United States Patent Application Publication US 2011/0191912 A1 - sequence listing, part 22

SEQ ID NO: 36644 - DNA, 3003 bp, Unknown
  misc_feature (1)..( 3003): 2750-1469P.txt file - cDNA_ID_3098823; gDNA_ID_2936565; Annot_ID_194613
agagaaaatattttattgtaagaaggagatacactgacactgatacggaaatacgatcgcaggactagtctttttatatatcctcaataagttaaaatttaatgactcttttttgacaatttaattttatactatggttttgctttttggacacccaaccaatgataatagtacaaacatatagtaatggttcttttggttttctttagtattcaaaatttagaaaagaacctagagaatactttgtttgttttgtctctcttcctatgaaaacaatgattagtttgtttactaattgccatccataactaattaattgtggtatcgaaacaatattttcactatatagaaacttgcacgaagataaagtgactgatccacttaaagatactgaatttgctatagaatatactgaacatatttcaacttactataatttaacgatgccagatataacgcaatattcgacttcatatttgaggataaagttgattatattacatggatatggatttatctaaactagtccatgagaagcccactaatctttttaagaatacacgtgaaagtcacgcgccgtcaaagtaaaagaataacagacttatccacacattaacgaggttcgtggatcccgaacaaaagaataacaggaaaatggtcgagaaccacgtgaaaataagatgagtcatgtgccctaacaggactttttacacaatacacatagtataggggggtatatatgcaaatattttaattaagttaatagcttaattcataattattataaaattgagggagctattagtgtttactgcagacaaaggctgatttggaaagatcaacagagtcagataactgtccccgaacaaacaaacatacgaagtgcattattttcgacaaatgaacgcaacgaacatttaaattgtatttgtcccagcaaaattaaaatttatttaatccaacacattgtatttattccaacataattaacaaactaattagatatggttagacatatagtttaactaacccaacacagcgtctttcatcaatcttatgctaggaaacaggagaccattagtttatcttaaaacaccttctttttgtgtgtctaaagtctttaagataatattttaagactcaattttagtcaagatcgcaaatcattgataagaaaggatctaagacttcaaccaacgaatgaatttagtttaactcaattattcagattcaactgcatcgatcagcatatgaagtatgtagagatgtcaaaacccaatttactaacggattaaaaagcccacaggttttccttttgaacttcagtgaaaactttggtagcttagttaagaagcagaagactccagctgagaggaaatgggcctaaaatagcccacacattcgactgtcttcaaatgggcttgagacggcctgatattggtttggcttgatattggtaaaacctctgattgagctggagtattctgtttctgttcaatattggtcacacaaattcagtagtagtatacaattgggcatgatcacagaatcttcaacttcaagtgccaaaaattttcttttatgttctcaagcaaaacatactcctacgccatggccacagttcaagaatctgctcactattagtacgccacttcgtcgtcagaagacaaatgttttgcctgataacttcagcagacacttacatagaccatgatcatcatgttcaacatcttataaatctatgtaaaaatgatctcaatcaactaatcaacacaccacttacacatcaacaacaactacctacactagtcattaatctcatgccataactttccaagattatcacaaaatgtggcaaaagccacaacctttctttcatttgcaattaccatttcataggcattgttgctatgtttctctcaccagtgtatatctatctattatccatcacaaattcatgccaaactcacaagctaaagatttgtccttgagattcgctactacttgtatcattgctctgagatcctagtctcactctcaatgaaaccaaatagatcttaaagaaagcataaccaatagcattcagaagaaaattcacatacaatttttaacagcctaagcagtatctcgacttcaattgaaaagacaacaaattcaaagacataagctttaccagaaaagactcatcatttcttcttccctttgggacctttacttttcttagtaggcataatgatttctcctttaagcacaggaatctccataatctcagaaagcccagcgaacctcttacgaaacttctcaacttgatcagcatcaaccatcaaagccgaacgattcccgaggtaaaacggatggttacctgaccatacatcaaccacatactctttctttgttcctcctgtagtcatcaccagctctccattgcagtaaacctttgcgtcttcgtggaattcaggatgcaattccttcttacgacacgttatctgaaccaccgtattgctgcttcttctcaccgattgttttcctcctttcactgccgccatcaccggctaattttgaaaaaaaaacacaaacaaatttagtgattttggggaaggaggagaaatagacgaagaatgagaaatcgatttcgagcttacctttcttaattgcagagaaggaacacatgggctaatctgaagaaacgagttcgggagagaaaccgccatttttgtcttcaggagctatcttcttcttttttcctggtgatagagaagaaacgaagtaacgattgatggataagagaatgaggatgatgaagtgtattggagttacgtttataaccctaaatactttgaagatatgtaagggtaatatggtaatttacatagagacttccttttgttctgttgatacactcttcgtcaatctaacgcttcttcatttttctcgagagaagcaaaactacatatatatatacgcacatacgtacacagttcgaaggttttagctgcgagtatg

SEQ ID NO: 36645 - DNA, 3003 bp, Unknown
  misc_feature (1)..( 3003): 2750-1469P.txt file - cDNA_ID_3098831; gDNA_ID_2936565; Annot_ID_194610
tcaagtggtgaaggaaatggtggacaagatgggttacgaagtatgtttcgtggtttcagtttctgctcttttatttaaatatccttgtctcgtgaagattgtgtttcatgaaaattttctgaactattctacaggttagacttgttagagtcaccaaaagagttcacgaggcatattttgcccagttattcctttcaaaggtctgcaactggtctcttatatacaacttacattcagccttggaaacttaaatcatttcctatgtattaaggctggttttgggacgatattgcaggtgggtaatgcctcggagtgtgtcagctttgatcttaggccttcagatgcaatcaatatagctgttagatgcaaggtattacatagctatgttaattaatcagctgaggtaaatacaaatgtgtgtttggcggttgaaaattgtgttgatcgttttgtagatacctatccaagtgaacaagtaccttgcatatagtgatggaatgagagtcattgagtcagggaagatatcaacaccggcaccagcttcagatggtttattatttactgaacaagaccggtaaattttcagacaccttaaagatcaatctttgcagatcacatctttttactgtgaatttgagtgccataaacttttttgactttgtgcagaccaaatggtcaggcttgtcttgatacgaaagagttcaatattttgagcaaaatgatgcaagccgttgatgaagagcgatatgatgaagccggtaagctttgctctagtctctatatccacaatgtacactttattagtggttacataacttactgctatgattggtggcccagcatttgagaccaatctgatttatgtatgtaacagaaacttttatagcttttcgtaaatcttggtctaatctctaatgatcaatacactgttggttatatgatttgcagctgagtggagagacaagcttggtcagtttcgggccaaacgtaacttgaggaaatacacatgagagaggtaaggagatataaacgaaaatgcatactaaatgacgttatcatttctcgatacttatgtttctccttggggcagctcgatcaacaattattggctgtgtacataaactaagaagaaagtcattggtcggaatcaaagtggaggaagaagcctgaagtgtcgtctctgtatgatggagatcgaagaatgcttctgcactttacccatttccctaaaaaataaacaaaaaaaaatgtataatgtatgtatgtagcgtgatgtgtacatattacttattaatctatgcaaattaagctcactctaattacttttaagtttccttttaagtcttatgttcgtcgtatttgttttcgtgcttctttctttttataataatttaattatatatttttgttattacttgcagctgtttgttgtttatcatagaagcaatgtggcatatggttaacatgaaatttgaagaaaagacaaaatcactggctttgccgacatatctgcagtgtctttgttttgtttgttagtactgcattgtctaaatctaaatcgtgacaataaaacaggataattatttttcattatgatgttctttggtaaatatgtctataaatattcttactaatttacaaatatatatattcatgtaaattttattattcaagagatcttacgcagacatggttttcacagtaccattaagattatattcaactggtttgtattatatttaatttataaataaaaattgtcaattgataataaatggaaagaaaaaattaaaatgaaaaaaaatccatatccattcaaataaaatatctcgcaacatacgtttcatacgacaaatagtgtgacaaactgacaaccacttgtcagaattgggctctcaatatggggaaaaaatagtcaatgttattaaaaagacaaaaataaataaataaaggaaaatatatctaaaatcaataagagattaaaaaatagaaataaatcatgtatttggcacataaacaagtcatatatcgacaaaagcctaagtttggtagatgaatagtgattttaaatggtacataagcaattcaaatatgtatagacaaataagcctaattttataacatttttttgttttatattacaaatctaacatttttttaattcaaatatcccactatcctttttgaatcaacagaaaaacatctcattaaactaaaaaatctcagattttgaacatgtttaggtaaacaaccatcatctcgtcgtttcttttttaccaaacatcaattttactaagttatcagaaaaacatttttcttttatcaagaattattcaaaaaccgataagtttacatgaaaaaagaaagtaatacagatacgcgccttcttgattaaacaatcaatccgaatattgttataacgaataaaaaaatatattaaaagaaagaaaagaaataaagaaagatcgaaagtagccatttgaatattgatatttgattcttaacaaatttatctcatatagtaagtatccgtctcactaaatttgaaaatacattagtcgatatataattattaactaattataacggtatttagtaacggtatttaccgtgcgcggggactcatctaattaaaaaactaaattgaaaaaacctcaaaaaatagtagttaccacttaccagcaaacattcaaaaaaaagaaaacagagtatgactgattttaaagtttctaagaagaaaagaaggaaaaaaatcaccgacgagtctttgtgtttccggtcacaattaatgaaaaccatttctagtctaacttttgttgtaacgcaagttttgaaacttattaattaaagaagactaataattattataaaaccccatcatcactttacttctccctcttacgtctctttcaatttcctctctgcagaatcgcttctctctctctctcggctccgccgattccgagttccccgattctcggattcttctgaagatttctcatg

SEQ ID NO: 36646 - DNA, 3000 bp, Unknown
  misc_feature (1)..( 3000): 2750-1469P.txt file - cDNA_ID_3098840; gDNA_ID_2936565; Annot_ID_194606
aggtctataatcgttaatacaattatacaacgaaagaaaaaatgatttttaagaactagttttttgttctgttcttgttccttaaggtgaataggtaatgataattttgtcttgagcagccaagaattgatcattttgtctcccaatgtagatatcaaaacctttttttgagccatgagcactgcgactaggccttcgtcttcatcgactaccatctgagaaaatcctgtttctcattcacagccaacagaaagattagtgcttcggttgaacaggaagaagaagaaagtttcatggaaagacgggacggtggacaacgagtttatgcagaagaagagttcaaagaaatgttgtatctttcataaacaaaagccctttgatgaggatgacagtgaagaagaagataacaacaaccatcaccatcaccatgaacactccgaatcttgtgaggcatcttcttctaacgattctaaagcatttgactaatgaatcagggtttcgtatcactatatagaactattgaatggagatcattggagaatggagaacacatattcgttttgaggttttggtttcattttcttttcttcccattacccaacagagattgagctatatgtacatgtaatcaacctccttaaagctctgttgaaggaatcacaaagttggtttagtaatgagatacttctgtcagacatatcgaactaaaactttcataatataatcaaaatatctcatttaatatcttatataaagattcaactaactttactattttttcaaattgcatggatcttacttcttagatagtctttatgtacaatcataacagtcgataataaaattttgacaaagaaaatcacttttaattttcaaggatcttttcaggcatcagaacagtgctttatatcaacttttgcaaatctatcaagaaaatagtggtcatggatgaaatgattaacttatatgttcaatgaatcgatatatagtgtgttgattagtgatcttgtccttatttggcttgttgcaaatatactctgtgaaaggaataaaaagttgtactcacgactctgacttagcgtaagaataaaactcttcttctgggcagtaatatgtgtccactattttacaatcgatccgaataatccacgtacgaaagctttaccagaatcagttctttagatagttgcttcattttgttttattttatttttccttttctttttggcatctaaacacttttacttgccataataaatgtttggatgggccaaattgccaaaaaaaacaatcgaaggaacagtcgctgccatatattatgctctgcaaaggttgttgagcgattaattggtctggtccaagctctgtttgtaatgggccctaaaataaagcccattctttaaatactaattatgacaaaatcaaattctcttgatgaaacaaaaacatcatcaagattggctgattgggacttccatgaccatctcatactacacacaaaaagaaacgtatttattttaccaaagatattgattcataaattaagctaattgaaaactaatactaataattaaaatcattcttacaaaaaaaacatttttaaacaattcgaataaaaacaaagttacaagcatgagcgcgcgtgagtttgaaaataaattggtctaacctaagtagctgacaagttttggcatttatacttgtaagtacataacattgattaatgttatttaatccttaacactaatttataacctaactgatgagagtgggtgaacgaatatccttataattatgagactctcgttaaactctttttttttttttttttctatatgagtgttgacaaaaaaagaagcctttatataagtaataattaaaaataaatgtatttggagggcatcaaagtttttggcttttgcggctaatggagaaacagtaacacgtagagcgcactcctcgtggtccttcaaaccccaccaacctctcttaatcactactaaacccaaattcttaaaataattaatcaccaaaacttggaaatggtaattaaattaatcttataaatggtaattcaaattgaaactctctccctgatgttgttttgtccaacatttaaactcaagtaatgtttagttttcgtcattcatatatagttgattatgaaatagtgaaatgtagaccaaactttacgaaaaagcaaaagtaatataaaaataaaaaaagaaaaagaaagttataaaaataaaatgaaaaaaaaaagaagaagaaaagaaaaagagaggagggaacgtggcacaattccccgtgcgtgtttcttcttccccagacgcaaaacgcagacgcacccagaaactaaaaaaaactgcttcctctctctctctctcttcccatcatcatcgtcgtctctttctcagatcgattttcggttatgccgatcaacggttaatctccgccgtttgatttcatcgccggagaggatctttctccgtctacgtatgccctttcgtatacgcgtttcgtgttttgattttccccgaaacctttcgttgttctggtgagaacctggcccatgtttttgaatctaatctactatatcggtttctcctgtggtgatgattgcgaattgaattagaaatcgtaggttgatttcttgttgcttgtgtatttgttagatcatttctctgatgaaattcgtgttccttggtcttgactcagttattcaggtcctgagtttccgagttcggtttatctcctctctcgtaggagcttttcattgaatgattaatctcagatcgttttggctttttttttttaataagaacttcagatctttttggtttcttaagctttatcgattttgaagtgagtcttgtgtgcttactgcagggttactgtgtgaggaaggacgtgcaaatttgtttggaagttgtgttaagttaaagcagagtattggagatcgtctgatagagaagagaatagttcttgtgtaaggttatg

SEQ ID NO: 36647 - DNA, 3003 bp, Unknown
  misc_feature (1)..( 3003): 2750-1469P.txt file - cDNA_ID_3098854; gDNA_ID_2936565; Annot_ID_194601
ttcgtgcagacatatactgtgccattgtcacttcatatatttcattttggaatatatatcaaagatataaacattgtattgctgttttattcgaagtcatatcaccgaattagtatgtgttatgttttggatttgctatggataagtaatgatccaaagcccttaaaatcatgatgtgtatttatatattacttatcattaatatataaatccaagtcatgcagttatttattttccaacactagacataattattcccaagcatatgagtataaaacagttggattgattctgatatgaggtgtgttatcacttatcactctttaattattaaatcagatggtttataacatatatttataaatattgaagataacaatgatattattgacataatttactatgctgcaactttaattttaattcattttaaaacacaaatattggctgatcttttttattctattcatcggctcacttttttttttttttttttttttttttgtcaaacattcatcggctcactaatttacaaacaaacacattttttgaaacatactggcccccacacgcgtcctcttctggttatatcgctatcattacattttcacaaatttcaatatggatattgttcataaagaaaatagaaagaaaaaaactagaattgacccaattgaatacaaaatatagtacatccgtttcacgaaaacacactgtatataatatgcagattacatgtggcaaggagtaatattgttggctgattcactctaatgtcatttttgataaaggtgtctcgcagtaatgtcgcttagtaatgctagctattttgggataattatatgttatgaagaaagcatatactaatctcatcatcagtggccaaattttaatcttacgtctatataaacttatttataccactaagaacaccaagacgtaggtttcatgctcaagtggcaatatctgattatttaagtactttttttgtttaaaattaaaaactgatcggattttcgcagttttttagtcattgtttataagaatttcaagtccaactggttagggctgtagacttgtaggttttcctttttttttttttttcttattgtcgagaaaacctatagagtctaaagatttcagatttcagatttcacatcgacaaagagcaaattatgaagaaagaaaaaatgcttgtagaaccaaccggcatagtttttttgatttagttaaatttatacgactcagcaacgcaaatagaaaaagtttaaaaattgatattgaccattatatattatataagacacaaatccgcaaaaagaaatcaaaacatgagaacaagatgacaataatgagatatgaaaatttggtaaaacgtaccgatctctattatcgtgcaaaggtattaatgtttggattagcatcaaatagataccaacttgctcttcactcttcttatagaaaaatatggtaccatatcgacccaccaaactaatcatcatcgaatctagctaggcgttaggattgcacattactcagaaatccaaaatataataagtaatttaacgaatttatataaataataaccacgtacggagtcaaattttgttaaaccaattttttgacttcacctattacatatcattcgtagaatcatatcttcgtaagtacaaaaaataaatagggagtttttgatttgagactgaaaataaattaaattttgttaactaaaaattataaaattaatctgtcgatgaagccaaagagagaatctaccgactgcaaaatactgcataagaagaatctaaaaaataaaaataatctttttttttttttgtttgaatggttttttatttaaaaaaaaaaaaacaatccattttgagtttgtgttattaccgtgcaagtcaccacgtgaactcacttcttcatctcaggagagaaaagggcccactatgattctccgtatccaaatgtggaccctgctctttcactacacacgtgtgacctcatcctctcccacgtgaatatccacgtggcgttcttccgttccgtttctcccatccctcccatgcctctccccatgactctatttatcccaatcctctcttcctttcattaatttatcagttaaaattcctcttttttcctagtagtatttggagttttcatatcaaaaagtttagactaaccctaaaaacattgatagaaaaacttatcattttaaacgttcttggggaccaatcaaaatggttaattgtctagtgcctgttcttgattcttcagacatggttgcaaaagtccatagtcaaatcaaggttatatgtagcttcaacactgataacacgtttattaacaaaaccatatcaaaatggttgttttttgcattttcagtcttgacgtatacactgccatttttgaattagtcaaatcgttacgtagttggtctacgatgtctcgctgaaacaaatacatacgtgtgtatatacactatgcaagtagtatagttaacatcataattgaccctaaggaaaaaagttaatgtaaacagtgacacgtagatatcacacggttcttttttggtttttgttaaagatgaacttgttaataaagaatatgacgtgatcttctccggtacaactctttgtcctataaatagagaactcttgtcttcatattctcgacacacacatataaacgcacaaactcgttaaatttgtacgaatataattttttttaaaacactcgttataatatattaaagtttcacccaaaccgaaaaaagagagaatctgtgcatgttgctcagaaaatcttcaaagcgtaatctgggcttacgttagctctcacgaacccccaaggatcttctatatatgttttttcatttccccataaaatctttcattatctaaaaaatattattatcgtatcttttttcttctatatattcttcctcctcaatcttgattcttgtttcttgagtattctttgatgaatcgtgaaatg

SEQ ID NO: 36648 - DNA, 3003 bp, Unknown
  misc_feature (1)..( 3003): 2750-1469P.txt file - cDNA_ID_3098867; gDNA_ID_2936565; Annot_ID_194596
atttgcatttatgatctttagtaattatcactgtcggggatgtttaaaatggattagatcaaacgctttgttctgaactgaagtaaaaaaagatctttagtatttgattaaaatgatctcttaaagaaacagtttttttttacaaatttagtttattatcaaatatccaataaaaattcttaaccgaatgaacaagttaaaaataaaccaacatttaatatatataatataatatggaccaactaagttatagtatggaccaattcttgagttgaaagtccatagattttaacatggtattaaagtttagctaacttgagaaagatgtgttgttcgatatataatttttggtccaatattagaattttgtttgaaatagacggataaaagcattattttaaggagaacgtgttaaaaatttcacatatacacttcaatgctctacattatctttcttggttttctcggatcagcttacacgtcagctttttacatataaaatatcatcttttaatttgatgtaaacaagaagttcattaacagaatttcatatcttatttaccttatacaaataaatttcattaacaaaagaaattcatatacataaggaaaaacacagtgcataagcgactttgtctcataatcgttatctggcataggttagtctaccatgtggattcaagatttcgtatttgaatccattagttaaatcatatatagcccgttattggagactggagaccatatataagccgagatataatgatgttgggccggaataaacgggccaggtttgttataaaccacgccatatagtctatcaagactcgcgaggattacacgttagtacaaagagaagctaagaagaagatgcaaagaaaaccaagagaatagtcaaagacttaaaagcccatagaaacagagacatataatagttacacattgaccgttacacacaacgtaacatcccgttttctttatacagatacattgcacttgatttaatagttttccccatgacacatttttagcttcgagacaaacaactgtcgtttttatgttttttttgatatggtaagaatctgctttcacactatacagacaaaccacatatatagatgtgcacatatataagtacatgtaactggtgtttatttacatatatatcctagttcacggtgactatatttgtatatatatgtagtttgtatatgataacttaacaattaaagagagtctagtgacacctcaaagtggggaatgaaaggaatcccaattagaatagccaccggaaatacaagtatcaaaccgagaaatatcattatctccttcatgaacccatggaaatcctaacgacattgtagcttcttcccatattgaagaatcatccattaccggcaaatccacgtttatatgctcccatgatatctcctctgtcactcttccacatgatgacatctcgttggatgaacacggcgactcagagtcgctgctgctttttccaccggtgttgctgcttggtgtagtctgggacgccggagacgacgccgttttagggtaacttcttaaggactcagggaggttgagatgagcctcaggcccatagagcttacgagctgcggagtcataagccaaggcagcttcacgggaggtgtcgaaggtaccgagccaaagacgagctcctcggttaggctcgcggatctcagcgacccatttgccccaagtgcgttgtctaacacctttgtaagtgcaagacgcgttatcgggtccaccttttcctctcatacaacctttcctcgaactagcttggacggttcgttgtttcttattagcaccaaccatcattacttttggctctatggatgacatgtacggatgttgataactcgaaagtgatattatgtgacgacttttggtgagtgataaggcaaagacatgaggtaatggttaggtgtgtatatatactagaagagagtgatgaaacgtggcgaggagaagatatagctggcgcagacatgacggagggtcgtgtcgagaggaggaagctggtgttgtgtttgtaatcctaacacttgtctcgagagacccttctttttttggcaacagtaatcgtaaaaccagcagagagattgatgagtttgagatttttccaaaaaaaaaaagaaaagagagagagagatatggataaggtcatccgcgattggggaaatataaaaagatttatcactatgaattaatggctcgtcatgtgaatgcttctatctaatatcaagctatggctttattcatcagaaaacaaaatcaagctatggctttaacttaattataatttcaaatagctaaaaagaaagaaaaaaatacatgatttttcttatatatacaaacttttttaattaaaaagcctttagatttataaagcttttctctatgagtcatgtaatctctccttttgtaaaaaaagaatcatcatctaatgcataaacattgagaaagaattgtagttttttttttaattcgttcatagagtcaccattttctttcttgatgttatccatttctccaggctttttaattgccacgtgggaaattatagcaaagtacaagtatgaatgtgtgtaagggtcagtcatgtggcggcaatatgtccacgcaaattaaacgtacgggacccgaaggttcctcgataagagacaaacaaagttcactgaatcttacttctctgtcttagaacatttgtggccgagacacacgtgaaaaggcggcctttttaaccgataactacaaagctccggttccaatttatctaacttattttttgttctaaatattatctctagtattctcagatagaactttttaaaaatttgaagtcgttcaatgtcaagtagattattatggaaattgcaaaacataatttaccaaatcaatgtaattgcaactaaaatccattaatttgttttggatttttttttttttgaaaaaataaatttagcaagagaaatg

SEQ ID NO: 36649 - DNA, 3000 bp, Unknown; identical to SEQ ID NO: 2185
  misc_feature (1)..( 3000): 2750-1469P.txt file - cDNA_ID_3098875; gDNA_ID_2936567; Annot_ID_143726

SEQ ID NO: 36650 - DNA, 3000 bp, Unknown; identical to SEQ ID NO: 2188
  misc_feature (1)..( 3000): 2750-1469P.txt file - cDNA_ID_3098881; gDNA_ID_2936567; Annot_ID_194650

SEQ ID NO: 36651 - DNA, 3000 bp, Unknown; identical to SEQ ID NO: 2188
  misc_feature (1)..( 3000): 2750-1469P.txt file - cDNA_ID_3098881; gDNA_ID_1620500; Annot_ID_158843

SEQ ID NO: 36652 - DNA, 3000 bp, Unknown; identical to SEQ ID NO: 2188
  misc_feature (1)..( 3000): 2750-1469P.txt file - cDNA_ID_3098881; gDNA_ID_2936567; Annot_ID_143721

SEQ ID NO: 36653 - DNA, 3003 bp, Unknown; identical to SEQ ID NO: 22152
  misc_feature (1)..( 3003): 2750-1469P.txt file - cDNA_ID_3098888; gDNA_ID_2936567; Annot_ID_143715

SEQ ID NO: 36654 - DNA, 3000 bp, Unknown; identical to SEQ ID NO: 2192
  misc_feature (1)..( 3000): 2750-1469P.txt file - cDNA_ID_3098892; gDNA_ID_2936567; Annot_ID_143713

SEQ ID NO: 36655 - DNA, 3003 bp, Unknown
  misc_feature (1)..( 3003): 2750-1469P.txt file - cDNA_ID_3098898; gDNA_ID_2936567; Annot_ID_143712
caactaggaaattatgttcccctgtgtttagacctatattcaattattatagaattttcaagagcaataaaaaaagaaagatccaactaagaaagataacgaacacatgcatgagattgtggtgcatgtaagtgaaaataagtcgtaataatcaccgacaaaacgcgttaatacttattatagatccttataaaacgagtccaaatgtcttccttcttcttcaagcaaataagcaatcaattgtgaactcaaagctttcttttctcgacctctctttctttcatcacgaaaaatttatacttatctcaaataaaataaaaatatatatatatggatatgaagggaacatacttagtaacggttattctcttggttagtacgttaagtgtggggatgtgttctaacggttggataagagctcatgcaacgtattatggtgtcaatgatagccctgcttcacttggtaaaaaggccattaaactattgtttaatatacgtttttgttacttcaaagtttgtatggtaaatttgttttttagatacaattttataggaggagcttgtgggtatgacaatccgtaccacgccggattcggagcacacacggcggcgctaagcggtgagctattcagaagcggtgagtcatgcggtgggtgctaccaggtgaggtgcgactttccggcggatcctaagtggtgtctccgaggagccgccgtgacggtgacggctacaaacttttgcccaacgaataacaataatggttggtgcaatctccctcgccatcactttgacatgtcctcccccgctttcttccgcattgcccgtcgcggcaatgaaggcatcgtccccgtcttctatcgccggtaacttattcgatgctataggagtcaattgcttttttatgcatatagtgttcatcctttttgataagttaataaactgaaactatacattaaagtatattttggagttttttttttttctttttaaaatgtaaggtagagaacattatacaaccctatcattattttaagttattaacattattgtttaatttatttcatctacatatcattattttgctataatgatcattagcaagctaggtcattatatattatagcaaaatttataaggaaagaatggatgaagtttagatcaacatcacattataacatgtacatatacgtacgctcacaaacagaaaaaaaaaaaacaaaaacaaggccaatccttcaaaagaatctggaaaaaggtttaaatggactttagttaaataaaaatatagcatgtaattactgtgatatttatgcaaaatatctaatagttttgtaatgtgtatatatagggtgggatgcaaaagaagaggaggcgtgaggttcacgatgagagggcaaggtaacttcaatatggtaatgatctcaaacgttggtggtggcggctcggtgagatcagtagcggtgagaggctcaaagggaaagacttggcttcagatgacccgtaattggggtgccaactggcagagctccggtgatctccggggacagagactctccttcaaagttactctgacggacagcaaaacgcagacatttttgaacgttgtcccttcttcttggtggtttggccaaaccttctcttctcgaggaagacaattcgtttaactacaaaactaagtcgtgctctggtcaaaacgcaattctttgcttatttctgaacttgcccttgttttaattgggcagtgttcctttgtttctcttttattgctaaataatttcatgcttaattttatttaacggaacggtttctcatttatgtatgaagcattactcgacaagttaaagagttttgcagaatttatattaatggaaataacattttttacaagttcatttgtcaacaaaattatcagagctaatagacaccatgaaaaaagactattatcagataaaagcttcataaaacacagattagtatataaatgtaatgttacatgctagctttaattgaaaaagaacgacattgtcaggtacgtaacttgaaataactctttatcttcttttttttgtcaatgaaataattctttctataaaataataataataataataataataataattctttcttacataaagataaaataaatatataaaaactataataaataaaacagagcaataaatatataaaaacaatttttaaaaaacaaggtgctggcccatgctttttaaaaaacaatctgttgatttttcaaatacaaactaaatatacttagaaagttaattaaatatcactaaaacctacttttgggaaggttattaaaaatttccctccaacttgggaagaatgtttgtgagagattaacaaaaaatagatgaaggtttcacaccacattcagttccttatcaacagattgatgtgagcttttaatgaataaaaagctgttttctttttgtcatcaatttcttctatacataactctggtccattttttattcatgttttaataatataacaaagaaaaagtggaatcattgtatttttaatgaagtggatggcgttacagttgcagtcttgcagatctcaaagagaataagaacaaaaaaaagcttgattttaaaatctattcaaaaaacagaacaaagatttttaaattaggtttaatactaggattaaaggaaccatttaaaaatggtcataagaaatctcaaagcccataagaaccagacatggattcttttcatgtgccatggatgatataagattgaacagaaaccatttaattttatcttttaccaaaaagaaaataacttttaaacagaaaaagacataaatacccttcaagtgctttcacactctcttctcgaacaatgaacacagagaaagagagagagagaagacacttagtaaagaaggtctgtgtgctgttctctccgaaattcctttttttggtctcgagggtttttcagactgtgaagagacatagctgtggcaaagatg

SEQ ID NO: 36656 - DNA, 3 bp, Unknown
  misc_feature (1)..( 3): 2750-1469P.txt file - cDNA_ID_3098909; gDNA_ID_2936567; Annot_ID_143709
gat

SEQ ID NO: 36657 - DNA, 3003 bp, Unknown
  misc_feature (1)..( 3003): 2750-1469P.txt file - cDNA_ID_3098939; gDNA_ID_2936567; Annot_ID_194654
caatatgcataatagtcatatattaaatgtttgattcttcacattaaaaccaaaaaaaaatatatattaaatgtttgaattgccctggcatcccacttgctttagcttgggacttgtttagagagttataattaaaatccagattatcgaaattgtcttcttatttcaaatttaaaactagttggtaattagttgattggcatgcagatcttagttagtagtgttggtacttttccattgcgcctagtccaaaaaagattgtttttttttccaatacatattattactgatttcatattaaatttgaaaattaaaacattgaaaagtcgagtttacgaccaaaacactttgaacgacatttggattgaagcaaataatgatattctagtggtcatcatcatattggtccatatcaatgatatttttttgatagaaacacctttttactactgtaaaatgtgtgaatactcacaacgtactaaaaattataggttcgacgatctaattcttccccaaaactttcatatagcactagaagtttgaaaactcttggttaaagaaaataaaatggtactttcaacagttacaagtgtctgtatataatataatatattcaatttatacgtagtccagttgtgattgcacgataacaccgttatatatttggtatctttatcaatcaagattgttatatgttgatttttcaaactaaaccataataatattgacatacgggataagcccactattcagtacccacgttatgttgaagataacacttacaaataggggtccctaacaaatagtttagagtgtatatatttggtaagaaaactattttaattatagaactcttaagttttgtaatatatcaaaaaattgtgcgtgtttgtgttgttgttgagattctgaacgtctagcaaaaaagaagtggtgtgcaaccatgtaaagcactagaaatctttgtgaatgcaaatagaaggatgtctcttgatctgatggatgtgactaaaaaatgatgtaattaaattgactaattagaggtaagcatttattttagttggtacaacgtgtgtaaaatatggtccacatttctcctttttttttttttctttttttctttttactactttttctatttgtttttcaaacaaagtgctctaaactgacaaaactggagaaatagtaggctgtatttgattttgtgaaccaaccaaaaaacctttgtatttgatttataatattgtgtgttttaaacataaagaaaaagatatgagataaggaatctcatggtcagaagtcaaaactagaaagtcataaaataaaccactcctaagaatctgataagtaaacaaactatatatttgcacactaaacgtaatttagtggtcgaaaaatatgcatgggttataatcatcttatgacgttggaaaaaaaacaagaataaatcatataataatgaaaatataaaagtaatcgaaacttaaaaatgacatgaaattggtcgatttgtttgtttccataatatttattatctaaaattcaaaaaatattctggtggtgcgattatctcaataacaaaagcgtgacatgtgacatctgaaacgtaaaacttttttttttttcccacacccacccggccatctttttccacgtcatcaatttgttaccttctctggcgatttctgtgggccctactgccccgattgccacgtatgaatatatcgtccataggtatcacacgtgtcgattattcattggatatttaacaagaacagtaaccacacaaaattaataaaatcgtattacagcatacaagatgaaattagaaaatttcttcaacttttttttgttttgcgatattgtcttgataatgtattatagtaagatatagcgagtatttgattttatgtgttagtgtaaatggcgaaagcgatatatatcttgaaattatgtacaaattttttgttttgttaagatatatcgttttcgacgttaattccagcctcctctccattgtcgtagttcgtccgtgtcgcgaggctatacataaaagtcataaacgcagagaaagaaaattgatatttaattcaatggttaattgtagctattatgtaattagcaatgactaatctaaccttatgcagtttggttaatttagtaattatacacagactcgacatgattagtcaggctttgtatatgtgtcgcattgtcgccacattaagatcctttagtgcaaccaaaacacactaaactcggctgaaatatggggcatcttgtaccttttaattatcgctgattactgattcacatcaaatatatggttccaaattattttattaactcaagtgtatagtaatgtttgactcttttttctgcaaatgtttcgaagacaaagtgctattaagttttatcaaaactatgatgttttgtagttttagatgattatataacgtttgtcaatctgtcttttaatttacttaaatcattagggcaggtaactatatttaaataaaaaacagagattgtgtatgagtttgaaataaaaacgtgttaaaatggaaaaaataaaccatgccaagtatttactttactacaaaggaaaaagtatacagaatttttacatgatgtcgtatgaattacatcatgtaataatagtaacttagatattctgtaagaaaattagatttgcataattacgttaatatccgagggtgtatataaataagaaagaaagaacagaggattaaaacccacaaattggcgttttatacatccccatttaaaaagaatggtaacgccgactctgtgaagcatttttcagcactcctttcctttcccccacaaactaaacaaaaaaccattaacaaaaaaaccattcacaaaaaaaatagagagaatcatctgagagagtagtagtgatgatatgatcgcttcttctcctacaatctcagaaacctccgatcacggttttagatatcttctacaacggatacaatg

SEQ ID NO: 36658 - DNA, 3003 bp, Unknown; identical to SEQ ID NO: 36657
  misc_feature (1)..( 3003): 2750-1469P.txt file - cDNA_ID_3098939; gDNA_ID_1620500; Annot_ID_158854

SEQ ID NO: 36659 - DNA, 3003 bp, Unknown; identical to SEQ ID NO: 36657
  misc_feature (1)..( 3003): 2750-1469P.txt file - cDNA_ID_3098939; gDNA_ID_2936567; Annot_ID_143725

SEQ ID NO: 36660 - DNA, 3000 bp, Unknown; identical to SEQ ID NO: 2185
  misc_feature (1)..( 3000): 2750-1469P.txt file - cDNA_ID_3098947; gDNA_ID_2936567; Annot_ID_194656

SEQ ID NO: 36661 - DNA, 3003 bp, Unknown; identical to SEQ ID NO: 22152
  misc_feature (1)..( 3003): 2750-1469P.txt file - cDNA_ID_3098951; gDNA_ID_2936567; Annot_ID_194644

SEQ ID NO: 36662 - DNA, 3003 bp, Unknown; identical to SEQ ID NO: 36655
  misc_feature (1)..( 3003): 2750-1469P.txt file - cDNA_ID_3098960; gDNA_ID_2936567; Annot_ID_194639

SEQ ID NO: 36663 - DNA, 3003 bp, Unknown; identical to SEQ ID NO: 36655
  misc_feature (1)..( 3003): 2750-1469P.txt file - cDNA_ID_3098960; gDNA_ID_1620500; Annot_ID_158831

SEQ ID NO: 36664 - DNA, 3003 bp, Unknown
  misc_feature (1)..( 3003): 2750-1469P.txt file - cDNA_ID_3098973; gDNA_ID_2936568; Annot_ID_194691
gagctcgtctgtgactacttaatgagaagaaccgttcgcagcctctatcaaccagttgtcttgatcgacgtcgatcttaacaaatgcgagccttgggacattcctcgtaagtaattctgtgtttacacaacatctcgcaactctatatcatatagtttaaaccattccatcggtagctattaaatccataattcttgtttccaacatgatctggttattgtttcttctacaattcgagtatatgtggtgtttagaaaaaaaaaaaaaaaaaagttcaacttgcaagccacctgcaaattagtattttgttccttactaatttctcgtgaaaagaccatttagctgcacaattataaatgcttagttcacattcattagacgcatatagtttattaatttagaatgaaaacgataccgtccgtttacataataaaagaacaaatcatcctaatcttgcagacgtgttggatgcctattcgatgactggttggttaagatatgaatatatgatacggatagaaaccatttggatattattgaatatgtcattaagatgaagactatttctgaaaagagaattctgtttatatatcttaatcttatcataaagtttctaaaatatgttggagaaaataccccctcccttaatagaaaactaaaatccattaatgtatgttagtatgtactatgtaatatacaaagaaaaacattcaacgcccaacttcttatcaatagttaagtttgatagtatataaaaaggtcattttcagaaacggcgagagtgggagggaaagaatggtacttttacagccaaaaagaccgtaaatacgcaacaggctacagaacaaaccgggctacggccaccggttattggaaagccaccgggaaagatagagcaatccaaagaaacggtggtcttgtgggtatgagaaagacacttgtgttttaccgaggtcgatcccctaaaggtcgtaaaactgattgggtcatgcatgagtttcgtctccaaggaaaacttcttcaccactcccctaattctctcgaggtattactcgtaaaaccgattgggtcatgcattaattagtccctctctttagtccattttttcctgcaaaataaatgtctctttgaaatgtaaatatagtcgaaattcaaaagtcaacttttctaaaatactccacaatagaacaactgatttatttttatgtcgcataaaaaaactaaagcaacatttagtattacattatatatcggctcattagttctactctttcgtaaatagctactatgtgcttttgaatgtaaatactaaatatcaaatgacgcatgaatgaagcaaacagccagagatgtcgcaatcatattatcccatgacttaaggcaaaagttttgactttatctttctttcacattcaacctaaatgttaaatgtctttaagggattttgctgacgattttgcaaagatttatttgtggctgatttaagatgatctatgacttggcgcacatatctactcttaaccataattttgacaaaattagttttgctgggacaaattaatgaaaacaggaagagtgggtattgtgtagagttttccacaagaacagcaacggagctgatatagacgacatcacaaggagctgctctgatgcaacagcttctgcattcatggactcttacatcaacttcgaccatcatcacatcatcaatcagcatgtaccctgcttctccaataatttgtcacataaccaaaccaaccaatccggtttaatctccaagaactccagcccattgtttaatgcttcccctgatcaaatgattctcagaactttgctaagtcaactcacaaaaaaagtcgaagaatcacagagtcgtggagacggaagctcagagagccaattgaccgacattggcatcccaagccatgcatggaattactgattatgaataaggcttaccagatatatcactatgtataagtatcatattcatgattcgaaacaatttattcaaccctcttatgtaaactgttataccattatattagcaatccaatcatatatagttgctaaaaaagcaaaaaatcattaaatttctgttatataatattttatttacgttatataatatgaaacggtaggtcgtctcgtcccataaacaaataatccaaagttacttaatcattatgaaaatagaagaggaaaaaatcttgaaaatttcccttcaatgggaaagtaacgcattaccataataagtaatttccacttggcttttcgacttttcatgtgattgactttgtggaagagagagaaaacaaaaaaagtaaaagcttcttcggtctggatatttatttgattgggtaaaaccgtaaaagtgccactggtgttgtgttctgtccgttggattttaatatttccgtttttcttttcttactggaatctattagtaatatatattttgccataattcataggtcggtaaaaaaaataaagatcggcgtatcgtaccaaaaaaggatattttgtttaacccggtcattatcctacgcgcaccgacctttctcattctccgtcgtcgtccttcttttgtctttcgccgtttctttccttattcggcatcgatttttccggctttgatctccttctccgtcgtgttattgcgaattgcccttttcggattgaaatcgttgttttcccccaaatttcaggtttagttttttttttttttcaattgtattggtctattcattctgagctagggtttgtgttgaaatcacaatttttccccaatttgatttaattggatggtttcgcgaatccgggcaatgtaatttaatttataacttggtgtaattcacgagttgtgtgtattttgttccgtatttctgtttattactgcgaactcaaatctctttttgtttttttttgttttaattgtagactccagcttattgtggtggtgatgatcgttctttggcaagtgtttgaatcatattgagaatg

SEQ ID NO: 36665 - DNA, 3003 bp, Unknown; identical to SEQ ID NO: 36664
  misc_feature (1)..( 3003): 2750-1469P.txt file - cDNA_ID_3098973; gDNA_ID_1620573; Annot_ID_160904

SEQ ID NO: 36666 - DNA, 3003 bp, Unknown; identical to SEQ ID NO: 36664
  misc_feature (1)..( 3003): 2750-1469P.txt file - cDNA_ID_3098973; gDNA_ID_2936568; Annot_ID_143737

SEQ ID NO: 36667 - DNA, 3003 bp, Unknown; identical to SEQ ID NO: 33382
  misc_feature (1)..( 3003): 2750-1469P.txt file - cDNA_ID_3098997; gDNA_ID_2936568; Annot_ID_194700

SEQ ID NO: 36668 - DNA, 3000 bp, Unknown; identical to SEQ ID NO: 2668
  misc_feature (1)..( 3000): 2750-1469P.txt file - cDNA_ID_3099004; gDNA_ID_2936568; Annot_ID_194693

SEQ ID NO: 36669 - DNA, 3000 bp, Unknown; identical to SEQ ID NO: 2668
  misc_feature (1)..( 3000): 2750-1469P.txt file - cDNA_ID_3099004; gDNA_ID_1620573; Annot_ID_160907

SEQ ID NO: 36670 - DNA, 3000 bp, Unknown
  misc_feature (1)..( 3000): 2750-1469P.txt file - cDNA_ID_3099004; gDNA_ID_2936568; Annot_ID_143739
ggaatgtgatagatgacgtgtggcacaacaaccacaatcctcttcatgctgctggttattttctgaatccgatggcttactactccgatgatttccatacttatcaacatgtatacaccggtcttgccttctctctggttcacttggtaaaagaacctcaccttcaagtgaagattggtacacagcttgatgtgtatagatacggtagaggttgctttatgaaagccagtcaagctggtcagctcaatggagtctctccaggtgagtgaactttcttgattttttatatatatatagtaatattgttttatttgcagacatttaagtttttgaatctctttgcagttaattggtggactcaaaaggcgaaccagtatcctgaactgcagaatctcgctgttaagattctgagccaaacaagtgaaggtgcttcaaggtacaagctgaagagaagcgtagcagagaagctgttgctcactgaaggaatgagccactgtgaacgaaagcatctggaagagttggctgttgtacattacaatctccaactacaaagctgcaaagcctaaggaagtgaagagcagtgaagatttgttttgcatatgtgactccattgatcacaagctttagacaattcttggatcagagtactttttacccaaataagttccatatttctgtattcttgcaaggatttgcaaaaacatgagttcgtttagaacaaagaacacccaagagattgtgttgcaaatgatttcagtttttttagtcaagttttgtgatttatatatccaagtctcatctttatttatcacattttttgatatttcaatgcattattggtatcgttcaggtaaaacaatgatcaactatataaatatttagtttctactagaatcgaagtataagttccaaagtgaaaagatttaagacgcaacacaattatttcaacacaaaagtatatagcaccatgattttctgggaaagtgattctttactcgttggttttcaaatttcgaatataaaatttgaaggaaatattgaatatcaaaatgtcaacaaagaaaacaaaactcagaaaaaggaatcaggcaccagtccactaagctctgaccagaaagcgacaaaaaaatgtcttagtagttgtataaacatgtgataatgggatgcttcaaggtttggttttaaagtgagtttggttttatttgcttctctcctttttaaatcactttttactttgtcattttttgagagaaaaagacgtcaaaatccaagtgcccgtgtaaattgaaactagtgttacagattctccactgttctgttccacagtatctttgtcttgtactctgcccaattctctaactcattattttatttcatagcccataataacaagaaaaaatagagtcttctttttgtagttaagcattaaatgctgacacatatttgagaagtttttgaatttcaaattgagaaactttttctaagtttggaaaataaataagaggttttcttctcttgtactcttatctagtagtactatctagtaaggcagagagatagatattttttctgggggagaatctagcagaagaagcctactagggtttggtttcttgagtcacatagatcttcttctctatctgtctctcttggattcttcaatgttcactttcagtcattggaaaaaaaggttcgcttttgtccccacttctcttttctcttcgaattttggttgcagaaaattgattttggtcaatctttttgaaagtgtcaatctttttttgaccattgattttggtatattcttttgttgaagccaattagatatatttgttcgtcttttagggatagggtctttagcttcttccttctttaatgtcttgtcttttcaatggaagttatcattatgtatatttcaagctcaatatcttatctttcaatcaaattaccacaagaaaataaagaaattcgaccttcggattacacaattttttttaaactcctcaacaaatcttgaattgcatgttaacagactgcatatttgtttaagctgctggtccttgtgttaatctcgaacgaataactgattaacctgtcaaaacctttcagtgtgaaatgttgaccatgtgactggttttgccgtctggtcgtttttgaaaaggacatgttgctgcacttattttgtgtaaattataattagatttgtccttattagatgttcacaggtgtaacagtgtcttgtcttgcctcttcatcttgtacttggactccatgtgctgagaaaagcctttgtcaacctcaaaaatttgtttagtgtcttgtgcttagtagacaacaacattggtcttttcctctaaatgttatcttatctcatttattatgtgaatatgatttatgcagggactatgtaatctaactctttttgtacttgagagaagaagctgaagtacatttgttcatcatttggttttatagtattaataactgccaaactccagagctttaagatgtatgactctcaagttttgaaatctaagtaaggcttaccatttcttcctctcttttcaacttctggattttgattcagcaactccttactagttgactgaattttgatcagatacaacccatttctcagacgttcgcattctggaaagaaatttcagggcacagttaccatgtcagaggtgtgaagatacattgtatttattttcatttcagaaactaactgttgaagtcctagaaaaaacattaagagcttgcttgcttaatttgtacagggcagagaaacttgcgaagaatctacgagtggtgaatcttttccatatagatttcaacttgaagaggatgtgagtttctgaactcaataagactagtaatgataacgtggaatgtgtatactgtatagttctgaaagaagtttttatgttacaggtaaaaagattgcaactgcaactccaacaagaaatagatttgcatacatttctagagagtgtcatg

SEQ ID NO: 36671 - DNA, 3000 bp, Unknown
  misc_feature (1)..( 3000): 2750-1469P.txt file - cDNA_ID_3099015; gDNA_ID_2936568; Annot_ID_194688
tgaaccgacaagcgaactctaagtaccgaaccggattctaattgtaccgactttattaggtggtaaatgtttcacttttagttttattggggttgtttcgttagataagattagatttgggtccagaatgtaaataattttgattttcgttgaggttatttcttcgtagagcgggttgttcgataacaagtcagtcattaataataactgtagcgagagtgagaagtgcttcccatgttcagagatcgattccagagatattaaaccacatgctttgataatataaacaagttttgactcattagcacagtgactttagggagcgacagcttttgttcctcttttattatatagttttctacacaaataaaaatattaaggtatgattttgcatgttagagacaaatccaaaatgcaaatcctctccgtatcggcttagttcatctactgcactgtggttctttattttaatcagtgtcaacttagtgtaattatttgatgatgaagagacagctttaccatgttggcctagattaagattaactactacatgttgatctccggtgaaaagatatttatatactcgtggatatgtaacttcaagcagctttgaaactgagggacataagattaacgaaacgaaaaacaagaaactgaaaggtaaaatgggggatggtcaaagcgtgaagaaagatgtcagtcatatgagctgcaattttttcgagtaaatgaagttttggctccaataattttatcttttttcaaatatatatagtacacatcacaaataaaagttgctggtcgttctcgaacactgtattttcaatcccatccgttggatgtttccttcgtcctcacctcaatttagtgaccacaataatataagtacatacacacatcacagaaaagaacaaggctacaagttcacgattttttatttttgggttttaatgtgacgctagaagttcttgtttatcaatcgttttgaatggttgcacgtatagaaggaacggattaacttccttgtgaattagacccttttgttttgggggcggataataatttataccattttttccaacagttcgtaattagtttatagcaggaaaaaaatgatttcgatgcaaccatataaaactattgtttgaagtatcagaaggttaatataaatttatgtcaaattttgttattagtaggtgacaaactaaactagcatataaaaagtctagtagtgtgaaatactcaacatgtagaaatgtcttttgaaagattttgtttcaaagttttaaccaatattgtaaacatagaaaaataatatatagttttaatacaggttcttaggaatcgtcttggactaagagaagttttggattaatgatactcctaagaagataatatagtatattcatttcacagaaatatattcatttacacaaagtacactacggtaagataatgaacctaaagaagtattacacaaagtatattagtgtatgcatgtatttgatgtattatttactaaagtgtttggatttaatttcaatatgccatataacaaaacagagtccgaaaacaaaaatctgcaatggtctttttgaccggtcttgaatttatggggacccatcgtcctcttgccaattatttggatttggaacgtacaacactacaacatataaaaacagtacagttaaacactgattactacatttttgtttttcaaccacatattaccacaatttcaagggatgttctcacgagtctccttcaattccaatggtgtaaaataattgaattggctaattctatgaattatgtatataattaaaacatttatgtatgtaagcctcaaaattcgacagaagtatggaaatgttttttctatatgtggtgtaactaaacctaattcatattggtcattggtcaatgtagcatccagtccggtggtaaaatttcggcttactcgaataagacattctagcagtacatatcgattttaaatcagatagctagacaaacatactcgcggattcatttgaatcctaagacaaatgtggaaaacaaatgctagaaaactttttgaacaataaataatttgtttttttttttacgaaacaaaagtaataataaggacagaaaagtaagagtaaggtggggaagatgaaggagagaacgtgatacatcccagtcttgtgccctctgatagattcgcaatctcttatttgatgctttcattcatatgtctctttgctctttttattacatatttgcgcatttatatatttattgtttatatcggagtaacgagccacgacaaatggcctaagtagaaaaggccgacaagaaaggagaaattagttagaaatagatactatgcctaatagataccgagtttagtacgtcaaaatggacattaacatgttagagttaggacaaagacaaataccataatccatagataatctaattatttagaaaaactataaacctaggtaagaaacgtctttttgtttctgctagctagacttattaacatgttacatgttcaatcatgcatgaaacctaaactataggattgttgtgagattaaagtgtacaatcgaacaatatgctaatcaatattttggcacttaataaggcatatatatatgtttgttttaggattcgttctctatatatatttagactttgatgtttctcgttattggagagagcatgaaagcgagagaaaagtacgtaagaactatgatgggaagtggacatcattttcgcgttgaatatgaaacactaataataatatgtggtttcaattcttgttcttttagtcgttttatgagattgggggaaattacgttatacattaataatgctcgtgacaacaccacccactctatatgaattgaaacaatgcaggtccttatcctaattgggcaacaattgttatatacaagtgtgagagtgatgataaagatccacagctaggatgctatgtaatatctaatg

SEQ ID NO: 36672 - DNA, 428 bp, Unknown
  misc_feature (1)..( 428): 2750-1469P.txt file - cDNA_ID_3099035; gDNA_ID_2936568; Annot_ID_143730
gatcttccaagtaagtttgttttactcactcttgcttttttctgttttttgcactccaaaccatgcaaacacaaatagaaaaaaaattaggtctaacttttatgagaaaaacaaaagtaaagtcgtgtatgcatgtttgtgaagtaaaattaacacataaattattgttataaactgatgatcaaacataatttttgtttgaagggtcgaggaatacagagaaggagagctacttcttttgtaagagaggaaggaaatacagaaacagcataagaccgaaccgagtgactggttccggtttctggaaagccacagggatagacaagcctgtctattccgatggatccaacaaagccgtgatcggtctaaagaagacactcgtttattacctaggaagcgccgggaaaggaaacaagacggattggatg

SEQ ID NO: 36673 - DNA, 1975 bp, Unknown
  misc_feature (1)..( 1975): 2750-1469P.txt file - cDNA_ID_3099074; gDNA_ID_2936569; Annot_ID_194726
cttcatctcaaagacgaaacaacttaaagaacacacaccggtttgtaagaagcaataacttgtccgattgccagtcataacaagactccagagccatatcctattgccgctgctttccagttcaacaagctttctttatttgtcggttttggttgttgtgtctgtggtgttcactctttaaactttttcatgtttttcttcaaactctgaatgcacatatccatttaacaaacgacgataaatattcactcttcaaagtttttcttgttttattctcacttcaattatgagataatattgttgaccaaaagaagttgttatgatctatttttcttctttcctacagggagaccgttaaatgtattcttgaacttgggcttcgtccacaaaaacatgccaaaagagaaatgatattgttgaatagtaaaagtcatacaactttcggtttcctttttctccttccctcttatcctcttgacagtatatctacgcaaaaaattgtgtgttattatacatatagaaagaacaaaagaaagaacgaaaaggaaaatggaatgtgctcaagtcccaaaggtcaaacaaagaagtgtgaaattgaaagcgaaaggtgaggcttctttcttgatacacttgttttgtttgtttggccaatgttcatcattcgccccttatcacaatcacacctccctcttcccaaacaaagccttctttcacctacttctctctttttgtttctaacaaatattgatttttttttcttgtaacaaatacttatgaacttgaagaaaaaagatctacttattttagggttatattttcagaagcttgaccatacacatgtttgaaacttgataagtaaaagaggagaaaatcaaaaggaatttgtttggagatagtatgatttatctttcaactggaaataatcattagattccatagattttgtatggaccacaatcccatcacacattccaaatccttctttgcccacaaaaaaaaaaaaaatggctggagaacaaacgatacacataacagatcatatcaaaaataaggatcacatcaacatatagacgcattattattatgttctatcaaacaccatttcaaagaaaaaagttatttgtatggcgaaagaattacaagtactacacatcgtgtaatttgtatgatgaagaaaagtaaaataaagtgcactaggaacaaaatttcacttggtgaatcattttgctggccattagagagatcatatcactcgaatgttttttccacattattaatcccatgccttaaaatccaccccccacactactaccctaggcctagggttgctaaaatgcgcacctagccagcgcacgatagctctgataatattaccaccgttgctaaaatgagccctgaattttcttcaacgcccccctttaaaaaggagatgtctttttagcaactctgcgtttctttctctctctctagtcacttgttgttcttactcaaagtgttcatctctctttcaccggtggatttctcgacaaagattctaactttgagagagatttttcggttgtagatgcagattcagagcgtatcatctctcgagaaaggatcaatgtctcatgaaataagctagactctgtttctgttttcttcttcttcgatctcaatttcttcttcttcgagctaggggttgtttatgtttgggaaaggaatgggcactaggcagtattcactgggagaagtagggccaccaataaatccgagagctggattgcgaagggaacaagctggtagaggttcatacagaggtagttagtagattcgtagctcatctgtaggcaaaaagggtttccttttaggtggcaagactgtttattttcagacacagagactgattaagaattcaagggagagttcttgtcgggggactattttaagttttaaaaaggggtgttttttagtggtgaaggggaaggtttagatg

SEQ ID NO: 36674 - DNA, 3000 bp, Unknown
  misc_feature (1)..( 3000): 2750-1469P.txt file - cDNA_ID_3099086; gDNA_ID_2936569; Annot_ID_194722
cgtgttccagttgctgcaaaggggccaggttatagggtcaggtccgaacggttgcacaaacatcccaggaggttctggcacttgtcgcccgtgagcggtcacgtgagtctgggtttacattctttaaattttttcaagcctaatgtaataaacacaatattgttttgtgtattggttctattttgacgcagttgtagcacatgtgaaagcaaatgtatgtattcattaacttggtaaatttgccaaaactagttgatgagattagctattcttttttgttttatgaactttaaacatgtaactttttggtttatattttttattttaagaatctttctgctaatttatgaatgcaagtccagattataatgccggtcaagatggcagtattaagagtttaagactgcagtttgtgaaattgtatattggtaaacaaaactaaaatctttcttaagttataattgtctgatcttacttttcttgaagaagctttttcaaaaagaaagtattctacgatcgcagaaatatgattgtgatcgtaaattaaagaaatttaatggttgtgatctatagtgtagacacaactaactctattttgtagagaaattctcttatagttcgagttttgattgggacatgacgtcgagtatcatataattaccaaatttcatgacatactatggtaattttgtggttattactggctaagtaaacaaatttcatgacacactcttttggagagaaattttctaatagttcgagttttgattggaacatgagtcacatgacgtcgattataattcattttatatgatacactcatacaccaagctatggtaattttgtggttattaattaaacaaatttcatgacacactcgtattaacccaggttaattatgataatataatggttattaattactgacgaaaaaacatatatgtgggtacaccatctttttttaatttgtcaaatttacattgcggtgtaaagtataaaaggttaatattgttttcggctatgatttctagtagaaacaaatttacatatatcacaataataaagaatccaagaatctctggttgcgtttcaagaagaagaatcaagtgcccggtcagtactcaaccatggcacctaggtgtaccacggggaatgttggtgcaaccatttggacctgacccgctgactggacccctttgcagtgcttggaacacgaaccggatctcatcggcagctgttgggaacggcctcattgcttcaacttgcttgacgtccaagaatacaacaaaaaaggcaactaacataacaaagatcattacttgtctcttcatcttcctcgatcgtactcttgcaatatcttcctcaaagaaaaaaataatctgacttgtttttctgtgtgtattggcacgtaaaattggttgtagagtgtaggcctttttttgtttgcatggggtttcattttaagtctatatatatatatatatatatatatatgtagagttattggtcaacacctcatggcttgactttgggatcatcctcactagcttgtatatgtatgtatatatatctttgactttgactttactacaaaaacaaatggctttcaaatatttgataaaacaagcgtaggaattgatcaaacgagtcactataacacggtttccactttgcgatcgcatttagacaaaggcctcttcgtgtcccgaacaaatagcacgtgtctccatctaatatacccaaaacaaagaaattgcataacccggtctagattggtttagtgcatgttcgattttatatatggaatttactctagctagtgtgacggctacgttcatcactagctaattgggacaggagtatagttagatttaatttgtgatatgcttacataattatgactctcatcctgtcacccattacaattttgcaatggatgatgataactagtttgctacaatctttttttgaaaaagtcatttttgcatgggtttgaaaattttgtatctcctatatatataagtggctctataacttgtatatatacaaggtatgttgggggtggctaataatggtttgacaagaattgaagaaactatcgaggcttgactttacttgggactaatgatgacatttgaacaatgaaactgatcaaacaagttactacacgtacgactcggtcggttctcggccgtacaccactaaaaggcagattataaccgcaaaagaccagatcagaattccggtttaagcttggttcatcagatagtctatgttattgtttactttccaatcagatagttttcttcttttaacattaaagaaaaaaaaaaatactcttctcctgtgtatttcaacatagggttgttaattgttatataattattgagatgtaattaaaattaattatactacaatgattgagaagtaaaagtcacgtttcgggtcaaaggcacaaaatactaataaactaaatgttacgaattatgaacagactagcaaattaagataatgcgaacgcgcctgcctacaccggatgtgtacttctgcgtgccgcgtacgtatatgtattaccgaattggaaagtcctaggaaaaatacacatgcatgtgtaaaatcctaaattgtatatttaaaagtcaaaacttgttttctaatttataatttttaaaaatacgtgaatgtgtgaactcataaactatattttcttacataaatttctaagaaaagattatatataggatgaatttataaactacactattaacctatttcaaatatcggtttatgtatttatctatcatacggtttacttaataatcattagaccacgcctccctgattatttggtttggtttggtttggtttcggtttagtagtagtgtgactgacttggtcacttgggtcagtttctgttgtcagttcacagagatttgtgtagaactctctctctctctataacaaaattggacagaattgggcaatcgagagagaaagatg

SEQ ID NO: 36675 - DNA, 3003 bp, Unknown
  misc_feature (1)..( 3003): 2750-1469P.txt file - cDNA_ID_3099093; gDNA_ID_2936569; Annot_ID_194720
tttatatggacataagaaatactaatgaaatagtatattttctgctatttaaagaaaagcaaaaatatactatttaattagtttttttttttgtcaatctagttagtaattcttattgtccaaaaagaaaaagaaaagcaaaaatatacttttttagattgtccaaagaataaaataatacaataaaattaaaactatcaattagaaaacattctattattttgctaatatgataactatataaaagatttctattaaaagtagaaggtagaacgatttatgaaatgggccatttttctgctgttgctagctatgatcatgttcaaagtacggagatatgggtatctatatttgtatatagagtattgataaatgagtagtgactatattctatgtacaatggtggaaatggtccattgattgatgttttaatttccttttctttatttatttttccttcgtatacatttttagacaccgaaaggaagaaaaaatggccatacacatggtgttcgcatttaaagaggttcgaacttacccactatccatgatccatctatcagccatgctcggcagaaatattttaggcattctgcattgatcatatcaagttaataaatacatttctaactctcttatcgtataagaaatttataaaaaaaataagcttgtatgattttctccatgaacctgatatgcatttgcactttgcagtatcttttcgacagcatgcgtttttgactgttctgttattcttaatttcttattactacgggacatgcatctgttttccatttctccatatgcctagcaaaaaaaaaacgaaataataattaaatagtagtacatttgttttttggttttaagaaatagtacaagctagagtaagtgcatgtaatatatatatatatatatgtatatgtatgtatgtatacataaacatattacatgcacttattaacgaagtcaatatcgagctccgtgtcaggtttatgcgtacatgcatgatgcatctatggtttccaataataataataatattactacaacaagttaatgaagtgttatgaggccaacgtcccaactgcaacaatttacagatataatgaaaagtggccctggagaaggaatgtattagctaagcctaagtagtcgttagttcgaacaatttgttcatacgtttcttattttggtttttgaatgttaatatttctttttgacatgaacgacttctcgtcaccattattacgttttaaaaattcaaaaaaattgcttaacaaattttctctaaattattacgcatcttataagccaacactttcacaattgtatattgtttacagaaaatatttgactttacatagtgacggttttttcgtctaacttctaccattcccaacgatttatgaatatcgctacaacgtaataaaaccgcgtcatggttaatttgttcctagtgacgaaatatcgctacaacgtaataattaaaaccgcgtcatagtttgttcctagtgagtaaaaatgtttcatttcttcctttttttttttttgagtttttaatttatttttcaaatgctttcttagttttggagattagatagttgctagataaagatagtaagatggcattcattaatttttaccaaattttaagtaaaactcgttcttcttctctgggatatatgcatgtgctttgcatatctttcttagtttgaagattagatgattgctaaaaatctcattaaccgattcttccttattaattcaagaaagatatattaatcaatatacatgttcttccatctcgtccttatttttggagattagatagttgctaagtgagaatacgtgaattaatatcttctaacttcaagaaagagtggttttcttctttgggatatttgcatgtgctttccatttcttccttatctttcaggatgaggtatcgatggttgctaagcaattacactaattaatttcattcgaactcatataagtttcgttcattaatttattagagatataggagtcctgatgttgcttggtccaccacatacacaatatagtattaagaaaaaaattattattgacataaaacaacatatagaaaaattcaaactttttctaacaagaagctaacaagatacatggttgagatatcttgattaaaaagatgattttctattacttctaatctccaaaaaataaaatatttagaaagtgaatctgttttgaaatggtaaattatattcattaattactttaacatgttatatcgaagacgaaatgagtgaactcgaagatgatttcttgaatatataaaagtaaacaaacaaatcgtgagaaagagtagaaatgaagggtctaaattttgttgatatccgttgctctaaaaatatttgtagtatagtcttgtattctctagattgtcaccaataagcctaattaacggtaacaaagaaaccgtacgtgttcatataacggcatatagaaggctattcaaaaacagaaatgacaaaatcaaagctataaatatggatgtacatatacattgaattagcatccataaaataaaaaatagtacaagattgaagaattgcatgaaatacgggtatgtatatcacaatactaaatcaaaatcgaggtctgtgtcagctttatgcttacatagttacatgcatctatctatggattccaacaatagaaatattttattattttcacaccaagttaatgaagtgataacgactacgtcccaactgcaacaatttacagataggataaaaaagaggtagcatgcattagagaataaattacggcgtccgttagtaagtcaattcactctattcaattttttaccctccatgctactataaattacaacgatactcactcacaaaacctaaaccactataacactctttatacaaacttcaaatccacaaagagtctttttttttttttctcttcgacttagcttatacatagttttattacaagatg

SEQ ID NO: 36676 - DNA, 3000 bp, Unknown
  misc_feature (1)..( 3000): 2750-1469P.txt file - cDNA_ID_3099107; gDNA_ID_2936569; Annot_ID_194716
tttttttgtcataataatcataaatttttgttaaatccaaactaataatattatttttattttgaattctattaataataattactagttggacttggaccttatttccagttggaagtttaattaattagatatgaactaaagcgttacgccacggaagaatttaggatctgttcgcagcatccgtttcaacgctaaatccaaacaacaaaagaagattagcaaaatcggattatcttctttgtttcttttcccttgacaagtcttcgtttttgaattagggtttttggacaattcttctcttcttcggctgcaaaaggtttattgtttgctccttgtcctgcgattgaattagtcttttgttatttgtatctctcaactttgattttttcctttttattattgtagctgattcctcttgaacctctgaaacttgttaatcgtttctgggttttgattgctctgttgataaaaaaaaacgtttttttttccgtttcttcttatgtgttgtagatgaatgtaaaattcaattatctgggctctgtctctgtgctttgtctattgaatggtatgcatgttatttcagataatctagggcttaggtttgtagaaaatctcagaatcgtgtatgctgaattttgatgtcattactcagaatttgagtcaatttactaactttattctagtttccggtgtagctatgacttgaaccggagttaccagctcctagtttttgtttctttgagcaatttttgtttcactcttttcttttaaaaagttcttgtggcatagtatgaatcctatgggaaattagatgaggaatagatagagcctcagacatacatggttctgttttctgatcacatgttttggtcttcttgatggcatattcttgtttgctatattcactaagtagaatccatgagattgttttccacactcagttttactcaaggatttaagctctgtgttgcaggttttcgcaagatatggctggctctgttggtgaggaaactgagccagaatggattaagagagtgaaattagagggagctgttccatgtcttaagccagacgacaactgcaaaaatggttggacgacgccatctcctgacacatttatggttagaggaccaaagtatttctctgacaaagttaagatacctgctggtgatttccttctaaagcctctgggttttgattggattaaaggtcctaaaaagctttctgagatcctgagttatccaagcagccgaatcaggaaagttatcgatgaggagtttcaaaaagatggaactaagccttttgtctgggcattcaatctccagcttcctcacaaagacaattacagtgctgtggcttactttgttaccacagagcctatccttgaaggctccctgatggatcggtttttgaaaggagatgatgggttcaagaaatcgaggcttaaactgattgcaaacattgtcaaaggcccttggattgttagaaaagctgttggagagcaagcgatctgtgtgattggacgtgcactctcttgcaaatatgtttcaggggaaaactttgtggagattgatgtcgatattggttcttcaatggtcgctagtgccattgttcatctcgcatttggctacgttactacattgacagttgatcttgcgttcctcattgagagtcagaccgaagcagagcttccagaaaagctactaggagctgtgagattctctgagctgcagaccgagtcagccacatctatcgaactgtcctcaagcaccagtaatgaccagtgggatcaaactacctcagagcggtcgagctggtggaaatcgattggaaatggattctctaatctgcttaatcaagatacggccaacatgaacaatacttctcatggggacatccagaaggatgaacatgtacagaagcagtaagtgttttgggagttattaacttcacaattctttgaatttgttcgatttcattaccaaaaaacagaaacaaaaacttgtcaattctttaaaaaaaccacagatgtatagattggtttttactaatatggatggatatgtgatatccaacaacaattcttgtgaccaaccatgcctaattttgtattggtgtcttttaggatcattctttttctcgaacgggctaagcattcatttctttgttagttaacatgccagtatatttttaatgattgcattaatcgtttttatgattgagaaaacgaaaaagtgaaagaagaagaaaaatctgatcgaatggtacatattaacataacatgtcgtcattccaaggaatcaattcacatgtcattttcaagattacgtgtagtcgtgtaatattctctgatttgagtaataccattacccaactctttctttctagatgaagcccatttttgtatacaaatctttcttgaaatcgtaaaagttcacgagacttgaaattcgagcatatcatataaaaggagcgtaaaagtctagtggtggtggaattattgaagttagtttattagtcaaaattaatgtgttttgactagattagtaaacaaaacacaaatctctactacgtgagaaaataacaagaatataaaatagcaaagtgtgaatataataaaaatatctaaaggtaggagagatgacgagaggaagaaggagagccacagaaaaagagtgggacccgcaagaccttgctgtaagaagcagagtgtttccttttgatacgcagaataatgaaaacaaagcaacaagcaagattcatcaaatccttatcttctctctttcactcacaaccaattgctcatcccacctacttgttccccacaaaacactctctccctctttgttctttcatcttctctaagctctttctctgaacctacgcttctgctaagctattctaagagaagccagactagcaataaacccttcattttaagcattctgtttccttcttgagaaacctagatattttggtttcttgtatccggtgatg

SEQ ID NO: 36677 - DNA, 3000 bp, Unknown
  misc_feature (1)..( 3000): 2750-1469P.txt file - cDNA_ID_3099134; gDNA_ID_2936569; Annot_ID_194710
aactcccacttgtgaagtttctcagatctcttcaaaattttcagaccccaacttacatttttagcaacaaaaacaaaaaaggaagaaaaaatagatgtttgttcgtgtttgtggtcgtgtggaggatcaagactatgagtgcctgattctctggactaggctgcaaccgttgaactgaaactcggactgaacacttttgattcatataactcgtactttttttataaacaaatgcatacgtactacttattcatgtatgtttgacctcactatttctgaataaacgttagttgagttcacacctcttttagttacaaggaacgaaggaagactgtttgttacacatttcacattaggtaaaatcccttccactttatggataggttatggattatttttagcggtccagtaaaaacagtttacaatcagaaaattggagcaacacacaaatctcgatccaaatccatacataaaaagtgattagataaagcgaagattcctggcaatatgcgcttgacaaaattagattatggtattgtcaagcggatacaacattagatccgtggaaaaaaatacaacattagatccaatttttttcggatacaaaaatctaattttgtcaaacggatattgccaaccatctttattttgtctaattgattcagtatttataaacgagattcctcctaatagagctacatcagttacaattagctagcctagttgccaatgatctcaattattggcacaggtggattctcattacattataaatcaaacgcatttataaaacacaaactaaaatattcactaggaaaacagaacaagaatgcagtaaactaggatcatttttcttttgtgtctttcattcctaagacaatataattaattaaatcaaggatcccaaaacacaaaaatgccagaaaaaaataaaaccatattaattagctacaaagaattaaaaccaccgcctttcatcatttgtctaaactctttgtagttaaccctaccatcaccatcaacatccactttctttatcatcttcttacaatcgtccaaggtcttaccttgtttgagccccaaggaagacaaaaccgccttcaattcatccaccgttataaacccatctccattctgatcaaacacattgaaagcttctttcatgtcctcttcttcttcgtcttcctcgtccattatcgtcttgtatagctcaccaaactcgtctatgtccacgcacccatcaccattcacgtcgatcttctcgatcatttgagtcaactccttgtccgggatgtaaatccctaggcttcgtagtgtctcgctcagctctttccccgtgatcgtcccgtccccgttcttgtcgaacatttggaacacgcgttttagctctgtcggatccatctcttttaaagttgtagtgttgcgtgtggaggaagaaaagataatggtgagggctccacgaggccgagaaaatcttttaccctttcctggcttcttggataagggcaggaattcaaaaatctaggaggaagttacaagagatgcaacaaagagacattcattagccaaaaataggaaggaagaaggagataaaaagatatgcctttggttgatattgttaatcggtagagatggacatgttgagggttttaaaaggatgcaactctatgagtttatggaattaattattttcttaaaatttgttatatatatagtgggaatttaattaatactttgttttcaccaaacaaaaaagtaagaattaagaaacagtagtactagggggaaagttgagtcaacattcaaataatatataatctgatagatttgtgtatccttttgaaggtagataacaaaattcttgtaaaataattacattcttgaatctgagcgaattaatatttagtataaacaactgcgacaaataccctggaatttacattcttgaattaacattagtatacgcaaaatatatgtttcgttttaaattattgttagcgtaattaattcccagttacaattaatcaagaacagttttagtgacgtttagctccaaacatttatcccagttaaataagacatattttgctgttaaaaaactagatagtaaatggtaggcaggtactccccacctcgaggatattggttgcacgtttagctccaaacatttatcagtttaaacaattgcattagctaaataacagtttattattgatcaaatcagaatttgatttaatatttgattcttaaaagaaaaacagctaaaaactctaatgaagtggtgaaccactattatgatttatggccaatgaaagtatcctaaaaagattttgttttataaaaactacaaagagatccaaaattgatacattacaatgagtcgcatcgctttcactaaatctctttatttaatacttacaaaaaaaaaaatatcttatttaatttcaactacatgttttttataatttacagggaaaggaaaaaaataaaattgcataaggttgaaaaataaaaaagtgcccacacgcaggatcgaactacggaccttcagtttacaagactgacgctctaccactgagctatacgggccattgataatggaatccaataacaaatatataaatctataaaagtcgtcatttatcctcctaacttacttcttcttccttatttcgtctccccccatagacgacgcctttgacacgagtttaacagttacttccagagacgacgcctttaacacgaattctctccagttcaggtaattctttgatctctatccttctattcatcaatgccccatcgatttcgctactatctcttcattcccatttctctgagaaaccctagattttcgccccgatttcttttttgtttttccagaaaattcgttgcatatatttaagacggaaattgtaactctgttgaatcaatttggggtttgttctatttgaacttaaattcgtttatcgttttctcttcttaatttggttagtgatg

SEQ ID NO: 36678 - DNA, 3000 bp, Unknown
  misc_feature (1)..( 3000): 2750-1469P.txt file - cDNA_ID_3099138; gDNA_ID_2936569; Annot_ID_194709
ggaatttacattcttgaattaacattagtatacgcaaaatatatgtttcgttttaaattattgttagcgtaattaattcccagttacaattaatcaagaacagttttagtgacgtttagctccaaacatttatcccagttaaataagacatattttgctgttaaaaaactagatagtaaatggtaggcaggtactccccacctcgaggatattggttgcacgtttagctccaaacatttatcagtttaaacaattgcattagctaaataacagtttattattgatcaaatcagaatttgatttaatatttgattcttaaaagaaaaacagctaaaaactctaatgaagtggtgaaccactattatgatttatggccaatgaaagtatcctaaaaagattttgttttataaaaactacaaagagatccaaaattgatacattacaatgagtcgcatcgctttcactaaatctctttatttaatacttacaaaaaaaaaaatatcttatttaatttcaactacatgttttttataatttacagggaaaggaaaaaaataaaattgcataaggttgaaaaataaaaaagtgcccacacgcaggatcgaactacggaccttcagtttacaagactgacgctctaccactgagctatacgggccattgataatggaatccaataacaaatatataaatctataaaagtcgtcatttatcctcctaacttacttcttcttccttatttcgtctccccccatagacgacgcctttgacacgagtttaacagttacttccagagacgacgcctttaacacgaattctctccagttcaggtaattctttgatctctatccttctattcatcaatgccccatcgatttcgctactatctcttcattcccatttctctgagaaaccctagattttcgccccgatttcttttttgtttttccagaaaattcgttgcatatatttaagacggaaattgtaactctgttgaatcaatttggggtttgttctatttgaacttaaattcgtttatcgttttctcttcttaatttggttagtgatggcgactccggaagaagtagcgtatgagaagttcctagagagagttcgtcgtactgtctacgtagacgaactcacgcctcttgccacagctcctgttatttcatctgctttcaatcagtttgggactgtcaagaaagtcagcttcatacctaactacttgggtccaaaggagcttcctatgggtgttcttgttgagatggagaatgaagagatgacacaggctgttatctctactgtctcacagttacctttcatggttgctggtatgccaaggcctgtgagagcttgtgctgctgagcctaatatgtttgttgataaaccgaagaagcctggtagaacggtccgttttcgctggattaagcctaacgatcctgatttcgacaaggccaggagagtcaagcggcttgctcgtaagcatagtgctgaaaattcgttcatgctcaaggtgcttatattttttgttttttgttttcgtttgtttgttgtctcttcctgtggtattggatctgattggcggtgatagtgttaatgaagacttgtgtgctattgtgtgaatgtgttttcttgtcttctgttgtcagaaacagcttgaggaggcagagaagctgtcgaaacagcaagctgagacggcggtaacacatcacaagaagtttgagatgatggataaactcctctacgatggtgttgctcagaaactggctggccgttacgacctgaaaggttttccttatcggtagagagagactgcatatggtattttgcttagaacttccttatgtcactagtttgtgcagtgtctattttggttgagctgactttgctgtaggcgctctgactttaactcgtaatgaagaatgttccacattctcatttatgtgaaacaagtagaagcgtgtaaatgagataatcaaagtccctgctttagtttaccttgacctctcctcttaatgcctaattctcaagcaaaacaagatttaagctttagagacacatattctgctctctctgatatttcagatttttggcgtttggttttctacattcccggttcttaagtcttgtgagtagtgtatgacatttgagatgagatagcttgatttctatgttggatcagacatttgaattgtattactattaaccaaactaaaaattgtgtaaagcgaatataataattttcggtttagtcatgaaccaccaaaccaattctgaagggaattaaaaaccaagaaaaattaagaaaagatcaaaagaacaattgtcaagaatcatagaggactagtcaatggatccattcagcagaaaacaaccttcaaaaattcggaccgtatatagcccgcatcacataagcactagtggatccattacaagatatttgaagggtatattggtaatttaaagaggaattcggactgacactttccgacattaatggcggaaagaagagagagagagagcttttttaataatgaaatggagagattaaataaaataatgataaaaagacgagagaagagcaatgccacctctgagcgggcaagcgggattagatttgccttcttctccccaagctgcctctctggcttttccccatcttcctggtaaaattctctccttcttcaatctctatctctctcttttttcctggttaattccaatttggatttgtaatttctctgaatttgattcctttatttcctttccgggatcgaaaattctaaatttccctttttttgttctgggttttcagggttctccggattgcgatcttggtaactagatattgaatttagggtgccaatcaaatcgcagctgctaggttttctttgattcctctgttgttgttgtcttcaattaggaattgttgctttcaaagatttagtcttaagatatagagatatttgcagggggggatattaggcggagaagaaaatg

SEQ ID NO: 36679 - DNA, 3000 bp, Unknown
  misc_feature (1)..( 3000): 2750-1469P.txt file - cDNA_ID_3099144; gDNA_ID_2936569; Annot_ID_194708
gctggagaaggttattgtggatgcatgtagtttatccatgagcttagatgcgtcttcagatctttttatcttgaacaagtgtcccataaggagagttgcagttctgttggttgactcagagaagaagagttgctatcttcaacacagttccatcacacaaggtgtctggtctctacttgagaaacccattgaaaaggagaaagccgctagggaaaatcagaaagaagagggcgtctttcaaaaagttgcatttgctgttgttaaggaggccacaggttatcttcaaagactgatcatttggtagtagcattctttctgtaagttattactaactgttttgaatcttttgcaggtgttaatcacaaggacattgtgatcttggagaggcatttggtatgctccttgagtgaagagaagacagcagtccgcttttacataatgaagtgcacttcacaagacaaattttctggagaaaatcctgtcgaagaagtgcttagttggtaagttgactttggtatgctctagctcaaatgactcccaaattttggcaagatggttattcagctgttatccttaaactcactttactttacattagttgcatgattggatcattctttactttttgtaagtacaaggaggtattgacatgatattcctaaccatcttcttttgcttttctctatgaaaatagtatgcagggtcctttatttgagaagagcttttccgactggactatgaattctatagtggaatactttcatgttcttccatatgccactctcatagaagattggttttccaggtttaattgcatcctttttttcttcctaaattgttattccttaacattactttgagtttgtttggtatcatttctagtttaggggtagcaatataagtttattgtgctttttcaggcgaggagataccgaatttgtgatagagaaagaaccagaagctgtatgtgatgatatcgaaagcaacaaagtagatgcaaccaaggagtcggaagtttccgacatttttgaaagacgagaaaaagctgctttaaaaaggagatatgaaattaaagtatgctctcataatgatacttgtattgtatggttgtgttaaggaaaatggtattacaaattaacttaagaatttaaattgcaggccaaaaaagttgccgctctactgagccatcctggagctagaggaaaagctacgacgaggttgcaaaatcggtacttaaaaggaagtatgagtggtgcgaaggaacctaatgttcactcggagacagtagttgcgttgaaggctaagaatgtaggtaatgaaatgagcccttgtaaggataactattcgaatggagagaaaggtggtttcgaggtgaaatctgaaatctacactaacaattatatattctcaattcaatcttcaagtatcctttatcacccttttgtaaatgcaggttgcgtctgacccaaaggaacttaaagaaagaggtctccagaggaagaaagctgttcctgacagacttaatagcattcataagcttaattcaactcctgcttctgctcataactctaatccaaatcttgaggagctacagacgtctcttctttctaaagcaacatcactatccgaaactgcattgaaagttcttctttgcaaacgagataaactggtaataactgtagaatttgatcaaagatacacaacacagcaaaaaaactgattggcaatagcatatatatccttattttatgattaagagctgctctctttttctctggctgcagactcgtcaacagaggaacatagaagacgagattgctaaatgtgataaatgcatccagaacatcaaaggtatgtatatatacatatacttttcctttctgcacagctttgtttttacatgaatcttagtgatctcgtgggtgttataggtgattgggagctgcaattagaaacagtactcgagtgctgtaacgagacatacccgaggcgtaaccttcaagaatctcttgacaagtcagcatgccaaagcaacaagaggctgaagctcagtgaaactcttccttctactaaaagtctgtgtcaggttagtttatggttactttaatcatttcttgttcaaagaattaagattcattgcccctatttattgcagagactcgatgatatctgtctcatgaataactgggtactaccaaactatcgtgtggctccatcagatggtaaagttttgagatcatttgccaaactcgtagttcagctccattactcccttcagatttgcatgttgatgttgatgctttgttcaaaaaggtggatatgaagctgaagtaagaatcacggggaatcatgtcgcatgtacaatacatggagaggaaaagtctgatgctgaggaagctagggaatctgcggcagcttgcttgctaacaaagttacaacacgacacagcagccaacttatcatgattatgtgagattcaagaacaactcagaaaccaaactaacttccagcatgagtagaaaacaaccctgattttgatatgtatggccattttggacgaatagcaagatttgtacaaaactccatcctctggttgagattttgagatatattacaagaagtcaaaggtattaactgatgcagaaactaaagtagaaccagaatcatgttaaaaacctaatcctaagcctcctgcatttaaaacaatcctagaaactcaaaaacccaacaaagtgctaaagagggatgaaagaaatcctagtaaaaaaaaaccctaatattgttaactagaccaaaaacctcaacaatggcctgaaagattagaccaatatgaatctcaacagacacaagaaacttgtcaacaacgaaaataggagctatactgtctcatggcaaaacagaggactccatcgcacctaaaggcccaaagacagatgtcgtcgcgagctttcagttcattagagggttattgggtttaagtggtctctgttgggcccaatg

SEQ ID NO: 36680 - DNA, 3003 bp, Unknown
  misc_feature (1)..( 3003): 2750-1469P.txt file - cDNA_ID_3099150; gDNA_ID_2936570; Annot_ID_194747
aaaaattgcaagttagtagtataagtttggttacctcgttgttacaaattcatatgtctaataccacctataatgttgatccctatggttcgaaaaacattgggaactttcatcatttgatcatgtagtacaatctcattgcctaggattctaatttataggacagtcattccgaaataaaaaaaattcttagtgggatatatatataaattaaaattaataaatgggaagtcaaagtaaaaataacaatggctgttaaattaacaatacaaagctaggttttcatcgagcgcaacaaaaataaagaaaatttgttgagaaaagacaaaagggagattaggcaactagtttaatcattgaagatccagtcatcaaagttaggggttcattgtttcagttctgccaaaaaatattattatttgtgaaaattgtaaatacagacaattatttattatagagtccacacaaaaaaaaaatccacggtccgttaattagtattttttattttatttttaataaacgatataattaaagcgtagttgttgctaattcgtaactcgaaacccataatgaaatgtgttgaattttattaatggttgcaaatttgcaatgtttcattatatatgtcgtgtatattaaatggtcggttgataacgatgcatttgttgcatctacgagaagtcaaaacctcagttgagtcgtgacttttggactgaactaaacataccactttacatcaatacttatttagttagacaaaactgtatagtcatgactcatgaatctgggttacgtcaattagttttgcatctgattttctcgttgattgtaatatatttattgagaccgatttttgtatacaagcaaggaagatttaacaatagctatccatgattttttttttcttgggggtcagatataccatttgaatgtagttcactattgacttttgacttaaaattttgtcgattttggtcttatcaaataccaaatgacgctatatactaattaacatcaaattgcgccgctaaatcacgcggttccatgtgatcaaagtccctggagtggatttgcttgtttggtctcactctcacgccaattaaaaggtgtctgtttaaccttttctcctttagtttatagactatgatatggtcaggaattacttaactataccacggatttataagaggtatctcaataaaagatctaatgaattttgaatcagatacaaatatatgatttttataattataaaacctttaaactatctcatggagtagtttggttggaaaacgaaatggatcctatccatccgttagttgataattattactcgtgacctaaaacttagactatatagggtttgctgtcaagcaagtattcattaaaaattgcacatttatataattactttgtttaaccgcatattcacagcacttgttaaagtttcaattatgaaactcagctatagtcttatactgttattatgttcacattaatctcatgaacggcaatatagagactgttggataaggtttgaaataacttaattctcatacaacagcacaatatataattgtttacgatccaatttagtgatttgcaaaataatgaaagaaaacatgtgaaagtaatagtaactgataactttccaaaatgatctaattatttcaaatctttgtaagattttatttcagccaaatagtatttttgtggtgtcttatctttgattaagccaaatgaagcaattgccgacaaaaataaaagatgctaaagacgtaattaaatattaaaatattaccgcacgagggaccttttgaaaaatcaacattccatcacataggtaaaattatgtcaaatgaccgtctagctaatcacaccatctgattaagcggcaacattttttaagtagttctaaatctaaccagtgttttgatttcggagtgatccggccggtcggacctttaaacatgcgacttgaatacgactaaactatagttcgtttggtaagcgatttttctttcacccactagaactaaacatgcaaaaacttcggcaaaaactagtgatccggtaaaatccacacaagggcggtctttaacacgccaaatcacaattttttttttatcctggtaacctctgattctttttttttttttctttctaattttgatgacgtgattgatatatttatttgataaatttgactctctaaaataatttaatttctgctaagacatacaagaactaataaaatcacacacatatatatatatatatatatagaacgtattatatgataaattttgattttcttggagaattctcatgctgattttttttaataactttaggaataattaattagtttcaaatcactctagaagacatttacttaatcatagcctctgatgataatagttccgaaacaagaaaacaaaacatacaatatatattatttattttatttttaattttataatagatatcaaaattggtgatatttattgtgatggggattcattgaaactggaagacaactgtagagaaagtgccccatagaagaagatcttcatagtactctccatctctttactctccttctctttctctctctctatctctctatttctctctctctctctctctcacccacagagaaaaccagcagtagtagcagtaaattgcttgagttcttgatgacagatcgacaatgtcttaaatgatgaagagaaaagaaggaaagcaataaaccttggcggcgtttgcagcagtttcttaaatttcctcaccatcattactctctcatctgctcccaaatctgctccttttaaataccaaacacatctccaagcctagctagaaattaatgtgatagagagcaaaagaaaaaggtgaacacaaatccccaaaaataattcatccacaaaccccaaaaaagtctcataaatcctctttctttctttttgtttgtgttttgtgttggggaagtagaaaaaaatg

SEQ ID NO: 36681 - DNA, 3000 bp, Unknown
  misc_feature (1)..( 3000): 2750-1469P.txt file - cDNA_ID_3099158; gDNA_ID_2936570; Annot_ID_194745
acaattttttaagtgaccacaacgaaattttctttaccggcgatatatatagactctagaaattagttgtctgattcaaccaaaaaattttccgaactaaaaaaatatatatataaaaaattttgagaatgatttcagttccggtggagccatattggctcccgtatgatgttaaacgacaataattggatgtagatttgttaaaattaacataagattgacgctaaggttcctcattcctaaccatcagtttgttagcttaaagaaaagtgataattacgctctttccgcctagaatggctttttgtcttgttgaatatataaaggaatgaagtgactcaaagcttcgtggtaaagttaagatatagaaactttattcgtatacactatgtaaatacacgcaatatctcaactaccctttaatagttgtgttatcaaataataaaatatataatatgagaaaatatgttaaacaccttccttttcggtcttaattaatgatcaattttgttaaaatcgttacaaaagggataagaaacaatcaccaacagagacaaaaataacattaccaacacatataatacaactctcattagtgaacactcatgtaaccaaaactgttaaccattagcgtatgattgagaacgatcctccctcataaaatatgtgaaagttatctaagggaatgttaagatatagtttttgttttattcaaacaccgttagttaaacttgaaagcatgcatgctaatgtttgggattcgatcctatgcgagagatcaatcttaagagaggttaaacttcacattcaataatgtaccgggaatggagacttcaagaatcatcggcttgatagaccactaataaaaaaatgacaaaaactagaacatccaaatatatgtcgttcgaaaatgtaattccgtagctagcttatacaattctatacacagaagatatttcgaatatagacacatataagatgttgcggtaatgcaattttaagtgtagttggacatggattggtgagaaaagtaaagtgaaaaaaagaaataattaaggaagagggggctatagctctgaaaccctagacgaaagcaacactgcattgccaatagtagaaacagtgcgatcacgagattcaactcattcctactttcttacttcttagtatccactccacttgtagtactagctagctccctgccacgtggtcctctcctcttcttttagctttatgggccttgtaaagcccgcgggccccatctgcccatcccatgcacatgcatcacattatgctttctctctatctacgaaattacgaatataagtatacgtatagaacactttttacaataaccaagggtcaaagttttctcgagtcggaggatatgaactaaatagtacattgtctaccagcgaagcttgaacatgagatcttgagacacatttcctttggaaggtactgaattgagtgttcatagcggttcaaggaactcgattaatttaaaatacctgaattaccatttttttggggattcgttgtgcttttttaatcaatctaccggaaatgaagacaagttttgctaaaaacgtaacacttgaatattgtaaatttgtaacataaaactctaaaaccttaacaaattaatacctctaattaaaatagaatactcataaaaatataaaatgtaaaagatacaaatattgaatatcttctaatataattctaagatgcgaaagatatagtagtcgaattaaagcaaccaatttcagcgtttccttaaacttatatttccaaaatatcatctaggacagtttgttttttttaagaatcgagaccctctactaaactcttgcattcaatttggtagaatcacgttttgtgtaggagagaagtagtgcttttggtttgtagtgtagagtagggtaaacgtgagtatataaaacgtagagaggcatatattatacagagagtgtgcttttaaagaacggaccggctgaagaaaaagataacgttgttgtctccgtaaaggttaccaagtatcactgtcacgtgaccaccaccattcctcttttcacatctttctcctttcgatattggttatattatagttaagttagcatttagttaaatttactatatattagtaagcaatgaaggggatattagtacaaatctggacatgaaatgtaggcctttatttgattgattgtcttggtataaacatttcatataatagctttgtagatttatacaaccaattaaataattaacactttacatatacagaataacataaaatgtttagatcatatattttgtcattttggatcaatagagaaaaacactcattgttattttcttatttatacttttctgtatcagtctatgtgtaaagtacaagtggacctgccgtgaatggcatagagcccacgctttacttgtaaaagtatattgggctttacggcccacggaccaatttatgttttgccattggttttttttttgtttgttttgttgggagttaaacccacacatcttcttcgcaactgttagttgtgtgtgttgttgttgttggcactgtgccactttctctctcgatgaaccctctcaagcaagcttcttcgatcttccgagcttagtttcgtttctaaatgtaagttttcaagtttttgtttcagtaagaagattgatagacctaattatttgttccccttctatatagtagagatttcacctagattggtccgtacatatcttatactgggattcgaatttggctgcctcagagtcagagattgattaattgatcaggtcaccggaaactttttgtctcgatttggatctcttatgcaaaatctgttgtgtcctaattctatttgattgtaaatcaatttgattctgggtttattacagattcagctgttgaaatcgtgcttattgctacaaattgagaggcactaaatcagtgaggtcgtaaagaagaaggcaaccacaatg

SEQ ID NO: 36682 - DNA, 2939 bp, Unknown
  misc_feature (1)..( 2939): 2750-1469P.txt file - cDNA_ID_3099170; gDNA_ID_2936570; Annot_ID_194742
gaattctatcaactattgattgataatggtgaatattgaataattttacttggtgttgttacgggcgagcgaagctaagaataaatagctagcgcatcacagccgtcggattgattctgagattagctattgtacaacgcagactacagtaagaccaaactggtaaacgtgtgaaaccaagccacgtgttttccttgctgtcaagctgctgtgtttgatttcgacaatagttggatgttgactttatttttcctctctattaatattaattctaaaagctgaattatattcacaaaaatttcgagataaaacaatcaaaaactgattgaaacaatttatgttttaattataaaatatttcctgaatttaatttgggtggtgagcaccattatttcaattaaatcacaagttgtttaatctaattaaaaaagtggataaaatgtgtaggtagacagtagacatattagatgatatacctaatgcaaatatttatgattattatgtaaagtcgaagctatttgatcatattttaattaagaaaatgacctcaataatcatattcgtttagactttactcttcacgtctcgttctttaaaacgagaaataatgtctgcttttataattgaaaataagtcgctatataggaaaaacaatatctgatttttataatgaaaataagtcgttatatcagttttgggttctcaatttttttcctaaattttaattaaaattgaaaagtcatatagttttttttttctctttacttttggtccgtggaattgctatttacagactgtagtgtacaaacttttgttcgctggcttgtctctaaaactatatgaatgcaattgtaagaagttaggaccatcggctgaatgaatttaataattatgtaaacattttcatgcatttttggttgttcgtagcatatgaccaaaactcagatttgtatttattatctatttttgggaggtaacaaaaacaagaaatgatcgtcctttttaatttccgttaagtttgagataaggtttaattaaacgagtggaaaacaaacgcttcaaattaatatcgtcggttgctccgtttcccatatttagtccatttagtcacttaccataatcatttttctacatattatttcgaaatttacttactacagtattaaaacactcaggtttcatcctaatcattctcgatgtaatactaatcatcattcatcagtcaaagtaattaaaagaaaaccagtcaaatttcttgatataaacaaaaaaaaacgcgaagaattatttgttaggagaacacatttaatgaacatttaatttatgtatattatcttccagcaaaatctcagtttaatgaagtgcattatcatcaacataaaccttctgtactaaatacaatctgtcccatttattttaatttatataaaaggaagattttattaaatactattccatgcttcatatagttgtagtggagtaaacagtatgatcacgatgtaaaaacagaaaagataatcataaaacagtcaaaaacgtttttttttcttttcaaaatgatcacatatacaatgtttgtatgaggtaagctaaatttatttctcttacaattacaaaatgttcagtaacaaatacgtctaagtataatactgtttatttaagtatcgcatgcaacggtaaatacaataaacgcttttcagaaatcaaagattgaaagtctcgaaaacgtcaatggcttaggtttattttgttcaggtcttctattaatagggattgtataaaaaggaagcacatgtgatacatgtcattgtttggctatcatcgtgataagaaattttaggaaaaagcctatctattcattccctttaacaaaaatagggctactgtgtatacggatttagtatttttatttgtttccgacttaaaaccagaattattactattaatcaacaggccaaatatctaaataatactatatagaattcaactaaattgaattattaaaagattattaaggagggtaaataaatagaaggagaataaaaaaaaaaaaaaaagaagagaaagtgaaggtaacgattagtttaaaggagagcctctgctacgttttaggctttgaagtgatacagaaggcattagatagatagatagattattttcaccatcaacatcaccatcaccgccactatcacaccataacccaccactcttcttcttcttcttcttcttctctctctttctctgtatctagaaacagagagtttttgattctctctgttttcaaatctgttccactaagctctcttgctttcgggaagattctgtttcactgctgcattttggatttttccggtgagtttttttctctctccatatatactctcctcctttcgattctacatttcttcggaattatgcttcgaaatcggagaactgtatatatcatgctctgttattagttcatttacaaaaaaaaaaaaaaaagaggaatcggcgtcggtgacttttggttttgtgatttgactgttgagaaaaaagcgtcggtgatttggttttcgaggtatttttttcttcgtctgccatttgtttggctttatatcctgaagttactgattctagtaatggcttttgtctccattttacttgatttttggaggtattcctttactagtttgattcctctcttcttttcatttacaagtgttcacagttcatcgaaatcagaaattttctagtcgattgcgatcgtcggtagtcttttgcctctgcatctctgattattttttactttctggcatttgctttctgatttgacttcaccacttcgtttcggaaagttcttaattatttttccgaaatcccaaaattgtatatatttggtttaatttttatgtttttgttttctgaaaatgttgaattgtttgttgattatgaagatg

SEQ ID NO: 36683 - DNA, 3003 bp, Unknown
  misc_feature (1)..( 3003): 2750-1469P.txt file - cDNA_ID_3099227; gDNA_ID_2936570; Annot_ID_194762
atgaaatttcaaatctaatattatgagttatgaccggaatatcaaagttatgacaatttttaaaaaaactaaaatttatatattcagaaaattaagagaagaaaattctctattcttaattacttgttgtgattacacaaaagaaaaaaaaaaacagaaaaagttaatgaatatcgcaatattttttcaaaataaacgtagtaattcacgaaacagcacctaaaaatattacgcaagtgatataccttttagtgcgtgggaatctttctcatttgagaaaccaacataaaaacagaaacctagtggtccacataagcttgtcagtttatcaaaactatcacaaatagacatgctaagttgctaacaagttgaattatcatccatatatttttaaggttccatgtcgtgaggcggagaaggaagacaggacaataacagctgatttagaaaacatggggaaaatatacatatcaaagacaagtcctaagagtgcacataaagcttatgctcttcaattccaaactgatttctgggtttttttgagatcgcgatctgaggagttggtcccgggaggccgaatggttttatcgttccttggtagaagatcactggatcccacaaccgaagagagttgctatcaatgggaactcctagctcaagctcttatgtccatggccaaagaggtatagtggtgtacatatgtttacatttatttataactaacatgtaagtctctttcggttataaatggctcatattctaaaaggatctgaccatgtcacgttacttgaccaattaagtcctagctagtaatgtggcccatgtgttcttttccaaatttcttgcggtttctcaaattacttaagttagtcaacaaagattttatcatatacaaatagatttgatatataccatatagaaattatttgtagtgccaaatactagctaaattcttactatatatttacgcaatcaattaagttttggagaaaaaaacgaatacttatgaaaaaacatatttattaattagttcccggttttttctcttgataaagaagcaaggtatggcagtaaaacattttaccctcctcataattacaaaatagttaataatgttttggtaatttaaactagtttcttgatttctgaaaaaaaaaatcttgatttctctatatttcaacataactatttagaactcaatatattgtagcctagattttcctctaaaaccattcatgattatttcaaacgattttctagataatatatatgatcaaaactaatgttaaatcttaggtttgatccaacaagatcgatagattattggatcaatagattaaaaaaaaaaaaaaaaaaacctagaagaaatcctcagtaagtcataactaaaaggtgccgcgtttatttttctccatcttaagggtatcatcgaggaagagaagatcgatgctttcaacgctccttactatgctgcgagctccgaagagttgaaaatggtgatagagaaagaagggtcattttcgatcgataggcttgagataagtccgattgattgggaaggtgggagtatcagtgaggagagttatgaccttgtaataaggtccaaacccgaagccctagctagtggccgaagagtgtctaataccataagagctgtggtcgagccgatgctagaacctactttcggtgaaaatgtgatggacgagctttttgaaaggtatgcaaagatcgtgggagagtacttctatgtaagctcgccacgatacgctattgttattctttcgctcgttagagccggttgatcgtgttataacatatgccaatatacatgtctttgggcctacaatgacatgatttggtagttttctaatcaagcatatgtaatataatttgcttcgagaataaaataataaaataaagtctgatgttacggtagacccttttttttttttttttttcatttacggtagacctatagtattaaaacaaatagaatcagctggttcggaccttgaaatgagagagcttggatgcatgtagacgcattagtcgtgaattattcaaatagaactaccttttgggcaatcacaatttgttcttctttttgcttttcctttataagatgcaacattaaggcggaatgtgacgtgagaatgttaaaagtgatcatcactttaacttgccacttaggagttgtgccgcaacaagtggaaaacaagttaatcatggccactcgtgagtcgtgagaatgtagggcaataccgcaacagcttctcttcaccgttcacgtgtctcccaaattataatttttctatttttgtatttctgttgttccttttgtttcaactttcagcgcatggcgtcacctcccatgaccaagacatttcttaagaagcgagaaaattccataaccaaaacatttatttatagccgttcaaatattttccacatgctcatgatttatttttaatctgccaagaatcgtgattagttgcacaatacgtcaatactgttgcctctgtattctgtaactcactaacactagtctcgagatgatatttttgtatcactcaactaatataaatatcaagaaaataattacagtagtttgatataccgataatttttcatgtatcaagaaaatgtgtttttttttttgttaaattatatcaagaaaatgttatacaccaaagtttacatacgttaaccttgaaaaaaaaaacagaaaagtgattaaaaacaaataaaaacttagaagacgttatattagtctcttggtttaatataccttctttgtatagccagcctcgattgatttatctgtaagaaaatatatatacacacacgcatattcaacagattttagtctaaagaaacatcatgaggagcaaaaaaagatcaacggcccactcactcgttacagaaaatatctctctatatttatagattacaagctcgaacaaagattgcatactaaaatttagaactaaattaaaccaaatg

SEQ ID NO: 36684 - DNA, 3003 bp, Unknown
  misc_feature (1)..( 3003): 2750-1469P.txt file - cDNA_ID_3099233; gDNA_ID_2936570; Annot_ID_194761
tcaaacagggtagacaaacactagctggaccttgagtcttttctttctccatcatctatatttaaaggttaattttatgtcacattcaaatatttagaagtacttcaatatttttaacataaatcaatccagacatgatcatattcactaagtagtaagtgaatcatgtgactggagatgtattaggtatcatactttaataaaatttgggtatctacctttctctaaaacaacattgtgtctctagtaaagtacacataacaaaagcgtgaaattttaccaccgaaagtaaaatagatgatggagaaacattgcttgaatggattttactatgattttagataatggatattttattttaccttttagacttattaaactataatatatatgattcactgtaagtctgtaagttaaaacattgcttgaatggaatttagcagatataaggtatgaaagattttgtaagacgtgaaaacaaaaaatacataaatatatcaaaatgaagtctgtatacatatatacatagacaataatccaacatatataaggagaaacgaggctcatcgtcagaacgtgaagcagaatgttcacgtgatattactacttcatttggcaatctattcgcgtccgaaaattacttggcagcaacggccacgtggttcacgacaattccttggttatttttacatattattagtatactcctgaaaatgaaaatgcattgcctatctagagtcaaattaaggagtgcatggcttagtatcttcatttgtttgcaaaaaaaaaaaaaagttttaaaagttgatagattgaactataccaaaaccataagccgtatctattgcggaatagaaaacataaacgtgacaaaataatgtcttctcatattcttcggatatagttcgaatataatttgaaatcaaatgttccacgaaccatatgccgtggtccaaacgtgaaagttttcctttttaaaataataaacacggatctttattcggtctatattctttagattaagactttatatcatatgccttaatctcgtatatttctactattgagtcgggcctctgtcttgtgtttatcacgcggattctttcaaaagtcggtcaggaactcttatgtgttgacattattaaaccctacaattaattattataaaaaatcgattaatttataatatttaaaatttgatatacagtatagagatacatttacatacgtgaagatattcaaagtatttttttcataacatattattcatgtaatatttaaaatgataaatgtcaatggcataaaatctaactgtgtacatattaaatgatttttgttttatttatgttgggaccatattgctgctcagaaaattgaaacgtacaagagacctaatctgatattcttgcctaccttaaaaacttgagaagacaaacccaattagagagctagaacctaacatttacaatataaacgtttaaaatatcagcacgtagtcgattacgacaaatcctttgacacatcagttagattcaagtacttgtatattatggtttgtctattacgattagtcgaaaattcagaaatttgttttagatatttttttcttaattatgttactgaaaaatatgtgtttatatataagaagccttgtattaatatattacaacgatcttaaaacagaagctgaatgtcaactagtactttattagcgctgataaattgagtgttaactacctaaatagatgttgacagtcaattaaaacgaatccttcatcggttcgaatcaatcaagaagtttagttataattgtataaatgcctgcagttcgaaattccaaaattcgttttgaattttttcttaataagtttttcttactaaaaaaggccagagcttgaattatatataacaagccttttataagtgtcaaccgtcaaaaatgattctgaaatggatacattgtcgttgtaatcacaaaataatatccaagtctttaaattgtgtagacctaacgagagaaaaaaaaaagtttacatatccaagaaatgatacatagaacatttttgttaacattatgctttgttgaaagacacatatttttggtatatattcacatgaaaatatatattattaaaaaaagggctcatttaattcagtttttccttatcaacaatttccattgttttaccatcgaccgctagatgagacttaatcttcttataatatgtattttttgataatatattatcggttagtactgataagactaagaacaaattctaagtggacagatacccatttccatgagccttgccattgcttcttgttttccggactaaaatgttgtacaactattttctgctgtagaattaattttgcaacttttatgattgaaatctaggattgtatatctaaactacttcatggaatccgcggaaatcatatgaaatcagcagtggttaataagaatttatcttcgtactcgacttacatgatattaactattggacatatatataatggtacctaatttttaatttttgttttttctttttcacagaattcttgcctgataaatttcatcaaaccaaagactattcccggtttttgaaaatgagttactttatgacttttgcgcgcggattaaaactcaaagtcactagagtttactcaattttctaaaatccaggttgaactaattaactgcgtgtggataccgattaacttacttgttaatataaaaaaaaattcgtaaaagggaccatcgtatgtttatatgtgtgtgtggagagagagatgcacccaacgcacgtccataagatgcatgtagtttataccaattaaaaaccaaaaaataaaaagattcatgtggctgtcaaaactctaatcgtttacaacacctctttccttatatatatcgacccaacatcacttactatattcattaaccttctgcttcatcaaaaagaaagagacacaaagagcgagagagggagagagatg

SEQ ID NO: 36685 - DNA, 3003 bp, Unknown
  misc_feature (1)..( 3003): 2750-1469P.txt file - cDNA_ID_3099238; gDNA_ID_2936570; Annot_ID_194760
ttctatcataggtgattgtagagattcatcagattttatgtgattacgtggtcaatttagctactaggtgatataatataaactatagttttcacttgttttgatcaacatgttttgtttttttcccgacctttttagctattgtatttgtgtggtgatcagttatttctcttgcaagtaaagtagttttgtgattttgtgaaccgagttagggttaagagatggggtgatgttggatactaaaagttttaattttgacacttgaatgtttctgggttctgcatcaaaagagtgaagatgaggtcgcttcaagcaccggttgtttgccctagtgttcgtcccagacaattgggtgtctctgctttacttgtcaactgctctgtttcgaaaactaggagtctcagaaaacaattctggggtaaccagaccaaaaatgacaagtctcaggctgctacagtgaatcttcgtctgcatcttcggaggtataagagtatcaaatgtcttttcagctcgcactctgatggtaccggaagcacagcagagaatttcaacgagaacgatgaggattatgtcaagtctagtgtattggaagctggtaatcctggttaaatctgtatttataccattagttctctctattcttcttgtgttttgattctaatcatcgatgttctcttgttggttttgtatataagttgaggtaaaaagtggaccagatggtttcatggtgaagatgaaggatgggaggcaacttcgatgtgtccacaataatcctcaaggagggaatcttccaaattatgctccacattctgcaattgtgctgaaaatggaagatggaactggtcttcttctccccattatcgtctgtatgtgatatcaaaactcattcttttgtttatgtgtgttgagatttccaatttgccttgtgttttgaatctcctttctttgttttttgtttattgcagtggagatgcctagtgtgttacttatggcagcaatgacaaatgttcaaatagtagggcttctgttattctttgcgttatgcttctgtttgaatcagtcaagagttgtgaagagagggtttatggattttttttggttactgcttgtaggcaaggcccactatgtatcaagtggtgaaggacatggtagacaaaatgggttatgaggtacgcctttcggtttttctgttttctctatcctgttattttccctttagcaatacaaattcttatgtgagtaacgttaccaaacaccaactttttctgcaggttaggcttgttagagttaccacaagagttcacgaggcatatttcgcagagttatacctttcaaaggtttgtaacttctggcatagaaatgcatcttccattcattttttcaaaaagttgtcccgaaactcgttatccattactagtatctcacttccatctgttttaaacttttactaaatctgctatgaatggaattgcaggtgggggataagtcggattgtgtcagcttcgatcttcgtccttctgatgcaattaatatagctgttagatgcaaggtatagttatattaccatatgctcaattctttcttttctaggggcacagtcacacagaggcctctccatgagatcatcttaaccggatacaaactacgtgatcactatgaaaaatggttttaatcctcactctttaggtacctattcaagtcaacaagtatctagcttatagtgatggaatgagagtcatcgattccggaaagctatcaaagcaaacacctgcttctgatggtttattgtttactgaactagaccggtaacgcttgtgaatttagtcatctgaaaccctttgctggcgaatttgaaaattacaaaacttaaaaacattatgttttccttgtgtaggccaaatggtcagccttgttttgatacaaaagagttcgatctagtaaggaacatgatgcaagctgttgatgaagaacggtatgatgaagccggtaagcttagtctctctcaccctccctatttggtagtgatcttggtcctgatcaactactagaattttcttaggttcttgtgtcaagaagaaccaatgttgaatatcttgtttggttttgcttttgtagctgagtggagagacaagcttggcaagtttcaggcaaaacgcaaattaaggaaatacacatgacaggtataatttcttttaacggctcatccaatccaatggactatacacaaaaacaaaatgagtaagttttgctctgttttttcttaatgcagctcgcagacgggagtgtttttaatacataatttatgtaaataataaagaagccattgccatttgccagaagttgtgatcatgaagaaaaatatctctctcgtatgagatatacttttctctatcgacacttgtgcacgtagttgattctcaaggaacggacaaaataaaaatgttattttataattgtagcgtgatggtgatgtgatgtgtacatatacattaatcttctgtaataatatatggtaagcctacgctttctcaattacatttgtctatagttactgtcacttgtccttaccacattatataaacaaactacataattcattagaaagtcatagaagaaaataaaataaaaactcctctaattgtctctgaactagaaaaaccgaattaacgtgtgacgtaataactggaagcgagttcccgccaagagcgttcacatgataactaaccgccacgtgtcttgatggcaataataagtaaccaaaaaaaacgaagaggcagacgaaaaaaaaaaagtcgaatcttcaacatttatggctctgattttccggccgccgtgaaaattagtagccaacatttatttcacattcgcataacgaaacgaatcaataaatcgctcacagttacttcttcatatacccctttccttcaatttcagtttcagattttccaaattctaaagtttcgatttttttggagtatcaagttcgattgattcttctcaatg

SEQ ID NO: 36686 - DNA, 3003 bp, Unknown
  misc_feature (1)..( 3003): 2750-1469P.txt file - cDNA_ID_3099243; gDNA_ID_2936570; Annot_ID_194759
catcgttttcgggaaacgaattaaattgtactccgaaaatgataaatgcatggagtaattgtataccaactaacttgtaataatttgaatcaacacatgctcttttgtttacgcagcccatgcatttatcgttttcgaaagtatttaattcattttgttataactacgatgagaagccgagagaaccacagaattataatgaatcggataagaaaaatcaacattctccccctataaatacaaaacaactagctaaagttcgaaggattcatacataaatcttcaacacaactctttaattatctagtttaatacaaatggcggcgatagaggacagtccaacgttttcctctgtggtaactccggcggcttttgagataggcagcctcccgacaaccgagataccggtggatccggtggaaaatgattcaacagcaccgccaaaaccggtgagaatcacctgtccaacagtcgccggaacttatcccgtcgttttattcttccatggcttttatcttcgcaactacttctactctgacgttcttaaccacatcgcttcgcatggttacattcttgtagccccacaggtacataatttaactatacaaaaaataattatgaatcatttaaaaggataacttacggtatgtaacatgtaacatgtaaaacaaaatgtacattaattgagattgattgttacgtgaaaagatataagttaattttatattcttgaatgacagttgtgcaaattattgccgccgggagggcaagtggaagtggacgatgctggaagtgtgataaactgggcatcggaaaacctcaaagctcacctaccaacttcggtaaatgctaatggaaaatacacctcactcgtgggccacagccgcggtgggaaaacggcgtttgcggttgcgctaggccatgccgcaacattagacccatccatcacgttttcagctctaataggaattgatccagtcgcaggaactaacaaatacattagaaccgatccgcatatcttaacgtataaaccggaatctttcgagctggacataccggttgcagtggtgggaaccggactcggaccgaagtggaacaacgtgatgccaccatgcgcaccaacggacttaaaccatgaggagttttacaaagagtgtaaggcgacgaaagcccatttcgtggctgcggattacggacatatggatatgttggacgatgatttgcccggttttgttgggtttatggccggttgtatgtgtaagaatgggcaaagaaaaaagtctgagatgaggagctttgtaggtggaattgtggttgcgtttctcaagtatagtttgtggggtgaaaaagcggagattcgattgattgtgaaggatccttccgtttctccggccaagcttgatccttcacctgagttggaagaagcttctggtatcttcgtctagatttgtgttatgtactattatcagaggggtcttgaatatttgaaaaacctatcaatgttttctagctccaagctagctattgttcatgtcctaagttgcatgtgtatttttattaaactcgatcaaaacatttgttatagttttaccccaaaactttacagcttcttcttatactaaaacctaaacacatttaaatagctatataattctctatataattcttatataatgaaatgtgaccaagcttttcaacttcgttgcaatgattcatgtaatttggtttaactccgtcacaaactctatatctttgtaacatacccttattcaaactttcttgttgtattctaaagttaatggtatttgtaacatatcgcaatttcgatcttattttcgtaaggagaaaggaaaaatttgctcctgcactacaacatttaatgagagctccaaactctacaaacaagtcaacaatgacaaattaatttgggcctgcactacgacaacgatacagcaaaatggagacaaaaccacatttaaggttttattgtaggcaaatggtcctaagattgtctgtatacgaaaggtgcgtcgtgagtctcgtgactcttgtgtatgtggtggttattttactctcgagttccacgtgtgtttgttataattgttagtatatacgaaagattgttagttataaccaccagctgacctgctgaagaaaggaattgagatgagccgaaaaggatcgagtcataaagcttggaccggtagatatttaaatgggcctaggcccatattggtcatttactttcaaagtagataaaacagtttcccacacatcccactaaagtcacatccaaacattacaaaaagaaaaaaagaaaaaaaccaccttatccataaccatccctgacacaggcgccgtacacgtggcgtccattaggcttaatttaatcggtgactgttacttgatgacttgtcagttttccacgagttaacggttcacgtcatcacggctagacactgaattctcatttttatcccttcaccacgaccattaatcaaatgcaagatattggtgaaagggtatattcgtcattgaaacaaacatgagtcgataaaattgacagagtcacagattctattttttcctctctctctgctctttgttgatctgtctgtgtgggattcttcctttagttcctctgttgatctatccaatcgaatcttacgaaaattttcggtaaagtttcactctttcttgtatttctatcataggtgattgtagagattcatcagattttatgtgattacgtggtcaatttagctactaggtgatataatataaactatagttttcacttgttttgatcaacatgttttgtttttttcccgacctttttagctattgtatttgtgtggtgatcagttatttctcttgcaagtaaagtagttttgtgattttgtgaaccgagttagggttaagagatggggtgatgttggatactaaaagttttaattttgacacttgaatgtttctgggttctgcatcaaaagagtgaagatg

SEQ ID NO: 36687 - DNA, 3003 bp, Unknown
  misc_feature (1)..( 3003): 2750-1469P.txt file - cDNA_ID_3099249; gDNA_ID_2936570; Annot_ID_194758
cacaccacaggactaaattccgctgatctgaatctttcctgtggagaattagggactctttagtaaagatagatttttagtttatccttttttgtttcttctgcattctacaaaatgacaagtttgtttcattggtacacatattttccccatgtgacatttaaacatggaataaaagtaaaaagggatacaaaatgtttaagggagcttttctctaatccaaagccagtcctattttatgtcatgttgcctgattaaggccctgaaatgcggaaaaagaagtgttagcagttgagaaacttaactttgtttagatggaaagtgaacatattgagtctcgtatggatattttacctcaacgcttgaaaaagaatgacttaatcttttattactatgtctggaccaaaagctcttcttcgaggtagaatccctggctttactccacttggtgctgacggaaccgaagtgccatttcataaaagacttagacgtggagcctttggtattcgaactaggatccatcttcagaccttttccttctcgtttccctagattctggaacataagatcctcacattcactgcggacataactatctaccacacggttcttacaccttttgtaactcgttgccttcaattctgcctcggcttttagagctttcctcgataatttagtaacctgtgtctctgtgcatatgggacacgtaggatcatacttctctgtttcatttgtcattgtctctaagcatgccgcatggtaaacatggccgcacgctagaacagcaggaattggaaggtcaaacctggcaactggagacctttcagttaaaagctttgagcaacgcccacaagtctgctgatcaacagaaggggagcatgagaatctgctactactacacccacttagtcttcgtcgtccggaacctaagtgctcattatcaaaagaccatctctccctttgagactgagccacgagctcacaaaaggcgtttatggaccagccaccttcagaagaagcaaaatgggacccagtggcagtgtcattactacaggtcgaaagcacaaaggacgaccttccttcagatgttgagtaattattgggagatttcaatcccaaagtttgactatcagaaacctgcctaaacaactgctgcccaggtgaacctcgagcacgtctagacggagttgatctgggaggaagtgaatgtgtgtgagctgaaggaagatcagagaccgaggtggaacttgacggatttggtaaaactgatgaaacaatatctgatgagtcaactatattcttcacctgaagaattaaaagacgagagggttaagagactctgaagggacgaaaagagactctgattggagtaagtaatgatctcacctcaacacgaacaggacttgccaaggatacatctgcccagagaaaatagatgcatgagagacaggaaaaaaatccttcattacagtaagaaaataaagctgaaatgatctctaccaaaaaatgaaatgtctctcgatctaatcctaccaaataaatgttgttacccctttgactggattgagtagactggaaaagaacatccacgaaggaactaaaatcgactcaacagtatattcccaaacaatgaaactgaaagttctacactttccccacaaaaaaagtgtttgaacgaacatacctgaaggagatcgaatcgccaaacttgtacccgctaaaggagctgtaaccatcgaagctgtgcccatctctgagtctgcggatttctgagagccaagagtagctaaacccccagtttcagatgacggaggtcctctctctaagcctaacgacaacttatcgatgtcaatacctctactcccaacattatgattagatgaatctttaatctcatcagctacacgcctcctgttgtcccgtcgaaaactccacgatggtgaacacactgaattatcaatagctccactgggaacatttctgtcctttgcagccacacagcaaacagaccccataatccttaaaagagagctgtaatgaatatgtcttacacaatctccattggtggtgcttcctaatctaccactgaagaacttatcacagtagcaaaccacaattctgcatataaacaaacagaatgtgaacttcgaatcagagccattataatacatagaggtgaaggcagagacctcaaaatctaacgcagaaatcatcaatggaacggaattaaagtaaatacaatagatgattctaaaatccgggggttcaccagggactcaccagagcaactagggttccgcaggattgaaacgaggtatatgaagatgcggcggaattcgaatccaacggctgagagagatttcaattactcgacggagatggccgccgatctgagagagagagagacggaggttgggtgcgtcgcagggaaattgtgccacgtcacccttcctctcttctttttctgttctctgtttttcttgtgctactatttgtttttggtcaaattttacttttttggtcaatttgtttcttttttttttacataacaattttttttttttttttactgaacaaacataacaaaatgttttttttaacaaacataacaatatgtttcctaatgcaatttgattatattttttagtagtacttagtaagtcttggtatgtgtttatggacacatcgttttcgggaaacgaattaaattgtactccgaaaatgataaatgcatggagtaattgtataccaactaacttgtaataatttgaatcaacacatgctcttttgtttacgcagcccatgcatttatcgttttcgaaagtatttaattcattttgttataactacgatgagaagccgagagaaccacagaattataatgaatcggataagaaaaatcaacattctccccctataaatacaaaacaactagctaaagttcgaaggattcatacataaatcttcaacacaactctttaattatctagtttaatacaaatg

SEQ ID NO: 36688 - DNA, 3000 bp, Unknown
  misc_feature (1)..( 3000): 2750-1469P.txt file - cDNA_ID_3099251; gDNA_ID_2936570; Annot_ID_194757
tataccctttcaccaatatcttgcatttgattaatggtcgtggtgaagggataaaaatgagaattcagtgtctagccgtgatgacgtgaaccgttaactcgtggaaaactgacaagtcatcaagtaacagtcaccgattaaattaagcctaatggacgccacgtgtacggcgcctgtgtcagggatggttatggataaggtggtttttttctttttttctttttgtaatgtttggatgtgactttagtgggatgtgtgggaaactgttttatctactttgaaagtaaatgaccaatatgggcctaggcccatttaaatatctaccggtccaagctttatgactcgatccttttcggctcatctcaattcctttcttcagcaggtcagctggtggttataactaacaatctttcgtatatactaacaattataacaaacacacgtggaactcgagagtaaaataaccaccacatacacaagagtcacgagactcacgacgcacctttcgtatacagacaatcttaggaccatttgcctacaataaaaccttaaatgtggttttgtctccattttgctgtatcgttgtcgtagtgcaggcccaaattaatttgtcattgttgacttgtttgtagagtttggagctctcattaaatgttgtagtgcaggagcaaatttttcctttctccttacgaaaataagatcgaaattgcgatatgttacaaataccattaactttagaatacaacaagaaagtttgaataagggtatgttacaaagatatagagtttgtgacggagttaaaccaaattacatgaatcattgcaacgaagttgaaaagcttggtcacatttcattatataagaattatatagagaattatatagctatttaaatgtgtttaggttttagtataagaagaagctgtaaagttttggggtaaaactataacaaatgttttgatcgagtttaataaaaatacacatgcaacttaggacatgaacaatagctagcttggagctagaaaacattgataggtttttcaaatattcaagacccctctgataatagtacataacacaaatctagacgaagataccagaagcttcttccaactcaggtgaaggatcaagcttggccggagaaacggaaggatccttcacaatcaatcgaatctccgctttttcaccccacaaactatacttgagaaacgcaaccacaattccacctacaaagctcctcatctcagacttttttctttgcccattcttacacatacaaccggccataaacccaacaaaaccgggcaaatcatcgtccaacatatccatatgtccgtaatccgcagccacgaaatgggctttcgtcgccttacactctttgtaaaactcctcatggtttaagtccgttggtgcgcatggtggcatcacgttgttccacttcggtccgagtccggttcccaccactgcaaccggtatgtccagctcgaaagattccggtttatacgttaagatatgcggatcggttctaatgtatttgttagttcctgcgactggatcaattcctattagagctgaaaacgtgatggatgggtctaatgttgcggcatggcctagcgcaaccgcaaacgccgttttcccaccgcggctgtggcccacgagtgaggtgtattttccattagcatttaccgaagttggtaggtgagctttgaggttttccgatgcccagtttatcacacttccagcatcgtccacttccacttgccctcccggcggcaataatttgcacaactgtcattcaagaatataaaattaacttatatcttttcacgtaacaatcaatctcaattaatgtacattttgttttacatgttacatgttacataccgtaagttatccttttaaatgattcataattattttttgtatagttaaattatgtacctgtggggctacaagaatgtaaccatgcgaagcgatgtggttaagaacgtcagagtagaagtagttgcgaagataaaagccatggaagaataaaacgacgggataagttccggcgactgttggacaggtgattctcaccggttttggcggtgctgttgaatcattttccaccggatccaccggtatctcggttgtcgggaggctgcctatctcaaaagccgccggagttaccacagaggaaaacgttggactgtcctctatcgccgccatttgtattaaactagataattaaagagttgtgttgaagatttatgtatgaatccttcgaactttagctagttgttttgtatttatagggggagaatgttgatttttcttatccgattcattataattctgtggttctctcggcttctcatcgtagttataacaaaatgaattaaatactttcgaaaacgataaatgcatgggctgcgtaaacaaaagagcatgtgttgattcaaattattacaagttagttggtatacaattactccatgcatttatcattttcggagtacaatttaattcgtttcccgaaaacgatgtgtccataaacacataccaagacttactaagtactactaaaaaatataatcaaattgcattaggaaacatattgttatgtttgttaaaaaaaacattttgttatgtttgttcagtaaaaaaaaaaaaaaaattgttatgtaaaaaaaaaagaaacaaattgaccaaaaaagtaaaatttgaccaaaaacaaatagtagcacaagaaaaacagagaacagaaaaagaagagaggaagggtgacgtggcacaatttccctgcgacgcacccaacctccgtctctctctctctcagatcggcggccatctccgtcgagtaattgaaatctctctcagccgttggattcgaattccgccgcatcttcatatacctcgtttcaatcctgcggaaccctagttgctctggtgagtccctggtgaacccccggattttagaatcatctattgtatttactttaattccgttccattgatg

SEQ ID NO: 36689 - DNA, 3000 bp, Unknown
  misc_feature (1)..( 3000): 2750-1469P.txt file - cDNA_ID_3099266; gDNA_ID_2936570; Annot_ID_194754
agatcctgcaaaaaaataagaggaagaagagtcgtgtaaggtgtggaattttaaaaatttctgatggaatctaagagaggttaaaacatcgtaatcatttcacaccaaaccattttttttatatatcatacataaacagtttcgaaagcaacaaacagaatcggaccaaattattcggaggattaaagtcaaattcttgataaaaagcaaatgtttttcgtgaagaactgaagaaacccagaaaaacccaatacaggaattgtgtaatcgtagaggaatacccgatctatggaggtgaaattgagaggagaaaaaaaccctaatttgaggttggaaaaaaaaatgcagagtaaaaagaaattgtgtagctcaacgtagtgagtcaaaagcagagaagattcaattattacataaagaagtaaagtgtcttgatgatttcatctcttgtaggagaatttccaaaaagcaagggagaaaaaaaacacagaaagtatacaaaaaataataatcaagaaacacagtacaagattaatcatatcaagaatcaagaatcaagaacttgaatttttaaaaactacctgagggagagaatcaaagttaaaaggaagaaaaaaaacctagagattgtgtttgtgagtgtggatgtggctgaatcaggaaacacaaaagcagaagagtttcgaacagttgaagacaaaaaaagatttgagacccaatcccgagagagatagagaaagaggcgattaataattgcaaaattcttaaataaacaaatttttttcagtccacaagaacaataaaaccaacccaacttatcattgggacattagacaccaacccaatttttaaaaatattattatgcaatatcaacaataaaataaaataatgatcactaccggaaaaatttgacaaccgctacctgtaatttttaattttttgcggcagaagcttctgtttctgatgcttagagtaaagataaattaatatgattttttttgtgtgccaaccattcatagagaaacacgtgagagcttacaaatcaccaattttcttttcttgattacgtgataatatttcttatgacgactttaacatacaaaacttaacaattccacacacacaaataaatggatttttatagatgattgtattatactttaatgatgttgtgttgtcattgacttgagactcatactacttttccgtataagttaactaaatacaaccaaaagaaaaaagttgaaggaatgagtgtttatatatgaaaagtttagtatttgtatattaaaaaaaaaaaccaaatctaactatttaaacgaaataatctataatgcgtacattaccatggtatcgtgggaaacttttaacgacttcctgatttgtgtacgtgaggctccaaaatagtgaaattattacctgccacaaattatagagtctagatttggatttcaaactaaaatgtttttttaaactatttgttcttatcaccttgctttcatcataaagttaaagttcgatacatttttaatagaacttcttgagcactttgtagttcaatatctttgaggttttctttaaatgtttgatataacggatatacttttagttatgcatggtagcggaaattaaactccatcaaataaaacatagaaacgtcattataggtaggaatatgagattacaaaactgaccctgataagctggtttaaggaagaagataaaacaaaggtgggtgtgtgtctgctcaattgcttaattgatggattaaatgacttaacaaccagttggtgagtccctccttactcttctgttatacccaatttttattctaagttctcttgtctttttatttcttttgttataaaccttttagttatacacttacatgtttgtatttgcatattccacaatgaagaatacgtaaaagattatctttatagctacactaataatataatccatttcctctgatttttaaaataacaagtagtttcgttttggtttgttggagattggatttagagcagccgacacaaaatcatttggcaagtaccattgtgttggaaaattattattcatgtgttttgagtctttgagagatgatgatattgacttttgtttccacgtggatcttgatttataatgatgattaaaaataaattaattaggcagttagctggtgagagattgattaaatctactaaaaatttagattattaatgatgtaattatttttaaaaccgtatggttctgtaaatcatattttaaagttgaggatgaatcgatgatgctaaacgaggaaaatgtgtgtgagtaagaaatgaacaacctttggtttggaggaaaatgttgaagtataataattcttgccaattgtcaaatatattaattacatggatatatccgaaaaaaaactttataataaatagccacaagttatggccgtgtaacaaaaagtaaaagaatttattgccacatacattgttggaccatatatgaagacggatcatcaccactaaaattcatgtttgtaacatttatattctatggatcgaaatcattatgctctccattattagaaccaaacaaaaccaaaccaaaattgtatcagcaaaactaatctgaagcctagcttagcttaagaaaaaaaaagaattaaaaccatatagtatgcattaactatcatcataactagtttagttttaggcttttagcaaataggccttttaaagcccattataaatatgaagagaggattccatcgggggcctgctgagaaacggcaatcaacttccttctaaataacaaaaacggcgtgaattgcaaacttctgcaaagagtcaacactgattagcggcttttccccattaaatctctcctctaaacttcttcgttccaagctttctccatcactgacgacagatccttagaaagttctgagatcgattgttactgtgtaaaccctaggatgtgattctaagctgtagagagaaacaatg

SEQ ID NO: 36690 - DNA, 3003 bp, Unknown
  misc_feature (1)..( 3003): 2750-1469P.txt file - cDNA_ID_3099271; gDNA_ID_2936570; Annot_ID_194753
tactagtgcaatcaagtaaaacccttttcttgatcaatcctactactgtatataatcctatgaacatagaggcaatccagagtctggcattgatccgaataagcaaaagagagcatcttgagaggctttcaatgtaaatgccaactcgagccgcttcgtattaagaacaacacttgaatcactagagtaatcttttatcatagaggcaatcaagtaaaaacccatttcttgatcaatccaaacgatcctatgaaacacatctccactatctattacctaagtttctgaaactttacacattgatcaaatataatgtatccaataataactgaaaacaccgaaacggagaccagaagaaatatctaaataccgattaaactatggctgcgatgggaacacatctttcacagcagaagctgccgtcaaataattgagtgtattcctcagcgtctccctctctctctttaacctagccgccgtatcttcaagctccagtaacgcttgctgctccatcggagctccttcaaacgtgcttccgacgaagaacgagaacggagtcggaaactgattcttcctcagatcctgagattccttatctggtttcccattcaatctattcgacaatcgaatcacttctttcatcagaacctcaacttcattcgccaattcgtccagattctcttcaccggacggtcgatcttcaagccacgtcactttcgcgacgaggtaaggtttcgtacggacgagatcggtgactcggaatcgttcctgacctttacagattaagaagaatcgatcgtcgactagacgctcgtgtttcacgatttctccgacgcatccgattccagctgcggagcctgaaacagcgtcggagtagacaacgccgaatctgagatcggattggagaagcgtttgcatcatgactcggtaacgaaactcgaagatctgaagcgggattgttgcgcctgggaagagaacgagaggtagtggaaatagaggaagctcgactaagtcatctgatttgggtggattcgcgttgttgtggtgtttctcggagaaggaagaggatgagcaacggaaggagaggagtttacagcttcgacggttgatgctccggtaagtagctggaagatgtagaggtttagggttgaaggcggagagataaggtggagttgatttgaaggaaggagatgagacagtgcttggaagcgccattagagagagtgaaggaggagaggtttcacaagtgaacggcgaaattgatttaagattttaattgtttcgtctttaaaattaaaccttatctgtttgagaaaatatatttcatcagatatttttatttcataattcctgtggctagaaatttgtttagaatagaaataaaaatatatacgagccatttggttcgtgtgtaagtgtgtagtacatgcatttgagacaccggtccacttggatatcatttcgtagtaaccatgaatttgcaggggtaattgtgtcaatatctcttggtcatatataggttacaaagatgaacggaagaaagaaaaaaaggtgatcggagattttggcttattctcagatttgggagaaatggcggcagaagagggtcaagtgattggttgtcacacgaacgatgtatggactgtgcaacttgataaagccaaagaatccaacaagctggtctcgattctcacccctttgttatgcaattctctttggttgtattggatttgggaattaggtttttgtttgattagggttactgtttctagtgtcaaagaaagcattatggtttcacatgttatggtataggttttgattccggctaacgtagagttggaataaacggattgttaaggagatcacaacattagatgtgagggcaagtgaatcatcagtgaaacttacgttttgatgtgtaaacttttagagtattttctttaattgattcatctttgtgacttttgttgtgttcctcttttccttattgtagctcagagtcacccctctggtaaaaaaaatcattttggattgggttatttaggattctgatggtgtgataatttcattgttttcagattgtgattgatttcactgcttcatggtgtccaccatgccgcatgattgctccaattttcaacgatttggccaagaagttcatgtcaagtgccatcttcttcaaggtggatgttgatgaacttcaggtgaacaaatacactttctttacaaacaaattaatctcctcactcttagactttagaattacactgatatattctatatacttgtgatgatgtttaacagagtgttgctaaagagtttggtgtggaggcaatgccaacctttgtgttcattaaagccggcgaagttgtggataagctcgttggtgcgaataaagaagatcttcaggcgaaaatagtgaagcatactggtgttacaactgcgtaaatcagtttgaggcataaataataaggtctaatttgtttatcttaaactagctagacataacgggaatagtgcagattggagatgaagtagaagttattgatctctgactgtcataaaaccatgctttttttatatggtctttggcttttgcctaattcatatgtttaggtgttctttctatacctccatagaccaccactcagtcgaattttcagatcagtgaaatagactcttgtgaatgaattgttccatgcatatcataatttgaatatctgaaatctgaggccttgcaaaggtgtaaaataattttgtgcgagcagctgtttccacgtgttataatttgattggaagttgaaattcttatccaccaaacgtttcatattttgttgccaacgaacccattaccgaggttcttcgtgctttcttatcttctttcttcttcgctgagcttactctgtaatcttgtgaactctcgttgataattcaaagaggaaacggagataaaggagaaaactttagagcgtgttcaagttaataacagttctgtcgataatg

SEQ ID NO: 36691 - DNA, 3000 bp, Unknown
  misc_feature (1)..( 3000): 2750-1469P.txt file - cDNA_ID_3099298; gDNA_ID_2936572; Annot_ID_194790
tttgtttaatataggacaaaattataaaactaaagaatagttttgaggctaatttgaatatttcctaaagatatgaactatttttggcaattttggaaatcacgagatttttatgaccgacgaacccataaaagaccaccagttcgacaacggcggcgacgaggctgagataacagacgcggcgaagaggtcccttccgattaaaagtcgcaagcattcaacgatggcttccatcacgaattatgtccgatacatggctcacaagctcgagtactctctcactctcagccttaaggttcttataatgctctctctctctctctctttcactctgtgacgcacagcttgtgttaagctttcagttccttaccttttgcttatctggttgtatggaaatttaactttctgatttctctctttgtaatttatgaaattggctttaggaatggttaaattggctagggtttctgatatgttcccctcatccaattatgattttgcttgaatacgtagctttagaaaattgcctccataaaacgccatttatcaagaaaatttgcttctttcgagctatgcatttggataaactaaatctttatgcttttagttagggaatgattgtaagtaccacttataataaaagggcatactttgaaattaaaaacaagaaaaaggaacaaactttatgctaagggatcagtagtttggttgacatgatcttcaatagcttgtgattcttgaatttattttaaaacaagttatacggtcaaatcattgctattgaatttgtgatagtacttctatcatattagtttcacttgtgactatgatctcaagatctttctttcagatgatctgattaaatctaatgactcaaaaaaagcgactatgatctcaagatctttctttcagatgatctgattaaatccaatgactcaaaaaaagccgtcatgattgttctggtccttgttgtttcttctgctgcagatacttttttttttctttctgaatccatttttttcagctcacttagttgtttaaaactgtcatgtagaatctgtcttttttttaaaaaaaaaaaaatttaaacacgttgtaaaatctgtttttagttaccatgcttgagttactctatttgcagaaacatactagagagaagctcagtgaccgggaactctttggtgtagtcatgaagaatctattctatggaagaataagctacttacactcggacaaaggaaaagagatggccccaaccatgggaacaaatgaaagcacgctacttgtccgtaagctaccagttgttgatacaaggtatgtttcttggcattaagggttagtccttttagttccacttacataaacaagttaccacttggtgttctatgaaatgttgctccgtatgctagttatctagtggggatatgggatcatgtttatctttctgaagtcataaacgttggattatttgtgtttcctttcttgtgtaggagctgtacttaatttccattagctaaagtcatgggcttttacattattttttatttcttatcttgcatttggaagttgtaacttgtatgtagtgtaggagaaagaggaaatcgaggattaaaatgtttgcaaaaagttataacaatgcttgttgttttgcttatgataaaatgtgtagtgggtgtatatgtatatgtcttcttactttgacagaatgaattggacagaattgagttggttggaacagacaagtatatttaactccgatgagctcattgaaaatgtaaattcttggtttcagctttttaatgtatccaataatcagtctaaaccctagctcgcagccttttctaggttcagtgtgtatatcattagtgatgctcatcaggatttcttgctttgttatctaggtacattttcgtaggggatgctgttgtcttgaaggacccgaatgaaacaaataagtatatagtcagaagactagcagctttagagggatctgaaatggtatcaagtgatgagaaagatgagccttttgttctcgaaaaggatcagtgctgggtcgttgctgagaatcaagagatgaaatctaaagtacaccacttactttctcccttacataattacttatccatgtagcgcttacataagagaaactaaatctatgtatactttggtatgtattaataaggaagcatatgatagtcgaacatttggtccaatttcaatggcggacatagtgggaagagctatatattgtctgaggacagcagtggatcatggtccagtaagcaacaggtaagagaagatttctattgtcccctatcagctttatctttctgtcattcttttattactgaggaaaaacaaatcctggaaaatgttgcttttatcagtgaatttgccatggacgaggattccccaatcctggcggtagaacttgacgtggatgaattggctaaaggccacaaggcgtcataatgaagaacctttcttgtaccacattttcattcactgtgtcgatgtttcacttataaactccaatttagttgtcattggaggtgtttgtggcaaatgttggcccgttggtacttaagcttaatacgtcggatgctgttgagtgttgacttgaggaaaaggttcttcatgagcttcatcctctctataataaacaaccatttctatagagaatccaccccatggttttaaaccgaaccggggaagactgtaccgttaatattaatatgaaattgatttctgaattcggtttggaagagttgtaaccgagattagaccgaatatagattattggtttgcgttagggcaatcgcttctgaaatgtcacggtttattttatgttttgtcggcaatttcacaaagcccataaagcccaatatcaacatttttgtgttaccaagataagccagagaaaacgcgagagtcgacaaggaaaaggcaatgcaagaagaagcttaaatctctcttctctgctcctgaagtctgttcatg

SEQ ID NO: 36692 - DNA, 3003 bp, Unknown
  misc_feature (1)..( 3003): 2750-1469P.txt file - cDNA_ID_3099307; gDNA_ID_2936572; Annot_ID_194803
taaccccttaaaaggttcttattttagtggcaaaaatatattttctgcaaaccgggagtttggggaaatcatataaagtcatacctgaatgcgtttaagacaggttcaagctaatcccaggaggaataatccggtaatgggagagtgagctgggaagaacgagattttgcttcacagaggaatatcatcgaacgactggacggcaagatgtgaagaactcaaatgaatagacgatgacttgaggtttagtaaatcggatcaaagtgagtaatacgaaacacccatgagctttgatcgaatacgtttgttcacagatttgatatgtagcagaatggtgtgattaggaaagaaggaatcttgcgttttgattctatcagcctctgttgggctttgaggttttaaaacctaaccggatatattcaaagggtttacgtttaaccggaatttggtcggttcagccacaaaaatttcagatttggacctaggaatagttaacaaattttaatcctataaaattcaggagacgtgtgaaaaaaatgtcaaatgtaaatatgtaacatgcaccaattagtaattacagaactctgtttttggtctaacaccattgatttgtccattacattatgcatacaaaaagaaaaacctaggtctacatagttcagagtgaaaaaaaaactttgatctaatcttcaaatttcatagccaattccaaattatagcgtatacttaattatgtgattttactttcgcaagatggccgtaaaatatgactgaattaccgcacaaggttttactcccgaagatacaccacgaattgcaagaaacaattaaaaattatagttacttagatataaacattataattactttttttttttttttttccgtcaaacattatagttacttagagtgggagatagtgttgtttgaaaccattattaatcactgcataacattgttgcctttgatcgtgctttagattttcccaaccaccttgcacattccttgatgcatatccaccgttgacaatctcccgattcacaccaacaccattgttgttaacactaaaccctcctgatccactcgaattcgtcatcgctaatccgttcttgttgttactattattgttaaatacgcgttgattattatcccaaccaatgagaggctggttatgaaccaagcttttgtataacttgagctcttcacaaatcctcctatactctccataggagccaaggaccggatctttctgtctccatagagcttcccatgttaaagaatcagagagcttggtacggtcctcttcacgtaccgtccgtaccattttttgtacgttactgacaccgaagaccttgtgcacggcctgaaactctttagtcttgcgggctgggaaatacggcgataagatacattcgttgttgcatttcttcctttgatgtttgcatgaagcacaagcttgatgcgacgatgagttattggagatgttactggtgatgctggtgttgttagagttcctttgcatcatgtcatgtccctagtaacggaaacttgaaattttaatacaaatataaatgttagggatcgataaggtttgaagcatcgatatatataaaatttccacacaccgtatgtatattcacaattgacaaggaaataagaaggaaacagatatataactcagagaagaacaaagttttgaacataatgtcaagaagggtcatatacaaacctcttgcctcttttattttccttcatttgtgggttaatagcaattggagatatggatttatattaataataagggatattggtagatgattattatttattatatgttatttttggaaaaaaataaagaagaatattaatggtgcacaaagagtttgtctaatgaacatgaaaagattgtttggtttgatgaaagaaaaaggtgtttggatgaagggtcgataatgatttatgagttttaggttgcccatgaaaaaggacaataacaactaggaaatcaataaacaaaacgaaattttgctttacatatttgatttttgttttttataattataatgggaaaatatgattccaagcattttggatgaaaatgtgtggaatgtaaagaataatactagtagtatgttagatattaatataatttgttggtggcttccatatttaagagtttttatgtaggcataacatggaaagaatgattacaattgcctcttcttcttcttatttttcctcttcttgcatcttagttatgtattacagtgagtaaccgagtataaaaggggaacgaagtatataatgtgtaggaagatgttttgtggagagatcttgttcatagaatttggcatatacaactagattctcgtgatatctttctattattatgtaatgcatttcccgtgttcaatacgtgatagtgatatgcaagatccatgcatggtaatatttacgtaatttttttatatataaaaagtatgacgacatataccgatgaatataaaaaatcttaaaattttaacatgtaccaacttaattaagcaatcgatgtctcggaaacttataagaaaatattgtgtggacactaggtttacaacagttgatacaatagtgcaccggtctgagagatgatcaaaaatcaaaatcacttttaatttcttggttcttttgtagttgaccggtcggttagaaattttttaaaccaaaagaaggttgacggatagatgaataataaacggctgagattgaacggcgataaggataacgaccttatcccaactaaaatcccttcgtacttccctaggagaggagtttcatggtctcgttaccaaattggttttaattagttttctcaaagggtatttatgtaatctcaccaccgttactaattttataaaattaaggaaactatcgttgaaacttcttcatcttccttaaaacaaccacaacgtcactttcttcccggataattgaaatcggtgatcggaatccctagaaatg

SEQ ID NO: 36693 - DNA, 3003 bp, Unknown
  misc_feature (1)..( 3003): 2750-1469P.txt file - cDNA_ID_3099316; gDNA_ID_2936572; Annot_ID_194800
catcatccatttgaagcatccctttgtttgccagacacctccaggtacttggcactaagtactcgtcctttagagcatccaatcctttattgaccaacgaaatatcccggccaatctccagcttgaataccccgtctgtatcttgcatccctgccatgccgtgcaggtatatctccaggttatggtagttcctgaagttcagagaccgtttcaggtatgttgagttcaaagtattgatctctaacacctcgccaatttctgagtacagtaagagtggataatgtggtgcgacatctggaacatttactattcttagaatgtttagtggttggagtgagtcgactacgtttttgaagttatggtctccaatccgaggactcccgaaagcaaaaactgtgataggaacttgctttttttgaagatttatattgatattattctttttgccatagacaagatctgcagctgatagaactgacataactgcgcccaagctatggcctgtgaaggtgatgcttatttcttcatccttgtaaagttctagcaacctcttgagctctccttgtacctaaaaccaaaaccaagacacgatgccattaggagaaagaaggagaaatggaagtagtgttgttgacgttgtaatgggtcgccccgccacgttttgagctcaacccatttcggccttgataacttgaacctgtcactgaagtgaatgcgatgataaaagagaaaggtgaggacctgttcttgtgcactagtcgtgtcataaggtgagcgagaatcagaagcggtatagatgtcgagccagccacttccaatacgagggttatctttggggtcagttactgggaaaaccgagatagctggctcaagcggaaaatcgaaatcattagcccattcatatggctgtagagttcctctccatgcaacaacaatgtctctcctccctaacatcgcttttccctggtctgtagcaaccgcaatgtaacccatccagttagtctgcacgcgagatgcatcctttgacaaagactttacgatgaaagagattggtaactttatggaagctgttgcgtagatgtacttagtcactttgtacctgaaaatctatcatgggtaagcttacatcgtcgaatcaaagatgaaacattgtgggagtatggtacctgaaagggttggctttaaggaagccggttcgagctaacagtcggttcttggagtaataacaatcaccggcgtatctggacttacggtcccagttaaaggcatcgtaaccaacctgagacatctcgccgtagtgaatgatgtagcggcgaagatccgggtcaagtggatcaagcaggcctttccatttgttttggccacttagcaccttccatctctttggtatgccctccaccatgtttgcctttgtttttttttcacaaacctttttcttcttgttcttgatgtttggagagtaacattgctccttgtgtgaaagaattggataatgcgtgaaggaaatggtccttaatgtatggcccttcacataaatagtgccggtttaagtttattttaagtgtacgtttattacaaatttgtaggattcacatcactttttttaacggttaatcaacgcttaaaacatgtactattgttagttacatcgaaattaaattaattaaagactatttcctctatagcctgtctaattttattcggctaaaccaaaccggaaacatctatccagaaccgaagcaggggcttatacttagcgaccagcgttgttaaggtgcaattgagtacttgaccggtgagtttcaatgtattcatgttctctgctctgcctcattcttgaagattccattatctttcatcaatggtttggaacctgaaactaaatttctcaaaaagagttgtcaccatcaagtaagactggttcgctcgccagagcatgttgtctaatatctggatctttcctgcaaacagaatcagccaccccttatgaccattgtcttcattttccgacattcctctctgtagataaacctttctggcactgcttcagaatcatctgaacattcttttgcaaaatcagacagtcatgattcaggagtttttgaacatggggacttgtgacctcggaaagctcttcttctcatctgtaatggactgattagaccgcctcagagaagttaacaggttataaagatccgcatgacaaagcaagcatcatccttggttcagttttctagctgaacaatacccatggcttctttccatattcatgatttcttttcaaagcatattcatgtaataattagaaggggaggcaatggttttccataaacgaaagaggcttcagcaagcaagtcttgaaccacatctgaacaaagtttctcaacagggtttctgactgtaatgaacttgatcctaaacaaattttgcagtatcagaaaccaagagttaacaaactagaaacatcatagtacgaattacatgtgctactataaagtatgaagtacctggaagcctcaaatttctccagcacatgtttttccatagctcaagaaactgaatcttcttgggtcaaaaatttgtatttatttagaaatgacaaagaaagaaggactcaagaattgtcaacaccaaagtttacaatggaaggatcaacaatcttcagagaaagccaatcagcaccagttttacaacgagtacctttacctgcaaaatgtcaaaagaagagaaaatttcagttttcaagaccaaaaaaaaaatgacttctggagaaacaggcataacataaacacatatgtcagttgactaaaacaaactaaattatacgactctcttaaacttacgtttctgcatattgttaaggatgggacaggaggaaacttgtcccactggaactgcaacaaaacacaaaacctgtgaccaagaaagcagtacaggactgaagcttatataccagaaaccaaactcatttcccaaactccaacttttaaacaaacaaaaatg

SEQ ID NO: 36694 - DNA, 3000 bp, Unknown
  misc_feature (1)..( 3000): 2750-1469P.txt file - cDNA_ID_3099323; gDNA_ID_2936572; Annot_ID_194798
tatcaaacaggatgcttctaggagaaagtaccaatcgttcaagcgagcctcatgtgcttaggcaggtattatagaaaacacatgtttctcttataatcgcatcttgactttagaatcctgttaacgataacctgcctctcaattatctctagtactttattttacaatcgtaattattttagctgcgctattgcagatagtcatacagagagcattgttatccaaaaggaaaaggttctaacgcttatggagattcatggactcactgcaagggatagcttgccatcatagcaataccacatttacccgtgtcttcacttacaccacgctccatccgtatgtagccttcttcaccccagccagttccccatgaattctttacgatccagtacttttgatcgccttctactccatatccaacaacagtcactccatggttgagatttgttccacagtaatttgtgaaaacaccggaggagtagagctgaaagataaacccaccagcatcgattccaactgatactggctgttgagctgcagcgatttgtaggctcgcctcgttttgggctaccttttggtatccttgtatcgtaactaccttatttttggatttttcttggtcgcaggtaccctctatgcctgtgtatgggtagtcggtctccgtggcgagtccaccattggttttgatgaattcaaatgctgtttccattaatccgccactacagcctttgttgtaagtgccgacatcacaatctatgagttgttgttctgagagagacactaaattccctgttttaatcttgttgatgccttcaatagctgctactgcagagaatgcccagcaacctcctgcaacaagaaaaacaaaacgcaatcagaatgtcatcagttgaataatgaatgtttgcaaggttttatgtttagaatgaattatgtaaaaacataatttcataccgcattttccttgatttctgataggagtcacagcaccttgagtcctccagtccacagcgtccgggacattgcctgctgggtcacaaactggtctctgcttcttgtgtaacctcaaggaagacgtgttcaacccgagaaaatgggccttaaactcagaattggtcatatctgcaaatctattatccgttagcttaaagggcaagtggagggagttgatgtagtcaatcaactggacgttagactgatatatcccaaaccgtagcatccactcatcccttcctccatataatttgctgtgggttttaagccacttctcgaaccgctgcttcagggttttgtgtgggtcatacacagaggaatcgacggaacatagctttgaagctatcaagacaaagcaaatcaaaacggcaagggtcaggttagaatttcgaagtacattcagcatttttgtttgtttaaaagttggagtttgggaaatgagtttggtttctggtatataagcttcagtcctgtactgctttcttggtcacaggttttgtgttttgttgcagttccagtgggacaagtttcctcctgtcccatccttaacaatatgcagaaacgtaagtttaagagagtcgtataatttagtttgttttagtcaactgacatatgtgtttatgttatgcctgtttctccagaagtcattttttttttggtcttgaaaactgaaattttctcttcttttgacattttgcaggtaaaggtactcgttgtaaaactggtgctgattggctttctctgaagattgttgatccttccattgtaaactttggtgttgacaattcttgagtccttctttctttgtcatttctaaataaatacaaatttttgacccaagaagattcagtttcttgagctatggaaaaacatgtgctggagaaatttgaggcttccaggtacttcatactttatagtagcacatgtaattcgtactatgatgtttctagtttgttaactcttggtttctgatactgcaaaatttgtttaggatcaagttcattacagtcagaaaccctgttgagaaactttgttcagatgtggttcaagacttgcttgctgaagcctctttcgtttatggaaaaccattgcctccccttctaattattacatgaatatgctttgaaaagaaatcatgaatatggaaagaagccatgggtattgttcagctagaaaactgaaccaaggatgatgcttgctttgtcatgcggatctttataacctgttaacttctctgaggcggtctaatcagtccattacagatgagaagaagagctttccgaggtcacaagtccccatgttcaaaaactcctgaatcatgactgtctgattttgcaaaagaatgttcagatgattctgaagcagtgccagaaaggtttatctacagagaggaatgtcggaaaatgaagacaatggtcataaggggtggctgattctgtttgcaggaaagatccagatattagacaacatgctctggcgagcgaaccagtcttacttgatggtgacaactctttttgagaaatttagtttcaggttccaaaccattgatgaaagataatggaatcttcaagaatgaggcagagcagagaacatgaatacattgaaactcaccggtcaagtactcaattgcaccttaacaacgctggtcgctaagtataagcccctgcttcggttctggatagatgtttccggtttggtttagccgaataaaattagacaggctatagaggaaatagtctttaattaatttaatttcgatgtaactaacaatagtacatgttttaagcgttgattaaccgttaaaaaaagtgatgtgaatcctacaaatttgtaataaacgtacacttaaaataaacttaaaccggcactatttatgtgaagggccatacattaaggaccatttccttcacgcattatccaattctttcacacaaggagcaatgttactctccaaacatcaagaacaagaagaaaaaggtttgtgaaaaaaaaacaaaggcaaacatg

SEQ ID NO: 36695 - DNA, 3003 bp, Unknown
  misc_feature (1)..( 3003): 2750-1469P.txt file - cDNA_ID_3099342; gDNA_ID_2936572; Annot_ID_194793
cttcgttaaattaagcaaagtctgggaaaattgtgcagagaatatggacaaattgaagatagcagaatggggagagaagctgaagactggtggagctcagatgagcagaatggtgagtgagaaagtgaaagatatgcttcaagctccaaccttggaatccaaaatggtggatgaagctactttagagactttagaggagcctaattggggaatgaacatgaggatttgtgctcagattaacaacgatgagtttaacggcactgagattgttagagctatcaagaggaagatctcaggtaagagccctgtgagccaaaggctgagccttgagcttttagaggcttgtgctatgaattgcgagaaggttttctctgaagttgcttctgagaaagttcttgatgagatggtttggttaatcaagaacggagaagctgattccgagaacagaaagcgagcttttcagcttattagagcttggggacaatcccaagatcttacttatcttcctgttttccaccagacttatatggtaaatctctctgaatcttatttgcttattatgcaaagatggaattgttcatatgcctataatctccggcttgtcttttgtttcatagagcttggaaggcgaaaatggattacacgctcgaggtgaagagaattcaatgccgggacaaagttctctggagtctcttatgcaacggcctgttccagtgcctccacctggtagctatccggttcctaatcaagaacaggctcttggggacgatgatggtcttgactataactttgggaacttatcgataaaggataagaaagaacagattgagattacacggaacagcctcgaattgctctctagcatgttgaatactgaaggaaagccaaatcacacagaggtagttgctacgttgtctgctcatctaacttttgtcattttccttaacaaatgtctatggaatatggattgagttatgagtatctcctggtttacattattgtttccttggatatatgtgcttaaagtgaaattgacaggacagtgataagtaataggtttatatatattatggttacaggacgatctaacggttagcctgatggagaaatgcaagcaatcgcagccattgattcaaatgatcatagagagtacaacagacgacgagggagtcctgttcgaggctctgcatctgaatgatgagctccaacaagttttatctagttacaagaagcctgatgaaaccgaaaagaaagcctccattgtggaacaagaatcatcaggaagcaaagatactggtccgaaaccaacagaacaagaagaacaagagcctgtaaagaaaacgggtgctgatgatgacaaaaaacattcagaagcatcaggatcctccaacaaaaccgtcaaagaagagaagcaggccgtgaaaatagaactggggctttcgagtgatgaagatgaaaaataagcagtctgtgtttgttgtcttcttccgacatggatatcagaatgttgcgaagagttgttcttgatggtttacttttaaattataacaatgtacttccattataagtgtggaacctttttagcttcgtttctcactttctgttttaaagtggtttcttagacattgttaaaccgtaggtgaatcttcacccgaaacatttatacgaggtgttttggtttgcacttagcctattgcttatgtgttgagaggtgagtatctacatctcctctggattatataaatggcttgataaaattcacctcactctccgataaactcgctcgaaatgataaaacgaagtctaacctttaatgtgtttaatgtgtttagtcttctcaagtcaaataataatcggagtcttggtctcttggacgatgctacacagggatatttcaaaagtttacccttatcaccaactagagaacccaaattaggtcttgtaccgattgtagagtatatgtctatacgatacttctcactgtctcttggacgatgcttcacagtgatattccaaaagtttacccctgtcaccaacaaagccaaataagggcttgtaccgattgaagagtatatgatacttcccactacacttgagtaaagaactgtcttcatgtaatcattataaccatcttgttatgcttactatcttcttcaaatcgcagctttcaatctaaaatgaactcctaagtgacatacgactaattttgcttcatccatcgcaaaacgcaaacatcttttaaaacttttactgaattttttctgcagtaaacatagtgaacccggtttacgttctggtttagacgtttcaattttttctaaattgggccgattgacatataattggacccgacccatcaacatatcccacatcgttacaaatagatttcaattactataatttaatcaatatataccgactaaaactctctgtccgacgtagagtcttccaatcaaaacctaaatctaaatttttcattcccttgttccggcgataacagtctcagtggcgacaaaccctattgccgagccaactcgcattttcctctagctatcgcaacgcctctcgctctctctccccaccggttcgtcttctcactccttaactttgttcagcttgttgattctaccctaggttattgctctactccaacgcttctgctcgactctcgccttgttgtttttctttagtccaacttagcataagcttctgctcgattctctcctagggttttgctctagtctaattaccttaagtttctggttgattctagctttttcatggtgttctcttggacttggtgttgagcattagaggagattactcgccaatgggttaaataaaatatgttgcagaattgctatagtaaataacccagatagatctatcaaaagcttgattttgtggtaatgcactcatttgacttttttgccgttattgtttatctgctacaaaatcctgattgctcatgggattcttttttgacaggtttacataaagatg

SEQ ID NO: 36696 - DNA, 3003 bp, Unknown
  misc_feature (1)..( 3003): 2750-1469P.txt file - cDNA_ID_3099347; gDNA_ID_2936572; Annot_ID_194792
acagtgaatgaaaatgtggtacaagaaaggttcttcattatgacgccttgtggcctttagccaattcatccacgtcaagttctaccgccaggattggggaatcctcgtccatggcaaattcactgataaaagcaacattttccaggatttgtttttcctcagtaataaaagaatgacagaaagataaagctgataggggacaatagaaatcttctcttacctgttgcttactggaccatgatccactgctgtcctcagacaatatatagctcttcccactatgtccgccattgaaattggaccaaatgttcgactatcatatgcttccttattaatacataccaaagtatacatagatttagtttctcttatgtaagcgctacatggataagtaattatgtaagggagaaagtaagtggtgtactttagatttcatctcttgattctcagcaacgacccagcactgatccttttcgagaacaaaaggctcatctttctcatcacttgataccatttcagatccctctaaagctgctagtcttctgactatatacttatttgtttcattcgggtccttcaagacaacagcatcccctacgaaaatgtacctagataacaaagcaagaaatcctgatgagcatcactaatgatatacacactgaacctagaaaaggctgcgagctagggtttagactgattattggatacattaaaaagctgaaaccaagaatttacattttcaatgagctcatcggagttaaatatacttgtctgttccaaccaactcaattctgtccaattcattctgtcaaagtaagaagacatatacatatacacccactacacattttatcataagcaaaacaacaagcattgttataactttttgcaaacattttaatcctcgatttcctctttctcctacactacatacaagttacaacttccaaatgcaagataagaaataaaaaataatgtaaaagcccatgactttagctaatggaaattaagtacagctcctacacaagaaaggaaacacaaataatccaacgtttatgacttcagaaagataaacatgatcccatatccccactagataactagcatacggagcaacatttcatagaacaccaagtggtaacttgtttatgtaagtggaactaaaaggactaacccttaatgccaagaaacataccttgtatcaacaactggtagcttacggacaagtagcgtgctttcatttgttcccatggttggggccatctcttttcctttgtccgagtgtaagtagcttattcttccatagaatagattcttcatgactacaccaaagagttcccggtcactgagcttctctctagtatgtttctgcaaatagagtaactcaagcatggtaactaaaaacagattttacaacgtgtttaaatttttttttttttaaaaaaaagacagattctacatgacagttttaaacaactaagtgagctgaaaaaaatggattcagaaagaaaaaaaaaagtatctgcagcagaagaaacaacaaggaccagaacaatcatgacggctttttttgagtcattggatttaatcagatcatctgaaagaaagatcttgagatcatagtcgctttttttgagtcattagatttaatcagatcatctgaaagaaagatcttgagatcatagtcacaagtgaaactaatatgatagaagtactatcacaaattcaatagcaatgatttgaccgtataacttgttttaaaataaattcaagaatcacaagctattgaagatcatgtcaaccaaactactgatcccttagcataaagtttgttcctttttcttgtttttaatttcaaagtatgcccttttattataagtggtacttacaatcattccctaactaaaagcataaagatttagtttatccaaatgcatagctcgaaagaagcaaattttcttgataaatggcgttttatggaggcaattttctaaagctacgtattcaagcaaaatcataattggatgaggggaacatatcagaaaccctagccaatttaaccattcctaaagccaatttcataaattacaaagagagaaatcagaaagttaaatttccatacaaccagataagcaaaaggtaaggaactgaaagcttaacacaagctgtgcgtcacagagtgaaagagagagagagagagagcattataagaaccttaaggctgagagtgagagagtactcgagcttgtgagccatgtatcggacataattcgtgatggaagccatcgttgaatgcttgcgacttttaatcggaagggacctcttcgccgcgtctgttatctcagcctcgtcgccgccgttgtcgaactggtggtcttttatgggttcgtcggtcataaaaatctcgtgatttccaaaattgccaaaaatagttcatatctttaggaaatattcaaattagcctcaaaactattctttagttttataattttgtcctatattaaacaaaattatcactttaacccccaccaggaagcttctgaccaaactttcgagttaggctttgtcaacatggcacgtgttcaacagtccttctcttttttttaactctcttaacatttccttccgacagatttgcttgcagattgaagctaaaataatcaaagacaaataccaaacacaacaacaaattttccagacgatttgaatttgatcatctctaataaacttcgtcgcaggtttgttcgctcctctcttctttttctagtgtactcaaggatcagcacatttgaatttatagatccaatttattgtaattgttttcttccctgatctctattcgtttagattttggttgattgatctcgattcggagtttacggttgtactgtttagtattatatagaacgatggtgactcgaaactgattcggaaatcaaattagggtttttttagggcttcgttaaattaagcaaagtctgggaaaattgtgcagagaatatg

SEQ ID NO: 36697 - DNA, 3000 bp, Unknown
  misc_feature (1)..( 3000): 2750-1469P.txt file - cDNA_ID_3099352; gDNA_ID_2936572; Annot_ID_194791
tcggacagagagttttagtcggtatatattgattaaattatagtaattgaaatctatttgtaacgatgtgggatatgttgatgggtcgggtccaattatatgtcaatcggcccaatttagaaaaaattgaaacgtctaaaccagaacgtaaaccgggttcactatgtttactgcagaaaaaattcagtaaaagttttaaaagatgtttgcgttttgcgatggatgaagcaaaattagtcgtatgtcacttaggagttcattttagattgaaagctgcgatttgaagaagatagtaagcataacaagatggttataatgattacatgaagacagttctttactcaagtgtagtgggaagtatcatatactcttcaatcggtacaagcccttatttggctttgttggtgacaggggtaaacttttggaatatcactgtgaagcatcgtccaagagacagtgagaagtatcgtatagacatatactctacaatcggtacaagacctaatttgggttctctagttggtgataagggtaaacttttgaaatatccctgtgtagcatcgtccaagagaccaagactccgattattatttgacttgagaagactaaacacattaaacacattaaaggttagacttcgttttatcatttcgagcgagtttatcggagagtgaggtgaattttatcaagccatttatataatccagaggagatgtagatactcacctctcaacacataagcaataggctaagtgcaaaccaaaacacctcgtataaatgtttcgggtgaagattcacctacggtttaacaatgtctaagaaaccactttaaaacagaaagtgagaaacgaagctaaaaaggttccacacttataatggaagtacattgttataatttaaaagtaaaccatcaagaacaactcttcgcaacattctgatatccatgtcggaagaagacaacaaacacagactgcttatttttcatcttcatcactcgaaagccccagttctattttcacggcctgcttctcttctttgacggttttgttggaggatcctgatgcttctgaatgttttttgtcatcatcagcacccgttttctttacaggctcttgttcttcttgttctgttggtttcggaccagtatctttgcttcctgatgattcttgttccacaatggaggctttcttttcggtttcatcaggcttcttgtaactagataaaacttgttggagctcatcattcagatgcagagcctcgaacaggactccctcgtcgtctgttgtactctctatgatcatttgaatcaatggctgcgattgcttgcatttctccatcaggctaaccgttagatcgtcctgtaaccataatatatataaacctattacttatcactgtcctgtcaatttcactttaagcacatatatccaaggaaacaataatgtaaaccaggagatactcataactcaatccatattccatagacatttgttaaggaaaatgacaaaagttagatgagcagacaacgtagcaactacctctgtgtgatttggctttccttcagtattcaacatgctagagagcaattcgaggctgttccgtgtaatctcaatctgttctttcttatcctttatcgataagttcccaaagttatagtcaagaccatcatcgtccccaagagcctgttcttgattaggaaccggatagctaccaggtggaggcactggaacaggccgttgcataagagactccagagaactttgtcccggcattgaattctcttcacctcgagcgtgtaatccattttcgccttccaagctctatgaaacaaaagacaagccggagattataggcatatgaacaattccatctttgcataataagcaaataagattcagagagatttaccatataagtctggtggaaaacaggaagataagtaagatcttgggattgtccccaagctctaataagctgaaaagctcgctttctgttctcggaatcagcttctccgttcttgattaaccaaaccatctcatcaagaactttctcagaagcaacttcagagaaaaccttctcgcaattcatagcacaagcctctaaaagctcaaggctcagcctttggctcacagggctcttacctgagatcttcctcttgatagctctaacaatctcagtgccgttaaactcatcgttgttaatctgagcacaaatcctcatgttcattccccaattaggctcctctaaagtctctaaagtagcttcatccaccattttggattccaaggttggagcttgaagcatatctttcactttctcactcaccattctgctcatctgagctccaccagtcttcagcttctctccccattctgctatcttcaatttgtccatattctctgcacaattttcccagactttgcttaatttaacgaagccctaaaaaaaccctaatttgatttccgaatcagtttcgagtcaccatcgttctatataatactaaacagtacaaccgtaaactccgaatcgagatcaatcaaccaaaatctaaacgaatagagatcagggaagaaaacaattacaataaattggatctataaattcaaatgtgctgatccttgagtacactagaaaaagaagagaggagcgaacaaacctgcgacgaagtttattagagatgatcaaattcaaatcgtctggaaaatttgttgttgtgtttggtatttgtctttgattattttagcttcaatctgcaagcaaatctgtcggaaggaaatgttaagagagttaaaaaaaagagaaggactgttgaacacgtgccatgttgacaaagcctaactcgaaagtttggtcagaagcttcctggtgggggttaaagtgataattttgtttaatataggacaaaattataaaactaaagaatagttttgaggctaatttgaatatttcctaaagatatgaactatttttggcaattttggaaatcacgagatttttatg

SEQ ID NO: 36698 - DNA, 3003 bp, Unknown
  misc_feature (1)..( 3003): 2750-1469P.txt file - cDNA_ID_3099394; gDNA_ID_2936573; Annot_ID_194817
tattgatccgccttgggaaaatgcaagtgctcatcagaaatcaaagttcgttatctacttaatgtatgcatgtggataagtattttttgtatctgaaagttcatgaccaatgtttcttggttctttgttttaggtatcctactttaccgaaccaatacttcttatctcttccgatcaagcagcttgctcatgctgaaggagctctcgtggctttgtgggtgacaaatagagagaaattactaagttttgttgagaaagagctattccctgcgtggggaattaagtatgtagctacaatgtattggttaaaggtgagctcatcttgcagctctcagtccccatcttggtttctgagttgcacatatgacttgacattttacatacttgctatgtaaatgtttcaggtgaaaccggatggtacactgatttgcgacctggacctggtccatcataaaccttatgagtaccttctactaggctaccattttaccgaagtaagtcaattcatttttttgtcacttgaataatctgagaaaggaacttctgtttgaacagccatgttgtgtatacatgtcatagcttgcaggatcagaaaagaggtcagattttaaactcttggacaagaaccagataatcatgagcatccctggtgatttttcgaggaaacccccaattggaggtattcttatgtttatattttcaacagctttgttctgcgattggcttcatcaaattcaagagtagataatgcaattttttcaaattcttggtctaaagctcccctgattcttgtttgtttccacttggactttgtgtagatatactactgaaacacactcccgggtctcaacctgctcggtgccttgagctatttgcgagggaaatggctgccggatggacctcttggggaaacgaaccgcttcactttcaggactcgagatactttttgaaagtttagtgggcgcattccctagggtgtaaccaagaaaaaggctggcttgggccctcatgatcgtttttctctatgactcattctcaagctggggacagttaggagagaacccttggaaagaagtggaaggttcggttcatcgcaaacgacatcgtttgaagaagacaacactagagtaagcctgaaaaaagtatagtgttactaaagattattttgtctcagaactgtaccatcaatttagtaagctttttccttttcctttcataaacagatgatgtttcagataaaatttaaatatattatcagtacagtaagattacatactatattagtatcactattctgctattcactagatttctttttctttttcaacaaaatatgaataaaataaaggcaaaagcgtgttaaatataaattcaataagtgactactcgttggaagatcatatctgctttgatgggtctatttgtggggcaaatccactatccagttttccttttgtgttcaatgaactatacaattgtcaaaaaaaaaaaaacatgagaattaaagaaaatcatcatgaccaatgaagagcaggtcccaacaataattccgaattataggctctgattgttatagcaatcaaacaatatgcttacaaatcacaaaacaaaattaacgatatttccaaatatagagctttccagtttgacttaataatgttgtgtgaatatcctcacatttccattttcgactctctttagtaaattttgaagtagtagaatgatgtagaatgttttgttttatcaatcacacagttttgtgaaatcacgatttccatccactattcaagaaaaacatcaagtggaagaaataataaaccaaaaccatcgcaacaaaatgcatatcacgagtatagaatgaacaaactacactgtcaaatacttaatttaggacttaaacttcgctttcagacaacttggttcggaaacttgaccatccgtcatgttgatatacacaatccatctcaaatgtagtagtgaatcactatatcagcatgtgttatcaaacgcaagttgtcactaagatcggagcttctagttcaaaatgttgataagtattacgaaagtacaattgaatataccaattatacatccaaacacgtccatgcttctccactcgagttctctttggaaatctatataatccgtcggtttggtattttactagttgtacgtagtgtctcccctcatatgtattgagtctttatagtttgttgcctcgtatacgatagaaagtaaaggctaaaaaaccatactatttcataaagggtttatttagttaacttttaatctaaaccatgtatcactccattttacgtatattcgttttcacaaataatctactaaataattttgtaatgtgataaaattaaagaataaacacatgatacataaacagtcaggacaaaagtaagcactcattttcttctattcatactatagtgaaacactattttatttttatccatatactatagtgacaaattaatctaatcattaaatgttatgaggctcaaaacaatttgttttcttatttaacatggccgatcccctcataaaccaatcagatggtgtgttttccggtcatactcgtgtaggacccacttcattacaatggccccacatgtctctctatctttttctcctctttataaaatcagctccttttcttacacagatttagagaaacacaacataaaacgtacttcttcttcaaaacgcgaaaccacactgtaagttacgtacaccaccacctatcctcaccattcatcatcgacacgtggctggtttaactcaaatcaacggtgaattctttttgcttttttattttaaataatgaatgaaaagattcttctataattccagcgaagaagaaagaaaaaaaaaagcgtattcctcgtgagcactaacttctcactcattcttcttcttcagctgaatccaaatacccatttccatttttaaccgtggttggattgttttgagagttgaaggaagaagatg

SEQ ID NO: 36699 - DNA, 3000 bp, Unknown
  misc_feature (1)..( 3000): 2750-1469P.txt file - cDNA_ID_3099410; gDNA_ID_2936573; Annot_ID_194818
cataagtgcctaagtggtctgcggaaaaaaaacttatgtattcaccaaaaaggtatttctttgatccagctgatttatgcgtttttttttttccgtctggatatcaaatatcaactatgctagtcttgagtcatgacatccattagcaattgtttaatagaaagaaaaatatttcaaaacaagttaaaattattaatgttaaaagatattccttaaaatatcttaagacaactcttcaccgtggcccgaagacgactggagcaaattccggacacaaagatctcaaattttgacgctttatcaaatttcttacttcacccataaaaatctgagtttttagacttcaacaggacagatctttcttctctttccagatcctaaaatcttcatctcctacagatctgcagaaatggcggttacgtactgattcagatacgggagaagaaaaagaagaaagctttctgctttaacttttcccattactgtaatggcggatcctctaaacggcaagtccttctttatctgtttctcccttttattctccttcactctgcttttcatttcgccgttgtatgccaccgagtctccggttatcgaagatgtttctaccgatgttgctgtgtctgttagcgaaaccaatcgagaagctgttctattgcataatttagaggaactcgttaagaatctgacggaattagtcgctaatctagatgctaagttatctgcaactccattaaaggagaagaacgagatctcagttgatgatgacatcggagaagagaaagagagaggaagggctaaggcgttttcagtgactaaatacagtccgttttggtcggagaggtttcagtttacatcagctgtgaaactcaattccgatgcgacttgtatcaatgtgttgccgtttagagatttcgaaggttcaagcaagtactttgcaattggtgattctaaaggtagagtttatgtgttcttgagaaatggtgatgttttgattgagtttttcaccactgttgattctccggttactgctatggtttcgtattcatctgtgtttaagaactcgagtttcgtggttacgggtcatcagaacggtgcggtgttgttgcatcggattcacgagggatcgaatggcgaagattggaactcgaattcggtttctatggaacatgttgggaagtttgatgtggatgattcagctgatcctgtgactttgttggaagtgcatcatgtgggtcgtgttaggtatatattggcgactgatttaagcgggaagctcacggttttaactgagaacaggacggtttatgggtcggttattccatcgagtagaccgctcgtgttcttgaagcagagattgttgtttcttactgagtctggtgctggttccttggacttaagaagcatgaagataagagaaactgagtgtgaaggactgaaccattcgcttgcgagaacttatgtttttgatgctgcggaacggtctaaagcttatggattcacatccgagggcgagatcattcacgtattgcttcatggagatataatgaacttcaaatgtagggttagatccaagaagaagtttcaaatggaggagccagtagctttacaatcaatcaaaggctatcttctagttatcaacgaagaaaaggttttcgctttcaatgtatcgactcagcattatgttcgtactgcgggtcctcggcttttgttctcagcgggattagaagagatcagatccgcgttcttgagccatcgcgaatcatcttcacgaaccaccacagtagtaaagactaggccgttaatagctagcgacagggaaaaccttcttgtgatcggtttagaaaacggatatttcgctgtttacaaatcgaagctgccaactctcaaaggagacttcaacacaatgctttggagcagtcctgtgttcttcttcatactatttctattcggggcttggcatttctttgccaagaagaaagaatcgctcactgcatggggaccagatgatccttttaccccgaccggcgcacaaaatagttcggcgaaagagccaacatttactgaaccttcaagaagaaacgatgacctcatggatctacggagaaggtacgctggtggctcataccggtcagttggagctaacgacccgagttcaagagctccggttgatggaaactatagaacaaccgcacaggatcataacaattatcgcggtggtggctcgggtcttgattcaaacgggtttggtaatagaagagatcatttgtttggtaacaacaaagttttggataacgaaagttagaatctttggattacttgcaaattctggcacgttaatcaccacttacttcaaaaattgtaatctttgtaactttatataaacgctaaagggttttattattcctcgttcggtttttaactttatataaacgcaagtctcttgaaattttcgaatacaaaaactctggtcaaagaataattgtttgacagctaaaacaacttaatctcaatcatagtcaagatgtgttttggtctatcatgtctcatgtgatcgtgctagcaagtgggtaaataattgagtttaatttttctccttaatctcgatttataatgtgttatgttgaccgtcagatgagtcagcgaaatagtcatgtcatctaacggttaagacttcatcttcaactaaagaatttcagaaaggaatctacatcgtgtgaagtagaggaacattactttcgagctttgattcatcgtcgtcgtcttcggagacgaagccaaacacacaagctctctctttctctcaacaacttcaaaagccggcaggtatgaccgagacctccgaagaaaaacagaacatttctagggtttaactctgatccaccacattaccaaaactttcttcaactaggtgatcaaaaaggagtcctttttcattttgagcttctgggtctttggcttctgatttcgctataaggaagagaaaagtcaacggccatg

SEQ ID NO: 36700 - DNA, 2828 bp, Unknown
  misc_feature (1)..( 2828): 2750-1469P.txt file - cDNA_ID_3099420; gDNA_ID_2936570; Annot_ID_194766
tcaagcgacatctggtttggtattctagtcgttgttctccttatgacagcatggtagggaaaaccgtgacggtttgaaaaggtaacgtagaagtttgcattcgctgccttggccttcatcgtcagcttcggctcccaggtttgcacaattacatatattagctccaatggctttgcccactccactagcttaatagatgcccagtgggagaacaatgtgatttccgcgtacagaagaaacaattcctggtgtcttccatctctgattttctcaacaagtagaatttcggcttattaagcataaacaagagtaagaacgtagtagtaaattaccaaaggtggagccgcccagtctaccgtctggggatcagaacataaatctttgtagatttcacattccggcctttctcccggagccggttgttgatattttggtgaatcgggtgattcatggtcagcatgacagctgtcagttggtgattctgaagagggcaaggatggttcatattcctcctccggtgtaacaaagttgtcatctggatagccttcagattagaaacctcttacacgtccccgctcatatgggtacggtggatcaggaaaaacgacgtatccctcagaagaagagaaaaaacaatttgatgcaaatcatgaaaatcgctggtcatccacaataaaatccgattaccttacgactgctgacggtgcgactataactgccttctcccaggaacattcttggaaaatctcacccaaccctacattcacccgcccaagaacattgtatcgcagaacgatatggttgatttgtgggatgtaaagatcggtaagactctcgagtctcgacaagacttatgtttctgaggaagaactcctcaaaaccatcaaaggtgatcagttaaaccataaaaacagtttctgatatccaatattcatcagtccaaactccaaagtattaaacgagtcacttgcatttgcagagacccagcctccaatggatttttttgtgggtttgatccatacggtccttgcgaagagcgactttacctccttgactatagatccttcttttggagttaagacttctgagctttatcctgaggtcaagtacacaagtactgtcgatgagtttcttaaataatttgtctgaaaaaacccttgtcccttatgttacgtgtagccagtgtttatccgagtttcgatatggaggcaaatcttatttcaaaataggcttcttatttgattgatacagtacattacataaaaaggtccaagtacattatttgactgatataagagagagaccttgaacaacattaccacaccaacgatctcataacggtgcatagtttcaagggttaaccttgggagcccatccagagatcacatacttttcctcggtcttagttttctcaaaagagtcgagcgagaacagagtcttcatgtagttatggacatggggaaagctctcagggacagaccagcttttgaaatggccaagagcaacttgaaggtggtaaagctttggtgctaagcttagatccactgcggaaactctttctccggcgataaaagggccatcgtgactcttaagatggttttccaaagcttctagctcaacaagcaaggcatgttcagatccgtcattggagtctttgctcttcaagaatgtcccaaaagtaccaaaaatgttggatccaacagaggcaaattcagcaggagtcttgagtggtggatcaggatacttctcctcgagtataccaacgatgacgtcggaatcagtcacccacttgtcgtcgatcttaagcactggtactttcccttgaggactaatgtccaagaacctgcatcatatataaaaccaaagccaccaatttcaagttccggttaacacaatgctcgcacatgaagccaatccaatttccggttaacacaaagctcgtaccagttacaagtaaaatttcagagattatggctaaacaagttcaaactagaccgatcttaagggtttaggcgtgagagaaactgaccactggggtttgtcagagaggttaatcagatggattttgtaggtaagactcttctcctcgagtgtgagaagagcccgttggctgaacggacctaaaacgacaaacaaacacttaaattagtaaatttaccaacgatcaaagctcagaaattaagaattgcaaaatcaaaagcttaatgcaaaacaaaaacagagagagaaagagaagatggttacagtcgccgagatgatcaggagcaccaacagcagctttcacacagatttccagagccatcttgattcttcttcctttgtttgcagagacggatgaatgattgagttaatcagtgagaaggcttagcttttaaactgaattattaccattctccacccaccagtgggccatttttacccgatgtttatcttttctcacgtgttatgcgttgcaagtgacgacgatacgaaacgacattgttactgatagggccatttgatttttggtcggcaggttttggaccgttcaatttagtgaaaatatagtaataaattcgtaccgaataatataatcggtttaatgaaactactacctgaaatatcgaattagatttggttcatatttcgtattgttttggttcgattaaaccatattaaaccactgtaactgtaatttattgtttcgccgtcccggaatgttcctgttgaaatccattttcgctgattttttttcttccgtctcttcttcagcttcgaccattttcgtcttcttcattcagtgttgagtcctcgtttacctgtgagctcgaagaaagtgacgatcaatg

SEQ ID NO: 36701 - DNA, 3003 bp, Unknown
  misc_feature (1)..( 3003): 2750-1469P.txt file - cDNA_ID_3099420; gDNA_ID_2936573; Annot_ID_194843
gtacgagagaagtcattaactcataaacttgagtaacacacaacaagcgaaacattgagaaaataaaaatgtagccacaccaccatctggagaaacaactctcaaatcgataaaatgataatacataatgggacgataggatacttgttatttggaacgcatcaacatcttgaattcaagcgacatctggtttggtattctagtcgttgttctccttatgacagcatggtagggaaaaccgtgacggtttgaaaaggtaacgtagaagtttgcattcgctgccttggccttcatcgtcagcttcggctcccaggtttgcacaattacatatattagctccaatggctttgcccactccactagcttaatagatgcccagtgggagaacaatgtgatttccgcgtacagaagaaacaattcctggtgtcttccatctctgattttctcaacaagtagaatttcggcttattaagcataaacaagagtaagaacgtagtagtaaattaccaaaggtggagccgcccagtctaccgtctggggatcagaacataaatctttgtagatttcacattccggcctttctcccggagccggttgttgatattttggtgaatcgggtgattcatggtcagcatgacagctgtcagttggtgattctgaagagggcaaggatggttcatattcctcctccggtgtaacaaagttgtcatctggatagccttcagattagaaacctcttacacgtccccgctcatatgggtacggtggatcaggaaaaacgacgtatccctcagaagaagagaaaaaacaatttgatgcaaatcatgaaaatcgctggtcatccacaataaaatccgattaccttacgactgctgacggtgcgactataactgccttctcccaggaacattcttggaaaatctcacccaaccctacattcacccgcccaagaacattgtatcgcagaacgatatggttgatttgtgggatgtaaagatcggtaagactctcgagtctcgacaagacttatgtttctgaggaagaactcctcaaaaccatcaaaggtgatcagttaaaccataaaaacagtttctgatatccaatattcatcagtccaaactccaaagtattaaacgagtcacttgcatttgcagagacccagcctccaatggatttttttgtgggtttgatccatacggtccttgcgaagagcgactttacctccttgactatagatccttcttttggagttaagacttctgagctttatcctgaggtcaagtacacaagtactgtcgatgagtttcttaaataatttgtctgaaaaaacccttgtcccttatgttacgtgtagccagtgtttatccgagtttcgatatggaggcaaatcttatttcaaaataggcttcttatttgattgatacagtacattacataaaaaggtccaagtacattatttgactgatataagagagagaccttgaacaacattaccacaccaacgatctcataacggtgcatagtttcaagggttaaccttgggagcccatccagagatcacatacttttcctcggtcttagttttctcaaaagagtcgagcgagaacagagtcttcatgtagttatggacatggggaaagctctcagggacagaccagcttttgaaatggccaagagcaacttgaaggtggtaaagctttggtgctaagcttagatccactgcggaaactctttctccggcgataaaagggccatcgtgactcttaagatggttttccaaagcttctagctcaacaagcaaggcatgttcagatccgtcattggagtctttgctcttcaagaatgtcccaaaagtaccaaaaatgttggatccaacagaggcaaattcagcaggagtcttgagtggtggatcaggatacttctcctcgagtataccaacgatgacgtcggaatcagtcacccacttgtcgtcgatcttaagcactggtactttcccttgaggactaatgtccaagaacctgcatcatatataaaaccaaagccaccaatttcaagttccggttaacacaatgctcgcacatgaagccaatccaatttccggttaacacaaagctcgtaccagttacaagtaaaatttcagagattatggctaaacaagttcaaactagaccgatcttaagggtttaggcgtgagagaaactgaccactggggtttgtcagagaggttaatcagatggattttgtaggtaagactcttctcctcgagtgtgagaagagcccgttggctgaacggacctaaaacgacaaacaaacacttaaattagtaaatttaccaacgatcaaagctcagaaattaagaattgcaaaatcaaaagcttaatgcaaaacaaaaacagagagagaaagagaagatggttacagtcgccgagatgatcaggagcaccaacagcagctttcacacagatttccagagccatcttgattcttcttcctttgtttgcagagacggatgaatgattgagttaatcagtgagaaggcttagcttttaaactgaattattaccattctccacccaccagtgggccatttttacccgatgtttatcttttctcacgtgttatgcgttgcaagtgacgacgatacgaaacgacattgttactgatagggccatttgatttttggtcggcaggttttggaccgttcaatttagtgaaaatatagtaataaattcgtaccgaataatataatcggtttaatgaaactactacctgaaatatcgaattagatttggttcatatttcgtattgttttggttcgattaaaccatattaaaccactgtaactgtaatttattgtttcgccgtcccggaatgttcctgttgaaatccattttcgctgattttttttcttccgtctcttcttcagcttcgaccattttcgtcttcttcattcagtgttgagtcctcgtttacctgtgagctcgaagaaagtgacgatcaatg

SEQ ID NO: 36702 - DNA, 3003 bp, Unknown
  misc_feature (1)..( 3003): 2750-1469P.txt file - cDNA_ID_3099425; gDNA_ID_2936570; Annot_ID_194767
atctttattcttcatgcttgcctagcaacataggcgcacatggatttttgcatacgcacatgcatcagactaatattcactcatgtttcatgaacttgattcttacgttcaaaagaccgaagtgataacatacaaagtttgattagacaataatactccctaagaaaccatgaaaaaatgttgaacatagcttcttcaaaagctgtaaatccgtctaccctaatgtactctacctgccatattcaaaccagagaccgaaacataatccccttgagtatctcaccctgtagggcttcggccagaaaacatacccctgaaaaatcagttcacattagaaggacgcttggtttctttatcaggcagtatgttgttagggaggttaagctctggtggagtttctctcactattccgagcattgagtcatactcctcgtcctttagagcatgcttcttgcgtagaaccttctcgaactcaatcacatttaatggctttgcattctctgcagcgtgagcctgtgcgaggtttgagtagtttgttgctgactgagagataaaagcaatttcctcatcagtgagcttcctgaggaaccttgctgggtttcctccccatacctgagtcattatagaccaatgcgaacattttaactctgtcagtcaatatggcggatgaagtaaattttaaggccatgatgagagactaacaccctttggcattcatatgcagataaaccatagctagaagaacatttccactttcatctaactaacatttataatctgttagggcatctgaaaagtggataagatacgttctatccagatagaggagaagaattctcaagactagaaactgtatttcaatttcacaccaacctccaatactttcagccaatgaaagaaagacactaataatgtcaataatatagcctatgctgtctaagtagcaatagaagtatacccgcaccaatggttacttgtgggttttcaggtaatcagaaatgttaaacccaaaatcatacctctccagaaggaattctggtgttttgtcgtacaagtgcaccagcagcaaccatcccatgcttttcaacaacgaccccatcaagaagtgtcgcacccatcccaataaaggtctcatcctcaacagtacatccatgtaaaacagcactatgacctgttacacatttaatttaagactatatcccaaatgcttcttggagatgtatgcatattaaacattttcaaaataaacagtgagtaagagattcccactaaccaatggttacattgtctccaattatggttgggtgcaccttcccgcttaagtttgattttgccacatgcacaagtgagttgtcctgaatattagttcctgacccaacacttacggtgttcacatcgcctgcgcagaaaaaaagagagaaagcaagtttagattgtatgttatcccagtttcctggtaaagtactaacaggcttagccatacagtaccaatgtgttatgacatgaaagcattctgtaaaaaggacaaccctatttcatcaccattaaataaaaatccagactagccaactcatactcgcaataaggattcaactcaaactcaataatctgtatatgatatcgttcaactaattctggtgttatgacatgaaagcattctgtatatgattggggatatcatatacccaatcacccattagagcaactgccagtatcatcaagatacgatatgtagtaatgatctgtttaagatccttcaataaagctagaaagctccattttgagtagtagtcttgttcatcgcttaaccagaagagtaaaaaacagatattcgttcactattttctatcgtaagagttgacacagctaaggatacagaagtagatactatttcaaacaaaacttcagtcactaaaatagtcaaccaccaaacaccaaacattgaggcttagtagctagctcacctcgtaatacgcatccataccaaatggacgatcctcttccaatgtgaacgtccccaataactgaggcgcttggtgccacaaaagcttccttgtccacaatcggagccttatcaaatacattcatcagtgtccgatgccttgacactacacagagaaaaccacaattacatataagcaaatttcgtgaccaggaaacaaaaaaaaaactaagcagcaaaacacattccacatcaattaatcccttgtgccattcgaatccagaatcgctatacctacaaagacatcaattccagatctctaacctaaccagaataggtgagctgaattacccaatcgaaactcctcactctttacgaattcgaaatcggagtgaaaaatagagttacgcagaatcttacgttgttctcggaagtaatttttgccttgaaggcgacaaccgaggcgatcaagagcttgaccagtctcacggatccaaaaaccgaccgagtaaaatgctctgcctagggttcccattgatcgtcactttcttcgagctcacaggtaaacgaggactcaacactgaatgaagaagacgaaaatggtcgaagctgaagaagagacggaagaaaaaaaatcagcgaaaatggatttcaacaggaacattccgggacggcgaaacaataaattacagttacagtggtttaatatggtttaatcgaaccaaaacaatacgaaatatgaaccaaatctaattcgatatttcaggtagtagtttcattaaaccgattatattattcggtacgaatttattactatattttcactaaattgaacggtccaaaacctgccgaccaaaaatcaaatggccctatcagtaacaatgtcgtttcgtatcgtcgtcacttgcaacgcataacacgtgagaaaagataaacatcgggtaaaaatggcccactggtgggtggagaatggtaataattcagtttaaaagctaagccttctcactgattaactcaatcattcatccgtctctgcaaacaaaggaagaagaatcaagatg

SEQ ID NO: 36703 - DNA, 3000 bp, Unknown
  misc_feature (1)..( 3000): 2750-1469P.txt file - cDNA_ID_3099425; gDNA_ID_2936573; Annot_ID_194842
tttattcttcatgcttgcctagcaacataggcgcacatggatttttgcatacgcacatgcatcagactaatattcactcatgtttcatgaacttgattcttacgttcaaaagaccgaagtgataacatacaaagtttgattagacaataatactccctaagaaaccatgaaaaaatgttgaacatagcttcttcaaaagctgtaaatccgtctaccctaatgtactctacctgccatattcaaaccagagaccgaaacataatccccttgagtatctcaccctgtagggcttcggccagaaaacatacccctgaaaaatcagttcacattagaaggacgcttggtttctttatcaggcagtatgttgttagggaggttaagctctggtggagtttctctcactattccgagcattgagtcatactcctcgtcctttagagcatgcttcttgcgtagaaccttctcgaactcaatcacatttaatggctttgcattctctgcagcgtgagcctgtgcgaggtttgagtagtttgttgctgactgagagataaaagcaatttcctcatcagtgagcttcctgaggaaccttgctgggtttcctccccatacctgagtcattatagaccaatgcgaacattttaactctgtcagtcaatatggcggatgaagtaaattttaaggccatgatgagagactaacaccctttggcattcatatgcagataaaccatagctagaagaacatttccactttcatctaactaacatttataatctgttagggcatctgaaaagtggataagatacgttctatccagatagaggagaagaattctcaagactagaaactgtatttcaatttcacaccaacctccaatactttcagccaatgaaagaaagacactaataatgtcaataatatagcctatgctgtctaagtagcaatagaagtatacccgcaccaatggttacttgtgggttttcaggtaatcagaaatgttaaacccaaaatcatacctctccagaaggaattctggtgttttgtcgtacaagtgcaccagcagcaaccatcccatgcttttcaacaacgaccccatcaagaagtgtcgcacccatcccaataaaggtctcatcctcaacagtacatccatgtaaaacagcactatgacctgttacacatttaatttaagactatatcccaaatgcttcttggagatgtatgcatattaaacattttcaaaataaacagtgagtaagagattcccactaaccaatggttacattgtctccaattatggttgggtgcaccttcccgcttaagtttgattttgccacatgcacaagtgagttgtcctgaatattagttcctgacccaacacttacggtgttcacatcgcctgcgcagaaaaaaagagagaaagcaagtttagattgtatgttatcccagtttcctggtaaagtactaacaggcttagccatacagtaccaatgtgttatgacatgaaagcattctgtaaaaaggacaaccctatttcatcaccattaaataaaaatccagactagccaactcatactcgcaataaggattcaactcaaactcaataatctgtatatgatatcgttcaactaattctggtgttatgacatgaaagcattctgtatatgattggggatatcatatacccaatcacccattagagcaactgccagtatcatcaagatacgatatgtagtaatgatctgtttaagatccttcaataaagctagaaagctccattttgagtagtagtcttgttcatcgcttaaccagaagagtaaaaaacagatattcgttcactattttctatcgtaagagttgacacagctaaggatacagaagtagatactatttcaaacaaaacttcagtcactaaaatagtcaaccaccaaacaccaaacattgaggcttagtagctagctcacctcgtaatacgcatccataccaaatggacgatcctcttccaatgtgaacgtccccaataactgaggcgcttggtgccacaaaagcttccttgtccacaatcggagccttatcaaatacattcatcagtgtccgatgccttgacactacacagagaaaaccacaattacatataagcaaatttcgtgaccaggaaacaaaaaaaaaactaagcagcaaaacacattccacatcaattaatcccttgtgccattcgaatccagaatcgctatacctacaaagacatcaattccagatctctaacctaaccagaataggtgagctgaattacccaatcgaaactcctcactctttacgaattcgaaatcggagtgaaaaatagagttacgcagaatcttacgttgttctcggaagtaatttttgccttgaaggcgacaaccgaggcgatcaagagcttgaccagtctcacggatccaaaaaccgaccgagtaaaatgctctgcctagggttcccattgatcgtcactttcttcgagctcacaggtaaacgaggactcaacactgaatgaagaagacgaaaatggtcgaagctgaagaagagacggaagaaaaaaaatcagcgaaaatggatttcaacaggaacattccgggacggcgaaacaataaattacagttacagtggtttaatatggtttaatcgaaccaaaacaatacgaaatatgaaccaaatctaattcgatatttcaggtagtagtttcattaaaccgattatattattcggtacgaatttattactatattttcactaaattgaacggtccaaaacctgccgaccaaaaatcaaatggccctatcagtaacaatgtcgtttcgtatcgtcgtcacttgcaacgcataacacgtgagaaaagataaacatcgggtaaaaatggcccactggtgggtggagaatggtaataattcagtttaaaagctaagccttctcactgattaactcaatcattcatccgtctctgcaaacaaaggaagaagaatcaagatg

SEQ ID NO: 36704 - DNA, 3000 bp, Unknown
  misc_feature (1)..( 3000): 2750-1469P.txt file - cDNA_ID_3099430; gDNA_ID_2936573; Annot_ID_194840
cagaatcaccaactgacagctgtcatgctgaccatgaatcacccgattcaccaaaatatcaacaaccggctccgggagaaaggccggaatgtgaaatctacaaagatttatgttctgatccccagacggtagactgggcggctccacctttggtaatttactactacgttcttactcttgtttatgcttaataagccgaaattctacttgttgagaaaatcagagatggaagacaccaggaattgtttcttctgtacgcggaaatcacattgttctcccactgggcatctattaagctagtggagtgggcaaagccattggagctaatatatgtaattgtgcaaacctgggagccgaagctgacgatgaaggccaaggcagcgaatgcaaacttctacgttaccttttcaaaccgtcacggttttccctaccatgctgtcataaggagaacaacgactagaataccaaaccagatgtcgcttgaattcaagatgttgatgcgttccaaataacaagtatcctatcgtcccattatgtattatcattttatcgatttgagagttgtttctccagatggtggtgtggctacatttttattttctcaatgtttcgcttgttgtgtgttactcaagtttatgagttaatgacttctctcgtacatccccgtctttcgactacttgttgctgtaactttgatttgaatgtcaagagtgttcgtcctttaatttgtcctagttgcaagtttttcagagatggaagaaaagccatacgaggaacaaccatgagaattgcattacagaatgtgagggtctcgagcgatttgcaggtgtacaagcaaattggcaatgtagcagatttgttatgatgagaagaatattcaacgcatagtttgatatcttctggttgaaatggtaaagtacaaaacttgagacgcaagctttctaaaaccggaactctatgtagtggcaatgtccttttaattaaacgtcgtaacctccggagattggacggtttagtgtcacgatcatcatgctcgagcttctttcacagcagagtgaacagttacgtacagagaaaaacggtgcaaaagaaattgatattgtggaaggttgggggtgagactttactactgactaggttatttccatatctcgaacgtcgttttatttttttgaatatactttctggtcaaagtttgtattcgatgtctttctgggaactaaaatgtgttttgggaattaaaatgtgttttgggaactacaaagagaacttaaacacactaagttcattcaattgtaataaacacgaaaccttaatcgcaatttggctgtgtagaaacataattaatggcggctacattttgttaatcgtcaggagaacaccatgccgttttcgttttggctagctagtctaagaaaatttaggttgaagtttgttttttcttcttcttatttcatggttgatcctacactctctttttttgtcatttggagttatttttgcactttttatttttatttattttgaatttaatatactttttaaagatctttaaattttttttaacgtatctgaaccaaagaataaaatttttaatggggcagggggcttccacttcctcttagttaaacaaagaataaataagatgtattcgtttaagtctatattatcctcaatattaagacaagcataattctatggaggtcttttttcatctaaacaaagtataactcaatatagatattttttgtcgaaaggggaaactcaatatagtcactctatatatataaactgaaagctatcatcgttacataaaccaaaacataagaaaattatatacaaaactagaagtaaaagcatagatttatttcatctatggaaatactaaaaggaaatttactcactagtaaaaacgcgtgggctaaaatgtgacggctgcaatctaggtaaagactattatagcgatgggtatcgttgctttcgttctggattcttctttcatagccaatgcgcccactccaatatagagattcataacctctatcatccacaacattctttgtttatcaaagtagttgcagaaaatgaaaatgttgatgaagaatgcaagctttgtagaggtaacttgccaaaaatatattattattgttctacatgtgattttgctatcgatttgatatgtgcaaaaaaagaagttaaaataataattcaaagtccagaaacccacgagcattgtttatcccttattccgaagatggttatgtttaattgttatctatgtggacggcttgatgatcggttcccttatgtatgtaccttatgtgatttgagttttcacaaagattgcgccgaatccacaccagagatcaactactcttgtcatcctagtcacattctcaagcgtttcacgcgtgttccaaattactcagatggaaaaatgtttatgtggaaacaaacttcataacgtgttctatagctgttctatttgtaattttagtgtggatgtggattgtgcaaagaatccaccccctttcactcttgttcaacctaaggctcataaacattcactcactcttatgccgcaaagaacttttttttgtaatgtttgtggactggatgacgatccaaatccttatatatgtattccatgcaatttcatgatccatcggaagtgtgttgacataccacgcgtcataaagatcagtcgtcatgatcatcgtattcattataatcattgtcttgaagtcggaaattggaactgtggagtgtgtcataaagagataaaatggacacatggggcttattcttgtttgaaatgtcctaattttgcttatcatgtaagatgtgccacaaggtccgggatttgggataggattgaactcgaaggcataccagaaaaaattgtagaggttagatcatatgaagtgatcaaagaaggagtgataaaacatttcagtcacaagggtcatactttaaagctcaaagaagaaagtgataatg

SEQ ID NO: 36705 - DNA, 3003 bp, Unknown
  misc_feature (1)..( 3003): 2750-1469P.txt file - cDNA_ID_3099434; gDNA_ID_2936573; Annot_ID_194839
atttactgcttctttttagctatgagatttttcttataatccatttccaagaagaactcttttctgaaatcaactttctatttggtttctcaacattttccttcgtttcttccatctgaatgtatttttcatggaaacgatcagtttcatttcgtgtccgaaaagttattatgtttcctctttcatagagaaacatataaataccataggttctctcttttgaacattctcctctcggatcattacaattttgccaattattgacaaaatcgcctaaaccgatcacagtgtaggccgggacaagattgatttttattaggaaaattaaacggatacttgaatttaatttcttttgttaactaactttgtttctttgtgatctcaatttccttttgacgtatacctcaactttgtaaaaagcgaacatacaatttcttttatcaagtagatataacttcaagaaattcgaagagataatgtacatgtgtgaattgtgatgtgtctgccacgcatcgtacacgtgtcgctgtcagcaatgaaaaagtcagaacaatccattaacgagctaagacaaaaacaaaaagtgttgaatccagttgtttatgcaagttaagccgactaatttagtattgttatgcagctaaatctgttttggatcgaagtgtccatcttaaacaattttccaaggttatctcctcgttacgtttgatatcgatcgttccacctcaaagacgaaacttcggcatcatcttttgtcatgttttagtttgtatccttgtataactgtattgctttcaagaaatttcatatttcgttgtctatctaaaactttggaatcaggaccaaacgaaataaaatgggatccaaaactacagatgaatttactgtactaaaaataataatcgtagtcgtcgtaggagacaagataaggttggaaagttaatatcttctctgtctatagattttaataatttaatcaattccactacttaaatcagtgggctattaccggagttttccaaagccaaatcatgggatttagttttctcaagttatacgaacttggaccgaatagccaagtaaatatataatattaataaactaaacacaaatttaatatctttgggggataagaattatctagatgacttgcatactttgcatggagcactatatatagaagaatgttaacacatgatcctaccgacattaatgtttactaatcagaaaatcaaaaggacaattggaaaagattaatagcaaatgggttctttaatgtcaggatgggactctcgagtaagggatcccaaatcaggtaactaatatcatcatgtatattatattttggattaatattcatgcatgtatgagattatattgtatgtttgattatacaatagaaactaaaagatgatttttaacataaattcagtgagaaggtgcaagtcgctcacaagagaagaaatcgacactttttggaaaacgaagaagaagaatgaagaagaagaacatgttcaagccttttccaagttggtaactcaggttaaaaccaaactttaaatttatttatttcttatttcccaaggaaagagacaatatttctactatcagtgatcttagtgaaaatcagagttcgactttaaaatttaccaaaaattattaaaatgatctaaaaaaggctttgaaattgtttgcaggaaggtgcacaaagccaagcgaaagagaagaagagtgtagatgatctttttgagaaccaaagcaagagtagtggatggtaattttttttttgtgcaaaaaccaatctcgtaactaagttctttaagagatatttgaaatgataaactgatgtggttggtcaggtggagaaaaacctactgggcgttcttgaatgagccgagggaggaagagggtcgaccgaacaactacgtgtcgcaattcaaagttgctcacatcgccaaaattgcgggctcgtaatgacgctataatcaccggctaatcacatatatatctcgtgtgaaatgcgattagtcgtctgccgttgtggtttaatcaccggctaatcacatatatagtatgttggccgtgttagtatgtgaatgtgtgagtagagcatgtaacaaagggtgtacgattttaatgtaagaatgtgttttactttatatgtgtcatgtatgtatttttttggttgtgtgagggtgtaatttacttttcaatggatcttcttaagtcttttccttgatgaaatagcgtgtgcttatgaattacgggagtcttgtgcatgataaaaaaacaaagatcaataataggtgatcatgaagacttttctgtttgttgtttccaaataacatttttacgccattcataacatttgtctaatctttatttatttttcattttaggaaagattgtctaaaattttgttcatatgtaatcttacgtatacattgataatacatttcatccaatttttacaatatatgtactcacttacaaatttcatatagtttacaaatttttataagacacgaagaacaaatatatgtaaactaaatcacaatagtagtggagcatatatagtagagcaaatttgttggatatgttaaaaggctattatatgtatttaggtagattgttagtaacttattttgaattcttttttagaaattgtggtagttttcttaattttccctactaattatgtgatttttaatatataaaaataaaaaagttttgttttgcagtttctggatttatttgtgatatcctataatgatataattatgcaatgtcaccaaaaccaaaaccaaactctaaaagtgaatcatcaatgtgaatgcaatagctgtcacactctgtgtctgtgggtcacaaaagggtactttggtaattatataactcggggccgttcggttcccaccgaacgaaaatataaaaccgatcaatctgagacggttgattactctcacttcagacttctcttcaacgaaactagccagagagatg

SEQ ID NO: 36706 - DNA, 3000 bp, Unknown
  misc_feature (1)..( 3000): 2750-1469P.txt file - cDNA_ID_3099465; gDNA_ID_2936573; Annot_ID_194829
cgtatcatatttaaaaaattacttaaatgtttcccaattcattcatctgtaaataacactctgtttttctttttttttaaaaatatatcttcaatgaattttagaaaaaagagagaatgacttttgtggagatttttttttttttttccaatacatatattttattcaccaatacaacatcaaatgtcatctaaatttatgttttaaaacataatgttattggtaaacattgaaaatgtcatctaaacttatgttttaaaacataactagatcataactcgtgctatacagcacgaacattaatattttgtataaattaaattgtatactttattatgtttgctatgtttgtcaaaattatttgttatatttgtcaaactttagtaaaatatatttaaatataattaaatttattaaaatttaataaatttaaaagtttttgttgtttggagacgcattatctacatacaaaatacctgtttctattttttgagtatttttagggcctgaaactttttatccaaactgacctaaacccaaatggacgcgatccgaaccgaatatttagaattattctattaggtagtaaatcatatacccattaatcccaaatccgaacgggttatacccgaactcgaatgggttactcatatgcctagccctattctctgatttaattatctaaaaaatcccaataaaacatatgttttggtgactactttttattcaaaaaaatttacatcttcttctgccaaaatcatttcataagacatcccaaaacccttggaataatgattccatgaatgaagaatcctaatttgaatataccaagaggttttgaaaggttttaagtttttgataggtgtgtatgtgagatggtacatccatcgtgatggtaatcggcttatttataattttaacttgcattatacagcaggtagtcttatattttagttaaactaaaaacttttattgtaaagttgattataaatatatgatattattttatttgattttaaatgtatagtaaactgcgagttgtatatgttttgttgatattatttatattgtttagtgtttaaaattatatacttgtattttgattgttaattttaaagtttcacatatagtatatcatcttgtattaatattgatttaaacccgtcaattgtaggatttttcagcttgtattaaaaattgaatcacatcatacacattaaaaaatctaatatgttattaattattgtagtatataagattataaattttaaaataatatgtatgaaattgaatataaatattcaaactatgacacagtactcagtaaaaaaatttcttaaatctacttttgacccgttatagtattttttcatgtattgaacagtttatattcgtttttaaaaattcaaattgtggcatatgcgaaaaaattctaattatttttttataacgatgatattatttttttgcaaaaatagaatcatataaagatgagaggtgaactataataattaataaaaaattaatatgataatttagatatcaaatctaatttgttgattttaattggttacttttttggaaattaataatgtatttcgtttttgagttaaatttaattaattaaattagtatttgacttttaatttttaaagaaataaattaatttactctttaaaatcttatttctaatgacatacctatgtaattacttacaaaaaaataaagttatatttaaaatgtatttcctaaataatatagtaggatgttattggtaaacattgaaataacatgtcgtattctcaaagattttaaatattgaaaataaataaataatgttgtatctgaataaatatttatatttattgaagtattcgaaattaatgacatccatatatttttcatatactagaaaacaaaaactataattattcgagtttatctaataaaataatgtcacttgcatatttgtgacctatcgacatcaatatcaacgaggtagcgaaaatgctaaaaagtagaggaggattcgagcattatattcatatttaagtgttactttaataatcttattatttgtcctaaattgaagttttagctaaattttctcccacaatattgttattctgattttgttaagagttaggacaacatctaaatatgaattctataatgcatgctaactattattataagtgctaaaatataaaatgacattgtcactttttgttgtcaaaaggaatgtctagtggcctcgtattctaatatgggaagttttaattattattcctaccaaaaaatatctttgaagtagacagtttacctaaacaaaaagaaaaacattttcttaaaaatacaatatagtttagtctcagcctgtaccacaattttatagtattgttgcgtaattagttacattgtaaaagctcattataatactaatgagtatgtagaagtatgtagaagaaaataaatgattcaaagcgactacaaatgcttgtatatgtgagcgaacatgggacaatgattcaaaaaattatctttgcgcaaaaaataactcgaaaacgacaatcagacaaaaaaaaacaatagttaaatttgatataaaagaatttaaaatgaacgatatcttatttaattacaaattaaaatgtttttaaattaagtttttttttgtcgacagagaagaaaaaaaacaggtccctttacgaattctataaatcgatgttaggcgacgcgttctgaggtggaaaactatgaaacagtctgcgtctctccacgcaaaggctcaatttttacaaaccatgaagaattcttaagcaaaacaagtctaacatctttttgaattcacccaaaactcaaatcctacctcaaatttcgtatttttcttcttctgcattttctagtttaggatcgacatttttatcctccgaaagattcgtgcttttttctctctgtagattacgattgttttgtagatttaagaaaaacaaaaagatg

SEQ ID NO: 36707 - DNA, 3003 bp, Unknown
  misc_feature (1)..( 3003): 2750-1469P.txt file - cDNA_ID_3099470; gDNA_ID_2936573; Annot_ID_194828
gcaagcagcacaatgaatggtatcgaagactccactaggaaaaggaagtcttctacttgctaaagagctgacaaaagtaggaaacccgcgctcaagagcgacctgtgctaagtcgactagatcgtcctttaaacctagagacaccgtcaaaacatccttatccagcaatgcagctacaaaacttgaatctgagcatccaatgtccaacactatacgaacattcttcccccattcaatatctggtaccatctatcaaacaccaatcatgtttttatctctaacacagaacttgtctccaatgaaaagccaacttcagagagtaacaaatgatactcacctcttgaatgaattcaaggtactgtagaacatttccgttgaacgtagtctggttctgtggaaaagataggtattcaccggtttcattcacccaattatgcttcttaatatacgcagccaacttcggatgtgccacgttcttatacaatatctgatgttaataaataaaaaagacattagatcaaaagaacttgaaccaaatatctcaaagaagctccaaaaatttaaaccttagatttgctttcaggccaggaaacaggaggatcatagccatcatgtggaagaggaacaagacacataactggtttcttaggacaactcctctctctatgtctataactctgaagcctccctattaacccatcattatcaatacatggcatgtaattgtgcttgctcctagtgttacacaatctccagctatactcagctttaggatcaaacaccggacctttcctcttcctctttttacttatctcgtttacagttacttcctcattcttttcttccacttcttcatcaactgatgcacttgaatcatccacacttccatctccatttccatcagattctccttcattgccatctgactcagttccttcttctccatcttccttattagactgatcagaatcgtcagattccgcctcttcatgttcttgatcctccttaaccacaacttcttcaaccacaggctttggcacatccttcttcttatgtggatgagacacagcatgctctttctttttcttggtttcatgtttatgaacagacgaacctccaacttttttcccctctttagatttcgaaccagattcaactttacctctctcatgtaatttgctagattcagacacctcatgagctgacttagtgcgagatgacactggctcagctatgtcgtcgaagctttctctctggacattaaaggtagaagcagaggaagataagaaggaccagaagaagacgaagcagagacccaaaacaactatgaacgtcatcttcacccaaatccctcgtggctgtttaatcctacgcgcgaaataagcaatccccatttctcgttttctctccatcatttttaaaatcttaaagaaaccacttttaacgcaactgaacaacagagatctgcaaagaagtactttaaccaaacttgagataagctcggaggccaagaatttgatcaaaactaagcaaactctgggagctaaatcaggatctccgcaagtaaggttcttgagcacgatttagtaggaatttgcagtacccagattggaaaagctgctaaaagaagaaaatttacaaatctcagatttctatcacgggagaaaagaacgaaacacagtagaaatttgcagtaccccaaatcgaatcgtaaaaatttaagcttgataatcaatcacataactgaaaattacgactcttttttaagctaacactaataatattatcctcaatgcttttttctcacttttttccttgtatagttgaaagttgaaaaagaaaagagaagaagaaatgggaaattctggcttttcacttttggtaataaataataactgagaagtggtcagaactcagaagttggtcgggtttcggaaaagtgccaacaagagagtcgaaacagccggaggtgacggagaattttaatttttggtctctctttaacagatcaggcattaagcccaaatggatttgaagtaaatcagcccaatgggctcattacggttgtacaatatacatgaatgttgattactgtataggtaataaatacacagtaatgcatcatttcatcactgttgttacttgttaaaattcgaaagagcataatagaaatctcaacttccaatgagatttggattccataaattttgccacaatttatttagaactcacaacaaagtcaacattgctgttaactctagatatcttgcttcaattacaatagtctttacatcctttaaaatctttcaatttttttctttattcatacattacttgttctgattttcccattatactactcctttctatttcaaactcttgctttctgtcattagcaaatagagaaagtgatttcttaaccaaacttacaaaattggaacttaacaagaaagaagaaagttcgttttgttcacgtataaaaggaacatgctgccattttaggacaagtttgtacatttttaaaattttaaaaacttttacaattacagaatttagctaataattccgacatgctaaaaaaactctttttactattttttttttaagaaaaggaaataataaaaacagctcgtcatgatgcataattatgtcaagattcgtttcaaaaaaacgtggacccctaccgcctcctcctccactactactaccaccaccacctttggtttccgtttctctgtatattcattcctcgaaaccctccaaaaacccatttcaatcaatttctcgcttttgccctctacgtttctcgtcctgggtttctcaaatccagctcagtttattccccaattcaataatcaaaactctgtcttttggtgggtcttcgtcaaagctctctcctttacggtccttttctccagcgcatgaaataataaaggacacctgtatttattaaaatcactacattttccgtaacaaaaaaaatcaaactttgttttctcaatg

SEQ ID NO: 36708 - DNA, 3000 bp, Unknown
  misc_feature (1)..( 3000): 2750-1469P.txt file - cDNA_ID_3099474; gDNA_ID_2936573; Annot_ID_194827
cctcttcgcatccttcccttcgcttcaatgtaagccaattcataccaaatggagctcgaagatgtgttaccaaatcgatgaagagtcatcctcgaagcctcgacatgaactggtgaaagctgcagattcttctctaactcatcgatcacagctcttccaccagcatggatacagaaatgctcgaaagcaagtttgaaatccgggatatacggtttcactttaccgttaaagagcttcttcacaactagagtcataaagaagagaatctgctcacttatcggtagaacaagaggacccaatgtagtgatattggttttgagagtttcccctgcaatcgccattagatctttcgacaacgaaaccccggttctccctgtatcatcctgctcttgataaacacaacggaaagctttatcatctgctccacggtgagtcctgactacatgtacaagcctgtacttagaccgtctcttgtccctcgacttgttcgatagcaaaaccgcagagccaccaactcgaaacaagcagttcggtatcaacatcgatttcttgttaccaaaataccaattctgagtaatgttctcagtagaaacaacaaccgcataagtgttcctatgtaccaacaacatgtctttagcaagatccacagcgataactcccgcgctgcaacccataccgcctagattgtagcttctaatgttacctctaagcttatacttgttcacaatcattgcagataacgaaggagttggattaaagagactacaattcacaacaaggattccaatatcctttggtttcacattagtgttagcgaaaaggttatctaaagcaccaaacatgacttgttcagcttcttctctagcagcagccattgaaattctcggtggaacataatgcatagcttcagggacataagtgtcttcccctaaaccagaacgctcaaggatcttgcgttgaaactcgagagcagagtcatcgaaatctccggtgagtctagaatgttccatgaaccgagcgtaaggagctttgagatgatcaggtgggagataacaagagaaatcaaccaagtaaacgggtctaggtcgggtcataacataaaccgttaacccgaagactagaatcgctgaacagatgatgatactaaccagattgtattgtagatggatccagagctgtttgagatcatctgggttcatctgagaggcttcgacggagataacaacggcgagagggaataaacagagagtcaagagatttgagattaagtaatggtaacctaatttcacatacttgagattcacgctctggagaaaatccggtagcatccgtgtttgtcggatctgaactccaacagaaccatcaccaccaccatcaccaccgagtcgtgattctccggcaccgtccattgagaaaacaaagtttgattttttttgttacggaaaatgtagtgattttaataaatacaggtgtcctttattatttcatgcgctggagaaaaggaccgtaaaggagagagctttgacgaagacccaccaaaagacagagttttgattattgaattggggaataaactgagctggatttgagaaacccaggacgagaaacgtagagggcaaaagcgagaaattgattgaaatgggtttttggagggtttcgaggaatgaatatacagagaaacggaaaccaaaggtggtggtggtagtagtagtggaggaggaggcggtaggggtccacgtttttttgaaacgaatcttgacataattatgcatcatgacgagctgtttttattatttccttttcttaaaaaaaaaatagtaaaaagagtttttttagcatgtcggaattattagctaaattctgtaattgtaaaagtttttaaaattttaaaaatgtacaaacttgtcctaaaatggcagcatgttccttttatacgtgaacaaaacgaactttcttctttcttgttaagttccaattttgtaagtttggttaagaaatcactttctctatttgctaatgacagaaagcaagagtttgaaatagaaaggagtagtataatgggaaaatcagaacaagtaatgtatgaataaagaaaaaaattgaaagattttaaaggatgtaaagactattgtaattgaagcaagatatctagagttaacagcaatgttgactttgttgtgagttctaaataaattgtggcaaaatttatggaatccaaatctcattggaagttgagatttctattatgctctttcgaattttaacaagtaacaacagtgatgaaatgatgcattactgtgtatttattacctatacagtaatcaacattcatgtatattgtacaaccgtaatgagcccattgggctgatttacttcaaatccatttgggcttaatgcctgatctgttaaagagagaccaaaaattaaaattctccgtcacctccggctgtttcgactctcttgttggcacttttccgaaacccgaccaacttctgagttctgaccacttctcagttattatttattaccaaaagtgaaaagccagaatttcccatttcttcttctcttttctttttcaactttcaactatacaaggaaaaaagtgagaaaaaagcattgaggataatattattagtgttagcttaaaaaagagtcgtaattttcagttatgtgattgattatcaagcttaaatttttacgattcgatttggggtactgcaaatttctactgtgtttcgttcttttctcccgtgatagaaatctgagatttgtaaattttcttcttttagcagcttttccaatctgggtactgcaaattcctactaaatcgtgctcaagaaccttacttgcggagatcctgatttagctcccagagtttgcttagttttgatcaaattcttggcctccgagcttatctcaagtttggttaaagtacttctttgcagatctctgttgttcagttgcgttaaaagtggtttctttaagattttaaaaatgatg

SEQ ID NO: 36709 - DNA, 3003 bp, Unknown
  misc_feature (1)..( 3003): 2750-1469P.txt file - cDNA_ID_3099479; gDNA_ID_2936573; Annot_ID_194826
tatccttaatattaagacaagaataattctttgagtgtccttttcaagtaaacaaagaatataacttgatatagattatttgatggagtataaaagaatatctatcatcgttacctgaaaccaaaacataagaaaaccatacacaaaactaaaagtaaaagcatagatttatttcatctatggaaatactaatgaaaatttactcactatcactaatgtgacggctgcaatcaaggcgaagattcttatagcgatgggtatcgttgtttccgttctggactcttctttcataagcaatgctccaactccgatatagagatccataatctctatcatccacaacattctttgcatatcaaagtagttgctgaaaatgaagatgtacatgaaaaatgcaagctttgtagaggtaacttgccaaagatgtattactattgttctacatgtgactttgctatcgatttggtatgcgcaagaaaagaagtcattcttacaattgaaagtctagagacccacgggcatcgtttatcacttattccaaagatggttatgtttacttgttctctatgtggactgcttgatgatcggtttccttatgcatgtattaaatgtattaaatgtttggtttcataatatttaacttataaatttgtatacctgctatctcctctttcgtttaaatttaaactttcttcgttattaaatattttatttttatagtatattttagaatgttgagtaccccatttctcaaaatatattatgggtatttctactgcaatgtatagaaattttcatcatttaaatttattgaaaaggtttctttgaaaggaaggaaaatcgaatttataatttttaaaaaccttgtgctggccgtaactcaaacactgtctctgcgggtccatcatcaagcaagggatctaattcggttcaggcaaatcacatgttcacaccaaacagcgttacatctcccggtttttgttttcaacatgacaactcaagctcccctcgcacctgcagatctcgttgggattagtggtctaaacgatgatgattggaaattgttacaacacatgcttgcagagcgcaagaacaagtcaacagaacgtctctccggtaagtttttctttgaatcatggatcattgatacaagcgcgtcgaatcatatgacgggtacacttgagtttttgcttgatatacatggcatggcacctgttttgataaaacttccggatggacggttcacaacctccacaaaacatggtcgtgttttgatgggttcttcattaagtctccaagatgtgttctttgttgatgggcttcattgtcatctcatttcagtatcacaattgactagagacagtggatatatgtttcagataactgacaaggtttgtgttattcaagaccgcatcacgaagacgctgattggcgcaggtgaacagcttaatggtctttatttctttagaggattgggagttgcagcgcctgttcaacacaaagattctacacccatcgatgtgtggcatagacgtctcgggcatccatcttctaaagctatggagatgttgaaattctcagattttagtagtagtggttttgattcaaaagattgtgagatttgtattagtgccaagcagacaagagattcgtttcctttgagttcaaataaaacaagttttgcttttgaattgattcattgcgatctatggggtccttatcgatcattctgcttgtgaattctcgcgacgatctctcacgggctggtttatacaactaggtggttctcctatttcgtggaagacaaataaacatgatgtggtctcacgttcttccgctgaggctgaatacagggccatggctgacaccttcagtgagttattatggatccgtcagttactaaatgttttaggaattgattgttcacagcctatcacactacactacgatagcttgtctgcaatttaattggctgccaatccggtttatcatgcaaggacaaaacacgttggccgtgatgttcatttcgtccgtgacgagataattcgtggagtagtaaagacaacgcatgtcaatacaaagtctcagctcgccgatatcatgactaaagctcttggtcgaaaggagtttgaagagttcctttgcaagctaggtattgggctatatgggcctcgtttaacttagtccatatcttgtaattaggttaagtcataagactaatgtcttctcttgtatataaggcaacgatcatgtatcgtagcaaaataaaaaaatcttttacatcttctgggtttcttgacagtttttaaatttgaaagagctaaatttatacttataaaatggaaaaaactcatgggcttgtaaccattggaaatacttttagaactttttttcaaaaataaaataagaaaattggctttgtagaagacaaggcactcaattaatggcggcccatattttttaaatagcccaagagcacactatgccattttcgttttaggttccgtccaaaaactaacaatatttttgtcgaagtttttcattttgatcttatactctttttttgtcatttggagtttttgttacatttctttttcttatatctgttgttttttaacgcaatttattttgattctagtagttaaatcttgtattcattttttaataatccttttggtaactcaaaaataaaaattaaattgaaaaaaaaaaaaaattaacctaatttaacatgtttatcgtgtatgccaaacttattttgaaattgggatgtcatcctcttagttacacaaagattaacctacttcgttaagtcttatattatccttaatattaagacaagaataattctttgagtgtccttttcaagtaaacaaagaatataacttgatatagattatttgatggagtataaaagaatatctatcatcgttacctgaaaccaaaacataagaaaaccatatacaaaactaaaagtaaaagcatagatttatttcatctatg

SEQ ID NO: 36710 - DNA, 3003 bp, Unknown
  misc_feature (1)..( 3003): 2750-1469P.txt file - cDNA_ID_3099497; gDNA_ID_2936573; Annot_ID_194822
tgaatctcacatggataataagtgacatatccagaagattatgttcaatctttgactactaaagatctaaaagttgtataaagcaattcttatacgaatgtgttattagataaaataagttataattaattatttctgaaacttcaagacttgaagtctctttgtgaatataactcacattgttaagagaatatctatgatgcagagatggtaaaacagacgcttaaacttttacgcaagtattgttgtcctgtagacacaatattttgaaagaaattttgagaactaatataaacttaaatcgagtgtttttcaaaggctaagaaaacatatgagttatcgatgataagtaatactcatattctgaagtgaatataagatcttacatagttagtcaaatttaatatcgtttatactagaatataaaattttaattattatctcgttattgttttattaacatatgattgattattaaaatacatagaagtaattttgattataagatctcattaagggagtaactgataagcaatgaaaagtaaattagaagttttgaaagaactagaagtttcaaaagaactaaaagtttcaaaagtatatttggcttaaccggattggtcatcctggtttaatgatgatgtgaaagtattgagaattatgtggacattaggtgaaaaaccagaagattctccctaatgatttatcaaatgttacttgctcagaaagcaatatgataatgtgatttttaccagtgtaagtaatttgaactttatctattcgtaagtatatacaaggagatgattatgggttgatcacccactatatgacatttagatacctaatggttataaaagatgcatcgattcaatggacgcattgactcgattgttgcatcgacaagaaggtcatatttatccttgttataaacctgcaacatagagtttgcgagattactttcttgattaaagtacaagagtatttcagtgtttatttataataaccattattggatatccgttgggataagtgtttaacattttgaaattcatgttcatacacaaaatggtttagtaacatcgatacgcatcaagccaatgaataattaatagttttccccattattattggttttgggtcagaaaccaaatagttttcatctaaaagctttgaatgtgaaaagtgctccaccacagcacgcagagatgaaccctcaaaggaggataagaatacatgttggatatgaatgataactaagccatcctagaaggatttatataccgctcgttttgaagactatcatattatatagtcagctattccaacataatggggagaatgtatacagctggtgaaaaagataaatagaaatgaattatcaatgatcctcggagtaaagaatgtatattaagagtccaaaagataattcaattacagaatttagcattgtaattgccagacgcatttgctaacccaaataaagtgatgaagtcacttataccagttgtaaattaaatgctccagaatataatgaatgtcctgtaaggaccaattttaaactgctattgagtcttaagatcgcatgaaacgtaatagaccttggttccaaatataaatatcctcgtaaaagtgaaggagcacaaaattaagaatgaccaaaattgaggaaataaatattttgatgatctcttgaagagagtgaatgatctctaaaagagacataaacatgacaaatgaaacattcaagtacttgacaatgacgagatctagctagctatgtcatgtcaaaatataatggaatcaaaagcaaatcgacgtcgtaatatatttgcatgctatgagcagttgatattatagacaaaaagaaggatcatgaaagaaagtctattgaaaagtgtacacaaagtaatgattagccaaaaatggaaaagaagaaatagacatataattataatctctagtagagatatttggactagtagtctatgcacatgatgtgtaaaacgagtggaaaataaatgagtctttatgtgaaagaatagtgaaattaatgagattttcacaaagataagaaatgtattatgaagagatatattctcttgtggtggatataatatttttttttaagtatctaaagtctgacaataagagacggaacactggatatgacatttatatgaaattcttgaaagatataatctctgaaggattaattatatgagaattatgttctctagaactctactcgatcgaataaaaagaaatatataacatggcatataatcatataaatgtatatttatgttgagtttgtcaaaatatattgatcaaactaatatttgttttgaaaatcattaaaactcctacagagttatcataagtaatacgatgacaataatgtatgataaaatatcactagataatgatatttataagtctatatgaaaaccaattaattttgatcattaagattatggttattaattccaacgagatattgtatttgattgaaaatcatctcctgaagaagatgtttccgagggggagattgaatgatatgcgtgtatgtaccctttttccttataatagtttttatcccacatgatttttttatgacaaggtttttaacgagacattaaagaacacgcaaataatacacttgataaatattaagaaattctatcaatcatccaaatgaatattatacactaatgatatttagagaaataaataagatggtcaagatgaatcatctaaaagattcatgagctgcagaagaatggcgttgtactttatctagaaatttgttcaagagaagatttggcagacttattctcaaatactgtttattctctgccacatcttctaatcatgcagagattttaccaattcatgaagctccccgcgagtgtgtatggctaagatccatagttcaccatatacaagaagactgtggtatgtatgcagggaaaaagactctaacaattatgtacgaagacaatg

SEQ ID NO: 36711 - DNA, 3003 bp, Unknown
  misc_feature (1)..( 3003): 2750-1469P.txt file - cDNA_ID_3099512; gDNA_ID_2936573; Annot_ID_194816
atttgtcaaaacctacaaaccaaaaagcacaacaataattctgattaaatacttttaactccataaacaagtactgacattgattttaatacttcaactcctactgttacttccataggaattctgggagacaagaactggtggaatgtgatatcactaatagtaaaacataatcgtgatactgaagaaattcgtaaattatatggattattctctaaagtttaaagctagaatatggtgaagttactcctttaggtccacatacacagagacactatcaaaaagatcttgcagagcagtttataatataaactagccaaccaaagcataaagattttataaagaatagtaatcgacagaagtgacactgcttggggacgaaaatgactcaactaattaagaaagaacaaaaaagaagaaaaacctctaaaacaaatgattaacattaatcaaaagactaacaaatttcaaaaagccagcttggatccttaaggtggagaacaaaaatgtcaagaaatatgatggagaattagataacaagtgcatatttgttatgatgttttattgaccaggcgccaaaataaagttgcctcttttttggtttgcctaattaatgtttgcaaactcaaaaatcacttatcccctatagatgattccttaaattgagcctgaaactcagcatgaaacaccaaaataatcaaagataccaaaatgtttcagaatctttatttgatgcaaactaatttttaaagaaaaataaaaatcactcaagggtttcatgaataaaataactacctaagaaccataaatacaaggttaaacagtgtaaaatccagcaataatggtgacttgaatgctatcatgcatgcaacaagttcaatcgccagatttcgaaaattttacagatttaacatttggtaaatacaaaagtagatttgattttcgatcaaactaacaattcttggtttaaaattagatgcgaggaaacataattattgacttgattagtgaatctataactagtaaatcgaagctcatgaatgattatatctaatttaaagttgatcatgttgagaaattcaagggaaaaaaacccaaatttgaaatacaaaatcatcccaaaacccaaattatgttcatcaattgcaaacttggtaaatccagaaaacagagaacaaaacactagattagatcgaaatttaactataaatggaaaacggaacaggaaacaacaaagataacatttttaccaaaaaaggaaagaaatcaaataactttaccagccaatgccaaccaccgagaccgacagcttttttgacaacaccttgaagaccaacaagcaccgatttcgtccggttgtttccggtgaccaccacttttgtatgacgtggcaataccgataactcttcttcactactgcaatcgccgtaaaagctctgaatctgcgggaatcctccattcaccactcctgagctatctacagcttccagcattcttcttcttcttctctaatctaatctgattttagacctgaagaaatcaacagacccagttcgatttttttcagctttgaacactgatagaaaatcgaagatcatgcattgctgagagagggaaagatcagatgattgagcgggaaaagtggagagatatcgaagtaaaataattagggtttgtcccacaagaagaagcagagagagaagaagagagatgagagaagaagaagcagagtaaagagaaggtagaggaggagggaaagagaggatgatagagacaggtttttcaccacggggaccaattagaagaagccatgtcagcattgtactgaaactatatgcgttatgcaaaaacagaaccggtttttttgtttggatttaaccggaggggtacttttggtaattacagaacacgcgattgacctgaatggttgactggtgtttaataaagacagagatagatgggacccgtttttatttaaatgacggttatacccttagtcacgtaacttttttccatagtttgaatttttttggatcttctttgtccttatcttataattttctttctttcataattattgctctctccattactagatttttattattattgagaacaatgttttactttatgaaaaccaggttctcaaaacagcaaaataaacgaaacaagtactgcttagtaagtgaaataaatggatcaaatacagtaagataaacattgaacataaactttaaactcatataatggctaaaaagcaatcaaattggtcgatgggataattgggtatattagatacagaaaatctaagggatttaatgttgtgtctctttaatgataacactattaaacacacatcgatattatcatcaaaagagctcaagagacgcaaatacaaaaaccttttttcgaccgattataagaaggttttataaaggttttataaaggtagatgatcgatatgatctatgaatattttatctttctttttttgtgttacatacaatcatacatgattttcttactatatgaaagttacatgtttggatcaattatttgtccaaaacttttatcgagtcattgtcattgtcacagttaacaaagcccacccaaaaataaaaccgtccccatatttggggaaactgtcaaagcgacccctcaccaaacgcctgcttcaattattcgtaacttttaatgcttacccttactaccattcccctcccataaaaatcaaaattttcattcttttgttctttattgtttttaaacataaacctacgaaatctagaggctggaacaaaatccattaattaccgggaaattttcagaggatttgcactaaattaggggttacttgttacatttcaaaattaggtgactaattgtggtcaattatgaaaattcgaggggttaatgagaataatcctacacgtctgtctctatcgtcgtctttgagggttttgtttgaacaaagagactagagagtgttggagccgttaaatg

SEQ ID NO: 36712 - DNA, 3003 bp, Unknown
  misc_feature (1)..( 3003): 2750-1469P.txt file - cDNA_ID_3099559; gDNA_ID_2936574; Annot_ID_194883
acaatcacacaattattttctccttttcactaattttatttttactattatttcatcatttagcaatgcctctttcactgtttttcttcttttaaatttataagttagtgtctttattttttaaacgtaaatgttaaaaaaaatacttttatgtcacaaatgttaaaatattctaaacaaggatgatatgcactaaaaatatctatgaaccattttgtcttattgttctcttgtaatttattttcttaatatgtagatttatttagtgtatcatataagatagtaaaatacatgaatatgttttttttaaaaataagcatagttaacaaaataaaaaattacacaaaattatttgtttttaacagaattatttgcatgccactagaaacccatatcaaaccattaagggtagggaaggacgctatgcagaggtgcaattcacatcggagaaccatgcagccaagattgttcagctagcccgtctatcttacaatagaaacaagctaaaggtttataatttggagttagatctctgccgtgaggatagagctacagttgaaaacatgattgagttgaggaaaagtttatttcggataccaaactacgcggaaatattctagtggctaaggcggggtgtttcctctctgggaatatgccaaactattagagttattttgaaaaattattcacctctccctaaactgggaagcaattccttatcgaataaagtttcattttggaaacattagagtagcgatgttgcattaaacccatataaggcccattaggttttatttttgccgctatcgtccttatatttaaaaactttcgactgtcaattagggtttacgccactaagagatgctggcggcaaaacagagaactcccaaaattaatatagaaactttattttaaaatatataatatataaaattttgtatgttgtagcatgggtcgagatacatatggttttatatggttttaatttatataaaataaaaaaactgtacaaaccaatcgtaaccaaatcgaattacatacagtttctatatggttttagtttttataaaaccaaaactaaacctaaccgaaaccaaaccaaaccaaaaaaattgtacccctatccctataacaagtaaatatttgtattatgtatagaatgattaaaattgtattataaaacagacaataatccaactttaaataaatatttaaaaattaatttttctccgtgctaaaccaaaacagattatgatctagtgtatactttatgattctttttcttatacttacgtttggtgtcgtgtattgtgttttttaaagctatataatacgtataagatataattgtaactcttactttatgtattatatgatgattcaaaacaatttaaaaagttaaacaaatatgatagaaaagtcataattttaaactttaatcaaatattctaagttttaactatgtatattgttaaatatgaaatatccggtgtaagagttggattaaatataacttatccaacaaaatttttatgaacaaaattgtttaacgggatggataccatttttatcaagaaaacacttttacttacccgccaaatagtaagtacaaaaatacttcatgtaaggcccaatgttttgcaataaaaacactttggtactaaaaatatcgagacccccatattaaagttttctaaaccatataagggcccattaggttttttattttctgctatctaaaagctcaatttagggtgtttagagctacaatggatggagttgaggaaagtttacttcggataccaaactacgtcggaaatattctagtggctaaggcggggtgtttcctctctaggaagatgccaaactattggagttagtttgaaaaatattcacctctccctgaactgggaagcaaatccttatcgaatggagttttcttttggaagcattagagtagcagtgttgaattaaacccatataaggcccattagattttatttttgccggtatcgtccttatatttaaaagctttcgactgtcaattagggtttacgccactaagagatgccgacggcaaaacagaaaaatcccaaaattaatatataaattttattttaaaatatataatatataaaattttgtatgttgtagcatgggtcgagatacatatggttttatatggttttaatttatataaaataaaaaattgtacaaaccaatcgtaaccaaatcgaattacatatagtttctatatggttttagtttttataaaaccaaaactaaacctaactgaaaccaaaccaaaccaaaaaaatcatacccctatccctataacaagtgaatatttgtattatgtatagaatgattaaaattgtattataaaacagacaataatccaactttaaataaatatttaaaaaataaatttttctccgtgctaaacaaatacagattatgatctagtgtatactttatgattctttttcttatgcttatgtttggtgtcgtgtattgtgtttttttaaagctatataatacgtataagatataattgtaactcttattttatgtattatatgatgattcaaatcaatttaaaaagttaaataaatatgataaaaaagtcataattttaaactttaatcaaatcttctaagttctaattatgtatattgttaaatatgaaatatccggtataagaattggattaaatataacttatccaacaaaatttttatgaacaaaattgtttaacgggatagatatcatttttatcaaaaaaacacttttacttacctgccaaatagtaagtacaaaaatacttcatttaaagcccaatattttgcaataacacacttttgcactagacccccatatgaagcccatattaaagtattctagaccataagggcccattaggtttttactttctgctatataaaagctcaatctagggtttatgtctctgatagattttacaccaccgaagccgaaaaaatg

SEQ ID NO: 36713 - DNA, 3003 bp, Unknown
  misc_feature (1)..( 3003): 2750-1469P.txt file - cDNA_ID_3099562; gDNA_ID_2936574; Annot_ID_194882
tgctctcagcacaagttcttagccagtctgggttgtggcatgatttctggcaagttgtgatcatctcggatatgttatccatgaagagcagtgctagaccaaccgtgagatccttgttcgtgcacatatcgttagtggtcttgtgaaatgaatccaaatccaagtaattgtggacaatagtcaccgcgttcttctctacagaactcaacatcattctgttctctagagcatcctcgtttttcctaatcaccgagtccaaggacttgctagcctgcagcaatataagccatcacatataaatatctcagagcttgatggcttacaggtcaaagttatagacatcttaccttgcacaagatgttgaccatctggtaattgccactccaacgagatgaagcatcgatgggtagtttccagttgccttcttgataagctgttgtcaactgaatgaaatcatcagatagctctgtggacgcgtttaactcttgtgtgaattctctaaccttagagataatgggctttatagttgctaacccctcatcaataatatcattcagagtttgagcggcacagggaatgtagcagaaaggtaagaccttttgaccatcaaagtactccttcaggctatgacaagcgtgaatagcgttttcgctgttgtcatgtgtacaacatagaatcctgtcttcaatggcatatgtcttaaggactttcaaaagggagttataaatctcagaacccccagagggataaggaatccgacatatgtcgagcagcaacctatgagacgaccaattttcatctatccattgacccgttacgctcatataaaaaatgttttcatatgaattccagaaacttaaagtgacagaaactttggactggatatgctccaaggttgtcttcacatctccccgcatacttgtgaaaacctcatcaagtatggctttatatttttcagccggccataactggatggatggcttaagaaatttgaaggagtttcccaaccatgtttcgtctacagtagagggaggaagtgatgacaaagcaagccacttgagaactaaccagttaagatgatcataatcgagttgtggtactttcgactgggattgtgacggtttaacaacagccggtggtgtctgtggtactgatgagctggtgacaacatctgctgctgccttatcatagcctggatgtcgattagtcagatgccttccaagatttccttaagagcaggaaaacagaacaagaacaaaaaatatgttgttagtaaaatcaaaaggacttggaataaaatgcagaggatataagaataataccagtagctgttgcaatggaatagctttgtccacagaacttgcatttccgagttttgctgtctggtgcagtctcgaaatatttaagataaactgatgtcattgtcttcttccgtttagggggaaccgaatttgacttatcagaagagcctaatccaatgtcaatgggatcagaatgtggaactagtgtcatgtccatcatggctttaggttccatttctacaccaagaagcagccacaaaatatcataagtggttctagtctcaattgaatgaacaaacacatacactgagaccaaggtaaacaagttccatactttatcacaaattatcagattgatgaatcttcatattcagttttcaatttacctttgtaggttttgaatgcattatttacattccactccattgattccaagcgtcttattagtctctgtgaaacgatccgtagagtaaaaaccgttgcgagagagagagggaagttatttttttggagggaaagcagaaacagcagctagagagaaagaggatcggcgctggatctatgagccacagatctgagccgatttaagggatatgaccttaggaggatcggcgagtcgggagattcgtcgatctgagagatgggttacgacggcggatccgttgatttggccggaggatttgacggaggagaggagctagggtaacgaggctggctcaataatcggtcggctggttttgggaattgagaagttgagaaagtaaaaggctcagctaaatgactccagcgaatggctcaggtctggtctgattttcggctcggataatatttaatttattaattttcggtttaacataccaccaaaattagtcatgattattgcttattggctcatcaggattttttttatgttttatataaatattaaatttcagttataaggctgattattttttattccgaagtgtatatatcttggaaaaagtgttcaatgagttggttttgctagaaagaaattataagaaaattctaattaattacataattcaaccaaaccgaaccgaaatagaaccaatgtatatcaactagtacattttatgattttcttaccaggacaattgaaactatttctttgattataattacttttcttatacaatgtgaataatatgatatgtcatggatcaacttaagctaaatttagtctctaacatcctgattaatcacagaaaggatttagttcttatgttttgtttggttttatttaggacaatcacaccaaagttacataccaaaccaaaatggtagatttaggcccaaatcaaaacggaaaacccaaatatattcgcatatttagaatttatgaaaaaagcaattatgttcccaatcgcacacctgtcacttatattaaaaaacaatattaactgggcccaaaaaaaagctatttatgaccgttacaataaagtttcaaaaaactctcatttttttttcttaatttgcgtttaatctaaagagtggaaaatagcaagcaattaatctacactctctcaaagctttttcattttgaccaacacacacttctccagtccaatcaacggcgtttgatcaatcatatatttcaactctaaagatcttcttctttgctgggttttgtattttggatggtgagaaaatcttagattctgaagaacgaaaaaagatg

SEQ ID NO: 36714 - DNA, 3000 bp, Unknown
  misc_feature (1)..( 3000): 2750-1469P.txt file - cDNA_ID_3099572; gDNA_ID_2936574; Annot_ID_194880
ctgtgccgctcaaactctgaatgatattattgatgaggggttagcaactataaagcccattatctctaaggttagagaattcacacaagagttaaacgcgtccacagagctatctgatgatttcattcagttgacaacagcttatcaagaaggcaactggaaactacccatcgatgcttcatctcgttggagtggcaattaccagatggtcaacatcttgtgcaaggtaagatgtctataactttgacctgtaagccatcaagctctgagatatttatatgtgatggcttatattgctgcaggctagcaagtccttggactcggtgattaggaaaaacgaggatgctctagagaacagaatgatgttgagttctgtagagaagaacgcggtgactattgtccacaattacttggatttggattcatttcacaagaccactaacgatatgtgcacgaacaaggatctcacggttggtctagcactgctcttcatggataacatatccgagatgatcacaacttgccagaaatcatgccacaacccagactggctaagaacttgtgctgagagcatggcccagaaggccagaagttacaacactcaagtgtgcaacgtattcacttacattacagccattcttgacccgcggatcaaaacagagtacattccagagacgattaatctcgagagctatatagatgaagcaagaagtcatttcattcgtaactattcttcctctcatttcacatcttcaatgactagcgggtatcgtcctcaggaggtagatgaaggaggaggaaatatctcatttgcagaggaaatcgctagaaggaaaagaagaggaagtatgagtaacaatgttgttgatgaactgactcagtacttatcagagtctatagttccaatgcagactgatgtgcttgattggtggaaggtaaacagtggaagatacccgcgactttccaacatggctcgggatttccttgcggttcaggcgacttctgctgcaccggaagagatcttttgtggtaaaggagaagagattgataagcagaagtattgcatgcctcatgatagcacacaatctgttatttgtatcagatcatggattgaagctggtatgaaactgaagtacaagtgtagtgagattgactatgaacgactaatggagttagctgccaccgtggccgctgataattctgccggaggtttagaaaaaattcaacaacataggtgagattattttttagtatttgtactaaagaactactgtaatttagttgtcatacttttagcatgaatcattgaatttagagttgggttgatgtaaaccaagctggttagctttcttcataaccgtatgtactttcatatcatattagagagaaaaaaaaacacaatgttgactaattaatgggttctgtctaactagaaaagtggaaattagttgtacgaaaaaagaaaatagcttatctctttctttgtaccttagatttttccttggtataatggatatcgatatgtccaagtccagtgtttgagtgaccaagttgttgctttaatttaatctagttcaaatacgactacttttgtgttgtacctctctaccttaccttcctcgaattttcaattcgtgtgctagtttgccaattgtttctttataattttgtcgtctctatgattgtttaagcatatttaaatatttgagagaaaaaaatactaagagttcagtcgtattttgaaaagtcctcgcactccaagttttaaagttgaattcattctgtcatggaaacgtacctttgtggtttttcatttcgatagacattttttaactcttctgataaattcaaaatgtttttttacattggttaaaatttgttgccaatttcaataaagctttttttttactcgttataaaattaaaaacttgctgagaaattatagtttcatatatactttggaccgacggtcaataccaaaaaactaaaataaaattttggtcaagaatcgggtcaatacaaaatatctccaaagatcgaagagaaagttcaacaggattttaatttaattggtgttccggacctgccggcgccgtattataattcttcaataaattttatattttggattgcataatcaaaactatttgcatagcagacatagatttcaaaataaattgatacgtaattagctatttacataggcaagacaattttacgttacatattttgcatgcttgatattcattctttttttttagcaacctttgctatattcattctattttttcccctttttttgctactatcaatatcatatcagatgtggcggttcttatgcatgggattatgaaaaatgatattatataatagatgtcttcgtagtatttttttattgacaatcaaaataaaataaattagtttaagaaagatcaaaagtctagtgtcaaaatgtccactgacaaaagttagcagtttttcttttatgtaataatccgattataaaaaattgcgttaaggaatcataatgagccatgtgtcagtcatatttaaacgacgacgttggcagcagccacacgtacagcctcaggcaagcataaatagagatgggctctttcctataagtttcccactttgcaaagtgtaacacaaacagttctctttagagaaaaaaagattctctctataaaaccttctctttgtgtctctctttgtggtaagaaaacagagcaactagatctctcttctcctctgctcgttcaatgttataacgatctcgagtatcacaaaagaacaagatgtctattcgaagaatctaccgatgtctgaattctttaatcaaaagatcttgtgctcaatctctatgatcatacgccccatttcacactttgtttcacctctcagtttttttttttgtgtttttttgtccctctttgtttcacttgagaacaaccccctttgaactcgatcaagaaagctaagtttgaagaatcaagaatg

SEQ ID NO: 36715 - DNA, 3000 bp, Unknown
  misc_feature (1)..( 3000): 2750-1469P.txt file - cDNA_ID_3099578; gDNA_ID_2936574; Annot_ID_194878
aatcaaccgggccatatctaattttctttttcttttcttcctttaatttcttaactttttgatctgatagtcgatttaaagaggttgatacagtagtttgtggataaatatatttaaaataatttctaatatcataaataatgcataagcatgtgggtcgtcactaagtcattgccggtctttgcagttggcactctgtgtagtggccacattcttgtgcatgcatgccttttgacatttcaaaagtcccatgacgtaacgatataaacagtagtatacccaaccacatatatgtattaatttttattttcaaggttgtgtcatcactttacatttttatgttcaaagtatacaggcgaaagaaattataaataaaaaattctgatatatgtatggttggaaaaatttatgctctctagttcaattaaggttcaatatttatattttttgacaccgtattttaacaagagaaaacatcccatataattaactatcaaaatttataattaagagaattatagaatgactcgttaacgggaaaaagtgagagaccatctatttaaaagatcaagtagataattatttgatgaaaactctccatttttaacttctttttagagtcgcattctgtttgccttttagagtaccatataccgtaattaaattttgaaaaatattcaaataattaaaatatgaatatgtaacattgttttataaaaacataaaatgaaaatataagtgtgtttttttagtcaaattattgagttctatttatcaatatgattttacttactgatataatacatattaggtgagtgttataagatggctgattctgatagattcggcacctatatatattccaattctacttttctgcatggggatgaatatggacgacctgacaaaaagtagtaccacttctgaagttgcatcatatcataccacttttgttttcacataagaacattgttgaaacgatgctaaattttaatatggtatttggttagtgttgtaaataatatataatactaataaattgcatattcacaggactgttttttcgctttaaatctgcattctatatatataggactataaatcttaataatctattcatattttactaaaaaacattttaaaggcttgtttttttaccgatttgaacaaacctgttacatcataatgacaacgttggacactaattaaatctaacatctgattaatttccgacaaaccttattggctgcttcttgaagcactaatatatagctttttaatttgtatttccagtaatatatgcttaagtcttaacatacaaaaggtaagagcactgagcacacatattcatagttgaataagagatccaagtaggatgcatacaaagtgattaaaaagaacaattcaatcaatcgatactgtatttactttgataggtgtatagaaaatatatgcgagtcgataatatatgcgattcgatgtaaaggtgctatcaccatccaacggtttcgtcgaaagatcaaaacaaaggtgattctatatatacactatttcccctaactttatttccacttgttacagataaattaaatctccattaaaggacaacattgattgctgatttttagaaaagtaaacaagtaaagttgtgattgctcgatccaacatgttacgtggagattattcagctctaaaacaatgaattcatagaaccttaattaatcattacagatacttgatttttttttttgggtttaaaataagttagttggcaccaataattctcatagcaccttaattgatccgttaataatagttagttccaatatcacctgtaggcaatacgtcgtattccctaactcgctttaatgggaatgagattattatcatcactataggctagtatatccactaaccacacatgcacttttaaagcatttttggaaatgagtataatttatcgatagctagctagtagagccgctaaccacacaattgtaaaaccgtcggcctttgtaaatgtgtcgaattcatttaaagtcaaaactccgtttcatttaatttacggatacaaatacaaatatagactcgtttttaggaaaaccaatcgaaaacaggtaactttgtgtagaaaaagaaagatttacggatttttggtctactaactaaacatgttatccgaacattgttactaagaaacttaagactaatacaacaaaacaaaaaaaatggatctagagatcttaaaagaagcgatattcgccacgaagatagatcactcgttttggcggtagattaactgtcgagaggttgccaaccaccttgaaatgcatattttgtgtatttggtttttctttttcaataacgtttgttaccgtttattcgatttttatatcgaaaaagtccaaactcgaaaaaatcgaaaagaaagaatttccaaatcaaacgaaatgaaagtagacaaagttttaggatagtaaattagtaacaatttcttataaaaccaaaacaaatcgaagaaacggaaccgaaaccctaatcgagatcccttccttacacaaatctatttaagactgagtgatagggtgttaatagacactttatatacttcatgtctcatctgtaaagaaaaaattattggaagattaatatgggaaaatttgaaaaagaagttaaaaacatttgataatacagtgtctgtcatttagtaagccaatgaatttagatctggaaaacaaaaataacatatttggacagtgaagaaagaattttgatacactcatagaaaacccgaaaggagaaaagcaaaaaagccagatcacaatctcaaactcgcttcttcttcttcctcactctcttattaggttcagttccttttcgattcttcgtgtggatcgctgtcggtagatttccgatttctttaggttctgctcgaaatcgtggtttagtgtttattatcatcgattcagaaaacggtgggtaaacttgtagcggaagatg

SEQ ID NO: 36716 - DNA, 3000 bp, Unknown
  misc_feature (1)..( 3000): 2750-1469P.txt file - cDNA_ID_3099589; gDNA_ID_2936574; Annot_ID_194875
tggaatatttagaaatgttaaattcaataaatggaattatatcgtttgacatacgtaaataaacaaaaatacacggaatgtttacatctattccatttaaatgttctgataacttaaaaaattctaatcataatatggagtaggatttaactcgtgctacaccacggagtaaatattttattcatacatttaataatattaatttttatggttttagtttaatattaaagttatataattttatattaataatataactaaaaaattggtgatgataaaataataaaataaatatttaacatgtgttatatcaatccaaacccgtcctgttatattttatatcaatccaaactcgttccgttatatttttcgtctcatgatctatttttttttatataagtttaaatattagttatggaattagtcgggattgtgattttatgccgaaaaagttatggacttttaattccatagaatattcaaaccaagataagaaatgtttttaggtgcacatataattgggtttgctcattttacgggatcgtaaatgtattttggtttgtttcacaatgtttgttttaatttattgccgaaatttaatacaaataattcaaatagttcaaattttggttgttttaagatttagtgaatattgtaggtgagataaggagaaaataatctattgtatttggcgtgacataagggattgccatatatttcgaatctttttggtttgttatagaattaattgccctaaaaaaattcaaaccattaattaaaaaaatcaaataattaaaatctagtggcagtcattgtaaataaattccaactccaagatttatttcataaaatggctgcaaaaatgtatatgtagattagtgaaaaagtatagatttgtttagtgctctgagcactgtgcttataacaaaaaaatatttatatatgtttcgcggttatggtttattatctactctgaacctaattatctttatagagtacattttaagtagatttttttatggtttattattaatttttttgtttcatctcttatgctttattttctaaaacatgattcagtttcaatcacgttaaatcatatatatgaaagttgaccaactctctccatatgattgacacatcatcactatcatcactttagcatttgctaattgtccactgaataattaatgtaaactcttcaacttataatttatagattaatgatgtatttattatttaattttatatatttaattgtactaatattaaatttatttgttattacatgtttttcaataaaattatttgattggttttctcatacttaaagattttttctgtaatcttaactcaaattatgagtgtatagtagttatagattagttaatagtttgaataatttgcatattgttaatgacacatcatcacacaacaaagtgacatatgtcattcgatgttttttaaattaataaaactaataaaattaaataaacaaattaaatatattatcaatcctactcttaattgatttctccaaaataaaaataaaaaataaaattatgtaaacaaattaagtactactttcattatactctttttatttattaattttttttatcatcaataatcataactaattttttattgtgttgtacttgtttgctacctaacctcttatttgtttagtaatttaattttgagtctttgataacattgacattcaaattttttcaaataataaaccttcaaaatattagacctaccaaataatgtaatacacgatcatttctcttatagtgatatatacaatgacaaaagatctaaaagtattgactttaatgatactttaatttttgaattctttttattcttttcatatgaatatttttgaaatcttgttcagtttatatcaattctatatatttaatcatgagcctataacaatattgttggagtattatatctggagaataaataaaactataaatagtttatttataatcaagttgaacaattttcaaatcatccaagacacaatcatttctctaatattgttatatgcaatgacaaaagatccaaaagtgttgacttcaatgacatcaatttttgctatatttttatttttttgtacgaatactcttaagatctttttcagttgatatcaatccaaactttaattatgaatctatcacaatatttttgaagtatacaaggaattgatttatttataatcaagttagaaaaattttaaactacaaaaataacattgttacacagaattgcatcaaaatatcattattgtttttatatgtatttatgaagtaaaaaaatattaaaatcttataaataatcagctttatacacaaaaatatataaattaatatttcaagtaacaaatgaatctaaccataaaaattgtaacttcaaattatgcatctaattttattaacaatacaaaaataaacaaatagtaaatataaattaacataaagaacaatcaagttctaaataaagtaacgaaggagagttgcggaaccgctagcagcacttgccaacactttaacaattttcaaaataaacccacgcgtaacatgagtactcatctagttattaaaaaaacacaaacgaaaatccttgtaacgtaaatccttaagcctcgggacccatttcactattttaagagacttataaacaaccagtaaatactcgacacgtcataaaagtgccacgtaataaagtaaagtttttttttttgtttttctcttcaccaggtttttcaattttttttgtttgttctcttctttaatttatttttccggtaaccgaataaaaaacctaagcaaaagaaatgaagcagctttatcatctgtaatcgcccataagatataatttggatttctgattttctttcttcctcattcctcctcctcctccaaaaaagaacccatttcattttcccgcactttctcaccccaaacgattctcgcccggaaaatg

SEQ ID NO: 36717 - DNA, 3000 bp, Unknown
  misc_feature (1)..( 3000): 2750-1469P.txt file - cDNA_ID_3099592; gDNA_ID_2936574; Annot_ID_194874
gacaggttgcggcaaatcccctttaattcacctattgcctatctgattcatagggacatctggacagggattttctcactctaatcatttttgtttccggttaataggtcttggatacgatgcaagatttgatcaaaatgtagggatgttgtctctaaagaagcaattgaagataaaatgccaagaacaaagtcatgcaagttccttgtacgataaatcacttgtcagaatcaatatggatcatcaaggtgtgtttaggcagactctgcgctagtcaatattagattgaaacatacaaaggtagcattttttctgtagcagaaactcactagtttgtatatgcttgattttattgtaggaagaggaaattttggtttgaacacttgccaatttaatgaaggaaagatgatgtttcaagcccggataaccgagagttacccggttggttacactatggaaacaatgatagatggaaaagtgcttcgtggtgttttgttttcaaacaagcgcagctctattctgccggcagatcaaagctttagtaggtgagtggttaaattaatcttcctctttccggggttttcagttgtgtgcatcgttttgtgaacaagtgtatttgttgtatagaaagaggccagctatgtcgaacggggatcaggacaatagatcaaagatatcaagaactttgatcaaggatcaagctaatgctgtagaatccaaagattctcaattaaacggtatggaggctggtattgataccatcagcaaccctctgggtgttaacataaccacagtggcagtggcaccacacgaaacagaaacctctgttgttacttctgatgccaagaaccaagatgcaagtcaactcgatatggtgcgtttttaaaatcatatatcctcaagaacctgtctttagtcatttcgtttctgaaaatgccgattatgcaatttcttgaccctaaaatactgaaaatctttgtgcagggcactgtgaatacagtgaatacagctccatcatcagttcctcaggttgatgaagcgtctttagaatctagaaatgcgattacgatagatgatagggctaacaagaccggacttggagagtcatagctacaaaaacaaaggtgggctaacgtctttaaagtccttatgatcgaatctttaggctacacaaaaacagaagaagccattgcatctaaaactagttgggtctaactctgttcgttttgagcatttgatttacagatgagagattctccgctatgaacagaggaacaacagcatgaacaacatcatttcttttcctgtacattagtctggagatagggtgggttttatttagaatctaagttagattatcgtggtcactggtgaggatgatgagaagctagctctgagttaggttttttcttttccttcttttcttattctctgcaattttctccttttttcgggtttaattcaacttccaagcaatgttatgcttcctccctcatagtttttatttttttgcacaatgaactagcttaaatgtcagataaaaatggtttattctagaatgtggagtgattcttctaaactggttttaccctttatcatgttatggttttcaatttcaactctagccttgtttactctttctagagctagattagaatttggtcgatcattcagtaggaaacataaattttggagataacgtagaagaaaagtcaaactagtcctagttggcaatccaactactaaaggctaaagcatgtagttccatatccaactaatttcgttgttgattagcatagcatgtgattctatcaacctgtttacatgaaaacaaaatttctaaatttcatgtaacaactacttcgtttttcttctttttgctcatgtaaaaacatagagaagaaaacttattttcatttattttgatggcctcctttatttcccattatatttaatagtgcttgcaatgtattttagaaaaaatgggaagaaataaaaagaaggataatttggagaaaatctaaactagaagacagaagtcacatgcagagggagacatctaaagaagtaatcacatcctacttccttcccacatggattcatgatttgagagaatgcgtctgtatctccaattctcatgaacgatctctctcatttctatttttattatccatattacttactaaagataatctaaaatcttggagcttttaagtctttaagagtgaggaattggaacaaacaaacaatatttacaaaccaacaagttcctccttcttatgtggctgtctttttgttttgttctctgagcagaaccaggaggaaacattttgcagaggttctttattcttcttcttctttgcttggcgctttctttctttccctaaggttttgaatgtacattctctgatcagtgatcttcttctgggagattaagttttcagacaaaagagcttttgttctgtaataatggagcttgtcttattccttttggggttagtggggatttgagaatctaggtgttgaaaatagggtttaatagattcatatgtttctgctagcctagactctacccaatttaccacgtataagaaaaaagcgaatttttcattatgatagggatttaagctatgtaatttagctggagagcaatgggaaatggcgttcacattgagctttgtcagggcaaattttattggaatgtgaattgataaaagctggaaacttttggaattatatgaaatatggaaagtggcgtcgttctcgttattagttggttccatggtggttgctattgatagagatataacgaaagcttacgtttttcccaaattaggatttactggaagcacaataaagaagagttaagacactgtcactacagagagaagagttcaaattctctcctttttgttaccagtagcaagttccggcgccggagattcgccggagaaccctcctggtttcaggtgaacttctagctatttttcaccattcatg

SEQ ID NO: 36718 - DNA, 3 bp, Unknown
  misc_feature (1)..( 3): 2750-1469P.txt file - cDNA_ID_3099603; gDNA_ID_2936579; Annot_ID_143746
atg

SEQ ID NO: 36719 - DNA, 3 bp, Unknown
  misc_feature (1)..( 3): 2750-1469P.txt file - cDNA_ID_3099611; gDNA_ID_2936579; Annot_ID_194892
atg

SEQ ID NO: 36720 - DNA, 3 bp, Unknown
  misc_feature (1)..( 3): 2750-1469P.txt file - cDNA_ID_3099623; gDNA_ID_2936580; Annot_ID_143747
atg

SEQ ID NO: 36721 - DNA, 3 bp, Unknown
  misc_feature (1)..( 3): 2750-1469P.txt file - cDNA_ID_3099633; gDNA_ID_2936580; Annot_ID_194893
atg

SEQ ID NO: 36722 - DNA, 3000 bp, Unknown
  misc_feature (1)..( 3000): 2750-1469P.txt file - cDNA_ID_3099640; gDNA_ID_2936581; Annot_ID_143764
gaaactaagatgtagctcttcaagattgagatactgagatacagattcggggatcgagccattgaattcgttttgagcaaagtttagaaacttgagactagacgatgaagacatgtttccaaactctacaggtcccttgagatggtttccctctaagttaaccctttctaacgtgggaattgtgaacaagaacgtagggaaagatccagttagattgttgaaactaagatctaactctatgagattgagatattgggatagagtatcagggattgggccatcaaatttgttttgagaaagaaatagatattgaagcctagtagatggtgaatacatattcctaaactctataggtcccttgaacatgtttccctctaaattagcccaacgtaatgaaggaattgtgaacaaagatttaggcaaagtcccggaaaatgagttttcaccaacattaaaatagtccaagttttggaatccactcatgtcaagtgggagcatggattcgaaggaattattatagaggttgacaacgagcagttttgttaaattggagaatgtaacaggaatattgccactgaatttgttgtgtgaaaagatcaagtattctagttgggttaggtttcctattgaagctggaagttgacctactaacttattatcccaaaggtcaagaattgtgagtcgagaaaggtttcctatagaaggtggaacttgaccaactaaataattatacgaaaggtcaagaagtgtgagacgaaaaaggtttcctaatgaagaaggaatatctccatagagactacaattactaagggttaagttatgaagatgttgaagtttgaaaagaccactatttggtttcaatgagttattaagaggaacatgactaaggttaagtgaaatcacctcgctagatatagcatcgcacgtgacaccctcccaagaacaacaatcaatgctcttgttccatgaacttaacgatacatcataaggaatttggttggattcatttacccgcggaaactcgtgtttgaactccagaagagcattcctttggtcatggcggcaatggcgaagcgtaggagaagcaagagtgtgtagaaagaatgaaaccatgaagaaaaaacagaagcaagattggcttggaatcatcattacttctttttttttttgttaggagtttgtgtggtagtttataggttatcctgatatggcttctttggctctgttcaaaaagcaaaaaaacgaaactcagttgcttaatttgacttgcgcaagtctttccaatgctctctttgactaatgatttggcctcttgccataatatccatcacaaaattgaaaactctcttcttcgttattaatgtcaagttactttgggtttctataggtcatgagtttgtatttgggctttttatttgggccagatagaatcagatgtaaccaagtctatttaatccgctgtcgtttttaaatagtttatctattttttttttataagaaaaaacaaaaatgattaaccctatctaaagttgttaaaaccaaatgttttagcaaatctaaccaaatatttttttctttgggaagctctaaccaaaaatgattatccttggataattactcaattagtaagatcttcaagaaactgatttcccccattattattttatttatatttttcggtttataaaactccagtaatttcaaatataatcctctgctaccgataccagaatccacacaagtgaaactaaaacaatccaacgatgtaaacaacctcacaatccacgtggacgttcaagatcacacatgcactagcttcagatattaagagtgaaacaaaataaaaggaagaaataaatcgaaaaaatggaaaaaagtgacaaatctggaaagctgattggctgaagtcgtccatgtattcaagtttcgcggcaacacctctcttctcatttttctcattccctaattcttctatatctctctctctttctctcacttcctttttttttttgtttttaaacaaataataatctttctttcttcttccttaatttgccttctctctctctaaaacccttgtttcaaatattttctcatcgatctctttttgaaactaaaggctcgagctttctctatctctctttcgaacccaccggtggttcgggtatctctctattcactcttcaagtcacctaattggttagtggatctgcttcgattagggtttttaaaaggcttttcctttttccgtttcaaattttttcttctttcgactctcaaaattttcccggattttttttttggattctttaacactttctgtgttagctctttttcttttgactcgagttccgttttttctcagctgaggtttagtgggtatttttggaagctcactcgattgaagttttttttttttttttgaggaatcagtttcagatttgtagaatctgcgttttatttatatttataggttagcgattgaagtttcgaattcgattttgttttactatctgaaatttaaacaattttctcaacacattttctcaaattttgtcaaagctcctgacttttgtggatgattttcgtgtttcttcactgtgtgtaattgattccttaatttggtgtgttttttaaaatacccaaattctgattttcgttaatatttcctctcatctcgattactgcagctatttatcttccccaacactgctttttactgatccaagaattggttctactcttttgttaaaaaacgtagagttttgatttttcttagctctaatccctaaaccctaaaccctaaaaacgtcttgatttttcccctggtgaaatgttgaaattcgtagtttgtacatgtcttagaggaagccaaatttgcttatcgacttagtgtcgtatcttgtccgtatcagtttaaagtgtgtcttttgtcacaattgcattttttggtttctaactatatatttgaatatacttgtgcagagaaacgtgcaaatg

SEQ ID NO: 36723 - DNA, 3000 bp, Unknown
  misc_feature (1)..( 3000): 2750-1469P.txt file - cDNA_ID_3099660; gDNA_ID_2936581; Annot_ID_143760
aaagaaaccaaaaattcctctgcattctcttcagtcaaaacagagcaagtaatcatttgtccacttttataaaccggagtgacacgaaccgaactcttccaaataacccaaattcgtcccaaacgatggtgttcatagttagtcatagaagaccacccaggaaataccttagaaatgatcttgctagcactagtttcatccaccctcgtttctaataaacccccaaaagttaaagactcctttctcacccaatcacgaacaacggaatgtttatttgatttgttaaaaccgcgcacattccagaagaaccccgacatttaatgatgttttttggagtttcttctgctcgaattgctggagacattgtctctagctttttgagtaaaagactccgaaaggactttgtgtgaactcttggaggagcgaggaagatttactctcaccgctcctgctttctctttatccgaagtggaattcttttcgatcgcttgagtagagacaacgtcatcaatagagttcgttcgctccgtctcaatgacttcctctgaggagattgtggggaactcatctttatccccattctcctcctgatcactcaggacagagtaccgagaagaggataaaattgttgcttggccaaaagttaatggtttcccatttgacttttctgtacttttgcttcctttacctggggagactatggaccaaccatctccttccgactgagattctggtggtaccaccttctctgctaccacttgttgttcaaaaacctcctgagaaatcaaaatcgagttctgaatcccatcctctttattcccactattagctgactcatggtcagcaactctcactgtggtagcagaagcagaaggatccgctaaaacttcaccttcttctagctcactttctatcaccagcgctggaggcttgagcttactcacacaaacatccactaggtgaccccacttactacaacaagtgcatttgggaggcaaccaggggtaaataaactccacgataacatctttttcctcctcaattttgaacctgtgacactttggaacgtcttgcgaaagatttacttcaacaaaaactttagcttcatcaaactttgtgcataattctgtttcaggatgtaaccgtattggatttcctactgaacttgtaataaaactcaaaccatcccaggagaacatggaatgaggaacattcttcactgtgacccacaacggcattgttttaatctctggctgggcttcttctttaatcggagaccacttggcaacaatcattggtaaaccagcaatgttccacatccctcttctgactattctcgaacgcgtggcggagtcacggattcgaaactttactgaagtagagtctatctcatagacgtcaatcttaattgctttgtccccaagagtccagatcttattgactatgacatggatcttagcgacatgcggagcttgtgatgggaaccgtcccaccagaaaatcatcccagagagggacagattcagtgataacttctttcggaactgcaatggttgggacaccgtcttgcacagagacttcatattcatcttttttcagagaaggccgtttagtaactactgctgcataggacttttgctggacagatccagatggagaaccaactgttcctgcctcagaagagactggtaaaacctggtcggacatgagaaaccgacggcaagccgccgctgaaaccctagcttgctgaaaaagaatgaaaaccctagtcgccaagaaaatcgccctagagctgacgtgtcattaaaaaaaaaaaacatcattcttatagtagaaacatttgattgttctgtggtaactggtaacgactaagtgatatggtttactagatcttgcaaacaaatctaattgatcatgagaaaaaattgtaagactagatcgattattttagtggtctaacaactagtttcaaagttgtaattttcaagattgtttattacatttagtacatgtttgaagtgaaacaatatatctcaatgtaagtacatgattctctttactactttgaatctatcacagaagttagtgcagacacccgattcgctatgattgttaagatcataaagtgacctagatcgatgagcatcaatgtttttttttttcttttgccaataagcatcaatgttttcttgacgagcaattgtcattttatttcaagaagcggaatctgttttatgaaagtgtttattgtttacgatatagaatcgaagcgtttggagggccaaaagaagtaggagaggcaatagtaagaacagtgacaggatctggtcaacgagcagatttgaaaggaactttgctagaatcaagtatcagacaagattcagagagaaacttgaagtactacgagttggagtttaaagtcgaatcacctcttttccggcggcataatgtagccgtttgttgcgctcacagtggccggctttatacactgaacgctcaagcgccagagtcagcttggtcagaggtgaaatcggaaatttacactactgcgaaatcgttcaatataatttcttgaatgtaaaggatcggaaaacaaattgtaaaaacccaaaaagaaacaagatactacaaagcaaagcttattttttcttcatattgatagggtctctttgtttttcttaattaattcacactattgagttgattacgatgattaaggtcaaaaatacgaagtgacaataaaaagagaaaagtttcgagcataatcatgtcttcttgatcgtgccgctcgctatataaacactgcaccaagcaattactataatttttgatcaattaaatattaaattttgagaatatgtttctatattaatgaaaataatttaaagtaatcataagtttgtatctttgaacaaacgaaactagaaaacgcctatctctgctcattggcttctccatctccgatcaaatccgcggtcgtagtcagagagagagacaaatg

SEQ ID NO: 36724 - DNA, 3003 bp, Unknown
  misc_feature (1)..( 3003): 2750-1469P.txt file - cDNA_ID_3099678; gDNA_ID_2936581; Annot_ID_194907
cttgccaatccttaaaattagggttacggaggaaccgataaagcatataaaggagagtacctgtgtcggcgaagcttggacaacgagctcgttaccgacgcgtgcgaggcagattatagacctagacaaggtcttgagcgcattgccactgatactcaactccatctctctctgtctctggagaaaaataaattcaaattttaatttaaaccttaaaaataaaataaaaattggtgaatgattttagtgggcgattggcgggattgccatgaaattcctgaaatcagcttaaagcgcgaaatatactaaaaagtcatagtatagtttcttaataatgggcctatattgatattagttaatgggcttttaaccgcacgatttaattgggcttatgtctcagatagagtgacgtcattgactagttcggtgccggtggtatactttaattggcatttattattgcgaaatatatttgttgcggtgacaaggacaaatctcgcaattgtactgttttcctttaccgaaccacaaatctaaaaatcgccaattatttgatttcatttttcagtttaaaataaaaagaaatgaaatatttgtctttcttttcttcttatttcttgcaaatggaatctacaattttctccaaactagcatgtgatatatctgacaatttatgggctagtatatttgttttaaattttttgtttgtttctccaaactgattatttactttattctcaagacaaagtgggtacaaacaactctctgtaaatgtggattccccttttttatgctaaatgtagacagaacacatcaactcataaaactcttctcaatatctctgagaaatgcagacaaaagttgtaactttctgcattcgacttttgaatatgaaaaaagttagatactttagcatatatatcatccctaaattatggtttcttactttttcattggtcttctcgatacgctgacttataatctttgactcctaaactccttttaatttatttgattgacaagtaacacctagactttgaaaatttgtaactaatcactcatgttagcattacgtgatctacggtaccgtgtatatgttatataatagagataacaaagtatgtagactattccaatataatacgtttaagtctctaagacaagttcatacaacattggccccacgtatatcaaatttgctgacacttgagaagttaaatgaaccaagtagaaagagtgaaaacaatagagaacaaatattgtgtacaagtctagtgatattcgcgaaaaaaaaaatgtctagtgatattcgttttactcaatctcaatggtaaaataaatcattcaatctagtaatctactactaagggaattttttaacatctttttctatcgacgtgagagataggattgaaacacacaattctcaacctctgctttgataccataaaaaatgatgaaagtaaatacaacttttccaatcatatgtctctccctcatttcaatattatgtccttgtaaacacattatatatgatcttattttgatgaactttgatataactattattaaaaacgcattcaaaggccaaacactagctttctaaaaagtcattcatcatatcaaactaagaaaatcatagtataaacttctcaacgaaatcaacatcatattctacaagataatattctttgcgacctattttgtgaaattatgaacaactaaccatctcactttgggaagctttagaatgtgacaagaaagatagagaagtttgcctaaattattaatttcaatttcgtcactacccacctattggtctgatttaccagaatccaatctaaagtccatatattttttaaaatacttttaattgaatattcatcagaattttggaaacttctaaccgtaagaataaatgttagattactaattatgggtgaattgagaattctttatccaacttatcatttatatagcaaaaacatcccccaactgacaacaattttgagtaaaactttataatctttcttatagccatatacgacagagaagggacatgtaaaggaaaatattttgtctatacagaaatttatgttttcctttgcatttgtaacatatttataccactaatattctatcaaatagtttcagtcaaaattaatttatctataatggcagttgcgtattgtgtgtgttacgaaactattacgacaatagagtttttttttctccgaacattcatatatccttaaataacccatgaataaaaaaacatatgaatgggaatcattcatacgtatgttgttaggtacgtgtatacgcacattcatatcaaaacacaagaataaattctatacaataaatgcaaaaattcgtttgtattgtaatttgcctcataaaacaatggtgggttgagaggaacaaagaaagcttgtacagtaaataaccaaatggctgaagaagccaaatgtgccaacaataagaggacccacttcacaccaacaccttcacgcttctttctatcttctctttgcttactagattttctcctttttaatctcttccttaaacaaaaaagctgttttcaaacttaaactaaaaagcttcatattgtcaccacattaattccaagaaaattcgcattaatgctctgcaaaatttaatgattttaaaattaacatttgttcctttattcaagaaaaattcgcattaatttatttatttaagagatgattacctaaaatggtgtgtataaattgcaaaattagctctgttgttctgctaggagagttaatggagaaagagggtgttaccattaccagtacaactatagttgcagagttcaggggttccttggagtagcattaaagtctcaaaggagagaaaaataaaaaaaaaatacattaaagacaaattgagtcttttctcataaatggtttctttgtagtgtttatgatttgtttttacagagaaaagatctaaaaagagaacaaagatatg

SEQ ID NO: 36725 - DNA, 3003 bp, Unknown; identical to SEQ ID NO: 36724
  misc_feature (1)..( 3003): 2750-1469P.txt file - cDNA_ID_3099678; gDNA_ID_2936581; Annot_ID_143755

SEQ ID NO: 36726 - DNA, 3000 bp, Unknown
  misc_feature (1)..( 3000): 2750-1469P.txt file - cDNA_ID_3099684; gDNA_ID_2936581; Annot_ID_143754
gtatcttccgacatgggttcggtatctttcaccgttttccaccgttaacaccttccagtcatcaagctctttagcattagcaacaatgcaaaagaatctaactttgcagcagtgtaatgaaactacaatgatcatgagaaaaatctgacgaaaataaaccatatctttgttctctttttagatcttttctctgtaaaaacaaatcataaacactacaaagaaaccatttatgagaaaagactcaatttgtctttaatgtattttttttttatttttctctcctttgagactttaatgctactccaaggaacccctgaactctgcaactatagttgtactggtaatggtaacaccctctttctccattaactctcctagcagaacaacagagctaattttgcaatttatacacaccattttaggtaatcatctcttaaataaataaattaatgcgaatttttcttgaataaaggaacaaatgttaattttaaaatcattaaattttgcagagcattaatgcgaattttcttggaattaatgtggtgacaatatgaagctttttagtttaagtttgaaaacagcttttttgtttaaggaagagattaaaaaggagaaaatctagtaagcaaagagaagatagaaagaagcgtgaaggtgttggtgtgaagtgggtcctcttattgttggcacatttggcttcttcagccatttggttatttactgtacaagctttctttgttcctctcaacccaccattgttttatgaggcaaattacaatacaaacgaatttttgcatttattgtatagaatttattcttgtgttttgatatgaatgtgcgtatacacgtacctaacaacatacgtatgaatgattcccattcatatgtttttttattcatgggttatttaaggatatatgaatgttcggagaaaaaaaaactctattgtcgtaatagtttcgtaacacacacaatacgcaactgccattatagataaattaattttgactgaaactatttgatagaatattagtggtataaatatgttacaaatgcaaaggaaaacataaatttctgtatagacaaaatattttcctttacatgtcccttctctgtcgtatatggctataagaaagattataaagttttactcaaaattgttgtcagttgggggatgtttttgctatataaatgataagttggataaagaattctcaattcacccataattagtaatctaacatttattcttacggttagaagtttccaaaattctgatgaatattcaattaaaagtattttaaaaaatatatggactttagattggattctggtaaatcagaccaataggtgggtagtgacgaaattgaaattaataatttaggcaaacttctctatctttcttgtcacattctaaagcttcccaaagtgagatggttagttgttcataatttcacaaaataggtcgcaaagaatattatcttgtagaatatgatgttgatttcgttgagaagtttatactatgattttcttagtttgatatgatgaatgactttttagaaagctagtgtttggcctttgaatgcgtttttaataatagttatatcaaagttcatcaaaataagatcatatataatgtgtttacaaggacataatattgaaatgagggagagacatatgattggaaaagttgtatttactttcatcattttttatggtatcaaagcagaggttgagaattgtgtgtttcaatcctatctctcacgtcgatagaaaaagatgttaaaaaattcccttagtagtagattactagattgaatgatttattttaccattgagattgagtaaaacgaatatcactagacattttttttttcgcgaatatcactagacttgtacacaatatttgttctctattgttttcactctttctacttggttcatttaacttctcaagtgtcagcaaatttgatatacgtggggccaatgttgtatgaacttgtcttagagacttaaacgtattatattggaatagtctacatactttgttatctctattatataacatatacacggtaccgtagatcacgtaatgctaacatgagtgattagttacaaattttcaaagtctaggtgttacttgtcaatcaaataaattaaaaggagtttaggagtcaaagattataagtcagcgtatcgagaagaccaatgaaaaagtaagaaaccataatttagggatgatatatatgctaaagtatctaacttttttcatattcaaaagtcgaatgcagaaagttacaacttttgtctgcatttctcagagatattgagaagagttttatgagttgatgtgttctgtctacatttagcataaaaaaggggaatccacatttacagagagttgtttgtacccactttgtcttgagaataaagtaaataatcagtttggagaaacaaacaaaaaatttaaaacaaatatactagcccataaattgtcagatatatcacatgctagtttggagaaaattgtagattccatttgcaagaaataagaagaaaagaaagacaaatatttcatttctttttattttaaactgaaaaatgaaatcaaataattggcgatttttagatttgtggttcggtaaaggaaaacagtacaattgcgagatttgtccttgtcaccgcaacaaatatatttcgcaataataaatgccaattaaagtataccaccggcaccgaactagtcaatgacgtcactctatctgagacataagcccaattaaatcgtgcggttaaaagcccattaactaatatcaatataggcccattattaagaaactatactatgactttttagtatatttcgcgctttaagctgatttcaggaatttcatggcaatcccgccaatcgcccactaaaatcattcaccaatttttattttatttttaaggtttaaattaaaatttgaatttatttttctccagagacagagagagatg

SEQ ID NO: 36727 - DNA, 3000 bp, Unknown
  misc_feature (1)..( 3000): 2750-1469P.txt file - cDNA_ID_3099689; gDNA_ID_2936581; Annot_ID_143751
ataatctgaaatgccgaatataaacagaatcatagccgcaaatgatttatttttatataaccaatgggtttgtaattaatattactcgaatctgtaatattttccctccaccaagtttgaaattggactaacaatggaatcaatagcacaatcaggtataagaagttttagtcatttgatcgagattaatgttggagtgtagctttgtttgggtcatgttttgggctcttctccatttcatactttgccgatgtgatgaaccacgcactaacatgggtatagttcgttcgatgtttctattgggcctttactcgtaatattgggccataatgatcacgtgacttagttttgttttgtttttgtttgtgttcatgtaattttaagtagtgggcttcaacttgttttgagcccatagcacatgatttccctttattgtttattggtctactttttttttttttttttttttgtgtgaacattggtctacttttaaaatcattaaactatgtaaattagaatctaaaataaattcctccattgactcccaagtcttcatcattagaacaagaatattcttgtatttattataatacttattataaacaatttccttttctggtgagaaaaaacaaaatcaaaataaaaaatttccttttcttagcgacacacatttacttaacccacaagtcgtcaacggcccaaagaatatggatggttacgagagagcgcatacaaagacgcgctcctaaccgacccaattagagaaaacacacgcttgcttacacgcgtaataaggttcttacacgtgccaaaaacccttgttatataaagaaacctaggtcacgtcaatttctcatcaccattgctttgttttgttcgtcaaatataatcaattttaaatttcttctcttctcttcaaacgaatcgcctttttcgataatctctttgcatcgatttcatcatggctactcaaacggatctcgctcagcccaagcttgatatggtaaattacgtaaatctctctcaatttcttatcgtttttcgtctcaaatcttgattttacgtttctgtgattgtaattttggaggatttttggttcaattttgttcacatgtctctacctatcgcattcatggatctgtagttcaattctttcagatcgtattcgtagtgcatgttaatgttttgtttatgtagaagattagattaatgaattgaaaacaaatgatattttgtgggctaattaatttgcatgttataattattgaattgtcagaccaaggaggagaaagagaggttgaagtatttgcaattcgtgcaagctgctgctgtggaagctctgcttcgctttgctcttatttacgctaaggcaaaggacaagtctggtcctttgaaacctggtgttgaatctgttgaaggagctgtcaagactgtcgttggtcctgtctacgagaaataccacgacgtccctgttgaggtccttaaatacatggaccagaaggtacaattttgactctttccctatctttggatcttgctgaaagtgcctttgttgatgaacaatgaatgaatctgtgttgttgattgtatatctacttcatcgaacatatgtgattaaaaaagtacagttaaagttgtgatgatttcatatcatctctttggtagaaggttcaggtaaacgggtcaatgtcattatgttctgtagagtccctctttttgaagctgacaagtttgttttgcgttgttgcaggttgatatgtctgtgactgagcttgaccgtcgtgtcccaccagtcgtcaagcaagtgtctgcccaagccatctccgctgctcagatagcacccattgtggcacgtgcgttggcctctgaggttcgacgtgctggtgttgttgaaaccgcttctggaatggctaaatccgtctactccaagtacgagcctgctgctaaggagttgtatgcaaactatgagccaaaagcagagcagtgtgccgtttcagcttggaagaagcttaaccagcttcctctattcccaaggctggctcaagttgctgtaccaacagctgctttctgctctgagaagtacaatgatactgtggttaaggctgcagagaaagggtacagagtcacatcgtacatgccattggttccaacagagaggatctcaaaaatcttcgctgaggagaaagctgagaccgagcctttggagttccatccacttgattgatatgggtgttttgttagtgtgattttttgttttgttgggattaaggtgaaccggatcttggttagcgattgatctctggttctcgttcttttttttctttgtcatgaacttttgttgtttcgtttaataatcaaaagttgtataatctaagtttgggattaccaccctattgagtattgagtgataaaaaaaaagttgcgtgaattatcgccctattgagtgatacatcatagtattacatatttatatcctcagaaaatggaccgagaatttttatcaagagatgaatattgttgtcggtaggatttaattatcagtttgtatatatgcagacatatgcaactcgtatgtattgtgatatgcagatattactgatatctataacaagtttgtgaaccttttttattgacgaggtatgtcatcatgtttgataatcgttagcgttattaacagcggtgagagaagcagacttgagatttgctttttcaagaaactatgggcccatgtcgcgctgatccgaaactttaatcccaatagctattatgcacacaagtcaccgccgttcacgttagcactccaaacccttggcacgtaaacctcccgacacttgctctctttctctcatctccacgatcttctcactctcttggtgagctttttctttcccggtcaaaatttcgactatagaagtttcgtccgtcggtctttctaactgaatcaaattttcacaagtaatctttcgcgcggctcgttttatagaaacacgattcagaatg

SEQ ID NO: 36728 - DNA, 3000 bp, Unknown
  misc_feature (1)..( 3000): 2750-1469P.txt file - cDNA_ID_3099698; gDNA_ID_2936581; Annot_ID_194902
gagtgcactgttgttcaatcttaaacttcgtgatcgatttcgaatcgccgtcgatgatcaccgtggtcgagctacggttttctcaccggatggttgcttctcttccactatccaccgctgggtgactcgattccggaactttcgccgggagtctctcccttctccaccggctttttatcgcagacgaggtttgaatgaatcattaccttttattaactctaatagtggatctgtgtaattgagctttgtgatttgaacttcagctgtttctctgagagatggtttgagtcgtaatattggcgtagattagctcgatggtgttatttgttttgtatcacctgaaggatttgtttttagcactttttggcaatagttttagctgtcattccaagctgctccaatgattctgtttgttattatgtctactatcttgatttgtgggaatttgaattgacaaaactccttgttcttgtagtttctaaggacttaacggcagaagaagagtctgctcttttccggatgctacaaactgtggctgttccccttattggaaatgcttgtcatgttttcatgaatggttttaaccgtgttcaggtttgagacatcttagatttctgcttcacaaatttcattcttatctttagtcctgttatcagttcttattttgtttatctttttaggtatatggtttagagaaattgcatgatgctttactcaacagaccaaagaacaagcctcttgtaacggtatgagttgacttatgttctgaaatgttgtgtgtttgtggttggggttttagatgaacctgcttgttttcttacccatgaacttcttaataatcttcaggtgagcaatcatgttgcatctgtggatgatccatttgtcattgcttcattacttccacctaaatttctacttgatgcccgtaatttgaggtggacgctctgtgctacagatagatgctttaaaaaccctgtaacttcagctttctctcgatctgtcaaagttttgccaatttctcgtggtgaaggaatttatcagcaggtaacacaggctgtttttgtagctagcttttcttgattgttacctgctattttatctatattcaaatttactgatgaaaacaagtgtcacatcttctgcagggaatggacattgcgatttcgaaattgaacaacggagggtgggttcacatctttccagaaggcagtcgctcccgggatggtggaaagactatgggctcagcgaagaggggtatcggaaggtgagtcatgtgtgatttgggttcacttcccttatataaagcactccactttaatgtgtcttatcattttattctataacaagttttatttgttttaggttgattttggacgcagatactctccctatggttgttccttttgtgcatactggtatgcaggatataatgccagttggagctagtgttccacggattggcaagacagtaagtatatctgaatctccaattttttcttcctcgtttgtagctttcatttttgatctcttaatagtttgatgcatcatgatctctgctccgcccaaaatcagaaaacaaataaaaaaccataactttcagagaagtagttagttgcctcgagttaaaatagtttaagagtgtattgctttgtttgatttgcaagcccttggatacagatctaagacctctcgcaatttttgttggacttgactttttagtgatccgaggagtgaatcggatctcgaattaatgatttaagaaagaaaggatctatcgataattgggtgattcatattttgagtaagtggatatgtattgtccatggaaggatatagagttcaaatgccagacattttgtagtgttactaattgtcattaggttattacattgcttaattatgtatttgcaatctttaatctgtttgatttacgtcaaacatttcgcaggtgacagtgatcattggagaccctattcattttaatgacattctcagcactgaaggagcccaacacgtctcaaggaaacacctgtatgacgccgtttcgtccagaattggacaaagactgtacgatttaaaagcacaagttgatagagtatatatagaacaacaatctatgatgtcacacaatgccaaaacaccctcggaccgtgctgctgagatctttcatagagtcgattgggactcatttgggatgggagcacaattttcagaagaatcatcacccagtagtaaaccgattggccaaagcgatgatcgcattgtcagatctcccaaaaggagagtctcacccgaaggaggggtcagcttgaagattaagaagctcatggactcaaccgagatgatggggtttgcggctagagggttactaatgaacgagtacaagagtcgggttgaatctgccaatgttggtaggcctttaaaggcttggagagagtattttatgaaccgtggattataacttgcaagttaaactcccgttaggaatattagtttagtaatgaggtttaagtcccacaggccacaacaaatggacatgtttttacttgtctaatatagatttagctagattttttttttcgatcacacatgaactcttatctatctcgttgttgttgttgtaaattagcttttaataaaatcccagtttctcgaacctttttaatcacagcaaatactacattaaagattagatttggtgtgttttgctaaagataatgcctttcatgcgcttaaattaatttgaatgggtttcgattgaaattgggatatttgctgcaaaaacgatgcggttcgagtaagaatggccacgtggcacaatctatcacatcaaaacgacaccgtcagaattcatcatggtaaacgaacggtcatgatttaatcgcgatccaacacaggaaagtttatgagtgtgcaatgacgaatgtatccctacagagttcagaatatcgacggcgacaatttctctctccggctaacttttttctagagaaagctatg

SEQ ID NO: 36729 - DNA, 3000 bp, Unknown; identical to SEQ ID NO: 36728
  misc_feature (1)..( 3000): 2750-1469P.txt file - cDNA_ID_3099698; gDNA_ID_2936581; Annot_ID_143749

SEQ ID NO: 36730 - DNA, 3000 bp, Unknown; identical to SEQ ID NO: 10587
  misc_feature (1)..( 3000): 2750-1469P.txt file - cDNA_ID_3099721; gDNA_ID_2213664; Annot_ID_132654

SEQ ID NO: 36731 - DNA, 3003 bp, Unknown
  misc_feature (1)..( 3003): 2750-1469P.txt file - cDNA_ID_3099721; gDNA_ID_2936581; Annot_ID_194922
gtcaacctctataataattccttcgaatccatgctcccacttgacatgagtggattccaaaacttggactattttaatgttggtgaaaactcattttccgggactttgcctaaatctttgttcacaattccttcattacgttgggctaatttagagggaaacatgttcaagggacctatagagtttaggaatatgtattcaccatctactaggcttcaatatctatttctttctcaaaacaaatttgatggcccaatccctgatactctatcccaatatctcaatctcatagagttagatcttagtttcaacaatctaactggatctttccctacgttcttgttcacaattcccacgttagaaagggttaacttagagggaaaccatctcaagggacctgtagagtttggaaacatgtcttcatcgtctagtctcaagtttctaaactttgctcaaaacgaattcaatggctcgatccccgaatctgtatctcagtatctcaatcttgaagagctacatcttagtttcaacaatttcattggtacaatcccaagatctatatcaaagttagccaaacttgaatatttttgtcttgaagacaataatatggtaggtgaagtaccaagttggctatggagattgacaatggtggcactttctaacaattctttcaacagttttggagaatcatcagaaggtcttgatgaaacacaagttcagtggttggatcttagttcaaattcatttcaaggaccatttcctcattggatatgcaagcttagatcgttggagatcttaattatgtccgataatcgcttcaacggctcaattcctccatgtttaagcagcttcatggtttctcttacagatttaattctacgtaacaacagtttgagtggacctcttcctgatatatttgtcaatgcgacaaagctactatcacttgacgttagtcgcaacaagttggatggagtactaccaaaatctttgatccattgcaaagctatgcaacttttgaatgtgagaagcaacaaaatcaaggacaagtttccttcttggttaggatctctaccgtcattacatgtcctcatcctacgatcaaatgagttttatgggacgttgtatcaaccccatgcatccattgggtttcaaagtttaagagtcattgatgtctcacacaatgacttgattgggacgttaccgtcattctatttttctagttggcgtgaaatgagcagattaacaggagaagatggcgactttagactttctgaggctccatacatgggaaaagttttgaatgctactgcattctttgttgattcaatggaaatcgtgaacaaaggagtagagacggagtttaagcggatcaacgaagaaaacaaagtcataaacttttctggaaacagattttctggaaatatacctgaatccattggattgttgaaagagttacgtcatctcaacttgtcaagtaatgcattcacaggaaatatcccacaatcattggcaaatttgatgaagcttgaggcgttagacttatctctgaatcagttgtctggtcaaattcctcaaggacttggtagtctctcgtttatgtcaacaatgaacttctcttacaactttcttgaaggtccagtgcctaaaagcacacagttccaaggtcaaaactgttctgcattcatggaaaaccccaagctcaatggtctcgaggaaatatgtagagaaactgatcgtgtcccgaatccaaaaccacaagaatcaaaagatttgtctgagccggaagaacatgtgattaactggatagccgcgggaatagcttatggtcctggtgtcgtctgtggattggtaattggacatatattcctttcacacaaacacgagtgttggttcatggaaaagtttcgtcgaaaaaagcccaaagtagtcaccagaattgctcgtccctctaagcattaatttgtgacgtatatgtttgttgactagcgtatattgtttattacaacagcttgtatatttttaacttatattacaacagccagcttgtgtaatcaattgttcaattttttttctttattcaacaaaagaattcatatattgttatatattactgactacagaagctgagagaagaatatgttcttacaagttgggatgtctatgagactagaaccaacaaggatgtctcttgctagttaatttatatgacaaaaggctgaaacatgaacttttaaagatgattccagtcttgattgcaccattaaacgtatcataatccagcgtcaacctcacataagccttcttgtgaacctcacgcaagccttactggttccagtctgatcaatgagttaaagtttcttggtcttatttaacatgtttagaaaatattcaactcacttagtttgattctttgaatcaagttttcagttattagttccaacttgtaaaaatggttgcagaacaaaatgatgaggaagttttttagtatcacataagtccagattcaagtttttttcaattgtatctaaaacacacacaactttcagattgaataaaatctgaatttcattctcagcagaggctaatataaaaatgacaaaagaagaggaggaggataggagctatatgtctactatttttatttttttagccaatgagagagctccacttcataccccacttttaccaatcgagcgatttcacaaccagtctcacccatgtcgcgttgagcgcgtgtctacgatttctaaaggggtttgtccacagaaatcatgccttttttgatccacgcaactcactctcaaaaatccatcgcgtgtcttattttttttggttttcttctctaaaccaaattaaaccgaaccgagatcaatttgaatttcaaaaccaatgtaaacccatcaaacccatcgctgtgaaaacaaaaagctcggccactgtaacaacaaaaatggagacgacacaacttggaagagaaatcaactctaaatagccaagagaatg

SEQ ID NO: 36732 - DNA, 3000 bp, Unknown; identical to SEQ ID NO: 10587
  misc_feature (1)..( 3000): 2750-1469P.txt file - cDNA_ID_3099721; gDNA_ID_2213664; Annot_ID_182041

SEQ ID NO: 36733 - DNA, 3000 bp, Unknown; identical to SEQ ID NO: 36722
  misc_feature (1)..( 3000): 2750-1469P.txt file - cDNA_ID_3099737; gDNA_ID_2936581; Annot_ID_194920

SEQ ID NO: 36734 - DNA, 3003 bp, Unknown
  misc_feature (1)..( 3003): 2750-1469P.txt file - cDNA_ID_3099737; gDNA_ID_2213664; Annot_ID_182044
gttgaaactaagatgtagctcttcaagattgagatactgagatacagattcggggatcgagccattgaattcgttttgagcaaagtttagaaacttgagactagacgatgaagacatgtttccaaactctacaggtcccttgagatggtttccctctaagttaaccctttctaacgtgggaattgtgaacaagaacgtagggaaagatccagttagattgttgaaactaagatctaactctatgagattgagatattgggatagagtatcagggattgggccatcaaatttgttttgagaaagaaatagatattgaagcctagtagatggtgaatacatattcctaaactctataggtcccttgaacatgtttccctctaaattagcccaacgtaatgaaggaattgtgaacaaagatttaggcaaagtcccggaaaatgagttttcaccaacattaaaatagtccaagttttggaatccactcatgtcaagtgggagcatggattcgaaggaattattatagaggttgacaacgagcagttttgttaaattggagaatgtaacaggaatattgccactgaatttgttgtgtgaaaagatcaagtattctagttgggttaggtttcctattgaagctggaagttgacctactaacttattatcccaaaggtcaagaattgtgagtcgagaaaggtttcctatagaaggtggaacttgaccaactaaataattatacgaaaggtcaagaagtgtgagacgaaaaaggtttcctaatgaagaaggaatatctccatagagactacaattactaagggttaagttatgaagatgttgaagtttgaaaagaccactatttggtttcaatgagttattaagaggaacatgactaaggttaagtgaaatcacctcgctagatatagcatcgcacgtgacaccctcccaagaacaacaatcaatgctcttgttccatgaacttaacgatacatcataaggaatttggttggattcatttacccgcggaaactcgtgtttgaactccagaagagcattcctttggtcatggcggcaatggcgaagcgtaggagaagcaagagtgtgtagaaagaatgaaaccatgaagaaaaaacagaagcaagattggcttggaatcatcattacttctttttttttttgttaggagtttgtgtggtagtttataggttatcctgatatggcttctttggctctgttcaaaaagcaaaaaaacgaaactcagttgcttaatttgacttgcgcaagtctttccaatgctctctttgactaatgatttggcctcttgccataatatccatcacaaaattgaaaactctcttcttcgttattaatgtcaagttactttgggtttctataggtcatgagtttgtatttgggctttttatttgggccagatagaatcagatgtaaccaagtctatttaatccgctgtcgtttttaaatagtttatctattttttttttataagaaaaaacaaaaatgattaaccctatctaaagttgttaaaaccaaatgttttagcaaatctaaccaaatatttttttctttgggaagctctaaccaaaaatgattatccttggataattactcaattagtaagatcttcaagaaactgatttcccccattattattttatttatatttttcggtttataaaactccagtaatttcaaatataatcctctgctaccgataccagaatccacacaagtgaaactaaaacaatccaacgatgtaaacaacctcacaatccacgtggacgttcaagatcacacatgcactagcttcagatattaagagtgaaacaaaataaaaggaagaaataaatcgaaaaaatggaaaaaagtgacaaatctggaaagctgattggctgaagtcgtccatgtattcaagtttcgcggcaacacctctcttctcatttttctcattccctaattcttctatatctctctctctttctctcacttcctttttttttttgtttttaaacaaataataatctttctttcttcttccttaatttgccttctctctctctaaaacccttgtttcaaatattttctcatcgatctctttttgaaactaaaggctcgagctttctctatctctctttcgaacccaccggtggttcgggtatctctctattcactcttcaagtcacctaattggttagtggatctgcttcgattagggtttttaaaaggcttttcctttttccgtttcaaattttttcttctttcgactctcaaaattttcccggattttttttttggattctttaacactttctgtgttagctctttttcttttgactcgagttccgttttttctcagctgaggtttagtgggtatttttggaagctcactcgattgaagttttttttttttttttgaggaatcagtttcagatttgtagaatctgcgttttatttatatttataggttagcgattgaagtttcgaattcgattttgttttactatctgaaatttaaacaattttctcaacacattttctcaaattttgtcaaagctcctgacttttgtggatgattttcgtgtttcttcactgtgtgtaattgattccttaatttggtgtgttttttaaaatacccaaattctgattttcgttaatatttcctctcatctcgattactgcagctatttatcttccccaacactgctttttactgatccaagaattggttctactcttttgttaaaaaacgtagagttttgatttttcttagctctaatccctaaaccctaaaccctaaaaacgtcttgatttttcccctggtgaaatgttgaaattcgtagtttgtacatgtcttagaggaagccaaatttgcttatcgacttagtgtcgtatcttgtccgtatcagtttaaagtgtgtcttttgtcacaattgcattttttggtttctaactatatatttgaatatacttgtgcagagaaacgtgcaaatg

SEQ ID NO: 36735 - DNA, 3000 bp, Unknown; identical to SEQ ID NO: 36723
  misc_feature (1)..( 3000): 2750-1469P.txt file - cDNA_ID_3099758; gDNA_ID_2936581; Annot_ID_194914

SEQ ID NO: 36736 - DNA, 3000 bp, Unknown; identical to SEQ ID NO: 36726
  misc_feature (1)..( 3000): 2750-1469P.txt file - cDNA_ID_3099777; gDNA_ID_2936581; Annot_ID_194906

SEQ ID NO: 36737 - DNA, 3000 bp, Unknown; identical to SEQ ID NO: 36727
  misc_feature (1)..( 3000): 2750-1469P.txt file - cDNA_ID_3099783; gDNA_ID_2936581; Annot_ID_194903

SEQ ID NO: 36738 - DNA, 3000 bp, Unknown
  misc_feature (1)..( 3000): 2750-1469P.txt file - cDNA_ID_3099795; gDNA_ID_2936582; Annot_ID_143790
aattggctcaaataacgagttctagtcagtcaaaaacttcataattcacaatgagggaaataaaaggaaaccgacaatagctactcataagtcataactctgactcacatgatacatgggttgagaaagatgctgagtaggtgcgccatggtgctgaaatccagtgtttggaccagtttgagcttgtccatattgatgatgatatggtctagactgttgctgtgccacatgaggacctccaccagagtgcattggttgttgttgcaactgagtggaggaagctggtatatcaagatgatgaaaaggaggttgctgggatgttggatgatgggaagccggaggaggcgcgttttgaacttgagaagactgtggatgagacatagaagtgacagcaggattcagatgtccctgacgctggggatgcgaaaaacgaggctgtgattgagcactatttgcagaaacagaargcggtggtggaggcataggcattggttgtggtgttgggtgttttcgaatcggggcttgtggctgcatcgyattggctggctcatgtacactgccaccgccttggaaagaagacatatgagcttgaacgtttggctttggcgggatagattgatgagattgttgaggttgttgtacagcttgtggctcaactttmggagtctaatagaaacagatttttgtaaaatttaagatgcttgaaatgaaatctattaacaaaatgacttaagaggacgcaagtacataccacttgaggaggctgaaccattccgagcatgatttgtgcctggcatttcaacaaacatagcatcatcatcaccatatacaaattctgaaatctatttgtaaatagaggcataaacctaaagattgttcatatctggaaactaacacaaaaccctaattgttaacctacctgcttcttcaacaatactaaacccaaactagtccaatcaatttactcaagtaagaagctccaaatcagaattcctcattgcttataagaccacacggattgcagatttagaagatggaaaagattagcgaagtgaagaagaacctggaaaagagccttcgtcaaaagagggttccgaatcagaatctccctcgcttgttgatggttttgatcaatcaacgtctgcacaattagattcgactgatcaaaaaaacagaattcgaaaaaaagaagaagaaatcaattgttctctattcaaatccgtaaaggatagtgttatagctgataatcggaaaagtatagaaaagaaagaagagagaaccttcatttgagacataatatcatagagctgacttttagtcattccggcgagatttgccggtaaacctccgtctccgccgatctgcttacccgccatggttctcgtcggtaatcgctaccgagcttaacctgtgtgttaaagacgcaacacaagagtacttgtgaacaaacctgggccaagtataatacgggcccaattagtataattccggcccatttaaaattctagacttattagtctatggcgcctgtagatcaactctttttttggtcaaaaatttaccatttttctcaaaacaaaacacaacaataaaatatagagatgcattagatatgtacgttaaatatatttatatgaaattattaatatgtttctttacatgtaccatgttaattgtacacgtaacatgcatgtatattgtataatatgtcttttggaaaagcaaaagcttataaacacaagtttacattagagagaagcgtgtgacacggttttggcctcttcactttcttgttgctccagaaatcttctttttatcttgtctccatccataattttcatacgaagatagttttctttatttcatccataatattcaatatatattggattcttgcctttggtaagtcggtaaacatcatcaactttatttttattctttcaggtaaaaatagagtcttccactacattcatcttccacaagttttgctaattttaagttttgggtaagaataactaacccatgtatatttcacaattcattcataacaaatcaaatgattatgagatatacttatgggttatatatctcaagggattcagtgatctttaaacttggcacttggtataatttcagcatgccctttaaagaatgagtaggcgtataatcttgtctcaagaaaattataagaagtccaaatttataaacatgtattgagacaattaaaagattagaattaaaaaaaagaaaaaaaaaagaaaaagagacgcactcaactcaactttctattttttatttttgtaaaactacaaactttgcttttgattttgtagccgaggtagtctctctctctccatttgataggaagaagaagaaagatacaaaaagataaaagaaagagagaaaaagagttttaattaaaatgcaatgttatacaaatgaagaagcactagcaagtctcttcatcaatgtctcaacatctttctttcttctcctcatcctcctctactccgccgtctccctcctaatcaagcttctccacttcatcggcggctaccctctcctccaaaggtctctatctatacatgcttatatgctcaccttactctatacacacacatatatatatatatatatatatatatatgtatatgatactaagtttcattttcccttgttttcggattttagcatattgcttagttttatattgaagatcttttaaattctgcaatgttttgtagagtagtttcatatttacgtgtttccggaagttagcatatatacagctaaaaataaaggtaaatggttgcttttgatgagtttttcatatagttctgaaaagtgataaaaaaaacaatcggtaaacattattgttctcagttgggacaaatcttaatagttttcttattatgtaggaatgaagatgaatatgattccgcggcatggtattccgaagaagaggaggaagaggaagaagaaggggaagaactcaagatg

SEQ ID NO: 36739 - DNA, 3003 bp, Unknown
  misc_feature (1)..( 3003): 2750-1469P.txt file - cDNA_ID_3099800; gDNA_ID_2936582; Annot_ID_143789
agtttattatgtacgtgtacatggtattttagaatgaggacttttcacgagttttttacttcaaatttacaatttttgttttcattatattacgtactttcaaataaatgtttagaaccatatactttttttttgaaaaattagaaccatatatatactttattcttaaataaaattttgaaccaatatgtctgtaattttgcgctctctccgttttcatgatatagtaaaatatgatcctcaaattcttaattacgatctaaccgctagttcatgtatggtactaaacttcatcattcttttcggaaaataagtcatagtgaaatacagtttggtgaagacactgttatagatggtgtttttttttcgttggcaaacactgttgaagatggttaatatcaaataataaaattgatcttgttgaaatattaaaagacaaaaaaaaatgaaaaatttaagttctgtgtaaaactagctattggtggttagtcaagaggaaacttataatggaacccactggtgatctgattctgcctccttattggttgaaatatactgtcatctccgtttttgcactctgattggctcaagttcttccatggagattcttacgtggaccccacattttcaagttttgttttgaaactattttgtttgttggtgcgtttgcatgaccgcaacgcagcgtgatactttaaacgcaggaagttacttttcatcttttcttttctttttttgtatagcaaacgacattcttttttggaacttccaacaacacctgtgaagttttgtagaacatttaacatccaacttctaatgtttgatgatagaaaaaaggattatatgtcactaaaaatgtaaaatttctgcttttgtgatcttagagatgggtgtttaatcagcacctaaagattcaaatgggtcctaaatttaattattatcatttattgtggatctaacataacggaaatgatatgagtaatggaattctagtcctttaaagaaaggaattgattgtggtgatatagcgacgtgacaatatatacaaatcaagaggttgtgacttcatcgaatttttggcaattttgcagtttacgccaaaagaaacaaggaaacaaacaattttacgccacatgacccacgaacaattgaacatctctctatcataggactcgttcctctgctttacaccaccattttatttatattactttatatggaatttacgcaagttatgtgacatgatatacaaaccttaattatatcaccattcaccaccaagttgaaatctgcacatttttgtgatacatgtgtagaattaataatataacctattgacgaacgagtgaatttcggaagtggaggcacaataggccttgattgatatgagagaccacttgctaacatagatgcgggaaatctttttgctttcatacgtccgattgctctgcgttgaagtgtgatagatcggtacttgaaacagttaaaattatcccaacactaattaataagtattaagtaacaacaataaaaacaaatattcctatattaaagctcgatatgataaataaatgtatcactacaacgttttccttaaatctgaagtattttcttgtctattttgaacgaaattaaagatcaatttaccactactatatttttggttttgttttcataacctatggttttaagtataaagtatgctaactctataatattgtagacggtggaagtaaagtaccacaacacgacgtgtgcccaaatcatacatgatacatattaaaatgttccgttggtcgtcgtaccccaattatatgttacaagttaatcgtttcttaatccaatttataatctgttaaaatactcgttaattttaggcaaggatttgccacgtgtaataaacccgtataaacgattggagaagccaaaaaagacttgttaattactgcgcgtcctcctacattcgcgctctctccctccgtacaacaaacaaaccccaattttttttttcctactctgtatagataatttttaatcattagagaaaaattaatcgtttaattagtttactattatccgctaataataatcaaaagatcaaatcaacccacattcccatcacgtctattttctccgtctctctgttttcttctctcaggttttagacctcctcaacgctcgtttccaagctttcccgataaaaacatcgtcttgattttctaaggtaatgagaacaaagatcgcatctttttttctttctcctcatatctttgttgccatgttgcgattttgctgatcgcgactttgagctatgttttgacttggtttttcaatgttgaatttttttttctcttgttgcaccaatgtacccttctggtaggttcgtctttagttttgtttccttctggctagttttgttttatcaagttttgttcgattgtctcacgttgctgtttttgtcttaatccctcaattcataatgctgtataacggttaaatcatgtgaatttatactgggaactagaaaaaatctcatctttgaatccctagattaatgaaattaatggaaatgtgattgttaggatttagtatcggctttaaatatggaaatatgagaaatttccttataataaattaagaattctcaaattcatcacagtaatccctgactctggttactatgttttattgtcagctaagattttttattacagagtaaagctgattacaatgatgactctgagatagttatgtctagcagtgccatttgatcatgttcttgcacgtctttgcatgtaggaaaagacaaaaagaactaggctttggttttcttttcatctagattgctcttctatgtgtgtgtgtgtgttcttatgaattttgtctaatgctcattttctttccctcaatcaactatgtttcaggagtttttgctaaagaatgcagcagttttggggtttccaggtgtttccataagtttgctttggacctcgaggcgtgatg

SEQ ID NO: 36740 - DNA, 3000 bp, Unknown
  misc_feature (1)..( 3000): 2750-1469P.txt file - cDNA_ID_3099805; gDNA_ID_2936582; Annot_ID_194965
ctgctagacataactatctcagagtcatcattgtaatcagctttactctgtaataaaaaatcttagctgacaataaaacatagtaaccagagtcagggattactgtgatgaatttgagaattcttaatttattataaggaaatttctcatatttccatatttaaagccgatactaaatcctaacaatcacatttccattaatttcattaatctagggattcaaagatgagattttttctagttcccagtataaattcacatgatttaaccgttatacagcattatgaattgagggattaagacaaaaacagcaacgtgagacaatcgaacaaaacttgataaaacaaaactagccagaaggaaacaaaactaaagacgaacctaccagaagggtacattggtgcaacaagagaaaaaaaaattcaacattgaaaaaccaagtcaaaacatagctcaaagtcgcgatcagcaaaatcgcaacatggcaacaaagatatgaggagaaagaaaaaaagatgcgatctttgttctcattaccttagaaaatcaagacgatgtttttatcgggaaagcttggaaacgagcgttgaggaggtctaaaacctgagagaagaaaacagagagacggagaaaatagacgtgatgggaatgtgggttgatttgatcttttgattattattagcggataatagtaaactaattaaacgattaatttttctctaatgattaaaaattatctatacagagtaggaaaaaaaaaattggggtttgtttgttgtacggagggagagagcgcgaatgtaggaggacgcgcagtaattaacaagtcttttttggcttctccaatcgtttatacgggtttattacacgtggcaaatccttgcctaaaattaacgagtattttaacagattataaattggattaagaaacgattaacttgtaacatataattggggtacgacgaccaacggaacattttaatatgtatcatgtatgatttgggcacacgtcgtgttgtggtactttacttccaccgtctacaatattatagagttagcatactttatacttaaaaccataggttatgaaaacaaaaccaaaaatatagtagtggtaaattgatctttaatttcgttcaaaatagacaagaaaatacttcagatttaaggaaaacgttgtagtgatacatttatttatcatatcgagctttaatataggaatatttgtttttattgttgttacttaatacttattaattagtgttgggataattttaactgtttcaagtaccgatctatcacacttcaacgcagagcaatcggacgtatgaaagcaaaaagatttcccgcatctatgttagcaagtggtctctcatatcaatcaaggcctattgtgcctccacttccgaaattcactcgttcgtcaataggttatattattaattctacacatgtatcacaaaaatgtgcagatttcaacttggtggtgaatggtgatataattaaggtttgtatatcatgtcacataacttgcgtaaattccatataaagtaatataaataaaatggtggtgtaaagcagaggaacgagtcctatgatagagagatgttcaattgttcgtgggtcatgtggcgtaaaattgtttgtttccttgtttcttttggcgtaaactgcaaaattgccaaaaattcgatgaagtcacaacctcttgatttgtatatattgtcacgtcgctatatcaccacaatcaattcctttctttaaaggactagaattccattactcatatcatttccgttatgttagatccacaataaatgataataattaaatttaggacccatttgaatctttaggtgctgattaaacacccatctctaagatcacaaaagcagaaattttacatttttagtgacatataatccttttttctatcatcaaacattagaagttggatgttaaatgttctacaaaacttcacaggtgttgttggaagttccaaaaaagaatgtcgtttgctatacaaaaaaagaaaagaaaagatgaaaagtaacttcctgcgtttaaagtatcacgctgcgttgcggtcatgcaaacgcaccaacaaacaaaatagtttcaaaacaaaacttgaaaatgtggggtccacgtaagaatctccatggaagaacttgagccaatcagagtgcaaaaacggagatgacagtatatttcaaccaataaggaggcagaatcagatcaccagtgggttccattataagtttcctcttgactaaccaccaatagctagttttacacagaacttaaatttttcatttttttttgtcttttaatatttcaacaagatcaattttattatttgatattaaccatcttcaacagtgtttgccaacgaaaaaaaaacaccatctataacagtgtcttcaccaaactgtatttcactatgacttattttccgaaaagaatgatgaagtttagtaccatacatgaactagcggttagatcgtaattaagaatttgaggatcatattttactatatcatgaaaacggagagagcgcaaaattacagacatattggttcaaaattttatttaagaataaagtatatatatggttctaatttttcaaaaaaaaagtatatggttctaaacatttatttgaaagtacgtaatataatgaaaacaaaaattgtaaatttgaagtaaaaaactcgtgaaaagtcctcattctaaaataccatgtacacgtacataataaactatgaatagaattatgagtttttatttatatttctatctccactccaaataatttagaccacacaaggtaatgaaaaaataataattctgaaaaaaatgaaaaatactgccgggaaatcgagacgccacacacactagtgaattcgttgcaaaaccatatatattacagtattttgttcttctcaaggcctctctctccatctcagcaactctctcactgtgtaatatacacacacaatg

SEQ ID NO: 36741 - DNA, 3000 bp, Unknown; identical to SEQ ID NO: 36740
  misc_feature (1)..( 3000): 2750-1469P.txt file - cDNA_ID_3099805; gDNA_ID_2936582; Annot_ID_143788

SEQ ID NO: 36742 - DNA, 3000 bp, Unknown
  misc_feature (1)..( 3000): 2750-1469P.txt file - cDNA_ID_3099810; gDNA_ID_2936582; Annot_ID_143787
tggtaggttcacgttgtgttatgttatcagctttgaccttggcttcacaatatattgttcaaggctgaaagctttgctttctattgttctcgatgttatttattttgtattagactcttactctactagtttcatcatttatgttatatttctgctgtgaatgcagatttgaacttctagaccatcaacatatagagtttgataaatttggtatgcgaaacaatgttgctcaactttgtgttttagaggtatgcaccgttttaagttatttctgtattgtcgtcttccccctcttttctcctctgtcttttcttgattctagaagcacagagatatgacaagcttaattgtgggcattattttatatatttttccctcctgttgtgttttcagctttgcaggctaattgcttaattttcttagtttcagcccttgcaattaattaatttacttgattgtctattacggaacagatgaactgtgaggaggacccaaagtctaaattacgggtgcgatcatcagagtatgtctgagttctgttctgattcctttactggagtgaatattgaacttacttttaagatccttactaaattttatgcgcacttccatgtttggttgatttatgcaaacttctactagtcctcgaaggctagtggttgggaatatacatgtcctattcaatcctaagcgtggggatatcaagcttggccaggtatgtcttgctagatccttacaaaattctgataaaaactggcttatccataaaatcggtagagcatttctgtcactacacatcctgagtttagaaatgtcaattttttagctagtactattttatggtattcatcagtacatcaatgcctgtcagtattgaaacttcattgaaattctaagtagctcgctcatttcttgatatttgatatgtcataacttataggtaagactctttctggagaaggcttacaagctatcacaggaatggggaaatattcctgtggcgattgcaggtgatctgaatagcactccacaggtgatctctaccaacttttgttttttttgttctaatacttattttttagctgaattctaaaacttactctggatttgctgtacagagtgcaatctatgatttcatagcttcagctgatgtgagttccattgagggttctggactctttcttttacatttcgcctggtcataatttttttcctttctttactgggaaagttagaatgaactctttatattccttttttaattttggacagttggatacacaacttcacgatcgcaggcaaatttctggccagactgaagtggaaccaaaggagaggtcattcagaaaccattatgcatttaggtagcttgtaattcaccggggtctttggtttctctaaataatgtatccatattccttttctgcctacctgatgaacggatagattgcttatatctcttctgtttacctgatgaactgatagagtgatagattacttatatttttctttggcctgcgcttaatcaactacgtaatcctcagatgaagtttctatctcaatttagtctaactaaacaactccctctttcgtcagtgcttcagcatccatctccggatcactactcaatgagtggagccaggaagaattacagcttgcaactggtggtcaagaaaccactcatgtccaacatcaactgaagcttaacagcgcatatagtggagttcctgtaagtgtttttgtttcttgttctcgactggtggacgcatcgaaaagagttgaaatctgccttacaggaaaactaagttcttaggaactgtggctttcttttatactagatactgaaaaacgtttagggaaagtagcatgttgtatgatgttatatatccttctagtatgctaagacctgagatcttgcagggtacatatagaactagagatcaacgcggtgaaccattggcaacaacgtatcattccaggttccttggaactgttgattatatatggtaagtctgttgtgcttatgaaatccgaatcattaatcagagctttcaattatatatggctatcaatgttgtgatatatgcacatgtaattttgaaatctcaataattaatctgaggttttgaacccaggcataccaaggaactcgttcctgtgagggttcttgagaccttgccagcagatgtattgagaagaacaggtggactacctagtgaggtaagtttttttttctaggctaaactttttttctggggcaaccctttactttctcgagttactctattcattttttcaagaatgtaaaaactgggattattggaagagttgcatacaagtctctgaccaatgaaaatttgcagaattggggaagcgaccatctcgctatcgcatgtgaactcggctttgtcaatgactggcaatgagccaaaatgttagcaccaaccactaaaccgagccacctgacttggccatcccttgaggtttttgaatgctcatcgaggcttctgaattggagttcggaaacagattcagtaaattgtaaaacataaacaagttttgggctcattcccatacatagatttgcttacttgaaacatttttttttaccttacctacccaagacttgcacctactctttctgcttttaaaaagttaataccaaaatagcatgttactggacgtgtacctatgaggagcgaagacccattttgctactagaagcaaaacaatgtaagagacgttgcgtaaaaagtatctcaatctgttcactccaaaataagctcttctcaagtgtcatctgacgctgcattaatcaaaataccacacggtattatcaaaagtgtcgtaagcattctttccaagtgttgggaatacattgggtacacaaatcggccatttacagttaacacacatctatttaaatcactcttttctctttgctccaccaaaacattccggcataaacaaaaaaaagtcccactagaaaagctcattatg

SEQ ID NO: 36743 - DNA, 3003 bp, Unknown
  misc_feature (1)..( 3003): 2750-1469P.txt file - cDNA_ID_3099833; gDNA_ID_2936582; Annot_ID_143781
gctttatggaggtctcatacttttatggaaaaaaaaacgatttggtctcatacttttatgacaaaaaataaagattcctattattcagttcatatgcaaagatgtggattttagaacttcaatataccagctttgctacatggttaatggttaattgctcaatacttcttgcctctttgtttccctggcagagtctaacgtttttggcccctcttctgaagcgcattgacagactcttgcagtttgacaggtaccctcatgtttgatgttaatgatttgataggttttaacagaacttattactgagagcttgttggagataaatgtactaggttgatgccaagctacaatggcatcttgacaattagctgcatccgaacattggcacagactgctctcaagctttctgattccatcagtttcgtaagttctttcctttcgcttttttcttccaattgctccttatgagatagataccagcggtgattaaaagcttgcaatttactgacttcaggatcacatctgtaaacttattgaacctttccggaattcggatacaatattgcaaattcgtatagaaggaagtagggcacttcttgacatcgagtaccaatccaaaggcataagttccgcacttttgttgtttatgaaatatttggtagaagaatcatctttgagaggttggttatattctcatgctggaacatagcagctttctatttctaatagagttcatttattgcttttatatctttggcccttgattacagggcaggtaaaattgtgtgtacacacaatgcggttatgtcaaatagcagttggatgtgactcagacgattgtgtcgacactgttactcttctggatttgctgcatctattcaagagccatgtagtatttaacaatgaacttcttcgctactacttgttctgcatttttcaaatcctcgctggaaggtctgtagtttacttccttcagtggattttgtttggaatccagttgttctatttgagcctagagggttatttttctctgttttcttctgcttatcaccataattatccacattctgaacagaatatacttattgttgtctcattttcagacccccaacgttgttcggagttcccaaagaaaaacctttgcagcttgttgatgtggaggcctgcattgaaccgaaaaatgtatttttggttcccggagcagaggcaggggagccttcactttcggcacttggagatgccaaaggacaatcgctggatgttgctccttatggtgttccaataataccacaggaaatgttcatgcctattgttcctgaactgatgttgccagaacctgttgcagcgtatgatgagacacagcatcttgaacctcgcatggaaagtcaaaaccaaccttcacatgaaaatcccatcgttcatgagattccatcagatgttgaaggtccaacagaagaattagctcatagggaagcaaaccctccaacaaaggaacctcaaaaagaacctgatgtggtttctgtgtctgttagtcatgaggtgaagaagtctgttatacggatcaaggtcagaccatctggggcaaccagcagagcggaaggatcagcacgaactatagaaagatctcaagggattgtggtacgccatgatatagaccgaggtcaaactagttcagcttcagtggacgccccacagagaatctcaactgacgctgtgagcataagcaatcagaatcacgtggaggaagtaaattcgtgtcacgatgttggttctcgcatgactgcaagcatcggcagtgtaaaatttgcaagcgaaggcgatatttttgggaaagagttgcaatgcactgctgagtctgggaaaccttcgacaagccagaaagcagataataacaaccgaactgtaccacctagcttcttaccactagaccacagtatggaaaacgaggcgcagcagaaatacgcgagcctccaaacactttcgattggtaaagaaaaggaaaagaagaaagacaaggaaaagaaagagaagaagaggaaaagagaagatcccgtttatctagagaagaaacggttaaagaaagagaagaaacgaaaggagaaggaaatggcgaagctcgtgagcagcactacggatccagctaaaaagaagatagagagtgttgcggaggttaaagaagaagaaccaagtgatggtgccatgttgattaaggttgaaccaaagactgaaccatcaacagcagaagctagaccgcttcccaaattccgaatcaaactgaaaagcaaagcgttcaacaactcataaggttagatccgagccagtccctccccgccaaaatctgagtagtaacttttatttccaaaagctttgttgttacaacttgcaaggtgttgtgattatatgtcaatgtaatctgtttattcaatgcgctttagcctctcttgtctagctttggttacacgccagagatgaagcgcgctccacgtcaaattcacgaactaacgttaggattgaaacagtgcacatttaatactaagggaacgatctgacaactacctttaattttatttgatttccagtgcgcaatgtcattaatttagactaatcatattacatcaagaggctaggctaaattacatcgatactaacaattaatggaacggttatctccaaattaaaacaatcagagcttgaatgattttctaaaattttgttaagaaaaataatccaaaaaaaaaaagaaaagaagagagagggttttagacagaaaataaacataaatgaaaagtaaatagagaaaaaacgaaagaggggaaagcgaaggagaagcactgtggaatcgaaaaaacacaaagctgcagcattttctctcaacttggtggcgtcttctctaaccaaccaaccaatcgtctctagtcaaagagaaaaagagcgagcatggaggcaaagctagaaatccttattccgtagtagggaagagaaacagagagaagaaagacgatg

SEQ ID NO: 36744 - DNA, 3003 bp, Unknown
  misc_feature (1)..( 3003): 2750-1469P.txt file - cDNA_ID_3099837; gDNA_ID_2936582; Annot_ID_143780
agactcagacggaagagatacatcttgaaaagctagtatagaaataagtagctttgcttggggatctgcaacatggatagtggactcagagctaaccaaagctctcaaagcttgaaggtaacgtgaatcaaagttttggttttgaagagattcacgaatctcagaccatgcttgaataatcgacctagcagatggagcagaattttgcttcactagatcaccagagacactacttccactcacagtccttaaccattcttcaaggaaaaaactattgttagcttttctcgccatctttaatacaactaattcagtaaatcctcatcaaggtataaaaccctaatcacgacagattatggattgatccaaaactgaaaaacccagaaaaatcgtcgctgaaagataaacagagaaagaacgaaatttcagcataaattcgtcaaactgactcttcaaaatacgcaaaaccagataattaagcgacggaattgaacaaaagagcaaaattgaagaggctttggctacgcagcgagttcaccccgaggtatttcctctctcactctctcgtagataacgagaaaccgccggaaaaccagataatctgcctagtttgcggtgacggagttgtgacgtttgttttgtggttaaggataaaccaaataaaccagaaaaccggagataaaaccgcacggttagtaaaccagctacagaattgttaaatgtctttttcaacttcaatgaggtcaacataatacgtaaacaaactgtaattgcaggtttcgaaatcacatgagctcatttcctcgttgtctacttcccacaaaattcagaaaaagttttgcacaaaacctggaaaaggaaactaattaagtcaacgattcacgtgactggtaacatcgaagctaatttaatttctctttcccttaacaaacacttcttaatcgaaaactagtatagattactgtggtgctaacttcttttttggcatttaaacaaatgtgtacatgatcttttcttttatttctgcttacatgatgctttattattacaacgattagtatcaaatgaagaaagaataaaaagatgagtaaattacatcattacaccagaagtgaaaaaaaataaatcacatgacaaagaagaataaataattcaagacatatacataccaagaaagaatattagctaatatcttatgaattaatcttctagtattagtaaaatatacgtgttttactatatctttgaaaaaataaagaaaacttaaagcaaaaattaagaagacaaatcagtggtgcaaggggtttggaccagatgggacgagtcgtttttcaacgccatatctcgggtcaatctcggatcctcccgccggcaaagctttccgatgattactccggcgaagatctttcaagaacggtgtgaagtcaaacgttttcaccgccaaagctcttcttcccggccggtagtaaagggccggcaaggtaataaccggagaaggaaaagggtttatgggtttggagctgaaattgccaaacaaccctatggagacgaagatgagaagagagatccatagaagaaaccctaagacatgtgagactctagtcgtcgccatggagattaaagatcataggaccatcgaagacataaatgaaatatagtgttaatatatatacgtatacgtatgtgtgtacagagggaaagagaaagagagagatgtgaattggagacagcgttttccaacgaagaaacttcctttgcgttcaaggaagaggaggcctcattaaatttgaagttcgtattaaagtcaaacctctcatcatatattatttattcattatgaatttcaaattgtttttgtacaacagcttaatttacaagcagcataggaaacacaggggaacaaaaattaaatgatcgcttcatgtttttatctaatttgttagcatattgaatgattgattttcttttaatttggatatgttgattgtcttgttgcatcatcaatgtatgttttatttaacaccggaagatcttatgatgggttcattacttcataataatctccgagttctacaagactacaactttcacgtgacttttacagcgacaaaaaatgcatctagcgaaaattaatccacaacctatgcatttttgtcactcttcacacgcgtatgtgcataaatatatagtatatactcgacaatcgatgcgtatgtgtacacaattaccaaaacaattatttgaatattcagacatgggttgacatcaccaagtaatattcacagtatctgaaaactatgttttgacatccctaaatagtttgactaaccagtttaatatgagagcatttgtaagaggcaagagccatggttttgttggctcgtttaatatgctcatttaacccccccaaaaaatactattagatttaaacgtaaaagaattaacgaacacaagaactgctaaaacaaaaaaaaatcaatggccgacatttcatagttcatacatcactaatactaaaagatgcatcatttcactagggtctcatgaaataggagttgacatttttttttgtaacgacagaagttgacatgttaagcatcaatttttttaagagtggattatactagtttttttttttttttttaatgtatggtatgatacaacaacaaaaactataaaatagaaaaagtcagtgaaacctcaaattgaaggaaaaacttttgcacaaaaagagagagagagagaaagaatgtaaatccaaataaatgggcctaattgagaatgctttaactttttttttttggctaaaagagaatgctttaactaagcccataaaatgaacatcaaactcaaagggtaagattaatacatttagaaaacaatagccgaatatttaataagtttaagacatagaggagttttatgtaatttaggaaccgatccatcgttggctgtataaaaaggttacatctccggctaacatatcggcaaaaaaggaacatg

SEQ ID NO: 36745 - DNA, 3000 bp, Unknown
  misc_feature (1)..( 3000): 2750-1469P.txt file - cDNA_ID_3099853; gDNA_ID_2936582; Annot_ID_194952
gtgtattaaaaagttaaaaacaactcataccaaaacatcattcacaagcctctccagctgtatctgttcaatatatgtatgtggaacatatgaaccttccagtccaagttggtctgccacatttttgacaaaggtacggtctttaccttgtaccttcaaaatagagttggacaaacttgatcattaatgtcaaaataccactctaaagacagtatatacgttttgagagacataagagaagcagatcttacctgtacatatgtccgattcagttgttccaaccaatcagttttcacaattaccttgtcatcatcaaagatatgactctttcttttcaggattgttgcaatggtataacccagtgccattaatcctccaagaagacgaacactaacttcaaaagttattctgggtgatataataaatggacgatctgtaacccactcctaagaacacatagaacggtaatcattcatcaaattaataaaccattcgttcagctttgatatgatatggtgtttacagaagaaaaactagtctggacaggtattggccaaacctcaaacatgagattgtattttccatctcggttcctcattctgaggtatgattggcatgcttcaggatcctcgcctggtggtaacagatagatgtcataagtttcctctgtacgttccttgaaatcttcagatagagctgccttcatttgttcgggtgttacagcctttgatgactacagtaagataacaaaaatcactccaaccgggaaagtattgctgctatagctagttgcagattatataatatgctacgatactacacttatgaacaatataaattctgtaacctttaaaatatatgttgggttctgaaagccactgaatgggttgaacttattaaggatcttaatctgagctgtcttcagatcaggttcaataaacgccttgtacataggataaacctggttggagaaaaaaacataagcaaaattttactgtaaaaaaaaactcaaaacatccagtaggagtaggagacatcgtttcatgttttttccatatttgaagcaactccaaacagcaggcatgacagcaagggtgattaatctgggctaaaaaataaaagatagcaaagactagcatgaaaaccgtctcagatatctgatggattatttcttcaggttcctggccagcacgttgaatgtcccgcaaaacacgcttaacaagatcaaaatgcactccaccagtgacagagacacgaagatctagcaaaggccgtagcttctcactcaaagcatatatgccttctagaataacaatgcgagagctaggcacctcaagcgttctatacaaagcacgaagaaactgataagtcattgcagctgtgtagctcttatcaactaacaagtggttcccaggaattcaagtataacgccgtctgtccacaagtttgaaatagtagtaaatgcaccaacgaagaatatatatacctgtaacctattcgagaactcgacttgaagtcatatattggaacctgaacaggttttccatcccttagaccatgtatattgtcaagaagtgtatcatagtcagtcaaccttggatctgtaacaaaatataacagaatcgcaaatgttctttatattcagattatatatacataagaaaggaatgattgaataaatccataaccagaatccagaagggtgaaacatagaggtgcataccatcaaagtttccatcgataacacgagtaccatcattatagttgtccatgttaatgatagcaatactaggcataaaattgagaatcttctcagtgaaaatggttttgccagctccagaaggaccagctaacccaaccaaaatgagcccatcgttcttctgagccaataattgacaagcacgaataacagcgtagaaacctttttcaaaagacaatggatcctctattggaactatctcatatcttccagagtcctttctttttataagctgaacctgatctcgcaacaagccatgccgccggcgaggtgacagagcaacagaactatcgagcgccattgcctcaaagttgcaaatgaagaagaatatctggaagctacaaatttcagacaaagacaagaatttgagatttttaatttcatacgagtgagcaaaaaatgttttttttagatcaatacgaacagttacctatcaatccacgatataagtctaatcaaatcaaagcatgagcagaaatttcattcaatttaacaagatcgatcaatattcatcagaagctgtggaaataattgacatgcacacactccaaatgtaagatttgagctttaatattactgcaacacgacttctaaaacacttggctacacgatcaatacgaaaaatcaaacaaatactcaacagataacatttcgaatctgatcgtaaacaaattagagacgaaaaagcgagaatctttaaacaaacttcacctaacggaagaagagtcaaattggggaaaaacgtcgccggagattattccatattttcgggaaacccagaagcgatagtaagaatatagttggagagatattttcgtagcagtcaatgagagtaagaagatgatggaaggaggaagacggaagctttaccagaaatcactagagaaatcaaacagtaaaccactcataccagattcatttgaaaattgaattttcttcggttattgattgagtcacctggtttatccatctttgtaccgaaccgagacatatacgatataaattaaaccaaatttggtttatactttggttcatattgctcttatttacgatgaaccgaacgaaaccgaaattggattagtgaaccattgcgagccgttagtccacgtaatgactttgaccgtcacacgtcactcacggtgaagcagtgacgacgtggaagaaactcaatctctttcttcttcaccttttttctttttcttcgcactggaaaattccgcaggtgagagagagaaacaatg

SEQ ID NO: 36746 - DNA, 3000 bp, Unknown; identical to SEQ ID NO: 36745
  misc_feature (1)..( 3000): 2750-1469P.txt file - cDNA_ID_3099853; gDNA_ID_2936582; Annot_ID_143777

SEQ ID NO: 36747 - DNA, 3000 bp, Unknown
  misc_feature (1)..( 3000): 2750-1469P.txt file - cDNA_ID_3099865; gDNA_ID_2936582; Annot_ID_194947
acgctttggtcgatccatgtttatatcggtatcaatgacattacaacagaagactcagtgaaaaagctgttcttttatttgtttttgtagaaaatctgatacttttcagagacagctacaacggagctgatactaggaggacctcatttggtttcacctaattctgtaagcaaaagccgccaatgagtgcctttctcgaatttctcatggtgatcggaaagcttcaccggcgtagcgcacattgccgagttcctcttcgatacggagaagctgcaatggaaataaatcaaactcaagggttcagatatgtggtatatagagtatagtattaagcataagttggatattagttaactacctggttgtattttgacaatcgttcacttcggcatggagcaccagttttgatctacaaaacagagaatgataagcaaacactagagagtaatacagacaggtttagaggatttgatgtacctgtccgcttgctaaaccaacagagagatctgcgatgaagttatcctctgtctcgccactcctgtgactaaccatcacaccccagcctgcagcttttgagtcaagtgctgcttgaattgactcagtgactgtcccaatctggttaacctgtgaaaccatgaattacaaacaaattgaaattcttctccaataacgggggttttgtcaaaatggtctagagaattgagattagaaaagagaaaataatataaaaacttttatttttaccttcaagagtagagcattgcaagactgtttcttaatagcttcagctatcctcttcgggttagtgactaacaagtcatctcccacgagttggatatccacagaggattgcaatgaagcccatgagctccaatcatcctggtcaaaaggatcttcgatagagacaattgggaaatccttgatgaattctctgtagaggtcagcaagactctcggctgacagtacgtgagctccatcgtttggctgtttcttgaagttcaaatcgtatctaccatctttcatgaaaaattctgatgcagcaacatccattcctattttgatctgcaaaaattatatattatgtgagtggtgtaagattgacaccgaagctgccagaagttgtttagggaaacacagatgacatgcaactttagcaagtattagcattaaaaagaaagagaacttgattacctttccagtgtaaccggccttttcaattgcatctatgagcagaactagtccctctctgttatcttgaacattcggcgcaaaccctccttcatctccgacattacaagcatcttgaccatacttagttttgattatccccttcaatgtatgataaactgtaatcaacaaagtacattaaatgcattactatcagaaaaacaattctttgtgataatccaaagaatagaagaactttggaaccaaaagagaaatatgaaacaggaagctgcttatcaaggcttttctgtttttctgacatttcattgcaaactcaagaaaaattaggagccgccatagtttcttaagttctagcaagttaaacccagttatcactaactgaccttcacttcccatctggaaggcctccgagaatgaggtagctcctacaggtagtatcataaactcttgcatagccaaactattcccagcatgactgcctccattgatcacattgaatgcaggaactggcatgacaagctcctttgttcctgatgtttcctggatgtgtttgtacaaaggcactcctttagctccagcacctgccctgcaaacgctcaatgacactcctaatatcgcattagccccgagtttcgacttgtttggggtcccatccagttccagcataagagcatcgacatcagcttggttccttaaagaaaataaggtaaaaatattacattcaactatccatcaccgattatagtttcccaacggttcagaatcagaaaccacaaacggaacaattcaacaatgacacctacttcaacacttagtagtatcaagtatgaagcaaaattaaaactacatgcaacaaacaaccttaataaccttaactagaattccaaattcaacagtcatgcattacgattcgaatccaagtccaccaaattgaccagtagtaatccagagcagagaaacaaagctaaaacaactccgaagatttctatctaactaagcataccaactccaaatcacgacgtttatatgttcatttagattgaggaacgaattcttattctcacctaacgtcaactccaatgagttttggagccacaagttcattgatgtttttaatagcctgtaatacacctttaccaccatagacgctcttgtctccatctctaagctcaagcgcttcgtagatcccggtagatgcaccacttggaacagccgaacgatacagatcatcggtaatcagatcaacctccaccgtcggattccctctactatcaataatctgtctcgctttcactcctttcactctgcactccttagccaccaccgagcattggacaccgctgcgacggaatctcagacatgatggcgcagattccaaatatcgttcgccggaaacacgcgacggagagaggaaagatctctgaagatggtgaggttttgtagtcaaagccattacacgatacctaaaaaaaatactctctgtgattcttttgactaaaatggagaagcggagaataaaatgatgttatataatttgaaaaacgtccttttggaggttggtgcaggcggaggcgatgaaaactaaggagtcaaaagaaccatacttaaaccggttcattttccaattggttgactgttaaagagaagtttctggttttggtttggttcggttcggttcggaacaattcaaataaataaaacaaatcaaaaatattcactagcaaagtagtaaccagagacactgtgccgtcgcccgtcgccgccgccgccacactatcatctctctcaggtttttgattttccacggcaatg

SEQ ID NO: 36748 - DNA, 3000 bp, Unknown; identical to SEQ ID NO: 36747
  misc_feature (1)..( 3000): 2750-1469P.txt file - cDNA_ID_3099865; gDNA_ID_2936582; Annot_ID_143772

SEQ ID NO: 36749 - DNA, 3003 bp, Unknown
  misc_feature (1)..( 3003): 2750-1469P.txt file - cDNA_ID_3099870; gDNA_ID_2936582; Annot_ID_194943
caaataaagaaatcattcgccagagtaagatttgtcaaaaaagtcacaagtcaccacgtctcacgagttgtggaaaaaaaaaagctgacctcgagagatggaaaactaaaatccatacaaaaacaaataatccgaaacgagaaagagtacgtgtaatgtatttttgtcggaataaaatcaactgtaaaagatggagtgcgagacttttctaaggaagaagacaagatggtgaatttaaaacattaacaagcaaattgaaaaactaaaacgcatttcaacgacaaaagcaaataataataagaaatagaaaacggttctaaacaaattgttggcggtatggtgttatacgaaaactgaagattcgaggaaagtggaaaattgtagtaaccaatattacggtcgtttggatttgatgacaaaaatataaactacaacttggtcgctcaaacactggacctggacagcatttagctgaatcaaatatccacaaaatggaaagaaaataatcacagcttttctaccttataattttccacggtttttaaaaaaatttagactaaaaagcattattccctttgaaaaatcatttgttgcttagttaactgaagatactcatactcttttggaagagcaacgctgaatacagtatacttatttcaaaaattcaattttcattactagacttgcacccaatgagtccgtacactacaaaaggcaagagctattccgatacaggagatacgatgatagcatcatacgtagtaaacaaacagtttcaacgattccatccatagcttgatttgtttaatggagaataattgaaaagacaattagatcggactcctcttaaagcttgctcgaacttagagcatctccaattctccaaaacgagtatataatttaaaccattggagatgttcttattatctttcttttttttgtttcatagttattgttttgtttttaagttttaacttagttttaggcaagcgaaatttgttgactaaattaattttgcgtgcgagatcagtagtaaaaagcaaacaccaaagcttttttgtcaataaaatgatacaatcaaaacgaatttcaaatttgtttttgagaaaattacaaacgcagtagatagacttcacaaagggccaaagcaaccaaactctttgacgactggcaagttcaagtcttcggtcttcctacgacccgccatcgtgaagtagtagtctctctcttacttatgaataagggttttgtatatgggcttgggctttagtttgggcttttaaaagattaataaaatgagaagtatgataaatccgattggttacgtttgtgtgacatgaaatgaaacggctaactttcgattccttatccacgaaatctagttaattatctatctccctccaccaatgatgacacacagtttcatcaggtagacaaaatgatgcaacccaatgcaaaacttttgtccccatccgctaaatttctaccgtcacctatagagccaccgcaacacaaccgtagaaccaccgtaggagcacctccgtcattggaacgaaactgcaaattatcgcgacggaatcttagtaaatcctcgttgcttctactcctcaccactcaaacaactctgacgccattgctcgacttctctaaagctcaagcagatacaattgctaaccctaatctcacaaattgcgaaaacagagtaaggaaaatgtttataaactggatttcaatttcaatgtctccttattaattcgatttctgtttccaattttccccagattccgactaagaaagcgttcatcgacgtgtcaatcgacggcgaaccaatcgggaggatcataatcggattatacggagacgatgtaccggcgggaacagctagattcagtagcattgtaagcgggaaagctggaattacttaccggagaaaagattttgtgaagattatgccaggttatgtccaacacggcggaattagatcgtacggtgtcgatgccgagcgtgccaccgccgcggtggggagtctccaaaacctaattgaagagtgggagagagggaagagaggagagatatgtaatgtaaataaggcgggaagcgttggaatcgtggtgagagatccgtcgaaaccgccgccgaagacgaagcttgtggcaaggaatgggaagcttgtggtcgaagaagaggtaattgcggtggggccaaacggaacggagtttgttataacggcggttgattcgccggagctggaggattcggttttggtgattgggaaagttttggaaggaatgggagttgttgagaagatgagagaagtgaagactgtgagggataacacttcatctccttatttcaggtaatatattactgaccgttggatttaacttgtgtttttgagatcaagggttgtgattgtggttctggtggtgtgaacagggtggctaaagtgatcggagataagagagctgtggtggcggagagagggtttaaccggccttattctaaggttgtagtcaccaattgtggtttgatcgagtcacaaactctatgaatgagctcattgtttgttggcaacgttttttgtgtgctatgcaagacaacttaaactgttaagcacatcaaccacatggaaagattgcagccatggtggtttggtggaactacattatcaattgagtaattataagcgtgtgattgagaaattgttgtcttgcgcggttaggccggagcatagtccacagaattgaattgcttgggccttaactggatattaaagagtgtaataaacaatttctactatttctatttgcccaaaacaaaactgtctcggtccataataaagcccgaatttactctaaagcccacgagcccacgcatcccctagggtttctgtgtcttcaaatgtgacctatcctcttctgctacactacccaatttattctcggccggaaagtctcttcttgattatcgtccagggattgcaacagagagaaagtaacgatg

SEQ ID NO: 36750 - DNA, 3003 bp, Unknown; identical to SEQ ID NO: 36749
  misc_feature (1)..( 3003): 2750-1469P.txt file - cDNA_ID_3099870; gDNA_ID_2936582; Annot_ID_143770

SEQ ID NO: 36751 - DNA, 3003 bp, Unknown
  misc_feature (1)..( 3003): 2750-1469P.txt file - cDNA_ID_3099875; gDNA_ID_2936582; Annot_ID_143769
tttggtaagaacattaaggcaaggatagatacgtcttattctgttattcctcgatactcgactttgctagcttttcgtaaactgaaattttgtgttctctctttacgaatatctcttattttttctttaagatgaagaagatagagaagagggagttttgtatgttcagccaagtaagaaatttaaagaaggaacgtagagctttttatcttgatttggcatggctcgtgtgtagccgacgccgtcgttttcaagtgtttgacacgtggatttgtagtttttcattggttataaataaatatctcatttgattaaaatgtgtagactttgtcagtggaaaataaattgagatggaggttcttgtacgtattctttatttcttacctagccatatattgtttctcctatgaattaaatttatcattaccaaattatacaatatattactccagtgatttttaattcttttagccaatgtaatcatcatttttactaatatcgaatcgttatagactaaaatccacattagttttggaattcatgaaacatataagataatactgtttaaaacgttcaatagtatgttggaacaattaaaaataggaaaaaataatataacattaacaatagtattttatatatattatggaagttctggaattttggagacgaacttaaaaatattcttaggaaaatatgaaatgtaccacctttcaaggttcagaaagacagaaactattttgtgtgtggctgaaaactcatactagtatataatttatttatctataatgctgtttaatctctaattgtataaccagatatttcatattaaatttctcacaatttttttttcttttgtttaaaaacaaatttgtttttgttagttaaaacttctaaagtgaatatatattgtacacagaatttctggaaagaaaattttgatctctaacataaattacacaattaaattcttgccacttgttttaattcaatattgccatatagttcatttttaattgattttatagaaaaacacacaaattaaaaaaatgtattagtttttgtgattaaaactgatcagaaatgtattagttttgtgatttatatttttctataattttaaaccaatgatattcaattatttgttttgaagtttatatactaatgtaggtcaagttagtttttttggaaagtaatacttcctctatttcttattatttgattttttagaaaataaaattgtcttaaaaaaattattttgtaagttttctatgcactatttattagttattattaatgaattttaatgtgacaaatttaaagaactctcatttaaataacaaaagattaaataatatttgccaaaaaaagatcgataaatatcccacgttaacttaacatcatacagtaatttagatgacaacgtaatagacaaaagatattttgataaaggatacattcgttttattcaacaattatgcttcaacgctgaagtagatgtacactattttactgttttttttttcagctgaattttctcatctgctagacaatatttcggacaaataaagaaatcattcgccagagtaagatttgtcaaaaaagtcacaagtcaccacgtctcacgagttgtggaaaaaaaaaagctgacctcgagagatggaaaactaaaatccatacaaaaacaaataatccgaaacgagaaagagtacgtgtaatgtatttttgtcggaataaaatcaactgtaaaagatggagtgcgagacttttctaaggaagaagacaagatggtgaatttaaaacattaacaagcaaattgaaaaactaaaacgcatttcaacgacaaaagcaaataataataagaaatagaaaacggttctaaacaaattgttggcggtatggtgttatacgaaaactgaagattcgaggaaagtggaaaattgtagtaaccaatattacggtcgtttggatttgatgacaaaaatataaactacaacttggtcgctcaaacactggacctggacagcatttagctgaatcaaatatccacaaaatggaaagaaaataatcacagcttttctaccttataattttccacggtttttaaaaaaatttagactaaaaagcattattccctttgaaaaatcatttgttgcttagttaactgaagatactcatactcttttggaagagcaacgctgaatacagtatacttatttcaaaaattcaattttcattactagacttgcacccaatgagtccgtacactacaaaaggcaagagctattccgatacaggagatacgatgatagcatcatacgtagtaaacaaacagtttcaacgattccatccatagcttgatttgtttaatggagaataattgaaaagacaattagatcggactcctcttaaagcttgctcgaacttagagcatctccaattctccaaaacgagtatataatttaaaccattggagatgttcttattatctttcttttttttgtttcatagttattgttttgtttttaagttttaacttagttttaggcaagcgaaatttgttgactaaattaattttgcgtgcgagatcagtagtaaaaagcaaacaccaaagcttttttgtcaataaaatgatacaatcaaaacgaatttcaaatttgtttttgagaaaattacaaacgcagtagatagacttcacaaagggccaaagcaaccaaactctttgacgactggcaagttcaagtcttcggtcttcctacgacccgccatcgtgaagtagtagtctctctcttacttatgaataagggttttgtatatgggcttgggctttagtttgggcttttaaaagattaataaaatgagaagtatgataaatccgattggttacgtttgtgtgacatgaaatgaaacggctaactttcgattccttatccacgaaatctagttaattatctatctccctccaccaatgatgacacacagtttcatcaggtagacaaaatg

SEQ ID NO: 36752 - DNA, 2583 bp, Unknown
  misc_feature (1)..( 2583): 2750-1469P.txt file - cDNA_ID_3099915; gDNA_ID_2936582; Annot_ID_194967
cattattgcatactcagcctgcaaaacatcaaacatatcgcctaaaggtcaaaaagtaagagtattaatacctgatatgttggctgactaggcagatgtggctgtccctgcgggaattgacctccaccggaagcagggggtctgttgcctgactgcaaaattggctcaaataacgagttctagtcagtcaaaaacttcataattcacaatgagggaaataaaaggaaaccgacaatagctactcataagtcataactctgactcacatgatacatgggttgagaaagatgctgagtaggtgcgccatggtgctgaaatccagtgtttggaccagtttgagcttgtccatattgatgatgatatggtctagactgttgctgtgccacatgaggacctccaccagagtgcattggttgttgttgcaactgagtggaggaagctggtatatcaagatgatgaaaaggaggttgctgggatgttggatgatgggaagccggaggaggcgcgttttgaacttgagaagactgtggatgagacatagaagtgacagcaggattcagatgtccctgacgctggggatgcgaaaaacgaggctgtgattgagcactatttgcagaaacagaargcggtggtggaggcataggcattggttgtggtgttgggtgttttcgaatcggggcttgtggctgcatcgyattggctggctcatgtacactgccaccgccttggaaagaagacatatgagcttgaacgtttggctttggcgggatagattgatgagattgttgaggttgttgtacagcttgtggctcaactttmggagtctaatagaaacagatttttgtaaaatttaagatgcttgaaatgaaatctattaacaaaatgacttaagaggacgcaagtacataccacttgaggaggctgaaccattccgagcatgatttgtgcctggcatttcaacaaacatagcatcatcatcaccatatacaaattctgaaatctatttgtaaatagaggcataaacctaaagattgttcatatctggaaactaacacaaaaccctaattgttaacctacctgcttcttcaacaatactaaacccaaactagtccaatcaatttactcaagtaagaagctccaaatcagaattcctcattgcttataagaccacacggattgcagatttagaagatggaaaagattagcgaagtgaagaagaacctggaaaagagccttcgtcaaaagagggttccgaatcagaatctccctcgcttgttgatggttttgatcaatcaacgtctgcacaattagattcgactgatcaaaaaaacagaattcgaaaaaaagaagaagaaatcaattgttctctattcaaatccgtaaaggatagtgttatagctgataatcggaaaagtatagaaaagaaagaagagagaaccttcatttgagacataatatcatagagctgacttttagtcattccggcgagatttgccggtaaacctccgtctccgccgatctgcttacccgccatggttctcgtcggtaatcgctaccgagcttaacctgtgtgttaaagacgcaacacaagagtacttgtgaacaaacctgggccaagtataatacgggcccaattagtataattccggcccatttaaaattctagacttattagtctatggcgcctgtagatcaactctttttttggtcaaaaatttaccatttttctcaaaacaaaacacaacaataaaatatagagatgcattagatatgtacgttaaatatatttatatgaaattattaatatgtttctttacatgtaccatgttaattgtacacgtaacatgcatgtatattgtataatatgtcttttggaaaagcaaaagcttataaacacaagtttacattagagagaagcgtgtgacacggttttggcctcttcactttcttgttgctccagaaatcttctttttatcttgtctccatccataattttcatacgaagatagttttctttatttcatccataatattcaatatatattggattcttgcctttggtaagtcggtaaacatcatcaactttatttttattctttcaggtaaaaatagagtcttccactacattcatcttccacaagttttgctaattttaagttttgggtaagaataactaacccatgtatatttcacaattcattcataacaaatcaaatgattatgagatatacttatgggttatatatctcaagggattcagtgatctttaaacttggcacttggtataatttcagcatgccctttaaagaatgagtaggcgtataatcttgtctcaagaaaattataagaagtccaaatttataaacatgtattgagacaattaaaagattagaattaaaaaaaagaaaaaaaaaagaaaaagagacgcactcaactcaactttctattttttatttttgtaaaactacaaactttgcttttgattttgtagccgaggtagtctctctctctccatttgataggaagaagaagaaagatacaaaaagataaaagaaagagagaaaaagagttttaattaaaatg

SEQ ID NO: 36753 - DNA, 3003 bp, Unknown; identical to SEQ ID NO: 36739
  misc_feature (1)..( 3003): 2750-1469P.txt file - cDNA_ID_3099921; gDNA_ID_2936582; Annot_ID_194966

SEQ ID NO: 36754 - DNA, 3000 bp, Unknown
  misc_feature (1)..( 3000): 2750-1469P.txt file - cDNA_ID_3099926; gDNA_ID_2936582; Annot_ID_194964
ttttacatttttagtgacatataatccttttttctatcatcaaacattagaagttggatgttaaatgttctacaaaacttcacaggtgttgttggaagttccaaaaaagaatgtcgtttgctatacaaaaaaagaaaagaaaagatgaaaagtaacttcctgcgtttaaagtatcacgctgcgttgcggtcatgcaaacgcaccaacaaacaaaatagtttcaaaacaaaacttgaaaatgtggggtccacgtaagaatctccatggaagaacttgagccaatcagagtgcaaaaacggagatgacagtatatttcaaccaataaggaggcagaatcagatcaccagtgggttccattataagtttcctcttgactaaccaccaatagctagttttacacagaacttaaatttttcatttttttttgtcttttaatatttcaacaagatcaattttattatttgatattaaccatcttcaacagtgtttgccaacgaaaaaaaaacaccatctataacagtgtcttcaccaaactgtatttcactatgacttattttccgaaaagaatgatgaagtttagtaccatacatgaactagcggttagatcgtaattaagaatttgaggatcatattttactatatcatgaaaacggagagagcgcaaaattacagacatattggttcaaaattttatttaagaataaagtatatatatggttctaatttttcaaaaaaaaagtatatggttctaaacatttatttgaaagtacgtaatataatgaaaacaaaaattgtaaatttgaagtaaaaaactcgtgaaaagtcctcattctaaaataccatgtacacgtacataataaactatgaatagaattatgagtttttatttatatttctatctccactccaaataatttagaccacacaaggtaatgaaaaaataataattctgaaaaaaatgaaaaatactgccgggaaatcgagacgccacacacactagtgaattcgttgcaaaaccatatatattacagtattttgttcttctcaaggcctctctctccatctcagcaactctctcactgtgtaatatacacacacaatggtggtcgatgtagagagccgaaccgcgagcgtgacaggagagaagatggcggcgcgtggctgtgatgcgtgcatgaagagatcacgtgctagttggtactgtccagccgatgacgctttcctatgccaaagctgcgacgcctcgatccactcggctaaccatttagcgaaacggcacgaacgtgtccggttacaatcatcttcgccgacggagacggcagacaaaacgacgtcggtatggtacgaaggattcaggagaaaggcgagaacgcctaggagcaagagttgtgcgtttgagaagttgttgcaaatcgagtcaaacgatcctcttgttccggagcttggtggagacgaagatgatggctttttctcgttctcctccgtagaagaaaccgaggagagtctgaattgttgcgtgcctgttttcgatcctttctcagacatgctgattgatgatataaacggcttttgcttagttcctgatgaagtcaataacactactactaatggagaattaggagaagtcgagaaggcaatcatggacgatgaaggttttatggggttcgtgccattggatatggatcttgaggatctcactatggacgtggagagtttacttgaggaagaacaactttgcttgggattcaaggaaccaaacgatgttggagtcatcaaagaagagaataaagtagggtttgagattaattgtaaggatttgaagagggtgaaagatgaagatgaagaagaagaagaagccaagtgtgaaaatggaggatcaaaggatagtgatagagaagcatcaaatgataaagatagaaagacaagtttgtttctgagattagattatggagctgtgattagtgcttgggataatcacggttcgccgtggaaaaccggaatcaaaccggagtgcatggtaagttggtgtctctagctatatctctcatctctatgttagtctttagtagtgtcgagttccgttgactttgagctgatatatattgattataaaagacgaaataacgttataaagttcactgatccagttgggagggaacacgtgtctgcctcatgttgtgggtgggtacgagaaattgatgtcgagcgacggatcggtgacacgtcagcaagggagagacggaggaggatcggacggggagagagaggcgagggttttgaggtacaaggagaagcggaggacgaggttgttctcaaagaaaataagatatgaggttcggaaacttaacgctgagcagagacctcgaatcaaaggtcgtttcgtgaagaggacgtcacttttgacgtgatttgatttactttaatcaacactttaaagatcttgtaattaagacctttgaagtaattgtcgtaatgtactgaataatgaactgaaactcttggggccgatggttgtgtagacttgtagccggcaactatgattttatagattgattgattgagtaatttattgtatatatcaaatgaaaactctttgtttatcaaatgaattggagaaaaaagccataatgtgtgataataacgaacactaaaaaattcgtagcgaagacatgttacaaagaaaacaagtgtaattaaaaaaaacaaaaaaaaaacaagaaacaagttcaaattagaacatgccatttccaacaatttacaaatgaagcaagaaataaaagccattaaggcctagttatggctgaatagcccatcacacaattaaaaaaaccaacataaagagcccaactaggcaactacttaagccaaccggtttgggttatcaagtacgtattttaatcgttaaccagtaaaaatcgtgaatttcaaccgactgaatttggttaacttcacaaggttgacgcatagctcacgcgccgccgacttgctacgattgacatg

SEQ ID NO: 36755 - DNA, 3003 bp, Unknown; identical to SEQ ID NO: 36743
  misc_feature (1)..( 3003): 2750-1469P.txt file - cDNA_ID_3099943; gDNA_ID_2936582; Annot_ID_194957

SEQ ID NO: 36756 - DNA, 3003 bp, Unknown; identical to SEQ ID NO: 36744
  misc_feature (1)..( 3003): 2750-1469P.txt file - cDNA_ID_3099947; gDNA_ID_2936582; Annot_ID_194956

SEQ ID NO: 36757 - DNA, 3003 bp, Unknown; identical to SEQ ID NO: 36751
  misc_feature (1)..( 3003): 2750-1469P.txt file - cDNA_ID_3099973; gDNA_ID_2936582; Annot_ID_194942

SEQ ID NO: 36758 - DNA, 3000 bp, Unknown
  misc_feature (1)..( 3000): 2750-1469P.txt file - cDNA_ID_3100007; gDNA_ID_2936583; Annot_ID_143802
tccctgtggaatgactcctgaaaagttgttgtatgagacattaaagacctcaagattgctcaactccgttagttgtggtgggatctgaccttgtaatctgttgaaagaaagatcaaggctttccacattcttcagtcctgaaaagctttctggtatactcctgataagttgttgtgagatagattgagagcatgtagtttccgaagatctccaaactctattgggatctcaccgctcagctcattttttgagagatccagtccaaacaataatttgagatttccacccctgtaggcatcatatctgtgttttgttgcaaactcaattttcgtttgggtgcttaactcataatcgatagcaaacccatcttgcacgagcagagatttgaaaaatgtactgacaggtgctcccaaagaaaaaacgtaatgattataaataatcgtctaatgtatcctcctctccccaaaccaagtgatgcattcctaagacatgaaggtatggatccatttaatttgttgttagcaagatccaggaggtgaatgcttcttacggcacacaaccggcgaggaatactgcctgttaaattattccctcggagaagaagaattctgatgtattgggtgttgatgaactccggaatattcccagacaatctgttatttctcagatcaagcacaatgatattcttccctagcagtgtatctggaataacccctgataaattattgtctcgcaggagtaacacttttaatgccccatatccagaaatggcttgaggtaagtcccctgataaactgtttgcagagagggccagtagttgaagactggacatgttgaataacgatataggtacttcaccttccaacaagttgttagaaatctgtagcgaatgtaagtcttgaagttggtcaaaccaacttggaataacacctgagagattgttgttcgaaatgtcaagcataatcaaagatctcaagctctgcaaacctcttccaatctttcctgtaaacagattgttatccatagacagctctagtattgaaaaaaagtttgatgcttctggaaaaacctcctcacttagtttcttatgtgatagtttcaagactatcaaggaatcacaacccttcaaaaaacttcttggtagcttcccatggaaactgttgtgagatatatccagaaattcaatcatttccatgttacccagagaagatggtagatttctttgaaaaccattagtcgttagattcatataatgtaagcaaggaagtattcacccaatgttctgaggaaagagttgatcaaatccattaactgaaacatccaggtaaagcagattatgatcagattgcggtagctgcaagcttgtaaaagagttattctgtagaagcaaagcctcgagttttgtattgttctccagcagccacgatggaaacttattattgttagagagatcaacatgacgcaaatccttctggtataggaaaatgaggaaccttcaccaaattgcaagctcctagtgaaataacactcaactgaaatttcggcttccaagaacttcccaactctacttgaagtgagttagattttgaagaaaggtttaccaaaggaaagcttgataacccgcccgctagtgcgatcactcaatgaccttccacagacagtaatcactctttgtgtcattagtccaacaaagcgttcttttcattctgaatacagcttttggatccatgtatctgtcccagcagtaacataatccatatcaagtattggcccaaaaacaccttcccttccatagcaaatatcaatatgagacaaaaagtgaaacaaaagaaactcaaacgcaatatgtgaatatgagttcaagcaaacatctccccacctctataagaatttcaaatttccagcggaaaacaccaagttcttcaagaaatatctgtaaatttgaaaagtcatatctttagcgtctaactaactcacttagagtagtatggtaagactcgttgggcatacaagtcaaagtctctctagaaaatgagtggtttagcatatgatatttcgcttgtcagtagccaagtaaattaacgaatgagattattgcaacacaggcccaagaattaaatttttgaattgattttttaaaacaactactcacaatcatatataccacaaaatgattcaagtgttgcttacacattcagtgaataaagttataaactttgaattctgttaaacatgtgaataactaaagcattatatgaacaaaaaaatctaacctttaaagtttaaactctctgcggtaactgtattgattatgtggcataatatgccacgtcagaaacaatggatgttaccgccaacaccaaaaacgccaccgtttccagcaaacattttatttttgtctccgcccaaataaaaaccctacatcctcacgaaacggcggctaccaccgtcgctgtccatcaatcggagttataaacagcaattgggtcgacccagaccttagaaatgaagctggaacagcgatcaagacgtaccggaccttcgactgggagtcaaaaagtatattccggcgagctccggcgagacgcataatgaggtttcgatggtgaggatcaatattaaaaaaagttggtaatgcatcgcttttttttggtgggggaatataaaagatgggaggatgttctttgcaattttagcatggagaggcgttgcttggtagtattactactttttattcagaaatataaaatgcaaccttaaaaagtctttgtcaaccaaaaacaaatggaatattcggaaaacgtgaattgaagaagaaagatataatattcgcccaagagcggtaagccaagaaacaggtcaatggagtaagagtgatatatcatatatgtatatcattagaaacactttattataaatggacaagaactgatagagtgggataagagacaaataaggagaatcaaacaagcaatccgatcgatctaccagatcgccatg

SEQ ID NO: 36759 - DNA, 3000 bp, Unknown
  misc_feature (1)..( 3000): 2750-1469P.txt file - cDNA_ID_3100018; gDNA_ID_2936583; Annot_ID_194995
ttggcgagaagcgcaacattggcacattgctttcattaaaacctcataaaccctaacaactcttggaagcttcgagaagattattttccttctctctgcaacggaaatggcgacgaagagctcggattcgagccataagcaatctcctccgagttttcgtaagagcgtcgaaatcaaagccacgcatgatcaatttttcggtaagcgacgagtctctcttctcccgactcatcgtttcggtttctctttgggtttattgcggcgaaaatcgttgtggatttgattgatgatcatgatttcgcttagaagatgagttcttcttagcgaaatgttgagatttcgtctggtgattatgatgagaacacctggatcatgttttagtggcattgatttttcactttcatcggaatcgaatagttgcaagtggggtcaattagtctaacgttcaacacattgatgtagtttggagagagttcttatggggaggtattgctggagcttttggagaaggaatgatgcatcccgttgatactctcaaaactagacttcaaagtcaaattatcatgaatgcaactcaggtatgattaaccagacttcactttcaggggcctttggcttaggaaatacagattagacctgattgtgtgtacttaccttcatttttggagtatatcatctctaatcgtgtttagttgttgatttcagagacaaaagagtattctacaaatgctccgaactgtctgggttggtgatggcttaaaaggtactttatccattctcttttctcttcttgaggcatgcatatggcatatgtgtggttcactgtcctacttatcatctttataagcaacagactgcctatgctggtacatgtttgtgctgagaacctggaatagaaaactatctatgctctgtatttcttttttttttttttttgctactgaccttgttttaggcttttataggggcattgctcctggagtcactggatctcttgccactggagcaacttactttggttttattgagtcaacaaagaaatggattgaagagtctcatcccagcttagcagggcactgggcgcattttatagcaggagcagttggtatgttatctaagtgtctcctctctcagtcatatcatcattaatataatggtaaagataggagggaaatatatggtcgctcaagtggaaattgatttagaatgccaagcatgcagcagaaatgagactagatataacctgcctgaagaaacgaaatgttatcaaacatgtcaatgttatatgatgattctaacttacggaaatggtgggtctttaaaagataagatccaagttattatcaaaccacacaagagcaaggattgctgattgcttacttaagatatgttccaatttttattactctttcatgatacgtcatggactgtccttgttgtgaatatcatcgtgaaggattgtggctgtgtgtatacatacacgtcatgagggggttccccaaatagttggaaaatgaaagtaaacgtagagttatttgaagttagaaagtttctgattcgtttgtgttttgctgcttctttccttgtttcaggcgatacacttggttctttcatatatgttccttgtgaagtcataaagcagcgaatgcaaattcaaggcactagtagctcctggagctcttatatttcgaggaacagcgttccggtgcaaccaagaggtgacatgtatggttattacactggaatgttccaggctggatgctcaatatggaaagagcaagggccaaaaggactatatgctgggtatgtaacttattttcaggctattatgatgtgaattggatacatcattctaattgttgactcgtgtcaagagacccatgttattattttcctttttcctgtggcagatattggtctacactagcgagggatgtgccttttgctggtcttatggtatgactatgtaatatggcacttcagtgaaactattacctccgttcaacttagggtctttgtctcctcatgttcggtctgtttttccattcaggtagtgttttatgaaggattaaaggatctaacagatcaaggaaagaaaaagtttccacagtatggagtcaacagttcgatagagggtctcgtattgggaggattagctggtggtacgttagaattagatcagttataaaagaaatccgtttcaaatagcttatccaacatattgacccatgtatgtctcctcaggactaagtgcttatctcacaactccactggatgttgtaaaaacaagactgcaagtgcaaggatcaacgatcaagtatgcctcgtgtgttaacagattaatatgatcaactaaatatcatccgcaattagattcaagaacttgtttcgattaagctttggtaacctcgttgagttttaggtacaagggatggttggatgcagttggacagatatggaggaaggaaggtccacaagggtttttccgaggaagcgtcccaagggtcatgtggtatcttccggcctcggcactcaccttcatggccgttgagttccttagagataacttcagagagaaaagtaataataataacaatgtcgtctcaaatttgagcatagagaggaaaacatcttctacttcagtgcatgaaggttagtgaggactagcgagattcttgtctccaagtataaagagtgagaggagcattcacaaacttgtctataaatggctcagtgttttgttttctcttctaagatactgtgaacaacaatctgattccttattaataagatactgtacttaatctttaattttcgttgatataagcctggtgatccctaaaactaaagtattaagagaaagaaaaattgaattataagtttatttattgttttgttcctatatatacatctccaaggtcaaatcttggacagctcgaactgggtatgcgtttaaaatcgacaaaagagaaatagcctaaaccctaaaaaccagagatg

SEQ ID NO: 36760 - DNA, 3000 bp, Unknown; identical to SEQ ID NO: 36759
  misc_feature (1)..( 3000): 2750-1469P.txt file - cDNA_ID_3100018; gDNA_ID_2936583; Annot_ID_143798

SEQ ID NO: 36761 - DNA, 3003 bp, Unknown
  misc_feature (1)..( 3003): 2750-1469P.txt file - cDNA_ID_3100023; gDNA_ID_2936583; Annot_ID_143797
ctagctcttcaatatccgaaaccaagcttcgcggtgtacgacttggatgcggatcactctcacaatagcccggtctgtcgaatgaaaccatatatacacctagttcctctactaaatcctataaaatgtattgacacactgttagaggtcccaataaaaaaccgaaaacgtcactctcaaataactttctcactaaacttctctatactacaaggatttttaacaacactacttgctacaaattaacatgccactaactaaataaatgattaaaacatagtgatcaaagtattattacataacaactatctatcaaatcaacgatagaagcatatagacatgcataatcttgattgtgtaaaacttaccggagaaagcagagtggcgaaaacggcatcgtgtctacaacaatcggatccatggatgaagacgattttgcggttagctttctctcttggaagtccatgctctttgtaagccaaatacctcccatcttgaagctttatccgcggcgctgtgatcggtggaccaccggaggagccacatagcttcggcggaggtggtttcaacttggactgataagtaaacgccacgattatcccaacaatgacaatcacaacagaaggaaaaagaaatttttttcgaggccatggctttaatgagctgttccttgatgaatctctcgtcatttaaaagaatgggaagttgatcggagaggcacggaggtcaacggcgacgattcttgaaaagagagccaactgttcaagaactacaacatagagatcgtttttttgttgttgttttgagataaaaatagagaagcccatttttatatgttattcattatagtaatggcccaagatgcttaatatactaatgccccaatagtgttaaggcccataagcccatattagggcttcttcttcgtttttctccctcgagtagcagcagcagcctttggatattcggcggaatcgaaaatggtcaagggacgccaaggagaacgagtcaggtctttcttcttctatttctcttttcgttcttcttcaagtttgatctatatcaccaagatggttttctatcggtgtatcatttgagatttgctctgttttcctcacttctgaaactgttttgctactattgttattgtctagatttgagctgattcttcatggtttagtaatcttgtaatcatcgataatgcgaaagtctgattctttttatgttatctaattttgcagactctacgtgaggggaaccatcctcggatacaaaaggtgacccatttctttcatcgctttcgttttccattttacactgcttatagcttatgattggacgccaataagattccatgtaatgaacgttgattggtatttatgtaagccaatttgacagaaacgagtcctataaccaagcttctcgtccacttatgatcagattatgtgtctgatgctttcactaaatgggaacattttgactcttgattagttagttgtctacatttcttaggacacttatctggcattttatttttgagctgctttgtatttctattaatcaacactgttgttaactgagttctgctttaataaccttgtcatgctgaaaaccgagaccttactgtttgatacttcctctggtctgacatttactatggtgtgcaggtcgaagtccaaccagtatccaaacacgtccctcgtccagatcgaaggagttaacactcaggaggaggtaaactggtacaagggaaagaggatggcttacatctacaaggctaagacaaagaagaacggtagccactaccgctgtatctggggaaaggttaccaggcctcacggtaacagcggtgttgtccgtgccaaattcacatccaaccttcctcccaagtccatggtacttaaacagattctataatcatcttctctgtttagaagtgaaatcttttgcttgggtttttaacaagatattattccttatgttcttgcagggaagcagagtgagagtcttcatgtatccgagtaacatatgaagcaatgcaaaaatggcttaaacttataatttagccgccttggttttgttcactagtttgttattttgtattttgatattgaaagcatttcctttctttgtttgaagtgtttggagattctctaaattgactttgatcatggatccggtttttcatcccaaattagactcccttttccccttttataacgaattaaaacagacgaatggtaacatattttctcaaatcactattacaactttataattagttcttagaaacacttaaattctcagaatcatccatggcatatgttaattgttgaagtctgaaaatcgaaaatcactcaaaataatcaaaaaacaagagctgattgaagttgtaaactgaaacatttgaaactcgatttgtgatatcggcccttaggcccattagacctttattgggcttacctaggctcaactttagaattttcaatcagaattttgttctcatgtaaacaaaaaagtaccaacaaacctaagattcgttgagaagagagaccagacaagaactctgtgtcgactgccgtactctcggagtcggagcttcggtcccgttaagacagtaacagagaaaaaccctaaaccctcttttcactttgtttgctgttccggtcatatctcgcgacgatgaatacctcccaagcaactcgtgcggctctgtttctaaacgtaaatattctcttactgctattcttatcagtggtccaagttttgtgtcgattgatcgatgaacttatttgattccgttctgttgcttaatcttttcatagattgattataaggatgatttcgaaaagtactttatattgagaatttgaagttctgttgatgttgaatgcagtaacttaggactctgatttactggaaacttcttggtatttggcatccataatgttttcgttttaacaagttagtgtttttttgcagggttccaatagacaagcgatg

SEQ ID NO: 36762 - DNA, 3000 bp, Unknown
  misc_feature (1)..( 3000): 2750-1469P.txt file - cDNA_ID_3100029; gDNA_ID_2936583; Annot_ID_194991
cagcatgacaaggttattaaagcagaactcagttaacaacagtgttgattaatagaaatacaaagcagctcaaaaataaaatgccagataagtgtcctaagaaatgtagacaactaactaatcaagagtcaaaatgttcccatttagtgaaagcatcagacacataatctgatcataagtggacgagaagcttggttataggactcgtttctgtcaaattggcttacataaataccaatcaacgttcattacatggaatcttattggcgtccaatcataagctataagcagtgtaaaatggaaaacgaaagcgatgaaagaaatgggtcaccttttgtatccgaggatggttcccctcacgtagagtctgcaaaattagataacataaaaagaatcagactttcgcattatcgatgattacaagattactaaaccatgaagaatcagctcaaatctagacaataacaatagtagcaaaacagtttcagaagtgaggaaaacagagcaaatctcaaatgatacaccgatagaaaaccatcttggtgatatagatcaaacttgaagaagaacgaaaagagaaatagaagaagaaagacctgactcgttctccttggcgtcccttgaccattttcgattccgccgaatatccaaaggctgctgctgctactcgagggagaaaaacgaagaagaagccctaatatgggcttatgggccttaacactattggggcattagtatattaagcatcttgggccattactataatgaataacatataaaaatgggcttctctatttttatctcaaaacaacaacaaaaaaacgatctctatgttgtagttcttgaacagttggctctcttttcaagaatcgtcgccgttgacctccgtgcctctccgatcaacttcccattcttttaaatgacgagagattcatcaaggaacagctcattaaagccatggcctcgaaaaaaatttctttttccttctgttgtgattgtcattgttgggataatcgtggcgtttacttatcagtccaagttgaaaccacctccgccgaagctatgtggctcctccggtggtccaccgatcacagcgccgcggataaagcttcaagatgggaggtatttggcttacaaagagcatggacttccaagagagaaagctaaccgcaaaatcgtcttcatccatggatccgattgttgtagacacgatgccgttttcgccactctgctttctccggtaagttttacacaatcaagattatgcatgtctatatgcttctatcgttgatttgatagatagttgttatgtaataatactttgatcactatgttttaatcatttatttagttagtggcatgttaatttgtagcaagtagtgttgttaaaaatccttgtagtatagagaagtttagtgagaaagttatttgagagtgacgttttcggttttttattgggacctctaacagtgtgtcaatacattttataggatttagtagaggaactaggtgtatatatggtttcattcgacagaccgggctattgtgagagtgatccgcatccaagtcgtacaccgcgaagcttggtttcggatattgaagagctagctgatcagttgagtctaggatcgaaattttatgtgctcgggtactcgatgggaggacaagcagcatggggatgtcttaaatacattcctcataggttagccggagtaacactagttgctccagtggttaactattattggaagaacttacctttgaacgtttccactgaaggttttaactttcaacaaaagagagatcaattggcagttcgtgttgctcactatactccttggcttatctattggtggaacacacaaaaatggttccctggttcgagtattgcaaaccgagatcacagtctcttggcacagccggataaagatatcatttcgaagcttggttcttcgaggaaaccacattgggcagaggtaaggcagcaaggaatacatgagagtattaaccgtgacatgatcgttggttttgggaactgggaatttggtcctttagacctcgagaatccgtttttgaataaggaaggctctgtgcatttgtggcaaggagatgaggacatgttagtacctgcgaagctgcagcgttaccttgctcatcagcttccatgggttcactatcatgaggttccgagaagtggccacttcttccactacactaaaggtgtagttgatgacattgtaaagtcgctcttaacctccgatgtaagagcatctagagtttgtatttgatcatttgtagcttccaaaaactctgaaaaaaaatcccaaaaaaatacacggatacaatagagttatgtactagttacatttgtcagcatcgtagtttatttttatttggttacacgtgtaatttaatcgaccaagccttcatcaattgtcttgtcaagcttatcatgttctttaatttgatcttttagcaacatgtgtttggtctttttgttttatattctatgttagtcttttaattaagagaatgaagaattcatctacttgagtgtctactagatttgccttagtgtctaatacatcattaattaaagtttttggtacaatctaaactaggcctaatcacattatctaagtgaggcagcacatgcttgtgctacaaccaagtggcaatcaccaaagtggtcattgaagataaccaagaaagctggaatctaagacatttggaatagtttttagccaaagtgtagcattttaacttgatagcttaacatgtatctttttcttttcctttttttggcaaccacacaattgaagtatcaaatcactgtaacgtatttgaatttaatgcatccctgatattgacgtggctgagaagacttatcacaaaaaaaaacacacgatatgttgtagttcttgaacagttggctctctttttcaagaatcgtcgccattgccgccgtgcctctccgatcatcttaccgttcgtgaaatg

SEQ ID NO: 36763 - DNA, 3000 bp, Unknown; identical to SEQ ID NO: 36762
  misc_feature (1)..( 3000): 2750-1469P.txt file - cDNA_ID_3100029; gDNA_ID_2936583; Annot_ID_143794

SEQ ID NO: 36764 - DNA, 3000 bp, Unknown
  misc_feature (1)..( 3000): 2750-1469P.txt file - cDNA_ID_3100034; gDNA_ID_2936583; Annot_ID_194990
ttgtgacctctaacattgtgtcatttacattttataggatttagtagaggaactaggtgtatatatggtttcattcgacagaccaggctattgtgagagtgatccgcatccaagtcgtacaccgcgaagcttggtttcggatattgaagagctcgatgatcaactgagtctaggatcaaagttctacgtgattgggaaatcaatgggaggacaagcggcgtggggatgccttaagtagaaccgtcaaatggtcatctgaccatgggctaagcccagtccacaacattatggacagtccatggtcgacccgtcacgaaaacgggttaaatggtctaaagaccaattatgtccgcggatttaatgggctagcccacacggtctatggttggtccatcaattttctcaacacatcaattttcttctcttctctatctcggcgacgaagctctctctctctcgcttcgacctctctctcaactcctactcccgttagttctactataatatgaatccgttgattagaataagttctctctaaaatatgcgttcatatgatagtctcatcgattttgttctctaagtccttatgcaatttcatcgctttgttattttctgttccttaattgtgattctgcatatgctttctttgatttcagcttgtgggtttgtccaaatttcacttgtttgctattctttgttattctctctctcccttcctttgatgccaaccatgtgtttgatgaaatgcctcacagaatatgtagagtttggttttggtagagcttgtaattacttgtgtagagcttggtgtttatgtatggagctaagtgtatgaacgtttagtgtgtgtttgctaatgtttatgaacgtttagagcttgtaattaagtaatcgtttctcaccaaaatccatcacttgtttgacaaacgttgttttgcaggaaacggattagaggtagcaagttcatgactcattggtttattaattttttgcagagagtggccatacatggaatcatcagctttacaagattggcgatcaaacattggcaaataatattcagatatttgttaattcccaaatctaagcttaactcttttgatgaacttattttcagacattggcaaataacattaagttatgggctgaccatgggctgaccattggacatggtccttaatggtcttgaacaaattttcagaccattgtccaataaagaccatccattaaaacccattaaaactaatggtccaattggacataaccattgggctttggacagcccaattgacacttctagccttaagtacatccctcatcgattagccggagtaacactagttgctcctgtggttaactactattggaggaacttacctttgaacgtttccactgaaggttttaactttcaacaaaagagagatcaatgggcggttcgtgttgctcactatgctccttggcttatttattggtggaacacacaaaaatggttccctggttcgagtattgcgaaccgagacagtctcttgtcacaatcggatagagatatcatttcgaagcgtggttatacgaggaaaccacattgggcagaggtaaggcagcaaggaatacatgagagtattaaccgtgacatgatcgttggttttgggaactgggaatttgatcctttagacctagacaatccgtttttgaacaatgaaggctttgtgcatttgtggcagggagatgaggacatgttagtgcctgtgaagctgcagcgttaccttgctcatcagcttccatgggttcactatcatgaggttccgagaagtggccacttcttccacttcactaaaggtgtggttgataacattgtaacgacgctcttaaccaccgatactgatacgattcgtcagtaagaagatgaggtggcagtcgagttggcacaggcagatgagtcagcaaagaagaataaagactctggataagccagaggttttgctgttacggagtcttcttctatatatagctactgtgatctatctttgagttttatgcttttgatgttgtgagattctcgactctcgagagagacttggcctggtgatgtgccagaggaagagatcaatatcggttacttagatctatcttgatctaagtatacgattcttatcttctcgttgtggtttcttaatcgattctacatttctatcaagtgtttacagagctaaggtattgaaaccttaataagagattaagtaaagagcgtctagagtttgtatttgttcatttgtactttgtagtttccagaaacacggatatacaatagacccgttacaattggtcagcattatatgtttgtttaattcggttactcgtaatttacttcgtaaagtgacaactaaggctggtcaattgtcctttcaagcttaccatgttctttactttgatcttttaaacatgtgtctggtctttttggttatattttctatgtttgtcttttaattaagggaatggagaattcatctaattgattgtgtacttgctttgcttagtttctatacatatattaattaggtctaattggtatatctaaactagacctaatctcactaatgtaagtgctgcggcacatgcttgtgctgcaaccaagtgacacctcaccaaaataatctaaaaagactctcagtggtcattggagataacgaagaaacctggagtcttagacatttggagtaatttttagccaaattgtagcattgtaattcgacagcttaacatgtatctttttcttttccttttttggcaaccacacaattaaagtatcaaatcactgcaacatatttgaatttaattcatccctgaaattgacgtggctgagaagacttgtcacaagcctaagagcccttcttcatctataaatatactcttgttcagtgatgaaaacttaatataatttggtttctccccaaattctccacttgttcacttaatctttctcactacctgatcgtggaaatg

SEQ ID NO: 36765 - DNA, 3000 bp, Unknown; identical to SEQ ID NO: 36764
  misc_feature (1)..( 3000): 2750-1469P.txt file - cDNA_ID_3100034; gDNA_ID_2936583; Annot_ID_143793

SEQ ID NO: 36766 - DNA, 3003 bp, Unknown
  misc_feature (1)..( 3003): 2750-1469P.txt file - cDNA_ID_3100039; gDNA_ID_2936583; Annot_ID_143792
accaatactgctcgaacctttgtcttgcatactccatgtagtcaaagtcgatttcattcacatgttcctgtaaagttttacaaaatgaaaatcaagcctatatatggttcagaaaatgcaagtatgatagaagagtattgtagaaattaccgatataattccccataaaccccaaattagatgactagcaagtgtatatttctcaacgtcttctaggagttttttgaccatagtatcgctgggcttttcatctggactcacaagaacaaatacaaatagagaattatggctgtacagtgatttattgctgaagctcatagcaagaaagtgtgataaaataatcacctgaataactcatatatgttttcagaaatctttgtcgctcctccacacctgttataatttagtcacatattaagatatatgattgatcttctatcatttcaaaagataaagaaagatgactttgaaatagacacttaccagggtatttactataatccatgatgtgaggtgtttcagtgtggtaatcggcagccatctcacagaagtgattggcaatgtcataagccacaggattatagcatgaatattcataatcctattttttataagacaaaataataaaatcagagttaggatccattttttctagtaatggtatacgaaaaaaggagagctgactaaacaaattcatgaaaccttacaatgatggttattgctttggtctcttcatccatcatgatgttcccatactgtaaatcattgtggcaaaatccaatattttcatcattgtcaaagagagatttctcaagcatattaatttccatctccataacatcgagacgaaaggacttagcttcttctggtgaagccagtctcttgcatgcagtgagccaatttctgaagttacaaaaaaaacaaagtggagaaaaagattacaaaaaagaacaaaattttaatgatttgttagaaagcaaagtagaatctggtagaaagcaaagtagaatctggtagaaaacaaagaaatgtaccgtaatctgtcccaaagcaaagcctttttcgcaccaggcatttcaagaccatgaaactccttcatcctagttgctattcgaccagatatttcaggatcacgcaagtcacaagcagatagggtctgaaagttcatagttcagcaaacaagttacaaattcagtaaacaaatacaaaaagattcacaagaattacctgaagaatgaaaaaaaccagggaagtgcaaagatactcaataacttaggaacacacagaatcagatattaaaaaaataattacccgtgcatggaggaactcttcgatacgaccattaccaaaccgacctaacaacaaaggtccatgaccatgcttcgacatgaactcaaatgtcctgatctcatcctcacgatcaaagaaaatctcaacaccttcaccataaatcctaaccaaaaccttacgagaaggacctttttccctagttggccatttgatctgaaacacctcatttgtcattgcaccttttaaaggaataacttgcagagcctttgaatcaatcacatcttcccactctgatgctattgcttgtaaagcttccttgacttctcgaggcaaacgatattgtttattctctacattcttttcagtaccacccatcgtcatttgaatgccacacacaaagataaatctctctgtacaagataaaaacagatacttttagcgaatacttataacaacactgtgttttgtccaattcaggggaggttctacgatcaacccaatgcaacaattctatatgcttccgtttcataaaaattctgaatatcaatctaaacctatacaattacatccttactaatctagataaagtgtatacaataaaatgagagcaataaggttcattaatctttatacttagctcctccacaggacgatatactttgagactgacacaaaacaaaataaggaagaaagcttacgtttttgaaggaaaatcacaggagggacgcggaagcaagattggtctgagaggaaaattgaggaagaggggttaatcgagatgaaaatggagtttgaagtaatagagagaacgttgcgcagatcgaggaagaacagaggataggatcaacacaaggatcttgtgaaaatgaaaatggctgaggaaatgaaggactatttgttaaataagatataatattatttctgaaatatttccatctgactcctttaatttatacaagcctccttttttgtacatctattttcagaagatccaaataattgtttcttctatttgtgtatttttgatatttaaacgtaaatctttggattttgatcaataatagacaattagccaagttcagttttcattaattagatttataattttaattatttttagcattcgtctaaaattaaataatgcggcaaaagaggagaaattaatttttgttgttattaattcaaagcgttacaaataaaaaaggaaattccacgctggcaataaaataagcgaaaattccacgtgacatctacctgtcggatcaaaaagagtggaattgacatttgtttctctcacactctctctcgaattctctggtagcttctagttctatgcaaaaaaacgacgatagttctctatctttccagatgaatctccttccatatacaaaagcagtcatgcctcctcgctctctcgcaattcacaaagtatccaaacatctaaagttatcaattttacaacattaccgctataatctgcttgattctctgcaaaaagagaagactttttaccgagaagaagtcctctggctcattgaagaaactcaacgaaacaaacccagttctcatatatcgttttaaggtaaatgatcgcgacaatcttgttctcatttgtgtgtttttgtgtttgtgattagggtttacaaaagatactgagattagtttttttttttttttttttttttcagggattacaaaagctaatcgaagatg

SEQ ID NO: 36767 - DNA, 3000 bp, Unknown
  misc_feature (1)..( 3000): 2750-1469P.txt file - cDNA_ID_3100064; gDNA_ID_2936583; Annot_ID_194992
attttccaaaagtggctccttgctgaacaaaaggtacctccttgacctttccaagcgagtcacctcgtctaacccacatgctctacatatcgaaaccgcattggtggaccatgctgttgtgaaagacaatctggggccaacttcaacaataacagcatggagtccttcttgcttcttcctctcaagaaaactatccgtacctgaaatttaactcaatcgtcaataacagagaggcctaacaatattgtaaccatatcatgatatagcatgcaaataacagtacctaaattctctggctcatatgtttcttgaagaatccactttagaacagaaagtttttcatcttttaacttggattcaagcccaatattgaaagactgttctgtagtcaaactgacaatctggttgctgattttggtttgaacagccttgaggagttccgcgttcgcgctttcttgaatcaaaggcacgcgataaaaatggataacctcagcagcaggtttctcaaccaagcttggtagctcatcagcagtaacaaaagaaccagtagaaacagctgctttaggtttattaggttgagcagaacatctcaagctaacagcttttgttcgattcagagacagccgtgaagttctcattctaacagaaccccacaattgactcattgagctccgctgcaaaagcatcgcttgtctattggaaccctgcaaaaaaacactaacttgttaaaacgaaaacattatggatgccaaataccaagaagtttccagtaaatcagagtcctaagttactgcattcaacatcaacagaacttcaaattctcaatataaagtacttttcgaaatcatccttataatcaatctatgaaaagattaagcaacagaacggaatcaaataagttcatcgatcaatcgacacaaaacttggaccactgataagaatagcagtaagagaatatttacgtttagaaacagagccgcacgagttgcttgggaggtattcatcgtcgcgagatatgaccggaacagcaaacaaagtgaaaagagggtttagggtttttctctgttactgtcttaacgggaccgaagctccgactccgagagtacggcagtcgacacagagttcttgtctggtctctcttctcaacgaatcttaggtttgttggtacttttttgtttacatgagaacaaaattctgattgaaaattctaaagttgagcctaggtaagcccaataaaggtctaatgggcctaagggccgatatcacaaatcgagtttcaaatgtttcagtttacaacttcaatcagctcttgttttttgattattttgagtgattttcgattttcagacttcaacaattaacatatgccatggatgattctgagaatttaagtgtttctaagaactaattataaagttgtaatagtgatttgagaaaatatgttaccattcgtctgttttaattcgttataaaaggggaaaagggagtctaatttgggatgaaaaaccggatccatgatcaaagtcaatttagagaatctccaaacacttcaaacaaagaaaggaaatgctttcaatatcaaaatacaaaataacaaactagtgaacaaaaccaaggcggctaaattataagtttaagccatttttgcattgcttcatatgttactcggatacatgaagactctcactctgcttccctgcaagaacataaggaataatatcttgttaaaaacccaagcaaaagatttcacttctaaacagagaagatgattatagaatctgtttaagtaccatggacttgggaggaaggttggatgtgaatttggcacggacaacaccgctgttaccgtgaggcctggtaacctttccccagatacagcggtagtggctaccgttcttctttgtcttagccttgtagatgtaagccatcctctttcccttgtaccagtttacctcctcctgagtgttaactccttcgatctggacgagggacgtgtttggatactggttggacttcgacctgcacaccatagtaaatgtcagaccagaggaagtatcaaacagtaaggtctcggttttcagcatgacaaggttattaaagcagaactcagttaacaacagtgttgattaatagaaatacaaagcagctcaaaaataaaatgccagataagtgtcctaagaaatgtagacaactaactaatcaagagtcaaaatgttcccatttagtgaaagcatcagacacataatctgatcataagtggacgagaagcttggttataggactcgtttctgtcaaattggcttacataaataccaatcaacgttcattacatggaatcttattggcgtccaatcataagctataagcagtgtaaaatggaaaacgaaagcgatgaaagaaatgggtcaccttttgtatccgaggatggttcccctcacgtagagtctgcaaaattagataacataaaaagaatcagactttcgcattatcgatgattacaagattactaaaccatgaagaatcagctcaaatctagacaataacaatagtagcaaaacagtttcagaagtgaggaaaacagagcaaatctcaaatgatacaccgatagaaaaccatcttggtgatatagatcaaacttgaagaagaacgaaaagagaaatagaagaagaaagacctgactcgttctccttggcgtcccttgaccattttcgattccgccgaatatccaaaggctgctgctgctactcgagggagaaaaacgaagaagaagccctaatatgggcttatgggccttaacactattggggcattagtatattaagcatcttgggccattactataatgaataacatataaaaatgggcttctctatttttatctcaaaacaacaacaaaaaaacgatctctatgttgtagttcttgaacagttggctctcttttcaagaatcgtcgccgttgacctccgtgcctctccgatcaacttcccattcttttaaatg

SEQ ID NO: 36768 - DNA, 3000 bp, Unknown; identical to SEQ ID NO: 36767
  misc_feature (1)..( 3000): 2750-1469P.txt file - cDNA_ID_3100064; gDNA_ID_2936583; Annot_ID_143795

SEQ ID NO: 36769 - DNA, 3000 bp, Unknown
  misc_feature (1)..( 3000): 2750-1469P.txt file - cDNA_ID_3100082; gDNA_ID_2936583; Annot_ID_195000
atgaattaaaccaaccaccaaaccagtccaagatatgttttgaggcattacttttattcaaagacaaaaagacagtacagaggaaccaaaacataagctatgttctggttttgtgaaacaaagcaggaggtttgagaagaagaacaacagaaggggacgacaatgaaactagcacgtaagaaacattttgtcacctgcagtattttaccataacaatttcctaaccttgtgaaccaaagcatcgacgatgtagaaccaaactctgctccaaggagaatcaaatgagagtgatgcgagtaacccaagaaggattgttatgtatgctgcaacaaaactccagtagaaagaaaccatgtcgatcgtgttttcaacagcttccactccataatctgcttcttgaaaggtattaccaatgcatcttatgtcggttggttgcccacagagaagaggattgcctatgtagcttcgcatgtcaaagctgttaaactgttttccctgtggaatgactcctgaaaagttgttgtatgagacattaaagacctcaagattgctcaactccgttagttgtggtgggatctgaccttgtaatctgttgaaagaaagatcaaggctttccacattcttcagtcctgaaaagctttctggtatactcctgataagttgttgtgagatagattgagagcatgtagtttccgaagatctccaaactctattgggatctcaccgctcagctcattttttgagagatccagtccaaacaataatttgagatttccacccctgtaggcatcatatctgtgttttgttgcaaactcaattttcgtttgggtgcttaactcataatcgatagcaaacccatcttgcacgagcagagatttgaaaaatgtactgacaggtgctcccaaagaaaaaacgtaatgattataaataatcgtctaatgtatcctcctctccccaaaccaagtgatgcattcctaagacatgaaggtatggatccatttaatttgttgttagcaagatccaggaggtgaatgcttcttacggcacacaaccggcgaggaatactgcctgttaaattattccctcggagaagaagaattctgatgtattgggtgttgatgaactccggaatattcccagacaatctgttatttctcagatcaagcacaatgatattcttccctagcagtgtatctggaataacccctgataaattattgtctcgcaggagtaacacttttaatgccccatatccagaaatggcttgaggtaagtcccctgataaactgtttgcagagagggccagtagttgaagactggacatgttgaataacgatataggtacttcaccttccaacaagttgttagaaatctgtagcgaatgtaagtcttgaagttggtcaaaccaacttggaataacacctgagagattgttgttcgaaatgtcaagcataatcaaagatctcaagctctgcaaacctcttccaatctttcctgtaaacagattgttatccatagacagctctagtattgaaaaaaagtttgatgcttctggaaaaacctcctcacttagtttcttatgtgatagtttcaagactatcaaggaatcacaacccttcaaaaaacttcttggtagcttcccatggaaactgttgtgagatatatccagaaattcaatcatttccatgttacccagagaagatggtagatttctttgaaaaccattagtcgttagattcatataatgtaagcaaggaagtattcacccaatgttctgaggaaagagttgatcaaatccattaactgaaacatccaggtaaagcagattatgatcagattgcggtagctgcaagcttgtaaaagagttattctgtagaagcaaagcctcgagttttgtattgttctccagcagccacgatggaaacttattattgttagagagatcaacatgacgcaaatccttctggtataggaaaatgaggaaccttcaccaaattgcaagctcctagtgaaataacactcaactgaaatttcggcttccaagaacttcccaactctacttgaagtgagttagattttgaagaaaggtttaccaaaggaaagcttgataacccgcccgctagtgcgatcactcaatgaccttccacagacagtaatcactctttgtgtcattagtccaacaaagcgttcttttcattctgaatacagcttttggatccatgtatctgtcccagcagtaacataatccatatcaagtattggcccaaaaacaccttcccttccatagcaaatatcaatatgagacaaaaagtgaaacaaaagaaactcaaacgcaatatgtgaatatgagttcaagcaaacatctccccacctctataagaatttcaaatttccagcggaaaacaccaagttcttcaagaaatatctgtaaatttgaaaagtcatatctttagcgtctaactaactcacttagagtagtatggtaagactcgttgggcatacaagtcaaagtctctctagaaaatgagtggtttagcatatgatatttcgcttgtcagtagccaagtaaattaacgaatgagattattgcaacacaggcccaagaattaaatttttgaattgattttttaaaacaactactcacaatcatatataccacaaaatgattcaagtgttgcttacacattcagtgaataaagttataaactttgaattctgttaaacatgtgaataactaaagcattatatgaacaaaaaaatctaacctttaaagtttaaactctctgcggtaactgtattgattatgtggcataatatgccacgtcagaaacaatggatgttaccgccaacaccaaaaacgccaccgtttccagcaaacattttatttttgtctccgcccaaataaaaaccctacatcctcacgaaacggcggctaccaccgtcgctgtccatcaatcggagttataaacagcaattgggtcgacccagaccttagaaatg

SEQ ID NO: 36770 - DNA, 3003 bp, Unknown; identical to SEQ ID NO: 36761
  misc_feature (1)..( 3003): 2750-1469P.txt file - cDNA_ID_3100091; gDNA_ID_2936583; Annot_ID_194994

SEQ ID NO: 36771 - DNA, 3003 bp, Unknown
  misc_feature (1)..( 3003): 2750-1469P.txt file - cDNA_ID_3100103; gDNA_ID_2936583; Annot_ID_194986
aggttaggctctttgcattgcagaaagaagaggcttggaccttaggtacagttagaattggaaagaaatggttaggacatggattgaagaaagtcaaagagtcagaaatcaaaggtttggcggatagtaactctaccttgagtcaaatatcttgccacagaaaggcaggcatggaaacagatcattggtataagatcttgcttagaatatggatggaggacgtgctaagaacctctgcagatagaagcgaggagtttgtcttgtccaagcatgttgtagaacctactgttcctcaagaactaagagatgcgttttacaagttccaaaacgctgctgcggcatatgtttcatcagagacggctaatctggaagcgcttttgccatgtccacaatctcatgatagacctgttttctttggtgatgttgtcgctccgactaatgctataggaaggcgtctttatcgctacggattaataacagccaagggttatgctcgttcaaattctatgcttattttgctagatactgcccaaataattgattggtattcaggacttgttcggcgatgggtgatttggtatgaaggctgtagtaattttgatgagataaaggctcttattgataatcagatcagaatgtcatgcatccgtactttggcagcaaaatatcgaatacatgaaaatgaaatagagaaacgccttgatttggaactgagcactattccctctgctgaagatatagaacaggaaatacaacatgagaaactagattctcctgcttttgacagggatgaacatctaacatacggcctttccaatagtggtttgtgtttattgtctttagctcgattagtgagcgaatcaaggccttgcaattgcttcgtaattggttgttcgatggctgcacctgctgtttatactttacatgcaatggagagacagaagtttccaggttggaaaactggattttctgtttgtattccttctagcttaaatggaaggagaatagggctgtgtaagcaacacctcaaagatctgtatataggtcaaatatcacttcaagctgttgattttggagcctggagatgattactactctccacgacaagagtcttgcaagtgtttgattcttcctaggtcaactctgattcgttttaggcagttgttgagctttgtgtatctgatgtctagcaaatcatatgtccggtgattatcgttcttcaaatgttttaatttctagaggccttgtgcagtagcacagtttgcataccctcagaacataaaaccatggcattagctggtctaatgggaaaagtctaggtgaaatggtctcattgacattcacaatataacttccttcacttttgactgtatcttccaatgcttagcttcttgaatttttctgatttttttctcacaattgatttgcggtgctgcaggttttgaacttgacaaaatggaattagcggatcgagcagtcgggcttctactatcttcaatcagcttgtccatattcacgtactatactttttgggtcatcatcctggtaagtgacaacatctcccccaagttccttaaaaagacattgtcagtttgatgtaccaatgtcatctaatgtttaggatattactaggaaaaagctgacataatagaattttcgttttgtacagccatttgtagatagtgatcacttcatccacaagtacttcttaccccaagactatgccattctcgtacctgtctttgccggcatagctcttctctctctcatttccgtattcatcggcatggtcatgctcaaatccaaaaagaagaaggcttaatttcattcaactcttgccgtaagacaaagttctgtccttgtttcttaagttgtccctacattgttttggtctttcagaggtttagtccggaaactttaaatgggtgtcgttgaaccgtacgagactatatcttattgactctaaatacatacacatgttaagctcaaataaattcttgagagaatatatactaatgatgatggattttaggctccctgacaattcaactaaaaaactatttacagaatatacgaatgatttagatgaatgatgcatttcacgaatatatatatttgtttcttattttgtcttttgtgtattctccatatggcagttactgatctattttcttttctggtttcgtcttttttagagagaaaaataaataaaattgactgataggaattcagtttgttagcaatataagcaccttaaatcataattagtgcttttgaaagttgagaaacagatatattatgaaaaatatcagtagtagtagtcatcataggctaagagctggcaaagcattagagacacaagtgagttttctctttgcaattattctatgtctgtaatgaattttggttttgacttatcttatgaaatttaatcatagttttagctttttctaatctcattagcactacttagtgcttatggataaatcatttcaagtcatcttcgtacaattaataaaatcaatagcccattcacttgtactgtactagagaccaaaacttaatacatacaaccaaaaatcaatttccttttttattttattttccaacacgctttgaattctgttctaccacatttgtatagtcaattctttatttcaacaaaaaagctgtcattaactatttgctaaaataggtttcaaaattttggaaggtgtagattcgtttttttggaccagactaataaatgcatgttttctttttgaagtaatgtaccgtcttcttctgataaaaaagtgaagagcctaaaacattctcttctgaaccttcattataaaaatatatacgaaacctctcaagttttcaggagattcactttggttccggatccgaattacggcgacggatcttatcgtgacggcgccggaatatacggatacgaaatcagctagtcacttgtggtggttgtgaagttacgaactaatcggaattctgttaaaaatg

SEQ ID NO: 36772 - DNA, 3000 bp, Unknown
  misc_feature (1)..( 3000): 2750-1469P.txt file - cDNA_ID_3100120; gDNA_ID_2936584; Annot_ID_143819
tgaaatgttttattgcttgtcataatttagttgttgaatactgtgctcttgaagaggccaccaagtttcatttataagaggatgcctctccttgccagttccgttagtttctaactcttagaaaagtgttatagtttgttctgagatctcataaatttgatgcttatttgataaaattagttttaatctgtgatttttgtttaactaatatagctttaatgaagctcgaagttatatatggttcttagaaaagtgttttccctttgcttccgttgacttcaattcttgtgtatgcaattgtaaggcatttgatatactgatctaggccggagtttattaatcgagctttttgttgcttggttgttagagctgggagaaaacagtggactgtcacagccctggcccggggctaatgccagcgagttttaaagtgaaatctgcgccacttgagggaaatgatggttcatttgaggagtttttagatccagactttggtggatcagccattggacgtgttagccctgttgactctggtaactctttgtgctctaacattttctatttatcatagataaacatacacccttgacattccagctactaaatcacattctactttcaaagttgtgaaactataaacattagtttaataataatatgattggaatctttcttaatttggctaggtttgtggtggatcatattgctgagagcttatggaaagctcacgggtgactacacgttgcaagagagaattgatgttcaaacagggatcaagttgatactcaagctttgtctagccgacggttttgacatgttcccgactctacttgtcactgacggatcatgtatggttgatcgaagaatggggattcatgggcatccacttgaaatccaagtaaagtgactgatcatccatgattgatcaaagaatggacttttcataactgataattaacggtcgtgattttttcattctcaggcattattctactccgctctccgttgtgctcgagagatgcttattgtgaatgatggaaccaagagcttagttactgcagtcaacaatcgcctaagtgctttatcattccatatcagagagtactattgggtggatattaagaaaatcaacgagatataccgttacaacacagaggagtattcagcagatgcaacaaacaagtttaacatatatccagaacagatccctacttggcttgtcgactggattcctgataaaggcggttacttcataggaaatctccagcctgctcacatggatttcagattcttcacacttggaaacctctgggccgttatttcgtctttgggaaaccaagaacagaatgaaggagtcatgacattgattgaagagaaatgggatgatcttgttgcaaacatgcctctcaagatctgttttccggctctggagaaagatgaatggcgaataatcaccggatctgatccaaagaatacgtgagtccattcaaaataacattctctttttcgttctttaggaattctgtagatctttggcttcatactttgtcattgcaggccttggtcatatcacaatggcggatcctggccaactctcctctggcaggtacaaaacaaacatgtattagttctaaagtagctgtgttttcagattatagaaactctaaaacccttttactgcatggttttttgtagttcacattggcttgtattaagatgggaaagctagaactggcgaagaaagcagttgctgtagcagaaaaaaggctaaaggaagatgagtggcctgagtattatgacacgaaaagcggaaggtttgtggggaaacaatcaaggctttaccagacttggaccatagcgggtttcttggcagctaagaaactaatagagcaacctgagaaagcatcactcttgttctgggaagaggactatcagctgctcgagacttgtgtctgtggcctcagtaaaagcagcggaaggaagaacaagtgttcgcgtttcacacctccaagatcttagtttcctgaaacttaataaactcacgaaccaaagtccatatttaatcatattttgcttctgacgtttagcaaaacatccttgctaattaggacgatgaatcagtttcaaacttaacgtatttttaatttgaaaaaaggaatatatatgtttatgtttgccttttccttcttgtcggattacttttaaatctcaatgatgtggatataaataaaaccagattcagtaatctgaagtaaataggatttgtttatagatttgtttttcagtttgacaattggatacgctagacattattggtcaaatcaaaaatggatatttgaaggaaaaggaaattaatgtagatgtcgtactacctttttcttagtataaaggcaattattaatgtgtgatactgccaaaagagtgagacgagagaaaaagacatgagatttgaagtggctgaggaagaagataagaaaatctaagtggaccactcaccagaatacacacatactatactagtatattaataagacaaaatctttggacaacaatcataaatatattacaaccacaaattcaaaataatctacagtaaatgtaaaaataaaaatctcgaaagaaacaatcaaccacaaattacatatcacatgtcaagttacttgaaatcaaacattaatcaaattggatattaactttcaataaattactattagtgtacttgctaaatagagaagctcctataatgtcaaaagaccgacaacatacgatgtcgtattagggacacatagagagacgtacacggactttggagctgagccatccacacacgggacacgataaggttgcgagcaaagtgatcaccaccaaccacttcttatcacgccgtttcaatgggcctttaatgggctctttttttcataaacccgttttgttttatcttttctcagtgtcggtaaaaactagaaagatccggtgattatttcatcatcggcgattatg

SEQ ID NO: 36773 - DNA, 3000 bp, Unknown
  misc_feature (1)..( 3000): 2750-1469P.txt file - cDNA_ID_3100130; gDNA_ID_2936584; Annot_ID_143817
gcctttggcgccattagagacgattcaccgttttgttgttaatgtttaaataaaggcaaaacggcatgatgttcggatgaggtgctttgttttttacatacgcctcgggactttaaccaacgacatttggttggaccaattaatagtaagtttaaccgacccaatgtccggtttttgttcagcttgataccttaccctggttggaacttggaaacggcaagcattcagctatttgtataaaaaggaaaggtggaaaaactacacgacttctctggagcaaaattttaggatgaggtaggctaggcccattttaatgtccatgagtgatttactagacttgagatccacggtagtcccagatcaacggctcttattttgacacgtgaacaaaacacaaaaaacacctcgcgttgtgatctgaaggataaagaaaaacaacaggacgttgtattacataaattagaaacgaggtgctgttttggtgttttccttttttcggcattgacctatcttgaccgactcataatataagcatgcttgtgtcgccactgtctctttctctatatataatagctctcactcttctctgattttcttctgttgaatcaaggtctctggaaatttcatcatcttcagtcttactcctatccctattttctcgttgggttgcacaaattgtttactgatgacgagcgatcgattttggcgcggcggtgaccgcgttgaggtggaacgactagtttctggcgcgacggcatattttccggcgagtgttgttagcgcgccttcggtgagaaagaaactcgtttgggtggagcatgaatccctaactgttggaggttccgtttccgtacgtatgaaggagtacgtcactcccacgcgcctccgtccatctccaccgcgtgaactcaacagacggttcaaagctgacgatgaggtcgatgtcttcagagatagcgaaggttgctgggttagaggcaatgttacgaccgtacttgaagattcaaggtacattgtggagtttaaaggggaaaatcgtccagaaatagaggttgatcagttcaatttgaggcttcatcgtgaatggctagatggtgggtgggttccttctcttctccaacaggtaaaacatttctctgcgtttgaattgaatctagggtttgtagaaaaatagtgaatttaatgttttagggattaagatacattgaaagatttgacgaattaattgtaaatttagtaaaaccaaaaaaaaaaaaaaaaaaaaaaaaaaaaaaaaattgtaaatttagaaaaaagacttaattatactatatatactgtatgtcaagcaatttgaatttgaagatttgttggaatttggcataataaactcacactgcttttttgatttacagagcaatttctcggaatcgacagcccaaagaattaaactgaagataaaaatcaagagaagagatcaatatgagaagggagctcttgtcgaagtcagaagtgaagaaaaagcttacaagggttcttggtattgtgctcgtatactttgtttattaggtgatgataagtacattgttgaacacttgaaatttagtagagatgatggtgagtcgatccctctgagagatgtggtagaagccaaggacataagaccagttcctccttcagaactctcgcctgttgtgtgctatgaaccaggggttatagttgatgcttggttcaacaaacggtggtggaccagtagggtttccaaagtcctaggaggaggttctaataagtattcagtttttatcatctcaactggtgaagaaacgacaatcttaaatttcaacttaaggccccacaaagattggatcaatggacaatgggtcattccttccaaggtattgactgatgtgccggaagaatgttacaaacctccattgaagaagctgaaatcttgtgagagagcagagaaggtgtttaacaatggaatggaggtggaagttagaagcgacgaaccaggttacgaagcctcatggttctctgcaaagatcgtaagttacttgggcgaaaacagatacacagtggagtatcaaacactaaaaacagacgatgaaagagagttgttgaaggaagaagcaagaggttcagatataagacctcctcctcctccactgattccaaaggggtatcgatatgaattgtatgaacttgtggatgcttggtacaatgaaggatggtggtctggtcgagtatataagataaacaacaacaaaacgagatatggtgtctacttccaaacgactgatgagagtttggagtttgcttacaatgaccttaggccttgccaagtgtggagaaacggaaaatggagtcgtgtataaggatgagaagaagttggctaacggttacaactattaatgaagaggataaggaaaatgacttgtttatagtacattttttgtttatgaacatatgtttgaagttgatgatgtcgttaattgtctgcgtataatataatatttaacttctaatgaaagaggtcaggtgttaagtttcttttttgttctctgttctcacttccattttactgaaattcttggatagatgggtttgttaatcttggcaaatgtgatgtgaacagtgattgtatcttgactttcttacacttgtttcaagactttctcgattgaggaattaaaacgcacagttttgtaatagtagcggcagattagagatgggctttattatcaagttgtaaaactattggggtttaaattcgaaaaacaaaaaaataggtcatggtttaaaacgcaattccattataactcaggggtttccttgtttctttatattactatatcttccagattaaaaataaaaggatcgttaaaccctaaacccgcttcttcttcttctttctcttcttctccctcaacgccgctctctatctctctatctctctctacctcaaacttattcttcgaatttcctctgaagaataatcttatcccaatagcgagtatg

SEQ ID NO: 36774 - DNA, 3003 bp, Unknown
  misc_feature (1)..( 3003): 2750-1469P.txt file - cDNA_ID_3100136; gDNA_ID_2936584; Annot_ID_143816
aatcgggatgctatatgcatactaccacccaactgtaagttcccaatactagaacttcacatcaactctgttcacaaatggttagctcagtgataaagacttaccgtttcatttccttgattatgtatcttataggttgaaagttggatggataaactggaggaagctgagatgaaattcagggtggctatcaaaacatctgtggcactgatagcactaacggtattacaagtcatcatttgactttctttcaggtgaaagaagcctcttgcatattgttcttccagctaatctatctttgttattatgaaacttttaggtgggatatttttggtacgagtatatatacaagatggacaagttaacttacaacaaatatcatccttacacctcttggattccaataacgtagtccactttacctgcaaatctctatacaaccactcttctaagaaccagtccttacttgtgtacctcgttttgcttttctttcagtgtttatatctgtctccggaacatcacccagtctttccgcggctacagtttgacccttctggcgtaagtaaaaaataattcagtcaatagatatgtttatcctcttataacgattttttcaagaaaaatttgttcatgaactttcaggtggcttggaaagataacactggagacatatatctcccagtttcatatatggctcaggtatgtcacacttttcttgcccaagttctcaattgtagagtaagtgggaaattgatggtggagcatgctaatacaataagctattaagatttttcctgacccattgaactatgaaataatctaattcacccacagatctggagttcctgatggtcaacccaaattactactatctcttgtcccggattacccattgttgaacttcatgctcactacttcgatttacgtcgctgtaagcaaaccctgctacaacagatagaaacaagttgaaagccagacagatacaaacaaactgattggctttttgttgctctgttttcagatctcttataggctctttgagcttaccaacactttgaaaacagccttcataccaaccaaggacgacaaacgccttgtctacaacacgatctcagcactcataatctgcacttgtctctactttttctcatttattcttatcacaattccccaaaaactggtaagtcaaaattttatctttttgtgtgggagaaagcttttttttccctggtacttgagttcattgatatgttagtgcatacacaaagcgaggacgaatgtcatcctctcatattcgattgaaccatctcacgttttattatttcactggaaacaaacaggtgtgaagcacttctgaaccggaccagagtggactattcgaatgaattcataggagttgaactacgcgatatggtagatatacgaagatagaaatcagaggtagatgcatacaatgttgctgtaatgtcatctttctgtatatttatttatgaataaggtgttctttcttgtttatttgtgtttctgttcacgatgatgttaagacttattattgtctattacaagttaaaggaaatccatatgagtaattgtatagctataaaatccagattaatcttacatcaaagtaaaatatgatggacttgcaaaagccattactttaatgtaaggaaacattgatatacttagatagaaagtgtagtcatagcatgtgtgtcaagcttgtcctctattgctcggtaggcagagaaagtgtccgagtcttcccatttggagaaattatacgcgggcccaaaggaaagcaaaaaatgaggtactgatattaaaaacaataacagtaccttatagtcaccccggtatagattgttagacatgctaaagagacaagataaccaaccgaggaagagcgtgtacaaagcatgtccgatctccatcctaaacttatccgatagctgaatcagccctaaccctccggtgaacaacgagatggtgaataacgacatggacaattcaaactctttgtttgtcaatagctcatatattaagggcaatgccaacgctaaatttgcggaaaatgtcgaaaacaaaacctgaggtactctctccaactttgtagtaaactccttgtagcaagcggaaggaggagcggtgaaaaaaagatatctgagtagcgtcactgcgtagaatgttgtgacactgaccgcaccgtccctaaaggactgagacgatgaatctccaggtggccagagaagattgagtgatttggagaggccaaaaagtgagagtagagtcattatataccatattcctctgcaaacaaacacatccatatcactaatcttcttctccatcgtgtgtgtgtttttactaggactatggggtttcggagatttaatagtcgtcgtgaattcgtttttcgatttcttttatttagttagttaaatctgcttttatccagaagaatgtggtatatctctattattagttaaaagtggttagaagattttcataatcacaacaaacaaaagaaatcttcgcaatctttatctaacacttttttttttcaagatatataaaattcttttatattcaacaaagaaaatagttcaaaaaatcacattataagtggaccactgaccagtaaagtgaacgaagaaagtataaactctattttcttcaattaaaccgtttatataaaaaaaaaaatcatattttaagtttctaacataagaaaaacagtagaccctatagtctatgcgttgattaagaagatgggccatgttgggccgattcacacttacctcttttattcatttacatcttaggcccattacgtttgtatatgtaatgtaagaagaaacttcttcttctcttgaacctcttcctcgattctcctcactcatctcaacatcttcccagattattcaacgctcgtgtatcgatcaagctactgaagtcacgttggttcgacttttgatacacaaatctgttcgagccaccatg

SEQ ID NO: 36775 - DNA, 3003 bp, Unknown
  misc_feature (1)..( 3003): 2750-1469P.txt file - cDNA_ID_3100141; gDNA_ID_2936584; Annot_ID_143815
tattacctctaaggaaggcactaattgaagtatgcatttatttgcacgaactccagacaagattttccaacttgtctcatcaatgtccctcagaaagaaaggattaagcacatctacattctgaagttctcgcagttaatatcaaaatcattttagtgtctctaagtaaagcaactagaactatagaaagttttgaaaacgaacgtttggaatggataatactctaagctgagcatatggaagatcaaccaagatcccatcaaacttaaagcggatgagaggaacttttgcatctttaacacaatgaagctcggaaacttctcgtctgcttttcaacatatcacgcaaggagatgaaaaaatcctcctgtaccaataagagaagaatctcaacttcacgggaaacaaaaacaaatgtgaatcagatcattcaacgaaacaaggaaaactcacagcaatagaggcaaagaaaggaccaatgcagagagcgtcaatgtctgattcagaaccataaacctggatgacaatgaaagacaacaagagttagctaaaagtttcagcattatagagtcgtttactagaacaatatatataaagattttgaaaaagaagacaagtgaaagagaaatctcaccccaagaccataagaaccataaggtaaaatggtggcgttggtggcgtcaatctgattttgtggaagacggtgttgccaggcaacattcttaacccatctcacaactatctgttcattagaaagaaactcagagacatcagtaatcactgtccaactactcaagaaacaaaactgaatgtacctttcgtagctgattgataacacctcttcgtttcacctcatcttcaagagatggaatgagtccttcattaaccatcagctacgaaattttgaaagaaagtgaaatcttggttttttttaagtccttaaattgagaatgagtaaaaaccctaatatattacctgacgaagcgagatcgagctttcgtcatcttgagggaaacctagggacaagaccagagccgtaacgtgaggaacaaggatccggcaagggagaaagggtttatcgaaataaaacgtggaatccaaggcagtgacggcgttgacaattagcataatccgccgttacacaaaacgaaaacacggaaagagaaagaagaatttgccgggaaaaaggactaacctttatttctcccacctccctttttcattgccaggaatgtcagactttgtttcccgagaaaatctttgaagaaaaagaaagcaaaattggtggagtctctccgcttcgccttcgcctttgttttgaacttcgaactaaaaattgccttaaatccagcgcagcaatagatttggccccaccaaattattgacgtggaatatgtattacttttttttttaatagtatagctttatttctctacttattatatttttctagtttataatctgaaaaagagataaattgaaattttatcgaaaatttctgttttcaaaggatggtttttatggaacaaaaaaaaataatcttccactaacactgattttttttttaacgactttcttcattgattcgatcaagtataatactgattatactgattataaaacaaaaaaaatgtatgtgaatgatcgttttctgttttttttttctttcgaataagatttcaaattttatttatgcatcctggcgtatcattttttctgatgagattgtgattctgaacatggcaattaaaatgagtgattctaaacactgttttagagactacagtctacatgcgacacgaatataaaatgatttgatcagatgtggacactcattatcatataatattataatggaatctaagatcagttagtatacgaatatgtatagagtccgaagcatataatgtcggtgaattccaattttcttactccaaactgattgcatgttaataaaattcttacttaatgtagtttgactatttaagtctaaagaaacgcgtctttgacaaacacacgcccacatcgcatcagccagcctcctaataattaaggtttaaatgaaagttaattgctaattacaatctgaaaatatgtgacaatgactctcataggttattatacatggtggtttatacgaacgatacacttcagttcaccggcattgaggattgtgatccaaaatcatccactctttcaattgctagtgagtacaattaatgagataaaggtttgaaactttacatgtcacacaaaaatgtggaaatcataatacgtattatcttcagaatcacgactcaaaataacatccagaaatatatatccttcttatattactggaagttatatacatacatacatactgaaatctcaaaatgtaatgggaatcaaaatgtatgatccaccgagtgtgaaaacaaaatattaaattgtctctttattatctttagttgtctcgttcttattacgacaccgatctgaaaaaaacgtttatttggttgttaaaaatctcactacacaatgacaacttttatctttgtatccatgcaagcatttcctttctattaacagcacccgattatgatagaagtgaataaaaaccaaaaatggtattgtcatacggaatttattgttggttttaatttgtaattaaatctgtcggttagtcatttttgtatttctattcttttcgtgggagaataaaataattgttttgaggtagcagctgcaaaccgctcaaacagttgcgcattaggcattacacagttccactcgttccttttgaagcttatctgtgtgactctaatctgttactataataggaacgaaagagagaactaggatctatacttgctccaaccttgctttgtttctcttctgcgatttatctctagatctactagatctggacaaggagcgaagcgaattgctggcaaattttagttttggagttttgaaacccgacgattatcgcgcttgatcgttgcttctctgatcggaaatg

SEQ ID NO: 36776 - DNA, 3003 bp, Unknown
  misc_feature (1)..( 3003): 2750-1469P.txt file - cDNA_ID_3100177; gDNA_ID_2936584; Annot_ID_195012
tctggtgtaggcgatgcatccttaacatagcgagcataaccagctctcccacagtgccttttgctggagtcttcgtgagatcttctgtgtctagaatgcattgtaccactatcttcccctcttttgatactaattgcttcatgttctgcaagtctagcttcttgtggtggggtactgacttcacgttggtcatcagtagcactgtctttcaatgactctgtttcataatcatcagattcctcatttataccaacagaagaagaagaggtagggctcaaacgaatgcgatctccaagagatgattccctctccactgaggatggatccgtctcatcagaattgcaaacactctcttctttctccttctcaagcatttccttatcactaggtgttgcttccctactgcagcaattctctgttggaagagatttctcgccactgaaacttccagcgttttcttcttgacaccccacaaaagcttcatcttttggagaaccatagactgaattcaaatccttgctaccatatgaatgagaaacgtcacttctagatgcttcatttgatgttatgcatcttgctttctcaggtgtcctgactggtagctcctcaacatcattagtaactgggatctggtttcatacatttaatcagcaatggaagataagggaagcaaaacccagcaaaccaagaatcattcaatctctaacctgtatcaccacgccagggtcaggatcacgtggacgacgcaaatctgcagaaggtattcgctcaagagtaccacctctaacctcaattgctcttcccttcagttgaataggtaagtaattcattaagatcaaaccaactacgccattgacacaacgatacgaaaaaaggaacgaaaacatgtctacttaccaacggtttacagtaatctttccagctctgctcgttaagcccaaaattaaaaaagtcactggtatccgtaccaggatccctccatggcttcttctctaacacatcgagatttacatcaaaaggtgtcctgagaataagagaaacacacatcatgatcttcaaacacataaaccattactcatatcaatcacattcaataaacctaaaacacacatttatcatctaaacaccactgtgactaacctggaccaagggtttgggaaactatatctgtattgagacattcctaaagaaggatcgatgcaagcattattagctgaagcgtttctagtccaccgtctctgaaacgaggaagctttggatgcttcgtatccgccaaagttggtgttaaacacacaagaagcaggaagggctttagagtcgtcgtctttgagcactatattcaaatcatcatcactatcactaaattccgattcttcatcggcctcagtcagattcatagcacaatcgtcgtcgtcacacggactcgaatccttagcaacaacatcaaatttcttcacttcaccttccgaatcagactttaccgtctcttcaaaacccttatcctcgccggagttcgtagcacactccgattcgaaagcatcagtcgcctgaaacttggcatcatcaacgtacaagtcaccgaaatcatcatcagtagaatccattcaaaagaaactcgatgaacaaatccaaatttgacactagaatcatctattccataaagtgagagtcttgacacttgacagttgcataaacccaaaagagatttgggagtgacagaaaacgccttaaaccctaacacgattaattcatatattattcttttctactacataaaatcttatatcataattaaaataaaaattatgcttgtgttgtggctgtggccacacaaaatatgagtatgtttttaatataaataaaatttaaaatttaaaattatttaaaatcaaaatttagaaatatgaacaaaaattataagaagttagataatatatggtaaacttagcaaacataaaaattaaaagaaatattagctgttttctttaattgatgccaaaaaaaaaaaaaaatctctttaattaatattaatatatatccaacatagaaataatcttcaatctatttttttacttaatacttaaagagttagagttgtatcttttcatttactcaaatttgtatttttttttaacaacaactcaattttttttatttttttgtttccatagaaagacatctttatgcttttccttaaaaaaaaatggacttcacaacaacaaccaaaaaaaagaataaaaagatttggatcggagatccggagctgtgacttgtgagctaactaccacgggccacgtgattacacctttaatataatattgtcttctctatctggcagtggtagctgagctcatcttatttgtttcttccctcccatttaatggtttcctcttaaaccattcccttcccttcctcctaactgcaatctactctccacctaacattgctccgttttgactcgctcgactcggctaagtgaccacaggttcgttttcctatttctctaacttttcattggagatttccatgactcagatccgtgtttttttcgaatccgatccggttaatctcaaacaaaacttgtcgatccggtttgggttttagggcctatagaggggatagtgatgagtcgatagtggaatgatttcgtttctacaaagactgagatcttaagtaatatggaattctgtaatgcagtggttgagatttgcagtagtgggtccctggtttcgatcccaaatcgttatcttttaatccagaacaactggaataaagaaacaaagcttcttcttgtttgattcagttctcgatcatggtttgattaaatgaatcaactttattaaagttgtgttagcttgaaaagggagaaactttttgttggtgtgtaaccgatgatctgtttgatctgtttcagtgtttgcttttttgcatgtcaatattttattcacgacttctaaatttcacctttttctgattctcagttcctttcgagccaataaaatg

SEQ ID NO: 36777 - DNA, 3003 bp, Unknown; identical to SEQ ID NO: 36776
  misc_feature (1)..( 3003): 2750-1469P.txt file - cDNA_ID_3100177; gDNA_ID_2936584; Annot_ID_143805

SEQ ID NO: 36778 - DNA, 3000 bp, Unknown
  misc_feature (1)..( 3000): 2750-1469P.txt file - cDNA_ID_3100192; gDNA_ID_2936584; Annot_ID_195029
aatttgtattttttcgtcattatttataaaacattttttttgttacagacttgagattattatcatctaaattcagactgctatattaatattgtaaatacttccatccatttttaaaaaccaattgttataaaacatcctaccataatatagatgttaatttagaattagaagtatgctaaagcagtaacgataacataatttcgaataatcgtaaatacatattcttgtcaacattataatatggtaacgggactaatacaaactattatactagaaacttagtcttaatcaattgctttaatattgtttgtttgttctttttcctttttgtggatataagcatttttagccacaaaagtctctaaagctctagccagaaaccatgctaatcacgtgataaatcaacaattcaattgaattaatgctttaatagagaacccataacattggatcgagacgcaaactcaatactaatcacattaacgaatacccaaatcgtgtactcgatacgacacaagaatattcggttttattgaaatttcttattattaccaatttaggaaaatattgatttttcggtttccgtacctttggacaagaggtttatgttttgtctatcccgtcgtaagttgattgatacctgccttgaaatttgccataccttcttagcaaccacttgtttgtttgtctctctgtcttttgtggttatctttaattagattcataataatttcacacatttttcgttagaatttaatgcaaagtaatttcacaattatgcattatatataattacttatgtatacatgtaaggaatatagggtttttgagctttaataatggttaccgtaagaaagtaggacatatatacatttgttttgcatttaatttgtctatatgtttatattagtgtatgtttcaatattgaatttttttctcccatgttaagattgatgaccaatattatatatgttaagagagtgatattaaacatatgaatgaaatagtaagattagtgtgcttttaacaaacaaacaacaaaaaactagtgtgtattccatatcttaccttaattactgtatcgtatcagggttttgtttttggacaaaatcgtatcagattttcaagatgtcaaagtttactatatatgatttttcccgatataaaataaaatgtgtaggcctaattaggaaatattcttttgatctttattctttatacgtatacattatttttaaacagataatcaatgtgtttttacataatggataagataattcaaaaagtaatgtgtaagtacatgaattcatgtatatacataatcaaactttcatgtaaaactagatcattgtgtgtgtttaactttccatgtttccagattgcatgagtagtactagttgcgagcttgtgaatttatctatccactaagttataaaaagagacccttcaattcccaccattcagactaacaaatattttttcttataaatataaacaatatggggttgtggataagatcgtataagctaatatcaacaagaaaaactgaagcacgttagatgaatgacatgctccagtccctttctaggttattcaaaagcaaacgtttagtattaaacccacatgcttcaatcctcgtggttaggcatctaatatgaacacttaagatatttagttcttaacttcttatgagtttgcagattttaacttatccgttttctttcttcaccaagtaatatagataactccactatttatgtatgaaactgggtatatacataatttggagtcagaaaagtgatttgactttatttttctaaattcaagttccaatagtagaaaggaaattagtttacatgttgtggttatagctgataaaattgtggaccaaggactacagaaacttcggtaaaaggaaaatttagattatatgttgatgtgaaaaaagattatttatgtcagtcacgtaatggaaattttgttttacaagtaaaaagtatataaaccaaaggttaaaattttgctcacatttttttttaaaaatggtctacgtagattatgctgcaagatgggcttatttaggctatataattgacaaattagtacatcataaacccatacggttaacttattacgctcaaactgggcctcatctttgtagtaatgggctggtatgattcgaaacgtgaatctttgtatgcgcttgaatagcacgctcaatttagagcgcgtgggtatgtttatgtgacgaagcaagattccttccttggccgccagacaaattgcaaaccgaaattgatcacggcgacgcgtttgcacaaattaaatttcagacaaagacgtctgcgtgcacatccagaaacattgactaatcaaaatatgccacgtatgcgaggatttggcttcccagggttaatttcgtaaaatggaatcgtgtcaaggaccagtaaggttattatcatcatgtatttctccacatttatttaatgaagaattcttgtgggctctaccaccggcccatctgatccatacaaaaacagagagcaaaatcggaaatgtcacttctaccctaactcgctcgacgataaattagtgacaaaacacaaaagaaacacgtatctgagcctattttcgtagttttacaataactgaaaaaagaagaaggaaaaacataaagtacacgcgcgtcaacatgttaactaatttacatttttgtccacggatctttttttctttttaagcaaccttcagatttcattccatcatcttcaccaaaccatttattcagacaacaaaaatatcttgcattcatttttgttactctcttaaaatctcattctttgattatcttctcttcccctgtaagtactccgatctaattatttgttcctatcagacatcccccaatttctacgatcggatttattcgtcgatcaagaagctggctaagttgtattgttggtgattgtatagtttttattattattcgagagaatg

SEQ ID NO: 36779 - DNA, 3000 bp, Unknown
  misc_feature (1)..( 3000): 2750-1469P.txt file - cDNA_ID_3100192; gDNA_ID_2936584; Annot_ID_143820
catgctaatcacgtgataaatcaacaattcaattgaattaatgctttaatagagaacccataacattggatcgagacgcaaactcaatactaatcacattaacgaatacccaaatcgtgtactcgatacgacacaagaatattcggttttattgaaatttcttattattaccaatttaggaaaatattgatttttcggtttccgtacctttggacaagaggtttatgttttgtctatcccgtcgtaagttgattgatacctgccttgaaatttgccataccttcttagcaaccacttgtttgtttgtctctctgtcttttgtggttatctttaattagattcataataatttcacacatttttcgttagaatttaatgcaaagtaatttcacaattatgcattatatataattacttatgtatacatgtaaggaatatagggtttttgagctttaataatggttaccgtaagaaagtaggacatatatacatttgttttgcatttaatttgtctatatgtttatattagtgtatgtttcaatattgaatttttttctcccatgttaagattgatgaccaatattatatatgttaagagagtgatattaaacatatgaatgaaatagtaagattagtgtgcttttaacaaacaaacaacaaaaaactagtgtgtattccatatcttaccttaattactgtatcgtatcagggttttgtttttggacaaaatcgtatcagattttcaagatgtcaaagtttactatatatgatttttcccgatataaaataaaatgtgtaggcctaattaggaaatattcttttgatctttattctttatacgtatacattatttttaaacagataatcaatgtgtttttacataatggataagataattcaaaaagtaatgtgtaagtacatgaattcatgtatatacataatcaaactttcatgtaaaactagatcattgtgtgtgtttaactttccatgtttccagattgcatgagtagtactagttgcgagcttgtgaatttatctatccactaagttataaaaagagacccttcaattcccaccattcagactaacaaatattttttcttataaatataaacaatatggggttgtggataagatcgtataagctaatatcaacaagaaaaactgaagcacgttagatgaatgacatgctccagtccctttctaggttattcaaaagcaaacgtttagtattaaacccacatgcttcaatcctcgtggttaggcatctaatatgaacacttaagatatttagttcttaacttcttatgagtttgcagattttaacttatccgttttctttcttcaccaagtaatatagataactccactatttatgtatgaaactgggtatatacataatttggagtcagaaaagtgatttgactttatttttctaaattcaagttccaatagtagaaaggaaattagtttacatgttgtggttatagctgataaaattgtggaccaaggactacagaaacttcggtaaaaggaaaatttagattatatgttgatgtgaaaaaagattatttatgtcagtcacgtaatggaaattttgttttacaagtaaaaagtatataaaccaaaggttaaaattttgctcacatttttttttaaaaatggtctacgtagattatgctgcaagatgggcttatttaggctatataattgacaaattagtacatcataaacccatacggttaacttattacgctcaaactgggcctcatctttgtagtaatgggctggtatgattcgaaacgtgaatctttgtatgcgcttgaatagcacgctcaatttagagcgcgtgggtatgtttatgtgacgaagcaagattccttccttggccgccagacaaattgcaaaccgaaattgatcacggcgacgcgtttgcacaaattaaatttcagacaaagacgtctgcgtgcacatccagaaacattgactaatcaaaatatgccacgtatgcgaggatttggcttcccagggttaatttcgtaaaatggaatcgtgtcaaggaccagtaaggttattatcatcatgtatttctccacatttatttaatgaagaattcttgtgggctctaccaccggcccatctgatccatacaaaaacagagagcaaaatcggaaatgtcacttctaccctaactcgctcgacgataaattagtgacaaaacacaaaagaaacacgtatctgagcctattttcgtagttttacaataactgaaaaaagaagaaggaaaaacataaagtacacgcgcgtcaacatgttaactaatttacatttttgtccacggatctttttttctttttaagcaaccttcagatttcattccatcatcttcaccaaaccatttattcagacaacaaaaatatcttgcattcatttttgttactctcttaaaatctcattctttgattatcttctcttcccctgtaagtactccgatctaattatttgttcctatcagacatcccccaatttctacgatcggatttattcgtcgatcaagaagctggctaagttgtattgttggtgattgtatagtttttattattattcgagagaatgaacagtagaagctgtatctgtgtctctgcgatgaaaccctgttgtagatttcttattagttttagaagttcctcgcttttcggtttttctcccccgaactctggcaaattcatcaattcgtcgaagttacactgtacaaagattgattccaggagtattagatctggtattcattgccgtcggattgttctggatcggaatgctttttgtgattccgattccattagctggggaggaggaggatctagagttttaagagctagaggtagtagtagaggaagaggaaggggtgttttagtaattccccatgtagcttcagattttaggaactattcgacctcttcgttggattctcatgtaaatgataagagctttgagagtatg

SEQ ID NO: 36780 - DNA, 3000 bp, Unknown; identical to SEQ ID NO: 36772
  misc_feature (1)..( 3000): 2750-1469P.txt file - cDNA_ID_3100197; gDNA_ID_2936584; Annot_ID_195028

SEQ ID NO: 36781 - DNA, 3000 bp, Unknown
  misc_feature (1)..( 3000): 2750-1469P.txt file - cDNA_ID_3100202; gDNA_ID_2936584; Annot_ID_195027
ctttaggatgggagtcgattggtctaggatcatgccagttgagcccaccaaaggaattaaggaagcagtgagtcaagaaaatattatgacacgttatgttttacatatactatatgtgtcaatgcattttcttttgttttgccattttttgctaaaactttgtatttctattgttatgctttgtaggttaactatgaggctgtcgaacactataaatggatacttaaaaaagttcgttcaaatggaatgaaggtgatgctaacgctgtttcatcattcattgccaccatgggcagctgactatggtggctggaaaatggagaagacagtcgactactttatggactttaccaggtgactgtctcatcaaatgagctatttatggacattctgtaggtcttaatcatctttctataacatgccaggattgttgtggattccatgtatgatttggtagactcttgggtaacatttaatgaaccccatatcttcaccatgcttacctacatgtgtggatcttggcccggtaacaaccctgattttctggagatagctacatctactctaccaatgggtgtattccatcgagccttacactggatggctgttgctcactcaaaggcctatgactacatccatgggaaaatgttagtttttctcctttttcttaaaaaaaaatcctatgaatttctctcactagcacatcttaatagtttccaactcttattttgcagttctttgaaaaaacctttggtaggggttgcgcaccacgtctcctttatgcgaccatatgggctctttgatatcggggctgttaccattagtaattccctcactatatttccatatatcgatagcatttgtgagaagttggatttcataggcatcaactactacggacaggtaagagagctacaagtaaaaattgctattaggtctcaaattttgattaataatattgctttctctcgaataagtatgttggaatctgactcgagaaatcaggaagcagtgtgtggtgctggactaaagcttgtagagactgatgaatacagtgaatcgggaagaggggtatatcctgatggtctctaccgcgtgttgttgatgttccacgagagatacaaacacctgaaagttccttttatcgtcacagaaaatggcgtgtctgatgaaacagatgtgattcgacgaccttacctgatcgagcatctccttgccttatatgctgcaatgctaaaggtctttgtccctgaaactctctgaatcatgcaaaacgttatttccagcttaactattgaaatttggtagcattgttgtgatgagcctggtctgttaaaacctcatctagacctcaaaatccagccatgattttagtccacgggccatcctggacccattaaggcaaaatggcgggtacctggctcatccagcatgtgacgggcttagactcaaaaaggtcatccgttgcagggctgggctggctttgggtcgccataacaaccctacgtattggcatatctctcacttgtgtttgtggctttcacaacagggtgttcctgtgctcggttacatattctggactatttcggacaattgggaatgggctgatggatatggtccaaaatttggacttgttgcggttgaccgatcccatgatcttgcccgaactcttcggcaatcataccatctcttttccaaggtttattataaccccttgtggtttttactacgcttgagagttgagatcaccagatcgctgttcgtctcatatggcttttgtgttttccttgctctttccagatagttaaaagtggaaaagtcactcggaaagatcggtctcttgcatggaacgaactccaaaaagctgccaaagcaggaaaactacggccattctaccgaggcgttgataatcataatcttatgtacgcaggttggtttacaacttccaaccttgcgtattttttttttgtttttccaacttttactttatataatcttacttccaaggctttgttttgtttgtttaaaagatggtctcgacaagcctcaatggagaccgtttgttgaccgcgactggcggtttggtcactaccaaatggatggtcttcaagacccgttgagtcgcgtggctcgaacccttctcatatggccgcttatcatgaaaaagaggataagaaaagttaagatcaagcacaccgatgatgctgggcttgttctacatcctgctttagcctcaccctttgactagagaaagaggtagaagaaatccgagtgtacaaactcatttccctgtatgatttgccaaacctttgggcctttggcgccattagagacgattcaccgttttgttgttaatgtttaaataaaggcaaaacggcatgatgttcggatgaggtgctttgttttttacatacgcctcgggactttaaccaacgacatttggttggaccaattaatagtaagtttaaccgacccaatgtccggtttttgttcagcttgataccttaccctggttggaacttggaaacggcaagcattcagctatttgtataaaaaggaaaggtggaaaaactacacgacttctctggagcaaaattttaggatgaggtaggctaggcccattttaatgtccatgagtgatttactagacttgagatccacggtagtcccagatcaacggctcttattttgacacgtgaacaaaacacaaaaaacacctcgcgttgtgatctgaaggataaagaaaaacaacaggacgttgtattacataaattagaaacgaggtgctgttttggtgttttccttttttcggcattgacctatcttgaccgactcataatataagcatgcttgtgtcgccactgtctctttctctatatataatagctctcactcttctctgattttcttctgttgaatcaaggtctctggaaatttcatcatcttcagtcttactcctatccctattttctcgttgggttgcacaaattgtttactgatg

SEQ ID NO: 36782 - DNA, 3003 bp, Unknown; identical to SEQ ID NO: 36774
  misc_feature (1)..( 3003): 2750-1469P.txt file - cDNA_ID_3100211; gDNA_ID_2936584; Annot_ID_195026

SEQ ID NO: 36783 - DNA, 3003 bp, Unknown; identical to SEQ ID NO: 36775
  misc_feature (1)..( 3003): 2750-1469P.txt file - cDNA_ID_3100220; gDNA_ID_2936584; Annot_ID_195024

SEQ ID NO: 36784 - DNA, 3000 bp, Unknown
  misc_feature (1)..( 3000): 2750-1469P.txt file - cDNA_ID_3100250; gDNA_ID_2936584; Annot_ID_195011
gacttgaatagacgtgcacaagtcccgctgacccaagcaaccactggtttggtcacttttccctgtttcatggcttcaactagagaatattcatctcttcctccaagctctccaagtacaaccaccatcttaatctgcaatattgaaaaaatgaaaacaaaattttggagttaaagaggctagctgaacaagagagggaaggtcagatgcctctaagtacagtatagctttctcatggttaaacagtagaaaaaatggataggccgcatgaggatatcccagtgagcaacaaaattttaaaagtcaagaagaatatacctgtgggatgttgttaaaccgcaggatatggtcagataaagttgagcccgggaacacatccccaccaatagcaatgcctacggccatcccaaatcataaactcatcttaagaatcttcagaaatgataagcataaggaacatattcattagtaaattctgaacaaaaaaatagaaactcaccttcatagatcccatctgtcacacgggcaatggtattgtacatttcattagacatgccaccctatagaaaatagtgaatgagaaataaactctcagattaagattcaaaagaggataatcatgagcttaggtagactacaaaatgcgaaaaaaacaatctccacagctcatacagattttgagacaaagccaacagatccaggcctgtacaacttgcattggatgatattgtcaatagttccagctgtgtcaccaattttaaaggctccagcttgaacgcctccaacagtagctggtccaataataacctgtaatgaccaatcagtaaaagaagattaactcggaaagctcacatcaataagaaaagatcgatcaatagtaagttcctaggaatactgcatcatgaggaatgagtcagtttagtgttataaccaaccttattattagcacgagcataagcaatcaactgcttagtgtctgactccggaacaccttctgctataatggccactactttaatagttggctgcttcaaagcagccatggatgaagcagcagcactaaaatacaaggggaaaagaaaacattacaagagaatcacatagtaaaacaggaaaatcgcattcacagaataaaacaataataaccttctaaacgatgcgaagttgatgaatacatctgctgtgggatgcgcagcgcatgctgcctcaatgctgcaagaaacagacaactaagataaaaaattctgaactatgtatttctctctttctttatgtagatggtatttaacttacgctgcgtggacagggatggcgatctcctcctgaccaaaaaatagcttttggaatccctcggaacctgggtttatgataccagcaacagaaggagtttctcgccctgtaaagagttaagataattaaagaaaccaaatttaatagtgaagtaaatccagagaataactgattaagacattaagaaagatacaaaagaagatacactcaccacagaggaaatcaaaatcaagcatacgctgaatgggaagctgcttataattgtagaacaacgcttgtgtgttgcgtgaaaatagctgtcccgtagccattttattggctcgaaaggaactgagaatcagaaaaaggtgaaatttagaagtcgtgaataaaatattgacatgcaaaaaagcaaacactgaaacagatcaaacagatcatcggttacacaccaacaaaaagtttctcccttttcaagctaacacaactttaataaagttgattcatttaatcaaaccatgatcgagaactgaatcaaacaagaagaagctttgtttctttattccagttgttctggattaaaagataacgatttgggatcgaaaccagggacccactactgcaaatctcaaccactgcattacagaattccatattacttaagatctcagtctttgtagaaacgaaatcattccactatcgactcatcactatcccctctataggccctaaaacccaaaccggatcgacaagttttgtttgagattaaccggatcggattcgaaaaaaacacggatctgagtcatggaaatctccaatgaaaagttagagaaataggaaaacgaacctgtggtcacttagccgagtcgagcgagtcaaaacggagcaatgttaggtggagagtagattgcagttaggaggaagggaagggaatggtttaagaggaaaccattaaatgggagggaagaaacaaataagatgagctcagctaccactgccagatagagaagacaatattatattaaaggtgtaatcacgtggcccgtggtagttagctcacaagtcacagctccggatctccgatccaaatctttttattcttttttttggttgttgttgtgaagtccatttttttttaaggaaaagcataaagatgtctttctatggaaacaaaaaaataaaaaaaattgagttgttgttaaaaaaaaatacaaatttgagtaaatgaaaagatacaactctaactctttaagtattaagtaaaaaaatagattgaagattatttctatgttggatatatattaatattaattaaagagatttttttttttttttggcatcaattaaagaaaacagctaatatttcttttaatttttatgtttgctaagtttaccatatattatctaacttcttataatttttgttcatatttctaaattttgattttaaataattttaaattttaaattttatttatattaaaaacatactcatattttgtgtggccacagccacaacacaagcataatttttattttaattatgatataagattttatgtagtagaaaagaataatatatgaattaatcgtgttagggtttaaggcgttttctgtcactcccaaatctcttttgggtttatgcaactgtcaagtgtcaagactctcactttatggaatagatgattctagtgtcaaatttggatttgttcatcgagtttcttttgaatg

SEQ ID NO: 36785 - DNA, 3003 bp, Unknown
  misc_feature (1)..( 3003): 2750-1469P.txt file - cDNA_ID_3100255; gDNA_ID_2936585; Annot_ID_143855
tatcgctctctttgctcttgtggacgccacttgtttccaggtctgcttactttacctgaactctttaagagttatgttgatagattcttgtctgcatgttggtgatgcttgttaggattatggttcagggatttcttgctcaagggttacagagaacttctgctggtttaggaagtgtaagtttttttctatctctcaagtcttatctgtgttcttgtctaggcctgagaaaggcttttgggtttgttaatccgtcacgctgcaggtcataattgattctcagccactgactgtagctgtgttagcatctttcttgtttggtgagtcaattggaatagtgagagctggaggtttgcttcttggtgttgctggacttttgcttcttgaggtaaacgatctacttaaccatctaaccaagtctgagctagtttctgtttagtgcaacttgatgatatgtttgattcactacaggttccatcagtaacttcagatggtaataatttttccttgtggggaagtggagaatggtggatgcttcttgcagctcagagcatggctattggcactgtcatggttcgatgggtctcaaaatactcagatccaattatggcaaccggttgggtaatgatgctcgatccttctcgcccctttcaatccttacttgtccccatttttgttcaatggcttgtcttcgagagttcttcttacaagaactaaactaaactaaacatgtctctcattttatctgcagcatatggttatcggtggccttcctcttttggcgatttctgttataaatcatgacccggtttttaatggtagtcttcaagatctatccacaaatgatgttatagcacttctctacacatccatttttggcagcgcagttagctacggtgtttacttctatagcgctactaaaggtccactctttcactgccttctcgagagactatcgctacttctggtttcagatctctgatacttgtatgatgtctatttttgcaggaagcctaactaaactcagctcactcaccttcttgacaccaatgtttgcatcaatctttgggtaagaccataatcagcaacccataaatccatgattttaatagagtttctttagtcatttggttcatagttctgatattattggtttgaccaggtatctgtacctcaatgagactttctcctcattgcaactggtcggagcagcagtgactttggtcgctatatacttggtgaactttcccgaaggcaacgactgagacactctttgagttcttacttacactctttgagttcttacgtcatttttaaacttgttatgaaggtggaaatgtatcatagtttcattatcttcaatcttattgtatataataaaatgaagcatcatagttcagtgttaatcaaaagccaagtttcgtaattacataaacaaatgttgcacaacacgatacagcagaagcagattctcttacttccgccacaacatttacaatcagagatcaaccagtatggtaatacaggtgtgagcagttttggattaagtagtcttctcatcttctggtttagcttccatgtccgacatacaagccacatcagcaactagtctctcaacaggcaccttgctcacatcccatcgcatgcctatatctgaaactaagcgactggtgcagtacatgccatagccagccacagccaaaccaccaaaacctgctacaaacctgagtggtgaagaaagaagaacactggcagctgcaacaattgaagcagcttgaccactccttcccacgtcggtgtttgccactagcaaacccgttttgcaatagatggcaaaatcttcacagttgttcttgaagacattgtacacaccaaaaccattttgcaagagaaaatttgctcgatagatgacttcttctggaggatctgaagatgctatagtgcatacgccgcctcgaggtttggcaagaaagatagcaggggaaacactgtactcaaagacatagagatcacctccggcaaggaaacattcaaggcaggaagatataacaccgccaagattggatcgatctccacaatcaggacatgggttgtctccatgattatgagatgaactaacaatgatgttgtccaagaaagtcccagttccagtctcttgaccatcaccacgagtaaaatggttgacttgtccattacctacatagattcctgcaaatcacacacacatacaagttaacgtgatagattacataacaaagaaaagataaattcaaggattacaatctagcctagtaacagagaatagctgttaaaatcacattttcctaaaccttctactaatttggatccaaacgaaagaatcacattatttcccccaaatttgaaattttcgcaaaatctaaccagttgcacaaataatcaaattgagacagctaaaattggaaattgaatcatctcgtatcatcatgaatgtacaatgtatgtatctctctgtaaaaagggaattacaaagagagagataagagtgagatcgaaccgtgatgagcgtaaatgtaggcttgacgccatgaatagatgtgatcgcctggtttcacatcgtctctggagattttattggaaaggaatcccatcttctccgccgacgaacggagaaccagaaattagggattgcgtcgtcagagagagaaagatcttattttttgcttagtgtgtagggttttccatcttccttggataacatcataacttttttaaagttccataaagacattgatcttttgacttttgagtttttgaccccagaaaaaatatagtttattagaaatttaaattctaattgcttaaatcttaaacgacaccgttacaccattgggcctcaaatgacattgactcttcatttaataaaaagcccaaattaaaattcagactcgtcagtcgtcaccattatttcatcccttaaaccaaaaatcttagtttcagacggaaagagagagtatagccatg

SEQ ID NO: 36786 - DNA, 3003 bp, Unknown
  misc_feature (1)..( 3003): 2750-1469P.txt file - cDNA_ID_3100258; gDNA_ID_2936585; Annot_ID_143853
acaaaaaccccacatttcttcttgggtttatgctagaggagtgagtttgatcttgctttttaagaatctctagttttgtaaccttgatgagttgttaaatggtttgaatcaggtgaagataaatactatatcttttcaaagggtatttacaaggttggtcgaaaaggtaatgttattacactttcatcatcgtcttgctcgtgttctgtgccttcatgggttgttctttctctgtaggatgtgatataattatcaataaggataagggggtatctaggatccacgctgagttaacttttgatgcaacaactgtttcaacctctcggaggaacaagtcttcttcagatacatcatcctttgttatccgtgtcaaagattgttcaaagtatgggacttttgtcaaaactgacctggggacaaaagataaagttcatgagctatctaataaggagaaaattctccaagatggagatgttatcgcgtttggtacaggttctgcaatttacaggtattccaggtgtgatgttttttttggttgtaacttcgtgtagtatggcttatattttttaatcattgtaggttgtccttaattccgcttgttttttacttgtgcccttcctctgagacctttaaggtggatcagcctgtacaagatgcagtttcatcaattggttagtgaaaaacattattccctgcctcatggagtagttttcatattaccagcattgcctgaaactacgtagatattcaggtgctcgtatttctcctacattgagtgaggagtgcactcatgtgcttcttgagccacgtatgcaagtgaatgaagctctgatcaatgcaattttagccaaaaaaacaatcattttgacaaactgggttatggtatgtctgagaattccattgtcatcacttgtctgttaattggtttttaacttcaatggtttgtctagcttctcgcagagaaaagtatctgcagcgaaattcctggatacagccagtgagcattacttactgttttccggttattgaattaaaatatattagttactgacattcaagtaatcaatgttaatttaggtacagaccatcagtgatggttgaagaagctttggtggatgtactagaattaaacgtccgtgaaaaatgtctagaaggatttacctttgtcttggaaccaacagacacggtataatctcttatttgtctcaagaagaatcagattcaactgatggttccaagtgatttttgttataggtctcagtagatcttagtcttactaaattattgataaactatgcatttacctatccgtgccattttctttatgcagtatagatttggttgcagcttcccatctttacttgaagtatgtggtgcagagaccgttaccatagaagacattagctccatgagtcaggtttgtgcttttatattgttttgctcatttgctctttctgtaggtagtcctaatcgtaatcaactctgcaggattctcagtttggagagattaatcgcatgatatgtgtcatcccaaaaagtgcaggagacaaatttggccgtttcaagcatctcagtttgttatctagagtgaacgagatggatttagtatgcgccgtcttttccggaaatctaccttcgacttcactgataccaccatccggtgagtaaccaaagccaaatatatttgcttttctcgggactatgacactgatcttgaaacatttcctgtttgtagttgtaatttcatcctcgtgctctacagatgagacagtggtagcggattctgaagccgaagaggaagaaacaacatcgtctgttcatatgattgatgctactgaaaaggcagaaacgccagagaagcctgctgctattgtaatagaggatagccctgttactatattggaagaaacttcgaatttgaacgagtttaaaagcgtgaacttattagcggatacagaaagtagaggccacatggatgaaaagaactcaagtgatagtgtgacaatccgaagggatcggaacgatgaggctgaaactgggaaatcggagattatatacactcaagatcttattgttagggacttgcgatcgactagaaaagttcaatcgacaggaggggaaggagttgtggacttcaagcgattcagaaaggtaaaacagaacctttggattctggacaaatgttgtgtttgcgagatgatgattttgcttgttttgttagggaaatgttacatgcggaaacagcttcagtagcctaataccttttgcgaaggatccatacaagtaattccgggtcttatctcttgcttattggctcataatgttttctcctctatgttttcttgaccgtttacttcggtgatgccagagaatacgatagctgggacgtgacagattttatgaaagaagagaagaaaaggaagcagatggaagccattgcagaggacttgtttaaaactgaaaaggtgtcaaactttattattatccaatatcaaaatataaagatcatcctgcgattctctttacactaatatcgtaatgtgcaggctagaaagcgtggaacggctggttccattcgcgggtttctctctggaagttgaggttttaaggtaaaatggttgctgtgggatcttaactctgtaaatttctcaggcttgtttagtcttcttcgaaagatctaagctttcattttttttctttgcgtgttttattgcaggactcttttagagtgaatcagaagaaaaagtctctggaagaacgcatgattctggatcagtggatcactaggaactaaacaaaatcttgtcttttattttttgttcttcatgagttaaaaaatgatgtatgtatagtgagtgatctttggtatctctgatgaaaacaaaaattgattatctcttttcagaaatttaaaaacagaaaacatgtggccattacttctctgttaactcgaaaagatacaaaatttatcctttctctttgttctaagtacaagcaacaatg

SEQ ID NO: 36787 - DNA, 3003 bp, Unknown
  misc_feature (1)..( 3003): 2750-1469P.txt file - cDNA_ID_3100272; gDNA_ID_2936585; Annot_ID_143846
agtttttgttgcggcggtgggaggtggagaagttagggatgggtttgtccggcgaaggaaggagagcacaggattatctgtgtaccttgccgcagaggatcaggaggttagaggaaagagctaacgatagagtcaaacttgcgtcaaagtcaaaaccttctgtttccttcagctggatttatgggagagaagttgaactataaaacgacacatgttgttgtgttctgtactagactctaaaaggttaatgcgagcttatgggccttagagcatgtccattgcagggaccttacaagttttttaagagaattctaatggaaagaagcaaaaaaaaaaaaaaaaattgtctaattaaccaaggtgcgaaccttgaataaggtatttttgggtgagtaaggttcgctgacgtggcactatatcattggaggaccaataaaacaaaacaagttttttttcttttttctttctctcctctctcttggtttcgtatagagtttctaggctttggtttatgttcaaatttgtgtttgatctgttggtttttaagataaaaatgtgaccattttgctgcttattcacttctcattagcattacaacggattggtgacacaaaataattggttctaggtttatgtttatgctcttttgtttgctcatttagttgatgttatcaaataattggttctcggtacgtgctttcatttaagttcatgacagtgtcttgagctggagatagattattctatgtttttcctttggtgacaatttcattaatagacctctcatcttggactttagtttcctcttgtaagccttttgatttgtattctttttctcttttttttttgcttttatgtcatcatatatgtttacaatttgtaatattttctaataacttttaagttttatcaaataaattattttaaaaatatttttgctttttaaagaaattttcataaggactccaccattggataacaaaaaatttagagactcaacaaaaactctaaactttaaaattaccaaaatatattattaaaaaatgttaaggattttttataaggattcaatcaatgggcatgctcttagtaatgtaatgaagaaagtaattaataataaaacgctaaatgatctgttcgtttgagtgaaaaactgggttataactaccatgcggcccacgggcttgtaaaataagcaaagaaatatctgagtggcatagacgtaattaaaagagtatctgagggatattatagagaataaaaacgttgtatattaaatcgaaagtttcttctgcacattctcttatttcgcagtctcatagcatagatataatcaaaagtttttcgttcattgatcatcttcgattgattgagtttgttggataagaaaagaatggcggtggctatggatcggatagttaatccccgtcatcgtacgtctatcgtccttgtcaagttaggggatccagatctttgtttatagtgtgtgcgttgttttttattcatacacttgtggactttgccctaaacagaattttgaaatcatttttgggtcaaaactcgaaaaaatgtgtagatagttttattgtggtgcttgttgttgggtaaaactacgaagacatatttttattttattttcatccaaaagccaaaaacacataaggatttgttttagtacgtattattattattattttttatttttttctgtatgggagttaattgttgaatacttccaactctctaatgaagtaattgcatttaagtttcttattcttttcttgtattcttatttcataaagaatgtcattttaaaattttaattttgttttataaaaattattgttttttattttcaatgcagttgtaaagatcaaatatcttttttttatctctactatttaaactaattaatgaaaaaaagagagtattatttagtatattaatagcaggtacaaatgaaatttgtttgctttccttaatttgcgtgaaaataatagaatgacattctttgtgaaacatataaatattgaaagttttgtaaaatttgattttcatagccatttccaacttgatggaaaaagtacattactttctaaatttatgtgaaaaatggtaaaatgacactctttgtaaaaacatatagaatttcgaaagttttgttacgtttgattttcacagccatttttcaacttggtgaaaaagacaagacacgagtaagccaactttctcgatcaagccgatttgttttttacaaatgtcattctttttcaataaaaagcattcaagattattaaagtaatattcattgggctacttccagaatatgctcatataaaatccatcagaatccagtccaattacaccaatctgatcaaaaatccgatcaaaaccgagggacatagagaccagaaaacccgattgaacccgtctttcaaagaagcatcgattgaaactttattatataccagaaacgatccgttaagaatatagaaacctaaccataccatcaatgcgatgttttgtttagtgtaaaaccgaataattgtgtatccatatgaattatatatatatatatatatataaaattataacaaatttatgatcgactgtatataaaaatacaatatttaaatggcaatgcaaacggcaaggaattatattatttgcgtagacaattttatataattaaaattgtaagaaatttatgatcgaatgtatataaaaacaatatttcaagggcaatgcaaacggcaagaagttatattatttgcgtagagattttctgtctttgcgataacatgtttaatagatctttaagtctatgacaactcgtcatattgatcatagaagaataaataattacaactggctaggggtaacatgtataacactctatcttttgtcaactcactcactatatacatatatactcttctctcctcctaacgcagaggcacaagggcaataagaaaagagagagatagataaatgacgatgatg

SEQ ID NO: 36788 - DNA, 3000 bp, Unknown
  misc_feature (1)..( 3000): 2750-1469P.txt file - cDNA_ID_3100282; gDNA_ID_2936585; Annot_ID_143839
tttcgtagaaaggtttgtcttttcttttcactctgtttcaaaaatgttgcattgaagcaatttctattgcatttcacttgtcttcctttgtttgaacatattcgttgaaattggagttccctgtatagaaatcaaagctaagttacatagttgcttcaagtggtttacctatctttgtgacttccaaagcaattctccatatatgattcttgttctgctttctataagttggtttgcacattgaatcaattcttagctatatagtagcatataaagattgatcttttgttgaaactgtaaagctactgtccacattttgtgtattgagatctatttcttgtcttcttctttctctaggaatcagtatcatctagatcacccccatttttccttgggtctccccctagccgagcagcaaacccgttagctcaagatgcacgctttggagatgagaaactcaacactgtctcaccctcactctcccctcttctcccatctgcatctcgtgttaaaagtggttgtggtagaatgaagtttggggtgaaaccagcaactgttagagtagaagggtttgattgcttgaacagggaccgcccaaactcaagtatccctgccatggcctagaaagaagaagaaggaacaaagaggattcacaaagtgtacataaaatccagactcaaagactccattttttgaagaagtatatatagttttgcagaagaagaggaaaaggaagattaacgatcgctcaagcttttaccgcagttttctgtgattatgatgaggttcaatgttgtgtatatatatgtatctaccgtaattaagaggtaaggtcgagactttatgtgttaacttcttatttctgaagtctcgttgtaacatattaaaccaatttgggagtgttgttctcttttctgtgtataataaccattcttcttttttggagattctcaagtctttgtaaattgtaatcttgataaattcaaaatgctttgtattattcgaacaagcttccgtctttagagattctaattgtcttgtctctctggaatggacaagagaaacgaaacggaaaataatgcgaatgaaacggagccatcagcgttgactacgtaacttgacacttacgaattacgtacggtctattcaacgaacgaagattccttcaatattgtcgtgaacaagaacactaatctcatggacgcattaaatgaatggaaatagtatttgactagttaatgtcgtttagaacttagtaaattttgaaccaaacccatggatatgaattgcagtagaatcataataccaatcggaaatactagttaattattttttacaactcattaaattttgaaccaaagacatgaatatgaattgatgtatgaaacgctacatttttgtctttttgctacgtggtttgttgttaaatgtacatgtttttttaatagaaaacaaggatttaactcacggtttaccgcgggcaatcggtttatttggtttttatactaaatatttgagtaaatttgatatcctaaacttataaatataaattttttaatcaaacataactaaaaaataatttggattttttttgttgttatttagtgataagaagaatgtgttaaaatgtgattaaattttttttgcttgttatttatttatttttgttgaacggtttagattgaagggaattaattttattgaacggtttagatttaatcgaatcatataaagtttagaagattgttaagaccaaattacccttaatgattttgaataacaaagaacaaaatccaaatttgaaataaaaattaagatcaaattagacaaaattcaatttgtacttcccttataataataagaggatacataacagaatccactaaactcaaatcaaatgtgctacaaaatgggtctcacaatattgtaatgtaatctggtacaaagttaaatttaagtggattacgtaagaaagaatatcaaagctgagttttggttgtctggattaaactataaggtggggaaaataagaattaatctaaaggtgattaaagataaaatttattaagtaaaagatgatttaagattacgttttttacgaaagcgtcggctaacagagagagtcacaaagatccgcccacagggagagaagaagaaaagatcaaaaaccggaaaccataaaaccagaaaccagtcaatagttttggacatagttgaaagcagtattgttaaaacagattcttttccagaaaaccaggagctaagtgtgggccccagttcttccaaatgctcctcaaatgactcaaatcccatctggatgacttacgtggcgattcgaccaaatttcttactcgcgagcgtggaggccacgtgtcttatcacagtctcttcaaacacatttaagacaatttaaccaaaatcctactccatagatactctgaattggtcagatactttaatcaacaaccatattaaatcgttttagaacgaattagattgtataatccagaatttatagactattcactagtaattaaaaaatggtaacttgatatgtcacgtgtatgacacgcgcattggatagagtggggacaaaaacataacttggggaagaaacacaagaagcaaaaccttgaatcagggtgaagaaaaacagcggcggttctgggaaaataaaggaaggattttgtaattaaaagacaaaacaacccttgtctttagagaaaaacagctcttcttatcttgttttctttgtcttctgccttcttcccttggttttataatctctctccgcttcccccaaaaatccaggggcttcttacacgcacacaatcctttaaagctatcgtctttcttatataatcagtgaatcttcattaacacctcccacaaaatctcagaaataactttcacaacagagtcaaagagttccaaatcgtttgtttgtattttgtacgatcaaagttgttggtacttgtaagataatcgaaaccaaagatg

SEQ ID NO: 36789 - DNA, 3000 bp, Unknown
  misc_feature (1)..( 3000): 2750-1469P.txt file - cDNA_ID_3100288; gDNA_ID_2936585; Annot_ID_143835
tcatgttttcgtttcgttttgtggacttaatcttctctgtgttcgttgttatctggagatctggcaaaatctcgaatgattttgatagattctaggtttctaggtgtatctatcggtatagtgttcgttttgtcttgatttgttggtctcgacgatttatctgttgtttcttttgttttgttgggaataatgttgatatagccaagctactgtgatgttgatgaagtttgaaatgaatttttgaaaacaggatctaaaagagtgtgtgataacataagatgtcgtcttctcgggaagagaatgtgtacttagccaagttagctgagcaagctgaacgttatgaggaaatggttgagttcatggagaaagttgcaaagactgttgacaccgatgagcttactgtcgaagagagaaacctcttgtctgttgcttacaagaacgtcattggtgctaggagagcttcctggaggatcatatcttccattgaacagaaggaagaaagcagaggaaacgatgatcatgtttccattatcaaggactacagaggaaagatcgaaactgaactcagcaaaatctgtgatggaatactcaatcttctggattctcaccttgttcccactgcatctttggccgagtccaaagtcttttacctcaaaatgaaaggagattaccacaggtaccttgctgagtttaagactggagctgagaggaaagaagctgctgagagcactctggttgcttacaagtcagctcaggtaaactctttaagtttcaacatctatctatcttattttgctgcttgagaccagtaaaggagctgtcatgatgaatgcttatgtgtgtttttcttctaatgtaggatattgcacttgctgatttagctcctactcatccgattagactgggacttgctcttaacttctctgtcttctactacgagattctcaactcacctgatcgtgcctgcagtctcgcaaaacaggtttgtattttgtcatacgggatgttatgatgcttccagactttgtaacacttattccagcaccaaattgcttaatgatattctctcaattgttttgacaggcttttgatgaggccatttctgagctggatacattaggagaagaatcatacaaagacagtacgttgataatgcaacttctccgtgacaatctgaccctttggaactctgacatcaatgtacacctttgtcttcctccttttgcttttccctataaactcttatatatgcagtctaagcttcttttactcagaaatttctctcaaacgctgattgtgttgctgatttttaggatgaggcgggcggtgatgagatcaaggaggcgtcaaaacatgagccggaagaggggaaaccagctgagacagggcagtgaccagagagagagggagagacatttctaagtatgtatggtatggattttccaaaaacatatgatatgattaggggatttgtagaagcagagagaaagatctttatttgattttctccaaaaatctctgttcccttttttttttattgggttattaaagctgtttgagtctttggttcctgcttcgttgcttgttagtatttaggaagtgaagaaacaaaactttgaattattgctttccattcaactcgtcataaattatcataatcagtgtattatttacttagttcttattagggtattctgatttttgcttaacgcaacagaatttgtgttaacccatttttaaagaatcttcaatcttgtatcattggtcgggtcagtcggatatatggtccgcttttggtttaagaccggaacaacgaaagccggggatattgagcctttctgatgatgcgcctccgggcggtaatgctattgggacatggattacattctgatcaatagggactaatagtatggatttactttgtacttcagactagggtttttttttttttttttttttttttttttttaaatattattaatcctcatcccaaatgaccttgggccgcaacaaaaacaacatcaaatccagttacaaaattagcaaatcggaaaacatgtcggcaaagaaggaagatcgccgcttgttgatggaagctagcagagagaccggagcattagatccggcgggctcaagccctacagtttcgaggccgcaaccgatgctcgagaaactccgacgaaagagaccggttttcgtcctcgaatcaaccccaccggcgcaccaacccaccacaagactcccagaaagctagtctccccaacaagcacatcgacggcaccggattctgaagaagcaatccgatacactggacggtaacccttccttcccaaaccggtacagatccgaaatcccagagctattgcgtttcaaccggctcgatggatgcaaaattgtgacaaatctaaaggaaggtggctcaaccgaagccttcagatccgtaactcacaaccgccctctaagatcctgaggatctgcagttaaccaccaagcaaacaacactcccaccagatgccctccaacttccgccgtgggcgcagctcaagaccgacggatgagccggaggacccgaagcactcacgacgtccataaacgtgagacaaacgctgcaggttcctcttccgccagaacttgagccacaaccacatcggagggaaatcgccacaccaccgttgacggagagaacgcaaagactcactcctggaccgacgttgaacagctacgtccggagagtgaagagcaactgaacctaaagatctagatctgagaagaagaaatcgccttcaagtgagagagaaaagcgtggaaaccaaagcaacgattgtgccttccacttttcttcaatggttaaatgtttggttgtctccagactaggttttggtctcttccgttttagtagttgttctcgtgtcgcttagagtctctgtaggtggtcaaagagatgataatattctgatttgtagagtattatctatctcattgtggtttaaaaatgcaatg

SEQ ID NO: 36790 - DNA, 3003 bp, Unknown
  misc_feature (1)..( 3003): 2750-1469P.txt file - cDNA_ID_3100304; gDNA_ID_2936585; Annot_ID_143830
agccaaaaaccgcagcttcatcccaaaagatcaaacctgggaagcaaccagatcgaataactacttaaatcaagaaagggctgttaaaagatcacttaaagactgacctctacgagcagcaagcaatgcagcttcattgacaatattggcgagatcagcacctacaaatccgggagttaaagaagcaaccagatcacatatgagaaatgcatcttcttctaaaggaacgtctctcagatgtatggccaagattttccgacggccttcttggtctggttctgcaaccaaaacttttctagagaaccttccaggccgacaaagagccgagtctaacgcttctggtcggttagttgctgcaattacaatgactttcgtgtctgactcgaatccatccatctcagtaagcaactacaaaggaagtatatcagcaatggagtctacatggttaaaagggtactaaatgttgattctttacctggtttaacgtctggtcacgttcatcgttgaaactcctaccgcgttttcctccaaccgcatcaagctcatcaatgaatataatggaaggtgagtttttccttgctgcattgaaaagatctctgattcgcgctgcgcctcttccaacaaacaattcaacaaactcactagcggagacagagaaaaatggaactcccgcttctccagctacagcccgagccaacaaggttttaccggtccctggtggaccgaccaaaagcacacctctcggtaatcttgctcctagttttttgtagtttatacttccttgaagacatgagactatctacaaagaaaaacagaacacatggaggttggacttcaaacttaattctataaacgttgcatttacgtatctttttacctccacgagctcgtctttagcagaatcaacaccctcaacatcatcgaagccaacagtgggatttttagaccgtcgtttcttcgcagggctgttagatgctgagagttgccgataaagaagccacataagaggtgtcaaaggaatccacagagagatgattgttatcaaagtagttctcattgacatcaatgcggattgaggagctgaactataagtaatgcctttctctctcattaaactaagaagaaacttctcatcatgatcgacttttcttgtcacatacttccacacaggaggcaaagctcgaacctttcgcggagtatcgtctttcgtaacagcttctgtcactgtgccgccatcaatttggattgccggatcttctaaagtttcagacttgtgaacatcatcaacaacctcaacattctcatcagtgttgtaatagattcgacgtgagccttcttcgagcaaaacctttgaaacagaaccacctcgaagattcgtaacgaaatctgagtaaggaacaatggatggggacggaacagcagttaacctcaagaacaaataacacagtccaaagattaaagccacaccggtggacaagatcactcttttgagattctttttcaaaaaatatcgaaaatcttccattgatgctctgaaatcaaatctgccaagtctcattctcactaatcgtaatctaggtcgaagcctaagagaaaaccttcttctcttccctttgtttctaccattttcaccaatacgagtctccttatctccgtaatcaccagtcacaagtcgcttaatctcgctattacaagaaaatctattacgagaatcgccatgaactctaataacccctaatctggtttcaccaatttccataaacccaccaagtctcctgcaactaaacgattgagtcctgattctagagacacaaacattaagctcactactcctcgaagacacctttctattaaatttctccggagaataacctccattgaatctaaatcgattgctacaaagaacattgaaagtagccatggattctctatcctggaatccgaatcatgcgttgatcattcttgtgcaaaaatcctaagaaaaccgaccaagcgcaagagtagacgaacgtgtcatacaagtgaagaagattggaattagaaaggctttcgtcttcaagctgatgactctgttaaattgaaaggataagaagagttcgcaaaagctcttttttggttgacagataaaaaacaaaacacagaacaggaaaaactgtatgaataagcattgggcattataaatcgagtcatggcctcatgggccttttagctattgggctatctttcattttgggcttattttaaaaaataggttactgatttttttgaattggtataattaatttgacgcctatatatatatatatacccaattaaattgttttgttcctaaaactttatgaatcataaattcataatcgtcgtgataaagcctctaattacccaaaatcgtgctcaatttagaaaatagaatcttttagttgtcaccaaacttagcaagttggcataaccaccatttaatcataataatactctctcgacggcgtcgtttcgtgctggcttcacttgaattattatttttctggctggactcatattttctccggcaaggaaaaaagaaaaacatcactttcttcaagcggatgaaaaattcaaagattgagtcaccaccaccatagtaatatacgcgtatgagttcccagatgtgatctccatccaacgttgtatttctttcgttttggttatcttcttcggttccatcgaattccaacaattcccatcgaggaatttggttacgaatcttttgatctgactaaacctaggtgagttttaatttctcctggattttttacgatcacgtttctgctgattatgattactggttacagtttttggacgatcgacgttactagatttaggattttactttgagaacctgtttatactttgatggtataaatttcactattgggatatattggtctatgattgtgtcattagggagcttgatcacaaggagactgaaaccaatgctaggaggagtctcttcaggttagtagaatg

SEQ ID NO: 36791 - DNA, 3000 bp, Unknown
  misc_feature (1)..( 3000): 2750-1469P.txt file - cDNA_ID_3100362; gDNA_ID_2936585; Annot_ID_195072
atttctaacttctttctttccttctctaaatcacatcgctgatatgaacaactgaattctcgcctgtcctcgttccttctcctctgctccatcaagatctccaatgttgtcgtgatactcctgtttaagggtttatattattagcaaatgcaagggaagcaaccacaaaagataaaattgggtaacagagagttttcattacaaacttatgtttcacagtccgtatcactaagtctgatggtttcagtgattcaaattgttcaaatgttgtttttatccatatcaagtcgagtcactggttaattggtgtgtatactactttttagacgagggaagagatagaaaacctgaagaatctgcttgacatcggttttactaagcttctgttgcttcagtagcagctccacccgcgctctcattccagaatgcctacatcaagtattgattacaaattagtatgtccgaaaagcgaaagctcaggtaagtatctttttggtgggtgctttaagggtgggacttactcagaacaccaaatatgccccaggataacagcaacaagctgcaatttcagagaaaatgttactcaagattaacaacaactagaaaaagaagataaaatcaagtgtagaggcctgaataagtgtgtaatgtagtatatatacacatattaggcacatttgccatttcccaaacggacatgaaactggataaattaaacttaatcgaacctgaagactgtagagacctgattctagcttccgattatatttctcatcttcatccaactgaaaagtaaaacagtgaaatcagttcataaacagattcaagctcagaatgaaaacatcaaaatatgaaaatgataaaagtgaaattacctcaaggtcatcaagctcaagctggtctaacctttccgcctctgatctaaccctatcagagtatctgccaagtgcaaaacaataatgagagaggaaacacaactttgaggtaactgcattttaccatcgcgttcaccatatagaagccttagctttttaatcaaaatgcttaaaatggtagactactgaagagaaagagaacatttctattacctcaaatataattccatgagccggtcaatcttctcaaattcattctccacgaatttactcaacaatcgatctctcctagaaccccttaatatcccagctgaaagatacagccaacaaacaagaaaaccaagaaattaacatcaagaacatgcaaagaaaacacgtcacttttactgaaacatatgacttgccttcttaccaaataatgacgcaatcagggaaataacccgctcctctagctcctccttataccgctcccttttgattctcttgtttagcggaatctaaacattcaaagaactaaacaaaatcaatagacaagaatgcctcagaatcgcctctttcacatgactttgatctactacgcaagcatttactaacaaaagatacagacttcaatacccaataagtcactagacagttcataaagatggtaaaaagaaacgggattgaaaaacttgccttacccatgaaagcagcaaatgctgttttcagtcccataacatccacaaacctctcacatgctggtggataattggtcatggcgaagtctagagctcgaatagcagacccgtaagcatatttcttctgtttcatgataataatcatcagctctacaccttccgcattcacaaacctctccttgttctccaatggcatcaagaggcaacacaaacaatcaaacagattctctaacatctcttcctcatcaggagttttaggatcctttgacttatacatcgccacaccttcaagcacagcgtctacaccattcatctgacctagccgtttctgattcgccgtactgttttgcagcagaattgcaagaatctcagacgcgtactgcttgattccttcgaattccctcaccttaatcttcgtcagaagccaccgcaatagcttcgtcctttcacacaccaattgagcaacagccggctttacttccaccaaattctcaatcaccgtcaaagttgcgtatatagccgtagcttcgtcagggtcagcctcagacaaacgattcatattctgaaccaagagctcgagcacattgttttcaaccaaggcgtcgactaacacacgcgcaggctcatcgttatcctctaaggcatcttcgtcagtcagatcctgaagaagctgaacaacatcgttggcgatatcggagttttcatgagagaggagattgacaatcgaaggaaccgtattggaagcaacaaggtccgggtaaagttccggagctccagcgagcaccttgagcttctgaagatcgtcgtgtaggtcaacctctgagtcagcgaacttttctggattctccacatacttgagacgagcagctatgttgtctctaagacgccgctcgaaggagaggacaagcttttttagggttttaagatcaagcgcttctactccattatgcgaagacttctcaagtgcttcaaggagagaaagatctacaccatctgagcctcgatacgccgtcggctgcgagccatgtccggcgtcgattgctttccgttttctggtctgatttgagacttccatggctatactctctctttccgtctgaaactaagatttttggtttaagggatgaaataatggtgacgactgacgagtctgaattttaatttgggctttttattaaatgaagagtcaatgtcatttgaggcccaatggtgtaacggtgtcgtttaagatttaagcaattagaatttaaatttctaataaactatattttttctggggtcaaaaactcaaaagtcaaaagatcaatgtctttatggaactttaaaaaagttatgatgttatccaaggaagatggaaaaccctacacactaagcaaaaaataagatctttctctctctgacgacgcaatccctaatttctggttctccgttcgtcggcggagaagatg

SEQ ID NO: 36792 - DNA, 3000 bp, Unknown; identical to SEQ ID NO: 36791
  misc_feature (1)..( 3000): 2750-1469P.txt file - cDNA_ID_3100362; gDNA_ID_2936585; Annot_ID_143854

SEQ ID NO: 36793 - DNA, 3003 bp, Unknown; identical to SEQ ID NO: 36785
  misc_feature (1)..( 3003): 2750-1469P.txt file - cDNA_ID_3100400; gDNA_ID_2936585; Annot_ID_195073

SEQ ID NO: 36794 - DNA, 3003 bp, Unknown; identical to SEQ ID NO: 36786
  misc_feature (1)..( 3003): 2750-1469P.txt file - cDNA_ID_3100405; gDNA_ID_2936585; Annot_ID_195071

SEQ ID NO: 36795 - DNA, 3003 bp, Unknown
  misc_feature (1)..( 3003): 2750-1469P.txt file - cDNA_ID_3100410; gDNA_ID_2936585; Annot_ID_195070
gctttgtttacctaatcctaggtcctagcgaaattgactgattgtttccgaggatgaaacgatgtgtggttcacggattaagtattaagtaagacatttgtgggtatatgtgtgtgtagtgtgactgtgtaagtgaggtctttttttgtttttttacagcatgtaaaatgtgtggttcagattgaagattcatagagaagctagaatttgtggaaactagtaggaacaaattaactcctctaaaagaattagaaaatctacgatctaaaacctcacctccttcaaaggtttgatcaaaactatattaatcagaaataccaagaaatttttaaaacaacacattcaacttaagctttcacaaatacaatgattcattttacttaaatacaccgtcgacgtattggactgaactcaaatcaaagtctttatttaatagataaacatacacttacataatgtaagttacattacacgacacagaatactcattttataaatatcataagagtacacatgatcattatcgatacactagcatgagcttaattattcaatatccaacgggatacgttcactgagtcgacggtgggaggaatggtaacggaggaaacctaaatccagggaaactgggaatagttaccggaggtaatggcgggaacggtaatggaagaccgggaatagttactggaggtaatggcgggaacggtaatggaagaccgggaatacctcctcctgatggagggaatggaaacggaagtctaaaaccaggcgaaccgggaataccgggaatacttcctcctccaggtgatgacgggaatggaaacggaagcctaaagccaggggaaccaggaataccgggaagaccaggaataccaggaataccgggaataccgggattacctccaggtgatgacgggaatggaaacggaagcctaaagccaggagaaccgggaataccgggattacctccaggtgatgacgggaatggaaacggaagtctaaagccaggagaaccgggaataggtgatgttggaggtgatgactgcaaactggagaacggatcagatacaaaggctaggttgttggcttcgttggtggtggtggttacgactctatcaaccggcttcgcatcggcatcgttgagagggcgagctacagttgtttctggtgtgaggtggaagatcaagaatagtattagggctaaagtggtcgctaaagatgccattgtgtggaaatgtttttgtctgttagtagcaggtgtttagtgcttgtttatataggcgcctatatttaggttggctccatctttatttttgttataatttaattataaggaaattttcaaaaaatatatacacattataagaagttttaatctctctatggacatgacaaccaattttgggttaatgttgactattttttacaaatttataatacattctataatatatatcaaagaataagctagtttaggaattaaacaagccaaattcgttttgctagcctgtgttcatttctggataaactttgtaaggctcaagaaagaccttgacagcaaggttttgttctgtccttagtcaaactattgggcctaagatatgcctgttttcttcgtttggtttcaatcctaatgttttaaaattttgtcatcttttcatcatcaactccaaggttttgtaatttcttgtggagaggaagcaagaggatgtgcttggttgtggaaatatagggcccttaaaatatattcatcgtattcactcacataacaaaaattccacaagtaagcacatcatcttgcttcctccacaagaaattacaatgagaggagatcaataatgctctcaacgttcaattcgttgttgacttggaataattaattctatttgttaataaaagactgatgatttggtttttagatatttcagagacctcaaatcataattaatctgaagaaacgcgagaacgagctaatatttattctacctaccatgattatccacaaatttgaacacaaccaaaggcaggctacgtactacacaacaactagatcagctagatcatcataatacaccgctagagctttactaggtttgaaaagattaagatcgactgaaattgccactttttcccttgttgcggctgcaagatctgccaactcggctccaagatctgaatcacacaaagagaatgcagcgaagaagatgagaaagaatagcaatcaatgcttttgttcaagtgcttaactattgattttgttcttacctagtgcctccctcatgtatcgagccttttgtcctagctggaatatatatggatatctttttctctacatacagatgccaaaattccatgctatgtacttccttgatccatatcgatggctctgcaatcaaaagaagaaaccacaaatcctaattacaaagacatgattagtgaccgagatttgtagatctggtaccatttttggtaggtgatgatgatgaagagaaaccgcgagattggcgatttccaatcgatctccctccacggtaacactgtacaattcttctatcaacagatcactcgtgaaaaaaacgagaatcagatattcggcgtacgtaccttggcaacgaagggtctcagattctgcatgatccaagaattaattaggtggtttgttagtgggggtgacttggttgttattatttccttaaaaagttttatacaaggacagatgggcctcatattttatttatgggccttttaacttgggctagacatccttgtacttcctttcataacaaattcccaaattatgtctatctttctcataacaaagaccataggggcctaatggtttattagtgggcctaagaatctccggttgatcttaaaaaacccgatataagttcggttttactaaaccggtctccttaaaacacagtaaacaaacaccaaagtctctgaagaaagaaatcaaaacccctttcgaacaaggatttcttggagcgaagcaaaatg

SEQ ID NO: 36796 - DNA, 3000 bp, Unknown
  misc_feature (1)..( 3000): 2750-1469P.txt file - cDNA_ID_3100415; gDNA_ID_2936585; Annot_ID_195069
agctatcgtattctctggcatcaccgaagtaaacggtcaagaaaacatagaggagaaaacattatgagccaataagcaagagataagacccggaattacttgtatggatccttcgcaaaaggtattaggctactgaagctgtttccgcatgtaacatttccctaacaaaacaagcaaaatcatcatctcgcaaacacaacatttgtccagaatccaaaggttctgttttacctttctgaatcgcttgaagtccacaactccttcccctcctgtcgattgaacttttctagtcgatcgcaagtccctaacaataagatcttgagtgtatataatctccgatttcccagtttcagcctcatcgttccgatcccttcggattgtcacactatcacttgagttcttttcatccatgtggcctctactttctgtatccgctaataagttcacgcttttaaactcgttcaaattcgaagtttcttccaatatagtaacagggctatcctctattacaatagcagcaggcttctctggcgtttctgccttttcagtagcatcaatcatatgaacagacgatgttgtttcttcctcttcggcttcagaatccgctaccactgtctcatctgtagagcacgaggatgaaattacaactacaaacaggaaatgtttcaagatcagtgtcatagtcccgagaaaagcaaatatatttggctttggttactcaccggatggtggtatcagtgaagtcgaaggtagatttccggaaaagacggcgcatactaaatccatctcgttcactctagataacaaactgagatgcttgaaacggccaaatttgtctcctgcactttttgggatgacacatatcatgcgattaatctctccaaactgagaatcctgcagagttgattacgattaggactacctacagaaagagcaaatgagcaaaacaatataaaagcacaaacctgactcatggagctaatgtcttctatggtaacggtctctgcaccacatacttcaagtaaagatgggaagctgcaaccaaatctatactgcataaagaaaatggcacggataggtaaatgcatagtttatcaataatttagtaagactaagatctactgagacctataacaaaaatcacttggaaccatcagttgaatctgattcttcttgagacaaataagagattataccgtgtctgttggttccaagacaaaggtaaatccttctagacatttttcacggacgtttaattctagtacatccaccaaagcttcttcaaccatcactgatggtctgtacctaaattaacattgattacttgaatgtcagtaactaatatattttaattcaataaccggaaaacagtaagtaatgctcactggctgtatccaggaatttcgctgcagatacttttctctgcgagaagctagacaaaccattgaagttaaaaaccaattaacagacaagtgatgacaatggaattctcagacataccataacccagtttgtcaaaatgattgtttttttggctaaaattgcattgatcagagcttcattcacttgcatacgtggctcaagaagcacatgagtgcactcctcactcaatgtaggagaaatacgagcacctgaatatctacgtagtttcaggcaatgctggtaatatgaaaactactccatgaggcagggaataatgtttttcactaaccaattgatgaaactgcatcttgtacaggctgatccaccttaaaggtctcagaggaagggcacaagtaaaaaacaagcggaattaaggacaacctacaatgattaaaaaatataagccatactacacgaagttacaaccaaaaaaaacatcacacctggaatacctgtaaattgcagaacctgtaccaaacgcgataacatctccatcttggagaattttctccttattagatagctcatgaactttatcttttgtccccaggtcagttttgacaaaagtcccatactttgaacaatctttgacacggataacaaaggatgatgtatctgaagaagacttgttcctccgagaggttgaaacagttgttgcatcaaaagttaactcagcgtggatcctagatacccccttatccttattgataattatatcacatcctacagagaaagaacaacccatgaaggcacagaacacgagcaagacgatgatgaaagtgtaataacattaccttttcgaccaaccttgtaaataccctttgaaaagatatagtatttatcttcacctgattcaaaccatttaacaactcatcaaggttacaaaactagagattcttaaaaagcaagatcaaactcactcctctagcataaacccaagaagaaatgtggggtttttgtaacacattgatcagaccgaagttgttaataagtagagaacaactaaaaactaaagggtcatcacgaatttcactgattcctagagcataacatagttgagattgagaactgcaattactggaggaaaaaattatcgtaatgatgaaaaaaatgaacagtaaacaataaagctcgttcacttgcaagacaatcgaattctaatggagaaaaacctgaaagaggatcaacgggaaagagaccccaaaccattttgcttcgctccaagaaatccttgttcgaaaggggttttgatttctttcttcagagactttggtgtttgtttactgtgttttaaggagaccggtttagtaaaaccgaacttatatcgggttttttaagatcaaccggagattcttaggcccactaataaaccattaggcccctatggtctttgttatgagaaagatagacataatttgggaatttgttatgaaaggaagtacaaggatgtctagcccaagttaaaaggcccataaataaaatatgaggcccatctgtccttgtataaaactttttaaggaaataataacaaccaagtcacccccactaacaaaccacctaattaattcttggatcatg

SEQ ID NO: 36797 - DNA, 3000 bp, Unknown
  misc_feature (1)..( 3000): 2750-1469P.txt file - cDNA_ID_3100424; gDNA_ID_2936585; Annot_ID_195066
ttttaaaacattaggattgaaaccaaacgaagaaaacaggcatatcttaggcccaatagtttgactaaggacagaacaaaaccttgctgtcaaggtctttcttgagccttacaaagtttatccagaaatgaacacaggctagcaaaacgaatttggcttgtttaattcctaaactagcttattctttgatatatattatagaatgtattataaatttgtaaaaaatagtcaacattaacccaaaattggttgtcatgtccatagagagattaaaacttcttataatgtgtatatattttttgaaaatttccttataattaaattataacaaaaataaagatggagccaacctaaatataggcgcctatataaacaagcactaaacacctgctactaacagacaaaaacatttccacacaatggcatctttagcgaccactttagccctaatactattcttgatcttccacctcacaccagaaacaactgtagctcgccctctcaacgatgccgatgcgaagccggttgatagagtcgtaaccaccaccaccaacgaagccaacaacctagcctttgtatctgatccgttctccagtttgcagtcatcacctccaacatcacctattcccggttctcctggctttagacttccgtttccattcccgtcatcacctggaggtaatcccggtattcccggttctcctggctttaggcttccgtttccattcccgtcatcacctggaggtaatcccggtattcccggtattcctggtattcctggtcttcccggtattcctggttcccctggctttaggcttccgtttccattcccgtcatcacctggaggaggaagtattcccggtattcccggttcgcctggttttagacttccgtttccattccctccatcaggaggaggtattcccggtcttccattaccgttcccgccattacctccagtaactattcccggtcttccattaccgttcccgccattacctccggtaactattcccagtttccctggatttaggtttcctccgttaccattcctcccaccgtcgactcagtgaacgtatcccgttggatattgaataattaagctcatgctagtgtatcgataatgatcatgtgtactcttatgatatttataaaatgagtattctgtgtcgtgtaatgtaacttacattatgtaagtgtatgtttatctattaaataaagactttgatttgagttcagtccaatacgtcgacggtgtatttaagtaaaatgaatcattgtatttgtgaaagcttaagttgaatgtgttgttttaaaaatttcttggtatttctgattaatatagttttgatcaaacctttgaaggaggtgaggttttagatcgtagattttctaattcttttagaggagttaatttgttcctactagtttccacaaattctagcttctctatgaatcttcaatctgaaccacacattttacatgctgtaaaaaaacaaaaaaagacctcacttacacagtcacactacacacacatatacccacaaatgtcttacttaatacttaatccgtgaaccacacatcgtttcatcctcggaaacaatcagtcaatttcgctaggacctaggattaggtaaacaaagctttgattttctggattttatttttgttttacgtaaattgatttttcatcatctaattaatgtttgttagataattcacaaatataatcttgtgaaaaataaattttatataaattaatttatagtagttgtgagagtaaccaaatgaaatgaaatggaaataagtgttaaaataattattaaaaatatatgagacaataagtcaacaaaaagtaagtaaggtaaaaaaaaaaaagtaagtaaggtaagataattaaaaaatatatatatatatattttttttttaacaggtatgaaatcccaaatcagtattttaggaatacaaggatataaaacaatggaatatataaaatgtgaaatgtcaaaaggatatgtatatatgtaaaagtacagccggtttcgaagtcaaaattggtattgaaaaaatgtaagataaaataattagtaaaaattagatatattcttgtttcttattttgtgtgtatatataatcagaattttaggaatataaggatataaaacaataaatatgaaatgtgaatgttaaaaaggaatatgtaaatatgtaatcataaagctggttctgatttttatatataattagtcaaatatatgagctgtatgcatgcctattgtatataaattagtcaaagtttcaagtatagattattttcctttttcaaccaatttttatgtcatatttgaaattgtacatgcatttgtagttttaaaatcagtctacttatatagctatatattcgaattcttcacattcgatgttacacacaaatttgcatcaattaattttgtttgtgtatatagggaaggagcccagtttgcttttaacgggccgtaaagtggtttacaatataaaaacaacacgggccgtaaagcaaacccgaaagagattattacatgaactgggtttatggatctcggttttccatcttaaccgattcaaattgaacagataccggttattaaaataaaccggagactttaggttcaatctcggtttcggctaatctgaagcaattgatctgtggaaaaagcaaagcaaaggtcgaaaacaaattccattcttgaagctgtgaacaagtaagctctttcacttcatcatcttcttcttcttcctcaaagtttaattgggtatccacttaggtgtgttgtaatgtcgctgaagttgggattgttatctccaagtagttagcttctctgggtctgtttcgatgcaatggtgggagattccttcataacttggtgtagaattataggattccctctatagttctgtttgaagttcccatttctggagattgacttgttcacggttctatggggacaatatgagacaatg

SEQ ID NO: 36798 - DNA, 3003 bp, Unknown; identical to SEQ ID NO: 36787
  misc_feature (1)..( 3003): 2750-1469P.txt file - cDNA_ID_3100435; gDNA_ID_2936585; Annot_ID_195062

SEQ ID NO: 36799 - DNA, 3003 bp, Unknown
  misc_feature (1)..( 3003): 2750-1469P.txt file - cDNA_ID_3100440; gDNA_ID_2936585; Annot_ID_195060
tgaatctaggatagcactgtgatgcagcaggtaaatttttgtagagaactcaatattatactacgaatagcttttctaatgagtccatgaaactattctgacccacaacagcgatctcttactgattctttacttttcacacactaccaagtacctttcttacttagattgttggcttttccatcattgtgtctgcattgaaatataaagatataaaaggaaaattatttgattatggtgtattttatgcctctaagcagcacaggatgagagaggcacagctaggcggtcacactctgaggtcccatggaatgactgttgcaaggactcacatgcatgattggatcattctcgtgttacttgttattctcgagtgtgtactccttataatccacccattttatcgctttgttggtaaagatatgatgactgatctaagttacccgttaaagagtaacaccgtaccaatttggtctgtcccggtaagcttccattaagacaacttctaagttctaacattggccttagacgtttttcacaatataaattacatttcttttctttggaatgacaggtatatgcgatgctgttacctttggtaatcttcatctttatctacttccgtcgaagagatgtttatgatcttcatcacgcggtgctaggttagaaacttagaatttctgaaggagagtaccgtttgcttcaaaatgtcttctttcgcatatataattaacagtaaagttggcctttcttgatgtgcaggtctcttatactctgttctggtgacagcagtacttaccgatgcaataaagaatgcagttggtcgaccacgtcctgacttcttctggcgttgttttccagatggcaaagctgtacatgtttcaatgagtttttacttatctcgttttaaatcttgttctgcctcttgaatctcgattttgcttatcagctttatgatagccttggagatgttatatgccatggtgataaaagcgtcataagggaaggtcacaaaagctttccaagtggacacacgtcatgtaagaccaagttactggtttataattcagaactagaaagaagcaaaagagtaaaaactgtggggttgaattgtttttgcagggtctttttcgggtctcggatttctttcgctttacttatcgggaaagattcaagcatttgacggtaaaggccacgttgcaaagctatgcatagtcatactccctttgctatttgcagctcttgtcggcatttcccgtgttgatgactattggcatcattggcaagacgtctttgcaggaggcttgctaggtttgttttcactctctagtcacaaaggtcaaaactttttccctttaaacatcattcaaaacttataccattgtctgaaaccgcaggtcttgcgatctctacaatctgttatcttcaatttttcccgccaccatatcacaccgaaggtgcaaacgaactgtggattcattttatggtttgctgaaaagaagtattatttttattgtgaattgatcgaaaaaggtttgatatatttttaggttggggaccatatgcttacttccaagtgttggaggctgcgagagtgcaaggagcagcgaatggagcagtgcagcagccgccgccccaagttaacaacggtgaagaagaagacggtgggtttatgggtttacatttggtggataatccgactatgaggagagaagaggatgtagaaactggtagaggctgagatgaagaaactctgaagctggtttggttacttgttaggacactttctcttgttcttttgattctttgttggacaactttagtagatttctctaagataactaatagagtcgtttggttttggttttggtttaaatggatgaccggttttatggttccggtattggtggttaaagtttatgtttttcaaaaaagttcactggataaatgtagctttattttcaatattttaaggattgaaatcggatttgaacttaatcgaaactcgtagtcaacttaaacacaagaaaaaatgatatctaaactatctttgtgctttgttacaaaacaaaaactacatcttttacaactataatcaatgtgtatattcgtatccaaatagtatgatatttttgtgtgcgttgtttattcatacacttgtggactttaccctacacagaattttgagatcatttttggtttgaaacttgaaaaaatgtgtagatagtttactagttagtactactgttgttgttgggtcacaatcaaaacacgaagaaatttataatatatatatataaaaaatcaaggatgctttttaaaaatattcttttgtatttgtttctgtatgggtgttgaatacttccaactctctaattaagtattgcatttatgtttcgtgttcttttctaatattgcaagttttgtaacgtttgattttctagctattacatattcaacttggtagataatagacacgacacgagtaagccaactttcttgatcaagccgatttgttttttacaaacggcatgcgttaccaaactttattatgtaccaaaaacgatccgttaagaatataaaaacctaaacataccatccttgtgatgttttgtttattgtaaaaccaaacaaatgtgttttcatgtgaattatgtacatttaaaattataacaaaatttatgatcttttgtatgtataacatgaaatatttgaacgccaatgcaaacggaaagaaattatattatttgcgttgagatttatgtctttgcgattacgtttaatagatctttaagactaactaacccaaattaatataagtaataaggactcgtcatatatatttatcatataagaataataataaattataagagctggctagggggtgacatgtttaacactccatcttttgtcaactcactatatactcctctctcctcctaacacagaggcacaagggcaagaagaaaagagagagatagagatatataaatgaagatg

SEQ ID NO: 36800 - DNA, 3003 bp, Unknown; identical to SEQ ID NO: 36799
  misc_feature (1)..( 3003): 2750-1469P.txt file - cDNA_ID_3100440; gDNA_ID_2936585; Annot_ID_143845

SEQ ID NO: 36801 - DNA, 3003 bp, Unknown
  misc_feature (1)..( 3003): 2750-1469P.txt file - cDNA_ID_3100446; gDNA_ID_2936585; Annot_ID_195059
gatggattggatgtttggctctcttagggatcctctcttagaagaagatgacaacaaagacagcttcaagaaagcagagtgagaatgcccacttgggttttgttcttctgttttgtcttgtgttgttgttgttcaaagtttcagcctttcttgttctttttcttcttcttcttattcatgtgtctctctcaacctttccaattatattgttacaaacatttgctgtctagtttaaaacatgtaaatgtttgatgatctttgcaagactccatttttgtttaaggtaaaccttgaatctcatagattgtcgattgttggtatttccattttcaggtacggttctgtagactgtagtcttgctgaccagtccggcttaaccacccaaatttcaaagatctacaacaatcaaaatgctggctggcccaatatatagatgggccagttaatccgtctagctttactctttagacctaccttagacagttagacacctgctaattaatgagtttcctttttcttgttcagcaagttacctgtgttacttgagagttgagttaatggtagtaaacgcaatttaacccttataagtttaatcgtattcaacgaatgacccagagactttaaataaatccatcgtaaccctccacttcaaaattctttttaaaaagtagcaaatcatttaaatattgtaagtttgcttcattcgaaattgtagctacagatctcaaagctcctcctgttggccatatctctctctaacaaacgcatagtaacacttgaccacagtttgacttctcggcggtttcatggcggcgactatggcagattataatgatcagatcgtcaatgagacctctttttacaaccgaatggttctgagtcaccttttgccggtgaatctatgggaacctttaccacatttcctccagacatggctccggaactacctcgccggaaacatactctacttcatctccggcttcctctggtgcttctacatctattaccttaaactcaacgtttacgtccccaaaggttacttttttcaatttcgatgttctgttttgaaacctttcttttgttgattccttcgattgtatcgcctgatagattgtgttatacgttaaccttttttcttactgttactttcagttcttgtcttctacttctcatttaattagttttaaagtttaatatttttggctaatccacattttttaagttgaatcttccatgaaatttgagctcaaaatataccatgaaattgaaatttgtggttcttagttctatttcttgcttggtttcttctatttttgtggttagaatccattcctacgagaaaggcaatgcttttgcaaatatacgtggcaatgaaggctatgccttggtacactcttcttccagctgtctctgagtatatgatcgagcatggttggaccaaatgttactctacacttgaccatttcaactggttcctctgtttcctctacatagctctctatcttgttttagttgagtttatgatttattgggttcacaaagagcttcatgacattaaatttctctataagcatctccatgctacccatcatatgtacaacaagcaaaacacactctctccatttgccggtatgtcaaagctatatgttctcaatctaaattcaagagcttgtatcaatggtgacttctttacttgatgtttttcgggttttcagggctcgcattccatccgctggacgggatacttcaggctataccgcacgtgatagcgctgtttatagtgccgattcatctcataacacatctgagtcttttgtttttggaagggatatggacagcaagcatccatgattgcatacatggtaacatctggcctataatgggtgcaggataccataccatacaccatacaacatacaagcataactatggtcattataccatatggatggactggatgtttggctctcttatggttcctttagcagaaaaagacagtttcaaggagaaagaaaagtgagaatgttcaatgctcacatgtattcttcatatgttgctcttctcgtgactcttattaaaacctttctaatcactttgttggaattaaaaacatgactgcataatttgatgcaaagtttcagacttttattgctaaaaatctctgatgattattaacctcaattatataattgctggatgaagagtttcaaatttggactaaatctgaagggtttaataggtcagttgcggtgtcagttttaccacagaccacagtaatctttgaatcttccaaacttgtaaaataaataattatactcatatggtaggtgaggttgctcaagatatgatgacatgtaagaggcaaagtttcctcttttgtcggttaaggttaagaatttgaatagcaagaacaaatcaaagtttgaaaacataagaatttacgaaaattaaagacctaaaatttattattatctgaaacgtgtagacgcatactctctctttcatccgccatggaagtataagacaccttttttcgcaaccccacacttttttctttttggctaagcatcaaacaattcaaaaggccgagtcgattctaattcagatataaaagaattctcctttttgcttcttttttttcacacgaagcaaatcgactagagtctggtaaattttcttctgtaattcatttataaaaaaatcttcttttgcatatccatgggggaataattataaaggtcgttactttccacatgggttttttttttggtagatatagcgaaacatttatattgcccactcccacttgtttgtgttgattagattgtccctaggagtcactgttatcgctctttcaattactgtaatgttgaatttgggtttcatctactaactaagatgaagtttcttgtctctttctgtctccctctttcttaattcctctctacttttcggttaattgctcctcttcagctaactttggggctttaaagtgataggatg

SEQ ID NO: 36802 - DNA, 3000 bp, Unknown
  misc_feature (1)..( 3000): 2750-1469P.txt file - cDNA_ID_3100455; gDNA_ID_2936585; Annot_ID_195056
ctgcacccattactggccagatgttgccatggatgcagtcatggatgttcgccgtccatatcgcttccatgaacaaaagacctatatgagttgtgaaatgaattggcactataaacagcgctatcacatgcggtacagcctgaagtatcccgtctactgggtgaaatgcaagccctgtaaacaaaaacgtaaggaagttacaagtaatattagatgtcacatccttggattaaccaagatacactccagggaagtagataaaagaacttctcgtcatttccaatcagtccgagaccagaagagaaacacaaagatctaaactctggttaagtcagaagtctctctgacatatgtgaagtaatgcagctgacatttatataattctagcctttctggttactttatggataaggaatgcaaaatgtgatttggagtacaagcagctgctgacaaagtcttttctggtaagaaactaaatgctaccaatcttttacaagaactaaagaagaacaaactgaaaacacttaccggcaaatggagagagtgtattctgcttgttgtagatatgatgggtggcatggagatacttatagagaggcttaatgtcatgaagctctctgtgcatccaataaataccaaactcaacgaaaacaagatagatggcgatgtaaacaaaatacagaatccagccgaattcgcctatgctagcaaaacatttggtccaaccacgttcaatcatactctcggagacagttggaagaagagtgtaccatggcatagccttcattgccacaaacatttgcaaacgcatagcctttattgtaggaattgcatctgaagcaaaacagaccaaaaaagatttcaaactaagacagagtctcagagaagcagaaaaagaatgtgtctgaaagtagacaatcacttcaacaaacaatttaagtggacttaaatggcaagtagaaaattcaacttcaaagatgtacgacttctcattggttgcacaaaaacttatataagccactaactgttcaatcccttagatggagaatatgcacaaataatcaataaatgcaaacatgaactatccacatcaaatccaaattactgtacagtacacgaagaaaccctcttcctttaaattgaaaaatcgataacatagaaagcgattaagcaatagtgaatacaaaagtgaaagtcgagacctttgggaaggtaaacgttgattttaaggtaatagatgtagaagcaccagaggaaaccggagatgaagtatagtagggttccggcgaggtaatttcggagccatgtctggagaaaatgaggtaagggttcccatagattcgccggcaaaagatgactcagaacgattcggttgtaaaaagaggtttcgtcaacaaactgcatcagataagcattatccgccgccatgtgaatcggagatccaccgagatcggtgccggaaaacgaaagaagattcgccggattgatcttactttacctttattgaacaagtcaacagtagtaatgcatgtggcacacagagagtttgatgattgattgatcgatcttcttctctcactctctcatgttcatggtaaatttttaattcttggcccattgttttggttttatcgaaatagctcccaatattttgttatatttacaaattgaaccttttacttgtatatcaaaataaatccacgtcaccaagtttatgaatgaaaatgaaaggtgggaaatattcaacataatagtaccaaaacacattttgataacagactctttggaatggcctgttactagttttttttttttaatattcgaattaatgaaaattttggttgaactgaaataagttaaacaatagaatacatgaattgtctataacaacaaatctcaaaattttgagatttagtggagagtatgacaaagagaatatcatgtgcctatgagtaagtgtgattcatatgggtaagggtgtgtcataatttttttatagggttgaaatttgtaaaaatctaaaagttaagggggagttgcaaaaagaaagagagaaagaagtaggagttgatttagattccgacgggagacaaaagatgctggttgtttggtccttgtacagttgtacttggtagtatataagatgacgtgcccgcacgtggaatgggacgacagtcacgcgccgtcagaacaaaacaaacggcgttggaccctttttattttaatgggctaataacatttggcccaaaatgtaaaacccaaaccaaatattttaaaatagccaattaagattataaaacttattaagaaatattcaatatttcaattattttatccgtaattcaaacagatttttttaaataaatattaaacaatttgaaaattccaattctgttatttagttactgtttgatgtcggatgtatgacgtttacaacactacaaaaatgaagatttattggtctgaatagatttttcatgtttttaaattatagtttatcatttcttacattagatatatttattgataaaagagtgaatttggaattatcgtaataaaatgagaacgtttagaacattttatattggtacattttgtcggtttagtttacactagtacaaaataatttaaagacgtgagagtgagtcatcattagagtccacgtggacagctagcaaacggcccacaaccaacggacggacgttaataccgtcggcaaaacacgtgatttctttgaacatctgtcacttttgcactttcttaagttaaacatcgcaaccctacatttatattttattccaacttttgacccccatacttttgattttacaatcataccttcctctgtttataaaacataaaaaaatccacgattcgggggtaaagagaaaagctttgagtcttccattgacatgggcgcttagcttatgcttgagatattttgtttttacctccgagaaacggatttagattcgtaatcgtgagttttttggtgtaatg

SEQ ID NO: 36803 - DNA, 3000 bp, Unknown; identical to SEQ ID NO: 36802
  misc_feature (1)..( 3000): 2750-1469P.txt file - cDNA_ID_3100455; gDNA_ID_2936585; Annot_ID_143841

SEQ ID NO: 36804 - DNA, 3003 bp, Unknown
  misc_feature (1)..( 3003): 2750-1469P.txt file - cDNA_ID_3100460; gDNA_ID_2936585; Annot_ID_195055
ggtattatgattctactgcaattcatatccatgggtttggttcaaaatttactaagttctaaacgacattaactagtcaaatactatttccattcatttaatgcgtccatgagattagtgttcttgttcacgacaatattgaaggaatcttcgttcgttgaatagaccgtacgtaattcgtaagtgtcaagttacgtagtcaacgctgatggctccgtttcattcgcattattttccgtttcgtttctcttgtccattccagagagacaagacaattagaatctctaaagacggaagcttgttcgaataatacaaagcattttgaatttatcaagattacaatttacaaagacttgagaatctccaaaaaagaagaatggttattatacacagaaaagagaacaacactcccaaattggtttaatatgttacaacgagacttcagaaataagaagttaacacataaagtctcgaccttacctcttaattacggtagatacatatatatacacaacattgaacctcatcataatcacagaaaactgcggtaaaagcttgagcgatcgttaatcttccttttcctcttcttctgcaaaactatatatacttcttcaaaaaatggagtctttgagtctggattttatgtacactttgtgaatcctctttgttccttcttcttctttctaggccatggcagggatacttgagtttgggcggtccctgttcaagcaatcaaacccttctactctaacagttgctggtttcaccccaaacttcattctaccacaaccacttttaacacgagatgcagatgggagaagaggggagagtgagggtgagacagtgttgagtttctcatctccaaagcgtgcatcttgagctaacgggtttgctgctcggctagggggagacccaaggaaaaatgggggtgatctagatgatactgattcctagagaaagaagaagacaagaaatagatctcaatacacaaaatgtggacagtagctttacagtttcaacaaaagatcaatctttatatgctactatatagctaagaattgattcaatgtgcaaaccaacttatagaaagcagaacaagaatcatatatggagaattgctttggaagtcacaaagataggtaaaccacttgaagcaactatgtaacttagctttgatttctatacagggaactccaatttcaacgaatatgttcaaacaaaggaagacaagtgaaatgcaatagaaattgcttcaatgcaacatttttgaaacagagtgaaaagaaaagacaaacctttctacgaaatatgtccaaaagatcttccccggctttagaatcacatacatcatcagctcctgaaagactgtcaatccccaaaacaaagcaaatcaagactttgttaaacaaaaacaacaatatgatgttttgtggacaaagataataaaggaagaaactttatacctaaaatgtaatctaaagggacgaataacgttgtttgcacgacggggcttagggcaaacaacagagtccactggatgagaatagataggaacaaatcctctcgattcttcacgagacaagaatgcattctgctgaaggctacaatgattcatcttttatccacagaagaacacctaatctgtgcatcaagtgaaaaaattaggttttaaaagaaaaaagaagtgaaagatgtgtaatttaagaccccaatggataagaaatcggatttacttggtaaaatctgaacaaatttgccctaaattcgtccagagtcccgttgaatttgagagaattgacaaaaactcgtttggtgatcatatcgaaattcaaagagagagatggatataaaaagggtgtttagaagcagaaatgccaactaatacattgactaaaagaaaccaatttcacagaaatagatatcaaagaatacacaaagtattgacgatactaaaaacagaaatttttcacaagactaaagaagatgaaacaagataaaaaaaattataaaccttagatctgtaacaaactgtttacaaggtagataaattccgccattaacggaccttaaagaaagagggagagagaaacaaacctgattgttcaagacgaaacagcggcgataagggtgagggaaagagaagaagaaacagagcggctatgtaatgaatgcactttataaaaatgtgaagtaaggtcggtttttgtgtactaaaaacgatatcgttttatgagatgataattatcgcctatattctatggagttatttaatgggctagtcccaggaagagtatacattgggcccattggttttaacggcccattttaagtatgattagatctagaccgtccaaaatagggatctcaaaaaaccctaaatatttaaagctttccttcaccagcattgtattgcctccctggaacaccgaagctctggattaacctattttcaccttctaaggttcttcgtcgttcttattggtacgcttcaaaagccttcctttctctgtagctttagttaaaatccaagaaatgggtgtttttgttggaggctaatcgacgtttttgtaattgctctctctctcagtttttttggagaaatatattagctttagtgagaggtgtagttcagggattacaattagtttgatctgcttaattttgtgatcattggactaataaaaaacttcctgtagggtttataagctctcttgctttgatgcacttattaatgtggttaatgtctcttatttggaaaattagatggttgagttgcatatagctcgcataatttagctgaggtaactgagtatttcggttttgtgaacttaattatcagtaaattgggaatttcagtgaatgccagacctaatttctgggaaattgatcaaatttgtggatttagttacaagttgaaataccgtttgctatgtcacaatctaaaaaatgataggctaatttttgtgtcttttatcttgttactgttgtagatctgtgaagatg

SEQ ID NO: 36805 - DNA, 3003 bp, Unknown; identical to SEQ ID NO: 36804
  misc_feature (1)..( 3003): 2750-1469P.txt file - cDNA_ID_3100460; gDNA_ID_2936585; Annot_ID_143840

SEQ ID NO: 36806 - DNA, 3000 bp, Unknown; identical to SEQ ID NO: 36788
  misc_feature (1)..( 3000): 2750-1469P.txt file - cDNA_ID_3100464; gDNA_ID_2936585; Annot_ID_195053

SEQ ID NO: 36807 - DNA, 3000 bp, Unknown
  misc_feature (1)..( 3000): 2750-1469P.txt file - cDNA_ID_3100469; gDNA_ID_2936585; Annot_ID_195051
aagaagaacatagagagtgtgcagggcgcagatgtgtatcctgctgcaaaacagatgcttattcaccaaggtaaagtgcttaaagatgagacaactattgaggaaaacaaagttgctgagaacagttttattgtcattatgatgaacaaggtacgttttggatctggggaataaataagtaattctgttgttttctgtttagctctttgattacccgattctgatttatgctctctggtgctaaacatgtaatagagtaaacctgcttcagctgcagcatctagtgcatctgctggcacatcgcaggtgagttggttctgttgttatgacatcattataaaggctcagatgctgcaacttgggatttttggaaaaacttcttgcctctgcaactaatgaaacgaaagtgtcaaatgcttctatgtattttcttgtttgttgaatgatctaactttggtgttggtttaggccaagtcgatacctccctcaacatcacagccttcaatttcccctcagactccagcttctgtatcagcgtgagttttcgagacaagtactctctgtttgaaaaattcctagaatctatctgaaaaaactgtggctacattctacaactaatttcaatattttgcccccaatttgaaaactgtgcagaccagtggcacctgcaccaacacgtccaccaccacctgcaccgacaccgacacctgcacctgtagctgcaactgaaactgtgactacccctatacctgaacctgtacctgctactatatcatcaagcactcctgcaccagactcagctcctgtggggttagcatctcgtttcagtcttctgcgcagctcagaaattgacctactcttattctgtttcctatttgttttgattaaaatagaagtcaaggtgatgtttacggacaagcagcatcaaatctagccgctggaagtaatttagagagtaccattcagcagattcttgacatgggtggaggaacctgggatcgtgagactgttgtccttgcacttcgtgctgcatttaacaaccctgaaagagctgtggaatatctttatactgtgagttcaattattttctctctattttcgtaccgtcatgcaacttaagaggcagattttggtcactaatcaatcactatgccgagaatagatttcctttttattatgattggctacctactaagtgagagaatacatatttaaacaccgaaattcatgtcttaggggatccctgagcaagctgaagttccaccagttgcccgtcctccagctagtgccggacagcctgcaaatcctccagcacagactcaacaacctgcagcagcacccgcaagtggtcctaatgcaaatccgttagatctcttcccacaggtaatacaccttgagatagaaagcagatttggttcatttaaactcttgattatagatgggtgtgcagctaaaatctgctctttatctctgacagggcttgccaaatgttggaggaaatcctggtgctggaacacttgacttcttgcgcaacagccaacaggtataagctgtttttttcttttctcgtacacttgcttacagagtttatcagacatcaatgtgaaacataaatactatttttgtatatattagttccaagctctgcgagcaatggtgcaagcaaaccctcaagttctgcaggtatgttgttctaattcacagaagaactgaaatcactgtcggttttcattaaatattgtttcaaataattttgtccttgcgttttttcttcagcccatgcttcaggaactgggaaaacagaacccaaacttgatgcggttgattcaagaccaccaagctgacttcttacgcttaatcaatgaacccgttgaaggagggggagaaaggtatgcatatgatgactttacgattatgaattaatgattcatatgtaacatatatatcaacagcaaaacgttgggaggattttgattacctaaatagttattctgtgcttggataatttgttgtgcattgtgtaattcagtggcaacctccttggccaaatggcggcgggaatgccacagccacaggcgattcaagtcacacatgaggaacgtgaagccattgaacgggtctgttccttattttctctcttttttttttttttttacttctagaactttgatctttcctctgaaaaagaaagtttgtatcactctttataatcgatgaactcggtttcacattgataaatacagcttgaagcgatgggatttgagagagcattggtgttggaagtgttctttgcgtgcaacaagaatgaagagttggctgcaaactatcttctagatcacatgcatgaattcgaggaataagcttcttcagattactttacctactctctatctttcgcattggtccatatgttttagctatatatgtgtgggatgccaaatccatgacctcgtcactttgtccatgttcatggctcagttctcagtttaaaatgaagtttgtcatgtgttctttctttgtattgtcgttagtccttacaaaatatcttgttccagttatttttgttgaattggggacaggtattatttctgtatgtgcctaaatagtaaaattattaaattataaataattttttttaaaaaaaaaaggaaaactcgataatcttataatcgtttcttttgtatgtatgcgaatacacaacaaaaagtgactttggtcttcgttggactattttgtggaaaagtcttatatcccagaagcccaaaacttgtaaaatccgaagtctatggcccaagtagagttctccacatctgacaaaacgacatcgttcgatggaactttacgaggcttcttttccctcacatcgtcctccgagccctcacttgacagaactcagaaatttgaaagagaaataaaagagagagaagctcccagagaagaaaagccctaaaagccccactcctctttccagtttcttttgatctctcagcatcgaaaatg

SEQ ID NO: 36808 - DNA, 3000 bp, Unknown; identical to SEQ ID NO: 36807
  misc_feature (1)..( 3000): 2750-1469P.txt file - cDNA_ID_3100469; gDNA_ID_2936585; Annot_ID_143837

SEQ ID NO: 36809 - DNA, 3000 bp, Unknown
  misc_feature (1)..( 3000): 2750-1469P.txt file - cDNA_ID_3100474; gDNA_ID_2936585; Annot_ID_195050
aatttcttcagtcggaatttactctattaaaatgacttgtgtatgtgattaaaatctttttactggtagtggtcgtgaatcaaatatatcatcttaatgcactcggtgtgaatgtaacatggattatttctcttgtaataggttgaggggcttgttcttgatcatggttcgagacaccctgacatgaagcgacgtgcggagaattgtcacatcctgacttgcaatgtgtcattagagtacgagaagaggtacataagacaaatctctggttgattaattgaatagatatgaaagactataacttagaagaattctcccgtgtattagtgattgtgtagcctaactttgtctatatatcagtgaaattaatgcaggattcttctactcgaatgcggagcagagggaagccatggttactgctgagcgacgttccgttgatgaaagagttcagaaaattattgagctgaagaacaaggtgagtttgaaactactacctccaagctatatgctgtattctttcagatatttatttatattattctttcagatatttatttatattttctttttctgatgcaggtttgtgctggtaatgataacagctttgttatcctaaatcaaaagggtattgatcccccgtcattggatcttcttgctagagaaggggtaagctatgattggctttgtatttttttccggcatctgattgtgagaaaagcatgaaaaaatgtagacgaagattgtgaaatcaagtgaactgaaattttaaccaaatagagaaaaggttatccactaagagtattcacctagaatctcttaaatgcctggatcttccaccaagcttgtttttttttgtcttgtgctctgtttcttgtgtctacaagttgttacaagagaattatctttctgttccttatatatgtatatatgtatctccagataatcgcccttagaagggcaaagaggaggaacatggaacgtttggttttggcatgtggtggagaagctgtgaactctgtcgatgacttgacccctgattgtcttggttgggctggacttgtatatgagcacgttcttggagaggagaagtacacatttgttgagcaagtgaagaatcctcattcatgtactatcctcataaaaggtacaaatgcccaaacttctatctcttgccagctaagttttgaagatcaattttgcttatcttcatatgtgtggtcattgattatctatgattatgatttggttttctttatagggcctaatgaccacactattgctcaaattaaggacgctgtccgtgatggtttaagatcagttaagaataccctagaagatgagtgtgtcgtattagtaagtaccttcttctccacaaagatcaaatccattgctatatcagtgtgattgttttggttttgggcgcatgtggtttattgacatctgtttctttctgtagggagctggagcttttgaagttgcagcaagacaacacttaatcaatgaagtcaagaaaaccgttcaaggggtgagtagaaagcaatattcctttgctccaataccaattcttgtttttttccggttgctaatgtaaattgtgggcaaattgcagcgcgctcaactcggtgttgaagcttttgctaatgcccttctcgtagtgcctaagacgcttgctgaaaatgctgggcttgacactcaagacgttatcatttctctaacggtattattcttgtattttcctcttctgccactatcgattatgctccaagtaaaattatgtttgtgtttatctactgagtttcgatgtatatacagagtgagcatgacaaaggaaacatcgtgggactagacctacaggatggagaacccgtcgaccctcagcttgccggcattttcgacaattactcggtgaaacgccaacttatcaattcagggtatgtgcagaaccaaatggaaatttgtataatggagtcttttaattcagttgcggttgagttcaggttgttaaaacggttgtttggtattgtattgcaggccggtgattgcttcgcagttgctattagtggatgaagtgattcgtgcaggaagaaatatgaggaagcctacttaaaacaagactatcttttgttttcaattttttcttactttccctttcgtgttttgagtattagcatatgaatactatttattttttactcgttatcctttgttgtcttagataattttgaatgtatcttttttttctatcttttgtatcaaacaaacatgatgaatgttttgattgtggtttctagcgaaaacagaacaagataaagatttcagaattttaagaaaatggaaccagatttatgtgtaaacaaacgcaattaaaagtcaaatcaacaacaatgcacggcatactttaattgatttttatttttctagtaacggagtcaaggcccaattaaattatttattttccacgatcattaaagtctttaacgggtcaacaccgttagacacttgtcatactattactgggccttatttttctctttactttctctgaaaatcaaagcccatctcttcttccttttttttcccctaatttctcacttccccctcatttcgcgtctcgaccttcgaattcgacaaatccctaattccaaaatcctctcggtaagctacggatctagtctctcttttgctcatagttcgacgaaatcgtctctctgttgctcgttcatgttttcgtttcgttttgtggacttaatcttctctgtgttcgttgttatctggagatctggcaaaatctcgaatgattttgatagattctaggtttctaggtgtatctatcggtatagtgttcgttttgtcttgatttgttggtctcgacgatttatctgttgtttcttttgttttgttgggaataatgttgatatagccaagctactgtgatgttgatgaagtttgaaatgaatttttgaaaacaggatctaaaagagtgtgtgataacataagatg

SEQ ID NO: 36810 - DNA, 3000 bp, Unknown; identical to SEQ ID NO: 36809
  misc_feature (1)..( 3000): 2750-1469P.txt file - cDNA_ID_3100474; gDNA_ID_2936585; Annot_ID_143836

SEQ ID NO: 36811 - DNA, 3000 bp, Unknown
  misc_feature (1)..( 3000): 2750-1469P.txt file - cDNA_ID_3100480; gDNA_ID_2936585; Annot_ID_195049
tgtgtttatctactgagtttcgatgtatatacagagtgagcatgacaaaggaaacatcgtgggactagacctacaggatggagaacccgtcgaccctcagcttgccggcattttcgacaattactcggtgaaacgccaacttatcaattcagggtatgtgcagaaccaaatggaaatttgtataatggagtcttttaattcagttgcggttgagttcaggttgttaaaacggttgtttggtattgtattgcaggccggtgattgcttcgcagttgctattagtggatgaagtgattcgtgcaggaagaaatatgaggaagcctacttaaaacaagactatcttttgttttcaattttttcttactttccctttcgtgttttgagtattagcatatgaatactatttattttttactcgttatcctttgttgtcttagataattttgaatgtatcttttttttctatcttttgtatcaaacaaacatgatgaatgttttgattgtggtttctagcgaaaacagaacaagataaagatttcagaattttaagaaaatggaaccagatttatgtgtaaacaaacgcaattaaaagtcaaatcaacaacaatgcacggcatactttaattgatttttatttttctagtaacggagtcaaggcccaattaaattatttattttccacgatcattaaagtctttaacgggtcaacaccgttagacacttgtcatactattactgggccttatttttctctttactttctctgaaaatcaaagcccatctcttcttccttttttttcccctaatttctcacttccccctcatttcgcgtctcgaccttcgaattcgacaaatccctaattccaaaatcctctcggtaagctacggatctagtctctcttttgctcatagttcgacgaaatcgtctctctgttgctcgttcatgttttcgtttcgttttgtggacttaatcttctctgtgttcgttgttatctggagatctggcaaaatctcgaatgattttgatagattctaggtttctaggtgtatctatcggtatagtgttcgttttgtcttgatttgttggtctcgacgatttatctgttgtttcttttgttttgttgggaataatgttgatatagccaagctactgtgatgttgatgaagtttgaaatgaatttttgaaaacaggatctaaaagagtgtgtgataacataagatgtcgtcttctcgggaagagaatgtgtacttagccaagttagctgagcaagctgaacgttatgaggaaatggttgagttcatggagaaagttgcaaagactgttgacaccgatgagcttactgtcgaagagagaaacctcttgtctgttgcttacaagaacgtcattggtgctaggagagcttcctggaggatcatatcttccattgaacagaaggaagaaagcagaggaaacgatgatcatgtttccattatcaaggactacagaggaaagatcgaaactgaactcagcaaaatctgtgatggaatactcaatcttctggattctcaccttgttcccactgcatctttggccgagtccaaagtcttttacctcaaaatgaaaggagattaccacaggtaccttgctgagtttaagactggagctgagaggaaagaagctgctgagagcactctggttgcttacaagtcagctcaggtaaactctttaagtttcaacatctatctatcttattttgctgcttgagaccagtaaaggagctgtcatgatgaatgcttatgtgtgtttttcttctaatgtaggatattgcacttgctgatttagctcctactcatccgattagactgggacttgctcttaacttctctgtcttctactacgagattctcaactcacctgatcgtgcctgcagtctcgcaaaacaggtttgtattttgtcatacgggatgttatgatgcttccagactttgtaacacttattccagcaccaaattgcttaatgatattctctcaattgttttgacaggcttttgatgaggccatttctgagctggatacattaggagaagaatcatacaaagacagtacgttgataatgcaacttctccgtgacaatctgaccctttggaactctgacatcaatgtacacctttgtcttcctccttttgcttttccctataaactcttatatatgcagtctaagcttcttttactcagaaatttctctcaaacgctgattgtgttgctgatttttaggatgaggcgggcggtgatgagatcaaggaggcgtcaaaacatgagccggaagaggggaaaccagctgagacagggcagtgaccagagagagagggagagacatttctaagtatgtatggtatggattttccaaaaacatatgatatgattaggggatttgtagaagcagagagaaagatctttatttgattttctccaaaaatctctgttcccttttttttttattgggttattaaagctgtttgagtctttggttcctgcttcgttgcttgttagtatttaggaagtgaagaaacaaaactttgaattattgctttccattcaactcgtcataaattatcataatcagtgtattatttacttagttcttattagggtattctgatttttgcttaacgcaacagaatttgtgttaacccatttttaaagaatcttcaatcttgtatcattggtcgggtcagtcggatatatggtccgcttttggtttaagaccggaacaacgaaagccggggatattgagcctttctgatgatgcgcctccgggcggtaatgctattgggacatggattacattctgatcaatagggactaatagtatggatttactttgtacttcagactagggtttttttttttttttttttttttttttttttaaatattattaatcctcatcccaaatgaccttgggccgcaacaaaaacaacatcaaatccagttacaaaattagcaaatcggaaaacatg

SEQ ID NO: 36812 - DNA, 3003 bp, Unknown; identical to SEQ ID NO: 36790
  misc_feature (1)..( 3003): 2750-1469P.txt file - cDNA_ID_3100492; gDNA_ID_2936585; Annot_ID_195045

SEQ ID NO: 36813 - DNA, 3000 bp, Unknown
  misc_feature (1)..( 3000): 2750-1469P.txt file - cDNA_ID_3100497; gDNA_ID_2936585; Annot_ID_195044
atacctgccatgaacaaacaaaaaaacacagttgttgattattcaagaaagctgagagcgtttttcaagtataccatcagatttaacaacatcaatgccctcaattaatcactacaagtaagattaaattatctatcaagttaatcatgtcgatatcgagaatctgattctttcatatctctcccgagttatcatggaaattttaccagaacattaacttttcgaaaacgaaagagaaccttgatagagtaagccaatggaagcaaggtatccggattcattgcgtcttccgggaaagttttcagagcatgtattagtttctcaaacggtaactttacctgcagagttaatttttttaaaaaggttggttttgcgaaattaacttacagctcgtaaataaacctcactcaccaactcatcttggcaatacttgagcaatgctaagcccactttgaacacgattttaacacccttaagaaacaatgaccatagaagataacagaatgaaactttgatcacaacaaacgttaaagagattttaaggatgcgcatttagttacctcggagagaaacacatcccatatccgtagagccaaagggaaaggaaatgagtatgagaagacggtgatgaaccattgacttgcatacatactcggattaatcatttcttgagtaaaatgttctccgagcttcggaattagctcttttaccaagctttctaactgaaacaggtattgctgtacaaggggaagccctgcctacattacacacaaaccactgactcttaagaaatagatgaaatgtgcggcaaagacattaccttgttaaatcaaggaacgaactatacagtagccttttaaattggatagttgattcataatcaatgacgaaaaactctcaccagaatcgttataaacttaatctacagagaacttttttaaaacgtggtcacaaactctaactcacgcagaaaatactctttttgtttcattcaactatacaacattttcttgcaatcttctaataattaaaagactcacatgatacagtccttccattggagcatgaacagctcctttaagtaatgcaactaataaccagaaggcatcttcttcgctcatatagagaagcaacaaaccggctataaaccccatcccctgcagatattagaatcatgaatcttagtcccatactaaaagaaagaaaaatgggaaacaagggaaatatctagaggatagacctgaacatatccgacatctctgtcataaactgagtatgccttaaggacattgtacaaggatctttgcccaggtccatgtctcttctgaaagaaaacatgtgatgggaaagtacgggatatgtctcgaatgatatcaagctctgatgcagatgtttcataaatcaccaattgcttcataggaaaatcgatagatgatcagaatatgactcagagaagaaacaatgtaaggatataaacggcgaagattacctcataaacaccaggattcataagcaaaaggtctcgacttcctgagattaactgccaaacaagacctcgtaagcaatcagggatcccttttcgtatacgccttctgacaacattaggttttctcctaacataatgcttccaatcactccctccaaccccaatcatcttcctccattttctcacctttctctcctctctatagatagccaacaacaaaaacacactctcactctctcaatcatattcttttaaaattattcgctccctcaggacatacctgtcatgatcagtggatgatgtagttttagacttgctaaaacgctcaggcgaattggcatgttcttgcttgagaaacccgaatctatccacaggaacatgagaagtggctggtcctgattcactgccattttccgttctttttctactcattctactaacctgaagagactcctcctagcattggtttcagtctccttgtgatcaagctccctaatgacacaatcatagaccaatatatcccaatagtgaaatttataccatcaaagtataaacaggttctcaaagtaaaatcctaaatctagtaacgtcgatcgtccaaaaactgtaaccagtaatcataatcagcagaaacgtgatcgtaaaaaatccaggagaaattaaaactcacctaggtttagtcagatcaaaagattcgtaaccaaattcctcgatgggaattgttggaattcgatggaaccgaagaagataaccaaaacgaaagaaatacaacgttggatggagatcacatctgggaactcatacgcgtatattactatggtggtggtgactcaatctttgaatttttcatccgcttgaagaaagtgatgtttttcttttttccttgccggagaaaatatgagtccagccagaaaaataataattcaagtgaagccagcacgaaacgacgccgtcgagagagtattattatgattaaatggtggttatgccaacttgctaagtttggtgacaactaaaagattctattttctaaattgagcacgattttgggtaattagaggctttatcacgacgattatgaatttatgattcataaagttttaggaacaaaacaatttaattgggtatatatatatatataggcgtcaaattaattataccaattcaaaaaaatcagtaacctattttttaaaataagcccaaaatgaaagatagcccaatagctaaaaggcccatgaggccatgactcgatttataatgcccaatgcttattcatacagtttttcctgttctgtgttttgttttttatctgtcaaccaaaaaagagcttttgcgaactcttcttatcctttcaatttaacagagtcatcagcttgaagacgaaagcctttctaattccaatcttcttcacttgtatgacacgttcgtctactcttgcgcttggtcggttttcttaggatttttgcacaagaatgatcaacgcatgattcggattccaggatagagaatccatg

SEQ ID NO: 36814 - DNA, 3000 bp, Unknown; identical to SEQ ID NO: 36813
  misc_feature (1)..( 3000): 2750-1469P.txt file - cDNA_ID_3100497; gDNA_ID_2936585; Annot_ID_143829

SEQ ID NO: 36815 - DNA, 3000 bp, Unknown
  misc_feature (1)..( 3000): 2750-1469P.txt file - cDNA_ID_3100513; gDNA_ID_2936585; Annot_ID_195037
aagctagcaaaatgggatcaaatcaacttagtacttagtcgcccttttccttttgctctgcaatatgcttgtgaactctcatactcttacttctcatgggctcaatcatcttctctgtttcttcaattgtctgttttggcagttgaacctctatggcatcaaaccattctcttagtttcattttttctaaatatacttctaccctctctactttcttattgttccatccctgcccaaccttttcctcatctaatgtcgcaaatccagcctcctcgaccttgcagtcactttcctcgtcgtgacactcttcttcaatttcttgtaagttttctgtctctccatcttctctaacagtacagttcaggtcatcttctcctacggtgcttttcttccttaactcaatctccacctgctctaccctcttagccccaccaccaaccctctcatattctttatcacttctttcactgcaaccttcttgagcttctttttcattttcattttctctttctctttcaatatcttgtgagttctctgtttctccatcttctttatcagtgcatttcaggccttctactgtgcttttcttccttaactcaatctccacctgctctaccctcttagatccatcgcattccttctcatcttcttgatcacatatgtcatcacttcttccactgcaaccttcctgagcttcattttccttatcttcttcaacatgacagttcttcaaaacctcttctccggcatcatcatttctagtctccttggatggctcctcatccattttcttcctctttgcacggcttttccgggcttggttcaggaccatctccaactccagaaaagactctccaccaatttcagtcgtcttgcttctggtagaccttgtagttctcttctcatctttaacctccaatccaaaacattcattttctatctgcttgctccttgtcactctcttcctgcttttcacctctgagatttccactgccttgggagtatcctcaacttccaatttgattgatttctggacaatctcactgttcttacctctccgagccctagagttgccttttttctcctccacaacttcttcttcctccgtaattgcactacttgcgttcttccggggcctcccaaccctttttttctcctccacaacttcttcttccttcgcaattgcactgcctgcgttcttccgaggcctcccaaccctagctttgaccaccttctcaatttccacatccaattcctcttctttatcggcgatatcgtccagattctttttcctcgaagccctagtactcttgggcagttcattttcctcttgcttcgacgatccacgcgtgcgctttggtttctcctgaaccgactcaataggatccggatccggatccgaagcagcaagccgcttgttgttcctccttggcctgggcggaagcttatgctcctgcggcgcctgaacaacatcactcccaaagttcaccaaaatggaagtgtactcaccaagcttaatttcgtctccatggctaagattgacgggcgtatctgagtcgatagtgtcagagttcaatatggtgccgttggaagaaccaagatcgtggattatccagttctcggaatcggaaacgatccggaggtgcttggtggagattccggcgtctttgatggcgatttcattaccacggacgattcgaccaattcggatagtggatccgggtttaaaccctagagaatcgccagctcttggaccctgggtgaagtcgagcttcagcaatggcggaaccatcgtgcgtctcggggaagctttgctttgattcaaaataatggaattttgaaatttcggatttatgtcaaactcaaaatcgaacggaacagtcctgaaacaaagaaaccctttcaagcccaatgggcttttgcattgtacaaactatgaatatacagtccagtccataagttaccaaaatatcttcttgttactacagagtacagcccatccaagttttttttttgttgttgttgttgttgttgtaaaatgatgatttatgcatgattgactatcaaattgaaacaagaaatgagttatagttgatttagatatattatatatataatatttgttgatataagtaaaaaaccaaaacaaagggagtaaatattcatttcatgatctaataatttcccaaaaaattaaattacaattttggcaatattgtttcagtgaacaactgaaaaactcaacttatcaacattactccacaattcacaaaaaaaaaaagatttatttcttggtaactggaagtgatgttgatataagctaatatataacattataacttgtggctcatgagcatcctaatctcttcactaaaggcttatttgtcacattctcattggtcactctagattcaccactttgccatgtcagctttttcttctcatccacctgcaaaacaacatttaaaaccaaaatgagtttcacttttatgtattactttgtataatctttggtcactacctgattacttaccatgtatgttccaataagaaaagtttccatctttgcttaaaagcaaaaaactaaaataccaaaagattcaaaaaaaaaccaaaacagtaaaagtaaatagcaatctctgagaatcttatccacgtcagctcacgggtcctacagagaaagctacaataggaagagatgttttcacttacagaagatttacttggtctagatttgttctcctttgtgaaggttatgagaaaaaaacttttttgatgattcatgaccttgttcaaaactcagacagccacaagatgatccaactacttttaacaaccactaactctgcgccacgtgtatatctccaaagattctatctttcccctctcaccacctagatatagtctcattagccttccctcctttctaattacaatctctccttttgccaacaatcattgcttaaaaaacacataccttcttctttagttataaaaatg

SEQ ID NO: 36816 - DNA, 3000 bp, Unknown; identical to SEQ ID NO: 36815
  misc_feature (1)..( 3000): 2750-1469P.txt file - cDNA_ID_3100513; gDNA_ID_2936585; Annot_ID_143823

SEQ ID NO: 36817 - DNA, 3003 bp, Unknown
  misc_feature (1)..( 3003): 2750-1469P.txt file - cDNA_ID_3100536; gDNA_ID_2936586; Annot_ID_143868
tcgcgactaaaacctcgatgtaagcttttccaagacccgcttgtaccaaaggaagttctattgtactacgggaaggaacaccgaaagggcacttctcttgtgtgataaatttcacatatgtctcattcgccacagcaaattcactcatgtcagagatatatagatgaatgtacaatacatgctgccagttatacccgtgttttaaaagctgggattcaagttctgtaagaacagtctcgagatcttctttcagacctgttttaagaggataaagcaaatatcaagtacatatgcggggagatcttgaagatttggtctgtttctgagttaccttttgacgattcactagaatcttccaaccagcagcagatggagaacgtgttgtgtttctcagcccttgatatgtgaagtctgttacttgtgtgttcaactagatcaacgattccattatctcgttggcgagtagaatctgatgtgttaggaccatctcctagtacctcagacactaaacttgattcctcttcaggggaatgggagtctggattccctttcttttcaagatggaacgtagatggatgaagaacaccaacaggtgcaatggaatctggagagtgtagcacaacttgatattcatcaagcacgatactcgcattctacaaatatgcaaattgtcaaactacaataaatgtgagaaatcaatgaacacaaactgttcttaagattgttgtttaaagaacatacagtgaaaagcgggcaatctagagtcagagtttcatattctcctccttccccgcaaacattacttccatatttcctaagtagagatgcaatcagaagctttagaaacaatgtaacacaaatagataaatgaagccataaaaaagagctgtggcatactcttttaacttcaaaagatatggttccatgaaggctaagtctttccctaaatgctttgagggatctaaccctattgccgcgacctgtaaaggttttacaaaccataattataagacgatgttgacgttaatagaagcaggaataatataacaacaatccttatctaccttgactaaaatagctttgatcccatttgctatctgcaagtaaacgagaaacgagttaagtaaaacatatacgaaaaagaaaaataaaaaattgagattgaaataggcttgaatctagattttctcttatactgaaacagtttaccatgtcctgaagaagcaatgtctgatcttgtttccacaaaaatgccaaagaaacaaggcctaaccttgaacaaatactctccacacgcagtcgttggtagtctgatgcaatggcaccagacgatactgcagtgatggaaggtatctgtctcttcacttcacttaacaagacaaacatatcttccacttcatcatctggagtcatttggtagctaagtttctgatgcctgcaaataaaactcgtcagaaattgttcataaaatcaagccttgccttggaaagcctaaggattctcaccttgaagaacctcggattcttcttctgaacaatggcacattcatacattctgcataacccactaaaatctggtggcctacctgaaaaaggtgcatccaatcaaagaaattagatgcgaggaaacataaatcattcttgctctcaaatatctaatcttattactcttctcaagaagaagaaccagatttacaaatcatgaaaacattgaccagattcacgtaaaacaccaatgagatagaaaaggctcaatttttattcaagcccttgttcatattaaatatccggttttagctcatactcaagcatatatagacaagagtagacagagaagaagcagaatcttacagtttgatacatatagctgtccaattcatcgacggaatcatcaaccggcaacaaattagccaatgccacgatctgtgcaaacacaaatcgagaaaccccaagtgagatttaagttcgtatagcttaaaaaattgaacttttgagaggcaatttcagggaaactctgaacaactaacaaaacttcgaaaattagacagaatccgaggtaagagacgtacctcgtgaccgtattggatacacttcatcatagcataacagctatctttgcctccactcactaaagccacgaccttcatctttctctctctctctctctctcgagttggagtgaggttcttatgtcgtcgaagaaactctgagaaagtcaagtcaatacaaaactttgaaggacgacttaaaaaataaaataaaaagaattttataaaagtttaggaatctagcatgacgtttctacttgttattcgattggcccctatattttttaatttgtcaagttctttctaaattagtaaattctaatttagggtttggaatcttttttttctattgctttaggtcgaaatccatatgatacgatatgatatcaccacgatagagatgtgtttgtatataaaacaacacaccaaaacgtctgaaacaatcccgtccacaaatgagtattcaactacctagttatgatagatattataatcttctcaatttaattgctaaactagattagaaaacatttgatattaacattgtattgatataacagttcgttattcaacctcaaaatcttttttctaaattactttcaaggaaactaatgaataagctaggttttcatctattttgagaaaacagaatattggccgaataaagagattaatgggcctgattaaatgggcacttagcttttggtaattaagctttgggtttcgatttgggtttagtgtttaaagcccaattcttctttatggtcgtgtacttagcttttcttcttctctgtaaacaggatcgaaagatcactaaacaaaacaatcatcttcttcctaaatttcttctgattcctcatctttttcttctacttctcatcttaattctgttatttctttgataagtctatttcgtgtttatcactactcttctcttctccagaaggacgaaaatg

SEQ ID NO: 36818 - DNA, 3000 bp, Unknown
  misc_feature (1)..( 3000): 2750-1469P.txt file - cDNA_ID_3100541; gDNA_ID_2936586; Annot_ID_143867
cagtatgatgaatcattttttttttgctcagaatctgtagaatagagagactaagtaatggattaagttttaactctcaccttgtgatcatcaattatctatcttctaaatttctaatgaaaacaaaaacaaagtatacgaatcagaaagacttccaaagactcattctttattcatcttcagggtctcagacaaggaagattcagtgaagatgagtagacaacatgaaaagaaaatcaacttgcattaatctttactgacaacgtaattcttgtaaaaatgtattgcatgtcgcagtgtgatataacctatccttatgaacaaaaattagtagactgaaacatattactaataaacagtaaccaagtttagaactatatgtgtttaccagaccagaagcgttgcgtatcttccttctgttcattctagtaatagcggttgacacaaaggctatagaattgtgctatggagatccataaaatatgttacaacaactccaacaagcgagcatagagctggtctgagctggaacaagtcctaacacataccctgtcaccaagaagtaaaaaatatcgtttgatgttcacgaccttcggtgaagtgcctgcaccattttccaaatcatacttccatgaacaacctgtagatgttaagataatatcagaaagaaaaaacaaaaacttactttgatgtgactgaagaacatataaagcaagcccacatgacattttgtttaagaattatcctgagcctttggaaaataaaagaaaatcaactcattctcaataaatataccatctataatggcataaaaaacttcggtaaaaactgatttgagcatttcagaaaaatgtgcattaccttggtttctgtccctataagaaatatgttaaaaaaacagcagccaacggtgatggatgaataagcaatccaacgatactgtagacttaagccaggcttagaatcatatcaaaacgacattaacataaacaagtcgatagaagcacaaacctgagtttcggcatttcttctgtcacggcctcgctaacaccaaataaaacaactaaagcaacaacctgaatacacagtcactggaaatgttacatataaacctagaagggcgttttccaaaaaaatgttttttgatcctctgttttttactctatgaaaacagaatcgtttataatgatgaattattgccagcatacaaatcacaaaattttctgttttttggtgacatacaaatgatttcaaaataacccaaaacctttattagaatcaactgtatgttaaaaaaaactgaactttgatcagattgatagaagaaacaaaaaactaaataataacaataggagctagcaacatgtatactatttcactttttttagagtttctaagccaatcagaaggctctatttcacacccactcgcacaaagtgagcgttgagcgcgtgagagcatttctgtgggtatacccctttccaaatcatgcctttttcaatcgacgcactagtctccaaaattcccatcgcgtgaaaatttgtgttttcttctctaaaccagtataaaccaaaccacaaatcaattctaatttcaataccaatgtataccgaacctaaaaatcaattttaatttcaaaaccgatgtaaacctagtaaatatcatctacaaatataagcacaaaaaccacagtaaatttcaagtgaacacagatacaaattgaaatcgattaacctgtgagatcttctgatccaagtactgatcagctttcgagcacctttgtcttcaacaagtttagaatggttgaaccacacctgtaaacaaaatcagaatcaatccttaatttgggaatacaaaatcaaaccaaaacaaaatcagacacagagcttcagagctacctcatcacggagaacgatatacttgaggaatcggaacggtggaattccttcttcaagagcaattccgttcgagttgagccttttgatggcttctacattattcaaatctagctcacatggtagtacctcgaccgtgctccggtaacgaaccagaagatgagtcaggtcaacaggatttgggcaacgaagctaatggagaaagagagcttcaggtagcattaagtgatttgaataaaaaccgccattttcgtccttctggagaagagaagagtagtgataaacacgaaatagacttatcaaagaaataacagaattaagatgagaagtagaagaaaaagatgaggaatcagaagaaatttaggaagaagatgattgttttgtttagtgatctttcgatcctgtttacagagaagaagaaaagctaagtacacgaccataaagaagaattgggctttaaacactaaacccaaatcgaaacccaaagcttaattaccaaaagctaagtgcccatttaatcaggcccattaatctctttattcggccaatattctgttttctcaaaatagatgaaaacctagcttattcattagtttccttgaaagtaatttagaaaaaagattttgaggttgaataacgaactgttatatcaatacaatgttaatatcaaatgttttctaatctagtttagcaattaaattgagaagattataatatctatcataactaggtagttgaatactcatttgtggacgggattgtttcagacgttttggtgtgttgttttatatacaaacacatctctatcgtggtgatatcatatcgtatcatatggatttcgacctaaagcaatagaaaaaaaagattccaaaccctaaattagaatttactaatttagaaagaacttgacaaattaaaaaatataggggccaatcgaataacaagtagaaacgtcatgctagattcctaaacttttataaaattctttttattttattttttaagtcgtccttcaaagttttgtattgacttgactttctcagagtttcttcgacgacataagaacctcactccaactcgagagagagagagagagagaaagatg

SEQ ID NO: 36819 - DNA, 3000 bp, Unknown
  misc_feature (1)..( 3000): 2750-1469P.txt file - cDNA_ID_3100547; gDNA_ID_2936586; Annot_ID_143866
actctttgtggttttctgttcagcacgcacaaaacaatcagagaggaaccaacttcatgaaaagtttgttactttcttgggtttggcaaagtcttctcggagggtacagaatgtcctagatcctatgttcctttacattcttgtccccgatcttccgaaaaggttaaaatactgcatagaatcttcctttacatccgtgtccccgatcttcccaacagttttgggtttttgacagtaattgttgttctccagggcccttgttgaagtgaaacctattttatacgtggaagaagatacagacaccgaagatgaaaccagccgagatcaatcgggtgaaggacattacagtatttggggatataagccagagaaatggcaccaagattgtgtgcagaaacgagttgttgatgggaaagtgtgtgtggccgttctctctatctcagctgaactaatgaggaaacttcagggagaagaagaagaactggagatagtatcaagattctgtgtatatcttctcaacaaaaccttgtctgaaaattcgttttcttggcaagacactacggtgagaatgagattcttttaaacaatgttagcctatcatcaaaagctttgcttatatcttgttgttttggttgatgcagagcttaagaatacacttctctactagtattggtgtgtccgtagagagattatcggccatttttgtgtctgcgttcagagagcttaacgagatgagtgatggagtaaaaatggacagtttgaaagaacctatcttcaatctcgtccctgtccttggtgctggaaactcttctgcttcactcgacaacataatcacctgtgaactatttgccctaaggtcgtagctttcctgtttctcaaggaacacaaaggtttacttacttgatcttggggtcatcaaggtcatcaagggccatttgattttgcaatgggtaagccaaattgaacggccctatgttttaggcggacagttccatgccgttttttttgaataccttttccatttgcgaaagaacaacacgtagttgttttgttccaaatggaaacggcacgatgtttgttattcttttcttttctttttttccagttggaggtgcaaagactgattactttttgccaaacccagtccaaatggaatttatttttatcgaaaggcatgatattattggtcaatacattataacaatatgaatattatttaccagaaatatttaacttggatttggttttaccacatactgtatgtaactttcctgtcacaggtcattattattaaacgtattttagaatttaatgcaaagaatgtgacatgttacacgacaatatatatctcagaaaggtgtgttttttgattaaagattattagtctttttcacgaggatataataagaggagagattccaaatgtcaagtgctattttcaaattgttaaacagagattgaagatctttagcataaaatgttaactatgacttgtctattcacaaccaaagtcttacctcaatgtataaaccgacgtctttccaacataacacatttgtattctcatatatttaaataaaagtgaagcttttctttgatctagatcgtggttattttaaaaatataataaaatcaaataactatggttacttaccaaagtaaagtggggttattttttgctgtggtgatgttttatgctttgtataagacacttttgcatctctagtttatttctaagcattttggagtaaagagagaacaaaaaacaaagtataaaaatatccaacaagatgcttttgggggaaacactgcattgtggtctgtggggacaaatttgctggcacaaaaattctgcagaagaaaatgaaaataatttgatatcactataggatggtccaaaaaagtactaacaagtttaaatatttaatttgattcacagcatcctttttagcaccgtaaatttgagtcttatgtagtactgattattaatacaaaactaacaagattatatatcgataaatatgaagcatcctattcctatggttgattatatgaatcttttatgtcacacaccctattacgacaggttttaatgatacccacatcacacgtgtataagttaaatgcaatgataacatcctttactctgaatacagatacatttgtggctaaaaaattgtaaatgcaaatctttggactttggttcagaaatgaaaacaaatgtattttttattcgaaactgtgtcttaaaaagaatccaaagtggaaatgtccaacctggaaattcagacgtaaagcgaacccaaaagaaaagaaaaaatgaaaaatggtaaaaccgtaattaagtgtaaagtcaagggtagttccatatttctcccttgttggtcgagcgagaccagaaaattcgcagagagagagagagagagagatagatctgagagtagtggtggtggcattaataatggcgtaagtggaagaaaggaacctagccgttagatcttctcaatcgctacaaacattcattgttcaccgatcgattctctctctttcttcttccccattgctccttccttcgtacccctctctctgtcttttgaggtttccgggtcgggttggtgagaaaactccagcggcttaacggatcttccactggtagttttctgttcctcacaaggaaatcgaaaatttgataaagcgaaagtgaaaaaggcgtgtgttttctttgtaaaggctccaacttttttgatgaacagcttgtgcttgttgtgaaggttgttactttttgtgtattggaatttgggttttttctttatgttctgaggaggagaaaggaggaagctttcttgaattggattcaaatttgagctcatatggtgagtttctagggttttgtttgtgattcctggaagaatctgattccttttctattagggttggagagaagtaaagcagaaaagcttttttgttttggagcttagtgagtgttgtggataaacaatg

SEQ ID NO: 36820 - DNA, 3003 bp, Unknown
  misc_feature (1)..( 3003): 2750-1469P.txt file - cDNA_ID_3100551; gDNA_ID_2936586; Annot_ID_143865
aaacgaatttgtttttttttctttgtctttttcgacttggtttctctgtaagattcttgttccttgaagtgatgaggtttctattagataagagttgattagaatgatataatgtgctcatggtgactctcatccttgcacgtccctgtggtttatgaaaagccatattgctttcctctttagccaaattgcgtgttaatatccttcccgttgcatttgattctatatcttgtttctgtttgatttttatgcatctgtcacctccatgatagtttctcttggttaatggctgaaacaagtttagttttggatagagaatcaaagagtctcttcttgttcgtttgtatctttcctcttgcggtatatgttgaagaactttagggaaacaaagtgaatgaaagctaagagttttttttatgaccaaaggcaaaacaaaaagtgaagaatattcctttggaaagttttgaaagggaaatacatataggatattaactaggcgaatggaattttttcactcatacagagtcattttctgtatatataacttagtgattgtgagttctcatattgcttctatgtaacactccttgtaaagctaaatagcccttttgtgctaagtctctgatatctattgttatcttctcaatactgcacttgttcaatgacacttgctagcgattttggttttccatccgctatatcttcatcttttacaattctagaagagagataccacaataactttcctaacactttgtgtgtttcatcaggacaggaatcgatgaataacaaccccgtcccctgtcaggtgtttcctctggtctctggtggtagttctggtgggaatttgttttcatcttcttccggattctgcaatggtgtctatgtttcatcttcctcccaggcacggccatctgtttctaccgtgccaagagacagaattactgttgctcacgtctctggtgaagggcagaggcaggaatgccctgtggaaacacattccttgcaattgatcaatcaacctcaagaacagaaaattatgacttggtcttcagaccagattcggggcttcttcgattttcctgttccagatccacaagcagcgagcagcagaactatggtttcatccaaggaagtgctttcaaaatgcgaatggccagactgggcggatcagttgatctctgatgatagtcttgaaccaaattggtcggagcttctaggtgatcctaatgtactcaatctatattcaaaggttcgtttctttcagctaaatatgaatctctacgcttatttcagctaaatatgattcttctattaagactgactctgataatgtcttacagatagaaacacagtcttctgatatagcaaggcaagagatcgtctttagaaatcagcatcaggtggatccatcaatggagccgtttaatgccaaaagcccaccagctagttcaatgacatctaagcaaagaatgcgttggacaccagaacttcatgaagcatttgtcgaagctatcaatcagctcggtggtagtgaacgtgcgtatgccctttttttttccttctcatgcctgcaaaatttagctgaacaacttattattattctcttggcttataatttcaaaccacaggagccacccctaaggctgttttgaagctcatcaatagccctgggttgaccgtttatcatgtcaaaagccatttgcaggttactattctccatctatgttttcggtttgtatgcttacagctcatcttaaacgtctttatattattggcttgtccagaaatacagaactgcaaggtataaaccagagctttccaaagatacaggtacttgaggcatctaaggattcaaactgtcttctcaatatttcacataagcttattatactttggaaacataatggcatttaaaagactcttgtgtgatgaaacacgtctttatacataatcagcttttcttcttggacagaagaacctctagtaaagaatttgaaaaccattgaagatatcaaatctcttgacttgaagacgtaaggaacattttacttctctgtcagaacagactaagtatcacctaggataatatttcttcatatctaagattttttttttttattcttcttcaggagcattgaaatcactgaagctctccggttacagatgaaagttcaaaaacaactccacgagcaacttgaggtataataattcaaactgcctaaaagaagcttttataaaacaaaacagtgtcctttcctcttcatttgtctgatttcttagtttttggttttagctggtgattttgatcttatattggtcttaatacaatgcagatccaaagatcactgcagttacaaatcgaagaacaaggtcggtatcttcagatgatgattgagaaacaacagaagatgcaagagaacaaaaaagactctacttcctcatcatcaatgccagaagctgacccttcagctccatcaccaaacctttcacaacctttcctccataaagcaaccaattcagaaccatcaataactcagaaactgcagaatggttctagcacaatggatcaaagtgaatctacttctgggactagtaatagaaaacgggttagagaagattagacatctcatgagtatgatccaaagatgttgcaaacatatgtaattgtgtatataaaattgaaaatatcacagcagcaagaaaatgaaaatttcttcttaatggagatgacgtggacaaatcactgtcgagttggaatgttgtcggctgatgagtcagcaatttagatgacgtggctaaagaacatccttatttatgacgtaattaataatgatctctcgaaatgcgtcttttcttcgtctgttctatcttctttaccaatttctgcaattctggagaagctaaaggtctcaatctctcagtcaaaaacaaaaggtctctcctttattaaactatctatcactaactagaagaagagattagaggaggaggaagaagatg

SEQ ID NO: 36821 - DNA, 3003 bp, Unknown
  misc_feature (1)..( 3003): 2750-1469P.txt file - cDNA_ID_3100563; gDNA_ID_2936586; Annot_ID_143861
taaattttccctattgtatgtgtgccccaatatataaaaccggtgaatttgtgatataatgagaagtggttcgagaagacaaagttggataatttcatttcatacactatacaactaataaaatggtcaagttttcattgacatagcaatcaacatcgagtctttttaagtcctacctaatacccccaaaagatttcaggttctcaacaagagaaagcaaggataatatcaaatgaagatgcttctattttagacttttagtctacatcttacgtgcagcatgtcacttttatgttttaagtccaaaccccattagactaagagaatattacgtgattagactctttaaaacactttaaatggagaagacactttagataaattattttacttatttaccctttaactacattttttccatcggtcatcttttctctctccttttcccatctcttctctctttttttctttttttttctcactttatcgaagaaaaaaacctttccgagagtatcttcaattccaaatctgcaattaatctccaaatccactcaacgcgatggctttctttaagattgttaatgggtaaataagtaaaagttctaataaggttaatctccgcaattttaatctccgcaattttaatctccgcaatctccgcaattttaaatggagaaggcactttaaataagcaaaataaatcacaatcttaaagaaaccaagacctcatattctccaattaatcaagagagaagaactttggtttctttacaaaccacggttaattgaatctcttgttattatggacatcgtatatagaatgaatatgaatcagtaaaaagttttctgaatgaatatatttaaatggactcgttattatggacaccaaaaaattgtttgttgattttgttacagtttgcagagacctccacctccaagaccttatggacatagaacttttaccaaattcctgagataatcgagatcgaattgtttaaaaaaattcgccaaaagttatggaaacgtggagagagagagaggcgctacaaatcatggagagagagagagattttatttattttggataaggatcgtggaagaggaataacaagaaagagaaattgagaattaaaaacataaatattgaattaagagtaaaaaagtctttagaaaaatgaattagtagaaaaagtgcatattccctataaagttcctcaaacggaaaaacattttctaaaagtgcctaatagtagaacattcccttagactaatgctaacattttttttcttttttcattttgatatttttttattttataatttataaacaaatacttgaacaagattctttgagtaaaatactttagccaatctaaatcaaaaatatttcagcaaaactgttgttaccaaacatttctctaaaatcgataccaaaaatcaaaagagaaaaaaaaaaaaaacattttgtaaattgaaagttgaaactgtgccttggttgaaaagtaagaacggcgcgtgtagttacacgcttctacgtggcccaacttgttcacatattttagatttggtcgttgttggtgtttggtaacatgtcctggcccaccaccaattaattctataattggtcttatgactcttatctttctatcaaaatcctaaattgcaacttgctgacgctttaccggtccaacgtaactttactacaccttggtaacgtgtctaataagctgtatttagcaaaattttaccatgtaatatgtggtttacttttttggcatcatttgtttcgacataaataattaatggaccatcgacgttaatgaacactcattctatattttcttccaaaatggaccatcaaatttaacaaagaaaaacatgtttaaaaaacaaatgtagtttcatacttcgtattgggattaacaactgtcacatgataagtgcaatagttatatgaataattcacgtcacagtatgtcaaatttttatattaaaattttaaaatcgcaacttgcaaatacaaatactactcttttcccctccatttctattatagtattaaaactaaaaaggtcagaaggtatgcataatttgtgatagaacatttttcttgttcatgaatcgaaagatgacaatatccaaacttcccacgtggttatcattccaaaactgaactacgccgtcgcatataacatatcttattttatttatccatttttacaatttaatactcactctaatttgtatgcgcatgccaattctttcttcacttaaactaaggtttatgttatttcttgttaggcttctacgaagcttcctattatgagtatatagaggaactttttgtcatcgtatctatgtttctgtttcgacatagataacggaccatcgacgttaacgttaatcagatactcactatataaatggaccaacaaattaaatgtaataaaggaaaacatcaaatatattccaagaaataattgtaatttcgtagttacgtgttgggagaaactaccgtcacatgatgaaagatatatgtcaaaattgcaacttgtaaagcctccttttctgatatatatatattctttttttttttttaagtcacaaagtaagggaatttgtggggaatatttttctttttcatgaacaaagcttcgtgtggacaataaaacaattgatatagtgtataatcttacccacaaagataaataaaataataagacaagtgattaataaacgtgccacgtattaaaaccatcccaaagaaacttaaccctttgaatgtcttaacgtccattatttaataaatttactatttttcaattgtttattatttatatttatttttgaaatttagaatctgcgcatataaatacataaaaccctattcgatctctttcttctccaatctaagttgcagaaccatggccaaaactctctactgcaattttttttgatcttttcttttactttttctcttcgtaatcgctggttcgagaaatg

SEQ ID NO: 36822 - DNA, 3003 bp, Unknown
  misc_feature (1)..( 3003): 2750-1469P.txt file - cDNA_ID_3100592; gDNA_ID_2936586; Annot_ID_195120
tatactagggtttttaaactaaaagggacatttcgtttttaaaaacagccgtggactgatttactaaataattcttttctatataaaaatatcttatagccaaaataaaatattattagtatatatgtgaaagaatatccaccaatgttaagaaacaaatctttttttaagtcaaaataaaatatggttggtatattgatatatggaagatacatcaatggtgagaaagagaaatgtcaaccttgaacctaaatgttctataaattcatcttttacttacaatccagaaaatcacaacatcttttttgaatagattttatagctgatacaacgagcaagagaaaatggccatcacaaagacttcagtgactcttttacttttaataataatggctgcttcgttgtctaatttcagcgtcttggcttcaggtatgtttgaaataattctatgctgttaatttcttattaggtttcatcacttgaaagcaatgacattgatatgtatgtatgtacttaaatcatgcatatatatatatatatatatatatatagtcatatagatatgatattcatgttgtgagtttgtggacatgcagagatcaaacctacaggaagagttgataatcaatgcaaggagatgtgttcggcaacgtttggggacggtaaatgtgccgcagactgtaggaaggctggtttctcatccggacgatgtcttacttcttctcctttcggaaataaatgttgttgcacctagtgatagctagaaccaatctatatgactatatgagttttctcttgttgtattgccacatattataattgtactgcaatagaataaaataattttattgttatatttttctttaatcatcaaaagtaggagctacaattacaatgcacgagtcgattaacatactcttatgactctttaactactcaattattacgtacgagaagttttctaaaatttcaatactgaagtggtgatattgtttacacaacgcaatgtcaagttttttcataaaaaaataaaataatcataaaaatatatgtttgcttgtgtttaaacaatcctaaacattttgtaaaacttcagaataaaaatgattaatttcaaattatgattgtcagttaggtcgaaatcccaaatcgaccatacccttatcggattggactttagatcttttgttaacaatgacgtgcataaatgaattatgaaaagttgagttaataaggctttttttgttcctgctctaaaaagatggccaatattgccagtaaagaaaagaaaacaaaaagaagcaagcaaataagtgttaacattcatggcttaactatgatgaatattgatgattacttttctatatccaacataatgatacctgttacttacattcataaacaagtttgaaaaaatcgcctagagatgctagattagtttagttattgcaaggagagatgagccattgatgtatgggtgaaagctcgattcgattagtcaacgtagctgagaaagttaagttggaaacattattttgtaacgtttcggaacaaaaaggatcttttgggcctatctagcaaatttgtgggccgttctcaggctaattatggtttgcttataacttagttattcgcatcactcctacgatttgttctaggatctgtggtcaaccttggttttgaaacaaaaagggacattttgtatttcaaaatagccacggattgatttgttaaacaatacattttacaaaagaaaaaatcttttagtcccaaataaaatgttattagatacatgtggaagatccaccaaatccaatgttaaggaaaaaatctttttaaatcaaaataaaatattattaatatagaaagatccatcaacggtcttcttttctacaaccacaataacctaaaatgttgtataaataaagcttctacttacaatctacgaaaacacaacatttttttgaatagattttatagttaatacaacgaggaagacaaaataatggccatcacaaagacttcagcaacgtttgtactcttaataatattggctgcttcgttgtccaatttcaacgtcttggcatcaggtatctttctaatttctacgtactttaattgtagttaggataactttatttgaaagcaataacattgatatgtatgtatgttattattcatgtggtgatattgtggacatgcagatatcaaacctaccgggagaattgataatcaatgcaagcggatgtgttcggcaacgtatgggaacggtaaatgtgccgcagactgtagaagtgatggtttctcatccggacaatgttttacttctccacctttcgacaatagatgttgttgcaacaattgatcgaaatcgatcttgtttttgcattgatctatgttttctttttttctgttgttgacttgccataatacgcaaatggaataaaactataactttactattttatgctttcaaaaaactaaaagtacgagctattattagtctatcaccatgcacatgagtcgatttaatttgcagcccactcttattcctcgtatcatattagtcacttactacgacaagtttaactttggaaacctccaacaaacctatttgagactatgtggtttcgatatgattagggtttagagttaaagagtggcatcagataccgctgttgaggttgaatagtttaattatttgtatctgaactataaaaacaggaaataaaatattttaaatctacatatttgtaaagaagaaatagaaaaagtcaaaaacaattctgatttgttactataatttcttccaggctccactaaaaataaaaatatcttcttcttttttttttttttttttgtaaaagacagaaatatctaatccggtttatacgaatccggtttaaaatcggtttggttttgttacaaagataagaccagattaataacatcttcgtcttcacacactctgcaacacctctcactcaaatttcattcaccatg

SEQ ID NO: 36823 - DNA, 3003 bp, Unknown
  misc_feature (1)..( 3003): 2750-1469P.txt file - cDNA_ID_3100599; gDNA_ID_2936586; Annot_ID_195117
aagcatccatacacgtatacgagtaaatgaaatcagagaaaatgcaaatgaaaacgaattatgtgtatactaaccacagaagcgttgaaaatcctagctccgtcaatgtgaagcttcaaaccatgtttcttggctaattctccgactttgtctatatattctataggaaggcatctacctccacaactacatcaacaaaaatccggttttgtcaaaccacaatgagtttatcgaaccggaaaatttaacacgaccaaaatactagtccacaattaatattcttttgaacaaccatgaaattttagaacatttggtcatatttgtgggacggttctatataatacttgtaagtttgtaactcatttctcttcaaccagaaatgagacaaccctaatacataaccggttaattacgaattatactctacaataatttcatttttctattattagtcctctaaaagaaacctaaaataaacctctacaccaactttagctaacacatgttcacaaaacattatgaaattataattaggctttgtttttatttgcttgataaaactaacacttactttgcttgagtattctcaagacatataagcttagtaaccggatgatggagatctcctttgggactcctcacggcagcttcaatagcaccaatctccatcgtaccgtcttcctcattcttcaccgtcctcggatgcacaccaccgaggcttgaaacgccgccgttttcatatatatgaatgtgagagtcgtctccaagaatcacttcactccctctctcatcacaatggaccaacacgcttatcagattccccattgtccctgacggaacaaacatcgccgcctcttttccagcgatctcagccacctctttctccaaacgcagagccgttggatcgtttcccaaaacgtcgtcgtctacttccgcgtttgccattgctgaacgcattgactctgttggtttagtcaccgtgtcggagcggagatcgacggttctaattgtagttggcgtcaccatcttgatttggctcactgcgttggattataaccaaaacattaaataaaagatcccattagaatgaaactcatctaaataaatataaagtcacttgagttttacttaagcatacctagattctgttctgttaggctatgctttttgttttcttggcgaagagataaaaagagatgtgcttcgggtgactcaaatggttgagagaatgagtgatcaaatcaaatacgaaatgacgacagggaatcttatagaaagaagatcggtccaaccaaataagtgttggatgcattatgacaaattggtaaagtaaggttttcttaacgtttttgcctaatttcttaacttatactgtactagtttccttgtttttcagtctatactttttagttgtatgtaagtaaataattctatgataactatcaaaataaaagttatgatagttaatattaaataaatcaatccaataaacatattaattttttatgatcgcaagaaacaattgttatgttattggtgtaatgttttgtattcttcattttatatattcatattattaaacattattctctatgaattttttatatatatagaaaagttacatagtgtaaattatatattagaccgttgttctagtatattctaatctggttaataatgaacgtttgcgtggcctaatggataaggcgctcgcctccgaagcgggagattgtgggttcgaatcccatcgcgaacgtagttttttgttttcagcaatttgcttatttcgttgaaacttggataacaacattcatatgtggctcttagtcgacgaatatgtatgcgtcggctaatttggaaaatctgatagcggcatcccaataactatactcgtaatttagcaagatgattacatgcataaccactctgacttataagagcgagacatgtatatagtgtagagtgtacatacgtaagcaaacatcaatcaattttgtcttgattggtgatggtatattcattttttatgtagcatctctagatgctttcggataaaggtgatatgaatatgtttacaagaaagagaaagaaaatgatatatttctgaataatgtttttttggataaatcctcaataatgttgtttcgaatctatgatctctacaatattattaaacatatatacctacaaatttagcatctatacgggtaagacgaccattcatatatataagggatcatgaagacaacacaaataagacatccacaaataaattaataagccaacttggtcttaaaaatcaggcatcttattcttaacaaactttagctgatcgattagtatttgcactaaccaaagaaataataatttagtttactaacataattgcatatatatatatattatacaattagtagagtggctataaagcatgccacatgcacattctttaatggacagacatttgaatattgaagagtttatcgtaaactaaatgtcatttgaaaactgctaaaggtcttttattttatatactcacataatcacatcaagaatatgacttattatattcatcgtttttggtcgataataatgattctttacaataaggacatgttgagcatgtttataacttatttaatttgactcgttgaattgttattattttgttaatatgcttagattccacatctaaaataatatctaatgcagatcatatgtaatgcacattaaaggttttacctccgataatttaatattccaattaattaatatgcaatggcagtgtaactaacggcagccgttagttaatggagtcggttgcttgcttagtttttgttctcgaagcttgacttttgaaacagaatgctgtttaacctccttaaacggaatattctcttttttagtactttgattctattcctctatataaacctctctctctctcacgaatcagagatacgaagaaactaacaacaacaagaaaaaaggaatattccgatg

SEQ ID NO: 36824 - DNA, 3 bp, Unknown
  misc_feature (1)..( 3): 2750-1469P.txt file - cDNA_ID_3100599; gDNA_ID_1972105; Annot_ID_178686
gaa

SEQ ID NO: 36825 - DNA, 3000 bp, Unknown
  misc_feature (1)..( 3000): 2750-1469P.txt file - cDNA_ID_3100604; gDNA_ID_2936586; Annot_ID_195116
ttgctgaaacacacaactacgtttgactattcgaatcaaacaattacacactcacatctatattacgacttctctaattacactctctaatcacatatctgaaaagcttcgactaattgctttggaggtttccaacgttcatcatccatgaatgtcctgcaattcaccattacaaattgatgagcaaactcaaaaaaaaaaaaaaaatcgagaaaaaaaagatgacttacgaagagcatcctctgcagaaaatcgccgagaaacatcacgacatatcattttcctcaacaaatccttcgcttccgatgatacagacccaaacttcttcggcggaaacctcaaattccctctcaatatcgattcaaatatatcttccgccgtctcaccgttaaacggcggttctccagctagcatcgtgtatatcactacaccagcgctccatatatcaaccttctcgtcgtacttcctccccatcactacctccggcgccacgtaatacggtgttcccacaactccctccgccgtttctccgcctaaccacaccgctgatccgaaatcacagagcttaacaccgccgcttacgagatcgactaagacgttgtcaggtttcacatcccgatgaacgacgtcgcaccggtgacaatgagcaagcgcactgaggatctgtttcgcgtatgaggcggattctgattctgataacctccccccggcggagattaaccgatcgtaaatcgtcatcggcggatcgactaattccatgacgatcgcaagagaatcctctgtttcgtagagatcgaagatcctgatgatattcggatgcggcggtaacatcgccatgatcctcggctccgtctctatacactcgcgatctaatgcgtcgatgagcacgcgcttgtcaatggttttgcaggcgtagaattctttagtcgcgggtgagaaacagcgagtgattgttccgaatctacctctgccgatctcgtcgcaaagctggtagttgttttccagttcgaattctctggtcatcggaatattccttttttcttgttgttgttagtttcttcgtatctctgattcgtgagagagagagaggtttatatagaggaatagaatcaaagtactaaaaaagagaatattccgtttaaggaggttaaacagcattctgtttcaaaagtcaagcttcgagaacaaaaactaagcaagcaaccgactccattaactaacggctgccgttagttacactgccattgcatattaattaattggaatattaaattatcggaggtaaaacctttaatgtgcattacatatgatctgcattagatattattttagatgtggaatctaagcatattaacaaaataataacaattcaacgagtcaaattaaataagttataaacatgctcaacatgtccttattgtaaagaatcattattatcgaccaaaaacgatgaatataataagtcatattcttgatgtgattatgtgagtatataaaataaaagacctttagcagttttcaaatgacatttagtttacgataaactcttcaatattcaaatgtctgtccattaaagaatgtgcatgtggcatgctttatagccactctactaattgtataatatatatatatatgcaattatgttagtaaactaaattattatttctttggttagtgcaaatactaatcgatcagctaaagtttgttaagaataagatgcctgatttttaagaccaagttggcttattaatttatttgtggatgtcttatttgtgttgtcttcatgatcccttatatatatgaatggtcgtcttacccgtatagatgctaaatttgtaggtatatatgtttaataatattgtagagatcatagattcgaaacaacattattgaggatttatccaaaaaaacattattcagaaatatatcattttctttctctttcttgtaaacatattcatatcacctttatccgaaagcatctagagatgctacataaaaaatgaatataccatcaccaatcaagacaaaattgattgatgtttgcttacgtatgtacactctacactatatacatgtctcgctcttataagtcagagtggttatgcatgtaatcatcttgctaaattacgagtatagttattgggatgccgctatcagattttccaaattagccgacgcatacatattcgtcgactaagagccacatatgaatgttgttatccaagtttcaacgaaataagcaaattgctgaaaacaaaaaactacgttcgcgatgggattcgaacccacaatctcccgcttcggaggcgagcgccttatccattaggccacgcaaacgttcattattaaccagattagaatatactagaacaacggtctaatatataatttacactatgtaacttttctatatatataaaaaattcatagagaataatgtttaataatatgaatatataaaatgaagaatacaaaacattacaccaataacataacaattgtttcttgcgatcataaaaaattaatatgtttattggattgatttatttaatattaactatcataacttttattttgatagttatcatagaattatttacttacatacaactaaaaagtatagactgaaaaacaaggaaactagtacagtataagttaagaaattaggcaaaaacgttaagaaaaccttactttaccaatttgtcataatgcatccaacacttatttggttggaccgatcttctttctataagattccctgtcgtcatttcgtatttgatttgatcactcattctctcaaccatttgagtcacccgaagcacatctctttttatctcttcgccaagaaaacaaaaagcatagcctaacagaacagaatctaggtatgcttaagtaaaactcaagtgactttatatttatttagatgagtttcattctaatgggatcttttatttaatgttttggttataatccaacgcagtgagccaaatcaagatg

SEQ ID NO: 36826 - DNA, 3003 bp, Unknown; identical to SEQ ID NO: 36817
  misc_feature (1)..( 3003): 2750-1469P.txt file - cDNA_ID_3100609; gDNA_ID_2936586; Annot_ID_195113

SEQ ID NO: 36827 - DNA, 3000 bp, Unknown; identical to SEQ ID NO: 36818
  misc_feature (1)..( 3000): 2750-1469P.txt file - cDNA_ID_3100615; gDNA_ID_2936586; Annot_ID_195112

SEQ ID NO: 36828 - DNA, 3003 bp, Unknown; identical to SEQ ID NO: 36820
  misc_feature (1)..( 3003): 2750-1469P.txt file - cDNA_ID_3100620; gDNA_ID_2936586; Annot_ID_195110

SEQ ID NO: 36829 - DNA, 3003 bp, Unknown
  misc_feature (1)..( 3003): 2750-1469P.txt file - cDNA_ID_3100629; gDNA_ID_2936586; Annot_ID_195108
aagaataatgtctcctcttcctccttcttcttctccattcgccttcaaggtatttctctcttttgaatcaagaatcaggaaacaccttgatctctgtatcttctctctctctgggttctgttttgctttctactttatgctctctgttttgatcctctctcgttgacttccatcactatttcttgactcaagaacaaaaccaagacccagcttctcttttgtctcttcttgttttcttcatggtgctttttacttgcatgttcataacgaattcacattaatcagctttgaataacctgttgatgagacaccattttgtttctttttttttgcaggaacaacaaggtagaccacctccaacaacacaacaaaccatagcaggaaaactctttagaactcttttcaagggtcttctcttctcacaactaaccttaatctcacttttggtgatcgttctcaccattcgcggtctcatctcagcaagtacacaccatttccacctcaagaaatggtaccctcctttactagcatctgttgctgtctcaggaattgcatctttagcatggcaatgcatctttatctacaatccatcaagagcagtcaaagcaacgttctggcttagcccaatactcacctgctcggtaggaatcttgcttgttttgattggctcagcggtagatgcaggtataggtgcagtgtttgtccttttcgccattactcagtccctctatggttgctggattactccgaggcttgagtacaccgataaaatattatcacttgccacagcatttccacctgcaagaaccagagaagtagtctgcttatcaatcatagtcagtgtcgtttactctggtttcttggtgactggaattggaggagcaacttccactagaacaaatcttgatatcttgttcatatccgtaatcataataagcttagcatggacgatgcaagttatcaagaatgttcaacaagttgcgatttcacgggcgagatatgtaaactttgcacatggagaagatatggacgcttggaatgctttccgcatcactatgaaacacttgactgggagcatctgcgttggctcgacgcttgttccaatcatcgtattcataagaggatcaataagaagtgttaatctaatgtcagggagcagcgatgaggtcatgtattcaggtgctgattgcttctctaccattgctaacaaactcattacacttggaaacagatggggctttgtacatgttggaacctatgataaaggattcatggaggcttcgagtgatacctggaagaagttcagaagcacaacagggttggagaaactgattgactcggatctcactagctccttctgttttctcagtgctgtttctgttggagctgtctcttcattaactgctgggatatggatgttgttaatacacaaggactatgccctggaagtgactctctatgctttcataattggatattttgtggtaagatagctaattttataaaaatatgaagaagacttttagacaaagtggtttatgttgtgtacctggttttgagtgttttcagggaagggtaggtttggcgtggctacaggcatgtgtattggcttactatgtagcttattctgaagatcctcagagcatgagatttgatggaacaattccacaacgtattcagcgtcttcaaatgttaagtgctcaccgagataacagggagcttgaggtgggtagagacagagaagaagatagttataacaattgttgagtcatgaaggagtctcgctacatacatgtaaagaaaaacaaggattactactttatttcttcaaacttatagattcttctattgataggcaaaaatcttagcttcaatgtgtttatatgtatgccaaaactccaactaaagaaagaatgcacatactttttctctcaacttagcaatatgtcccattatacagtgggacttaagattactgaaattttcaacacttagaaatcttgagtttttagcatactaccaatttacagcaaaaaataactaaatttgttccatatgtgacagaagtatactagtgatcataatcacaatcattatcaacattaagcacaagtacattctaatgattaacgaaaaaacaataatctgaagcaatagaaggaagagaagctactgtacatttggaatcgaatagccgataggggaatccgccgcagattctggagaagaatttgcagttcatcggagagagcctatgattgaagaaatcagacaaaagtttcggaggagagatctcgaaccggaacaaaaagtttatattggtattgaaattaaaatcgattttgggtttggtttagactggtttagagaggaaaagaaaaaaatattcacgcgatggtgattttggagacaagtgcgttgataaaaaaaggcatgatttcagaaggtaaacccctacagaattgctctcacgctctctacgcgcactttgtgcgagtggttctgaaatagagcctcttgattggctaaaaaactctaaaaaaatagcaatagtagacatgttgctagctcttgttattatttagcttttctacaaaacgccgtcgtttctatttcgatcgtttcagcttttgacattgatccgaaccaatcggttcaactggcttagtctatccacaggttcgtataaaaaaatctcattttgtcatcaaattaagcagtaaatttatattaattaatcataagttaatgtttaaagacaaattctatttcaaatttctaacgaatcagacctaattgtccggaataaatgattggttctgaaaatatcaattgggaaattaaaacccggttcaatttgaaaccggaaacaagactagctacgcctggaaactcacacagagtcacaggagaagctcccgcgtctgcaaggaacggataaagtctctctctttctcacacacactctctctctctctctctctctcaaagaagaagaagatg

SEQ ID NO: 36830 - DNA, 3003 bp, Unknown; identical to SEQ ID NO: 36821
  misc_feature (1)..( 3003): 2750-1469P.txt file - cDNA_ID_3100639; gDNA_ID_2936586; Annot_ID_195105

SEQ ID NO: 36831 - DNA, 3003 bp, Unknown
  misc_feature (1)..( 3003): 2750-1469P.txt file - cDNA_ID_3100648; gDNA_ID_2936586; Annot_ID_195103
aaagattgtttctgctaaaaaacaacaaggtgagaaagaatgtctaagatgatataaccttagaggcttagcatcaattatccctgcctaaagcttgagatcctttagaatttctctaaagtgtatgattcagtcgttgaggtaacaaccgccaattcttaaaatgcaggttccaaagaggtgtctaaaaagcgcaaatgagactggtcattatttagagttaaacattaaagaaagcatgagctcacaaaacactatgatccatcgcgagctctgcatgattcaactagcttttccttcttgatgacatatacaacttttatggtctgcagttttttctcatttacaatctcttctttaggtaaaaaaaagtgttatgttgcctaaccaaagaaactcactgtttagttctgttcttcaaatttcatggcatatgtcaaaataaataaaccttttttaatagagttctagagcgtaaagactggatcgaaaaggagcccatcactggtaaattcagccaagagtgatccatcgcatcaatgatttgtaatgttaaacaaaattttaatatttagacttagaagttgtaatttattggtttattttggtcatcatagaagaattatttacatattttatatttttatttatacattgttgctagtttttttggaactatcaaattttacattctttgtttttttttctccaagaagttactgatttgaagaaacctatatctttgtaatgttacatgtactggagactggaagttacttacatatatgactttgaccaacatttctattcggattaaacaaagtataatcctaggttcatcagttccaaatttgtttctaccaattcagaagtgcttcttcttatggttgcataccttgagaagagaaagggaatgttgtgagtaaagcatcttcttaaggtattttttagtttccaggtccgcaagtgagtaaagctcatggtttaatccatgtatgagctgcatctccccacttgagctcttcgaaagctaccctcagcgaatggtgttgaaattgtgtttagatgtaacaggctccaattttgctataatatgcttaacatcgtctaaaactgcaggaccatacatatcagagctcgcagaagcagcagtaggtgacgcattaggaacctattaagaggcaatcaaaacgacaagagagcaataaaagtttgtgaggcatttggaacctattaagagacgacaaaaatgataagagagaacaataacagttttgtcttggccaaagtccacagagtacatgtaaccgagttagaggtaccttgtatgtgcttgtttctgacacaaaaaccgaactaaggggaatgttaaaggccgctgcagcaacctttgtatgcatatccttaacccatttcaacacctccatgtgtcaccaaaacagtcccattggtgcaaacatgaacaagagcaccggaagtatcttaaaatccagattctagatttgcaagcaacggtagtgcaatgctgagatttccaaacaagctttatattattcttttaactttaaagtgaatcctttttctagcaaaatgaggacaaacttttaccaattttcacatttttagaaaaatattcaactcactttgatttcttaagggctcagctgaatctagttttcaatgtctgcagaacaaaatgaaaatgaaaattttattatctcaaaatccattctattttttttttgtgtgacattaatcaatgatttcaaaataaccaaaaacatacaaattttatgtttcattcttattattatcaatttatcatcctcatcctccctcagctcctgaaaactatgtcgttttggaaaatgacgaaaatacccttgtatctgtattgctatgtaaactactgttgtttcaacaaacataaaattttgaaaaagtaataataagaataaaataatttatttcataatctaaaaaaaaacgaataatctaatagattgaaggaggacttaataattagaacaaggttatataattagatatattctttttttttttaaggttatataattagatatattcgtttttttaaaaggttatagaataagatttcattgcatcttaaaaccagacaactttcagaactgaagaatgacgaaaaattaataatagaggaggagaggaggagctacatcaacattatttctattttttcagccaatcagagcgctccggacttcgcccactcgcaccaacctcgcgccacgcgctccattccatgcccactcgcaccaacctcgcgttgaacgcgtgtcgtcgatttctgtaggggtaaacccacaaaatcatgcctattttacatctactcgctttgtttccaaaacagcctcgagtgacttttttcttttgttttttttctcaaaaccgtattaattctaatgcaaaccgaaccaaaattaatttttatttcaaaaccatctaaaccaaacagaaatcacatgtaatttcaaacccgaaccgaaatcaattgtcatttcatcaaaaccatgtaaaaagcttctacgattgttttaacttgcaactgaaaatagcaatcctaatttatcaacagataaagatagatacatgcaacactttacttttttatttttggttttgagaagatgattacagttgtgattttggtggagacaaaaatgtccatctctgtatgttgctagccgatcaaattttacattcaaaatcctttttgataaaaaaaataaaaaaattcaaaatcctttatgatatattgggcctaagatgatttccaaaaaaaagatgatgagaaaagaaagagaacattattgggcttattgttaaattatttcggcccataaaataaagtccaggtcagctcacaatacatgaagaaaaccctagttcaagcgtatataaaccctctcggcgctgccattgaaactctttcaaggagagagctgctactctgcaaccatg

SEQ ID NO: 36832 - DNA, 3003 bp, Unknown; identical to SEQ ID NO: 36831
  misc_feature (1)..( 3003): 2750-1469P.txt file - cDNA_ID_3100648; gDNA_ID_2936586; Annot_ID_143859

SEQ ID NO: 36833 - DNA, 3003 bp, Unknown
  misc_feature (1)..( 3003): 2750-1469P.txt file - cDNA_ID_3100659; gDNA_ID_1620852; Annot_ID_50997
tacctccaatagcctctatttcccttacaaggcgaaaatggcttctgttcaatgtactcttgaatgccatcctttcaagcaagtgcgtcgctccacggaattgaggagtctcataaatagaaccacagtcaacgtataaaccaatggaagctgctggattctgaacaaaatttcactcaaaatcactttccagtagtttttaacaggaagttgatgttgggattactaaaagaagctctcaccggagacatctcagtggctatagtcagaccatttggaagagtagtggtcttaagtttgctaggctcaacatggtcagagagtggtggtggaagagagacaccagccaagggaatgttcatagaaggaagtgaactagagtagcctccacttagccagctggaggaagaagagctcgttgcaacagcactagaacttgcataacgagaagctcgaaaattgtggtttagaatgccctataaacacacacacacacacacacatcctaagcatcattaatctcttgattcaattaacattgtaaaaataagaactttcgaaacagagacatttcataaacctgcaaaaagcatgaataatggcaccagctactataaagcgataaaattgaatcaagatctataagaatctaagagaccctttaatccaaatccaaaaacaatgaatcatacaaattgttcaatactaagcattctcctaaaaaaaccagaatctcaatggaaacaagtgaagtaggacattgaccttaagggccttggctcgagaagctgccgtacggtacatgatgatgactgcgaaaccctagcttggtcagatgagtaccggtgaatgtggctgacgacgggagagagatagaggccgagtcagagctgaaaagaaacgagagaagggaacgattttttttcctaattaaggttattggatcgggcaattgcttctaattacattgataggcccatatgatataatagtcttggcccaaattataacatatagaaaagatgaatttaaagcccatgtattgtagtggtgtgatcctattatattttctctcaattatattttttttcttttctttttcacgtaccattgtgtaaaaattcaagtaaggtaacgacatttacatgcagtcacaaatgaaacaagaatttttttgaggtgtgtgtaaagtgaaacgaaaaaagtactaagaaagtttatcttctctaagttaatagaattattttgaaacgtagtatccacatatatagaagactcgtgtgtggtgcatatatatactgcataacttcaattgaactgtattatataactatgactatccatccatgggaagataagaatgagagccgaatgctaaaaagcaagggacccgaattaaacaaaaatgaataaaggagaaaggtttgtgtgattttgtcaattgtcgtcgtttagtggatgtgtaaaaatactaaatactataacaggtggtgtgggtctatctttttttttttttggtctaatgttaaatgtgggtctatcttaataatgcagaaatagtgcaatacgattcatgagtggaaaaaatcatatttgggtactctcatatatagtctcattaatcattatcaccgagtggggcgtacgatacactttttcttctttatctgttttcatctaatcatcatactgtatgtctatattatcgtagcattcatcatcgagttatgaaacttatgccaaaagaaaagaaaaaaaaatcatttgagattggttaaatttctattttaagatttaaaccaaaatgtttaaagttctataagctctaattaaagtctctgcagtccattaaaatggataattaggatttgccgaacttgaaaggagtaatgcacattttgatgctcacgtgaacaacgagttgtaacggtttcgctataattggaggcagatgagaaatggtcgtgtgtgagttttaataccacgtgattaacggagccacaatcatattcatgggccattctcatgagctataatttgaggtgtagctgagagatggtcaaatgccacgaactttgagtatttctttcttaactttgcatttttttagacgtaagttttttttttcatagcctacatttctttgacaactcataacctacattttgagaatttataaatgtcaatttatcatttaaccttctcacgataatgcaattcctatggtaaatgtcaactcataacagactctacgaagaatctacgacactgtgaaaatctctaatccaatattcaaaagagagttaaaaaaaaaaaaaaaaaacagaagagaacatctttacgatgctgctttcacgattttaaaattttaggtgattttttttggaattttggaattctctttacaaattttatgttgtaaggtagattcaattttaaaaaaaaaaagatatttagattaatacaagttcctaagtcctaactaatcaaagcttccatccctcgtgaagcacgagttggttgaatataaagtctctcaaaaagaaaagaaaaagtggttagtattggcagaaaaaaaaagtggttagtattggatgaaaagagaatttaatgttcgtattcaaaaatgttttatatatactatatagtatatatacaaaatcccaagattaactcattcatattccatcttcatctccatttctcacactcaaaggtgtttcttccttccctttaatgtactccttttttctttctttcacaaaatcgttatattgatttttactagttttatttgaattattgaatttctttatatgataatgaatctatgagaatatgataccattgtttaaagtaatgtcctagtggaagtattatagtcctcagattagattagtttcatcatcatgaaagtgcttgagtagtgtctgttcatggctcttgtgcgtttacagtttctaagaaatgggtactataactttaggttaagaagaaaagatg

SEQ ID NO: 36834 - DNA, 3003 bp, Unknown
  misc_feature (1)..( 3003): 2750-1469P.txt file - cDNA_ID_3100661; gDNA_ID_2214611; Annot_ID_135745
gtggagcatttgtttatacagccatggttaattatccaactgcagctaatttcatggcgccactgcctggttatcccgtagagcaggtgagatattcattcgttaaagtgtgtcatcgagtattttctttttcccgaccgtcattttctcttgcatcagatgtgcaagatcatcgacgggttccctcgaggatccagtaatcttgaccgtgcctttgctgctgcaagcttatactacaactattcgggatcagaaaaatgcttcgagatggaacaacaaactgatgatcatggacttgatggttggcaatatcaggtaaactcatttagaccgtcatttagatatttgaacatattctaatagatttgacgatttgcagtcgctagagcaagaaatggttttatgttatgaaacttaaaacttataaatgacacaaaatgattattgaatggaaacaggcgtgtacagagatggtgatgccaatgagctgctcgaaccagagcatgctccctccgtacgaaaatgactctgaggcattccaagaacaatgcatgactagatacggagtcaagcctcgaccccattggatcaccacagaatttggtggaatggtcagtttttttcttcccctccattggatcagtttcttcggctgtaagattcaatatcctgctctttggtcatcttttgcagaggatagagacagtactgaagagatttggaagcaacatcatattctccaatggaatgcaggacccttggagccgtggagggtaagtggtactacacagtactattcggttttggttcttaaacagatggattattttcatcaaattttcagggttctgaagaacatttcaagtagcatcgttgcgcttgtgaccaagaaaggtaaacacttctgttatgtttatgaatgttggggaaagttagacagagatagatttgagtgaaaaatcgaaacctaacattgttttgtgtggaacaggagctcaccatgcagatctcagggctgctacaaaagatgacccagagtggctgaaagagcagaggaggcaagaggttgccattatagagaaatggatcagtgagtattacagagatttaagagaagagcaatagaggagccaaacaaaagtttattgcactaaaaatcaacaaataaagaaactaggtgtttttgattcggttcgtgtaacaaagtaaaagcttcaccaggaatttgtattccctcaaacaaaataatctgatgtttgtttctctatggagtgaattctgtaactaatatctgattatatcgtggcattcatgaaaatgttatggaacaaagagggtatcatcgcaaatagtcaaaaatgtcacgcgtatttaaaccctaattagacaccgagaacataagtaacgtacgacacattcttcatgaaacaaatgcgaattcaattagattcctattcttcttcttcgctctcttggtccaaatctgttgtcgaggtaggagagttacaagtcccgaaagtgtatcccttctgtgtcaacttgacggagaccatcatgaataaaggttcttgtggcaagtcagatttttgacttcttatcccgtttggcttggacaatctgatcagctatatgttcggacaagacatgatcgtggaattggcttaggagaagttgatagacgtagtttggttcgaagtttctgaagtctagaaagattagtgggtcgggacctcgagaaggattctggtaagatccgagactcgtgacgctaccatccctgtcgtttatgataaattcctcgaagtctctgtctcgactgatcattaccgagtttaagaaacctgacgatgatggagtacgagaccaagcggttacatgaacatcgagtttcattaattcagtatccattgtcgaatttttattcgacaaaatcagagagaaaatatgattcgtggagaattaaagtgtaatgttatgtttttataagcatagatctgattataatttgttctaacttctaacgcgtttatggaatttccttttttgtctccattttttttcttttttcgttcttattttctttttgtttaaattgtttaatattatttgcgggtttacgatgtgtttatagataagatattttataaaacaaagaaaaaaagaaaatctttctaaaaactgtaattaatatttgctataatacaataaaaagtaaagtttggtagtggatcatgctgaaatttaaccttgaaataactaagttaatgaaatttgatcattttataaaaagttaaactaaattttaggatttaagtgttttttcgaaagttcataattttttcgttcaaaatttaaaagttttttttttttttggttcagactatgaatgatcatttgatcgataacttgttttttattgggttttgttggatttctcatagtaatttcattgttcctccttgtctttgcgattgtcctctttgacttcatggtactgaaatcttttttggatctttctattttttggaaattgcttggatagctcccgatcgtttatctttcaatcaaactacggtttcatttttctaagcccaaataatctcgatttccgaaatttcatttcacaaggcttcaaactaactccgaaagatgtggaaaaatttagtgaatacgaaaagatgtgggacgcttcataaataaagatgtgcggcaattttgtaattacgcaaagatgtaggcaattacgtaactacccaaagatgtgaggggatttcgtaaataggggaaaggtatgggataatgtcgtaattaccaaacgatgtgggggtgatagagttactagtgccaatcttggaatagatagtctccctccagttacagtgctctcttttccactatcgccatgattgctcaaacgtgaattgaatgatctgatccataatctaaaaaattgagctttcatcagtaaccgaagcaatggcacggaggtctggaaattgcatg

SEQ ID NO: 36835 - DNA, 3000 bp, Unknown; identical to SEQ ID NO: 4735
  misc_feature (1)..( 3000): 2750-1469P.txt file - cDNA_ID_3100665; gDNA_ID_2926149; Annot_ID_139240

SEQ ID NO: 36836 - DNA, 3000 bp, Unknown; identical to SEQ ID NO: 4735
  misc_feature (1)..( 3000): 2750-1469P.txt file - cDNA_ID_3100665; gDNA_ID_1620725; Annot_ID_49267

SEQ ID NO: 36837 - DNA, 3000 bp, Unknown; identical to SEQ ID NO: 14136
  misc_feature (1)..( 3000): 2750-1469P.txt file - cDNA_ID_3100679; gDNA_ID_2214702; Annot_ID_136889

SEQ ID NO: 36838 - DNA, 3003 bp, Unknown; identical to SEQ ID NO: 28332
  misc_feature (1)..( 3003): 2750-1469P.txt file - cDNA_ID_3100683; gDNA_ID_1971823; Annot_ID_58359

SEQ ID NO: 36839 - DNA, 3003 bp, Unknown; identical to SEQ ID NO: 28332
  misc_feature (1)..( 3003): 2750-1469P.txt file - cDNA_ID_3100683; gDNA_ID_2926152; Annot_ID_139355

SEQ ID NO: 36840 - DNA, 3003 bp, Unknown; identical to SEQ ID NO: 27963
  misc_feature (1)..( 3003): 2750-1469P.txt file - cDNA_ID_3100686; gDNA_ID_1620823; Annot_ID_57821

SEQ ID NO: 36841 - DNA, 3003 bp, Unknown; identical to SEQ ID NO: 28334
  misc_feature (1)..( 3003): 2750-1469P.txt file - cDNA_ID_3100714; gDNA_ID_2214482; Annot_ID_133290

SEQ ID NO: 36842 - DNA, 3003 bp, Unknown; identical to SEQ ID NO: 28335
  misc_feature (1)..( 3003): 2750-1469P.txt file - cDNA_ID_3100721; gDNA_ID_1620666; Annot_ID_48060

SEQ ID NO: 36843 - DNA, 3003 bp, Unknown; identical to SEQ ID NO: 28335
  misc_feature (1)..( 3003): 2750-1469P.txt file - cDNA_ID_3100721; gDNA_ID_2926191; Annot_ID_141034

SEQ ID NO: 36844 - DNA, 3000 bp, Unknown
  misc_feature (1)..( 3000): 2750-1469P.txt file - cDNA_ID_3100726; gDNA_ID_1621153; Annot_ID_56915
gattattagtttaagttgttccttgttactattggaagcctacagatgaatggctaaatgccgatgaagaagatatttaatagtatgcacaacatgcgcatgttatcactcacctccagagcagcttgatcctgaggcgtgccattgagagttgtttcaaactctttgagcctttgctgcaaaatgaaaaaaaatcgagatgtttactacgtatcttactttattcagattatcaaagttcatgaacgaaatcttcatgatcagcccctaatattacctgaagcgtggctttctcttcttctgaaatttgatttttaactactgttgtgttcttagttggactatcactgaaaagtggtaaaaacattgttagaactgacaccggctaaattacatgacaacatgacttggtatgacaaaaatgtgaaattacggaaaccaacccagctgatcctaagaacatatgatgtcatcagaatctttacacaaacaattacaaactggaataaaaagaaggaaaatgacaaacagtaacatggtgtaaatgacacagttatgacttggacttcacttaacgcaccttcccgtgggaagaaagtcaccaagagcaaaaaccaaaccaaatacaacaacagctatgccaactccaacctgtcatggcatgggcccaagttttgtcatgttatgtatgagtagcttataggcctcaagtggttttagaacaaaataaaaaataaacacttgcaagatgttatgtatgcgtaccttagtaccaagaccaattgttttctggtcagacttgactggtgcatcatagtcaattggaccaaattctttaactacttctgtctttttctgctcaagagctgacctgattcatcaaaagagcagaggtcacagaaataacattccgatcagtgggaggacaatgatcttgactatgtctagggggtgagggaagtggaaagcaagacaagtgatgaacaaatcaagaaaaaaaaagaatcaaactttcataggaagatcatgtcgttgtgggtataatgagaaagtcaagtgtgattgtcagaggaataatcctattgtaacctatatatctctaaagccaatcttcatgctagaatcataaaacataggtaccttctgatgttttccagccgttcatcgaagtctatatcaaaagatcgaccagattttccttcaaactgagtattcagaccaggtgcctctgcaaacaaatgcaggagtttcttgagcaaacctttcaattgaaaccaactttttgagataaactgaagaatgcaaaaatgaagttatgttcgagacaccatgaaggagagcagcaacatctgttacgtacaatatgctttaaaatcaaattatacttacttctgggtacagaaacagactgtttagaagatgatttcctgcagcaaagaagtccatatgaaaatataacaacagcaatttaaaattctaaatgctttaaacaaacacaaaaactatttatacctttgctgcaatgccgggtctttctcttcctgtgatgcgatttcacatttttgtctcagtactttgaatcaacaaaattaagttgaacaaagaagaatttggaatcaaaccttttttgagccgaagccacgcttagggttagaatccgagcaacgtattcgaaataggagaagcttcgagttaaatgaaacggaggtcgtcgccgctagtgtcatcaacatcctctgtttgtattgtcctaaccaaaacagagaattttctaagaaagtttcaaagaaataatgagaagtaacggctacgaagagaaattcgtccgccggagattgacgatgaaaggtgagctccgtgatcgggccggtaagataacgttagtggttcttcttcttcttcactttgcagattgtctattatatgggccgaatggcaaaacataattttgggctaggcccatataatattcaaatgttaatattccaaaattgatgggtatttttgataatttaactcgatctatataatttaacaaacgaggatgattttaagtttttaactttttaagtgagaatagtgattaagtgtcaacgactcattggataggatgtgtcataaaattagtattgaaccactgaggagtgaaaataaaattaaaggtagaaaaattaatttaggaaaaaaatattcggaaagttctgtgaaaagtcttcggatttagaacggagacagcgagaggatagagcgcttcttcggctacaacaagctttcgctaatggcggtttccttctgatcactctcaccggagccgtcatcttctctgttttaccgatttttagggtttgtttccggataaactcttcgtatgctttttttttttcgttggattcgtttctggaaacgtatccatttcctgtctagagatcatgtgaatttctcttagaacagaactcagatctaaattaaagtaacggtgcttgattcattaaactcggaatgcaaagtcccttgcgttttattcactgaaatcttagtcgattagatcttgaggtctgtttgttaatcgcacttttctggggaattgatcgtagaagcaattacgctcatgggaaatgatgaaagttatagctaaactttactgtagaaccttactctgattatatttcatttaaaaatgctatttggttggtaaagagaaacatcacaacttttcatacttttctatttttttcagaaattttgattgtggtggaaacttgttgtggcaactctactgagaaagtttgaagaagctggaatcaaagatatagctagagttaagagggttcatactaacttgtgctcgttttgtgatgtgctgttgttaacgtttggaggaaaaagttgtagtgtattaaaattcagcgtccgagttctggggcggagttgccccatagcattgactttacgcctctacacatagtccgaagggctaattcagctcaaaacatgatgatg

SEQ ID NO: 36845 - DNA, 3000 bp, Unknown; identical to SEQ ID NO: 13841
  misc_feature (1)..( 3000): 2750-1469P.txt file - cDNA_ID_3100736; gDNA_ID_2214656; Annot_ID_136501

SEQ ID NO: 36846 - DNA, 3003 bp, Unknown; identical to SEQ ID NO: 27818
  misc_feature (1)..( 3003): 2750-1469P.txt file - cDNA_ID_3100742; gDNA_ID_2926238; Annot_ID_142792

SEQ ID NO: 36847 - DNA, 3003 bp, Unknown; identical to SEQ ID NO: 27818
  misc_feature (1)..( 3003): 2750-1469P.txt file - cDNA_ID_3100742; gDNA_ID_2926206; Annot_ID_141752

SEQ ID NO: 36848 - DNA, 3000 bp, Unknown; identical to SEQ ID NO: 28271
  misc_feature (1)..( 3000): 2750-1469P.txt file - cDNA_ID_3100748; gDNA_ID_2926230; Annot_ID_142617

SEQ ID NO: 36849 - DNA, 3000 bp, Unknown
  misc_feature (1)..( 3000): 2750-1469P.txt file - cDNA_ID_3100758; gDNA_ID_1621127; Annot_ID_56391
caaagctaatgactcggtcgttccggtagacagtcaaccgatctacacatctcttttgtcaatacgtgggagccctttaaggcttttatcactattattcttattataacatgataaaataaaataaacatgatctctctttctttctgtctatttgtttctcttatttctacgtgtgtggactcaaactaaaatttagtttttattatcttctcgaattttaaattataaggtcatgccaaataaggtgacacgtttcttcactatctagttattttagtcatttgacatagcatatcagtttttttttgtttttttcgttggtggttttaatcatcaaactttggcgatgaaaacataaaaaggaaatcaacagtaaaacaaatatcaaatataattatgatactataaatttgtaacattactatatgaacaacataactaattcaccaaccaaattttttttttctttctaataaggtttattatgggcaacacatgttatcacgataaatataatatagactatttggatatgtgttattagttgtattctttttctttcttatttttttttatttttatttttttctatattttcattaactattattttataaggtaaaaatataaatattaaaatacattcgtctgctaaaattatccaatgtaatattgcaattcaaaattaattgtttcagaaaataatctcagtagaatgcgctcttataaccgcatgtagccaaccaatgagcgattccaatgattagtaacactaaatctcttcgacttttctaaatttgttgaacctgtttcgatttctttatccggtttgtatagtaccattttttggttatccttcaacaaatttaacaaaaaaaataaaaaaattgcatttacattatgtagtagtctaataaaatataattatagataatagaaaagtcaatagttctaatatgataacaacaaaagaaaatgtatactttaaaatctgaaaattaccattcttttatttgttatcccaaacataagccatgtactataattaggttattgtaatttattataaaaaaaaaagaaagaatattcctgtacttcatgatttctttttgtaacgaagtacataaaattttcaaatcacatgtggtaaccatgatttaacaaaaaattaagtcggtgacaagcaacgaaacataaataatcgactttgtcaagatatgtataaaaatcgactttgtatttagagaacaaggtcttcattatttttcttttttaacattagagaaagagaactaaaggtctacttcaagaaaacaagaaactaggtgcttagctttaataatatatcaaagaaaaatgggtcaaaaaataaattattacatgagtggggcccggccggccacggaagtaagacctaacgaccagcgcaaccggtcaccagtcaagactattagaagccgggccgtcaaaatcgttgactcggtttttgtttccaactgtttttgtattttgttaaaaataaattaatactaataaataagctgaaaaaaaagaaaagagaaaaggtataatcacgtggaacgcgccgcagtaaacggagcggtggatcaaacttttcgtccgtttgatcaaacagaagagaactagtcaatgctctttcttcatatcacaatttaatagtctcaagacgattacgccacataaccattttctcgtgatttcgacatcaaaatttaataaaaggaactgattgattggtcatcatgttacaagtgtcaaatgagctaatccgttttacagtggcatagtttacgatcaatttacaaatttttggttttataacatacttgtagttaaaactatttataagctatttatagtgagttagcttataaaaccctattcttttatctaaaattatgttttgactcgtttcatgataaaattttatccttttcatcggaataaaaaactttattatttatttggcaaaataattggtgtaaaaattatgtatatgttaataacaaaaaatattaatctgattcataatcttaaaaaagaaaaatttcttgaaataaactttagacattgtaaataaaaaaacattatttttatataatgggatgtttatatgtaattttttataaaaaaataaaagttgtttactagtaatccgattggctttaactatcgtcgccaaaagaataatgtagaactgactttgaggtaaaactaaaagaaatttgtaagataatagtcacattaaatgctaaaattaatacatactgatatatcgtataaaatttatgaaaactacaccttaacctgaatcatacactgtaataaaaaaaacaaattatatataaaccctaaaaactaatcataaatcccaaacggtgtactctctattagctttgaaaggattgcccaattgtttgttaaaaatttctaataatagtacaatgttttgtttcatttttccttttcgtcaacctgttacccaatagcaaatgaagtttttatgtgtgtgtgtgtgtgtgaatttccatgaaaatgaaacgggcttagaatcccggtgtattatgggtcgggtcgtaaccgggcaatgacgcaggatctgacgtaaaactcccaagaatttttttaaaaagtctccggaaaataaaatcaaagttcattaacttaaaaagaaaaaacaaaatcggtccacgtcccaaaccctttttataggagagtcttatgttctggcagaagacttcacagactctttcttaatctctctctctttcaaccaaacccctaaacaaaaaaaaaatacattttctgatctctctaaaaatctttctccttcgttaatctcgtgatctctttctttttctatatatggacagaggatggtctggtctcactcttgattcatcttctcttgatcttttaaaccctaatcgtatttctcataagaatcaccgacgtttctcaaatcctttggcgatg

SEQ ID NO: 36850 - DNA, 3000 bp, Unknown; identical to SEQ ID NO: 5721
  misc_feature (1)..( 3000): 2750-1469P.txt file - cDNA_ID_3100768; gDNA_ID_1620813; Annot_ID_50610

SEQ ID NO: 36851 - DNA, 3000 bp, Unknown
  misc_feature (1)..( 3000): 2750-1469P.txt file - cDNA_ID_3100772; gDNA_ID_2926240; Annot_ID_142870
gtcaaatcaccatttcatcttttccttttcactttattcagttttctattatagaacatttaacttgaaaaaaactttagcagtcgttcaacctgagaccagcagatgcctcagggagaccaaactttcaagtagctgttcccaaaaccaacttgaaggtggctgcaattctagagaaagccaacactcttcgccaggtctctccctctctccttcttggttaaatttggacacttgatataataatctgttgcacaaagaaaaagatataataatcttggggatcgataaagtggttttgtgacatacatataaataggcaatggcgggaagtgacgacgagcacgattcagatagctggagcgagtgagtcgttgaatcaaatctgcaggtaacaaacatatagatcacactctgtatagaagaattctcacattgtatgtattctcacaagtaatgtttttattgctgtatttttgacacattgtaagtcactctgtttttttcccctttatatgtacacccaattttaccctcttttaaagggaatcaatccagttgatgtttcagcatatttgcatgtttgatcttttcacataaacaaatactttacataagtaaaagtaagtgttataggacttgtaatttacatcaagatacattttaaattcaaccttcatcagtgcatatgcacaaatcaacaagtatgataaatactgatagtagatgaaaaacgatgttggagagcaaagtatttttaaaagtcaagaaacgctaagtttttgttatgacttctctgatttgttcaaactttttgaaatttgaagtgtgaactggaatgctactagtcgtcgttggaatatttagccacgtagtgtatgtctgagtctccttgaacaatcgtttccaagttgaaaaaagaaaagaagtgataataaaaagtcaagtctaagagttgaattgtcatcaaagtacgattagtggaagtggtacggtatacgtgtaaacgatcctaggaatattccgtacgatatccggcctaacacggtcaagagtcataacgtctcgtgaattctgtacttttttgtgcctggtagagttgacacgtctcttactatgacgacgttctgtttcgcaaagggtagtttggtcatttcaaaaaaatagccgtagtttggagtcgtccaaatcccaccgtcgccggctatactcgttatcctaattatatacgctctctgttttctaattggtgaaaaaagctttgtttaaactctttttttttataggagttcaattgtagttgcgctggagatgagtcggattcaattttgaaaggattttggcattgaagtttctataaaactccttgtttgaacttggaaattcactaaatctgttgaccaaaaaaagattattagcaaatgttttaggtgtttggcatataacttttctctaactttaagactaatatttaatcatgacgtaacttgattcaaatttggatttacagctaaaagaaataacacatctcatgagtcctcctttttagctgatttctattgctgttgtagaaccccatgataactcaggtttcctcttacacgtctgtttcaatatcaattttgttttagactaaaccatcttcttctttctttcctttttctctttcctgtccacgttagtttccagaatttggtatttgtagtatgtgttgaaaaatggtttgttttggagaaacggccagaaatattctagaaattcacagccttgttttcttatttgatgataacacgtattataacgctataagacacatgtatgcgtgacagaaagattattaaatatgaaattgtgcgtactgatatatatcatgccccttataataaaacttataaagaattggatcgttacctagaatagttttaggttattataagtacggtcacacaccttggagtttgaaataatatttcccagtctacatttactgttttgtctttgctgcgcactctcgttgtccattcaataatatttttgttggtttgtcaacttgtccatacaataattattttatctgacttttaactccttttcttttcttttctttttcatatgtataattaagctaaaaaatataatcaaaaattaggtcgggacaaaagaaaaggcacttactggttttttacaattatgtggttgtgacataatacacacagaaaactaataaaacgtgaaaaagaaaagttttagatatggaatatatcattggcaatggagaatcactagttttttttaaaaaaagttgggagacaagaataagattacacatttgatgaaaaagaacatatatctcccgaatattttcttggtcggcttgtctaattttttttttttttttatttacatgatatcaagtatatgttttgtgaagacgtcaaaagagtatttgtaaagattagatggtgttggaaaataagtaaaataatttagccgattattaaaggttaagaatataataattaaagtagaatggaggaaaagataaaaaggatatttaatgagagggaggtaagaaagataagagaggttctttcaatctatcgtactgtccgcactcgaatctgtccttcctcgcatgcttactccaccatatacttctactaccaatggcctaacttgttgattgcgacttctctcttccttttacctttttgcccctcccgtccttccccgtacggttctctttctttattttatttaccttttaccaaagttacacttctacccctatttttcttcaataagagatggaagagcaagggcaattaagtaatttgacaatatccttctccttcaagactctctctctcccacagaaaacaaactgtttgttgttaataactgtgggttttttccaaaatcctcaaagagagactatacttctctcggatccttcctgatttcaaaatttcttcaacccaccagcagcagcagcagatg

SEQ ID NO: 36852 - DNA, 3000 bp, Unknown; identical to SEQ ID NO: 5560
  misc_feature (1)..( 3000): 2750-1469P.txt file - cDNA_ID_3100778; gDNA_ID_1620803; Annot_ID_50512

SEQ ID NO: 36853 - DNA, 3003 bp, Unknown; identical to SEQ ID NO: 35460
  misc_feature (1)..( 3003): 2750-1469P.txt file - cDNA_ID_3100788; gDNA_ID_2926123; Annot_ID_138623

SEQ ID NO: 36854 - DNA, 3000 bp, Unknown; identical to SEQ ID NO: 11425
  misc_feature (1)..( 3000): 2750-1469P.txt file - cDNA_ID_3100792; gDNA_ID_2214495; Annot_ID_133558

SEQ ID NO: 36855 - DNA, 572 bp, Unknown; identical to SEQ ID NO: 15284
  misc_feature (1)..( 572): 2750-1469P.txt file - cDNA_ID_3100800; gDNA_ID_2926123; Annot_ID_138622

SEQ ID NO: 36856 - DNA, 3003 bp, Unknown; identical to SEQ ID NO: 27472
  misc_feature (1)..( 3003): 2750-1469P.txt file - cDNA_ID_3100805; gDNA_ID_1621103; Annot_ID_55932

SEQ ID NO: 36857 - DNA, 3003 bp, Unknown; identical to SEQ ID NO: 27477
  misc_feature (1)..( 3003): 2750-1469P.txt file - cDNA_ID_3100809; gDNA_ID_2926232; Annot_ID_142679

SEQ ID NO: 36858 - DNA, 3000 bp, Unknown; identical to SEQ ID NO: 4851
  misc_feature (1)..( 3000): 2750-1469P.txt file - cDNA_ID_3100820; gDNA_ID_1620736; Annot_ID_49494

SEQ ID NO: 36859 - DNA, 3000 bp, Unknown; identical to SEQ ID NO: 4851
  misc_feature (1)..( 3000): 2750-1469P.txt file - cDNA_ID_3100820; gDNA_ID_2926157; Annot_ID_139568

SEQ ID NO: 36860 - DNA, 3000 bp, Unknown; identical to SEQ ID NO: 6487
  misc_feature (1)..( 3000): 2750-1469P.txt file - cDNA_ID_3100843; gDNA_ID_1621095; Annot_ID_55635

SEQ ID NO: 36861 - DNA, 3000 bp, Unknown; identical to SEQ ID NO: 6487
  misc_feature (1)..( 3000): 2750-1469P.txt file - cDNA_ID_3100843; gDNA_ID_2926162; Annot_ID_139780

SEQ ID NO: 36862 - DNA, 3003 bp, Unknown
  misc_feature (1)..( 3003): 2750-1469P.txt file - cDNA_ID_3100848; gDNA_ID_2214479; Annot_ID_133209
taatgtcaccttatcatcaccagaggaggcttattacccgaacaagcctcttctttcattgaaccaagatctatcaccctatattttggagaacatgtatgtgggcttctcagcctcaacggggtctgttagagcaatgcattacatgttgagttggtttgtacatggcggcgttgatgttccaaacctggacttgggaataccaacatttcctccatatcccaaggaaaaatctctggtttatcggattgttttggtgaccagcttggcattggttctctttgttgcgcttgttgcatcagctttaagtatctttttctacaggagacataaaaaggttaaagaggttctagaggaatgggagatccaatgtgggcctcataggtttgcttacaaagaactctttaaagccacaaaaggtttcaaacaacttctaggcaaaggagggtttggtcaggtctttaagggtacacttccaggttctgatgcagagattgccgttaaacgaatttcacatgattcaaaacaaggaatgcaggaattcttggctgagatatcgacaattggtcggcttagacaccagaacctagtcaggcttcagggttattgtaggtacaaggaggaactctacttggtttatgactttatgcccaatggaagtcttgacaagtacctctaccacagagcgaatcaagagcaactcacttggaatcaacgtttcaagatcatcaaagacatagcctctgcactctgctatttgcatcatgaatgggtacaagttgtaattcatcgagacatcaagccggcaaatgtcctgattgaccaccaaatgaatgcaaggctcggggattttgggttggctaagttgtacgatcagggttatgatcctcagacatctagagttgctgggacattctggtacattgcaccggagctcataagaagcggaagagcaaccacagggacagacgtctatgccttcgggctgtttatgctagaagtctcttgcggtaggaggctgatagagcgaagaacagcctccgacgaggtcgtcctagctgaatggacattaaagtgctgggaaaacggagatattctcgaggcagtcaatgatggaatccgtcacgaagacaatagagaacagctcgagcttgttttgaaattgggagtgttgtgttcgcaccaggctgtagcaattaggccagacatgtctaaggtggtccagatcttgggtggtgatctgcagcttccagataatctactcgatatagtcaaagcagagaaggtcagaatgtggtctgagacatctgagagtgtacttggtgttttgacatcacaagggtccattggtaccttgacgttaacggaaccttttacctcccggggacgctgagacgtgatgctgagttcggtcgtgaaatgatatatgacatgtttgtttgtaaatattttatgttttcgattgatgacaaaggagtcagaaaggacacttgaccatcacggaagcgatgacttccgtcggacggtaaaaagtgatggtcgaggtttggtgagaaatctaaaaatgtgacggtgtttgcttgataaatatctttattttggtgattgtattgaatgtatcgttttgatttctgtttatacttatatcggcggtggaataattacacatgacctgaaaagtatgcgtttgtgtttacttttatgttgtagtacttgttgtgtttttcagctatgaaaagtctacatatttcttctgtgtgctaacttattggataaattggatatttttaagagatctaatgtttacacaaacgtatggtgaacaccaatggggatgtttacacacacttatgatttatgactgaaagagatgttaatcgaagtatatactccattgattaatgttaatcaccgaaagagatgttaaacaagcattaatgtttacacttaaatgtgatggaacgaaaacaaagaataagtttaaatttgttgtcatggtctcaatgaaaaaccgaaaacgttgtgctatcaaattactcaaaacgttgagctagctaaacttggcagaaaagtatcgaatgatgctaaaatgcaaaaaaccattaaacccaatgtacggtttatagagttttcatatgccaagtgggacatccacgtggagatcctatgccacttgtcccctctctgtctctttcatgcttcaaacttatttggcttttacgtggattctcacgcccgagtacgtcgattattacaaaactcacataaattaatataaacactttatattttgttttgacctttttaccccttctcattgctcatcaattttcatagatctaataccaaattatcacacatataggagagtcatctaacaattagcacaagtcatgagtgaaagagactaagcatgaatcataatcatctttgacataggtgctcaaaagtaatcaattttttcaactttactattcaactcaataaaagaatttttaatcaacaattcttttcaagatgtatcccttttttttcttgcaactttttctcaactatattaatatttagtatactgctacttagctactcgatgttttgatgtatcattgatcattattgttgactaataattatttgatacaaatattttaccgacatatgtaagaacaatagtgtcaaaattgaagcatctcaagggtattttagaacagatacccaatttatttatttttataatttgtcaccttgtttttcacacacaaatgacaatatgacgtcattttccttattagaataatttttttaacaaaaaaaagaattatttattttcgtctctcttattgcttgctacgctcaacgctgtgcataagcattctctttctgtggacgaaactaaacctgagagaaaaagccagaagaaccaaactcagaccgagagatagagattgagggagagctctagctctgtagaaaagaaggattcattcatcatatccagaaatg

SEQ ID NO: 36863 - DNA, 3013 bp, Unknown
  misc_feature (1)..( 3013): 2750-1469P.txt file - cDNA_ID_3100853; gDNA_ID_2214624; Annot_ID_135931
  misc_feature (3003)..(3003): n is a, c, g, or t
  misc_feature (3006)..(3006): n is a, c, g, or t
  misc_feature (3011)..(3011): n is a, c, g, or t
ccaattggtagagaatgtaggactaatgataagagaggaagtttactacttatatagattttaattgcttcttactctttttcctaatcaattcctttgtctttattttttattttcacaaaaagtaatttaatttgtctttttcgtatattctgattggttgttcttttcttttattgctaaaatatattttcttttaacataattaatgattttcaattatgttttagtcaaacccgaaagaaaaaggaaacaaattttttatatttccattcatgctaaaaagaaatgaaagtgtcacgaggtccgacccaaaggtcatacatgctaagcagcttatggttacttattcattttatgctttgcttatcaccaattttgttttatgattatggtaccaaatttgtttttactaaatagttgttgttcataaatatctgatactattttttaattaatgtgtggttgacaaaaaaaataatagaaaaaggtcatgtaaccgttttttttattcggacaactatttttattggaccggccatgcgtataacttccctatttggcaagttttggtctaccattctatcccaaataacaaaacttgggttttatggtctggtctacaactcacaaatcacaagcatagacaaatccgatcatgtggcaaattcaagcttcagattgttgttgccacacaccaagttaatttgttgatttttaaatttaaatttgttttcttttcgcttcttaactatttctttttggttgtcttttttcggaactattacttaattattactactactacacatttggatttgaagcactccataacctaaatcaggttttgtttttcattcactacatgaaattataaaacagagaaatgttttgtatggatttatattgcgtttgggataggtcggaattggttatataggatggaagaagctgatcgaatattcgaactagaggttaagaagcaacatgaaaacaagaaaccctaaattttgtttgtttgatatattggcttacctcgattaaatctgcatgatagcattgattcaacacattaattttaagcaacaaatctcgaactggtttcagataattaagaaagaacataaactagtttatggatccttttattaactctcaaaggtcaaagcagttgaataaaaaatttaactctaaacaacttattccctacccaaaaaaaaactctaaacaacttattgataagacacgaaaagaattgtaaaacccctaaaattcaattttgattttcataattcttaagtttttttttttagttaaagagataattctaagacttgtaaatactaattttaataaaacttgattgacacggaaatagagctacaaagtccacaataaacagagattaatcacaaatcatagctattctgttcgttgacataaaagcgaaattaaatcgaaaaaactatataggacaaaacgaaaaaaaaaaaatgttgaaaatatcctgaaatctactgcaaataagaaagaaaaaaaaaaagaaaaaacttttattgctctttttttacctctcaacgcaattgaataaaattttaatcctgaacaactaaattcacaagaaacacgaaagaattgtaagaaccctatgtagaattaagactttgattatagatgcaagattataaaagactattcttttattccttcgaaaacttactcaaaacccaagttcttacaatctcttaatctctctctcaaccatctaaggttttccacaacttggaaactcatatatttagagactaacatatccaaaacttactaggattgtaattagataactccaaacttttttttttccgctagataactcctaacttatcctttagatatctcctaaagatttaatataatcctatttaaactaaatcacttatatctcaagttattaccaagcttagtccaagaccctaaaactcaaatttgattttaataattctaagttgcaaactcatgacacggtaatagagatatagtccgaatacacagagattggtcacacagctgagccggagtcggcagtggagctacaacaacaacaggatccagccggagccggtgacggaactggagctggaaccgagttggatccggtgctggagtcggggctggagcaggagccagtgctagatccagacaatccagcgtcgtcctgacggagaccattgagtctagttgcaacaaaagctggagctgaagttggagcaggagtaggaacagcggaagacaaagctgaagcttgacaatccagggtcttcctctctgtgactgagttcctcctgcttctctttctccttggaacatcatcaaatattctccggcatctctcacgatccattctccgcgtacacctagctgactctgacaaaagaaagtgttgtttgctccacaaggaacagataataagaaatagattgactagggtgaatgagagaggagattatatatgttttctgttttgtaaatagttttttttcttatttattctttctctcagtcctaatttttaggcttttatttcttttatttacaaaagtatatcagtgattctaaatgtaatatttaagataagttcactaccattagtccgttaccgacttaccgtcctgtgttattagcgaaaaaaaacaaaaaaaaacatttttgagttacaacaacaatatgttcatgacgtgtcattttcttatttgatagtttttagtctacgattctatcccaaataacaaaacagaggtttctatagggttttaagtgttttgtttttgctgctggggaagaagaagaagcagtggcaaatacagttctgttgctgggtttgttgattttttagtcaattctttttttttttcttggcgatttaattttggaattgaacttgaaaaatctcattgggttttcgattaatttaatcttgttcattttgtttcaggaggaatgatntcntdktnag

SEQ ID NO: 36864 - DNA, 3 bp, Unknown
  misc_feature (1)..( 3): Matrix.001 file - promoters75/1007152
tct

SEQ ID NO: 36865 - DNA, 9 bp, Unknown
  misc_feature (1)..( 9): Matrix.001 file - promoters75/1007152
attttgatt

SEQ ID NO: 36866 - DNA, 8 bp, Unknown
  misc_feature (1)..( 8): Matrix.001 file - promoters75/1007273
aaagaacc

SEQ ID NO: 36867 - DNA, 7 bp, Unknown
  misc_feature (1)..( 7): Matrix.001 file - promoters75/1007273
agattac

SEQ ID NO: 36868 - DNA, 12 bp, Unknown
  misc_feature (1)..( 12): Matrix.001 file - promoters75/1007370
caaaaatttaca

SEQ ID NO: 36869 - DNA, 8 bp, Unknown
  misc_feature (1)..( 8): Matrix.001 file - promoters75/1007967
attcttaa

SEQ ID NO: 36870 - DNA, 9 bp, Unknown
  misc_feature (1)..( 9): Matrix.001 file - promoters75/1007967
aatttgaac

SEQ ID NO: 36871 - DNA, 10 bp, Unknown
  misc_feature (1)..( 10): Matrix.001 file - promoters75/1008148
atatgtgaaa

SEQ ID NO: 36872 - DNA, 8 bp, Unknown
  misc_feature (1)..( 8): Matrix.001 file - promoters75/1008218
atttattt

SEQ ID NO: 36873 - DNA, 9 bp, Unknown
  misc_feature (1)..( 9): Matrix.001 file - promoters75/1008218
catttaatt

SEQ ID NO: 36874 - DNA, 8 bp, Unknown
  misc_feature (1)..( 8): Matrix.001 file - promoters75/1008218
gtatagtt

SEQ ID NO: 36875 - DNA, 10 bp, Unknown
  misc_feature (1)..( 10): Matrix.001 file - promoters75/1008218
cttaaatcaa

SEQ ID NO: 36876 - DNA, 8 bp, Unknown
  misc_feature (1)..( 8): Matrix.001 file - promoters75/1008218
tagtattt

SEQ ID NO: 36877 - DNA, 10 bp, Unknown
  misc_feature (1)..( 10): Matrix.001 file - promoters75/1008218
atatttcttg

SEQ ID NO: 36878 - DNA, 10 bp, Unknown
  misc_feature (1)..( 10): Matrix.001 file - promoters75/1008443
ataaaaaatt

SEQ ID NO: 36879 - DNA, 12 bp, Unknown
  misc_feature (1)..( 12): Matrix.001 file - promoters75/1008443
acaaaaaaaata

SEQ ID NO: 36880 - DNA, 9 bp, Unknown
  misc_feature (1)..( 9): Matrix.001 file - promoters75/1008732
agtagtttc

SEQ ID NO: 36881 - DNA, 9 bp, Unknown
  misc_feature (1)..( 9): Matrix.001 file - promoters75/1008732
aaatttgtt

SEQ ID NO: 36882 - DNA, 8 bp, Unknown
  misc_feature (1)..( 8): Matrix.001 file - promoters75/1008732
acatatta

SEQ ID NO: 36883 - DNA, 11 bp, Unknown
  misc_feature (1)..( 11): Matrix.001 file - promoters75/1008732
tttttattcta

SEQ ID NO: 36884 - DNA, 9 bp, Unknown
  misc_feature (1)..( 9): Matrix.001 file - promoters75/1008732
aatactttt

SEQ ID NO: 36885 - DNA, 8 bp, Unknown
  misc_feature (1)..( 8): Matrix.001 file - promoters75/1008732
ataatatt

SEQ ID NO: 36886 - DNA, 8 bp, Unknown
  misc_feature (1)..( 8): Matrix.001 file - promoters75/1008732
ttacttca

SEQ ID NO: 36887 - DNA, 6 bp, Unknown
  misc_feature (1)..( 6): Matrix.001 file - promoters75/1008732
atatag

SEQ ID NO: 36888 - DNA, 13 bp, Unknown
  misc_feature (1)..( 13): Matrix.001 file - promoters75/1008732
aaataaataaaaa

SEQ ID NO: 36889 - DNA, 7 bp, Unknown
  misc_feature (1)..( 7): Matrix.001 file - promoters75/1008808
cgaagaa

SEQ ID NO: 36890 - DNA, 8 bp, Unknown
  misc_feature (1)..( 8): Matrix.001 file - promoters75/1008808
acttcctt

SEQ ID NO: 36891 - DNA, 7 bp, Unknown
  misc_feature (1)..( 7): Matrix.001 file - promoters75/1008808
gtttgaa

SEQ ID NO: 36892 - DNA, 9 bp, Unknown
  misc_feature (1)..( 9): Matrix.001 file - promoters75/1008808
aaatgatta

SEQ ID NO: 36893 - DNA, 7 bp, Unknown
  misc_feature (1)..( 7): Matrix.001 file - promoters75/1008808
aatattg

SEQ ID NO: 36894 - DNA, 5 bp, Unknown
  misc_feature (1)..( 5): Matrix.001 file - promoters75/1009030
tattt

SEQ ID NO: 36895 - DNA, 8 bp, Unknown
  misc_feature (1)..( 8): Matrix.001 file - promoters75/1009211
ttcattac

SEQ ID NO: 36896 - DNA, 7 bp, Unknown
  misc_feature (1)..( 7): Matrix.001 file - promoters75/1009941
ttttgaa

SEQ ID NO: 36897 - DNA, 7 bp, Unknown
  misc_feature (1)..( 7): Matrix.001 file - promoters75/1009941
cctaaat

SEQ ID NO: 36898 - DNA, 8 bp, Unknown
  misc_feature (1)..( 8): Matrix.001 file - promoters75/1009941
tcaatttc

SEQ ID NO: 36899 - DNA, 10 bp, Unknown
  misc_feature (1)..( 10): Matrix.001 file - promoters75/1009941
ttttcttctc

SEQ ID NO: 36900 - DNA, 9 bp, Unknown
  misc_feature (1)..( 9): Matrix.001 file - promoters75/1009941
acaataaaa

SEQ ID NO: 36901 - DNA, 11 bp, Unknown
  misc_feature (1)..( 11): Matrix.001 file - promoters75/1010094
ggaagaaaaaa

SEQ ID NO: 36902 - DNA, 8 bp, Unknown
  misc_feature (1)..( 8): Matrix.001 file - promoters75/1010094
atataaaa

SEQ ID NO: 36903 - DNA, 8 bp, Unknown
  misc_feature (1)..( 8): Matrix.001 file - promoters75/1010094
ctttctac

SEQ ID NO: 36904 - DNA, 10 bp, Unknown
  misc_feature (1)..( 10): Matrix.001 file - promoters75/1010094
ataataaaaa

SEQ ID NO: 36905 - DNA, 8 bp, Unknown
  misc_feature (1)..( 8): Matrix.001 file - promoters75/1010367
ttaaaaaa

SEQ ID NO: 36906 - DNA, 8 bp, Unknown
  misc_feature (1)..( 8): Matrix.001 file - promoters75/1010367
aaaccaat

SEQ ID NO: 36907 - DNA, 7 bp, Unknown
  misc_feature (1)..( 7): Matrix.001 file - promoters75/1010367
taacaaa

SEQ ID NO: 36908 - DNA, 7 bp, Unknown
  misc_feature (1)..( 7): Matrix.001 file - promoters75/1010367
tcttttt

SEQ ID NO: 36909 - DNA, 8 bp, Unknown
  misc_feature (1)..( 8): Matrix.001 file - promoters75/1010385
gctttttg

SEQ ID NO: 36910 - DNA, 10 bp, Unknown
  misc_feature (1)..( 10): Matrix.001 file - promoters75/1010435
aatctgaatc

SEQ ID NO: 36911 - DNA, 9 bp, Unknown
  misc_feature (1)..( 9): Matrix.001 file - promoters75/1010819
atttttggt

SEQ ID NO: 36912 - DNA, 9 bp, Unknown
  misc_feature (1)..( 9): Matrix.001 file - promoters75/1011923
ttgttgttt

SEQ ID NO: 36913 - DNA, 11 bp, Unknown
  misc_feature (1)..( 11): Matrix.001 file - promoters75/1011923
atcttcatgtt

SEQ ID NO: 36914 - DNA, 7 bp, Unknown
  misc_feature (1)..( 7): Matrix.001 file - promoters75/1011972
gcataat

SEQ ID NO: 36915 - DNA, 7 bp, Unknown
  misc_feature (1)..( 7): Matrix.001 file - promoters75/1011972
tttaaag

SEQ ID NO: 36916 - DNA, 9 bp, Unknown
  misc_feature (1)..( 9): Matrix.001 file - promoters75/1011972
ttctgctaa

SEQ ID NO: 36917 - DNA, 9 bp, Unknown
  misc_feature (1)..( 9): Matrix.001 file - promoters75/1011972
ctatataaa

SEQ ID NO: 36918 - DNA, 9 bp, Unknown
  misc_feature (1)..( 9): Matrix.001 file - promoters75/1011972
atctacata

SEQ ID NO: 36919 - DNA, 8 bp, Unknown
  misc_feature (1)..( 8): Matrix.001 file - promoters75/1012003
cagagaga

SEQ ID NO: 36920 - DNA, 8 bp, Unknown
  misc_feature (1)..( 8): Matrix.001 file - promoters75/1012074
agtgttca

SEQ ID NO: 36921 - DNA, 10 bp, Unknown
  misc_feature (1)..( 10): Matrix.001 file - promoters75/1012074
ttttaataag

SEQ ID NO: 36922 - DNA, 11 bp, Unknown
  misc_feature (1)..( 11): Matrix.001 file - promoters75/1012110
ccataattaag

SEQ ID NO: 36923 - DNA, 12 bp, Unknown
  misc_feature (1)..( 12): Matrix.001 file - promoters75/1012128
tcaaagaccaca

SEQ ID NO: 36924 - DNA, 12 bp, Unknown
  misc_feature (1)..( 12): Matrix.001 file - promoters75/1012128
attcaaaaagca

SEQ ID NO: 36925 - DNA, 5 bp, Unknown
  misc_feature (1)..( 5): Matrix.001 file - promoters75/1012128
aatat

SEQ ID NO: 36926 - DNA, 10 bp, Unknown
  misc_feature (1)..( 10): Matrix.001 file - promoters75/1012128
catttaattt

SEQ ID NO: 36927 - DNA, 8 bp, Unknown
  misc_feature (1)..( 8): Matrix.001 file - promoters75/1012334
gtttttct

SEQ ID NO: 36928 - DNA, 12 bp, Unknown
  misc_feature (1)..( 12): Matrix.001 file - promoters75/1012349
caaaaatttaca

SEQ ID NO: 36929 - DNA, 9 bp, Unknown
  misc_feature (1)..( 9): Matrix.001 file - promoters75/1012673
tatcatttt

SEQ ID NO: 36930 - DNA, 11 bp, Unknown
  misc_feature (1)..( 11): Matrix.001 file - promoters75/1012757
tgtttgaacat

SEQ ID NO: 36931 - DNA, 8 bp, Unknown
  misc_feature (1)..( 8): Matrix.001 file - promoters75/1012757
caacgaaa

SEQ ID NO: 36932 - DNA, 7 bp, Unknown
  misc_feature (1)..( 7): Matrix.001 file - promoters75/1013128
gaaattg

SEQ ID NO: 36933 - DNA, 9 bp, Unknown
  misc_feature (1)..( 9): Matrix.001 file - promoters75/1013128
aaaaaaaag

SEQ ID NO: 36934 - DNA, 11 bp, Unknown
  misc_feature (1)..( 11): Matrix.001 file - promoters75/1013208
aaagtaattta

SEQ ID NO: 36935 - DNA, 11 bp, Unknown
  misc_feature (1)..( 11): Matrix.001 file - promoters75/1013208
tttttattcta

SEQ ID NO: 36936 - DNA, 8 bp, Unknown
  misc_feature (1)..( 8): Matrix.001 file - promoters75/1013384
aaaacaga

SEQ ID NO: 36937 - DNA, 15 bp, Unknown
  misc_feature (1)..( 15): Matrix.001 file - promoters75/1013540
acagagacaataaaa

SEQ ID NO: 36938 - DNA, 11 bp, Unknown
  misc_feature (1)..( 11): Matrix.001 file - promoters75/1013893
aagaaaattga

SEQ ID NO: 36939 - DNA, 11 bp, Unknown
  misc_feature (1)..( 11): Matrix.001 file - promoters75/1013893
aaatttctctt

SEQ ID NO: 36940 - DNA, 9 bp, Unknown
  misc_feature (1)..( 9): Matrix.001 file - promoters75/1013904
ttagtaatt

SEQ ID NO: 36941 - DNA, 8 bp, Unknown
  misc_feature (1)..( 8): Matrix.001 file - promoters75/1013904
aattatat

SEQ ID NO: 36942 - DNA, 10 bp, Unknown
  misc_feature (1)..( 10): Matrix.001 file - promoters75/1013904
tgataaaatt

SEQ ID NO: 36943 - DNA, 7 bp, Unknown
  misc_feature (1)..( 7): Matrix.001 file - promoters75/1013904
aataaaa

SEQ ID NO: 36944 - DNA, 8 bp, Unknown
  misc_feature (1)..( 8): Matrix.001 file - promoters75/1013904
gtttaggt

SEQ ID NO: 36945 - DNA, 11 bp, Unknown
  misc_feature (1)..( 11): Matrix.001 file - promoters75/1013904
aagaaaaaaat

SEQ ID NO: 36946 - DNA, 8 bp, Unknown
  misc_feature (1)..( 8): Matrix.001 file - promoters75/1013904
ttaataat

SEQ ID NO: 36947 - DNA, 7 bp, Unknown
  misc_feature (1)..( 7): Matrix.001 file - promoters75/1013904
taataat

SEQ ID NO: 36948 - DNA, 8 bp, Unknown
  misc_feature (1)..( 8): Matrix.001 file - promoters75/1013904
caatattt

SEQ ID NO: 36949 - DNA, 7 bp, Unknown
  misc_feature (1)..( 7): Matrix.001 file - promoters75/1013904
tttatat

SEQ ID NO: 36950 - DNA, 11 bp, Unknown
  misc_feature (1)..( 11): Matrix.001 file - promoters75/1014125
aaaatgtgaaa

SEQ ID NO: 36951 - DNA, 10 bp, Unknown
  misc_feature (1)..( 10): Matrix.001 file - promoters75/1014125
ccaattttaa

SEQ ID NO: 36952 - DNA, 8 bp, Unknown
  misc_feature (1)..( 8): Matrix.001 file - promoters75/1014180
tcaatttt

SEQ ID NO: 36953 - DNA, 7 bp, Unknown
  misc_feature (1)..( 7): Matrix.001 file - promoters75/1014180
caatatt

SEQ ID NO: 36954 - DNA, 7 bp, Unknown
  misc_feature (1)..( 7): Matrix.001 file - promoters75/1014525
aaaaata

SEQ ID NO: 36955 - DNA, 8 bp, Unknown
  misc_feature (1)..( 8): Matrix.001 file - promoters75/1014525
aatcaaaa

SEQ ID NO: 36956 - DNA, 9 bp, Unknown
  misc_feature (1)..( 9): Matrix.001 file - promoters75/1014525
tatatatac

SEQ ID NO: 36957 - DNA, 8 bp, Unknown
  misc_feature (1)..( 8): Matrix.001 file - promoters75/1014662
aaaaaaga

SEQ ID NO: 36958 - DNA, 8 bp, Unknown
  misc_feature (1)..( 8): Matrix.001 file - promoters75/1014662
ttttgtca

SEQ ID NO: 36959 - DNA, 8 bp, Unknown
  misc_feature (1)..( 8): Matrix.001 file - promoters75/1014662
atatttat

SEQ ID NO: 36960 - DNA, 8 bp, Unknown
  misc_feature (1)..( 8): Matrix.001 file - promoters75/1014662
aaatcaaa

SEQ ID NO: 36961 - DNA, 7 bp, Unknown
  misc_feature (1)..( 7): Matrix.001 file - promoters75/1014662
actttac

SEQ ID NO: 36962 - DNA, 7 bp, Unknown
  misc_feature (1)..( 7): Matrix.001 file - promoters75/1014662
tataata

SEQ ID NO: 36963 - DNA, 8 bp, Unknown
  misc_feature (1)..( 8): Matrix.001 file - promoters75/1014991
tacagtaa

SEQ ID NO: 36964 - DNA, 8 bp, Unknown
  misc_feature (1)..( 8): Matrix.001 file - promoters75/1015214
gaaagaaa

SEQ ID NO: 36965 - DNA, 8 bp, Unknown
  misc_feature (1)..( 8): Matrix.001 file - promoters75/1015214
tatttaaa

SEQ ID NO: 36966 - DNA, 7 bp, Unknown
  misc_feature (1)..( 7): Matrix.001 file - promoters75/1015214
ttaaaaa

SEQ ID NO: 36967 - DNA, 9 bp, Unknown
  misc_feature (1)..( 9): Matrix.001 file - promoters75/1015214
aaattcctt

SEQ ID NO: 36968 - DNA, 10 bp, Unknown
  misc_feature (1)..( 10): Matrix.001 file - promoters75/1015214
aattttgacc

SEQ ID NO: 36969 - DNA, 11 bp, Unknown
  misc_feature (1)..( 11): Matrix.001 file - promoters75/1015261
ttgtaaatgtt

SEQ ID NO: 36970 - DNA, 7 bp, Unknown
  misc_feature (1)..( 7): Matrix.001 file - promoters75/1015261
tttcatt

SEQ ID NO: 36971 - DNA, 12 bp, Unknown
  misc_feature (1)..( 12): Matrix.001 file - promoters75/1015261
attaatgggctt

SEQ ID NO: 36972 - DNA, 8 bp, Unknown
  misc_feature (1)..( 8): Matrix.001 file - promoters75/1015261
atagagaa

SEQ ID NO: 36973 - DNA, 8 bp, Unknown
  misc_feature (1)..( 8): Matrix.001 file - promoters75/1015261
caagcaaa

SEQ ID NO: 36974 - DNA, 12 bp, Unknown
  misc_feature (1)..( 12): Matrix.001 file - promoters75/1015337
tactaaatttta

SEQ ID NO: 36975 - DNA, 6 bp, Unknown
  misc_feature (1)..( 6): Matrix.001 file - promoters75/1015337
attttt

SEQ ID NO: 36976 - DNA, 9 bp, Unknown
  misc_feature (1)..( 9): Matrix.001 file - promoters75/1015475
gtttccttt

SEQ ID NO: 36977 - DNA, 9 bp, Unknown
  misc_feature (1)..( 9): Matrix.001 file - promoters75/1015848
gtttccttt

SEQ ID NO: 36978 - DNA, 9 bp, Unknown
  misc_feature (1)..( 9): Matrix.001 file - promoters75/1016250
gttaaattg

SEQ ID NO: 36979 - DNA, 9 bp, Unknown
  misc_feature (1)..( 9): Matrix.001 file - promoters75/1016250
taattttta

SEQ ID NO: 36980 - DNA, 9 bp, Unknown
  misc_feature (1)..( 9): Matrix.001 file - promoters75/1016278
gggattttt

SEQ ID NO: 36981 - DNA, 7 bp, Unknown
  misc_feature (1)..( 7): Matrix.001 file - promoters75/1016278
taattat

SEQ ID NO: 36982 - DNA, 9 bp, Unknown
  misc_feature (1)..( 9): Matrix.001 file - promoters75/1016468
ttgaatttt

SEQ ID NO: 36983 - DNA, 8 bp, Unknown
  misc_feature (1)..( 8): Matrix.001 file - promoters75/1016468
taaaaaaa

SEQ ID NO: 36984 - DNA, 8 bp, Unknown
  misc_feature (1)..( 8): Matrix.001 file - promoters75/1016468
ttataaaa

SEQ ID NO: 36985 - DNA, 11 bp, Unknown
  misc_feature (1)..( 11): Matrix.001 file - promoters75/1016468
aagaaaaaaac

SEQ ID NO: 36986 - DNA, 9 bp, Unknown
  misc_feature (1)..( 9): Matrix.001 file - promoters75/1016468
atataatta

SEQ ID NO: 36987 - DNA, 9 bp, Unknown
  misc_feature (1)..( 9): Matrix.001 file - promoters75/1016468
tggtcaaaa

SEQ ID NO: 36988 - DNA, 8 bp, Unknown
  misc_feature (1)..( 8): Matrix.001 file - promoters75/1016468
aaattgtc

SEQ ID NO: 36989 - DNA, 8 bp, Unknown
  misc_feature (1)..( 8): Matrix.001 file - promoters75/1016468
tatatata

SEQ ID NO: 36990 - DNA, 8 bp, Unknown
  misc_feature (1)..( 8): Matrix.001 file - promoters75/1016468
taattttt

SEQ ID NO: 36991 - DNA, 8 bp, Unknown
  misc_feature (1)..( 8): Matrix.001 file - promoters75/1016771
attaatgt

SEQ ID NO: 36992 - DNA, 8 bp, Unknown
  misc_feature (1)..( 8): Matrix.001 file - promoters75/1016771
tttactaa

SEQ ID NO: 36993 - DNA, 8 bp, Unknown
  misc_feature (1)..( 8): Matrix.001 file - promoters75/1016771
tttcactt

SEQ ID NO: 36994 - DNA, 14 bp, Unknown
  misc_feature (1)..( 14): Matrix.001 file - promoters75/1016886
tccacttttaaaaa

SEQ ID NO: 36995 - DNA, 9 bp, Unknown
  misc_feature (1)..( 9): Matrix.001 file - promoters75/1017282
ttttccgct

SEQ ID NO: 36996 - DNA, 9 bp, Unknown
  misc_feature (1)..( 9): Matrix.001 file - promoters75/1017618
ttatgaaaa

SEQ ID NO: 36997 - DNA, 7 bp, Unknown
  misc_feature (1)..( 7): Matrix.001 file - promoters75/1018052
tcagttt

SEQ ID NO: 36998 - DNA, 9 bp, Unknown
  misc_feature (1)..( 9): Matrix.001 file - promoters75/1018052
cttcaacat

SEQ ID NO: 36999 - DNA, 8 bp, Unknown
  misc_feature (1)..( 8): Matrix.001 file - promoters75/1018052
attgttgt

SEQ ID NO: 37000 - DNA, 7 bp, Unknown
  misc_feature (1)..( 7): Matrix.001 file - promoters75/1018190
atttgtt

SEQ ID NO: 37001 - DNA, 7 bp, Unknown
  misc_feature (1)..( 7): Matrix.001 file - promoters75/1018190
ttgattg

SEQ ID NO: 37002 - DNA, 9 bp, Unknown
  misc_feature (1)..( 9): Matrix.001 file - promoters75/1018190
cttttttta

SEQ ID NO: 37003 - DNA, 9 bp, Unknown
  misc_feature (1)..( 9): Matrix.001 file - promoters75/1018276
tcttcttat

SEQ ID NO: 37004 - DNA, 13 bp, Unknown
  misc_feature (1)..( 13): Matrix.001 file - promoters75/1018391
ctagtttattgtt

SEQ ID NO: 37005 - DNA, 8 bp, Unknown
  misc_feature (1)..( 8): Matrix.001 file - promoters75/1018391
agatcatg

SEQ ID NO: 37006 - DNA, 8 bp, Unknown
  misc_feature (1)..( 8): Matrix.001 file - promoters75/1018523
tacaaaaa

SEQ ID NO: 37007 - DNA, 7 bp, Unknown
  misc_feature (1)..( 7): Matrix.001 file - promoters75/1018523
aaacaat

SEQ ID NO: 37008 - DNA, 10 bp, Unknown
  misc_feature (1)..( 10): Matrix.001 file - promoters75/1018523
attaatatag

SEQ ID NO: 37009 - DNA, 12 bp, Unknown
  misc_feature (1)..( 12): Matrix.001 file - promoters75/1018523
taaaaaaactaa

SEQ ID NO: 37010 - DNA, 6 bp, Unknown
  misc_feature (1)..( 6): Matrix.001 file - promoters75/1018523
taaaat

SEQ ID NO: 37011 - DNA, 5 bp, Unknown
  misc_feature (1)..( 5): Matrix.001 file - promoters75/1018523
caaaa

SEQ ID NO: 37012 - DNA, 13 bp, Unknown
  misc_feature (1)..( 13): Matrix.001 file - promoters75/1018523
taacaaatttctt

SEQ ID NO: 37013 - DNA, 10 bp, Unknown
  misc_feature (1)..( 10): Matrix.001 file - promoters75/1018523
agttaataaa

SEQ ID NO: 37014 - DNA, 8 bp, Unknown
  misc_feature (1)..( 8): Matrix.001 file - promoters75/1018536
atttgtta

SEQ ID NO: 37015 - DNA, 7 bp, Unknown
  misc_feature (1)..( 7): Matrix.001 file - promoters75/1018536
ttttaat

SEQ ID NO: 37016 - DNA, 8 bp, Unknown
  misc_feature (1)..( 8): Matrix.001 file - promoters75/1018536
aaattctc

SEQ ID NO: 37017 - DNA, 11 bp, Unknown
  misc_feature (1)..( 11): Matrix.001 file - promoters75/1018536
tttataactat

SEQ ID NO: 37018 - DNA, 9 bp, Unknown
  misc_feature (1)..( 9): Matrix.001 file - promoters75/1018770
taaaaccga

SEQ ID NO: 37019 - DNA, 8 bp, Unknown
  misc_feature (1)..( 8): Matrix.001 file - promoters75/1018770
aacaaaac

SEQ ID NO: 37020 - DNA, 12 bp, Unknown
  misc_feature (1)..( 12): Matrix.001 file - promoters75/1018770
atactttttgaa

SEQ ID NO: 37021 - DNA, 11 bp, Unknown
  misc_feature (1)..( 11): Matrix.001 file - promoters75/1018770
actattttaca

SEQ ID NO: 37022 - DNA, 9 bp, Unknown
  misc_feature (1)..( 9): Matrix.001 file - promoters75/1019734
tcaatcata

SEQ ID NO: 37023 - DNA, 9 bp, Unknown
  misc_feature (1)..( 9): Matrix.001 file - promoters75/1019734
taatttcat

SEQ ID NO: 37024 - DNA, 8 bp, Unknown
  misc_feature (1)..( 8): Matrix.001 file - promoters75/1019928
atttgtta

SEQ ID NO: 37025 - DNA, 7 bp, Unknown
  misc_feature (1)..( 7): Matrix.001 file - promoters75/1019928
ttttaat

SEQ ID NO: 37026 - DNA, 8 bp, Unknown
  misc_feature (1)..( 8): Matrix.001 file - promoters75/1019928
aaattctc

SEQ ID NO: 37027 - DNA, 11 bp, Unknown
  misc_feature (1)..( 11): Matrix.001 file - promoters75/1019928
tttataactat

SEQ ID NO: 37028 - DNA, 8 bp, Unknown
  misc_feature (1)..( 8): Matrix.001 file - promoters75/1020223
atcatatt

SEQ ID NO: 37029 - DNA, 9 bp, Unknown
  misc_feature (1)..( 9): Matrix.001 file - promoters75/1020223
tttgtagtg

SEQ ID NO: 37030 - DNA, 8 bp, Unknown
  misc_feature (1)..( 8): Matrix.001 file - promoters75/1020223
tgatttgt

SEQ ID NO: 37031 - DNA, 7 bp, Unknown
  misc_feature (1)..( 7): Matrix.001 file - promoters75/1020223
gtttgtt

SEQ ID NO: 37032 - DNA, 8 bp, Unknown
  misc_feature (1)..( 8): Matrix.001 file - promoters75/1020223
gatttgtt

SEQ ID NO: 37033 - DNA, 8 bp, Unknown
  misc_feature (1)..( 8): Matrix.001 file - promoters75/1020265
atgactta

SEQ ID NO: 37034 - DNA, 8 bp, Unknown
  misc_feature (1)..( 8): Matrix.001 file - promoters75/1020543
gaaaaaaa

SEQ ID NO: 37035 - DNA, 12 bp, Unknown
  misc_feature (1)..( 12): Matrix.001 file - promoters75/1020543
aaaaaagaagaa

SEQ ID NO: 37036 - DNA, 11 bp, Unknown
  misc_feature (1)..( 11): Matrix.001 file - promoters75/1020701
tgtttgaacat

SEQ ID NO: 37037 - DNA, 8 bp, Unknown
  misc_feature (1)..( 8): Matrix.001 file - promoters75/1020701
caacgaaa

SEQ ID NO: 37038 - DNA, 6 bp, Unknown
  misc_feature (1)..( 6): Matrix.001 file - promoters75/1020786
tataaa

SEQ ID NO: 37039 - DNA, 6 bp, Unknown
  misc_feature (1)..( 6): Matrix.001 file - promoters75/1020786
caaaaa

SEQ ID NO: 37040 - DNA, 14 bp, Unknown
  misc_feature (1)..( 14): Matrix.001 file - promoters75/1020786
aacaacaaaacaag

SEQ ID NO: 37041 - DNA, 9 bp, Unknown
  misc_feature (1)..( 9): Matrix.001 file - promoters75/1020863
aaaaattaa

SEQ ID NO: 37042 - DNA, 10 bp, Unknown
  misc_feature (1)..( 10): Matrix.001 file - promoters75/1020863
ataaaattaa

SEQ ID NO: 37043 - DNA, 9 bp, Unknown
  misc_feature (1)..( 9): Matrix.001 file - promoters75/1020863
aataaaatt

SEQ ID NO: 37044 - DNA, 7 bp, Unknown
  misc_feature (1)..( 7): Matrix.001 file - promoters75/1020863
aaacaaa

SEQ ID NO: 37045 - DNA, 10 bp, Unknown
  misc_feature (1)..( 10): Matrix.001 file - promoters75/1020863
atattattag

SEQ ID NO: 37046 - DNA, 9 bp, Unknown
  misc_feature (1)..( 9): Matrix.001 file - promoters75/1021549
gtatatata

SEQ ID NO: 37047 - DNA, 10 bp, Unknown
  misc_feature (1)..( 10): Matrix.001 file - promoters75/1021549
agttatatat

SEQ ID NO: 37048 - DNA, 7 bp, Unknown
  misc_feature (1)..( 7): Matrix.001 file - promoters75/1021952
ctaaaaa

SEQ ID NO: 37049 - DNA, 12 bp, Unknown
  misc_feature (1)..( 12): Matrix.001 file - promoters75/1021968
caaaaatttaca

SEQ ID NO: 37050 - DNA, 9 bp, Unknown
  misc_feature (1)..( 9): Matrix.001 file - promoters75/1022324
agaaccaac

SEQ ID NO: 37051 - DNA, 11 bp, Unknown
  misc_feature (1)..( 11): Matrix.001 file - promoters75/1022662
atctttataaa

SEQ ID NO: 37052 - DNA, 10 bp, Unknown
  misc_feature (1)..( 10): Matrix.001 file - promoters75/1022662
aataaaaatc

SEQ ID NO: 37053 - DNA, 15 bp, Unknown
  misc_feature (1)..( 15): Matrix.001 file - promoters75/1022748
ttatttttgtaataa

SEQ ID NO: 37054 - DNA, 12 bp, Unknown
  misc_feature (1)..( 12): Matrix.001 file - promoters75/1022748
ctgatggatttg

SEQ ID NO: 37055 - DNA, 7 bp, Unknown
  misc_feature (1)..( 7): Matrix.001 file - promoters75/1022748
agaaaat

SEQ ID NO: 37056 - DNA, 11 bp, Unknown
  misc_feature (1)..( 11): Matrix.001 file - promoters75/1022748
taaagttttaa

SEQ ID NO: 37057 - DNA, 8 bp, Unknown
  misc_feature (1)..( 8): Matrix.001 file - promoters75/1022932
catcagct

SEQ ID NO: 37058 - DNA, 8 bp, Unknown
  misc_feature (1)..( 8): Matrix.001 file - promoters75/1022932
gttatgtt

SEQ ID NO: 37059 - DNA, 8 bp, Unknown
  misc_feature (1)..( 8): Matrix.001 file - promoters75/1022932
ttactttt

SEQ ID NO: 37060 - DNA, 7 bp, Unknown
  misc_feature (1)..( 7): Matrix.001 file - promoters75/1022932
ttacttt

SEQ ID NO: 37061 - DNA, 9 bp, Unknown
  misc_feature (1)..( 9): Matrix.001 file - promoters75/1022932
tacaataaa

SEQ ID NO: 37062 - DNA, 8 bp, Unknown
  misc_feature (1)..( 8): Matrix.001 file - promoters75/1022983
atttctta

SEQ ID NO: 37063 - DNA, 4 bp, Unknown
  misc_feature (1)..( 4): Matrix.001 file - promoters75/1022983
attt

SEQ ID NO: 37064 - DNA, 10 bp, Unknown
  misc_feature (1)..( 10): Matrix.001 file - promoters75/1022983
tattttatta

SEQ ID NO: 37065 - DNA, 9 bp, Unknown
  misc_feature (1)..( 9): Matrix.001 file - promoters75/1023297
taaaagttt

SEQ ID NO: 37066 - DNA, 9 bp, Unknown
  misc_feature (1)..( 9): Matrix.001 file - promoters75/1023297
tttttgtct

SEQ ID NO: 37067 - DNA, 7 bp, Unknown
  misc_feature (1)..( 7): Matrix.001 file - promoters75/1023453
ctgggaa

SEQ ID NO: 37068 - DNA, 11 bp, Unknown
  misc_feature (1)..( 11): Matrix.001 file - promoters75/1023453
aaaagaaaaaa

SEQ ID NO: 37069 - DNA, 11 bp, Unknown
  misc_feature (1)..( 11): Matrix.001 file - promoters75/1023453
aatctaattga

SEQ ID NO: 37070 - DNA, 8 bp, Unknown
  misc_feature (1)..( 8): Matrix.001 file - promoters75/1023634
ttttgaat

SEQ ID NO: 37071 - DNA, 11 bp, Unknown
  misc_feature (1)..( 11): Matrix.001 file - promoters75/1023634
aaaatgtgaaa

SEQ ID NO: 37072 - DNA, 8 bp, Unknown
  misc_feature (1)..( 8): Matrix.001 file - promoters75/1023634
agcccaaa

SEQ ID NO: 37073 - DNA, 10 bp, Unknown
  misc_feature (1)..( 10): Matrix.001 file - promoters75/1024015
tcaaaccaaa

SEQ ID NO: 37074 - DNA, 9 bp, Unknown
  misc_feature (1)..( 9): Matrix.001 file - promoters75/1024015
aaatcgtaa

SEQ ID NO: 37075 - DNA, 6 bp, Unknown
  misc_feature (1)..( 6): Matrix.001 file - promoters75/1024126
aaaaaa

SEQ ID NO: 37076 - DNA, 8 bp, Unknown
  misc_feature (1)..( 8): Matrix.001 file - promoters75/1024126
attgaaaa

SEQ ID NO: 37077 - DNA, 15 bp, Unknown
  misc_feature (1)..( 15): Matrix.001 file - promoters75/1024126
tcaaataccacggtt

SEQ ID NO: 37078 - DNA, 10 bp, Unknown
  misc_feature (1)..( 10): Matrix.001 file - promoters75/1024126
attgaaaaat

SEQ ID NO: 37079 - DNA, 8 bp, Unknown
  misc_feature (1)..( 8): Matrix.001 file - promoters75/1024126
atgattaa

SEQ ID NO: 37080 - DNA, 7 bp, Unknown
  misc_feature (1)..( 7): Matrix.001 file - promoters75/1024126
atattat

SEQ ID NO: 37081 - DNA, 7 bp, Unknown
  misc_feature (1)..( 7): Matrix.001 file - promoters75/1024126
tatttaa

SEQ ID NO: 37082 - DNA, 8 bp, Unknown
  misc_feature (1)..( 8): Matrix.001 file - promoters75/1024189
aaaaaaga

SEQ ID NO: 37083 - DNA, 8 bp, Unknown
  misc_feature (1)..( 8): Matrix.001 file - promoters75/1024189
ttttgtca

SEQ ID NO: 37084 - DNA, 8 bp, Unknown
  misc_feature (1)..( 8): Matrix.001 file - promoters75/1024189
atatttat

SEQ ID NO: 37085 - DNA, 8 bp, Unknown
  misc_feature (1)..( 8): Matrix.001 file - promoters75/1024189
aaatcaaa

SEQ ID NO: 37086 - DNA, 7 bp, Unknown
  misc_feature (1)..( 7): Matrix.001 file - promoters75/1024189
actttac

SEQ ID NO: 37087 - DNA, 7 bp, Unknown
  misc_feature (1)..( 7): Matrix.001 file - promoters75/1024189
tataata

SEQ ID NO: 37088 - DNA, 9 bp, Unknown
  misc_feature (1)..( 9): Matrix.001 file - promoters75/1024199
aaacaaaat

SEQ ID NO: 37089 - DNA, 13 bp, Unknown
  misc_feature (1)..( 13): Matrix.001 file - promoters75/1024234
ttgattcaaaatt

SEQ ID NO: 37090 - DNA, 10 bp, Unknown
  misc_feature (1)..( 10): Matrix.001 file - promoters75/1024236
tatataaaga

SEQ ID NO: 37091 - DNA, 8 bp, Unknown
  misc_feature (1)..( 8): Matrix.001 file - promoters75/1024367
attaactt

SEQ ID NO: 37092 - DNA, 6 bp, Unknown
  misc_feature (1)..( 6): Matrix.001 file - promoters75/1024367
tatata

SEQ ID NO: 37093 - DNA, 10 bp, Unknown
  misc_feature (1)..( 10): Matrix.001 file - promoters75/1024367
ttaaaaaaaa

SEQ ID NO: 37094 - DNA, 10 bp, Unknown
  misc_feature (1)..( 10): Matrix.001 file - promoters75/1024367
tttgaatttt

SEQ ID NO: 37095 - DNA, 14 bp, Unknown
  misc_feature (1)..( 14): Matrix.001 file - promoters75/1024367
cttcctcgcaactc

SEQ ID NO: 37096 - DNA, 10 bp, Unknown
  misc_feature (1)..( 10): Matrix.001 file - promoters75/1024499
ctataaatag

SEQ ID NO: 37097 - DNA, 11 bp, Unknown
  misc_feature (1)..( 11): Matrix.001 file - promoters75/1024853
caaccttcttt

SEQ ID NO: 37098 - DNA, 10 bp, Unknown
  misc_feature (1)..( 10): Matrix.001 file - promoters75/1024853
aaaaccaaaa

SEQ ID NO: 37099 - DNA, 16 bp, Unknown
  misc_feature (1)..( 16): Matrix.001 file - promoters75/1024853
tgtttaaaaatgaaat

SEQ ID NO: 37100 - DNA, 11 bp, Unknown
  misc_feature (1)..( 11): Matrix.001 file - promoters75/1024889
ttttaaattat

SEQ ID NO: 37101 - DNA, 7 bp, Unknown
  misc_feature (1)..( 7): Matrix.001 file - promoters75/1024889
tcataaa

SEQ ID NO: 37102 - DNA, 8 bp, Unknown
  misc_feature (1)..( 8): Matrix.001 file - promoters75/1024889
aaagtttt

SEQ ID NO: 37103 - DNA, 9 bp, Unknown
  misc_feature (1)..( 9): Matrix.001 file - promoters75/1024993
aaaaaggtg

SEQ ID NO: 37104 - DNA, 14 bp, Unknown
  misc_feature (1)..( 14): Matrix.001 file - promoters75/1025471
aatagtaaaaaaat

SEQ ID NO: 37105 - DNA, 9 bp, Unknown
  misc_feature (1)..( 9): Matrix.001 file - promoters75/1025471
taaaaaaga

SEQ ID NO: 37106 - DNA, 9 bp, Unknown
  misc_feature (1)..( 9): Matrix.001 file - promoters75/1025683
agaaaattg

SEQ ID NO: 37107 - DNA, 8 bp, Unknown
  misc_feature (1)..( 8): Matrix.001 file - promoters75/1025683
cctatata

SEQ ID NO: 37108 - DNA, 14 bp, Unknown
  misc_feature (1)..( 14): Matrix.001 file - promoters75/1025683
tatgaatcagctaa

SEQ ID NO: 37109 - DNA, 8 bp, Unknown
  misc_feature (1)..( 8): Matrix.001 file - promoters75/1026622
aaattttc

SEQ ID NO: 37110 - DNA, 8 bp, Unknown
  misc_feature (1)..( 8): Matrix.001 file - promoters75/1026622
agacacaa

SEQ ID NO: 37111 - DNA, 8 bp, Unknown
  misc_feature (1)..( 8): Matrix.001 file - promoters75/1026622
acattttt

SEQ ID NO: 37112 - DNA, 11 bp, Unknown
  misc_feature (1)..( 11): Matrix.001 file - promoters75/1026705
gaagatgtgaa

SEQ ID NO: 37113 - DNA, 7 bp, Unknown
  misc_feature (1)..( 7): Matrix.001 file - promoters75/1026883
tgaaaac

SEQ ID NO: 37114 - DNA, 9 bp, Unknown
  misc_feature (1)..( 9): Matrix.001 file - promoters75/1026883
aatagatta

SEQ ID NO: 37115 - DNA, 9 bp, Unknown
  misc_feature (1)..( 9): Matrix.001 file - promoters75/1026883
acaaataat

SEQ ID NO: 37116 - DNA, 9 bp, Unknown
  misc_feature (1)..( 9): Matrix.001 file - promoters75/1026883
atttgtcta

SEQ ID NO: 37117 - DNA, 7 bp, Unknown
  misc_feature (1)..( 7): Matrix.001 file - promoters75/1026983
tttcaac

SEQ ID NO: 37118 - DNA, 10 bp, Unknown
  misc_feature (1)..( 10): Matrix.001 file - promoters75/1026987
tattttactt

SEQ ID NO: 37119 - DNA, 11 bp, Unknown
  misc_feature (1)..( 11): Matrix.001 file - promoters75/1026987
tatttaaaaag

SEQ ID NO: 37120 - DNA, 8 bp, Unknown
  misc_feature (1)..( 8): Matrix.001 file - promoters75/1026987
tttgtttt

SEQ ID NO: 37121 - DNA, 8 bp, Unknown
  misc_feature (1)..( 8): Matrix.001 file - promoters75/1026987
aaaacatt

SEQ ID NO: 37122 - DNA, 11 bp, Unknown
  misc_feature (1)..( 11): Matrix.001 file - promoters75/1027327
ttgtaaatgtt

SEQ ID NO: 37123 - DNA, 7 bp, Unknown
  misc_feature (1)..( 7): Matrix.001 file - promoters75/1027327
tttcatt

SEQ ID NO: 37124 - DNA, 12 bp, Unknown
  misc_feature (1)..( 12): Matrix.001 file - promoters75/1027327
attaatgggctt

SEQ ID NO: 37125 - DNA, 8 bp, Unknown
  misc_feature (1)..( 8): Matrix.001 file - promoters75/1027327
atagagaa

SEQ ID NO: 37126 - DNA, 8 bp, Unknown
  misc_feature (1)..( 8): Matrix.001 file - promoters75/1027327
caagcaaa

SEQ ID NO: 37127 - DNA, 10 bp, Unknown
  misc_feature (1)..( 10): Matrix.001 file - promoters75/1027760
tatattaatt

SEQ ID NO: 37128 - DNA, 12 bp, Unknown
  misc_feature (1)..( 12): Matrix.001 file - promoters75/1027760
ataaatgaaatt

SEQ ID NO: 37129 - DNA, 8 bp, Unknown
  misc_feature (1)..( 8): Matrix.001 file - promoters75/1027760
tcattttt

SEQ ID NO: 37130 - DNA, 7 bp, Unknown
  misc_feature (1)..( 7): Matrix.001 file - promoters75/1027760
agaaacg

SEQ ID NO: 37131 - DNA, 14 bp, Unknown
  misc_feature (1)..( 14): Matrix.001 file - promoters75/1027760
ataaatattgttaa

SEQ ID NO: 37132 - DNA, 12 bp, Unknown
  misc_feature (1)..( 12): Matrix.001 file - promoters75/1027760
aacaattttatt

SEQ ID NO: 37133 - DNA, 9 bp, Unknown
  misc_feature (1)..( 9): Matrix.001 file - promoters75/1027760
attaatttt

SEQ ID NO: 37134 - DNA, 8 bp, Unknown
  misc_feature (1)..( 8): Matrix.001 file - promoters75/1027760
agaaaaat

SEQ ID NO: 37135 - DNA, 8 bp, Unknown
  misc_feature (1)..( 8): Matrix.001 file - promoters75/1027760
tttaccaa

SEQ ID NO: 37136 - DNA, 9 bp, Unknown
  misc_feature (1)..( 9): Matrix.001 file - promoters75/1027760
ataatttac

SEQ ID NO: 37137 - DNA, 9 bp, Unknown
  misc_feature (1)..( 9): Matrix.001 file - promoters75/1028368
ttgttttct

SEQ ID NO: 37138 - DNA, 9 bp, Unknown
  misc_feature (1)..( 9): Matrix.001 file - promoters75/1029485
caaacaaaa

SEQ ID NO: 37139 - DNA, 9 bp, Unknown
  misc_feature (1)..( 9): Matrix.001 file - promoters75/1029485
aaaagtttt

SEQ ID NO: 37140 - DNA, 12 bp, Unknown
  misc_feature (1)..( 12): Matrix.001 file - promoters75/1029485
cacaattattat

SEQ ID NO: 37141 - DNA, 11 bp, Unknown
  misc_feature (1)..( 11): Matrix.001 file - promoters75/1029952
aatgggcccat

SEQ ID NO: 37142 - DNA, 9 bp, Unknown
  misc_feature (1)..( 9): Matrix.001 file - promoters75/1029952
aagaaaaaa

SEQ ID NO: 37143 - DNA, 12 bp, Unknown
  misc_feature (1)..( 12): Matrix.001 file - promoters75/1030324
gtctatgaataa

SEQ ID NO: 37144 - DNA, 9 bp, Unknown
  misc_feature (1)..( 9): Matrix.001 file - promoters75/1030528
ataataatt

SEQ ID NO: 37145 - DNA, 13 bp, Unknown
  misc_feature (1)..( 13): Matrix.001 file - promoters75/1030528
ttatatttttaaa

SEQ ID NO: 37146 - DNA, 7 bp, Unknown
  misc_feature (1)..( 7): Matrix.001 file - promoters75/1030528
ttaaaaa

SEQ ID NO: 37147 - DNA, 9 bp, Unknown
  misc_feature (1)..( 9): Matrix.001 file - promoters75/1030547
atctttata

SEQ ID NO: 37148 - DNA, 10 bp, Unknown
  misc_feature (1)..( 10): Matrix.001 file - promoters75/1030547
taatatattt

SEQ ID NO: 37149 - DNA, 9 bp, Unknown
  misc_feature (1)..( 9): Matrix.001 file - promoters75/1030547
ataaatatc

SEQ ID NO: 37150 - DNA, 13 bp, Unknown
  misc_feature (1)..( 13): Matrix.001 file - promoters75/1030547
atctttataagta

SEQ ID NO: 37151 - DNA, 8 bp, Unknown
  misc_feature (1)..( 8): Matrix.001 file - promoters75/1030821
tattttta

SEQ ID NO: 37152 - DNA, 9 bp, Unknown
  misc_feature (1)..( 9): Matrix.001 file - promoters75/1030821
tttgataca

SEQ ID NO: 37153 - DNA, 8 bp, Unknown
  misc_feature (1)..( 8): Matrix.001 file - promoters75/1030821
aaaacata

SEQ ID NO: 37154 - DNA, 8 bp, Unknown
  misc_feature (1)..( 8): Matrix.001 file - promoters75/1030821
ataacaaa

SEQ ID NO: 37155 - DNA, 7 bp, Unknown
  misc_feature (1)..( 7): Matrix.001 file - promoters75/1030821
acaaaca

SEQ ID NO: 37156 - DNA, 14 bp, Unknown
  misc_feature (1)..( 14): Matrix.001 file - promoters75/1030821
aaacaatatactta

SEQ ID NO: 37157 - DNA, 8 bp, Unknown
  misc_feature (1)..( 8): Matrix.001 file - promoters75/1030821
acaccttt

SEQ ID NO: 37158 - DNA, 9 bp, Unknown
  misc_feature (1)..( 9): Matrix.001 file - promoters75/1030940
tataaaaag

SEQ ID NO: 37159 - DNA, 10 bp, Unknown
  misc_feature (1)..( 10): Matrix.001 file - promoters75/1030940
aaatagaaaa

SEQ ID NO: 37160 - DNA, 11 bp, Unknown
  misc_feature (1)..( 11): Matrix.001 file - promoters75/1030940
caaaatatctt

SEQ ID NO: 37161 - DNA, 14 bp, Unknown
  misc_feature (1)..( 14): Matrix.001 file - promoters75/1030940
aaaggcccataaaa

SEQ ID NO: 37162 - DNA, 13 bp, Unknown
  misc_feature (1)..( 13): Matrix.001 file - promoters75/1030940
aaactttatattt

SEQ ID NO: 37163 - DNA, 9 bp, Unknown
  misc_feature (1)..( 9): Matrix.001 file - promoters75/1031052
gaaaaaaaa

SEQ ID NO: 37164 - DNA, 11 bp, Unknown
  misc_feature (1)..( 11): Matrix.001 file - promoters75/1031267
tttatttttat

SEQ ID NO: 37165 - DNA, 13 bp, Unknown
  misc_feature (1)..( 13): Matrix.001 file - promoters75/1031291
gaataaaaattca

SEQ ID NO: 37166 - DNA, 7 bp, Unknown
  misc_feature (1)..( 7): Matrix.001 file - promoters75/1031291
aaaggac

SEQ ID NO: 37167 - DNA, 18 bp, Unknown
  misc_feature (1)..( 18): Matrix.001 file - promoters75/1031799
acgactcttcatattatt

SEQ ID NO: 37168 - DNA, 11 bp, Unknown
  misc_feature (1)..( 11): Matrix.001 file - promoters75/1031799
atgaaacaaaa

SEQ ID NO: 37169 - DNA, 11 bp, Unknown
  misc_feature (1)..( 11): Matrix.001 file - promoters75/1032381
tactttggatt

SEQ ID NO: 37170 - DNA, 9 bp, Unknown
  misc_feature (1)..( 9): Matrix.001 file - promoters75/1032381
aaaccaaaa

SEQ ID NO: 37171 - DNA, 9 bp, Unknown
  misc_feature (1)..( 9): Matrix.001 file - promoters75/1032381
tttactttg

SEQ ID NO: 37172 - DNA, 7 bp, Unknown
  misc_feature (1)..( 7): Matrix.001 file - promoters75/1032498
ttttcta

SEQ ID NO: 37173 - DNA, 8 bp, Unknown
  misc_feature (1)..( 8): Matrix.001 file - promoters75/1032498
ataataat

SEQ ID NO: 37174 - DNA, 12 bp, Unknown
  misc_feature (1)..( 12): Matrix.001 file - promoters75/1032498
taattttatata

SEQ ID NO: 37175 - DNA, 11 bp, Unknown
  misc_feature (1)..( 11): Matrix.001 file - promoters75/1032498
aaacaaaaaaa

SEQ ID NO: 37176 - DNA, 10 bp, Unknown
  misc_feature (1)..( 10): Matrix.001 file - promoters75/1032676
aaacttaaga

SEQ ID NO: 37177 - DNA, 8 bp, Unknown
  misc_feature (1)..( 8): Matrix.001 file - promoters75/1032676
attttttt

SEQ ID NO: 37178 - DNA, 8 bp, Unknown
  misc_feature (1)..( 8): Matrix.001 file - promoters75/1032676
gatattaa

SEQ ID NO: 37179 - DNA, 12 bp, Unknown
  misc_feature (1)..( 12): Matrix.001 file - promoters75/1032897
ataaaaatttat

SEQ ID NO: 37180 - DNA, 9 bp, Unknown
  misc_feature (1)..( 9): Matrix.001 file - promoters75/1032897
gtatcaaac

SEQ ID NO: 37181 - DNA, 9 bp, Unknown
  misc_feature (1)..( 9): Matrix.001 file - promoters75/1032897
cataaattt

SEQ ID NO: 37182 - DNA, 8 bp, Unknown
  misc_feature (1)..( 8): Matrix.001 file - promoters75/1032897
aaaacaaa

SEQ ID NO: 37183 - DNA, 8 bp, Unknown
  misc_feature (1)..( 8): Matrix.001 file - promoters75/1033781
tcttatta

SEQ ID NO: 37184 - DNA, 10 bp, Unknown
  misc_feature (1)..( 10): Matrix.001 file - promoters75/1033781
accattttct

SEQ ID NO: 37185 - DNA, 10 bp, Unknown
  misc_feature (1)..( 10): Matrix.001 file - promoters75/1033781
gcccatttaa

SEQ ID NO: 37186 - DNA, 7 bp, Unknown
  misc_feature (1)..( 7): Matrix.001 file - promoters75/1033781
taaaaaa

SEQ ID NO: 37187 - DNA, 12 bp, Unknown
  misc_feature (1)..( 12): Matrix.001 file - promoters75/1033781
tccatataaatt

SEQ ID NO: 37188 - DNA, 9 bp, Unknown
  misc_feature (1)..( 9): Matrix.001 file - promoters75/1033781
catgaattg

SEQ ID NO: 37189 - DNA, 8 bp, Unknown
  misc_feature (1)..( 8): Matrix.001 file - promoters75/1033781
aaacaaat

SEQ ID NO: 37190 - DNA, 7 bp, Unknown
  misc_feature (1)..( 7): Matrix.001 file - promoters75/1033841
tccttcc

SEQ ID NO: 37191 - DNA, 8 bp, Unknown
  misc_feature (1)..( 8): Matrix.001 file - promoters75/1033841
atttgctt

SEQ ID NO: 37192 - DNA, 10 bp, Unknown
  misc_feature (1)..( 10): Matrix.001 file - promoters75/1034137
tcaataaatg

SEQ ID NO: 37193 - DNA, 10 bp, Unknown
  misc_feature (1)..( 10): Matrix.001 file - promoters75/1034137
ttaaaaaaaa

SEQ ID NO: 37194 - DNA, 33 bp, Unknown
  misc_feature (1)..( 33): romoters75/1034137
aagtatactataaaggcaataagcatgagtgac

SEQ ID NO: 37195 - DNA, 32 bp, Unknown
  misc_feature (1)..( 32): Matrix.001 file - promoters75/1034137
agtatactataaaggcaataagcatgagtgac

SEQ ID NO: 37196 - DNA, 15 bp, Unknown
  misc_feature (1)..( 15): romoters75/1034137
attgaagacttttca

SEQ ID NO: 37197 - DNA, 14 bp, Unknown
  misc_feature (1)..( 14): Matrix.001 file - promoters75/1034137
ctataagcatttaa

SEQ ID NO: 37198 - DNA, 25 bp, Unknown
  misc_feature (1)..( 25): Matrix.001 file - promoters75/1034137
agcatttaagtctatcgctagactg

SEQ ID NO: 37199 - DNA, 8 bp, Unknown
  misc_feature (1)..( 8): Matrix.001 file - promoters75/1034322
attttaat

SEQ ID NO: 37200 - DNA, 11 bp, Unknown
  misc_feature (1)..( 11): Matrix.001 file - promoters75/1034322
ttaacgaataa

SEQ ID NO: 37201 - DNA, 9 bp, Unknown
  misc_feature (1)..( 9): Matrix.001 file - promoters75/1034322
aatttaatt

SEQ ID NO: 37202 - DNA, 7 bp, Unknown
  misc_feature (1)..( 7): Matrix.001 file - promoters75/1035267
ccacaga

SEQ ID NO: 37203 - DNA, 8 bp, Unknown
  misc_feature (1)..( 8): Matrix.001 file - promoters75/1375471
aaaataat

SEQ ID NO: 37204 - DNA, 8 bp, Unknown
  misc_feature (1)..( 8): Matrix.001 file - promoters75/1375615
atcatatt

SEQ ID NO: 37205 - DNA, 9 bp, Unknown
  misc_feature (1)..( 9): Matrix.001 file - promoters75/1375615
tttgtagtg

SEQ ID NO: 37206 - DNA, 8 bp, Unknown
  misc_feature (1)..( 8): Matrix.001 file - promoters75/1375615
tgatttgt

SEQ ID NO: 37207 - DNA, 7 bp, Unknown
  misc_feature (1)..( 7): Matrix.001 file - promoters75/1375615
gtttgtt

SEQ ID NO: 37208 - DNA, 8 bp, Unknown
  misc_feature (1)..( 8): Matrix.001 file - promoters75/1375615
gatttgtt

SEQ ID NO: 37209 - DNA, 8 bp, Unknown
  misc_feature (1)..( 8): Matrix.001 file - promoters75/1376650
gaaatcaa

SEQ ID NO: 37210 - DNA, 8 bp, Unknown
  misc_feature (1)..( 8): Matrix.001 file - promoters75/1376650
gaactcag

SEQ ID NO: 37211 - DNA, 9 bp, Unknown
  misc_feature (1)..( 9): Matrix.001 file - promoters75/1376650
aagaaaaaa

SEQ ID NO: 37212 - DNA, 6 bp, Unknown
  misc_feature (1)..( 6): Matrix.001 file - promoters75/1376881
agtaaa

SEQ ID NO: 37213 - DNA, 10 bp, Unknown
  misc_feature (1)..( 10): Matrix.001 file - promoters75/1376881
gaaacaaaaa

SEQ ID NO: 37214 - DNA, 7 bp, Unknown
  misc_feature (1)..( 7): Matrix.001 file - promoters75/1377564
attttac

SEQ ID NO: 37215 - DNA, 7 bp, Unknown
  misc_feature (1)..( 7): Matrix.001 file - promoters75/1377564
caaaatc

SEQ ID NO: 37216 - DNA, 7 bp, Unknown
  misc_feature (1)..( 7): Matrix.001 file - promoters75/1377642
taaaaag

SEQ ID NO: 37217 - DNA, 9 bp, Unknown
  misc_feature (1)..( 9): Matrix.001 file - promoters75/1377642
aatgaatat

SEQ ID NO: 37218 - DNA, 6 bp, Unknown
  misc_feature (1)..( 6): Matrix.001 file - promoters75/1377642
ataata

SEQ ID NO: 37219 - DNA, 12 bp, Unknown
  misc_feature (1)..( 12): Matrix.001 file - promoters75/1377642
atataataaata

SEQ ID NO: 37220 - DNA, 8 bp, Unknown
  misc_feature (1)..( 8): Matrix.001 file - promoters75/1377642
aaatatat

SEQ ID NO: 37221 - DNA, 9 bp, Unknown
  misc_feature (1)..( 9): Matrix.001 file - promoters75/1377642
aaattaata

SEQ ID NO: 37222 - DNA, 6 bp, Unknown
  misc_feature (1)..( 6): Matrix.001 file - promoters75/1377642
aaatat

SEQ ID NO: 37223 - DNA, 7 bp, Unknown
  misc_feature (1)..( 7): Matrix.001 file - promoters75/1377642
ttatata

SEQ ID NO: 37224 - DNA, 8 bp, Unknown
  misc_feature (1)..( 8): Matrix.001 file - promoters75/1377642
tgtatcta

SEQ ID NO: 37225 - DNA, 8 bp, Unknown
  misc_feature (1)..( 8): Matrix.001 file - promoters75/1377642
atccaaac

SEQ ID NO: 37226 - DNA, 9 bp, Unknown
  misc_feature (1)..( 9): Matrix.001 file - promoters75/1377642
tttattgat

SEQ ID NO: 37227 - DNA, 9 bp, Unknown
  misc_feature (1)..( 9): Matrix.001 file - promoters75/1377642
aatttattt

SEQ ID NO: 37228 - DNA, 10 bp, Unknown
  misc_feature (1)..( 10): Matrix.001 file - promoters75/1377642
aaaaagacac

SEQ ID NO: 37229 - DNA, 9 bp, Unknown
  misc_feature (1)..( 9): Matrix.001 file - promoters75/1377642
gggattttt

SEQ ID NO: 37230 - DNA, 11 bp, Unknown
  misc_feature (1)..( 11): Matrix.001 file - promoters75/1377680
tgtttgaacat

SEQ ID NO: 37231 - DNA, 8 bp, Unknown
  misc_feature (1)..( 8): Matrix.001 file - promoters75/1377680
caacgaaa

SEQ ID NO: 37232 - DNA, 8 bp, Unknown
  misc_feature (1)..( 8): Matrix.001 file - promoters75/1378049
tatatata

SEQ ID NO: 37233 - DNA, 12 bp, Unknown
  misc_feature (1)..( 12): Matrix.001 file - promoters75/1378393
gtttctttatct

SEQ ID NO: 37234 - DNA, 7 bp, Unknown
  misc_feature (1)..( 7): Matrix.001 file - promoters75/1378393
tttaaca

SEQ ID NO: 37235 - DNA, 7 bp, Unknown
  misc_feature (1)..( 7): Matrix.001 file - promoters75/1380389
tttggtt

SEQ ID NO: 37236 - DNA, 11 bp, Unknown
  misc_feature (1)..( 11): Matrix.001 file - promoters75/1380708
taaaatttttt

SEQ ID NO: 37237 - DNA, 9 bp, Unknown
  misc_feature (1)..( 9): Matrix.001 file - promoters75/1380708
tttattcag

SEQ ID NO: 37238 - DNA, 9 bp, Unknown
  misc_feature (1)..( 9): Matrix.001 file - promoters75/1381704
gtttccttt

SEQ ID NO: 37239 - DNA, 11 bp, Unknown
  misc_feature (1)..( 11): Matrix.001 file - promoters75/1383485
ccataattaag

SEQ ID NO: 37240 - DNA, 10 bp, Unknown
  misc_feature (1)..( 10): Matrix.001 file - promoters75/1383552
gtaaaaataa

SEQ ID NO: 37241 - DNA, 7 bp, Unknown
  misc_feature (1)..( 7): Matrix.001 file - promoters75/1383552
ggcccat

SEQ ID NO: 37242 - DNA, 7 bp, Unknown
  misc_feature (1)..( 7): Matrix.001 file - promoters75/1383552
aaaattt

SEQ ID NO: 37243 - DNA, 10 bp, Unknown
  misc_feature (1)..( 10): Matrix.001 file - promoters75/1384016
tttaataata

SEQ ID NO: 37244 - DNA, 14 bp, Unknown
  misc_feature (1)..( 14): Matrix.001 file - promoters75/1384016
tacttttattataa

SEQ ID NO: 37245 - DNA, 10 bp, Unknown
  misc_feature (1)..( 10): Matrix.001 file - promoters75/1384016
aaaaaaatta

SEQ ID NO: 37246 - DNA, 12 bp, Unknown
  misc_feature (1)..( 12): Matrix.001 file - promoters75/1384016
tttcaaaaaaaa

SEQ ID NO: 37247 - DNA, 10 bp, Unknown
  misc_feature (1)..( 10): Matrix.001 file - promoters75/1384016
ttcaaaaaaa

SEQ ID NO: 37248 - DNA, 14 bp, Unknown
  misc_feature (1)..( 14): Matrix.001 file - promoters75/1384016
agatgaaattaatt

SEQ ID NO: 37249 - DNA, 10 bp, Unknown
  misc_feature (1)..( 10): Matrix.001 file - promoters75/1384016
tttttagcaa

SEQ ID NO: 37250 - DNA, 11 bp, Unknown
  misc_feature (1)..( 11): Matrix.001 file - promoters75/1384016
tattaaataaa

SEQ ID NO: 37251 - DNA, 12 bp, Unknown
  misc_feature (1)..( 12): Matrix.001 file - promoters75/1384016
tgtttttggtta

SEQ ID NO: 37252 - DNA, 8 bp, Unknown
  misc_feature (1)..( 8): Matrix.001 file - promoters75/1384016
tttataaa

SEQ ID NO: 37253 - DNA, 8 bp, Unknown
  misc_feature (1)..( 8): Matrix.001 file - promoters75/1384016
ataaatat

SEQ ID NO: 37254 - DNA, 11 bp, Unknown
  misc_feature (1)..( 11): Matrix.001 file - promoters75/1387123
tgtttgaacat

SEQ ID NO: 37255 - DNA, 8 bp, Unknown
  misc_feature (1)..( 8): Matrix.001 file - promoters75/1387123
caacgaaa

SEQ ID NO: 37256 - DNA, 9 bp, Unknown
  misc_feature (1)..( 9): Matrix.001 file - promoters75/1387349
tttgataca

SEQ ID NO: 37257 - DNA, 12 bp, Unknown
  misc_feature (1)..( 12): Matrix.001 file - promoters75/1387671
tactattaaaac

SEQ ID NO: 37258 - DNA, 12 bp, Unknown
  misc_feature (1)..( 12): Matrix.001 file - promoters75/1387671
ttcttataattc

SEQ ID NO: 37259 - DNA, 11 bp, Unknown
  misc_feature (1)..( 11): Matrix.001 file - promoters75/1387906
ttttaataaca

SEQ ID NO: 37260 - DNA, 10 bp, Unknown
  misc_feature (1)..( 10): Matrix.001 file - promoters75/1387906
aaaatctgtt

SEQ ID NO: 37261 - DNA, 9 bp, Unknown
  misc_feature (1)..( 9): Matrix.001 file - promoters75/1388973
ttttgcata

SEQ ID NO: 37262 - DNA, 9 bp, Unknown
  misc_feature (1)..( 9): Matrix.001 file - promoters75/1390146
aatttgaac

SEQ ID NO: 37263 - DNA, 9 bp, Unknown
  misc_feature (1)..( 9): Matrix.001 file - promoters75/1390240
acttgctga

SEQ ID NO: 37264 - DNA, 8 bp, Unknown
  misc_feature (1)..( 8): Matrix.001 file - promoters75/1390240
aaaataaa

SEQ ID NO: 37265 - DNA, 7 bp, Unknown
  misc_feature (1)..( 7): Matrix.001 file - promoters75/1390240
gggatgg

SEQ ID NO: 37266 - DNA, 15 bp, Unknown
  misc_feature (1)..( 15): Matrix.001 file - promoters75/1393787
gattaatgtctcttg

SEQ ID NO: 37267 - DNA, 10 bp, Unknown
  misc_feature (1)..( 10): Matrix.001 file - promoters75/1393787
ctatgttttg

SEQ ID NO: 37268 - DNA, 11 bp, Unknown
  misc_feature (1)..( 11): Matrix.001 file - promoters75/1393787
atttaaatttt

SEQ ID NO: 37269 - DNA, 7 bp, Unknown
  misc_feature (1)..( 7): Matrix.001 file - promoters75/1393787
taaaaat

SEQ ID NO: 37270 - DNA, 7 bp, Unknown
  misc_feature (1)..( 7): Matrix.001 file - promoters75/1393787
ttattct

SEQ ID NO: 37271 - DNA, 9 bp, Unknown
  misc_feature (1)..( 9): Matrix.001 file - promoters75/1393787
cattttcaa

SEQ ID NO: 37272 - DNA, 11 bp, Unknown
  misc_feature (1)..( 11): Matrix.001 file - promoters75/1393787
taaccattttc

SEQ ID NO: 37273 - DNA, 9 bp, Unknown
  misc_feature (1)..( 9): Matrix.001 file - promoters75/1393787
ttatgtttt

SEQ ID NO: 37274 - DNA, 8 bp, Unknown
  misc_feature (1)..( 8): Matrix.001 file - promoters75/1393787
caagaaat

SEQ ID NO: 37275 - DNA, 7 bp, Unknown
  misc_feature (1)..( 7): Matrix.001 file - promoters75/1393787
aaaatga

SEQ ID NO: 37276 - DNA, 11 bp, Unknown
  misc_feature (1)..( 11): Matrix.001 file - promoters75/1394510
taaaatttttt

SEQ ID NO: 37277 - DNA, 9 bp, Unknown
  misc_feature (1)..( 9): Matrix.001 file - promoters75/1394510
tttattcag

SEQ ID NO: 37278 - DNA, 9 bp, Unknown
  misc_feature (1)..( 9): Matrix.001 file - promoters75/1394592
ataattata

SEQ ID NO: 37279 - DNA, 9 bp, Unknown
  misc_feature (1)..( 9): Matrix.001 file - promoters75/1395095
aaaataatc

SEQ ID NO: 37280 - DNA, 7 bp, Unknown
  misc_feature (1)..( 7): Matrix.001 file - promoters75/1395095
aatagat

SEQ ID NO: 37281 - DNA, 8 bp, Unknown
  misc_feature (1)..( 8): Matrix.001 file - promoters75/1395095
tttatttc

SEQ ID NO: 37282 - DNA, 7 bp, Unknown
  misc_feature (1)..( 7): Matrix.001 file - promoters75/1395095
aaaaaaa

SEQ ID NO: 37283 - DNA, 11 bp, Unknown
  misc_feature (1)..( 11): Matrix.001 file - promoters75/1395095
caaattttttt

SEQ ID NO: 37284 - DNA, 8 bp, Unknown
  misc_feature (1)..( 8): Matrix.001 file - promoters75/1395095
aaagtctt

SEQ ID NO: 37285 - DNA, 8 bp, Unknown
  misc_feature (1)..( 8): Matrix.001 file - promoters75/1395095
catttttt

SEQ ID NO: 37286 - DNA, 8 bp, Unknown
  misc_feature (1)..( 8): Matrix.001 file - promoters75/1395095
aaaattct

SEQ ID NO: 37287 - DNA, 8 bp, Unknown
  misc_feature (1)..( 8): Matrix.001 file - promoters75/1395095
tataaaaa

SEQ ID NO: 37288 - DNA, 9 bp, Unknown
  misc_feature (1)..( 9): Matrix.001 file - promoters75/1396182
aagaataag

SEQ ID NO: 37289 - DNA, 7 bp, Unknown
  misc_feature (1)..( 7): Matrix.001 file - promoters75/1396182
aaaacaa

SEQ ID NO: 37290 - DNA, 11 bp, Unknown
  misc_feature (1)..( 11): Matrix.001 file - promoters75/1396182
ggaaatgaaat

SEQ ID NO: 37291 - DNA, 7 bp, Unknown
  misc_feature (1)..( 7): Matrix.001 file - promoters75/1396182
gtatata

SEQ ID NO: 37292 - DNA, 9 bp, Unknown
  misc_feature (1)..( 9): Matrix.001 file - promoters75/1396308
gggattttt

SEQ ID NO: 37293 - DNA, 7 bp, Unknown
  misc_feature (1)..( 7): Matrix.001 file - promoters75/1396308
taattat

SEQ ID NO: 37294 - DNA, 6 bp, Unknown
  misc_feature (1)..( 6): Matrix.001 file - promoters75/1396354
tacatt

SEQ ID NO: 37295 - DNA, 7 bp, Unknown
  misc_feature (1)..( 7): Matrix.001 file - promoters75/1396354
tttgatt

SEQ ID NO: 37296 - DNA, 7 bp, Unknown
  misc_feature (1)..( 7): Matrix.001 file - promoters75/1397231
tttgctt

SEQ ID NO: 37297 - DNA, 7 bp, Unknown
  misc_feature (1)..( 7): Matrix.001 file - promoters75/1397231
ttccttt

SEQ ID NO: 37298 - DNA, 9 bp, Unknown
  misc_feature (1)..( 9): Matrix.001 file - promoters75/1397231
aacaaaaca

SEQ ID NO: 37299 - DNA, 9 bp, Unknown
  misc_feature (1)..( 9): Matrix.001 file - promoters75/1397231
aaaattata

SEQ ID NO: 37300 - DNA, 6 bp, Unknown
  misc_feature (1)..( 6): Matrix.001 file - promoters75/1397263
tttcaa

SEQ ID NO: 37301 - DNA, 12 bp, Unknown
  misc_feature (1)..( 12): Matrix.001 file - promoters75/1397753
ttctaaaataat

SEQ ID NO: 37302 - DNA, 11 bp, Unknown
  misc_feature (1)..( 11): Matrix.001 file - promoters75/1398337
gaaacaaaaac

SEQ ID NO: 37303 - DNA, 8 bp, Unknown
  misc_feature (1)..( 8): Matrix.001 file - promoters75/1399325
aaattttt

SEQ ID NO: 37304 - DNA, 8 bp, Unknown
  misc_feature (1)..( 8): Matrix.001 file - promoters75/1399325
aaaataaa

SEQ ID NO: 37305 - DNA, 11 bp, Unknown
  misc_feature (1)..( 11): Matrix.001 file - promoters75/1441657
aacttctattt

SEQ ID NO: 37306 - DNA, 7 bp, Unknown
  misc_feature (1)..( 7): Matrix.001 file - promoters75/1441657
ccaaacc

SEQ ID NO: 37307 - DNA, 9 bp, Unknown
  misc_feature (1)..( 9): Matrix.001 file - promoters75/1441657
aaattttca

SEQ ID NO: 37308 - DNA, 7 bp, Unknown
  misc_feature (1)..( 7): Matrix.001 file - promoters75/1441657
caatatt

SEQ ID NO: 37309 - DNA, 12 bp, Unknown
  misc_feature (1)..( 12): Matrix.001 file - promoters75/1441665
gatacaaaacca

SEQ ID NO: 37310 - DNA, 10 bp, Unknown
  misc_feature (1)..( 10): Matrix.001 file - promoters75/1441665
ccaaacaaaa

SEQ ID NO: 37311 - DNA, 11 bp, Unknown
  misc_feature (1)..( 11): Matrix.001 file - promoters75/1441835
gcataaataaa

SEQ ID NO: 37312 - DNA, 11 bp, Unknown
  misc_feature (1)..( 11): Matrix.001 file - promoters75/1441835
ttcattttatt

SEQ ID NO: 37313 - DNA, 11 bp, Unknown
  misc_feature (1)..( 11): Matrix.001 file - promoters75/1441835
agggccatatt

SEQ ID NO: 37314 - DNA, 12 bp, Unknown
  misc_feature (1)..( 12): Matrix.001 file - promoters75/1441835
taattaaaaaaa

SEQ ID NO: 37315 - DNA, 12 bp, Unknown
  misc_feature (1)..( 12): Matrix.001 file - promoters75/1442476
ctttttgttttt

SEQ ID NO: 37316 - DNA, 9 bp, Unknown
  misc_feature (1)..( 9): Matrix.001 file - promoters75/1442476
caaacaaaa

SEQ ID NO: 37317 - DNA, 9 bp, Unknown
  misc_feature (1)..( 9): Matrix.001 file - promoters75/1442880
acctctttt

SEQ ID NO: 37318 - DNA, 7 bp, Unknown
  misc_feature (1)..( 7): Matrix.001 file - promoters75/1442880
aatttac

SEQ ID NO: 37319 - DNA, 10 bp, Unknown
  misc_feature (1)..( 10): Matrix.001 file - promoters75/1442880
aaaaaattgt

SEQ ID NO: 37320 - DNA, 8 bp, Unknown
  misc_feature (1)..( 8): Matrix.001 file - promoters75/1442880
aagctata

SEQ ID NO: 37321 - DNA, 11 bp, Unknown
  misc_feature (1)..( 11): Matrix.001 file - promoters75/1442880
ttacttaaatt

SEQ ID NO: 37322 - DNA, 9 bp, Unknown
  misc_feature (1)..( 9): Matrix.001 file - promoters75/1442880
aaagaattg

SEQ ID NO: 37323 - DNA, 13 bp, Unknown
  misc_feature (1)..( 13): Matrix.001 file - promoters75/1442880
aatatcaacgacg

SEQ ID NO: 37324 - DNA, 8 bp, Unknown
  misc_feature (1)..( 8): Matrix.001 file - promoters75/1442880
aaataata

SEQ ID NO: 37325 - DNA, 12 bp, Unknown
  misc_feature (1)..( 12): Matrix.001 file - promoters75/1442975
ctttttgtatat

SEQ ID NO: 37326 - DNA, 8 bp, Unknown
  misc_feature (1)..( 8): Matrix.001 file - promoters75/1442975
tctgaatt

SEQ ID NO: 37327 - DNA, 11 bp, Unknown
  misc_feature (1)..( 11): Matrix.001 file - promoters75/1442993
ataattgtata

SEQ ID NO: 37328 - DNA, 10 bp, Unknown
  misc_feature (1)..( 10): Matrix.001 file - promoters75/1442993
gaaatagatt

SEQ ID NO: 37329 - DNA, 10 bp, Unknown
  misc_feature (1)..( 10): Matrix.001 file - promoters75/1443306
ctataaatag

SEQ ID NO: 37330 - DNA, 9 bp, Unknown
  misc_feature (1)..( 9): Matrix.001 file - promoters75/1443683
tattagctt

SEQ ID NO: 37331 - DNA, 9 bp, Unknown
  misc_feature (1)..( 9): Matrix.001 file - promoters75/1444441
aatattttt

SEQ ID NO: 37332 - DNA, 11 bp, Unknown
  misc_feature (1)..( 11): Matrix.001 file - promoters75/1444441
gttatattaat

SEQ ID NO: 37333 - DNA, 12 bp, Unknown
  misc_feature (1)..( 12): Matrix.001 file - promoters75/1444441
ttgtttttgaaa

SEQ ID NO: 37334 - DNA, 13 bp, Unknown
  misc_feature (1)..( 13): Matrix.001 file - promoters75/1444441
agaataaaaaaat

SEQ ID NO: 37335 - DNA, 9 bp, Unknown
  misc_feature (1)..( 9): Matrix.001 file - promoters75/1444441
tttataaat

SEQ ID NO: 37336 - DNA, 11 bp, Unknown
  misc_feature (1)..( 11): Matrix.001 file - promoters75/1444441
tttctaattat

SEQ ID NO: 37337 - DNA, 7 bp, Unknown
  misc_feature (1)..( 7): Matrix.001 file - promoters75/1444460
tgaaaca

SEQ ID NO: 37338 - DNA, 7 bp, Unknown
  misc_feature (1)..( 7): Matrix.001 file - promoters75/1446636
aaaggat

SEQ ID NO: 37339 - DNA, 9 bp, Unknown
  misc_feature (1)..( 9): Matrix.001 file - promoters75/1446636
gaggttaaa

SEQ ID NO: 37340 - DNA, 10 bp, Unknown
  misc_feature (1)..( 10): Matrix.001 file - promoters75/1447646
ggaagtagag

SEQ ID NO: 37341 - DNA, 9 bp, Unknown
  misc_feature (1)..( 9): Matrix.001 file - promoters75/1447646
aagatgatg

SEQ ID NO: 37342 - DNA, 6 bp, Unknown
  misc_feature (1)..( 6): Matrix.001 file - promoters75/1447953
cttctt

SEQ ID NO: 37343 - DNA, 7 bp, Unknown
  misc_feature (1)..( 7): Matrix.001 file - promoters75/1448231
cttaacc

SEQ ID NO: 37344 - DNA, 8 bp, Unknown
  misc_feature (1)..( 8): Matrix.001 file - promoters75/1450625
aattttaa

SEQ ID NO: 37345 - DNA, 6 bp, Unknown
  misc_feature (1)..( 6): Matrix.001 file - promoters75/1450625
ttattc

SEQ ID NO: 37346 - DNA, 6 bp, Unknown
  misc_feature (1)..( 6): Matrix.001 file - promoters75/1459039
tataaa

SEQ ID NO: 37347 - DNA, 9 bp, Unknown
  misc_feature (1)..( 9): Matrix.001 file - promoters75/1459039
ggtcaattt

SEQ ID NO: 37348 - DNA, 7 bp, Unknown
  misc_feature (1)..( 7): Matrix.001 file - promoters75/1459039
gccaaac

SEQ ID NO: 37349 - DNA, 8 bp, Unknown
  misc_feature (1)..( 8): Matrix.001 file - promoters75/1459223
aaaaaaat

SEQ ID NO: 37350 - DNA, 10 bp, Unknown
  misc_feature (1)..( 10): Matrix.001 file - promoters75/1459223
tttataaata

SEQ ID NO: 37351 - DNA, 6 bp, Unknown
  misc_feature (1)..( 6): Matrix.001 file - promoters75/1459223
caaaca

SEQ ID NO: 37352 - DNA, 7 bp, Unknown
  misc_feature (1)..( 7): Matrix.001 file - promoters75/1461791
gaaatcg

SEQ ID NO: 37353 - DNA, 7 bp, Unknown
  misc_feature (1)..( 7): Matrix.001 file - promoters75/1461839
ataatcc

SEQ ID NO: 37354 - DNA, 7 bp, Unknown
  misc_feature (1)..( 7): Matrix.001 file - promoters75/1461839
acacata

SEQ ID NO: 37355 - DNA, 11 bp, Unknown
  misc_feature (1)..( 11): Matrix.001 file - promoters75/1461839
aaaaagaaaag

SEQ ID NO: 37356 - DNA, 7 bp, Unknown
  misc_feature (1)..( 7): Matrix.001 file - promoters75/1461839
ggatgat

SEQ ID NO: 37357 - DNA, 10 bp, Unknown
  misc_feature (1)..( 10): Matrix.001 file - promoters75/1461839
aaaaaaagaa

SEQ ID NO: 37358 - DNA, 7 bp, Unknown
  misc_feature (1)..( 7): Matrix.001 file - promoters75/1461839
ggatgat

SEQ ID NO: 37359 - DNA, 7 bp, Unknown
  misc_feature (1)..( 7): Matrix.001 file - promoters75/1461839
ttatcag

SEQ ID NO: 37360 - DNA, 12 bp, Unknown
  misc_feature (1)..( 12): Matrix.001 file - promoters75/1461839
ttgagattatca

SEQ ID NO: 37361 - DNA, 10 bp, Unknown
  misc_feature (1)..( 10): Matrix.001 file - promoters75/1472778
ttttagttta

SEQ ID NO: 37362 - DNA, 8 bp, Unknown
  misc_feature (1)..( 8): Matrix.001 file - promoters75/1472799
atcatatt

SEQ ID NO: 37363 - DNA, 9 bp, Unknown
  misc_feature (1)..( 9): Matrix.001 file - promoters75/1472799
tttgtagtg

SEQ ID NO: 37364 - DNA, 8 bp, Unknown
  misc_feature (1)..( 8): Matrix.001 file - promoters75/1472799
tgatttgt

SEQ ID NO: 37365 - DNA, 7 bp, Unknown
  misc_feature (1)..( 7): Matrix.001 file - promoters75/1472799
gtttgtt

SEQ ID NO: 37366 - DNA, 8 bp, Unknown
  misc_feature (1)..( 8): Matrix.001 file - promoters75/1472799
gatttgtt

SEQ ID NO: 37367 - DNA, 7 bp, Unknown
  misc_feature (1)..( 7): Matrix.001 file - promoters75/1481696
tttactt

SEQ ID NO: 37368 - DNA, 10 bp, Unknown
  misc_feature (1)..( 10): Matrix.001 file - promoters75/1481696
aaaaagaaac

SEQ ID NO: 37369 - DNA, 12 bp, Unknown
  misc_feature (1)..( 12): Matrix.001 file - promoters75/1481696
tatattcaattc

SEQ ID NO: 37370 - DNA, 9 bp, Unknown
  misc_feature (1)..( 9): Matrix.001 file - promoters75/1481696
ttttattat

SEQ ID NO: 37371 - DNA, 13 bp, Unknown
  misc_feature (1)..( 13): Matrix.001 file - promoters75/1481696
tgcttatgttaga

SEQ ID NO: 37372 - DNA, 7 bp, Unknown
  misc_feature (1)..( 7): Matrix.001 file - promoters75/1532660
ggagcaa

SEQ ID NO: 37373 - DNA, 7 bp, Unknown
  misc_feature (1)..( 7): Matrix.001 file - promoters75/1532660
aaaattt

SEQ ID NO: 37374 - DNA, 7 bp, Unknown
  misc_feature (1)..( 7): Matrix.001 file - promoters75/1532660
aaagaat

SEQ ID NO: 37375 - DNA, 10 bp, Unknown
  misc_feature (1)..( 10): Matrix.001 file - promoters75/1532660
caaataattt

SEQ ID NO: 37376 - DNA, 7 bp, Unknown
  misc_feature (1)..( 7): Matrix.001 file - promoters75/1532660
aagaagg

SEQ ID NO: 37377 - DNA, 7 bp, Unknown
  misc_feature (1)..( 7): Matrix.001 file - promoters75/1532937
cttcaaa

SEQ ID NO: 37378 - DNA, 6 bp, Unknown
  misc_feature (1)..( 6): Matrix.001 file - promoters75/1532937
aataaa

SEQ ID NO: 37379 - DNA, 10 bp, Unknown
  misc_feature (1)..( 10): Matrix.001 file - promoters75/1532937
ttcttcttct

SEQ ID NO: 37380 - DNA, 12 bp, Unknown
  misc_feature (1)..( 12): Matrix.001 file - promoters75/1532937
aaaaaaattcca

SEQ ID NO: 37381 - DNA, 9 bp, Unknown
  misc_feature (1)..( 9): Matrix.001 file - promoters75/1532937
aatttttgg

SEQ ID NO: 37382 - DNA, 9 bp, Unknown
  misc_feature (1)..( 9): Matrix.001 file - promoters75/1532937
aattggtta

SEQ ID NO: 37383 - DNA, 8 bp, Unknown
  misc_feature (1)..( 8): Matrix.001 file - promoters75/1532948
ttttgtaa

SEQ ID NO: 37384 - DNA, 8 bp, Unknown
  misc_feature (1)..( 8): Matrix.001 file - promoters75/1532948
cccactaa

SEQ ID NO: 37385 - DNA, 9 bp, Unknown
  misc_feature (1)..( 9): Matrix.001 file - promoters75/1557606
ttggcgaga

SEQ ID NO: 37386 - DNA, 10 bp, Unknown
  misc_feature (1)..( 10): Matrix.001 file - promoters75/1557769
aaacttaaga

SEQ ID NO: 37387 - DNA, 8 bp, Unknown
  misc_feature (1)..( 8): Matrix.001 file - promoters75/1557769
attttttt

SEQ ID NO: 37388 - DNA, 8 bp, Unknown
  misc_feature (1)..( 8): Matrix.001 file - promoters75/1557769
gatattaa

SEQ ID NO: 37389 - DNA, 12 bp, Unknown
  misc_feature (1)..( 12): Matrix.001 file - promoters75/1567092
caaaaatttaca

SEQ ID NO: 37390 - DNA, 9 bp, Unknown
  misc_feature (1)..( 9): Matrix.001 file - promoters75/1567092
ttgtttata

SEQ ID NO: 37391 - DNA, 10 bp, Unknown
  misc_feature (1)..( 10): Matrix.001 file - promoters75/1567092
tgactatatg

SEQ ID NO: 37392 - DNA, 8 bp, Unknown
  misc_feature (1)..( 8): Matrix.001 file - promoters75/1567092
aaactaat

SEQ ID NO: 37393 - DNA, 8 bp, Unknown
  misc_feature (1)..( 8): Matrix.001 file - promoters75/1567092
tttgtttg

SEQ ID NO: 37394 - DNA, 8 bp, Unknown
  misc_feature (1)..( 8): Matrix.001 file - promoters75/1567092
tttgaatt

SEQ ID NO: 37395 - DNA, 6 bp, Unknown
  misc_feature (1)..( 6): Matrix.001 file - promoters75/1567092
attttt

SEQ ID NO: 37396 - DNA, 8 bp, Unknown
  misc_feature (1)..( 8): Matrix.001 file - promoters75/1567092
atattagt

SEQ ID NO: 37397 - DNA, 8 bp, Unknown
  misc_feature (1)..( 8): Matrix.001 file - promoters75/1567547
actcttag

SEQ ID NO: 37398 - DNA, 13 bp, Unknown
  misc_feature (1)..( 13): Matrix.001 file - promoters75/1567547
actatataaagaa

SEQ ID NO: 37399 - DNA, 9 bp, Unknown
  misc_feature (1)..( 9): Matrix.001 file - promoters75/1570116
ttagaaaat

SEQ ID NO: 37400 - DNA, 8 bp, Unknown
  misc_feature (1)..( 8): Matrix.001 file - promoters75/1570116
tattaaaa

SEQ ID NO: 37401 - DNA, 7 bp, Unknown
  misc_feature (1)..( 7): Matrix.001 file - promoters75/1570116
aaaaata

SEQ ID NO: 37402 - DNA, 7 bp, Unknown
  misc_feature (1)..( 7): Matrix.001 file - promoters75/1570116
aaaataa

SEQ ID NO: 37403 - DNA, 10 bp, Unknown
  misc_feature (1)..( 10): Matrix.001 file - promoters75/1570474
cattctctga

SEQ ID NO: 37404 - DNA, 12 bp, Unknown
  misc_feature (1)..( 12): Matrix.001 file - promoters75/1570606
taaacattttaa

SEQ ID NO: 37405 - DNA, 11 bp, Unknown
  misc_feature (1)..( 11): Matrix.001 file - promoters75/1570606
aagaaaagtaa

SEQ ID NO: 37406 - DNA, 8 bp, Unknown
  misc_feature (1)..( 8): Matrix.001 file - promoters75/1570606
tatatttg

SEQ ID NO: 37407 - DNA, 9 bp, Unknown
  misc_feature (1)..( 9): Matrix.001 file - promoters75/1570606
gtaaaaaat

SEQ ID NO: 37408 - DNA, 8 bp, Unknown
  misc_feature (1)..( 8): Matrix.001 file - promoters75/1570606
aaaattta

SEQ ID NO: 37409 - DNA, 9 bp, Unknown
  misc_feature (1)..( 9): Matrix.001 file - promoters75/1570622
tcgtttcaa

SEQ ID NO: 37410 - DNA, 8 bp, Unknown
  misc_feature (1)..( 8): Matrix.001 file - promoters75/1570622
aaacataa

SEQ ID NO: 37411 - DNA, 19 bp, Unknown
  misc_feature (1)..( 19): Matrix.001 file - promoters75/1570622
taaaacaaaaaaaagaaaa

SEQ ID NO: 37412 - DNA, 9 bp, Unknown
  misc_feature (1)..( 9): Matrix.001 file - promoters75/1570622
tactctttt

SEQ ID NO: 37413 - DNA, 9 bp, Unknown
  misc_feature (1)..( 9): Matrix.001 file - promoters75/1570622
tatgattaa

SEQ ID NO: 37414 - DNA, 9 bp, Unknown
  misc_feature (1)..( 9): Matrix.001 file - promoters75/1570622
tcttcttat

SEQ ID NO: 37415 - DNA, 9 bp, Unknown
  misc_feature (1)..( 9): Matrix.001 file - promoters75/1570622
tttaacaat

SEQ ID NO: 37416 - DNA, 7 bp, Unknown
  misc_feature (1)..( 7): Matrix.001 file - promoters75/1570966
attttta

SEQ ID NO: 37417 - DNA, 9 bp, Unknown
  misc_feature (1)..( 9): Matrix.001 file - promoters75/1570966
agttaactt

SEQ ID NO: 37418 - DNA, 8 bp, Unknown
  misc_feature (1)..( 8): Matrix.001 file - promoters75/1580932
aataaaag

SEQ ID NO: 37419 - DNA, 8 bp, Unknown
  misc_feature (1)..( 8): Matrix.001 file - promoters75/1580932
tcatttaa

SEQ ID NO: 37420 - DNA, 8 bp, Unknown
  misc_feature (1)..( 8): Matrix.001 file - promoters75/1580932
aaaaacca

SEQ ID NO: 37421 - DNA, 8 bp, Unknown
  misc_feature (1)..( 8): Matrix.001 file - promoters75/1595794
aaatgtat

SEQ ID NO: 37422 - DNA, 7 bp, Unknown
  misc_feature (1)..( 7): Matrix.001 file - promoters75/1595794
aaaaaat

SEQ ID NO: 37423 - DNA, 9 bp, Unknown
  misc_feature (1)..( 9): Matrix.001 file - promoters75/1595794
aatttaatc

SEQ ID NO: 37424 - DNA, 9 bp, Unknown
  misc_feature (1)..( 9): Matrix.001 file - promoters75/1595794
agtctttta

SEQ ID NO: 37425 - DNA, 11 bp, Unknown
  misc_feature (1)..( 11): Matrix.001 file - promoters75/1595794
catttgtataa

SEQ ID NO: 37426 - DNA, 11 bp, Unknown
  misc_feature (1)..( 11): Matrix.001 file - promoters75/1595794
catttctatag

SEQ ID NO: 37427 - DNA, 11 bp, Unknown
  misc_feature (1)..( 11): Matrix.001 file - promoters75/1595794
aaataattcaa

SEQ ID NO: 37428 - DNA, 9 bp, Unknown
  misc_feature (1)..( 9): Matrix.001 file - promoters75/1595794
attttctta

SEQ ID NO: 37429 - DNA, 9 bp, Unknown
  misc_feature (1)..( 9): Matrix.001 file - promoters75/1595794
aaaacaaaa

SEQ ID NO: 37430 - DNA, 10 bp, Unknown
  misc_feature (1)..( 10): Matrix.001 file - promoters75/1662827
ttttcataat

SEQ ID NO: 37431 - DNA, 10 bp, Unknown
  misc_feature (1)..( 10): Matrix.001 file - promoters75/1662827
agttaataaa

SEQ ID NO: 37432 - DNA, 6 bp, Unknown
  misc_feature (1)..( 6): Matrix.001 file - promoters75/1662827
tacatt

SEQ ID NO: 37433 - DNA, 7 bp, Unknown
  misc_feature (1)..( 7): Matrix.001 file - promoters75/1662827
tttttac

SEQ ID NO: 37434 - DNA, 8 bp, Unknown
  misc_feature (1)..( 8): Matrix.001 file - promoters75/1662827
agacaaaa

SEQ ID NO: 37435 - DNA, 8 bp, Unknown
  misc_feature (1)..( 8): Matrix.001 file - promoters75/1662917
atttgtta

SEQ ID NO: 37436 - DNA, 7 bp, Unknown
  misc_feature (1)..( 7): Matrix.001 file - promoters75/1662917
ttttaat

SEQ ID NO: 37437 - DNA, 8 bp, Unknown
  misc_feature (1)..( 8): Matrix.001 file - promoters75/1662917
aaattctc

SEQ ID NO: 37438 - DNA, 11 bp, Unknown
  misc_feature (1)..( 11): Matrix.001 file - promoters75/1662917
tttataactat

SEQ ID NO: 37439 - DNA, 8 bp, Unknown
  misc_feature (1)..( 8): Matrix.001 file - promoters75/1663221
gataattt

SEQ ID NO: 37440 - DNA, 8 bp, Unknown
  misc_feature (1)..( 8): Matrix.001 file - promoters75/1663221
agagaagg

SEQ ID NO: 37441 - DNA, 11 bp, Unknown
  misc_feature (1)..( 11): Matrix.001 file - promoters75/1663221
agtatatcatt

SEQ ID NO: 37442 - DNA, 7 bp, Unknown
  misc_feature (1)..( 7): Matrix.001 file - promoters75/1664931
gaagttt

SEQ ID NO: 37443 - DNA, 11 bp, Unknown
  misc_feature (1)..( 11): Matrix.001 file - promoters75/1664981
aatatataaag

SEQ ID NO: 37444 - DNA, 18 bp, Unknown
  misc_feature (1)..( 18): Matrix.001 file - promoters75/1664981
tattcaaaacaaatattc

SEQ ID NO: 37445 - DNA, 8 bp, Unknown
  misc_feature (1)..( 8): Matrix.001 file - promoters75/1665272
ttccaaaa

SEQ ID NO: 37446 - DNA, 11 bp, Unknown
  misc_feature (1)..( 11): Matrix.001 file - promoters75/1665272
ttcttgttcgt

SEQ ID NO: 37447 - DNA, 9 bp, Unknown
  misc_feature (1)..( 9): Matrix.001 file - promoters75/1665272
agaaataga

SEQ ID NO: 37448 - DNA, 7 bp, Unknown
  misc_feature (1)..( 7): Matrix.001 file - promoters75/1711228
aagattt

SEQ ID NO: 37449 - DNA, 12 bp, Unknown
  misc_feature (1)..( 12): Matrix.001 file - promoters75/1711228
tgtattttatgt

SEQ ID NO: 37450 - DNA, 9 bp, Unknown
  misc_feature (1)..( 9): Matrix.001 file - promoters75/1714831
tcaaaatgc

SEQ ID NO: 37451 - DNA, 10 bp, Unknown
  misc_feature (1)..( 10): Matrix.001 file - promoters75/1714831
catttgattt

SEQ ID NO: 37452 - DNA, 7 bp, Unknown
  misc_feature (1)..( 7): Matrix.001 file - promoters75/1714989
aaaaata

SEQ ID NO: 37453 - DNA, 8 bp, Unknown
  misc_feature (1)..( 8): Matrix.001 file - promoters75/1714989
aaaataaa

SEQ ID NO: 37454 - DNA, 7 bp, Unknown
  misc_feature (1)..( 7): Matrix.001 file - promoters75/1714989
aaaaaaa

SEQ ID NO: 37455 - DNA, 10 bp, Unknown
  misc_feature (1)..( 10): Matrix.001 file - promoters75/1714989
caaaccaaag

SEQ ID NO: 37456 - DNA, 11 bp, Unknown
  misc_feature (1)..( 11): Matrix.001 file - promoters75/1714989
atttgaataaa

SEQ ID NO: 37457 - DNA, 9 bp, Unknown
  misc_feature (1)..( 9): Matrix.001 file - promoters75/1714989
cctctttcc

SEQ ID NO: 37458 - DNA, 10 bp, Unknown
  misc_feature (1)..( 10): Matrix.001 file - promoters75/1714989
tatacaaaaa

SEQ ID NO: 37459 - DNA, 11 bp, Unknown
  misc_feature (1)..( 11): Matrix.001 file - promoters75/1714989
aaacaataaaa

SEQ ID NO: 37460 - DNA, 10 bp, Unknown
  misc_feature (1)..( 10): Matrix.001 file - promoters75/1714989
atattattag

SEQ ID NO: 37461 - DNA, 7 bp, Unknown
  misc_feature (1)..( 7): Matrix.001 file - promoters75/1714989
tttattt

SEQ ID NO: 37462 - DNA, 7 bp, Unknown
  misc_feature (1)..( 7): Matrix.001 file - promoters75/1714989
aaccaat

SEQ ID NO: 37463 - DNA, 8 bp, Unknown
  misc_feature (1)..( 8): Matrix.001 file - promoters75/1714989
aacaaaag

SEQ ID NO: 37464 - DNA, 8 bp, Unknown
  misc_feature (1)..( 8): Matrix.001 file - promoters75/1714989
ttacaaac

SEQ ID NO: 37465 - DNA, 8 bp, Unknown
  misc_feature (1)..( 8): Matrix.001 file - promoters75/1715347
tttttgtt

SEQ ID NO: 37466 - DNA, 8 bp, Unknown
  misc_feature (1)..( 8): Matrix.001 file - promoters75/1807771
acttatat

SEQ ID NO: 37467 - DNA, 12 bp, Unknown
  misc_feature (1)..( 12): Matrix.001 file - promoters75/1807771
tttgtttttttt

SEQ ID NO: 37468 - DNA, 12 bp, Unknown
  misc_feature (1)..( 12): Matrix.001 file - promoters75/1808172
aattaaccatga

SEQ ID NO: 37469 - DNA, 7 bp, Unknown
  misc_feature (1)..( 7): Matrix.001 file - promoters75/1808172
tctttct

SEQ ID NO: 37470 - DNA, 8 bp, Unknown
  misc_feature (1)..( 8): Matrix.001 file - promoters75/1808172
acaaaaca

SEQ ID NO: 37471 - DNA, 8 bp, Unknown
  misc_feature (1)..( 8): Matrix.001 file - promoters75/1808172
caattata

SEQ ID NO: 37472 - DNA, 7 bp, Unknown
  misc_feature (1)..( 7): Matrix.001 file - promoters75/1808172
ctctttc

SEQ ID NO: 37473 - DNA, 8 bp, Unknown
  misc_feature (1)..( 8): Matrix.001 file - promoters75/1808172
tatatata

SEQ ID NO: 37474 - DNA, 9 bp, Unknown
  misc_feature (1)..( 9): Matrix.001 file - promoters75/1808172
aaattttga

SEQ ID NO: 37475 - DNA, 9 bp, Unknown
  misc_feature (1)..( 9): Matrix.001 file - promoters75/1808172
tatgagaaa

SEQ ID NO: 37476 - DNA, 7 bp, Unknown
  misc_feature (1)..( 7): Matrix.001 file - promoters75/1808172
ttgtttt

SEQ ID NO: 37477 - DNA, 7 bp, Unknown
  misc_feature (1)..( 7): Matrix.001 file - promoters75/1808172
attttta

SEQ ID NO: 37478 - DNA, 9 bp, Unknown
  misc_feature (1)..( 9): Matrix.001 file - promoters75/1808172
agttaactt

SEQ ID NO: 37479 - DNA, 9 bp, Unknown
  misc_feature (1)..( 9): Matrix.001 file - promoters75/1809157
aaaaacata

SEQ ID NO: 37480 - DNA, 11 bp, Unknown
  misc_feature (1)..( 11): Matrix.001 file - promoters75/1809157
cgaaacaaaaa

SEQ ID NO: 37481 - DNA, 9 bp, Unknown
  misc_feature (1)..( 9): Matrix.001 file - promoters75/1957212
gattcttac

SEQ ID NO: 37482 - DNA, 9 bp, Unknown
  misc_feature (1)..( 9): Matrix.001 file - promoters75/1957212
tatttaaac

SEQ ID NO: 37483 - DNA, 8 bp, Unknown
  misc_feature (1)..( 8): Matrix.001 file - promoters75/1957212
agagaaac

SEQ ID NO: 37484 - DNA, 10 bp, Unknown
  misc_feature (1)..( 10): Matrix.001 file - promoters75/1975923
gataaaattt

SEQ ID NO: 37485 - DNA, 8 bp, Unknown
  misc_feature (1)..( 8): Matrix.001 file - promoters75/1975923
atataaag

SEQ ID NO: 37486 - DNA, 10 bp, Unknown
  misc_feature (1)..( 10): Matrix.001 file - promoters75/1975923
taaaaataat

SEQ ID NO: 37487 - DNA, 9 bp, Unknown
  misc_feature (1)..( 9): Matrix.001 file - promoters75/1976019
aatttttgg

SEQ ID NO: 37488 - DNA, 9 bp, Unknown
  misc_feature (1)..( 9): Matrix.001 file - promoters75/1976019
aattggtta

SEQ ID NO: 37489 - DNA, 10 bp, Unknown
  misc_feature (1)..( 10): Matrix.001 file - promoters75/1976078
ccagatacag

SEQ ID NO: 37490 - DNA, 12 bp, Unknown
  misc_feature (1)..( 12): Matrix.001 file - promoters75/1976078
aaatccaaaccc

SEQ ID NO: 37491 - DNA, 9 bp, Unknown
  misc_feature (1)..( 9): Matrix.001 file - promoters75/1976078
acttttttt

SEQ ID NO: 37492 - DNA, 4 bp, Unknown
  misc_feature (1)..( 4): Matrix.001 file - promoters75/1976078
attg

SEQ ID NO: 37493 - DNA, 9 bp, Unknown
  misc_feature (1)..( 9): Matrix.001 file - promoters75/1976078
tttcaagtt

SEQ ID NO: 37494 - DNA, 9 bp, Unknown
  misc_feature (1)..( 9): Matrix.001 file - promoters75/1976236
ttcaaaaaa

SEQ ID NO: 37495 - DNA, 7 bp, Unknown
  misc_feature (1)..( 7): Matrix.001 file - promoters75/1976236
ttttgac

SEQ ID NO: 37496 - DNA, 8 bp, Unknown
  misc_feature (1)..( 8): Matrix.001 file - promoters75/1976236
caaacctg

SEQ ID NO: 37497 - DNA, 8 bp, Unknown
  misc_feature (1)..( 8): Matrix.001 file - promoters75/1976236
agatacag

SEQ ID NO: 37498 - DNA, 9 bp, Unknown
  misc_feature (1)..( 9): Matrix.001 file - promoters75/1976236
tttcaagtt

SEQ ID NO: 37499 - DNA, 9 bp, Unknown
  misc_feature (1)..( 9): Matrix.001 file - promoters75/1976354
aataaaaaa

SEQ ID NO: 37500 - DNA, 11 bp, Unknown
  misc_feature (1)..( 11): Matrix.001 file - promoters75/1976354
aatatgtgtaa

SEQ ID NO: 37501 - DNA, 9 bp, Unknown
  misc_feature (1)..( 9): Matrix.001 file - promoters75/1976354
acagttatc

SEQ ID NO: 37502 - DNA, 10 bp, Unknown
  misc_feature (1)..( 10): Matrix.001 file - promoters75/1976354
atcagtttga

SEQ ID NO: 37503 - DNA, 8 bp, Unknown
  misc_feature (1)..( 8): Matrix.001 file - promoters75/2104991
aaatttca

SEQ ID NO: 37504 - DNA, 8 bp, Unknown
  misc_feature (1)..( 8): Matrix.001 file - promoters75/2104991
taaatcag

SEQ ID NO: 37505 - DNA, 14 bp, Unknown
  misc_feature (1)..( 14): Matrix.001 file - promoters75/2104991
taaaagtttgatat

SEQ ID NO: 37506 - DNA, 14 bp, Unknown
  misc_feature (1)..( 14): Matrix.001 file - promoters75/2104991
taaaagtttgatat

SEQ ID NO: 37507 - DNA, 9 bp, Unknown
  misc_feature (1)..( 9): Matrix.001 file - promoters75/2105514
tatataaaa

SEQ ID NO: 37508 - DNA, 10 bp, Unknown
  misc_feature (1)..( 10): Matrix.001 file - promoters75/2106017
aaataaaaaa

SEQ ID NO: 37509 - DNA, 9 bp, Unknown
  misc_feature (1)..( 9): Matrix.001 file - promoters75/2106017
gcagtaaca

SEQ ID NO: 37510 - DNA, 12 bp, Unknown
  misc_feature (1)..( 12): Matrix.001 file - promoters75/2106017
gtttgaaatctg

SEQ ID NO: 37511 - DNA, 9 bp, Unknown
  misc_feature (1)..( 9): Matrix.001 file - promoters75/2107065
tgaagaaaa

SEQ ID NO: 37512 - DNA, 10 bp, Unknown
  misc_feature (1)..( 10): Matrix.001 file - promoters75/2113502
acattaaaaa

SEQ ID NO: 37513 - DNA, 13 bp, Unknown
  misc_feature (1)..( 13): Matrix.001 file - promoters75/2113502
ctccactataaaa

SEQ ID NO: 37514 - DNA, 11 bp, Unknown
  misc_feature (1)..( 11): Matrix.001 file - promoters75/2113502
cgaaacaatta

SEQ ID NO: 37515 - DNA, 8 bp, Unknown
  misc_feature (1)..( 8): Matrix.001 file - promoters75/2113846
tataattt

SEQ ID NO: 37516 - DNA, 9 bp, Unknown
  misc_feature (1)..( 9): Matrix.001 file - promoters75/2113846
aatttaacg

SEQ ID NO: 37517 - DNA, 8 bp, Unknown
  misc_feature (1)..( 8): Matrix.001 file - promoters75/2113889
gttgactg

SEQ ID NO: 37518 - DNA, 7 bp, Unknown
  misc_feature (1)..( 7): Matrix.001 file - promoters75/2114200
aatcctt

SEQ ID NO: 37519 - DNA, 8 bp, Unknown
  misc_feature (1)..( 8): Matrix.001 file - promoters75/2114200
gaataaaa

SEQ ID NO: 37520 - DNA, 11 bp, Unknown
  misc_feature (1)..( 11): Matrix.001 file - promoters75/2187156
ccataattaag

SEQ ID NO: 37521 - DNA, 8 bp, Unknown
  misc_feature (1)..( 8): Matrix.001 file - promoters75/2217732
gaaagaaa

SEQ ID NO: 37522 - DNA, 7 bp, Unknown
  misc_feature (1)..( 7): Matrix.001 file - promoters75/2217817
atagatt

SEQ ID NO: 37523 - DNA, 9 bp, Unknown
  misc_feature (1)..( 9): Matrix.001 file - promoters75/2218207
gcagaaaaa

SEQ ID NO: 37524 - DNA, 10 bp, Unknown
  misc_feature (1)..( 10): Matrix.001 file - promoters75/2218207
aatataaagg

SEQ ID NO: 37525 - DNA, 11 bp, Unknown
  misc_feature (1)..( 11): Matrix.001 file - promoters75/2218271
ataaaaactgg

SEQ ID NO: 37526 - DNA, 7 bp, Unknown
  misc_feature (1)..( 7): Matrix.001 file - promoters75/2724699
cattatc

SEQ ID NO: 37527 - DNA, 9 bp, Unknown
  misc_feature (1)..( 9): Matrix.001 file - promoters75/2724699
aaatgtttt

SEQ ID NO: 37528 - DNA, 8 bp, Unknown
  misc_feature (1)..( 8): Matrix.001 file - promoters75/2781251
ttctccgc

SEQ ID NO: 37529 - DNA, 9 bp, Unknown
  misc_feature (1)..( 9): Matrix.001 file - promoters75/2781251
aaaacatat

SEQ ID NO: 37530 - DNA, 9 bp, Unknown
  misc_feature (1)..( 9): Matrix.001 file - promoters75/2781341
aaatcgtaa

SEQ ID NO: 37531 - DNA, 10 bp, Unknown
  misc_feature (1)..( 10): Matrix.001 file - promoters75/2781341
aaaaccaaaa

SEQ ID NO: 37532 - DNA, 7 bp, Unknown
  misc_feature (1)..( 7): Matrix.001 file - promoters75/2990611
tttgttt

SEQ ID NO: 37533 - DNA, 10 bp, Unknown
  misc_feature (1)..( 10): Matrix.001 file - promoters75/2991239
tcaataaatg

SEQ ID NO: 37534 - DNA, 10 bp, Unknown
  misc_feature (1)..( 10): Matrix.001 file - promoters75/2991239
ttaaaaaaaa

SEQ ID NO: 37535 - DNA, 33 bp, Unknown; identical to SEQ ID NO: 37194
  misc_feature (1)..( 33): Matrix.001 file - promoters75/2991239

SEQ ID NO: 37536 - DNA, 32 bp, Unknown; identical to SEQ ID NO: 37195
  misc_feature (1)..( 32): Matrix.001 file - promoters75/2991239

SEQ ID NO: 37537 - DNA, 15 bp, Unknown
  misc_feature (1)..( 15): Matrix.001 file - promoters75/2991239
attgaagacttttca

SEQ ID NO: 37538 - DNA, 14 bp, Unknown
  misc_feature (1)..( 14): Matrix.001 file - promoters75/2991239
ctataagcatttaa

SEQ ID NO: 37539 - DNA, 25 bp, Unknown
  misc_feature (1)..( 25): Matrix.001 file - promoters75/2991239
agcatttaagtctatcgctagactg

SEQ ID NO: 37540 - DNA, 8 bp, Unknown
  misc_feature (1)..( 8): Matrix.001 file - promoters75/2991281
ttttgaat

SEQ ID NO: 37541 - DNA, 11 bp, Unknown
  misc_feature (1)..( 11): Matrix.001 file - promoters75/2991281
aaaatgtgaaa

SEQ ID NO: 37542 - DNA, 8 bp, Unknown
  misc_feature (1)..( 8): Matrix.001 file - promoters75/2991281
agcccaaa

SEQ ID NO: 37543 - DNA, 8 bp, Unknown
  misc_feature (1)..( 8): Matrix.001 file - promoters75/2991281
tgtttaga

SEQ ID NO: 37544 - DNA, 10 bp, Unknown
  misc_feature (1)..( 10): Matrix.001 file - promoters75/2991300
ttatattatt

SEQ ID NO: 37545 - DNA, 10 bp, Unknown
  misc_feature (1)..( 10): Matrix.001 file - promoters75/2991300
attaatatat

SEQ ID NO: 37546 - DNA, 9 bp, Unknown
  misc_feature (1)..( 9): Matrix.001 file - promoters75/2991300
taaatatat

SEQ ID NO: 37547 - DNA, 8 bp, Unknown
  misc_feature (1)..( 8): Matrix.001 file - promoters75/2991489
tttttgta

SEQ ID NO: 37548 - DNA, 12 bp, Unknown
  misc_feature (1)..( 12): Matrix.001 file - promoters75/2991489
aaattttaatat

SEQ ID NO: 37549 - DNA, 7 bp, Unknown
  misc_feature (1)..( 7): Matrix.001 file - promoters75/2992722
aatttac

SEQ ID NO: 37550 - DNA, 11 bp, Unknown
  misc_feature (1)..( 11): Matrix.001 file - promoters75/2992722
ataattgtata

SEQ ID NO: 37551 - DNA, 10 bp, Unknown
  misc_feature (1)..( 10): Matrix.001 file - promoters75/2992722
gaaatagatt

SEQ ID NO: 37552 - DNA, 8 bp, Unknown
  misc_feature (1)..( 8): Matrix.001 file - promoters75/2992722
aagctata

SEQ ID NO: 37553 - DNA, 9 bp, Unknown
  misc_feature (1)..( 9): Matrix.001 file - promoters75/2992722
ttattaatt

SEQ ID NO: 37554 - DNA, 14 bp, Unknown
  misc_feature (1)..( 14): Matrix.001 file - promoters75/2993642
tttatatattttta

SEQ ID NO: 37555 - DNA, 8 bp, Unknown
  misc_feature (1)..( 8): Matrix.001 file - promoters75/2993642
aaatgttt

SEQ ID NO: 37556 - DNA, 12 bp, Unknown
  misc_feature (1)..( 12): Matrix.001 file - promoters75/3043962
atttgaaatttt

SEQ ID NO: 37557 - DNA, 9 bp, Unknown
  misc_feature (1)..( 9): Matrix.001 file - promoters75/3043962
actatttaa

SEQ ID NO: 37558 - DNA, 8 bp, Unknown
  misc_feature (1)..( 8): Matrix.001 file - promoters75/3043962
ttataaaa

SEQ ID NO: 37559 - DNA, 7 bp, Unknown
  misc_feature (1)..( 7): Matrix.001 file - promoters75/3409165
ttcataa

SEQ ID NO: 37560 - DNA, 7 bp, Unknown
  misc_feature (1)..( 7): Matrix.001 file - promoters75/3409489
cgaagaa

SEQ ID NO: 37561 - DNA, 8 bp, Unknown
  misc_feature (1)..( 8): Matrix.001 file - promoters75/3409489
acttcctt

SEQ ID NO: 37562 - DNA, 9 bp, Unknown
  misc_feature (1)..( 9): Matrix.001 file - promoters75/3409489
aaatgatta

SEQ ID NO: 37563 - DNA, 9 bp, Unknown
  misc_feature (1)..( 9): Matrix.001 file - promoters75/3433904
atattaaaa

SEQ ID NO: 37564 - DNA, 8 bp, Unknown
  misc_feature (1)..( 8): Matrix.001 file - promoters75/3433904
tataaatt

SEQ ID NO: 37565 - DNA, 8 bp, Unknown
  misc_feature (1)..( 8): Matrix.001 file - promoters75/3433904
gttggata

SEQ ID NO: 37566 - DNA, 11 bp, Unknown
  misc_feature (1)..( 11): Matrix.001 file - promoters75/3433904
ttaattctttt

SEQ ID NO: 37567 - DNA, 10 bp, Unknown
  misc_feature (1)..( 10): Matrix.001 file - promoters75/3433944
aaacttaaga

SEQ ID NO: 37568 - DNA, 8 bp, Unknown
  misc_feature (1)..( 8): Matrix.001 file - promoters75/3433944
attttttt

SEQ ID NO: 37569 - DNA, 8 bp, Unknown
  misc_feature (1)..( 8): Matrix.001 file - promoters75/3433944
gatattaa

SEQ ID NO: 37570 - DNA, 13 bp, Unknown
  misc_feature (1)..( 13): Matrix.001 file - promoters75/3434108
gattaatttctct

SEQ ID NO: 37571 - DNA, 9 bp, Unknown
  misc_feature (1)..( 9): Matrix.001 file - promoters75/3434108
tgttgttac

SEQ ID NO: 37572 - DNA, 10 bp, Unknown
  misc_feature (1)..( 10): Matrix.001 file - promoters75/3434108
aaataaattg

SEQ ID NO: 37573 - DNA, 8 bp, Unknown
  misc_feature (1)..( 8): Matrix.001 file - promoters75/3434108
tcttaaaa

SEQ ID NO: 37574 - DNA, 8 bp, Unknown
  misc_feature (1)..( 8): Matrix.001 file - promoters75/3434108
ttttttta

SEQ ID NO: 37575 - DNA, 7 bp, Unknown
  misc_feature (1)..( 7): Matrix.001 file - promoters75/3434108
aattttg

SEQ ID NO: 37576 - DNA, 9 bp, Unknown
  misc_feature (1)..( 9): Matrix.001 file - promoters75/3434108
ctaattaat

SEQ ID NO: 37577 - DNA, 7 bp, Unknown
  misc_feature (1)..( 7): Matrix.001 file - promoters75/3434108
ttataat

SEQ ID NO: 37578 - DNA, 10 bp, Unknown
  misc_feature (1)..( 10): Matrix.001 file - promoters75/3434108
caaaataaaa

SEQ ID NO: 37579 - DNA, 10 bp, Unknown
  misc_feature (1)..( 10): Matrix.001 file - promoters75/3434108
ttaaaaaaac

SEQ ID NO: 37580 - DNA, 8 bp, Unknown
  misc_feature (1)..( 8): Matrix.001 file - promoters75/3434108
tattatta

SEQ ID NO: 37581 - DNA, 8 bp, Unknown
  misc_feature (1)..( 8): Matrix.001 file - promoters75/3434108
aaaacaaa

SEQ ID NO: 37582 - DNA, 6 bp, Unknown
  misc_feature (1)..( 6): Matrix.001 file - promoters75/3434233
acatat

SEQ ID NO: 37583 - DNA, 13 bp, Unknown
  misc_feature (1)..( 13): Matrix.001 file - promoters75/3434233
agaaaaagaaaaa

SEQ ID NO: 37584 - DNA, 8 bp, Unknown
  misc_feature (1)..( 8): Matrix.001 file - promoters75/3434233
aaaagaaa

SEQ ID NO: 37585 - DNA, 7 bp, Unknown
  misc_feature (1)..( 7): Matrix.001 file - promoters75/3434233
gaaagaa

SEQ ID NO: 37586 - DNA, 7 bp, Unknown
  misc_feature (1)..( 7): Matrix.001 file - promoters75/3434233
tcaaagc

SEQ ID NO: 37587 - DNA, 8 bp, Unknown
  misc_feature (1)..( 8): Matrix.001 file - promoters75/3434233
gaaaaaga

SEQ ID NO: 37588 - DNA, 12 bp, Unknown
  misc_feature (1)..( 12): Matrix.001 file - promoters75/3434279
gacgataattta

SEQ ID NO: 37589 - DNA, 12 bp, Unknown
  misc_feature (1)..( 12): Matrix.001 file - promoters75/3434279
aaaaacaaataa

SEQ ID NO: 37590 - DNA, 9 bp, Unknown
  misc_feature (1)..( 9): Matrix.001 file - promoters75/3434279
acattaatt

SEQ ID NO: 37591 - DNA, 10 bp, Unknown
  misc_feature (1)..( 10): Matrix.001 file - promoters75/3434563
ctaaaaataa

SEQ ID NO: 37592 - DNA, 7 bp, Unknown
  misc_feature (1)..( 7): Matrix.001 file - promoters75/3435133
atagatt

SEQ ID NO: 37593 - DNA, 9 bp, Unknown
  misc_feature (1)..( 9): Matrix.001 file - promoters75/3435833
ttaagaaaa

SEQ ID NO: 37594 - DNA, 8 bp, Unknown
  misc_feature (1)..( 8): Matrix.001 file - promoters75/3435833
tatataaa

SEQ ID NO: 37595 - DNA, 7 bp, Unknown
  misc_feature (1)..( 7): Matrix.001 file - promoters75/3436196
actaaaa

SEQ ID NO: 37596 - DNA, 10 bp, Unknown
  misc_feature (1)..( 10): Matrix.001 file - promoters75/3436196
atcataaaat

SEQ ID NO: 37597 - DNA, 8 bp, Unknown
  misc_feature (1)..( 8): Matrix.001 file - promoters75/3437244
gaatcaac

SEQ ID NO: 37598 - DNA, 10 bp, Unknown
  misc_feature (1)..( 10): Matrix.001 file - promoters75/3437244
cactgcgtgt

SEQ ID NO: 37599 - DNA, 8 bp, Unknown
  misc_feature (1)..( 8): Matrix.001 file - promoters75/3437710
acaaaaaa

SEQ ID NO: 37600 - DNA, 10 bp, Unknown
  misc_feature (1)..( 10): Matrix.001 file - promoters75/3437710
aataaaaatc

SEQ ID NO: 37601 - DNA, 8 bp, Unknown
  misc_feature (1)..( 8): Matrix.001 file - promoters75/3437710
tatccaag

SEQ ID NO: 37602 - DNA, 10 bp, Unknown
  misc_feature (1)..( 10): Matrix.001 file - promoters75/3438077
ataaaaacac

SEQ ID NO: 37603 - DNA, 11 bp, Unknown
  misc_feature (1)..( 11): Matrix.001 file - promoters75/3438194
atagaacaaac

SEQ ID NO: 37604 - DNA, 12 bp, Unknown
  misc_feature (1)..( 12): Matrix.001 file - promoters75/3438236
caaataaatctc

SEQ ID NO: 37605 - DNA, 11 bp, Unknown
  misc_feature (1)..( 11): Matrix.001 file - promoters75/3438512
caaaaatttac

SEQ ID NO: 37606 - DNA, 6 bp, Unknown
  misc_feature (1)..( 6): Matrix.001 file - promoters75/3438512
ataact

SEQ ID NO: 37607 - DNA, 12 bp, Unknown
  misc_feature (1)..( 12): Matrix.001 file - promoters75/3438512
tacacaagtttt

SEQ ID NO: 37608 - DNA, 7 bp, Unknown
  misc_feature (1)..( 7): Matrix.001 file - promoters75/3438512
aaacttt

SEQ ID NO: 37609 - DNA, 11 bp, Unknown
  misc_feature (1)..( 11): Matrix.001 file - promoters75/3438512
ttttacttttt

SEQ ID NO: 37610 - DNA, 9 bp, Unknown
  misc_feature (1)..( 9): Matrix.001 file - promoters75/3438512
tcaaaaaaa

SEQ ID NO: 37611 - DNA, 8 bp, Unknown
  misc_feature (1)..( 8): Matrix.001 file - promoters75/3438632
agatatta

SEQ ID NO: 37612 - DNA, 7 bp, Unknown
  misc_feature (1)..( 7): Matrix.001 file - promoters75/3438632
aaaagaa

SEQ ID NO: 37613 - DNA, 9 bp, Unknown
  misc_feature (1)..( 9): Matrix.001 file - promoters75/3439213
attttgatt

SEQ ID NO: 37614 - DNA, 7 bp, Unknown
  misc_feature (1)..( 7): Matrix.001 file - promoters75/3439472
gaaacaa

SEQ ID NO: 37615 - DNA, 12 bp, Unknown
  misc_feature (1)..( 12): Matrix.001 file - promoters75/3439472
gacaaaacttga

SEQ ID NO: 37616 - DNA, 10 bp, Unknown
  misc_feature (1)..( 10): Matrix.001 file - promoters75/3439614
tattagcttc

SEQ ID NO: 37617 - DNA, 7 bp, Unknown
  misc_feature (1)..( 7): Matrix.001 file - promoters75/3439614
ttagaga

SEQ ID NO: 37618 - DNA, 13 bp, Unknown
  misc_feature (1)..( 13): Matrix.001 file - promoters75/3593205
aattagatctttt

SEQ ID NO: 37619 - DNA, 8 bp, Unknown
  misc_feature (1)..( 8): Matrix.001 file - promoters75/3593205
ttatcctt

SEQ ID NO: 37620 - DNA, 8 bp, Unknown
  misc_feature (1)..( 8): Matrix.001 file - promoters75/3593230
cacattca

SEQ ID NO: 37621 - DNA, 8 bp, Unknown
  misc_feature (1)..( 8): Matrix.001 file - promoters75/3593230
tcttcttg

SEQ ID NO: 37622 - DNA, 8 bp, Unknown
  misc_feature (1)..( 8): Matrix.001 file - promoters75/4254434
tttagatt

SEQ ID NO: 37623 - DNA, 5 bp, Unknown
  misc_feature (1)..( 5): Matrix.001 file - promoters75/4254434
agatt

SEQ ID NO: 37624 - DNA, 10 bp, Unknown
  misc_feature (1)..( 10): Matrix.001 file - promoters75/4262420
cctattggtt

SEQ ID NO: 37625 - DNA, 6 bp, Unknown
  misc_feature (1)..( 6): Matrix.001 file - promoters75/4262420
tgggat

SEQ ID NO: 37626 - DNA, 7 bp, Unknown
  misc_feature (1)..( 7): Matrix.001 file - promoters75/4262428
attaaat

SEQ ID NO: 37627 - DNA, 7 bp, Unknown
  misc_feature (1)..( 7): Matrix.001 file - promoters75/4262428
tatataa

SEQ ID NO: 37628 - DNA, 7 bp, Unknown
  misc_feature (1)..( 7): Matrix.001 file - promoters75/4262428
tataaat

SEQ ID NO: 37629 - DNA, 7 bp, Unknown
  misc_feature (1)..( 7): Matrix.001 file - promoters75/4281773
ttagggc

SEQ ID NO: 37630 - DNA, 7 bp, Unknown
  misc_feature (1)..( 7): Matrix.001 file - promoters75/4281773
cagtatt

SEQ ID NO: 37631 - DNA, 13 bp, Unknown
  misc_feature (1)..( 13): Matrix.001 file - promoters75/4281773
atgcatagtttat

SEQ ID NO: 37632 - DNA, 7 bp, Unknown
  misc_feature (1)..( 7): Matrix.001 file - promoters75/4281773
aaagaca

SEQ ID NO: 37633 - DNA, 9 bp, Unknown
  misc_feature (1)..( 9): Matrix.001 file - promoters75/4281773
aagaaaaag

SEQ ID NO: 37634 - DNA, 11 bp, Unknown
  misc_feature (1)..( 11): Matrix.001 file - promoters75/4281925
aaaataaaaca

SEQ ID NO: 37635 - DNA, 8 bp, Unknown
  misc_feature (1)..( 8): Matrix.001 file - promoters75/4281925
taaatttt

SEQ ID NO: 37636 - DNA, 14 bp, Unknown
  misc_feature (1)..( 14): Matrix.001 file - promoters75/4281925
aatttacatatcta

SEQ ID NO: 37637 - DNA, 7 bp, Unknown
  misc_feature (1)..( 7): Matrix.001 file - promoters75/4282316
cattatc

SEQ ID NO: 37638 - DNA, 9 bp, Unknown
  misc_feature (1)..( 9): Matrix.001 file - promoters75/4282316
aaatgtttt

SEQ ID NO: 37639 - DNA, 9 bp, Unknown
  misc_feature (1)..( 9): Matrix.001 file - promoters75/4282418
aaaataaaa

SEQ ID NO: 37640 - DNA, 7 bp, Unknown
  misc_feature (1)..( 7): Matrix.001 file - promoters75/4282503
taaaatc

SEQ ID NO: 37641 - DNA, 10 bp, Unknown
  misc_feature (1)..( 10): Matrix.001 file - promoters75/4282503
ttttaataac

SEQ ID NO: 37642 - DNA, 11 bp, Unknown
  misc_feature (1)..( 11): Matrix.001 file - promoters75/4282503
tttattaaatg

SEQ ID NO: 37643 - DNA, 8 bp, Unknown
  misc_feature (1)..( 8): Matrix.001 file - promoters75/4282667
aatgggcc

SEQ ID NO: 37644 - DNA, 8 bp, Unknown
  misc_feature (1)..( 8): Matrix.001 file - promoters75/4282667
attgttac

SEQ ID NO: 37645 - DNA, 8 bp, Unknown
  misc_feature (1)..( 8): Matrix.001 file - promoters75/4282667
taaacaaa

SEQ ID NO: 37646 - DNA, 12 bp, Unknown
  misc_feature (1)..( 12): Matrix.001 file - promoters75/4282667
ctcttatgattc

SEQ ID NO: 37647 - DNA, 8 bp, Unknown
  misc_feature (1)..( 8): Matrix.001 file - promoters75/4282788
tttgattt

SEQ ID NO: 37648 - DNA, 9 bp, Unknown
  misc_feature (1)..( 9): Matrix.001 file - promoters75/4283355
gaaacaaaa

SEQ ID NO: 37649 - DNA, 13 bp, Unknown
  misc_feature (1)..( 13): Matrix.001 file - promoters75/4283355
gctcttcccctta

SEQ ID NO: 37650 - DNA, 10 bp, Unknown
  misc_feature (1)..( 10): Matrix.001 file - promoters75/4283355
taaagttttt

SEQ ID NO: 37651 - DNA, 9 bp, Unknown
  misc_feature (1)..( 9): Matrix.001 file - promoters75/4283378
aatatatac

SEQ ID NO: 37652 - DNA, 9 bp, Unknown
  misc_feature (1)..( 9): Matrix.001 file - promoters75/4283378
tatataaat

SEQ ID NO: 37653 - DNA, 15 bp, Unknown
  misc_feature (1)..( 15): Matrix.001 file - promoters75/4283378
ataactttataagta

SEQ ID NO: 37654 - DNA, 8 bp, Unknown
  misc_feature (1)..( 8): Matrix.001 file - promoters75/4283378
aaatgtca

SEQ ID NO: 37655 - DNA, 11 bp, Unknown
  misc_feature (1)..( 11): Matrix.001 file - promoters75/4577400
ccataattaag

SEQ ID NO: 37656 - DNA, 7 bp, Unknown
  misc_feature (1)..( 7): Matrix.001 file - promoters75/4608096
tttttgt

SEQ ID NO: 37657 - DNA, 10 bp, Unknown
  misc_feature (1)..( 10): Matrix.001 file - promoters75/4608096
tttataaaac

SEQ ID NO: 37658 - DNA, 11 bp, Unknown
  misc_feature (1)..( 11): Matrix.001 file - promoters75/4608965
cttagtttcct

SEQ ID NO: 37659 - DNA, 14 bp, Unknown
  misc_feature (1)..( 14): Matrix.001 file - promoters75/4608965
caaacgaaatcact

SEQ ID NO: 37660 - DNA, 7 bp, Unknown
  misc_feature (1)..( 7): Matrix.001 file - promoters75/4608985
taaaaat

SEQ ID NO: 37661 - DNA, 8 bp, Unknown
  misc_feature (1)..( 8): Matrix.001 file - promoters75/4608985
aataaaat

SEQ ID NO: 37662 - DNA, 13 bp, Unknown
  misc_feature (1)..( 13): Matrix.001 file - promoters75/4608985
taacaaatttctt

SEQ ID NO: 37663 - DNA, 7 bp, Unknown
  misc_feature (1)..( 7): Matrix.001 file - promoters75/4608985
gttatta

SEQ ID NO: 37664 - DNA, 11 bp, Unknown
  misc_feature (1)..( 11): Matrix.001 file - promoters75/4608985
aaaaaactaat

SEQ ID NO: 37665 - DNA, 10 bp, Unknown
  misc_feature (1)..( 10): Matrix.001 file - promoters75/4608985
agttaataaa

SEQ ID NO: 37666 - DNA, 10 bp, Unknown
  misc_feature (1)..( 10): Matrix.001 file - promoters75/4608985
caaacaaaaa

SEQ ID NO: 37667 - DNA, 8 bp, Unknown
  misc_feature (1)..( 8): Matrix.001 file - promoters75/4608985
tttattat

SEQ ID NO: 37668 - DNA, 7 bp, Unknown
  misc_feature (1)..( 7): Matrix.001 file - promoters75/4608985
aaaaaag

SEQ ID NO: 37669 - DNA, 8 bp, Unknown
  misc_feature (1)..( 8): Matrix.001 file - promoters75/4608985
cttttatt

SEQ ID NO: 37670 - DNA, 9 bp, Unknown
  misc_feature (1)..( 9): Matrix.001 file - promoters75/4608985
aataatata

SEQ ID NO: 37671 - DNA, 8 bp, Unknown
  misc_feature (1)..( 8): Matrix.001 file - promoters75/4608985
cagtcaag

SEQ ID NO: 37672 - DNA, 8 bp, Unknown
  misc_feature (1)..( 8): Matrix.001 file - promoters75/4608985
cctatata

SEQ ID NO: 37673 - DNA, 14 bp, Unknown
  misc_feature (1)..( 14): Matrix.001 file - promoters75/4610551
tttaaaaaataaat

SEQ ID NO: 37674 - DNA, 10 bp, Unknown
  misc_feature (1)..( 10): Matrix.001 file - promoters75/4610551
gaaagaaaaa

SEQ ID NO: 37675 - DNA, 10 bp, Unknown
  misc_feature (1)..( 10): Matrix.001 file - promoters75/4610551
ggtagttttt

SEQ ID NO: 37676 - DNA, 10 bp, Unknown
  misc_feature (1)..( 10): Matrix.001 file - promoters75/4610551
tatatctaaa

SEQ ID NO: 37677 - DNA, 12 bp, Unknown
  misc_feature (1)..( 12): Matrix.001 file - promoters75/4610551
aaagtttttgta

SEQ ID NO: 37678 - DNA, 8 bp, Unknown
  misc_feature (1)..( 8): Matrix.001 file - promoters75/4766490
gaaaaaaa

SEQ ID NO: 37679 - DNA, 12 bp, Unknown
  misc_feature (1)..( 12): Matrix.001 file - promoters75/4766490
aaaaaagaagaa

SEQ ID NO: 37680 - DNA, 10 bp, Unknown
  misc_feature (1)..( 10): Matrix.001 file - promoters75/4766977
ctataaatag

SEQ ID NO: 37681 - DNA, 15 bp, Unknown
  misc_feature (1)..( 15): Matrix.001 file - promoters75/4767487
ttaattttttcaaaa

SEQ ID NO: 37682 - DNA, 10 bp, Unknown
  misc_feature (1)..( 10): Matrix.001 file - promoters75/4767487
ttatgattaa

SEQ ID NO: 37683 - DNA, 9 bp, Unknown
  misc_feature (1)..( 9): Matrix.001 file - promoters75/4767487
tatataaac

SEQ ID NO: 37684 - DNA, 11 bp, Unknown
  misc_feature (1)..( 11): Matrix.001 file - promoters75/4767701
tctatgaatca

SEQ ID NO: 37685 - DNA, 12 bp, Unknown
  misc_feature (1)..( 12): Matrix.001 file - promoters75/4767701
aaataaactatt

SEQ ID NO: 37686 - DNA, 10 bp, Unknown
  misc_feature (1)..( 10): Matrix.001 file - promoters75/4767982
ttaaacttgt

SEQ ID NO: 37687 - DNA, 6 bp, Unknown
  misc_feature (1)..( 6): Matrix.001 file - promoters75/4768285
atgatc

SEQ ID NO: 37688 - DNA, 7 bp, Unknown
  misc_feature (1)..( 7): Matrix.001 file - promoters75/4768285
tttaatt

SEQ ID NO: 37689 - DNA, 9 bp, Unknown
  misc_feature (1)..( 9): Matrix.001 file - promoters75/4768289
gtttattaa

SEQ ID NO: 37690 - DNA, 11 bp, Unknown
  misc_feature (1)..( 11): Matrix.001 file - promoters75/4768354
taaaatttttt

SEQ ID NO: 37691 - DNA, 9 bp, Unknown
  misc_feature (1)..( 9): Matrix.001 file - promoters75/4768354
tttattcag

SEQ ID NO: 37692 - DNA, 7 bp, Unknown
  misc_feature (1)..( 7): Matrix.001 file - promoters75/4768615
taaaaat

SEQ ID NO: 37693 - DNA, 8 bp, Unknown
  misc_feature (1)..( 8): Matrix.001 file - promoters75/4768615
aataaaat

SEQ ID NO: 37694 - DNA, 13 bp, Unknown
  misc_feature (1)..( 13): Matrix.001 file - promoters75/4768615
taacaaatttctt

SEQ ID NO: 37695 - DNA, 7 bp, Unknown
  misc_feature (1)..( 7): Matrix.001 file - promoters75/4768615
gttatta

SEQ ID NO: 37696 - DNA, 11 bp, Unknown
  misc_feature (1)..( 11): Matrix.001 file - promoters75/4768615
aaaaaactaat

SEQ ID NO: 37697 - DNA, 10 bp, Unknown
  misc_feature (1)..( 10): Matrix.001 file - promoters75/4768615
agttaataaa

SEQ ID NO: 37698 - DNA, 10 bp, Unknown
  misc_feature (1)..( 10): Matrix.001 file - promoters75/4768615
caaacaaaaa

SEQ ID NO: 37699 - DNA, 8 bp, Unknown
  misc_feature (1)..( 8): Matrix.001 file - promoters75/4768615
tttattat

SEQ ID NO: 37700 - DNA, 7 bp, Unknown
  misc_feature (1)..( 7): Matrix.001 file - promoters75/4768615
aaaaaag

SEQ ID NO: 37701 - DNA, 8 bp, Unknown
  misc_feature (1)..( 8): Matrix.001 file - promoters75/4768615
cttttatt

SEQ ID NO: 37702 - DNA, 9 bp, Unknown
  misc_feature (1)..( 9): Matrix.001 file - promoters75/4768615
aataatata

SEQ ID NO: 37703 - DNA, 8 bp, Unknown
  misc_feature (1)..( 8): Matrix.001 file - promoters75/4768615
cagtcaag

SEQ ID NO: 37704 - DNA, 8 bp, Unknown
  misc_feature (1)..( 8): Matrix.001 file - promoters75/4768615
cctatata

SEQ ID NO: 37705 - DNA, 15 bp, Unknown
  misc_feature (1)..( 15): Matrix.001 file - promoters75/4768635
aattttaattttttt

SEQ ID NO: 37706 - DNA, 8 bp, Unknown
  misc_feature (1)..( 8): Matrix.001 file - promoters75/4768635
tttttgtt

SEQ ID NO: 37707 - DNA, 11 bp, Unknown
  misc_feature (1)..( 11): Matrix.001 file - promoters75/4768635
taattgatttt

SEQ ID NO: 37708 - DNA, 7 bp, Unknown
  misc_feature (1)..( 7): Matrix.001 file - promoters75/4768635
tttggtt

SEQ ID NO: 37709 - DNA, 8 bp, Unknown
  misc_feature (1)..( 8): Matrix.001 file - promoters75/4768635
atttttgg

SEQ ID NO: 37710 - DNA, 8 bp, Unknown
  misc_feature (1)..( 8): Matrix.001 file - promoters75/4768635
tatttcaa

SEQ ID NO: 37711 - DNA, 12 bp, Unknown
  misc_feature (1)..( 12): Matrix.001 file - promoters75/4769059
ttatatctttat

SEQ ID NO: 37712 - DNA, 8 bp, Unknown
  misc_feature (1)..( 8): Matrix.001 file - promoters75/4770305
tgtttaga

SEQ ID NO: 37713 - DNA, 11 bp, Unknown
  misc_feature (1)..( 11): Matrix.001 file - promoters75/4770443
aaaagaagttt

SEQ ID NO: 37714 - DNA, 12 bp, Unknown
  misc_feature (1)..( 12): Matrix.001 file - promoters75/4770443
tctaattttatc

SEQ ID NO: 37715 - DNA, 9 bp, Unknown
  misc_feature (1)..( 9): Matrix.001 file - promoters75/4770443
atagacaaa

SEQ ID NO: 37716 - DNA, 9 bp, Unknown
  misc_feature (1)..( 9): Matrix.001 file - promoters75/4770443
aaaaatgat

SEQ ID NO: 37717 - DNA, 12 bp, Unknown
  misc_feature (1)..( 12): Matrix.001 file - promoters75/4770443
aaaaattttttt

SEQ ID NO: 37718 - DNA, 11 bp, Unknown
  misc_feature (1)..( 11): Matrix.001 file - promoters75/4770477
tatacttcagt

SEQ ID NO: 37719 - DNA, 9 bp, Unknown
  misc_feature (1)..( 9): Matrix.001 file - promoters75/4771239
ttggcgaga

SEQ ID NO: 37720 - DNA, 7 bp, Unknown
  misc_feature (1)..( 7): Matrix.001 file - promoters75/4771271
ttttgct

SEQ ID NO: 37721 - DNA, 9 bp, Unknown
  misc_feature (1)..( 9): Matrix.001 file - promoters75/4771271
aaattaaac

SEQ ID NO: 37722 - DNA, 8 bp, Unknown
  misc_feature (1)..( 8): Matrix.001 file - promoters75/4771271
tatgatta

SEQ ID NO: 37723 - DNA, 10 bp, Unknown
  misc_feature (1)..( 10): Matrix.001 file - promoters75/4771271
aacaaaattg

SEQ ID NO: 37724 - DNA, 13 bp, Unknown
  misc_feature (1)..( 13): Matrix.001 file - promoters75/4771271
gtttttcatagaa

SEQ ID NO: 37725 - DNA, 8 bp, Unknown
  misc_feature (1)..( 8): Matrix.001 file - promoters75/4771271
gttaaata

SEQ ID NO: 37726 - DNA, 12 bp, Unknown
  misc_feature (1)..( 12): Matrix.001 file - promoters75/4771271
tgataaaaaaaa

SEQ ID NO: 37727 - DNA, 9 bp, Unknown
  misc_feature (1)..( 9): Matrix.001 file - promoters75/4771271
taaacaaaa

SEQ ID NO: 37728 - DNA, 9 bp, Unknown
  misc_feature (1)..( 9): Matrix.001 file - promoters75/4771271
aatattttg

SEQ ID NO: 37729 - DNA, 10 bp, Unknown
  misc_feature (1)..( 10): Matrix.001 file - promoters75/4771271
ttaggttttt

SEQ ID NO: 37730 - DNA, 8 bp, Unknown
  misc_feature (1)..( 8): Matrix.001 file - promoters75/4771271
attatttt

SEQ ID NO: 37731 - DNA, 10 bp, Unknown
  misc_feature (1)..( 10): Matrix.001 file - promoters75/4771321
tgtgacgggt

SEQ ID NO: 37732 - DNA, 9 bp, Unknown
  misc_feature (1)..( 9): Matrix.001 file - promoters75/4771321
gaaaacaga

SEQ ID NO: 37733 - DNA, 10 bp, Unknown
  misc_feature (1)..( 10): Matrix.001 file - promoters75/4771334
aaaaataaat

SEQ ID NO: 37734 - DNA, 14 bp, Unknown
  misc_feature (1)..( 14): Matrix.001 file - promoters75/4771334
gtgcttctaacaaa

SEQ ID NO: 37735 - DNA, 9 bp, Unknown
  misc_feature (1)..( 9): Matrix.001 file - promoters75/4771334
taaaaaata

SEQ ID NO: 37736 - DNA, 9 bp, Unknown
  misc_feature (1)..( 9): Matrix.001 file - promoters75/4771334
attaaaaaa

SEQ ID NO: 37737 - DNA, 8 bp, Unknown
  misc_feature (1)..( 8): Matrix.001 file - promoters75/4771495
aattgtag

SEQ ID NO: 37738 - DNA, 9 bp, Unknown
  misc_feature (1)..( 9): Matrix.001 file - promoters75/4771495
gcaaaacta

SEQ ID NO: 37739 - DNA, 7 bp, Unknown
  misc_feature (1)..( 7): Matrix.001 file - promoters75/4771495
atgtttc

SEQ ID NO: 37740 - DNA, 8 bp, Unknown
  misc_feature (1)..( 8): Matrix.001 file - promoters75/4771495
aacatatt

SEQ ID NO: 37741 - DNA, 4 bp, Unknown
  misc_feature (1)..( 4): Matrix.001 file - promoters75/4771677
aaac

SEQ ID NO: 37742 - DNA, 10 bp, Unknown
  misc_feature (1)..( 10): Matrix.001 file - promoters75/4771769
tttttgttta

SEQ ID NO: 37743 - DNA, 9 bp, Unknown
  misc_feature (1)..( 9): Matrix.001 file - promoters75/4771769
gttttttaa

SEQ ID NO: 37744 - DNA, 12 bp, Unknown
  misc_feature (1)..( 12): Matrix.001 file - promoters75/4771769
atgcatagttta

SEQ ID NO: 37745 - DNA, 9 bp, Unknown
  misc_feature (1)..( 9): Matrix.001 file - promoters75/4771853
gtttccttt

SEQ ID NO: 37746 - DNA, 11 bp, Unknown
  misc_feature (1)..( 11): Matrix.001 file - promoters75/4772336
attgaccatga

SEQ ID NO: 37747 - DNA, 9 bp, Unknown
  misc_feature (1)..( 9): Matrix.001 file - promoters75/4772336
tgtattgac

SEQ ID NO: 37748 - DNA, 9 bp, Unknown
  misc_feature (1)..( 9): Matrix.001 file - promoters75/4772336
aaattgaca

SEQ ID NO: 37749 - DNA, 7 bp, Unknown
  misc_feature (1)..( 7): Matrix.001 file - promoters75/4772336
tatataa

SEQ ID NO: 37750 - DNA, 8 bp, Unknown
  misc_feature (1)..( 8): Matrix.001 file - promoters75/4772346
agatacag

SEQ ID NO: 37751 - DNA, 7 bp, Unknown
  misc_feature (1)..( 7): Matrix.001 file - promoters75/4772346
tttcaag

SEQ ID NO: 37752 - DNA, 8 bp, Unknown
  misc_feature (1)..( 8): Matrix.001 file - promoters75/4772346
caaacctg

SEQ ID NO: 37753 - DNA, 6 bp, Unknown
  misc_feature (1)..( 6): Matrix.001 file - promoters75/4772398
atttga

SEQ ID NO: 37754 - DNA, 11 bp, Unknown
  misc_feature (1)..( 11): Matrix.001 file - promoters75/4772398
gtcataaattt

SEQ ID NO: 37755 - DNA, 13 bp, Unknown
  misc_feature (1)..( 13): Matrix.001 file - promoters75/4772398
tgttataggccca

SEQ ID NO: 37756 - DNA, 11 bp, Unknown
  misc_feature (1)..( 11): Matrix.001 file - promoters75/4772398
attgttaattt

SEQ ID NO: 37757 - DNA, 15 bp, Unknown
  misc_feature (1)..( 15): Matrix.001 file - promoters75/4772398
ttattcttttaacat

SEQ ID NO: 37758 - DNA, 14 bp, Unknown
  misc_feature (1)..( 14): Matrix.001 file - promoters75/4772398
agttaaaggcccaa

SEQ ID NO: 37759 - DNA, 9 bp, Unknown
  misc_feature (1)..( 9): Matrix.001 file - promoters75/4772398
aaatttgaa

SEQ ID NO: 37760 - DNA, 7 bp, Unknown
  misc_feature (1)..( 7): Matrix.001 file - promoters75/4772776
atataaa

SEQ ID NO: 37761 - DNA, 11 bp, Unknown
  misc_feature (1)..( 11): Matrix.001 file - promoters75/4772776
cttcttgttac

SEQ ID NO: 37762 - DNA, 11 bp, Unknown
  misc_feature (1)..( 11): Matrix.001 file - promoters75/4772776
aagtgtctttt

SEQ ID NO: 37763 - DNA, 8 bp, Unknown
  misc_feature (1)..( 8): Matrix.001 file - promoters75/4772776
aatcaaaa

SEQ ID NO: 37764 - DNA, 7 bp, Unknown
  misc_feature (1)..( 7): Matrix.001 file - promoters75/4772879
taaaaag

SEQ ID NO: 37765 - DNA, 9 bp, Unknown
  misc_feature (1)..( 9): Matrix.001 file - promoters75/4772879
aatgaatat

SEQ ID NO: 37766 - DNA, 6 bp, Unknown
  misc_feature (1)..( 6): Matrix.001 file - promoters75/4772879
ataata

SEQ ID NO: 37767 - DNA, 12 bp, Unknown
  misc_feature (1)..( 12): Matrix.001 file - promoters75/4772879
atataataaata

SEQ ID NO: 37768 - DNA, 8 bp, Unknown
  misc_feature (1)..( 8): Matrix.001 file - promoters75/4772879
aaatatat

SEQ ID NO: 37769 - DNA, 9 bp, Unknown
  misc_feature (1)..( 9): Matrix.001 file - promoters75/4772879
aaattaata

SEQ ID NO: 37770 - DNA, 6 bp, Unknown
  misc_feature (1)..( 6): Matrix.001 file - promoters75/4772879
aaatat

SEQ ID NO: 37771 - DNA, 7 bp, Unknown
  misc_feature (1)..( 7): Matrix.001 file - promoters75/4772879
ttatata

SEQ ID NO: 37772 - DNA, 8 bp, Unknown
  misc_feature (1)..( 8): Matrix.001 file - promoters75/4772879
tgtatcta

SEQ ID NO: 37773 - DNA, 8 bp, Unknown
  misc_feature (1)..( 8): Matrix.001 file - promoters75/4772879
atccaaac

SEQ ID NO: 37774 - DNA, 9 bp, Unknown
  misc_feature (1)..( 9): Matrix.001 file - promoters75/4772879
tttattgat

SEQ ID NO: 37775 - DNA, 9 bp, Unknown
  misc_feature (1)..( 9): Matrix.001 file - promoters75/4772879
aatttattt

SEQ ID NO: 37776 - DNA, 10 bp, Unknown
  misc_feature (1)..( 10): Matrix.001 file - promoters75/4772879
aaaaagacac

SEQ ID NO: 37777 - DNA, 9 bp, Unknown
  misc_feature (1)..( 9): Matrix.001 file - promoters75/4772879
gggattttt

SEQ ID NO: 37778 - DNA, 17 bp, Unknown
  misc_feature (1)..( 17): Matrix.001 file - promoters75/4773074
tataaataaacccttaa

SEQ ID NO: 37779 - DNA, 10 bp, Unknown
  misc_feature (1)..( 10): Matrix.001 file - promoters75/4773074
ctataaaaaa

SEQ ID NO: 37780 - DNA, 9 bp, Unknown
  misc_feature (1)..( 9): Matrix.001 file - promoters75/4773823
agaaaattc

SEQ ID NO: 37781 - DNA, 12 bp, Unknown
  misc_feature (1)..( 12): Matrix.001 file - promoters75/4899830
aagaaaaagtaa

SEQ ID NO: 37782 - DNA, 10 bp, Unknown
  misc_feature (1)..( 10): Matrix.001 file - promoters75/4899830
aatatataac

SEQ ID NO: 37783 - DNA, 11 bp, Unknown
  misc_feature (1)..( 11): Matrix.001 file - promoters75/4900353
taatataaatt

SEQ ID NO: 37784 - DNA, 8 bp, Unknown
  misc_feature (1)..( 8): Matrix.001 file - promoters75/4900353
gggcctaa

SEQ ID NO: 37785 - DNA, 10 bp, Unknown
  misc_feature (1)..( 10): Matrix.001 file - promoters75/4901171
caaaacttcc

SEQ ID NO: 37786 - DNA, 10 bp, Unknown
  misc_feature (1)..( 10): Matrix.001 file - promoters75/4901171
aaaaattcca

SEQ ID NO: 37787 - DNA, 11 bp, Unknown
  misc_feature (1)..( 11): Matrix.001 file - promoters75/4901736
aaaaattaaac

SEQ ID NO: 37788 - DNA, 15 bp, Unknown
  misc_feature (1)..( 15): Matrix.001 file - promoters75/4901736
cgttttttaattttc

SEQ ID NO: 37789 - DNA, 7 bp, Unknown
  misc_feature (1)..( 7): Matrix.001 file - promoters75/4901736
ttgttta

SEQ ID NO: 37790 - DNA, 12 bp, Unknown
  misc_feature (1)..( 12): Matrix.001 file - promoters75/4909449
atataaaagcca

SEQ ID NO: 37791 - DNA, 10 bp, Unknown
  misc_feature (1)..( 10): Matrix.001 file - promoters75/4909449
aaaaaagttt

SEQ ID NO: 37792 - DNA, 9 bp, Unknown
  misc_feature (1)..( 9): Matrix.001 file - promoters75/4909449
atattaata

SEQ ID NO: 37793 - DNA, 7 bp, Unknown
  misc_feature (1)..( 7): Matrix.001 file - promoters75/4911485
atgtttg

SEQ ID NO: 37794 - DNA, 12 bp, Unknown
  misc_feature (1)..( 12): Matrix.001 file - promoters75/4911485
tgagtatatttt

SEQ ID NO: 37795 - DNA, 8 bp, Unknown
  misc_feature (1)..( 8): Matrix.001 file - promoters75/4911485
ttttaatt

SEQ ID NO: 37796 - DNA, 8 bp, Unknown
  misc_feature (1)..( 8): Matrix.001 file - promoters75/4911485
taagccca

SEQ ID NO: 37797 - DNA, 7 bp, Unknown
  misc_feature (1)..( 7): Matrix.001 file - promoters75/4911485
ttggata

SEQ ID NO: 37798 - DNA, 10 bp, Unknown
  misc_feature (1)..( 10): Matrix.001 file - promoters75/4911485
aaaagtttta

SEQ ID NO: 37799 - DNA, 8 bp, Unknown
  misc_feature (1)..( 8): Matrix.001 file - promoters75/4911485
aataattt

SEQ ID NO: 37800 - DNA, 12 bp, Unknown
  misc_feature (1)..( 12): Matrix.001 file - promoters75/4911485
aaaaaagaaaaa

SEQ ID NO: 37801 - DNA, 8 bp, Unknown
  misc_feature (1)..( 8): Matrix.001 file - promoters75/4911485
attttgtt

SEQ ID NO: 37802 - DNA, 13 bp, Unknown
  misc_feature (1)..( 13): Matrix.001 file - promoters75/4911485
tataaatgggcct

SEQ ID NO: 37803 - DNA, 13 bp, Unknown
  misc_feature (1)..( 13): Matrix.001 file - promoters75/4915127
cactgatttattt

SEQ ID NO: 37804 - DNA, 13 bp, Unknown
  misc_feature (1)..( 13): Matrix.001 file - promoters75/4915606
aattattatataa

SEQ ID NO: 37805 - DNA, 9 bp, Unknown
  misc_feature (1)..( 9): Matrix.001 file - promoters75/4978201
tttattttt

SEQ ID NO: 37806 - DNA, 16 bp, Unknown
  misc_feature (1)..( 16): Matrix.001 file - promoters75/4978201
aaattatgcaaaaaaa

SEQ ID NO: 37807 - DNA, 12 bp, Unknown
  misc_feature (1)..( 12): Matrix.001 file - promoters75/4978201
acaaacaaaaaa

SEQ ID NO: 37808 - DNA, 8 bp, Unknown
  misc_feature (1)..( 8): Matrix.001 file - promoters75/5662799
tttgacca

SEQ ID NO: 37809 - DNA, 8 bp, Unknown
  misc_feature (1)..( 8): Matrix.001 file - promoters75/5662893
tttgtatt

SEQ ID NO: 37810 - DNA, 10 bp, Unknown
  misc_feature (1)..( 10): Matrix.001 file - promoters75/5662914
ggaagtagag

SEQ ID NO: 37811 - DNA, 9 bp, Unknown
  misc_feature (1)..( 9): Matrix.001 file - promoters75/5662914
aagatgatg

SEQ ID NO: 37812 - DNA, 9 bp, Unknown
  misc_feature (1)..( 9): Matrix.001 file - promoters75/5663003
acctctttt

SEQ ID NO: 37813 - DNA, 7 bp, Unknown
  misc_feature (1)..( 7): Matrix.001 file - promoters75/5663003
aatttac

SEQ ID NO: 37814 - DNA, 10 bp, Unknown
  misc_feature (1)..( 10): Matrix.001 file - promoters75/5663003
aaaaaattgt

SEQ ID NO: 37815 - DNA, 8 bp, Unknown
  misc_feature (1)..( 8): Matrix.001 file - promoters75/5663003
aagctata

SEQ ID NO: 37816 - DNA, 11 bp, Unknown
  misc_feature (1)..( 11): Matrix.001 file - promoters75/5663003
ttacttaaatt

SEQ ID NO: 37817 - DNA, 9 bp, Unknown
  misc_feature (1)..( 9): Matrix.001 file - promoters75/5663003
aaagaattg

SEQ ID NO: 37818 - DNA, 13 bp, Unknown
  misc_feature (1)..( 13): Matrix.001 file - promoters75/5663003
aatatcaacgacg

SEQ ID NO: 37819 - DNA, 8 bp, Unknown
  misc_feature (1)..( 8): Matrix.001 file - promoters75/5663003
aaataata

SEQ ID NO: 37820 - DNA, 5 bp, Unknown
  misc_feature (1)..( 5): Matrix.001 file - promoters75/5663116
catta

SEQ ID NO: 37821 - DNA, 9 bp, Unknown
  misc_feature (1)..( 9): Matrix.001 file - promoters75/5663862
caactttat

SEQ ID NO: 37822 - DNA, 14 bp, Unknown
  misc_feature (1)..( 14): Matrix.001 file - promoters75/5663934
tatagtttttgtaa

SEQ ID NO: 37823 - DNA, 9 bp, Unknown
  misc_feature (1)..( 9): Matrix.001 file - promoters75/5663970
gagtttctt

SEQ ID NO: 37824 - DNA, 8 bp, Unknown
  misc_feature (1)..( 8): Matrix.001 file - promoters75/5664294
aaaatcga

SEQ ID NO: 37825 - DNA, 8 bp, Unknown
  misc_feature (1)..( 8): Matrix.001 file - promoters75/5664294
gataaaaa

SEQ ID NO: 37826 - DNA, 7 bp, Unknown
  misc_feature (1)..( 7): Matrix.001 file - promoters75/5664311
tttctca

SEQ ID NO: 37827 - DNA, 9 bp, Unknown
  misc_feature (1)..( 9): Matrix.001 file - promoters75/5664311
aataaattt

SEQ ID NO: 37828 - DNA, 9 bp, Unknown
  misc_feature (1)..( 9): Matrix.001 file - promoters75/5664362
ttgttttct

SEQ ID NO: 37829 - DNA, 7 bp, Unknown
  misc_feature (1)..( 7): Matrix.001 file - promoters75/5664465
ttcacaa

SEQ ID NO: 37830 - DNA, 12 bp, Unknown
  misc_feature (1)..( 12): Matrix.001 file - promoters75/5664703
ctttttgtatat

SEQ ID NO: 37831 - DNA, 8 bp, Unknown
  misc_feature (1)..( 8): Matrix.001 file - promoters75/5664703
tctgaatt

SEQ ID NO: 37832 - DNA, 12 bp, Unknown
  misc_feature (1)..( 12): Matrix.001 file - promoters75/5664873
aaaataaaaaaa

SEQ ID NO: 37833 - DNA, 9 bp, Unknown
  misc_feature (1)..( 9): Matrix.001 file - promoters75/5664885
attttgacc

SEQ ID NO: 37834 - DNA, 8 bp, Unknown
  misc_feature (1)..( 8): Matrix.001 file - promoters75/5664885
cattcata

SEQ ID NO: 37835 - DNA, 11 bp, Unknown
  misc_feature (1)..( 11): Matrix.001 file - promoters75/5665347
agttataaatc

SEQ ID NO: 37836 - DNA, 9 bp, Unknown
  misc_feature (1)..( 9): Matrix.001 file - promoters75/5667720
taaccaaaa

SEQ ID NO: 37837 - DNA, 12 bp, Unknown
  misc_feature (1)..( 12): Matrix.001 file - promoters75/5667720
aaaataaaaata

SEQ ID NO: 37838 - DNA, 10 bp, Unknown
  misc_feature (1)..( 10): Matrix.001 file - promoters75/5667812
gagttggata

SEQ ID NO: 37839 - DNA, 14 bp, Unknown
  misc_feature (1)..( 14): Matrix.001 file - promoters75/5667812
aaaagttttattta

SEQ ID NO: 37840 - DNA, 9 bp, Unknown
  misc_feature (1)..( 9): Matrix.001 file - promoters75/5667849
gtgaatgat

SEQ ID NO: 37841 - DNA, 8 bp, Unknown
  misc_feature (1)..( 8): Matrix.001 file - promoters75/5667849
cattttgt

SEQ ID NO: 37842 - DNA, 9 bp, Unknown
  misc_feature (1)..( 9): Matrix.001 file - promoters75/5668065
aaagaaaat

SEQ ID NO: 37843 - DNA, 14 bp, Unknown
  misc_feature (1)..( 14): Matrix.001 file - promoters75/5668065
ctcttattatttgc

SEQ ID NO: 37844 - DNA, 13 bp, Unknown
  misc_feature (1)..( 13): Matrix.001 file - promoters75/5668292
ctcttatgatttt

SEQ ID NO: 37845 - DNA, 10 bp, Unknown
  misc_feature (1)..( 10): Matrix.001 file - promoters75/5668292
aaaagtttta

SEQ ID NO: 37846 - DNA, 15 bp, Unknown
  misc_feature (1)..( 15): Matrix.001 file - promoters75/5668292
attaaagttgggccc

SEQ ID NO: 37847 - DNA, 8 bp, Unknown
  misc_feature (1)..( 8): Matrix.001 file - promoters75/5668292
atgggcca

SEQ ID NO: 37848 - DNA, 13 bp, Unknown
  misc_feature (1)..( 13): Matrix.001 file - promoters75/5668435
gagacaaaaccaa

SEQ ID NO: 37849 - DNA, 12 bp, Unknown
  misc_feature (1)..( 12): Matrix.001 file - promoters75/5668435
cattatttaaaa

SEQ ID NO: 37850 - DNA, 8 bp, Unknown
  misc_feature (1)..( 8): Matrix.001 file - promoters75/5668435
tatgggcc

SEQ ID NO: 37851 - DNA, 9 bp, Unknown
  misc_feature (1)..( 9): Matrix.001 file - promoters75/5668493
aataaatgt

SEQ ID NO: 37852 - DNA, 9 bp, Unknown
  misc_feature (1)..( 9): Matrix.001 file - promoters75/5668493
gtttattta

SEQ ID NO: 37853 - DNA, 9 bp, Unknown
  misc_feature (1)..( 9): Matrix.001 file - promoters75/5668493
tacaatatt

SEQ ID NO: 37854 - DNA, 7 bp, Unknown
  misc_feature (1)..( 7): Matrix.001 file - promoters75/5668509
agaggag

SEQ ID NO: 37855 - DNA, 13 bp, Unknown
  misc_feature (1)..( 13): Matrix.001 file - promoters75/5668720
ctaaaggcccaat

SEQ ID NO: 37856 - DNA, 11 bp, Unknown
  misc_feature (1)..( 11): Matrix.001 file - promoters75/5668720
ttcaaaaatac

SEQ ID NO: 37857 - DNA, 8 bp, Unknown
  misc_feature (1)..( 8): Matrix.001 file - promoters75/5668720
gaatttga

SEQ ID NO: 37858 - DNA, 8 bp, Unknown
  misc_feature (1)..( 8): Matrix.001 file - promoters75/5668720
tgaattgg

SEQ ID NO: 37859 - DNA, 9 bp, Unknown
  misc_feature (1)..( 9): Matrix.001 file - promoters75/5669025
tggttttat

SEQ ID NO: 37860 - DNA, 8 bp, Unknown
  misc_feature (1)..( 8): Matrix.001 file - promoters75/5669025
atatcatg

SEQ ID NO: 37861 - DNA, 7 bp, Unknown
  misc_feature (1)..( 7): Matrix.001 file - promoters75/5669250
actataa

SEQ ID NO: 37862 - DNA, 8 bp, Unknown
  misc_feature (1)..( 8): Matrix.001 file - promoters75/5670592
aaataatt

SEQ ID NO: 37863 - DNA, 14 bp, Unknown
  misc_feature (1)..( 14): Matrix.001 file - promoters75/5674194
aatcattaaagttt

SEQ ID NO: 37864 - DNA, 11 bp, Unknown
  misc_feature (1)..( 11): Matrix.001 file - promoters75/5674194
aataaaaaaaa

SEQ ID NO: 37865 - DNA, 10 bp, Unknown
  misc_feature (1)..( 10): Matrix.001 file - promoters75/5674634
aaaataaatt

SEQ ID NO: 37866 - DNA, 7 bp, Unknown
  misc_feature (1)..( 7): Matrix.001 file - promoters75/5674666
taatgaa

SEQ ID NO: 37867 - DNA, 6 bp, Unknown
  misc_feature (1)..( 6): Matrix.001 file - promoters75/5674666
atttgt

SEQ ID NO: 37868 - DNA, 7 bp, Unknown
  misc_feature (1)..( 7): Matrix.001 file - promoters75/5674666
tttattt

SEQ ID NO: 37869 - DNA, 10 bp, Unknown
  misc_feature (1)..( 10): Matrix.001 file - promoters75/5674666
gtttgtattt

SEQ ID NO: 37870 - DNA, 7 bp, Unknown
  misc_feature (1)..( 7): Matrix.001 file - promoters75/5674666
tgtattt

SEQ ID NO: 37871 - DNA, 7 bp, Unknown
  misc_feature (1)..( 7): Matrix.001 file - promoters75/5675661
aatttct

SEQ ID NO: 37872 - DNA, 8 bp, Unknown
  misc_feature (1)..( 8): Matrix.001 file - promoters75/5675661
ttggttgg

SEQ ID NO: 37873 - DNA, 7 bp, Unknown
  misc_feature (1)..( 7): Matrix.001 file - promoters75/5677230
aagtaaa

SEQ ID NO: 37874 - DNA, 7 bp, Unknown
  misc_feature (1)..( 7): Matrix.001 file - promoters75/5677230
aaaatat

SEQ ID NO: 37875 - DNA, 10 bp, Unknown
  misc_feature (1)..( 10): Matrix.001 file - promoters75/5677309
cacaaaaact

SEQ ID NO: 37876 - DNA, 11 bp, Unknown
  misc_feature (1)..( 11): Matrix.001 file - promoters75/5677309
taatttgacaa

SEQ ID NO: 37877 - DNA, 7 bp, Unknown
  misc_feature (1)..( 7): Matrix.001 file - promoters75/5677309
aaaagta

SEQ ID NO: 37878 - DNA, 7 bp, Unknown
  misc_feature (1)..( 7): Matrix.001 file - promoters75/5677344
aaaattt

SEQ ID NO: 37879 - DNA, 9 bp, Unknown
  misc_feature (1)..( 9): Matrix.001 file - promoters75/5753942
tacattgtt

SEQ ID NO: 37880 - DNA, 9 bp, Unknown
  misc_feature (1)..( 9): Matrix.001 file - promoters75/5753942
caaacaaaa

SEQ ID NO: 37881 - DNA, 9 bp, Unknown
  misc_feature (1)..( 9): Matrix.001 file - promoters75/5753942
tgttcaaaa

SEQ ID NO: 37882 - DNA, 13 bp, Unknown
  misc_feature (1)..( 13): Matrix.001 file - promoters75/5753942
gcccaaattaaaa

SEQ ID NO: 37883 - DNA, 11 bp, Unknown
  misc_feature (1)..( 11): Matrix.001 file - promoters75/5753942
tttgtgttttt

SEQ ID NO: 37884 - DNA, 7 bp, Unknown
  misc_feature (1)..( 7): Matrix.001 file - promoters75/5753942
catattt

SEQ ID NO: 37885 - DNA, 10 bp, Unknown
  misc_feature (1)..( 10): Matrix.001 file - promoters75/5753942
tttcgtacat

SEQ ID NO: 37886 - DNA, 8 bp, Unknown
  misc_feature (1)..( 8): Matrix.001 file - promoters75/5753942
gggccata

SEQ ID NO: 37887 - DNA, 7 bp, Unknown
  misc_feature (1)..( 7): Matrix.001 file - promoters75/5754280
ggcccaa

SEQ ID NO: 37888 - DNA, 11 bp, Unknown
  misc_feature (1)..( 11): Matrix.001 file - promoters75/5754280
aagcccaaata

SEQ ID NO: 37889 - DNA, 8 bp, Unknown
  misc_feature (1)..( 8): Matrix.001 file - promoters75/5756166
ttacaatg

SEQ ID NO: 37890 - DNA, 7 bp, Unknown
  misc_feature (1)..( 7): Matrix.001 file - promoters75/5756166
tcttaaa

SEQ ID NO: 37891 - DNA, 11 bp, Unknown
  misc_feature (1)..( 11): Matrix.001 file - promoters75/5758021
tcttaggattt

SEQ ID NO: 37892 - DNA, 4 bp, Unknown
  misc_feature (1)..( 4): Matrix.001 file - promoters75/5776417
caag

SEQ ID NO: 37893 - DNA, 9 bp, Unknown
  misc_feature (1)..( 9): Matrix.001 file - promoters75/5776417
cgattcaat

SEQ ID NO: 37894 - DNA, 7 bp, Unknown
  misc_feature (1)..( 7): Matrix.001 file - promoters75/5776417
agttttt

SEQ ID NO: 37895 - DNA, 8 bp, Unknown
  misc_feature (1)..( 8): Matrix.001 file - promoters70/1007030
aaacgaat

SEQ ID NO: 37896 - DNA, 11 bp, Unknown
  misc_feature (1)..( 11): Matrix.001 file - promoters70/1007030
gaaaatataca

SEQ ID NO: 37897 - DNA, 12 bp, Unknown
  misc_feature (1)..( 12): Matrix.001 file - promoters70/1007030
atccaaatctaa

SEQ ID NO: 37898 - DNA, 7 bp, Unknown
  misc_feature (1)..( 7): Matrix.001 file - promoters70/1007030
aatctga

SEQ ID NO: 37899 - DNA, 12 bp, Unknown
  misc_feature (1)..( 12): Matrix.001 file - promoters70/1007030
ttatcaaaatta

SEQ ID NO: 37900 - DNA, 9 bp, Unknown
  misc_feature (1)..( 9): Matrix.001 file - promoters70/1007030
taaacatat

SEQ ID NO: 37901 - DNA, 9 bp, Unknown
  misc_feature (1)..( 9): Matrix.001 file - promoters70/1007273
aaagaacct

SEQ ID NO: 37902 - DNA, 8 bp, Unknown
  misc_feature (1)..( 8): Matrix.001 file - promoters70/1007273
attccaaa

SEQ ID NO: 37903 - DNA, 9 bp, Unknown
  misc_feature (1)..( 9): Matrix.001 file - promoters70/1007273
gaaagaacc

SEQ ID NO: 37904 - DNA, 7 bp, Unknown
  misc_feature (1)..( 7): Matrix.001 file - promoters70/1007273
agattac

SEQ ID NO: 37905 - DNA, 8 bp, Unknown
  misc_feature (1)..( 8): Matrix.001 file - promoters70/1007273
atgaatca

SEQ ID NO: 37906 - DNA, 10 bp, Unknown
  misc_feature (1)..( 10): Matrix.001 file - promoters70/1007273
agagaagaaa

SEQ ID NO: 37907 - DNA, 8 bp, Unknown
  misc_feature (1)..( 8): Matrix.001 file - promoters70/1007273
aaaagaaa

SEQ ID NO: 37908 - DNA, 7 bp, Unknown
  misc_feature (1)..( 7): Matrix.001 file - promoters70/1007273
cttaaat

SEQ ID NO: 37909 - DNA, 6 bp, Unknown
  misc_feature (1)..( 6): Matrix.001 file - promoters70/1007273
caaaac

SEQ ID NO: 37910 - DNA, 10 bp, Unknown
  misc_feature (1)..( 10): Matrix.001 file - promoters70/1007639
ataaaaacaa

SEQ ID NO: 37911 - DNA, 12 bp, Unknown
  misc_feature (1)..( 12): Matrix.001 file - promoters70/1007639
cagaaatataaa

SEQ ID NO: 37912 - DNA, 11 bp, Unknown
  misc_feature (1)..( 11): Matrix.001 file - promoters70/1007639
agttttgtatt

SEQ ID NO: 37913 - DNA, 12 bp, Unknown
  misc_feature (1)..( 12): Matrix.001 file - promoters70/1007639
aattatttgtgg

SEQ ID NO: 37914 - DNA, 9 bp, Unknown
  misc_feature (1)..( 9): Matrix.001 file - promoters70/1007639
atatcattc

SEQ ID NO: 37915 - DNA, 8 bp, Unknown
  misc_feature (1)..( 8): Matrix.001 file - promoters70/1007759
aagaagaa

SEQ ID NO: 37916 - DNA, 9 bp, Unknown
  misc_feature (1)..( 9): Matrix.001 file - promoters70/1007759
agctaaaca

SEQ ID NO: 37917 - DNA, 8 bp, Unknown
  misc_feature (1)..( 8): Matrix.001 file - promoters70/1007759
gagttaga

SEQ ID NO: 37918 - DNA, 14 bp, Unknown
  misc_feature (1)..( 14): Matrix.001 file - promoters70/1007759
gagtgggaggaaaa

SEQ ID NO: 37919 - DNA, 8 bp, Unknown
  misc_feature (1)..( 8): Matrix.001 file - promoters70/1007967
attcttaa

SEQ ID NO: 37920 - DNA, 9 bp, Unknown
  misc_feature (1)..( 9): Matrix.001 file - promoters70/1007967
aatttgaac

SEQ ID NO: 37921 - DNA, 9 bp, Unknown
  misc_feature (1)..( 9): Matrix.001 file - promoters70/1008070
aaaacaaac

SEQ ID NO: 37922 - DNA, 9 bp, Unknown
  misc_feature (1)..( 9): Matrix.001 file - promoters70/1008070
atttcataa

SEQ ID NO: 37923 - DNA, 11 bp, Unknown
  misc_feature (1)..( 11): Matrix.001 file - promoters70/1008070
ccatttatata

SEQ ID NO: 37924 - DNA, 9 bp, Unknown
  misc_feature (1)..( 9): Matrix.001 file - promoters70/1008070
aaaatgaaa

SEQ ID NO: 37925 - DNA, 12 bp, Unknown
  misc_feature (1)..( 12): Matrix.001 file - promoters70/1008148
ctataatacaaa

SEQ ID NO: 37926 - DNA, 11 bp, Unknown
  misc_feature (1)..( 11): Matrix.001 file - promoters70/1008148
atatagattta

SEQ ID NO: 37927 - DNA, 9 bp, Unknown
  misc_feature (1)..( 9): Matrix.001 file - promoters70/1008148
atcatagat

SEQ ID NO: 37928 - DNA, 12 bp, Unknown
  misc_feature (1)..( 12): Matrix.001 file - promoters70/1008148
ctatataaagac

SEQ ID NO: 37929 - DNA, 8 bp, Unknown
  misc_feature (1)..( 8): Matrix.001 file - promoters70/1008148
aaataaat

SEQ ID NO: 37930 - DNA, 10 bp, Unknown
  misc_feature (1)..( 10): Matrix.001 file - promoters70/1008148
agattagaga

SEQ ID NO: 37931 - DNA, 6 bp, Unknown
  misc_feature (1)..( 6): Matrix.001 file - promoters70/1008148
attaat

SEQ ID NO: 37932 - DNA, 9 bp, Unknown
  misc_feature (1)..( 9): Matrix.001 file - promoters70/1008218
catttaagt

SEQ ID NO: 37933 - DNA, 9 bp, Unknown
  misc_feature (1)..( 9): Matrix.001 file - promoters70/1008218
ttatttata

SEQ ID NO: 37934 - DNA, 7 bp, Unknown
  misc_feature (1)..( 7): Matrix.001 file - promoters70/1008218
tagtatt

SEQ ID NO: 37935 - DNA, 10 bp, Unknown
  misc_feature (1)..( 10): Matrix.001 file - promoters70/1008425
caaatacatt

SEQ ID NO: 37936 - DNA, 8 bp, Unknown
  misc_feature (1)..( 8): Matrix.001 file - promoters70/1008425
cttttgaa

SEQ ID NO: 37937 - DNA, 9 bp, Unknown
  misc_feature (1)..( 9): Matrix.001 file - promoters70/1008443
agaaatgac

SEQ ID NO: 37938 - DNA, 8 bp, Unknown
  misc_feature (1)..( 8): Matrix.001 file - promoters70/1008443
caaaaaaa

SEQ ID NO: 37939 - DNA, 14 bp, Unknown
  misc_feature (1)..( 14): Matrix.001 file - promoters70/1008443
tatagaaaagacaa

SEQ ID NO: 37940 - DNA, 15 bp, Unknown
  misc_feature (1)..( 15): Matrix.001 file - promoters70/1008443
ataataatgtaatat

SEQ ID NO: 37941 - DNA, 11 bp, Unknown
  misc_feature (1)..( 11): Matrix.001 file - promoters70/1008732
aaaataattta

SEQ ID NO: 37942 - DNA, 7 bp, Unknown
  misc_feature (1)..( 7): Matrix.001 file - promoters70/1008808
cgaagaa

SEQ ID NO: 37943 - DNA, 8 bp, Unknown
  misc_feature (1)..( 8): Matrix.001 file - promoters70/1008808
acttcctt

SEQ ID NO: 37944 - DNA, 7 bp, Unknown
  misc_feature (1)..( 7): Matrix.001 file - promoters70/1008808
gtttgaa

SEQ ID NO: 37945 - DNA, 9 bp, Unknown
  misc_feature (1)..( 9): Matrix.001 file - promoters70/1008808
aaatgatta

SEQ ID NO: 37946 - DNA, 7 bp, Unknown
  misc_feature (1)..( 7): Matrix.001 file - promoters70/1008808
aatattg

SEQ ID NO: 37947 - DNA, 12 bp, Unknown
  misc_feature (1)..( 12): Matrix.001 file - promoters70/1008836
taaaatacaaat

SEQ ID NO: 37948 - DNA, 10 bp, Unknown
  misc_feature (1)..( 10): Matrix.001 file - promoters70/1008836
atatttttat

SEQ ID NO: 37949 - DNA, 8 bp, Unknown
  misc_feature (1)..( 8): Matrix.001 file - promoters70/1008836
tcaaaaga

SEQ ID NO: 37950 - DNA, 8 bp, Unknown
  misc_feature (1)..( 8): Matrix.001 file - promoters70/1008836
aaaacttt

SEQ ID NO: 37951 - DNA, 9 bp, Unknown
  misc_feature (1)..( 9): Matrix.001 file - promoters70/1008836
aattaaatg

SEQ ID NO: 37952 - DNA, 10 bp, Unknown
  misc_feature (1)..( 10): Matrix.001 file - promoters70/1008836
aaagaattta

SEQ ID NO: 37953 - DNA, 10 bp, Unknown
  misc_feature (1)..( 10): Matrix.001 file - promoters70/1008836
taattatcca

SEQ ID NO: 37954 - DNA, 8 bp, Unknown
  misc_feature (1)..( 8): Matrix.001 file - promoters70/1008836
tccaaata

SEQ ID NO: 37955 - DNA, 8 bp, Unknown
  misc_feature (1)..( 8): Matrix.001 file - promoters70/1009030
atttttag

SEQ ID NO: 37956 - DNA, 11 bp, Unknown
  misc_feature (1)..( 11): Matrix.001 file - promoters70/1009030
tctcttttcat

SEQ ID NO: 37957 - DNA, 11 bp, Unknown
  misc_feature (1)..( 11): Matrix.001 file - promoters70/1009234
cgatacttgtc

SEQ ID NO: 37958 - DNA, 10 bp, Unknown
  misc_feature (1)..( 10): Matrix.001 file - promoters70/1009234
aagaactcat

SEQ ID NO: 37959 - DNA, 12 bp, Unknown
  misc_feature (1)..( 12): Matrix.001 file - promoters70/1009234
ttaaatgaagat

SEQ ID NO: 37960 - DNA, 10 bp, Unknown
  misc_feature (1)..( 10): Matrix.001 file - promoters70/1009234
tgtggtccat

SEQ ID NO: 37961 - DNA, 8 bp, Unknown
  misc_feature (1)..( 8): Matrix.001 file - promoters70/1009387
tctttgtc

SEQ ID NO: 37962 - DNA, 8 bp, Unknown
  misc_feature (1)..( 8): Matrix.001 file - promoters70/1009387
cttcttca

SEQ ID NO: 37963 - DNA, 8 bp, Unknown
  misc_feature (1)..( 8): Matrix.001 file - promoters70/1009387
ttatatgg

SEQ ID NO: 37964 - DNA, 7 bp, Unknown
  misc_feature (1)..( 7): Matrix.001 file - promoters70/1009520
aatatat

SEQ ID NO: 37965 - DNA, 9 bp, Unknown
  misc_feature (1)..( 9): Matrix.001 file - promoters70/1009520
ttgtatatt

SEQ ID NO: 37966 - DNA, 9 bp, Unknown
  misc_feature (1)..( 9): Matrix.001 file - promoters70/1009520
aaagaaaaa

SEQ ID NO: 37967 - DNA, 9 bp, Unknown
  misc_feature (1)..( 9): Matrix.001 file - promoters70/1009520
tttgtctat

SEQ ID NO: 37968 - DNA, 9 bp, Unknown
  misc_feature (1)..( 9): Matrix.001 file - promoters70/1009520
tcttctttg

SEQ ID NO: 37969 - DNA, 11 bp, Unknown
  misc_feature (1)..( 11): Matrix.001 file - promoters70/1009941
actatatatat

SEQ ID NO: 37970 - DNA, 11 bp, Unknown
  misc_feature (1)..( 11): Matrix.001 file - promoters70/1009941
aaattggatta

SEQ ID NO: 37971 - DNA, 9 bp, Unknown
  misc_feature (1)..( 9): Matrix.001 file - promoters70/1010025
agattttct

SEQ ID NO: 37972 - DNA, 11 bp, Unknown
  misc_feature (1)..( 11): Matrix.001 file - promoters70/1010025
atttatttgtg

SEQ ID NO: 37973 - DNA, 8 bp, Unknown
  misc_feature (1)..( 8): Matrix.001 file - promoters70/1010025
atgtacta

SEQ ID NO: 37974 - DNA, 7 bp, Unknown
  misc_feature (1)..( 7): Matrix.001 file - promoters70/1010055
aaaaata

SEQ ID NO: 37975 - DNA, 9 bp, Unknown
  misc_feature (1)..( 9): Matrix.001 file - promoters70/1010055
aaaacaaat

SEQ ID NO: 37976 - DNA, 9 bp, Unknown
  misc_feature (1)..( 9): Matrix.001 file - promoters70/1010055
atattatta

SEQ ID NO: 37977 - DNA, 9 bp, Unknown
  misc_feature (1)..( 9): Matrix.001 file - promoters70/1010055
tcaacatat

SEQ ID NO: 37978 - DNA, 8 bp, Unknown
  misc_feature (1)..( 8): Matrix.001 file - promoters70/1010115
caaacctg

SEQ ID NO: 37979 - DNA, 8 bp, Unknown
  misc_feature (1)..( 8): Matrix.001 file - promoters70/1010115
agatacag

SEQ ID NO: 37980 - DNA, 9 bp, Unknown
  misc_feature (1)..( 9): Matrix.001 file - promoters70/1010115
tttcaagtt

SEQ ID NO: 37981 - DNA, 7 bp, Unknown
  misc_feature (1)..( 7): Matrix.001 file - promoters70/1010367
aaaaata

SEQ ID NO: 37982 - DNA, 7 bp, Unknown
  misc_feature (1)..( 7): Matrix.001 file - promoters70/1010367
aaaataa

SEQ ID NO: 37983 - DNA, 9 bp, Unknown
  misc_feature (1)..( 9): Matrix.001 file - promoters70/1010367
aaaaaaaat

SEQ ID NO: 37984 - DNA, 12 bp, Unknown
  misc_feature (1)..( 12): Matrix.001 file - promoters70/1010367
atttggataaaa

SEQ ID NO: 37985 - DNA, 9 bp, Unknown
  misc_feature (1)..( 9): Matrix.001 file - promoters70/1010367
cctctttcc

SEQ ID NO: 37986 - DNA, 11 bp, Unknown
  misc_feature (1)..( 11): Matrix.001 file - promoters70/1010367
aaatacaaaaa

SEQ ID NO: 37987 - DNA, 7 bp, Unknown
  misc_feature (1)..( 7): Matrix.001 file - promoters70/1010367
aaaaact

SEQ ID NO: 37988 - DNA, 11 bp, Unknown
  misc_feature (1)..( 11): Matrix.001 file - promoters70/1010367
aaaaaataaaa

SEQ ID NO: 37989 - DNA, 8 bp, Unknown
  misc_feature (1)..( 8): Matrix.001 file - promoters70/1010367
aaaccaat

SEQ ID NO: 37990 - DNA, 8 bp, Unknown
  misc_feature (1)..( 8): Matrix.001 file - promoters70/1010367
aatgaatt

SEQ ID NO: 37991 - DNA, 7 bp, Unknown
  misc_feature (1)..( 7): Matrix.001 file - promoters70/1010367
taacaaa

SEQ ID NO: 37992 - DNA, 8 bp, Unknown
  misc_feature (1)..( 8): Matrix.001 file - promoters70/1010385
gctttttg

SEQ ID NO: 37993 - DNA, 7 bp, Unknown
  misc_feature (1)..( 7): Matrix.001 file - promoters70/1010429
taataat

SEQ ID NO: 37994 - DNA, 7 bp, Unknown
  misc_feature (1)..( 7): Matrix.001 file - promoters70/1010429
atgttct

SEQ ID NO: 37995 - DNA, 9 bp, Unknown
  misc_feature (1)..( 9): Matrix.001 file - promoters70/1010429
aattataca

SEQ ID NO: 37996 - DNA, 10 bp, Unknown
  misc_feature (1)..( 10): Matrix.001 file - promoters70/1010429
gttattaatt

SEQ ID NO: 37997 - DNA, 8 bp, Unknown
  misc_feature (1)..( 8): Matrix.001 file - promoters70/1010435
tcttcttc

SEQ ID NO: 37998 - DNA, 10 bp, Unknown
  misc_feature (1)..( 10): Matrix.001 file - promoters70/1010435
attatcaaag

SEQ ID NO: 37999 - DNA, 10 bp, Unknown
  misc_feature (1)..( 10): Matrix.001 file - promoters70/1010435
aatctgaatc

SEQ ID NO: 38000 - DNA, 8 bp, Unknown
  misc_feature (1)..( 8): Matrix.001 file - promoters70/1010449
gagtttat

SEQ ID NO: 38001 - DNA, 7 bp, Unknown
  misc_feature (1)..( 7): Matrix.001 file - promoters70/1010449
tgtgttt

SEQ ID NO: 38002 - DNA, 8 bp, Unknown
  misc_feature (1)..( 8): Matrix.001 file - promoters70/1010636
gcttggat

SEQ ID NO: 38003 - DNA, 8 bp, Unknown
  misc_feature (1)..( 8): Matrix.001 file - promoters70/1010636
cgaaagtt

SEQ ID NO: 38004 - DNA, 10 bp, Unknown
  misc_feature (1)..( 10): Matrix.001 file - promoters70/1010636
tttaaaccct

SEQ ID NO: 38005 - DNA, 8 bp, Unknown
  misc_feature (1)..( 8): Matrix.001 file - promoters70/1010636
gtggcatt

SEQ ID NO: 38006 - DNA, 7 bp, Unknown
  misc_feature (1)..( 7): Matrix.001 file - promoters70/1010636
ttttcta

SEQ ID NO: 38007 - DNA, 11 bp, Unknown
  misc_feature (1)..( 11): Matrix.001 file - promoters70/1010815
aaattgtttgt

SEQ ID NO: 38008 - DNA, 9 bp, Unknown
  misc_feature (1)..( 9): Matrix.001 file - promoters70/1010819
atttttggt

SEQ ID NO: 38009 - DNA, 11 bp, Unknown
  misc_feature (1)..( 11): Matrix.001 file - promoters70/1010993
aaaataataaa

SEQ ID NO: 38010 - DNA, 9 bp, Unknown
  misc_feature (1)..( 9): Matrix.001 file - promoters70/1010993
aaaaaacta

SEQ ID NO: 38011 - DNA, 8 bp, Unknown
  misc_feature (1)..( 8): Matrix.001 file - promoters70/1010993
taaaaaac

SEQ ID NO: 38012 - DNA, 10 bp, Unknown
  misc_feature (1)..( 10): Matrix.001 file - promoters70/1010993
tatagaattt

SEQ ID NO: 38013 - DNA, 7 bp, Unknown
  misc_feature (1)..( 7): Matrix.001 file - promoters70/1011337
aaaaaaa

SEQ ID NO: 38014 - DNA, 11 bp, Unknown
  misc_feature (1)..( 11): Matrix.001 file - promoters70/1011358
cgatacttgtc

SEQ ID NO: 38015 - DNA, 10 bp, Unknown
  misc_feature (1)..( 10): Matrix.001 file - promoters70/1011358
aagaactcat

SEQ ID NO: 38016 - DNA, 12 bp, Unknown
  misc_feature (1)..( 12): Matrix.001 file - promoters70/1011358
ttaaatgaagat

SEQ ID NO: 38017 - DNA, 10 bp, Unknown
  misc_feature (1)..( 10): Matrix.001 file - promoters70/1011358
tgtggtccat

SEQ ID NO: 38018 - DNA, 12 bp, Unknown
  misc_feature (1)..( 12): Matrix.001 file - promoters70/1011780
tgtaaattttgc

SEQ ID NO: 38019 - DNA, 7 bp, Unknown
  misc_feature (1)..( 7): Matrix.001 file - promoters70/1011780
aaaaata

SEQ ID NO: 38020 - DNA, 7 bp, Unknown
  misc_feature (1)..( 7): Matrix.001 file - promoters70/1011780
tttgtta

SEQ ID NO: 38021 - DNA, 8 bp, Unknown
  misc_feature (1)..( 8): Matrix.001 file - promoters70/1011780
gtaataat

SEQ ID NO: 38022 - DNA, 11 bp, Unknown
  misc_feature (1)..( 11): Matrix.001 file - promoters70/1011780
aaaggcccata

SEQ ID NO: 38023 - DNA, 7 bp, Unknown
  misc_feature (1)..( 7): Matrix.001 file - promoters70/1011780
caaaaaa

SEQ ID NO: 38024 - DNA, 6 bp, Unknown
  misc_feature (1)..( 6): Matrix.001 file - promoters70/1011780
tcaaaa

SEQ ID NO: 38025 - DNA, 11 bp, Unknown
  misc_feature (1)..( 11): Matrix.001 file - promoters70/1011780
catgaatttaa

SEQ ID NO: 38026 - DNA, 9 bp, Unknown
  misc_feature (1)..( 9): Matrix.001 file - promoters70/1011923
ttgttgttt

SEQ ID NO: 38027 - DNA, 11 bp, Unknown
  misc_feature (1)..( 11): Matrix.001 file - promoters70/1011923
atcttcatgtt

SEQ ID NO: 38028 - DNA, 10 bp, Unknown
  misc_feature (1)..( 10): Matrix.001 file - promoters70/1011972
aaactttttt

SEQ ID NO: 38029 - DNA, 10 bp, Unknown
  misc_feature (1)..( 10): Matrix.001 file - promoters70/1011972
ttttaacaaa

SEQ ID NO: 38030 - DNA, 8 bp, Unknown
  misc_feature (1)..( 8): Matrix.001 file - promoters70/1011972
tgcataag

SEQ ID NO: 38031 - DNA, 9 bp, Unknown
  misc_feature (1)..( 9): Matrix.001 file - promoters70/1011972
gaatctctt

SEQ ID NO: 38032 - DNA, 7 bp, Unknown
  misc_feature (1)..( 7): Matrix.001 file - promoters70/1011972
tttaaag

SEQ ID NO: 38033 - DNA, 11 bp, Unknown
  misc_feature (1)..( 11): Matrix.001 file - promoters70/1011972
aatctttttaa

SEQ ID NO: 38034 - DNA, 9 bp, Unknown
  misc_feature (1)..( 9): Matrix.001 file - promoters70/1011972
ttctgctaa

SEQ ID NO: 38035 - DNA, 9 bp, Unknown
  misc_feature (1)..( 9): Matrix.001 file - promoters70/1011972
ctatataaa

SEQ ID NO: 38036 - DNA, 12 bp, Unknown
  misc_feature (1)..( 12): Matrix.001 file - promoters70/1011972
actgtttgatat

SEQ ID NO: 38037 - DNA, 8 bp, Unknown
  misc_feature (1)..( 8): Matrix.001 file - promoters70/1011972
attttcaa

SEQ ID NO: 38038 - DNA, 9 bp, Unknown
  misc_feature (1)..( 9): Matrix.001 file - promoters70/1011972
ctaatcaac

SEQ ID NO: 38039 - DNA, 9 bp, Unknown
  misc_feature (1)..( 9): Matrix.001 file - promoters70/1011972
atctacata

SEQ ID NO: 38040 - DNA, 8 bp, Unknown
  misc_feature (1)..( 8): Matrix.001 file - promoters70/1011972
atcaatat

SEQ ID NO: 38041 - DNA, 7 bp, Unknown
  misc_feature (1)..( 7): Matrix.001 file - promoters70/1011972
tgacatt

SEQ ID NO: 38042 - DNA, 7 bp, Unknown
  misc_feature (1)..( 7): Matrix.001 file - promoters70/1011972
tttcgga

SEQ ID NO: 38043 - DNA, 6 bp, Unknown
  misc_feature (1)..( 6): Matrix.001 file - promoters70/1012003
aagttt

SEQ ID NO: 38044 - DNA, 15 bp, Unknown
  misc_feature (1)..( 15): Matrix.001 file - promoters70/1012003
agcaaaaaaatctca

SEQ ID NO: 38045 - DNA, 9 bp, Unknown
  misc_feature (1)..( 9): Matrix.001 file - promoters70/1012003
tatatataa

SEQ ID NO: 38046 - DNA, 9 bp, Unknown
  misc_feature (1)..( 9): Matrix.001 file - promoters70/1012003
tgaagaaaa

SEQ ID NO: 38047 - DNA, 11 bp, Unknown
  misc_feature (1)..( 11): Matrix.001 file - promoters70/1012003
gaaaaaaatcc

SEQ ID NO: 38048 - DNA, 15 bp, Unknown
  misc_feature (1)..( 15): Matrix.001 file - promoters70/1012003
aaaggcccaatttca

SEQ ID NO: 38049 - DNA, 8 bp, Unknown
  misc_feature (1)..( 8): Matrix.001 file - promoters70/1012074
agtgttca

SEQ ID NO: 38050 - DNA, 10 bp, Unknown
  misc_feature (1)..( 10): Matrix.001 file - promoters70/1012074
ttttaataag

SEQ ID NO: 38051 - DNA, 11 bp, Unknown
  misc_feature (1)..( 11): Matrix.001 file - promoters70/1012110
ccataattaag

SEQ ID NO: 38052 - DNA, 10 bp, Unknown
  misc_feature (1)..( 10): Matrix.001 file - promoters70/1012334
gttttttcgt

SEQ ID NO: 38053 - DNA, 12 bp, Unknown
  misc_feature (1)..( 12): Matrix.001 file - promoters70/1012349
aaacgtttgtta

SEQ ID NO: 38054 - DNA, 11 bp, Unknown
  misc_feature (1)..( 11): Matrix.001 file - promoters70/1012349
tttcttaaaaa

SEQ ID NO: 38055 - DNA, 8 bp, Unknown
  misc_feature (1)..( 8): Matrix.001 file - promoters70/1012407
ccatctga

SEQ ID NO: 38056 - DNA, 8 bp, Unknown
  misc_feature (1)..( 8): Matrix.001 file - promoters70/1012407
aattttaa

SEQ ID NO: 38057 - DNA, 6 bp, Unknown
  misc_feature (1)..( 6): Matrix.001 file - promoters70/1012407
ttattc

SEQ ID NO: 38058 - DNA, 10 bp, Unknown
  misc_feature (1)..( 10): Matrix.001 file - promoters70/1012407
ccaaataatt

SEQ ID NO: 38059 - DNA, 9 bp, Unknown
  misc_feature (1)..( 9): Matrix.001 file - promoters70/1012580
tcttataat

SEQ ID NO: 38060 - DNA, 8 bp, Unknown
  misc_feature (1)..( 8): Matrix.001 file - promoters70/1012580
tcttataa

SEQ ID NO: 38061 - DNA, 9 bp, Unknown
  misc_feature (1)..( 9): Matrix.001 file - promoters70/1012673
tatcatttt

SEQ ID NO: 38062 - DNA, 11 bp, Unknown
  misc_feature (1)..( 11): Matrix.001 file - promoters70/1012757
tgtttgaacat

SEQ ID NO: 38063 - DNA, 8 bp, Unknown
  misc_feature (1)..( 8): Matrix.001 file - promoters70/1012757
caacgaaa

SEQ ID NO: 38064 - DNA, 8 bp, Unknown
  misc_feature (1)..( 8): Matrix.001 file - promoters70/1012883
aaagattg

SEQ ID NO: 38065 - DNA, 7 bp, Unknown
  misc_feature (1)..( 7): Matrix.001 file - promoters70/1012883
ccattaa

SEQ ID NO: 38066 - DNA, 9 bp, Unknown
  misc_feature (1)..( 9): Matrix.001 file - promoters70/1012883
actaaatta

SEQ ID NO: 38067 - DNA, 9 bp, Unknown
  misc_feature (1)..( 9): Matrix.001 file - promoters70/1013128
gtagtgaaa

SEQ ID NO: 38068 - DNA, 10 bp, Unknown
  misc_feature (1)..( 10): Matrix.001 file - promoters70/1013128
agaaaaaaaa

SEQ ID NO: 38069 - DNA, 11 bp, Unknown
  misc_feature (1)..( 11): Matrix.001 file - promoters70/1013128
atttttctaat

SEQ ID NO: 38070 - DNA, 7 bp, Unknown
  misc_feature (1)..( 7): Matrix.001 file - promoters70/1013128
gaaattg

SEQ ID NO: 38071 - DNA, 7 bp, Unknown
  misc_feature (1)..( 7): Matrix.001 file - promoters70/1013128
atataaa

SEQ ID NO: 38072 - DNA, 11 bp, Unknown
  misc_feature (1)..( 11): Matrix.001 file - promoters70/1013208
attttattcta

SEQ ID NO: 38073 - DNA, 11 bp, Unknown
  misc_feature (1)..( 11): Matrix.001 file - promoters70/1013208
cttctttatag

SEQ ID NO: 38074 - DNA, 9 bp, Unknown
  misc_feature (1)..( 9): Matrix.001 file - promoters70/1013242
tctttataa

SEQ ID NO: 38075 - DNA, 9 bp, Unknown
  misc_feature (1)..( 9): Matrix.001 file - promoters70/1013242
atgatttag

SEQ ID NO: 38076 - DNA, 8 bp, Unknown
  misc_feature (1)..( 8): Matrix.001 file - promoters70/1013242
tctttctc

SEQ ID NO: 38077 - DNA, 9 bp, Unknown
  misc_feature (1)..( 9): Matrix.001 file - promoters70/1013242
aaaaacata

SEQ ID NO: 38078 - DNA, 12 bp, Unknown
  misc_feature (1)..( 12): Matrix.001 file - promoters70/1013314
taaaatacaaat

SEQ ID NO: 38079 - DNA, 10 bp, Unknown
  misc_feature (1)..( 10): Matrix.001 file - promoters70/1013314
atatttttat

SEQ ID NO: 38080 - DNA, 8 bp, Unknown
  misc_feature (1)..( 8): Matrix.001 file - promoters70/1013314
tcaaaaga

SEQ ID NO: 38081 - DNA, 8 bp, Unknown
  misc_feature (1)..( 8): Matrix.001 file - promoters70/1013314
aaaacttt

SEQ ID NO: 38082 - DNA, 9 bp, Unknown
  misc_feature (1)..( 9): Matrix.001 file - promoters70/1013314
aattaaatg

SEQ ID NO: 38083 - DNA, 10 bp, Unknown
  misc_feature (1)..( 10): Matrix.001 file - promoters70/1013314
aaagaattta

SEQ ID NO: 38084 - DNA, 10 bp, Unknown
  misc_feature (1)..( 10): Matrix.001 file - promoters70/1013314
taattatcca

SEQ ID NO: 38085 - DNA, 8 bp, Unknown
  misc_feature (1)..( 8): Matrix.001 file - promoters70/1013314
tccaaata

SEQ ID NO: 38086 - DNA, 8 bp, Unknown
  misc_feature (1)..( 8): Matrix.001 file - promoters70/1013384
aaaacaga

SEQ ID NO: 38087 - DNA, 14 bp, Unknown
  misc_feature (1)..( 14): Matrix.001 file - promoters70/1013540
aatcctcaaaacta

SEQ ID NO: 38088 - DNA, 8 bp, Unknown
  misc_feature (1)..( 8): Matrix.001 file - promoters70/1013540
cctcacac

SEQ ID NO: 38089 - DNA, 11 bp, Unknown
  misc_feature (1)..( 11): Matrix.001 file - promoters70/1013690
taagaggtata

SEQ ID NO: 38090 - DNA, 11 bp, Unknown
  misc_feature (1)..( 11): Matrix.001 file - promoters70/1013786
agtctaggaac

SEQ ID NO: 38091 - DNA, 6 bp, Unknown
  misc_feature (1)..( 6): Matrix.001 file - promoters70/1013786
aaaaat

SEQ ID NO: 38092 - DNA, 9 bp, Unknown
  misc_feature (1)..( 9): Matrix.001 file - promoters70/1013786
tatataaat

SEQ ID NO: 38093 - DNA, 12 bp, Unknown
  misc_feature (1)..( 12): Matrix.001 file - promoters70/1013786
aaaaatttaata

SEQ ID NO: 38094 - DNA, 9 bp, Unknown
  misc_feature (1)..( 9): Matrix.001 file - promoters70/1013904
ttagtaatt

SEQ ID NO: 38095 - DNA, 8 bp, Unknown
  misc_feature (1)..( 8): Matrix.001 file - promoters70/1013904
aattatat

SEQ ID NO: 38096 - DNA, 10 bp, Unknown
  misc_feature (1)..( 10): Matrix.001 file - promoters70/1013904
tgataaaatt

SEQ ID NO: 38097 - DNA, 7 bp, Unknown
  misc_feature (1)..( 7): Matrix.001 file - promoters70/1013904
aataaaa

SEQ ID NO: 38098 - DNA, 8 bp, Unknown
  misc_feature (1)..( 8): Matrix.001 file - promoters70/1013904
gtttaggt

SEQ ID NO: 38099 - DNA, 11 bp, Unknown
  misc_feature (1)..( 11): Matrix.001 file - promoters70/1013904
aagaaaaaaat

SEQ ID NO: 38100 - DNA, 8 bp, Unknown
  misc_feature (1)..( 8): Matrix.001 file - promoters70/1013904
ttaataat

SEQ ID NO: 38101 - DNA, 7 bp, Unknown
  misc_feature (1)..( 7): Matrix.001 file - promoters70/1013904
taataat

SEQ ID NO: 38102 - DNA, 8 bp, Unknown
  misc_feature (1)..( 8): Matrix.001 file - promoters70/1013904
caatattt

SEQ ID NO: 38103 - DNA, 7 bp, Unknown
  misc_feature (1)..( 7): Matrix.001 file - promoters70/1013904
tttatat

SEQ ID NO: 38104 - DNA, 7 bp, Unknown
  misc_feature (1)..( 7): Matrix.001 file - promoters70/1014010
tattaaa

SEQ ID NO: 38105 - DNA, 9 bp, Unknown
  misc_feature (1)..( 9): Matrix.001 file - promoters70/1014050
aaaatagtt

SEQ ID NO: 38106 - DNA, 11 bp, Unknown
  misc_feature (1)..( 11): Matrix.001 file - promoters70/1014125
aaaatgtgaaa

SEQ ID NO: 38107 - DNA, 10 bp, Unknown
  misc_feature (1)..( 10): Matrix.001 file - promoters70/1014125
ccaattttaa

SEQ ID NO: 38108 - DNA, 10 bp, Unknown
  misc_feature (1)..( 10): Matrix.001 file - promoters70/1014176
attctaattt

SEQ ID NO: 38109 - DNA, 8 bp, Unknown
  misc_feature (1)..( 8): Matrix.001 file - promoters70/1014180
tcaatttt

SEQ ID NO: 38110 - DNA, 7 bp, Unknown
  misc_feature (1)..( 7): Matrix.001 file - promoters70/1014180
caatatt

SEQ ID NO: 38111 - DNA, 10 bp, Unknown
  misc_feature (1)..( 10): Matrix.001 file - promoters70/1014452
aacattaata

SEQ ID NO: 38112 - DNA, 8 bp, Unknown
  misc_feature (1)..( 8): Matrix.001 file - promoters70/1014452
tataaata

SEQ ID NO: 38113 - DNA, 7 bp, Unknown
  misc_feature (1)..( 7): Matrix.001 file - promoters70/1014525
aaaaata

SEQ ID NO: 38114 - DNA, 8 bp, Unknown
  misc_feature (1)..( 8): Matrix.001 file - promoters70/1014525
aatcaaaa

SEQ ID NO: 38115 - DNA, 9 bp, Unknown
  misc_feature (1)..( 9): Matrix.001 file - promoters70/1014525
tatatatac

SEQ ID NO: 38116 - DNA, 8 bp, Unknown
  misc_feature (1)..( 8): Matrix.001 file - promoters70/1014641
ttttgttt

SEQ ID NO: 38117 - DNA, 8 bp, Unknown
  misc_feature (1)..( 8): Matrix.001 file - promoters70/1014641
gttcttct

SEQ ID NO: 38118 - DNA, 8 bp, Unknown
  misc_feature (1)..( 8): Matrix.001 file - promoters70/1014662
aaaaaaga

SEQ ID NO: 38119 - DNA, 8 bp, Unknown
  misc_feature (1)..( 8): Matrix.001 file - promoters70/1014662
ttttgtca

SEQ ID NO: 38120 - DNA, 8 bp, Unknown
  misc_feature (1)..( 8): Matrix.001 file - promoters70/1014662
aaatttat

SEQ ID NO: 38121 - DNA, 8 bp, Unknown
  misc_feature (1)..( 8): Matrix.001 file - promoters70/1014662
aatcaaaa

SEQ ID NO: 38122 - DNA, 11 bp, Unknown
  misc_feature (1)..( 11): Matrix.001 file - promoters70/1014662
aaaaacacgaa

SEQ ID NO: 38123 - DNA, 7 bp, Unknown
  misc_feature (1)..( 7): Matrix.001 file - promoters70/1014662
actttac

SEQ ID NO: 38124 - DNA, 8 bp, Unknown
  misc_feature (1)..( 8): Matrix.001 file - promoters70/1014662
atataata

SEQ ID NO: 38125 - DNA, 9 bp, Unknown
  misc_feature (1)..( 9): Matrix.001 file - promoters70/1014662
tttattgat

SEQ ID NO: 38126 - DNA, 12 bp, Unknown
  misc_feature (1)..( 12): Matrix.001 file - promoters70/1014662
ataaaatcaata

SEQ ID NO: 38127 - DNA, 10 bp, Unknown
  misc_feature (1)..( 10): Matrix.001 file - promoters70/1014662
ctaacaaaaa

SEQ ID NO: 38128 - DNA, 6 bp, Unknown
  misc_feature (1)..( 6): Matrix.001 file - promoters70/1014885
ttaaaa

SEQ ID NO: 38129 - DNA, 7 bp, Unknown
  misc_feature (1)..( 7): Matrix.001 file - promoters70/1014885
aaaaagt

SEQ ID NO: 38130 - DNA, 10 bp, Unknown
  misc_feature (1)..( 10): Matrix.001 file - promoters70/1015030
ttttgaccta

SEQ ID NO: 38131 - DNA, 7 bp, Unknown
  misc_feature (1)..( 7): Matrix.001 file - promoters70/1015030
tctttag

SEQ ID NO: 38132 - DNA, 11 bp, Unknown
  misc_feature (1)..( 11): Matrix.001 file - promoters70/1015030
cttatctcgtg

SEQ ID NO: 38133 - DNA, 8 bp, Unknown
  misc_feature (1)..( 8): Matrix.001 file - promoters70/1015214
aaaacaaa

SEQ ID NO: 38134 - DNA, 11 bp, Unknown
  misc_feature (1)..( 11): Matrix.001 file - promoters70/1015214
tatttaaaaag

SEQ ID NO: 38135 - DNA, 10 bp, Unknown
  misc_feature (1)..( 10): Matrix.001 file - promoters70/1015214
tttaaaaaaa

SEQ ID NO: 38136 - DNA, 12 bp, Unknown
  misc_feature (1)..( 12): Matrix.001 file - promoters70/1015337
tactaaatttta

SEQ ID NO: 38137 - DNA, 8 bp, Unknown
  misc_feature (1)..( 8): Matrix.001 file - promoters70/1015337
atatgagt

SEQ ID NO: 38138 - DNA, 6 bp, Unknown
  misc_feature (1)..( 6): Matrix.001 file - promoters70/1015337
attttt

SEQ ID NO: 38139 - DNA, 10 bp, Unknown
  misc_feature (1)..( 10): Matrix.001 file - promoters70/1015337
agtaatattt

SEQ ID NO: 38140 - DNA, 9 bp, Unknown
  misc_feature (1)..( 9): Matrix.001 file - promoters70/1015475
gtttccttt

SEQ ID NO: 38141 - DNA, 11 bp, Unknown
  misc_feature (1)..( 11): Matrix.001 file - promoters70/1015524
aaacgtgaaag

SEQ ID NO: 38142 - DNA, 8 bp, Unknown
  misc_feature (1)..( 8): Matrix.001 file - promoters70/1015524
agatatac

SEQ ID NO: 38143 - DNA, 9 bp, Unknown
  misc_feature (1)..( 9): Matrix.001 file - promoters70/1015524
ttgtttctc

SEQ ID NO: 38144 - DNA, 9 bp, Unknown
  misc_feature (1)..( 9): Matrix.001 file - promoters70/1015848
gtttccttt

SEQ ID NO: 38145 - DNA, 11 bp, Unknown
  misc_feature (1)..( 11): Matrix.001 file - promoters70/1016056
aataaaataaa

SEQ ID NO: 38146 - DNA, 11 bp, Unknown
  misc_feature (1)..( 11): Matrix.001 file - promoters70/1016056
aataaaaactt

SEQ ID NO: 38147 - DNA, 13 bp, Unknown
  misc_feature (1)..( 13): Matrix.001 file - promoters70/1016176
aaaattataaatc

SEQ ID NO: 38148 - DNA, 13 bp, Unknown
  misc_feature (1)..( 13): Matrix.001 file - promoters70/1016176
gataacaaaacaa

SEQ ID NO: 38149 - DNA, 9 bp, Unknown
  misc_feature (1)..( 9): Matrix.001 file - promoters70/1016250
gttaaattg

SEQ ID NO: 38150 - DNA, 9 bp, Unknown
  misc_feature (1)..( 9): Matrix.001 file - promoters70/1016250
ttttacata

SEQ ID NO: 38151 - DNA, 9 bp, Unknown
  misc_feature (1)..( 9): Matrix.001 file - promoters70/1016250
taattttta

SEQ ID NO: 38152 - DNA, 9 bp, Unknown
  misc_feature (1)..( 9): Matrix.001 file - promoters70/1016250
atctttttt

SEQ ID NO: 38153 - DNA, 11 bp, Unknown
  misc_feature (1)..( 11): Matrix.001 file - promoters70/1016250
aacattaaaaa

SEQ ID NO: 38154 - DNA, 12 bp, Unknown
  misc_feature (1)..( 12): Matrix.001 file - promoters70/1016250
catttctttgta

SEQ ID NO: 38155 - DNA, 10 bp, Unknown
  misc_feature (1)..( 10): Matrix.001 file - promoters70/1016250
ttttgtaaat

SEQ ID NO: 38156 - DNA, 9 bp, Unknown
  misc_feature (1)..( 9): Matrix.001 file - promoters70/1016278
gggattttt

SEQ ID NO: 38157 - DNA, 7 bp, Unknown
  misc_feature (1)..( 7): Matrix.001 file - promoters70/1016278
taattat

SEQ ID NO: 38158 - DNA, 8 bp, Unknown
  misc_feature (1)..( 8): Matrix.001 file - promoters70/1016418
taatcaat

SEQ ID NO: 38159 - DNA, 9 bp, Unknown
  misc_feature (1)..( 9): Matrix.001 file - promoters70/1016418
ttatttgga

SEQ ID NO: 38160 - DNA, 7 bp, Unknown
  misc_feature (1)..( 7): Matrix.001 file - promoters70/1016418
tataaat

SEQ ID NO: 38161 - DNA, 8 bp, Unknown
  misc_feature (1)..( 8): Matrix.001 file - promoters70/1016418
attgttga

SEQ ID NO: 38162 - DNA, 6 bp, Unknown
  misc_feature (1)..( 6): Matrix.001 file - promoters70/1016418
agcaat

SEQ ID NO: 38163 - DNA, 9 bp, Unknown
  misc_feature (1)..( 9): Matrix.001 file - promoters70/1016468
ttgaatttt

SEQ ID NO: 38164 - DNA, 10 bp, Unknown
  misc_feature (1)..( 10): Matrix.001 file - promoters70/1016468
tataagaaaa

SEQ ID NO: 38165 - DNA, 8 bp, Unknown
  misc_feature (1)..( 8): Matrix.001 file - promoters70/1016468
aaataaaa

SEQ ID NO: 38166 - DNA, 9 bp, Unknown
  misc_feature (1)..( 9): Matrix.001 file - promoters70/1016468
aatgaaaaa

SEQ ID NO: 38167 - DNA, 10 bp, Unknown
  misc_feature (1)..( 10): Matrix.001 file - promoters70/1016468
aagaaaaaac

SEQ ID NO: 38168 - DNA, 14 bp, Unknown
  misc_feature (1)..( 14): Matrix.001 file - promoters70/1016468
atataattattttg

SEQ ID NO: 38169 - DNA, 10 bp, Unknown
  misc_feature (1)..( 10): Matrix.001 file - promoters70/1016468
attaactttg

SEQ ID NO: 38170 - DNA, 10 bp, Unknown
  misc_feature (1)..( 10): Matrix.001 file - promoters70/1016468
gttaattttt

SEQ ID NO: 38171 - DNA, 10 bp, Unknown
  misc_feature (1)..( 10): Matrix.001 file - promoters70/1016771
aaaatgaatt

SEQ ID NO: 38172 - DNA, 9 bp, Unknown
  misc_feature (1)..( 9): Matrix.001 file - promoters70/1016771
taaaaagat

SEQ ID NO: 38173 - DNA, 12 bp, Unknown
  misc_feature (1)..( 12): Matrix.001 file - promoters70/1016771
aaaatgcattaa

SEQ ID NO: 38174 - DNA, 14 bp, Unknown
  misc_feature (1)..( 14): Matrix.001 file - promoters70/1016886
tccacttttaaaaa

SEQ ID NO: 38175 - DNA, 8 bp, Unknown
  misc_feature (1)..( 8): Matrix.001 file - promoters70/1017358
gaaaaaaa

SEQ ID NO: 38176 - DNA, 11 bp, Unknown
  misc_feature (1)..( 11): Matrix.001 file - promoters70/1017358
acttatatata

SEQ ID NO: 38177 - DNA, 13 bp, Unknown
  misc_feature (1)..( 13): Matrix.001 file - promoters70/1017358
ccaatgatattca

SEQ ID NO: 38178 - DNA, 8 bp, Unknown
  misc_feature (1)..( 8): Matrix.001 file - promoters70/1017434
ttgaattc

SEQ ID NO: 38179 - DNA, 10 bp, Unknown
  misc_feature (1)..( 10): Matrix.001 file - promoters70/1017434
tttattttaa

SEQ ID NO: 38180 - DNA, 9 bp, Unknown
  misc_feature (1)..( 9): Matrix.001 file - promoters70/1017434
aattgattt

SEQ ID NO: 38181 - DNA, 9 bp, Unknown
  misc_feature (1)..( 9): Matrix.001 file - promoters70/1017618
ttatgaaaa

SEQ ID NO: 38182 - DNA, 7 bp, Unknown
  misc_feature (1)..( 7): Matrix.001 file - promoters70/1017770
gtttgaa

SEQ ID NO: 38183 - DNA, 7 bp, Unknown
  misc_feature (1)..( 7): Matrix.001 file - promoters70/1017770
aatattg

SEQ ID NO: 38184 - DNA, 7 bp, Unknown
  misc_feature (1)..( 7): Matrix.001 file - promoters70/1017770
gattatg

SEQ ID NO: 38185 - DNA, 7 bp, Unknown
  misc_feature (1)..( 7): Matrix.001 file - promoters70/1018052
tcagttt

SEQ ID NO: 38186 - DNA, 9 bp, Unknown
  misc_feature (1)..( 9): Matrix.001 file - promoters70/1018052
cttcaacat

SEQ ID NO: 38187 - DNA, 8 bp, Unknown
  misc_feature (1)..( 8): Matrix.001 file - promoters70/1018052
attgttgt

SEQ ID NO: 38188 - DNA, 9 bp, Unknown
  misc_feature (1)..( 9): Matrix.001 file - promoters70/1018159
agtaagaaa

SEQ ID NO: 38189 - DNA, 7 bp, Unknown
  misc_feature (1)..( 7): Matrix.001 file - promoters70/1018190
atttgtt

SEQ ID NO: 38190 - DNA, 7 bp, Unknown
  misc_feature (1)..( 7): Matrix.001 file - promoters70/1018190
ttgattg

SEQ ID NO: 38191 - DNA, 9 bp, Unknown
  misc_feature (1)..( 9): Matrix.001 file - promoters70/1018190
cttttttta

SEQ ID NO: 38192 - DNA, 9 bp, Unknown
  misc_feature (1)..( 9): Matrix.001 file - promoters70/1018276
tcttcttat

SEQ ID NO: 38193 - DNA, 13 bp, Unknown
  misc_feature (1)..( 13): Matrix.001 file - promoters70/1018391
ctagtttattgtt

SEQ ID NO: 38194 - DNA, 8 bp, Unknown
  misc_feature (1)..( 8): Matrix.001 file - promoters70/1018391
agatcatg

SEQ ID NO: 38195 - DNA, 9 bp, Unknown
  misc_feature (1)..( 9): Matrix.001 file - promoters70/1018523
tacaaaaat

SEQ ID NO: 38196 - DNA, 12 bp, Unknown
  misc_feature (1)..( 12): Matrix.001 file - promoters70/1018523
aaataataaaac

SEQ ID NO: 38197 - DNA, 6 bp, Unknown
  misc_feature (1)..( 6): Matrix.001 file - promoters70/1018523
tattta

SEQ ID NO: 38198 - DNA, 14 bp, Unknown
  misc_feature (1)..( 14): Matrix.001 file - promoters70/1018523
aaaaaaaagtataa

SEQ ID NO: 38199 - DNA, 8 bp, Unknown
  misc_feature (1)..( 8): Matrix.001 file - promoters70/1018523
taaaaatt

SEQ ID NO: 38200 - DNA, 11 bp, Unknown
  misc_feature (1)..( 11): Matrix.001 file - promoters70/1018523
agttaaaaaat

SEQ ID NO: 38201 - DNA, 14 bp, Unknown
  misc_feature (1)..( 14): Matrix.001 file - promoters70/1018523
aaaacaaatttctg

SEQ ID NO: 38202 - DNA, 11 bp, Unknown
  misc_feature (1)..( 11): Matrix.001 file - promoters70/1018523
agattattatt

SEQ ID NO: 38203 - DNA, 12 bp, Unknown
  misc_feature (1)..( 12): Matrix.001 file - promoters70/1018529
tcataattaata

SEQ ID NO: 38204 - DNA, 7 bp, Unknown
  misc_feature (1)..( 7): Matrix.001 file - promoters70/1018529
aataaaa

SEQ ID NO: 38205 - DNA, 9 bp, Unknown
  misc_feature (1)..( 9): Matrix.001 file - promoters70/1018536
tagagaaat

SEQ ID NO: 38206 - DNA, 8 bp, Unknown
  misc_feature (1)..( 8): Matrix.001 file - promoters70/1018536
atttgtta

SEQ ID NO: 38207 - DNA, 8 bp, Unknown
  misc_feature (1)..( 8): Matrix.001 file - promoters70/1018536
attttaaa

SEQ ID NO: 38208 - DNA, 9 bp, Unknown
  misc_feature (1)..( 9): Matrix.001 file - promoters70/1018536
ttttgatga

SEQ ID NO: 38209 - DNA, 11 bp, Unknown
  misc_feature (1)..( 11): Matrix.001 file - promoters70/1018536
attttcataaa

SEQ ID NO: 38210 - DNA, 17 bp, Unknown
  misc_feature (1)..( 17): Matrix.001 file - promoters70/1018536
taaatgttaaaattatt

SEQ ID NO: 38211 - DNA, 13 bp, Unknown
  misc_feature (1)..( 13): Matrix.001 file - promoters70/1018536
taatccaacggca

SEQ ID NO: 38212 - DNA, 6 bp, Unknown
  misc_feature (1)..( 6): Matrix.001 file - promoters70/1018536
tatata

SEQ ID NO: 38213 - DNA, 10 bp, Unknown
  misc_feature (1)..( 10): Matrix.001 file - promoters70/1018536
tataaacaaa

SEQ ID NO: 38214 - DNA, 8 bp, Unknown
  misc_feature (1)..( 8): Matrix.001 file - promoters70/1018536
aaattctc

SEQ ID NO: 38215 - DNA, 11 bp, Unknown
  misc_feature (1)..( 11): Matrix.001 file - promoters70/1018536
tttataagtat

SEQ ID NO: 38216 - DNA, 8 bp, Unknown
  misc_feature (1)..( 8): Matrix.001 file - promoters70/1018536
tgaatgta

SEQ ID NO: 38217 - DNA, 10 bp, Unknown
  misc_feature (1)..( 10): Matrix.001 file - promoters70/1018536
atttaaattg

SEQ ID NO: 38218 - DNA, 10 bp, Unknown
  misc_feature (1)..( 10): Matrix.001 file - promoters70/1018755
actaaacaaa

SEQ ID NO: 38219 - DNA, 9 bp, Unknown
  misc_feature (1)..( 9): Matrix.001 file - promoters70/1018755
acaatcacg

SEQ ID NO: 38220 - DNA, 8 bp, Unknown
  misc_feature (1)..( 8): Matrix.001 file - promoters70/1018770
caaagaaa

SEQ ID NO: 38221 - DNA, 10 bp, Unknown
  misc_feature (1)..( 10): Matrix.001 file - promoters70/1018956
ggaaaagaaa

SEQ ID NO: 38222 - DNA, 7 bp, Unknown
  misc_feature (1)..( 7): Matrix.001 file - promoters70/1018956
aaaagaa

SEQ ID NO: 38223 - DNA, 5 bp, Unknown
  misc_feature (1)..( 5): Matrix.001 file - promoters70/1018973
ttata

SEQ ID NO: 38224 - DNA, 7 bp, Unknown
  misc_feature (1)..( 7): Matrix.001 file - promoters70/1019257
aaaaaag

SEQ ID NO: 38225 - DNA, 9 bp, Unknown
  misc_feature (1)..( 9): Matrix.001 file - promoters70/1019257
attataaaa

SEQ ID NO: 38226 - DNA, 9 bp, Unknown
  misc_feature (1)..( 9): Matrix.001 file - promoters70/1019508
agatggaaa

SEQ ID NO: 38227 - DNA, 6 bp, Unknown
  misc_feature (1)..( 6): Matrix.001 file - promoters70/1019537
aaaaca

SEQ ID NO: 38228 - DNA, 11 bp, Unknown
  misc_feature (1)..( 11): Matrix.001 file - promoters70/1019537
tttgttttcta

SEQ ID NO: 38229 - DNA, 8 bp, Unknown
  misc_feature (1)..( 8): Matrix.001 file - promoters70/1019537
tatataaa

SEQ ID NO: 38230 - DNA, 11 bp, Unknown
  misc_feature (1)..( 11): Matrix.001 file - promoters70/1019537
atatatgtaaa

SEQ ID NO: 38231 - DNA, 9 bp, Unknown
  misc_feature (1)..( 9): Matrix.001 file - promoters70/1019734
tcaatcata

SEQ ID NO: 38232 - DNA, 9 bp, Unknown
  misc_feature (1)..( 9): Matrix.001 file - promoters70/1019734
taatttcat

SEQ ID NO: 38233 - DNA, 8 bp, Unknown
  misc_feature (1)..( 8): Matrix.001 file - promoters70/1019928
atttgtta

SEQ ID NO: 38234 - DNA, 7 bp, Unknown
  misc_feature (1)..( 7): Matrix.001 file - promoters70/1019928
ttttaat

SEQ ID NO: 38235 - DNA, 8 bp, Unknown
  misc_feature (1)..( 8): Matrix.001 file - promoters70/1019928
aaattctc

SEQ ID NO: 38236 - DNA, 11 bp, Unknown
  misc_feature (1)..( 11): Matrix.001 file - promoters70/1019928
tttataactat

SEQ ID NO: 38237 - DNA, 10 bp, Unknown
  misc_feature (1)..( 10): Matrix.001 file - promoters70/1020023
tcctatatat

SEQ ID NO: 38238 - DNA, 8 bp, Unknown
  misc_feature (1)..( 8): Matrix.001 file - promoters70/1020223
atcatatt

SEQ ID NO: 38239 - DNA, 9 bp, Unknown
  misc_feature (1)..( 9): Matrix.001 file - promoters70/1020223
tttgtagtg

SEQ ID NO: 38240 - DNA, 8 bp, Unknown
  misc_feature (1)..( 8): Matrix.001 file - promoters70/1020223
tgatttgt

SEQ ID NO: 38241 - DNA, 7 bp, Unknown
  misc_feature (1)..( 7): Matrix.001 file - promoters70/1020223
gtttgtt

SEQ ID NO: 38242 - DNA, 8 bp, Unknown
  misc_feature (1)..( 8): Matrix.001 file - promoters70/1020223
gatttgtt

SEQ ID NO: 38243 - DNA, 8 bp, Unknown
  misc_feature (1)..( 8): Matrix.001 file - promoters70/1020265
atgactta

SEQ ID NO: 38244 - DNA, 9 bp, Unknown
  misc_feature (1)..( 9): Matrix.001 file - promoters70/1020313
gtgtatata

SEQ ID NO: 38245 - DNA, 8 bp, Unknown
  misc_feature (1)..( 8): Matrix.001 file - promoters70/1020430
acaaaaaa

SEQ ID NO: 38246 - DNA, 11 bp, Unknown
  misc_feature (1)..( 11): Matrix.001 file - promoters70/1020430
aattaaaataa

SEQ ID NO: 38247 - DNA, 8 bp, Unknown
  misc_feature (1)..( 8): Matrix.001 file - promoters70/1020430
cttaaata

SEQ ID NO: 38248 - DNA, 8 bp, Unknown
  misc_feature (1)..( 8): Matrix.001 file - promoters70/1020543
gaaaaaaa

SEQ ID NO: 38249 - DNA, 12 bp, Unknown
  misc_feature (1)..( 12): Matrix.001 file - promoters70/1020543
aaaaaagaagaa

SEQ ID NO: 38250 - DNA, 11 bp, Unknown
  misc_feature (1)..( 11): Matrix.001 file - promoters70/1020646
aataatttgta

SEQ ID NO: 38251 - DNA, 10 bp, Unknown
  misc_feature (1)..( 10): Matrix.001 file - promoters70/1020666
tggtaaataa

SEQ ID NO: 38252 - DNA, 13 bp, Unknown
  misc_feature (1)..( 13): Matrix.001 file - promoters70/1020666
gaaacaaacctga

SEQ ID NO: 38253 - DNA, 11 bp, Unknown
  misc_feature (1)..( 11): Matrix.001 file - promoters70/1020701
tgtttgaacat

SEQ ID NO: 38254 - DNA, 8 bp, Unknown
  misc_feature (1)..( 8): Matrix.001 file - promoters70/1020701
caacgaaa

SEQ ID NO: 38255 - DNA, 10 bp, Unknown
  misc_feature (1)..( 10): Matrix.001 file - promoters70/1020701
aaatcatatt

SEQ ID NO: 38256 - DNA, 9 bp, Unknown
  misc_feature (1)..( 9): Matrix.001 file - promoters70/1020701
ataagaaaa

SEQ ID NO: 38257 - DNA, 9 bp, Unknown
  misc_feature (1)..( 9): Matrix.001 file - promoters70/1020701
tcaatcata

SEQ ID NO: 38258 - DNA, 8 bp, Unknown
  misc_feature (1)..( 8): Matrix.001 file - promoters70/1020701
taatttca

SEQ ID NO: 38259 - DNA, 9 bp, Unknown
  misc_feature (1)..( 9): Matrix.001 file - promoters70/1020701
ataataaaa

SEQ ID NO: 38260 - DNA, 8 bp, Unknown
  misc_feature (1)..( 8): Matrix.001 file - promoters70/1020701
aaatatct

SEQ ID NO: 38261 - DNA, 7 bp, Unknown
  misc_feature (1)..( 7): Matrix.001 file - promoters70/1020701
tatcata

SEQ ID NO: 38262 - DNA, 8 bp, Unknown
  misc_feature (1)..( 8): Matrix.001 file - promoters70/1020701
taataaag

SEQ ID NO: 38263 - DNA, 12 bp, Unknown
  misc_feature (1)..( 12): Matrix.001 file - promoters70/1020701
ataaattaatgt

SEQ ID NO: 38264 - DNA, 10 bp, Unknown
  misc_feature (1)..( 10): Matrix.001 file - promoters70/1020786
atttatttcg

SEQ ID NO: 38265 - DNA, 10 bp, Unknown
  misc_feature (1)..( 10): Matrix.001 file - promoters70/1020786
acaaactaat

SEQ ID NO: 38266 - DNA, 6 bp, Unknown
  misc_feature (1)..( 6): Matrix.001 file - promoters70/1020786
tataaa

SEQ ID NO: 38267 - DNA, 10 bp, Unknown
  misc_feature (1)..( 10): Matrix.001 file - promoters70/1020786
ttaagatctt

SEQ ID NO: 38268 - DNA, 10 bp, Unknown
  misc_feature (1)..( 10): Matrix.001 file - promoters70/1020786
gcaaaaaaca

SEQ ID NO: 38269 - DNA, 14 bp, Unknown
  misc_feature (1)..( 14): Matrix.001 file - promoters70/1020786
aacaacaaaaaaag

SEQ ID NO: 38270 - DNA, 10 bp, Unknown
  misc_feature (1)..( 10): Matrix.001 file - promoters70/1020786
aaatcgaaga

SEQ ID NO: 38271 - DNA, 10 bp, Unknown
  misc_feature (1)..( 10): Matrix.001 file - promoters70/1020786
atttactctc

SEQ ID NO: 38272 - DNA, 8 bp, Unknown
  misc_feature (1)..( 8): Matrix.001 file - promoters70/1020786
cctatata

SEQ ID NO: 38273 - DNA, 9 bp, Unknown
  misc_feature (1)..( 9): Matrix.001 file - promoters70/1020786
caacaaaaa

SEQ ID NO: 38274 - DNA, 7 bp, Unknown
  misc_feature (1)..( 7): Matrix.001 file - promoters70/1020786
agaaatg

SEQ ID NO: 38275 - DNA, 13 bp, Unknown
  misc_feature (1)..( 13): Matrix.001 file - promoters70/1020818
ataatttttcctt

SEQ ID NO: 38276 - DNA, 11 bp, Unknown
  misc_feature (1)..( 11): Matrix.001 file - promoters70/1020818
caataattttt

SEQ ID NO: 38277 - DNA, 10 bp, Unknown
  misc_feature (1)..( 10): Matrix.001 file - promoters70/1020818
taaaaaagaa

SEQ ID NO: 38278 - DNA, 11 bp, Unknown
  misc_feature (1)..( 11): Matrix.001 file - promoters70/1020863
ggaacaattaa

SEQ ID NO: 38279 - DNA, 8 bp, Unknown
  misc_feature (1)..( 8): Matrix.001 file - promoters70/1020863
taaacaaa

SEQ ID NO: 38280 - DNA, 12 bp, Unknown
  misc_feature (1)..( 12): Matrix.001 file - promoters70/1020863
ttttatttctca

SEQ ID NO: 38281 - DNA, 8 bp, Unknown
  misc_feature (1)..( 8): Matrix.001 file - promoters70/1020940
taaaattg

SEQ ID NO: 38282 - DNA, 8 bp, Unknown
  misc_feature (1)..( 8): Matrix.001 file - promoters70/1020940
aaaataga

SEQ ID NO: 38283 - DNA, 8 bp, Unknown
  misc_feature (1)..( 8): Matrix.001 file - promoters70/1020940
aaacaaag

SEQ ID NO: 38284 - DNA, 7 bp, Unknown
  misc_feature (1)..( 7): Matrix.001 file - promoters70/1020940
aaattat

SEQ ID NO: 38285 - DNA, 10 bp, Unknown
  misc_feature (1)..( 10): Matrix.001 file - promoters70/1020940
tatataaacc

SEQ ID NO: 38286 - DNA, 9 bp, Unknown
  misc_feature (1)..( 9): Matrix.001 file - promoters70/1021079
ttgaaacac

SEQ ID NO: 38287 - DNA, 11 bp, Unknown
  misc_feature (1)..( 11): Matrix.001 file - promoters70/1021079
aggaaaacata

SEQ ID NO: 38288 - DNA, 9 bp, Unknown
  misc_feature (1)..( 9): Matrix.001 file - promoters70/1021079
aaaattttg

SEQ ID NO: 38289 - DNA, 8 bp, Unknown
  misc_feature (1)..( 8): Matrix.001 file - promoters70/1021079
agtaaaat

SEQ ID NO: 38290 - DNA, 7 bp, Unknown
  misc_feature (1)..( 7): Matrix.001 file - promoters70/1021079
taaaaat

SEQ ID NO: 38291 - DNA, 9 bp, Unknown
  misc_feature (1)..( 9): Matrix.001 file - promoters70/1021079
tttaatata

SEQ ID NO: 38292 - DNA, 8 bp, Unknown
  misc_feature (1)..( 8): Matrix.001 file - promoters70/1021079
taaaacaa

SEQ ID NO: 38293 - DNA, 11 bp, Unknown
  misc_feature (1)..( 11): Matrix.001 file - promoters70/1021079
cttaaatatca

SEQ ID NO: 38294 - DNA, 9 bp, Unknown
  misc_feature (1)..( 9): Matrix.001 file - promoters70/1021079
tgaatgatt

SEQ ID NO: 38295 - DNA, 6 bp, Unknown
  misc_feature (1)..( 6): Matrix.001 file - promoters70/1021079
tttagt

SEQ ID NO: 38296 - DNA, 9 bp, Unknown
  misc_feature (1)..( 9): Matrix.001 file - promoters70/1021104
attttgacc

SEQ ID NO: 38297 - DNA, 8 bp, Unknown
  misc_feature (1)..( 8): Matrix.001 file - promoters70/1021104
cattcata

SEQ ID NO: 38298 - DNA, 7 bp, Unknown
  misc_feature (1)..( 7): Matrix.001 file - promoters70/1021104
ttcttct

SEQ ID NO: 38299 - DNA, 10 bp, Unknown
  misc_feature (1)..( 10): Matrix.001 file - promoters70/1021104
tcttcattta

SEQ ID NO: 38300 - DNA, 6 bp, Unknown
  misc_feature (1)..( 6): Matrix.001 file - promoters70/1021218
aaagaa

SEQ ID NO: 38301 - DNA, 8 bp, Unknown
  misc_feature (1)..( 8): Matrix.001 file - promoters70/1021218
ttgaattt

SEQ ID NO: 38302 - DNA, 10 bp, Unknown
  misc_feature (1)..( 10): Matrix.001 file - promoters70/1021218
atttcttaga

SEQ ID NO: 38303 - DNA, 9 bp, Unknown
  misc_feature (1)..( 9): Matrix.001 file - promoters70/1021218
gtaagaaaa

SEQ ID NO: 38304 - DNA, 8 bp, Unknown
  misc_feature (1)..( 8): Matrix.001 file - promoters70/1021218
aaagaaaa

SEQ ID NO: 38305 - DNA, 9 bp, Unknown
  misc_feature (1)..( 9): Matrix.001 file - promoters70/1021218
gtttaaacg

SEQ ID NO: 38306 - DNA, 9 bp, Unknown
  misc_feature (1)..( 9): Matrix.001 file - promoters70/1021218
attcgaaaa

SEQ ID NO: 38307 - DNA, 8 bp, Unknown
  misc_feature (1)..( 8): Matrix.001 file - promoters70/1021218
tttcctat

SEQ ID NO: 38308 - DNA, 12 bp, Unknown
  misc_feature (1)..( 12): Matrix.001 file - promoters70/1021218
agtaaataaatg

SEQ ID NO: 38309 - DNA, 12 bp, Unknown
  misc_feature (1)..( 12): Matrix.001 file - promoters70/1021218
aaaccaaacatg

SEQ ID NO: 38310 - DNA, 8 bp, Unknown
  misc_feature (1)..( 8): Matrix.001 file - promoters70/1021218
taaagatg

SEQ ID NO: 38311 - DNA, 7 bp, Unknown
  misc_feature (1)..( 7): Matrix.001 file - promoters70/1021438
aaaagta

SEQ ID NO: 38312 - DNA, 8 bp, Unknown
  misc_feature (1)..( 8): Matrix.001 file - promoters70/1021445
gtttctat

SEQ ID NO: 38313 - DNA, 9 bp, Unknown
  misc_feature (1)..( 9): Matrix.001 file - promoters70/1021445
aatcaaaaa

SEQ ID NO: 38314 - DNA, 9 bp, Unknown
  misc_feature (1)..( 9): Matrix.001 file - promoters70/1021445
taaaaaaaa

SEQ ID NO: 38315 - DNA, 12 bp, Unknown
  misc_feature (1)..( 12): Matrix.001 file - promoters70/1021445
taaaaaacaaat

SEQ ID NO: 38316 - DNA, 6 bp, Unknown
  misc_feature (1)..( 6): Matrix.001 file - promoters70/1021445
tggtat

SEQ ID NO: 38317 - DNA, 7 bp, Unknown
  misc_feature (1)..( 7): Matrix.001 file - promoters70/1021445
attaaag

SEQ ID NO: 38318 - DNA, 7 bp, Unknown
  misc_feature (1)..( 7): Matrix.001 file - promoters70/1021445
agaagat

SEQ ID NO: 38319 - DNA, 17 bp, Unknown
  misc_feature (1)..( 17): Matrix.001 file - promoters70/1021445
ctttataaacgctgcgt

SEQ ID NO: 38320 - DNA, 8 bp, Unknown
  misc_feature (1)..( 8): Matrix.001 file - promoters70/1021445
attttgtg

SEQ ID NO: 38321 - DNA, 16 bp, Unknown
  misc_feature (1)..( 16): Matrix.001 file - promoters70/1021445
tcttcataatcccttc

SEQ ID NO: 38322 - DNA, 9 bp, Unknown
  misc_feature (1)..( 9): Matrix.001 file - promoters70/1021549
gtatataaa

SEQ ID NO: 38323 - DNA, 9 bp, Unknown
  misc_feature (1)..( 9): Matrix.001 file - promoters70/1021549
aatagttta

SEQ ID NO: 38324 - DNA, 10 bp, Unknown
  misc_feature (1)..( 10): Matrix.001 file - promoters70/1021549
agttatatat

SEQ ID NO: 38325 - DNA, 7 bp, Unknown
  misc_feature (1)..( 7): Matrix.001 file - promoters70/1021862
aaatcgt

SEQ ID NO: 38326 - DNA, 10 bp, Unknown
  misc_feature (1)..( 10): Matrix.001 file - promoters70/1021862
catttaagtt

SEQ ID NO: 38327 - DNA, 9 bp, Unknown
  misc_feature (1)..( 9): Matrix.001 file - promoters70/1021862
aaattttca

SEQ ID NO: 38328 - DNA, 8 bp, Unknown
  misc_feature (1)..( 8): Matrix.001 file - promoters70/1021862
aaacttcc

SEQ ID NO: 38329 - DNA, 6 bp, Unknown
  misc_feature (1)..( 6): Matrix.001 file - promoters70/1021862
taaaat

SEQ ID NO: 38330 - DNA, 9 bp, Unknown
  misc_feature (1)..( 9): Matrix.001 file - promoters70/1021870
aaaatctgg

SEQ ID NO: 38331 - DNA, 8 bp, Unknown
  misc_feature (1)..( 8): Matrix.001 file - promoters70/1021870
ccataatt

SEQ ID NO: 38332 - DNA, 9 bp, Unknown
  misc_feature (1)..( 9): Matrix.001 file - promoters70/1021952
tcattaaat

SEQ ID NO: 38333 - DNA, 10 bp, Unknown
  misc_feature (1)..( 10): Matrix.001 file - promoters70/1021968
taaaataata

SEQ ID NO: 38334 - DNA, 10 bp, Unknown
  misc_feature (1)..( 10): Matrix.001 file - promoters70/1021968
aaataacaaa

SEQ ID NO: 38335 - DNA, 9 bp, Unknown
  misc_feature (1)..( 9): Matrix.001 file - promoters70/1021968
aaataattc

SEQ ID NO: 38336 - DNA, 8 bp, Unknown
  misc_feature (1)..( 8): Matrix.001 file - promoters70/1021968
gtattttt

SEQ ID NO: 38337 - DNA, 9 bp, Unknown
  misc_feature (1)..( 9): Matrix.001 file - promoters70/1021968
cttaattca

SEQ ID NO: 38338 - DNA, 9 bp, Unknown
  misc_feature (1)..( 9): Matrix.001 file - promoters70/1021968
ataaaaaat

SEQ ID NO: 38339 - DNA, 9 bp, Unknown
  misc_feature (1)..( 9): Matrix.001 file - promoters70/1021987
atttgattt

SEQ ID NO: 38340 - DNA, 7 bp, Unknown
  misc_feature (1)..( 7): Matrix.001 file - promoters70/1022245
aaaatca

SEQ ID NO: 38341 - DNA, 9 bp, Unknown
  misc_feature (1)..( 9): Matrix.001 file - promoters70/1022296
cagatggaa

SEQ ID NO: 38342 - DNA, 7 bp, Unknown
  misc_feature (1)..( 7): Matrix.001 file - promoters70/1022296
tatttat

SEQ ID NO: 38343 - DNA, 9 bp, Unknown
  misc_feature (1)..( 9): Matrix.001 file - promoters70/1022296
ttgtaattt

SEQ ID NO: 38344 - DNA, 7 bp, Unknown
  misc_feature (1)..( 7): Matrix.001 file - promoters70/1022324
aaaaaag

SEQ ID NO: 38345 - DNA, 8 bp, Unknown
  misc_feature (1)..( 8): Matrix.001 file - promoters70/1022364
tttgattg

SEQ ID NO: 38346 - DNA, 10 bp, Unknown
  misc_feature (1)..( 10): Matrix.001 file - promoters70/1022662
tatttgtata

SEQ ID NO: 38347 - DNA, 7 bp, Unknown
  misc_feature (1)..( 7): Matrix.001 file - promoters70/1022662
aacttta

SEQ ID NO: 38348 - DNA, 17 bp, Unknown
  misc_feature (1)..( 17): Matrix.001 file - promoters70/1022748
tgtaaagaaaaaagttt

SEQ ID NO: 38349 - DNA, 7 bp, Unknown
  misc_feature (1)..( 7): Matrix.001 file - promoters70/1022764
tttatat

SEQ ID NO: 38350 - DNA, 8 bp, Unknown
  misc_feature (1)..( 8): Matrix.001 file - promoters70/1022932
catcagct

SEQ ID NO: 38351 - DNA, 8 bp, Unknown
  misc_feature (1)..( 8): Matrix.001 file - promoters70/1022932
gttatgtt

SEQ ID NO: 38352 - DNA, 8 bp, Unknown
  misc_feature (1)..( 8): Matrix.001 file - promoters70/1022932
ttactttt

SEQ ID NO: 38353 - DNA, 7 bp, Unknown
  misc_feature (1)..( 7): Matrix.001 file - promoters70/1022932
ttacttt

SEQ ID NO: 38354 - DNA, 9 bp, Unknown
  misc_feature (1)..( 9): Matrix.001 file - promoters70/1022932
tacaataaa

SEQ ID NO: 38355 - DNA, 7 bp, Unknown
  misc_feature (1)..( 7): Matrix.001 file - promoters70/1022983
gaatcaa

SEQ ID NO: 38356 - DNA, 8 bp, Unknown
  misc_feature (1)..( 8): Matrix.001 file - promoters70/1022983
atttctta

SEQ ID NO: 38357 - DNA, 4 bp, Unknown
  misc_feature (1)..( 4): Matrix.001 file - promoters70/1022983
attt

SEQ ID NO: 38358 - DNA, 10 bp, Unknown
  misc_feature (1)..( 10): Matrix.001 file - promoters70/1022983
tattttatta

SEQ ID NO: 38359 - DNA, 9 bp, Unknown
  misc_feature (1)..( 9): Matrix.001 file - promoters70/1023237
ttgttgttt

SEQ ID NO: 38360 - DNA, 11 bp, Unknown
  misc_feature (1)..( 11): Matrix.001 file - promoters70/1023237
atcttcatgtt

SEQ ID NO: 38361 - DNA, 11 bp, Unknown
  misc_feature (1)..( 11): Matrix.001 file - promoters70/1023453
gacagataatg

SEQ ID NO: 38362 - DNA, 14 bp, Unknown
  misc_feature (1)..( 14): Matrix.001 file - promoters70/1023453
gaagaaaaaaaaga

SEQ ID NO: 38363 - DNA, 11 bp, Unknown
  misc_feature (1)..( 11): Matrix.001 file - promoters70/1023453
gaaagaaaaaa

SEQ ID NO: 38364 - DNA, 6 bp, Unknown
  misc_feature (1)..( 6): Matrix.001 file - promoters70/1023490
aaaaaa

SEQ ID NO: 38365 - DNA, 11 bp, Unknown
  misc_feature (1)..( 11): Matrix.001 file - promoters70/1023490
agtcaaacaaa

SEQ ID NO: 38366 - DNA, 8 bp, Unknown
  misc_feature (1)..( 8): Matrix.001 file - promoters70/1023634
ttttgaat

SEQ ID NO: 38367 - DNA, 11 bp, Unknown
  misc_feature (1)..( 11): Matrix.001 file - promoters70/1023634
aaaatgtgaaa

SEQ ID NO: 38368 - DNA, 8 bp, Unknown
  misc_feature (1)..( 8): Matrix.001 file - promoters70/1023634
agcccaaa

SEQ ID NO: 38369 - DNA, 8 bp, Unknown
  misc_feature (1)..( 8): Matrix.001 file - promoters70/1023634
tgtttaga

SEQ ID NO: 38370 - DNA, 9 bp, Unknown
  misc_feature (1)..( 9): Matrix.001 file - promoters70/1023698
aagcaaaaa

SEQ ID NO: 38371 - DNA, 8 bp, Unknown
  misc_feature (1)..( 8): Matrix.001 file - promoters70/1023698
ctttattt

SEQ ID NO: 38372 - DNA, 7 bp, Unknown
  misc_feature (1)..( 7): Matrix.001 file - promoters70/1023698
atttttt

SEQ ID NO: 38373 - DNA, 8 bp, Unknown
  misc_feature (1)..( 8): Matrix.001 file - promoters70/1023698
aaaaataa

SEQ ID NO: 38374 - DNA, 9 bp, Unknown
  misc_feature (1)..( 9): Matrix.001 file - promoters70/1023698
tcttaattt

SEQ ID NO: 38375 - DNA, 10 bp, Unknown
  misc_feature (1)..( 10): Matrix.001 file - promoters70/1023698
atatttagtt

SEQ ID NO: 38376 - DNA, 11 bp, Unknown
  misc_feature (1)..( 11): Matrix.001 file - promoters70/1023782
aaaataaaata

SEQ ID NO: 38377 - DNA, 10 bp, Unknown
  misc_feature (1)..( 10): Matrix.001 file - promoters70/1023782
ggaaatgaaa

SEQ ID NO: 38378 - DNA, 10 bp, Unknown
  misc_feature (1)..( 10): Matrix.001 file - promoters70/1023963
ttctacttta

SEQ ID NO: 38379 - DNA, 8 bp, Unknown
  misc_feature (1)..( 8): Matrix.001 file - promoters70/1023963
atttcgta

SEQ ID NO: 38380 - DNA, 8 bp, Unknown
  misc_feature (1)..( 8): Matrix.001 file - promoters70/1023963
aaatgtag

SEQ ID NO: 38381 - DNA, 8 bp, Unknown
  misc_feature (1)..( 8): Matrix.001 file - promoters70/1023963
atgtaaat

SEQ ID NO: 38382 - DNA, 7 bp, Unknown
  misc_feature (1)..( 7): Matrix.001 file - promoters70/1023963
ttttgta

SEQ ID NO: 38383 - DNA, 7 bp, Unknown
  misc_feature (1)..( 7): Matrix.001 file - promoters70/1023963
aaaaaat

SEQ ID NO: 38384 - DNA, 9 bp, Unknown
  misc_feature (1)..( 9): Matrix.001 file - promoters70/1024126
gaaaaagaa

SEQ ID NO: 38385 - DNA, 7 bp, Unknown
  misc_feature (1)..( 7): Matrix.001 file - promoters70/1024126
aaaccaa

SEQ ID NO: 38386 - DNA, 9 bp, Unknown
  misc_feature (1)..( 9): Matrix.001 file - promoters70/1024126
acaataaca

SEQ ID NO: 38387 - DNA, 8 bp, Unknown
  misc_feature (1)..( 8): Matrix.001 file - promoters70/1024189
aaaaaaga

SEQ ID NO: 38388 - DNA, 8 bp, Unknown
  misc_feature (1)..( 8): Matrix.001 file - promoters70/1024189
ttttgtca

SEQ ID NO: 38389 - DNA, 8 bp, Unknown
  misc_feature (1)..( 8): Matrix.001 file - promoters70/1024189
aaatttat

SEQ ID NO: 38390 - DNA, 8 bp, Unknown
  misc_feature (1)..( 8): Matrix.001 file - promoters70/1024189
aatcaaaa

SEQ ID NO: 38391 - DNA, 11 bp, Unknown
  misc_feature (1)..( 11): Matrix.001 file - promoters70/1024189
aaaaacacgaa

SEQ ID NO: 38392 - DNA, 7 bp, Unknown
  misc_feature (1)..( 7): Matrix.001 file - promoters70/1024189
actttac

SEQ ID NO: 38393 - DNA, 8 bp, Unknown
  misc_feature (1)..( 8): Matrix.001 file - promoters70/1024189
atataata

SEQ ID NO: 38394 - DNA, 9 bp, Unknown
  misc_feature (1)..( 9): Matrix.001 file - promoters70/1024189
tttattgat

SEQ ID NO: 38395 - DNA, 12 bp, Unknown
  misc_feature (1)..( 12): Matrix.001 file - promoters70/1024189
ataaaatcaata

SEQ ID NO: 38396 - DNA, 10 bp, Unknown
  misc_feature (1)..( 10): Matrix.001 file - promoters70/1024189
ctaacaaaaa

SEQ ID NO: 38397 - DNA, 11 bp, Unknown
  misc_feature (1)..( 11): Matrix.001 file - promoters70/1024199
catttaaatga

SEQ ID NO: 38398 - DNA, 10 bp, Unknown
  misc_feature (1)..( 10): Matrix.001 file - promoters70/1024199
ttataaaccc

SEQ ID NO: 38399 - DNA, 12 bp, Unknown
  misc_feature (1)..( 12): Matrix.001 file - promoters70/1024199
ggcctatataaa

SEQ ID NO: 38400 - DNA, 9 bp, Unknown
  misc_feature (1)..( 9): Matrix.001 file - promoters70/1024203
agaaaagac

SEQ ID NO: 38401 - DNA, 7 bp, Unknown
  misc_feature (1)..( 7): Matrix.001 file - promoters70/1024203
acaagcg

SEQ ID NO: 38402 - DNA, 7 bp, Unknown
  misc_feature (1)..( 7): Matrix.001 file - promoters70/1024203
tcgatga

SEQ ID NO: 38403 - DNA, 13 bp, Unknown
  misc_feature (1)..( 13): Matrix.001 file - promoters70/1024234
ttgattcaaaatt

SEQ ID NO: 38404 - DNA, 11 bp, Unknown
  misc_feature (1)..( 11): Matrix.001 file - promoters70/1024236
agcacaagaat

SEQ ID NO: 38405 - DNA, 11 bp, Unknown
  misc_feature (1)..( 11): Matrix.001 file - promoters70/1024236
aaaaaagtttt

SEQ ID NO: 38406 - DNA, 13 bp, Unknown
  misc_feature (1)..( 13): Matrix.001 file - promoters70/1024236
cattactggaaag

SEQ ID NO: 38407 - DNA, 9 bp, Unknown
  misc_feature (1)..( 9): Matrix.001 file - promoters70/1024257
atctctaaa

SEQ ID NO: 38408 - DNA, 7 bp, Unknown
  misc_feature (1)..( 7): Matrix.001 file - promoters70/1024367
attaact

SEQ ID NO: 38409 - DNA, 8 bp, Unknown
  misc_feature (1)..( 8): Matrix.001 file - promoters70/1024367
tttatata

SEQ ID NO: 38410 - DNA, 11 bp, Unknown
  misc_feature (1)..( 11): Matrix.001 file - promoters70/1024367
ctaaaaaaaac

SEQ ID NO: 38411 - DNA, 9 bp, Unknown
  misc_feature (1)..( 9): Matrix.001 file - promoters70/1024367
tttcccaat

SEQ ID NO: 38412 - DNA, 7 bp, Unknown
  misc_feature (1)..( 7): Matrix.001 file - promoters70/1024367
aatttta

SEQ ID NO: 38413 - DNA, 9 bp, Unknown
  misc_feature (1)..( 9): Matrix.001 file - promoters70/1024367
agaaacaaa

SEQ ID NO: 38414 - DNA, 8 bp, Unknown
  misc_feature (1)..( 8): Matrix.001 file - promoters70/1024499
tttgtaat

SEQ ID NO: 38415 - DNA, 12 bp, Unknown
  misc_feature (1)..( 12): Matrix.001 file - promoters70/1024499
taaaatattttt

SEQ ID NO: 38416 - DNA, 7 bp, Unknown
  misc_feature (1)..( 7): Matrix.001 file - promoters70/1024499
tttattt

SEQ ID NO: 38417 - DNA, 7 bp, Unknown
  misc_feature (1)..( 7): Matrix.001 file - promoters70/1024499
cataaac

SEQ ID NO: 38418 - DNA, 11 bp, Unknown
  misc_feature (1)..( 11): Matrix.001 file - promoters70/1024499
tatatataaat

SEQ ID NO: 38419 - DNA, 10 bp, Unknown
  misc_feature (1)..( 10): Matrix.001 file - promoters70/1024499
ttaattttac

SEQ ID NO: 38420 - DNA, 9 bp, Unknown
  misc_feature (1)..( 9): Matrix.001 file - promoters70/1024756
ataattttt

SEQ ID NO: 38421 - DNA, 11 bp, Unknown
  misc_feature (1)..( 11): Matrix.001 file - promoters70/1024756
taacagtcaaa

SEQ ID NO: 38422 - DNA, 9 bp, Unknown
  misc_feature (1)..( 9): Matrix.001 file - promoters70/1024756
ttaccaaag

SEQ ID NO: 38423 - DNA, 11 bp, Unknown
  misc_feature (1)..( 11): Matrix.001 file - promoters70/1024853
agaattgacat

SEQ ID NO: 38424 - DNA, 8 bp, Unknown
  misc_feature (1)..( 8): Matrix.001 file - promoters70/1024853
caaaaaaa

SEQ ID NO: 38425 - DNA, 15 bp, Unknown
  misc_feature (1)..( 15): Matrix.001 file - promoters70/1024889
actatcaattaaggt

SEQ ID NO: 38426 - DNA, 11 bp, Unknown
  misc_feature (1)..( 11): Matrix.001 file - promoters70/1024889
ataattttatt

SEQ ID NO: 38427 - DNA, 6 bp, Unknown
  misc_feature (1)..( 6): Matrix.001 file - promoters70/1024889
attttt

SEQ ID NO: 38428 - DNA, 12 bp, Unknown
  misc_feature (1)..( 12): Matrix.001 file - promoters70/1024889
tagattttgttt

SEQ ID NO: 38429 - DNA, 18 bp, Unknown
  misc_feature (1)..( 18): Matrix.001 file - promoters70/1024889
tcgatttagtttttacag

SEQ ID NO: 38430 - DNA, 10 bp, Unknown
  misc_feature (1)..( 10): Matrix.001 file - promoters70/1024993
tgaaatgatc

SEQ ID NO: 38431 - DNA, 13 bp, Unknown
  misc_feature (1)..( 13): Matrix.001 file - promoters70/1024993
ttgtctaatattc

SEQ ID NO: 38432 - DNA, 15 bp, Unknown
  misc_feature (1)..( 15): Matrix.001 file - promoters70/1024993
aacttgttacaaaat

SEQ ID NO: 38433 - DNA, 7 bp, Unknown
  misc_feature (1)..( 7): Matrix.001 file - promoters70/1025211
aaacaaa

SEQ ID NO: 38434 - DNA, 9 bp, Unknown
  misc_feature (1)..( 9): Matrix.001 file - promoters70/1025211
atattatta

SEQ ID NO: 38435 - DNA, 10 bp, Unknown
  misc_feature (1)..( 10): Matrix.001 file - promoters70/1025211
gtttcaaata

SEQ ID NO: 38436 - DNA, 8 bp, Unknown
  misc_feature (1)..( 8): Matrix.001 file - promoters70/1025211
agtcaaaa

SEQ ID NO: 38437 - DNA, 9 bp, Unknown
  misc_feature (1)..( 9): Matrix.001 file - promoters70/1025211
aaataaaca

SEQ ID NO: 38438 - DNA, 10 bp, Unknown
  misc_feature (1)..( 10): Matrix.001 file - promoters70/1025211
aatgaaattc

SEQ ID NO: 38439 - DNA, 10 bp, Unknown
  misc_feature (1)..( 10): Matrix.001 file - promoters70/1025582
gagacaattg

SEQ ID NO: 38440 - DNA, 10 bp, Unknown
  misc_feature (1)..( 10): Matrix.001 file - promoters70/1025642
tcataattaa

SEQ ID NO: 38441 - DNA, 12 bp, Unknown
  misc_feature (1)..( 12): Matrix.001 file - promoters70/1025642
ccaatgatttag

SEQ ID NO: 38442 - DNA, 9 bp, Unknown
  misc_feature (1)..( 9): Matrix.001 file - promoters70/1025642
tatataata

SEQ ID NO: 38443 - DNA, 9 bp, Unknown
  misc_feature (1)..( 9): Matrix.001 file - promoters70/1025683
agaaaattg

SEQ ID NO: 38444 - DNA, 8 bp, Unknown
  misc_feature (1)..( 8): Matrix.001 file - promoters70/1025683
cctatata

SEQ ID NO: 38445 - DNA, 14 bp, Unknown
  misc_feature (1)..( 14): Matrix.001 file - promoters70/1025683
tatgaatcagctaa

SEQ ID NO: 38446 - DNA, 13 bp, Unknown
  misc_feature (1)..( 13): Matrix.001 file - promoters70/1025791
caaaagaaccaat

SEQ ID NO: 38447 - DNA, 12 bp, Unknown
  misc_feature (1)..( 12): Matrix.001 file - promoters70/1025791
aaccaaaaaaat

SEQ ID NO: 38448 - DNA, 13 bp, Unknown
  misc_feature (1)..( 13): Matrix.001 file - promoters70/1026160
ttaaaaacaatac

SEQ ID NO: 38449 - DNA, 7 bp, Unknown
  misc_feature (1)..( 7): Matrix.001 file - promoters70/1026160
aaacaaa

SEQ ID NO: 38450 - DNA, 8 bp, Unknown
  misc_feature (1)..( 8): Matrix.001 file - promoters70/1026551
aatatata

SEQ ID NO: 38451 - DNA, 11 bp, Unknown
  misc_feature (1)..( 11): Matrix.001 file - promoters70/1026551
aagtataactt

SEQ ID NO: 38452 - DNA, 7 bp, Unknown
  misc_feature (1)..( 7): Matrix.001 file - promoters70/1026551
aaatatg

SEQ ID NO: 38453 - DNA, 15 bp, Unknown
  misc_feature (1)..( 15): Matrix.001 file - promoters70/1026551
aaggatgatggacca

SEQ ID NO: 38454 - DNA, 21 bp, Unknown
  misc_feature (1)..( 21): Matrix.001 file - promoters70/1026551
tacacattaataacgtggtcc

SEQ ID NO: 38455 - DNA, 7 bp, Unknown
  misc_feature (1)..( 7): Matrix.001 file - promoters70/1026551
ttaattt

SEQ ID NO: 38456 - DNA, 8 bp, Unknown
  misc_feature (1)..( 8): Matrix.001 file - promoters70/1026551
attttata

SEQ ID NO: 38457 - DNA, 14 bp, Unknown
  misc_feature (1)..( 14): Matrix.001 file - promoters70/1026622
ggagcatatttcaa

SEQ ID NO: 38458 - DNA, 13 bp, Unknown
  misc_feature (1)..( 13): Matrix.001 file - promoters70/1026622
gaatttaaaaaaa

SEQ ID NO: 38459 - DNA, 11 bp, Unknown
  misc_feature (1)..( 11): Matrix.001 file - promoters70/1026705
gaagatgtgaa

SEQ ID NO: 38460 - DNA, 7 bp, Unknown
  misc_feature (1)..( 7): Matrix.001 file - promoters70/1026861
tataaaa

SEQ ID NO: 38461 - DNA, 9 bp, Unknown
  misc_feature (1)..( 9): Matrix.001 file - promoters70/1026883
aaataattt

SEQ ID NO: 38462 - DNA, 7 bp, Unknown
  misc_feature (1)..( 7): Matrix.001 file - promoters70/1026883
tagaaca

SEQ ID NO: 38463 - DNA, 7 bp, Unknown
  misc_feature (1)..( 7): Matrix.001 file - promoters70/1026883
tgaaaac

SEQ ID NO: 38464 - DNA, 9 bp, Unknown
  misc_feature (1)..( 9): Matrix.001 file - promoters70/1026883
aatagatta

SEQ ID NO: 38465 - DNA, 9 bp, Unknown
  misc_feature (1)..( 9): Matrix.001 file - promoters70/1026883
acaaataat

SEQ ID NO: 38466 - DNA, 9 bp, Unknown
  misc_feature (1)..( 9): Matrix.001 file - promoters70/1026883
atttgtcta

SEQ ID NO: 38467 - DNA, 10 bp, Unknown
  misc_feature (1)..( 10): Matrix.001 file - promoters70/1026883
aattatttat

SEQ ID NO: 38468 - DNA, 10 bp, Unknown
  misc_feature (1)..( 10): Matrix.001 file - promoters70/1026883
aattaattta

SEQ ID NO: 38469 - DNA, 8 bp, Unknown
  misc_feature (1)..( 8): Matrix.001 file - promoters70/1026883
aattataa

SEQ ID NO: 38470 - DNA, 9 bp, Unknown
  misc_feature (1)..( 9): Matrix.001 file - promoters70/1026883
caacaacca

SEQ ID NO: 38471 - DNA, 13 bp, Unknown
  misc_feature (1)..( 13): Matrix.001 file - promoters70/1026976
ttgaatcaaaatt

SEQ ID NO: 38472 - DNA, 8 bp, Unknown
  misc_feature (1)..( 8): Matrix.001 file - promoters70/1026976
atttctgc

SEQ ID NO: 38473 - DNA, 8 bp, Unknown
  misc_feature (1)..( 8): Matrix.001 file - promoters70/1026987
aaaacaaa

SEQ ID NO: 38474 - DNA, 11 bp, Unknown
  misc_feature (1)..( 11): Matrix.001 file - promoters70/1026987
tatttaaaaag

SEQ ID NO: 38475 - DNA, 10 bp, Unknown
  misc_feature (1)..( 10): Matrix.001 file - promoters70/1026987
tttaaaaaaa

SEQ ID NO: 38476 - DNA, 7 bp, Unknown
  misc_feature (1)..( 7): Matrix.001 file - promoters70/1027189
aaaaaat

SEQ ID NO: 38477 - DNA, 10 bp, Unknown
  misc_feature (1)..( 10): Matrix.001 file - promoters70/1027189
ggtttgtttt

SEQ ID NO: 38478 - DNA, 9 bp, Unknown
  misc_feature (1)..( 9): Matrix.001 file - promoters70/1027276
agtagtttc

SEQ ID NO: 38479 - DNA, 9 bp, Unknown
  misc_feature (1)..( 9): Matrix.001 file - promoters70/1027276
aaatttgaa

SEQ ID NO: 38480 - DNA, 8 bp, Unknown
  misc_feature (1)..( 8): Matrix.001 file - promoters70/1027276
acatatta

SEQ ID NO: 38481 - DNA, 10 bp, Unknown
  misc_feature (1)..( 10): Matrix.001 file - promoters70/1027276
aaaagaaatt

SEQ ID NO: 38482 - DNA, 7 bp, Unknown
  misc_feature (1)..( 7): Matrix.001 file - promoters70/1027276
gaaaaaa

SEQ ID NO: 38483 - DNA, 6 bp, Unknown
  misc_feature (1)..( 6): Matrix.001 file - promoters70/1027276
atatag

SEQ ID NO: 38484 - DNA, 12 bp, Unknown
  misc_feature (1)..( 12): Matrix.001 file - promoters70/1027276
aaaaaaaaagaa

SEQ ID NO: 38485 - DNA, 7 bp, Unknown
  misc_feature (1)..( 7): Matrix.001 file - promoters70/1027276
tcaaaat

SEQ ID NO: 38486 - DNA, 11 bp, Unknown
  misc_feature (1)..( 11): Matrix.001 file - promoters70/1027327
ttgtaaatgtt

SEQ ID NO: 38487 - DNA, 13 bp, Unknown
  misc_feature (1)..( 13): Matrix.001 file - promoters70/1027327
cattaataagctt

SEQ ID NO: 38488 - DNA, 10 bp, Unknown
  misc_feature (1)..( 10): Matrix.001 file - promoters70/1027399
ataactctat

SEQ ID NO: 38489 - DNA, 8 bp, Unknown
  misc_feature (1)..( 8): Matrix.001 file - promoters70/1027406
tataaaat

SEQ ID NO: 38490 - DNA, 7 bp, Unknown
  misc_feature (1)..( 7): Matrix.001 file - promoters70/1027406
atgaaat

SEQ ID NO: 38491 - DNA, 16 bp, Unknown
  misc_feature (1)..( 16): Matrix.001 file - promoters70/1027406
ttttaaaaaactatat

SEQ ID NO: 38492 - DNA, 8 bp, Unknown
  misc_feature (1)..( 8): Matrix.001 file - promoters70/1027590
ttatagag

SEQ ID NO: 38493 - DNA, 12 bp, Unknown
  misc_feature (1)..( 12): Matrix.001 file - promoters70/1027590
taaaaaaataaa

SEQ ID NO: 38494 - DNA, 12 bp, Unknown
  misc_feature (1)..( 12): Matrix.001 file - promoters70/1027760
aaagtttataga

SEQ ID NO: 38495 - DNA, 11 bp, Unknown
  misc_feature (1)..( 11): Matrix.001 file - promoters70/1027760
aaaaaaattaa

SEQ ID NO: 38496 - DNA, 16 bp, Unknown
  misc_feature (1)..( 16): Matrix.001 file - promoters70/1027760
aataattttccaaata

SEQ ID NO: 38497 - DNA, 9 bp, Unknown
  misc_feature (1)..( 9): Matrix.001 file - promoters70/1027760
tccatttca

SEQ ID NO: 38498 - DNA, 10 bp, Unknown
  misc_feature (1)..( 10): Matrix.001 file - promoters70/1028243
aaaaccaaaa

SEQ ID NO: 38499 - DNA, 13 bp, Unknown
  misc_feature (1)..( 13): Matrix.001 file - promoters70/1028243
atatcaatttaaa

SEQ ID NO: 38500 - DNA, 10 bp, Unknown
  misc_feature (1)..( 10): Matrix.001 file - promoters70/1028368
aagaaaaaat

SEQ ID NO: 38501 - DNA, 10 bp, Unknown
  misc_feature (1)..( 10): Matrix.001 file - promoters70/1028368
atataaatca

SEQ ID NO: 38502 - DNA, 11 bp, Unknown
  misc_feature (1)..( 11): Matrix.001 file - promoters70/1028368
atctaaaaaat

SEQ ID NO: 38503 - DNA, 7 bp, Unknown
  misc_feature (1)..( 7): Matrix.001 file - promoters70/1028368
aaaagta

SEQ ID NO: 38504 - DNA, 8 bp, Unknown
  misc_feature (1)..( 8): Matrix.001 file - promoters70/1028413
aaaagaaa

SEQ ID NO: 38505 - DNA, 11 bp, Unknown
  misc_feature (1)..( 11): Matrix.001 file - promoters70/1028413
gtgaaccagga

SEQ ID NO: 38506 - DNA, 10 bp, Unknown
  misc_feature (1)..( 10): Matrix.001 file - promoters70/1028413
aaaacgaaat

SEQ ID NO: 38507 - DNA, 9 bp, Unknown
  misc_feature (1)..( 9): Matrix.001 file - promoters70/1028413
tttaaaggg

SEQ ID NO: 38508 - DNA, 10 bp, Unknown
  misc_feature (1)..( 10): Matrix.001 file - promoters70/1028470
ctaaatactc

SEQ ID NO: 38509 - DNA, 9 bp, Unknown
  misc_feature (1)..( 9): Matrix.001 file - promoters70/1028470
tttaatata

SEQ ID NO: 38510 - DNA, 12 bp, Unknown
  misc_feature (1)..( 12): Matrix.001 file - promoters70/1028470
gactctttttct

SEQ ID NO: 38511 - DNA, 9 bp, Unknown
  misc_feature (1)..( 9): Matrix.001 file - promoters70/1028682
ttttcaatt

SEQ ID NO: 38512 - DNA, 7 bp, Unknown
  misc_feature (1)..( 7): Matrix.001 file - promoters70/1028682
catatat

SEQ ID NO: 38513 - DNA, 10 bp, Unknown
  misc_feature (1)..( 10): Matrix.001 file - promoters70/1028863
agattttttt

SEQ ID NO: 38514 - DNA, 7 bp, Unknown
  misc_feature (1)..( 7): Matrix.001 file - promoters70/1028937
tattttg

SEQ ID NO: 38515 - DNA, 6 bp, Unknown
  misc_feature (1)..( 6): Matrix.001 file - promoters70/1028955
attatc

SEQ ID NO: 38516 - DNA, 9 bp, Unknown
  misc_feature (1)..( 9): Matrix.001 file - promoters70/1028955
gatgtctca

SEQ ID NO: 38517 - DNA, 10 bp, Unknown
  misc_feature (1)..( 10): Matrix.001 file - promoters70/1028963
aaataaaata

SEQ ID NO: 38518 - DNA, 8 bp, Unknown
  misc_feature (1)..( 8): Matrix.001 file - promoters70/1028963
tatcttct

SEQ ID NO: 38519 - DNA, 12 bp, Unknown
  misc_feature (1)..( 12): Matrix.001 file - promoters70/1029485
taatggcccaaa

SEQ ID NO: 38520 - DNA, 7 bp, Unknown
  misc_feature (1)..( 7): Matrix.001 file - promoters70/1029908
aagattt

SEQ ID NO: 38521 - DNA, 12 bp, Unknown
  misc_feature (1)..( 12): Matrix.001 file - promoters70/1029908
tgtattttatgt

SEQ ID NO: 38522 - DNA, 12 bp, Unknown
  misc_feature (1)..( 12): Matrix.001 file - promoters70/1029952
aatgggcccaaa

SEQ ID NO: 38523 - DNA, 11 bp, Unknown
  misc_feature (1)..( 11): Matrix.001 file - promoters70/1030231
atttgaatttt

SEQ ID NO: 38524 - DNA, 8 bp, Unknown
  misc_feature (1)..( 8): Matrix.001 file - promoters70/1030283
aaaaaaga

SEQ ID NO: 38525 - DNA, 7 bp, Unknown
  misc_feature (1)..( 7): Matrix.001 file - promoters70/1030283
tcctttg

SEQ ID NO: 38526 - DNA, 8 bp, Unknown
  misc_feature (1)..( 8): Matrix.001 file - promoters70/1030283
aaaaaaga

SEQ ID NO: 38527 - DNA, 7 bp, Unknown
  misc_feature (1)..( 7): Matrix.001 file - promoters70/1030283
ttccaaa

SEQ ID NO: 38528 - DNA, 9 bp, Unknown
  misc_feature (1)..( 9): Matrix.001 file - promoters70/1030283
tttattttt

SEQ ID NO: 38529 - DNA, 10 bp, Unknown
  misc_feature (1)..( 10): Matrix.001 file - promoters70/1030283
tttgaataaa

SEQ ID NO: 38530 - DNA, 10 bp, Unknown
  misc_feature (1)..( 10): Matrix.001 file - promoters70/1030283
tataaaaatt

SEQ ID NO: 38531 - DNA, 7 bp, Unknown
  misc_feature (1)..( 7): Matrix.001 file - promoters70/1030283
gaaacaa

SEQ ID NO: 38532 - DNA, 9 bp, Unknown
  misc_feature (1)..( 9): Matrix.001 file - promoters70/1030528
ataataatt

SEQ ID NO: 38533 - DNA, 13 bp, Unknown
  misc_feature (1)..( 13): Matrix.001 file - promoters70/1030528
ttatatttttaaa

SEQ ID NO: 38534 - DNA, 7 bp, Unknown
  misc_feature (1)..( 7): Matrix.001 file - promoters70/1030528
ttaaaaa

SEQ ID NO: 38535 - DNA, 9 bp, Unknown
  misc_feature (1)..( 9): Matrix.001 file - promoters70/1030547
aatgtttgt

SEQ ID NO: 38536 - DNA, 9 bp, Unknown
  misc_feature (1)..( 9): Matrix.001 file - promoters70/1030547
ttttgatga

SEQ ID NO: 38537 - DNA, 14 bp, Unknown
  misc_feature (1)..( 14): Matrix.001 file - promoters70/1030547
attcaaaaatatta

SEQ ID NO: 38538 - DNA, 10 bp, Unknown
  misc_feature (1)..( 10): Matrix.001 file - promoters70/1030547
tatataaata

SEQ ID NO: 38539 - DNA, 10 bp, Unknown
  misc_feature (1)..( 10): Matrix.001 file - promoters70/1030547
tataaacaaa

SEQ ID NO: 38540 - DNA, 9 bp, Unknown
  misc_feature (1)..( 9): Matrix.001 file - promoters70/1030547
ttttgatta

SEQ ID NO: 38541 - DNA, 13 bp, Unknown
  misc_feature (1)..( 13): Matrix.001 file - promoters70/1030547
atctttataagta

SEQ ID NO: 38542 - DNA, 9 bp, Unknown
  misc_feature (1)..( 9): Matrix.001 file - promoters70/1030547
atctttata

SEQ ID NO: 38543 - DNA, 10 bp, Unknown
  misc_feature (1)..( 10): Matrix.001 file - promoters70/1030547
taatatattt

SEQ ID NO: 38544 - DNA, 11 bp, Unknown
  misc_feature (1)..( 11): Matrix.001 file - promoters70/1030605
aaaaaaagaat

SEQ ID NO: 38545 - DNA, 10 bp, Unknown
  misc_feature (1)..( 10): Matrix.001 file - promoters70/1030605
taaattgaaa

SEQ ID NO: 38546 - DNA, 16 bp, Unknown
  misc_feature (1)..( 16): Matrix.001 file - promoters70/1030605
ccttactatataaaaa

SEQ ID NO: 38547 - DNA, 14 bp, Unknown
  misc_feature (1)..( 14): Matrix.001 file - promoters70/1030605
ttaaaaaatattga

SEQ ID NO: 38548 - DNA, 10 bp, Unknown
  misc_feature (1)..( 10): Matrix.001 file - promoters70/1030605
tatttagaaa

SEQ ID NO: 38549 - DNA, 10 bp, Unknown
  misc_feature (1)..( 10): Matrix.001 file - promoters70/1030757
caaatacatt

SEQ ID NO: 38550 - DNA, 8 bp, Unknown
  misc_feature (1)..( 8): Matrix.001 file - promoters70/1030757
cttttgaa

SEQ ID NO: 38551 - DNA, 9 bp, Unknown
  misc_feature (1)..( 9): Matrix.001 file - promoters70/1030821
aataaaaaa

SEQ ID NO: 38552 - DNA, 12 bp, Unknown
  misc_feature (1)..( 12): Matrix.001 file - promoters70/1030821
acaataaacaaa

SEQ ID NO: 38553 - DNA, 7 bp, Unknown
  misc_feature (1)..( 7): Matrix.001 file - promoters70/1030821
aaaacat

SEQ ID NO: 38554 - DNA, 12 bp, Unknown
  misc_feature (1)..( 12): Matrix.001 file - promoters70/1030902
gtcatataaata

SEQ ID NO: 38555 - DNA, 10 bp, Unknown
  misc_feature (1)..( 10): Matrix.001 file - promoters70/1030916
ttttactaac

SEQ ID NO: 38556 - DNA, 9 bp, Unknown
  misc_feature (1)..( 9): Matrix.001 file - promoters70/1030916
atttcaaaa

SEQ ID NO: 38557 - DNA, 10 bp, Unknown
  misc_feature (1)..( 10): Matrix.001 file - promoters70/1030916
actttataat

SEQ ID NO: 38558 - DNA, 9 bp, Unknown
  misc_feature (1)..( 9): Matrix.001 file - promoters70/1031084
tagagaatg

SEQ ID NO: 38559 - DNA, 9 bp, Unknown
  misc_feature (1)..( 9): Matrix.001 file - promoters70/1031267
caaagaaag

SEQ ID NO: 38560 - DNA, 8 bp, Unknown
  misc_feature (1)..( 8): Matrix.001 file - promoters70/1031267
aaatcaaa

SEQ ID NO: 38561 - DNA, 7 bp, Unknown
  misc_feature (1)..( 7): Matrix.001 file - promoters70/1031267
aagtcaa

SEQ ID NO: 38562 - DNA, 8 bp, Unknown
  misc_feature (1)..( 8): Matrix.001 file - promoters70/1031291
aataaaat

SEQ ID NO: 38563 - DNA, 11 bp, Unknown
  misc_feature (1)..( 11): Matrix.001 file - promoters70/1031291
aaaaaaaattc

SEQ ID NO: 38564 - DNA, 9 bp, Unknown
  misc_feature (1)..( 9): Matrix.001 file - promoters70/1031429
taaccaata

SEQ ID NO: 38565 - DNA, 10 bp, Unknown
  misc_feature (1)..( 10): Matrix.001 file - promoters70/1031429
aatacaaatc

SEQ ID NO: 38566 - DNA, 7 bp, Unknown
  misc_feature (1)..( 7): Matrix.001 file - promoters70/1031429
taaggca

SEQ ID NO: 38567 - DNA, 11 bp, Unknown
  misc_feature (1)..( 11): Matrix.001 file - promoters70/1031429
aaagaaacaaa

SEQ ID NO: 38568 - DNA, 8 bp, Unknown
  misc_feature (1)..( 8): Matrix.001 file - promoters70/1031706
tatatata

SEQ ID NO: 38569 - DNA, 8 bp, Unknown
  misc_feature (1)..( 8): Matrix.001 file - promoters70/1031799
acaaaaca

SEQ ID NO: 38570 - DNA, 9 bp, Unknown
  misc_feature (1)..( 9): Matrix.001 file - promoters70/1031799
atataaata

SEQ ID NO: 38571 - DNA, 13 bp, Unknown
  misc_feature (1)..( 13): Matrix.001 file - promoters70/1031799
aaaaataaatcca

SEQ ID NO: 38572 - DNA, 7 bp, Unknown
  misc_feature (1)..( 7): Matrix.001 file - promoters70/1032047
caatatt

SEQ ID NO: 38573 - DNA, 7 bp, Unknown
  misc_feature (1)..( 7): Matrix.001 file - promoters70/1032047
tttttac

SEQ ID NO: 38574 - DNA, 12 bp, Unknown
  misc_feature (1)..( 12): Matrix.001 file - promoters70/1032047
aaaggaaaaaat

SEQ ID NO: 38575 - DNA, 13 bp, Unknown
  misc_feature (1)..( 13): Matrix.001 file - promoters70/1032047
ctcctataaattg

SEQ ID NO: 38576 - DNA, 15 bp, Unknown
  misc_feature (1)..( 15): Matrix.001 file - promoters70/1032047
acataaaagaaatat

SEQ ID NO: 38577 - DNA, 9 bp, Unknown
  misc_feature (1)..( 9): Matrix.001 file - promoters70/1032047
ataggaata

SEQ ID NO: 38578 - DNA, 13 bp, Unknown
  misc_feature (1)..( 13): Matrix.001 file - promoters70/1032047
ccataaaggaaaa

SEQ ID NO: 38579 - DNA, 8 bp, Unknown
  misc_feature (1)..( 8): Matrix.001 file - promoters70/1032313
cgtttttc

SEQ ID NO: 38580 - DNA, 7 bp, Unknown
  misc_feature (1)..( 7): Matrix.001 file - promoters70/1032381
attattt

SEQ ID NO: 38581 - DNA, 6 bp, Unknown
  misc_feature (1)..( 6): Matrix.001 file - promoters70/1032381
aataaa

SEQ ID NO: 38582 - DNA, 11 bp, Unknown
  misc_feature (1)..( 11): Matrix.001 file - promoters70/1032381
agaataaaaaa

SEQ ID NO: 38583 - DNA, 8 bp, Unknown
  misc_feature (1)..( 8): Matrix.001 file - promoters70/1032400
aattgatt

SEQ ID NO: 38584 - DNA, 11 bp, Unknown
  misc_feature (1)..( 11): Matrix.001 file - promoters70/1032498
acaaaccaaaa

SEQ ID NO: 38585 - DNA, 9 bp, Unknown
  misc_feature (1)..( 9): Matrix.001 file - promoters70/1032498
tatatcaaa

SEQ ID NO: 38586 - DNA, 10 bp, Unknown
  misc_feature (1)..( 10): Matrix.001 file - promoters70/1032498
gcaaaccaaa

SEQ ID NO: 38587 - DNA, 10 bp, Unknown
  misc_feature (1)..( 10): Matrix.001 file - promoters70/1032676
aaacttaaga

SEQ ID NO: 38588 - DNA, 8 bp, Unknown
  misc_feature (1)..( 8): Matrix.001 file - promoters70/1032676
attttttt

SEQ ID NO: 38589 - DNA, 9 bp, Unknown
  misc_feature (1)..( 9): Matrix.001 file - promoters70/1032676
agatattaa

SEQ ID NO: 38590 - DNA, 11 bp, Unknown
  misc_feature (1)..( 11): Matrix.001 file - promoters70/1032676
ttcaaaatttc

SEQ ID NO: 38591 - DNA, 7 bp, Unknown
  misc_feature (1)..( 7): Matrix.001 file - promoters70/1032676
aaaagaa

SEQ ID NO: 38592 - DNA, 7 bp, Unknown
  misc_feature (1)..( 7): Matrix.001 file - promoters70/1032788
ttacaaa

SEQ ID NO: 38593 - DNA, 13 bp, Unknown
  misc_feature (1)..( 13): Matrix.001 file - promoters70/1032897
aatcttgttttaa

SEQ ID NO: 38594 - DNA, 10 bp, Unknown
  misc_feature (1)..( 10): Matrix.001 file - promoters70/1032897
ctttttctac

SEQ ID NO: 38595 - DNA, 7 bp, Unknown
  misc_feature (1)..( 7): Matrix.001 file - promoters70/1033184
aatatat

SEQ ID NO: 38596 - DNA, 8 bp, Unknown
  misc_feature (1)..( 8): Matrix.001 file - promoters70/1033184
gcccaaag

SEQ ID NO: 38597 - DNA, 12 bp, Unknown
  misc_feature (1)..( 12): Matrix.001 file - promoters70/1033184
tataaatccttc

SEQ ID NO: 38598 - DNA, 8 bp, Unknown
  misc_feature (1)..( 8): Matrix.001 file - promoters70/1033184
gtttttat

SEQ ID NO: 38599 - DNA, 8 bp, Unknown
  misc_feature (1)..( 8): Matrix.001 file - promoters70/1033184
attttttt

SEQ ID NO: 38600 - DNA, 8 bp, Unknown
  misc_feature (1)..( 8): Matrix.001 file - promoters70/1033184
gttaactt

SEQ ID NO: 38601 - DNA, 7 bp, Unknown
  misc_feature (1)..( 7): Matrix.001 file - promoters70/1033184
aaaaaat

SEQ ID NO: 38602 - DNA, 9 bp, Unknown
  misc_feature (1)..( 9): Matrix.001 file - promoters70/1033184
agtcatatt

SEQ ID NO: 38603 - DNA, 8 bp, Unknown
  misc_feature (1)..( 8): Matrix.001 file - promoters70/1033262
aagttgat

SEQ ID NO: 38604 - DNA, 10 bp, Unknown
  misc_feature (1)..( 10): Matrix.001 file - promoters70/1033262
gaagttgact

SEQ ID NO: 38605 - DNA, 7 bp, Unknown
  misc_feature (1)..( 7): Matrix.001 file - promoters70/1033262
agttttt

SEQ ID NO: 38606 - DNA, 11 bp, Unknown
  misc_feature (1)..( 11): Matrix.001 file - promoters70/1033262
gttaagaagcc

SEQ ID NO: 38607 - DNA, 7 bp, Unknown
  misc_feature (1)..( 7): Matrix.001 file - promoters70/1033262
gaaagaa

SEQ ID NO: 38608 - DNA, 8 bp, Unknown
  misc_feature (1)..( 8): Matrix.001 file - promoters70/1033262
atttcttg

SEQ ID NO: 38609 - DNA, 7 bp, Unknown
  misc_feature (1)..( 7): Matrix.001 file - promoters70/1033262
ctttatt

SEQ ID NO: 38610 - DNA, 7 bp, Unknown
  misc_feature (1)..( 7): Matrix.001 file - promoters70/1033262
aaagaaa

SEQ ID NO: 38611 - DNA, 8 bp, Unknown
  misc_feature (1)..( 8): Matrix.001 file - promoters70/1033262
tgatttgc

SEQ ID NO: 38612 - DNA, 9 bp, Unknown
  misc_feature (1)..( 9): Matrix.001 file - promoters70/1033262
agataaaga

SEQ ID NO: 38613 - DNA, 8 bp, Unknown
  misc_feature (1)..( 8): Matrix.001 file - promoters70/1033262
gaagttga

SEQ ID NO: 38614 - DNA, 9 bp, Unknown
  misc_feature (1)..( 9): Matrix.001 file - promoters70/1033262
agttttttt

SEQ ID NO: 38615 - DNA, 7 bp, Unknown
  misc_feature (1)..( 7): Matrix.001 file - promoters70/1033262
aaagaag

SEQ ID NO: 38616 - DNA, 9 bp, Unknown
  misc_feature (1)..( 9): Matrix.001 file - promoters70/1033781
aataaaaaa

SEQ ID NO: 38617 - DNA, 14 bp, Unknown
  misc_feature (1)..( 14): Matrix.001 file - promoters70/1033781
acttattatcgaag

SEQ ID NO: 38618 - DNA, 10 bp, Unknown
  misc_feature (1)..( 10): Matrix.001 file - promoters70/1033781
accattttct

SEQ ID NO: 38619 - DNA, 9 bp, Unknown
  misc_feature (1)..( 9): Matrix.001 file - promoters70/1033781
catgaattg

SEQ ID NO: 38620 - DNA, 14 bp, Unknown
  misc_feature (1)..( 14): Matrix.001 file - promoters70/1033781
gtaattttttattt

SEQ ID NO: 38621 - DNA, 9 bp, Unknown
  misc_feature (1)..( 9): Matrix.001 file - promoters70/1033841
atctccatt

SEQ ID NO: 38622 - DNA, 10 bp, Unknown
  misc_feature (1)..( 10): Matrix.001 file - promoters70/1034137
tcaataaatg

SEQ ID NO: 38623 - DNA, 10 bp, Unknown
  misc_feature (1)..( 10): Matrix.001 file - promoters70/1034137
ttaaaaaaaa

SEQ ID NO: 38624 - DNA, 33 bp, Unknown; identical to SEQ ID NO: 37194
  misc_feature (1)..( 33): Matrix.001 file - promoters70/1034137

SEQ ID NO: 38625 - DNA, 32 bp, Unknown; identical to SEQ ID NO: 37195
  misc_feature (1)..( 32): Matrix.001 file - promoters70/1034137

SEQ ID NO: 38626 - DNA, 15 bp, Unknown
  misc_feature (1)..( 15): Matrix.001 file - promoters70/1034137
attgaagacttttca

SEQ ID NO: 38627 - DNA, 14 bp, Unknown
  misc_feature (1)..( 14): Matrix.001 file - promoters70/1034137
ctataagcatttaa

SEQ ID NO: 38628 - DNA, 25 bp, Unknown
  misc_feature (1)..( 25): Matrix.001 file - promoters70/1034137
agcatttaagtctatcgctagactg

SEQ ID NO: 38629 - DNA, 10 bp, Unknown
  misc_feature (1)..( 10): Matrix.001 file - promoters70/1034322
tatataaata

SEQ ID NO: 38630 - DNA, 13 bp, Unknown
  misc_feature (1)..( 13): Matrix.001 file - promoters70/1034322
attttaataactt

SEQ ID NO: 38631 - DNA, 13 bp, Unknown
  misc_feature (1)..( 13): Matrix.001 file - promoters70/1034322
aatttaataactt

SEQ ID NO: 38632 - DNA, 9 bp, Unknown
  misc_feature (1)..( 9): Matrix.001 file - promoters70/1034652
aaaaacata

SEQ ID NO: 38633 - DNA, 11 bp, Unknown
  misc_feature (1)..( 11): Matrix.001 file - promoters70/1034652
ctaaacaaaaa

SEQ ID NO: 38634 - DNA, 9 bp, Unknown
  misc_feature (1)..( 9): Matrix.001 file - promoters70/1034652
caatcaaat

SEQ ID NO: 38635 - DNA, 11 bp, Unknown
  misc_feature (1)..( 11): Matrix.001 file - promoters70/1034652
tatccttcttt

SEQ ID NO: 38636 - DNA, 10 bp, Unknown
  misc_feature (1)..( 10): Matrix.001 file - promoters70/1035083
tattagttct

SEQ ID NO: 38637 - DNA, 11 bp, Unknown
  misc_feature (1)..( 11): Matrix.001 file - promoters70/1035083
aatctttggaa

SEQ ID NO: 38638 - DNA, 11 bp, Unknown
  misc_feature (1)..( 11): Matrix.001 file - promoters70/1035083
atttgatgaat

SEQ ID NO: 38639 - DNA, 9 bp, Unknown
  misc_feature (1)..( 9): Matrix.001 file - promoters70/1035083
tataaaaac

SEQ ID NO: 38640 - DNA, 10 bp, Unknown
  misc_feature (1)..( 10): Matrix.001 file - promoters70/1035083
tataaaaaaa

SEQ ID NO: 38641 - DNA, 10 bp, Unknown
  misc_feature (1)..( 10): Matrix.001 file - promoters70/1035083
caatatttta

SEQ ID NO: 38642 - DNA, 8 bp, Unknown
  misc_feature (1)..( 8): Matrix.001 file - promoters70/1035172
tttaaccc

SEQ ID NO: 38643 - DNA, 7 bp, Unknown
  misc_feature (1)..( 7): Matrix.001 file - promoters70/1035172
gttgact

SEQ ID NO: 38644 - DNA, 7 bp, Unknown
  misc_feature (1)..( 7): Matrix.001 file - promoters70/1035172
actattt

SEQ ID NO: 38645 - DNA, 12 bp, Unknown
  misc_feature (1)..( 12): Matrix.001 file - promoters70/1035172
gaaaaagaaaaa

SEQ ID NO: 38646 - DNA, 8 bp, Unknown
  misc_feature (1)..( 8): Matrix.001 file - promoters70/1035172
taaaaaat

SEQ ID NO: 38647 - DNA, 16 bp, Unknown
  misc_feature (1)..( 16): Matrix.001 file - promoters70/1035172
tcttttctctatataa

SEQ ID NO: 38648 - DNA, 8 bp, Unknown
  misc_feature (1)..( 8): Matrix.001 file - promoters70/1035172
taaatatt

SEQ ID NO: 38649 - DNA, 7 bp, Unknown
  misc_feature (1)..( 7): Matrix.001 file - promoters70/1035267
ccacaga

SEQ ID NO: 38650 - DNA, 8 bp, Unknown
  misc_feature (1)..( 8): Matrix.001 file - promoters70/1035312
atcaaaac

SEQ ID NO: 38651 - DNA, 9 bp, Unknown
  misc_feature (1)..( 9): Matrix.001 file - promoters70/1035312
aaaccaaaa

SEQ ID NO: 38652 - DNA, 8 bp, Unknown
  misc_feature (1)..( 8): Matrix.001 file - promoters70/1035312
caatcgaa

SEQ ID NO: 38653 - DNA, 10 bp, Unknown
  misc_feature (1)..( 10): Matrix.001 file - promoters70/1035312
cgatttcaca

SEQ ID NO: 38654 - DNA, 10 bp, Unknown
  misc_feature (1)..( 10): Matrix.001 file - promoters70/1035312
attgggccca

SEQ ID NO: 38655 - DNA, 12 bp, Unknown
  misc_feature (1)..( 12): Matrix.001 file - promoters70/1035632
ttacaaaagtat

SEQ ID NO: 38656 - DNA, 10 bp, Unknown
  misc_feature (1)..( 10): Matrix.001 file - promoters70/1035632
acaaaaaata

SEQ ID NO: 38657 - DNA, 8 bp, Unknown
  misc_feature (1)..( 8): Matrix.001 file - promoters70/1035632
aataaaaa

SEQ ID NO: 38658 - DNA, 10 bp, Unknown
  misc_feature (1)..( 10): Matrix.001 file - promoters70/1375217
ttaaaaaaag

SEQ ID NO: 38659 - DNA, 8 bp, Unknown
  misc_feature (1)..( 8): Matrix.001 file - promoters70/1375217
aagaaaaa

SEQ ID NO: 38660 - DNA, 13 bp, Unknown
  misc_feature (1)..( 13): Matrix.001 file - promoters70/1375217
tgtttgtttcaca

SEQ ID NO: 38661 - DNA, 8 bp, Unknown
  misc_feature (1)..( 8): Matrix.001 file - promoters70/1375217
aatcaaga

SEQ ID NO: 38662 - DNA, 9 bp, Unknown
  misc_feature (1)..( 9): Matrix.001 file - promoters70/1375217
gttccttct

SEQ ID NO: 38663 - DNA, 8 bp, Unknown
  misc_feature (1)..( 8): Matrix.001 file - promoters70/1375471
aaaataat

SEQ ID NO: 38664 - DNA, 8 bp, Unknown
  misc_feature (1)..( 8): Matrix.001 file - promoters70/1375615
atcatatt

SEQ ID NO: 38665 - DNA, 9 bp, Unknown
  misc_feature (1)..( 9): Matrix.001 file - promoters70/1375615
tttgtagtg

SEQ ID NO: 38666 - DNA, 8 bp, Unknown
  misc_feature (1)..( 8): Matrix.001 file - promoters70/1375615
tgatttgt

SEQ ID NO: 38667 - DNA, 7 bp, Unknown
  misc_feature (1)..( 7): Matrix.001 file - promoters70/1375615
gtttgtt

SEQ ID NO: 38668 - DNA, 8 bp, Unknown
  misc_feature (1)..( 8): Matrix.001 file - promoters70/1375615
gatttgtt

SEQ ID NO: 38669 - DNA, 9 bp, Unknown
  misc_feature (1)..( 9): Matrix.001 file - promoters70/1375634
tgtatgcat

SEQ ID NO: 38670 - DNA, 10 bp, Unknown
  misc_feature (1)..( 10): Matrix.001 file - promoters70/1375634
tcaattttat

SEQ ID NO: 38671 - DNA, 10 bp, Unknown
  misc_feature (1)..( 10): Matrix.001 file - promoters70/1375634
tcaattttat

SEQ ID NO: 38672 - DNA, 7 bp, Unknown
  misc_feature (1)..( 7): Matrix.001 file - promoters70/1376361
aatttag

SEQ ID NO: 38673 - DNA, 8 bp, Unknown
  misc_feature (1)..( 8): Matrix.001 file - promoters70/1376650
gaaatcaa

SEQ ID NO: 38674 - DNA, 8 bp, Unknown
  misc_feature (1)..( 8): Matrix.001 file - promoters70/1376650
gaactcag

SEQ ID NO: 38675 - DNA, 9 bp, Unknown
  misc_feature (1)..( 9): Matrix.001 file - promoters70/1376650
aagaaaaaa

SEQ ID NO: 38676 - DNA, 6 bp, Unknown
  misc_feature (1)..( 6): Matrix.001 file - promoters70/1376881
agtaaa

SEQ ID NO: 38677 - DNA, 10 bp, Unknown
  misc_feature (1)..( 10): Matrix.001 file - promoters70/1376881
gaaacaaaaa

SEQ ID NO: 38678 - DNA, 8 bp, Unknown
  misc_feature (1)..( 8): Matrix.001 file - promoters70/1377139
tttgagag

SEQ ID NO: 38679 - DNA, 7 bp, Unknown
  misc_feature (1)..( 7): Matrix.001 file - promoters70/1377412
ttgtgaa

SEQ ID NO: 38680 - DNA, 11 bp, Unknown
  misc_feature (1)..( 11): Matrix.001 file - promoters70/1377412
aaatcaaagat

SEQ ID NO: 38681 - DNA, 8 bp, Unknown
  misc_feature (1)..( 8): Matrix.001 file - promoters70/1377412
ttcttcaa

SEQ ID NO: 38682 - DNA, 7 bp, Unknown
  misc_feature (1)..( 7): Matrix.001 file - promoters70/1377472
aaaacaa

SEQ ID NO: 38683 - DNA, 8 bp, Unknown
  misc_feature (1)..( 8): Matrix.001 file - promoters70/1377472
catcgttt

SEQ ID NO: 38684 - DNA, 8 bp, Unknown
  misc_feature (1)..( 8): Matrix.001 file - promoters70/1377472
gattcttt

SEQ ID NO: 38685 - DNA, 7 bp, Unknown
  misc_feature (1)..( 7): Matrix.001 file - promoters70/1377564
attttac

SEQ ID NO: 38686 - DNA, 7 bp, Unknown
  misc_feature (1)..( 7): Matrix.001 file - promoters70/1377564
caaaatc

SEQ ID NO: 38687 - DNA, 10 bp, Unknown
  misc_feature (1)..( 10): Matrix.001 file - promoters70/1377642
taaaaaggaa

SEQ ID NO: 38688 - DNA, 7 bp, Unknown
  misc_feature (1)..( 7): Matrix.001 file - promoters70/1377642
atataat

SEQ ID NO: 38689 - DNA, 8 bp, Unknown
  misc_feature (1)..( 8): Matrix.001 file - promoters70/1377642
taaatata

SEQ ID NO: 38690 - DNA, 11 bp, Unknown
  misc_feature (1)..( 11): Matrix.001 file - promoters70/1377642
ataaaattaat

SEQ ID NO: 38691 - DNA, 12 bp, Unknown
  misc_feature (1)..( 12): Matrix.001 file - promoters70/1377642
ttttgtaaacaa

SEQ ID NO: 38692 - DNA, 8 bp, Unknown
  misc_feature (1)..( 8): Matrix.001 file - promoters70/1377642
aaatttat

SEQ ID NO: 38693 - DNA, 8 bp, Unknown
  misc_feature (1)..( 8): Matrix.001 file - promoters70/1377642
aatcaaaa

SEQ ID NO: 38694 - DNA, 11 bp, Unknown
  misc_feature (1)..( 11): Matrix.001 file - promoters70/1377642
aaaaacacgaa

SEQ ID NO: 38695 - DNA, 8 bp, Unknown
  misc_feature (1)..( 8): Matrix.001 file - promoters70/1377642
atataata

SEQ ID NO: 38696 - DNA, 11 bp, Unknown
  misc_feature (1)..( 11): Matrix.001 file - promoters70/1377680
tgtttgaacat

SEQ ID NO: 38697 - DNA, 8 bp, Unknown
  misc_feature (1)..( 8): Matrix.001 file - promoters70/1377680
caacgaaa

SEQ ID NO: 38698 - DNA, 10 bp, Unknown
  misc_feature (1)..( 10): Matrix.001 file - promoters70/1377680
aaatcatatt

SEQ ID NO: 38699 - DNA, 9 bp, Unknown
  misc_feature (1)..( 9): Matrix.001 file - promoters70/1377680
ataagaaaa

SEQ ID NO: 38700 - DNA, 9 bp, Unknown
  misc_feature (1)..( 9): Matrix.001 file - promoters70/1377680
tcaatcata

SEQ ID NO: 38701 - DNA, 8 bp, Unknown
  misc_feature (1)..( 8): Matrix.001 file - promoters70/1377680
taatttca

SEQ ID NO: 38702 - DNA, 9 bp, Unknown
  misc_feature (1)..( 9): Matrix.001 file - promoters70/1377680
ataataaaa

SEQ ID NO: 38703 - DNA, 8 bp, Unknown
  misc_feature (1)..( 8): Matrix.001 file - promoters70/1377680
aaatatct

SEQ ID NO: 38704 - DNA, 7 bp, Unknown
  misc_feature (1)..( 7): Matrix.001 file - promoters70/1377680
tatcata

SEQ ID NO: 38705 - DNA, 8 bp, Unknown
  misc_feature (1)..( 8): Matrix.001 file - promoters70/1377680
taataaag

SEQ ID NO: 38706 - DNA, 12 bp, Unknown
  misc_feature (1)..( 12): Matrix.001 file - promoters70/1377680
ataaattaatgt

SEQ ID NO: 38707 - DNA, 10 bp, Unknown
  misc_feature (1)..( 10): Matrix.001 file - promoters70/1377718
taaatttgct

SEQ ID NO: 38708 - DNA, 6 bp, Unknown
  misc_feature (1)..( 6): Matrix.001 file - promoters70/1377847
accaaa

SEQ ID NO: 38709 - DNA, 9 bp, Unknown
  misc_feature (1)..( 9): Matrix.001 file - promoters70/1377847
tgtttcttt

SEQ ID NO: 38710 - DNA, 8 bp, Unknown
  misc_feature (1)..( 8): Matrix.001 file - promoters70/1377847
aatcaaga

SEQ ID NO: 38711 - DNA, 9 bp, Unknown
  misc_feature (1)..( 9): Matrix.001 file - promoters70/1377847
gttccttct

SEQ ID NO: 38712 - DNA, 13 bp, Unknown
  misc_feature (1)..( 13): Matrix.001 file - promoters70/1377847
ctatttttctctt

SEQ ID NO: 38713 - DNA, 14 bp, Unknown
  misc_feature (1)..( 14): Matrix.001 file - promoters70/1378049
aaaaattaaccacg

SEQ ID NO: 38714 - DNA, 7 bp, Unknown
  misc_feature (1)..( 7): Matrix.001 file - promoters70/1378049
aaacaaa

SEQ ID NO: 38715 - DNA, 11 bp, Unknown
  misc_feature (1)..( 11): Matrix.001 file - promoters70/1378049
tttatttcaca

SEQ ID NO: 38716 - DNA, 8 bp, Unknown
  misc_feature (1)..( 8): Matrix.001 file - promoters70/1378049
caataaaa

SEQ ID NO: 38717 - DNA, 11 bp, Unknown
  misc_feature (1)..( 11): Matrix.001 file - promoters70/1378088
aattattttat

SEQ ID NO: 38718 - DNA, 7 bp, Unknown
  misc_feature (1)..( 7): Matrix.001 file - promoters70/1378088
tagattt

SEQ ID NO: 38719 - DNA, 8 bp, Unknown
  misc_feature (1)..( 8): Matrix.001 file - promoters70/1378088
aaattatt

SEQ ID NO: 38720 - DNA, 12 bp, Unknown
  misc_feature (1)..( 12): Matrix.001 file - promoters70/1378088
aattagattcga

SEQ ID NO: 38721 - DNA, 9 bp, Unknown
  misc_feature (1)..( 9): Matrix.001 file - promoters70/1378088
aaaaacatt

SEQ ID NO: 38722 - DNA, 9 bp, Unknown
  misc_feature (1)..( 9): Matrix.001 file - promoters70/1378088
aaaaaatta

SEQ ID NO: 38723 - DNA, 11 bp, Unknown
  misc_feature (1)..( 11): Matrix.001 file - promoters70/1378088
ttaatttttta

SEQ ID NO: 38724 - DNA, 10 bp, Unknown
  misc_feature (1)..( 10): Matrix.001 file - promoters70/1378088
attttaaaat

SEQ ID NO: 38725 - DNA, 13 bp, Unknown
  misc_feature (1)..( 13): Matrix.001 file - promoters70/1378088
ttataaaaagata

SEQ ID NO: 38726 - DNA, 8 bp, Unknown
  misc_feature (1)..( 8): Matrix.001 file - promoters70/1378088
gttataaa

SEQ ID NO: 38727 - DNA, 13 bp, Unknown
  misc_feature (1)..( 13): Matrix.001 file - promoters70/1378088
taaaaagagaaaa

SEQ ID NO: 38728 - DNA, 7 bp, Unknown
  misc_feature (1)..( 7): Matrix.001 file - promoters70/1378333
gctgaaa

SEQ ID NO: 38729 - DNA, 13 bp, Unknown
  misc_feature (1)..( 13): Matrix.001 file - promoters70/1378393
ggtttgtttaact

SEQ ID NO: 38730 - DNA, 7 bp, Unknown
  misc_feature (1)..( 7): Matrix.001 file - promoters70/1380389
tttggtt

SEQ ID NO: 38731 - DNA, 8 bp, Unknown
  misc_feature (1)..( 8): Matrix.001 file - promoters70/1380519
gagcaaaa

SEQ ID NO: 38732 - DNA, 11 bp, Unknown
  misc_feature (1)..( 11): Matrix.001 file - promoters70/1380708
taaaatttttt

SEQ ID NO: 38733 - DNA, 9 bp, Unknown
  misc_feature (1)..( 9): Matrix.001 file - promoters70/1380708
tttattcag

SEQ ID NO: 38734 - DNA, 16 bp, Unknown
  misc_feature (1)..( 16): Matrix.001 file - promoters70/1381002
tataaaactttcataa

SEQ ID NO: 38735 - DNA, 7 bp, Unknown
  misc_feature (1)..( 7): Matrix.001 file - promoters70/1381002
ttaaaat

SEQ ID NO: 38736 - DNA, 7 bp, Unknown
  misc_feature (1)..( 7): Matrix.001 file - promoters70/1381002
tcaccta

SEQ ID NO: 38737 - DNA, 8 bp, Unknown
  misc_feature (1)..( 8): Matrix.001 file - promoters70/1381002
tataattt

SEQ ID NO: 38738 - DNA, 9 bp, Unknown
  misc_feature (1)..( 9): Matrix.001 file - promoters70/1381002
tatcaaatt

SEQ ID NO: 38739 - DNA, 8 bp, Unknown
  misc_feature (1)..( 8): Matrix.001 file - promoters70/1381002
caaacact

SEQ ID NO: 38740 - DNA, 8 bp, Unknown
  misc_feature (1)..( 8): Matrix.001 file - promoters70/1381457
ttttgatt

SEQ ID NO: 38741 - DNA, 10 bp, Unknown
  misc_feature (1)..( 10): Matrix.001 file - promoters70/1381563
ggtacacgtg

SEQ ID NO: 38742 - DNA, 9 bp, Unknown
  misc_feature (1)..( 9): Matrix.001 file - promoters70/1381704
gtttccttt

SEQ ID NO: 38743 - DNA, 8 bp, Unknown
  misc_feature (1)..( 8): Matrix.001 file - promoters70/1381818
aaataaaa

SEQ ID NO: 38744 - DNA, 9 bp, Unknown
  misc_feature (1)..( 9): Matrix.001 file - promoters70/1381818
aatgaaaaa

SEQ ID NO: 38745 - DNA, 7 bp, Unknown
  misc_feature (1)..( 7): Matrix.001 file - promoters70/1381818
aaaaaca

SEQ ID NO: 38746 - DNA, 11 bp, Unknown
  misc_feature (1)..( 11): Matrix.001 file - promoters70/1381818
aagaaaaaata

SEQ ID NO: 38747 - DNA, 8 bp, Unknown
  misc_feature (1)..( 8): Matrix.001 file - promoters70/1381818
atataatt

SEQ ID NO: 38748 - DNA, 11 bp, Unknown
  misc_feature (1)..( 11): Matrix.001 file - promoters70/1381818
agttaaattta

SEQ ID NO: 38749 - DNA, 11 bp, Unknown
  misc_feature (1)..( 11): Matrix.001 file - promoters70/1381818
aattaactttg

SEQ ID NO: 38750 - DNA, 10 bp, Unknown
  misc_feature (1)..( 10): Matrix.001 file - promoters70/1381926
gaaatagatt

SEQ ID NO: 38751 - DNA, 7 bp, Unknown
  misc_feature (1)..( 7): Matrix.001 file - promoters70/1382713
attgtgt

SEQ ID NO: 38752 - DNA, 8 bp, Unknown
  misc_feature (1)..( 8): Matrix.001 file - promoters70/1382713
attattct

SEQ ID NO: 38753 - DNA, 13 bp, Unknown
  misc_feature (1)..( 13): Matrix.001 file - promoters70/1383341
cttcctatatagt

SEQ ID NO: 38754 - DNA, 11 bp, Unknown
  misc_feature (1)..( 11): Matrix.001 file - promoters70/1383341
aaagaaataaa

SEQ ID NO: 38755 - DNA, 11 bp, Unknown
  misc_feature (1)..( 11): Matrix.001 file - promoters70/1383485
ccataattaag

SEQ ID NO: 38756 - DNA, 9 bp, Unknown
  misc_feature (1)..( 9): Matrix.001 file - promoters70/1383552
ttaaaaatt

SEQ ID NO: 38757 - DNA, 9 bp, Unknown
  misc_feature (1)..( 9): Matrix.001 file - promoters70/1383552
aaatgtctt

SEQ ID NO: 38758 - DNA, 14 bp, Unknown
  misc_feature (1)..( 14): Matrix.001 file - promoters70/1383552
aaaaatttataatc

SEQ ID NO: 38759 - DNA, 15 bp, Unknown
  misc_feature (1)..( 15): Matrix.001 file - promoters70/1384016
aaaaaatatttttga

SEQ ID NO: 38760 - DNA, 9 bp, Unknown
  misc_feature (1)..( 9): Matrix.001 file - promoters70/1384016
ttacaaaaa

SEQ ID NO: 38761 - DNA, 9 bp, Unknown
  misc_feature (1)..( 9): Matrix.001 file - promoters70/1385376
taaaagatt

SEQ ID NO: 38762 - DNA, 7 bp, Unknown
  misc_feature (1)..( 7): Matrix.001 file - promoters70/1385376
ttggttt

SEQ ID NO: 38763 - DNA, 9 bp, Unknown
  misc_feature (1)..( 9): Matrix.001 file - promoters70/1385376
tttggtttt

SEQ ID NO: 38764 - DNA, 9 bp, Unknown
  misc_feature (1)..( 9): Matrix.001 file - promoters70/1387072
aaagaaaaa

SEQ ID NO: 38765 - DNA, 11 bp, Unknown
  misc_feature (1)..( 11): Matrix.001 file - promoters70/1387123
tgtttgaacat

SEQ ID NO: 38766 - DNA, 8 bp, Unknown
  misc_feature (1)..( 8): Matrix.001 file - promoters70/1387123
caacgaaa

SEQ ID NO: 38767 - DNA, 13 bp, Unknown
  misc_feature (1)..( 13): Matrix.001 file - promoters70/1387349
aaacaaaccaaat

SEQ ID NO: 38768 - DNA, 10 bp, Unknown
  misc_feature (1)..( 10): Matrix.001 file - promoters70/1387349
acacaaaaac

SEQ ID NO: 38769 - DNA, 9 bp, Unknown
  misc_feature (1)..( 9): Matrix.001 file - promoters70/1387349
tcaaagatt

SEQ ID NO: 38770 - DNA, 12 bp, Unknown
  misc_feature (1)..( 12): Matrix.001 file - promoters70/1387349
aagaaaatgaac

SEQ ID NO: 38771 - DNA, 6 bp, Unknown
  misc_feature (1)..( 6): Matrix.001 file - promoters70/1387356
ttaaaa

SEQ ID NO: 38772 - DNA, 11 bp, Unknown
  misc_feature (1)..( 11): Matrix.001 file - promoters70/1387356
aaagtaaaaat

SEQ ID NO: 38773 - DNA, 8 bp, Unknown
  misc_feature (1)..( 8): Matrix.001 file - promoters70/1387417
attttctg

SEQ ID NO: 38774 - DNA, 9 bp, Unknown
  misc_feature (1)..( 9): Matrix.001 file - promoters70/1387417
aatgatttc

SEQ ID NO: 38775 - DNA, 11 bp, Unknown
  misc_feature (1)..( 11): Matrix.001 file - promoters70/1387449
caaattttcac

SEQ ID NO: 38776 - DNA, 8 bp, Unknown
  misc_feature (1)..( 8): Matrix.001 file - promoters70/1387449
aattatat

SEQ ID NO: 38777 - DNA, 7 bp, Unknown
  misc_feature (1)..( 7): Matrix.001 file - promoters70/1387449
tggtttt

SEQ ID NO: 38778 - DNA, 9 bp, Unknown
  misc_feature (1)..( 9): Matrix.001 file - promoters70/1387616
aataaaatt

SEQ ID NO: 38779 - DNA, 10 bp, Unknown
  misc_feature (1)..( 10): Matrix.001 file - promoters70/1387616
taaataaata

SEQ ID NO: 38780 - DNA, 8 bp, Unknown
  misc_feature (1)..( 8): Matrix.001 file - promoters70/1387616
tttcttta

SEQ ID NO: 38781 - DNA, 9 bp, Unknown
  misc_feature (1)..( 9): Matrix.001 file - promoters70/1387671
ttctgtttg

SEQ ID NO: 38782 - DNA, 11 bp, Unknown
  misc_feature (1)..( 11): Matrix.001 file - promoters70/1387671
atcaatactta

SEQ ID NO: 38783 - DNA, 8 bp, Unknown
  misc_feature (1)..( 8): Matrix.001 file - promoters70/1387671
actcttat

SEQ ID NO: 38784 - DNA, 11 bp, Unknown
  misc_feature (1)..( 11): Matrix.001 file - promoters70/1387671
ataaaaaaata

SEQ ID NO: 38785 - DNA, 13 bp, Unknown
  misc_feature (1)..( 13): Matrix.001 file - promoters70/1387671
ccaataaaaaata

SEQ ID NO: 38786 - DNA, 10 bp, Unknown
  misc_feature (1)..( 10): Matrix.001 file - promoters70/1387906
tttgaaggtt

SEQ ID NO: 38787 - DNA, 7 bp, Unknown
  misc_feature (1)..( 7): Matrix.001 file - promoters70/1387906
gaaaata

SEQ ID NO: 38788 - DNA, 11 bp, Unknown
  misc_feature (1)..( 11): Matrix.001 file - promoters70/1387906
ttttaataaca

SEQ ID NO: 38789 - DNA, 10 bp, Unknown
  misc_feature (1)..( 10): Matrix.001 file - promoters70/1387906
aaaatctgtt

SEQ ID NO: 38790 - DNA, 10 bp, Unknown
  misc_feature (1)..( 10): Matrix.001 file - promoters70/1387906
actttataat

SEQ ID NO: 38791 - DNA, 11 bp, Unknown
  misc_feature (1)..( 11): Matrix.001 file - promoters70/1388009
tattaaaatat

SEQ ID NO: 38792 - DNA, 7 bp, Unknown
  misc_feature (1)..( 7): Matrix.001 file - promoters70/1388009
atatttt

SEQ ID NO: 38793 - DNA, 7 bp, Unknown
  misc_feature (1)..( 7): Matrix.001 file - promoters70/1388009
attttac

SEQ ID NO: 38794 - DNA, 10 bp, Unknown
  misc_feature (1)..( 10): Matrix.001 file - promoters70/1388009
cgaaatcata

SEQ ID NO: 38795 - DNA, 7 bp, Unknown
  misc_feature (1)..( 7): Matrix.001 file - promoters70/1388009
ctatatg

SEQ ID NO: 38796 - DNA, 9 bp, Unknown
  misc_feature (1)..( 9): Matrix.001 file - promoters70/1388009
aaattataa

SEQ ID NO: 38797 - DNA, 7 bp, Unknown
  misc_feature (1)..( 7): Matrix.001 file - promoters70/1389279
caatgtt

SEQ ID NO: 38798 - DNA, 8 bp, Unknown
  misc_feature (1)..( 8): Matrix.001 file - promoters70/1389279
agaaaaaa

SEQ ID NO: 38799 - DNA, 7 bp, Unknown
  misc_feature (1)..( 7): Matrix.001 file - promoters70/1389279
acaaaaa

SEQ ID NO: 38800 - DNA, 8 bp, Unknown
  misc_feature (1)..( 8): Matrix.001 file - promoters70/1389279
tatatata

SEQ ID NO: 38801 - DNA, 9 bp, Unknown
  misc_feature (1)..( 9): Matrix.001 file - promoters70/1389279
aaaacaagt

SEQ ID NO: 38802 - DNA, 9 bp, Unknown
  misc_feature (1)..( 9): Matrix.001 file - promoters70/1390146
aatttgaac

SEQ ID NO: 38803 - DNA, 10 bp, Unknown
  misc_feature (1)..( 10): Matrix.001 file - promoters70/1390240
aaatcatttt

SEQ ID NO: 38804 - DNA, 7 bp, Unknown
  misc_feature (1)..( 7): Matrix.001 file - promoters70/1391420
agatttt

SEQ ID NO: 38805 - DNA, 7 bp, Unknown
  misc_feature (1)..( 7): Matrix.001 file - promoters70/1393104
atgtgga

SEQ ID NO: 38806 - DNA, 8 bp, Unknown
  misc_feature (1)..( 8): Matrix.001 file - promoters70/1393139
tagatttg

SEQ ID NO: 38807 - DNA, 7 bp, Unknown
  misc_feature (1)..( 7): Matrix.001 file - promoters70/1393139
cttcatt

SEQ ID NO: 38808 - DNA, 13 bp, Unknown
  misc_feature (1)..( 13): Matrix.001 file - promoters70/1393139
tcaacttttgaga

SEQ ID NO: 38809 - DNA, 10 bp, Unknown
  misc_feature (1)..( 10): Matrix.001 file - promoters70/1393139
aataaaagac

SEQ ID NO: 38810 - DNA, 11 bp, Unknown
  misc_feature (1)..( 11): Matrix.001 file - promoters70/1393139
taccaaaagta

SEQ ID NO: 38811 - DNA, 11 bp, Unknown
  misc_feature (1)..( 11): Matrix.001 file - promoters70/1393139
acgagtctaga

SEQ ID NO: 38812 - DNA, 7 bp, Unknown
  misc_feature (1)..( 7): Matrix.001 file - promoters70/1393139
acgaaaa

SEQ ID NO: 38813 - DNA, 9 bp, Unknown
  misc_feature (1)..( 9): Matrix.001 file - promoters70/1393326
atttgtttg

SEQ ID NO: 38814 - DNA, 10 bp, Unknown
  misc_feature (1)..( 10): Matrix.001 file - promoters70/1393326
aaataaagtt

SEQ ID NO: 38815 - DNA, 7 bp, Unknown
  misc_feature (1)..( 7): Matrix.001 file - promoters70/1393326
aagaaaa

SEQ ID NO: 38816 - DNA, 11 bp, Unknown
  misc_feature (1)..( 11): Matrix.001 file - promoters70/1393492
tttaataacct

SEQ ID NO: 38817 - DNA, 13 bp, Unknown
  misc_feature (1)..( 13): Matrix.001 file - promoters70/1393787
gattaaggtctct

SEQ ID NO: 38818 - DNA, 9 bp, Unknown
  misc_feature (1)..( 9): Matrix.001 file - promoters70/1393787
ataaaaaat

SEQ ID NO: 38819 - DNA, 13 bp, Unknown
  misc_feature (1)..( 13): Matrix.001 file - promoters70/1393787
aaagaaattcgtt

SEQ ID NO: 38820 - DNA, 10 bp, Unknown
  misc_feature (1)..( 10): Matrix.001 file - promoters70/1393787
ctatgttttg

SEQ ID NO: 38821 - DNA, 9 bp, Unknown
  misc_feature (1)..( 9): Matrix.001 file - promoters70/1393787
cattttcaa

SEQ ID NO: 38822 - DNA, 11 bp, Unknown
  misc_feature (1)..( 11): Matrix.001 file - promoters70/1393787
taaccattttc

SEQ ID NO: 38823 - DNA, 14 bp, Unknown
  misc_feature (1)..( 14): Matrix.001 file - promoters70/1393805
ataattaaagtcta

SEQ ID NO: 38824 - DNA, 9 bp, Unknown
  misc_feature (1)..( 9): Matrix.001 file - promoters70/1393805
ttacttcac

SEQ ID NO: 38825 - DNA, 9 bp, Unknown
  misc_feature (1)..( 9): Matrix.001 file - promoters70/1394480
aaaatttct

SEQ ID NO: 38826 - DNA, 8 bp, Unknown
  misc_feature (1)..( 8): Matrix.001 file - promoters70/1394480
tgtgaaac

SEQ ID NO: 38827 - DNA, 9 bp, Unknown
  misc_feature (1)..( 9): Matrix.001 file - promoters70/1394480
aaaatttct

SEQ ID NO: 38828 - DNA, 9 bp, Unknown
  misc_feature (1)..( 9): Matrix.001 file - promoters70/1394480
tttcaaaat

SEQ ID NO: 38829 - DNA, 11 bp, Unknown
  misc_feature (1)..( 11): Matrix.001 file - promoters70/1394510
taaaatttttt

SEQ ID NO: 38830 - DNA, 9 bp, Unknown
  misc_feature (1)..( 9): Matrix.001 file - promoters70/1394510
tttattcag

SEQ ID NO: 38831 - DNA, 9 bp, Unknown
  misc_feature (1)..( 9): Matrix.001 file - promoters70/1394592
ataattata

SEQ ID NO: 38832 - DNA, 9 bp, Unknown
  misc_feature (1)..( 9): Matrix.001 file - promoters70/1395095
aaaataatc

SEQ ID NO: 38833 - DNA, 7 bp, Unknown
  misc_feature (1)..( 7): Matrix.001 file - promoters70/1395095
aatagat

SEQ ID NO: 38834 - DNA, 8 bp, Unknown
  misc_feature (1)..( 8): Matrix.001 file - promoters70/1395095
tttatttc

SEQ ID NO: 38835 - DNA, 7 bp, Unknown
  misc_feature (1)..( 7): Matrix.001 file - promoters70/1395095
aaaaaaa

SEQ ID NO: 38836 - DNA, 11 bp, Unknown
  misc_feature (1)..( 11): Matrix.001 file - promoters70/1395095
caaattttttt

SEQ ID NO: 38837 - DNA, 8 bp, Unknown
  misc_feature (1)..( 8): Matrix.001 file - promoters70/1395095
aaagtctt

SEQ ID NO: 38838 - DNA, 8 bp, Unknown
  misc_feature (1)..( 8): Matrix.001 file - promoters70/1395095
catttttt

SEQ ID NO: 38839 - DNA, 8 bp, Unknown
  misc_feature (1)..( 8): Matrix.001 file - promoters70/1395095
aaaattct

SEQ ID NO: 38840 - DNA, 8 bp, Unknown
  misc_feature (1)..( 8): Matrix.001 file - promoters70/1395095
tataaaaa

SEQ ID NO: 38841 - DNA, 7 bp, Unknown
  misc_feature (1)..( 7): Matrix.001 file - promoters70/1395636
caatatt

SEQ ID NO: 38842 - DNA, 7 bp, Unknown
  misc_feature (1)..( 7): Matrix.001 file - promoters70/1395636
tttttac

SEQ ID NO: 38843 - DNA, 12 bp, Unknown
  misc_feature (1)..( 12): Matrix.001 file - promoters70/1395636
aaaggaaaaaat

SEQ ID NO: 38844 - DNA, 9 bp, Unknown
  misc_feature (1)..( 9): Matrix.001 file - promoters70/1395636
tataaattg

SEQ ID NO: 38845 - DNA, 7 bp, Unknown
  misc_feature (1)..( 7): Matrix.001 file - promoters70/1395636
tttgttt

SEQ ID NO: 38846 - DNA, 10 bp, Unknown
  misc_feature (1)..( 10): Matrix.001 file - promoters70/1395824
ttcaaatata

SEQ ID NO: 38847 - DNA, 10 bp, Unknown
  misc_feature (1)..( 10): Matrix.001 file - promoters70/1396085
tttttattct

SEQ ID NO: 38848 - DNA, 8 bp, Unknown
  misc_feature (1)..( 8): Matrix.001 file - promoters70/1396085
ataaaatt

SEQ ID NO: 38849 - DNA, 8 bp, Unknown
  misc_feature (1)..( 8): Matrix.001 file - promoters70/1396085
aaaataaa

SEQ ID NO: 38850 - DNA, 9 bp, Unknown
  misc_feature (1)..( 9): Matrix.001 file - promoters70/1396182
aagaataag

SEQ ID NO: 38851 - DNA, 7 bp, Unknown
  misc_feature (1)..( 7): Matrix.001 file - promoters70/1396182
aaaacaa

SEQ ID NO: 38852 - DNA, 11 bp, Unknown
  misc_feature (1)..( 11): Matrix.001 file - promoters70/1396182
ggaaatgaaat

SEQ ID NO: 38853 - DNA, 7 bp, Unknown
  misc_feature (1)..( 7): Matrix.001 file - promoters70/1396182
gtatata

SEQ ID NO: 38854 - DNA, 7 bp, Unknown
  misc_feature (1)..( 7): Matrix.001 file - promoters70/1396238
taaaggg

SEQ ID NO: 38855 - DNA, 10 bp, Unknown
  misc_feature (1)..( 10): Matrix.001 file - promoters70/1396308
taaaaaggaa

SEQ ID NO: 38856 - DNA, 7 bp, Unknown
  misc_feature (1)..( 7): Matrix.001 file - promoters70/1396308
atataat

SEQ ID NO: 38857 - DNA, 8 bp, Unknown
  misc_feature (1)..( 8): Matrix.001 file - promoters70/1396308
taaatata

SEQ ID NO: 38858 - DNA, 11 bp, Unknown
  misc_feature (1)..( 11): Matrix.001 file - promoters70/1396308
ataaaattaat

SEQ ID NO: 38859 - DNA, 12 bp, Unknown
  misc_feature (1)..( 12): Matrix.001 file - promoters70/1396308
ttttgtaaacaa

SEQ ID NO: 38860 - DNA, 8 bp, Unknown
  misc_feature (1)..( 8): Matrix.001 file - promoters70/1396308
aaatttat

SEQ ID NO: 38861 - DNA, 8 bp, Unknown
  misc_feature (1)..( 8): Matrix.001 file - promoters70/1396308
aatcaaaa

SEQ ID NO: 38862 - DNA, 11 bp, Unknown
  misc_feature (1)..( 11): Matrix.001 file - promoters70/1396308
aaaaacacgaa

SEQ ID NO: 38863 - DNA, 8 bp, Unknown
  misc_feature (1)..( 8): Matrix.001 file - promoters70/1396308
atataata

SEQ ID NO: 38864 - DNA, 6 bp, Unknown
  misc_feature (1)..( 6): Matrix.001 file - promoters70/1396354
tacatt

SEQ ID NO: 38865 - DNA, 7 bp, Unknown
  misc_feature (1)..( 7): Matrix.001 file - promoters70/1396354
tttgatt

SEQ ID NO: 38866 - DNA, 9 bp, Unknown
  misc_feature (1)..( 9): Matrix.001 file - promoters70/1396469
cattcttat

SEQ ID NO: 38867 - DNA, 9 bp, Unknown
  misc_feature (1)..( 9): Matrix.001 file - promoters70/1396469
acttacaaa

SEQ ID NO: 38868 - DNA, 9 bp, Unknown
  misc_feature (1)..( 9): Matrix.001 file - promoters70/1396469
atataaaca

SEQ ID NO: 38869 - DNA, 6 bp, Unknown
  misc_feature (1)..( 6): Matrix.001 file - promoters70/1396469
aagaaa

SEQ ID NO: 38870 - DNA, 14 bp, Unknown
  misc_feature (1)..( 14): Matrix.001 file - promoters70/1396469
ttagctataaatta

SEQ ID NO: 38871 - DNA, 7 bp, Unknown
  misc_feature (1)..( 7): Matrix.001 file - promoters70/1396469
caacaaa

SEQ ID NO: 38872 - DNA, 9 bp, Unknown
  misc_feature (1)..( 9): Matrix.001 file - promoters70/1396482
aaaaaaagt

SEQ ID NO: 38873 - DNA, 9 bp, Unknown
  misc_feature (1)..( 9): Matrix.001 file - promoters70/1397080
aaatcaaat

SEQ ID NO: 38874 - DNA, 10 bp, Unknown
  misc_feature (1)..( 10): Matrix.001 file - promoters70/1397080
ctaaacaaaa

SEQ ID NO: 38875 - DNA, 8 bp, Unknown
  misc_feature (1)..( 8): Matrix.001 file - promoters70/1397125
tcccaaaa

SEQ ID NO: 38876 - DNA, 8 bp, Unknown
  misc_feature (1)..( 8): Matrix.001 file - promoters70/1397125
taaaattt

SEQ ID NO: 38877 - DNA, 8 bp, Unknown
  misc_feature (1)..( 8): Matrix.001 file - promoters70/1397203
ttattcta

SEQ ID NO: 38878 - DNA, 9 bp, Unknown
  misc_feature (1)..( 9): Matrix.001 file - promoters70/1397203
aaaaaacaa

SEQ ID NO: 38879 - DNA, 10 bp, Unknown
  misc_feature (1)..( 10): Matrix.001 file - promoters70/1397203
aaattataaa

SEQ ID NO: 38880 - DNA, 8 bp, Unknown
  misc_feature (1)..( 8): Matrix.001 file - promoters70/1397231
tatgttaa

SEQ ID NO: 38881 - DNA, 12 bp, Unknown
  misc_feature (1)..( 12): Matrix.001 file - promoters70/1397231
attattttccta

SEQ ID NO: 38882 - DNA, 6 bp, Unknown
  misc_feature (1)..( 6): Matrix.001 file - promoters70/1397231
attatt

SEQ ID NO: 38883 - DNA, 16 bp, Unknown
  misc_feature (1)..( 16): Matrix.001 file - promoters70/1397231
agataagtattaaaaa

SEQ ID NO: 38884 - DNA, 8 bp, Unknown
  misc_feature (1)..( 8): Matrix.001 file - promoters70/1397231
ataaaaaa

SEQ ID NO: 38885 - DNA, 10 bp, Unknown
  misc_feature (1)..( 10): Matrix.001 file - promoters70/1397231
ttatatatat

SEQ ID NO: 38886 - DNA, 10 bp, Unknown
  misc_feature (1)..( 10): Matrix.001 file - promoters70/1397263
atatatcaaa

SEQ ID NO: 38887 - DNA, 9 bp, Unknown
  misc_feature (1)..( 9): Matrix.001 file - promoters70/1397263
ataaaaata

SEQ ID NO: 38888 - DNA, 17 bp, Unknown
  misc_feature (1)..( 17): Matrix.001 file - promoters70/1397263
ggaatttattttaaaac

SEQ ID NO: 38889 - DNA, 10 bp, Unknown
  misc_feature (1)..( 10): Matrix.001 file - promoters70/1397263
ttaaaaaaat

SEQ ID NO: 38890 - DNA, 10 bp, Unknown
  misc_feature (1)..( 10): Matrix.001 file - promoters70/1397263
ggcccaataa

SEQ ID NO: 38891 - DNA, 12 bp, Unknown
  misc_feature (1)..( 12): Matrix.001 file - promoters70/1397263
ggcaaactaaaa

SEQ ID NO: 38892 - DNA, 13 bp, Unknown
  misc_feature (1)..( 13): Matrix.001 file - promoters70/1397350
gtctcatggattc

SEQ ID NO: 38893 - DNA, 11 bp, Unknown
  misc_feature (1)..( 11): Matrix.001 file - promoters70/1397461
aatacaaaatg

SEQ ID NO: 38894 - DNA, 7 bp, Unknown
  misc_feature (1)..( 7): Matrix.001 file - promoters70/1397461
ctttttg

SEQ ID NO: 38895 - DNA, 9 bp, Unknown
  misc_feature (1)..( 9): Matrix.001 file - promoters70/1397461
tcaaaaaat

SEQ ID NO: 38896 - DNA, 8 bp, Unknown
  misc_feature (1)..( 8): Matrix.001 file - promoters70/1397500
aatcatat

SEQ ID NO: 38897 - DNA, 8 bp, Unknown
  misc_feature (1)..( 8): Matrix.001 file - promoters70/1397500
aaatggag

SEQ ID NO: 38898 - DNA, 10 bp, Unknown
  misc_feature (1)..( 10): Matrix.001 file - promoters70/1397500
aaattgaatc

SEQ ID NO: 38899 - DNA, 9 bp, Unknown
  misc_feature (1)..( 9): Matrix.001 file - promoters70/1397500
ttataataa

SEQ ID NO: 38900 - DNA, 9 bp, Unknown
  misc_feature (1)..( 9): Matrix.001 file - promoters70/1397500
agtgccaat

SEQ ID NO: 38901 - DNA, 10 bp, Unknown
  misc_feature (1)..( 10): Matrix.001 file - promoters70/1397500
tcattattat

SEQ ID NO: 38902 - DNA, 9 bp, Unknown
  misc_feature (1)..( 9): Matrix.001 file - promoters70/1397500
ataattatt

SEQ ID NO: 38903 - DNA, 10 bp, Unknown
  misc_feature (1)..( 10): Matrix.001 file - promoters70/1397500
taaatcataa

SEQ ID NO: 38904 - DNA, 7 bp, Unknown
  misc_feature (1)..( 7): Matrix.001 file - promoters70/1397500
atttttt

SEQ ID NO: 38905 - DNA, 9 bp, Unknown
  misc_feature (1)..( 9): Matrix.001 file - promoters70/1397500
ttcaacaat

SEQ ID NO: 38906 - DNA, 8 bp, Unknown
  misc_feature (1)..( 8): Matrix.001 file - promoters70/1397500
caaccaaa

SEQ ID NO: 38907 - DNA, 8 bp, Unknown
  misc_feature (1)..( 8): Matrix.001 file - promoters70/1397500
aaacaatt

SEQ ID NO: 38908 - DNA, 10 bp, Unknown
  misc_feature (1)..( 10): Matrix.001 file - promoters70/1397500
tttttgtgac

SEQ ID NO: 38909 - DNA, 9 bp, Unknown
  misc_feature (1)..( 9): Matrix.001 file - promoters70/1397500
acatattaa

SEQ ID NO: 38910 - DNA, 7 bp, Unknown
  misc_feature (1)..( 7): Matrix.001 file - promoters70/1397700
gtgtttg

SEQ ID NO: 38911 - DNA, 8 bp, Unknown
  misc_feature (1)..( 8): Matrix.001 file - promoters70/1397700
atttcaaa

SEQ ID NO: 38912 - DNA, 11 bp, Unknown
  misc_feature (1)..( 11): Matrix.001 file - promoters70/1397700
taaagtcaaaa

SEQ ID NO: 38913 - DNA, 10 bp, Unknown
  misc_feature (1)..( 10): Matrix.001 file - promoters70/1397700
aaagtcaaaa

SEQ ID NO: 38914 - DNA, 12 bp, Unknown
  misc_feature (1)..( 12): Matrix.001 file - promoters70/1397753
ttctaaaataat

SEQ ID NO: 38915 - DNA, 10 bp, Unknown
  misc_feature (1)..( 10): Matrix.001 file - promoters70/1397821
gaattgatta

SEQ ID NO: 38916 - DNA, 10 bp, Unknown
  misc_feature (1)..( 10): Matrix.001 file - promoters70/1397821
gtcttttcaa

SEQ ID NO: 38917 - DNA, 7 bp, Unknown
  misc_feature (1)..( 7): Matrix.001 file - promoters70/1398124
aatattg

SEQ ID NO: 38918 - DNA, 8 bp, Unknown
  misc_feature (1)..( 8): Matrix.001 file - promoters70/1398124
ttaagtag

SEQ ID NO: 38919 - DNA, 11 bp, Unknown
  misc_feature (1)..( 11): Matrix.001 file - promoters70/1398337
gaaacaaaaac

SEQ ID NO: 38920 - DNA, 10 bp, Unknown
  misc_feature (1)..( 10): Matrix.001 file - promoters70/1398545
tataataaaa

SEQ ID NO: 38921 - DNA, 13 bp, Unknown
  misc_feature (1)..( 13): Matrix.001 file - promoters70/1398545
aactctttttaaa

SEQ ID NO: 38922 - DNA, 9 bp, Unknown
  misc_feature (1)..( 9): Matrix.001 file - promoters70/1398545
ttcaaaaaa

SEQ ID NO: 38923 - DNA, 12 bp, Unknown
  misc_feature (1)..( 12): Matrix.001 file - promoters70/1398545
aaggcccaataa

SEQ ID NO: 38924 - DNA, 11 bp, Unknown
  misc_feature (1)..( 11): Matrix.001 file - promoters70/1398545
acacacaacta

SEQ ID NO: 38925 - DNA, 9 bp, Unknown
  misc_feature (1)..( 9): Matrix.001 file - promoters70/1398573
atttagaaa

SEQ ID NO: 38926 - DNA, 8 bp, Unknown
  misc_feature (1)..( 8): Matrix.001 file - promoters70/1398573
aacaacat

SEQ ID NO: 38927 - DNA, 11 bp, Unknown
  misc_feature (1)..( 11): Matrix.001 file - promoters70/1399325
aaagtaattta

SEQ ID NO: 38928 - DNA, 10 bp, Unknown
  misc_feature (1)..( 10): Matrix.001 file - promoters70/1399325
taaatatgat

SEQ ID NO: 38929 - DNA, 11 bp, Unknown
  misc_feature (1)..( 11): Matrix.001 file - promoters70/1399325
ataattaaatc

SEQ ID NO: 38930 - DNA, 12 bp, Unknown
  misc_feature (1)..( 12): Matrix.001 file - promoters70/1399345
aataaagttttt

SEQ ID NO: 38931 - DNA, 11 bp, Unknown
  misc_feature (1)..( 11): Matrix.001 file - promoters70/1399726
ccaattaattt

SEQ ID NO: 38932 - DNA, 8 bp, Unknown
  misc_feature (1)..( 8): Matrix.001 file - promoters70/1399726
agtgataa

SEQ ID NO: 38933 - DNA, 8 bp, Unknown
  misc_feature (1)..( 8): Matrix.001 file - promoters70/1399726
caaattct

SEQ ID NO: 38934 - DNA, 12 bp, Unknown
  misc_feature (1)..( 12): Matrix.001 file - promoters70/1399726
gtttaacacaaa

SEQ ID NO: 38935 - DNA, 8 bp, Unknown
  misc_feature (1)..( 8): Matrix.001 file - promoters70/1399726
aagcaaaa

SEQ ID NO: 38936 - DNA, 11 bp, Unknown
  misc_feature (1)..( 11): Matrix.001 file - promoters70/1399726
aaaatgaaaaa

SEQ ID NO: 38937 - DNA, 8 bp, Unknown
  misc_feature (1)..( 8): Matrix.001 file - promoters70/1399726
caaaatac

SEQ ID NO: 38938 - DNA, 8 bp, Unknown
  misc_feature (1)..( 8): Matrix.001 file - promoters70/1399726
aaaacaaa

SEQ ID NO: 38939 - DNA, 11 bp, Unknown
  misc_feature (1)..( 11): Matrix.001 file - promoters70/1399726
aaaaaagaaaa

SEQ ID NO: 38940 - DNA, 7 bp, Unknown
  misc_feature (1)..( 7): Matrix.001 file - promoters70/1411616
aaaatca

SEQ ID NO: 38941 - DNA, 6 bp, Unknown
  misc_feature (1)..( 6): Matrix.001 file - promoters70/1413191
ctttct

SEQ ID NO: 38942 - DNA, 14 bp, Unknown
  misc_feature (1)..( 14): Matrix.001 file - promoters70/1413191
caatcaaaagaaac

SEQ ID NO: 38943 - DNA, 10 bp, Unknown
  misc_feature (1)..( 10): Matrix.001 file - promoters70/1413191
tttatgttga

SEQ ID NO: 38944 - DNA, 7 bp, Unknown
  misc_feature (1)..( 7): Matrix.001 file - promoters70/1413191
atataaa

SEQ ID NO: 38945 - DNA, 13 bp, Unknown
  misc_feature (1)..( 13): Matrix.001 file - promoters70/1441044
acaaacttttttt

SEQ ID NO: 38946 - DNA, 9 bp, Unknown
  misc_feature (1)..( 9): Matrix.001 file - promoters70/1441044
aactaaacc

SEQ ID NO: 38947 - DNA, 7 bp, Unknown
  misc_feature (1)..( 7): Matrix.001 file - promoters70/1441044
aaacaat

SEQ ID NO: 38948 - DNA, 17 bp, Unknown
  misc_feature (1)..( 17): Matrix.001 file - promoters70/1441184
tataaataaacccttaa

SEQ ID NO: 38949 - DNA, 10 bp, Unknown
  misc_feature (1)..( 10): Matrix.001 file - promoters70/1441184
ctataaaaaa

SEQ ID NO: 38950 - DNA, 11 bp, Unknown
  misc_feature (1)..( 11): Matrix.001 file - promoters70/1441657
aacttctattt

SEQ ID NO: 38951 - DNA, 7 bp, Unknown
  misc_feature (1)..( 7): Matrix.001 file - promoters70/1441657
ccaaacc

SEQ ID NO: 38952 - DNA, 9 bp, Unknown
  misc_feature (1)..( 9): Matrix.001 file - promoters70/1441657
aaattttca

SEQ ID NO: 38953 - DNA, 7 bp, Unknown
  misc_feature (1)..( 7): Matrix.001 file - promoters70/1441657
caatatt

SEQ ID NO: 38954 - DNA, 13 bp, Unknown
  misc_feature (1)..( 13): Matrix.001 file - promoters70/1441665
gagacaaaaccaa

SEQ ID NO: 38955 - DNA, 9 bp, Unknown
  misc_feature (1)..( 9): Matrix.001 file - promoters70/1441665
acaaaaaac

SEQ ID NO: 38956 - DNA, 13 bp, Unknown
  misc_feature (1)..( 13): Matrix.001 file - promoters70/1441665
tcaaaaacaaaaa

SEQ ID NO: 38957 - DNA, 10 bp, Unknown
  misc_feature (1)..( 10): Matrix.001 file - promoters70/1441665
actatttaaa

SEQ ID NO: 38958 - DNA, 12 bp, Unknown
  misc_feature (1)..( 12): Matrix.001 file - promoters70/1441665
ttcttataattc

SEQ ID NO: 38959 - DNA, 8 bp, Unknown
  misc_feature (1)..( 8): Matrix.001 file - promoters70/1441665
tatgggcc

SEQ ID NO: 38960 - DNA, 9 bp, Unknown
  misc_feature (1)..( 9): Matrix.001 file - promoters70/1441665
caaacaaaa

SEQ ID NO: 38961 - DNA, 11 bp, Unknown
  misc_feature (1)..( 11): Matrix.001 file - promoters70/1441814
taaaaatttat

SEQ ID NO: 38962 - DNA, 8 bp, Unknown
  misc_feature (1)..( 8): Matrix.001 file - promoters70/1441814
ataactat

SEQ ID NO: 38963 - DNA, 12 bp, Unknown
  misc_feature (1)..( 12): Matrix.001 file - promoters70/1441814
tacacaagtttt

SEQ ID NO: 38964 - DNA, 11 bp, Unknown
  misc_feature (1)..( 11): Matrix.001 file - promoters70/1441814
ttttacttttt

SEQ ID NO: 38965 - DNA, 7 bp, Unknown
  misc_feature (1)..( 7): Matrix.001 file - promoters70/1441835
agcaaaa

SEQ ID NO: 38966 - DNA, 10 bp, Unknown
  misc_feature (1)..( 10): Matrix.001 file - promoters70/1441835
aagtcaaaac

SEQ ID NO: 38967 - DNA, 9 bp, Unknown
  misc_feature (1)..( 9): Matrix.001 file - promoters70/1441859
ataaaaata

SEQ ID NO: 38968 - DNA, 8 bp, Unknown
  misc_feature (1)..( 8): Matrix.001 file - promoters70/1441859
atatttta

SEQ ID NO: 38969 - DNA, 10 bp, Unknown
  misc_feature (1)..( 10): Matrix.001 file - promoters70/1441912
gtttggtttt

SEQ ID NO: 38970 - DNA, 6 bp, Unknown
  misc_feature (1)..( 6): Matrix.001 file - promoters70/1441912
tatata

SEQ ID NO: 38971 - DNA, 10 bp, Unknown
  misc_feature (1)..( 10): Matrix.001 file - promoters70/1441912
aacaaaagtt

SEQ ID NO: 38972 - DNA, 7 bp, Unknown
  misc_feature (1)..( 7): Matrix.001 file - promoters70/1442156
attttag

SEQ ID NO: 38973 - DNA, 9 bp, Unknown
  misc_feature (1)..( 9): Matrix.001 file - promoters70/1442156
aaataatta

SEQ ID NO: 38974 - DNA, 7 bp, Unknown
  misc_feature (1)..( 7): Matrix.001 file - promoters70/1442156
aatatac

SEQ ID NO: 38975 - DNA, 7 bp, Unknown
  misc_feature (1)..( 7): Matrix.001 file - promoters70/1442156
aaaaaaa

SEQ ID NO: 38976 - DNA, 7 bp, Unknown
  misc_feature (1)..( 7): Matrix.001 file - promoters70/1442156
tttattt

SEQ ID NO: 38977 - DNA, 10 bp, Unknown
  misc_feature (1)..( 10): Matrix.001 file - promoters70/1442156
aaaatcaaaa

SEQ ID NO: 38978 - DNA, 7 bp, Unknown
  misc_feature (1)..( 7): Matrix.001 file - promoters70/1442156
aaaataa

SEQ ID NO: 38979 - DNA, 8 bp, Unknown
  misc_feature (1)..( 8): Matrix.001 file - promoters70/1442156
cttcttct

SEQ ID NO: 38980 - DNA, 6 bp, Unknown
  misc_feature (1)..( 6): Matrix.001 file - promoters70/1442156
cacgtg

SEQ ID NO: 38981 - DNA, 9 bp, Unknown
  misc_feature (1)..( 9): Matrix.001 file - promoters70/1442156
attaattta

SEQ ID NO: 38982 - DNA, 7 bp, Unknown
  misc_feature (1)..( 7): Matrix.001 file - promoters70/1442156
aaattac

SEQ ID NO: 38983 - DNA, 7 bp, Unknown
  misc_feature (1)..( 7): Matrix.001 file - promoters70/1442408
cttcttt

SEQ ID NO: 38984 - DNA, 10 bp, Unknown
  misc_feature (1)..( 10): Matrix.001 file - promoters70/1442427
taaatttgct

SEQ ID NO: 38985 - DNA, 11 bp, Unknown
  misc_feature (1)..( 11): Matrix.001 file - promoters70/1442476
cccgtagaatt

SEQ ID NO: 38986 - DNA, 9 bp, Unknown
  misc_feature (1)..( 9): Matrix.001 file - promoters70/1442476
aaacaaaaa

SEQ ID NO: 38987 - DNA, 9 bp, Unknown
  misc_feature (1)..( 9): Matrix.001 file - promoters70/1442504
attatatct

SEQ ID NO: 38988 - DNA, 9 bp, Unknown
  misc_feature (1)..( 9): Matrix.001 file - promoters70/1442649
aaaatagtt

SEQ ID NO: 38989 - DNA, 7 bp, Unknown
  misc_feature (1)..( 7): Matrix.001 file - promoters70/1442649
atatcat

SEQ ID NO: 38990 - DNA, 6 bp, Unknown
  misc_feature (1)..( 6): Matrix.001 file - promoters70/1442649
tattta

SEQ ID NO: 38991 - DNA, 9 bp, Unknown
  misc_feature (1)..( 9): Matrix.001 file - promoters70/1442880
acctctttt

SEQ ID NO: 38992 - DNA, 7 bp, Unknown
  misc_feature (1)..( 7): Matrix.001 file - promoters70/1442880
aatttac

SEQ ID NO: 38993 - DNA, 10 bp, Unknown
  misc_feature (1)..( 10): Matrix.001 file - promoters70/1442880
aaaaaattgt

SEQ ID NO: 38994 - DNA, 8 bp, Unknown
  misc_feature (1)..( 8): Matrix.001 file - promoters70/1442880
aagctata

SEQ ID NO: 38995 - DNA, 11 bp, Unknown
  misc_feature (1)..( 11): Matrix.001 file - promoters70/1442880
ttacttaaatt

SEQ ID NO: 38996 - DNA, 9 bp, Unknown
  misc_feature (1)..( 9): Matrix.001 file - promoters70/1442880
aaagaattg

SEQ ID NO: 38997 - DNA, 13 bp, Unknown
  misc_feature (1)..( 13): Matrix.001 file - promoters70/1442880
aatatcaacgacg

SEQ ID NO: 38998 - DNA, 8 bp, Unknown
  misc_feature (1)..( 8): Matrix.001 file - promoters70/1442880
aaataata

SEQ ID NO: 38999 - DNA, 12 bp, Unknown
  misc_feature (1)..( 12): Matrix.001 file - promoters70/1442975
ctttttgtatat

SEQ ID NO: 39000 - DNA, 8 bp, Unknown
  misc_feature (1)..( 8): Matrix.001 file - promoters70/1442975
tctgaatt

SEQ ID NO: 39001 - DNA, 12 bp, Unknown
  misc_feature (1)..( 12): Matrix.001 file - promoters70/1442993
aaataattgtat

SEQ ID NO: 39002 - DNA, 10 bp, Unknown
  misc_feature (1)..( 10): Matrix.001 file - promoters70/1442993
gaaatagatt

SEQ ID NO: 39003 - DNA, 11 bp, Unknown
  misc_feature (1)..( 11): Matrix.001 file - promoters70/1442993
ttacttaaatt

SEQ ID NO: 39004 - DNA, 12 bp, Unknown
  misc_feature (1)..( 12): Matrix.001 file - promoters70/1443021
tcaaaatttatc

SEQ ID NO: 39005 - DNA, 15 bp, Unknown
  misc_feature (1)..( 15): Matrix.001 file - promoters70/1443192
aaaaattattaaatt

SEQ ID NO: 39006 - DNA, 9 bp, Unknown
  misc_feature (1)..( 9): Matrix.001 file - promoters70/1443192
ttaataata

SEQ ID NO: 39007 - DNA, 8 bp, Unknown
  misc_feature (1)..( 8): Matrix.001 file - promoters70/1443192
ataatttt

SEQ ID NO: 39008 - DNA, 10 bp, Unknown
  misc_feature (1)..( 10): Matrix.001 file - promoters70/1443192
ctatatatat

SEQ ID NO: 39009 - DNA, 8 bp, Unknown
  misc_feature (1)..( 8): Matrix.001 file - promoters70/1443192
taattgaa

SEQ ID NO: 39010 - DNA, 8 bp, Unknown
  misc_feature (1)..( 8): Matrix.001 file - promoters70/1443306
tttgtaat

SEQ ID NO: 39011 - DNA, 12 bp, Unknown
  misc_feature (1)..( 12): Matrix.001 file - promoters70/1443306
taaaatattttt

SEQ ID NO: 39012 - DNA, 7 bp, Unknown
  misc_feature (1)..( 7): Matrix.001 file - promoters70/1443306
tttattt

SEQ ID NO: 39013 - DNA, 7 bp, Unknown
  misc_feature (1)..( 7): Matrix.001 file - promoters70/1443306
cataaac

SEQ ID NO: 39014 - DNA, 11 bp, Unknown
  misc_feature (1)..( 11): Matrix.001 file - promoters70/1443306
tatatataaat

SEQ ID NO: 39015 - DNA, 10 bp, Unknown
  misc_feature (1)..( 10): Matrix.001 file - promoters70/1443306
ttaattttac

SEQ ID NO: 39016 - DNA, 9 bp, Unknown
  misc_feature (1)..( 9): Matrix.001 file - promoters70/1443338
tcttataat

SEQ ID NO: 39017 - DNA, 8 bp, Unknown
  misc_feature (1)..( 8): Matrix.001 file - promoters70/1443338
tcttataa

SEQ ID NO: 39018 - DNA, 11 bp, Unknown
  misc_feature (1)..( 11): Matrix.001 file - promoters70/1443349
ttttgaagaat

SEQ ID NO: 39019 - DNA, 16 bp, Unknown
  misc_feature (1)..( 16): Matrix.001 file - promoters70/1443349
atagattttaaaaaaa

SEQ ID NO: 39020 - DNA, 8 bp, Unknown
  misc_feature (1)..( 8): Matrix.001 file - promoters70/1443349
aattaaag

SEQ ID NO: 39021 - DNA, 11 bp, Unknown
  misc_feature (1)..( 11): Matrix.001 file - promoters70/1443349
tatatataaaa

SEQ ID NO: 39022 - DNA, 11 bp, Unknown
  misc_feature (1)..( 11): Matrix.001 file - promoters70/1443349
attataaataa

SEQ ID NO: 39023 - DNA, 8 bp, Unknown
  misc_feature (1)..( 8): Matrix.001 file - promoters70/1443349
cttcataa

SEQ ID NO: 39024 - DNA, 14 bp, Unknown
  misc_feature (1)..( 14): Matrix.001 file - promoters70/1443349
atagattgtaaaaa

SEQ ID NO: 39025 - DNA, 13 bp, Unknown
  misc_feature (1)..( 13): Matrix.001 file - promoters70/1443349
atttataagtatg

SEQ ID NO: 39026 - DNA, 11 bp, Unknown
  misc_feature (1)..( 11): Matrix.001 file - promoters70/1443349
ctttataaaaa

SEQ ID NO: 39027 - DNA, 9 bp, Unknown
  misc_feature (1)..( 9): Matrix.001 file - promoters70/1443356
tacaaattt

SEQ ID NO: 39028 - DNA, 8 bp, Unknown
  misc_feature (1)..( 8): Matrix.001 file - promoters70/1443356
tttatttg

SEQ ID NO: 39029 - DNA, 7 bp, Unknown
  misc_feature (1)..( 7): Matrix.001 file - promoters70/1443356
tacaata

SEQ ID NO: 39030 - DNA, 8 bp, Unknown
  misc_feature (1)..( 8): Matrix.001 file - promoters70/1443418
aattttta

SEQ ID NO: 39031 - DNA, 8 bp, Unknown
  misc_feature (1)..( 8): Matrix.001 file - promoters70/1443418
ttttatta

SEQ ID NO: 39032 - DNA, 9 bp, Unknown
  misc_feature (1)..( 9): Matrix.001 file - promoters70/1443418
tgtttaaaa

SEQ ID NO: 39033 - DNA, 9 bp, Unknown
  misc_feature (1)..( 9): Matrix.001 file - promoters70/1443418
tatatataa

SEQ ID NO: 39034 - DNA, 9 bp, Unknown
  misc_feature (1)..( 9): Matrix.001 file - promoters70/1443633
agaatacat

SEQ ID NO: 39035 - DNA, 8 bp, Unknown
  misc_feature (1)..( 8): Matrix.001 file - promoters70/1443633
acgaaatt

SEQ ID NO: 39036 - DNA, 15 bp, Unknown
  misc_feature (1)..( 15): Matrix.001 file - promoters70/1443683
tatgagcttcaaaca

SEQ ID NO: 39037 - DNA, 12 bp, Unknown
  misc_feature (1)..( 12): Matrix.001 file - promoters70/1444131
gacattataaaa

SEQ ID NO: 39038 - DNA, 12 bp, Unknown
  misc_feature (1)..( 12): Matrix.001 file - promoters70/1444131
caaacaaataaa

SEQ ID NO: 39039 - DNA, 11 bp, Unknown
  misc_feature (1)..( 11): Matrix.001 file - promoters70/1444441
aactcttttta

SEQ ID NO: 39040 - DNA, 9 bp, Unknown
  misc_feature (1)..( 9): Matrix.001 file - promoters70/1444460
tgaaacaca

SEQ ID NO: 39041 - DNA, 7 bp, Unknown
  misc_feature (1)..( 7): Matrix.001 file - promoters70/1444460
tttcttc

SEQ ID NO: 39042 - DNA, 15 bp, Unknown
  misc_feature (1)..( 15): Matrix.001 file - promoters70/1444479
aaaaattattaaatt

SEQ ID NO: 39043 - DNA, 10 bp, Unknown
  misc_feature (1)..( 10): Matrix.001 file - promoters70/1444479
tttactaaaa

SEQ ID NO: 39044 - DNA, 8 bp, Unknown
  misc_feature (1)..( 8): Matrix.001 file - promoters70/1444479
ataatttt

SEQ ID NO: 39045 - DNA, 7 bp, Unknown
  misc_feature (1)..( 7): Matrix.001 file - promoters70/1444479
tatttta

SEQ ID NO: 39046 - DNA, 10 bp, Unknown
  misc_feature (1)..( 10): Matrix.001 file - promoters70/1444479
ctatatatat

SEQ ID NO: 39047 - DNA, 9 bp, Unknown
  misc_feature (1)..( 9): Matrix.001 file - promoters70/1444479
ctaatttta

SEQ ID NO: 39048 - DNA, 8 bp, Unknown
  misc_feature (1)..( 8): Matrix.001 file - promoters70/1444479
ttttgtta

SEQ ID NO: 39049 - DNA, 8 bp, Unknown
  misc_feature (1)..( 8): Matrix.001 file - promoters70/1444479
acaaaaaa

SEQ ID NO: 39050 - DNA, 10 bp, Unknown
  misc_feature (1)..( 10): Matrix.001 file - promoters70/1444479
aaaaaataat

SEQ ID NO: 39051 - DNA, 8 bp, Unknown
  misc_feature (1)..( 8): Matrix.001 file - promoters70/1444479
taattgaa

SEQ ID NO: 39052 - DNA, 9 bp, Unknown
  misc_feature (1)..( 9): Matrix.001 file - promoters70/1444479
aaaatattt

SEQ ID NO: 39053 - DNA, 7 bp, Unknown
  misc_feature (1)..( 7): Matrix.001 file - promoters70/1444479
attttgt

SEQ ID NO: 39054 - DNA, 8 bp, Unknown
  misc_feature (1)..( 8): Matrix.001 file - promoters70/1444479
aaaaaaat

SEQ ID NO: 39055 - DNA, 15 bp, Unknown
  misc_feature (1)..( 15): Matrix.001 file - promoters70/1444506
aaaaattattaaatt

SEQ ID NO: 39056 - DNA, 10 bp, Unknown
  misc_feature (1)..( 10): Matrix.001 file - promoters70/1444506
tttactaaaa

SEQ ID NO: 39057 - DNA, 8 bp, Unknown
  misc_feature (1)..( 8): Matrix.001 file - promoters70/1444506
ataatttt

SEQ ID NO: 39058 - DNA, 7 bp, Unknown
  misc_feature (1)..( 7): Matrix.001 file - promoters70/1444506
tatttta

SEQ ID NO: 39059 - DNA, 10 bp, Unknown
  misc_feature (1)..( 10): Matrix.001 file - promoters70/1444506
ctatatatat

SEQ ID NO: 39060 - DNA, 9 bp, Unknown
  misc_feature (1)..( 9): Matrix.001 file - promoters70/1444506
ctaatttta

SEQ ID NO: 39061 - DNA, 8 bp, Unknown
  misc_feature (1)..( 8): Matrix.001 file - promoters70/1444506
ttttgtta

SEQ ID NO: 39062 - DNA, 8 bp, Unknown
  misc_feature (1)..( 8): Matrix.001 file - promoters70/1444506
acaaaaaa

SEQ ID NO: 39063 - DNA, 10 bp, Unknown
  misc_feature (1)..( 10): Matrix.001 file - promoters70/1444506
aaaaaataat

SEQ ID NO: 39064 - DNA, 8 bp, Unknown
  misc_feature (1)..( 8): Matrix.001 file - promoters70/1444506
taattgaa

SEQ ID NO: 39065 - DNA, 9 bp, Unknown
  misc_feature (1)..( 9): Matrix.001 file - promoters70/1444506
aaaatattt

SEQ ID NO: 39066 - DNA, 7 bp, Unknown
  misc_feature (1)..( 7): Matrix.001 file - promoters70/1444506
attttgt

SEQ ID NO: 39067 - DNA, 8 bp, Unknown
  misc_feature (1)..( 8): Matrix.001 file - promoters70/1444506
aaaaaaat

SEQ ID NO: 39068 - DNA, 15 bp, Unknown
  misc_feature (1)..( 15): Matrix.001 file - promoters70/1444514
aaaaattattaaatt

SEQ ID NO: 39069 - DNA, 9 bp, Unknown
  misc_feature (1)..( 9): Matrix.001 file - promoters70/1444514
ttaataata

SEQ ID NO: 39070 - DNA, 8 bp, Unknown
  misc_feature (1)..( 8): Matrix.001 file - promoters70/1444514
ataatttt

SEQ ID NO: 39071 - DNA, 10 bp, Unknown
  misc_feature (1)..( 10): Matrix.001 file - promoters70/1444514
ctatatatat

SEQ ID NO: 39072 - DNA, 8 bp, Unknown
  misc_feature (1)..( 8): Matrix.001 file - promoters70/1444514
taattgaa

SEQ ID NO: 39073 - DNA, 9 bp, Unknown
  misc_feature (1)..( 9): Matrix.001 file - promoters70/1446636
gaggttaaa

SEQ ID NO: 39074 - DNA, 7 bp, Unknown
  misc_feature (1)..( 7): Matrix.001 file - promoters70/1446636
aaaggat

SEQ ID NO: 39075 - DNA, 10 bp, Unknown
  misc_feature (1)..( 10): Matrix.001 file - promoters70/1447425
aatttgatag

SEQ ID NO: 39076 - DNA, 10 bp, Unknown
  misc_feature (1)..( 10): Matrix.001 file - promoters70/1447646
ggaagtagag

SEQ ID NO: 39077 - DNA, 10 bp, Unknown
  misc_feature (1)..( 10): Matrix.001 file - promoters70/1447646
gaagaaagga

SEQ ID NO: 39078 - DNA, 9 bp, Unknown
  misc_feature (1)..( 9): Matrix.001 file - promoters70/1447646
aagatgatg

SEQ ID NO: 39079 - DNA, 8 bp, Unknown
  misc_feature (1)..( 8): Matrix.001 file - promoters70/1447646
gataaaga

SEQ ID NO: 39080 - DNA, 8 bp, Unknown
  misc_feature (1)..( 8): Matrix.001 file - promoters70/1447646
agtggaaa

SEQ ID NO: 39081 - DNA, 8 bp, Unknown
  misc_feature (1)..( 8): Matrix.001 file - promoters70/1447646
gaagttga

SEQ ID NO: 39082 - DNA, 5 bp, Unknown
  misc_feature (1)..( 5): Matrix.001 file - promoters70/1447953
ttata

SEQ ID NO: 39083 - DNA, 7 bp, Unknown
  misc_feature (1)..( 7): Matrix.001 file - promoters70/1448231
cttaacc

SEQ ID NO: 39084 - DNA, 8 bp, Unknown
  misc_feature (1)..( 8): Matrix.001 file - promoters70/1450625
aattttaa

SEQ ID NO: 39085 - DNA, 6 bp, Unknown
  misc_feature (1)..( 6): Matrix.001 file - promoters70/1450625
ttattc

SEQ ID NO: 39086 - DNA, 9 bp, Unknown
  misc_feature (1)..( 9): Matrix.001 file - promoters70/1450696
aaaaccaaa

SEQ ID NO: 39087 - DNA, 8 bp, Unknown
  misc_feature (1)..( 8): Matrix.001 file - promoters70/1450696
aatatata

SEQ ID NO: 39088 - DNA, 8 bp, Unknown
  misc_feature (1)..( 8): Matrix.001 file - promoters70/1450696
ttttttta

SEQ ID NO: 39089 - DNA, 9 bp, Unknown
  misc_feature (1)..( 9): Matrix.001 file - promoters70/1450811
agatactta

SEQ ID NO: 39090 - DNA, 11 bp, Unknown
  misc_feature (1)..( 11): Matrix.001 file - promoters70/1455944
aaataaaattg

SEQ ID NO: 39091 - DNA, 11 bp, Unknown
  misc_feature (1)..( 11): Matrix.001 file - promoters70/1455944
aaaaaaagaat

SEQ ID NO: 39092 - DNA, 11 bp, Unknown
  misc_feature (1)..( 11): Matrix.001 file - promoters70/1455944
aaacaaagaaa

SEQ ID NO: 39093 - DNA, 7 bp, Unknown
  misc_feature (1)..( 7): Matrix.001 file - promoters70/1455944
aaattaa

SEQ ID NO: 39094 - DNA, 8 bp, Unknown
  misc_feature (1)..( 8): Matrix.001 file - promoters70/1455944
tgaacaaa

SEQ ID NO: 39095 - DNA, 11 bp, Unknown
  misc_feature (1)..( 11): Matrix.001 file - promoters70/1455944
caatcactctc

SEQ ID NO: 39096 - DNA, 10 bp, Unknown
  misc_feature (1)..( 10): Matrix.001 file - promoters70/1455944
tatataaaac

SEQ ID NO: 39097 - DNA, 9 bp, Unknown
  misc_feature (1)..( 9): Matrix.001 file - promoters70/1455944
ttgaccaaa

SEQ ID NO: 39098 - DNA, 9 bp, Unknown
  misc_feature (1)..( 9): Matrix.001 file - promoters70/1455956
tgttaattt

SEQ ID NO: 39099 - DNA, 8 bp, Unknown
  misc_feature (1)..( 8): Matrix.001 file - promoters70/1455956
ttgatttg

SEQ ID NO: 39100 - DNA, 8 bp, Unknown
  misc_feature (1)..( 8): Matrix.001 file - promoters70/1455956
taacttcc

SEQ ID NO: 39101 - DNA, 7 bp, Unknown
  misc_feature (1)..( 7): Matrix.001 file - promoters70/1455956
ttaattt

SEQ ID NO: 39102 - DNA, 10 bp, Unknown
  misc_feature (1)..( 10): Matrix.001 file - promoters70/1455972
ttcaaatata

SEQ ID NO: 39103 - DNA, 9 bp, Unknown
  misc_feature (1)..( 9): Matrix.001 file - promoters70/1459039
atataaagg

SEQ ID NO: 39104 - DNA, 8 bp, Unknown
  misc_feature (1)..( 8): Matrix.001 file - promoters70/1459223
aaaaaaat

SEQ ID NO: 39105 - DNA, 10 bp, Unknown
  misc_feature (1)..( 10): Matrix.001 file - promoters70/1459223
tttataaata

SEQ ID NO: 39106 - DNA, 6 bp, Unknown
  misc_feature (1)..( 6): Matrix.001 file - promoters70/1459223
caaaca

SEQ ID NO: 39107 - DNA, 11 bp, Unknown
  misc_feature (1)..( 11): Matrix.001 file - promoters70/1461780
tttactcaatt

SEQ ID NO: 39108 - DNA, 11 bp, Unknown
  misc_feature (1)..( 11): Matrix.001 file - promoters70/1461791
gaagttgtgtt

SEQ ID NO: 39109 - DNA, 6 bp, Unknown
  misc_feature (1)..( 6): Matrix.001 file - promoters70/1461791
caattt

SEQ ID NO: 39110 - DNA, 8 bp, Unknown
  misc_feature (1)..( 8): Matrix.001 file - promoters70/1461791
actataaa

SEQ ID NO: 39111 - DNA, 7 bp, Unknown
  misc_feature (1)..( 7): Matrix.001 file - promoters70/1461791
gttgaac

SEQ ID NO: 39112 - DNA, 8 bp, Unknown
  misc_feature (1)..( 8): Matrix.001 file - promoters70/1461791
tgaaacaa

SEQ ID NO: 39113 - DNA, 7 bp, Unknown
  misc_feature (1)..( 7): Matrix.001 file - promoters70/1461791
gaaatcg

SEQ ID NO: 39114 - DNA, 15 bp, Unknown
  misc_feature (1)..( 15): Matrix.001 file - promoters70/1461803
actacatttaattat

SEQ ID NO: 39115 - DNA, 8 bp, Unknown
  misc_feature (1)..( 8): Matrix.001 file - promoters70/1461803
caacatga

SEQ ID NO: 39116 - DNA, 12 bp, Unknown
  misc_feature (1)..( 12): Matrix.001 file - promoters70/1461803
accaataaaaga

SEQ ID NO: 39117 - DNA, 11 bp, Unknown
  misc_feature (1)..( 11): Matrix.001 file - promoters70/1461803
agaagataagt

SEQ ID NO: 39118 - DNA, 11 bp, Unknown
  misc_feature (1)..( 11): Matrix.001 file - promoters70/1461803
agacgatgagt

SEQ ID NO: 39119 - DNA, 8 bp, Unknown
  misc_feature (1)..( 8): Matrix.001 file - promoters70/1461803
aattttca

SEQ ID NO: 39120 - DNA, 8 bp, Unknown
  misc_feature (1)..( 8): Matrix.001 file - promoters70/1461803
aataatta

SEQ ID NO: 39121 - DNA, 10 bp, Unknown
  misc_feature (1)..( 10): Matrix.001 file - promoters70/1461803
accaataaaa

SEQ ID NO: 39122 - DNA, 11 bp, Unknown
  misc_feature (1)..( 11): Matrix.001 file - promoters70/1461803
gtcaatataaa

SEQ ID NO: 39123 - DNA, 9 bp, Unknown
  misc_feature (1)..( 9): Matrix.001 file - promoters70/1461803
aagcaaaac

SEQ ID NO: 39124 - DNA, 14 bp, Unknown
  misc_feature (1)..( 14): Matrix.001 file - promoters70/1461839
aaaaagaaaaagaa

SEQ ID NO: 39125 - DNA, 11 bp, Unknown
  misc_feature (1)..( 11): Matrix.001 file - promoters70/1461839
aaaaaaagaaa

SEQ ID NO: 39126 - DNA, 8 bp, Unknown
  misc_feature (1)..( 8): Matrix.001 file - promoters70/1461839
caatctaa

SEQ ID NO: 39127 - DNA, 9 bp, Unknown
  misc_feature (1)..( 9): Matrix.001 file - promoters70/1461839
aaaaggaga

SEQ ID NO: 39128 - DNA, 8 bp, Unknown
  misc_feature (1)..( 8): Matrix.001 file - promoters70/1470993
aaagattg

SEQ ID NO: 39129 - DNA, 7 bp, Unknown
  misc_feature (1)..( 7): Matrix.001 file - promoters70/1470993
ccattaa

SEQ ID NO: 39130 - DNA, 9 bp, Unknown
  misc_feature (1)..( 9): Matrix.001 file - promoters70/1470993
actaaatta

SEQ ID NO: 39131 - DNA, 8 bp, Unknown
  misc_feature (1)..( 8): Matrix.001 file - promoters70/1470993
tagttttg

SEQ ID NO: 39132 - DNA, 6 bp, Unknown
  misc_feature (1)..( 6): Matrix.001 file - promoters70/1471041
aataaa

SEQ ID NO: 39133 - DNA, 7 bp, Unknown
  misc_feature (1)..( 7): Matrix.001 file - promoters70/1471041
aaaaatg

SEQ ID NO: 39134 - DNA, 13 bp, Unknown
  misc_feature (1)..( 13): Matrix.001 file - promoters70/1472778
gtataaaacgaag

SEQ ID NO: 39135 - DNA, 11 bp, Unknown
  misc_feature (1)..( 11): Matrix.001 file - promoters70/1472778
tatataacaca

SEQ ID NO: 39136 - DNA, 9 bp, Unknown
  misc_feature (1)..( 9): Matrix.001 file - promoters70/1472778
ttaattttc

SEQ ID NO: 39137 - DNA, 10 bp, Unknown
  misc_feature (1)..( 10): Matrix.001 file - promoters70/1472778
ttttattttc

SEQ ID NO: 39138 - DNA, 10 bp, Unknown
  misc_feature (1)..( 10): Matrix.001 file - promoters70/1472778
gatacagtta

SEQ ID NO: 39139 - DNA, 8 bp, Unknown
  misc_feature (1)..( 8): Matrix.001 file - promoters70/1472799
atcatatt

SEQ ID NO: 39140 - DNA, 9 bp, Unknown
  misc_feature (1)..( 9): Matrix.001 file - promoters70/1472799
tttgtagtg

SEQ ID NO: 39141 - DNA, 8 bp, Unknown
  misc_feature (1)..( 8): Matrix.001 file - promoters70/1472799
tgatttgt

SEQ ID NO: 39142 - DNA, 7 bp, Unknown
  misc_feature (1)..( 7): Matrix.001 file - promoters70/1472799
gtttgtt

SEQ ID NO: 39143 - DNA, 8 bp, Unknown
  misc_feature (1)..( 8): Matrix.001 file - promoters70/1472799
gatttgtt

SEQ ID NO: 39144 - DNA, 7 bp, Unknown
  misc_feature (1)..( 7): Matrix.001 file - promoters70/1481696
tttactt

SEQ ID NO: 39145 - DNA, 10 bp, Unknown
  misc_feature (1)..( 10): Matrix.001 file - promoters70/1481696
aaaaagaaac

SEQ ID NO: 39146 - DNA, 12 bp, Unknown
  misc_feature (1)..( 12): Matrix.001 file - promoters70/1481696
tatattcaattc

SEQ ID NO: 39147 - DNA, 9 bp, Unknown
  misc_feature (1)..( 9): Matrix.001 file - promoters70/1481696
ttttattat

SEQ ID NO: 39148 - DNA, 13 bp, Unknown
  misc_feature (1)..( 13): Matrix.001 file - promoters70/1481696
tgcttatgttaga

SEQ ID NO: 39149 - DNA, 8 bp, Unknown
  misc_feature (1)..( 8): Matrix.001 file - promoters70/1482448
actatata

SEQ ID NO: 39150 - DNA, 8 bp, Unknown
  misc_feature (1)..( 8): Matrix.001 file - promoters70/1482448
catttttt

SEQ ID NO: 39151 - DNA, 8 bp, Unknown
  misc_feature (1)..( 8): Matrix.001 file - promoters70/1482448
attttaaa

SEQ ID NO: 39152 - DNA, 9 bp, Unknown
  misc_feature (1)..( 9): Matrix.001 file - promoters70/1532660
taaaatttg

SEQ ID NO: 39153 - DNA, 10 bp, Unknown
  misc_feature (1)..( 10): Matrix.001 file - promoters70/1532660
aaaaaatctt

SEQ ID NO: 39154 - DNA, 7 bp, Unknown
  misc_feature (1)..( 7): Matrix.001 file - promoters70/1532937
ttttgtt

SEQ ID NO: 39155 - DNA, 10 bp, Unknown
  misc_feature (1)..( 10): Matrix.001 file - promoters70/1532937
tattaataaa

SEQ ID NO: 39156 - DNA, 8 bp, Unknown
  misc_feature (1)..( 8): Matrix.001 file - promoters70/1532937
cttgtttt

SEQ ID NO: 39157 - DNA, 14 bp, Unknown
  misc_feature (1)..( 14): Matrix.001 file - promoters70/1532937
tattaataaaattt

SEQ ID NO: 39158 - DNA, 10 bp, Unknown
  misc_feature (1)..( 10): Matrix.001 file - promoters70/1532937
tgtttttgtt

SEQ ID NO: 39159 - DNA, 8 bp, Unknown
  misc_feature (1)..( 8): Matrix.001 file - promoters70/1532948
attccatt

SEQ ID NO: 39160 - DNA, 8 bp, Unknown
  misc_feature (1)..( 8): Matrix.001 file - promoters70/1532948
tttgtaat

SEQ ID NO: 39161 - DNA, 12 bp, Unknown
  misc_feature (1)..( 12): Matrix.001 file - promoters70/1532948
aaaagaaattaa

SEQ ID NO: 39162 - DNA, 12 bp, Unknown
  misc_feature (1)..( 12): Matrix.001 file - promoters70/1532948
ttgagacaaaaa

SEQ ID NO: 39163 - DNA, 7 bp, Unknown
  misc_feature (1)..( 7): Matrix.001 file - promoters70/1532948
ggagaaa

SEQ ID NO: 39164 - DNA, 8 bp, Unknown
  misc_feature (1)..( 8): Matrix.001 file - promoters70/1532948
cccactaa

SEQ ID NO: 39165 - DNA, 9 bp, Unknown
  misc_feature (1)..( 9): Matrix.001 file - promoters70/1532948
taacaagta

SEQ ID NO: 39166 - DNA, 9 bp, Unknown
  misc_feature (1)..( 9): Matrix.001 file - promoters70/1534378
gaaattctt

SEQ ID NO: 39167 - DNA, 7 bp, Unknown
  misc_feature (1)..( 7): Matrix.001 file - promoters70/1534378
aatggat

SEQ ID NO: 39168 - DNA, 7 bp, Unknown
  misc_feature (1)..( 7): Matrix.001 file - promoters70/1534378
gaccaac

SEQ ID NO: 39169 - DNA, 7 bp, Unknown
  misc_feature (1)..( 7): Matrix.001 file - promoters70/1534528
gtatata

SEQ ID NO: 39170 - DNA, 8 bp, Unknown
  misc_feature (1)..( 8): Matrix.001 file - promoters70/1537456
ctttcttt

SEQ ID NO: 39171 - DNA, 9 bp, Unknown
  misc_feature (1)..( 9): Matrix.001 file - promoters70/1537617
tgtatgcat

SEQ ID NO: 39172 - DNA, 10 bp, Unknown
  misc_feature (1)..( 10): Matrix.001 file - promoters70/1537617
tcaattttat

SEQ ID NO: 39173 - DNA, 10 bp, Unknown
  misc_feature (1)..( 10): Matrix.001 file - promoters70/1537617
tcaattttat

SEQ ID NO: 39174 - DNA, 9 bp, Unknown
  misc_feature (1)..( 9): Matrix.001 file - promoters70/1557606
ttggcgaga

SEQ ID NO: 39175 - DNA, 11 bp, Unknown
  misc_feature (1)..( 11): Matrix.001 file - promoters70/1557769
atttttgtttt

SEQ ID NO: 39176 - DNA, 14 bp, Unknown
  misc_feature (1)..( 14): Matrix.001 file - promoters70/1557769
gatattaataatag

SEQ ID NO: 39177 - DNA, 9 bp, Unknown
  misc_feature (1)..( 9): Matrix.001 file - promoters70/1557769
aatttttct

SEQ ID NO: 39178 - DNA, 8 bp, Unknown
  misc_feature (1)..( 8): Matrix.001 file - promoters70/1557769
gatattaa

SEQ ID NO: 39179 - DNA, 13 bp, Unknown
  misc_feature (1)..( 13): Matrix.001 file - promoters70/1557769
taacaaaaaaact

SEQ ID NO: 39180 - DNA, 10 bp, Unknown
  misc_feature (1)..( 10): Matrix.001 file - promoters70/1557769
acaataaaaa

SEQ ID NO: 39181 - DNA, 8 bp, Unknown
  misc_feature (1)..( 8): Matrix.001 file - promoters70/1567007
ctaaaaaa

SEQ ID NO: 39182 - DNA, 8 bp, Unknown
  misc_feature (1)..( 8): Matrix.001 file - promoters70/1567007
taaaaaaa

SEQ ID NO: 39183 - DNA, 12 bp, Unknown
  misc_feature (1)..( 12): Matrix.001 file - promoters70/1567092
caacaatttaca

SEQ ID NO: 39184 - DNA, 10 bp, Unknown
  misc_feature (1)..( 10): Matrix.001 file - promoters70/1567092
tttgtttata

SEQ ID NO: 39185 - DNA, 9 bp, Unknown
  misc_feature (1)..( 9): Matrix.001 file - promoters70/1567535
gtttcttct

SEQ ID NO: 39186 - DNA, 11 bp, Unknown
  misc_feature (1)..( 11): Matrix.001 file - promoters70/1567547
aaacacaaaaa

SEQ ID NO: 39187 - DNA, 10 bp, Unknown
  misc_feature (1)..( 10): Matrix.001 file - promoters70/1568230
ttaatataaa

SEQ ID NO: 39188 - DNA, 9 bp, Unknown
  misc_feature (1)..( 9): Matrix.001 file - promoters70/1568508
tcttataat

SEQ ID NO: 39189 - DNA, 8 bp, Unknown
  misc_feature (1)..( 8): Matrix.001 file - promoters70/1568508
tcttataa

SEQ ID NO: 39190 - DNA, 8 bp, Unknown
  misc_feature (1)..( 8): Matrix.001 file - promoters70/1569568
aaaataaa

SEQ ID NO: 39191 - DNA, 8 bp, Unknown
  misc_feature (1)..( 8): Matrix.001 file - promoters70/1569568
taaaataa

SEQ ID NO: 39192 - DNA, 7 bp, Unknown
  misc_feature (1)..( 7): Matrix.001 file - promoters70/1569568
aaataaa

SEQ ID NO: 39193 - DNA, 10 bp, Unknown
  misc_feature (1)..( 10): Matrix.001 file - promoters70/1569568
tttatttaat

SEQ ID NO: 39194 - DNA, 9 bp, Unknown
  misc_feature (1)..( 9): Matrix.001 file - promoters70/1569568
aaaattaaa

SEQ ID NO: 39195 - DNA, 15 bp, Unknown
  misc_feature (1)..( 15): Matrix.001 file - promoters70/1569568
ttttactaaaaaaga

SEQ ID NO: 39196 - DNA, 11 bp, Unknown
  misc_feature (1)..( 11): Matrix.001 file - promoters70/1569568
taatatctcat

SEQ ID NO: 39197 - DNA, 12 bp, Unknown
  misc_feature (1)..( 12): Matrix.001 file - promoters70/1569568
aattttatttat

SEQ ID NO: 39198 - DNA, 9 bp, Unknown
  misc_feature (1)..( 9): Matrix.001 file - promoters70/1569721
tagagaaga

SEQ ID NO: 39199 - DNA, 10 bp, Unknown
  misc_feature (1)..( 10): Matrix.001 file - promoters70/1570606
ttttaataaa

SEQ ID NO: 39200 - DNA, 14 bp, Unknown
  misc_feature (1)..( 14): Matrix.001 file - promoters70/1570606
actttaattaaaat

SEQ ID NO: 39201 - DNA, 8 bp, Unknown
  misc_feature (1)..( 8): Matrix.001 file - promoters70/1570606
tattaata

SEQ ID NO: 39202 - DNA, 12 bp, Unknown
  misc_feature (1)..( 12): Matrix.001 file - promoters70/1570606
agaaaaaaatta

SEQ ID NO: 39203 - DNA, 9 bp, Unknown
  misc_feature (1)..( 9): Matrix.001 file - promoters70/1570622
tcgtttcaa

SEQ ID NO: 39204 - DNA, 8 bp, Unknown
  misc_feature (1)..( 8): Matrix.001 file - promoters70/1570622
aaacataa

SEQ ID NO: 39205 - DNA, 19 bp, Unknown
  misc_feature (1)..( 19): Matrix.001 file - promoters70/1570622
taaaacaaaaaaaagaaaa

SEQ ID NO: 39206 - DNA, 9 bp, Unknown
  misc_feature (1)..( 9): Matrix.001 file - promoters70/1570622
tactctttt

SEQ ID NO: 39207 - DNA, 9 bp, Unknown
  misc_feature (1)..( 9): Matrix.001 file - promoters70/1570622
tatgattaa

SEQ ID NO: 39208 - DNA, 9 bp, Unknown
  misc_feature (1)..( 9): Matrix.001 file - promoters70/1570622
tcttcttat

SEQ ID NO: 39209 - DNA, 9 bp, Unknown
  misc_feature (1)..( 9): Matrix.001 file - promoters70/1570622
tttaacaat

SEQ ID NO: 39210 - DNA, 12 bp, Unknown
  misc_feature (1)..( 12): Matrix.001 file - promoters70/1570860
gagaaataatac

SEQ ID NO: 39211 - DNA, 11 bp, Unknown
  misc_feature (1)..( 11): Matrix.001 file - promoters70/1570869
ttttgaagaat

SEQ ID NO: 39212 - DNA, 16 bp, Unknown
  misc_feature (1)..( 16): Matrix.001 file - promoters70/1570869
atataaatgttaaaaa

SEQ ID NO: 39213 - DNA, 11 bp, Unknown
  misc_feature (1)..( 11): Matrix.001 file - promoters70/1570869
tatatataaaa

SEQ ID NO: 39214 - DNA, 10 bp, Unknown
  misc_feature (1)..( 10): Matrix.001 file - promoters70/1570869
tataaaaaac

SEQ ID NO: 39215 - DNA, 10 bp, Unknown
  misc_feature (1)..( 10): Matrix.001 file - promoters70/1570869
atatctttat

SEQ ID NO: 39216 - DNA, 14 bp, Unknown
  misc_feature (1)..( 14): Matrix.001 file - promoters70/1570869
atagattgtaaaaa

SEQ ID NO: 39217 - DNA, 13 bp, Unknown
  misc_feature (1)..( 13): Matrix.001 file - promoters70/1570869
atttataagtaaa

SEQ ID NO: 39218 - DNA, 14 bp, Unknown
  misc_feature (1)..( 14): Matrix.001 file - promoters70/1570869
ataactttataaaa

SEQ ID NO: 39219 - DNA, 11 bp, Unknown
  misc_feature (1)..( 11): Matrix.001 file - promoters70/1570869
ttaatttaaca

SEQ ID NO: 39220 - DNA, 11 bp, Unknown
  misc_feature (1)..( 11): Matrix.001 file - promoters70/1570966
gataaatttca

SEQ ID NO: 39221 - DNA, 12 bp, Unknown
  misc_feature (1)..( 12): Matrix.001 file - promoters70/1570966
aaataaaataaa

SEQ ID NO: 39222 - DNA, 8 bp, Unknown
  misc_feature (1)..( 8): Matrix.001 file - promoters70/1570966
atatatat

SEQ ID NO: 39223 - DNA, 6 bp, Unknown
  misc_feature (1)..( 6): Matrix.001 file - promoters70/1570966
tttatt

SEQ ID NO: 39224 - DNA, 8 bp, Unknown
  misc_feature (1)..( 8): Matrix.001 file - promoters70/1570966
aattttta

SEQ ID NO: 39225 - DNA, 10 bp, Unknown
  misc_feature (1)..( 10): Matrix.001 file - promoters70/1570966
gaaaaaagaa

SEQ ID NO: 39226 - DNA, 12 bp, Unknown
  misc_feature (1)..( 12): Matrix.001 file - promoters70/1571014
gtttctttatct

SEQ ID NO: 39227 - DNA, 7 bp, Unknown
  misc_feature (1)..( 7): Matrix.001 file - promoters70/1571014
tttaaca

SEQ ID NO: 39228 - DNA, 9 bp, Unknown
  misc_feature (1)..( 9): Matrix.001 file - promoters70/1571014
aatttacaa

SEQ ID NO: 39229 - DNA, 7 bp, Unknown
  misc_feature (1)..( 7): Matrix.001 file - promoters70/1571014
tccaata

SEQ ID NO: 39230 - DNA, 10 bp, Unknown
  misc_feature (1)..( 10): Matrix.001 file - promoters70/1571014
tttaacaaga

SEQ ID NO: 39231 - DNA, 9 bp, Unknown
  misc_feature (1)..( 9): Matrix.001 file - promoters70/1571014
tgattcttt

SEQ ID NO: 39232 - DNA, 7 bp, Unknown
  misc_feature (1)..( 7): Matrix.001 file - promoters70/1573945
cagaaga

SEQ ID NO: 39233 - DNA, 10 bp, Unknown
  misc_feature (1)..( 10): Matrix.001 file - promoters70/1573945
tttaaaattt

SEQ ID NO: 39234 - DNA, 9 bp, Unknown
  misc_feature (1)..( 9): Matrix.001 file - promoters70/1573980
agtaagata

SEQ ID NO: 39235 - DNA, 9 bp, Unknown
  misc_feature (1)..( 9): Matrix.001 file - promoters70/1573980
taagagtta

SEQ ID NO: 39236 - DNA, 10 bp, Unknown
  misc_feature (1)..( 10): Matrix.001 file - promoters70/1573980
tataaatact

SEQ ID NO: 39237 - DNA, 10 bp, Unknown
  misc_feature (1)..( 10): Matrix.001 file - promoters70/1573980
gtatataaat

SEQ ID NO: 39238 - DNA, 8 bp, Unknown
  misc_feature (1)..( 8): Matrix.001 file - promoters70/1573980
ttacaata

SEQ ID NO: 39239 - DNA, 7 bp, Unknown
  misc_feature (1)..( 7): Matrix.001 file - promoters70/1574029
atgtgga

SEQ ID NO: 39240 - DNA, 8 bp, Unknown
  misc_feature (1)..( 8): Matrix.001 file - promoters70/1580500
catataaa

SEQ ID NO: 39241 - DNA, 9 bp, Unknown
  misc_feature (1)..( 9): Matrix.001 file - promoters70/1580500
taaataaaa

SEQ ID NO: 39242 - DNA, 9 bp, Unknown
  misc_feature (1)..( 9): Matrix.001 file - promoters70/1580500
taataaata

SEQ ID NO: 39243 - DNA, 13 bp, Unknown
  misc_feature (1)..( 13): Matrix.001 file - promoters70/1580932
cagattcggattc

SEQ ID NO: 39244 - DNA, 8 bp, Unknown
  misc_feature (1)..( 8): Matrix.001 file - promoters70/1580932
gaaaagga

SEQ ID NO: 39245 - DNA, 8 bp, Unknown
  misc_feature (1)..( 8): Matrix.001 file - promoters70/1580932
accacaaa

SEQ ID NO: 39246 - DNA, 9 bp, Unknown
  misc_feature (1)..( 9): Matrix.001 file - promoters70/1580932
aaaaaaaaa

SEQ ID NO: 39247 - DNA, 8 bp, Unknown
  misc_feature (1)..( 8): Matrix.001 file - promoters70/1580932
tcatttaa

SEQ ID NO: 39248 - DNA, 7 bp, Unknown
  misc_feature (1)..( 7): Matrix.001 file - promoters70/1580932
aaaaacc

SEQ ID NO: 39249 - DNA, 8 bp, Unknown
  misc_feature (1)..( 8): Matrix.001 file - promoters70/1580932
tttcaata

SEQ ID NO: 39250 - DNA, 10 bp, Unknown
  misc_feature (1)..( 10): Matrix.001 file - promoters70/1580932
aaatttatta

SEQ ID NO: 39251 - DNA, 7 bp, Unknown
  misc_feature (1)..( 7): Matrix.001 file - promoters70/1581987
gataatg

SEQ ID NO: 39252 - DNA, 8 bp, Unknown
  misc_feature (1)..( 8): Matrix.001 file - promoters70/1582576
taaaataa

SEQ ID NO: 39253 - DNA, 7 bp, Unknown
  misc_feature (1)..( 7): Matrix.001 file - promoters70/1582576
aataaaa

SEQ ID NO: 39254 - DNA, 11 bp, Unknown
  misc_feature (1)..( 11): Matrix.001 file - promoters70/1595707
aataccaatca

SEQ ID NO: 39255 - DNA, 7 bp, Unknown
  misc_feature (1)..( 7): Matrix.001 file - promoters70/1595707
gacaaaa

SEQ ID NO: 39256 - DNA, 9 bp, Unknown
  misc_feature (1)..( 9): Matrix.001 file - promoters70/1595707
acaaaaaaa

SEQ ID NO: 39257 - DNA, 13 bp, Unknown
  misc_feature (1)..( 13): Matrix.001 file - promoters70/1595741
cttagaaatcctt

SEQ ID NO: 39258 - DNA, 7 bp, Unknown
  misc_feature (1)..( 7): Matrix.001 file - promoters70/1595772
atttaaa

SEQ ID NO: 39259 - DNA, 7 bp, Unknown
  misc_feature (1)..( 7): Matrix.001 file - promoters70/1595772
aaaacaa

SEQ ID NO: 39260 - DNA, 9 bp, Unknown
  misc_feature (1)..( 9): Matrix.001 file - promoters70/1595772
atataaata

SEQ ID NO: 39261 - DNA, 9 bp, Unknown
  misc_feature (1)..( 9): Matrix.001 file - promoters70/1595794
taaaaaatt

SEQ ID NO: 39262 - DNA, 10 bp, Unknown
  misc_feature (1)..( 10): Matrix.001 file - promoters70/1662827
ttttcataat

SEQ ID NO: 39263 - DNA, 10 bp, Unknown
  misc_feature (1)..( 10): Matrix.001 file - promoters70/1662827
agttaataaa

SEQ ID NO: 39264 - DNA, 6 bp, Unknown
  misc_feature (1)..( 6): Matrix.001 file - promoters70/1662827
tacatt

SEQ ID NO: 39265 - DNA, 7 bp, Unknown
  misc_feature (1)..( 7): Matrix.001 file - promoters70/1662827
tttttac

SEQ ID NO: 39266 - DNA, 8 bp, Unknown
  misc_feature (1)..( 8): Matrix.001 file - promoters70/1662827
agacaaaa

SEQ ID NO: 39267 - DNA, 9 bp, Unknown
  misc_feature (1)..( 9): Matrix.001 file - promoters70/1662917
tagagaaat

SEQ ID NO: 39268 - DNA, 8 bp, Unknown
  misc_feature (1)..( 8): Matrix.001 file - promoters70/1662917
atttgtta

SEQ ID NO: 39269 - DNA, 8 bp, Unknown
  misc_feature (1)..( 8): Matrix.001 file - promoters70/1662917
attttaaa

SEQ ID NO: 39270 - DNA, 9 bp, Unknown
  misc_feature (1)..( 9): Matrix.001 file - promoters70/1662917
ttttgatga

SEQ ID NO: 39271 - DNA, 11 bp, Unknown
  misc_feature (1)..( 11): Matrix.001 file - promoters70/1662917
attttcataaa

SEQ ID NO: 39272 - DNA, 17 bp, Unknown
  misc_feature (1)..( 17): Matrix.001 file - promoters70/1662917
taaatgttaaaattatt

SEQ ID NO: 39273 - DNA, 13 bp, Unknown
  misc_feature (1)..( 13): Matrix.001 file - promoters70/1662917
taatccaacggca

SEQ ID NO: 39274 - DNA, 6 bp, Unknown
  misc_feature (1)..( 6): Matrix.001 file - promoters70/1662917
tatata

SEQ ID NO: 39275 - DNA, 10 bp, Unknown
  misc_feature (1)..( 10): Matrix.001 file - promoters70/1662917
tataaacaaa

SEQ ID NO: 39276 - DNA, 8 bp, Unknown
  misc_feature (1)..( 8): Matrix.001 file - promoters70/1662917
aaattctc

SEQ ID NO: 39277 - DNA, 11 bp, Unknown
  misc_feature (1)..( 11): Matrix.001 file - promoters70/1662917
tttataagtat

SEQ ID NO: 39278 - DNA, 8 bp, Unknown
  misc_feature (1)..( 8): Matrix.001 file - promoters70/1662917
tgaatgta

SEQ ID NO: 39279 - DNA, 10 bp, Unknown
  misc_feature (1)..( 10): Matrix.001 file - promoters70/1662917
atttaaattg

SEQ ID NO: 39280 - DNA, 9 bp, Unknown
  misc_feature (1)..( 9): Matrix.001 file - promoters70/1663278
gttcttttt

SEQ ID NO: 39281 - DNA, 6 bp, Unknown
  misc_feature (1)..( 6): Matrix.001 file - promoters70/1663278
tagctt

SEQ ID NO: 39282 - DNA, 7 bp, Unknown
  misc_feature (1)..( 7): Matrix.001 file - promoters70/1663353
aaaacaa

SEQ ID NO: 39283 - DNA, 8 bp, Unknown
  misc_feature (1)..( 8): Matrix.001 file - promoters70/1663353
catcgttt

SEQ ID NO: 39284 - DNA, 8 bp, Unknown
  misc_feature (1)..( 8): Matrix.001 file - promoters70/1663353
gattcttt

SEQ ID NO: 39285 - DNA, 9 bp, Unknown
  misc_feature (1)..( 9): Matrix.001 file - promoters70/1673798
aaactaaaa

SEQ ID NO: 39286 - DNA, 10 bp, Unknown
  misc_feature (1)..( 10): Matrix.001 file - promoters70/1673798
taaaataaaa

SEQ ID NO: 39287 - DNA, 7 bp, Unknown
  misc_feature (1)..( 7): Matrix.001 file - promoters70/1711228
aagattt

SEQ ID NO: 39288 - DNA, 12 bp, Unknown
  misc_feature (1)..( 12): Matrix.001 file - promoters70/1711228
tgtattttatgt

SEQ ID NO: 39289 - DNA, 7 bp, Unknown
  misc_feature (1)..( 7): Matrix.001 file - promoters70/1711228
tagtatt

SEQ ID NO: 39290 - DNA, 8 bp, Unknown
  misc_feature (1)..( 8): Matrix.001 file - promoters70/1711228
caataatg

SEQ ID NO: 39291 - DNA, 7 bp, Unknown
  misc_feature (1)..( 7): Matrix.001 file - promoters70/1711228
tgtattt

SEQ ID NO: 39292 - DNA, 10 bp, Unknown
  misc_feature (1)..( 10): Matrix.001 file - promoters70/1711228
acacaaaaaa

SEQ ID NO: 39293 - DNA, 9 bp, Unknown
  misc_feature (1)..( 9): Matrix.001 file - promoters70/1711318
attaatttc

SEQ ID NO: 39294 - DNA, 12 bp, Unknown
  misc_feature (1)..( 12): Matrix.001 file - promoters70/1711318
aaaggcccatat

SEQ ID NO: 39295 - DNA, 9 bp, Unknown
  misc_feature (1)..( 9): Matrix.001 file - promoters70/1711318
aaattgaga

SEQ ID NO: 39296 - DNA, 9 bp, Unknown
  misc_feature (1)..( 9): Matrix.001 file - promoters70/1711318
gaaaacaaa

SEQ ID NO: 39297 - DNA, 12 bp, Unknown
  misc_feature (1)..( 12): Matrix.001 file - promoters70/1711318
atttttaggccc

SEQ ID NO: 39298 - DNA, 9 bp, Unknown
  misc_feature (1)..( 9): Matrix.001 file - promoters70/1711318
gattggaaa

SEQ ID NO: 39299 - DNA, 12 bp, Unknown
  misc_feature (1)..( 12): Matrix.001 file - promoters70/1711318
atttataggccc

SEQ ID NO: 39300 - DNA, 7 bp, Unknown
  misc_feature (1)..( 7): Matrix.001 file - promoters70/1713842
tatttat

SEQ ID NO: 39301 - DNA, 8 bp, Unknown
  misc_feature (1)..( 8): Matrix.001 file - promoters70/1713842
caaacctg

SEQ ID NO: 39302 - DNA, 8 bp, Unknown
  misc_feature (1)..( 8): Matrix.001 file - promoters70/1713842
agatacag

SEQ ID NO: 39303 - DNA, 9 bp, Unknown
  misc_feature (1)..( 9): Matrix.001 file - promoters70/1713842
tttcaagtt

SEQ ID NO: 39304 - DNA, 8 bp, Unknown
  misc_feature (1)..( 8): Matrix.001 file - promoters70/1714694
ttgtatat

SEQ ID NO: 39305 - DNA, 7 bp, Unknown
  misc_feature (1)..( 7): Matrix.001 file - promoters70/1714694
tttgctt

SEQ ID NO: 39306 - DNA, 8 bp, Unknown
  misc_feature (1)..( 8): Matrix.001 file - promoters70/1714831
aaaatgca

SEQ ID NO: 39307 - DNA, 10 bp, Unknown
  misc_feature (1)..( 10): Matrix.001 file - promoters70/1714831
aagccgaatt

SEQ ID NO: 39308 - DNA, 10 bp, Unknown
  misc_feature (1)..( 10): Matrix.001 file - promoters70/1714831
catttgattt

SEQ ID NO: 39309 - DNA, 8 bp, Unknown
  misc_feature (1)..( 8): Matrix.001 file - promoters70/1714831
caaacctg

SEQ ID NO: 39310 - DNA, 8 bp, Unknown
  misc_feature (1)..( 8): Matrix.001 file - promoters70/1714831
agatacag

SEQ ID NO: 39311 - DNA, 9 bp, Unknown
  misc_feature (1)..( 9): Matrix.001 file - promoters70/1714831
tttcaagtt

SEQ ID NO: 39312 - DNA, 9 bp, Unknown
  misc_feature (1)..( 9): Matrix.001 file - promoters70/1714989
taaaaatat

SEQ ID NO: 39313 - DNA, 10 bp, Unknown
  misc_feature (1)..( 10): Matrix.001 file - promoters70/1714989
taaaaaaaat

SEQ ID NO: 39314 - DNA, 10 bp, Unknown
  misc_feature (1)..( 10): Matrix.001 file - promoters70/1714989
caaaccaaaa

SEQ ID NO: 39315 - DNA, 12 bp, Unknown
  misc_feature (1)..( 12): Matrix.001 file - promoters70/1714989
tttacaaaaaaa

SEQ ID NO: 39316 - DNA, 10 bp, Unknown
  misc_feature (1)..( 10): Matrix.001 file - promoters70/1714989
aaacaataaa

SEQ ID NO: 39317 - DNA, 12 bp, Unknown
  misc_feature (1)..( 12): Matrix.001 file - promoters70/1714989
aaaaatattatt

SEQ ID NO: 39318 - DNA, 5 bp, Unknown
  misc_feature (1)..( 5): Matrix.001 file - promoters70/1714989
tttta

SEQ ID NO: 39319 - DNA, 9 bp, Unknown
  misc_feature (1)..( 9): Matrix.001 file - promoters70/1714989
aaaaatatg

SEQ ID NO: 39320 - DNA, 5 bp, Unknown
  misc_feature (1)..( 5): Matrix.001 file - promoters70/1714989
caaaa

SEQ ID NO: 39321 - DNA, 5 bp, Unknown
  misc_feature (1)..( 5): Matrix.001 file - promoters70/1714989
taaaa

SEQ ID NO: 39322 - DNA, 11 bp, Unknown
  misc_feature (1)..( 11): Matrix.001 file - promoters70/1714989
tagttaataaa

SEQ ID NO: 39323 - DNA, 11 bp, Unknown
  misc_feature (1)..( 11): Matrix.001 file - promoters70/1715347
atttagtttcc

SEQ ID NO: 39324 - DNA, 12 bp, Unknown
  misc_feature (1)..( 12): Matrix.001 file - promoters70/1715347
tctttaattaat

SEQ ID NO: 39325 - DNA, 8 bp, Unknown
  misc_feature (1)..( 8): Matrix.001 file - promoters70/1715347
aaaatatc

SEQ ID NO: 39326 - DNA, 13 bp, Unknown
  misc_feature (1)..( 13): Matrix.001 file - promoters70/1715347
aacatcttaaatc

SEQ ID NO: 39327 - DNA, 10 bp, Unknown
  misc_feature (1)..( 10): Matrix.001 file - promoters70/1715347
tctattattt

SEQ ID NO: 39328 - DNA, 8 bp, Unknown
  misc_feature (1)..( 8): Matrix.001 file - promoters70/1715482
aattcaaa

SEQ ID NO: 39329 - DNA, 9 bp, Unknown
  misc_feature (1)..( 9): Matrix.001 file - promoters70/1715482
aaaacaact

SEQ ID NO: 39330 - DNA, 11 bp, Unknown
  misc_feature (1)..( 11): Matrix.001 file - promoters70/1715535
caaattttcac

SEQ ID NO: 39331 - DNA, 11 bp, Unknown
  misc_feature (1)..( 11): Matrix.001 file - promoters70/1715535
ctctgaacaat

SEQ ID NO: 39332 - DNA, 9 bp, Unknown
  misc_feature (1)..( 9): Matrix.001 file - promoters70/1807771
caaaatatt

SEQ ID NO: 39333 - DNA, 9 bp, Unknown
  misc_feature (1)..( 9): Matrix.001 file - promoters70/1807771
gtcatttaa

SEQ ID NO: 39334 - DNA, 10 bp, Unknown
  misc_feature (1)..( 10): Matrix.001 file - promoters70/1807771
aaacttatac

SEQ ID NO: 39335 - DNA, 9 bp, Unknown
  misc_feature (1)..( 9): Matrix.001 file - promoters70/1807771
atttaattc

SEQ ID NO: 39336 - DNA, 10 bp, Unknown
  misc_feature (1)..( 10): Matrix.001 file - promoters70/1807771
tccaagtaaa

SEQ ID NO: 39337 - DNA, 12 bp, Unknown
  misc_feature (1)..( 12): Matrix.001 file - promoters70/1807771
tttgtttttttt

SEQ ID NO: 39338 - DNA, 7 bp, Unknown
  misc_feature (1)..( 7): Matrix.001 file - promoters70/1807774
aaatttt

SEQ ID NO: 39339 - DNA, 8 bp, Unknown
  misc_feature (1)..( 8): Matrix.001 file - promoters70/1807774
ataccaac

SEQ ID NO: 39340 - DNA, 10 bp, Unknown
  misc_feature (1)..( 10): Matrix.001 file - promoters70/1807774
ttttggaaat

SEQ ID NO: 39341 - DNA, 10 bp, Unknown
  misc_feature (1)..( 10): Matrix.001 file - promoters70/1807774
taaaaatttt

SEQ ID NO: 39342 - DNA, 10 bp, Unknown
  misc_feature (1)..( 10): Matrix.001 file - promoters70/1808137
ggtttatttt

SEQ ID NO: 39343 - DNA, 12 bp, Unknown
  misc_feature (1)..( 12): Matrix.001 file - promoters70/1808156
gtttctttatct

SEQ ID NO: 39344 - DNA, 10 bp, Unknown
  misc_feature (1)..( 10): Matrix.001 file - promoters70/1808156
ggtataaaaa

SEQ ID NO: 39345 - DNA, 7 bp, Unknown
  misc_feature (1)..( 7): Matrix.001 file - promoters70/1808156
tttaaca

SEQ ID NO: 39346 - DNA, 10 bp, Unknown
  misc_feature (1)..( 10): Matrix.001 file - promoters70/1808156
agattttttg

SEQ ID NO: 39347 - DNA, 8 bp, Unknown
  misc_feature (1)..( 8): Matrix.001 file - promoters70/1808156
aatatgaa

SEQ ID NO: 39348 - DNA, 12 bp, Unknown
  misc_feature (1)..( 12): Matrix.001 file - promoters70/1808172
aattaaccatga

SEQ ID NO: 39349 - DNA, 7 bp, Unknown
  misc_feature (1)..( 7): Matrix.001 file - promoters70/1808172
tctttct

SEQ ID NO: 39350 - DNA, 8 bp, Unknown
  misc_feature (1)..( 8): Matrix.001 file - promoters70/1808172
acaaaaca

SEQ ID NO: 39351 - DNA, 8 bp, Unknown
  misc_feature (1)..( 8): Matrix.001 file - promoters70/1808172
caattata

SEQ ID NO: 39352 - DNA, 7 bp, Unknown
  misc_feature (1)..( 7): Matrix.001 file - promoters70/1808172
ctctttc

SEQ ID NO: 39353 - DNA, 8 bp, Unknown
  misc_feature (1)..( 8): Matrix.001 file - promoters70/1808172
tatatata

SEQ ID NO: 39354 - DNA, 9 bp, Unknown
  misc_feature (1)..( 9): Matrix.001 file - promoters70/1808172
aaattttga

SEQ ID NO: 39355 - DNA, 9 bp, Unknown
  misc_feature (1)..( 9): Matrix.001 file - promoters70/1808172
tatgagaaa

SEQ ID NO: 39356 - DNA, 7 bp, Unknown
  misc_feature (1)..( 7): Matrix.001 file - promoters70/1808172
ttgtttt

SEQ ID NO: 39357 - DNA, 7 bp, Unknown
  misc_feature (1)..( 7): Matrix.001 file - promoters70/1808172
attttta

SEQ ID NO: 39358 - DNA, 9 bp, Unknown
  misc_feature (1)..( 9): Matrix.001 file - promoters70/1808172
agttaactt

SEQ ID NO: 39359 - DNA, 9 bp, Unknown
  misc_feature (1)..( 9): Matrix.001 file - promoters70/1808184
tctttataa

SEQ ID NO: 39360 - DNA, 10 bp, Unknown
  misc_feature (1)..( 10): Matrix.001 file - promoters70/1808184
tttaacaaga

SEQ ID NO: 39361 - DNA, 8 bp, Unknown
  misc_feature (1)..( 8): Matrix.001 file - promoters70/1808184
atttacaa

SEQ ID NO: 39362 - DNA, 10 bp, Unknown
  misc_feature (1)..( 10): Matrix.001 file - promoters70/1808184
agataattaa

SEQ ID NO: 39363 - DNA, 10 bp, Unknown
  misc_feature (1)..( 10): Matrix.001 file - promoters70/1809222
attaatttat

SEQ ID NO: 39364 - DNA, 8 bp, Unknown
  misc_feature (1)..( 8): Matrix.001 file - promoters70/1957018
ctttttaa

SEQ ID NO: 39365 - DNA, 9 bp, Unknown
  misc_feature (1)..( 9): Matrix.001 file - promoters70/1957018
gttcttttt

SEQ ID NO: 39366 - DNA, 9 bp, Unknown
  misc_feature (1)..( 9): Matrix.001 file - promoters70/1957018
aaagatttt

SEQ ID NO: 39367 - DNA, 9 bp, Unknown
  misc_feature (1)..( 9): Matrix.001 file - promoters70/1957018
cagtagaga

SEQ ID NO: 39368 - DNA, 10 bp, Unknown
  misc_feature (1)..( 10): Matrix.001 file - promoters70/1957018
tatggataga

SEQ ID NO: 39369 - DNA, 9 bp, Unknown
  misc_feature (1)..( 9): Matrix.001 file - promoters70/1957212
gattcttac

SEQ ID NO: 39370 - DNA, 9 bp, Unknown
  misc_feature (1)..( 9): Matrix.001 file - promoters70/1957212
tatttaaac

SEQ ID NO: 39371 - DNA, 8 bp, Unknown
  misc_feature (1)..( 8): Matrix.001 file - promoters70/1957212
agagaaac

SEQ ID NO: 39372 - DNA, 9 bp, Unknown
  misc_feature (1)..( 9): Matrix.001 file - promoters70/1975923
aaaatatca

SEQ ID NO: 39373 - DNA, 10 bp, Unknown
  misc_feature (1)..( 10): Matrix.001 file - promoters70/1975923
ttaataaaat

SEQ ID NO: 39374 - DNA, 11 bp, Unknown
  misc_feature (1)..( 11): Matrix.001 file - promoters70/1975923
aaaataaacta

SEQ ID NO: 39375 - DNA, 9 bp, Unknown
  misc_feature (1)..( 9): Matrix.001 file - promoters70/1976000
aaaacaatt

SEQ ID NO: 39376 - DNA, 11 bp, Unknown
  misc_feature (1)..( 11): Matrix.001 file - promoters70/1976019
aatcactcctt

SEQ ID NO: 39377 - DNA, 7 bp, Unknown
  misc_feature (1)..( 7): Matrix.001 file - promoters70/1976019
ataaaaa

SEQ ID NO: 39378 - DNA, 9 bp, Unknown
  misc_feature (1)..( 9): Matrix.001 file - promoters70/1976019
taaaaaaaa

SEQ ID NO: 39379 - DNA, 10 bp, Unknown
  misc_feature (1)..( 10): Matrix.001 file - promoters70/1976078
ccagatacag

SEQ ID NO: 39380 - DNA, 12 bp, Unknown
  misc_feature (1)..( 12): Matrix.001 file - promoters70/1976078
aaatccaaaccc

SEQ ID NO: 39381 - DNA, 9 bp, Unknown
  misc_feature (1)..( 9): Matrix.001 file - promoters70/1976078
acttttttt

SEQ ID NO: 39382 - DNA, 4 bp, Unknown
  misc_feature (1)..( 4): Matrix.001 file - promoters70/1976078
attg

SEQ ID NO: 39383 - DNA, 9 bp, Unknown
  misc_feature (1)..( 9): Matrix.001 file - promoters70/1976078
tttcaagtt

SEQ ID NO: 39384 - DNA, 18 bp, Unknown
  misc_feature (1)..( 18): Matrix.001 file - promoters70/1976333
gataaagactcaatattt

SEQ ID NO: 39385 - DNA, 15 bp, Unknown
  misc_feature (1)..( 15): Matrix.001 file - promoters70/1976387
ctaaaggcccaataa

SEQ ID NO: 39386 - DNA, 7 bp, Unknown
  misc_feature (1)..( 7): Matrix.001 file - promoters70/1976387
tatcaaa

SEQ ID NO: 39387 - DNA, 12 bp, Unknown
  misc_feature (1)..( 12): Matrix.001 file - promoters70/1976387
tgaatttgagat

SEQ ID NO: 39388 - DNA, 8 bp, Unknown
  misc_feature (1)..( 8): Matrix.001 file - promoters70/1976457
tatataat

SEQ ID NO: 39389 - DNA, 13 bp, Unknown
  misc_feature (1)..( 13): Matrix.001 file - promoters70/1976457
agaaaaaaaaatg

SEQ ID NO: 39390 - DNA, 11 bp, Unknown
  misc_feature (1)..( 11): Matrix.001 file - promoters70/1976496
tcctatgattt

SEQ ID NO: 39391 - DNA, 12 bp, Unknown
  misc_feature (1)..( 12): Matrix.001 file - promoters70/1976496
taaatcttttga

SEQ ID NO: 39392 - DNA, 8 bp, Unknown
  misc_feature (1)..( 8): Matrix.001 file - promoters70/2026771
aaataaaa

SEQ ID NO: 39393 - DNA, 9 bp, Unknown
  misc_feature (1)..( 9): Matrix.001 file - promoters70/2029031
ttaataaaa

SEQ ID NO: 39394 - DNA, 14 bp, Unknown
  misc_feature (1)..( 14): Matrix.001 file - promoters70/2029031
tactattaataaaa

SEQ ID NO: 39395 - DNA, 12 bp, Unknown
  misc_feature (1)..( 12): Matrix.001 file - promoters70/2029033
atttatttcctt

SEQ ID NO: 39396 - DNA, 8 bp, Unknown
  misc_feature (1)..( 8): Matrix.001 file - promoters70/2029033
tattctat

SEQ ID NO: 39397 - DNA, 7 bp, Unknown
  misc_feature (1)..( 7): Matrix.001 file - promoters70/2029033
tttctat

SEQ ID NO: 39398 - DNA, 11 bp, Unknown
  misc_feature (1)..( 11): Matrix.001 file - promoters70/2029079
tcataattaat

SEQ ID NO: 39399 - DNA, 8 bp, Unknown
  misc_feature (1)..( 8): Matrix.001 file - promoters70/2029079
ccaatttt

SEQ ID NO: 39400 - DNA, 8 bp, Unknown
  misc_feature (1)..( 8): Matrix.001 file - promoters70/2104991
aaatttca

SEQ ID NO: 39401 - DNA, 8 bp, Unknown
  misc_feature (1)..( 8): Matrix.001 file - promoters70/2104991
taaatcag

SEQ ID NO: 39402 - DNA, 14 bp, Unknown
  misc_feature (1)..( 14): Matrix.001 file - promoters70/2104991
taaaagtttgatat

SEQ ID NO: 39403 - DNA, 14 bp, Unknown
  misc_feature (1)..( 14): Matrix.001 file - promoters70/2104991
taaaagtttgatat

SEQ ID NO: 39404 - DNA, 10 bp, Unknown
  misc_feature (1)..( 10): Matrix.001 file - promoters70/2105398
aaatacattt

SEQ ID NO: 39405 - DNA, 8 bp, Unknown
  misc_feature (1)..( 8): Matrix.001 file - promoters70/2105514
actcttat

SEQ ID NO: 39406 - DNA, 10 bp, Unknown
  misc_feature (1)..( 10): Matrix.001 file - promoters70/2105514
aaaagttttg

SEQ ID NO: 39407 - DNA, 13 bp, Unknown
  misc_feature (1)..( 13): Matrix.001 file - promoters70/2105514
tatataaatacgc

SEQ ID NO: 39408 - DNA, 11 bp, Unknown
  misc_feature (1)..( 11): Matrix.001 file - promoters70/2105535
tatcaaagaaa

SEQ ID NO: 39409 - DNA, 9 bp, Unknown
  misc_feature (1)..( 9): Matrix.001 file - promoters70/2105535
caaacaaaa

SEQ ID NO: 39410 - DNA, 11 bp, Unknown
  misc_feature (1)..( 11): Matrix.001 file - promoters70/2105535
ctaatatgtac

SEQ ID NO: 39411 - DNA, 7 bp, Unknown
  misc_feature (1)..( 7): Matrix.001 file - promoters70/2106017
caactaa

SEQ ID NO: 39412 - DNA, 8 bp, Unknown
  misc_feature (1)..( 8): Matrix.001 file - promoters70/2106017
aaaacttt

SEQ ID NO: 39413 - DNA, 10 bp, Unknown
  misc_feature (1)..( 10): Matrix.001 file - promoters70/2113502
ctataaaaat

SEQ ID NO: 39414 - DNA, 10 bp, Unknown
  misc_feature (1)..( 10): Matrix.001 file - promoters70/2113502
tattaaaaaa

SEQ ID NO: 39415 - DNA, 11 bp, Unknown
  misc_feature (1)..( 11): Matrix.001 file - promoters70/2113502
aaaaagcccaa

SEQ ID NO: 39416 - DNA, 11 bp, Unknown
  misc_feature (1)..( 11): Matrix.001 file - promoters70/2113502
ggcctatatac

SEQ ID NO: 39417 - DNA, 12 bp, Unknown
  misc_feature (1)..( 12): Matrix.001 file - promoters70/2113502
atttaaatcttt

SEQ ID NO: 39418 - DNA, 8 bp, Unknown
  misc_feature (1)..( 8): Matrix.001 file - promoters70/2113620
gaaggaag

SEQ ID NO: 39419 - DNA, 9 bp, Unknown
  misc_feature (1)..( 9): Matrix.001 file - promoters70/2113734
aattaaaga

SEQ ID NO: 39420 - DNA, 11 bp, Unknown
  misc_feature (1)..( 11): Matrix.001 file - promoters70/2113734
aattaaaataa

SEQ ID NO: 39421 - DNA, 8 bp, Unknown
  misc_feature (1)..( 8): Matrix.001 file - promoters70/2113846
tataattt

SEQ ID NO: 39422 - DNA, 9 bp, Unknown
  misc_feature (1)..( 9): Matrix.001 file - promoters70/2113846
aatttaacg

SEQ ID NO: 39423 - DNA, 13 bp, Unknown
  misc_feature (1)..( 13): Matrix.001 file - promoters70/2113889
aaaatttagaaat

SEQ ID NO: 39424 - DNA, 10 bp, Unknown
  misc_feature (1)..( 10): Matrix.001 file - promoters70/2113889
attaactttg

SEQ ID NO: 39425 - DNA, 7 bp, Unknown
  misc_feature (1)..( 7): Matrix.001 file - promoters70/2113889
aaaaata

SEQ ID NO: 39426 - DNA, 11 bp, Unknown
  misc_feature (1)..( 11): Matrix.001 file - promoters70/2113889
aaaatgaaaaa

SEQ ID NO: 39427 - DNA, 10 bp, Unknown
  misc_feature (1)..( 10): Matrix.001 file - promoters70/2113889
tatatataaa

SEQ ID NO: 39428 - DNA, 7 bp, Unknown
  misc_feature (1)..( 7): Matrix.001 file - promoters70/2113889
caataaa

SEQ ID NO: 39429 - DNA, 7 bp, Unknown
  misc_feature (1)..( 7): Matrix.001 file - promoters70/2113889
attaatg

SEQ ID NO: 39430 - DNA, 7 bp, Unknown
  misc_feature (1)..( 7): Matrix.001 file - promoters70/2114095
aatcttt

SEQ ID NO: 39431 - DNA, 9 bp, Unknown
  misc_feature (1)..( 9): Matrix.001 file - promoters70/2114095
aaaaaatct

SEQ ID NO: 39432 - DNA, 8 bp, Unknown
  misc_feature (1)..( 8): Matrix.001 file - promoters70/2114200
catcaatc

SEQ ID NO: 39433 - DNA, 9 bp, Unknown
  misc_feature (1)..( 9): Matrix.001 file - promoters70/2114200
tgctatata

SEQ ID NO: 39434 - DNA, 11 bp, Unknown
  misc_feature (1)..( 11): Matrix.001 file - promoters70/2187156
ccataattaag

SEQ ID NO: 39435 - DNA, 16 bp, Unknown
  misc_feature (1)..( 16): Matrix.001 file - promoters70/2217732
tccaatataaagataa

SEQ ID NO: 39436 - DNA, 7 bp, Unknown
  misc_feature (1)..( 7): Matrix.001 file - promoters70/2217817
atagatt

SEQ ID NO: 39437 - DNA, 8 bp, Unknown
  misc_feature (1)..( 8): Matrix.001 file - promoters70/2217996
caaacctg

SEQ ID NO: 39438 - DNA, 8 bp, Unknown
  misc_feature (1)..( 8): Matrix.001 file - promoters70/2217996
agatacag

SEQ ID NO: 39439 - DNA, 9 bp, Unknown
  misc_feature (1)..( 9): Matrix.001 file - promoters70/2217996
tttcaagtt

SEQ ID NO: 39440 - DNA, 8 bp, Unknown
  misc_feature (1)..( 8): Matrix.001 file - promoters70/2218260
acaaaatt

SEQ ID NO: 39441 - DNA, 10 bp, Unknown
  misc_feature (1)..( 10): Matrix.001 file - promoters70/2218260
ctatatataa

SEQ ID NO: 39442 - DNA, 14 bp, Unknown
  misc_feature (1)..( 14): Matrix.001 file - promoters70/2218260
aaaaaaaaaaagtt

SEQ ID NO: 39443 - DNA, 7 bp, Unknown
  misc_feature (1)..( 7): Matrix.001 file - promoters70/2218260
aaattat

SEQ ID NO: 39444 - DNA, 10 bp, Unknown
  misc_feature (1)..( 10): Matrix.001 file - promoters70/2218271
catatataaa

SEQ ID NO: 39445 - DNA, 13 bp, Unknown
  misc_feature (1)..( 13): Matrix.001 file - promoters70/2218271
taaagttataaat

SEQ ID NO: 39446 - DNA, 10 bp, Unknown
  misc_feature (1)..( 10): Matrix.001 file - promoters70/2218271
ataaaaataa

SEQ ID NO: 39447 - DNA, 8 bp, Unknown
  misc_feature (1)..( 8): Matrix.001 file - promoters70/2218271
aggcccaa

SEQ ID NO: 39448 - DNA, 10 bp, Unknown
  misc_feature (1)..( 10): Matrix.001 file - promoters70/2685931
taaatgataa

SEQ ID NO: 39449 - DNA, 8 bp, Unknown
  misc_feature (1)..( 8): Matrix.001 file - promoters70/2685931
tctttgaa

SEQ ID NO: 39450 - DNA, 8 bp, Unknown
  misc_feature (1)..( 8): Matrix.001 file - promoters70/2685931
acattaaa

SEQ ID NO: 39451 - DNA, 7 bp, Unknown
  misc_feature (1)..( 7): Matrix.001 file - promoters70/2685951
aaataag

SEQ ID NO: 39452 - DNA, 7 bp, Unknown
  misc_feature (1)..( 7): Matrix.001 file - promoters70/2724699
cattatc

SEQ ID NO: 39453 - DNA, 9 bp, Unknown
  misc_feature (1)..( 9): Matrix.001 file - promoters70/2724699
aaatgtttt

SEQ ID NO: 39454 - DNA, 9 bp, Unknown
  misc_feature (1)..( 9): Matrix.001 file - promoters70/2918658
acattatca

SEQ ID NO: 39455 - DNA, 9 bp, Unknown
  misc_feature (1)..( 9): Matrix.001 file - promoters70/2918680
caaaaaaaa

SEQ ID NO: 39456 - DNA, 10 bp, Unknown
  misc_feature (1)..( 10): Matrix.001 file - promoters70/2990263
tcgaagaaag

SEQ ID NO: 39457 - DNA, 9 bp, Unknown
  misc_feature (1)..( 9): Matrix.001 file - promoters70/2990263
aaagaagaa

SEQ ID NO: 39458 - DNA, 7 bp, Unknown
  misc_feature (1)..( 7): Matrix.001 file - promoters70/2990611
tttgttt

SEQ ID NO: 39459 - DNA, 13 bp, Unknown
  misc_feature (1)..( 13): Matrix.001 file - promoters70/2990611
ccataaaggaaaa

SEQ ID NO: 39460 - DNA, 8 bp, Unknown
  misc_feature (1)..( 8): Matrix.001 file - promoters70/2990611
tttcttta

SEQ ID NO: 39461 - DNA, 8 bp, Unknown
  misc_feature (1)..( 8): Matrix.001 file - promoters70/2990611
tttatttt

SEQ ID NO: 39462 - DNA, 9 bp, Unknown
  misc_feature (1)..( 9): Matrix.001 file - promoters70/2990611
ataataagt

SEQ ID NO: 39463 - DNA, 9 bp, Unknown
  misc_feature (1)..( 9): Matrix.001 file - promoters70/2990611
aataagttt

SEQ ID NO: 39464 - DNA, 10 bp, Unknown
  misc_feature (1)..( 10): Matrix.001 file - promoters70/2991239
tcaataaatg

SEQ ID NO: 39465 - DNA, 10 bp, Unknown
  misc_feature (1)..( 10): Matrix.001 file - promoters70/2991239
ttaaaaaaaa

SEQ ID NO: 39466 - DNA, 33 bp, Unknown; identical to SEQ ID NO: 37194
  misc_feature (1)..( 33): Matrix.001 file - promoters70/2991239

SEQ ID NO: 39467 - DNA, 32 bp, Unknown; identical to SEQ ID NO: 37195
  misc_feature (1)..( 32): Matrix.001 file - promoters70/2991239

SEQ ID NO: 39468 - DNA, 15 bp, Unknown
  misc_feature (1)..( 15): Matrix.001 file - promoters70/2991239
attgaagacttttca

SEQ ID NO: 39469 - DNA, 14 bp, Unknown
  misc_feature (1)..( 14): Matrix.001 file - promoters70/2991239
ctataagcatttaa

SEQ ID NO: 39470 - DNA, 25 bp, Unknown
  misc_feature (1)..( 25): Matrix.001 file - promoters70/2991239
agcatttaagtctatcgctagactg

SEQ ID NO: 39471 - DNA, 13 bp, Unknown
  misc_feature (1)..( 13): Matrix.001 file - promoters70/2991489
caaaaaggcccaa

SEQ ID NO: 39472 - DNA, 8 bp, Unknown
  misc_feature (1)..( 8): Matrix.001 file - promoters70/2992101
tttcttat

SEQ ID NO: 39473 - DNA, 8 bp, Unknown
  misc_feature (1)..( 8): Matrix.001 file - promoters70/2992101
tcttttct

SEQ ID NO: 39474 - DNA, 9 bp, Unknown
  misc_feature (1)..( 9): Matrix.001 file - promoters70/2992247
cttagatat

SEQ ID NO: 39475 - DNA, 6 bp, Unknown
  misc_feature (1)..( 6): Matrix.001 file - promoters70/2992247
atcttc

SEQ ID NO: 39476 - DNA, 9 bp, Unknown
  misc_feature (1)..( 9): Matrix.001 file - promoters70/2992247
tgagttttt

SEQ ID NO: 39477 - DNA, 6 bp, Unknown
  misc_feature (1)..( 6): Matrix.001 file - promoters70/2992247
aaaatc

SEQ ID NO: 39478 - DNA, 9 bp, Unknown
  misc_feature (1)..( 9): Matrix.001 file - promoters70/2992247
aatttttgg

SEQ ID NO: 39479 - DNA, 9 bp, Unknown
  misc_feature (1)..( 9): Matrix.001 file - promoters70/2992247
aattggtta

SEQ ID NO: 39480 - DNA, 11 bp, Unknown
  misc_feature (1)..( 11): Matrix.001 file - promoters70/2992281
aaatcattaat

SEQ ID NO: 39481 - DNA, 11 bp, Unknown
  misc_feature (1)..( 11): Matrix.001 file - promoters70/2992281
tttaattttaa

SEQ ID NO: 39482 - DNA, 7 bp, Unknown
  misc_feature (1)..( 7): Matrix.001 file - promoters70/2992722
aatttac

SEQ ID NO: 39483 - DNA, 11 bp, Unknown
  misc_feature (1)..( 11): Matrix.001 file - promoters70/2992722
ataattgtata

SEQ ID NO: 39484 - DNA, 10 bp, Unknown
  misc_feature (1)..( 10): Matrix.001 file - promoters70/2992722
gaaatagatt

SEQ ID NO: 39485 - DNA, 8 bp, Unknown
  misc_feature (1)..( 8): Matrix.001 file - promoters70/2992722
aagctata

SEQ ID NO: 39486 - DNA, 9 bp, Unknown
  misc_feature (1)..( 9): Matrix.001 file - promoters70/2992722
ttattaatt

SEQ ID NO: 39487 - DNA, 7 bp, Unknown
  misc_feature (1)..( 7): Matrix.001 file - promoters70/2993642
ctttttc

SEQ ID NO: 39488 - DNA, 7 bp, Unknown
  misc_feature (1)..( 7): Matrix.001 file - promoters70/2993642
tatttat

SEQ ID NO: 39489 - DNA, 8 bp, Unknown
  misc_feature (1)..( 8): Matrix.001 file - promoters70/2993642
ccacgtgg

SEQ ID NO: 39490 - DNA, 14 bp, Unknown
  misc_feature (1)..( 14): Matrix.001 file - promoters70/2993642
tttatatattttta

SEQ ID NO: 39491 - DNA, 8 bp, Unknown
  misc_feature (1)..( 8): Matrix.001 file - promoters70/2993642
aaatgttt

SEQ ID NO: 39492 - DNA, 15 bp, Unknown
  misc_feature (1)..( 15): Matrix.001 file - promoters70/2996222
aaaaattattaaatt

SEQ ID NO: 39493 - DNA, 10 bp, Unknown
  misc_feature (1)..( 10): Matrix.001 file - promoters70/2996222
tttactaaaa

SEQ ID NO: 39494 - DNA, 8 bp, Unknown
  misc_feature (1)..( 8): Matrix.001 file - promoters70/2996222
ataatttt

SEQ ID NO: 39495 - DNA, 7 bp, Unknown
  misc_feature (1)..( 7): Matrix.001 file - promoters70/2996222
tatttta

SEQ ID NO: 39496 - DNA, 10 bp, Unknown
  misc_feature (1)..( 10): Matrix.001 file - promoters70/2996222
ctatatatat

SEQ ID NO: 39497 - DNA, 9 bp, Unknown
  misc_feature (1)..( 9): Matrix.001 file - promoters70/2996222
ctaatttta

SEQ ID NO: 39498 - DNA, 8 bp, Unknown
  misc_feature (1)..( 8): Matrix.001 file - promoters70/2996222
ttttgtta

SEQ ID NO: 39499 - DNA, 8 bp, Unknown
  misc_feature (1)..( 8): Matrix.001 file - promoters70/2996222
acaaaaaa

SEQ ID NO: 39500 - DNA, 10 bp, Unknown
  misc_feature (1)..( 10): Matrix.001 file - promoters70/2996222
aaaaaataat

SEQ ID NO: 39501 - DNA, 8 bp, Unknown
  misc_feature (1)..( 8): Matrix.001 file - promoters70/2996222
taattgaa

SEQ ID NO: 39502 - DNA, 9 bp, Unknown
  misc_feature (1)..( 9): Matrix.001 file - promoters70/2996222
aaaatattt

SEQ ID NO: 39503 - DNA, 7 bp, Unknown
  misc_feature (1)..( 7): Matrix.001 file - promoters70/2996222
attttgt

SEQ ID NO: 39504 - DNA, 8 bp, Unknown
  misc_feature (1)..( 8): Matrix.001 file - promoters70/2996222
aaaaaaat

SEQ ID NO: 39505 - DNA, 7 bp, Unknown
  misc_feature (1)..( 7): Matrix.001 file - promoters70/3003010
caatatt

SEQ ID NO: 39506 - DNA, 12 bp, Unknown
  misc_feature (1)..( 12): Matrix.001 file - promoters70/3043962
atttgaaatttt

SEQ ID NO: 39507 - DNA, 9 bp, Unknown
  misc_feature (1)..( 9): Matrix.001 file - promoters70/3043962
actatttaa

SEQ ID NO: 39508 - DNA, 8 bp, Unknown
  misc_feature (1)..( 8): Matrix.001 file - promoters70/3043962
ttataaaa

SEQ ID NO: 39509 - DNA, 8 bp, Unknown
  misc_feature (1)..( 8): Matrix.001 file - promoters70/3408983
aaatatga

SEQ ID NO: 39510 - DNA, 7 bp, Unknown
  misc_feature (1)..( 7): Matrix.001 file - promoters70/3409165
ttcataa

SEQ ID NO: 39511 - DNA, 7 bp, Unknown
  misc_feature (1)..( 7): Matrix.001 file - promoters70/3409489
cgaagaa

SEQ ID NO: 39512 - DNA, 8 bp, Unknown
  misc_feature (1)..( 8): Matrix.001 file - promoters70/3409489
acttcctt

SEQ ID NO: 39513 - DNA, 9 bp, Unknown
  misc_feature (1)..( 9): Matrix.001 file - promoters70/3409489
aaatgatta

SEQ ID NO: 39514 - DNA, 12 bp, Unknown
  misc_feature (1)..( 12): Matrix.001 file - promoters70/3433799
gattgataacag

SEQ ID NO: 39515 - DNA, 7 bp, Unknown
  misc_feature (1)..( 7): Matrix.001 file - promoters70/3433799
tggaaaa

SEQ ID NO: 39516 - DNA, 9 bp, Unknown
  misc_feature (1)..( 9): Matrix.001 file - promoters70/3433799
aaaccattt

SEQ ID NO: 39517 - DNA, 10 bp, Unknown
  misc_feature (1)..( 10): Matrix.001 file - promoters70/3433799
actttataat

SEQ ID NO: 39518 - DNA, 10 bp, Unknown
  misc_feature (1)..( 10): Matrix.001 file - promoters70/3433904
acattctaca

SEQ ID NO: 39519 - DNA, 8 bp, Unknown
  misc_feature (1)..( 8): Matrix.001 file - promoters70/3433904
tataaaag

SEQ ID NO: 39520 - DNA, 10 bp, Unknown
  misc_feature (1)..( 10): Matrix.001 file - promoters70/3433944
aaacttaaga

SEQ ID NO: 39521 - DNA, 8 bp, Unknown
  misc_feature (1)..( 8): Matrix.001 file - promoters70/3433944
attttttt

SEQ ID NO: 39522 - DNA, 9 bp, Unknown
  misc_feature (1)..( 9): Matrix.001 file - promoters70/3433944
agatattaa

SEQ ID NO: 39523 - DNA, 11 bp, Unknown
  misc_feature (1)..( 11): Matrix.001 file - promoters70/3433944
ttcaaaatttc

SEQ ID NO: 39524 - DNA, 7 bp, Unknown
  misc_feature (1)..( 7): Matrix.001 file - promoters70/3433944
aaaagaa

SEQ ID NO: 39525 - DNA, 12 bp, Unknown
  misc_feature (1)..( 12): Matrix.001 file - promoters70/3434108
ataatttacttt

SEQ ID NO: 39526 - DNA, 7 bp, Unknown
  misc_feature (1)..( 7): Matrix.001 file - promoters70/3434108
acctaaa

SEQ ID NO: 39527 - DNA, 12 bp, Unknown
  misc_feature (1)..( 12): Matrix.001 file - promoters70/3434108
tattaaaaaaat

SEQ ID NO: 39528 - DNA, 10 bp, Unknown
  misc_feature (1)..( 10): Matrix.001 file - promoters70/3434233
aaagcacata

SEQ ID NO: 39529 - DNA, 8 bp, Unknown
  misc_feature (1)..( 8): Matrix.001 file - promoters70/3434233
atatagat

SEQ ID NO: 39530 - DNA, 10 bp, Unknown
  misc_feature (1)..( 10): Matrix.001 file - promoters70/3434279
aaatataaaa

SEQ ID NO: 39531 - DNA, 13 bp, Unknown
  misc_feature (1)..( 13): Matrix.001 file - promoters70/3434279
agagaaaaaatat

SEQ ID NO: 39532 - DNA, 7 bp, Unknown
  misc_feature (1)..( 7): Matrix.001 file - promoters70/3434311
catcaga

SEQ ID NO: 39533 - DNA, 9 bp, Unknown
  misc_feature (1)..( 9): Matrix.001 file - promoters70/3434311
taatgttac

SEQ ID NO: 39534 - DNA, 11 bp, Unknown
  misc_feature (1)..( 11): Matrix.001 file - promoters70/3434311
atactttaagt

SEQ ID NO: 39535 - DNA, 11 bp, Unknown
  misc_feature (1)..( 11): Matrix.001 file - promoters70/3434400
aaaatctgttc

SEQ ID NO: 39536 - DNA, 9 bp, Unknown
  misc_feature (1)..( 9): Matrix.001 file - promoters70/3434400
aaagaacat

SEQ ID NO: 39537 - DNA, 10 bp, Unknown
  misc_feature (1)..( 10): Matrix.001 file - promoters70/3434400
actttataat

SEQ ID NO: 39538 - DNA, 12 bp, Unknown
  misc_feature (1)..( 12): Matrix.001 file - promoters70/3434563
tctttctgttca

SEQ ID NO: 39539 - DNA, 10 bp, Unknown
  misc_feature (1)..( 10): Matrix.001 file - promoters70/3434563
aaaaaagaaa

SEQ ID NO: 39540 - DNA, 9 bp, Unknown
  misc_feature (1)..( 9): Matrix.001 file - promoters70/3434563
cattttgta

SEQ ID NO: 39541 - DNA, 7 bp, Unknown
  misc_feature (1)..( 7): Matrix.001 file - promoters70/3435133
atagatt

SEQ ID NO: 39542 - DNA, 9 bp, Unknown
  misc_feature (1)..( 9): Matrix.001 file - promoters70/3435452
agaaatata

SEQ ID NO: 39543 - DNA, 7 bp, Unknown
  misc_feature (1)..( 7): Matrix.001 file - promoters70/3435452
ctaaaat

SEQ ID NO: 39544 - DNA, 9 bp, Unknown
  misc_feature (1)..( 9): Matrix.001 file - promoters70/3435452
agaaattat

SEQ ID NO: 39545 - DNA, 9 bp, Unknown
  misc_feature (1)..( 9): Matrix.001 file - promoters70/3435452
tatgctaaa

SEQ ID NO: 39546 - DNA, 12 bp, Unknown
  misc_feature (1)..( 12): Matrix.001 file - promoters70/3435452
ttaacttcatca

SEQ ID NO: 39547 - DNA, 10 bp, Unknown
  misc_feature (1)..( 10): Matrix.001 file - promoters70/3435469
ttttgaaaaa

SEQ ID NO: 39548 - DNA, 7 bp, Unknown
  misc_feature (1)..( 7): Matrix.001 file - promoters70/3435469
aacaaaa

SEQ ID NO: 39549 - DNA, 10 bp, Unknown
  misc_feature (1)..( 10): Matrix.001 file - promoters70/3435469
ttttgaccta

SEQ ID NO: 39550 - DNA, 7 bp, Unknown
  misc_feature (1)..( 7): Matrix.001 file - promoters70/3435469
tctttag

SEQ ID NO: 39551 - DNA, 11 bp, Unknown
  misc_feature (1)..( 11): Matrix.001 file - promoters70/3435469
cttatctcgtg

SEQ ID NO: 39552 - DNA, 8 bp, Unknown
  misc_feature (1)..( 8): Matrix.001 file - promoters70/3435469
aatttata

SEQ ID NO: 39553 - DNA, 11 bp, Unknown
  misc_feature (1)..( 11): Matrix.001 file - promoters70/3435534
aaacagagtaa

SEQ ID NO: 39554 - DNA, 11 bp, Unknown
  misc_feature (1)..( 11): Matrix.001 file - promoters70/3435534
gtctatgtgaa

SEQ ID NO: 39555 - DNA, 9 bp, Unknown
  misc_feature (1)..( 9): Matrix.001 file - promoters70/3435632
ttttctttg

SEQ ID NO: 39556 - DNA, 7 bp, Unknown
  misc_feature (1)..( 7): Matrix.001 file - promoters70/3435632
cttttta

SEQ ID NO: 39557 - DNA, 9 bp, Unknown
  misc_feature (1)..( 9): Matrix.001 file - promoters70/3435632
cttaagtca

SEQ ID NO: 39558 - DNA, 8 bp, Unknown
  misc_feature (1)..( 8): Matrix.001 file - promoters70/3435632
aaaaaatt

SEQ ID NO: 39559 - DNA, 8 bp, Unknown
  misc_feature (1)..( 8): Matrix.001 file - promoters70/3435632
aaataatt

SEQ ID NO: 39560 - DNA, 7 bp, Unknown
  misc_feature (1)..( 7): Matrix.001 file - promoters70/3435761
aaaaaaa

SEQ ID NO: 39561 - DNA, 8 bp, Unknown
  misc_feature (1)..( 8): Matrix.001 file - promoters70/3435829
ctaaaata

SEQ ID NO: 39562 - DNA, 8 bp, Unknown
  misc_feature (1)..( 8): Matrix.001 file - promoters70/3435829
attaacta

SEQ ID NO: 39563 - DNA, 8 bp, Unknown
  misc_feature (1)..( 8): Matrix.001 file - promoters70/3436196
aaatcttt

SEQ ID NO: 39564 - DNA, 7 bp, Unknown
  misc_feature (1)..( 7): Matrix.001 file - promoters70/3436196
actaaaa

SEQ ID NO: 39565 - DNA, 10 bp, Unknown
  misc_feature (1)..( 10): Matrix.001 file - promoters70/3436196
atcataaaat

SEQ ID NO: 39566 - DNA, 10 bp, Unknown
  misc_feature (1)..( 10): Matrix.001 file - promoters70/3437193
attgatgaga

SEQ ID NO: 39567 - DNA, 8 bp, Unknown
  misc_feature (1)..( 8): Matrix.001 file - promoters70/3437244
gaatcaac

SEQ ID NO: 39568 - DNA, 10 bp, Unknown
  misc_feature (1)..( 10): Matrix.001 file - promoters70/3437244
attttagttt

SEQ ID NO: 39569 - DNA, 10 bp, Unknown
  misc_feature (1)..( 10): Matrix.001 file - promoters70/3437331
cattttgttt

SEQ ID NO: 39570 - DNA, 8 bp, Unknown
  misc_feature (1)..( 8): Matrix.001 file - promoters70/3437710
tatccaag

SEQ ID NO: 39571 - DNA, 7 bp, Unknown
  misc_feature (1)..( 7): Matrix.001 file - promoters70/3438069
agaaagt

SEQ ID NO: 39572 - DNA, 8 bp, Unknown
  misc_feature (1)..( 8): Matrix.001 file - promoters70/3438069
tcaaaatc

SEQ ID NO: 39573 - DNA, 8 bp, Unknown
  misc_feature (1)..( 8): Matrix.001 file - promoters70/3438069
gttaattg

SEQ ID NO: 39574 - DNA, 9 bp, Unknown
  misc_feature (1)..( 9): Matrix.001 file - promoters70/3438171
agaatgtat

SEQ ID NO: 39575 - DNA, 8 bp, Unknown
  misc_feature (1)..( 8): Matrix.001 file - promoters70/3438171
atatatca

SEQ ID NO: 39576 - DNA, 8 bp, Unknown
  misc_feature (1)..( 8): Matrix.001 file - promoters70/3438171
taatattt

SEQ ID NO: 39577 - DNA, 6 bp, Unknown
  misc_feature (1)..( 6): Matrix.001 file - promoters70/3438171
aaatat

SEQ ID NO: 39578 - DNA, 9 bp, Unknown
  misc_feature (1)..( 9): Matrix.001 file - promoters70/3438171
taaaaaata

SEQ ID NO: 39579 - DNA, 8 bp, Unknown
  misc_feature (1)..( 8): Matrix.001 file - promoters70/3438171
tttttatt

SEQ ID NO: 39580 - DNA, 7 bp, Unknown
  misc_feature (1)..( 7): Matrix.001 file - promoters70/3438171
atattta

SEQ ID NO: 39581 - DNA, 19 bp, Unknown
  misc_feature (1)..( 19): Matrix.001 file - promoters70/3438171
aaattattcacacaagttg

SEQ ID NO: 39582 - DNA, 11 bp, Unknown
  misc_feature (1)..( 11): Matrix.001 file - promoters70/3438171
gtttaaaaatt

SEQ ID NO: 39583 - DNA, 8 bp, Unknown
  misc_feature (1)..( 8): Matrix.001 file - promoters70/3438171
ataatttc

SEQ ID NO: 39584 - DNA, 9 bp, Unknown
  misc_feature (1)..( 9): Matrix.001 file - promoters70/3438171
aataaaaaa

SEQ ID NO: 39585 - DNA, 11 bp, Unknown
  misc_feature (1)..( 11): Matrix.001 file - promoters70/3438171
atttaaataaa

SEQ ID NO: 39586 - DNA, 7 bp, Unknown
  misc_feature (1)..( 7): Matrix.001 file - promoters70/3438171
aaaacaa

SEQ ID NO: 39587 - DNA, 9 bp, Unknown
  misc_feature (1)..( 9): Matrix.001 file - promoters70/3438171
atataaata

SEQ ID NO: 39588 - DNA, 9 bp, Unknown
  misc_feature (1)..( 9): Matrix.001 file - promoters70/3438194
gaaacagag

SEQ ID NO: 39589 - DNA, 8 bp, Unknown
  misc_feature (1)..( 8): Matrix.001 file - promoters70/3438236
taattgat

SEQ ID NO: 39590 - DNA, 7 bp, Unknown
  misc_feature (1)..( 7): Matrix.001 file - promoters70/3438236
taaaccc

SEQ ID NO: 39591 - DNA, 13 bp, Unknown
  misc_feature (1)..( 13): Matrix.001 file - promoters70/3438236
gcgctttttgatt

SEQ ID NO: 39592 - DNA, 12 bp, Unknown
  misc_feature (1)..( 12): Matrix.001 file - promoters70/3438512
tttgtttataat

SEQ ID NO: 39593 - DNA, 8 bp, Unknown
  misc_feature (1)..( 8): Matrix.001 file - promoters70/3438512
caaaaaaa

SEQ ID NO: 39594 - DNA, 10 bp, Unknown
  misc_feature (1)..( 10): Matrix.001 file - promoters70/3438512
aatgtttgag

SEQ ID NO: 39595 - DNA, 11 bp, Unknown
  misc_feature (1)..( 11): Matrix.001 file - promoters70/3438512
agaagaaaaaa

SEQ ID NO: 39596 - DNA, 12 bp, Unknown
  misc_feature (1)..( 12): Matrix.001 file - promoters70/3438632
aaaggcccatat

SEQ ID NO: 39597 - DNA, 11 bp, Unknown
  misc_feature (1)..( 11): Matrix.001 file - promoters70/3438632
ctttattatca

SEQ ID NO: 39598 - DNA, 9 bp, Unknown
  misc_feature (1)..( 9): Matrix.001 file - promoters70/3438648
aaaaaattc

SEQ ID NO: 39599 - DNA, 9 bp, Unknown
  misc_feature (1)..( 9): Matrix.001 file - promoters70/3438648
aatatgagt

SEQ ID NO: 39600 - DNA, 8 bp, Unknown
  misc_feature (1)..( 8): Matrix.001 file - promoters70/3438648
aaaattac

SEQ ID NO: 39601 - DNA, 7 bp, Unknown
  misc_feature (1)..( 7): Matrix.001 file - promoters70/3438648
aaaaaaa

SEQ ID NO: 39602 - DNA, 9 bp, Unknown
  misc_feature (1)..( 9): Matrix.001 file - promoters70/3438648
gaaaaaaaa

SEQ ID NO: 39603 - DNA, 11 bp, Unknown
  misc_feature (1)..( 11): Matrix.001 file - promoters70/3438648
ttgaaaatata

SEQ ID NO: 39604 - DNA, 10 bp, Unknown
  misc_feature (1)..( 10): Matrix.001 file - promoters70/3438648
aaataaaaac

SEQ ID NO: 39605 - DNA, 8 bp, Unknown
  misc_feature (1)..( 8): Matrix.001 file - promoters70/3438734
gtttgatc

SEQ ID NO: 39606 - DNA, 10 bp, Unknown
  misc_feature (1)..( 10): Matrix.001 file - promoters70/3438946
actttataat

SEQ ID NO: 39607 - DNA, 13 bp, Unknown
  misc_feature (1)..( 13): Matrix.001 file - promoters70/3439364
atatttttaaaaa

SEQ ID NO: 39608 - DNA, 7 bp, Unknown
  misc_feature (1)..( 7): Matrix.001 file - promoters70/3439364
ttaaatt

SEQ ID NO: 39609 - DNA, 13 bp, Unknown
  misc_feature (1)..( 13): Matrix.001 file - promoters70/3439364
ttttgtatttatt

SEQ ID NO: 39610 - DNA, 12 bp, Unknown
  misc_feature (1)..( 12): Matrix.001 file - promoters70/3439364
acacatatattt

SEQ ID NO: 39611 - DNA, 11 bp, Unknown
  misc_feature (1)..( 11): Matrix.001 file - promoters70/3439364
tatatataact

SEQ ID NO: 39612 - DNA, 9 bp, Unknown
  misc_feature (1)..( 9): Matrix.001 file - promoters70/3439364
atatttaaa

SEQ ID NO: 39613 - DNA, 8 bp, Unknown
  misc_feature (1)..( 8): Matrix.001 file - promoters70/3439364
aacagttt

SEQ ID NO: 39614 - DNA, 11 bp, Unknown
  misc_feature (1)..( 11): Matrix.001 file - promoters70/3439364
aaaaaaagaat

SEQ ID NO: 39615 - DNA, 13 bp, Unknown
  misc_feature (1)..( 13): Matrix.001 file - promoters70/3439364
acacagatattat

SEQ ID NO: 39616 - DNA, 8 bp, Unknown
  misc_feature (1)..( 8): Matrix.001 file - promoters70/3439364
aataaaaa

SEQ ID NO: 39617 - DNA, 14 bp, Unknown
  misc_feature (1)..( 14): Matrix.001 file - promoters70/3439416
aagtagaaagaaag

SEQ ID NO: 39618 - DNA, 11 bp, Unknown
  misc_feature (1)..( 11): Matrix.001 file - promoters70/3439472
attaataaatc

SEQ ID NO: 39619 - DNA, 15 bp, Unknown
  misc_feature (1)..( 15): Matrix.001 file - promoters70/3439472
acaaaattttattat

SEQ ID NO: 39620 - DNA, 12 bp, Unknown
  misc_feature (1)..( 12): Matrix.001 file - promoters70/3439472
agaaaaaaacaa

SEQ ID NO: 39621 - DNA, 10 bp, Unknown
  misc_feature (1)..( 10): Matrix.001 file - promoters70/3439472
actttaattt

SEQ ID NO: 39622 - DNA, 12 bp, Unknown
  misc_feature (1)..( 12): Matrix.001 file - promoters70/3439641
gaaatacgtttt

SEQ ID NO: 39623 - DNA, 10 bp, Unknown
  misc_feature (1)..( 10): Matrix.001 file - promoters70/3439641
aaagacaaag

SEQ ID NO: 39624 - DNA, 9 bp, Unknown
  misc_feature (1)..( 9): Matrix.001 file - promoters70/3439641
gtccaaatt

SEQ ID NO: 39625 - DNA, 10 bp, Unknown
  misc_feature (1)..( 10): Matrix.001 file - promoters70/3439641
gcccataaag

SEQ ID NO: 39626 - DNA, 11 bp, Unknown
  misc_feature (1)..( 11): Matrix.001 file - promoters70/3439641
ttttgattcgt

SEQ ID NO: 39627 - DNA, 8 bp, Unknown
  misc_feature (1)..( 8): Matrix.001 file - promoters70/3439641
tatttcat

SEQ ID NO: 39628 - DNA, 8 bp, Unknown
  misc_feature (1)..( 8): Matrix.001 file - promoters70/3439641
taattttt

SEQ ID NO: 39629 - DNA, 11 bp, Unknown
  misc_feature (1)..( 11): Matrix.001 file - promoters70/3593205
aaatattttat

SEQ ID NO: 39630 - DNA, 8 bp, Unknown
  misc_feature (1)..( 8): Matrix.001 file - promoters70/3593205
tatgaaac

SEQ ID NO: 39631 - DNA, 8 bp, Unknown
  misc_feature (1)..( 8): Matrix.001 file - promoters70/3593205
caaaaatt

SEQ ID NO: 39632 - DNA, 7 bp, Unknown
  misc_feature (1)..( 7): Matrix.001 file - promoters70/3593205
aaaattg

SEQ ID NO: 39633 - DNA, 7 bp, Unknown
  misc_feature (1)..( 7): Matrix.001 file - promoters70/3593205
aaacttc

SEQ ID NO: 39634 - DNA, 13 bp, Unknown
  misc_feature (1)..( 13): Matrix.001 file - promoters70/3593205
aattagatctttt

SEQ ID NO: 39635 - DNA, 8 bp, Unknown
  misc_feature (1)..( 8): Matrix.001 file - promoters70/3593205
ttatcctt

SEQ ID NO: 39636 - DNA, 10 bp, Unknown
  misc_feature (1)..( 10): Matrix.001 file - promoters70/3593205
ttactttttt

SEQ ID NO: 39637 - DNA, 8 bp, Unknown
  misc_feature (1)..( 8): Matrix.001 file - promoters70/3593205
tttataat

SEQ ID NO: 39638 - DNA, 8 bp, Unknown
  misc_feature (1)..( 8): Matrix.001 file - promoters70/3593205
gttaaaaa

SEQ ID NO: 39639 - DNA, 7 bp, Unknown
  misc_feature (1)..( 7): Matrix.001 file - promoters70/3593205
taaaaat

SEQ ID NO: 39640 - DNA, 6 bp, Unknown
  misc_feature (1)..( 6): Matrix.001 file - promoters70/3593230
cacatt

SEQ ID NO: 39641 - DNA, 8 bp, Unknown
  misc_feature (1)..( 8): Matrix.001 file - promoters70/3593230
tcttcttg

SEQ ID NO: 39642 - DNA, 7 bp, Unknown
  misc_feature (1)..( 7): Matrix.001 file - promoters70/3593230
gatcaca

SEQ ID NO: 39643 - DNA, 8 bp, Unknown
  misc_feature (1)..( 8): Matrix.001 file - promoters70/3597145
gaagaaga

SEQ ID NO: 39644 - DNA, 7 bp, Unknown
  misc_feature (1)..( 7): Matrix.001 file - promoters70/3597145
aaatgaa

SEQ ID NO: 39645 - DNA, 8 bp, Unknown
  misc_feature (1)..( 8): Matrix.001 file - promoters70/3597175
gctctata

SEQ ID NO: 39646 - DNA, 8 bp, Unknown
  misc_feature (1)..( 8): Matrix.001 file - promoters70/4254434
tttagatt

SEQ ID NO: 39647 - DNA, 5 bp, Unknown
  misc_feature (1)..( 5): Matrix.001 file - promoters70/4254434
agatt

SEQ ID NO: 39648 - DNA, 10 bp, Unknown
  misc_feature (1)..( 10): Matrix.001 file - promoters70/4262420
cctattggtt

SEQ ID NO: 39649 - DNA, 6 bp, Unknown
  misc_feature (1)..( 6): Matrix.001 file - promoters70/4262420
tgggat

SEQ ID NO: 39650 - DNA, 9 bp, Unknown
  misc_feature (1)..( 9): Matrix.001 file - promoters70/4262422
ttgtaattt

SEQ ID NO: 39651 - DNA, 7 bp, Unknown
  misc_feature (1)..( 7): Matrix.001 file - promoters70/4262422
accaaag

SEQ ID NO: 39652 - DNA, 8 bp, Unknown
  misc_feature (1)..( 8): Matrix.001 file - promoters70/4262422
tagtgtta

SEQ ID NO: 39653 - DNA, 7 bp, Unknown
  misc_feature (1)..( 7): Matrix.001 file - promoters70/4262422
gataaga

SEQ ID NO: 39654 - DNA, 12 bp, Unknown
  misc_feature (1)..( 12): Matrix.001 file - promoters70/4262422
taatttaatttg

SEQ ID NO: 39655 - DNA, 8 bp, Unknown
  misc_feature (1)..( 8): Matrix.001 file - promoters70/4262428
atgttaac

SEQ ID NO: 39656 - DNA, 7 bp, Unknown
  misc_feature (1)..( 7): Matrix.001 file - promoters70/4262428
attaaat

SEQ ID NO: 39657 - DNA, 9 bp, Unknown
  misc_feature (1)..( 9): Matrix.001 file - promoters70/4262428
ccattaaag

SEQ ID NO: 39658 - DNA, 9 bp, Unknown
  misc_feature (1)..( 9): Matrix.001 file - promoters70/4262428
ttctttctt

SEQ ID NO: 39659 - DNA, 7 bp, Unknown
  misc_feature (1)..( 7): Matrix.001 file - promoters70/4262428
tatataa

SEQ ID NO: 39660 - DNA, 7 bp, Unknown
  misc_feature (1)..( 7): Matrix.001 file - promoters70/4262428
tataaat

SEQ ID NO: 39661 - DNA, 8 bp, Unknown
  misc_feature (1)..( 8): Matrix.001 file - promoters70/4267125
ttatttgt

SEQ ID NO: 39662 - DNA, 8 bp, Unknown
  misc_feature (1)..( 8): Matrix.001 file - promoters70/4270131
ttaataac

SEQ ID NO: 39663 - DNA, 10 bp, Unknown
  misc_feature (1)..( 10): Matrix.001 file - promoters70/4281662
actttataaa

SEQ ID NO: 39664 - DNA, 8 bp, Unknown
  misc_feature (1)..( 8): Matrix.001 file - promoters70/4281662
aagatagt

SEQ ID NO: 39665 - DNA, 8 bp, Unknown
  misc_feature (1)..( 8): Matrix.001 file - promoters70/4281662
attatgtc

SEQ ID NO: 39666 - DNA, 9 bp, Unknown
  misc_feature (1)..( 9): Matrix.001 file - promoters70/4281662
ctttaaaat

SEQ ID NO: 39667 - DNA, 7 bp, Unknown
  misc_feature (1)..( 7): Matrix.001 file - promoters70/4281662
tccattt

SEQ ID NO: 39668 - DNA, 7 bp, Unknown
  misc_feature (1)..( 7): Matrix.001 file - promoters70/4281711
gaataaa

SEQ ID NO: 39669 - DNA, 7 bp, Unknown
  misc_feature (1)..( 7): Matrix.001 file - promoters70/4281744
aatttac

SEQ ID NO: 39670 - DNA, 11 bp, Unknown
  misc_feature (1)..( 11): Matrix.001 file - promoters70/4281744
ataattgtata

SEQ ID NO: 39671 - DNA, 10 bp, Unknown
  misc_feature (1)..( 10): Matrix.001 file - promoters70/4281744
gaaatagatt

SEQ ID NO: 39672 - DNA, 8 bp, Unknown
  misc_feature (1)..( 8): Matrix.001 file - promoters70/4281744
aagctata

SEQ ID NO: 39673 - DNA, 9 bp, Unknown
  misc_feature (1)..( 9): Matrix.001 file - promoters70/4281744
ttattaatt

SEQ ID NO: 39674 - DNA, 9 bp, Unknown
  misc_feature (1)..( 9): Matrix.001 file - promoters70/4281773
aagaattgc

SEQ ID NO: 39675 - DNA, 11 bp, Unknown
  misc_feature (1)..( 11): Matrix.001 file - promoters70/4281925
aaaataaaaca

SEQ ID NO: 39676 - DNA, 8 bp, Unknown
  misc_feature (1)..( 8): Matrix.001 file - promoters70/4281925
taaatttt

SEQ ID NO: 39677 - DNA, 14 bp, Unknown
  misc_feature (1)..( 14): Matrix.001 file - promoters70/4281925
aatttacatatcta

SEQ ID NO: 39678 - DNA, 6 bp, Unknown
  misc_feature (1)..( 6): Matrix.001 file - promoters70/4281997
attatc

SEQ ID NO: 39679 - DNA, 7 bp, Unknown
  misc_feature (1)..( 7): Matrix.001 file - promoters70/4282316
cattatc

SEQ ID NO: 39680 - DNA, 9 bp, Unknown
  misc_feature (1)..( 9): Matrix.001 file - promoters70/4282316
aaatgtttt

SEQ ID NO: 39681 - DNA, 9 bp, Unknown
  misc_feature (1)..( 9): Matrix.001 file - promoters70/4282418
aaaataaaa

SEQ ID NO: 39682 - DNA, 7 bp, Unknown
  misc_feature (1)..( 7): Matrix.001 file - promoters70/4282503
taaaatc

SEQ ID NO: 39683 - DNA, 10 bp, Unknown
  misc_feature (1)..( 10): Matrix.001 file - promoters70/4282503
ttttaataac

SEQ ID NO: 39684 - DNA, 11 bp, Unknown
  misc_feature (1)..( 11): Matrix.001 file - promoters70/4282503
tttattaaatg

SEQ ID NO: 39685 - DNA, 8 bp, Unknown
  misc_feature (1)..( 8): Matrix.001 file - promoters70/4282667
aatgggcc

SEQ ID NO: 39686 - DNA, 8 bp, Unknown
  misc_feature (1)..( 8): Matrix.001 file - promoters70/4282667
attgttac

SEQ ID NO: 39687 - DNA, 10 bp, Unknown
  misc_feature (1)..( 10): Matrix.001 file - promoters70/4282667
attcaaaaaa

SEQ ID NO: 39688 - DNA, 8 bp, Unknown
  misc_feature (1)..( 8): Matrix.001 file - promoters70/4282788
tttgattt

SEQ ID NO: 39689 - DNA, 11 bp, Unknown
  misc_feature (1)..( 11): Matrix.001 file - promoters70/4283003
aataatttgta

SEQ ID NO: 39690 - DNA, 8 bp, Unknown
  misc_feature (1)..( 8): Matrix.001 file - promoters70/4283240
tcaagatt

SEQ ID NO: 39691 - DNA, 10 bp, Unknown
  misc_feature (1)..( 10): Matrix.001 file - promoters70/4283240
aaattgatat

SEQ ID NO: 39692 - DNA, 8 bp, Unknown
  misc_feature (1)..( 8): Matrix.001 file - promoters70/4283293
tttatttc

SEQ ID NO: 39693 - DNA, 7 bp, Unknown
  misc_feature (1)..( 7): Matrix.001 file - promoters70/4283293
tatttaa

SEQ ID NO: 39694 - DNA, 8 bp, Unknown
  misc_feature (1)..( 8): Matrix.001 file - promoters70/4283297
aataaaaa

SEQ ID NO: 39695 - DNA, 7 bp, Unknown
  misc_feature (1)..( 7): Matrix.001 file - promoters70/4283338
aaagcca

SEQ ID NO: 39696 - DNA, 8 bp, Unknown
  misc_feature (1)..( 8): Matrix.001 file - promoters70/4283355
aaatcaaa

SEQ ID NO: 39697 - DNA, 8 bp, Unknown
  misc_feature (1)..( 8): Matrix.001 file - promoters70/4283378
tatataaa

SEQ ID NO: 39698 - DNA, 10 bp, Unknown
  misc_feature (1)..( 10): Matrix.001 file - promoters70/4283378
tgaatgtaaa

SEQ ID NO: 39699 - DNA, 14 bp, Unknown
  misc_feature (1)..( 14): Matrix.001 file - promoters70/4283378
ataactttataaaa

SEQ ID NO: 39700 - DNA, 6 bp, Unknown
  misc_feature (1)..( 6): Matrix.001 file - promoters70/4283378
aaatat

SEQ ID NO: 39701 - DNA, 12 bp, Unknown
  misc_feature (1)..( 12): Matrix.001 file - promoters70/4283378
tataatatatac

SEQ ID NO: 39702 - DNA, 11 bp, Unknown
  misc_feature (1)..( 11): Matrix.001 file - promoters70/4283378
ttaatttaaca

SEQ ID NO: 39703 - DNA, 8 bp, Unknown
  misc_feature (1)..( 8): Matrix.001 file - promoters70/4283378
aaattttt

SEQ ID NO: 39704 - DNA, 8 bp, Unknown
  misc_feature (1)..( 8): Matrix.001 file - promoters70/4283386
gttttatt

SEQ ID NO: 39705 - DNA, 9 bp, Unknown
  misc_feature (1)..( 9): Matrix.001 file - promoters70/4283386
tttctttta

SEQ ID NO: 39706 - DNA, 11 bp, Unknown
  misc_feature (1)..( 11): Matrix.001 file - promoters70/4577400
ccataattaag

SEQ ID NO: 39707 - DNA, 10 bp, Unknown
  misc_feature (1)..( 10): Matrix.001 file - promoters70/4608096
tataaaaata

SEQ ID NO: 39708 - DNA, 9 bp, Unknown
  misc_feature (1)..( 9): Matrix.001 file - promoters70/4608104
tctaataga

SEQ ID NO: 39709 - DNA, 12 bp, Unknown
  misc_feature (1)..( 12): Matrix.001 file - promoters70/4608965
ttttataaatcc

SEQ ID NO: 39710 - DNA, 8 bp, Unknown
  misc_feature (1)..( 8): Matrix.001 file - promoters70/4608985
tacaaaaa

SEQ ID NO: 39711 - DNA, 7 bp, Unknown
  misc_feature (1)..( 7): Matrix.001 file - promoters70/4608985
aaacaat

SEQ ID NO: 39712 - DNA, 10 bp, Unknown
  misc_feature (1)..( 10): Matrix.001 file - promoters70/4608985
attaatatag

SEQ ID NO: 39713 - DNA, 12 bp, Unknown
  misc_feature (1)..( 12): Matrix.001 file - promoters70/4608985
taaaaaaactaa

SEQ ID NO: 39714 - DNA, 6 bp, Unknown
  misc_feature (1)..( 6): Matrix.001 file - promoters70/4608985
taaaat

SEQ ID NO: 39715 - DNA, 5 bp, Unknown
  misc_feature (1)..( 5): Matrix.001 file - promoters70/4608985
caaaa

SEQ ID NO: 39716 - DNA, 13 bp, Unknown
  misc_feature (1)..( 13): Matrix.001 file - promoters70/4608985
taacaaatttctt

SEQ ID NO: 39717 - DNA, 10 bp, Unknown
  misc_feature (1)..( 10): Matrix.001 file - promoters70/4608985
agttaataaa

SEQ ID NO: 39718 - DNA, 11 bp, Unknown
  misc_feature (1)..( 11): Matrix.001 file - promoters70/4610551
aagaaaatata

SEQ ID NO: 39719 - DNA, 12 bp, Unknown
  misc_feature (1)..( 12): Matrix.001 file - promoters70/4701809
ataatgtttttt

SEQ ID NO: 39720 - DNA, 7 bp, Unknown
  misc_feature (1)..( 7): Matrix.001 file - promoters70/4701809
aaagtca

SEQ ID NO: 39721 - DNA, 8 bp, Unknown
  misc_feature (1)..( 8): Matrix.001 file - promoters70/4701809
atttttct

SEQ ID NO: 39722 - DNA, 10 bp, Unknown
  misc_feature (1)..( 10): Matrix.001 file - promoters70/4701809
tacaaaattg

SEQ ID NO: 39723 - DNA, 8 bp, Unknown
  misc_feature (1)..( 8): Matrix.001 file - promoters70/4701809
ttataaaa

SEQ ID NO: 39724 - DNA, 9 bp, Unknown
  misc_feature (1)..( 9): Matrix.001 file - promoters70/4701809
atttttttt

SEQ ID NO: 39725 - DNA, 9 bp, Unknown
  misc_feature (1)..( 9): Matrix.001 file - promoters70/4701809
taaattaat

SEQ ID NO: 39726 - DNA, 12 bp, Unknown
  misc_feature (1)..( 12): Matrix.001 file - promoters70/4701809
tcgttttgtttt

SEQ ID NO: 39727 - DNA, 13 bp, Unknown
  misc_feature (1)..( 13): Matrix.001 file - promoters70/4701809
ttagattcatatt

SEQ ID NO: 39728 - DNA, 7 bp, Unknown
  misc_feature (1)..( 7): Matrix.001 file - promoters70/4701809
aaattaa

SEQ ID NO: 39729 - DNA, 10 bp, Unknown
  misc_feature (1)..( 10): Matrix.001 file - promoters70/4701809
tttgtttttg

SEQ ID NO: 39730 - DNA, 7 bp, Unknown
  misc_feature (1)..( 7): Matrix.001 file - promoters70/4701809
ataaaaa

SEQ ID NO: 39731 - DNA, 8 bp, Unknown
  misc_feature (1)..( 8): Matrix.001 file - promoters70/4766447
tcaaacaa

SEQ ID NO: 39732 - DNA, 7 bp, Unknown
  misc_feature (1)..( 7): Matrix.001 file - promoters70/4766447
tttattt

SEQ ID NO: 39733 - DNA, 11 bp, Unknown
  misc_feature (1)..( 11): Matrix.001 file - promoters70/4766447
aatccaatttt

SEQ ID NO: 39734 - DNA, 8 bp, Unknown
  misc_feature (1)..( 8): Matrix.001 file - promoters70/4766490
gaaaaaaa

SEQ ID NO: 39735 - DNA, 12 bp, Unknown
  misc_feature (1)..( 12): Matrix.001 file - promoters70/4766490
aaaaaagaagaa

SEQ ID NO: 39736 - DNA, 8 bp, Unknown
  misc_feature (1)..( 8): Matrix.001 file - promoters70/4766602
actatata

SEQ ID NO: 39737 - DNA, 8 bp, Unknown
  misc_feature (1)..( 8): Matrix.001 file - promoters70/4766602
catttttt

SEQ ID NO: 39738 - DNA, 8 bp, Unknown
  misc_feature (1)..( 8): Matrix.001 file - promoters70/4766602
attttaaa

SEQ ID NO: 39739 - DNA, 9 bp, Unknown
  misc_feature (1)..( 9): Matrix.001 file - promoters70/4766712
ttataaata

SEQ ID NO: 39740 - DNA, 11 bp, Unknown
  misc_feature (1)..( 11): Matrix.001 file - promoters70/4766712
aagacccgttg

SEQ ID NO: 39741 - DNA, 6 bp, Unknown
  misc_feature (1)..( 6): Matrix.001 file - promoters70/4766712
attaaa

SEQ ID NO: 39742 - DNA, 9 bp, Unknown
  misc_feature (1)..( 9): Matrix.001 file - promoters70/4766712
gaaatgaga

SEQ ID NO: 39743 - DNA, 8 bp, Unknown
  misc_feature (1)..( 8): Matrix.001 file - promoters70/4766866
attccatt

SEQ ID NO: 39744 - DNA, 8 bp, Unknown
  misc_feature (1)..( 8): Matrix.001 file - promoters70/4766866
tttgtaat

SEQ ID NO: 39745 - DNA, 12 bp, Unknown
  misc_feature (1)..( 12): Matrix.001 file - promoters70/4766866
aaaagaaattaa

SEQ ID NO: 39746 - DNA, 12 bp, Unknown
  misc_feature (1)..( 12): Matrix.001 file - promoters70/4766866
ttgagacaaaaa

SEQ ID NO: 39747 - DNA, 7 bp, Unknown
  misc_feature (1)..( 7): Matrix.001 file - promoters70/4766866
ggagaaa

SEQ ID NO: 39748 - DNA, 8 bp, Unknown
  misc_feature (1)..( 8): Matrix.001 file - promoters70/4766866
cccactaa

SEQ ID NO: 39749 - DNA, 9 bp, Unknown
  misc_feature (1)..( 9): Matrix.001 file - promoters70/4766866
taacaagta

SEQ ID NO: 39750 - DNA, 8 bp, Unknown
  misc_feature (1)..( 8): Matrix.001 file - promoters70/4766936
tttatttg

SEQ ID NO: 39751 - DNA, 8 bp, Unknown
  misc_feature (1)..( 8): Matrix.001 file - promoters70/4766936
aattgtta

SEQ ID NO: 39752 - DNA, 15 bp, Unknown
  misc_feature (1)..( 15): Matrix.001 file - promoters70/4766936
tttttaccacacaag

SEQ ID NO: 39753 - DNA, 10 bp, Unknown
  misc_feature (1)..( 10): Matrix.001 file - promoters70/4766936
atctttataa

SEQ ID NO: 39754 - DNA, 10 bp, Unknown
  misc_feature (1)..( 10): Matrix.001 file - promoters70/4766936
ttgccacgtg

SEQ ID NO: 39755 - DNA, 8 bp, Unknown
  misc_feature (1)..( 8): Matrix.001 file - promoters70/4766936
aatgtttt

SEQ ID NO: 39756 - DNA, 9 bp, Unknown
  misc_feature (1)..( 9): Matrix.001 file - promoters70/4766936
attttttgt

SEQ ID NO: 39757 - DNA, 9 bp, Unknown
  misc_feature (1)..( 9): Matrix.001 file - promoters70/4766936
ttatcaaat

SEQ ID NO: 39758 - DNA, 10 bp, Unknown
  misc_feature (1)..( 10): Matrix.001 file - promoters70/4766977
ctataaatag

SEQ ID NO: 39759 - DNA, 7 bp, Unknown
  misc_feature (1)..( 7): Matrix.001 file - promoters70/4767298
tatttca

SEQ ID NO: 39760 - DNA, 7 bp, Unknown
  misc_feature (1)..( 7): Matrix.001 file - promoters70/4767298
ttcattt

SEQ ID NO: 39761 - DNA, 9 bp, Unknown
  misc_feature (1)..( 9): Matrix.001 file - promoters70/4767298
aaatatgat

SEQ ID NO: 39762 - DNA, 9 bp, Unknown
  misc_feature (1)..( 9): Matrix.001 file - promoters70/4767379
taaaaattc

SEQ ID NO: 39763 - DNA, 9 bp, Unknown
  misc_feature (1)..( 9): Matrix.001 file - promoters70/4767379
aaaaataaa

SEQ ID NO: 39764 - DNA, 10 bp, Unknown
  misc_feature (1)..( 10): Matrix.001 file - promoters70/4767379
aaataaaatt

SEQ ID NO: 39765 - DNA, 7 bp, Unknown
  misc_feature (1)..( 7): Matrix.001 file - promoters70/4767379
aaacaaa

SEQ ID NO: 39766 - DNA, 10 bp, Unknown
  misc_feature (1)..( 10): Matrix.001 file - promoters70/4767379
aatgatatac

SEQ ID NO: 39767 - DNA, 11 bp, Unknown
  misc_feature (1)..( 11): Matrix.001 file - promoters70/4767379
aagaaaaaata

SEQ ID NO: 39768 - DNA, 10 bp, Unknown
  misc_feature (1)..( 10): Matrix.001 file - promoters70/4767487
tatttaaaaa

SEQ ID NO: 39769 - DNA, 8 bp, Unknown
  misc_feature (1)..( 8): Matrix.001 file - promoters70/4767487
tttgattt

SEQ ID NO: 39770 - DNA, 10 bp, Unknown
  misc_feature (1)..( 10): Matrix.001 file - promoters70/4767487
taattttctc

SEQ ID NO: 39771 - DNA, 10 bp, Unknown
  misc_feature (1)..( 10): Matrix.001 file - promoters70/4767487
ttatgaataa

SEQ ID NO: 39772 - DNA, 10 bp, Unknown
  misc_feature (1)..( 10): Matrix.001 file - promoters70/4767515
aacaaaacaa

SEQ ID NO: 39773 - DNA, 9 bp, Unknown
  misc_feature (1)..( 9): Matrix.001 file - promoters70/4767701
aattttgag

SEQ ID NO: 39774 - DNA, 12 bp, Unknown
  misc_feature (1)..( 12): Matrix.001 file - promoters70/4767701
aatcaatttaaa

SEQ ID NO: 39775 - DNA, 10 bp, Unknown
  misc_feature (1)..( 10): Matrix.001 file - promoters70/4767701
cttatatata

SEQ ID NO: 39776 - DNA, 11 bp, Unknown
  misc_feature (1)..( 11): Matrix.001 file - promoters70/4767701
aatcaaattgt

SEQ ID NO: 39777 - DNA, 8 bp, Unknown
  misc_feature (1)..( 8): Matrix.001 file - promoters70/4767952
aaaattaa

SEQ ID NO: 39778 - DNA, 8 bp, Unknown
  misc_feature (1)..( 8): Matrix.001 file - promoters70/4767952
attaaatt

SEQ ID NO: 39779 - DNA, 8 bp, Unknown
  misc_feature (1)..( 8): Matrix.001 file - promoters70/4767952
attaaatt

SEQ ID NO: 39780 - DNA, 7 bp, Unknown
  misc_feature (1)..( 7): Matrix.001 file - promoters70/4767952
gtataca

SEQ ID NO: 39781 - DNA, 7 bp, Unknown
  misc_feature (1)..( 7): Matrix.001 file - promoters70/4767952
agatcaa

SEQ ID NO: 39782 - DNA, 7 bp, Unknown
  misc_feature (1)..( 7): Matrix.001 file - promoters70/4767976
gtatata

SEQ ID NO: 39783 - DNA, 10 bp, Unknown
  misc_feature (1)..( 10): Matrix.001 file - promoters70/4767982
ttaaacttgt

SEQ ID NO: 39784 - DNA, 7 bp, Unknown
  misc_feature (1)..( 7): Matrix.001 file - promoters70/4767982
attttaa

SEQ ID NO: 39785 - DNA, 6 bp, Unknown
  misc_feature (1)..( 6): Matrix.001 file - promoters70/4767994
aaatga

SEQ ID NO: 39786 - DNA, 7 bp, Unknown
  misc_feature (1)..( 7): Matrix.001 file - promoters70/4767994
tggccct

SEQ ID NO: 39787 - DNA, 10 bp, Unknown
  misc_feature (1)..( 10): Matrix.001 file - promoters70/4767994
atttgtttat

SEQ ID NO: 39788 - DNA, 9 bp, Unknown
  misc_feature (1)..( 9): Matrix.001 file - promoters70/4767994
taaccaata

SEQ ID NO: 39789 - DNA, 10 bp, Unknown
  misc_feature (1)..( 10): Matrix.001 file - promoters70/4767994
aatacaaatc

SEQ ID NO: 39790 - DNA, 7 bp, Unknown
  misc_feature (1)..( 7): Matrix.001 file - promoters70/4767994
taaggca

SEQ ID NO: 39791 - DNA, 11 bp, Unknown
  misc_feature (1)..( 11): Matrix.001 file - promoters70/4767994
aaagaaacaaa

SEQ ID NO: 39792 - DNA, 10 bp, Unknown
  misc_feature (1)..( 10): Matrix.001 file - promoters70/4767994
caccattgtc

SEQ ID NO: 39793 - DNA, 15 bp, Unknown
  misc_feature (1)..( 15): Matrix.001 file - promoters70/4768007
aaagaatataataaa

SEQ ID NO: 39794 - DNA, 9 bp, Unknown
  misc_feature (1)..( 9): Matrix.001 file - promoters70/4768007
tatatatag

SEQ ID NO: 39795 - DNA, 11 bp, Unknown
  misc_feature (1)..( 11): Matrix.001 file - promoters70/4768007
ttgattttaaa

SEQ ID NO: 39796 - DNA, 10 bp, Unknown
  misc_feature (1)..( 10): Matrix.001 file - promoters70/4768007
ccaaataaaa

SEQ ID NO: 39797 - DNA, 9 bp, Unknown
  misc_feature (1)..( 9): Matrix.001 file - promoters70/4768039
atttctaaa

SEQ ID NO: 39798 - DNA, 8 bp, Unknown
  misc_feature (1)..( 8): Matrix.001 file - promoters70/4768039
tataatat

SEQ ID NO: 39799 - DNA, 11 bp, Unknown
  misc_feature (1)..( 11): Matrix.001 file - promoters70/4768039
caaaaaaaaag

SEQ ID NO: 39800 - DNA, 6 bp, Unknown
  misc_feature (1)..( 6): Matrix.001 file - promoters70/4768066
gtatat

SEQ ID NO: 39801 - DNA, 13 bp, Unknown
  misc_feature (1)..( 13): Matrix.001 file - promoters70/4768147
caataatttttcc

SEQ ID NO: 39802 - DNA, 7 bp, Unknown
  misc_feature (1)..( 7): Matrix.001 file - promoters70/4768147
tattata

SEQ ID NO: 39803 - DNA, 10 bp, Unknown
  misc_feature (1)..( 10): Matrix.001 file - promoters70/4768147
aaaacaataa

SEQ ID NO: 39804 - DNA, 13 bp, Unknown
  misc_feature (1)..( 13): Matrix.001 file - promoters70/4768217
taagataaggaaa

SEQ ID NO: 39805 - DNA, 9 bp, Unknown
  misc_feature (1)..( 9): Matrix.001 file - promoters70/4768236
aaagaaatt

SEQ ID NO: 39806 - DNA, 9 bp, Unknown
  misc_feature (1)..( 9): Matrix.001 file - promoters70/4768236
aagtcaaaa

SEQ ID NO: 39807 - DNA, 7 bp, Unknown
  misc_feature (1)..( 7): Matrix.001 file - promoters70/4768236
aaaaaaa

SEQ ID NO: 39808 - DNA, 7 bp, Unknown
  misc_feature (1)..( 7): Matrix.001 file - promoters70/4768236
aaaataa

SEQ ID NO: 39809 - DNA, 9 bp, Unknown
  misc_feature (1)..( 9): Matrix.001 file - promoters70/4768250
aacaatatt

SEQ ID NO: 39810 - DNA, 7 bp, Unknown
  misc_feature (1)..( 7): Matrix.001 file - promoters70/4768250
caatatt

SEQ ID NO: 39811 - DNA, 10 bp, Unknown
  misc_feature (1)..( 10): Matrix.001 file - promoters70/4768250
agaaaaaaat

SEQ ID NO: 39812 - DNA, 6 bp, Unknown
  misc_feature (1)..( 6): Matrix.001 file - promoters70/4768250
aataaa

SEQ ID NO: 39813 - DNA, 10 bp, Unknown
  misc_feature (1)..( 10): Matrix.001 file - promoters70/4768250
cttttagtta

SEQ ID NO: 39814 - DNA, 8 bp, Unknown
  misc_feature (1)..( 8): Matrix.001 file - promoters70/4768250
aaataata

SEQ ID NO: 39815 - DNA, 13 bp, Unknown
  misc_feature (1)..( 13): Matrix.001 file - promoters70/4768250
agtaatttttggt

SEQ ID NO: 39816 - DNA, 8 bp, Unknown
  misc_feature (1)..( 8): Matrix.001 file - promoters70/4768250
taatttta

SEQ ID NO: 39817 - DNA, 8 bp, Unknown
  misc_feature (1)..( 8): Matrix.001 file - promoters70/4768265
aaaacatt

SEQ ID NO: 39818 - DNA, 7 bp, Unknown
  misc_feature (1)..( 7): Matrix.001 file - promoters70/4768285
tttgatt

SEQ ID NO: 39819 - DNA, 9 bp, Unknown
  misc_feature (1)..( 9): Matrix.001 file - promoters70/4768289
gtttattaa

SEQ ID NO: 39820 - DNA, 13 bp, Unknown
  misc_feature (1)..( 13): Matrix.001 file - promoters70/4768319
catcttcctttgt

SEQ ID NO: 39821 - DNA, 11 bp, Unknown
  misc_feature (1)..( 11): Matrix.001 file - promoters70/4768319
tagataattgt

SEQ ID NO: 39822 - DNA, 11 bp, Unknown
  misc_feature (1)..( 11): Matrix.001 file - promoters70/4768354
taaaatttttt

SEQ ID NO: 39823 - DNA, 9 bp, Unknown
  misc_feature (1)..( 9): Matrix.001 file - promoters70/4768354
tttattcag

SEQ ID NO: 39824 - DNA, 9 bp, Unknown
  misc_feature (1)..( 9): Matrix.001 file - promoters70/4768528
aaaatttct

SEQ ID NO: 39825 - DNA, 8 bp, Unknown
  misc_feature (1)..( 8): Matrix.001 file - promoters70/4768528
tgtgaaac

SEQ ID NO: 39826 - DNA, 9 bp, Unknown
  misc_feature (1)..( 9): Matrix.001 file - promoters70/4768528
aaaatttct

SEQ ID NO: 39827 - DNA, 9 bp, Unknown
  misc_feature (1)..( 9): Matrix.001 file - promoters70/4768528
tttcaaaat

SEQ ID NO: 39828 - DNA, 8 bp, Unknown
  misc_feature (1)..( 8): Matrix.001 file - promoters70/4768532
atttttgt

SEQ ID NO: 39829 - DNA, 9 bp, Unknown
  misc_feature (1)..( 9): Matrix.001 file - promoters70/4768532
tgtcctaat

SEQ ID NO: 39830 - DNA, 9 bp, Unknown
  misc_feature (1)..( 9): Matrix.001 file - promoters70/4768615
taaaaaata

SEQ ID NO: 39831 - DNA, 9 bp, Unknown
  misc_feature (1)..( 9): Matrix.001 file - promoters70/4768615
aaaaaaaat

SEQ ID NO: 39832 - DNA, 10 bp, Unknown
  misc_feature (1)..( 10): Matrix.001 file - promoters70/4768615
aattacaaaa

SEQ ID NO: 39833 - DNA, 12 bp, Unknown
  misc_feature (1)..( 12): Matrix.001 file - promoters70/4768615
agaaaataaaat

SEQ ID NO: 39834 - DNA, 13 bp, Unknown
  misc_feature (1)..( 13): Matrix.001 file - promoters70/4768615
gataaaaaaccaa

SEQ ID NO: 39835 - DNA, 6 bp, Unknown
  misc_feature (1)..( 6): Matrix.001 file - promoters70/4768615
aaaaat

SEQ ID NO: 39836 - DNA, 10 bp, Unknown
  misc_feature (1)..( 10): Matrix.001 file - promoters70/4768635
aaacaaaaac

SEQ ID NO: 39837 - DNA, 8 bp, Unknown
  misc_feature (1)..( 8): Matrix.001 file - promoters70/4768698
attagtta

SEQ ID NO: 39838 - DNA, 13 bp, Unknown
  misc_feature (1)..( 13): Matrix.001 file - promoters70/4768698
attcgaaattttc

SEQ ID NO: 39839 - DNA, 16 bp, Unknown
  misc_feature (1)..( 16): Matrix.001 file - promoters70/4768698
attcgaaaatttcaaa

SEQ ID NO: 39840 - DNA, 11 bp, Unknown
  misc_feature (1)..( 11): Matrix.001 file - promoters70/4768698
gtgttaaatat

SEQ ID NO: 39841 - DNA, 8 bp, Unknown
  misc_feature (1)..( 8): Matrix.001 file - promoters70/4768698
tatataaa

SEQ ID NO: 39842 - DNA, 7 bp, Unknown
  misc_feature (1)..( 7): Matrix.001 file - promoters70/4768698
gaaaatt

SEQ ID NO: 39843 - DNA, 11 bp, Unknown
  misc_feature (1)..( 11): Matrix.001 file - promoters70/4768698
gttataagtta

SEQ ID NO: 39844 - DNA, 10 bp, Unknown
  misc_feature (1)..( 10): Matrix.001 file - promoters70/4768698
ataactttat

SEQ ID NO: 39845 - DNA, 16 bp, Unknown
  misc_feature (1)..( 16): Matrix.001 file - promoters70/4768698
attgtgaaataatttt

SEQ ID NO: 39846 - DNA, 8 bp, Unknown
  misc_feature (1)..( 8): Matrix.001 file - promoters70/4768829
caaattat

SEQ ID NO: 39847 - DNA, 7 bp, Unknown
  misc_feature (1)..( 7): Matrix.001 file - promoters70/4768829
tatgtct

SEQ ID NO: 39848 - DNA, 7 bp, Unknown
  misc_feature (1)..( 7): Matrix.001 file - promoters70/4768829
tttattt

SEQ ID NO: 39849 - DNA, 9 bp, Unknown
  misc_feature (1)..( 9): Matrix.001 file - promoters70/4768829
taaaaaaaa

SEQ ID NO: 39850 - DNA, 7 bp, Unknown
  misc_feature (1)..( 7): Matrix.001 file - promoters70/4768829
gaatcaa

SEQ ID NO: 39851 - DNA, 9 bp, Unknown
  misc_feature (1)..( 9): Matrix.001 file - promoters70/4768848
tactccatt

SEQ ID NO: 39852 - DNA, 8 bp, Unknown
  misc_feature (1)..( 8): Matrix.001 file - promoters70/4768848
attaaaat

SEQ ID NO: 39853 - DNA, 12 bp, Unknown
  misc_feature (1)..( 12): Matrix.001 file - promoters70/4769059
ttatatctttat

SEQ ID NO: 39854 - DNA, 9 bp, Unknown
  misc_feature (1)..( 9): Matrix.001 file - promoters70/4769137
tttgtcttt

SEQ ID NO: 39855 - DNA, 8 bp, Unknown
  misc_feature (1)..( 8): Matrix.001 file - promoters70/4769137
taacaaaa

SEQ ID NO: 39856 - DNA, 8 bp, Unknown
  misc_feature (1)..( 8): Matrix.001 file - promoters70/4769137
ttttggtg

SEQ ID NO: 39857 - DNA, 6 bp, Unknown
  misc_feature (1)..( 6): Matrix.001 file - promoters70/4769137
tataaa

SEQ ID NO: 39858 - DNA, 8 bp, Unknown
  misc_feature (1)..( 8): Matrix.001 file - promoters70/4769137
tttattag

SEQ ID NO: 39859 - DNA, 9 bp, Unknown
  misc_feature (1)..( 9): Matrix.001 file - promoters70/4769137
tttactttg

SEQ ID NO: 39860 - DNA, 9 bp, Unknown
  misc_feature (1)..( 9): Matrix.001 file - promoters70/4769137
ccactagtt

SEQ ID NO: 39861 - DNA, 11 bp, Unknown
  misc_feature (1)..( 11): Matrix.001 file - promoters70/4769153
acattataaaa

SEQ ID NO: 39862 - DNA, 10 bp, Unknown
  misc_feature (1)..( 10): Matrix.001 file - promoters70/4769153
aaattgttta

SEQ ID NO: 39863 - DNA, 8 bp, Unknown
  misc_feature (1)..( 8): Matrix.001 file - promoters70/4769180
aaaaaaat

SEQ ID NO: 39864 - DNA, 10 bp, Unknown
  misc_feature (1)..( 10): Matrix.001 file - promoters70/4769180
aaaaaaaaag

SEQ ID NO: 39865 - DNA, 9 bp, Unknown
  misc_feature (1)..( 9): Matrix.001 file - promoters70/4769180
tagttacag

SEQ ID NO: 39866 - DNA, 7 bp, Unknown
  misc_feature (1)..( 7): Matrix.001 file - promoters70/4769180
agaaaag

SEQ ID NO: 39867 - DNA, 8 bp, Unknown
  misc_feature (1)..( 8): Matrix.001 file - promoters70/4769180
aagaaaaa

SEQ ID NO: 39868 - DNA, 8 bp, Unknown
  misc_feature (1)..( 8): Matrix.001 file - promoters70/4769180
ttcttctt

SEQ ID NO: 39869 - DNA, 9 bp, Unknown
  misc_feature (1)..( 9): Matrix.001 file - promoters70/4769180
ataataaat

SEQ ID NO: 39870 - DNA, 7 bp, Unknown
  misc_feature (1)..( 7): Matrix.001 file - promoters70/4769180
ctataat

SEQ ID NO: 39871 - DNA, 9 bp, Unknown
  misc_feature (1)..( 9): Matrix.001 file - promoters70/4769180
aaattaatc

SEQ ID NO: 39872 - DNA, 11 bp, Unknown
  misc_feature (1)..( 11): Matrix.001 file - promoters70/4769180
gaataaccaaa

SEQ ID NO: 39873 - DNA, 8 bp, Unknown
  misc_feature (1)..( 8): Matrix.001 file - promoters70/4769180
aaaatatt

SEQ ID NO: 39874 - DNA, 14 bp, Unknown
  misc_feature (1)..( 14): Matrix.001 file - promoters70/4769301
agaaatacaatttt

SEQ ID NO: 39875 - DNA, 8 bp, Unknown
  misc_feature (1)..( 8): Matrix.001 file - promoters70/4769301
ctaaaaaa

SEQ ID NO: 39876 - DNA, 7 bp, Unknown
  misc_feature (1)..( 7): Matrix.001 file - promoters70/4769301
tttttgg

SEQ ID NO: 39877 - DNA, 10 bp, Unknown
  misc_feature (1)..( 10): Matrix.001 file - promoters70/4769301
tttcaaaaaa

SEQ ID NO: 39878 - DNA, 11 bp, Unknown
  misc_feature (1)..( 11): Matrix.001 file - promoters70/4769312
aaataaaattg

SEQ ID NO: 39879 - DNA, 11 bp, Unknown
  misc_feature (1)..( 11): Matrix.001 file - promoters70/4769312
aaaaaaagaat

SEQ ID NO: 39880 - DNA, 11 bp, Unknown
  misc_feature (1)..( 11): Matrix.001 file - promoters70/4769312
aaacaaagaaa

SEQ ID NO: 39881 - DNA, 7 bp, Unknown
  misc_feature (1)..( 7): Matrix.001 file - promoters70/4769312
aaattaa

SEQ ID NO: 39882 - DNA, 8 bp, Unknown
  misc_feature (1)..( 8): Matrix.001 file - promoters70/4769312
tgaacaaa

SEQ ID NO: 39883 - DNA, 11 bp, Unknown
  misc_feature (1)..( 11): Matrix.001 file - promoters70/4769312
caatcactctc

SEQ ID NO: 39884 - DNA, 10 bp, Unknown
  misc_feature (1)..( 10): Matrix.001 file - promoters70/4769312
tatataaaac

SEQ ID NO: 39885 - DNA, 9 bp, Unknown
  misc_feature (1)..( 9): Matrix.001 file - promoters70/4769312
ttgaccaaa

SEQ ID NO: 39886 - DNA, 11 bp, Unknown
  misc_feature (1)..( 11): Matrix.001 file - promoters70/4769328
aagaaatttgt

SEQ ID NO: 39887 - DNA, 7 bp, Unknown
  misc_feature (1)..( 7): Matrix.001 file - promoters70/4769328
atcttcg

SEQ ID NO: 39888 - DNA, 8 bp, Unknown
  misc_feature (1)..( 8): Matrix.001 file - promoters70/4770260
attcatat

SEQ ID NO: 39889 - DNA, 8 bp, Unknown
  misc_feature (1)..( 8): Matrix.001 file - promoters70/4770260
ttccattt

SEQ ID NO: 39890 - DNA, 8 bp, Unknown
  misc_feature (1)..( 8): Matrix.001 file - promoters70/4770260
tttcaaat

SEQ ID NO: 39891 - DNA, 8 bp, Unknown
  misc_feature (1)..( 8): Matrix.001 file - promoters70/4770278
caaaaatc

SEQ ID NO: 39892 - DNA, 6 bp, Unknown
  misc_feature (1)..( 6): Matrix.001 file - promoters70/4770278
tttgtc

SEQ ID NO: 39893 - DNA, 8 bp, Unknown
  misc_feature (1)..( 8): Matrix.001 file - promoters70/4770278
aaagaaaa

SEQ ID NO: 39894 - DNA, 8 bp, Unknown
  misc_feature (1)..( 8): Matrix.001 file - promoters70/4770305
tgtttaga

SEQ ID NO: 39895 - DNA, 6 bp, Unknown
  misc_feature (1)..( 6): Matrix.001 file - promoters70/4770379
aagaaa

SEQ ID NO: 39896 - DNA, 7 bp, Unknown
  misc_feature (1)..( 7): Matrix.001 file - promoters70/4770379
ttttttt

SEQ ID NO: 39897 - DNA, 9 bp, Unknown
  misc_feature (1)..( 9): Matrix.001 file - promoters70/4770379
ctataaatt

SEQ ID NO: 39898 - DNA, 9 bp, Unknown
  misc_feature (1)..( 9): Matrix.001 file - promoters70/4770379
atataaaca

SEQ ID NO: 39899 - DNA, 7 bp, Unknown
  misc_feature (1)..( 7): Matrix.001 file - promoters70/4770379
tactaaa

SEQ ID NO: 39900 - DNA, 9 bp, Unknown
  misc_feature (1)..( 9): Matrix.001 file - promoters70/4770379
cgaactaaa

SEQ ID NO: 39901 - DNA, 7 bp, Unknown
  misc_feature (1)..( 7): Matrix.001 file - promoters70/4770379
gttttct

SEQ ID NO: 39902 - DNA, 12 bp, Unknown
  misc_feature (1)..( 12): Matrix.001 file - promoters70/4770443
attaattttact

SEQ ID NO: 39903 - DNA, 11 bp, Unknown
  misc_feature (1)..( 11): Matrix.001 file - promoters70/4770443
tgataaaaaat

SEQ ID NO: 39904 - DNA, 8 bp, Unknown
  misc_feature (1)..( 8): Matrix.001 file - promoters70/4770443
ctttgatt

SEQ ID NO: 39905 - DNA, 11 bp, Unknown
  misc_feature (1)..( 11): Matrix.001 file - promoters70/4770443
acaaaaatgat

SEQ ID NO: 39906 - DNA, 13 bp, Unknown
  misc_feature (1)..( 13): Matrix.001 file - promoters70/4770443
taatttttttcta

SEQ ID NO: 39907 - DNA, 17 bp, Unknown
  misc_feature (1)..( 17): Matrix.001 file - promoters70/4770443
tttttttatattaaaaa

SEQ ID NO: 39908 - DNA, 13 bp, Unknown
  misc_feature (1)..( 13): Matrix.001 file - promoters70/4770443
aaaatattttttt

SEQ ID NO: 39909 - DNA, 11 bp, Unknown
  misc_feature (1)..( 11): Matrix.001 file - promoters70/4770477
tatacttcagt

SEQ ID NO: 39910 - DNA, 8 bp, Unknown
  misc_feature (1)..( 8): Matrix.001 file - promoters70/4770594
ttaatata

SEQ ID NO: 39911 - DNA, 10 bp, Unknown
  misc_feature (1)..( 10): Matrix.001 file - promoters70/4770594
cttcccttta

SEQ ID NO: 39912 - DNA, 9 bp, Unknown
  misc_feature (1)..( 9): Matrix.001 file - promoters70/4770594
tttttatat

SEQ ID NO: 39913 - DNA, 13 bp, Unknown
  misc_feature (1)..( 13): Matrix.001 file - promoters70/4770594
aaatcattaaaat

SEQ ID NO: 39914 - DNA, 13 bp, Unknown
  misc_feature (1)..( 13): Matrix.001 file - promoters70/4770594
aaaacattaaaat

SEQ ID NO: 39915 - DNA, 9 bp, Unknown
  misc_feature (1)..( 9): Matrix.001 file - promoters70/4771239
ttggcgaga

SEQ ID NO: 39916 - DNA, 7 bp, Unknown
  misc_feature (1)..( 7): Matrix.001 file - promoters70/4771271
ttttgct

SEQ ID NO: 39917 - DNA, 9 bp, Unknown
  misc_feature (1)..( 9): Matrix.001 file - promoters70/4771271
aaattaaac

SEQ ID NO: 39918 - DNA, 8 bp, Unknown
  misc_feature (1)..( 8): Matrix.001 file - promoters70/4771271
tatgatta

SEQ ID NO: 39919 - DNA, 10 bp, Unknown
  misc_feature (1)..( 10): Matrix.001 file - promoters70/4771271
aacaaaattg

SEQ ID NO: 39920 - DNA, 13 bp, Unknown
  misc_feature (1)..( 13): Matrix.001 file - promoters70/4771271
gtttttcatagaa

SEQ ID NO: 39921 - DNA, 8 bp, Unknown
  misc_feature (1)..( 8): Matrix.001 file - promoters70/4771271
gttaaata

SEQ ID NO: 39922 - DNA, 12 bp, Unknown
  misc_feature (1)..( 12): Matrix.001 file - promoters70/4771271
tgataaaaaaaa

SEQ ID NO: 39923 - DNA, 9 bp, Unknown
  misc_feature (1)..( 9): Matrix.001 file - promoters70/4771271
taaacaaaa

SEQ ID NO: 39924 - DNA, 9 bp, Unknown
  misc_feature (1)..( 9): Matrix.001 file - promoters70/4771271
aatattttg

SEQ ID NO: 39925 - DNA, 10 bp, Unknown
  misc_feature (1)..( 10): Matrix.001 file - promoters70/4771271
ttaggttttt

SEQ ID NO: 39926 - DNA, 8 bp, Unknown
  misc_feature (1)..( 8): Matrix.001 file - promoters70/4771271
attatttt

SEQ ID NO: 39927 - DNA, 9 bp, Unknown
  misc_feature (1)..( 9): Matrix.001 file - promoters70/4771321
gaaataaga

SEQ ID NO: 39928 - DNA, 9 bp, Unknown
  misc_feature (1)..( 9): Matrix.001 file - promoters70/4771334
agtttttgt

SEQ ID NO: 39929 - DNA, 8 bp, Unknown
  misc_feature (1)..( 8): Matrix.001 file - promoters70/4771348
tgtcttta

SEQ ID NO: 39930 - DNA, 8 bp, Unknown
  misc_feature (1)..( 8): Matrix.001 file - promoters70/4771348
cattagta

SEQ ID NO: 39931 - DNA, 12 bp, Unknown
  misc_feature (1)..( 12): Matrix.001 file - promoters70/4771360
agaaaaatagat

SEQ ID NO: 39932 - DNA, 10 bp, Unknown
  misc_feature (1)..( 10): Matrix.001 file - promoters70/4771360
ttgcatttta

SEQ ID NO: 39933 - DNA, 8 bp, Unknown
  misc_feature (1)..( 8): Matrix.001 file - promoters70/4771360
aaatgtta

SEQ ID NO: 39934 - DNA, 7 bp, Unknown
  misc_feature (1)..( 7): Matrix.001 file - promoters70/4771360
aaaaatt

SEQ ID NO: 39935 - DNA, 9 bp, Unknown
  misc_feature (1)..( 9): Matrix.001 file - promoters70/4771360
gaaaatgtt

SEQ ID NO: 39936 - DNA, 10 bp, Unknown
  misc_feature (1)..( 10): Matrix.001 file - promoters70/4771360
taaaaatgat

SEQ ID NO: 39937 - DNA, 10 bp, Unknown
  misc_feature (1)..( 10): Matrix.001 file - promoters70/4771360
taattagagt

SEQ ID NO: 39938 - DNA, 7 bp, Unknown
  misc_feature (1)..( 7): Matrix.001 file - promoters70/4771360
gaaaatt

SEQ ID NO: 39939 - DNA, 8 bp, Unknown
  misc_feature (1)..( 8): Matrix.001 file - promoters70/4771407
cagattat

SEQ ID NO: 39940 - DNA, 12 bp, Unknown
  misc_feature (1)..( 12): Matrix.001 file - promoters70/4771407
aaatgtcatttt

SEQ ID NO: 39941 - DNA, 7 bp, Unknown
  misc_feature (1)..( 7): Matrix.001 file - promoters70/4771407
attttgt

SEQ ID NO: 39942 - DNA, 9 bp, Unknown
  misc_feature (1)..( 9): Matrix.001 file - promoters70/4771407
aatggaaga

SEQ ID NO: 39943 - DNA, 11 bp, Unknown
  misc_feature (1)..( 11): Matrix.001 file - promoters70/4771407
gatttttgtta

SEQ ID NO: 39944 - DNA, 11 bp, Unknown
  misc_feature (1)..( 11): Matrix.001 file - promoters70/4771414
aaaaattgttc

SEQ ID NO: 39945 - DNA, 7 bp, Unknown
  misc_feature (1)..( 7): Matrix.001 file - promoters70/4771478
ttgcaaa

SEQ ID NO: 39946 - DNA, 9 bp, Unknown
  misc_feature (1)..( 9): Matrix.001 file - promoters70/4771478
taattaaaa

SEQ ID NO: 39947 - DNA, 9 bp, Unknown
  misc_feature (1)..( 9): Matrix.001 file - promoters70/4771478
ttaaaagaa

SEQ ID NO: 39948 - DNA, 15 bp, Unknown
  misc_feature (1)..( 15): Matrix.001 file - promoters70/4771495
aaactattaaaaaaa

SEQ ID NO: 39949 - DNA, 9 bp, Unknown
  misc_feature (1)..( 9): Matrix.001 file - promoters70/4771523
attcatgaa

SEQ ID NO: 39950 - DNA, 9 bp, Unknown
  misc_feature (1)..( 9): Matrix.001 file - promoters70/4771674
ctctccttt

SEQ ID NO: 39951 - DNA, 16 bp, Unknown
  misc_feature (1)..( 16): Matrix.001 file - promoters70/4771674
attctatccaatcttg

SEQ ID NO: 39952 - DNA, 9 bp, Unknown
  misc_feature (1)..( 9): Matrix.001 file - promoters70/4771677
aatgaaaaa

SEQ ID NO: 39953 - DNA, 10 bp, Unknown
  misc_feature (1)..( 10): Matrix.001 file - promoters70/4771677
tataaaaaaa

SEQ ID NO: 39954 - DNA, 11 bp, Unknown
  misc_feature (1)..( 11): Matrix.001 file - promoters70/4771677
aataaaaaata

SEQ ID NO: 39955 - DNA, 9 bp, Unknown
  misc_feature (1)..( 9): Matrix.001 file - promoters70/4771677
aaaatgtca

SEQ ID NO: 39956 - DNA, 11 bp, Unknown
  misc_feature (1)..( 11): Matrix.001 file - promoters70/4771725
taacagaataa

SEQ ID NO: 39957 - DNA, 5 bp, Unknown
  misc_feature (1)..( 5): Matrix.001 file - promoters70/4771725
aaata

SEQ ID NO: 39958 - DNA, 8 bp, Unknown
  misc_feature (1)..( 8): Matrix.001 file - promoters70/4771725
aataaaat

SEQ ID NO: 39959 - DNA, 9 bp, Unknown
  misc_feature (1)..( 9): Matrix.001 file - promoters70/4771853
gtttccttt

SEQ ID NO: 39960 - DNA, 14 bp, Unknown
  misc_feature (1)..( 14): Matrix.001 file - promoters70/4771928
agaaatacaatttt

SEQ ID NO: 39961 - DNA, 8 bp, Unknown
  misc_feature (1)..( 8): Matrix.001 file - promoters70/4771928
ctaaaaaa

SEQ ID NO: 39962 - DNA, 7 bp, Unknown
  misc_feature (1)..( 7): Matrix.001 file - promoters70/4771928
tttttgg

SEQ ID NO: 39963 - DNA, 10 bp, Unknown
  misc_feature (1)..( 10): Matrix.001 file - promoters70/4771928
tttcaaaaaa

SEQ ID NO: 39964 - DNA, 11 bp, Unknown
  misc_feature (1)..( 11): Matrix.001 file - promoters70/4772130
cgattgcacaa

SEQ ID NO: 39965 - DNA, 7 bp, Unknown
  misc_feature (1)..( 7): Matrix.001 file - promoters70/4772130
attcttc

SEQ ID NO: 39966 - DNA, 12 bp, Unknown
  misc_feature (1)..( 12): Matrix.001 file - promoters70/4772130
gaccttgtgaaa

SEQ ID NO: 39967 - DNA, 7 bp, Unknown
  misc_feature (1)..( 7): Matrix.001 file - promoters70/4772130
gatcatt

SEQ ID NO: 39968 - DNA, 8 bp, Unknown
  misc_feature (1)..( 8): Matrix.001 file - promoters70/4772130
ataaattc

SEQ ID NO: 39969 - DNA, 10 bp, Unknown
  misc_feature (1)..( 10): Matrix.001 file - promoters70/4772336
gcctatatat

SEQ ID NO: 39970 - DNA, 16 bp, Unknown
  misc_feature (1)..( 16): Matrix.001 file - promoters70/4772336
tgttttcataacaaaa

SEQ ID NO: 39971 - DNA, 8 bp, Unknown
  misc_feature (1)..( 8): Matrix.001 file - promoters70/4772346
agatacag

SEQ ID NO: 39972 - DNA, 7 bp, Unknown
  misc_feature (1)..( 7): Matrix.001 file - promoters70/4772346
tttcaag

SEQ ID NO: 39973 - DNA, 8 bp, Unknown
  misc_feature (1)..( 8): Matrix.001 file - promoters70/4772346
caaacctg

SEQ ID NO: 39974 - DNA, 15 bp, Unknown
  misc_feature (1)..( 15): Matrix.001 file - promoters70/4772398
ttcataaatttaata

SEQ ID NO: 39975 - DNA, 10 bp, Unknown
  misc_feature (1)..( 10): Matrix.001 file - promoters70/4772398
atctcttttg

SEQ ID NO: 39976 - DNA, 11 bp, Unknown
  misc_feature (1)..( 11): Matrix.001 file - promoters70/4772398
attgttactta

SEQ ID NO: 39977 - DNA, 6 bp, Unknown
  misc_feature (1)..( 6): Matrix.001 file - promoters70/4772398
tttcat

SEQ ID NO: 39978 - DNA, 8 bp, Unknown
  misc_feature (1)..( 8): Matrix.001 file - promoters70/4772398
ttatgaaa

SEQ ID NO: 39979 - DNA, 12 bp, Unknown
  misc_feature (1)..( 12): Matrix.001 file - promoters70/4772402
agaacattggat

SEQ ID NO: 39980 - DNA, 10 bp, Unknown
  misc_feature (1)..( 10): Matrix.001 file - promoters70/4772402
ctaataaaac

SEQ ID NO: 39981 - DNA, 8 bp, Unknown
  misc_feature (1)..( 8): Matrix.001 file - promoters70/4772402
caagttta

SEQ ID NO: 39982 - DNA, 7 bp, Unknown
  misc_feature (1)..( 7): Matrix.001 file - promoters70/4772402
taaaatt

SEQ ID NO: 39983 - DNA, 9 bp, Unknown
  misc_feature (1)..( 9): Matrix.001 file - promoters70/4772402
aaaccctaa

SEQ ID NO: 39984 - DNA, 7 bp, Unknown
  misc_feature (1)..( 7): Matrix.001 file - promoters70/4772402
tttttga

SEQ ID NO: 39985 - DNA, 7 bp, Unknown
  misc_feature (1)..( 7): Matrix.001 file - promoters70/4772724
atgtgga

SEQ ID NO: 39986 - DNA, 7 bp, Unknown
  misc_feature (1)..( 7): Matrix.001 file - promoters70/4772772
aaacaaa

SEQ ID NO: 39987 - DNA, 8 bp, Unknown
  misc_feature (1)..( 8): Matrix.001 file - promoters70/4772772
cctatata

SEQ ID NO: 39988 - DNA, 8 bp, Unknown
  misc_feature (1)..( 8): Matrix.001 file - promoters70/4772772
taaaattt

SEQ ID NO: 39989 - DNA, 8 bp, Unknown
  misc_feature (1)..( 8): Matrix.001 file - promoters70/4772772
aaaatctc

SEQ ID NO: 39990 - DNA, 9 bp, Unknown
  misc_feature (1)..( 9): Matrix.001 file - promoters70/4772776
atttaaacg

SEQ ID NO: 39991 - DNA, 8 bp, Unknown
  misc_feature (1)..( 8): Matrix.001 file - promoters70/4772776
aaatctcg

SEQ ID NO: 39992 - DNA, 11 bp, Unknown
  misc_feature (1)..( 11): Matrix.001 file - promoters70/4772776
ttgttaatgat

SEQ ID NO: 39993 - DNA, 9 bp, Unknown
  misc_feature (1)..( 9): Matrix.001 file - promoters70/4772776
tttatcata

SEQ ID NO: 39994 - DNA, 13 bp, Unknown
  misc_feature (1)..( 13): Matrix.001 file - promoters70/4772776
tcattgatctcaa

SEQ ID NO: 39995 - DNA, 8 bp, Unknown
  misc_feature (1)..( 8): Matrix.001 file - promoters70/4772776
aattgaaa

SEQ ID NO: 39996 - DNA, 10 bp, Unknown
  misc_feature (1)..( 10): Matrix.001 file - promoters70/4772776
attgataaaa

SEQ ID NO: 39997 - DNA, 12 bp, Unknown
  misc_feature (1)..( 12): Matrix.001 file - promoters70/4772776
aacttaaaaaca

SEQ ID NO: 39998 - DNA, 9 bp, Unknown
  misc_feature (1)..( 9): Matrix.001 file - promoters70/4772776
taaaatgca

SEQ ID NO: 39999 - DNA, 11 bp, Unknown
  misc_feature (1)..( 11): Matrix.001 file - promoters70/4772776
tttgatctcaa

SEQ ID NO: 40000 - DNA, 7 bp, Unknown
  misc_feature (1)..( 7): Matrix.001 file - promoters70/4772776
atataaa

SEQ ID NO: 40001 - DNA, 11 bp, Unknown
  misc_feature (1)..( 11): Matrix.001 file - promoters70/4772776
cttcttgttac

SEQ ID NO: 40002 - DNA, 11 bp, Unknown
  misc_feature (1)..( 11): Matrix.001 file - promoters70/4772776
aagtgtctttt

SEQ ID NO: 40003 - DNA, 8 bp, Unknown
  misc_feature (1)..( 8): Matrix.001 file - promoters70/4772776
aatcaaaa

SEQ ID NO: 40004 - DNA, 10 bp, Unknown
  misc_feature (1)..( 10): Matrix.001 file - promoters70/4772879
taaaaaggaa

SEQ ID NO: 40005 - DNA, 7 bp, Unknown
  misc_feature (1)..( 7): Matrix.001 file - promoters70/4772879
atataat

SEQ ID NO: 40006 - DNA, 8 bp, Unknown
  misc_feature (1)..( 8): Matrix.001 file - promoters70/4772879
taaatata

SEQ ID NO: 40007 - DNA, 11 bp, Unknown
  misc_feature (1)..( 11): Matrix.001 file - promoters70/4772879
ataaaattaat

SEQ ID NO: 40008 - DNA, 12 bp, Unknown
  misc_feature (1)..( 12): Matrix.001 file - promoters70/4772879
ttttgtaaacaa

SEQ ID NO: 40009 - DNA, 8 bp, Unknown
  misc_feature (1)..( 8): Matrix.001 file - promoters70/4772879
aaatttat

SEQ ID NO: 40010 - DNA, 8 bp, Unknown
  misc_feature (1)..( 8): Matrix.001 file - promoters70/4772879
aatcaaaa

SEQ ID NO: 40011 - DNA, 11 bp, Unknown
  misc_feature (1)..( 11): Matrix.001 file - promoters70/4772879
aaaaacacgaa

SEQ ID NO: 40012 - DNA, 8 bp, Unknown
  misc_feature (1)..( 8): Matrix.001 file - promoters70/4772879
atataata

SEQ ID NO: 40013 - DNA, 13 bp, Unknown
  misc_feature (1)..( 13): Matrix.001 file - promoters70/4773035
aatatttttaata

SEQ ID NO: 40014 - DNA, 9 bp, Unknown
  misc_feature (1)..( 9): Matrix.001 file - promoters70/4773035
aaatatttt

SEQ ID NO: 40015 - DNA, 7 bp, Unknown
  misc_feature (1)..( 7): Matrix.001 file - promoters70/4773035
tttttaa

SEQ ID NO: 40016 - DNA, 9 bp, Unknown
  misc_feature (1)..( 9): Matrix.001 file - promoters70/4773035
atatgagtc

SEQ ID NO: 40017 - DNA, 8 bp, Unknown
  misc_feature (1)..( 8): Matrix.001 file - promoters70/4773035
tattttca

SEQ ID NO: 40018 - DNA, 7 bp, Unknown
  misc_feature (1)..( 7): Matrix.001 file - promoters70/4773035
cggttag

SEQ ID NO: 40019 - DNA, 12 bp, Unknown
  misc_feature (1)..( 12): Matrix.001 file - promoters70/4773035
aaccaaaacaat

SEQ ID NO: 40020 - DNA, 10 bp, Unknown
  misc_feature (1)..( 10): Matrix.001 file - promoters70/4773068
tacgtgtcaa

SEQ ID NO: 40021 - DNA, 20 bp, Unknown
  misc_feature (1)..( 20): Matrix.001 file - promoters70/4773068
ttggctattgcttcaccgcc

SEQ ID NO: 40022 - DNA, 16 bp, Unknown
  misc_feature (1)..( 16): Matrix.001 file - promoters70/4773068
gaccgagtcgtcctcg

SEQ ID NO: 40023 - DNA, 19 bp, Unknown
  misc_feature (1)..( 19): Matrix.001 file - promoters70/4773068
ttcttcttctataaatcaa

SEQ ID NO: 40024 - DNA, 15 bp, Unknown
  misc_feature (1)..( 15): Matrix.001 file - promoters70/4773068
cgccttagctttctc

SEQ ID NO: 40025 - DNA, 13 bp, Unknown
  misc_feature (1)..( 13): Matrix.001 file - promoters70/4773074
atataaaacccct

SEQ ID NO: 40026 - DNA, 10 bp, Unknown
  misc_feature (1)..( 10): Matrix.001 file - promoters70/4773182
ttgtaagttt

SEQ ID NO: 40027 - DNA, 11 bp, Unknown
  misc_feature (1)..( 11): Matrix.001 file - promoters70/4773355
ttacttttaac

SEQ ID NO: 40028 - DNA, 9 bp, Unknown
  misc_feature (1)..( 9): Matrix.001 file - promoters70/4773355
ttaacaaaa

SEQ ID NO: 40029 - DNA, 8 bp, Unknown
  misc_feature (1)..( 8): Matrix.001 file - promoters70/4773355
aaacaatt

SEQ ID NO: 40030 - DNA, 9 bp, Unknown
  misc_feature (1)..( 9): Matrix.001 file - promoters70/4773823
agaaaattc

SEQ ID NO: 40031 - DNA, 9 bp, Unknown
  misc_feature (1)..( 9): Matrix.001 file - promoters70/4803329
aaaattgaa

SEQ ID NO: 40032 - DNA, 7 bp, Unknown
  misc_feature (1)..( 7): Matrix.001 file - promoters70/4806023
gaccgtt

SEQ ID NO: 40033 - DNA, 10 bp, Unknown
  misc_feature (1)..( 10): Matrix.001 file - promoters70/4806023
atcttgattt

SEQ ID NO: 40034 - DNA, 14 bp, Unknown
  misc_feature (1)..( 14): Matrix.001 file - promoters70/4807026
tatattaactttaa

SEQ ID NO: 40035 - DNA, 9 bp, Unknown
  misc_feature (1)..( 9): Matrix.001 file - promoters70/4807026
cttagaaac

SEQ ID NO: 40036 - DNA, 9 bp, Unknown
  misc_feature (1)..( 9): Matrix.001 file - promoters70/4807026
ttgatttgg

SEQ ID NO: 40037 - DNA, 10 bp, Unknown
  misc_feature (1)..( 10): Matrix.001 file - promoters70/4807026
aaaatcccta

SEQ ID NO: 40038 - DNA, 9 bp, Unknown
  misc_feature (1)..( 9): Matrix.001 file - promoters70/4807026
aaacatata

SEQ ID NO: 40039 - DNA, 12 bp, Unknown
  misc_feature (1)..( 12): Matrix.001 file - promoters70/4807236
tttagcaataag

SEQ ID NO: 40040 - DNA, 7 bp, Unknown
  misc_feature (1)..( 7): Matrix.001 file - promoters70/4808052
aaaccat

SEQ ID NO: 40041 - DNA, 10 bp, Unknown
  misc_feature (1)..( 10): Matrix.001 file - promoters70/4808052
ggacaaaaac

SEQ ID NO: 40042 - DNA, 7 bp, Unknown
  misc_feature (1)..( 7): Matrix.001 file - promoters70/4808052
ttaaaaa

SEQ ID NO: 40043 - DNA, 7 bp, Unknown
  misc_feature (1)..( 7): Matrix.001 file - promoters70/4808052
aaaatta

SEQ ID NO: 40044 - DNA, 7 bp, Unknown
  misc_feature (1)..( 7): Matrix.001 file - promoters70/4808052
agatcaa

SEQ ID NO: 40045 - DNA, 9 bp, Unknown
  misc_feature (1)..( 9): Matrix.001 file - promoters70/4811047
aaaaataaa

SEQ ID NO: 40046 - DNA, 9 bp, Unknown
  misc_feature (1)..( 9): Matrix.001 file - promoters70/4811047
taaataaaa

SEQ ID NO: 40047 - DNA, 9 bp, Unknown
  misc_feature (1)..( 9): Matrix.001 file - promoters70/4811047
atatattaa

SEQ ID NO: 40048 - DNA, 11 bp, Unknown
  misc_feature (1)..( 11): Matrix.001 file - promoters70/4811047
taattattatg

SEQ ID NO: 40049 - DNA, 8 bp, Unknown
  misc_feature (1)..( 8): Matrix.001 file - promoters70/4811047
gtcatata

SEQ ID NO: 40050 - DNA, 9 bp, Unknown
  misc_feature (1)..( 9): Matrix.001 file - promoters70/4899830
tatataaaa

SEQ ID NO: 40051 - DNA, 13 bp, Unknown
  misc_feature (1)..( 13): Matrix.001 file - promoters70/4899830
aaacgtttgataa

SEQ ID NO: 40052 - DNA, 11 bp, Unknown
  misc_feature (1)..( 11): Matrix.001 file - promoters70/4899873
catatatatta

SEQ ID NO: 40053 - DNA, 6 bp, Unknown
  misc_feature (1)..( 6): Matrix.001 file - promoters70/4899873
aaataa

SEQ ID NO: 40054 - DNA, 11 bp, Unknown
  misc_feature (1)..( 11): Matrix.001 file - promoters70/4900353
taatataaatt

SEQ ID NO: 40055 - DNA, 8 bp, Unknown
  misc_feature (1)..( 8): Matrix.001 file - promoters70/4900353
gggcctaa

SEQ ID NO: 40056 - DNA, 9 bp, Unknown
  misc_feature (1)..( 9): Matrix.001 file - promoters70/4901133
atgaaaatt

SEQ ID NO: 40057 - DNA, 8 bp, Unknown
  misc_feature (1)..( 8): Matrix.001 file - promoters70/4901133
acaaataa

SEQ ID NO: 40058 - DNA, 12 bp, Unknown
  misc_feature (1)..( 12): Matrix.001 file - promoters70/4901171
agtaactaaaaa

SEQ ID NO: 40059 - DNA, 5 bp, Unknown
  misc_feature (1)..( 5): Matrix.001 file - promoters70/4901171
actaa

SEQ ID NO: 40060 - DNA, 7 bp, Unknown
  misc_feature (1)..( 7): Matrix.001 file - promoters70/4901783
ccacaga

SEQ ID NO: 40061 - DNA, 10 bp, Unknown
  misc_feature (1)..( 10): Matrix.001 file - promoters70/4901839
ttaaacttgt

SEQ ID NO: 40062 - DNA, 7 bp, Unknown
  misc_feature (1)..( 7): Matrix.001 file - promoters70/4901839
attttaa

SEQ ID NO: 40063 - DNA, 5 bp, Unknown
  misc_feature (1)..( 5): Matrix.001 file - promoters70/4902387
tgata

SEQ ID NO: 40064 - DNA, 9 bp, Unknown
  misc_feature (1)..( 9): Matrix.001 file - promoters70/4902387
ccgaataaa

SEQ ID NO: 40065 - DNA, 10 bp, Unknown
  misc_feature (1)..( 10): Matrix.001 file - promoters70/4903614
ttaatataaa

SEQ ID NO: 40066 - DNA, 11 bp, Unknown
  misc_feature (1)..( 11): Matrix.001 file - promoters70/4909449
ttcaaaaaata

SEQ ID NO: 40067 - DNA, 15 bp, Unknown
  misc_feature (1)..( 15): Matrix.001 file - promoters70/4911380
cattcttgtattaac

SEQ ID NO: 40068 - DNA, 11 bp, Unknown
  misc_feature (1)..( 11): Matrix.001 file - promoters70/4911380
acaaaaatttt

SEQ ID NO: 40069 - DNA, 8 bp, Unknown
  misc_feature (1)..( 8): Matrix.001 file - promoters70/4911485
aatgtttg

SEQ ID NO: 40070 - DNA, 11 bp, Unknown
  misc_feature (1)..( 11): Matrix.001 file - promoters70/4911485
tgagtaaattt

SEQ ID NO: 40071 - DNA, 8 bp, Unknown
  misc_feature (1)..( 8): Matrix.001 file - promoters70/4911485
agttggat

SEQ ID NO: 40072 - DNA, 10 bp, Unknown
  misc_feature (1)..( 10): Matrix.001 file - promoters70/4911485
tataaattta

SEQ ID NO: 40073 - DNA, 10 bp, Unknown
  misc_feature (1)..( 10): Matrix.001 file - promoters70/4911485
ttattgttag

SEQ ID NO: 40074 - DNA, 8 bp, Unknown
  misc_feature (1)..( 8): Matrix.001 file - promoters70/4911485
aattttta

SEQ ID NO: 40075 - DNA, 15 bp, Unknown
  misc_feature (1)..( 15): Matrix.001 file - promoters70/4911485
atataaatttatata

SEQ ID NO: 40076 - DNA, 11 bp, Unknown
  misc_feature (1)..( 11): Matrix.001 file - promoters70/4911485
aatataaattt

SEQ ID NO: 40077 - DNA, 9 bp, Unknown
  misc_feature (1)..( 9): Matrix.001 file - promoters70/4911485
tatcaaaaa

SEQ ID NO: 40078 - DNA, 8 bp, Unknown
  misc_feature (1)..( 8): Matrix.001 file - promoters70/4911485
agaattta

SEQ ID NO: 40079 - DNA, 10 bp, Unknown
  misc_feature (1)..( 10): Matrix.001 file - promoters70/4911492
aataaaatta

SEQ ID NO: 40080 - DNA, 8 bp, Unknown
  misc_feature (1)..( 8): Matrix.001 file - promoters70/4911492
aagaaata

SEQ ID NO: 40081 - DNA, 9 bp, Unknown
  misc_feature (1)..( 9): Matrix.001 file - promoters70/4911492
tatatatat

SEQ ID NO: 40082 - DNA, 9 bp, Unknown
  misc_feature (1)..( 9): Matrix.001 file - promoters70/4911492
taaccaaaa

SEQ ID NO: 40083 - DNA, 12 bp, Unknown
  misc_feature (1)..( 12): Matrix.001 file - promoters70/4911492
aaaataaaaata

SEQ ID NO: 40084 - DNA, 8 bp, Unknown
  misc_feature (1)..( 8): Matrix.001 file - promoters70/4911492
aataaata

SEQ ID NO: 40085 - DNA, 10 bp, Unknown
  misc_feature (1)..( 10): Matrix.001 file - promoters70/4911492
tggaaagttt

SEQ ID NO: 40086 - DNA, 8 bp, Unknown
  misc_feature (1)..( 8): Matrix.001 file - promoters70/4914438
tttgccag

SEQ ID NO: 40087 - DNA, 10 bp, Unknown
  misc_feature (1)..( 10): Matrix.001 file - promoters70/4914438
tataaaaaat

SEQ ID NO: 40088 - DNA, 7 bp, Unknown
  misc_feature (1)..( 7): Matrix.001 file - promoters70/4914438
tataaaa

SEQ ID NO: 40089 - DNA, 10 bp, Unknown
  misc_feature (1)..( 10): Matrix.001 file - promoters70/4915384
ggtttatttt

SEQ ID NO: 40090 - DNA, 9 bp, Unknown
  misc_feature (1)..( 9): Matrix.001 file - promoters70/4915420
aggaatatt

SEQ ID NO: 40091 - DNA, 10 bp, Unknown
  misc_feature (1)..( 10): Matrix.001 file - promoters70/4915420
taatatgagt

SEQ ID NO: 40092 - DNA, 9 bp, Unknown
  misc_feature (1)..( 9): Matrix.001 file - promoters70/4915420
tatatatga

SEQ ID NO: 40093 - DNA, 7 bp, Unknown
  misc_feature (1)..( 7): Matrix.001 file - promoters70/4915420
aaacaaa

SEQ ID NO: 40094 - DNA, 8 bp, Unknown
  misc_feature (1)..( 8): Matrix.001 file - promoters70/4915420
ggttttaa

SEQ ID NO: 40095 - DNA, 12 bp, Unknown
  misc_feature (1)..( 12): Matrix.001 file - promoters70/4915420
agaaatataaat

SEQ ID NO: 40096 - DNA, 12 bp, Unknown
  misc_feature (1)..( 12): Matrix.001 file - promoters70/4915606
aaaaaagtttat

SEQ ID NO: 40097 - DNA, 15 bp, Unknown
  misc_feature (1)..( 15): Matrix.001 file - promoters70/4915606
gttaaatttttaatt

SEQ ID NO: 40098 - DNA, 9 bp, Unknown
  misc_feature (1)..( 9): Matrix.001 file - promoters70/4915606
aaagaattt

SEQ ID NO: 40099 - DNA, 9 bp, Unknown
  misc_feature (1)..( 9): Matrix.001 file - promoters70/4921433
cgagtggct

SEQ ID NO: 40100 - DNA, 8 bp, Unknown
  misc_feature (1)..( 8): Matrix.001 file - promoters70/4921433
gaatgaag

SEQ ID NO: 40101 - DNA, 12 bp, Unknown
  misc_feature (1)..( 12): Matrix.001 file - promoters70/4934904
tctgggaaatcg

SEQ ID NO: 40102 - DNA, 6 bp, Unknown
  misc_feature (1)..( 6): Matrix.001 file - promoters70/4934904
tttcaa

SEQ ID NO: 40103 - DNA, 6 bp, Unknown
  misc_feature (1)..( 6): Matrix.001 file - promoters70/4934904
ggaaat

SEQ ID NO: 40104 - DNA, 10 bp, Unknown
  misc_feature (1)..( 10): Matrix.001 file - promoters70/4949707
aaataattga

SEQ ID NO: 40105 - DNA, 7 bp, Unknown
  misc_feature (1)..( 7): Matrix.001 file - promoters70/4949707
atattta

SEQ ID NO: 40106 - DNA, 9 bp, Unknown
  misc_feature (1)..( 9): Matrix.001 file - promoters70/4978201
tatatattc

SEQ ID NO: 40107 - DNA, 10 bp, Unknown
  misc_feature (1)..( 10): Matrix.001 file - promoters70/4992383
ttttgatttg

SEQ ID NO: 40108 - DNA, 12 bp, Unknown
  misc_feature (1)..( 12): Matrix.001 file - promoters70/4992383
aacttttaagta

SEQ ID NO: 40109 - DNA, 7 bp, Unknown
  misc_feature (1)..( 7): Matrix.001 file - promoters70/5662743
atttgat

SEQ ID NO: 40110 - DNA, 10 bp, Unknown
  misc_feature (1)..( 10): Matrix.001 file - promoters70/5662799
aggcccaatt

SEQ ID NO: 40111 - DNA, 8 bp, Unknown
  misc_feature (1)..( 8): Matrix.001 file - promoters70/5662799
aatttgat

SEQ ID NO: 40112 - DNA, 8 bp, Unknown
  misc_feature (1)..( 8): Matrix.001 file - promoters70/5662799
tttgacca

SEQ ID NO: 40113 - DNA, 7 bp, Unknown
  misc_feature (1)..( 7): Matrix.001 file - promoters70/5662893
aaacaaa

SEQ ID NO: 40114 - DNA, 11 bp, Unknown
  misc_feature (1)..( 11): Matrix.001 file - promoters70/5662893
acttgacaaaa

SEQ ID NO: 40115 - DNA, 11 bp, Unknown
  misc_feature (1)..( 11): Matrix.001 file - promoters70/5662893
ctagagacaaa

SEQ ID NO: 40116 - DNA, 11 bp, Unknown
  misc_feature (1)..( 11): Matrix.001 file - promoters70/5662902
taagataataa

SEQ ID NO: 40117 - DNA, 10 bp, Unknown
  misc_feature (1)..( 10): Matrix.001 file - promoters70/5662914
ggaagtagag

SEQ ID NO: 40118 - DNA, 9 bp, Unknown
  misc_feature (1)..( 9): Matrix.001 file - promoters70/5662914
aagatgatg

SEQ ID NO: 40119 - DNA, 9 bp, Unknown
  misc_feature (1)..( 9): Matrix.001 file - promoters70/5662921
taatttcaa

SEQ ID NO: 40120 - DNA, 8 bp, Unknown
  misc_feature (1)..( 8): Matrix.001 file - promoters70/5662921
aaatttta

SEQ ID NO: 40121 - DNA, 8 bp, Unknown
  misc_feature (1)..( 8): Matrix.001 file - promoters70/5662967
tatattat

SEQ ID NO: 40122 - DNA, 7 bp, Unknown
  misc_feature (1)..( 7): Matrix.001 file - promoters70/5662977
gttcctt

SEQ ID NO: 40123 - DNA, 8 bp, Unknown
  misc_feature (1)..( 8): Matrix.001 file - promoters70/5662977
aaatgtta

SEQ ID NO: 40124 - DNA, 7 bp, Unknown
  misc_feature (1)..( 7): Matrix.001 file - promoters70/5662977
gttgatt

SEQ ID NO: 40125 - DNA, 8 bp, Unknown
  misc_feature (1)..( 8): Matrix.001 file - promoters70/5662977
cgacatgt

SEQ ID NO: 40126 - DNA, 6 bp, Unknown
  misc_feature (1)..( 6): Matrix.001 file - promoters70/5662977
acatgt

SEQ ID NO: 40127 - DNA, 12 bp, Unknown
  misc_feature (1)..( 12): Matrix.001 file - promoters70/5663003
aaataattgtat

SEQ ID NO: 40128 - DNA, 10 bp, Unknown
  misc_feature (1)..( 10): Matrix.001 file - promoters70/5663003
gaaatagatt

SEQ ID NO: 40129 - DNA, 11 bp, Unknown
  misc_feature (1)..( 11): Matrix.001 file - promoters70/5663003
ttacttaaatt

SEQ ID NO: 40130 - DNA, 10 bp, Unknown
  misc_feature (1)..( 10): Matrix.001 file - promoters70/5663116
cattaatttc

SEQ ID NO: 40131 - DNA, 10 bp, Unknown
  misc_feature (1)..( 10): Matrix.001 file - promoters70/5663116
aattaattaa

SEQ ID NO: 40132 - DNA, 8 bp, Unknown
  misc_feature (1)..( 8): Matrix.001 file - promoters70/5663116
acgaaatt

SEQ ID NO: 40133 - DNA, 11 bp, Unknown
  misc_feature (1)..( 11): Matrix.001 file - promoters70/5663116
attaaatcaat

SEQ ID NO: 40134 - DNA, 9 bp, Unknown
  misc_feature (1)..( 9): Matrix.001 file - promoters70/5663138
taataacat

SEQ ID NO: 40135 - DNA, 9 bp, Unknown
  misc_feature (1)..( 9): Matrix.001 file - promoters70/5663142
aatgaatat

SEQ ID NO: 40136 - DNA, 8 bp, Unknown
  misc_feature (1)..( 8): Matrix.001 file - promoters70/5663142
aataatga

SEQ ID NO: 40137 - DNA, 8 bp, Unknown
  misc_feature (1)..( 8): Matrix.001 file - promoters70/5663142
tattaatt

SEQ ID NO: 40138 - DNA, 6 bp, Unknown
  misc_feature (1)..( 6): Matrix.001 file - promoters70/5663142
ataata

SEQ ID NO: 40139 - DNA, 14 bp, Unknown
  misc_feature (1)..( 14): Matrix.001 file - promoters70/5663142
acatataataaata

SEQ ID NO: 40140 - DNA, 8 bp, Unknown
  misc_feature (1)..( 8): Matrix.001 file - promoters70/5663142
aaatatat

SEQ ID NO: 40141 - DNA, 9 bp, Unknown
  misc_feature (1)..( 9): Matrix.001 file - promoters70/5663142
aaattaata

SEQ ID NO: 40142 - DNA, 6 bp, Unknown
  misc_feature (1)..( 6): Matrix.001 file - promoters70/5663142
aaatat

SEQ ID NO: 40143 - DNA, 12 bp, Unknown
  misc_feature (1)..( 12): Matrix.001 file - promoters70/5663142
agacataataaa

SEQ ID NO: 40144 - DNA, 8 bp, Unknown
  misc_feature (1)..( 8): Matrix.001 file - promoters70/5663142
agtgaaaa

SEQ ID NO: 40145 - DNA, 8 bp, Unknown
  misc_feature (1)..( 8): Matrix.001 file - promoters70/5663142
tcatataa

SEQ ID NO: 40146 - DNA, 8 bp, Unknown
  misc_feature (1)..( 8): Matrix.001 file - promoters70/5663142
aaatcttg

SEQ ID NO: 40147 - DNA, 10 bp, Unknown
  misc_feature (1)..( 10): Matrix.001 file - promoters70/5663151
aagaaatgat

SEQ ID NO: 40148 - DNA, 9 bp, Unknown
  misc_feature (1)..( 9): Matrix.001 file - promoters70/5663151
caaacccaa

SEQ ID NO: 40149 - DNA, 11 bp, Unknown
  misc_feature (1)..( 11): Matrix.001 file - promoters70/5663224
cttttaaaata

SEQ ID NO: 40150 - DNA, 7 bp, Unknown
  misc_feature (1)..( 7): Matrix.001 file - promoters70/5663224
gaattat

SEQ ID NO: 40151 - DNA, 13 bp, Unknown
  misc_feature (1)..( 13): Matrix.001 file - promoters70/5663374
aaataaaataaat

SEQ ID NO: 40152 - DNA, 9 bp, Unknown
  misc_feature (1)..( 9): Matrix.001 file - promoters70/5663374
ttcccacta

SEQ ID NO: 40153 - DNA, 9 bp, Unknown
  misc_feature (1)..( 9): Matrix.001 file - promoters70/5663625
aagtcacta

SEQ ID NO: 40154 - DNA, 7 bp, Unknown
  misc_feature (1)..( 7): Matrix.001 file - promoters70/5663625
aagaaag

SEQ ID NO: 40155 - DNA, 11 bp, Unknown
  misc_feature (1)..( 11): Matrix.001 file - promoters70/5663625
ttataataatt

SEQ ID NO: 40156 - DNA, 9 bp, Unknown
  misc_feature (1)..( 9): Matrix.001 file - promoters70/5663625
tagtaatat

SEQ ID NO: 40157 - DNA, 9 bp, Unknown
  misc_feature (1)..( 9): Matrix.001 file - promoters70/5663625
ttgaaaatt

SEQ ID NO: 40158 - DNA, 7 bp, Unknown
  misc_feature (1)..( 7): Matrix.001 file - promoters70/5663625
tcagtct

SEQ ID NO: 40159 - DNA, 7 bp, Unknown
  misc_feature (1)..( 7): Matrix.001 file - promoters70/5663625
atatgat

SEQ ID NO: 40160 - DNA, 8 bp, Unknown
  misc_feature (1)..( 8): Matrix.001 file - promoters70/5663625
atatgagt

SEQ ID NO: 40161 - DNA, 7 bp, Unknown
  misc_feature (1)..( 7): Matrix.001 file - promoters70/5663625
aaattta

SEQ ID NO: 40162 - DNA, 9 bp, Unknown
  misc_feature (1)..( 9): Matrix.001 file - promoters70/5663805
ttactttac

SEQ ID NO: 40163 - DNA, 6 bp, Unknown
  misc_feature (1)..( 6): Matrix.001 file - promoters70/5663805
atataa

SEQ ID NO: 40164 - DNA, 8 bp, Unknown
  misc_feature (1)..( 8): Matrix.001 file - promoters70/5663805
atccaaac

SEQ ID NO: 40165 - DNA, 7 bp, Unknown
  misc_feature (1)..( 7): Matrix.001 file - promoters70/5663805
gtaagaa

SEQ ID NO: 40166 - DNA, 10 bp, Unknown
  misc_feature (1)..( 10): Matrix.001 file - promoters70/5663805
ctttattgat

SEQ ID NO: 40167 - DNA, 8 bp, Unknown
  misc_feature (1)..( 8): Matrix.001 file - promoters70/5663805
ataataaa

SEQ ID NO: 40168 - DNA, 9 bp, Unknown
  misc_feature (1)..( 9): Matrix.001 file - promoters70/5663805
aatttattt

SEQ ID NO: 40169 - DNA, 13 bp, Unknown
  misc_feature (1)..( 13): Matrix.001 file - promoters70/5663805
acttataataaaa

SEQ ID NO: 40170 - DNA, 10 bp, Unknown
  misc_feature (1)..( 10): Matrix.001 file - promoters70/5663805
aaaaagacac

SEQ ID NO: 40171 - DNA, 7 bp, Unknown
  misc_feature (1)..( 7): Matrix.001 file - promoters70/5663805
aaataaa

SEQ ID NO: 40172 - DNA, 8 bp, Unknown
  misc_feature (1)..( 8): Matrix.001 file - promoters70/5663805
aatatgaa

SEQ ID NO: 40173 - DNA, 8 bp, Unknown
  misc_feature (1)..( 8): Matrix.001 file - promoters70/5663805
tttaaaat

SEQ ID NO: 40174 - DNA, 8 bp, Unknown
  misc_feature (1)..( 8): Matrix.001 file - promoters70/5663805
tttatttc

SEQ ID NO: 40175 - DNA, 8 bp, Unknown
  misc_feature (1)..( 8): Matrix.001 file - promoters70/5663862
tgtcattt

SEQ ID NO: 40176 - DNA, 8 bp, Unknown
  misc_feature (1)..( 8): Matrix.001 file - promoters70/5663907
taatcaat

SEQ ID NO: 40177 - DNA, 9 bp, Unknown
  misc_feature (1)..( 9): Matrix.001 file - promoters70/5663907
ttatttgga

SEQ ID NO: 40178 - DNA, 7 bp, Unknown
  misc_feature (1)..( 7): Matrix.001 file - promoters70/5663907
tataaat

SEQ ID NO: 40179 - DNA, 8 bp, Unknown
  misc_feature (1)..( 8): Matrix.001 file - promoters70/5663907
attgttga

SEQ ID NO: 40180 - DNA, 6 bp, Unknown
  misc_feature (1)..( 6): Matrix.001 file - promoters70/5663907
agcaat

SEQ ID NO: 40181 - DNA, 11 bp, Unknown
  misc_feature (1)..( 11): Matrix.001 file - promoters70/5663934
atactacaaat

SEQ ID NO: 40182 - DNA, 13 bp, Unknown
  misc_feature (1)..( 13): Matrix.001 file - promoters70/5663934
aaaacgaatgact

SEQ ID NO: 40183 - DNA, 12 bp, Unknown
  misc_feature (1)..( 12): Matrix.001 file - promoters70/5663934
gaacaaagaaaa

SEQ ID NO: 40184 - DNA, 13 bp, Unknown
  misc_feature (1)..( 13): Matrix.001 file - promoters70/5663934
tactaaaaataac

SEQ ID NO: 40185 - DNA, 11 bp, Unknown
  misc_feature (1)..( 11): Matrix.001 file - promoters70/5663934
aaaagaaatga

SEQ ID NO: 40186 - DNA, 5 bp, Unknown
  misc_feature (1)..( 5): Matrix.001 file - promoters70/5663934
caaat

SEQ ID NO: 40187 - DNA, 7 bp, Unknown
  misc_feature (1)..( 7): Matrix.001 file - promoters70/5663950
ggatttt

SEQ ID NO: 40188 - DNA, 9 bp, Unknown
  misc_feature (1)..( 9): Matrix.001 file - promoters70/5663950
ggatttatt

SEQ ID NO: 40189 - DNA, 8 bp, Unknown
  misc_feature (1)..( 8): Matrix.001 file - promoters70/5663950
ctcatata

SEQ ID NO: 40190 - DNA, 8 bp, Unknown
  misc_feature (1)..( 8): Matrix.001 file - promoters70/5663950
aaagattt

SEQ ID NO: 40191 - DNA, 9 bp, Unknown
  misc_feature (1)..( 9): Matrix.001 file - promoters70/5663970
gagtttctt

SEQ ID NO: 40192 - DNA, 10 bp, Unknown
  misc_feature (1)..( 10): Matrix.001 file - promoters70/5663996
tggaataatc

SEQ ID NO: 40193 - DNA, 13 bp, Unknown
  misc_feature (1)..( 13): Matrix.001 file - promoters70/5663996
atcaaatacacaa

SEQ ID NO: 40194 - DNA, 9 bp, Unknown
  misc_feature (1)..( 9): Matrix.001 file - promoters70/5663996
aacaatttt

SEQ ID NO: 40195 - DNA, 9 bp, Unknown
  misc_feature (1)..( 9): Matrix.001 file - promoters70/5663996
ttggattta

SEQ ID NO: 40196 - DNA, 7 bp, Unknown
  misc_feature (1)..( 7): Matrix.001 file - promoters70/5663996
gagagta

SEQ ID NO: 40197 - DNA, 8 bp, Unknown
  misc_feature (1)..( 8): Matrix.001 file - promoters70/5663996
ctttgacc

SEQ ID NO: 40198 - DNA, 13 bp, Unknown
  misc_feature (1)..( 13): Matrix.001 file - promoters70/5663996
ttgaatcaaaatt

SEQ ID NO: 40199 - DNA, 10 bp, Unknown
  misc_feature (1)..( 10): Matrix.001 file - promoters70/5663996
agctcgctct

SEQ ID NO: 40200 - DNA, 9 bp, Unknown
  misc_feature (1)..( 9): Matrix.001 file - promoters70/5664060
acaaataat

SEQ ID NO: 40201 - DNA, 8 bp, Unknown
  misc_feature (1)..( 8): Matrix.001 file - promoters70/5664060
attggatt

SEQ ID NO: 40202 - DNA, 9 bp, Unknown
  misc_feature (1)..( 9): Matrix.001 file - promoters70/5664060
atttgtcta

SEQ ID NO: 40203 - DNA, 7 bp, Unknown
  misc_feature (1)..( 7): Matrix.001 file - promoters70/5664060
tgaaaac

SEQ ID NO: 40204 - DNA, 7 bp, Unknown
  misc_feature (1)..( 7): Matrix.001 file - promoters70/5664141
atttatg

SEQ ID NO: 40205 - DNA, 9 bp, Unknown
  misc_feature (1)..( 9): Matrix.001 file - promoters70/5664141
atttttttt

SEQ ID NO: 40206 - DNA, 7 bp, Unknown
  misc_feature (1)..( 7): Matrix.001 file - promoters70/5664170
cataatt

SEQ ID NO: 40207 - DNA, 8 bp, Unknown
  misc_feature (1)..( 8): Matrix.001 file - promoters70/5664182
tacaaatt

SEQ ID NO: 40208 - DNA, 11 bp, Unknown
  misc_feature (1)..( 11): Matrix.001 file - promoters70/5664182
gcttaagttta

SEQ ID NO: 40209 - DNA, 8 bp, Unknown
  misc_feature (1)..( 8): Matrix.001 file - promoters70/5664182
gttaaagt

SEQ ID NO: 40210 - DNA, 8 bp, Unknown
  misc_feature (1)..( 8): Matrix.001 file - promoters70/5664294
aaaatcga

SEQ ID NO: 40211 - DNA, 8 bp, Unknown
  misc_feature (1)..( 8): Matrix.001 file - promoters70/5664294
gataaaaa

SEQ ID NO: 40212 - DNA, 10 bp, Unknown
  misc_feature (1)..( 10): Matrix.001 file - promoters70/5664294
actttataat

SEQ ID NO: 40213 - DNA, 10 bp, Unknown
  misc_feature (1)..( 10): Matrix.001 file - promoters70/5664298
catgagctta

SEQ ID NO: 40214 - DNA, 11 bp, Unknown
  misc_feature (1)..( 11): Matrix.001 file - promoters70/5664311
cattgtaaact

SEQ ID NO: 40215 - DNA, 11 bp, Unknown
  misc_feature (1)..( 11): Matrix.001 file - promoters70/5664311
aaaaaaataaa

SEQ ID NO: 40216 - DNA, 9 bp, Unknown
  misc_feature (1)..( 9): Matrix.001 file - promoters70/5664311
aaagttttc

SEQ ID NO: 40217 - DNA, 9 bp, Unknown
  misc_feature (1)..( 9): Matrix.001 file - promoters70/5664457
tctttctat

SEQ ID NO: 40218 - DNA, 7 bp, Unknown
  misc_feature (1)..( 7): Matrix.001 file - promoters70/5664457
tcaaacc

SEQ ID NO: 40219 - DNA, 7 bp, Unknown
  misc_feature (1)..( 7): Matrix.001 file - promoters70/5664465
ttcacaa

SEQ ID NO: 40220 - DNA, 12 bp, Unknown
  misc_feature (1)..( 12): Matrix.001 file - promoters70/5664703
ctttttgtatat

SEQ ID NO: 40221 - DNA, 8 bp, Unknown
  misc_feature (1)..( 8): Matrix.001 file - promoters70/5664703
tctgaatt

SEQ ID NO: 40222 - DNA, 7 bp, Unknown
  misc_feature (1)..( 7): Matrix.001 file - promoters70/5664873
aaataaa

SEQ ID NO: 40223 - DNA, 8 bp, Unknown
  misc_feature (1)..( 8): Matrix.001 file - promoters70/5664873
taaaattt

SEQ ID NO: 40224 - DNA, 7 bp, Unknown
  misc_feature (1)..( 7): Matrix.001 file - promoters70/5664873
aaataaa

SEQ ID NO: 40225 - DNA, 7 bp, Unknown
  misc_feature (1)..( 7): Matrix.001 file - promoters70/5664873
aaattta

SEQ ID NO: 40226 - DNA, 9 bp, Unknown
  misc_feature (1)..( 9): Matrix.001 file - promoters70/5664873
aaacttaat

SEQ ID NO: 40227 - DNA, 11 bp, Unknown
  misc_feature (1)..( 11): Matrix.001 file - promoters70/5664873
tttttgacttt

SEQ ID NO: 40228 - DNA, 13 bp, Unknown
  misc_feature (1)..( 13): Matrix.001 file - promoters70/5664873
ttttactaaaaaa

SEQ ID NO: 40229 - DNA, 10 bp, Unknown
  misc_feature (1)..( 10): Matrix.001 file - promoters70/5664873
taatgtctcg

SEQ ID NO: 40230 - DNA, 9 bp, Unknown
  misc_feature (1)..( 9): Matrix.001 file - promoters70/5664873
aaattttat

SEQ ID NO: 40231 - DNA, 10 bp, Unknown
  misc_feature (1)..( 10): Matrix.001 file - promoters70/5664885
ataaaaatta

SEQ ID NO: 40232 - DNA, 7 bp, Unknown
  misc_feature (1)..( 7): Matrix.001 file - promoters70/5665140
aaaacaa

SEQ ID NO: 40233 - DNA, 8 bp, Unknown
  misc_feature (1)..( 8): Matrix.001 file - promoters70/5665140
catcgttt

SEQ ID NO: 40234 - DNA, 8 bp, Unknown
  misc_feature (1)..( 8): Matrix.001 file - promoters70/5665140
gattcttt

SEQ ID NO: 40235 - DNA, 11 bp, Unknown
  misc_feature (1)..( 11): Matrix.001 file - promoters70/5665347
aattatgaatt

SEQ ID NO: 40236 - DNA, 7 bp, Unknown
  misc_feature (1)..( 7): Matrix.001 file - promoters70/5665351
gcatttc

SEQ ID NO: 40237 - DNA, 8 bp, Unknown
  misc_feature (1)..( 8): Matrix.001 file - promoters70/5665351
caaatgga

SEQ ID NO: 40238 - DNA, 9 bp, Unknown
  misc_feature (1)..( 9): Matrix.001 file - promoters70/5665351
cttcttctc

SEQ ID NO: 40239 - DNA, 7 bp, Unknown
  misc_feature (1)..( 7): Matrix.001 file - promoters70/5665359
aaaaatt

SEQ ID NO: 40240 - DNA, 5 bp, Unknown
  misc_feature (1)..( 5): Matrix.001 file - promoters70/5665359
gttta

SEQ ID NO: 40241 - DNA, 6 bp, Unknown
  misc_feature (1)..( 6): Matrix.001 file - promoters70/5665359
tattgt

SEQ ID NO: 40242 - DNA, 9 bp, Unknown
  misc_feature (1)..( 9): Matrix.001 file - promoters70/5665359
attgttttg

SEQ ID NO: 40243 - DNA, 9 bp, Unknown
  misc_feature (1)..( 9): Matrix.001 file - promoters70/5665404
ttcgtcctt

SEQ ID NO: 40244 - DNA, 7 bp, Unknown
  misc_feature (1)..( 7): Matrix.001 file - promoters70/5665404
ttgcttt

SEQ ID NO: 40245 - DNA, 10 bp, Unknown
  misc_feature (1)..( 10): Matrix.001 file - promoters70/5665404
aaataaaata

SEQ ID NO: 40246 - DNA, 10 bp, Unknown
  misc_feature (1)..( 10): Matrix.001 file - promoters70/5665507
atttttcttt

SEQ ID NO: 40247 - DNA, 7 bp, Unknown
  misc_feature (1)..( 7): Matrix.001 file - promoters70/5665507
atgtttg

SEQ ID NO: 40248 - DNA, 7 bp, Unknown
  misc_feature (1)..( 7): Matrix.001 file - promoters70/5665507
aaaaaat

SEQ ID NO: 40249 - DNA, 7 bp, Unknown
  misc_feature (1)..( 7): Matrix.001 file - promoters70/5665507
tattttc

SEQ ID NO: 40250 - DNA, 8 bp, Unknown
  misc_feature (1)..( 8): Matrix.001 file - promoters70/5665507
ttttgtac

SEQ ID NO: 40251 - DNA, 7 bp, Unknown
  misc_feature (1)..( 7): Matrix.001 file - promoters70/5665507
aaatatc

SEQ ID NO: 40252 - DNA, 8 bp, Unknown
  misc_feature (1)..( 8): Matrix.001 file - promoters70/5665507
aatatctt

SEQ ID NO: 40253 - DNA, 10 bp, Unknown
  misc_feature (1)..( 10): Matrix.001 file - promoters70/5665796
agcatccaca

SEQ ID NO: 40254 - DNA, 10 bp, Unknown
  misc_feature (1)..( 10): Matrix.001 file - promoters70/5665796
aaaatgtgaa

SEQ ID NO: 40255 - DNA, 7 bp, Unknown
  misc_feature (1)..( 7): Matrix.001 file - promoters70/5667720
aatgata

SEQ ID NO: 40256 - DNA, 7 bp, Unknown
  misc_feature (1)..( 7): Matrix.001 file - promoters70/5667720
aaaaatt

SEQ ID NO: 40257 - DNA, 9 bp, Unknown
  misc_feature (1)..( 9): Matrix.001 file - promoters70/5667720
aaagaaata

SEQ ID NO: 40258 - DNA, 9 bp, Unknown
  misc_feature (1)..( 9): Matrix.001 file - promoters70/5667720
aaaacaaat

SEQ ID NO: 40259 - DNA, 9 bp, Unknown
  misc_feature (1)..( 9): Matrix.001 file - promoters70/5667720
taaccaaaa

SEQ ID NO: 40260 - DNA, 12 bp, Unknown
  misc_feature (1)..( 12): Matrix.001 file - promoters70/5667720
aaaataaaaata

SEQ ID NO: 40261 - DNA, 8 bp, Unknown
  misc_feature (1)..( 8): Matrix.001 file - promoters70/5667737
ctacaaag

SEQ ID NO: 40262 - DNA, 14 bp, Unknown
  misc_feature (1)..( 14): Matrix.001 file - promoters70/5667737
ctacaaagaccaaa

SEQ ID NO: 40263 - DNA, 13 bp, Unknown
  misc_feature (1)..( 13): Matrix.001 file - promoters70/5667812
gaaagtttttttt

SEQ ID NO: 40264 - DNA, 10 bp, Unknown
  misc_feature (1)..( 10): Matrix.001 file - promoters70/5667812
aaagaaattc

SEQ ID NO: 40265 - DNA, 9 bp, Unknown
  misc_feature (1)..( 9): Matrix.001 file - promoters70/5667812
gaaacaaaa

SEQ ID NO: 40266 - DNA, 13 bp, Unknown
  misc_feature (1)..( 13): Matrix.001 file - promoters70/5667812
acaagaattaaaa

SEQ ID NO: 40267 - DNA, 8 bp, Unknown
  misc_feature (1)..( 8): Matrix.001 file - promoters70/5667822
tttgccag

SEQ ID NO: 40268 - DNA, 10 bp, Unknown
  misc_feature (1)..( 10): Matrix.001 file - promoters70/5667822
tataaaaaat

SEQ ID NO: 40269 - DNA, 7 bp, Unknown
  misc_feature (1)..( 7): Matrix.001 file - promoters70/5667822
tataaaa

SEQ ID NO: 40270 - DNA, 9 bp, Unknown
  misc_feature (1)..( 9): Matrix.001 file - promoters70/5667849
gtgaatgat

SEQ ID NO: 40271 - DNA, 8 bp, Unknown
  misc_feature (1)..( 8): Matrix.001 file - promoters70/5667849
cattttgt

SEQ ID NO: 40272 - DNA, 8 bp, Unknown
  misc_feature (1)..( 8): Matrix.001 file - promoters70/5668294
attaattt

SEQ ID NO: 40273 - DNA, 8 bp, Unknown
  misc_feature (1)..( 8): Matrix.001 file - promoters70/5668359
atggattt

SEQ ID NO: 40274 - DNA, 13 bp, Unknown
  misc_feature (1)..( 13): Matrix.001 file - promoters70/5668435
agatacaaaacat

SEQ ID NO: 40275 - DNA, 9 bp, Unknown
  misc_feature (1)..( 9): Matrix.001 file - promoters70/5668435
ttttgttat

SEQ ID NO: 40276 - DNA, 11 bp, Unknown
  misc_feature (1)..( 11): Matrix.001 file - promoters70/5668435
atataaaaaaa

SEQ ID NO: 40277 - DNA, 12 bp, Unknown
  misc_feature (1)..( 12): Matrix.001 file - promoters70/5668435
tactatttaaac

SEQ ID NO: 40278 - DNA, 9 bp, Unknown
  misc_feature (1)..( 9): Matrix.001 file - promoters70/5668454
tcttaattt

SEQ ID NO: 40279 - DNA, 6 bp, Unknown
  misc_feature (1)..( 6): Matrix.001 file - promoters70/5668454
tctaaa

SEQ ID NO: 40280 - DNA, 8 bp, Unknown
  misc_feature (1)..( 8): Matrix.001 file - promoters70/5668454
aaaaataa

SEQ ID NO: 40281 - DNA, 8 bp, Unknown
  misc_feature (1)..( 8): Matrix.001 file - promoters70/5668469
ataaaata

SEQ ID NO: 40282 - DNA, 7 bp, Unknown
  misc_feature (1)..( 7): Matrix.001 file - promoters70/5668469
tttatta

SEQ ID NO: 40283 - DNA, 9 bp, Unknown
  misc_feature (1)..( 9): Matrix.001 file - promoters70/5668493
aataaatgt

SEQ ID NO: 40284 - DNA, 9 bp, Unknown
  misc_feature (1)..( 9): Matrix.001 file - promoters70/5668493
gtttattta

SEQ ID NO: 40285 - DNA, 9 bp, Unknown
  misc_feature (1)..( 9): Matrix.001 file - promoters70/5668493
tacaatatt

SEQ ID NO: 40286 - DNA, 8 bp, Unknown
  misc_feature (1)..( 8): Matrix.001 file - promoters70/5668509
ttaagaaa

SEQ ID NO: 40287 - DNA, 8 bp, Unknown
  misc_feature (1)..( 8): Matrix.001 file - promoters70/5668509
ccaaaaaa

SEQ ID NO: 40288 - DNA, 7 bp, Unknown
  misc_feature (1)..( 7): Matrix.001 file - promoters70/5668509
agaagaa

SEQ ID NO: 40289 - DNA, 7 bp, Unknown
  misc_feature (1)..( 7): Matrix.001 file - promoters70/5668509
agaggag

SEQ ID NO: 40290 - DNA, 7 bp, Unknown
  misc_feature (1)..( 7): Matrix.001 file - promoters70/5668529
gttgact

SEQ ID NO: 40291 - DNA, 7 bp, Unknown
  misc_feature (1)..( 7): Matrix.001 file - promoters70/5668547
gctgaaa

SEQ ID NO: 40292 - DNA, 11 bp, Unknown
  misc_feature (1)..( 11): Matrix.001 file - promoters70/5668720
aaagaaacaaa

SEQ ID NO: 40293 - DNA, 9 bp, Unknown
  misc_feature (1)..( 9): Matrix.001 file - promoters70/5668720
aaaaaagtt

SEQ ID NO: 40294 - DNA, 13 bp, Unknown
  misc_feature (1)..( 13): Matrix.001 file - promoters70/5668720
acatttgtttttg

SEQ ID NO: 40295 - DNA, 9 bp, Unknown
  misc_feature (1)..( 9): Matrix.001 file - promoters70/5668897
atgtttttt

SEQ ID NO: 40296 - DNA, 8 bp, Unknown
  misc_feature (1)..( 8): Matrix.001 file - promoters70/5668903
agaatttg

SEQ ID NO: 40297 - DNA, 9 bp, Unknown
  misc_feature (1)..( 9): Matrix.001 file - promoters70/5668903
tttaatttg

SEQ ID NO: 40298 - DNA, 8 bp, Unknown
  misc_feature (1)..( 8): Matrix.001 file - promoters70/5668926
catttaaa

SEQ ID NO: 40299 - DNA, 12 bp, Unknown
  misc_feature (1)..( 12): Matrix.001 file - promoters70/5668926
aaaaatgtgaaa

SEQ ID NO: 40300 - DNA, 10 bp, Unknown
  misc_feature (1)..( 10): Matrix.001 file - promoters70/5668926
ccaattttaa

SEQ ID NO: 40301 - DNA, 9 bp, Unknown
  misc_feature (1)..( 9): Matrix.001 file - promoters70/5668974
aaaaactaa

SEQ ID NO: 40302 - DNA, 10 bp, Unknown
  misc_feature (1)..( 10): Matrix.001 file - promoters70/5668974
caatattttt

SEQ ID NO: 40303 - DNA, 9 bp, Unknown
  misc_feature (1)..( 9): Matrix.001 file - promoters70/5668974
aatatttta

SEQ ID NO: 40304 - DNA, 11 bp, Unknown
  misc_feature (1)..( 11): Matrix.001 file - promoters70/5668974
cactaaaacag

SEQ ID NO: 40305 - DNA, 8 bp, Unknown
  misc_feature (1)..( 8): Matrix.001 file - promoters70/5668990
cgtagtat

SEQ ID NO: 40306 - DNA, 8 bp, Unknown
  misc_feature (1)..( 8): Matrix.001 file - promoters70/5669025
aaagttta

SEQ ID NO: 40307 - DNA, 9 bp, Unknown
  misc_feature (1)..( 9): Matrix.001 file - promoters70/5669025
ttacaaaaa

SEQ ID NO: 40308 - DNA, 12 bp, Unknown
  misc_feature (1)..( 12): Matrix.001 file - promoters70/5669250
aaataaattact

SEQ ID NO: 40309 - DNA, 11 bp, Unknown
  misc_feature (1)..( 11): Matrix.001 file - promoters70/5669250
aaatatctaga

SEQ ID NO: 40310 - DNA, 9 bp, Unknown
  misc_feature (1)..( 9): Matrix.001 file - promoters70/5669250
aaggcccaa

SEQ ID NO: 40311 - DNA, 7 bp, Unknown
  misc_feature (1)..( 7): Matrix.001 file - promoters70/5669250
actataa

SEQ ID NO: 40312 - DNA, 8 bp, Unknown
  misc_feature (1)..( 8): Matrix.001 file - promoters70/5669508
taaacaaa

SEQ ID NO: 40313 - DNA, 8 bp, Unknown
  misc_feature (1)..( 8): Matrix.001 file - promoters70/5669546
cgacatgt

SEQ ID NO: 40314 - DNA, 10 bp, Unknown
  misc_feature (1)..( 10): Matrix.001 file - promoters70/5670592
aatacaaaac

SEQ ID NO: 40315 - DNA, 6 bp, Unknown
  misc_feature (1)..( 6): Matrix.001 file - promoters70/5670592
agaaat

SEQ ID NO: 40316 - DNA, 10 bp, Unknown
  misc_feature (1)..( 10): Matrix.001 file - promoters70/5670592
agacataaag

SEQ ID NO: 40317 - DNA, 7 bp, Unknown
  misc_feature (1)..( 7): Matrix.001 file - promoters70/5671204
atatata

SEQ ID NO: 40318 - DNA, 10 bp, Unknown
  misc_feature (1)..( 10): Matrix.001 file - promoters70/5671204
aaactaaaaa

SEQ ID NO: 40319 - DNA, 11 bp, Unknown
  misc_feature (1)..( 11): Matrix.001 file - promoters70/5671318
cattaaataaa

SEQ ID NO: 40320 - DNA, 9 bp, Unknown
  misc_feature (1)..( 9): Matrix.001 file - promoters70/5671318
acgaaaaat

SEQ ID NO: 40321 - DNA, 11 bp, Unknown
  misc_feature (1)..( 11): Matrix.001 file - promoters70/5671318
tgattaataat

SEQ ID NO: 40322 - DNA, 10 bp, Unknown
  misc_feature (1)..( 10): Matrix.001 file - promoters70/5671318
ataatttaaa

SEQ ID NO: 40323 - DNA, 10 bp, Unknown
  misc_feature (1)..( 10): Matrix.001 file - promoters70/5672093
tttgcttatt

SEQ ID NO: 40324 - DNA, 12 bp, Unknown
  misc_feature (1)..( 12): Matrix.001 file - promoters70/5672842
aaaaaaaacttt

SEQ ID NO: 40325 - DNA, 11 bp, Unknown
  misc_feature (1)..( 11): Matrix.001 file - promoters70/5672842
tttgccactct

SEQ ID NO: 40326 - DNA, 11 bp, Unknown
  misc_feature (1)..( 11): Matrix.001 file - promoters70/5672842
gcccaatgaat

SEQ ID NO: 40327 - DNA, 10 bp, Unknown
  misc_feature (1)..( 10): Matrix.001 file - promoters70/5673124
ggtttatttt

SEQ ID NO: 40328 - DNA, 12 bp, Unknown
  misc_feature (1)..( 12): Matrix.001 file - promoters70/5674194
taagtttattat

SEQ ID NO: 40329 - DNA, 11 bp, Unknown
  misc_feature (1)..( 11): Matrix.001 file - promoters70/5674194
ctttttgttag

SEQ ID NO: 40330 - DNA, 10 bp, Unknown
  misc_feature (1)..( 10): Matrix.001 file - promoters70/5674194
catatataaa

SEQ ID NO: 40331 - DNA, 8 bp, Unknown
  misc_feature (1)..( 8): Matrix.001 file - promoters70/5674194
taatcttt

SEQ ID NO: 40332 - DNA, 8 bp, Unknown
  misc_feature (1)..( 8): Matrix.001 file - promoters70/5674194
aaatatta

SEQ ID NO: 40333 - DNA, 9 bp, Unknown
  misc_feature (1)..( 9): Matrix.001 file - promoters70/5674194
gtttttgtt

SEQ ID NO: 40334 - DNA, 10 bp, Unknown
  misc_feature (1)..( 10): Matrix.001 file - promoters70/5674194
ctttttgtta

SEQ ID NO: 40335 - DNA, 8 bp, Unknown
  misc_feature (1)..( 8): Matrix.001 file - promoters70/5674634
aagaaaat

SEQ ID NO: 40336 - DNA, 9 bp, Unknown
  misc_feature (1)..( 9): Matrix.001 file - promoters70/5674666
aaaaattat

SEQ ID NO: 40337 - DNA, 9 bp, Unknown
  misc_feature (1)..( 9): Matrix.001 file - promoters70/5674666
attcttaca

SEQ ID NO: 40338 - DNA, 9 bp, Unknown
  misc_feature (1)..( 9): Matrix.001 file - promoters70/5675661
ggttgattt

SEQ ID NO: 40339 - DNA, 8 bp, Unknown
  misc_feature (1)..( 8): Matrix.001 file - promoters70/5675661
caaagttg

SEQ ID NO: 40340 - DNA, 8 bp, Unknown
  misc_feature (1)..( 8): Matrix.001 file - promoters70/5675661
aaaagata

SEQ ID NO: 40341 - DNA, 8 bp, Unknown
  misc_feature (1)..( 8): Matrix.001 file - promoters70/5675661
gagagtaa

SEQ ID NO: 40342 - DNA, 7 bp, Unknown
  misc_feature (1)..( 7): Matrix.001 file - promoters70/5677230
aagtaaa

SEQ ID NO: 40343 - DNA, 7 bp, Unknown
  misc_feature (1)..( 7): Matrix.001 file - promoters70/5677230
aaaatat

SEQ ID NO: 40344 - DNA, 8 bp, Unknown
  misc_feature (1)..( 8): Matrix.001 file - promoters70/5677274
acatttag

SEQ ID NO: 40345 - DNA, 11 bp, Unknown
  misc_feature (1)..( 11): Matrix.001 file - promoters70/5677274
atgataataat

SEQ ID NO: 40346 - DNA, 7 bp, Unknown
  misc_feature (1)..( 7): Matrix.001 file - promoters70/5677298
taagaaa

SEQ ID NO: 40347 - DNA, 8 bp, Unknown
  misc_feature (1)..( 8): Matrix.001 file - promoters70/5677298
cttcaatg

SEQ ID NO: 40348 - DNA, 8 bp, Unknown
  misc_feature (1)..( 8): Matrix.001 file - promoters70/5677298
agaaaaca

SEQ ID NO: 40349 - DNA, 7 bp, Unknown
  misc_feature (1)..( 7): Matrix.001 file - promoters70/5681068
gctgaaa

SEQ ID NO: 40350 - DNA, 10 bp, Unknown
  misc_feature (1)..( 10): Matrix.001 file - promoters70/5681157
accttaaaaa

SEQ ID NO: 40351 - DNA, 7 bp, Unknown
  misc_feature (1)..( 7): Matrix.001 file - promoters70/5681157
aaataaa

SEQ ID NO: 40352 - DNA, 6 bp, Unknown
  misc_feature (1)..( 6): Matrix.001 file - promoters70/5681157
ttaaaa

SEQ ID NO: 40353 - DNA, 8 bp, Unknown
  misc_feature (1)..( 8): Matrix.001 file - promoters70/5681157
taaaccat

SEQ ID NO: 40354 - DNA, 12 bp, Unknown
  misc_feature (1)..( 12): Matrix.001 file - promoters70/5681157
ataaaccaaaaa

SEQ ID NO: 40355 - DNA, 6 bp, Unknown
  misc_feature (1)..( 6): Matrix.001 file - promoters70/5681157
ttaaaa

SEQ ID NO: 40356 - DNA, 9 bp, Unknown
  misc_feature (1)..( 9): Matrix.001 file - promoters70/5681157
aaaataaac

SEQ ID NO: 40357 - DNA, 10 bp, Unknown
  misc_feature (1)..( 10): Matrix.001 file - promoters70/5681157
tttgtaatat

SEQ ID NO: 40358 - DNA, 9 bp, Unknown
  misc_feature (1)..( 9): Matrix.001 file - promoters70/5753942
tacattgtt

SEQ ID NO: 40359 - DNA, 9 bp, Unknown
  misc_feature (1)..( 9): Matrix.001 file - promoters70/5753942
caaacaaaa

SEQ ID NO: 40360 - DNA, 9 bp, Unknown
  misc_feature (1)..( 9): Matrix.001 file - promoters70/5753942
tgttcaaaa

SEQ ID NO: 40361 - DNA, 13 bp, Unknown
  misc_feature (1)..( 13): Matrix.001 file - promoters70/5753942
gcccaaattaaaa

SEQ ID NO: 40362 - DNA, 11 bp, Unknown
  misc_feature (1)..( 11): Matrix.001 file - promoters70/5753942
tttgtgttttt

SEQ ID NO: 40363 - DNA, 7 bp, Unknown
  misc_feature (1)..( 7): Matrix.001 file - promoters70/5753942
catattt

SEQ ID NO: 40364 - DNA, 10 bp, Unknown
  misc_feature (1)..( 10): Matrix.001 file - promoters70/5753942
tttcgtacat

SEQ ID NO: 40365 - DNA, 8 bp, Unknown
  misc_feature (1)..( 8): Matrix.001 file - promoters70/5753942
gggccata

SEQ ID NO: 40366 - DNA, 12 bp, Unknown
  misc_feature (1)..( 12): Matrix.001 file - promoters70/5754134
gaaatctggatg

SEQ ID NO: 40367 - DNA, 8 bp, Unknown
  misc_feature (1)..( 8): Matrix.001 file - promoters70/5756166
ttacaatg

SEQ ID NO: 40368 - DNA, 7 bp, Unknown
  misc_feature (1)..( 7): Matrix.001 file - promoters70/5756166
tcttaaa

SEQ ID NO: 40369 - DNA, 8 bp, Unknown
  misc_feature (1)..( 8): Matrix.001 file - promoters70/5759467
gcaataag

SEQ ID NO: 40370 - DNA, 7 bp, Unknown
  misc_feature (1)..( 7): Matrix.001 file - promoters70/5759467
gatttac

SEQ ID NO: 40371 - DNA, 8 bp, Unknown
  misc_feature (1)..( 8): Matrix.001 file - promoters70/5773091
acaaaata

SEQ ID NO: 40372 - DNA, 8 bp, Unknown
  misc_feature (1)..( 8): Matrix.001 file - promoters70/5776417
agtttttg

SEQ ID NO: 40373 - DNA, 8 bp, Unknown
  misc_feature (1)..( 8): Matrix.001 file - promoters60/1006957
gaaaggag

SEQ ID NO: 40374 - DNA, 7 bp, Unknown
  misc_feature (1)..( 7): Matrix.001 file - promoters60/1006957
gataaat

SEQ ID NO: 40375 - DNA, 6 bp, Unknown
  misc_feature (1)..( 6): Matrix.001 file - promoters60/1006957
atcata

SEQ ID NO: 40376 - DNA, 6 bp, Unknown
  misc_feature (1)..( 6): Matrix.001 file - promoters60/1006957
aaaaat

SEQ ID NO: 40377 - DNA, 7 bp, Unknown
  misc_feature (1)..( 7): Matrix.001 file - promoters60/1006957
attcaaa

SEQ ID NO: 40378 - DNA, 10 bp, Unknown
  misc_feature (1)..( 10): Matrix.001 file - promoters60/1006957
caaactaggc

SEQ ID NO: 40379 - DNA, 10 bp, Unknown
  misc_feature (1)..( 10): Matrix.001 file - promoters60/1006957
tgagggtttt

SEQ ID NO: 40380 - DNA, 7 bp, Unknown
  misc_feature (1)..( 7): Matrix.001 file - promoters60/1006957
tggcttc

SEQ ID NO: 40381 - DNA, 6 bp, Unknown
  misc_feature (1)..( 6): Matrix.001 file - promoters60/1006957
gagtga

SEQ ID NO: 40382 - DNA, 9 bp, Unknown
  misc_feature (1)..( 9): Matrix.001 file - promoters60/1006957
ggagagaaa

SEQ ID NO: 40383 - DNA, 9 bp, Unknown
  misc_feature (1)..( 9): Matrix.001 file - promoters60/1006957
agaaaaagt

SEQ ID NO: 40384 - DNA, 8 bp, Unknown
  misc_feature (1)..( 8): Matrix.001 file - promoters60/1006957
tttagctt

SEQ ID NO: 40385 - DNA, 8 bp, Unknown
  misc_feature (1)..( 8): Matrix.001 file - promoters60/1007030
aaataata

SEQ ID NO: 40386 - DNA, 12 bp, Unknown
  misc_feature (1)..( 12): Matrix.001 file - promoters60/1007030
ataaatagtaat

SEQ ID NO: 40387 - DNA, 8 bp, Unknown
  misc_feature (1)..( 8): Matrix.001 file - promoters60/1007030
aaaacaat

SEQ ID NO: 40388 - DNA, 8 bp, Unknown
  misc_feature (1)..( 8): Matrix.001 file - promoters60/1007030
aaacgaat

SEQ ID NO: 40389 - DNA, 13 bp, Unknown
  misc_feature (1)..( 13): Matrix.001 file - promoters60/1007030
tcgaaaataaaca

SEQ ID NO: 40390 - DNA, 11 bp, Unknown
  misc_feature (1)..( 11): Matrix.001 file - promoters60/1007030
aattaacccaa

SEQ ID NO: 40391 - DNA, 10 bp, Unknown
  misc_feature (1)..( 10): Matrix.001 file - promoters60/1007030
aatctgattc

SEQ ID NO: 40392 - DNA, 7 bp, Unknown
  misc_feature (1)..( 7): Matrix.001 file - promoters60/1007030
aaaataa

SEQ ID NO: 40393 - DNA, 12 bp, Unknown
  misc_feature (1)..( 12): Matrix.001 file - promoters60/1007030
agaagaaaaaga

SEQ ID NO: 40394 - DNA, 7 bp, Unknown
  misc_feature (1)..( 7): Matrix.001 file - promoters60/1007030
taaaaaa

SEQ ID NO: 40395 - DNA, 10 bp, Unknown
  misc_feature (1)..( 10): Matrix.001 file - promoters60/1007030
attgaaatat

SEQ ID NO: 40396 - DNA, 8 bp, Unknown
  misc_feature (1)..( 8): Matrix.001 file - promoters60/1007056
aaggatga

SEQ ID NO: 40397 - DNA, 7 bp, Unknown
  misc_feature (1)..( 7): Matrix.001 file - promoters60/1007056
gttttgg

SEQ ID NO: 40398 - DNA, 6 bp, Unknown
  misc_feature (1)..( 6): Matrix.001 file - promoters60/1007056
ggtgat

SEQ ID NO: 40399 - DNA, 11 bp, Unknown
  misc_feature (1)..( 11): Matrix.001 file - promoters60/1007056
accttctctga

SEQ ID NO: 40400 - DNA, 6 bp, Unknown
  misc_feature (1)..( 6): Matrix.001 file - promoters60/1007056
aaggct

SEQ ID NO: 40401 - DNA, 6 bp, Unknown
  misc_feature (1)..( 6): Matrix.001 file - promoters60/1007056
gatgca

SEQ ID NO: 40402 - DNA, 7 bp, Unknown
  misc_feature (1)..( 7): Matrix.001 file - promoters60/1007056
aacatct

SEQ ID NO: 40403 - DNA, 10 bp, Unknown
  misc_feature (1)..( 10): Matrix.001 file - promoters60/1007056
aagttttcta

SEQ ID NO: 40404 - DNA, 7 bp, Unknown
  misc_feature (1)..( 7): Matrix.001 file - promoters60/1007056
ctaatca

SEQ ID NO: 40405 - DNA, 6 bp, Unknown
  misc_feature (1)..( 6): Matrix.001 file - promoters60/1007056
ggtttt

SEQ ID NO: 40406 - DNA, 6 bp, Unknown
  misc_feature (1)..( 6): Matrix.001 file - promoters60/1007056
ttttgt

SEQ ID NO: 40407 - DNA, 6 bp, Unknown
  misc_feature (1)..( 6): Matrix.001 file - promoters60/1007056
ttgttt

SEQ ID NO: 40408 - DNA, 6 bp, Unknown
  misc_feature (1)..( 6): Matrix.001 file - promoters60/1007056
atccaa

SEQ ID NO: 40409 - DNA, 7 bp, Unknown
  misc_feature (1)..( 7): Matrix.001 file - promoters60/1007056
tgccaag

SEQ ID NO: 40410 - DNA, 7 bp, Unknown
  misc_feature (1)..( 7): Matrix.001 file - promoters60/1007056
tcaagaa

SEQ ID NO: 40411 - DNA, 6 bp, Unknown
  misc_feature (1)..( 6): Matrix.001 file - promoters60/1007056
agtcct

SEQ ID NO: 40412 - DNA, 6 bp, Unknown
  misc_feature (1)..( 6): Matrix.001 file - promoters60/1007056
gaggca

SEQ ID NO: 40413 - DNA, 7 bp, Unknown
  misc_feature (1)..( 7): Matrix.001 file - promoters60/1007056
tcaagaa

SEQ ID NO: 40414 - DNA, 10 bp, Unknown
  misc_feature (1)..( 10): Matrix.001 file - promoters60/1007139
tttcaacaaa

SEQ ID NO: 40415 - DNA, 9 bp, Unknown
  misc_feature (1)..( 9): Matrix.001 file - promoters60/1007139
aaagttcag

SEQ ID NO: 40416 - DNA, 10 bp, Unknown
  misc_feature (1)..( 10): Matrix.001 file - promoters60/1007139
taatatatat

SEQ ID NO: 40417 - DNA, 9 bp, Unknown
  misc_feature (1)..( 9): Matrix.001 file - promoters60/1007187
aatttattt

SEQ ID NO: 40418 - DNA, 9 bp, Unknown
  misc_feature (1)..( 9): Matrix.001 file - promoters60/1007187
aaaatatta

SEQ ID NO: 40419 - DNA, 9 bp, Unknown
  misc_feature (1)..( 9): Matrix.001 file - promoters60/1007187
tgttaatct

SEQ ID NO: 40420 - DNA, 7 bp, Unknown
  misc_feature (1)..( 7): Matrix.001 file - promoters60/1007187
aaaagat

SEQ ID NO: 40421 - DNA, 9 bp, Unknown
  misc_feature (1)..( 9): Matrix.001 file - promoters60/1007187
tttggtttt

SEQ ID NO: 40422 - DNA, 12 bp, Unknown
  misc_feature (1)..( 12): Matrix.001 file - promoters60/1007187
ttttctacaatt

SEQ ID NO: 40423 - DNA, 7 bp, Unknown
  misc_feature (1)..( 7): Matrix.001 file - promoters60/1007187
tttttct

SEQ ID NO: 40424 - DNA, 8 bp, Unknown
  misc_feature (1)..( 8): Matrix.001 file - promoters60/1007187
tgaggaat

SEQ ID NO: 40425 - DNA, 7 bp, Unknown
  misc_feature (1)..( 7): Matrix.001 file - promoters60/1007187
caaacgc

SEQ ID NO: 40426 - DNA, 6 bp, Unknown
  misc_feature (1)..( 6): Matrix.001 file - promoters60/1007187
aatttt

SEQ ID NO: 40427 - DNA, 9 bp, Unknown
  misc_feature (1)..( 9): Matrix.001 file - promoters60/1007187
tatttttaa

SEQ ID NO: 40428 - DNA, 9 bp, Unknown
  misc_feature (1)..( 9): Matrix.001 file - promoters60/1007187
aatattttt

SEQ ID NO: 40429 - DNA, 8 bp, Unknown
  misc_feature (1)..( 8): Matrix.001 file - promoters60/1007187
atttaaaa

SEQ ID NO: 40430 - DNA, 7 bp, Unknown
  misc_feature (1)..( 7): Matrix.001 file - promoters60/1007187
taaataa

SEQ ID NO: 40431 - DNA, 7 bp, Unknown
  misc_feature (1)..( 7): Matrix.001 file - promoters60/1007187
ttgtttt

SEQ ID NO: 40432 - DNA, 8 bp, Unknown
  misc_feature (1)..( 8): Matrix.001 file - promoters60/1007187
attggatg

SEQ ID NO: 40433 - DNA, 6 bp, Unknown
  misc_feature (1)..( 6): Matrix.001 file - promoters60/1007187
tccaaa

SEQ ID NO: 40434 - DNA, 6 bp, Unknown
  misc_feature (1)..( 6): Matrix.001 file - promoters60/1007187
tatttt

SEQ ID NO: 40435 - DNA, 6 bp, Unknown
  misc_feature (1)..( 6): Matrix.001 file - promoters60/1007187
ttaaaa

SEQ ID NO: 40436 - DNA, 9 bp, Unknown
  misc_feature (1)..( 9): Matrix.001 file - promoters60/1007187
ataacaaaa

SEQ ID NO: 40437 - DNA, 7 bp, Unknown
  misc_feature (1)..( 7): Matrix.001 file - promoters60/1007187
taataat

SEQ ID NO: 40438 - DNA, 6 bp, Unknown
  misc_feature (1)..( 6): Matrix.001 file - promoters60/1007187
atattt

SEQ ID NO: 40439 - DNA, 7 bp, Unknown
  misc_feature (1)..( 7): Matrix.001 file - promoters60/1007187
tatacaa

SEQ ID NO: 40440 - DNA, 7 bp, Unknown
  misc_feature (1)..( 7): Matrix.001 file - promoters60/1007187
tataatt

SEQ ID NO: 40441 - DNA, 6 bp, Unknown
  misc_feature (1)..( 6): Matrix.001 file - promoters60/1007187
aaaaaa

SEQ ID NO: 40442 - DNA, 8 bp, Unknown
  misc_feature (1)..( 8): Matrix.001 file - promoters60/1007187
taaatttc

SEQ ID NO: 40443 - DNA, 7 bp, Unknown
  misc_feature (1)..( 7): Matrix.001 file - promoters60/1007187
aagagaa

SEQ ID NO: 40444 - DNA, 8 bp, Unknown
  misc_feature (1)..( 8): Matrix.001 file - promoters60/1007187
atggcttg

SEQ ID NO: 40445 - DNA, 12 bp, Unknown
  misc_feature (1)..( 12): Matrix.001 file - promoters60/1007269
tggaaacgaatt

SEQ ID NO: 40446 - DNA, 10 bp, Unknown
  misc_feature (1)..( 10): Matrix.001 file - promoters60/1007269
tattcgtttt

SEQ ID NO: 40447 - DNA, 8 bp, Unknown
  misc_feature (1)..( 8): Matrix.001 file - promoters60/1007269
taaaaaag

SEQ ID NO: 40448 - DNA, 9 bp, Unknown
  misc_feature (1)..( 9): Matrix.001 file - promoters60/1007269
ataaaacct

SEQ ID NO: 40449 - DNA, 8 bp, Unknown
  misc_feature (1)..( 8): Matrix.001 file - promoters60/1007289
atttctta

SEQ ID NO: 40450 - DNA, 11 bp, Unknown
  misc_feature (1)..( 11): Matrix.001 file - promoters60/1007289
ttcaatgataa

SEQ ID NO: 40451 - DNA, 12 bp, Unknown
  misc_feature (1)..( 12): Matrix.001 file - promoters60/1007289
gaataagaagaa

SEQ ID NO: 40452 - DNA, 7 bp, Unknown
  misc_feature (1)..( 7): Matrix.001 file - promoters60/1007289
aaaaaaa

SEQ ID NO: 40453 - DNA, 7 bp, Unknown
  misc_feature (1)..( 7): Matrix.001 file - promoters60/1007348
tgtaatt

SEQ ID NO: 40454 - DNA, 6 bp, Unknown
  misc_feature (1)..( 6): Matrix.001 file - promoters60/1007348
gatctt

SEQ ID NO: 40455 - DNA, 8 bp, Unknown
  misc_feature (1)..( 8): Matrix.001 file - promoters60/1007348
tatgtttt

SEQ ID NO: 40456 - DNA, 7 bp, Unknown
  misc_feature (1)..( 7): Matrix.001 file - promoters60/1007348
ttaaaac

SEQ ID NO: 40457 - DNA, 7 bp, Unknown
  misc_feature (1)..( 7): Matrix.001 file - promoters60/1007348
attgttt

SEQ ID NO: 40458 - DNA, 7 bp, Unknown
  misc_feature (1)..( 7): Matrix.001 file - promoters60/1007348
atccaca

SEQ ID NO: 40459 - DNA, 8 bp, Unknown
  misc_feature (1)..( 8): Matrix.001 file - promoters60/1007348
tatttttc

SEQ ID NO: 40460 - DNA, 8 bp, Unknown
  misc_feature (1)..( 8): Matrix.001 file - promoters60/1007348
atatgtaa

SEQ ID NO: 40461 - DNA, 6 bp, Unknown
  misc_feature (1)..( 6): Matrix.001 file - promoters60/1007348
gtttaa

SEQ ID NO: 40462 - DNA, 7 bp, Unknown
  misc_feature (1)..( 7): Matrix.001 file - promoters60/1007348
ctctttt

SEQ ID NO: 40463 - DNA, 8 bp, Unknown
  misc_feature (1)..( 8): Matrix.001 file - promoters60/1007348
ataacatc

SEQ ID NO: 40464 - DNA, 8 bp, Unknown
  misc_feature (1)..( 8): Matrix.001 file - promoters60/1007348
cacaaaga

SEQ ID NO: 40465 - DNA, 11 bp, Unknown
  misc_feature (1)..( 11): Matrix.001 file - promoters60/1007348
accaataagaa

SEQ ID NO: 40466 - DNA, 8 bp, Unknown
  misc_feature (1)..( 8): Matrix.001 file - promoters60/1007348
aaaataag

SEQ ID NO: 40467 - DNA, 8 bp, Unknown
  misc_feature (1)..( 8): Matrix.001 file - promoters60/1007348
taaattgt

SEQ ID NO: 40468 - DNA, 6 bp, Unknown
  misc_feature (1)..( 6): Matrix.001 file - promoters60/1007348
atagat

SEQ ID NO: 40469 - DNA, 7 bp, Unknown
  misc_feature (1)..( 7): Matrix.001 file - promoters60/1007348
agagata

SEQ ID NO: 40470 - DNA, 6 bp, Unknown
  misc_feature (1)..( 6): Matrix.001 file - promoters60/1007348
ttttgg

SEQ ID NO: 40471 - DNA, 6 bp, Unknown
  misc_feature (1)..( 6): Matrix.001 file - promoters60/1007348
taagat

SEQ ID NO: 40472 - DNA, 6 bp, Unknown
  misc_feature (1)..( 6): Matrix.001 file - promoters60/1007348
aaagaa

SEQ ID NO: 40473 - DNA, 12 bp, Unknown
  misc_feature (1)..( 12): Matrix.001 file - promoters60/1007348
aaaaacaaaaca

SEQ ID NO: 40474 - DNA, 6 bp, Unknown
  misc_feature (1)..( 6): Matrix.001 file - promoters60/1007348
aaaaat

SEQ ID NO: 40475 - DNA, 6 bp, Unknown
  misc_feature (1)..( 6): Matrix.001 file - promoters60/1007348
taaccc

SEQ ID NO: 40476 - DNA, 13 bp, Unknown
  misc_feature (1)..( 13): Matrix.001 file - promoters60/1007370
caataatttaaaa

SEQ ID NO: 40477 - DNA, 8 bp, Unknown
  misc_feature (1)..( 8): Matrix.001 file - promoters60/1007370
aatttatc

SEQ ID NO: 40478 - DNA, 11 bp, Unknown
  misc_feature (1)..( 11): Matrix.001 file - promoters60/1007370
gaatattttat

SEQ ID NO: 40479 - DNA, 9 bp, Unknown
  misc_feature (1)..( 9): Matrix.001 file - promoters60/1007524
tcttgtaaa

SEQ ID NO: 40480 - DNA, 9 bp, Unknown
  misc_feature (1)..( 9): Matrix.001 file - promoters60/1007554
atttatgta

SEQ ID NO: 40481 - DNA, 8 bp, Unknown
  misc_feature (1)..( 8): Matrix.001 file - promoters60/1007554
aaaaataa

SEQ ID NO: 40482 - DNA, 6 bp, Unknown
  misc_feature (1)..( 6): Matrix.001 file - promoters60/1007554
tttaat

SEQ ID NO: 40483 - DNA, 7 bp, Unknown
  misc_feature (1)..( 7): Matrix.001 file - promoters60/1007576
aaacaaa

SEQ ID NO: 40484 - DNA, 10 bp, Unknown
  misc_feature (1)..( 10): Matrix.001 file - promoters60/1007576
ctggaaaatg

SEQ ID NO: 40485 - DNA, 6 bp, Unknown
  misc_feature (1)..( 6): Matrix.001 file - promoters60/1007576
aatgat

SEQ ID NO: 40486 - DNA, 8 bp, Unknown
  misc_feature (1)..( 8): Matrix.001 file - promoters60/1007576
cttcgata

SEQ ID NO: 40487 - DNA, 7 bp, Unknown
  misc_feature (1)..( 7): Matrix.001 file - promoters60/1007576
tcaggaa

SEQ ID NO: 40488 - DNA, 6 bp, Unknown
  misc_feature (1)..( 6): Matrix.001 file - promoters60/1007576
ttttct

SEQ ID NO: 40489 - DNA, 6 bp, Unknown
  misc_feature (1)..( 6): Matrix.001 file - promoters60/1007576
tgaaat

SEQ ID NO: 40490 - DNA, 8 bp, Unknown
  misc_feature (1)..( 8): Matrix.001 file - promoters60/1007576
gtttctca

SEQ ID NO: 40491 - DNA, 6 bp, Unknown
  misc_feature (1)..( 6): Matrix.001 file - promoters60/1007576
tatatt

SEQ ID NO: 40492 - DNA, 6 bp, Unknown
  misc_feature (1)..( 6): Matrix.001 file - promoters60/1007576
gatggt

SEQ ID NO: 40493 - DNA, 7 bp, Unknown
  misc_feature (1)..( 7): Matrix.001 file - promoters60/1007576
tctcttg

SEQ ID NO: 40494 - DNA, 7 bp, Unknown
  misc_feature (1)..( 7): Matrix.001 file - promoters60/1007576
tttactc

SEQ ID NO: 40495 - DNA, 7 bp, Unknown
  misc_feature (1)..( 7): Matrix.001 file - promoters60/1007576
ctgaaac

SEQ ID NO: 40496 - DNA, 9 bp, Unknown
  misc_feature (1)..( 9): Matrix.001 file - promoters60/1007639
cacaaaaac

SEQ ID NO: 40497 - DNA, 12 bp, Unknown
  misc_feature (1)..( 12): Matrix.001 file - promoters60/1007639
tataaactttta

SEQ ID NO: 40498 - DNA, 16 bp, Unknown
  misc_feature (1)..( 16): Matrix.001 file - promoters60/1007639
tgacaaaaaaaaatat

SEQ ID NO: 40499 - DNA, 9 bp, Unknown
  misc_feature (1)..( 9): Matrix.001 file - promoters60/1007639
aaaaattta

SEQ ID NO: 40500 - DNA, 10 bp, Unknown
  misc_feature (1)..( 10): Matrix.001 file - promoters60/1007639
aaaaacttat

SEQ ID NO: 40501 - DNA, 10 bp, Unknown
  misc_feature (1)..( 10): Matrix.001 file - promoters60/1007639
tttttatata

SEQ ID NO: 40502 - DNA, 8 bp, Unknown
  misc_feature (1)..( 8): Matrix.001 file - promoters60/1007675
ctagaaag

SEQ ID NO: 40503 - DNA, 6 bp, Unknown
  misc_feature (1)..( 6): Matrix.001 file - promoters60/1007675
gagata

SEQ ID NO: 40504 - DNA, 6 bp, Unknown
  misc_feature (1)..( 6): Matrix.001 file - promoters60/1007675
caagac

SEQ ID NO: 40505 - DNA, 7 bp, Unknown
  misc_feature (1)..( 7): Matrix.001 file - promoters60/1007675
taatatt

SEQ ID NO: 40506 - DNA, 7 bp, Unknown
  misc_feature (1)..( 7): Matrix.001 file - promoters60/1007675
aaaggga

SEQ ID NO: 40507 - DNA, 6 bp, Unknown
  misc_feature (1)..( 6): Matrix.001 file - promoters60/1007675
tacaaa

SEQ ID NO: 40508 - DNA, 7 bp, Unknown
  misc_feature (1)..( 7): Matrix.001 file - promoters60/1007675
aaaaaaa

SEQ ID NO: 40509 - DNA, 8 bp, Unknown
  misc_feature (1)..( 8): Matrix.001 file - promoters60/1007675
aaatcaac

SEQ ID NO: 40510 - DNA, 6 bp, Unknown
  misc_feature (1)..( 6): Matrix.001 file - promoters60/1007675
aagtcc

SEQ ID NO: 40511 - DNA, 7 bp, Unknown
  misc_feature (1)..( 7): Matrix.001 file - promoters60/1007675
tcaattg

SEQ ID NO: 40512 - DNA, 7 bp, Unknown
  misc_feature (1)..( 7): Matrix.001 file - promoters60/1007675
tatgatt

SEQ ID NO: 40513 - DNA, 6 bp, Unknown
  misc_feature (1)..( 6): Matrix.001 file - promoters60/1007675
atatat

SEQ ID NO: 40514 - DNA, 6 bp, Unknown
  misc_feature (1)..( 6): Matrix.001 file - promoters60/1007675
gaagac

SEQ ID NO: 40515 - DNA, 10 bp, Unknown
  misc_feature (1)..( 10): Matrix.001 file - promoters60/1007675
tattaatgaa

SEQ ID NO: 40516 - DNA, 7 bp, Unknown
  misc_feature (1)..( 7): Matrix.001 file - promoters60/1007675
tttagaa

SEQ ID NO: 40517 - DNA, 6 bp, Unknown
  misc_feature (1)..( 6): Matrix.001 file - promoters60/1007675
aaataa

SEQ ID NO: 40518 - DNA, 9 bp, Unknown
  misc_feature (1)..( 9): Matrix.001 file - promoters60/1007675
tccaaaagt

SEQ ID NO: 40519 - DNA, 8 bp, Unknown
  misc_feature (1)..( 8): Matrix.001 file - promoters60/1007675
tccaaatg

SEQ ID NO: 40520 - DNA, 7 bp, Unknown
  misc_feature (1)..( 7): Matrix.001 file - promoters60/1007675
aaagaaa

SEQ ID NO: 40521 - DNA, 6 bp, Unknown
  misc_feature (1)..( 6): Matrix.001 file - promoters60/1007675
ggaaat

SEQ ID NO: 40522 - DNA, 7 bp, Unknown
  misc_feature (1)..( 7): Matrix.001 file - promoters60/1007675
ataaaaa

SEQ ID NO: 40523 - DNA, 6 bp, Unknown
  misc_feature (1)..( 6): Matrix.001 file - promoters60/1007731
ttttta

SEQ ID NO: 40524 - DNA, 6 bp, Unknown
  misc_feature (1)..( 6): Matrix.001 file - promoters60/1007731
atttac

SEQ ID NO: 40525 - DNA, 6 bp, Unknown
  misc_feature (1)..( 6): Matrix.001 file - promoters60/1007731
ctgttg

SEQ ID NO: 40526 - DNA, 6 bp, Unknown
  misc_feature (1)..( 6): Matrix.001 file - promoters60/1007731
aaacta

SEQ ID NO: 40527 - DNA, 7 bp, Unknown
  misc_feature (1)..( 7): Matrix.001 file - promoters60/1007731
attcgag

SEQ ID NO: 40528 - DNA, 7 bp, Unknown
  misc_feature (1)..( 7): Matrix.001 file - promoters60/1007731
tttcctt

SEQ ID NO: 40529 - DNA, 6 bp, Unknown
  misc_feature (1)..( 6): Matrix.001 file - promoters60/1007731
tatttt

SEQ ID NO: 40530 - DNA, 6 bp, Unknown
  misc_feature (1)..( 6): Matrix.001 file - promoters60/1007731
ttgaat

SEQ ID NO: 40531 - DNA, 6 bp, Unknown
  misc_feature (1)..( 6): Matrix.001 file - promoters60/1007731
attgaa

SEQ ID NO: 40532 - DNA, 7 bp, Unknown
  misc_feature (1)..( 7): Matrix.001 file - promoters60/1007731
tgacatt

SEQ ID NO: 40533 - DNA, 10 bp, Unknown
  misc_feature (1)..( 10): Matrix.001 file - promoters60/1007731
aaattacttg

SEQ ID NO: 40534 - DNA, 7 bp, Unknown
  misc_feature (1)..( 7): Matrix.001 file - promoters60/1007731
atgtgac

SEQ ID NO: 40535 - DNA, 9 bp, Unknown
  misc_feature (1)..( 9): Matrix.001 file - promoters60/1007731
tgactccat

SEQ ID NO: 40536 - DNA, 7 bp, Unknown
  misc_feature (1)..( 7): Matrix.001 file - promoters60/1007731
acgatta

SEQ ID NO: 40537 - DNA, 8 bp, Unknown
  misc_feature (1)..( 8): Matrix.001 file - promoters60/1007731
agaaaatt

SEQ ID NO: 40538 - DNA, 6 bp, Unknown
  misc_feature (1)..( 6): Matrix.001 file - promoters60/1007731
aaaatt

SEQ ID NO: 40539 - DNA, 7 bp, Unknown
  misc_feature (1)..( 7): Matrix.001 file - promoters60/1007731
caaaatg

SEQ ID NO: 40540 - DNA, 6 bp, Unknown
  misc_feature (1)..( 6): Matrix.001 file - promoters60/1007731
gtttac

SEQ ID NO: 40541 - DNA, 6 bp, Unknown
  misc_feature (1)..( 6): Matrix.001 file - promoters60/1007731
ccaaat

SEQ ID NO: 40542 - DNA, 7 bp, Unknown
  misc_feature (1)..( 7): Matrix.001 file - promoters60/1007756
cttctag

SEQ ID NO: 40543 - DNA, 6 bp, Unknown
  misc_feature (1)..( 6): Matrix.001 file - promoters60/1007756
attcac

SEQ ID NO: 40544 - DNA, 8 bp, Unknown
  misc_feature (1)..( 8): Matrix.001 file - promoters60/1007756
tcacatta

SEQ ID NO: 40545 - DNA, 12 bp, Unknown
  misc_feature (1)..( 12): Matrix.001 file - promoters60/1007756
aacctgtttatt

SEQ ID NO: 40546 - DNA, 6 bp, Unknown
  misc_feature (1)..( 6): Matrix.001 file - promoters60/1007756
tattta

SEQ ID NO: 40547 - DNA, 9 bp, Unknown
  misc_feature (1)..( 9): Matrix.001 file - promoters60/1007756
cggtttata

SEQ ID NO: 40548 - DNA, 6 bp, Unknown
  misc_feature (1)..( 6): Matrix.001 file - promoters60/1007756
gatgat

SEQ ID NO: 40549 - DNA, 6 bp, Unknown
  misc_feature (1)..( 6): Matrix.001 file - promoters60/1007756
acccgg

SEQ ID NO: 40550 - DNA, 8 bp, Unknown
  misc_feature (1)..( 8): Matrix.001 file - promoters60/1007756
aatagtaa

SEQ ID NO: 40551 - DNA, 9 bp, Unknown
  misc_feature (1)..( 9): Matrix.001 file - promoters60/1007756
attctgaaa

SEQ ID NO: 40552 - DNA, 8 bp, Unknown
  misc_feature (1)..( 8): Matrix.001 file - promoters60/1007759
aaacaact

SEQ ID NO: 40553 - DNA, 10 bp, Unknown
  misc_feature (1)..( 10): Matrix.001 file - promoters60/1007795
actttttata

SEQ ID NO: 40554 - DNA, 15 bp, Unknown
  misc_feature (1)..( 15): Matrix.001 file - promoters60/1007795
aattttatattgatt

SEQ ID NO: 40555 - DNA, 10 bp, Unknown
  misc_feature (1)..( 10): Matrix.001 file - promoters60/1007795
aaagtttttg

SEQ ID NO: 40556 - DNA, 9 bp, Unknown
  misc_feature (1)..( 9): Matrix.001 file - promoters60/1007802
agattttct

SEQ ID NO: 40557 - DNA, 6 bp, Unknown
  misc_feature (1)..( 6): Matrix.001 file - promoters60/1007802
aaaaac

SEQ ID NO: 40558 - DNA, 9 bp, Unknown
  misc_feature (1)..( 9): Matrix.001 file - promoters60/1007802
tgaaaaaaa

SEQ ID NO: 40559 - DNA, 11 bp, Unknown
  misc_feature (1)..( 11): Matrix.001 file - promoters60/1007802
atttatttgtg

SEQ ID NO: 40560 - DNA, 8 bp, Unknown
  misc_feature (1)..( 8): Matrix.001 file - promoters60/1007802
atgtacta

SEQ ID NO: 40561 - DNA, 9 bp, Unknown
  misc_feature (1)..( 9): Matrix.001 file - promoters60/1007802
aaaatttgt

SEQ ID NO: 40562 - DNA, 6 bp, Unknown
  misc_feature (1)..( 6): Matrix.001 file - promoters60/1007967
gtttta

SEQ ID NO: 40563 - DNA, 8 bp, Unknown
  misc_feature (1)..( 8): Matrix.001 file - promoters60/1007967
attcttaa

SEQ ID NO: 40564 - DNA, 9 bp, Unknown
  misc_feature (1)..( 9): Matrix.001 file - promoters60/1007967
aatttgaac

SEQ ID NO: 40565 - DNA, 6 bp, Unknown
  misc_feature (1)..( 6): Matrix.001 file - promoters60/1007967
attcat

SEQ ID NO: 40566 - DNA, 6 bp, Unknown
  misc_feature (1)..( 6): Matrix.001 file - promoters60/1007967
ttttaa

SEQ ID NO: 40567 - DNA, 6 bp, Unknown
  misc_feature (1)..( 6): Matrix.001 file - promoters60/1007967
gtgtaa

SEQ ID NO: 40568 - DNA, 9 bp, Unknown
  misc_feature (1)..( 9): Matrix.001 file - promoters60/1007967
cataactgt

SEQ ID NO: 40569 - DNA, 7 bp, Unknown
  misc_feature (1)..( 7): Matrix.001 file - promoters60/1007967
ttactga

SEQ ID NO: 40570 - DNA, 6 bp, Unknown
  misc_feature (1)..( 6): Matrix.001 file - promoters60/1007967
aaccaa

SEQ ID NO: 40571 - DNA, 6 bp, Unknown
  misc_feature (1)..( 6): Matrix.001 file - promoters60/1007967
tttcac

SEQ ID NO: 40572 - DNA, 6 bp, Unknown
  misc_feature (1)..( 6): Matrix.001 file - promoters60/1007967
aaactc

SEQ ID NO: 40573 - DNA, 8 bp, Unknown
  misc_feature (1)..( 8): Matrix.001 file - promoters60/1007967
tcatatgt

SEQ ID NO: 40574 - DNA, 7 bp, Unknown
  misc_feature (1)..( 7): Matrix.001 file - promoters60/1007967
aaacaga

SEQ ID NO: 40575 - DNA, 9 bp, Unknown
  misc_feature (1)..( 9): Matrix.001 file - promoters60/1007967
ataaaataa

SEQ ID NO: 40576 - DNA, 9 bp, Unknown
  misc_feature (1)..( 9): Matrix.001 file - promoters60/1007967
ttatccaac

SEQ ID NO: 40577 - DNA, 8 bp, Unknown
  misc_feature (1)..( 8): Matrix.001 file - promoters60/1008070
aaaaaaaa

SEQ ID NO: 40578 - DNA, 11 bp, Unknown
  misc_feature (1)..( 11): Matrix.001 file - promoters60/1008070
ccactatatat

SEQ ID NO: 40579 - DNA, 8 bp, Unknown
  misc_feature (1)..( 8): Matrix.001 file - promoters60/1008070
tgaaataa

SEQ ID NO: 40580 - DNA, 8 bp, Unknown
  misc_feature (1)..( 8): Matrix.001 file - promoters60/1008070
atttattt

SEQ ID NO: 40581 - DNA, 12 bp, Unknown
  misc_feature (1)..( 12): Matrix.001 file - promoters60/1008148
taaattaatctc

SEQ ID NO: 40582 - DNA, 10 bp, Unknown
  misc_feature (1)..( 10): Matrix.001 file - promoters60/1008218
gattaaaata

SEQ ID NO: 40583 - DNA, 11 bp, Unknown
  misc_feature (1)..( 11): Matrix.001 file - promoters60/1008218
ttctggagaga

SEQ ID NO: 40584 - DNA, 9 bp, Unknown
  misc_feature (1)..( 9): Matrix.001 file - promoters60/1008218
caaacaaag

SEQ ID NO: 40585 - DNA, 9 bp, Unknown
  misc_feature (1)..( 9): Matrix.001 file - promoters60/1008319
ggacaacaa

SEQ ID NO: 40586 - DNA, 14 bp, Unknown
  misc_feature (1)..( 14): Matrix.001 file - promoters60/1008319
tttctttttcgcaa

SEQ ID NO: 40587 - DNA, 10 bp, Unknown
  misc_feature (1)..( 10): Matrix.001 file - promoters60/1008319
aaaaacaaag

SEQ ID NO: 40588 - DNA, 4 bp, Unknown
  misc_feature (1)..( 4): Matrix.001 file - promoters60/1008319
cttt

SEQ ID NO: 40589 - DNA, 12 bp, Unknown
  misc_feature (1)..( 12): Matrix.001 file - promoters60/1008324
gatatgctttgc

SEQ ID NO: 40590 - DNA, 11 bp, Unknown
  misc_feature (1)..( 11): Matrix.001 file - promoters60/1008324
gataatttgtc

SEQ ID NO: 40591 - DNA, 9 bp, Unknown
  misc_feature (1)..( 9): Matrix.001 file - promoters60/1008324
aggcccaat

SEQ ID NO: 40592 - DNA, 10 bp, Unknown
  misc_feature (1)..( 10): Matrix.001 file - promoters60/1008324
acacggtatt

SEQ ID NO: 40593 - DNA, 8 bp, Unknown
  misc_feature (1)..( 8): Matrix.001 file - promoters60/1008400
gaacgtga

SEQ ID NO: 40594 - DNA, 7 bp, Unknown
  misc_feature (1)..( 7): Matrix.001 file - promoters60/1008400
gtaagaa

SEQ ID NO: 40595 - DNA, 8 bp, Unknown
  misc_feature (1)..( 8): Matrix.001 file - promoters60/1008400
aaaaaaat

SEQ ID NO: 40596 - DNA, 6 bp, Unknown
  misc_feature (1)..( 6): Matrix.001 file - promoters60/1008400
ttgatt

SEQ ID NO: 40597 - DNA, 6 bp, Unknown
  misc_feature (1)..( 6): Matrix.001 file - promoters60/1008400
aattgt

SEQ ID NO: 40598 - DNA, 7 bp, Unknown
  misc_feature (1)..( 7): Matrix.001 file - promoters60/1008400
ctttgag

SEQ ID NO: 40599 - DNA, 7 bp, Unknown
  misc_feature (1)..( 7): Matrix.001 file - promoters60/1008400
tatcatt

SEQ ID NO: 40600 - DNA, 7 bp, Unknown
  misc_feature (1)..( 7): Matrix.001 file - promoters60/1008400
gaatttg

SEQ ID NO: 40601 - DNA, 7 bp, Unknown
  misc_feature (1)..( 7): Matrix.001 file - promoters60/1008400
tttgatt

SEQ ID NO: 40602 - DNA, 7 bp, Unknown
  misc_feature (1)..( 7): Matrix.001 file - promoters60/1008400
ttagatc

SEQ ID NO: 40603 - DNA, 6 bp, Unknown
  misc_feature (1)..( 6): Matrix.001 file - promoters60/1008400
catttg

SEQ ID NO: 40604 - DNA, 7 bp, Unknown
  misc_feature (1)..( 7): Matrix.001 file - promoters60/1008425
tttggaa

SEQ ID NO: 40605 - DNA, 6 bp, Unknown
  misc_feature (1)..( 6): Matrix.001 file - promoters60/1008425
agaaaa

SEQ ID NO: 40606 - DNA, 10 bp, Unknown
  misc_feature (1)..( 10): Matrix.001 file - promoters60/1008425
caaatacatt

SEQ ID NO: 40607 - DNA, 8 bp, Unknown
  misc_feature (1)..( 8): Matrix.001 file - promoters60/1008425
tgtaaatt

SEQ ID NO: 40608 - DNA, 7 bp, Unknown
  misc_feature (1)..( 7): Matrix.001 file - promoters60/1008425
caaataa

SEQ ID NO: 40609 - DNA, 7 bp, Unknown
  misc_feature (1)..( 7): Matrix.001 file - promoters60/1008425
ttttttt

SEQ ID NO: 40610 - DNA, 6 bp, Unknown
  misc_feature (1)..( 6): Matrix.001 file - promoters60/1008425
aatatt

SEQ ID NO: 40611 - DNA, 8 bp, Unknown
  misc_feature (1)..( 8): Matrix.001 file - promoters60/1008425
cttttgaa

SEQ ID NO: 40612 - DNA, 6 bp, Unknown
  misc_feature (1)..( 6): Matrix.001 file - promoters60/1008425
tttttt

SEQ ID NO: 40613 - DNA, 9 bp, Unknown
  misc_feature (1)..( 9): Matrix.001 file - promoters60/1008425
aatatatta

SEQ ID NO: 40614 - DNA, 8 bp, Unknown
  misc_feature (1)..( 8): Matrix.001 file - promoters60/1008425
gaaaactt

SEQ ID NO: 40615 - DNA, 8 bp, Unknown
  misc_feature (1)..( 8): Matrix.001 file - promoters60/1008425
acttttat

SEQ ID NO: 40616 - DNA, 7 bp, Unknown
  misc_feature (1)..( 7): Matrix.001 file - promoters60/1008425
tttatta

SEQ ID NO: 40617 - DNA, 8 bp, Unknown
  misc_feature (1)..( 8): Matrix.001 file - promoters60/1008425
tttcaatt

SEQ ID NO: 40618 - DNA, 7 bp, Unknown
  misc_feature (1)..( 7): Matrix.001 file - promoters60/1008425
cataaaa

SEQ ID NO: 40619 - DNA, 7 bp, Unknown
  misc_feature (1)..( 7): Matrix.001 file - promoters60/1008425
aaaatga

SEQ ID NO: 40620 - DNA, 6 bp, Unknown
  misc_feature (1)..( 6): Matrix.001 file - promoters60/1008425
acttgt

SEQ ID NO: 40621 - DNA, 7 bp, Unknown
  misc_feature (1)..( 7): Matrix.001 file - promoters60/1008425
tcaagtt

SEQ ID NO: 40622 - DNA, 6 bp, Unknown
  misc_feature (1)..( 6): Matrix.001 file - promoters60/1008425
attaaa

SEQ ID NO: 40623 - DNA, 6 bp, Unknown
  misc_feature (1)..( 6): Matrix.001 file - promoters60/1008425
tcaaca

SEQ ID NO: 40624 - DNA, 9 bp, Unknown
  misc_feature (1)..( 9): Matrix.001 file - promoters60/1008425
aaccattta

SEQ ID NO: 40625 - DNA, 6 bp, Unknown
  misc_feature (1)..( 6): Matrix.001 file - promoters60/1008432
tataat

SEQ ID NO: 40626 - DNA, 6 bp, Unknown
  misc_feature (1)..( 6): Matrix.001 file - promoters60/1008432
ccacca

SEQ ID NO: 40627 - DNA, 9 bp, Unknown
  misc_feature (1)..( 9): Matrix.001 file - promoters60/1008432
gtagatatt

SEQ ID NO: 40628 - DNA, 6 bp, Unknown
  misc_feature (1)..( 6): Matrix.001 file - promoters60/1008432
aacatt

SEQ ID NO: 40629 - DNA, 7 bp, Unknown
  misc_feature (1)..( 7): Matrix.001 file - promoters60/1008432
ttgatga

SEQ ID NO: 40630 - DNA, 8 bp, Unknown
  misc_feature (1)..( 8): Matrix.001 file - promoters60/1008432
ttaatcaa

SEQ ID NO: 40631 - DNA, 8 bp, Unknown
  misc_feature (1)..( 8): Matrix.001 file - promoters60/1008432
aaatggtt

SEQ ID NO: 40632 - DNA, 7 bp, Unknown
  misc_feature (1)..( 7): Matrix.001 file - promoters60/1008432
aatctct

SEQ ID NO: 40633 - DNA, 6 bp, Unknown
  misc_feature (1)..( 6): Matrix.001 file - promoters60/1008432
caaatt

SEQ ID NO: 40634 - DNA, 9 bp, Unknown
  misc_feature (1)..( 9): Matrix.001 file - promoters60/1008432
aatcaaaaa

SEQ ID NO: 40635 - DNA, 8 bp, Unknown
  misc_feature (1)..( 8): Matrix.001 file - promoters60/1008432
tatagtaa

SEQ ID NO: 40636 - DNA, 8 bp, Unknown
  misc_feature (1)..( 8): Matrix.001 file - promoters60/1008432
attttttt

SEQ ID NO: 40637 - DNA, 6 bp, Unknown
  misc_feature (1)..( 6): Matrix.001 file - promoters60/1008432
tttgtt

SEQ ID NO: 40638 - DNA, 6 bp, Unknown
  misc_feature (1)..( 6): Matrix.001 file - promoters60/1008432
tataac

SEQ ID NO: 40639 - DNA, 8 bp, Unknown
  misc_feature (1)..( 8): Matrix.001 file - promoters60/1008432
gaacaaag

SEQ ID NO: 40640 - DNA, 8 bp, Unknown
  misc_feature (1)..( 8): Matrix.001 file - promoters60/1008432
tttaaatg

SEQ ID NO: 40641 - DNA, 7 bp, Unknown
  misc_feature (1)..( 7): Matrix.001 file - promoters60/1008432
ccaaaca

SEQ ID NO: 40642 - DNA, 8 bp, Unknown
  misc_feature (1)..( 8): Matrix.001 file - promoters60/1008432
tacaaaaa

SEQ ID NO: 40643 - DNA, 8 bp, Unknown
  misc_feature (1)..( 8): Matrix.001 file - promoters60/1008432
aaaaaaag

SEQ ID NO: 40644 - DNA, 8 bp, Unknown
  misc_feature (1)..( 8): Matrix.001 file - promoters60/1008432
aacaacct

SEQ ID NO: 40645 - DNA, 12 bp, Unknown
  misc_feature (1)..( 12): Matrix.001 file - promoters60/1008443
taaataggccca

SEQ ID NO: 40646 - DNA, 12 bp, Unknown
  misc_feature (1)..( 12): Matrix.001 file - promoters60/1008534
cccaatataaaa

SEQ ID NO: 40647 - DNA, 11 bp, Unknown
  misc_feature (1)..( 11): Matrix.001 file - promoters60/1008534
atttctgtcaa

SEQ ID NO: 40648 - DNA, 13 bp, Unknown
  misc_feature (1)..( 13): Matrix.001 file - promoters60/1008534
ctcattatataaa

SEQ ID NO: 40649 - DNA, 10 bp, Unknown
  misc_feature (1)..( 10): Matrix.001 file - promoters60/1008573
aagaaatatt

SEQ ID NO: 40650 - DNA, 10 bp, Unknown
  misc_feature (1)..( 10): Matrix.001 file - promoters60/1008573
tatttttaat

SEQ ID NO: 40651 - DNA, 10 bp, Unknown
  misc_feature (1)..( 10): Matrix.001 file - promoters60/1008573
gaataaaaat

SEQ ID NO: 40652 - DNA, 11 bp, Unknown
  misc_feature (1)..( 11): Matrix.001 file - promoters60/1008573
caataatttaa

SEQ ID NO: 40653 - DNA, 10 bp, Unknown
  misc_feature (1)..( 10): Matrix.001 file - promoters60/1008573
aaaatgtata

SEQ ID NO: 40654 - DNA, 7 bp, Unknown
  misc_feature (1)..( 7): Matrix.001 file - promoters60/1008573
gataaaa

SEQ ID NO: 40655 - DNA, 12 bp, Unknown
  misc_feature (1)..( 12): Matrix.001 file - promoters60/1008573
atattttttatg

SEQ ID NO: 40656 - DNA, 7 bp, Unknown
  misc_feature (1)..( 7): Matrix.001 file - promoters60/1008573
tatttat

SEQ ID NO: 40657 - DNA, 6 bp, Unknown
  misc_feature (1)..( 6): Matrix.001 file - promoters60/1008673
atagat

SEQ ID NO: 40658 - DNA, 9 bp, Unknown
  misc_feature (1)..( 9): Matrix.001 file - promoters60/1008673
tatgtaatt

SEQ ID NO: 40659 - DNA, 7 bp, Unknown
  misc_feature (1)..( 7): Matrix.001 file - promoters60/1008673
attgaaa

SEQ ID NO: 40660 - DNA, 12 bp, Unknown
  misc_feature (1)..( 12): Matrix.001 file - promoters60/1008673
aactcaatagtt

SEQ ID NO: 40661 - DNA, 6 bp, Unknown
  misc_feature (1)..( 6): Matrix.001 file - promoters60/1008673
gtttgt

SEQ ID NO: 40662 - DNA, 7 bp, Unknown
  misc_feature (1)..( 7): Matrix.001 file - promoters60/1008673
attcatt

SEQ ID NO: 40663 - DNA, 6 bp, Unknown
  misc_feature (1)..( 6): Matrix.001 file - promoters60/1008673
tgtttg

SEQ ID NO: 40664 - DNA, 8 bp, Unknown
  misc_feature (1)..( 8): Matrix.001 file - promoters60/1008673
cgttacca

SEQ ID NO: 40665 - DNA, 7 bp, Unknown
  misc_feature (1)..( 7): Matrix.001 file - promoters60/1008673
aaaagaa

SEQ ID NO: 40666 - DNA, 6 bp, Unknown
  misc_feature (1)..( 6): Matrix.001 file - promoters60/1008673
actgaa

SEQ ID NO: 40667 - DNA, 6 bp, Unknown
  misc_feature (1)..( 6): Matrix.001 file - promoters60/1008673
tagata

SEQ ID NO: 40668 - DNA, 8 bp, Unknown
  misc_feature (1)..( 8): Matrix.001 file - promoters60/1008673
atgaaatg

SEQ ID NO: 40669 - DNA, 8 bp, Unknown
  misc_feature (1)..( 8): Matrix.001 file - promoters60/1008673
tttttaat

SEQ ID NO: 40670 - DNA, 7 bp, Unknown
  misc_feature (1)..( 7): Matrix.001 file - promoters60/1008673
aaatctt

SEQ ID NO: 40671 - DNA, 9 bp, Unknown
  misc_feature (1)..( 9): Matrix.001 file - promoters60/1008732
taaatttga

SEQ ID NO: 40672 - DNA, 13 bp, Unknown
  misc_feature (1)..( 13): Matrix.001 file - promoters60/1008732
ttaattgtactaa

SEQ ID NO: 40673 - DNA, 12 bp, Unknown
  misc_feature (1)..( 12): Matrix.001 file - promoters60/1008732
aattttattcta

SEQ ID NO: 40674 - DNA, 11 bp, Unknown
  misc_feature (1)..( 11): Matrix.001 file - promoters60/1008732
attaaaatttt

SEQ ID NO: 40675 - DNA, 7 bp, Unknown
  misc_feature (1)..( 7): Matrix.001 file - promoters60/1008787
taacgtt

SEQ ID NO: 40676 - DNA, 15 bp, Unknown
  misc_feature (1)..( 15): Matrix.001 file - promoters60/1008787
aaaagcatacaaata

SEQ ID NO: 40677 - DNA, 6 bp, Unknown
  misc_feature (1)..( 6): Matrix.001 file - promoters60/1008787
tcaact

SEQ ID NO: 40678 - DNA, 7 bp, Unknown
  misc_feature (1)..( 7): Matrix.001 file - promoters60/1008787
aacgtcg

SEQ ID NO: 40679 - DNA, 7 bp, Unknown
  misc_feature (1)..( 7): Matrix.001 file - promoters60/1008787
ctattat

SEQ ID NO: 40680 - DNA, 8 bp, Unknown
  misc_feature (1)..( 8): Matrix.001 file - promoters60/1008787
attatatt

SEQ ID NO: 40681 - DNA, 9 bp, Unknown
  misc_feature (1)..( 9): Matrix.001 file - promoters60/1008787
aaataacaa

SEQ ID NO: 40682 - DNA, 7 bp, Unknown
  misc_feature (1)..( 7): Matrix.001 file - promoters60/1008787
ttaatca

SEQ ID NO: 40683 - DNA, 6 bp, Unknown
  misc_feature (1)..( 6): Matrix.001 file - promoters60/1008787
tttctt

SEQ ID NO: 40684 - DNA, 6 bp, Unknown
  misc_feature (1)..( 6): Matrix.001 file - promoters60/1008787
caagaa

SEQ ID NO: 40685 - DNA, 8 bp, Unknown
  misc_feature (1)..( 8): Matrix.001 file - promoters60/1008787
tggttatt

SEQ ID NO: 40686 - DNA, 6 bp, Unknown
  misc_feature (1)..( 6): Matrix.001 file - promoters60/1008787
ctttgt

SEQ ID NO: 40687 - DNA, 7 bp, Unknown
  misc_feature (1)..( 7): Matrix.001 file - promoters60/1008787
tttcaac

SEQ ID NO: 40688 - DNA, 6 bp, Unknown
  misc_feature (1)..( 6): Matrix.001 file - promoters60/1008787
attaaa

SEQ ID NO: 40689 - DNA, 7 bp, Unknown
  misc_feature (1)..( 7): Matrix.001 file - promoters60/1008787
tacataa

SEQ ID NO: 40690 - DNA, 6 bp, Unknown
  misc_feature (1)..( 6): Matrix.001 file - promoters60/1008787
gtaaaa

SEQ ID NO: 40691 - DNA, 9 bp, Unknown
  misc_feature (1)..( 9): Matrix.001 file - promoters60/1008787
aaatagtta

SEQ ID NO: 40692 - DNA, 8 bp, Unknown
  misc_feature (1)..( 8): Matrix.001 file - promoters60/1008787
caaaactt

SEQ ID NO: 40693 - DNA, 6 bp, Unknown
  misc_feature (1)..( 6): Matrix.001 file - promoters60/1008787
gttcta

SEQ ID NO: 40694 - DNA, 7 bp, Unknown
  misc_feature (1)..( 7): Matrix.001 file - promoters60/1008787
atacttt

SEQ ID NO: 40695 - DNA, 5 bp, Unknown
  misc_feature (1)..( 5): Matrix.001 file - promoters60/1008808
tactt

SEQ ID NO: 40696 - DNA, 11 bp, Unknown
  misc_feature (1)..( 11): Matrix.001 file - promoters60/1008808
aaaaatgatta

SEQ ID NO: 40697 - DNA, 9 bp, Unknown
  misc_feature (1)..( 9): Matrix.001 file - promoters60/1008808
ataagtttg

SEQ ID NO: 40698 - DNA, 9 bp, Unknown
  misc_feature (1)..( 9): Matrix.001 file - promoters60/1008816
tcataacac

SEQ ID NO: 40699 - DNA, 7 bp, Unknown
  misc_feature (1)..( 7): Matrix.001 file - promoters60/1008816
gataaaa

SEQ ID NO: 40700 - DNA, 6 bp, Unknown
  misc_feature (1)..( 6): Matrix.001 file - promoters60/1008816
ttcaac

SEQ ID NO: 40701 - DNA, 6 bp, Unknown
  misc_feature (1)..( 6): Matrix.001 file - promoters60/1008816
taaaac

SEQ ID NO: 40702 - DNA, 6 bp, Unknown
  misc_feature (1)..( 6): Matrix.001 file - promoters60/1008816
aaagtt

SEQ ID NO: 40703 - DNA, 6 bp, Unknown
  misc_feature (1)..( 6): Matrix.001 file - promoters60/1008816
atattt

SEQ ID NO: 40704 - DNA, 6 bp, Unknown
  misc_feature (1)..( 6): Matrix.001 file - promoters60/1008816
gaaaaa

SEQ ID NO: 40705 - DNA, 8 bp, Unknown
  misc_feature (1)..( 8): Matrix.001 file - promoters60/1008816
aggagaaa

SEQ ID NO: 40706 - DNA, 6 bp, Unknown
  misc_feature (1)..( 6): Matrix.001 file - promoters60/1008816
tctaaa

SEQ ID NO: 40707 - DNA, 9 bp, Unknown
  misc_feature (1)..( 9): Matrix.001 file - promoters60/1008816
atcataact

SEQ ID NO: 40708 - DNA, 6 bp, Unknown
  misc_feature (1)..( 6): Matrix.001 file - promoters60/1008816
ctctac

SEQ ID NO: 40709 - DNA, 8 bp, Unknown
  misc_feature (1)..( 8): Matrix.001 file - promoters60/1008816
taaaccaa

SEQ ID NO: 40710 - DNA, 13 bp, Unknown
  misc_feature (1)..( 13): Matrix.001 file - promoters60/1008816
cgaataaaaaaaa

SEQ ID NO: 40711 - DNA, 6 bp, Unknown
  misc_feature (1)..( 6): Matrix.001 file - promoters60/1008816
agtaaa

SEQ ID NO: 40712 - DNA, 7 bp, Unknown
  misc_feature (1)..( 7): Matrix.001 file - promoters60/1008816
aatcggg

SEQ ID NO: 40713 - DNA, 8 bp, Unknown
  misc_feature (1)..( 8): Matrix.001 file - promoters60/1008816
gaaacaaa

SEQ ID NO: 40714 - DNA, 10 bp, Unknown
  misc_feature (1)..( 10): Matrix.001 file - promoters60/1008816
ggaaaagaaa

SEQ ID NO: 40715 - DNA, 7 bp, Unknown
  misc_feature (1)..( 7): Matrix.001 file - promoters60/1008816
cccacta

SEQ ID NO: 40716 - DNA, 9 bp, Unknown
  misc_feature (1)..( 9): Matrix.001 file - promoters60/1008816
aaagaaaag

SEQ ID NO: 40717 - DNA, 7 bp, Unknown
  misc_feature (1)..( 7): Matrix.001 file - promoters60/1008816
gtatata

SEQ ID NO: 40718 - DNA, 10 bp, Unknown
  misc_feature (1)..( 10): Matrix.001 file - promoters60/1008836
aaattttttt

SEQ ID NO: 40719 - DNA, 10 bp, Unknown
  misc_feature (1)..( 10): Matrix.001 file - promoters60/1008836
atttttatta

SEQ ID NO: 40720 - DNA, 12 bp, Unknown
  misc_feature (1)..( 12): Matrix.001 file - promoters60/1008836
tcaaaaaaaaaa

SEQ ID NO: 40721 - DNA, 7 bp, Unknown
  misc_feature (1)..( 7): Matrix.001 file - promoters60/1008836
taaaacg

SEQ ID NO: 40722 - DNA, 12 bp, Unknown
  misc_feature (1)..( 12): Matrix.001 file - promoters60/1008836
taaaaattaaat

SEQ ID NO: 40723 - DNA, 10 bp, Unknown
  misc_feature (1)..( 10): Matrix.001 file - promoters60/1008836
aaatattatc

SEQ ID NO: 40724 - DNA, 6 bp, Unknown
  misc_feature (1)..( 6): Matrix.001 file - promoters60/1008836
tataaa

SEQ ID NO: 40725 - DNA, 13 bp, Unknown
  misc_feature (1)..( 13): Matrix.001 file - promoters60/1008836
atatttttataaa

SEQ ID NO: 40726 - DNA, 12 bp, Unknown
  misc_feature (1)..( 12): Matrix.001 file - promoters60/1008836
gtttttgatatt

SEQ ID NO: 40727 - DNA, 10 bp, Unknown
  misc_feature (1)..( 10): Matrix.001 file - promoters60/1008836
ttttaaaaaa

SEQ ID NO: 40728 - DNA, 4 bp, Unknown
  misc_feature (1)..( 4): Matrix.001 file - promoters60/1008836
atat

SEQ ID NO: 40729 - DNA, 11 bp, Unknown
  misc_feature (1)..( 11): Matrix.001 file - promoters60/1008836
tagattaaaaa

SEQ ID NO: 40730 - DNA, 8 bp, Unknown
  misc_feature (1)..( 8): Matrix.001 file - promoters60/1008889
attcattg

SEQ ID NO: 40731 - DNA, 8 bp, Unknown
  misc_feature (1)..( 8): Matrix.001 file - promoters60/1008889
ctgatatt

SEQ ID NO: 40732 - DNA, 10 bp, Unknown
  misc_feature (1)..( 10): Matrix.001 file - promoters60/1008889
atttataaat

SEQ ID NO: 40733 - DNA, 7 bp, Unknown
  misc_feature (1)..( 7): Matrix.001 file - promoters60/1008889
gttattt

SEQ ID NO: 40734 - DNA, 8 bp, Unknown
  misc_feature (1)..( 8): Matrix.001 file - promoters60/1008889
taaattat

SEQ ID NO: 40735 - DNA, 8 bp, Unknown
  misc_feature (1)..( 8): Matrix.001 file - promoters60/1008889
gtcaaaaa

SEQ ID NO: 40736 - DNA, 6 bp, Unknown
  misc_feature (1)..( 6): Matrix.001 file - promoters60/1008889
agtttg

SEQ ID NO: 40737 - DNA, 8 bp, Unknown
  misc_feature (1)..( 8): Matrix.001 file - promoters60/1008889
aaagacat

SEQ ID NO: 40738 - DNA, 6 bp, Unknown
  misc_feature (1)..( 6): Matrix.001 file - promoters60/1008889
ctctcc

SEQ ID NO: 40739 - DNA, 7 bp, Unknown
  misc_feature (1)..( 7): Matrix.001 file - promoters60/1008889
caacctt

SEQ ID NO: 40740 - DNA, 8 bp, Unknown
  misc_feature (1)..( 8): Matrix.001 file - promoters60/1008889
aagaagat

SEQ ID NO: 40741 - DNA, 8 bp, Unknown
  misc_feature (1)..( 8): Matrix.001 file - promoters60/1008889
caataaga

SEQ ID NO: 40742 - DNA, 6 bp, Unknown
  misc_feature (1)..( 6): Matrix.001 file - promoters60/1008889
aaaaaa

SEQ ID NO: 40743 - DNA, 13 bp, Unknown
  misc_feature (1)..( 13): Matrix.001 file - promoters60/1008889
aaagaaaaaaatt

SEQ ID NO: 40744 - DNA, 8 bp, Unknown
  misc_feature (1)..( 8): Matrix.001 file - promoters60/1008889
attttttt

SEQ ID NO: 40745 - DNA, 6 bp, Unknown
  misc_feature (1)..( 6): Matrix.001 file - promoters60/1008889
caatat

SEQ ID NO: 40746 - DNA, 6 bp, Unknown
  misc_feature (1)..( 6): Matrix.001 file - promoters60/1008889
aataaa

SEQ ID NO: 40747 - DNA, 7 bp, Unknown
  misc_feature (1)..( 7): Matrix.001 file - promoters60/1008983
ttaattg

SEQ ID NO: 40748 - DNA, 7 bp, Unknown
  misc_feature (1)..( 7): Matrix.001 file - promoters60/1008983
gtccaga

SEQ ID NO: 40749 - DNA, 6 bp, Unknown
  misc_feature (1)..( 6): Matrix.001 file - promoters60/1008983
tgaaaa

SEQ ID NO: 40750 - DNA, 6 bp, Unknown
  misc_feature (1)..( 6): Matrix.001 file - promoters60/1008983
atttgg

SEQ ID NO: 40751 - DNA, 9 bp, Unknown
  misc_feature (1)..( 9): Matrix.001 file - promoters60/1008983
ggtgttggt

SEQ ID NO: 40752 - DNA, 7 bp, Unknown
  misc_feature (1)..( 7): Matrix.001 file - promoters60/1008983
atttttg

SEQ ID NO: 40753 - DNA, 6 bp, Unknown
  misc_feature (1)..( 6): Matrix.001 file - promoters60/1008983
gctttt

SEQ ID NO: 40754 - DNA, 7 bp, Unknown
  misc_feature (1)..( 7): Matrix.001 file - promoters60/1008983
tctggtg

SEQ ID NO: 40755 - DNA, 6 bp, Unknown
  misc_feature (1)..( 6): Matrix.001 file - promoters60/1008983
tcttgt

SEQ ID NO: 40756 - DNA, 6 bp, Unknown
  misc_feature (1)..( 6): Matrix.001 file - promoters60/1008983
tctatc

SEQ ID NO: 40757 - DNA, 7 bp, Unknown
  misc_feature (1)..( 7): Matrix.001 file - promoters60/1008983
aatatct

SEQ ID NO: 40758 - DNA, 7 bp, Unknown
  misc_feature (1)..( 7): Matrix.001 file - promoters60/1008983
ttaaccc

SEQ ID NO: 40759 - DNA, 6 bp, Unknown
  misc_feature (1)..( 6): Matrix.001 file - promoters60/1008983
ttctta

SEQ ID NO: 40760 - DNA, 8 bp, Unknown
  misc_feature (1)..( 8): Matrix.001 file - promoters60/1008983
atgatttc

SEQ ID NO: 40761 - DNA, 7 bp, Unknown
  misc_feature (1)..( 7): Matrix.001 file - promoters60/1008983
atttttc

SEQ ID NO: 40762 - DNA, 8 bp, Unknown
  misc_feature (1)..( 8): Matrix.001 file - promoters60/1008983
agaacagg

SEQ ID NO: 40763 - DNA, 6 bp, Unknown
  misc_feature (1)..( 6): Matrix.001 file - promoters60/1008983
tgatcg

SEQ ID NO: 40764 - DNA, 6 bp, Unknown
  misc_feature (1)..( 6): Matrix.001 file - promoters60/1008983
aatgcc

SEQ ID NO: 40765 - DNA, 6 bp, Unknown
  misc_feature (1)..( 6): Matrix.001 file - promoters60/1008983
tgctga

SEQ ID NO: 40766 - DNA, 7 bp, Unknown
  misc_feature (1)..( 7): Matrix.001 file - promoters60/1008983
ccgagtt

SEQ ID NO: 40767 - DNA, 11 bp, Unknown
  misc_feature (1)..( 11): Matrix.001 file - promoters60/1009030
ataaaacaaaa

SEQ ID NO: 40768 - DNA, 11 bp, Unknown
  misc_feature (1)..( 11): Matrix.001 file - promoters60/1009030
ataataatagc

SEQ ID NO: 40769 - DNA, 9 bp, Unknown
  misc_feature (1)..( 9): Matrix.001 file - promoters60/1009030
acaaaacat

SEQ ID NO: 40770 - DNA, 8 bp, Unknown
  misc_feature (1)..( 8): Matrix.001 file - promoters60/1009053
atactact

SEQ ID NO: 40771 - DNA, 7 bp, Unknown
  misc_feature (1)..( 7): Matrix.001 file - promoters60/1009053
caaatac

SEQ ID NO: 40772 - DNA, 11 bp, Unknown
  misc_feature (1)..( 11): Matrix.001 file - promoters60/1009053
tatattttttt

SEQ ID NO: 40773 - DNA, 6 bp, Unknown
  misc_feature (1)..( 6): Matrix.001 file - promoters60/1009053
tatatg

SEQ ID NO: 40774 - DNA, 6 bp, Unknown
  misc_feature (1)..( 6): Matrix.001 file - promoters60/1009053
ttcaaa

SEQ ID NO: 40775 - DNA, 9 bp, Unknown
  misc_feature (1)..( 9): Matrix.001 file - promoters60/1009053
atactctca

SEQ ID NO: 40776 - DNA, 6 bp, Unknown
  misc_feature (1)..( 6): Matrix.001 file - promoters60/1009053
tcaaac

SEQ ID NO: 40777 - DNA, 6 bp, Unknown
  misc_feature (1)..( 6): Matrix.001 file - promoters60/1009053
ttttct

SEQ ID NO: 40778 - DNA, 7 bp, Unknown
  misc_feature (1)..( 7): Matrix.001 file - promoters60/1009053
gaaatca

SEQ ID NO: 40779 - DNA, 6 bp, Unknown
  misc_feature (1)..( 6): Matrix.001 file - promoters60/1009053
atcttg

SEQ ID NO: 40780 - DNA, 6 bp, Unknown
  misc_feature (1)..( 6): Matrix.001 file - promoters60/1009053
acacaa

SEQ ID NO: 40781 - DNA, 10 bp, Unknown
  misc_feature (1)..( 10): Matrix.001 file - promoters60/1009053
atttttttaa

SEQ ID NO: 40782 - DNA, 7 bp, Unknown
  misc_feature (1)..( 7): Matrix.001 file - promoters60/1009053
actattc

SEQ ID NO: 40783 - DNA, 11 bp, Unknown
  misc_feature (1)..( 11): Matrix.001 file - promoters60/1009053
accggatatta

SEQ ID NO: 40784 - DNA, 6 bp, Unknown
  misc_feature (1)..( 6): Matrix.001 file - promoters60/1009053
tactgt

SEQ ID NO: 40785 - DNA, 9 bp, Unknown
  misc_feature (1)..( 9): Matrix.001 file - promoters60/1009053
tcaaaattt

SEQ ID NO: 40786 - DNA, 6 bp, Unknown
  misc_feature (1)..( 6): Matrix.001 file - promoters60/1009053
ttgaaa

SEQ ID NO: 40787 - DNA, 7 bp, Unknown
  misc_feature (1)..( 7): Matrix.001 file - promoters60/1009053
cttctcc

SEQ ID NO: 40788 - DNA, 7 bp, Unknown
  misc_feature (1)..( 7): Matrix.001 file - promoters60/1009053
ttcatgt

SEQ ID NO: 40789 - DNA, 7 bp, Unknown
  misc_feature (1)..( 7): Matrix.001 file - promoters60/1009053
aagattt

SEQ ID NO: 40790 - DNA, 7 bp, Unknown
  misc_feature (1)..( 7): Matrix.001 file - promoters60/1009053
tacctca

SEQ ID NO: 40791 - DNA, 7 bp, Unknown
  misc_feature (1)..( 7): Matrix.001 file - promoters60/1009053
tttgata

SEQ ID NO: 40792 - DNA, 9 bp, Unknown
  misc_feature (1)..( 9): Matrix.001 file - promoters60/1009053
catcattat

SEQ ID NO: 40793 - DNA, 8 bp, Unknown
  misc_feature (1)..( 8): Matrix.001 file - promoters60/1009086
ataaataa

SEQ ID NO: 40794 - DNA, 6 bp, Unknown
  misc_feature (1)..( 6): Matrix.001 file - promoters60/1009086
aattat

SEQ ID NO: 40795 - DNA, 6 bp, Unknown
  misc_feature (1)..( 6): Matrix.001 file - promoters60/1009086
tttgtt

SEQ ID NO: 40796 - DNA, 6 bp, Unknown
  misc_feature (1)..( 6): Matrix.001 file - promoters60/1009086
aaattg

SEQ ID NO: 40797 - DNA, 7 bp, Unknown
  misc_feature (1)..( 7): Matrix.001 file - promoters60/1009086
aaaaatt

SEQ ID NO: 40798 - DNA, 6 bp, Unknown
  misc_feature (1)..( 6): Matrix.001 file - promoters60/1009086
tttgat

SEQ ID NO: 40799 - DNA, 6 bp, Unknown
  misc_feature (1)..( 6): Matrix.001 file - promoters60/1009086
tcaaat

SEQ ID NO: 40800 - DNA, 9 bp, Unknown
  misc_feature (1)..( 9): Matrix.001 file - promoters60/1009086
taaatatga

SEQ ID NO: 40801 - DNA, 7 bp, Unknown
  misc_feature (1)..( 7): Matrix.001 file - promoters60/1009086
aatactt

SEQ ID NO: 40802 - DNA, 7 bp, Unknown
  misc_feature (1)..( 7): Matrix.001 file - promoters60/1009086
aaactct

SEQ ID NO: 40803 - DNA, 6 bp, Unknown
  misc_feature (1)..( 6): Matrix.001 file - promoters60/1009086
gttttt

SEQ ID NO: 40804 - DNA, 8 bp, Unknown
  misc_feature (1)..( 8): Matrix.001 file - promoters60/1009086
gaaacaga

SEQ ID NO: 40805 - DNA, 7 bp, Unknown
  misc_feature (1)..( 7): Matrix.001 file - promoters60/1009086
aaagctt

SEQ ID NO: 40806 - DNA, 8 bp, Unknown
  misc_feature (1)..( 8): Matrix.001 file - promoters60/1009086
aatatgat

SEQ ID NO: 40807 - DNA, 7 bp, Unknown
  misc_feature (1)..( 7): Matrix.001 file - promoters60/1009086
ctcaaca

SEQ ID NO: 40808 - DNA, 8 bp, Unknown
  misc_feature (1)..( 8): Matrix.001 file - promoters60/1009086
ataaaaca

SEQ ID NO: 40809 - DNA, 8 bp, Unknown
  misc_feature (1)..( 8): Matrix.001 file - promoters60/1009086
tatatttt

SEQ ID NO: 40810 - DNA, 6 bp, Unknown
  misc_feature (1)..( 6): Matrix.001 file - promoters60/1009086
tatttc

SEQ ID NO: 40811 - DNA, 8 bp, Unknown
  misc_feature (1)..( 8): Matrix.001 file - promoters60/1009086
atcaggaa

SEQ ID NO: 40812 - DNA, 8 bp, Unknown
  misc_feature (1)..( 8): Matrix.001 file - promoters60/1009086
tttaaaag

SEQ ID NO: 40813 - DNA, 6 bp, Unknown
  misc_feature (1)..( 6): Matrix.001 file - promoters60/1009086
aggttt

SEQ ID NO: 40814 - DNA, 8 bp, Unknown
  misc_feature (1)..( 8): Matrix.001 file - promoters60/1009136
caaaacaa

SEQ ID NO: 40815 - DNA, 8 bp, Unknown
  misc_feature (1)..( 8): Matrix.001 file - promoters60/1009136
attcaatt

SEQ ID NO: 40816 - DNA, 11 bp, Unknown
  misc_feature (1)..( 11): Matrix.001 file - promoters60/1009136
acagaaataaa

SEQ ID NO: 40817 - DNA, 8 bp, Unknown
  misc_feature (1)..( 8): Matrix.001 file - promoters60/1009146
caaatttt

SEQ ID NO: 40818 - DNA, 7 bp, Unknown
  misc_feature (1)..( 7): Matrix.001 file - promoters60/1009146
agacaag

SEQ ID NO: 40819 - DNA, 8 bp, Unknown
  misc_feature (1)..( 8): Matrix.001 file - promoters60/1009146
aaagcgac

SEQ ID NO: 40820 - DNA, 8 bp, Unknown
  misc_feature (1)..( 8): Matrix.001 file - promoters60/1009146
aggggaat

SEQ ID NO: 40821 - DNA, 7 bp, Unknown
  misc_feature (1)..( 7): Matrix.001 file - promoters60/1009146
gttcttg

SEQ ID NO: 40822 - DNA, 13 bp, Unknown
  misc_feature (1)..( 13): Matrix.001 file - promoters60/1009146
ttgaatcaaaatt

SEQ ID NO: 40823 - DNA, 7 bp, Unknown
  misc_feature (1)..( 7): Matrix.001 file - promoters60/1009146
tggattt

SEQ ID NO: 40824 - DNA, 6 bp, Unknown
  misc_feature (1)..( 6): Matrix.001 file - promoters60/1009146
aagatt

SEQ ID NO: 40825 - DNA, 6 bp, Unknown
  misc_feature (1)..( 6): Matrix.001 file - promoters60/1009146
ttggtt

SEQ ID NO: 40826 - DNA, 6 bp, Unknown
  misc_feature (1)..( 6): Matrix.001 file - promoters60/1009146
ttaacc

SEQ ID NO: 40827 - DNA, 7 bp, Unknown
  misc_feature (1)..( 7): Matrix.001 file - promoters60/1009146
ctcactc

SEQ ID NO: 40828 - DNA, 6 bp, Unknown
  misc_feature (1)..( 6): Matrix.001 file - promoters60/1009146
atttct

SEQ ID NO: 40829 - DNA, 15 bp, Unknown
  misc_feature (1)..( 15): Matrix.001 file - promoters60/1009211
taattgggcttatta

SEQ ID NO: 40830 - DNA, 12 bp, Unknown
  misc_feature (1)..( 12): Matrix.001 file - promoters60/1009234
taaaatgaagag

SEQ ID NO: 40831 - DNA, 7 bp, Unknown
  misc_feature (1)..( 7): Matrix.001 file - promoters60/1009234
caaatag

SEQ ID NO: 40832 - DNA, 9 bp, Unknown
  misc_feature (1)..( 9): Matrix.001 file - promoters60/1009354
attgaaata

SEQ ID NO: 40833 - DNA, 6 bp, Unknown
  misc_feature (1)..( 6): Matrix.001 file - promoters60/1009354
ttattt

SEQ ID NO: 40834 - DNA, 6 bp, Unknown
  misc_feature (1)..( 6): Matrix.001 file - promoters60/1009354
ataatt

SEQ ID NO: 40835 - DNA, 8 bp, Unknown
  misc_feature (1)..( 8): Matrix.001 file - promoters60/1009354
taagaact

SEQ ID NO: 40836 - DNA, 7 bp, Unknown
  misc_feature (1)..( 7): Matrix.001 file - promoters60/1009354
accctct

SEQ ID NO: 40837 - DNA, 6 bp, Unknown
  misc_feature (1)..( 6): Matrix.001 file - promoters60/1009354
ttaaat

SEQ ID NO: 40838 - DNA, 6 bp, Unknown
  misc_feature (1)..( 6): Matrix.001 file - promoters60/1009354
ttttgt

SEQ ID NO: 40839 - DNA, 6 bp, Unknown
  misc_feature (1)..( 6): Matrix.001 file - promoters60/1009354
agtaat

SEQ ID NO: 40840 - DNA, 6 bp, Unknown
  misc_feature (1)..( 6): Matrix.001 file - promoters60/1009354
atagag

SEQ ID NO: 40841 - DNA, 7 bp, Unknown
  misc_feature (1)..( 7): Matrix.001 file - promoters60/1009354
atgtggc

SEQ ID NO: 40842 - DNA, 7 bp, Unknown
  misc_feature (1)..( 7): Matrix.001 file - promoters60/1009354
gattctt

SEQ ID NO: 40843 - DNA, 9 bp, Unknown
  misc_feature (1)..( 9): Matrix.001 file - promoters60/1009354
aatgaagat

SEQ ID NO: 40844 - DNA, 7 bp, Unknown
  misc_feature (1)..( 7): Matrix.001 file - promoters60/1009354
acacgtc

SEQ ID NO: 40845 - DNA, 8 bp, Unknown
  misc_feature (1)..( 8): Matrix.001 file - promoters60/1009354
gtgatcca

SEQ ID NO: 40846 - DNA, 6 bp, Unknown
  misc_feature (1)..( 6): Matrix.001 file - promoters60/1009354
aaactt

SEQ ID NO: 40847 - DNA, 7 bp, Unknown
  misc_feature (1)..( 7): Matrix.001 file - promoters60/1009354
ttcaaaa

SEQ ID NO: 40848 - DNA, 6 bp, Unknown
  misc_feature (1)..( 6): Matrix.001 file - promoters60/1009354
taagaa

SEQ ID NO: 40849 - DNA, 8 bp, Unknown
  misc_feature (1)..( 8): Matrix.001 file - promoters60/1009354
gaaaatct

SEQ ID NO: 40850 - DNA, 6 bp, Unknown
  misc_feature (1)..( 6): Matrix.001 file - promoters60/1009354
ttgtca

SEQ ID NO: 40851 - DNA, 8 bp, Unknown
  misc_feature (1)..( 8): Matrix.001 file - promoters60/1009354
cataagta

SEQ ID NO: 40852 - DNA, 8 bp, Unknown
  misc_feature (1)..( 8): Matrix.001 file - promoters60/1009354
ggtggata

SEQ ID NO: 40853 - DNA, 7 bp, Unknown
  misc_feature (1)..( 7): Matrix.001 file - promoters60/1009354
cacacgt

SEQ ID NO: 40854 - DNA, 13 bp, Unknown
  misc_feature (1)..( 13): Matrix.001 file - promoters60/1009354
taaccaaaaattc

SEQ ID NO: 40855 - DNA, 10 bp, Unknown
  misc_feature (1)..( 10): Matrix.001 file - promoters60/1009430
ctcttaaata

SEQ ID NO: 40856 - DNA, 9 bp, Unknown
  misc_feature (1)..( 9): Matrix.001 file - promoters60/1009430
agaaaattc

SEQ ID NO: 40857 - DNA, 8 bp, Unknown
  misc_feature (1)..( 8): Matrix.001 file - promoters60/1009430
cttcatct

SEQ ID NO: 40858 - DNA, 10 bp, Unknown
  misc_feature (1)..( 10): Matrix.001 file - promoters60/1009616
ctaaacaaaa

SEQ ID NO: 40859 - DNA, 9 bp, Unknown
  misc_feature (1)..( 9): Matrix.001 file - promoters60/1009616
gaatacaaa

SEQ ID NO: 40860 - DNA, 12 bp, Unknown
  misc_feature (1)..( 12): Matrix.001 file - promoters60/1009616
aaaatatacaac

SEQ ID NO: 40861 - DNA, 12 bp, Unknown
  misc_feature (1)..( 12): Matrix.001 file - promoters60/1009616
attataatgcaa

SEQ ID NO: 40862 - DNA, 12 bp, Unknown
  misc_feature (1)..( 12): Matrix.001 file - promoters60/1009616
aaacttaaaaag

SEQ ID NO: 40863 - DNA, 7 bp, Unknown
  misc_feature (1)..( 7): Matrix.001 file - promoters60/1009686
tatgttt

SEQ ID NO: 40864 - DNA, 7 bp, Unknown
  misc_feature (1)..( 7): Matrix.001 file - promoters60/1009686
aaagttg

SEQ ID NO: 40865 - DNA, 7 bp, Unknown
  misc_feature (1)..( 7): Matrix.001 file - promoters60/1009686
ttacata

SEQ ID NO: 40866 - DNA, 7 bp, Unknown
  misc_feature (1)..( 7): Matrix.001 file - promoters60/1009686
tagttaa

SEQ ID NO: 40867 - DNA, 6 bp, Unknown
  misc_feature (1)..( 6): Matrix.001 file - promoters60/1009686
tgaaaa

SEQ ID NO: 40868 - DNA, 6 bp, Unknown
  misc_feature (1)..( 6): Matrix.001 file - promoters60/1009686
taaagt

SEQ ID NO: 40869 - DNA, 6 bp, Unknown
  misc_feature (1)..( 6): Matrix.001 file - promoters60/1009686
taattt

SEQ ID NO: 40870 - DNA, 7 bp, Unknown
  misc_feature (1)..( 7): Matrix.001 file - promoters60/1009686
ttacgaa

SEQ ID NO: 40871 - DNA, 8 bp, Unknown
  misc_feature (1)..( 8): Matrix.001 file - promoters60/1009686
attaagtc

SEQ ID NO: 40872 - DNA, 9 bp, Unknown
  misc_feature (1)..( 9): Matrix.001 file - promoters60/1009686
aatcaaaaa

SEQ ID NO: 40873 - DNA, 9 bp, Unknown
  misc_feature (1)..( 9): Matrix.001 file - promoters60/1009686
aaacaatta

SEQ ID NO: 40874 - DNA, 7 bp, Unknown
  misc_feature (1)..( 7): Matrix.001 file - promoters60/1009686
agtagtt

SEQ ID NO: 40875 - DNA, 7 bp, Unknown
  misc_feature (1)..( 7): Matrix.001 file - promoters60/1009686
cttcctt

SEQ ID NO: 40876 - DNA, 6 bp, Unknown
  misc_feature (1)..( 6): Matrix.001 file - promoters60/1009686
tttaca

SEQ ID NO: 40877 - DNA, 7 bp, Unknown
  misc_feature (1)..( 7): Matrix.001 file - promoters60/1009686
aataagg

SEQ ID NO: 40878 - DNA, 11 bp, Unknown
  misc_feature (1)..( 11): Matrix.001 file - promoters60/1009686
acaaagaaata

SEQ ID NO: 40879 - DNA, 6 bp, Unknown
  misc_feature (1)..( 6): Matrix.001 file - promoters60/1009686
tcaaaa

SEQ ID NO: 40880 - DNA, 8 bp, Unknown
  misc_feature (1)..( 8): Matrix.001 file - promoters60/1009686
aagaagaa

SEQ ID NO: 40881 - DNA, 8 bp, Unknown
  misc_feature (1)..( 8): Matrix.001 file - promoters60/1009686
aagaggag

SEQ ID NO: 40882 - DNA, 8 bp, Unknown
  misc_feature (1)..( 8): Matrix.001 file - promoters60/1009752
atttcaat

SEQ ID NO: 40883 - DNA, 8 bp, Unknown
  misc_feature (1)..( 8): Matrix.001 file - promoters60/1009752
ttatttta

SEQ ID NO: 40884 - DNA, 7 bp, Unknown
  misc_feature (1)..( 7): Matrix.001 file - promoters60/1009752
aaaaaat

SEQ ID NO: 40885 - DNA, 6 bp, Unknown
  misc_feature (1)..( 6): Matrix.001 file - promoters60/1009752
aattag

SEQ ID NO: 40886 - DNA, 8 bp, Unknown
  misc_feature (1)..( 8): Matrix.001 file - promoters60/1009752
aggatgtt

SEQ ID NO: 40887 - DNA, 6 bp, Unknown
  misc_feature (1)..( 6): Matrix.001 file - promoters60/1009752
taaacg

SEQ ID NO: 40888 - DNA, 6 bp, Unknown
  misc_feature (1)..( 6): Matrix.001 file - promoters60/1009752
ttaatt

SEQ ID NO: 40889 - DNA, 7 bp, Unknown
  misc_feature (1)..( 7): Matrix.001 file - promoters60/1009752
taacaat

SEQ ID NO: 40890 - DNA, 6 bp, Unknown
  misc_feature (1)..( 6): Matrix.001 file - promoters60/1009752
aaataa

SEQ ID NO: 40891 - DNA, 7 bp, Unknown
  misc_feature (1)..( 7): Matrix.001 file - promoters60/1009752
tttccct

SEQ ID NO: 40892 - DNA, 6 bp, Unknown
  misc_feature (1)..( 6): Matrix.001 file - promoters60/1009752
tatttt

SEQ ID NO: 40893 - DNA, 6 bp, Unknown
  misc_feature (1)..( 6): Matrix.001 file - promoters60/1009752
atttaa

SEQ ID NO: 40894 - DNA, 6 bp, Unknown
  misc_feature (1)..( 6): Matrix.001 file - promoters60/1009752
taatta

SEQ ID NO: 40895 - DNA, 7 bp, Unknown
  misc_feature (1)..( 7): Matrix.001 file - promoters60/1009752
gataata

SEQ ID NO: 40896 - DNA, 7 bp, Unknown
  misc_feature (1)..( 7): Matrix.001 file - promoters60/1009752
ttaaaaa

SEQ ID NO: 40897 - DNA, 6 bp, Unknown
  misc_feature (1)..( 6): Matrix.001 file - promoters60/1009752
aataaa

SEQ ID NO: 40898 - DNA, 7 bp, Unknown
  misc_feature (1)..( 7): Matrix.001 file - promoters60/1009752
tcctata

SEQ ID NO: 40899 - DNA, 9 bp, Unknown
  misc_feature (1)..( 9): Matrix.001 file - promoters60/1009834
aagaaaaga

SEQ ID NO: 40900 - DNA, 7 bp, Unknown
  misc_feature (1)..( 7): Matrix.001 file - promoters60/1009834
tttattc

SEQ ID NO: 40901 - DNA, 11 bp, Unknown
  misc_feature (1)..( 11): Matrix.001 file - promoters60/1009834
atattttggag

SEQ ID NO: 40902 - DNA, 7 bp, Unknown
  misc_feature (1)..( 7): Matrix.001 file - promoters60/1009834
ttcatta

SEQ ID NO: 40903 - DNA, 7 bp, Unknown
  misc_feature (1)..( 7): Matrix.001 file - promoters60/1009834
aaaaatt

SEQ ID NO: 40904 - DNA, 9 bp, Unknown
  misc_feature (1)..( 9): Matrix.001 file - promoters60/1009834
aaaaaaagt

SEQ ID NO: 40905 - DNA, 7 bp, Unknown
  misc_feature (1)..( 7): Matrix.001 file - promoters60/1009834
gaaacaa

SEQ ID NO: 40906 - DNA, 8 bp, Unknown
  misc_feature (1)..( 8): Matrix.001 file - promoters60/1009834
ttacaata

SEQ ID NO: 40907 - DNA, 9 bp, Unknown
  misc_feature (1)..( 9): Matrix.001 file - promoters60/1009834
attcgtttt

SEQ ID NO: 40908 - DNA, 7 bp, Unknown
  misc_feature (1)..( 7): Matrix.001 file - promoters60/1009834
tcccatt

SEQ ID NO: 40909 - DNA, 7 bp, Unknown
  misc_feature (1)..( 7): Matrix.001 file - promoters60/1009834
attgttt

SEQ ID NO: 40910 - DNA, 6 bp, Unknown
  misc_feature (1)..( 6): Matrix.001 file - promoters60/1009834
tattaa

SEQ ID NO: 40911 - DNA, 6 bp, Unknown
  misc_feature (1)..( 6): Matrix.001 file - promoters60/1009834
taatat

SEQ ID NO: 40912 - DNA, 13 bp, Unknown
  misc_feature (1)..( 13): Matrix.001 file - promoters60/1009854
attcataaaaaaa

SEQ ID NO: 40913 - DNA, 8 bp, Unknown
  misc_feature (1)..( 8): Matrix.001 file - promoters60/1009854
gaaaaaat

SEQ ID NO: 40914 - DNA, 12 bp, Unknown
  misc_feature (1)..( 12): Matrix.001 file - promoters60/1009854
aactaatgcaat

SEQ ID NO: 40915 - DNA, 11 bp, Unknown
  misc_feature (1)..( 11): Matrix.001 file - promoters60/1009854
atttctaaaaa

SEQ ID NO: 40916 - DNA, 10 bp, Unknown
  misc_feature (1)..( 10): Matrix.001 file - promoters60/1009854
aaagaaaaca

SEQ ID NO: 40917 - DNA, 9 bp, Unknown
  misc_feature (1)..( 9): Matrix.001 file - promoters60/1009854
caaaacaaa

SEQ ID NO: 40918 - DNA, 7 bp, Unknown
  misc_feature (1)..( 7): Matrix.001 file - promoters60/1009854
aattttg

SEQ ID NO: 40919 - DNA, 9 bp, Unknown
  misc_feature (1)..( 9): Matrix.001 file - promoters60/1009854
ttttgttta

SEQ ID NO: 40920 - DNA, 8 bp, Unknown
  misc_feature (1)..( 8): Matrix.001 file - promoters60/1009854
ttgagatc

SEQ ID NO: 40921 - DNA, 9 bp, Unknown
  misc_feature (1)..( 9): Matrix.001 file - promoters60/1009854
gaaatgaag

SEQ ID NO: 40922 - DNA, 8 bp, Unknown
  misc_feature (1)..( 8): Matrix.001 file - promoters60/1009854
aaaaatat

SEQ ID NO: 40923 - DNA, 12 bp, Unknown
  misc_feature (1)..( 12): Matrix.001 file - promoters60/1009854
ttttattaaaat

SEQ ID NO: 40924 - DNA, 9 bp, Unknown
  misc_feature (1)..( 9): Matrix.001 file - promoters60/1009854
ctttcacaa

SEQ ID NO: 40925 - DNA, 10 bp, Unknown
  misc_feature (1)..( 10): Matrix.001 file - promoters60/1009854
aaaataaatt

SEQ ID NO: 40926 - DNA, 7 bp, Unknown
  misc_feature (1)..( 7): Matrix.001 file - promoters60/1009854
ctataaa

SEQ ID NO: 40927 - DNA, 6 bp, Unknown
  misc_feature (1)..( 6): Matrix.001 file - promoters60/1009861
aaagaa

SEQ ID NO: 40928 - DNA, 8 bp, Unknown
  misc_feature (1)..( 8): Matrix.001 file - promoters60/1009861
attttaat

SEQ ID NO: 40929 - DNA, 6 bp, Unknown
  misc_feature (1)..( 6): Matrix.001 file - promoters60/1009861
aaccaa

SEQ ID NO: 40930 - DNA, 6 bp, Unknown
  misc_feature (1)..( 6): Matrix.001 file - promoters60/1009861
aaaatt

SEQ ID NO: 40931 - DNA, 9 bp, Unknown
  misc_feature (1)..( 9): Matrix.001 file - promoters60/1009861
ttcaaattc

SEQ ID NO: 40932 - DNA, 8 bp, Unknown
  misc_feature (1)..( 8): Matrix.001 file - promoters60/1009861
ttagctgg

SEQ ID NO: 40933 - DNA, 9 bp, Unknown
  misc_feature (1)..( 9): Matrix.001 file - promoters60/1009861
agtacaatg

SEQ ID NO: 40934 - DNA, 6 bp, Unknown
  misc_feature (1)..( 6): Matrix.001 file - promoters60/1009861
gaacat

SEQ ID NO: 40935 - DNA, 6 bp, Unknown
  misc_feature (1)..( 6): Matrix.001 file - promoters60/1009861
ttattt

SEQ ID NO: 40936 - DNA, 6 bp, Unknown
  misc_feature (1)..( 6): Matrix.001 file - promoters60/1009861
tctttt

SEQ ID NO: 40937 - DNA, 10 bp, Unknown
  misc_feature (1)..( 10): Matrix.001 file - promoters60/1009861
ttttaattaa

SEQ ID NO: 40938 - DNA, 6 bp, Unknown
  misc_feature (1)..( 6): Matrix.001 file - promoters60/1009861
aatttc

SEQ ID NO: 40939 - DNA, 8 bp, Unknown
  misc_feature (1)..( 8): Matrix.001 file - promoters60/1009861
aaaatttc

SEQ ID NO: 40940 - DNA, 7 bp, Unknown
  misc_feature (1)..( 7): Matrix.001 file - promoters60/1009861
tttaata

SEQ ID NO: 40941 - DNA, 7 bp, Unknown
  misc_feature (1)..( 7): Matrix.001 file - promoters60/1009861
caaaaac

SEQ ID NO: 40942 - DNA, 8 bp, Unknown
  misc_feature (1)..( 8): Matrix.001 file - promoters60/1009861
aaaagcgc

SEQ ID NO: 40943 - DNA, 8 bp, Unknown
  misc_feature (1)..( 8): Matrix.001 file - promoters60/1009861
tatacata

SEQ ID NO: 40944 - DNA, 7 bp, Unknown
  misc_feature (1)..( 7): Matrix.001 file - promoters60/1009861
aaccgaa

SEQ ID NO: 40945 - DNA, 6 bp, Unknown
  misc_feature (1)..( 6): Matrix.001 file - promoters60/1009861
aatttt

SEQ ID NO: 40946 - DNA, 7 bp, Unknown
  misc_feature (1)..( 7): Matrix.001 file - promoters60/1009861
cataaac

SEQ ID NO: 40947 - DNA, 6 bp, Unknown
  misc_feature (1)..( 6): Matrix.001 file - promoters60/1009861
ctcctt

SEQ ID NO: 40948 - DNA, 9 bp, Unknown
  misc_feature (1)..( 9): Matrix.001 file - promoters60/1009861
tttcaattt

SEQ ID NO: 40949 - DNA, 7 bp, Unknown
  misc_feature (1)..( 7): Matrix.001 file - promoters60/1009861
tttctct

SEQ ID NO: 40950 - DNA, 6 bp, Unknown
  misc_feature (1)..( 6): Matrix.001 file - promoters60/1009861
taacat

SEQ ID NO: 40951 - DNA, 6 bp, Unknown
  misc_feature (1)..( 6): Matrix.001 file - promoters60/1009861
ttttta

SEQ ID NO: 40952 - DNA, 6 bp, Unknown
  misc_feature (1)..( 6): Matrix.001 file - promoters60/1009861
ataata

SEQ ID NO: 40953 - DNA, 8 bp, Unknown
  misc_feature (1)..( 8): Matrix.001 file - promoters60/1009861
catatata

SEQ ID NO: 40954 - DNA, 9 bp, Unknown
  misc_feature (1)..( 9): Matrix.001 file - promoters60/1009930
tcatatctg

SEQ ID NO: 40955 - DNA, 8 bp, Unknown
  misc_feature (1)..( 8): Matrix.001 file - promoters60/1009930
tttaaatt

SEQ ID NO: 40956 - DNA, 9 bp, Unknown
  misc_feature (1)..( 9): Matrix.001 file - promoters60/1009930
aatttattt

SEQ ID NO: 40957 - DNA, 9 bp, Unknown
  misc_feature (1)..( 9): Matrix.001 file - promoters60/1009930
ttacattag

SEQ ID NO: 40958 - DNA, 8 bp, Unknown
  misc_feature (1)..( 8): Matrix.001 file - promoters60/1009930
ttatgatc

SEQ ID NO: 40959 - DNA, 7 bp, Unknown
  misc_feature (1)..( 7): Matrix.001 file - promoters60/1009930
aaacact

SEQ ID NO: 40960 - DNA, 6 bp, Unknown
  misc_feature (1)..( 6): Matrix.001 file - promoters60/1009930
caaata

SEQ ID NO: 40961 - DNA, 9 bp, Unknown
  misc_feature (1)..( 9): Matrix.001 file - promoters60/1009941
tcttcttta

SEQ ID NO: 40962 - DNA, 13 bp, Unknown
  misc_feature (1)..( 13): Matrix.001 file - promoters60/1009941
caaagtatatata

SEQ ID NO: 40963 - DNA, 8 bp, Unknown
  misc_feature (1)..( 8): Matrix.001 file - promoters60/1009941
tagtatat

SEQ ID NO: 40964 - DNA, 8 bp, Unknown
  misc_feature (1)..( 8): Matrix.001 file - promoters60/1009941
agttttct

SEQ ID NO: 40965 - DNA, 12 bp, Unknown
  misc_feature (1)..( 12): Matrix.001 file - promoters60/1009941
aaaaattaataa

SEQ ID NO: 40966 - DNA, 13 bp, Unknown
  misc_feature (1)..( 13): Matrix.001 file - promoters60/1009941
aaaagattattga

SEQ ID NO: 40967 - DNA, 6 bp, Unknown
  misc_feature (1)..( 6): Matrix.001 file - promoters60/1009999
ttgttt

SEQ ID NO: 40968 - DNA, 6 bp, Unknown
  misc_feature (1)..( 6): Matrix.001 file - promoters60/1009999
tatttt

SEQ ID NO: 40969 - DNA, 7 bp, Unknown
  misc_feature (1)..( 7): Matrix.001 file - promoters60/1009999
tttactt

SEQ ID NO: 40970 - DNA, 6 bp, Unknown
  misc_feature (1)..( 6): Matrix.001 file - promoters60/1009999
aaaaga

SEQ ID NO: 40971 - DNA, 6 bp, Unknown
  misc_feature (1)..( 6): Matrix.001 file - promoters60/1009999
aataaa

SEQ ID NO: 40972 - DNA, 7 bp, Unknown
  misc_feature (1)..( 7): Matrix.001 file - promoters60/1009999
ttcctcc

SEQ ID NO: 40973 - DNA, 10 bp, Unknown
  misc_feature (1)..( 10): Matrix.001 file - promoters60/1009999
gtaaaaattt

SEQ ID NO: 40974 - DNA, 7 bp, Unknown
  misc_feature (1)..( 7): Matrix.001 file - promoters60/1009999
ttgctca

SEQ ID NO: 40975 - DNA, 7 bp, Unknown
  misc_feature (1)..( 7): Matrix.001 file - promoters60/1009999
ccactaa

SEQ ID NO: 40976 - DNA, 6 bp, Unknown
  misc_feature (1)..( 6): Matrix.001 file - promoters60/1009999
ataaaa

SEQ ID NO: 40977 - DNA, 8 bp, Unknown
  misc_feature (1)..( 8): Matrix.001 file - promoters60/1009999
tttatttt

SEQ ID NO: 40978 - DNA, 6 bp, Unknown
  misc_feature (1)..( 6): Matrix.001 file - promoters60/1009999
tttact

SEQ ID NO: 40979 - DNA, 9 bp, Unknown
  misc_feature (1)..( 9): Matrix.001 file - promoters60/1009999
cttagtttt

SEQ ID NO: 40980 - DNA, 8 bp, Unknown
  misc_feature (1)..( 8): Matrix.001 file - promoters60/1009999
tttgtttg

SEQ ID NO: 40981 - DNA, 6 bp, Unknown
  misc_feature (1)..( 6): Matrix.001 file - promoters60/1009999
aagttt

SEQ ID NO: 40982 - DNA, 10 bp, Unknown
  misc_feature (1)..( 10): Matrix.001 file - promoters60/1009999
caaactaatt

SEQ ID NO: 40983 - DNA, 7 bp, Unknown
  misc_feature (1)..( 7): Matrix.001 file - promoters60/1009999
attagaa

SEQ ID NO: 40984 - DNA, 8 bp, Unknown
  misc_feature (1)..( 8): Matrix.001 file - promoters60/1009999
aacaaaat

SEQ ID NO: 40985 - DNA, 7 bp, Unknown
  misc_feature (1)..( 7): Matrix.001 file - promoters60/1010019
caaaaac

SEQ ID NO: 40986 - DNA, 9 bp, Unknown
  misc_feature (1)..( 9): Matrix.001 file - promoters60/1010025
agattttct

SEQ ID NO: 40987 - DNA, 6 bp, Unknown
  misc_feature (1)..( 6): Matrix.001 file - promoters60/1010025
aaaaac

SEQ ID NO: 40988 - DNA, 9 bp, Unknown
  misc_feature (1)..( 9): Matrix.001 file - promoters60/1010025
tgaaaaaaa

SEQ ID NO: 40989 - DNA, 11 bp, Unknown
  misc_feature (1)..( 11): Matrix.001 file - promoters60/1010025
atttatttgtg

SEQ ID NO: 40990 - DNA, 8 bp, Unknown
  misc_feature (1)..( 8): Matrix.001 file - promoters60/1010025
atgtacta

SEQ ID NO: 40991 - DNA, 9 bp, Unknown
  misc_feature (1)..( 9): Matrix.001 file - promoters60/1010025
aaaatttgt

SEQ ID NO: 40992 - DNA, 10 bp, Unknown
  misc_feature (1)..( 10): Matrix.001 file - promoters60/1010055
tgtaaaaaaa

SEQ ID NO: 40993 - DNA, 13 bp, Unknown
  misc_feature (1)..( 13): Matrix.001 file - promoters60/1010055
atataattatttt

SEQ ID NO: 40994 - DNA, 9 bp, Unknown
  misc_feature (1)..( 9): Matrix.001 file - promoters60/1010055
aatgaaaat

SEQ ID NO: 40995 - DNA, 10 bp, Unknown
  misc_feature (1)..( 10): Matrix.001 file - promoters60/1010055
aagaaaaaat

SEQ ID NO: 40996 - DNA, 8 bp, Unknown
  misc_feature (1)..( 8): Matrix.001 file - promoters60/1010055
atttattt

SEQ ID NO: 40997 - DNA, 8 bp, Unknown
  misc_feature (1)..( 8): Matrix.001 file - promoters60/1010065
tatacata

SEQ ID NO: 40998 - DNA, 9 bp, Unknown
  misc_feature (1)..( 9): Matrix.001 file - promoters60/1010065
tcgaaatag

SEQ ID NO: 40999 - DNA, 9 bp, Unknown
  misc_feature (1)..( 9): Matrix.001 file - promoters60/1010065
gcgcaatta

SEQ ID NO: 41000 - DNA, 6 bp, Unknown
  misc_feature (1)..( 6): Matrix.001 file - promoters60/1010065
taaaca

SEQ ID NO: 41001 - DNA, 8 bp, Unknown
  misc_feature (1)..( 8): Matrix.001 file - promoters60/1010065
attattta

SEQ ID NO: 41002 - DNA, 6 bp, Unknown
  misc_feature (1)..( 6): Matrix.001 file - promoters60/1010065
tttctc

SEQ ID NO: 41003 - DNA, 6 bp, Unknown
  misc_feature (1)..( 6): Matrix.001 file - promoters60/1010065
aatttt

SEQ ID NO: 41004 - DNA, 7 bp, Unknown
  misc_feature (1)..( 7): Matrix.001 file - promoters60/1010065
atacata

SEQ ID NO: 41005 - DNA, 8 bp, Unknown
  misc_feature (1)..( 8): Matrix.001 file - promoters60/1010065
acatacat

SEQ ID NO: 41006 - DNA, 7 bp, Unknown
  misc_feature (1)..( 7): Matrix.001 file - promoters60/1010065
atactag

SEQ ID NO: 41007 - DNA, 7 bp, Unknown
  misc_feature (1)..( 7): Matrix.001 file - promoters60/1010065
catctat

SEQ ID NO: 41008 - DNA, 7 bp, Unknown
  misc_feature (1)..( 7): Matrix.001 file - promoters60/1010065
acatttc

SEQ ID NO: 41009 - DNA, 7 bp, Unknown
  misc_feature (1)..( 7): Matrix.001 file - promoters60/1010065
tcacata

SEQ ID NO: 41010 - DNA, 6 bp, Unknown
  misc_feature (1)..( 6): Matrix.001 file - promoters60/1010065
atttat

SEQ ID NO: 41011 - DNA, 6 bp, Unknown
  misc_feature (1)..( 6): Matrix.001 file - promoters60/1010065
taataa

SEQ ID NO: 41012 - DNA, 6 bp, Unknown
  misc_feature (1)..( 6): Matrix.001 file - promoters60/1010065
tcgatc

SEQ ID NO: 41013 - DNA, 6 bp, Unknown
  misc_feature (1)..( 6): Matrix.001 file - promoters60/1010065
tagatt

SEQ ID NO: 41014 - DNA, 6 bp, Unknown
  misc_feature (1)..( 6): Matrix.001 file - promoters60/1010115
ttgttt

SEQ ID NO: 41015 - DNA, 9 bp, Unknown
  misc_feature (1)..( 9): Matrix.001 file - promoters60/1010115
ttgataatt

SEQ ID NO: 41016 - DNA, 6 bp, Unknown
  misc_feature (1)..( 6): Matrix.001 file - promoters60/1010140
atagaa

SEQ ID NO: 41017 - DNA, 7 bp, Unknown
  misc_feature (1)..( 7): Matrix.001 file - promoters60/1010140
aacaaca

SEQ ID NO: 41018 - DNA, 6 bp, Unknown
  misc_feature (1)..( 6): Matrix.001 file - promoters60/1010140
ttgaat

SEQ ID NO: 41019 - DNA, 6 bp, Unknown
  misc_feature (1)..( 6): Matrix.001 file - promoters60/1010140
acaaag

SEQ ID NO: 41020 - DNA, 7 bp, Unknown
  misc_feature (1)..( 7): Matrix.001 file - promoters60/1010140
ctgattc

SEQ ID NO: 41021 - DNA, 9 bp, Unknown
  misc_feature (1)..( 9): Matrix.001 file - promoters60/1010140
ttttttttt

SEQ ID NO: 41022 - DNA, 9 bp, Unknown
  misc_feature (1)..( 9): Matrix.001 file - promoters60/1010140
gaagaaaat

SEQ ID NO: 41023 - DNA, 8 bp, Unknown
  misc_feature (1)..( 8): Matrix.001 file - promoters60/1010140
aaaagttt

SEQ ID NO: 41024 - DNA, 8 bp, Unknown
  misc_feature (1)..( 8): Matrix.001 file - promoters60/1010140
attgaaca

SEQ ID NO: 41025 - DNA, 6 bp, Unknown
  misc_feature (1)..( 6): Matrix.001 file - promoters60/1010140
accaac

SEQ ID NO: 41026 - DNA, 6 bp, Unknown
  misc_feature (1)..( 6): Matrix.001 file - promoters60/1010140
ataatc

SEQ ID NO: 41027 - DNA, 6 bp, Unknown
  misc_feature (1)..( 6): Matrix.001 file - promoters60/1010140
actaac

SEQ ID NO: 41028 - DNA, 8 bp, Unknown
  misc_feature (1)..( 8): Matrix.001 file - promoters60/1010140
ataactct

SEQ ID NO: 41029 - DNA, 7 bp, Unknown
  misc_feature (1)..( 7): Matrix.001 file - promoters60/1010140
aaacaca

SEQ ID NO: 41030 - DNA, 10 bp, Unknown
  misc_feature (1)..( 10): Matrix.001 file - promoters60/1010140
aatgaacata

SEQ ID NO: 41031 - DNA, 6 bp, Unknown
  misc_feature (1)..( 6): Matrix.001 file - promoters60/1010140
atataa

SEQ ID NO: 41032 - DNA, 8 bp, Unknown
  misc_feature (1)..( 8): Matrix.001 file - promoters60/1010140
agtattaa

SEQ ID NO: 41033 - DNA, 6 bp, Unknown
  misc_feature (1)..( 6): Matrix.001 file - promoters60/1010140
tcatta

SEQ ID NO: 41034 - DNA, 8 bp, Unknown
  misc_feature (1)..( 8): Matrix.001 file - promoters60/1010140
tttcaaat

SEQ ID NO: 41035 - DNA, 8 bp, Unknown
  misc_feature (1)..( 8): Matrix.001 file - promoters60/1010140
gttatttt

SEQ ID NO: 41036 - DNA, 7 bp, Unknown
  misc_feature (1)..( 7): Matrix.001 file - promoters60/1010140
actcaat

SEQ ID NO: 41037 - DNA, 8 bp, Unknown
  misc_feature (1)..( 8): Matrix.001 file - promoters60/1010140
tttataaa

SEQ ID NO: 41038 - DNA, 9 bp, Unknown
  misc_feature (1)..( 9): Matrix.001 file - promoters60/1010209
acacacatg

SEQ ID NO: 41039 - DNA, 13 bp, Unknown
  misc_feature (1)..( 13): Matrix.001 file - promoters60/1010209
aaacaaatttatt

SEQ ID NO: 41040 - DNA, 8 bp, Unknown
  misc_feature (1)..( 8): Matrix.001 file - promoters60/1010346
atttttac

SEQ ID NO: 41041 - DNA, 8 bp, Unknown
  misc_feature (1)..( 8): Matrix.001 file - promoters60/1010346
tttgccag

SEQ ID NO: 41042 - DNA, 10 bp, Unknown
  misc_feature (1)..( 10): Matrix.001 file - promoters60/1010346
tataaaaaat

SEQ ID NO: 41043 - DNA, 7 bp, Unknown
  misc_feature (1)..( 7): Matrix.001 file - promoters60/1010346
tataaaa

SEQ ID NO: 41044 - DNA, 7 bp, Unknown
  misc_feature (1)..( 7): Matrix.001 file - promoters60/1010346
ccaaatt

SEQ ID NO: 41045 - DNA, 8 bp, Unknown
  misc_feature (1)..( 8): Matrix.001 file - promoters60/1010346
tattttaa

SEQ ID NO: 41046 - DNA, 9 bp, Unknown
  misc_feature (1)..( 9): Matrix.001 file - promoters60/1010346
attgaattt

SEQ ID NO: 41047 - DNA, 7 bp, Unknown
  misc_feature (1)..( 7): Matrix.001 file - promoters60/1010367
aaaattt

SEQ ID NO: 41048 - DNA, 9 bp, Unknown
  misc_feature (1)..( 9): Matrix.001 file - promoters60/1010367
aaaacaaat

SEQ ID NO: 41049 - DNA, 12 bp, Unknown
  misc_feature (1)..( 12): Matrix.001 file - promoters60/1010367
tatttgaataaa

SEQ ID NO: 41050 - DNA, 11 bp, Unknown
  misc_feature (1)..( 11): Matrix.001 file - promoters60/1010367
aaatacaaaaa

SEQ ID NO: 41051 - DNA, 11 bp, Unknown
  misc_feature (1)..( 11): Matrix.001 file - promoters60/1010367
aaaatgaatta

SEQ ID NO: 41052 - DNA, 8 bp, Unknown
  misc_feature (1)..( 8): Matrix.001 file - promoters60/1010367
tatatata

SEQ ID NO: 41053 - DNA, 10 bp, Unknown
  misc_feature (1)..( 10): Matrix.001 file - promoters60/1010367
ttttattttc

SEQ ID NO: 41054 - DNA, 7 bp, Unknown
  misc_feature (1)..( 7): Matrix.001 file - promoters60/1010367
aaaaatt

SEQ ID NO: 41055 - DNA, 8 bp, Unknown
  misc_feature (1)..( 8): Matrix.001 file - promoters60/1010373
cttttttt

SEQ ID NO: 41056 - DNA, 10 bp, Unknown
  misc_feature (1)..( 10): Matrix.001 file - promoters60/1010373
ataatttaca

SEQ ID NO: 41057 - DNA, 9 bp, Unknown
  misc_feature (1)..( 9): Matrix.001 file - promoters60/1010373
cttctttaa

SEQ ID NO: 41058 - DNA, 9 bp, Unknown
  misc_feature (1)..( 9): Matrix.001 file - promoters60/1010373
attttataa

SEQ ID NO: 41059 - DNA, 9 bp, Unknown
  misc_feature (1)..( 9): Matrix.001 file - promoters60/1010385
ctgaagttt

SEQ ID NO: 41060 - DNA, 16 bp, Unknown
  misc_feature (1)..( 16): Matrix.001 file - promoters60/1010385
aaataggcccattata

SEQ ID NO: 41061 - DNA, 8 bp, Unknown
  misc_feature (1)..( 8): Matrix.001 file - promoters60/1010411
aataattg

SEQ ID NO: 41062 - DNA, 9 bp, Unknown
  misc_feature (1)..( 9): Matrix.001 file - promoters60/1010411
tatgtttgc

SEQ ID NO: 41063 - DNA, 10 bp, Unknown
  misc_feature (1)..( 10): Matrix.001 file - promoters60/1010411
gtaattgatg

SEQ ID NO: 41064 - DNA, 8 bp, Unknown
  misc_feature (1)..( 8): Matrix.001 file - promoters60/1010411
aaagtgaa

SEQ ID NO: 41065 - DNA, 14 bp, Unknown
  misc_feature (1)..( 14): Matrix.001 file - promoters60/1010411
ttaataattttttt

SEQ ID NO: 41066 - DNA, 8 bp, Unknown
  misc_feature (1)..( 8): Matrix.001 file - promoters60/1010411
attactaa

SEQ ID NO: 41067 - DNA, 6 bp, Unknown
  misc_feature (1)..( 6): Matrix.001 file - promoters60/1010411
tatttt

SEQ ID NO: 41068 - DNA, 11 bp, Unknown
  misc_feature (1)..( 11): Matrix.001 file - promoters60/1010418
ccagaagagaa

SEQ ID NO: 41069 - DNA, 8 bp, Unknown
  misc_feature (1)..( 8): Matrix.001 file - promoters60/1010418
ggaaagaa

SEQ ID NO: 41070 - DNA, 7 bp, Unknown
  misc_feature (1)..( 7): Matrix.001 file - promoters60/1010418
tagtgat

SEQ ID NO: 41071 - DNA, 8 bp, Unknown
  misc_feature (1)..( 8): Matrix.001 file - promoters60/1010418
ggcctaat

SEQ ID NO: 41072 - DNA, 6 bp, Unknown
  misc_feature (1)..( 6): Matrix.001 file - promoters60/1010421
tgtggt

SEQ ID NO: 41073 - DNA, 11 bp, Unknown
  misc_feature (1)..( 11): Matrix.001 file - promoters60/1010421
cttaaataaat

SEQ ID NO: 41074 - DNA, 6 bp, Unknown
  misc_feature (1)..( 6): Matrix.001 file - promoters60/1010421
caagat

SEQ ID NO: 41075 - DNA, 7 bp, Unknown
  misc_feature (1)..( 7): Matrix.001 file - promoters60/1010421
aatattt

SEQ ID NO: 41076 - DNA, 9 bp, Unknown
  misc_feature (1)..( 9): Matrix.001 file - promoters60/1010421
ataacaaaa

SEQ ID NO: 41077 - DNA, 7 bp, Unknown
  misc_feature (1)..( 7): Matrix.001 file - promoters60/1010421
ccaaaaa

SEQ ID NO: 41078 - DNA, 13 bp, Unknown
  misc_feature (1)..( 13): Matrix.001 file - promoters60/1010421
aataacgtggtcc

SEQ ID NO: 41079 - DNA, 7 bp, Unknown
  misc_feature (1)..( 7): Matrix.001 file - promoters60/1010421
attcaaa

SEQ ID NO: 41080 - DNA, 8 bp, Unknown
  misc_feature (1)..( 8): Matrix.001 file - promoters60/1010421
tgataatc

SEQ ID NO: 41081 - DNA, 6 bp, Unknown
  misc_feature (1)..( 6): Matrix.001 file - promoters60/1010421
atatat

SEQ ID NO: 41082 - DNA, 7 bp, Unknown
  misc_feature (1)..( 7): Matrix.001 file - promoters60/1010421
ttacttt

SEQ ID NO: 41083 - DNA, 6 bp, Unknown
  misc_feature (1)..( 6): Matrix.001 file - promoters60/1010421
atttta

SEQ ID NO: 41084 - DNA, 7 bp, Unknown
  misc_feature (1)..( 7): Matrix.001 file - promoters60/1010421
atatata

SEQ ID NO: 41085 - DNA, 7 bp, Unknown
  misc_feature (1)..( 7): Matrix.001 file - promoters60/1010421
attattt

SEQ ID NO: 41086 - DNA, 7 bp, Unknown
  misc_feature (1)..( 7): Matrix.001 file - promoters60/1010421
tatgtat

SEQ ID NO: 41087 - DNA, 7 bp, Unknown
  misc_feature (1)..( 7): Matrix.001 file - promoters60/1010421
attaata

SEQ ID NO: 41088 - DNA, 7 bp, Unknown
  misc_feature (1)..( 7): Matrix.001 file - promoters60/1010421
aaggatg

SEQ ID NO: 41089 - DNA, 6 bp, Unknown
  misc_feature (1)..( 6): Matrix.001 file - promoters60/1010421
ccaact

SEQ ID NO: 41090 - DNA, 7 bp, Unknown
  misc_feature (1)..( 7): Matrix.001 file - promoters60/1010421
tataatt

SEQ ID NO: 41091 - DNA, 8 bp, Unknown
  misc_feature (1)..( 8): Matrix.001 file - promoters60/1010425
gaaaaaca

SEQ ID NO: 41092 - DNA, 8 bp, Unknown
  misc_feature (1)..( 8): Matrix.001 file - promoters60/1010425
aaattagg

SEQ ID NO: 41093 - DNA, 8 bp, Unknown
  misc_feature (1)..( 8): Matrix.001 file - promoters60/1010425
aaaaaccc

SEQ ID NO: 41094 - DNA, 10 bp, Unknown
  misc_feature (1)..( 10): Matrix.001 file - promoters60/1010429
gaaaaaataa

SEQ ID NO: 41095 - DNA, 9 bp, Unknown
  misc_feature (1)..( 9): Matrix.001 file - promoters60/1010429
aaataaaaa

SEQ ID NO: 41096 - DNA, 8 bp, Unknown
  misc_feature (1)..( 8): Matrix.001 file - promoters60/1010429
tttgttta

SEQ ID NO: 41097 - DNA, 11 bp, Unknown
  misc_feature (1)..( 11): Matrix.001 file - promoters60/1010429
ccaatatgttc

SEQ ID NO: 41098 - DNA, 11 bp, Unknown
  misc_feature (1)..( 11): Matrix.001 file - promoters60/1010429
aatatgtgttc

SEQ ID NO: 41099 - DNA, 10 bp, Unknown
  misc_feature (1)..( 10): Matrix.001 file - promoters60/1010429
ctatataaat

SEQ ID NO: 41100 - DNA, 9 bp, Unknown
  misc_feature (1)..( 9): Matrix.001 file - promoters60/1010431
gacacgtgg

SEQ ID NO: 41101 - DNA, 8 bp, Unknown
  misc_feature (1)..( 8): Matrix.001 file - promoters60/1010435
tcttcttc

SEQ ID NO: 41102 - DNA, 10 bp, Unknown
  misc_feature (1)..( 10): Matrix.001 file - promoters60/1010435
attatcaaag

SEQ ID NO: 41103 - DNA, 10 bp, Unknown
  misc_feature (1)..( 10): Matrix.001 file - promoters60/1010435
aatctgaatc

SEQ ID NO: 41104 - DNA, 9 bp, Unknown
  misc_feature (1)..( 9): Matrix.001 file - promoters60/1010449
attgtattt

SEQ ID NO: 41105 - DNA, 8 bp, Unknown
  misc_feature (1)..( 8): Matrix.001 file - promoters60/1010449
cacaataa

SEQ ID NO: 41106 - DNA, 11 bp, Unknown
  misc_feature (1)..( 11): Matrix.001 file - promoters60/1010491
tataaagaaaa

SEQ ID NO: 41107 - DNA, 7 bp, Unknown
  misc_feature (1)..( 7): Matrix.001 file - promoters60/1010524
taaaata

SEQ ID NO: 41108 - DNA, 6 bp, Unknown
  misc_feature (1)..( 6): Matrix.001 file - promoters60/1010524
atcaaa

SEQ ID NO: 41109 - DNA, 7 bp, Unknown
  misc_feature (1)..( 7): Matrix.001 file - promoters60/1010524
aacaaat

SEQ ID NO: 41110 - DNA, 10 bp, Unknown
  misc_feature (1)..( 10): Matrix.001 file - promoters60/1010524
tattttgaaa

SEQ ID NO: 41111 - DNA, 10 bp, Unknown
  misc_feature (1)..( 10): Matrix.001 file - promoters60/1010524
gaatattttt

SEQ ID NO: 41112 - DNA, 7 bp, Unknown
  misc_feature (1)..( 7): Matrix.001 file - promoters60/1010524
attattt

SEQ ID NO: 41113 - DNA, 6 bp, Unknown
  misc_feature (1)..( 6): Matrix.001 file - promoters60/1010524
atttgg

SEQ ID NO: 41114 - DNA, 6 bp, Unknown
  misc_feature (1)..( 6): Matrix.001 file - promoters60/1010524
tttggt

SEQ ID NO: 41115 - DNA, 8 bp, Unknown
  misc_feature (1)..( 8): Matrix.001 file - promoters60/1010524
aaaacccc

SEQ ID NO: 41116 - DNA, 6 bp, Unknown
  misc_feature (1)..( 6): Matrix.001 file - promoters60/1010524
actttt

SEQ ID NO: 41117 - DNA, 6 bp, Unknown
  misc_feature (1)..( 6): Matrix.001 file - promoters60/1010524
atcaaa

SEQ ID NO: 41118 - DNA, 9 bp, Unknown
  misc_feature (1)..( 9): Matrix.001 file - promoters60/1010524
acaaacgtt

SEQ ID NO: 41119 - DNA, 8 bp, Unknown
  misc_feature (1)..( 8): Matrix.001 file - promoters60/1010524
cgtagcta

SEQ ID NO: 41120 - DNA, 7 bp, Unknown
  misc_feature (1)..( 7): Matrix.001 file - promoters60/1010524
tccattt

SEQ ID NO: 41121 - DNA, 8 bp, Unknown
  misc_feature (1)..( 8): Matrix.001 file - promoters60/1010524
atattttg

SEQ ID NO: 41122 - DNA, 6 bp, Unknown
  misc_feature (1)..( 6): Matrix.001 file - promoters60/1010524
ttttac

SEQ ID NO: 41123 - DNA, 12 bp, Unknown
  misc_feature (1)..( 12): Matrix.001 file - promoters60/1010524
tacatattatat

SEQ ID NO: 41124 - DNA, 7 bp, Unknown
  misc_feature (1)..( 7): Matrix.001 file - promoters60/1010524
ttcgttt

SEQ ID NO: 41125 - DNA, 6 bp, Unknown
  misc_feature (1)..( 6): Matrix.001 file - promoters60/1010524
tacttg

SEQ ID NO: 41126 - DNA, 6 bp, Unknown
  misc_feature (1)..( 6): Matrix.001 file - promoters60/1010524
gaaaag

SEQ ID NO: 41127 - DNA, 8 bp, Unknown
  misc_feature (1)..( 8): Matrix.001 file - promoters60/1010536
gtgtctga

SEQ ID NO: 41128 - DNA, 7 bp, Unknown
  misc_feature (1)..( 7): Matrix.001 file - promoters60/1010536
tccaaaa

SEQ ID NO: 41129 - DNA, 6 bp, Unknown
  misc_feature (1)..( 6): Matrix.001 file - promoters60/1010536
ctccat

SEQ ID NO: 41130 - DNA, 6 bp, Unknown
  misc_feature (1)..( 6): Matrix.001 file - promoters60/1010536
tagaga

SEQ ID NO: 41131 - DNA, 8 bp, Unknown
  misc_feature (1)..( 8): Matrix.001 file - promoters60/1010536
ggcaaaac

SEQ ID NO: 41132 - DNA, 6 bp, Unknown
  misc_feature (1)..( 6): Matrix.001 file - promoters60/1010536
aatctc

SEQ ID NO: 41133 - DNA, 8 bp, Unknown
  misc_feature (1)..( 8): Matrix.001 file - promoters60/1010536
tttaatta

SEQ ID NO: 41134 - DNA, 7 bp, Unknown
  misc_feature (1)..( 7): Matrix.001 file - promoters60/1010536
taacatt

SEQ ID NO: 41135 - DNA, 6 bp, Unknown
  misc_feature (1)..( 6): Matrix.001 file - promoters60/1010536
aaaata

SEQ ID NO: 41136 - DNA, 7 bp, Unknown
  misc_feature (1)..( 7): Matrix.001 file - promoters60/1010536
caaattt

SEQ ID NO: 41137 - DNA, 6 bp, Unknown
  misc_feature (1)..( 6): Matrix.001 file - promoters60/1010536
aaaata

SEQ ID NO: 41138 - DNA, 7 bp, Unknown
  misc_feature (1)..( 7): Matrix.001 file - promoters60/1010536
tatgtaa

SEQ ID NO: 41139 - DNA, 8 bp, Unknown
  misc_feature (1)..( 8): Matrix.001 file - promoters60/1010536
aataatta

SEQ ID NO: 41140 - DNA, 7 bp, Unknown
  misc_feature (1)..( 7): Matrix.001 file - promoters60/1010536
attcaat

SEQ ID NO: 41141 - DNA, 6 bp, Unknown
  misc_feature (1)..( 6): Matrix.001 file - promoters60/1010536
ttaata

SEQ ID NO: 41142 - DNA, 6 bp, Unknown
  misc_feature (1)..( 6): Matrix.001 file - promoters60/1010536
aaatag

SEQ ID NO: 41143 - DNA, 8 bp, Unknown
  misc_feature (1)..( 8): Matrix.001 file - promoters60/1010536
ttaatttt

SEQ ID NO: 41144 - DNA, 6 bp, Unknown
  misc_feature (1)..( 6): Matrix.001 file - promoters60/1010536
gacaaa

SEQ ID NO: 41145 - DNA, 6 bp, Unknown
  misc_feature (1)..( 6): Matrix.001 file - promoters60/1010536
aaaaaa

SEQ ID NO: 41146 - DNA, 9 bp, Unknown
  misc_feature (1)..( 9): Matrix.001 file - promoters60/1010536
agtactctt

SEQ ID NO: 41147 - DNA, 6 bp, Unknown
  misc_feature (1)..( 6): Matrix.001 file - promoters60/1010536
aaagat

SEQ ID NO: 41148 - DNA, 9 bp, Unknown
  misc_feature (1)..( 9): Matrix.001 file - promoters60/1010536
ttaataatt

SEQ ID NO: 41149 - DNA, 6 bp, Unknown
  misc_feature (1)..( 6): Matrix.001 file - promoters60/1010536
ttttaa

SEQ ID NO: 41150 - DNA, 6 bp, Unknown
  misc_feature (1)..( 6): Matrix.001 file - promoters60/1010536
gaaaat

SEQ ID NO: 41151 - DNA, 7 bp, Unknown
  misc_feature (1)..( 7): Matrix.001 file - promoters60/1010562
aaataaa

SEQ ID NO: 41152 - DNA, 6 bp, Unknown
  misc_feature (1)..( 6): Matrix.001 file - promoters60/1010562
aattag

SEQ ID NO: 41153 - DNA, 8 bp, Unknown
  misc_feature (1)..( 8): Matrix.001 file - promoters60/1010562
tatctttc

SEQ ID NO: 41154 - DNA, 7 bp, Unknown
  misc_feature (1)..( 7): Matrix.001 file - promoters60/1010562
aaagatg

SEQ ID NO: 41155 - DNA, 7 bp, Unknown
  misc_feature (1)..( 7): Matrix.001 file - promoters60/1010562
caagtga

SEQ ID NO: 41156 - DNA, 6 bp, Unknown
  misc_feature (1)..( 6): Matrix.001 file - promoters60/1010562
aatcat

SEQ ID NO: 41157 - DNA, 6 bp, Unknown
  misc_feature (1)..( 6): Matrix.001 file - promoters60/1010562
cattat

SEQ ID NO: 41158 - DNA, 7 bp, Unknown
  misc_feature (1)..( 7): Matrix.001 file - promoters60/1010562
tcagatc

SEQ ID NO: 41159 - DNA, 7 bp, Unknown
  misc_feature (1)..( 7): Matrix.001 file - promoters60/1010562
caaaatc

SEQ ID NO: 41160 - DNA, 9 bp, Unknown
  misc_feature (1)..( 9): Matrix.001 file - promoters60/1010562
ccaagaaat

SEQ ID NO: 41161 - DNA, 8 bp, Unknown
  misc_feature (1)..( 8): Matrix.001 file - promoters60/1010562
tttctttt

SEQ ID NO: 41162 - DNA, 6 bp, Unknown
  misc_feature (1)..( 6): Matrix.001 file - promoters60/1010562
tttgtt

SEQ ID NO: 41163 - DNA, 8 bp, Unknown
  misc_feature (1)..( 8): Matrix.001 file - promoters60/1010562
tattataa

SEQ ID NO: 41164 - DNA, 7 bp, Unknown
  misc_feature (1)..( 7): Matrix.001 file - promoters60/1010562
ctcgcat

SEQ ID NO: 41165 - DNA, 6 bp, Unknown
  misc_feature (1)..( 6): Matrix.001 file - promoters60/1010562
cattct

SEQ ID NO: 41166 - DNA, 7 bp, Unknown
  misc_feature (1)..( 7): Matrix.001 file - promoters60/1010562
tatggat

SEQ ID NO: 41167 - DNA, 9 bp, Unknown
  misc_feature (1)..( 9): Matrix.001 file - promoters60/1010562
ttagtatgg

SEQ ID NO: 41168 - DNA, 7 bp, Unknown
  misc_feature (1)..( 7): Matrix.001 file - promoters60/1010562
tttctac

SEQ ID NO: 41169 - DNA, 8 bp, Unknown
  misc_feature (1)..( 8): Matrix.001 file - promoters60/1010562
ctaaagaa

SEQ ID NO: 41170 - DNA, 6 bp, Unknown
  misc_feature (1)..( 6): Matrix.001 file - promoters60/1010562
cccacc

SEQ ID NO: 41171 - DNA, 11 bp, Unknown
  misc_feature (1)..( 11): Matrix.001 file - promoters60/1010571
ctaaattaata

SEQ ID NO: 41172 - DNA, 8 bp, Unknown
  misc_feature (1)..( 8): Matrix.001 file - promoters60/1010571
aatatata

SEQ ID NO: 41173 - DNA, 8 bp, Unknown
  misc_feature (1)..( 8): Matrix.001 file - promoters60/1010571
tataactt

SEQ ID NO: 41174 - DNA, 10 bp, Unknown
  misc_feature (1)..( 10): Matrix.001 file - promoters60/1010571
ttaccaattg

SEQ ID NO: 41175 - DNA, 6 bp, Unknown
  misc_feature (1)..( 6): Matrix.001 file - promoters60/1010571
aaatat

SEQ ID NO: 41176 - DNA, 6 bp, Unknown
  misc_feature (1)..( 6): Matrix.001 file - promoters60/1010571
ataatt

SEQ ID NO: 41177 - DNA, 15 bp, Unknown
  misc_feature (1)..( 15): Matrix.001 file - promoters60/1010571
aaggatgatggacca

SEQ ID NO: 41178 - DNA, 15 bp, Unknown
  misc_feature (1)..( 15): Matrix.001 file - promoters60/1010571
tacacattaataacg

SEQ ID NO: 41179 - DNA, 29 bp, Unknown
  misc_feature (1)..( 29): Matrix.001 file - promoters60/1010571
tttaccaaataaagaaaatacatttctat

SEQ ID NO: 41180 - DNA, 6 bp, Unknown
  misc_feature (1)..( 6): Matrix.001 file - promoters60/1010571
tggttt

SEQ ID NO: 41181 - DNA, 6 bp, Unknown
  misc_feature (1)..( 6): Matrix.001 file - promoters60/1010571
caaaac

SEQ ID NO: 41182 - DNA, 11 bp, Unknown
  misc_feature (1)..( 11): Matrix.001 file - promoters60/1010571
attctcttatt

SEQ ID NO: 41183 - DNA, 6 bp, Unknown
  misc_feature (1)..( 6): Matrix.001 file - promoters60/1010571
tgtttt

SEQ ID NO: 41184 - DNA, 7 bp, Unknown
  misc_feature (1)..( 7): Matrix.001 file - promoters60/1010571
caaaaaa

SEQ ID NO: 41185 - DNA, 7 bp, Unknown
  misc_feature (1)..( 7): Matrix.001 file - promoters60/1010571
aatgttt

SEQ ID NO: 41186 - DNA, 6 bp, Unknown
  misc_feature (1)..( 6): Matrix.001 file - promoters60/1010571
ttttat

SEQ ID NO: 41187 - DNA, 8 bp, Unknown
  misc_feature (1)..( 8): Matrix.001 file - promoters60/1010636
gcttggat

SEQ ID NO: 41188 - DNA, 8 bp, Unknown
  misc_feature (1)..( 8): Matrix.001 file - promoters60/1010636
cgaaagtt

SEQ ID NO: 41189 - DNA, 10 bp, Unknown
  misc_feature (1)..( 10): Matrix.001 file - promoters60/1010636
tttaaaccct

SEQ ID NO: 41190 - DNA, 8 bp, Unknown
  misc_feature (1)..( 8): Matrix.001 file - promoters60/1010636
gtggcatt

SEQ ID NO: 41191 - DNA, 7 bp, Unknown
  misc_feature (1)..( 7): Matrix.001 file - promoters60/1010636
ttttcta

SEQ ID NO: 41192 - DNA, 6 bp, Unknown
  misc_feature (1)..( 6): Matrix.001 file - promoters60/1010693
taattc

SEQ ID NO: 41193 - DNA, 9 bp, Unknown
  misc_feature (1)..( 9): Matrix.001 file - promoters60/1010693
gaagctttt

SEQ ID NO: 41194 - DNA, 6 bp, Unknown
  misc_feature (1)..( 6): Matrix.001 file - promoters60/1010693
ttttaa

SEQ ID NO: 41195 - DNA, 7 bp, Unknown
  misc_feature (1)..( 7): Matrix.001 file - promoters60/1010693
aatcaat

SEQ ID NO: 41196 - DNA, 8 bp, Unknown
  misc_feature (1)..( 8): Matrix.001 file - promoters60/1010693
ttaaatat

SEQ ID NO: 41197 - DNA, 6 bp, Unknown
  misc_feature (1)..( 6): Matrix.001 file - promoters60/1010693
ataaaa

SEQ ID NO: 41198 - DNA, 7 bp, Unknown
  misc_feature (1)..( 7): Matrix.001 file - promoters60/1010693
tttcatt

SEQ ID NO: 41199 - DNA, 7 bp, Unknown
  misc_feature (1)..( 7): Matrix.001 file - promoters60/1010693
agttggt

SEQ ID NO: 41200 - DNA, 7 bp, Unknown
  misc_feature (1)..( 7): Matrix.001 file - promoters60/1010693
agtaaaa

SEQ ID NO: 41201 - DNA, 8 bp, Unknown
  misc_feature (1)..( 8): Matrix.001 file - promoters60/1010693
ataatata

SEQ ID NO: 41202 - DNA, 6 bp, Unknown
  misc_feature (1)..( 6): Matrix.001 file - promoters60/1010693
aacata

SEQ ID NO: 41203 - DNA, 6 bp, Unknown
  misc_feature (1)..( 6): Matrix.001 file - promoters60/1010693
aaaatt

SEQ ID NO: 41204 - DNA, 7 bp, Unknown
  misc_feature (1)..( 7): Matrix.001 file - promoters60/1010693
tttcatt

SEQ ID NO: 41205 - DNA, 8 bp, Unknown
  misc_feature (1)..( 8): Matrix.001 file - promoters60/1010693
caaagtcg

SEQ ID NO: 41206 - DNA, 8 bp, Unknown
  misc_feature (1)..( 8): Matrix.001 file - promoters60/1010693
aaaacttc

SEQ ID NO: 41207 - DNA, 6 bp, Unknown
  misc_feature (1)..( 6): Matrix.001 file - promoters60/1010693
taataa

SEQ ID NO: 41208 - DNA, 7 bp, Unknown
  misc_feature (1)..( 7): Matrix.001 file - promoters60/1010693
aaaagcg

SEQ ID NO: 41209 - DNA, 9 bp, Unknown
  misc_feature (1)..( 9): Matrix.001 file - promoters60/1010693
tcgtaaata

SEQ ID NO: 41210 - DNA, 7 bp, Unknown
  misc_feature (1)..( 7): Matrix.001 file - promoters60/1010693
caaaaac

SEQ ID NO: 41211 - DNA, 6 bp, Unknown
  misc_feature (1)..( 6): Matrix.001 file - promoters60/1010693
atgtta

SEQ ID NO: 41212 - DNA, 9 bp, Unknown
  misc_feature (1)..( 9): Matrix.001 file - promoters60/1010693
aaactaaaa

SEQ ID NO: 41213 - DNA, 7 bp, Unknown
  misc_feature (1)..( 7): Matrix.001 file - promoters60/1010693
tatacaa

SEQ ID NO: 41214 - DNA, 8 bp, Unknown
  misc_feature (1)..( 8): Matrix.001 file - promoters60/1010693
attgtaat

SEQ ID NO: 41215 - DNA, 6 bp, Unknown
  misc_feature (1)..( 6): Matrix.001 file - promoters60/1010710
cggtaa

SEQ ID NO: 41216 - DNA, 7 bp, Unknown
  misc_feature (1)..( 7): Matrix.001 file - promoters60/1010710
tttcttg

SEQ ID NO: 41217 - DNA, 6 bp, Unknown
  misc_feature (1)..( 6): Matrix.001 file - promoters60/1010710
acatat

SEQ ID NO: 41218 - DNA, 7 bp, Unknown
  misc_feature (1)..( 7): Matrix.001 file - promoters60/1010710
tttgttc

SEQ ID NO: 41219 - DNA, 8 bp, Unknown
  misc_feature (1)..( 8): Matrix.001 file - promoters60/1010710
aatcaaaa

SEQ ID NO: 41220 - DNA, 7 bp, Unknown
  misc_feature (1)..( 7): Matrix.001 file - promoters60/1010710
gataaat

SEQ ID NO: 41221 - DNA, 7 bp, Unknown
  misc_feature (1)..( 7): Matrix.001 file - promoters60/1010710
gaacttt

SEQ ID NO: 41222 - DNA, 6 bp, Unknown
  misc_feature (1)..( 6): Matrix.001 file - promoters60/1010710
agtata

SEQ ID NO: 41223 - DNA, 10 bp, Unknown
  misc_feature (1)..( 10): Matrix.001 file - promoters60/1010710
accggttata

SEQ ID NO: 41224 - DNA, 9 bp, Unknown
  misc_feature (1)..( 9): Matrix.001 file - promoters60/1010710
aattatttt

SEQ ID NO: 41225 - DNA, 7 bp, Unknown
  misc_feature (1)..( 7): Matrix.001 file - promoters60/1010710
tttccgg

SEQ ID NO: 41226 - DNA, 7 bp, Unknown
  misc_feature (1)..( 7): Matrix.001 file - promoters60/1010710
gaacagt

SEQ ID NO: 41227 - DNA, 7 bp, Unknown
  misc_feature (1)..( 7): Matrix.001 file - promoters60/1010710
cgacaca

SEQ ID NO: 41228 - DNA, 7 bp, Unknown
  misc_feature (1)..( 7): Matrix.001 file - promoters60/1010710
tttatat

SEQ ID NO: 41229 - DNA, 7 bp, Unknown
  misc_feature (1)..( 7): Matrix.001 file - promoters60/1010710
gatgtga

SEQ ID NO: 41230 - DNA, 6 bp, Unknown
  misc_feature (1)..( 6): Matrix.001 file - promoters60/1010770
ttttaa

SEQ ID NO: 41231 - DNA, 6 bp, Unknown
  misc_feature (1)..( 6): Matrix.001 file - promoters60/1010770
aaaagc

SEQ ID NO: 41232 - DNA, 7 bp, Unknown
  misc_feature (1)..( 7): Matrix.001 file - promoters60/1010770
attattg

SEQ ID NO: 41233 - DNA, 9 bp, Unknown
  misc_feature (1)..( 9): Matrix.001 file - promoters60/1010770
acaaagaga

SEQ ID NO: 41234 - DNA, 7 bp, Unknown
  misc_feature (1)..( 7): Matrix.001 file - promoters60/1010770
tttggac

SEQ ID NO: 41235 - DNA, 6 bp, Unknown
  misc_feature (1)..( 6): Matrix.001 file - promoters60/1010770
gctttt

SEQ ID NO: 41236 - DNA, 7 bp, Unknown
  misc_feature (1)..( 7): Matrix.001 file - promoters60/1010770
ccaattg

SEQ ID NO: 41237 - DNA, 8 bp, Unknown
  misc_feature (1)..( 8): Matrix.001 file - promoters60/1010770
gattaatt

SEQ ID NO: 41238 - DNA, 6 bp, Unknown
  misc_feature (1)..( 6): Matrix.001 file - promoters60/1010770
taaatt

SEQ ID NO: 41239 - DNA, 8 bp, Unknown
  misc_feature (1)..( 8): Matrix.001 file - promoters60/1010770
aattgcaa

SEQ ID NO: 41240 - DNA, 7 bp, Unknown
  misc_feature (1)..( 7): Matrix.001 file - promoters60/1010770
gttattg

SEQ ID NO: 41241 - DNA, 7 bp, Unknown
  misc_feature (1)..( 7): Matrix.001 file - promoters60/1010770
tttagtt

SEQ ID NO: 41242 - DNA, 9 bp, Unknown
  misc_feature (1)..( 9): Matrix.001 file - promoters60/1010770
aatacaaaa

SEQ ID NO: 41243 - DNA, 7 bp, Unknown
  misc_feature (1)..( 7): Matrix.001 file - promoters60/1010770
caaaaaa

SEQ ID NO: 41244 - DNA, 10 bp, Unknown
  misc_feature (1)..( 10): Matrix.001 file - promoters60/1010770
tttaaacaat

SEQ ID NO: 41245 - DNA, 7 bp, Unknown
  misc_feature (1)..( 7): Matrix.001 file - promoters60/1010770
ttaatgc

SEQ ID NO: 41246 - DNA, 6 bp, Unknown
  misc_feature (1)..( 6): Matrix.001 file - promoters60/1010770
atatac

SEQ ID NO: 41247 - DNA, 8 bp, Unknown
  misc_feature (1)..( 8): Matrix.001 file - promoters60/1010770
cttggttt

SEQ ID NO: 41248 - DNA, 8 bp, Unknown
  misc_feature (1)..( 8): Matrix.001 file - promoters60/1010770
ccatacat

SEQ ID NO: 41249 - DNA, 13 bp, Unknown
  misc_feature (1)..( 13): Matrix.001 file - promoters60/1010815
ctttcaaagaaag

SEQ ID NO: 41250 - DNA, 5 bp, Unknown
  misc_feature (1)..( 5): Matrix.001 file - promoters60/1010815
aaaaa

SEQ ID NO: 41251 - DNA, 9 bp, Unknown
  misc_feature (1)..( 9): Matrix.001 file - promoters60/1010815
aacaaaaaa

SEQ ID NO: 41252 - DNA, 11 bp, Unknown
  misc_feature (1)..( 11): Matrix.001 file - promoters60/1010815
aatatataaat

SEQ ID NO: 41253 - DNA, 12 bp, Unknown
  misc_feature (1)..( 12): Matrix.001 file - promoters60/1010819
tttttctaaaag

SEQ ID NO: 41254 - DNA, 6 bp, Unknown
  misc_feature (1)..( 6): Matrix.001 file - promoters60/1010993
tttttt

SEQ ID NO: 41255 - DNA, 10 bp, Unknown
  misc_feature (1)..( 10): Matrix.001 file - promoters60/1010993
taatataaaa

SEQ ID NO: 41256 - DNA, 9 bp, Unknown
  misc_feature (1)..( 9): Matrix.001 file - promoters60/1010993
aaaataaaa

SEQ ID NO: 41257 - DNA, 11 bp, Unknown
  misc_feature (1)..( 11): Matrix.001 file - promoters60/1010993
taaaaaaacta

SEQ ID NO: 41258 - DNA, 8 bp, Unknown
  misc_feature (1)..( 8): Matrix.001 file - promoters60/1010993
aagagtat

SEQ ID NO: 41259 - DNA, 10 bp, Unknown
  misc_feature (1)..( 10): Matrix.001 file - promoters60/1010993
tatagaattt

SEQ ID NO: 41260 - DNA, 8 bp, Unknown
  misc_feature (1)..( 8): Matrix.001 file - promoters60/1010993
attgaaaa

SEQ ID NO: 41261 - DNA, 8 bp, Unknown
  misc_feature (1)..( 8): Matrix.001 file - promoters60/1011041
cagattga

SEQ ID NO: 41262 - DNA, 8 bp, Unknown
  misc_feature (1)..( 8): Matrix.001 file - promoters60/1011041
aagattga

SEQ ID NO: 41263 - DNA, 10 bp, Unknown
  misc_feature (1)..( 10): Matrix.001 file - promoters60/1011041
agaatttaaa

SEQ ID NO: 41264 - DNA, 6 bp, Unknown
  misc_feature (1)..( 6): Matrix.001 file - promoters60/1011212
tttttg

SEQ ID NO: 41265 - DNA, 7 bp, Unknown
  misc_feature (1)..( 7): Matrix.001 file - promoters60/1011212
gacatgg

SEQ ID NO: 41266 - DNA, 7 bp, Unknown
  misc_feature (1)..( 7): Matrix.001 file - promoters60/1011212
taggagt

SEQ ID NO: 41267 - DNA, 8 bp, Unknown
  misc_feature (1)..( 8): Matrix.001 file - promoters60/1011212
ttaaaaca

SEQ ID NO: 41268 - DNA, 12 bp, Unknown
  misc_feature (1)..( 12): Matrix.001 file - promoters60/1011212
acatttatttta

SEQ ID NO: 41269 - DNA, 7 bp, Unknown
  misc_feature (1)..( 7): Matrix.001 file - promoters60/1011212
taatttt

SEQ ID NO: 41270 - DNA, 6 bp, Unknown
  misc_feature (1)..( 6): Matrix.001 file - promoters60/1011212
atttta

SEQ ID NO: 41271 - DNA, 6 bp, Unknown
  misc_feature (1)..( 6): Matrix.001 file - promoters60/1011212
aattga

SEQ ID NO: 41272 - DNA, 7 bp, Unknown
  misc_feature (1)..( 7): Matrix.001 file - promoters60/1011212
ttaaaac

SEQ ID NO: 41273 - DNA, 7 bp, Unknown
  misc_feature (1)..( 7): Matrix.001 file - promoters60/1011212
gttaaca

SEQ ID NO: 41274 - DNA, 8 bp, Unknown
  misc_feature (1)..( 8): Matrix.001 file - promoters60/1011212
ttaaagaa

SEQ ID NO: 41275 - DNA, 6 bp, Unknown
  misc_feature (1)..( 6): Matrix.001 file - promoters60/1011212
aaaaat

SEQ ID NO: 41276 - DNA, 6 bp, Unknown
  misc_feature (1)..( 6): Matrix.001 file - promoters60/1011212
actaca

SEQ ID NO: 41277 - DNA, 6 bp, Unknown
  misc_feature (1)..( 6): Matrix.001 file - promoters60/1011212
ctaact

SEQ ID NO: 41278 - DNA, 6 bp, Unknown
  misc_feature (1)..( 6): Matrix.001 file - promoters60/1011212
ctattt

SEQ ID NO: 41279 - DNA, 7 bp, Unknown
  misc_feature (1)..( 7): Matrix.001 file - promoters60/1011212
acctgat

SEQ ID NO: 41280 - DNA, 6 bp, Unknown
  misc_feature (1)..( 6): Matrix.001 file - promoters60/1011212
tcttag

SEQ ID NO: 41281 - DNA, 7 bp, Unknown
  misc_feature (1)..( 7): Matrix.001 file - promoters60/1011212
catgagt

SEQ ID NO: 41282 - DNA, 7 bp, Unknown
  misc_feature (1)..( 7): Matrix.001 file - promoters60/1011212
ccacggt

SEQ ID NO: 41283 - DNA, 6 bp, Unknown
  misc_feature (1)..( 6): Matrix.001 file - promoters60/1011258
ttaaaa

SEQ ID NO: 41284 - DNA, 6 bp, Unknown
  misc_feature (1)..( 6): Matrix.001 file - promoters60/1011258
taaaac

SEQ ID NO: 41285 - DNA, 6 bp, Unknown
  misc_feature (1)..( 6): Matrix.001 file - promoters60/1011258
aaactt

SEQ ID NO: 41286 - DNA, 7 bp, Unknown
  misc_feature (1)..( 7): Matrix.001 file - promoters60/1011258
cacaatc

SEQ ID NO: 41287 - DNA, 7 bp, Unknown
  misc_feature (1)..( 7): Matrix.001 file - promoters60/1011258
aaaccaa

SEQ ID NO: 41288 - DNA, 7 bp, Unknown
  misc_feature (1)..( 7): Matrix.001 file - promoters60/1011258
aaaccaa

SEQ ID NO: 41289 - DNA, 6 bp, Unknown
  misc_feature (1)..( 6): Matrix.001 file - promoters60/1011258
aataaa

SEQ ID NO: 41290 - DNA, 7 bp, Unknown
  misc_feature (1)..( 7): Matrix.001 file - promoters60/1011258
aagaaga

SEQ ID NO: 41291 - DNA, 9 bp, Unknown
  misc_feature (1)..( 9): Matrix.001 file - promoters60/1011258
ttacagtta

SEQ ID NO: 41292 - DNA, 6 bp, Unknown
  misc_feature (1)..( 6): Matrix.001 file - promoters60/1011258
cagaaa

SEQ ID NO: 41293 - DNA, 7 bp, Unknown
  misc_feature (1)..( 7): Matrix.001 file - promoters60/1011258
tccacca

SEQ ID NO: 41294 - DNA, 6 bp, Unknown
  misc_feature (1)..( 6): Matrix.001 file - promoters60/1011258
ttttga

SEQ ID NO: 41295 - DNA, 6 bp, Unknown
  misc_feature (1)..( 6): Matrix.001 file - promoters60/1011258
tcttct

SEQ ID NO: 41296 - DNA, 7 bp, Unknown
  misc_feature (1)..( 7): Matrix.001 file - promoters60/1011258
cacacca

SEQ ID NO: 41297 - DNA, 11 bp, Unknown
  misc_feature (1)..( 11): Matrix.001 file - promoters60/1011258
ctttcttcttt

SEQ ID NO: 41298 - DNA, 8 bp, Unknown
  misc_feature (1)..( 8): Matrix.001 file - promoters60/1011258
tttgcttc

SEQ ID NO: 41299 - DNA, 7 bp, Unknown
  misc_feature (1)..( 7): Matrix.001 file - promoters60/1011258
caagttg

SEQ ID NO: 41300 - DNA, 8 bp, Unknown
  misc_feature (1)..( 8): Matrix.001 file - promoters60/1011258
taaaaaaa

SEQ ID NO: 41301 - DNA, 8 bp, Unknown
  misc_feature (1)..( 8): Matrix.001 file - promoters60/1011258
caagaaaa

SEQ ID NO: 41302 - DNA, 8 bp, Unknown
  misc_feature (1)..( 8): Matrix.001 file - promoters60/1011258
aagaatct

SEQ ID NO: 41303 - DNA, 8 bp, Unknown
  misc_feature (1)..( 8): Matrix.001 file - promoters60/1011258
tccaacaa

SEQ ID NO: 41304 - DNA, 6 bp, Unknown
  misc_feature (1)..( 6): Matrix.001 file - promoters60/1011262
atgttt

SEQ ID NO: 41305 - DNA, 9 bp, Unknown
  misc_feature (1)..( 9): Matrix.001 file - promoters60/1011262
taagcatat

SEQ ID NO: 41306 - DNA, 6 bp, Unknown
  misc_feature (1)..( 6): Matrix.001 file - promoters60/1011262
taatat

SEQ ID NO: 41307 - DNA, 10 bp, Unknown
  misc_feature (1)..( 10): Matrix.001 file - promoters60/1011262
atatcataat

SEQ ID NO: 41308 - DNA, 8 bp, Unknown
  misc_feature (1)..( 8): Matrix.001 file - promoters60/1011262
tatacata

SEQ ID NO: 41309 - DNA, 7 bp, Unknown
  misc_feature (1)..( 7): Matrix.001 file - promoters60/1011262
atttaca

SEQ ID NO: 41310 - DNA, 6 bp, Unknown
  misc_feature (1)..( 6): Matrix.001 file - promoters60/1011262
acattt

SEQ ID NO: 41311 - DNA, 6 bp, Unknown
  misc_feature (1)..( 6): Matrix.001 file - promoters60/1011262
atttta

SEQ ID NO: 41312 - DNA, 7 bp, Unknown
  misc_feature (1)..( 7): Matrix.001 file - promoters60/1011262
tatatat

SEQ ID NO: 41313 - DNA, 6 bp, Unknown
  misc_feature (1)..( 6): Matrix.001 file - promoters60/1011262
tatatt

SEQ ID NO: 41314 - DNA, 7 bp, Unknown
  misc_feature (1)..( 7): Matrix.001 file - promoters60/1011262
tttattt

SEQ ID NO: 41315 - DNA, 6 bp, Unknown
  misc_feature (1)..( 6): Matrix.001 file - promoters60/1011262
aaaaaa

SEQ ID NO: 41316 - DNA, 6 bp, Unknown
  misc_feature (1)..( 6): Matrix.001 file - promoters60/1011262
aaattc

SEQ ID NO: 41317 - DNA, 7 bp, Unknown
  misc_feature (1)..( 7): Matrix.001 file - promoters60/1011262
ccatctg

SEQ ID NO: 41318 - DNA, 6 bp, Unknown
  misc_feature (1)..( 6): Matrix.001 file - promoters60/1011262
atacac

SEQ ID NO: 41319 - DNA, 6 bp, Unknown
  misc_feature (1)..( 6): Matrix.001 file - promoters60/1011262
ttgatt

SEQ ID NO: 41320 - DNA, 8 bp, Unknown
  misc_feature (1)..( 8): Matrix.001 file - promoters60/1011262
gctacaga

SEQ ID NO: 41321 - DNA, 7 bp, Unknown
  misc_feature (1)..( 7): Matrix.001 file - promoters60/1011303
tgcataa

SEQ ID NO: 41322 - DNA, 9 bp, Unknown
  misc_feature (1)..( 9): Matrix.001 file - promoters60/1011303
tcaaaaact

SEQ ID NO: 41323 - DNA, 6 bp, Unknown
  misc_feature (1)..( 6): Matrix.001 file - promoters60/1011303
aacaaa

SEQ ID NO: 41324 - DNA, 6 bp, Unknown
  misc_feature (1)..( 6): Matrix.001 file - promoters60/1011303
ttttaa

SEQ ID NO: 41325 - DNA, 8 bp, Unknown
  misc_feature (1)..( 8): Matrix.001 file - promoters60/1011303
tccaattt

SEQ ID NO: 41326 - DNA, 9 bp, Unknown
  misc_feature (1)..( 9): Matrix.001 file - promoters60/1011303
tataatgaa

SEQ ID NO: 41327 - DNA, 7 bp, Unknown
  misc_feature (1)..( 7): Matrix.001 file - promoters60/1011303
gtgatca

SEQ ID NO: 41328 - DNA, 10 bp, Unknown
  misc_feature (1)..( 10): Matrix.001 file - promoters60/1011303
cttacaattt

SEQ ID NO: 41329 - DNA, 8 bp, Unknown
  misc_feature (1)..( 8): Matrix.001 file - promoters60/1011303
tttgtaaa

SEQ ID NO: 41330 - DNA, 9 bp, Unknown
  misc_feature (1)..( 9): Matrix.001 file - promoters60/1011303
aacaatata

SEQ ID NO: 41331 - DNA, 6 bp, Unknown
  misc_feature (1)..( 6): Matrix.001 file - promoters60/1011303
aatggt

SEQ ID NO: 41332 - DNA, 7 bp, Unknown
  misc_feature (1)..( 7): Matrix.001 file - promoters60/1011303
caaaatc

SEQ ID NO: 41333 - DNA, 9 bp, Unknown
  misc_feature (1)..( 9): Matrix.001 file - promoters60/1011303
actacaaac

SEQ ID NO: 41334 - DNA, 6 bp, Unknown
  misc_feature (1)..( 6): Matrix.001 file - promoters60/1011303
aaaact

SEQ ID NO: 41335 - DNA, 8 bp, Unknown
  misc_feature (1)..( 8): Matrix.001 file - promoters60/1011303
aggcaaat

SEQ ID NO: 41336 - DNA, 10 bp, Unknown
  misc_feature (1)..( 10): Matrix.001 file - promoters60/1011303
cagtgtcgga

SEQ ID NO: 41337 - DNA, 9 bp, Unknown
  misc_feature (1)..( 9): Matrix.001 file - promoters60/1011303
ttttgatta

SEQ ID NO: 41338 - DNA, 6 bp, Unknown
  misc_feature (1)..( 6): Matrix.001 file - promoters60/1011303
taacta

SEQ ID NO: 41339 - DNA, 6 bp, Unknown
  misc_feature (1)..( 6): Matrix.001 file - promoters60/1011303
attact

SEQ ID NO: 41340 - DNA, 6 bp, Unknown
  misc_feature (1)..( 6): Matrix.001 file - promoters60/1011303
gtcttt

SEQ ID NO: 41341 - DNA, 7 bp, Unknown
  misc_feature (1)..( 7): Matrix.001 file - promoters60/1011303
aataaaa

SEQ ID NO: 41342 - DNA, 6 bp, Unknown
  misc_feature (1)..( 6): Matrix.001 file - promoters60/1011303
gcaaaa

SEQ ID NO: 41343 - DNA, 6 bp, Unknown
  misc_feature (1)..( 6): Matrix.001 file - promoters60/1011303
aaatta

SEQ ID NO: 41344 - DNA, 8 bp, Unknown
  misc_feature (1)..( 8): Matrix.001 file - promoters60/1011303
tttagtcg

SEQ ID NO: 41345 - DNA, 6 bp, Unknown
  misc_feature (1)..( 6): Matrix.001 file - promoters60/1011303
attttt

SEQ ID NO: 41346 - DNA, 11 bp, Unknown
  misc_feature (1)..( 11): Matrix.001 file - promoters60/1011337
atatttttcgt

SEQ ID NO: 41347 - DNA, 7 bp, Unknown
  misc_feature (1)..( 7): Matrix.001 file - promoters60/1011337
aaaaaaa

SEQ ID NO: 41348 - DNA, 8 bp, Unknown
  misc_feature (1)..( 8): Matrix.001 file - promoters60/1011337
aataaata

SEQ ID NO: 41349 - DNA, 11 bp, Unknown
  misc_feature (1)..( 11): Matrix.001 file - promoters60/1011358
cgatacttgtc

SEQ ID NO: 41350 - DNA, 10 bp, Unknown
  misc_feature (1)..( 10): Matrix.001 file - promoters60/1011358
aagaactcat

SEQ ID NO: 41351 - DNA, 12 bp, Unknown
  misc_feature (1)..( 12): Matrix.001 file - promoters60/1011358
ttaaatgaagat

SEQ ID NO: 41352 - DNA, 7 bp, Unknown
  misc_feature (1)..( 7): Matrix.001 file - promoters60/1011358
acacgtc

SEQ ID NO: 41353 - DNA, 10 bp, Unknown
  misc_feature (1)..( 10): Matrix.001 file - promoters60/1011358
tgtggtccat

SEQ ID NO: 41354 - DNA, 9 bp, Unknown
  misc_feature (1)..( 9): Matrix.001 file - promoters60/1011358
ttatgtgga

SEQ ID NO: 41355 - DNA, 7 bp, Unknown
  misc_feature (1)..( 7): Matrix.001 file - promoters60/1011358
agaagaa

SEQ ID NO: 41356 - DNA, 6 bp, Unknown
  misc_feature (1)..( 6): Matrix.001 file - promoters60/1011358
gtgtaa

SEQ ID NO: 41357 - DNA, 9 bp, Unknown
  misc_feature (1)..( 9): Matrix.001 file - promoters60/1011358
aaacaaaaa

SEQ ID NO: 41358 - DNA, 6 bp, Unknown
  misc_feature (1)..( 6): Matrix.001 file - promoters60/1011358
tataaa

SEQ ID NO: 41359 - DNA, 7 bp, Unknown
  misc_feature (1)..( 7): Matrix.001 file - promoters60/1011358
gacctta

SEQ ID NO: 41360 - DNA, 6 bp, Unknown
  misc_feature (1)..( 6): Matrix.001 file - promoters60/1011358
atgaag

SEQ ID NO: 41361 - DNA, 6 bp, Unknown
  misc_feature (1)..( 6): Matrix.001 file - promoters60/1011358
agtaat

SEQ ID NO: 41362 - DNA, 8 bp, Unknown
  misc_feature (1)..( 8): Matrix.001 file - promoters60/1011358
tcagccag

SEQ ID NO: 41363 - DNA, 6 bp, Unknown
  misc_feature (1)..( 6): Matrix.001 file - promoters60/1011358
cgttga

SEQ ID NO: 41364 - DNA, 7 bp, Unknown
  misc_feature (1)..( 7): Matrix.001 file - promoters60/1011516
tagattt

SEQ ID NO: 41365 - DNA, 8 bp, Unknown
  misc_feature (1)..( 8): Matrix.001 file - promoters60/1011516
caatgaga

SEQ ID NO: 41366 - DNA, 7 bp, Unknown
  misc_feature (1)..( 7): Matrix.001 file - promoters60/1011516
cataatt

SEQ ID NO: 41367 - DNA, 8 bp, Unknown
  misc_feature (1)..( 8): Matrix.001 file - promoters60/1011516
aatcaata

SEQ ID NO: 41368 - DNA, 6 bp, Unknown
  misc_feature (1)..( 6): Matrix.001 file - promoters60/1011516
aagaga

SEQ ID NO: 41369 - DNA, 9 bp, Unknown
  misc_feature (1)..( 9): Matrix.001 file - promoters60/1011516
ataataata

SEQ ID NO: 41370 - DNA, 7 bp, Unknown
  misc_feature (1)..( 7): Matrix.001 file - promoters60/1011516
tttgttc

SEQ ID NO: 41371 - DNA, 8 bp, Unknown
  misc_feature (1)..( 8): Matrix.001 file - promoters60/1011516
ccactcca

SEQ ID NO: 41372 - DNA, 8 bp, Unknown
  misc_feature (1)..( 8): Matrix.001 file - promoters60/1011516
taacacgt

SEQ ID NO: 41373 - DNA, 7 bp, Unknown
  misc_feature (1)..( 7): Matrix.001 file - promoters60/1011516
caaaaat

SEQ ID NO: 41374 - DNA, 7 bp, Unknown
  misc_feature (1)..( 7): Matrix.001 file - promoters60/1011516
aaaagga

SEQ ID NO: 41375 - DNA, 10 bp, Unknown
  misc_feature (1)..( 10): Matrix.001 file - promoters60/1011516
ctatattaat

SEQ ID NO: 41376 - DNA, 6 bp, Unknown
  misc_feature (1)..( 6): Matrix.001 file - promoters60/1011516
gatcat

SEQ ID NO: 41377 - DNA, 7 bp, Unknown
  misc_feature (1)..( 7): Matrix.001 file - promoters60/1011516
tctacat

SEQ ID NO: 41378 - DNA, 7 bp, Unknown
  misc_feature (1)..( 7): Matrix.001 file - promoters60/1011516
ttacaaa

SEQ ID NO: 41379 - DNA, 8 bp, Unknown
  misc_feature (1)..( 8): Matrix.001 file - promoters60/1011516
taaaatta

SEQ ID NO: 41380 - DNA, 8 bp, Unknown
  misc_feature (1)..( 8): Matrix.001 file - promoters60/1011516
aataaata

SEQ ID NO: 41381 - DNA, 9 bp, Unknown
  misc_feature (1)..( 9): Matrix.001 file - promoters60/1011556
gaaaaaaaa

SEQ ID NO: 41382 - DNA, 7 bp, Unknown
  misc_feature (1)..( 7): Matrix.001 file - promoters60/1011556
taaaatt

SEQ ID NO: 41383 - DNA, 8 bp, Unknown
  misc_feature (1)..( 8): Matrix.001 file - promoters60/1011556
tttaattt

SEQ ID NO: 41384 - DNA, 6 bp, Unknown
  misc_feature (1)..( 6): Matrix.001 file - promoters60/1011556
ataaat

SEQ ID NO: 41385 - DNA, 12 bp, Unknown
  misc_feature (1)..( 12): Matrix.001 file - promoters60/1011556
atgttaaataat

SEQ ID NO: 41386 - DNA, 8 bp, Unknown
  misc_feature (1)..( 8): Matrix.001 file - promoters60/1011556
tcactaca

SEQ ID NO: 41387 - DNA, 8 bp, Unknown
  misc_feature (1)..( 8): Matrix.001 file - promoters60/1011616
actagaag

SEQ ID NO: 41388 - DNA, 6 bp, Unknown
  misc_feature (1)..( 6): Matrix.001 file - promoters60/1011616
tataaa

SEQ ID NO: 41389 - DNA, 9 bp, Unknown
  misc_feature (1)..( 9): Matrix.001 file - promoters60/1011616
atgaacaat

SEQ ID NO: 41390 - DNA, 7 bp, Unknown
  misc_feature (1)..( 7): Matrix.001 file - promoters60/1011616
ggacgct

SEQ ID NO: 41391 - DNA, 7 bp, Unknown
  misc_feature (1)..( 7): Matrix.001 file - promoters60/1011616
caaccaa

SEQ ID NO: 41392 - DNA, 6 bp, Unknown
  misc_feature (1)..( 6): Matrix.001 file - promoters60/1011616
aataaa

SEQ ID NO: 41393 - DNA, 6 bp, Unknown
  misc_feature (1)..( 6): Matrix.001 file - promoters60/1011616
aaaaat

SEQ ID NO: 41394 - DNA, 7 bp, Unknown
  misc_feature (1)..( 7): Matrix.001 file - promoters60/1011616
ggtcggt

SEQ ID NO: 41395 - DNA, 6 bp, Unknown
  misc_feature (1)..( 6): Matrix.001 file - promoters60/1011616
taaaaa

SEQ ID NO: 41396 - DNA, 6 bp, Unknown
  misc_feature (1)..( 6): Matrix.001 file - promoters60/1011616
tataaa

SEQ ID NO: 41397 - DNA, 8 bp, Unknown
  misc_feature (1)..( 8): Matrix.001 file - promoters60/1011780
aggcccaa

SEQ ID NO: 41398 - DNA, 6 bp, Unknown
  misc_feature (1)..( 6): Matrix.001 file - promoters60/1011900
aaaaat

SEQ ID NO: 41399 - DNA, 9 bp, Unknown
  misc_feature (1)..( 9): Matrix.001 file - promoters60/1011900
gattattgt

SEQ ID NO: 41400 - DNA, 6 bp, Unknown
  misc_feature (1)..( 6): Matrix.001 file - promoters60/1011900
catatc

SEQ ID NO: 41401 - DNA, 6 bp, Unknown
  misc_feature (1)..( 6): Matrix.001 file - promoters60/1011900
caaggt

SEQ ID NO: 41402 - DNA, 6 bp, Unknown
  misc_feature (1)..( 6): Matrix.001 file - promoters60/1011900
aaatgt

SEQ ID NO: 41403 - DNA, 7 bp, Unknown
  misc_feature (1)..( 7): Matrix.001 file - promoters60/1011900
tcataat

SEQ ID NO: 41404 - DNA, 7 bp, Unknown
  misc_feature (1)..( 7): Matrix.001 file - promoters60/1011900
atttgag

SEQ ID NO: 41405 - DNA, 6 bp, Unknown
  misc_feature (1)..( 6): Matrix.001 file - promoters60/1011900
cttaga

SEQ ID NO: 41406 - DNA, 6 bp, Unknown
  misc_feature (1)..( 6): Matrix.001 file - promoters60/1011900
actttt

SEQ ID NO: 41407 - DNA, 6 bp, Unknown
  misc_feature (1)..( 6): Matrix.001 file - promoters60/1011900
aaattc

SEQ ID NO: 41408 - DNA, 6 bp, Unknown
  misc_feature (1)..( 6): Matrix.001 file - promoters60/1011900
caacca

SEQ ID NO: 41409 - DNA, 7 bp, Unknown
  misc_feature (1)..( 7): Matrix.001 file - promoters60/1011900
agtaatc

SEQ ID NO: 41410 - DNA, 10 bp, Unknown
  misc_feature (1)..( 10): Matrix.001 file - promoters60/1011972
aaactttttt

SEQ ID NO: 41411 - DNA, 10 bp, Unknown
  misc_feature (1)..( 10): Matrix.001 file - promoters60/1011972
ttttaacaaa

SEQ ID NO: 41412 - DNA, 8 bp, Unknown
  misc_feature (1)..( 8): Matrix.001 file - promoters60/1011972
tgcataag

SEQ ID NO: 41413 - DNA, 9 bp, Unknown
  misc_feature (1)..( 9): Matrix.001 file - promoters60/1011972
gaatctctt

SEQ ID NO: 41414 - DNA, 7 bp, Unknown
  misc_feature (1)..( 7): Matrix.001 file - promoters60/1011972
tttaaag

SEQ ID NO: 41415 - DNA, 11 bp, Unknown
  misc_feature (1)..( 11): Matrix.001 file - promoters60/1011972
aatctttttaa

SEQ ID NO: 41416 - DNA, 9 bp, Unknown
  misc_feature (1)..( 9): Matrix.001 file - promoters60/1011972
ttctgctaa

SEQ ID NO: 41417 - DNA, 9 bp, Unknown
  misc_feature (1)..( 9): Matrix.001 file - promoters60/1011972
ctatataaa

SEQ ID NO: 41418 - DNA, 12 bp, Unknown
  misc_feature (1)..( 12): Matrix.001 file - promoters60/1011972
actgtttgatat

SEQ ID NO: 41419 - DNA, 8 bp, Unknown
  misc_feature (1)..( 8): Matrix.001 file - promoters60/1011972
attttcaa

SEQ ID NO: 41420 - DNA, 9 bp, Unknown
  misc_feature (1)..( 9): Matrix.001 file - promoters60/1011972
ctaatcaac

SEQ ID NO: 41421 - DNA, 9 bp, Unknown
  misc_feature (1)..( 9): Matrix.001 file - promoters60/1011972
atctacata

SEQ ID NO: 41422 - DNA, 8 bp, Unknown
  misc_feature (1)..( 8): Matrix.001 file - promoters60/1011972
atcaatat

SEQ ID NO: 41423 - DNA, 7 bp, Unknown
  misc_feature (1)..( 7): Matrix.001 file - promoters60/1011972
tgacatt

SEQ ID NO: 41424 - DNA, 7 bp, Unknown
  misc_feature (1)..( 7): Matrix.001 file - promoters60/1011972
tttcgga

SEQ ID NO: 41425 - DNA, 8 bp, Unknown
  misc_feature (1)..( 8): Matrix.001 file - promoters60/1012017
aatgcaac

SEQ ID NO: 41426 - DNA, 6 bp, Unknown
  misc_feature (1)..( 6): Matrix.001 file - promoters60/1012017
aaattt

SEQ ID NO: 41427 - DNA, 10 bp, Unknown
  misc_feature (1)..( 10): Matrix.001 file - promoters60/1012017
tgttttcact

SEQ ID NO: 41428 - DNA, 7 bp, Unknown
  misc_feature (1)..( 7): Matrix.001 file - promoters60/1012017
gttaata

SEQ ID NO: 41429 - DNA, 10 bp, Unknown
  misc_feature (1)..( 10): Matrix.001 file - promoters60/1012017
aactctttta

SEQ ID NO: 41430 - DNA, 6 bp, Unknown
  misc_feature (1)..( 6): Matrix.001 file - promoters60/1012017
caaaaa

SEQ ID NO: 41431 - DNA, 7 bp, Unknown
  misc_feature (1)..( 7): Matrix.001 file - promoters60/1012017
tttatta

SEQ ID NO: 41432 - DNA, 7 bp, Unknown
  misc_feature (1)..( 7): Matrix.001 file - promoters60/1012017
tgaaatt

SEQ ID NO: 41433 - DNA, 6 bp, Unknown
  misc_feature (1)..( 6): Matrix.001 file - promoters60/1012017
aagttg

SEQ ID NO: 41434 - DNA, 8 bp, Unknown
  misc_feature (1)..( 8): Matrix.001 file - promoters60/1012017
attactat

SEQ ID NO: 41435 - DNA, 6 bp, Unknown
  misc_feature (1)..( 6): Matrix.001 file - promoters60/1012017
taattc

SEQ ID NO: 41436 - DNA, 8 bp, Unknown
  misc_feature (1)..( 8): Matrix.001 file - promoters60/1012017
tgtcaaag

SEQ ID NO: 41437 - DNA, 7 bp, Unknown
  misc_feature (1)..( 7): Matrix.001 file - promoters60/1012017
aaaaaaa

SEQ ID NO: 41438 - DNA, 6 bp, Unknown
  misc_feature (1)..( 6): Matrix.001 file - promoters60/1012017
tgtcga

SEQ ID NO: 41439 - DNA, 7 bp, Unknown
  misc_feature (1)..( 7): Matrix.001 file - promoters60/1012017
tttactt

SEQ ID NO: 41440 - DNA, 6 bp, Unknown
  misc_feature (1)..( 6): Matrix.001 file - promoters60/1012017
ttgtac

SEQ ID NO: 41441 - DNA, 10 bp, Unknown
  misc_feature (1)..( 10): Matrix.001 file - promoters60/1012074
atattttgcg

SEQ ID NO: 41442 - DNA, 9 bp, Unknown
  misc_feature (1)..( 9): Matrix.001 file - promoters60/1012074
tttagttaa

SEQ ID NO: 41443 - DNA, 12 bp, Unknown
  misc_feature (1)..( 12): Matrix.001 file - promoters60/1012074
atttaataacaa

SEQ ID NO: 41444 - DNA, 11 bp, Unknown
  misc_feature (1)..( 11): Matrix.001 file - promoters60/1012074
taattttataa

SEQ ID NO: 41445 - DNA, 6 bp, Unknown
  misc_feature (1)..( 6): Matrix.001 file - promoters60/1012078
agccag

SEQ ID NO: 41446 - DNA, 7 bp, Unknown
  misc_feature (1)..( 7): Matrix.001 file - promoters60/1012078
gaaacca

SEQ ID NO: 41447 - DNA, 7 bp, Unknown
  misc_feature (1)..( 7): Matrix.001 file - promoters60/1012078
ttaggat

SEQ ID NO: 41448 - DNA, 7 bp, Unknown
  misc_feature (1)..( 7): Matrix.001 file - promoters60/1012078
ttcatga

SEQ ID NO: 41449 - DNA, 6 bp, Unknown
  misc_feature (1)..( 6): Matrix.001 file - promoters60/1012078
aagaaa

SEQ ID NO: 41450 - DNA, 7 bp, Unknown
  misc_feature (1)..( 7): Matrix.001 file - promoters60/1012078
ttcctct

SEQ ID NO: 41451 - DNA, 13 bp, Unknown
  misc_feature (1)..( 13): Matrix.001 file - promoters60/1012078
gttataatttttt

SEQ ID NO: 41452 - DNA, 7 bp, Unknown
  misc_feature (1)..( 7): Matrix.001 file - promoters60/1012078
tgaatat

SEQ ID NO: 41453 - DNA, 8 bp, Unknown
  misc_feature (1)..( 8): Matrix.001 file - promoters60/1012078
ttgatata

SEQ ID NO: 41454 - DNA, 8 bp, Unknown
  misc_feature (1)..( 8): Matrix.001 file - promoters60/1012078
gatattgt

SEQ ID NO: 41455 - DNA, 6 bp, Unknown
  misc_feature (1)..( 6): Matrix.001 file - promoters60/1012078
aattca

SEQ ID NO: 41456 - DNA, 8 bp, Unknown
  misc_feature (1)..( 8): Matrix.001 file - promoters60/1012078
aaaaaaat

SEQ ID NO: 41457 - DNA, 8 bp, Unknown
  misc_feature (1)..( 8): Matrix.001 file - promoters60/1012078
ttttcctt

SEQ ID NO: 41458 - DNA, 6 bp, Unknown
  misc_feature (1)..( 6): Matrix.001 file - promoters60/1012078
agtgtt

SEQ ID NO: 41459 - DNA, 8 bp, Unknown
  misc_feature (1)..( 8): Matrix.001 file - promoters60/1012078
tttgtttt

SEQ ID NO: 41460 - DNA, 7 bp, Unknown
  misc_feature (1)..( 7): Matrix.001 file - promoters60/1012078
aaaatat

SEQ ID NO: 41461 - DNA, 10 bp, Unknown
  misc_feature (1)..( 10): Matrix.001 file - promoters60/1012078
aaattaaaaa

SEQ ID NO: 41462 - DNA, 8 bp, Unknown
  misc_feature (1)..( 8): Matrix.001 file - promoters60/1012110
aaatgaaa

SEQ ID NO: 41463 - DNA, 11 bp, Unknown
  misc_feature (1)..( 11): Matrix.001 file - promoters60/1012110
ccataattaag

SEQ ID NO: 41464 - DNA, 9 bp, Unknown
  misc_feature (1)..( 9): Matrix.001 file - promoters60/1012110
ctcaaaaaa

SEQ ID NO: 41465 - DNA, 10 bp, Unknown
  misc_feature (1)..( 10): Matrix.001 file - promoters60/1012110
gtaaaaataa

SEQ ID NO: 41466 - DNA, 15 bp, Unknown
  misc_feature (1)..( 15): Matrix.001 file - promoters60/1012128
taaggcccaatattt

SEQ ID NO: 41467 - DNA, 9 bp, Unknown
  misc_feature (1)..( 9): Matrix.001 file - promoters60/1012128
catatataa

SEQ ID NO: 41468 - DNA, 7 bp, Unknown
  misc_feature (1)..( 7): Matrix.001 file - promoters60/1012128
cacaaaa

SEQ ID NO: 41469 - DNA, 11 bp, Unknown
  misc_feature (1)..( 11): Matrix.001 file - promoters60/1012128
gccttcaaaga

SEQ ID NO: 41470 - DNA, 10 bp, Unknown
  misc_feature (1)..( 10): Matrix.001 file - promoters60/1012128
actaatctga

SEQ ID NO: 41471 - DNA, 13 bp, Unknown
  misc_feature (1)..( 13): Matrix.001 file - promoters60/1012140
ttgagtcaaatca

SEQ ID NO: 41472 - DNA, 6 bp, Unknown
  misc_feature (1)..( 6): Matrix.001 file - promoters60/1012140
aaggtt

SEQ ID NO: 41473 - DNA, 7 bp, Unknown
  misc_feature (1)..( 7): Matrix.001 file - promoters60/1012140
ttgaatt

SEQ ID NO: 41474 - DNA, 9 bp, Unknown
  misc_feature (1)..( 9): Matrix.001 file - promoters60/1012140
tcttgttct

SEQ ID NO: 41475 - DNA, 6 bp, Unknown
  misc_feature (1)..( 6): Matrix.001 file - promoters60/1012140
ttcttt

SEQ ID NO: 41476 - DNA, 6 bp, Unknown
  misc_feature (1)..( 6): Matrix.001 file - promoters60/1012140
tttttg

SEQ ID NO: 41477 - DNA, 8 bp, Unknown
  misc_feature (1)..( 8): Matrix.001 file - promoters60/1012140
gcaaaatt

SEQ ID NO: 41478 - DNA, 7 bp, Unknown
  misc_feature (1)..( 7): Matrix.001 file - promoters60/1012140
acaaaaa

SEQ ID NO: 41479 - DNA, 6 bp, Unknown
  misc_feature (1)..( 6): Matrix.001 file - promoters60/1012140
tcaaac

SEQ ID NO: 41480 - DNA, 6 bp, Unknown
  misc_feature (1)..( 6): Matrix.001 file - promoters60/1012213
ctttct

SEQ ID NO: 41481 - DNA, 8 bp, Unknown
  misc_feature (1)..( 8): Matrix.001 file - promoters60/1012213
aaaataca

SEQ ID NO: 41482 - DNA, 6 bp, Unknown
  misc_feature (1)..( 6): Matrix.001 file - promoters60/1012213
tgtgtt

SEQ ID NO: 41483 - DNA, 7 bp, Unknown
  misc_feature (1)..( 7): Matrix.001 file - promoters60/1012213
tttcatg

SEQ ID NO: 41484 - DNA, 7 bp, Unknown
  misc_feature (1)..( 7): Matrix.001 file - promoters60/1012213
tgtctat

SEQ ID NO: 41485 - DNA, 6 bp, Unknown
  misc_feature (1)..( 6): Matrix.001 file - promoters60/1012213
gatgta

SEQ ID NO: 41486 - DNA, 6 bp, Unknown
  misc_feature (1)..( 6): Matrix.001 file - promoters60/1012213
tttttt

SEQ ID NO: 41487 - DNA, 7 bp, Unknown
  misc_feature (1)..( 7): Matrix.001 file - promoters60/1012213
tatcatg

SEQ ID NO: 41488 - DNA, 7 bp, Unknown
  misc_feature (1)..( 7): Matrix.001 file - promoters60/1012213
tttgtat

SEQ ID NO: 41489 - DNA, 6 bp, Unknown
  misc_feature (1)..( 6): Matrix.001 file - promoters60/1012213
aacaac

SEQ ID NO: 41490 - DNA, 8 bp, Unknown
  misc_feature (1)..( 8): Matrix.001 file - promoters60/1012213
aaaaatct

SEQ ID NO: 41491 - DNA, 7 bp, Unknown
  misc_feature (1)..( 7): Matrix.001 file - promoters60/1012213
tatattt

SEQ ID NO: 41492 - DNA, 7 bp, Unknown
  misc_feature (1)..( 7): Matrix.001 file - promoters60/1012213
tatgatt

SEQ ID NO: 41493 - DNA, 7 bp, Unknown
  misc_feature (1)..( 7): Matrix.001 file - promoters60/1012213
tttctgt

SEQ ID NO: 41494 - DNA, 6 bp, Unknown
  misc_feature (1)..( 6): Matrix.001 file - promoters60/1012213
gctaat

SEQ ID NO: 41495 - DNA, 7 bp, Unknown
  misc_feature (1)..( 7): Matrix.001 file - promoters60/1012245
agcgatt

SEQ ID NO: 41496 - DNA, 7 bp, Unknown
  misc_feature (1)..( 7): Matrix.001 file - promoters60/1012245
ttttggt

SEQ ID NO: 41497 - DNA, 7 bp, Unknown
  misc_feature (1)..( 7): Matrix.001 file - promoters60/1012245
gttcctt

SEQ ID NO: 41498 - DNA, 6 bp, Unknown
  misc_feature (1)..( 6): Matrix.001 file - promoters60/1012245
atttaa

SEQ ID NO: 41499 - DNA, 6 bp, Unknown
  misc_feature (1)..( 6): Matrix.001 file - promoters60/1012245
catttt

SEQ ID NO: 41500 - DNA, 7 bp, Unknown
  misc_feature (1)..( 7): Matrix.001 file - promoters60/1012245
tgaatct

SEQ ID NO: 41501 - DNA, 8 bp, Unknown
  misc_feature (1)..( 8): Matrix.001 file - promoters60/1012245
aagagtaa

SEQ ID NO: 41502 - DNA, 8 bp, Unknown
  misc_feature (1)..( 8): Matrix.001 file - promoters60/1012245
tttactta

SEQ ID NO: 41503 - DNA, 7 bp, Unknown
  misc_feature (1)..( 7): Matrix.001 file - promoters60/1012245
ttttcat

SEQ ID NO: 41504 - DNA, 8 bp, Unknown
  misc_feature (1)..( 8): Matrix.001 file - promoters60/1012245
tctcaaat

SEQ ID NO: 41505 - DNA, 9 bp, Unknown
  misc_feature (1)..( 9): Matrix.001 file - promoters60/1012245
tctcaagtg

SEQ ID NO: 41506 - DNA, 9 bp, Unknown
  misc_feature (1)..( 9): Matrix.001 file - promoters60/1012349
ttttgttta

SEQ ID NO: 41507 - DNA, 12 bp, Unknown
  misc_feature (1)..( 12): Matrix.001 file - promoters60/1012349
ataaaaatacta

SEQ ID NO: 41508 - DNA, 12 bp, Unknown
  misc_feature (1)..( 12): Matrix.001 file - promoters60/1012349
caacaatataca

SEQ ID NO: 41509 - DNA, 10 bp, Unknown
  misc_feature (1)..( 10): Matrix.001 file - promoters60/1012349
gaatttatat

SEQ ID NO: 41510 - DNA, 11 bp, Unknown
  misc_feature (1)..( 11): Matrix.001 file - promoters60/1012388
ataatttgatt

SEQ ID NO: 41511 - DNA, 8 bp, Unknown
  misc_feature (1)..( 8): Matrix.001 file - promoters60/1012388
tatttaat

SEQ ID NO: 41512 - DNA, 10 bp, Unknown
  misc_feature (1)..( 10): Matrix.001 file - promoters60/1012388
taaaaatata

SEQ ID NO: 41513 - DNA, 11 bp, Unknown
  misc_feature (1)..( 11): Matrix.001 file - promoters60/1012388
aaattatgatt

SEQ ID NO: 41514 - DNA, 11 bp, Unknown
  misc_feature (1)..( 11): Matrix.001 file - promoters60/1012388
tttaaaataga

SEQ ID NO: 41515 - DNA, 11 bp, Unknown
  misc_feature (1)..( 11): Matrix.001 file - promoters60/1012397
tcgaatatatg

SEQ ID NO: 41516 - DNA, 13 bp, Unknown
  misc_feature (1)..( 13): Matrix.001 file - promoters60/1012397
aatttctctgctt

SEQ ID NO: 41517 - DNA, 10 bp, Unknown
  misc_feature (1)..( 10): Matrix.001 file - promoters60/1012397
ttaatttatt

SEQ ID NO: 41518 - DNA, 10 bp, Unknown
  misc_feature (1)..( 10): Matrix.001 file - promoters60/1012397
aaaaattgat

SEQ ID NO: 41519 - DNA, 13 bp, Unknown
  misc_feature (1)..( 13): Matrix.001 file - promoters60/1012397
taatttaattcat

SEQ ID NO: 41520 - DNA, 10 bp, Unknown
  misc_feature (1)..( 10): Matrix.001 file - promoters60/1012397
cattctcttc

SEQ ID NO: 41521 - DNA, 8 bp, Unknown
  misc_feature (1)..( 8): Matrix.001 file - promoters60/1012403
ttttttta

SEQ ID NO: 41522 - DNA, 7 bp, Unknown
  misc_feature (1)..( 7): Matrix.001 file - promoters60/1012403
aaaataa

SEQ ID NO: 41523 - DNA, 8 bp, Unknown
  misc_feature (1)..( 8): Matrix.001 file - promoters60/1012403
ttttgtta

SEQ ID NO: 41524 - DNA, 8 bp, Unknown
  misc_feature (1)..( 8): Matrix.001 file - promoters60/1012403
caattttt

SEQ ID NO: 41525 - DNA, 12 bp, Unknown
  misc_feature (1)..( 12): Matrix.001 file - promoters60/1012403
ttttatttaatg

SEQ ID NO: 41526 - DNA, 7 bp, Unknown
  misc_feature (1)..( 7): Matrix.001 file - promoters60/1012403
gttgaat

SEQ ID NO: 41527 - DNA, 9 bp, Unknown
  misc_feature (1)..( 9): Matrix.001 file - promoters60/1012407
aaatttttc

SEQ ID NO: 41528 - DNA, 15 bp, Unknown
  misc_feature (1)..( 15): Matrix.001 file - promoters60/1012407
tctacattgtttgat

SEQ ID NO: 41529 - DNA, 6 bp, Unknown
  misc_feature (1)..( 6): Matrix.001 file - promoters60/1012442
aaataa

SEQ ID NO: 41530 - DNA, 7 bp, Unknown
  misc_feature (1)..( 7): Matrix.001 file - promoters60/1012442
tcagttt

SEQ ID NO: 41531 - DNA, 13 bp, Unknown
  misc_feature (1)..( 13): Matrix.001 file - promoters60/1012442
taagattaacata

SEQ ID NO: 41532 - DNA, 7 bp, Unknown
  misc_feature (1)..( 7): Matrix.001 file - promoters60/1012442
tttttaa

SEQ ID NO: 41533 - DNA, 8 bp, Unknown
  misc_feature (1)..( 8): Matrix.001 file - promoters60/1012442
aagaaatt

SEQ ID NO: 41534 - DNA, 7 bp, Unknown
  misc_feature (1)..( 7): Matrix.001 file - promoters60/1012442
aatattt

SEQ ID NO: 41535 - DNA, 7 bp, Unknown
  misc_feature (1)..( 7): Matrix.001 file - promoters60/1012442
aatatat

SEQ ID NO: 41536 - DNA, 6 bp, Unknown
  misc_feature (1)..( 6): Matrix.001 file - promoters60/1012442
aaaatc

SEQ ID NO: 41537 - DNA, 8 bp, Unknown
  misc_feature (1)..( 8): Matrix.001 file - promoters60/1012442
caaggcat

SEQ ID NO: 41538 - DNA, 7 bp, Unknown
  misc_feature (1)..( 7): Matrix.001 file - promoters60/1012442
aataaat

SEQ ID NO: 41539 - DNA, 7 bp, Unknown
  misc_feature (1)..( 7): Matrix.001 file - promoters60/1012442
ttaaaat

SEQ ID NO: 41540 - DNA, 7 bp, Unknown
  misc_feature (1)..( 7): Matrix.001 file - promoters60/1012442
aatgtta

SEQ ID NO: 41541 - DNA, 6 bp, Unknown
  misc_feature (1)..( 6): Matrix.001 file - promoters60/1012442
agatat

SEQ ID NO: 41542 - DNA, 8 bp, Unknown
  misc_feature (1)..( 8): Matrix.001 file - promoters60/1012442
ccaacaca

SEQ ID NO: 41543 - DNA, 8 bp, Unknown
  misc_feature (1)..( 8): Matrix.001 file - promoters60/1012442
taaattgt

SEQ ID NO: 41544 - DNA, 6 bp, Unknown
  misc_feature (1)..( 6): Matrix.001 file - promoters60/1012442
atagat

SEQ ID NO: 41545 - DNA, 7 bp, Unknown
  misc_feature (1)..( 7): Matrix.001 file - promoters60/1012442
agagata

SEQ ID NO: 41546 - DNA, 6 bp, Unknown
  misc_feature (1)..( 6): Matrix.001 file - promoters60/1012442
ttttgg

SEQ ID NO: 41547 - DNA, 12 bp, Unknown
  misc_feature (1)..( 12): Matrix.001 file - promoters60/1012442
aaaaacaaaaca

SEQ ID NO: 41548 - DNA, 6 bp, Unknown
  misc_feature (1)..( 6): Matrix.001 file - promoters60/1012442
aaaaat

SEQ ID NO: 41549 - DNA, 6 bp, Unknown
  misc_feature (1)..( 6): Matrix.001 file - promoters60/1012442
taaccc

SEQ ID NO: 41550 - DNA, 7 bp, Unknown
  misc_feature (1)..( 7): Matrix.001 file - promoters60/1012561
aaacaaa

SEQ ID NO: 41551 - DNA, 7 bp, Unknown
  misc_feature (1)..( 7): Matrix.001 file - promoters60/1012561
gtatctt

SEQ ID NO: 41552 - DNA, 6 bp, Unknown
  misc_feature (1)..( 6): Matrix.001 file - promoters60/1012561
ttatct

SEQ ID NO: 41553 - DNA, 8 bp, Unknown
  misc_feature (1)..( 8): Matrix.001 file - promoters60/1012561
aacaaatt

SEQ ID NO: 41554 - DNA, 7 bp, Unknown
  misc_feature (1)..( 7): Matrix.001 file - promoters60/1012561
tttgctt

SEQ ID NO: 41555 - DNA, 10 bp, Unknown
  misc_feature (1)..( 10): Matrix.001 file - promoters60/1012561
attattgttt

SEQ ID NO: 41556 - DNA, 6 bp, Unknown
  misc_feature (1)..( 6): Matrix.001 file - promoters60/1012561
tcagat

SEQ ID NO: 41557 - DNA, 7 bp, Unknown
  misc_feature (1)..( 7): Matrix.001 file - promoters60/1012561
taaataa

SEQ ID NO: 41558 - DNA, 6 bp, Unknown
  misc_feature (1)..( 6): Matrix.001 file - promoters60/1012561
ataaat

SEQ ID NO: 41559 - DNA, 7 bp, Unknown
  misc_feature (1)..( 7): Matrix.001 file - promoters60/1012561
tatgttt

SEQ ID NO: 41560 - DNA, 7 bp, Unknown
  misc_feature (1)..( 7): Matrix.001 file - promoters60/1012561
caaaaaa

SEQ ID NO: 41561 - DNA, 6 bp, Unknown
  misc_feature (1)..( 6): Matrix.001 file - promoters60/1012561
taaaca

SEQ ID NO: 41562 - DNA, 7 bp, Unknown
  misc_feature (1)..( 7): Matrix.001 file - promoters60/1012561
ttagatc

SEQ ID NO: 41563 - DNA, 7 bp, Unknown
  misc_feature (1)..( 7): Matrix.001 file - promoters60/1012561
atcattt

SEQ ID NO: 41564 - DNA, 7 bp, Unknown
  misc_feature (1)..( 7): Matrix.001 file - promoters60/1012561
gatctat

SEQ ID NO: 41565 - DNA, 6 bp, Unknown
  misc_feature (1)..( 6): Matrix.001 file - promoters60/1012561
ttttca

SEQ ID NO: 41566 - DNA, 7 bp, Unknown
  misc_feature (1)..( 7): Matrix.001 file - promoters60/1012561
cgaacaa

SEQ ID NO: 41567 - DNA, 6 bp, Unknown
  misc_feature (1)..( 6): Matrix.001 file - promoters60/1012561
tatcta

SEQ ID NO: 41568 - DNA, 9 bp, Unknown
  misc_feature (1)..( 9): Matrix.001 file - promoters60/1012580
tcttataat

SEQ ID NO: 41569 - DNA, 7 bp, Unknown
  misc_feature (1)..( 7): Matrix.001 file - promoters60/1012580
acaccaa

SEQ ID NO: 41570 - DNA, 8 bp, Unknown
  misc_feature (1)..( 8): Matrix.001 file - promoters60/1012580
tcttataa

SEQ ID NO: 41571 - DNA, 8 bp, Unknown
  misc_feature (1)..( 8): Matrix.001 file - promoters60/1012580
aaaacaca

SEQ ID NO: 41572 - DNA, 8 bp, Unknown
  misc_feature (1)..( 8): Matrix.001 file - promoters60/1012580
caaacttt

SEQ ID NO: 41573 - DNA, 6 bp, Unknown
  misc_feature (1)..( 6): Matrix.001 file - promoters60/1012580
aatatt

SEQ ID NO: 41574 - DNA, 6 bp, Unknown
  misc_feature (1)..( 6): Matrix.001 file - promoters60/1012580
atcaaa

SEQ ID NO: 41575 - DNA, 7 bp, Unknown
  misc_feature (1)..( 7): Matrix.001 file - promoters60/1012580
caaatcc

SEQ ID NO: 41576 - DNA, 7 bp, Unknown
  misc_feature (1)..( 7): Matrix.001 file - promoters60/1012580
cacaaga

SEQ ID NO: 41577 - DNA, 8 bp, Unknown
  misc_feature (1)..( 8): Matrix.001 file - promoters60/1012580
ctcgcttc

SEQ ID NO: 41578 - DNA, 8 bp, Unknown
  misc_feature (1)..( 8): Matrix.001 file - promoters60/1012580
cttctcga

SEQ ID NO: 41579 - DNA, 11 bp, Unknown
  misc_feature (1)..( 11): Matrix.001 file - promoters60/1012620
ataatttgagt

SEQ ID NO: 41580 - DNA, 8 bp, Unknown
  misc_feature (1)..( 8): Matrix.001 file - promoters60/1012620
aggaggaa

SEQ ID NO: 41581 - DNA, 8 bp, Unknown
  misc_feature (1)..( 8): Matrix.001 file - promoters60/1012620
gttacaac

SEQ ID NO: 41582 - DNA, 10 bp, Unknown
  misc_feature (1)..( 10): Matrix.001 file - promoters60/1012620
aatttataaa

SEQ ID NO: 41583 - DNA, 10 bp, Unknown
  misc_feature (1)..( 10): Matrix.001 file - promoters60/1012620
agaaaaaaga

SEQ ID NO: 41584 - DNA, 9 bp, Unknown
  misc_feature (1)..( 9): Matrix.001 file - promoters60/1012620
acttataaa

SEQ ID NO: 41585 - DNA, 10 bp, Unknown
  misc_feature (1)..( 10): Matrix.001 file - promoters60/1012673
ctaattaaaa

SEQ ID NO: 41586 - DNA, 11 bp, Unknown
  misc_feature (1)..( 11): Matrix.001 file - promoters60/1012673
caaataatttt

SEQ ID NO: 41587 - DNA, 9 bp, Unknown
  misc_feature (1)..( 9): Matrix.001 file - promoters60/1012673
tatcatttt

SEQ ID NO: 41588 - DNA, 11 bp, Unknown
  misc_feature (1)..( 11): Matrix.001 file - promoters60/1012673
agaatccagct

SEQ ID NO: 41589 - DNA, 10 bp, Unknown
  misc_feature (1)..( 10): Matrix.001 file - promoters60/1012673
tcaaataatt

SEQ ID NO: 41590 - DNA, 11 bp, Unknown
  misc_feature (1)..( 11): Matrix.001 file - promoters60/1012673
tgatttgtttg

SEQ ID NO: 41591 - DNA, 8 bp, Unknown
  misc_feature (1)..( 8): Matrix.001 file - promoters60/1012720
ttaagcta

SEQ ID NO: 41592 - DNA, 14 bp, Unknown
  misc_feature (1)..( 14): Matrix.001 file - promoters60/1012720
tttgattcctttaa

SEQ ID NO: 41593 - DNA, 8 bp, Unknown
  misc_feature (1)..( 8): Matrix.001 file - promoters60/1012720
tgttaaaa

SEQ ID NO: 41594 - DNA, 9 bp, Unknown
  misc_feature (1)..( 9): Matrix.001 file - promoters60/1012720
atgttttgc

SEQ ID NO: 41595 - DNA, 7 bp, Unknown
  misc_feature (1)..( 7): Matrix.001 file - promoters60/1012720
aagaaag

SEQ ID NO: 41596 - DNA, 8 bp, Unknown
  misc_feature (1)..( 8): Matrix.001 file - promoters60/1012720
taacttgt

SEQ ID NO: 41597 - DNA, 9 bp, Unknown
  misc_feature (1)..( 9): Matrix.001 file - promoters60/1012720
tgttataaa

SEQ ID NO: 41598 - DNA, 7 bp, Unknown
  misc_feature (1)..( 7): Matrix.001 file - promoters60/1012757
aaaatat

SEQ ID NO: 41599 - DNA, 9 bp, Unknown
  misc_feature (1)..( 9): Matrix.001 file - promoters60/1012757
aaattaaaa

SEQ ID NO: 41600 - DNA, 7 bp, Unknown
  misc_feature (1)..( 7): Matrix.001 file - promoters60/1012757
tctatgt

SEQ ID NO: 41601 - DNA, 11 bp, Unknown
  misc_feature (1)..( 11): Matrix.001 file - promoters60/1012757
tgtttgaacat

SEQ ID NO: 41602 - DNA, 8 bp, Unknown
  misc_feature (1)..( 8): Matrix.001 file - promoters60/1012757
caacgaaa

SEQ ID NO: 41603 - DNA, 6 bp, Unknown
  misc_feature (1)..( 6): Matrix.001 file - promoters60/1012791
ttgttt

SEQ ID NO: 41604 - DNA, 6 bp, Unknown
  misc_feature (1)..( 6): Matrix.001 file - promoters60/1012791
atatat

SEQ ID NO: 41605 - DNA, 6 bp, Unknown
  misc_feature (1)..( 6): Matrix.001 file - promoters60/1012791
attttt

SEQ ID NO: 41606 - DNA, 8 bp, Unknown
  misc_feature (1)..( 8): Matrix.001 file - promoters60/1012791
aaacaaaa

SEQ ID NO: 41607 - DNA, 7 bp, Unknown
  misc_feature (1)..( 7): Matrix.001 file - promoters60/1012791
aataaac

SEQ ID NO: 41608 - DNA, 6 bp, Unknown
  misc_feature (1)..( 6): Matrix.001 file - promoters60/1012791
tttatt

SEQ ID NO: 41609 - DNA, 6 bp, Unknown
  misc_feature (1)..( 6): Matrix.001 file - promoters60/1012791
attaaa

SEQ ID NO: 41610 - DNA, 6 bp, Unknown
  misc_feature (1)..( 6): Matrix.001 file - promoters60/1012791
attaca

SEQ ID NO: 41611 - DNA, 6 bp, Unknown
  misc_feature (1)..( 6): Matrix.001 file - promoters60/1012791
tatatt

SEQ ID NO: 41612 - DNA, 12 bp, Unknown
  misc_feature (1)..( 12): Matrix.001 file - promoters60/1012791
tatatataatgc

SEQ ID NO: 41613 - DNA, 9 bp, Unknown
  misc_feature (1)..( 9): Matrix.001 file - promoters60/1012791
tttttatat

SEQ ID NO: 41614 - DNA, 7 bp, Unknown
  misc_feature (1)..( 7): Matrix.001 file - promoters60/1012791
aacatta

SEQ ID NO: 41615 - DNA, 10 bp, Unknown
  misc_feature (1)..( 10): Matrix.001 file - promoters60/1012791
aaaaacaaat

SEQ ID NO: 41616 - DNA, 8 bp, Unknown
  misc_feature (1)..( 8): Matrix.001 file - promoters60/1012791
aaaaaaac

SEQ ID NO: 41617 - DNA, 7 bp, Unknown
  misc_feature (1)..( 7): Matrix.001 file - promoters60/1012791
accacag

SEQ ID NO: 41618 - DNA, 8 bp, Unknown
  misc_feature (1)..( 8): Matrix.001 file - promoters60/1012791
aaaaaaaa

SEQ ID NO: 41619 - DNA, 6 bp, Unknown
  misc_feature (1)..( 6): Matrix.001 file - promoters60/1012791
aaaaaa

SEQ ID NO: 41620 - DNA, 7 bp, Unknown
  misc_feature (1)..( 7): Matrix.001 file - promoters60/1012791
aaaaaag

SEQ ID NO: 41621 - DNA, 7 bp, Unknown
  misc_feature (1)..( 7): Matrix.001 file - promoters60/1012791
ttctttt

SEQ ID NO: 41622 - DNA, 6 bp, Unknown
  misc_feature (1)..( 6): Matrix.001 file - promoters60/1012791
ataaag

SEQ ID NO: 41623 - DNA, 8 bp, Unknown
  misc_feature (1)..( 8): Matrix.001 file - promoters60/1012791
cttcgcaa

SEQ ID NO: 41624 - DNA, 8 bp, Unknown
  misc_feature (1)..( 8): Matrix.001 file - promoters60/1012791
tttaaaaa

SEQ ID NO: 41625 - DNA, 6 bp, Unknown
  misc_feature (1)..( 6): Matrix.001 file - promoters60/1012791
tcattt

SEQ ID NO: 41626 - DNA, 8 bp, Unknown
  misc_feature (1)..( 8): Matrix.001 file - promoters60/1012791
ttgtttca

SEQ ID NO: 41627 - DNA, 8 bp, Unknown
  misc_feature (1)..( 8): Matrix.001 file - promoters60/1012791
tctatata

SEQ ID NO: 41628 - DNA, 6 bp, Unknown
  misc_feature (1)..( 6): Matrix.001 file - promoters60/1012791
aagata

SEQ ID NO: 41629 - DNA, 11 bp, Unknown
  misc_feature (1)..( 11): Matrix.001 file - promoters60/1012791
atccaccaccg

SEQ ID NO: 41630 - DNA, 11 bp, Unknown
  misc_feature (1)..( 11): Matrix.001 file - promoters60/1012883
gtagatattta

SEQ ID NO: 41631 - DNA, 8 bp, Unknown
  misc_feature (1)..( 8): Matrix.001 file - promoters60/1012883
tgatgaat

SEQ ID NO: 41632 - DNA, 10 bp, Unknown
  misc_feature (1)..( 10): Matrix.001 file - promoters60/1012883
ttagaaaaaa

SEQ ID NO: 41633 - DNA, 11 bp, Unknown
  misc_feature (1)..( 11): Matrix.001 file - promoters60/1012883
cggtacacgtg

SEQ ID NO: 41634 - DNA, 9 bp, Unknown
  misc_feature (1)..( 9): Matrix.001 file - promoters60/1012883
taaaaattg

SEQ ID NO: 41635 - DNA, 9 bp, Unknown
  misc_feature (1)..( 9): Matrix.001 file - promoters60/1012883
aaccattaa

SEQ ID NO: 41636 - DNA, 8 bp, Unknown
  misc_feature (1)..( 8): Matrix.001 file - promoters60/1012883
tagttttg

SEQ ID NO: 41637 - DNA, 14 bp, Unknown
  misc_feature (1)..( 14): Matrix.001 file - promoters60/1012883
tttaaatttgatga

SEQ ID NO: 41638 - DNA, 10 bp, Unknown
  misc_feature (1)..( 10): Matrix.001 file - promoters60/1012906
tgaagaaaaa

SEQ ID NO: 41639 - DNA, 12 bp, Unknown
  misc_feature (1)..( 12): Matrix.001 file - promoters60/1012906
aaaaaaatgttt

SEQ ID NO: 41640 - DNA, 8 bp, Unknown
  misc_feature (1)..( 8): Matrix.001 file - promoters60/1012906
ttaaaaaa

SEQ ID NO: 41641 - DNA, 15 bp, Unknown
  misc_feature (1)..( 15): Matrix.001 file - promoters60/1012906
agttaaaaaatctta

SEQ ID NO: 41642 - DNA, 9 bp, Unknown
  misc_feature (1)..( 9): Matrix.001 file - promoters60/1012906
ataatatct

SEQ ID NO: 41643 - DNA, 11 bp, Unknown
  misc_feature (1)..( 11): Matrix.001 file - promoters60/1012906
gaattgatata

SEQ ID NO: 41644 - DNA, 9 bp, Unknown
  misc_feature (1)..( 9): Matrix.001 file - promoters60/1012906
aaaatccat

SEQ ID NO: 41645 - DNA, 7 bp, Unknown
  misc_feature (1)..( 7): Matrix.001 file - promoters60/1012906
ctatata

SEQ ID NO: 41646 - DNA, 10 bp, Unknown
  misc_feature (1)..( 10): Matrix.001 file - promoters60/1012906
ttgacatatt

SEQ ID NO: 41647 - DNA, 10 bp, Unknown
  misc_feature (1)..( 10): Matrix.001 file - promoters60/1012906
aaatttataa

SEQ ID NO: 41648 - DNA, 10 bp, Unknown
  misc_feature (1)..( 10): Matrix.001 file - promoters60/1012906
agaatttata

SEQ ID NO: 41649 - DNA, 9 bp, Unknown
  misc_feature (1)..( 9): Matrix.001 file - promoters60/1012906
ccaattatt

SEQ ID NO: 41650 - DNA, 9 bp, Unknown
  misc_feature (1)..( 9): Matrix.001 file - promoters60/1012906
gaattgata

SEQ ID NO: 41651 - DNA, 9 bp, Unknown
  misc_feature (1)..( 9): Matrix.001 file - promoters60/1012906
aaatcatat

SEQ ID NO: 41652 - DNA, 11 bp, Unknown
  misc_feature (1)..( 11): Matrix.001 file - promoters60/1012912
tttgaaaaaaa

SEQ ID NO: 41653 - DNA, 8 bp, Unknown
  misc_feature (1)..( 8): Matrix.001 file - promoters60/1012912
atatctac

SEQ ID NO: 41654 - DNA, 11 bp, Unknown
  misc_feature (1)..( 11): Matrix.001 file - promoters60/1012943
taaaaaaataa

SEQ ID NO: 41655 - DNA, 14 bp, Unknown
  misc_feature (1)..( 14): Matrix.001 file - promoters60/1012943
tcaaaatgaaaaat

SEQ ID NO: 41656 - DNA, 12 bp, Unknown
  misc_feature (1)..( 12): Matrix.001 file - promoters60/1012943
ataaaaaataaa

SEQ ID NO: 41657 - DNA, 11 bp, Unknown
  misc_feature (1)..( 11): Matrix.001 file - promoters60/1012943
gaaaagaaata

SEQ ID NO: 41658 - DNA, 10 bp, Unknown
  misc_feature (1)..( 10): Matrix.001 file - promoters60/1012943
aaaagaaaag

SEQ ID NO: 41659 - DNA, 11 bp, Unknown
  misc_feature (1)..( 11): Matrix.001 file - promoters60/1012943
caccaaaaaaa

SEQ ID NO: 41660 - DNA, 12 bp, Unknown
  misc_feature (1)..( 12): Matrix.001 file - promoters60/1012943
ttaaattatttg

SEQ ID NO: 41661 - DNA, 8 bp, Unknown
  misc_feature (1)..( 8): Matrix.001 file - promoters60/1012984
tttgtgaa

SEQ ID NO: 41662 - DNA, 12 bp, Unknown
  misc_feature (1)..( 12): Matrix.001 file - promoters60/1012984
ggtagagataga

SEQ ID NO: 41663 - DNA, 8 bp, Unknown
  misc_feature (1)..( 8): Matrix.001 file - promoters60/1012984
ttgaaatt

SEQ ID NO: 41664 - DNA, 7 bp, Unknown
  misc_feature (1)..( 7): Matrix.001 file - promoters60/1012984
tggattt

SEQ ID NO: 41665 - DNA, 8 bp, Unknown
  misc_feature (1)..( 8): Matrix.001 file - promoters60/1012984
tgaaattt

SEQ ID NO: 41666 - DNA, 6 bp, Unknown
  misc_feature (1)..( 6): Matrix.001 file - promoters60/1012984
atacag

SEQ ID NO: 41667 - DNA, 7 bp, Unknown
  misc_feature (1)..( 7): Matrix.001 file - promoters60/1012984
cggtttg

SEQ ID NO: 41668 - DNA, 9 bp, Unknown
  misc_feature (1)..( 9): Matrix.001 file - promoters60/1013121
gaaaagaaa

SEQ ID NO: 41669 - DNA, 10 bp, Unknown
  misc_feature (1)..( 10): Matrix.001 file - promoters60/1013121
tcaaatttaa

SEQ ID NO: 41670 - DNA, 10 bp, Unknown
  misc_feature (1)..( 10): Matrix.001 file - promoters60/1013121
gatttaagat

SEQ ID NO: 41671 - DNA, 8 bp, Unknown
  misc_feature (1)..( 8): Matrix.001 file - promoters60/1013128
tatatata

SEQ ID NO: 41672 - DNA, 10 bp, Unknown
  misc_feature (1)..( 10): Matrix.001 file - promoters60/1013128
agaaaaaaaa

SEQ ID NO: 41673 - DNA, 8 bp, Unknown
  misc_feature (1)..( 8): Matrix.001 file - promoters60/1013190
gaattaaa

SEQ ID NO: 41674 - DNA, 8 bp, Unknown
  misc_feature (1)..( 8): Matrix.001 file - promoters60/1013190
aaaaaaaa

SEQ ID NO: 41675 - DNA, 7 bp, Unknown
  misc_feature (1)..( 7): Matrix.001 file - promoters60/1013190
attaaaa

SEQ ID NO: 41676 - DNA, 8 bp, Unknown
  misc_feature (1)..( 8): Matrix.001 file - promoters60/1013190
ccaaagaa

SEQ ID NO: 41677 - DNA, 7 bp, Unknown
  misc_feature (1)..( 7): Matrix.001 file - promoters60/1013190
tttattt

SEQ ID NO: 41678 - DNA, 7 bp, Unknown
  misc_feature (1)..( 7): Matrix.001 file - promoters60/1013190
ggtatta

SEQ ID NO: 41679 - DNA, 6 bp, Unknown
  misc_feature (1)..( 6): Matrix.001 file - promoters60/1013190
taaaag

SEQ ID NO: 41680 - DNA, 6 bp, Unknown
  misc_feature (1)..( 6): Matrix.001 file - promoters60/1013190
aaaatt

SEQ ID NO: 41681 - DNA, 9 bp, Unknown
  misc_feature (1)..( 9): Matrix.001 file - promoters60/1013190
gaatatatt

SEQ ID NO: 41682 - DNA, 6 bp, Unknown
  misc_feature (1)..( 6): Matrix.001 file - promoters60/1013190
tgaaat

SEQ ID NO: 41683 - DNA, 8 bp, Unknown
  misc_feature (1)..( 8): Matrix.001 file - promoters60/1013190
aataatta

SEQ ID NO: 41684 - DNA, 6 bp, Unknown
  misc_feature (1)..( 6): Matrix.001 file - promoters60/1013190
agttct

SEQ ID NO: 41685 - DNA, 7 bp, Unknown
  misc_feature (1)..( 7): Matrix.001 file - promoters60/1013190
tataaac

SEQ ID NO: 41686 - DNA, 6 bp, Unknown
  misc_feature (1)..( 6): Matrix.001 file - promoters60/1013190
aaacat

SEQ ID NO: 41687 - DNA, 8 bp, Unknown
  misc_feature (1)..( 8): Matrix.001 file - promoters60/1013190
tttagctt

SEQ ID NO: 41688 - DNA, 6 bp, Unknown
  misc_feature (1)..( 6): Matrix.001 file - promoters60/1013190
gcggaa

SEQ ID NO: 41689 - DNA, 7 bp, Unknown
  misc_feature (1)..( 7): Matrix.001 file - promoters60/1013190
tatcttc

SEQ ID NO: 41690 - DNA, 6 bp, Unknown
  misc_feature (1)..( 6): Matrix.001 file - promoters60/1013190
tccttg

SEQ ID NO: 41691 - DNA, 7 bp, Unknown
  misc_feature (1)..( 7): Matrix.001 file - promoters60/1013190
gatatat

SEQ ID NO: 41692 - DNA, 10 bp, Unknown
  misc_feature (1)..( 10): Matrix.001 file - promoters60/1013208
atttaaattg

SEQ ID NO: 41693 - DNA, 12 bp, Unknown
  misc_feature (1)..( 12): Matrix.001 file - promoters60/1013208
aaatgaaaatat

SEQ ID NO: 41694 - DNA, 7 bp, Unknown
  misc_feature (1)..( 7): Matrix.001 file - promoters60/1013208
taataaa

SEQ ID NO: 41695 - DNA, 6 bp, Unknown
  misc_feature (1)..( 6): Matrix.001 file - promoters60/1013208
atttta

SEQ ID NO: 41696 - DNA, 8 bp, Unknown
  misc_feature (1)..( 8): Matrix.001 file - promoters60/1013208
ttaaaaat

SEQ ID NO: 41697 - DNA, 7 bp, Unknown
  misc_feature (1)..( 7): Matrix.001 file - promoters60/1013208
aagaaat

SEQ ID NO: 41698 - DNA, 10 bp, Unknown
  misc_feature (1)..( 10): Matrix.001 file - promoters60/1013208
aaatttgttg

SEQ ID NO: 41699 - DNA, 9 bp, Unknown
  misc_feature (1)..( 9): Matrix.001 file - promoters60/1013208
ataattaaa

SEQ ID NO: 41700 - DNA, 8 bp, Unknown
  misc_feature (1)..( 8): Matrix.001 file - promoters60/1013208
taaaaatt

SEQ ID NO: 41701 - DNA, 11 bp, Unknown
  misc_feature (1)..( 11): Matrix.001 file - promoters60/1013208
taaataaataa

SEQ ID NO: 41702 - DNA, 17 bp, Unknown
  misc_feature (1)..( 17): Matrix.001 file - promoters60/1013208
aagaaaaaaatactttt

SEQ ID NO: 41703 - DNA, 8 bp, Unknown
  misc_feature (1)..( 8): Matrix.001 file - promoters60/1013242
ttttacat

SEQ ID NO: 41704 - DNA, 11 bp, Unknown
  misc_feature (1)..( 11): Matrix.001 file - promoters60/1013242
atttttaaatt

SEQ ID NO: 41705 - DNA, 10 bp, Unknown
  misc_feature (1)..( 10): Matrix.001 file - promoters60/1013274
ttataatatt

SEQ ID NO: 41706 - DNA, 8 bp, Unknown
  misc_feature (1)..( 8): Matrix.001 file - promoters60/1013274
aatatata

SEQ ID NO: 41707 - DNA, 9 bp, Unknown
  misc_feature (1)..( 9): Matrix.001 file - promoters60/1013274
aaaagaaaa

SEQ ID NO: 41708 - DNA, 9 bp, Unknown
  misc_feature (1)..( 9): Matrix.001 file - promoters60/1013274
tttttgttc

SEQ ID NO: 41709 - DNA, 11 bp, Unknown
  misc_feature (1)..( 11): Matrix.001 file - promoters60/1013274
catttttcttt

SEQ ID NO: 41710 - DNA, 11 bp, Unknown
  misc_feature (1)..( 11): Matrix.001 file - promoters60/1013274
aactttaaata

SEQ ID NO: 41711 - DNA, 6 bp, Unknown
  misc_feature (1)..( 6): Matrix.001 file - promoters60/1013298
ctttca

SEQ ID NO: 41712 - DNA, 6 bp, Unknown
  misc_feature (1)..( 6): Matrix.001 file - promoters60/1013298
agacta

SEQ ID NO: 41713 - DNA, 7 bp, Unknown
  misc_feature (1)..( 7): Matrix.001 file - promoters60/1013298
aaaatta

SEQ ID NO: 41714 - DNA, 6 bp, Unknown
  misc_feature (1)..( 6): Matrix.001 file - promoters60/1013298
ttgaag

SEQ ID NO: 41715 - DNA, 7 bp, Unknown
  misc_feature (1)..( 7): Matrix.001 file - promoters60/1013298
tttaaat

SEQ ID NO: 41716 - DNA, 7 bp, Unknown
  misc_feature (1)..( 7): Matrix.001 file - promoters60/1013298
ttttgtt

SEQ ID NO: 41717 - DNA, 7 bp, Unknown
  misc_feature (1)..( 7): Matrix.001 file - promoters60/1013298
attttaa

SEQ ID NO: 41718 - DNA, 7 bp, Unknown
  misc_feature (1)..( 7): Matrix.001 file - promoters60/1013298
ttaattt

SEQ ID NO: 41719 - DNA, 8 bp, Unknown
  misc_feature (1)..( 8): Matrix.001 file - promoters60/1013298
gtcatttt

SEQ ID NO: 41720 - DNA, 8 bp, Unknown
  misc_feature (1)..( 8): Matrix.001 file - promoters60/1013298
ttttatgg

SEQ ID NO: 41721 - DNA, 6 bp, Unknown
  misc_feature (1)..( 6): Matrix.001 file - promoters60/1013298
atcaaa

SEQ ID NO: 41722 - DNA, 7 bp, Unknown
  misc_feature (1)..( 7): Matrix.001 file - promoters60/1013298
ttaatat

SEQ ID NO: 41723 - DNA, 8 bp, Unknown
  misc_feature (1)..( 8): Matrix.001 file - promoters60/1013298
ttggattt

SEQ ID NO: 41724 - DNA, 6 bp, Unknown
  misc_feature (1)..( 6): Matrix.001 file - promoters60/1013298
ttccat

SEQ ID NO: 41725 - DNA, 8 bp, Unknown
  misc_feature (1)..( 8): Matrix.001 file - promoters60/1013298
atgctttt

SEQ ID NO: 41726 - DNA, 6 bp, Unknown
  misc_feature (1)..( 6): Matrix.001 file - promoters60/1013298
ttctca

SEQ ID NO: 41727 - DNA, 6 bp, Unknown
  misc_feature (1)..( 6): Matrix.001 file - promoters60/1013298
tgtctc

SEQ ID NO: 41728 - DNA, 6 bp, Unknown
  misc_feature (1)..( 6): Matrix.001 file - promoters60/1013298
tatttt

SEQ ID NO: 41729 - DNA, 8 bp, Unknown
  misc_feature (1)..( 8): Matrix.001 file - promoters60/1013298
caattgat

SEQ ID NO: 41730 - DNA, 7 bp, Unknown
  misc_feature (1)..( 7): Matrix.001 file - promoters60/1013298
gaagttt

SEQ ID NO: 41731 - DNA, 6 bp, Unknown
  misc_feature (1)..( 6): Matrix.001 file - promoters60/1013298
aaagtt

SEQ ID NO: 41732 - DNA, 6 bp, Unknown
  misc_feature (1)..( 6): Matrix.001 file - promoters60/1013298
ttgtca

SEQ ID NO: 41733 - DNA, 12 bp, Unknown
  misc_feature (1)..( 12): Matrix.001 file - promoters60/1013310
tcctcttttata

SEQ ID NO: 41734 - DNA, 8 bp, Unknown
  misc_feature (1)..( 8): Matrix.001 file - promoters60/1013310
aattcaaa

SEQ ID NO: 41735 - DNA, 9 bp, Unknown
  misc_feature (1)..( 9): Matrix.001 file - promoters60/1013310
tccactttg

SEQ ID NO: 41736 - DNA, 7 bp, Unknown
  misc_feature (1)..( 7): Matrix.001 file - promoters60/1013314
taaaata

SEQ ID NO: 41737 - DNA, 11 bp, Unknown
  misc_feature (1)..( 11): Matrix.001 file - promoters60/1013314
aaatattttta

SEQ ID NO: 41738 - DNA, 10 bp, Unknown
  misc_feature (1)..( 10): Matrix.001 file - promoters60/1013314
tatatagaaa

SEQ ID NO: 41739 - DNA, 10 bp, Unknown
  misc_feature (1)..( 10): Matrix.001 file - promoters60/1013314
atttttatta

SEQ ID NO: 41740 - DNA, 12 bp, Unknown
  misc_feature (1)..( 12): Matrix.001 file - promoters60/1013314
tcaaaagaaaaa

SEQ ID NO: 41741 - DNA, 8 bp, Unknown
  misc_feature (1)..( 8): Matrix.001 file - promoters60/1013314
aaaaatta

SEQ ID NO: 41742 - DNA, 10 bp, Unknown
  misc_feature (1)..( 10): Matrix.001 file - promoters60/1013314
aaattaaaag

SEQ ID NO: 41743 - DNA, 9 bp, Unknown
  misc_feature (1)..( 9): Matrix.001 file - promoters60/1013314
ttatataaa

SEQ ID NO: 41744 - DNA, 11 bp, Unknown
  misc_feature (1)..( 11): Matrix.001 file - promoters60/1013314
tcaatattatc

SEQ ID NO: 41745 - DNA, 10 bp, Unknown
  misc_feature (1)..( 10): Matrix.001 file - promoters60/1013314
atatttttat

SEQ ID NO: 41746 - DNA, 9 bp, Unknown
  misc_feature (1)..( 9): Matrix.001 file - promoters60/1013314
ataaattat

SEQ ID NO: 41747 - DNA, 5 bp, Unknown
  misc_feature (1)..( 5): Matrix.001 file - promoters60/1013314
atttt

SEQ ID NO: 41748 - DNA, 9 bp, Unknown
  misc_feature (1)..( 9): Matrix.001 file - promoters60/1013314
aacaaaata

SEQ ID NO: 41749 - DNA, 13 bp, Unknown
  misc_feature (1)..( 13): Matrix.001 file - promoters60/1013314
aataaaagaattt

SEQ ID NO: 41750 - DNA, 11 bp, Unknown
  misc_feature (1)..( 11): Matrix.001 file - promoters60/1013314
tcaaaaaaaaa

SEQ ID NO: 41751 - DNA, 13 bp, Unknown
  misc_feature (1)..( 13): Matrix.001 file - promoters60/1013314
ataaagctttaaa

SEQ ID NO: 41752 - DNA, 11 bp, Unknown
  misc_feature (1)..( 11): Matrix.001 file - promoters60/1013314
attttaaaata

SEQ ID NO: 41753 - DNA, 4 bp, Unknown
  misc_feature (1)..( 4): Matrix.001 file - promoters60/1013314
aaat

SEQ ID NO: 41754 - DNA, 10 bp, Unknown
  misc_feature (1)..( 10): Matrix.001 file - promoters60/1013314
ttttaacaaa

SEQ ID NO: 41755 - DNA, 8 bp, Unknown
  misc_feature (1)..( 8): Matrix.001 file - promoters60/1013384
aaaacaga

SEQ ID NO: 41756 - DNA, 7 bp, Unknown
  misc_feature (1)..( 7): Matrix.001 file - promoters60/1013384
ccaatga

SEQ ID NO: 41757 - DNA, 8 bp, Unknown
  misc_feature (1)..( 8): Matrix.001 file - promoters60/1013384
gagcatga

SEQ ID NO: 41758 - DNA, 8 bp, Unknown
  misc_feature (1)..( 8): Matrix.001 file - promoters60/1013384
tccagaag

SEQ ID NO: 41759 - DNA, 6 bp, Unknown
  misc_feature (1)..( 6): Matrix.001 file - promoters60/1013384
gacttg

SEQ ID NO: 41760 - DNA, 6 bp, Unknown
  misc_feature (1)..( 6): Matrix.001 file - promoters60/1013384
tcttct

SEQ ID NO: 41761 - DNA, 6 bp, Unknown
  misc_feature (1)..( 6): Matrix.001 file - promoters60/1013384
caagaa

SEQ ID NO: 41762 - DNA, 6 bp, Unknown
  misc_feature (1)..( 6): Matrix.001 file - promoters60/1013384
tctaaa

SEQ ID NO: 41763 - DNA, 6 bp, Unknown
  misc_feature (1)..( 6): Matrix.001 file - promoters60/1013384
caaacc

SEQ ID NO: 41764 - DNA, 7 bp, Unknown
  misc_feature (1)..( 7): Matrix.001 file - promoters60/1013384
tttaggt

SEQ ID NO: 41765 - DNA, 6 bp, Unknown
  misc_feature (1)..( 6): Matrix.001 file - promoters60/1013384
ttcagt

SEQ ID NO: 41766 - DNA, 15 bp, Unknown
  misc_feature (1)..( 15): Matrix.001 file - promoters60/1013413
taataacaataagaa

SEQ ID NO: 41767 - DNA, 11 bp, Unknown
  misc_feature (1)..( 11): Matrix.001 file - promoters60/1013413
atttaataaaa

SEQ ID NO: 41768 - DNA, 6 bp, Unknown
  misc_feature (1)..( 6): Matrix.001 file - promoters60/1013427
aattca

SEQ ID NO: 41769 - DNA, 6 bp, Unknown
  misc_feature (1)..( 6): Matrix.001 file - promoters60/1013427
caacgg

SEQ ID NO: 41770 - DNA, 8 bp, Unknown
  misc_feature (1)..( 8): Matrix.001 file - promoters60/1013427
tttctctt

SEQ ID NO: 41771 - DNA, 9 bp, Unknown
  misc_feature (1)..( 9): Matrix.001 file - promoters60/1013427
tttatatta

SEQ ID NO: 41772 - DNA, 7 bp, Unknown
  misc_feature (1)..( 7): Matrix.001 file - promoters60/1013427
ttcaatt

SEQ ID NO: 41773 - DNA, 8 bp, Unknown
  misc_feature (1)..( 8): Matrix.001 file - promoters60/1013427
aataattt

SEQ ID NO: 41774 - DNA, 6 bp, Unknown
  misc_feature (1)..( 6): Matrix.001 file - promoters60/1013427
tctttg

SEQ ID NO: 41775 - DNA, 11 bp, Unknown
  misc_feature (1)..( 11): Matrix.001 file - promoters60/1013427
aataatgattt

SEQ ID NO: 41776 - DNA, 7 bp, Unknown
  misc_feature (1)..( 7): Matrix.001 file - promoters60/1013427
ataatta

SEQ ID NO: 41777 - DNA, 6 bp, Unknown
  misc_feature (1)..( 6): Matrix.001 file - promoters60/1013427
ttacaa

SEQ ID NO: 41778 - DNA, 7 bp, Unknown
  misc_feature (1)..( 7): Matrix.001 file - promoters60/1013427
gaaatca

SEQ ID NO: 41779 - DNA, 7 bp, Unknown
  misc_feature (1)..( 7): Matrix.001 file - promoters60/1013497
aaaggaa

SEQ ID NO: 41780 - DNA, 6 bp, Unknown
  misc_feature (1)..( 6): Matrix.001 file - promoters60/1013497
aataaa

SEQ ID NO: 41781 - DNA, 8 bp, Unknown
  misc_feature (1)..( 8): Matrix.001 file - promoters60/1013497
aaatgtta

SEQ ID NO: 41782 - DNA, 8 bp, Unknown
  misc_feature (1)..( 8): Matrix.001 file - promoters60/1013497
aattatca

SEQ ID NO: 41783 - DNA, 6 bp, Unknown
  misc_feature (1)..( 6): Matrix.001 file - promoters60/1013497
aaaatg

SEQ ID NO: 41784 - DNA, 6 bp, Unknown
  misc_feature (1)..( 6): Matrix.001 file - promoters60/1013497
ataaga

SEQ ID NO: 41785 - DNA, 6 bp, Unknown
  misc_feature (1)..( 6): Matrix.001 file - promoters60/1013497
gttgac

SEQ ID NO: 41786 - DNA, 6 bp, Unknown
  misc_feature (1)..( 6): Matrix.001 file - promoters60/1013497
cactca

SEQ ID NO: 41787 - DNA, 6 bp, Unknown
  misc_feature (1)..( 6): Matrix.001 file - promoters60/1013497
ccacca

SEQ ID NO: 41788 - DNA, 6 bp, Unknown
  misc_feature (1)..( 6): Matrix.001 file - promoters60/1013497
cggtga

SEQ ID NO: 41789 - DNA, 9 bp, Unknown
  misc_feature (1)..( 9): Matrix.001 file - promoters60/1013497
gaagtacta

SEQ ID NO: 41790 - DNA, 6 bp, Unknown
  misc_feature (1)..( 6): Matrix.001 file - promoters60/1013497
ccaagt

SEQ ID NO: 41791 - DNA, 7 bp, Unknown
  misc_feature (1)..( 7): Matrix.001 file - promoters60/1013497
tctaagc

SEQ ID NO: 41792 - DNA, 12 bp, Unknown
  misc_feature (1)..( 12): Matrix.001 file - promoters60/1013540
atcttctatgtt

SEQ ID NO: 41793 - DNA, 7 bp, Unknown
  misc_feature (1)..( 7): Matrix.001 file - promoters60/1013629
ggtttct

SEQ ID NO: 41794 - DNA, 8 bp, Unknown
  misc_feature (1)..( 8): Matrix.001 file - promoters60/1013629
agagaaag

SEQ ID NO: 41795 - DNA, 9 bp, Unknown
  misc_feature (1)..( 9): Matrix.001 file - promoters60/1013629
tttcttaga

SEQ ID NO: 41796 - DNA, 8 bp, Unknown
  misc_feature (1)..( 8): Matrix.001 file - promoters60/1013629
ttttcttt

SEQ ID NO: 41797 - DNA, 9 bp, Unknown
  misc_feature (1)..( 9): Matrix.001 file - promoters60/1013641
tattatcat

SEQ ID NO: 41798 - DNA, 12 bp, Unknown
  misc_feature (1)..( 12): Matrix.001 file - promoters60/1013641
tttgacttttaa

SEQ ID NO: 41799 - DNA, 10 bp, Unknown
  misc_feature (1)..( 10): Matrix.001 file - promoters60/1013641
ggattcaaat

SEQ ID NO: 41800 - DNA, 9 bp, Unknown
  misc_feature (1)..( 9): Matrix.001 file - promoters60/1013641
tttaaaata

SEQ ID NO: 41801 - DNA, 11 bp, Unknown
  misc_feature (1)..( 11): Matrix.001 file - promoters60/1013641
tttctacatag

SEQ ID NO: 41802 - DNA, 10 bp, Unknown
  misc_feature (1)..( 10): Matrix.001 file - promoters60/1013641
tctcccttct

SEQ ID NO: 41803 - DNA, 8 bp, Unknown
  misc_feature (1)..( 8): Matrix.001 file - promoters60/1013645
agctcctc

SEQ ID NO: 41804 - DNA, 7 bp, Unknown
  misc_feature (1)..( 7): Matrix.001 file - promoters60/1013645
ttcgtct

SEQ ID NO: 41805 - DNA, 6 bp, Unknown
  misc_feature (1)..( 6): Matrix.001 file - promoters60/1013645
ataaat

SEQ ID NO: 41806 - DNA, 6 bp, Unknown
  misc_feature (1)..( 6): Matrix.001 file - promoters60/1013645
atgatc

SEQ ID NO: 41807 - DNA, 7 bp, Unknown
  misc_feature (1)..( 7): Matrix.001 file - promoters60/1013645
agaattg

SEQ ID NO: 41808 - DNA, 7 bp, Unknown
  misc_feature (1)..( 7): Matrix.001 file - promoters60/1013645
tgtatat

SEQ ID NO: 41809 - DNA, 8 bp, Unknown
  misc_feature (1)..( 8): Matrix.001 file - promoters60/1013645
tctggttt

SEQ ID NO: 41810 - DNA, 7 bp, Unknown
  misc_feature (1)..( 7): Matrix.001 file - promoters60/1013645
tttactt

SEQ ID NO: 41811 - DNA, 8 bp, Unknown
  misc_feature (1)..( 8): Matrix.001 file - promoters60/1013645
cttgtctc

SEQ ID NO: 41812 - DNA, 7 bp, Unknown
  misc_feature (1)..( 7): Matrix.001 file - promoters60/1013645
ttgaagc

SEQ ID NO: 41813 - DNA, 6 bp, Unknown
  misc_feature (1)..( 6): Matrix.001 file - promoters60/1013645
cctttt

SEQ ID NO: 41814 - DNA, 7 bp, Unknown
  misc_feature (1)..( 7): Matrix.001 file - promoters60/1013645
ttttttt

SEQ ID NO: 41815 - DNA, 7 bp, Unknown
  misc_feature (1)..( 7): Matrix.001 file - promoters60/1013645
ggcctat

SEQ ID NO: 41816 - DNA, 8 bp, Unknown
  misc_feature (1)..( 8): Matrix.001 file - promoters60/1013674
ttttgttt

SEQ ID NO: 41817 - DNA, 8 bp, Unknown
  misc_feature (1)..( 8): Matrix.001 file - promoters60/1013674
attacttt

SEQ ID NO: 41818 - DNA, 6 bp, Unknown
  misc_feature (1)..( 6): Matrix.001 file - promoters60/1013674
aaacat

SEQ ID NO: 41819 - DNA, 8 bp, Unknown
  misc_feature (1)..( 8): Matrix.001 file - promoters60/1013674
tgagtttt

SEQ ID NO: 41820 - DNA, 9 bp, Unknown
  misc_feature (1)..( 9): Matrix.001 file - promoters60/1013674
ataagcttt

SEQ ID NO: 41821 - DNA, 12 bp, Unknown
  misc_feature (1)..( 12): Matrix.001 file - promoters60/1013674
tttttgtttcaa

SEQ ID NO: 41822 - DNA, 6 bp, Unknown
  misc_feature (1)..( 6): Matrix.001 file - promoters60/1013674
atatca

SEQ ID NO: 41823 - DNA, 7 bp, Unknown
  misc_feature (1)..( 7): Matrix.001 file - promoters60/1013674
atagttt

SEQ ID NO: 41824 - DNA, 8 bp, Unknown
  misc_feature (1)..( 8): Matrix.001 file - promoters60/1013674
tagcataa

SEQ ID NO: 41825 - DNA, 8 bp, Unknown
  misc_feature (1)..( 8): Matrix.001 file - promoters60/1013674
ttaaaaat

SEQ ID NO: 41826 - DNA, 6 bp, Unknown
  misc_feature (1)..( 6): Matrix.001 file - promoters60/1013674
acaaaa

SEQ ID NO: 41827 - DNA, 7 bp, Unknown
  misc_feature (1)..( 7): Matrix.001 file - promoters60/1013674
ataattt

SEQ ID NO: 41828 - DNA, 7 bp, Unknown
  misc_feature (1)..( 7): Matrix.001 file - promoters60/1013674
tttaata

SEQ ID NO: 41829 - DNA, 7 bp, Unknown
  misc_feature (1)..( 7): Matrix.001 file - promoters60/1013674
attaaat

SEQ ID NO: 41830 - DNA, 8 bp, Unknown
  misc_feature (1)..( 8): Matrix.001 file - promoters60/1013674
aaaacaat

SEQ ID NO: 41831 - DNA, 7 bp, Unknown
  misc_feature (1)..( 7): Matrix.001 file - promoters60/1013674
ataaaat

SEQ ID NO: 41832 - DNA, 7 bp, Unknown
  misc_feature (1)..( 7): Matrix.001 file - promoters60/1013674
taccttt

SEQ ID NO: 41833 - DNA, 7 bp, Unknown
  misc_feature (1)..( 7): Matrix.001 file - promoters60/1013674
tttacta

SEQ ID NO: 41834 - DNA, 6 bp, Unknown
  misc_feature (1)..( 6): Matrix.001 file - promoters60/1013674
atatat

SEQ ID NO: 41835 - DNA, 7 bp, Unknown
  misc_feature (1)..( 7): Matrix.001 file - promoters60/1013674
ataatat

SEQ ID NO: 41836 - DNA, 8 bp, Unknown
  misc_feature (1)..( 8): Matrix.001 file - promoters60/1013674
cttaaaat

SEQ ID NO: 41837 - DNA, 6 bp, Unknown
  misc_feature (1)..( 6): Matrix.001 file - promoters60/1013674
tttcct

SEQ ID NO: 41838 - DNA, 6 bp, Unknown
  misc_feature (1)..( 6): Matrix.001 file - promoters60/1013674
attttt

SEQ ID NO: 41839 - DNA, 7 bp, Unknown
  misc_feature (1)..( 7): Matrix.001 file - promoters60/1013674
tttgtta

SEQ ID NO: 41840 - DNA, 6 bp, Unknown
  misc_feature (1)..( 6): Matrix.001 file - promoters60/1013674
atttaa

SEQ ID NO: 41841 - DNA, 6 bp, Unknown
  misc_feature (1)..( 6): Matrix.001 file - promoters60/1013674
aataga

SEQ ID NO: 41842 - DNA, 8 bp, Unknown
  misc_feature (1)..( 8): Matrix.001 file - promoters60/1013674
aaacaaag

SEQ ID NO: 41843 - DNA, 7 bp, Unknown
  misc_feature (1)..( 7): Matrix.001 file - promoters60/1013674
aacaaaa

SEQ ID NO: 41844 - DNA, 6 bp, Unknown
  misc_feature (1)..( 6): Matrix.001 file - promoters60/1013674
tgtatt

SEQ ID NO: 41845 - DNA, 7 bp, Unknown
  misc_feature (1)..( 7): Matrix.001 file - promoters60/1013674
tatctgt

SEQ ID NO: 41846 - DNA, 7 bp, Unknown
  misc_feature (1)..( 7): Matrix.001 file - promoters60/1013674
attgtat

SEQ ID NO: 41847 - DNA, 11 bp, Unknown
  misc_feature (1)..( 11): Matrix.001 file - promoters60/1013674
aaataataatt

SEQ ID NO: 41848 - DNA, 7 bp, Unknown
  misc_feature (1)..( 7): Matrix.001 file - promoters60/1013690
tttcaga

SEQ ID NO: 41849 - DNA, 11 bp, Unknown
  misc_feature (1)..( 11): Matrix.001 file - promoters60/1013690
taagaggtata

SEQ ID NO: 41850 - DNA, 6 bp, Unknown
  misc_feature (1)..( 6): Matrix.001 file - promoters60/1013690
tatgtt

SEQ ID NO: 41851 - DNA, 6 bp, Unknown
  misc_feature (1)..( 6): Matrix.001 file - promoters60/1013690
caagaa

SEQ ID NO: 41852 - DNA, 8 bp, Unknown
  misc_feature (1)..( 8): Matrix.001 file - promoters60/1013690
attactga

SEQ ID NO: 41853 - DNA, 7 bp, Unknown
  misc_feature (1)..( 7): Matrix.001 file - promoters60/1013690
tatcata

SEQ ID NO: 41854 - DNA, 6 bp, Unknown
  misc_feature (1)..( 6): Matrix.001 file - promoters60/1013690
aatttg

SEQ ID NO: 41855 - DNA, 6 bp, Unknown
  misc_feature (1)..( 6): Matrix.001 file - promoters60/1013690
tataaa

SEQ ID NO: 41856 - DNA, 6 bp, Unknown
  misc_feature (1)..( 6): Matrix.001 file - promoters60/1013690
tctcaa

SEQ ID NO: 41857 - DNA, 7 bp, Unknown
  misc_feature (1)..( 7): Matrix.001 file - promoters60/1013690
aaccaca

SEQ ID NO: 41858 - DNA, 6 bp, Unknown
  misc_feature (1)..( 6): Matrix.001 file - promoters60/1013690
ggctga

SEQ ID NO: 41859 - DNA, 11 bp, Unknown
  misc_feature (1)..( 11): Matrix.001 file - promoters60/1013690
agggtctcaga

SEQ ID NO: 41860 - DNA, 6 bp, Unknown
  misc_feature (1)..( 6): Matrix.001 file - promoters60/1013690
agattt

SEQ ID NO: 41861 - DNA, 6 bp, Unknown
  misc_feature (1)..( 6): Matrix.001 file - promoters60/1013710
acatgt

SEQ ID NO: 41862 - DNA, 8 bp, Unknown
  misc_feature (1)..( 8): Matrix.001 file - promoters60/1013710
taatgagt

SEQ ID NO: 41863 - DNA, 6 bp, Unknown
  misc_feature (1)..( 6): Matrix.001 file - promoters60/1013710
ttttaa

SEQ ID NO: 41864 - DNA, 6 bp, Unknown
  misc_feature (1)..( 6): Matrix.001 file - promoters60/1013710
aaaata

SEQ ID NO: 41865 - DNA, 8 bp, Unknown
  misc_feature (1)..( 8): Matrix.001 file - promoters60/1013710
aagcattg

SEQ ID NO: 41866 - DNA, 6 bp, Unknown
  misc_feature (1)..( 6): Matrix.001 file - promoters60/1013710
tccaca

SEQ ID NO: 41867 - DNA, 7 bp, Unknown
  misc_feature (1)..( 7): Matrix.001 file - promoters60/1013710
ttgaaat

SEQ ID NO: 41868 - DNA, 6 bp, Unknown
  misc_feature (1)..( 6): Matrix.001 file - promoters60/1013710
aagaag

SEQ ID NO: 41869 - DNA, 6 bp, Unknown
  misc_feature (1)..( 6): Matrix.001 file - promoters60/1013710
aataaa

SEQ ID NO: 41870 - DNA, 8 bp, Unknown
  misc_feature (1)..( 8): Matrix.001 file - promoters60/1013710
aaaacttt

SEQ ID NO: 41871 - DNA, 9 bp, Unknown
  misc_feature (1)..( 9): Matrix.001 file - promoters60/1013710
taaaaagag

SEQ ID NO: 41872 - DNA, 7 bp, Unknown
  misc_feature (1)..( 7): Matrix.001 file - promoters60/1013710
tttcaag

SEQ ID NO: 41873 - DNA, 8 bp, Unknown
  misc_feature (1)..( 8): Matrix.001 file - promoters60/1013710
agccatac

SEQ ID NO: 41874 - DNA, 10 bp, Unknown
  misc_feature (1)..( 10): Matrix.001 file - promoters60/1013710
cttgaataac

SEQ ID NO: 41875 - DNA, 9 bp, Unknown
  misc_feature (1)..( 9): Matrix.001 file - promoters60/1013710
taaacgaaa

SEQ ID NO: 41876 - DNA, 6 bp, Unknown
  misc_feature (1)..( 6): Matrix.001 file - promoters60/1013714
tctttt

SEQ ID NO: 41877 - DNA, 8 bp, Unknown
  misc_feature (1)..( 8): Matrix.001 file - promoters60/1013714
atttaaat

SEQ ID NO: 41878 - DNA, 7 bp, Unknown
  misc_feature (1)..( 7): Matrix.001 file - promoters60/1013714
aaaaact

SEQ ID NO: 41879 - DNA, 10 bp, Unknown
  misc_feature (1)..( 10): Matrix.001 file - promoters60/1013714
aaataattat

SEQ ID NO: 41880 - DNA, 6 bp, Unknown
  misc_feature (1)..( 6): Matrix.001 file - promoters60/1013714
atgatc

SEQ ID NO: 41881 - DNA, 7 bp, Unknown
  misc_feature (1)..( 7): Matrix.001 file - promoters60/1013714
cacgaca

SEQ ID NO: 41882 - DNA, 7 bp, Unknown
  misc_feature (1)..( 7): Matrix.001 file - promoters60/1013714
ttcaaaa

SEQ ID NO: 41883 - DNA, 8 bp, Unknown
  misc_feature (1)..( 8): Matrix.001 file - promoters60/1013714
aaaggaag

SEQ ID NO: 41884 - DNA, 9 bp, Unknown
  misc_feature (1)..( 9): Matrix.001 file - promoters60/1013714
gaaaaaagt

SEQ ID NO: 41885 - DNA, 11 bp, Unknown
  misc_feature (1)..( 11): Matrix.001 file - promoters60/1013714
tatataaaagc

SEQ ID NO: 41886 - DNA, 9 bp, Unknown
  misc_feature (1)..( 9): Matrix.001 file - promoters60/1013714
gccatgaac

SEQ ID NO: 41887 - DNA, 8 bp, Unknown
  misc_feature (1)..( 8): Matrix.001 file - promoters60/1013714
cattatca

SEQ ID NO: 41888 - DNA, 8 bp, Unknown
  misc_feature (1)..( 8): Matrix.001 file - promoters60/1013714
atgaaatt

SEQ ID NO: 41889 - DNA, 8 bp, Unknown
  misc_feature (1)..( 8): Matrix.001 file - promoters60/1013714
ttgtattt

SEQ ID NO: 41890 - DNA, 8 bp, Unknown
  misc_feature (1)..( 8): Matrix.001 file - promoters60/1013714
ttaatttt

SEQ ID NO: 41891 - DNA, 6 bp, Unknown
  misc_feature (1)..( 6): Matrix.001 file - promoters60/1013714
aaattt

SEQ ID NO: 41892 - DNA, 7 bp, Unknown
  misc_feature (1)..( 7): Matrix.001 file - promoters60/1013714
aacctta

SEQ ID NO: 41893 - DNA, 9 bp, Unknown
  misc_feature (1)..( 9): Matrix.001 file - promoters60/1013714
cattctaaa

SEQ ID NO: 41894 - DNA, 6 bp, Unknown
  misc_feature (1)..( 6): Matrix.001 file - promoters60/1013714
aagcat

SEQ ID NO: 41895 - DNA, 7 bp, Unknown
  misc_feature (1)..( 7): Matrix.001 file - promoters60/1013714
atttttt

SEQ ID NO: 41896 - DNA, 8 bp, Unknown
  misc_feature (1)..( 8): Matrix.001 file - promoters60/1013714
aaattgct

SEQ ID NO: 41897 - DNA, 8 bp, Unknown
  misc_feature (1)..( 8): Matrix.001 file - promoters60/1013714
aaaaaatg

SEQ ID NO: 41898 - DNA, 6 bp, Unknown
  misc_feature (1)..( 6): Matrix.001 file - promoters60/1013714
aaatat

SEQ ID NO: 41899 - DNA, 6 bp, Unknown
  misc_feature (1)..( 6): Matrix.001 file - promoters60/1013714
aattta

SEQ ID NO: 41900 - DNA, 8 bp, Unknown
  misc_feature (1)..( 8): Matrix.001 file - promoters60/1013764
tattatgt

SEQ ID NO: 41901 - DNA, 8 bp, Unknown
  misc_feature (1)..( 8): Matrix.001 file - promoters60/1013764
taccaatc

SEQ ID NO: 41902 - DNA, 7 bp, Unknown
  misc_feature (1)..( 7): Matrix.001 file - promoters60/1013764
gtaggtt

SEQ ID NO: 41903 - DNA, 6 bp, Unknown
  misc_feature (1)..( 6): Matrix.001 file - promoters60/1013764
gtttct

SEQ ID NO: 41904 - DNA, 6 bp, Unknown
  misc_feature (1)..( 6): Matrix.001 file - promoters60/1013764
gttttg

SEQ ID NO: 41905 - DNA, 6 bp, Unknown
  misc_feature (1)..( 6): Matrix.001 file - promoters60/1013764
tagtaa

SEQ ID NO: 41906 - DNA, 7 bp, Unknown
  misc_feature (1)..( 7): Matrix.001 file - promoters60/1013764
atatctg

SEQ ID NO: 41907 - DNA, 8 bp, Unknown
  misc_feature (1)..( 8): Matrix.001 file - promoters60/1013764
gctaccat

SEQ ID NO: 41908 - DNA, 6 bp, Unknown
  misc_feature (1)..( 6): Matrix.001 file - promoters60/1013764
ggtgag

SEQ ID NO: 41909 - DNA, 11 bp, Unknown
  misc_feature (1)..( 11): Matrix.001 file - promoters60/1013764
acttgtctcct

SEQ ID NO: 41910 - DNA, 7 bp, Unknown
  misc_feature (1)..( 7): Matrix.001 file - promoters60/1013764
gtgctaa

SEQ ID NO: 41911 - DNA, 7 bp, Unknown
  misc_feature (1)..( 7): Matrix.001 file - promoters60/1013764
gatgaag

SEQ ID NO: 41912 - DNA, 7 bp, Unknown
  misc_feature (1)..( 7): Matrix.001 file - promoters60/1013764
tctacct

SEQ ID NO: 41913 - DNA, 7 bp, Unknown
  misc_feature (1)..( 7): Matrix.001 file - promoters60/1013764
cttattg

SEQ ID NO: 41914 - DNA, 7 bp, Unknown
  misc_feature (1)..( 7): Matrix.001 file - promoters60/1013764
gttcctt

SEQ ID NO: 41915 - DNA, 9 bp, Unknown
  misc_feature (1)..( 9): Matrix.001 file - promoters60/1013805
attcttttc

SEQ ID NO: 41916 - DNA, 7 bp, Unknown
  misc_feature (1)..( 7): Matrix.001 file - promoters60/1013850
attataa

SEQ ID NO: 41917 - DNA, 6 bp, Unknown
  misc_feature (1)..( 6): Matrix.001 file - promoters60/1013850
gttcta

SEQ ID NO: 41918 - DNA, 6 bp, Unknown
  misc_feature (1)..( 6): Matrix.001 file - promoters60/1013850
atttga

SEQ ID NO: 41919 - DNA, 6 bp, Unknown
  misc_feature (1)..( 6): Matrix.001 file - promoters60/1013850
ttaaaa

SEQ ID NO: 41920 - DNA, 8 bp, Unknown
  misc_feature (1)..( 8): Matrix.001 file - promoters60/1013850
attgtgtt

SEQ ID NO: 41921 - DNA, 6 bp, Unknown
  misc_feature (1)..( 6): Matrix.001 file - promoters60/1013850
aaaatt

SEQ ID NO: 41922 - DNA, 6 bp, Unknown
  misc_feature (1)..( 6): Matrix.001 file - promoters60/1013850
tttggt

SEQ ID NO: 41923 - DNA, 6 bp, Unknown
  misc_feature (1)..( 6): Matrix.001 file - promoters60/1013850
aaaaaa

SEQ ID NO: 41924 - DNA, 8 bp, Unknown
  misc_feature (1)..( 8): Matrix.001 file - promoters60/1013850
gagaacca

SEQ ID NO: 41925 - DNA, 7 bp, Unknown
  misc_feature (1)..( 7): Matrix.001 file - promoters60/1013850
tgaaacg

SEQ ID NO: 41926 - DNA, 6 bp, Unknown
  misc_feature (1)..( 6): Matrix.001 file - promoters60/1013850
ccattt

SEQ ID NO: 41927 - DNA, 6 bp, Unknown
  misc_feature (1)..( 6): Matrix.001 file - promoters60/1013850
gttttt

SEQ ID NO: 41928 - DNA, 7 bp, Unknown
  misc_feature (1)..( 7): Matrix.001 file - promoters60/1013850
ggcgtcg

SEQ ID NO: 41929 - DNA, 6 bp, Unknown
  misc_feature (1)..( 6): Matrix.001 file - promoters60/1013850
aagccc

SEQ ID NO: 41930 - DNA, 7 bp, Unknown
  misc_feature (1)..( 7): Matrix.001 file - promoters60/1013850
taagaga

SEQ ID NO: 41931 - DNA, 6 bp, Unknown
  misc_feature (1)..( 6): Matrix.001 file - promoters60/1013870
aattta

SEQ ID NO: 41932 - DNA, 8 bp, Unknown
  misc_feature (1)..( 8): Matrix.001 file - promoters60/1013870
tataatta

SEQ ID NO: 41933 - DNA, 10 bp, Unknown
  misc_feature (1)..( 10): Matrix.001 file - promoters60/1013870
aataaaaata

SEQ ID NO: 41934 - DNA, 7 bp, Unknown
  misc_feature (1)..( 7): Matrix.001 file - promoters60/1013870
tggcttg

SEQ ID NO: 41935 - DNA, 12 bp, Unknown
  misc_feature (1)..( 12): Matrix.001 file - promoters60/1013870
taaatttaataa

SEQ ID NO: 41936 - DNA, 8 bp, Unknown
  misc_feature (1)..( 8): Matrix.001 file - promoters60/1013870
aaatctat

SEQ ID NO: 41937 - DNA, 7 bp, Unknown
  misc_feature (1)..( 7): Matrix.001 file - promoters60/1013870
acaatat

SEQ ID NO: 41938 - DNA, 9 bp, Unknown
  misc_feature (1)..( 9): Matrix.001 file - promoters60/1013870
ttacttata

SEQ ID NO: 41939 - DNA, 6 bp, Unknown
  misc_feature (1)..( 6): Matrix.001 file - promoters60/1013870
tacctt

SEQ ID NO: 41940 - DNA, 7 bp, Unknown
  misc_feature (1)..( 7): Matrix.001 file - promoters60/1013870
aataata

SEQ ID NO: 41941 - DNA, 6 bp, Unknown
  misc_feature (1)..( 6): Matrix.001 file - promoters60/1013870
atattt

SEQ ID NO: 41942 - DNA, 7 bp, Unknown
  misc_feature (1)..( 7): Matrix.001 file - promoters60/1013870
tttattt

SEQ ID NO: 41943 - DNA, 8 bp, Unknown
  misc_feature (1)..( 8): Matrix.001 file - promoters60/1013870
ttttgtca

SEQ ID NO: 41944 - DNA, 8 bp, Unknown
  misc_feature (1)..( 8): Matrix.001 file - promoters60/1013870
aattcatt

SEQ ID NO: 41945 - DNA, 7 bp, Unknown
  misc_feature (1)..( 7): Matrix.001 file - promoters60/1013870
aactaaa

SEQ ID NO: 41946 - DNA, 6 bp, Unknown
  misc_feature (1)..( 6): Matrix.001 file - promoters60/1013870
gattta

SEQ ID NO: 41947 - DNA, 12 bp, Unknown
  misc_feature (1)..( 12): Matrix.001 file - promoters60/1013870
tagaattactaa

SEQ ID NO: 41948 - DNA, 7 bp, Unknown
  misc_feature (1)..( 7): Matrix.001 file - promoters60/1013870
taataat

SEQ ID NO: 41949 - DNA, 9 bp, Unknown
  misc_feature (1)..( 9): Matrix.001 file - promoters60/1013870
aatattttt

SEQ ID NO: 41950 - DNA, 6 bp, Unknown
  misc_feature (1)..( 6): Matrix.001 file - promoters60/1013870
atattt

SEQ ID NO: 41951 - DNA, 7 bp, Unknown
  misc_feature (1)..( 7): Matrix.001 file - promoters60/1013870
tatacaa

SEQ ID NO: 41952 - DNA, 11 bp, Unknown
  misc_feature (1)..( 11): Matrix.001 file - promoters60/1013870
ttttctaaaat

SEQ ID NO: 41953 - DNA, 7 bp, Unknown
  misc_feature (1)..( 7): Matrix.001 file - promoters60/1013870
ttataat

SEQ ID NO: 41954 - DNA, 6 bp, Unknown
  misc_feature (1)..( 6): Matrix.001 file - promoters60/1013870
aaaaaa

SEQ ID NO: 41955 - DNA, 8 bp, Unknown
  misc_feature (1)..( 8): Matrix.001 file - promoters60/1013870
taaatttc

SEQ ID NO: 41956 - DNA, 7 bp, Unknown
  misc_feature (1)..( 7): Matrix.001 file - promoters60/1013870
aagagaa

SEQ ID NO: 41957 - DNA, 8 bp, Unknown
  misc_feature (1)..( 8): Matrix.001 file - promoters60/1013878
ataatatg

SEQ ID NO: 41958 - DNA, 9 bp, Unknown
  misc_feature (1)..( 9): Matrix.001 file - promoters60/1013878
atttataaa

SEQ ID NO: 41959 - DNA, 8 bp, Unknown
  misc_feature (1)..( 8): Matrix.001 file - promoters60/1013878
ttacaaga

SEQ ID NO: 41960 - DNA, 10 bp, Unknown
  misc_feature (1)..( 10): Matrix.001 file - promoters60/1013878
taaattctat

SEQ ID NO: 41961 - DNA, 14 bp, Unknown
  misc_feature (1)..( 14): Matrix.001 file - promoters60/1013878
agaaaaaaaaattg

SEQ ID NO: 41962 - DNA, 9 bp, Unknown
  misc_feature (1)..( 9): Matrix.001 file - promoters60/1013878
aaatataat

SEQ ID NO: 41963 - DNA, 10 bp, Unknown
  misc_feature (1)..( 10): Matrix.001 file - promoters60/1013878
ttacccaaaa

SEQ ID NO: 41964 - DNA, 8 bp, Unknown
  misc_feature (1)..( 8): Matrix.001 file - promoters60/1013881
ggataaaa

SEQ ID NO: 41965 - DNA, 11 bp, Unknown
  misc_feature (1)..( 11): Matrix.001 file - promoters60/1013881
agtttattttt

SEQ ID NO: 41966 - DNA, 8 bp, Unknown
  misc_feature (1)..( 8): Matrix.001 file - promoters60/1013881
attttctt

SEQ ID NO: 41967 - DNA, 9 bp, Unknown
  misc_feature (1)..( 9): Matrix.001 file - promoters60/1013881
ttttcttta

SEQ ID NO: 41968 - DNA, 8 bp, Unknown
  misc_feature (1)..( 8): Matrix.001 file - promoters60/1013881
caattttt

SEQ ID NO: 41969 - DNA, 7 bp, Unknown
  misc_feature (1)..( 7): Matrix.001 file - promoters60/1013881
ttactac

SEQ ID NO: 41970 - DNA, 12 bp, Unknown
  misc_feature (1)..( 12): Matrix.001 file - promoters60/1013893
aaaatacacaaa

SEQ ID NO: 41971 - DNA, 9 bp, Unknown
  misc_feature (1)..( 9): Matrix.001 file - promoters60/1013893
attttgtgt

SEQ ID NO: 41972 - DNA, 7 bp, Unknown
  misc_feature (1)..( 7): Matrix.001 file - promoters60/1013904
atataat

SEQ ID NO: 41973 - DNA, 9 bp, Unknown
  misc_feature (1)..( 9): Matrix.001 file - promoters60/1013904
tatttaatt

SEQ ID NO: 41974 - DNA, 10 bp, Unknown
  misc_feature (1)..( 10): Matrix.001 file - promoters60/1013904
tgataaaatc

SEQ ID NO: 41975 - DNA, 8 bp, Unknown
  misc_feature (1)..( 8): Matrix.001 file - promoters60/1013904
aatctaac

SEQ ID NO: 41976 - DNA, 9 bp, Unknown
  misc_feature (1)..( 9): Matrix.001 file - promoters60/1013904
caaaattag

SEQ ID NO: 41977 - DNA, 9 bp, Unknown
  misc_feature (1)..( 9): Matrix.001 file - promoters60/1013907
tttactttc

SEQ ID NO: 41978 - DNA, 8 bp, Unknown
  misc_feature (1)..( 8): Matrix.001 file - promoters60/1013907
aaagattg

SEQ ID NO: 41979 - DNA, 8 bp, Unknown
  misc_feature (1)..( 8): Matrix.001 file - promoters60/1013907
tagatatt

SEQ ID NO: 41980 - DNA, 7 bp, Unknown
  misc_feature (1)..( 7): Matrix.001 file - promoters60/1013907
ccattaa

SEQ ID NO: 41981 - DNA, 9 bp, Unknown
  misc_feature (1)..( 9): Matrix.001 file - promoters60/1013907
actaaatta

SEQ ID NO: 41982 - DNA, 9 bp, Unknown
  misc_feature (1)..( 9): Matrix.001 file - promoters60/1013907
tttaaaatc

SEQ ID NO: 41983 - DNA, 12 bp, Unknown
  misc_feature (1)..( 12): Matrix.001 file - promoters60/1013923
aaaattttagtt

SEQ ID NO: 41984 - DNA, 12 bp, Unknown
  misc_feature (1)..( 12): Matrix.001 file - promoters60/1013923
aaaattttagtt

SEQ ID NO: 41985 - DNA, 11 bp, Unknown
  misc_feature (1)..( 11): Matrix.001 file - promoters60/1013923
atttaatcaaa

SEQ ID NO: 41986 - DNA, 10 bp, Unknown
  misc_feature (1)..( 10): Matrix.001 file - promoters60/1013923
ttcatttaat

SEQ ID NO: 41987 - DNA, 8 bp, Unknown
  misc_feature (1)..( 8): Matrix.001 file - promoters60/1013923
tttcacag

SEQ ID NO: 41988 - DNA, 8 bp, Unknown
  misc_feature (1)..( 8): Matrix.001 file - promoters60/1013923
gataatat

SEQ ID NO: 41989 - DNA, 9 bp, Unknown
  misc_feature (1)..( 9): Matrix.001 file - promoters60/1013923
agatttttg

SEQ ID NO: 41990 - DNA, 9 bp, Unknown
  misc_feature (1)..( 9): Matrix.001 file - promoters60/1013931
agaagcata

SEQ ID NO: 41991 - DNA, 6 bp, Unknown
  misc_feature (1)..( 6): Matrix.001 file - promoters60/1013931
ttcagg

SEQ ID NO: 41992 - DNA, 6 bp, Unknown
  misc_feature (1)..( 6): Matrix.001 file - promoters60/1013931
attggt

SEQ ID NO: 41993 - DNA, 8 bp, Unknown
  misc_feature (1)..( 8): Matrix.001 file - promoters60/1013931
ttagactt

SEQ ID NO: 41994 - DNA, 8 bp, Unknown
  misc_feature (1)..( 8): Matrix.001 file - promoters60/1013931
ttgtgatt

SEQ ID NO: 41995 - DNA, 10 bp, Unknown
  misc_feature (1)..( 10): Matrix.001 file - promoters60/1013931
ttctcttaga

SEQ ID NO: 41996 - DNA, 8 bp, Unknown
  misc_feature (1)..( 8): Matrix.001 file - promoters60/1013931
aaaaattg

SEQ ID NO: 41997 - DNA, 6 bp, Unknown
  misc_feature (1)..( 6): Matrix.001 file - promoters60/1013931
cccttg

SEQ ID NO: 41998 - DNA, 10 bp, Unknown
  misc_feature (1)..( 10): Matrix.001 file - promoters60/1013931
atctctggtg

SEQ ID NO: 41999 - DNA, 7 bp, Unknown
  misc_feature (1)..( 7): Matrix.001 file - promoters60/1013931
tttgtat

SEQ ID NO: 42000 - DNA, 8 bp, Unknown
  misc_feature (1)..( 8): Matrix.001 file - promoters60/1013931
tttgattt

SEQ ID NO: 42001 - DNA, 9 bp, Unknown
  misc_feature (1)..( 9): Matrix.001 file - promoters60/1013931
agttccata

SEQ ID NO: 42002 - DNA, 7 bp, Unknown
  misc_feature (1)..( 7): Matrix.001 file - promoters60/1013931
tctttta

SEQ ID NO: 42003 - DNA, 13 bp, Unknown
  misc_feature (1)..( 13): Matrix.001 file - promoters60/1014010
gtaataaaagaac

SEQ ID NO: 42004 - DNA, 7 bp, Unknown
  misc_feature (1)..( 7): Matrix.001 file - promoters60/1014010
tataaaa

SEQ ID NO: 42005 - DNA, 10 bp, Unknown
  misc_feature (1)..( 10): Matrix.001 file - promoters60/1014050
gaaaaaaaat

SEQ ID NO: 42006 - DNA, 9 bp, Unknown
  misc_feature (1)..( 9): Matrix.001 file - promoters60/1014125
ctaattatt

SEQ ID NO: 42007 - DNA, 8 bp, Unknown
  misc_feature (1)..( 8): Matrix.001 file - promoters60/1014176
aattctat

SEQ ID NO: 42008 - DNA, 11 bp, Unknown
  misc_feature (1)..( 11): Matrix.001 file - promoters60/1014180
tctttgaacat

SEQ ID NO: 42009 - DNA, 7 bp, Unknown
  misc_feature (1)..( 7): Matrix.001 file - promoters60/1014223
aatctgt

SEQ ID NO: 42010 - DNA, 7 bp, Unknown
  misc_feature (1)..( 7): Matrix.001 file - promoters60/1014223
cctacaa

SEQ ID NO: 42011 - DNA, 6 bp, Unknown
  misc_feature (1)..( 6): Matrix.001 file - promoters60/1014223
aagaga

SEQ ID NO: 42012 - DNA, 8 bp, Unknown
  misc_feature (1)..( 8): Matrix.001 file - promoters60/1014223
ttattttt

SEQ ID NO: 42013 - DNA, 6 bp, Unknown
  misc_feature (1)..( 6): Matrix.001 file - promoters60/1014223
aaaaaa

SEQ ID NO: 42014 - DNA, 9 bp, Unknown
  misc_feature (1)..( 9): Matrix.001 file - promoters60/1014223
ttttggtat

SEQ ID NO: 42015 - DNA, 7 bp, Unknown
  misc_feature (1)..( 7): Matrix.001 file - promoters60/1014223
tttaatg

SEQ ID NO: 42016 - DNA, 9 bp, Unknown
  misc_feature (1)..( 9): Matrix.001 file - promoters60/1014223
gtgtattgg

SEQ ID NO: 42017 - DNA, 7 bp, Unknown
  misc_feature (1)..( 7): Matrix.001 file - promoters60/1014223
tgttgta

SEQ ID NO: 42018 - DNA, 6 bp, Unknown
  misc_feature (1)..( 6): Matrix.001 file - promoters60/1014223
caagag

SEQ ID NO: 42019 - DNA, 7 bp, Unknown
  misc_feature (1)..( 7): Matrix.001 file - promoters60/1014223
gaccata

SEQ ID NO: 42020 - DNA, 8 bp, Unknown
  misc_feature (1)..( 8): Matrix.001 file - promoters60/1014259
gcaacaga

SEQ ID NO: 42021 - DNA, 8 bp, Unknown
  misc_feature (1)..( 8): Matrix.001 file - promoters60/1014259
atatatta

SEQ ID NO: 42022 - DNA, 10 bp, Unknown
  misc_feature (1)..( 10): Matrix.001 file - promoters60/1014259
taatgactaa

SEQ ID NO: 42023 - DNA, 7 bp, Unknown
  misc_feature (1)..( 7): Matrix.001 file - promoters60/1014259
taatctg

SEQ ID NO: 42024 - DNA, 8 bp, Unknown
  misc_feature (1)..( 8): Matrix.001 file - promoters60/1014259
aatatata

SEQ ID NO: 42025 - DNA, 8 bp, Unknown
  misc_feature (1)..( 8): Matrix.001 file - promoters60/1014259
aataacaa

SEQ ID NO: 42026 - DNA, 10 bp, Unknown
  misc_feature (1)..( 10): Matrix.001 file - promoters60/1014259
taaaaactaa

SEQ ID NO: 42027 - DNA, 6 bp, Unknown
  misc_feature (1)..( 6): Matrix.001 file - promoters60/1014259
ataaac

SEQ ID NO: 42028 - DNA, 8 bp, Unknown
  misc_feature (1)..( 8): Matrix.001 file - promoters60/1014259
aaacccta

SEQ ID NO: 42029 - DNA, 7 bp, Unknown
  misc_feature (1)..( 7): Matrix.001 file - promoters60/1014259
gatcatt

SEQ ID NO: 42030 - DNA, 9 bp, Unknown
  misc_feature (1)..( 9): Matrix.001 file - promoters60/1014259
ttcgttttc

SEQ ID NO: 42031 - DNA, 8 bp, Unknown
  misc_feature (1)..( 8): Matrix.001 file - promoters60/1014259
tctattta

SEQ ID NO: 42032 - DNA, 7 bp, Unknown
  misc_feature (1)..( 7): Matrix.001 file - promoters60/1014259
taccaaa

SEQ ID NO: 42033 - DNA, 10 bp, Unknown
  misc_feature (1)..( 10): Matrix.001 file - promoters60/1014259
atgtgcgtct

SEQ ID NO: 42034 - DNA, 6 bp, Unknown
  misc_feature (1)..( 6): Matrix.001 file - promoters60/1014259
tgaaaa

SEQ ID NO: 42035 - DNA, 7 bp, Unknown
  misc_feature (1)..( 7): Matrix.001 file - promoters60/1014259
tatctaa

SEQ ID NO: 42036 - DNA, 6 bp, Unknown
  misc_feature (1)..( 6): Matrix.001 file - promoters60/1014259
caactt

SEQ ID NO: 42037 - DNA, 8 bp, Unknown
  misc_feature (1)..( 8): Matrix.001 file - promoters60/1014259
taataacc

SEQ ID NO: 42038 - DNA, 6 bp, Unknown
  misc_feature (1)..( 6): Matrix.001 file - promoters60/1014259
aatggg

SEQ ID NO: 42039 - DNA, 8 bp, Unknown
  misc_feature (1)..( 8): Matrix.001 file - promoters60/1014333
caatgtgt

SEQ ID NO: 42040 - DNA, 10 bp, Unknown
  misc_feature (1)..( 10): Matrix.001 file - promoters60/1014333
atataatttt

SEQ ID NO: 42041 - DNA, 8 bp, Unknown
  misc_feature (1)..( 8): Matrix.001 file - promoters60/1014333
aaaccaaa

SEQ ID NO: 42042 - DNA, 7 bp, Unknown
  misc_feature (1)..( 7): Matrix.001 file - promoters60/1014333
tcgtcaa

SEQ ID NO: 42043 - DNA, 7 bp, Unknown
  misc_feature (1)..( 7): Matrix.001 file - promoters60/1014333
aaacaaa

SEQ ID NO: 42044 - DNA, 8 bp, Unknown
  misc_feature (1)..( 8): Matrix.001 file - promoters60/1014333
taaatata

SEQ ID NO: 42045 - DNA, 8 bp, Unknown
  misc_feature (1)..( 8): Matrix.001 file - promoters60/1014333
taatatta

SEQ ID NO: 42046 - DNA, 6 bp, Unknown
  misc_feature (1)..( 6): Matrix.001 file - promoters60/1014333
tttaaa

SEQ ID NO: 42047 - DNA, 10 bp, Unknown
  misc_feature (1)..( 10): Matrix.001 file - promoters60/1014333
ttaaaaattc

SEQ ID NO: 42048 - DNA, 7 bp, Unknown
  misc_feature (1)..( 7): Matrix.001 file - promoters60/1014333
gttggtt

SEQ ID NO: 42049 - DNA, 7 bp, Unknown
  misc_feature (1)..( 7): Matrix.001 file - promoters60/1014333
aaccgaa

SEQ ID NO: 42050 - DNA, 11 bp, Unknown
  misc_feature (1)..( 11): Matrix.001 file - promoters60/1014333
aatccaaacac

SEQ ID NO: 42051 - DNA, 9 bp, Unknown
  misc_feature (1)..( 9): Matrix.001 file - promoters60/1014333
tgtcgcata

SEQ ID NO: 42052 - DNA, 7 bp, Unknown
  misc_feature (1)..( 7): Matrix.001 file - promoters60/1014333
tttattg

SEQ ID NO: 42053 - DNA, 10 bp, Unknown
  misc_feature (1)..( 10): Matrix.001 file - promoters60/1014362
ccatgttttt

SEQ ID NO: 42054 - DNA, 6 bp, Unknown
  misc_feature (1)..( 6): Matrix.001 file - promoters60/1014362
tttctg

SEQ ID NO: 42055 - DNA, 9 bp, Unknown
  misc_feature (1)..( 9): Matrix.001 file - promoters60/1014387
cctaaaaat

SEQ ID NO: 42056 - DNA, 7 bp, Unknown
  misc_feature (1)..( 7): Matrix.001 file - promoters60/1014387
taaaaat

SEQ ID NO: 42057 - DNA, 13 bp, Unknown
  misc_feature (1)..( 13): Matrix.001 file - promoters60/1014387
tgggaaaattaaa

SEQ ID NO: 42058 - DNA, 11 bp, Unknown
  misc_feature (1)..( 11): Matrix.001 file - promoters60/1014387
gtttctctctt

SEQ ID NO: 42059 - DNA, 11 bp, Unknown
  misc_feature (1)..( 11): Matrix.001 file - promoters60/1014452
tatttatttga

SEQ ID NO: 42060 - DNA, 8 bp, Unknown
  misc_feature (1)..( 8): Matrix.001 file - promoters60/1014452
tataaata

SEQ ID NO: 42061 - DNA, 9 bp, Unknown
  misc_feature (1)..( 9): Matrix.001 file - promoters60/1014452
tcaatattt

SEQ ID NO: 42062 - DNA, 10 bp, Unknown
  misc_feature (1)..( 10): Matrix.001 file - promoters60/1014452
aaaacttaaa

SEQ ID NO: 42063 - DNA, 18 bp, Unknown
  misc_feature (1)..( 18): Matrix.001 file - promoters60/1014452
ctttatcgtccaaacaat

SEQ ID NO: 42064 - DNA, 8 bp, Unknown
  misc_feature (1)..( 8): Matrix.001 file - promoters60/1014452
aatataaa

SEQ ID NO: 42065 - DNA, 11 bp, Unknown
  misc_feature (1)..( 11): Matrix.001 file - promoters60/1014452
aatttttactt

SEQ ID NO: 42066 - DNA, 9 bp, Unknown
  misc_feature (1)..( 9): Matrix.001 file - promoters60/1014452
taaatatat

SEQ ID NO: 42067 - DNA, 8 bp, Unknown
  misc_feature (1)..( 8): Matrix.001 file - promoters60/1014452
actaatat

SEQ ID NO: 42068 - DNA, 11 bp, Unknown
  misc_feature (1)..( 11): Matrix.001 file - promoters60/1014525
taattaaaaaa

SEQ ID NO: 42069 - DNA, 5 bp, Unknown
  misc_feature (1)..( 5): Matrix.001 file - promoters60/1014525
tatat

SEQ ID NO: 42070 - DNA, 11 bp, Unknown
  misc_feature (1)..( 11): Matrix.001 file - promoters60/1014525
ataacaataac

SEQ ID NO: 42071 - DNA, 3 bp, Unknown
  misc_feature (1)..( 3): Matrix.001 file - promoters60/1014525
aaa

SEQ ID NO: 42072 - DNA, 9 bp, Unknown
  misc_feature (1)..( 9): Matrix.001 file - promoters60/1014525
attatatat

SEQ ID NO: 42073 - DNA, 11 bp, Unknown
  misc_feature (1)..( 11): Matrix.001 file - promoters60/1014525
tttacaaaatt

SEQ ID NO: 42074 - DNA, 6 bp, Unknown
  misc_feature (1)..( 6): Matrix.001 file - promoters60/1014573
tttagg

SEQ ID NO: 42075 - DNA, 6 bp, Unknown
  misc_feature (1)..( 6): Matrix.001 file - promoters60/1014573
tttttt

SEQ ID NO: 42076 - DNA, 7 bp, Unknown
  misc_feature (1)..( 7): Matrix.001 file - promoters60/1014573
ggtttta

SEQ ID NO: 42077 - DNA, 9 bp, Unknown
  misc_feature (1)..( 9): Matrix.001 file - promoters60/1014573
tctatagca

SEQ ID NO: 42078 - DNA, 7 bp, Unknown
  misc_feature (1)..( 7): Matrix.001 file - promoters60/1014573
atagttc

SEQ ID NO: 42079 - DNA, 7 bp, Unknown
  misc_feature (1)..( 7): Matrix.001 file - promoters60/1014573
caacaaa

SEQ ID NO: 42080 - DNA, 8 bp, Unknown
  misc_feature (1)..( 8): Matrix.001 file - promoters60/1014573
tataaaat

SEQ ID NO: 42081 - DNA, 10 bp, Unknown
  misc_feature (1)..( 10): Matrix.001 file - promoters60/1014573
ttaatgattc

SEQ ID NO: 42082 - DNA, 8 bp, Unknown
  misc_feature (1)..( 8): Matrix.001 file - promoters60/1014573
aaacacaa

SEQ ID NO: 42083 - DNA, 8 bp, Unknown
  misc_feature (1)..( 8): Matrix.001 file - promoters60/1014573
aagattta

SEQ ID NO: 42084 - DNA, 7 bp, Unknown
  misc_feature (1)..( 7): Matrix.001 file - promoters60/1014573
tgaatat

SEQ ID NO: 42085 - DNA, 15 bp, Unknown
  misc_feature (1)..( 15): Matrix.001 file - promoters60/1014573
tatcagatatgagat

SEQ ID NO: 42086 - DNA, 6 bp, Unknown
  misc_feature (1)..( 6): Matrix.001 file - promoters60/1014573
tactgt

SEQ ID NO: 42087 - DNA, 9 bp, Unknown
  misc_feature (1)..( 9): Matrix.001 file - promoters60/1014573
tcaaaattt

SEQ ID NO: 42088 - DNA, 6 bp, Unknown
  misc_feature (1)..( 6): Matrix.001 file - promoters60/1014573
ttgaaa

SEQ ID NO: 42089 - DNA, 7 bp, Unknown
  misc_feature (1)..( 7): Matrix.001 file - promoters60/1014573
cttctcc

SEQ ID NO: 42090 - DNA, 7 bp, Unknown
  misc_feature (1)..( 7): Matrix.001 file - promoters60/1014573
ttcatgt

SEQ ID NO: 42091 - DNA, 7 bp, Unknown
  misc_feature (1)..( 7): Matrix.001 file - promoters60/1014573
tacctca

SEQ ID NO: 42092 - DNA, 7 bp, Unknown
  misc_feature (1)..( 7): Matrix.001 file - promoters60/1014573
tttgata

SEQ ID NO: 42093 - DNA, 9 bp, Unknown
  misc_feature (1)..( 9): Matrix.001 file - promoters60/1014573
catcattat

SEQ ID NO: 42094 - DNA, 11 bp, Unknown
  misc_feature (1)..( 11): Matrix.001 file - promoters60/1014649
tgctctatact

SEQ ID NO: 42095 - DNA, 6 bp, Unknown
  misc_feature (1)..( 6): Matrix.001 file - promoters60/1014649
caccac

SEQ ID NO: 42096 - DNA, 9 bp, Unknown
  misc_feature (1)..( 9): Matrix.001 file - promoters60/1014649
attctttac

SEQ ID NO: 42097 - DNA, 9 bp, Unknown
  misc_feature (1)..( 9): Matrix.001 file - promoters60/1014649
tttgatttt

SEQ ID NO: 42098 - DNA, 8 bp, Unknown
  misc_feature (1)..( 8): Matrix.001 file - promoters60/1014649
acatatgt

SEQ ID NO: 42099 - DNA, 7 bp, Unknown
  misc_feature (1)..( 7): Matrix.001 file - promoters60/1014649
ttacatt

SEQ ID NO: 42100 - DNA, 6 bp, Unknown
  misc_feature (1)..( 6): Matrix.001 file - promoters60/1014649
tttata

SEQ ID NO: 42101 - DNA, 6 bp, Unknown
  misc_feature (1)..( 6): Matrix.001 file - promoters60/1014649
tcttcg

SEQ ID NO: 42102 - DNA, 7 bp, Unknown
  misc_feature (1)..( 7): Matrix.001 file - promoters60/1014649
gttatca

SEQ ID NO: 42103 - DNA, 9 bp, Unknown
  misc_feature (1)..( 9): Matrix.001 file - promoters60/1014649
aaaaataaa

SEQ ID NO: 42104 - DNA, 6 bp, Unknown
  misc_feature (1)..( 6): Matrix.001 file - promoters60/1014649
taaaat

SEQ ID NO: 42105 - DNA, 9 bp, Unknown
  misc_feature (1)..( 9): Matrix.001 file - promoters60/1014649
aaaataaat

SEQ ID NO: 42106 - DNA, 9 bp, Unknown
  misc_feature (1)..( 9): Matrix.001 file - promoters60/1014649
atttattta

SEQ ID NO: 42107 - DNA, 8 bp, Unknown
  misc_feature (1)..( 8): Matrix.001 file - promoters60/1014649
tctttttt

SEQ ID NO: 42108 - DNA, 6 bp, Unknown
  misc_feature (1)..( 6): Matrix.001 file - promoters60/1014649
ttttaa

SEQ ID NO: 42109 - DNA, 8 bp, Unknown
  misc_feature (1)..( 8): Matrix.001 file - promoters60/1014649
aagtaata

SEQ ID NO: 42110 - DNA, 8 bp, Unknown
  misc_feature (1)..( 8): Matrix.001 file - promoters60/1014649
caaacaag

SEQ ID NO: 42111 - DNA, 6 bp, Unknown
  misc_feature (1)..( 6): Matrix.001 file - promoters60/1014649
actttt

SEQ ID NO: 42112 - DNA, 6 bp, Unknown
  misc_feature (1)..( 6): Matrix.001 file - promoters60/1014649
atttgt

SEQ ID NO: 42113 - DNA, 7 bp, Unknown
  misc_feature (1)..( 7): Matrix.001 file - promoters60/1014649
ttccttt

SEQ ID NO: 42114 - DNA, 11 bp, Unknown
  misc_feature (1)..( 11): Matrix.001 file - promoters60/1014662
ccaaaaatgat

SEQ ID NO: 42115 - DNA, 13 bp, Unknown
  misc_feature (1)..( 13): Matrix.001 file - promoters60/1014662
acttataataaaa

SEQ ID NO: 42116 - DNA, 7 bp, Unknown
  misc_feature (1)..( 7): Matrix.001 file - promoters60/1014662
atataat

SEQ ID NO: 42117 - DNA, 9 bp, Unknown
  misc_feature (1)..( 9): Matrix.001 file - promoters60/1014662
aaaatatat

SEQ ID NO: 42118 - DNA, 11 bp, Unknown
  misc_feature (1)..( 11): Matrix.001 file - promoters60/1014662
ataaaattaat

SEQ ID NO: 42119 - DNA, 12 bp, Unknown
  misc_feature (1)..( 12): Matrix.001 file - promoters60/1014662
ttttgtaaacaa

SEQ ID NO: 42120 - DNA, 8 bp, Unknown
  misc_feature (1)..( 8): Matrix.001 file - promoters60/1014662
aatcaaaa

SEQ ID NO: 42121 - DNA, 11 bp, Unknown
  misc_feature (1)..( 11): Matrix.001 file - promoters60/1014662
tgaccaaaaat

SEQ ID NO: 42122 - DNA, 11 bp, Unknown
  misc_feature (1)..( 11): Matrix.001 file - promoters60/1014662
tgaccaaaaat

SEQ ID NO: 42123 - DNA, 8 bp, Unknown
  misc_feature (1)..( 8): Matrix.001 file - promoters60/1014662
aagtcatt

SEQ ID NO: 42124 - DNA, 8 bp, Unknown
  misc_feature (1)..( 8): Matrix.001 file - promoters60/1014678
cacatgtc

SEQ ID NO: 42125 - DNA, 6 bp, Unknown
  misc_feature (1)..( 6): Matrix.001 file - promoters60/1014678
ttactc

SEQ ID NO: 42126 - DNA, 7 bp, Unknown
  misc_feature (1)..( 7): Matrix.001 file - promoters60/1014678
cataaga

SEQ ID NO: 42127 - DNA, 10 bp, Unknown
  misc_feature (1)..( 10): Matrix.001 file - promoters60/1014678
aaaacaaatc

SEQ ID NO: 42128 - DNA, 6 bp, Unknown
  misc_feature (1)..( 6): Matrix.001 file - promoters60/1014678
aaaact

SEQ ID NO: 42129 - DNA, 10 bp, Unknown
  misc_feature (1)..( 10): Matrix.001 file - promoters60/1014678
cacaatggaa

SEQ ID NO: 42130 - DNA, 11 bp, Unknown
  misc_feature (1)..( 11): Matrix.001 file - promoters60/1014678
aaaaataaatt

SEQ ID NO: 42131 - DNA, 7 bp, Unknown
  misc_feature (1)..( 7): Matrix.001 file - promoters60/1014678
atattgt

SEQ ID NO: 42132 - DNA, 6 bp, Unknown
  misc_feature (1)..( 6): Matrix.001 file - promoters60/1014678
cagtat

SEQ ID NO: 42133 - DNA, 8 bp, Unknown
  misc_feature (1)..( 8): Matrix.001 file - promoters60/1014678
aaagaaaa

SEQ ID NO: 42134 - DNA, 8 bp, Unknown
  misc_feature (1)..( 8): Matrix.001 file - promoters60/1014678
aaactcga

SEQ ID NO: 42135 - DNA, 6 bp, Unknown
  misc_feature (1)..( 6): Matrix.001 file - promoters60/1014678
gtcttc

SEQ ID NO: 42136 - DNA, 6 bp, Unknown
  misc_feature (1)..( 6): Matrix.001 file - promoters60/1014678
accgtt

SEQ ID NO: 42137 - DNA, 7 bp, Unknown
  misc_feature (1)..( 7): Matrix.001 file - promoters60/1014678
catacaa

SEQ ID NO: 42138 - DNA, 7 bp, Unknown
  misc_feature (1)..( 7): Matrix.001 file - promoters60/1014678
caaaaca

SEQ ID NO: 42139 - DNA, 7 bp, Unknown
  misc_feature (1)..( 7): Matrix.001 file - promoters60/1014678
ttcttct

SEQ ID NO: 42140 - DNA, 12 bp, Unknown
  misc_feature (1)..( 12): Matrix.001 file - promoters60/1014693
ttttttataaag

SEQ ID NO: 42141 - DNA, 11 bp, Unknown
  misc_feature (1)..( 11): Matrix.001 file - promoters60/1014693
tgagtctacta

SEQ ID NO: 42142 - DNA, 6 bp, Unknown
  misc_feature (1)..( 6): Matrix.001 file - promoters60/1014771
taaaaa

SEQ ID NO: 42143 - DNA, 11 bp, Unknown
  misc_feature (1)..( 11): Matrix.001 file - promoters60/1014771
tgaaacaaatt

SEQ ID NO: 42144 - DNA, 8 bp, Unknown
  misc_feature (1)..( 8): Matrix.001 file - promoters60/1014778
aagagaag

SEQ ID NO: 42145 - DNA, 6 bp, Unknown
  misc_feature (1)..( 6): Matrix.001 file - promoters60/1014778
catgaa

SEQ ID NO: 42146 - DNA, 6 bp, Unknown
  misc_feature (1)..( 6): Matrix.001 file - promoters60/1014778
attctt

SEQ ID NO: 42147 - DNA, 6 bp, Unknown
  misc_feature (1)..( 6): Matrix.001 file - promoters60/1014778
taattt

SEQ ID NO: 42148 - DNA, 8 bp, Unknown
  misc_feature (1)..( 8): Matrix.001 file - promoters60/1014778
tagtgtct

SEQ ID NO: 42149 - DNA, 8 bp, Unknown
  misc_feature (1)..( 8): Matrix.001 file - promoters60/1014778
cagaaaaa

SEQ ID NO: 42150 - DNA, 8 bp, Unknown
  misc_feature (1)..( 8): Matrix.001 file - promoters60/1014778
tttcgaag

SEQ ID NO: 42151 - DNA, 9 bp, Unknown
  misc_feature (1)..( 9): Matrix.001 file - promoters60/1014778
ggcttatga

SEQ ID NO: 42152 - DNA, 7 bp, Unknown
  misc_feature (1)..( 7): Matrix.001 file - promoters60/1014778
ccaagaa

SEQ ID NO: 42153 - DNA, 9 bp, Unknown
  misc_feature (1)..( 9): Matrix.001 file - promoters60/1014778
acaatacaa

SEQ ID NO: 42154 - DNA, 11 bp, Unknown
  misc_feature (1)..( 11): Matrix.001 file - promoters60/1014778
gaagaacaatg

SEQ ID NO: 42155 - DNA, 8 bp, Unknown
  misc_feature (1)..( 8): Matrix.001 file - promoters60/1014778
gtttatca

SEQ ID NO: 42156 - DNA, 9 bp, Unknown
  misc_feature (1)..( 9): Matrix.001 file - promoters60/1014778
gagaacctc

SEQ ID NO: 42157 - DNA, 6 bp, Unknown
  misc_feature (1)..( 6): Matrix.001 file - promoters60/1014803
ttgctt

SEQ ID NO: 42158 - DNA, 6 bp, Unknown
  misc_feature (1)..( 6): Matrix.001 file - promoters60/1014803
gcaatg

SEQ ID NO: 42159 - DNA, 7 bp, Unknown
  misc_feature (1)..( 7): Matrix.001 file - promoters60/1014803
aatgcat

SEQ ID NO: 42160 - DNA, 7 bp, Unknown
  misc_feature (1)..( 7): Matrix.001 file - promoters60/1014803
tctctga

SEQ ID NO: 42161 - DNA, 6 bp, Unknown
  misc_feature (1)..( 6): Matrix.001 file - promoters60/1014803
taaagt

SEQ ID NO: 42162 - DNA, 6 bp, Unknown
  misc_feature (1)..( 6): Matrix.001 file - promoters60/1014803
tttcaa

SEQ ID NO: 42163 - DNA, 8 bp, Unknown
  misc_feature (1)..( 8): Matrix.001 file - promoters60/1014803
ttcaatat

SEQ ID NO: 42164 - DNA, 9 bp, Unknown
  misc_feature (1)..( 9): Matrix.001 file - promoters60/1014803
aaattggta

SEQ ID NO: 42165 - DNA, 6 bp, Unknown
  misc_feature (1)..( 6): Matrix.001 file - promoters60/1014803
aatagt

SEQ ID NO: 42166 - DNA, 6 bp, Unknown
  misc_feature (1)..( 6): Matrix.001 file - promoters60/1014803
ctttcg

SEQ ID NO: 42167 - DNA, 11 bp, Unknown
  misc_feature (1)..( 11): Matrix.001 file - promoters60/1014803
ttcctagatac

SEQ ID NO: 42168 - DNA, 6 bp, Unknown
  misc_feature (1)..( 6): Matrix.001 file - promoters60/1014803
ttctga

SEQ ID NO: 42169 - DNA, 8 bp, Unknown
  misc_feature (1)..( 8): Matrix.001 file - promoters60/1014803
ctcttgtt

SEQ ID NO: 42170 - DNA, 6 bp, Unknown
  misc_feature (1)..( 6): Matrix.001 file - promoters60/1014803
gatatt

SEQ ID NO: 42171 - DNA, 6 bp, Unknown
  misc_feature (1)..( 6): Matrix.001 file - promoters60/1014803
gttcac

SEQ ID NO: 42172 - DNA, 10 bp, Unknown
  misc_feature (1)..( 10): Matrix.001 file - promoters60/1014885
gttttcattt

SEQ ID NO: 42173 - DNA, 6 bp, Unknown
  misc_feature (1)..( 6): Matrix.001 file - promoters60/1014885
ttaaaa

SEQ ID NO: 42174 - DNA, 7 bp, Unknown
  misc_feature (1)..( 7): Matrix.001 file - promoters60/1014885
aaaaagt

SEQ ID NO: 42175 - DNA, 8 bp, Unknown
  misc_feature (1)..( 8): Matrix.001 file - promoters60/1014885
taccctct

SEQ ID NO: 42176 - DNA, 9 bp, Unknown
  misc_feature (1)..( 9): Matrix.001 file - promoters60/1014885
aaaaactaa

SEQ ID NO: 42177 - DNA, 11 bp, Unknown
  misc_feature (1)..( 11): Matrix.001 file - promoters60/1014895
aatggatagtg

SEQ ID NO: 42178 - DNA, 7 bp, Unknown
  misc_feature (1)..( 7): Matrix.001 file - promoters60/1014895
gaaaatg

SEQ ID NO: 42179 - DNA, 7 bp, Unknown
  misc_feature (1)..( 7): Matrix.001 file - promoters60/1014895
aaaaagc

SEQ ID NO: 42180 - DNA, 8 bp, Unknown
  misc_feature (1)..( 8): Matrix.001 file - promoters60/1014895
ctagcaca

SEQ ID NO: 42181 - DNA, 7 bp, Unknown
  misc_feature (1)..( 7): Matrix.001 file - promoters60/1014895
aatctct

SEQ ID NO: 42182 - DNA, 6 bp, Unknown
  misc_feature (1)..( 6): Matrix.001 file - promoters60/1014895
tataaa

SEQ ID NO: 42183 - DNA, 6 bp, Unknown
  misc_feature (1)..( 6): Matrix.001 file - promoters60/1014895
cacaca

SEQ ID NO: 42184 - DNA, 6 bp, Unknown
  misc_feature (1)..( 6): Matrix.001 file - promoters60/1014895
aaggta

SEQ ID NO: 42185 - DNA, 7 bp, Unknown
  misc_feature (1)..( 7): Matrix.001 file - promoters60/1014895
tataatt

SEQ ID NO: 42186 - DNA, 6 bp, Unknown
  misc_feature (1)..( 6): Matrix.001 file - promoters60/1014895
tcgtta

SEQ ID NO: 42187 - DNA, 8 bp, Unknown
  misc_feature (1)..( 8): Matrix.001 file - promoters60/1014895
cgggaaaa

SEQ ID NO: 42188 - DNA, 7 bp, Unknown
  misc_feature (1)..( 7): Matrix.001 file - promoters60/1014895
ggaatat

SEQ ID NO: 42189 - DNA, 7 bp, Unknown
  misc_feature (1)..( 7): Matrix.001 file - promoters60/1014895
gaaaaaa

SEQ ID NO: 42190 - DNA, 7 bp, Unknown
  misc_feature (1)..( 7): Matrix.001 file - promoters60/1014895
aaaaaaa

SEQ ID NO: 42191 - DNA, 7 bp, Unknown
  misc_feature (1)..( 7): Matrix.001 file - promoters60/1014895
acaaaat

SEQ ID NO: 42192 - DNA, 6 bp, Unknown
  misc_feature (1)..( 6): Matrix.001 file - promoters60/1014895
aatttt

SEQ ID NO: 42193 - DNA, 8 bp, Unknown
  misc_feature (1)..( 8): Matrix.001 file - promoters60/1014895
gaaattgt

SEQ ID NO: 42194 - DNA, 7 bp, Unknown
  misc_feature (1)..( 7): Matrix.001 file - promoters60/1014895
ggtttgg

SEQ ID NO: 42195 - DNA, 6 bp, Unknown
  misc_feature (1)..( 6): Matrix.001 file - promoters60/1014899
cgagtc

SEQ ID NO: 42196 - DNA, 6 bp, Unknown
  misc_feature (1)..( 6): Matrix.001 file - promoters60/1014899
gaaatt

SEQ ID NO: 42197 - DNA, 7 bp, Unknown
  misc_feature (1)..( 7): Matrix.001 file - promoters60/1014899
gacagaa

SEQ ID NO: 42198 - DNA, 8 bp, Unknown
  misc_feature (1)..( 8): Matrix.001 file - promoters60/1014899
aaagatca

SEQ ID NO: 42199 - DNA, 6 bp, Unknown
  misc_feature (1)..( 6): Matrix.001 file - promoters60/1014899
tagtag

SEQ ID NO: 42200 - DNA, 6 bp, Unknown
  misc_feature (1)..( 6): Matrix.001 file - promoters60/1014899
cctttt

SEQ ID NO: 42201 - DNA, 6 bp, Unknown
  misc_feature (1)..( 6): Matrix.001 file - promoters60/1014899
tttgat

SEQ ID NO: 42202 - DNA, 8 bp, Unknown
  misc_feature (1)..( 8): Matrix.001 file - promoters60/1014899
tttaacta

SEQ ID NO: 42203 - DNA, 8 bp, Unknown
  misc_feature (1)..( 8): Matrix.001 file - promoters60/1014899
ctatcttt

SEQ ID NO: 42204 - DNA, 8 bp, Unknown
  misc_feature (1)..( 8): Matrix.001 file - promoters60/1014899
cactaacc

SEQ ID NO: 42205 - DNA, 7 bp, Unknown
  misc_feature (1)..( 7): Matrix.001 file - promoters60/1014899
aatcggt

SEQ ID NO: 42206 - DNA, 6 bp, Unknown
  misc_feature (1)..( 6): Matrix.001 file - promoters60/1014899
gacctc

SEQ ID NO: 42207 - DNA, 8 bp, Unknown
  misc_feature (1)..( 8): Matrix.001 file - promoters60/1014899
ttttaata

SEQ ID NO: 42208 - DNA, 9 bp, Unknown
  misc_feature (1)..( 9): Matrix.001 file - promoters60/1014899
tcttgttta

SEQ ID NO: 42209 - DNA, 7 bp, Unknown
  misc_feature (1)..( 7): Matrix.001 file - promoters60/1014899
aaacata

SEQ ID NO: 42210 - DNA, 7 bp, Unknown
  misc_feature (1)..( 7): Matrix.001 file - promoters60/1014899
caacata

SEQ ID NO: 42211 - DNA, 7 bp, Unknown
  misc_feature (1)..( 7): Matrix.001 file - promoters60/1014899
ttaaaaa

SEQ ID NO: 42212 - DNA, 8 bp, Unknown
  misc_feature (1)..( 8): Matrix.001 file - promoters60/1014899
gtgaaaaa

SEQ ID NO: 42213 - DNA, 8 bp, Unknown
  misc_feature (1)..( 8): Matrix.001 file - promoters60/1014899
tataaata

SEQ ID NO: 42214 - DNA, 11 bp, Unknown
  misc_feature (1)..( 11): Matrix.001 file - promoters60/1014907
ctacatatcat

SEQ ID NO: 42215 - DNA, 7 bp, Unknown
  misc_feature (1)..( 7): Matrix.001 file - promoters60/1014907
ttttcta

SEQ ID NO: 42216 - DNA, 7 bp, Unknown
  misc_feature (1)..( 7): Matrix.001 file - promoters60/1014907
tatcttt

SEQ ID NO: 42217 - DNA, 9 bp, Unknown
  misc_feature (1)..( 9): Matrix.001 file - promoters60/1014907
atttttaat

SEQ ID NO: 42218 - DNA, 9 bp, Unknown
  misc_feature (1)..( 9): Matrix.001 file - promoters60/1014907
caaaaaaaa

SEQ ID NO: 42219 - DNA, 10 bp, Unknown
  misc_feature (1)..( 10): Matrix.001 file - promoters60/1014907
taaaatgatc

SEQ ID NO: 42220 - DNA, 7 bp, Unknown
  misc_feature (1)..( 7): Matrix.001 file - promoters60/1014907
aaaatct

SEQ ID NO: 42221 - DNA, 6 bp, Unknown
  misc_feature (1)..( 6): Matrix.001 file - promoters60/1014926
aataca

SEQ ID NO: 42222 - DNA, 8 bp, Unknown
  misc_feature (1)..( 8): Matrix.001 file - promoters60/1014926
taacacag

SEQ ID NO: 42223 - DNA, 7 bp, Unknown
  misc_feature (1)..( 7): Matrix.001 file - promoters60/1014926
ctcattc

SEQ ID NO: 42224 - DNA, 7 bp, Unknown
  misc_feature (1)..( 7): Matrix.001 file - promoters60/1014926
ccttcct

SEQ ID NO: 42225 - DNA, 8 bp, Unknown
  misc_feature (1)..( 8): Matrix.001 file - promoters60/1014926
cttattta

SEQ ID NO: 42226 - DNA, 6 bp, Unknown
  misc_feature (1)..( 6): Matrix.001 file - promoters60/1014926
aaaagg

SEQ ID NO: 42227 - DNA, 11 bp, Unknown
  misc_feature (1)..( 11): Matrix.001 file - promoters60/1014926
attgttatagg

SEQ ID NO: 42228 - DNA, 7 bp, Unknown
  misc_feature (1)..( 7): Matrix.001 file - promoters60/1014926
ttacaga

SEQ ID NO: 42229 - DNA, 7 bp, Unknown
  misc_feature (1)..( 7): Matrix.001 file - promoters60/1014926
ttacgtt

SEQ ID NO: 42230 - DNA, 8 bp, Unknown
  misc_feature (1)..( 8): Matrix.001 file - promoters60/1014926
taagaaat

SEQ ID NO: 42231 - DNA, 6 bp, Unknown
  misc_feature (1)..( 6): Matrix.001 file - promoters60/1014926
ggctca

SEQ ID NO: 42232 - DNA, 6 bp, Unknown
  misc_feature (1)..( 6): Matrix.001 file - promoters60/1014926
aagttg

SEQ ID NO: 42233 - DNA, 6 bp, Unknown
  misc_feature (1)..( 6): Matrix.001 file - promoters60/1014926
cattct

SEQ ID NO: 42234 - DNA, 6 bp, Unknown
  misc_feature (1)..( 6): Matrix.001 file - promoters60/1014926
tctgga

SEQ ID NO: 42235 - DNA, 7 bp, Unknown
  misc_feature (1)..( 7): Matrix.001 file - promoters60/1014926
cctaaat

SEQ ID NO: 42236 - DNA, 8 bp, Unknown
  misc_feature (1)..( 8): Matrix.001 file - promoters60/1014989
ttttgaaa

SEQ ID NO: 42237 - DNA, 9 bp, Unknown
  misc_feature (1)..( 9): Matrix.001 file - promoters60/1014989
aacaaatat

SEQ ID NO: 42238 - DNA, 7 bp, Unknown
  misc_feature (1)..( 7): Matrix.001 file - promoters60/1014989
atatatg

SEQ ID NO: 42239 - DNA, 6 bp, Unknown
  misc_feature (1)..( 6): Matrix.001 file - promoters60/1014989
aattgg

SEQ ID NO: 42240 - DNA, 6 bp, Unknown
  misc_feature (1)..( 6): Matrix.001 file - promoters60/1014989
gtaata

SEQ ID NO: 42241 - DNA, 8 bp, Unknown
  misc_feature (1)..( 8): Matrix.001 file - promoters60/1014989
aacttatt

SEQ ID NO: 42242 - DNA, 6 bp, Unknown
  misc_feature (1)..( 6): Matrix.001 file - promoters60/1014989
tatttt

SEQ ID NO: 42243 - DNA, 7 bp, Unknown
  misc_feature (1)..( 7): Matrix.001 file - promoters60/1014989
attatat

SEQ ID NO: 42244 - DNA, 7 bp, Unknown
  misc_feature (1)..( 7): Matrix.001 file - promoters60/1014989
agaatat

SEQ ID NO: 42245 - DNA, 7 bp, Unknown
  misc_feature (1)..( 7): Matrix.001 file - promoters60/1014989
ttaaaac

SEQ ID NO: 42246 - DNA, 7 bp, Unknown
  misc_feature (1)..( 7): Matrix.001 file - promoters60/1014989
tttcaaa

SEQ ID NO: 42247 - DNA, 7 bp, Unknown
  misc_feature (1)..( 7): Matrix.001 file - promoters60/1014989
aaccatt

SEQ ID NO: 42248 - DNA, 7 bp, Unknown
  misc_feature (1)..( 7): Matrix.001 file - promoters60/1014989
atgggag

SEQ ID NO: 42249 - DNA, 8 bp, Unknown
  misc_feature (1)..( 8): Matrix.001 file - promoters60/1014989
caaatcaa

SEQ ID NO: 42250 - DNA, 7 bp, Unknown
  misc_feature (1)..( 7): Matrix.001 file - promoters60/1014989
attcaat

SEQ ID NO: 42251 - DNA, 8 bp, Unknown
  misc_feature (1)..( 8): Matrix.001 file - promoters60/1014989
atagcaat

SEQ ID NO: 42252 - DNA, 6 bp, Unknown
  misc_feature (1)..( 6): Matrix.001 file - promoters60/1014989
ttttat

SEQ ID NO: 42253 - DNA, 6 bp, Unknown
  misc_feature (1)..( 6): Matrix.001 file - promoters60/1014989
atattt

SEQ ID NO: 42254 - DNA, 7 bp, Unknown
  misc_feature (1)..( 7): Matrix.001 file - promoters60/1014989
tttcatg

SEQ ID NO: 42255 - DNA, 6 bp, Unknown
  misc_feature (1)..( 6): Matrix.001 file - promoters60/1014989
gatcat

SEQ ID NO: 42256 - DNA, 6 bp, Unknown
  misc_feature (1)..( 6): Matrix.001 file - promoters60/1014989
aaattt

SEQ ID NO: 42257 - DNA, 6 bp, Unknown
  misc_feature (1)..( 6): Matrix.001 file - promoters60/1014989
tgtttt

SEQ ID NO: 42258 - DNA, 6 bp, Unknown
  misc_feature (1)..( 6): Matrix.001 file - promoters60/1014989
atgcaa

SEQ ID NO: 42259 - DNA, 7 bp, Unknown
  misc_feature (1)..( 7): Matrix.001 file - promoters60/1014989
tacattt

SEQ ID NO: 42260 - DNA, 11 bp, Unknown
  misc_feature (1)..( 11): Matrix.001 file - promoters60/1014991
cttgtcttttt

SEQ ID NO: 42261 - DNA, 10 bp, Unknown
  misc_feature (1)..( 10): Matrix.001 file - promoters60/1015030
ttttgaaaaa

SEQ ID NO: 42262 - DNA, 8 bp, Unknown
  misc_feature (1)..( 8): Matrix.001 file - promoters60/1015030
aaaattta

SEQ ID NO: 42263 - DNA, 6 bp, Unknown
  misc_feature (1)..( 6): Matrix.001 file - promoters60/1015030
acaaaa

SEQ ID NO: 42264 - DNA, 10 bp, Unknown
  misc_feature (1)..( 10): Matrix.001 file - promoters60/1015030
ttttgaccta

SEQ ID NO: 42265 - DNA, 8 bp, Unknown
  misc_feature (1)..( 8): Matrix.001 file - promoters60/1015030
aaaaataa

SEQ ID NO: 42266 - DNA, 7 bp, Unknown
  misc_feature (1)..( 7): Matrix.001 file - promoters60/1015030
tccatta

SEQ ID NO: 42267 - DNA, 7 bp, Unknown
  misc_feature (1)..( 7): Matrix.001 file - promoters60/1015030
tttgttc

SEQ ID NO: 42268 - DNA, 7 bp, Unknown
  misc_feature (1)..( 7): Matrix.001 file - promoters60/1015030
tatatac

SEQ ID NO: 42269 - DNA, 7 bp, Unknown
  misc_feature (1)..( 7): Matrix.001 file - promoters60/1015030
atataaa

SEQ ID NO: 42270 - DNA, 7 bp, Unknown
  misc_feature (1)..( 7): Matrix.001 file - promoters60/1015030
tctttag

SEQ ID NO: 42271 - DNA, 8 bp, Unknown
  misc_feature (1)..( 8): Matrix.001 file - promoters60/1015030
agatgttt

SEQ ID NO: 42272 - DNA, 6 bp, Unknown
  misc_feature (1)..( 6): Matrix.001 file - promoters60/1015030
agtttt

SEQ ID NO: 42273 - DNA, 11 bp, Unknown
  misc_feature (1)..( 11): Matrix.001 file - promoters60/1015030
cttatctcgtg

SEQ ID NO: 42274 - DNA, 8 bp, Unknown
  misc_feature (1)..( 8): Matrix.001 file - promoters60/1015030
aatatata

SEQ ID NO: 42275 - DNA, 7 bp, Unknown
  misc_feature (1)..( 7): Matrix.001 file - promoters60/1015030
actaaat

SEQ ID NO: 42276 - DNA, 6 bp, Unknown
  misc_feature (1)..( 6): Matrix.001 file - promoters60/1015030
gttcaa

SEQ ID NO: 42277 - DNA, 6 bp, Unknown
  misc_feature (1)..( 6): Matrix.001 file - promoters60/1015030
tttttt

SEQ ID NO: 42278 - DNA, 6 bp, Unknown
  misc_feature (1)..( 6): Matrix.001 file - promoters60/1015030
actttt

SEQ ID NO: 42279 - DNA, 7 bp, Unknown
  misc_feature (1)..( 7): Matrix.001 file - promoters60/1015030
ttttctt

SEQ ID NO: 42280 - DNA, 8 bp, Unknown
  misc_feature (1)..( 8): Matrix.001 file - promoters60/1015030
tcctcttt

SEQ ID NO: 42281 - DNA, 6 bp, Unknown
  misc_feature (1)..( 6): Matrix.001 file - promoters60/1015030
tgaaag

SEQ ID NO: 42282 - DNA, 7 bp, Unknown
  misc_feature (1)..( 7): Matrix.001 file - promoters60/1015030
gatatac

SEQ ID NO: 42283 - DNA, 7 bp, Unknown
  misc_feature (1)..( 7): Matrix.001 file - promoters60/1015030
ccaaata

SEQ ID NO: 42284 - DNA, 9 bp, Unknown
  misc_feature (1)..( 9): Matrix.001 file - promoters60/1015064
attttagtt

SEQ ID NO: 42285 - DNA, 8 bp, Unknown
  misc_feature (1)..( 8): Matrix.001 file - promoters60/1015064
tattaatg

SEQ ID NO: 42286 - DNA, 7 bp, Unknown
  misc_feature (1)..( 7): Matrix.001 file - promoters60/1015064
aatattt

SEQ ID NO: 42287 - DNA, 8 bp, Unknown
  misc_feature (1)..( 8): Matrix.001 file - promoters60/1015064
tttagttt

SEQ ID NO: 42288 - DNA, 9 bp, Unknown
  misc_feature (1)..( 9): Matrix.001 file - promoters60/1015064
tgaaaccaa

SEQ ID NO: 42289 - DNA, 7 bp, Unknown
  misc_feature (1)..( 7): Matrix.001 file - promoters60/1015064
ttttgat

SEQ ID NO: 42290 - DNA, 9 bp, Unknown
  misc_feature (1)..( 9): Matrix.001 file - promoters60/1015064
aatttattt

SEQ ID NO: 42291 - DNA, 11 bp, Unknown
  misc_feature (1)..( 11): Matrix.001 file - promoters60/1015064
tacgtaacatg

SEQ ID NO: 42292 - DNA, 7 bp, Unknown
  misc_feature (1)..( 7): Matrix.001 file - promoters60/1015092
gtcgaaa

SEQ ID NO: 42293 - DNA, 7 bp, Unknown
  misc_feature (1)..( 7): Matrix.001 file - promoters60/1015092
aaacatt

SEQ ID NO: 42294 - DNA, 10 bp, Unknown
  misc_feature (1)..( 10): Matrix.001 file - promoters60/1015092
taaatttgct

SEQ ID NO: 42295 - DNA, 9 bp, Unknown
  misc_feature (1)..( 9): Matrix.001 file - promoters60/1015092
tcagtaaga

SEQ ID NO: 42296 - DNA, 7 bp, Unknown
  misc_feature (1)..( 7): Matrix.001 file - promoters60/1015092
tttattg

SEQ ID NO: 42297 - DNA, 7 bp, Unknown
  misc_feature (1)..( 7): Matrix.001 file - promoters60/1015092
tgaaaaa

SEQ ID NO: 42298 - DNA, 6 bp, Unknown
  misc_feature (1)..( 6): Matrix.001 file - promoters60/1015092
aatatt

SEQ ID NO: 42299 - DNA, 12 bp, Unknown
  misc_feature (1)..( 12): Matrix.001 file - promoters60/1015092
ttagtttggtct

SEQ ID NO: 42300 - DNA, 6 bp, Unknown
  misc_feature (1)..( 6): Matrix.001 file - promoters60/1015092
ttttat

SEQ ID NO: 42301 - DNA, 9 bp, Unknown
  misc_feature (1)..( 9): Matrix.001 file - promoters60/1015092
attagaaga

SEQ ID NO: 42302 - DNA, 11 bp, Unknown
  misc_feature (1)..( 11): Matrix.001 file - promoters60/1015179
aaactcttata

SEQ ID NO: 42303 - DNA, 7 bp, Unknown
  misc_feature (1)..( 7): Matrix.001 file - promoters60/1015179
tttgaat

SEQ ID NO: 42304 - DNA, 10 bp, Unknown
  misc_feature (1)..( 10): Matrix.001 file - promoters60/1015179
ttattataca

SEQ ID NO: 42305 - DNA, 8 bp, Unknown
  misc_feature (1)..( 8): Matrix.001 file - promoters60/1015179
ccaaattt

SEQ ID NO: 42306 - DNA, 9 bp, Unknown
  misc_feature (1)..( 9): Matrix.001 file - promoters60/1015179
tttcttctc

SEQ ID NO: 42307 - DNA, 8 bp, Unknown
  misc_feature (1)..( 8): Matrix.001 file - promoters60/1015210
ctttattt

SEQ ID NO: 42308 - DNA, 7 bp, Unknown
  misc_feature (1)..( 7): Matrix.001 file - promoters60/1015210
aaataaa

SEQ ID NO: 42309 - DNA, 7 bp, Unknown
  misc_feature (1)..( 7): Matrix.001 file - promoters60/1015210
atgataa

SEQ ID NO: 42310 - DNA, 6 bp, Unknown
  misc_feature (1)..( 6): Matrix.001 file - promoters60/1015214
aaaaca

SEQ ID NO: 42311 - DNA, 6 bp, Unknown
  misc_feature (1)..( 6): Matrix.001 file - promoters60/1015214
tttgtt

SEQ ID NO: 42312 - DNA, 9 bp, Unknown
  misc_feature (1)..( 9): Matrix.001 file - promoters60/1015214
tatataaac

SEQ ID NO: 42313 - DNA, 6 bp, Unknown
  misc_feature (1)..( 6): Matrix.001 file - promoters60/1015214
atatat

SEQ ID NO: 42314 - DNA, 12 bp, Unknown
  misc_feature (1)..( 12): Matrix.001 file - promoters60/1015214
ttcatttatgtt

SEQ ID NO: 42315 - DNA, 11 bp, Unknown
  misc_feature (1)..( 11): Matrix.001 file - promoters60/1015261
acttgtaaatt

SEQ ID NO: 42316 - DNA, 9 bp, Unknown
  misc_feature (1)..( 9): Matrix.001 file - promoters60/1015261
atatataaa

SEQ ID NO: 42317 - DNA, 10 bp, Unknown
  misc_feature (1)..( 10): Matrix.001 file - promoters60/1015261
acttgtaagc

SEQ ID NO: 42318 - DNA, 12 bp, Unknown
  misc_feature (1)..( 12): Matrix.001 file - promoters60/1015261
attagagaaaca

SEQ ID NO: 42319 - DNA, 6 bp, Unknown
  misc_feature (1)..( 6): Matrix.001 file - promoters60/1015261
atttat

SEQ ID NO: 42320 - DNA, 10 bp, Unknown
  misc_feature (1)..( 10): Matrix.001 file - promoters60/1015261
acaattttta

SEQ ID NO: 42321 - DNA, 8 bp, Unknown
  misc_feature (1)..( 8): Matrix.001 file - promoters60/1015264
attttttt

SEQ ID NO: 42322 - DNA, 6 bp, Unknown
  misc_feature (1)..( 6): Matrix.001 file - promoters60/1015264
ataata

SEQ ID NO: 42323 - DNA, 8 bp, Unknown
  misc_feature (1)..( 8): Matrix.001 file - promoters60/1015264
tgtacgaa

SEQ ID NO: 42324 - DNA, 8 bp, Unknown
  misc_feature (1)..( 8): Matrix.001 file - promoters60/1015264
aattaaaa

SEQ ID NO: 42325 - DNA, 7 bp, Unknown
  misc_feature (1)..( 7): Matrix.001 file - promoters60/1015264
aaaatta

SEQ ID NO: 42326 - DNA, 6 bp, Unknown
  misc_feature (1)..( 6): Matrix.001 file - promoters60/1015264
caaggt

SEQ ID NO: 42327 - DNA, 6 bp, Unknown
  misc_feature (1)..( 6): Matrix.001 file - promoters60/1015264
taatta

SEQ ID NO: 42328 - DNA, 8 bp, Unknown
  misc_feature (1)..( 8): Matrix.001 file - promoters60/1015264
tcagatta

SEQ ID NO: 42329 - DNA, 7 bp, Unknown
  misc_feature (1)..( 7): Matrix.001 file - promoters60/1015264
tcgattt

SEQ ID NO: 42330 - DNA, 6 bp, Unknown
  misc_feature (1)..( 6): Matrix.001 file - promoters60/1015264
attagt

SEQ ID NO: 42331 - DNA, 8 bp, Unknown
  misc_feature (1)..( 8): Matrix.001 file - promoters60/1015264
agaaaaaa

SEQ ID NO: 42332 - DNA, 8 bp, Unknown
  misc_feature (1)..( 8): Matrix.001 file - promoters60/1015264
aaatataa

SEQ ID NO: 42333 - DNA, 6 bp, Unknown
  misc_feature (1)..( 6): Matrix.001 file - promoters60/1015264
tctgta

SEQ ID NO: 42334 - DNA, 7 bp, Unknown
  misc_feature (1)..( 7): Matrix.001 file - promoters60/1015264
tcatttg

SEQ ID NO: 42335 - DNA, 7 bp, Unknown
  misc_feature (1)..( 7): Matrix.001 file - promoters60/1015264
tttgaag

SEQ ID NO: 42336 - DNA, 7 bp, Unknown
  misc_feature (1)..( 7): Matrix.001 file - promoters60/1015264
ttaacca

SEQ ID NO: 42337 - DNA, 6 bp, Unknown
  misc_feature (1)..( 6): Matrix.001 file - promoters60/1015264
tgacat

SEQ ID NO: 42338 - DNA, 7 bp, Unknown
  misc_feature (1)..( 7): Matrix.001 file - promoters60/1015264
tatcatt

SEQ ID NO: 42339 - DNA, 7 bp, Unknown
  misc_feature (1)..( 7): Matrix.001 file - promoters60/1015264
gaatttg

SEQ ID NO: 42340 - DNA, 7 bp, Unknown
  misc_feature (1)..( 7): Matrix.001 file - promoters60/1015264
tttgatt

SEQ ID NO: 42341 - DNA, 7 bp, Unknown
  misc_feature (1)..( 7): Matrix.001 file - promoters60/1015264
ttagatc

SEQ ID NO: 42342 - DNA, 7 bp, Unknown
  misc_feature (1)..( 7): Matrix.001 file - promoters60/1015337
aaacaaa

SEQ ID NO: 42343 - DNA, 7 bp, Unknown
  misc_feature (1)..( 7): Matrix.001 file - promoters60/1015360
gttatat

SEQ ID NO: 42344 - DNA, 7 bp, Unknown
  misc_feature (1)..( 7): Matrix.001 file - promoters60/1015360
ctaataa

SEQ ID NO: 42345 - DNA, 8 bp, Unknown
  misc_feature (1)..( 8): Matrix.001 file - promoters60/1015360
atttcatt

SEQ ID NO: 42346 - DNA, 13 bp, Unknown
  misc_feature (1)..( 13): Matrix.001 file - promoters60/1015360
accaaaaaagaaa

SEQ ID NO: 42347 - DNA, 7 bp, Unknown
  misc_feature (1)..( 7): Matrix.001 file - promoters60/1015360
aaaaaaa

SEQ ID NO: 42348 - DNA, 10 bp, Unknown
  misc_feature (1)..( 10): Matrix.001 file - promoters60/1015360
gaaaaataaa

SEQ ID NO: 42349 - DNA, 9 bp, Unknown
  misc_feature (1)..( 9): Matrix.001 file - promoters60/1015475
gtttccttt

SEQ ID NO: 42350 - DNA, 8 bp, Unknown
  misc_feature (1)..( 8): Matrix.001 file - promoters60/1015475
aaccaata

SEQ ID NO: 42351 - DNA, 9 bp, Unknown
  misc_feature (1)..( 9): Matrix.001 file - promoters60/1015475
tttccttat

SEQ ID NO: 42352 - DNA, 12 bp, Unknown
  misc_feature (1)..( 12): Matrix.001 file - promoters60/1015524
acttgaatatta

SEQ ID NO: 42353 - DNA, 7 bp, Unknown
  misc_feature (1)..( 7): Matrix.001 file - promoters60/1015524
agatata

SEQ ID NO: 42354 - DNA, 9 bp, Unknown
  misc_feature (1)..( 9): Matrix.001 file - promoters60/1015524
atttttttc

SEQ ID NO: 42355 - DNA, 12 bp, Unknown
  misc_feature (1)..( 12): Matrix.001 file - promoters60/1015537
aaaaaatttaag

SEQ ID NO: 42356 - DNA, 7 bp, Unknown
  misc_feature (1)..( 7): Matrix.001 file - promoters60/1015537
aatcaat

SEQ ID NO: 42357 - DNA, 7 bp, Unknown
  misc_feature (1)..( 7): Matrix.001 file - promoters60/1015537
aatcaaa

SEQ ID NO: 42358 - DNA, 9 bp, Unknown
  misc_feature (1)..( 9): Matrix.001 file - promoters60/1015537
ctaatttaa

SEQ ID NO: 42359 - DNA, 8 bp, Unknown
  misc_feature (1)..( 8): Matrix.001 file - promoters60/1015537
atataaat

SEQ ID NO: 42360 - DNA, 11 bp, Unknown
  misc_feature (1)..( 11): Matrix.001 file - promoters60/1015537
ttagtttccta

SEQ ID NO: 42361 - DNA, 9 bp, Unknown
  misc_feature (1)..( 9): Matrix.001 file - promoters60/1015597
gagtttgtt

SEQ ID NO: 42362 - DNA, 7 bp, Unknown
  misc_feature (1)..( 7): Matrix.001 file - promoters60/1015661
attaata

SEQ ID NO: 42363 - DNA, 8 bp, Unknown
  misc_feature (1)..( 8): Matrix.001 file - promoters60/1015661
tttataat

SEQ ID NO: 42364 - DNA, 9 bp, Unknown
  misc_feature (1)..( 9): Matrix.001 file - promoters60/1015661
tatataaaa

SEQ ID NO: 42365 - DNA, 6 bp, Unknown
  misc_feature (1)..( 6): Matrix.001 file - promoters60/1015661
ttaatg

SEQ ID NO: 42366 - DNA, 7 bp, Unknown
  misc_feature (1)..( 7): Matrix.001 file - promoters60/1015661
gaaatat

SEQ ID NO: 42367 - DNA, 6 bp, Unknown
  misc_feature (1)..( 6): Matrix.001 file - promoters60/1015661
aaatgt

SEQ ID NO: 42368 - DNA, 7 bp, Unknown
  misc_feature (1)..( 7): Matrix.001 file - promoters60/1015661
tgtacac

SEQ ID NO: 42369 - DNA, 9 bp, Unknown
  misc_feature (1)..( 9): Matrix.001 file - promoters60/1015661
aaagcaatg

SEQ ID NO: 42370 - DNA, 6 bp, Unknown
  misc_feature (1)..( 6): Matrix.001 file - promoters60/1015661
aaacaa

SEQ ID NO: 42371 - DNA, 8 bp, Unknown
  misc_feature (1)..( 8): Matrix.001 file - promoters60/1015661
aaccaaaa

SEQ ID NO: 42372 - DNA, 6 bp, Unknown
  misc_feature (1)..( 6): Matrix.001 file - promoters60/1015661
caaaga

SEQ ID NO: 42373 - DNA, 6 bp, Unknown
  misc_feature (1)..( 6): Matrix.001 file - promoters60/1015661
attatt

SEQ ID NO: 42374 - DNA, 7 bp, Unknown
  misc_feature (1)..( 7): Matrix.001 file - promoters60/1015661
tttgtga

SEQ ID NO: 42375 - DNA, 6 bp, Unknown
  misc_feature (1)..( 6): Matrix.001 file - promoters60/1015661
taaaaa

SEQ ID NO: 42376 - DNA, 6 bp, Unknown
  misc_feature (1)..( 6): Matrix.001 file - promoters60/1015661
atattt

SEQ ID NO: 42377 - DNA, 9 bp, Unknown
  misc_feature (1)..( 9): Matrix.001 file - promoters60/1015661
tagtgtaaa

SEQ ID NO: 42378 - DNA, 6 bp, Unknown
  misc_feature (1)..( 6): Matrix.001 file - promoters60/1015661
ctaatt

SEQ ID NO: 42379 - DNA, 8 bp, Unknown
  misc_feature (1)..( 8): Matrix.001 file - promoters60/1015676
ttttgaaa

SEQ ID NO: 42380 - DNA, 8 bp, Unknown
  misc_feature (1)..( 8): Matrix.001 file - promoters60/1015676
aatatttt

SEQ ID NO: 42381 - DNA, 13 bp, Unknown
  misc_feature (1)..( 13): Matrix.001 file - promoters60/1015676
attatatcaacat

SEQ ID NO: 42382 - DNA, 8 bp, Unknown
  misc_feature (1)..( 8): Matrix.001 file - promoters60/1015676
ttaaaaca

SEQ ID NO: 42383 - DNA, 8 bp, Unknown
  misc_feature (1)..( 8): Matrix.001 file - promoters60/1015676
gtttcaaa

SEQ ID NO: 42384 - DNA, 8 bp, Unknown
  misc_feature (1)..( 8): Matrix.001 file - promoters60/1015748
gttttaat

SEQ ID NO: 42385 - DNA, 10 bp, Unknown
  misc_feature (1)..( 10): Matrix.001 file - promoters60/1015748
caattttgtt

SEQ ID NO: 42386 - DNA, 8 bp, Unknown
  misc_feature (1)..( 8): Matrix.001 file - promoters60/1015748
ttaaaaaa

SEQ ID NO: 42387 - DNA, 8 bp, Unknown
  misc_feature (1)..( 8): Matrix.001 file - promoters60/1015778
attatccc

SEQ ID NO: 42388 - DNA, 11 bp, Unknown
  misc_feature (1)..( 11): Matrix.001 file - promoters60/1015778
taaaataaatt

SEQ ID NO: 42389 - DNA, 12 bp, Unknown
  misc_feature (1)..( 12): Matrix.001 file - promoters60/1015778
aacaaaaaaaaa

SEQ ID NO: 42390 - DNA, 7 bp, Unknown
  misc_feature (1)..( 7): Matrix.001 file - promoters60/1015778
aaaagat

SEQ ID NO: 42391 - DNA, 9 bp, Unknown
  misc_feature (1)..( 9): Matrix.001 file - promoters60/1015778
actctaaaa

SEQ ID NO: 42392 - DNA, 8 bp, Unknown
  misc_feature (1)..( 8): Matrix.001 file - promoters60/1015778
tttgggcc

SEQ ID NO: 42393 - DNA, 12 bp, Unknown
  misc_feature (1)..( 12): Matrix.001 file - promoters60/1015778
aataaaatacta

SEQ ID NO: 42394 - DNA, 9 bp, Unknown
  misc_feature (1)..( 9): Matrix.001 file - promoters60/1015848
gtttccttt

SEQ ID NO: 42395 - DNA, 8 bp, Unknown
  misc_feature (1)..( 8): Matrix.001 file - promoters60/1015848
aaccaata

SEQ ID NO: 42396 - DNA, 9 bp, Unknown
  misc_feature (1)..( 9): Matrix.001 file - promoters60/1015848
tttccttat

SEQ ID NO: 42397 - DNA, 7 bp, Unknown
  misc_feature (1)..( 7): Matrix.001 file - promoters60/1016056
tgtattg

SEQ ID NO: 42398 - DNA, 6 bp, Unknown
  misc_feature (1)..( 6): Matrix.001 file - promoters60/1016056
attaaa

SEQ ID NO: 42399 - DNA, 8 bp, Unknown
  misc_feature (1)..( 8): Matrix.001 file - promoters60/1016056
cagtaact

SEQ ID NO: 42400 - DNA, 8 bp, Unknown
  misc_feature (1)..( 8): Matrix.001 file - promoters60/1016056
ataaaagt

SEQ ID NO: 42401 - DNA, 11 bp, Unknown
  misc_feature (1)..( 11): Matrix.001 file - promoters60/1016056
aataaaataaa

SEQ ID NO: 42402 - DNA, 6 bp, Unknown
  misc_feature (1)..( 6): Matrix.001 file - promoters60/1016056
tttatt

SEQ ID NO: 42403 - DNA, 11 bp, Unknown
  misc_feature (1)..( 11): Matrix.001 file - promoters60/1016056
aataaaaactt

SEQ ID NO: 42404 - DNA, 7 bp, Unknown
  misc_feature (1)..( 7): Matrix.001 file - promoters60/1016056
ttgagaa

SEQ ID NO: 42405 - DNA, 6 bp, Unknown
  misc_feature (1)..( 6): Matrix.001 file - promoters60/1016056
taaaaa

SEQ ID NO: 42406 - DNA, 6 bp, Unknown
  misc_feature (1)..( 6): Matrix.001 file - promoters60/1016056
tgttat

SEQ ID NO: 42407 - DNA, 6 bp, Unknown
  misc_feature (1)..( 6): Matrix.001 file - promoters60/1016056
agtaaa

SEQ ID NO: 42408 - DNA, 7 bp, Unknown
  misc_feature (1)..( 7): Matrix.001 file - promoters60/1016056
aatcggg

SEQ ID NO: 42409 - DNA, 8 bp, Unknown
  misc_feature (1)..( 8): Matrix.001 file - promoters60/1016056
gaaacaaa

SEQ ID NO: 42410 - DNA, 7 bp, Unknown
  misc_feature (1)..( 7): Matrix.001 file - promoters60/1016056
cccacta

SEQ ID NO: 42411 - DNA, 9 bp, Unknown
  misc_feature (1)..( 9): Matrix.001 file - promoters60/1016056
aaagaaaag

SEQ ID NO: 42412 - DNA, 7 bp, Unknown
  misc_feature (1)..( 7): Matrix.001 file - promoters60/1016056
gtatata

SEQ ID NO: 42413 - DNA, 14 bp, Unknown
  misc_feature (1)..( 14): Matrix.001 file - promoters60/1016094
cactgtgattgaat

SEQ ID NO: 42414 - DNA, 9 bp, Unknown
  misc_feature (1)..( 9): Matrix.001 file - promoters60/1016094
gaaaaaaaa

SEQ ID NO: 42415 - DNA, 7 bp, Unknown
  misc_feature (1)..( 7): Matrix.001 file - promoters60/1016133
aaaaaat

SEQ ID NO: 42416 - DNA, 7 bp, Unknown
  misc_feature (1)..( 7): Matrix.001 file - promoters60/1016133
atacaaa

SEQ ID NO: 42417 - DNA, 7 bp, Unknown
  misc_feature (1)..( 7): Matrix.001 file - promoters60/1016133
aaatttt

SEQ ID NO: 42418 - DNA, 6 bp, Unknown
  misc_feature (1)..( 6): Matrix.001 file - promoters60/1016133
ttttat

SEQ ID NO: 42419 - DNA, 8 bp, Unknown
  misc_feature (1)..( 8): Matrix.001 file - promoters60/1016133
ataacatt

SEQ ID NO: 42420 - DNA, 6 bp, Unknown
  misc_feature (1)..( 6): Matrix.001 file - promoters60/1016133
ttaatt

SEQ ID NO: 42421 - DNA, 10 bp, Unknown
  misc_feature (1)..( 10): Matrix.001 file - promoters60/1016133
gtatatcaaa

SEQ ID NO: 42422 - DNA, 6 bp, Unknown
  misc_feature (1)..( 6): Matrix.001 file - promoters60/1016133
tttgaa

SEQ ID NO: 42423 - DNA, 8 bp, Unknown
  misc_feature (1)..( 8): Matrix.001 file - promoters60/1016133
aacattca

SEQ ID NO: 42424 - DNA, 6 bp, Unknown
  misc_feature (1)..( 6): Matrix.001 file - promoters60/1016133
ctctat

SEQ ID NO: 42425 - DNA, 8 bp, Unknown
  misc_feature (1)..( 8): Matrix.001 file - promoters60/1016133
atttgatg

SEQ ID NO: 42426 - DNA, 7 bp, Unknown
  misc_feature (1)..( 7): Matrix.001 file - promoters60/1016133
gatatat

SEQ ID NO: 42427 - DNA, 7 bp, Unknown
  misc_feature (1)..( 7): Matrix.001 file - promoters60/1016133
tatttag

SEQ ID NO: 42428 - DNA, 7 bp, Unknown
  misc_feature (1)..( 7): Matrix.001 file - promoters60/1016133
atcgttt

SEQ ID NO: 42429 - DNA, 6 bp, Unknown
  misc_feature (1)..( 6): Matrix.001 file - promoters60/1016133
atttta

SEQ ID NO: 42430 - DNA, 6 bp, Unknown
  misc_feature (1)..( 6): Matrix.001 file - promoters60/1016133
aataat

SEQ ID NO: 42431 - DNA, 8 bp, Unknown
  misc_feature (1)..( 8): Matrix.001 file - promoters60/1016133
atcaaata

SEQ ID NO: 42432 - DNA, 6 bp, Unknown
  misc_feature (1)..( 6): Matrix.001 file - promoters60/1016133
aattaa

SEQ ID NO: 42433 - DNA, 6 bp, Unknown
  misc_feature (1)..( 6): Matrix.001 file - promoters60/1016133
aataat

SEQ ID NO: 42434 - DNA, 9 bp, Unknown
  misc_feature (1)..( 9): Matrix.001 file - promoters60/1016133
tagataatt

SEQ ID NO: 42435 - DNA, 7 bp, Unknown
  misc_feature (1)..( 7): Matrix.001 file - promoters60/1016133
aatatta

SEQ ID NO: 42436 - DNA, 6 bp, Unknown
  misc_feature (1)..( 6): Matrix.001 file - promoters60/1016133
attcta

SEQ ID NO: 42437 - DNA, 6 bp, Unknown
  misc_feature (1)..( 6): Matrix.001 file - promoters60/1016133
atatat

SEQ ID NO: 42438 - DNA, 7 bp, Unknown
  misc_feature (1)..( 7): Matrix.001 file - promoters60/1016133
tatcata

SEQ ID NO: 42439 - DNA, 6 bp, Unknown
  misc_feature (1)..( 6): Matrix.001 file - promoters60/1016133
aaagat

SEQ ID NO: 42440 - DNA, 6 bp, Unknown
  misc_feature (1)..( 6): Matrix.001 file - promoters60/1016133
actata

SEQ ID NO: 42441 - DNA, 11 bp, Unknown
  misc_feature (1)..( 11): Matrix.001 file - promoters60/1016133
tatactttact

SEQ ID NO: 42442 - DNA, 7 bp, Unknown
  misc_feature (1)..( 7): Matrix.001 file - promoters60/1016133
attcaaa

SEQ ID NO: 42443 - DNA, 7 bp, Unknown
  misc_feature (1)..( 7): Matrix.001 file - promoters60/1016133
aaaatta

SEQ ID NO: 42444 - DNA, 7 bp, Unknown
  misc_feature (1)..( 7): Matrix.001 file - promoters60/1016133
ctacaaa

SEQ ID NO: 42445 - DNA, 6 bp, Unknown
  misc_feature (1)..( 6): Matrix.001 file - promoters60/1016165
tattat

SEQ ID NO: 42446 - DNA, 10 bp, Unknown
  misc_feature (1)..( 10): Matrix.001 file - promoters60/1016165
gattatggat

SEQ ID NO: 42447 - DNA, 7 bp, Unknown
  misc_feature (1)..( 7): Matrix.001 file - promoters60/1016165
tgtattt

SEQ ID NO: 42448 - DNA, 8 bp, Unknown
  misc_feature (1)..( 8): Matrix.001 file - promoters60/1016165
aaaatgtg

SEQ ID NO: 42449 - DNA, 10 bp, Unknown
  misc_feature (1)..( 10): Matrix.001 file - promoters60/1016165
tattttaatg

SEQ ID NO: 42450 - DNA, 10 bp, Unknown
  misc_feature (1)..( 10): Matrix.001 file - promoters60/1016165
ttaataattt

SEQ ID NO: 42451 - DNA, 8 bp, Unknown
  misc_feature (1)..( 8): Matrix.001 file - promoters60/1016165
aataaaag

SEQ ID NO: 42452 - DNA, 6 bp, Unknown
  misc_feature (1)..( 6): Matrix.001 file - promoters60/1016165
aaaatt

SEQ ID NO: 42453 - DNA, 7 bp, Unknown
  misc_feature (1)..( 7): Matrix.001 file - promoters60/1016165
aatcaaa

SEQ ID NO: 42454 - DNA, 6 bp, Unknown
  misc_feature (1)..( 6): Matrix.001 file - promoters60/1016165
ggccca

SEQ ID NO: 42455 - DNA, 8 bp, Unknown
  misc_feature (1)..( 8): Matrix.001 file - promoters60/1016165
agacaagt

SEQ ID NO: 42456 - DNA, 7 bp, Unknown
  misc_feature (1)..( 7): Matrix.001 file - promoters60/1016165
aagatca

SEQ ID NO: 42457 - DNA, 7 bp, Unknown
  misc_feature (1)..( 7): Matrix.001 file - promoters60/1016165
taacaaa

SEQ ID NO: 42458 - DNA, 7 bp, Unknown
  misc_feature (1)..( 7): Matrix.001 file - promoters60/1016165
taatcac

SEQ ID NO: 42459 - DNA, 7 bp, Unknown
  misc_feature (1)..( 7): Matrix.001 file - promoters60/1016165
agtgaat

SEQ ID NO: 42460 - DNA, 7 bp, Unknown
  misc_feature (1)..( 7): Matrix.001 file - promoters60/1016165
cccattt

SEQ ID NO: 42461 - DNA, 6 bp, Unknown
  misc_feature (1)..( 6): Matrix.001 file - promoters60/1016165
aaccaa

SEQ ID NO: 42462 - DNA, 7 bp, Unknown
  misc_feature (1)..( 7): Matrix.001 file - promoters60/1016165
agggata

SEQ ID NO: 42463 - DNA, 7 bp, Unknown
  misc_feature (1)..( 7): Matrix.001 file - promoters60/1016165
tgatcat

SEQ ID NO: 42464 - DNA, 6 bp, Unknown
  misc_feature (1)..( 6): Matrix.001 file - promoters60/1016165
taattt

SEQ ID NO: 42465 - DNA, 7 bp, Unknown
  misc_feature (1)..( 7): Matrix.001 file - promoters60/1016165
ttccatt

SEQ ID NO: 42466 - DNA, 8 bp, Unknown
  misc_feature (1)..( 8): Matrix.001 file - promoters60/1016165
ttaacaat

SEQ ID NO: 42467 - DNA, 9 bp, Unknown
  misc_feature (1)..( 9): Matrix.001 file - promoters60/1016176
taaaataaa

SEQ ID NO: 42468 - DNA, 11 bp, Unknown
  misc_feature (1)..( 11): Matrix.001 file - promoters60/1016176
acaaatcataa

SEQ ID NO: 42469 - DNA, 6 bp, Unknown
  misc_feature (1)..( 6): Matrix.001 file - promoters60/1016176
gaaaga

SEQ ID NO: 42470 - DNA, 8 bp, Unknown
  misc_feature (1)..( 8): Matrix.001 file - promoters60/1016223
aaaacaac

SEQ ID NO: 42471 - DNA, 6 bp, Unknown
  misc_feature (1)..( 6): Matrix.001 file - promoters60/1016223
atggca

SEQ ID NO: 42472 - DNA, 7 bp, Unknown
  misc_feature (1)..( 7): Matrix.001 file - promoters60/1016223
cgtgaaa

SEQ ID NO: 42473 - DNA, 8 bp, Unknown
  misc_feature (1)..( 8): Matrix.001 file - promoters60/1016223
agaaattg

SEQ ID NO: 42474 - DNA, 8 bp, Unknown
  misc_feature (1)..( 8): Matrix.001 file - promoters60/1016223
aaaacaat

SEQ ID NO: 42475 - DNA, 8 bp, Unknown
  misc_feature (1)..( 8): Matrix.001 file - promoters60/1016223
gaaataaa

SEQ ID NO: 42476 - DNA, 7 bp, Unknown
  misc_feature (1)..( 7): Matrix.001 file - promoters60/1016223
caaattt

SEQ ID NO: 42477 - DNA, 6 bp, Unknown
  misc_feature (1)..( 6): Matrix.001 file - promoters60/1016223
ttaaaa

SEQ ID NO: 42478 - DNA, 6 bp, Unknown
  misc_feature (1)..( 6): Matrix.001 file - promoters60/1016223
gtaacg

SEQ ID NO: 42479 - DNA, 7 bp, Unknown
  misc_feature (1)..( 7): Matrix.001 file - promoters60/1016223
gtggtta

SEQ ID NO: 42480 - DNA, 8 bp, Unknown
  misc_feature (1)..( 8): Matrix.001 file - promoters60/1016223
acgtgtca

SEQ ID NO: 42481 - DNA, 15 bp, Unknown
  misc_feature (1)..( 15): Matrix.001 file - promoters60/1016223
tattgcttcaccgcc

SEQ ID NO: 42482 - DNA, 6 bp, Unknown
  misc_feature (1)..( 6): Matrix.001 file - promoters60/1016223
ctcgtc

SEQ ID NO: 42483 - DNA, 15 bp, Unknown
  misc_feature (1)..( 15): Matrix.001 file - promoters60/1016223
ttcttcttctataaa

SEQ ID NO: 42484 - DNA, 10 bp, Unknown
  misc_feature (1)..( 10): Matrix.001 file - promoters60/1016250
atcaaccaaa

SEQ ID NO: 42485 - DNA, 11 bp, Unknown
  misc_feature (1)..( 11): Matrix.001 file - promoters60/1016250
ccacctatata

SEQ ID NO: 42486 - DNA, 10 bp, Unknown
  misc_feature (1)..( 10): Matrix.001 file - promoters60/1016250
aaagaaaaaa

SEQ ID NO: 42487 - DNA, 7 bp, Unknown
  misc_feature (1)..( 7): Matrix.001 file - promoters60/1016250
aaatgaa

SEQ ID NO: 42488 - DNA, 6 bp, Unknown
  misc_feature (1)..( 6): Matrix.001 file - promoters60/1016278
aaaaag

SEQ ID NO: 42489 - DNA, 9 bp, Unknown
  misc_feature (1)..( 9): Matrix.001 file - promoters60/1016278
gggattttt

SEQ ID NO: 42490 - DNA, 8 bp, Unknown
  misc_feature (1)..( 8): Matrix.001 file - promoters60/1016278
tgtatcta

SEQ ID NO: 42491 - DNA, 7 bp, Unknown
  misc_feature (1)..( 7): Matrix.001 file - promoters60/1016278
taattat

SEQ ID NO: 42492 - DNA, 7 bp, Unknown
  misc_feature (1)..( 7): Matrix.001 file - promoters60/1016278
ttatata

SEQ ID NO: 42493 - DNA, 8 bp, Unknown
  misc_feature (1)..( 8): Matrix.001 file - promoters60/1016278
aacgcaag

SEQ ID NO: 42494 - DNA, 6 bp, Unknown
  misc_feature (1)..( 6): Matrix.001 file - promoters60/1016278
attttt

SEQ ID NO: 42495 - DNA, 6 bp, Unknown
  misc_feature (1)..( 6): Matrix.001 file - promoters60/1016278
atcaac

SEQ ID NO: 42496 - DNA, 11 bp, Unknown
  misc_feature (1)..( 11): Matrix.001 file - promoters60/1016278
tataatataat

SEQ ID NO: 42497 - DNA, 6 bp, Unknown
  misc_feature (1)..( 6): Matrix.001 file - promoters60/1016278
aaataa

SEQ ID NO: 42498 - DNA, 10 bp, Unknown
  misc_feature (1)..( 10): Matrix.001 file - promoters60/1016278
aaatagataa

SEQ ID NO: 42499 - DNA, 6 bp, Unknown
  misc_feature (1)..( 6): Matrix.001 file - promoters60/1016278
aattgt

SEQ ID NO: 42500 - DNA, 6 bp, Unknown
  misc_feature (1)..( 6): Matrix.001 file - promoters60/1016278
gctacc

SEQ ID NO: 42501 - DNA, 6 bp, Unknown
  misc_feature (1)..( 6): Matrix.001 file - promoters60/1016278
tctctc

SEQ ID NO: 42502 - DNA, 7 bp, Unknown
  misc_feature (1)..( 7): Matrix.001 file - promoters60/1016278
tttattt

SEQ ID NO: 42503 - DNA, 8 bp, Unknown
  misc_feature (1)..( 8): Matrix.001 file - promoters60/1016278
ttactgat

SEQ ID NO: 42504 - DNA, 6 bp, Unknown
  misc_feature (1)..( 6): Matrix.001 file - promoters60/1016278
atttat

SEQ ID NO: 42505 - DNA, 7 bp, Unknown
  misc_feature (1)..( 7): Matrix.001 file - promoters60/1016278
tttattt

SEQ ID NO: 42506 - DNA, 6 bp, Unknown
  misc_feature (1)..( 6): Matrix.001 file - promoters60/1016278
tatctc

SEQ ID NO: 42507 - DNA, 8 bp, Unknown
  misc_feature (1)..( 8): Matrix.001 file - promoters60/1016278
atccaaac

SEQ ID NO: 42508 - DNA, 7 bp, Unknown
  misc_feature (1)..( 7): Matrix.001 file - promoters60/1016278
ataaaaa

SEQ ID NO: 42509 - DNA, 7 bp, Unknown
  misc_feature (1)..( 7): Matrix.001 file - promoters60/1016278
gaaaacg

SEQ ID NO: 42510 - DNA, 6 bp, Unknown
  misc_feature (1)..( 6): Matrix.001 file - promoters60/1016343
tttccg

SEQ ID NO: 42511 - DNA, 6 bp, Unknown
  misc_feature (1)..( 6): Matrix.001 file - promoters60/1016343
ttttat

SEQ ID NO: 42512 - DNA, 7 bp, Unknown
  misc_feature (1)..( 7): Matrix.001 file - promoters60/1016343
attaata

SEQ ID NO: 42513 - DNA, 6 bp, Unknown
  misc_feature (1)..( 6): Matrix.001 file - promoters60/1016343
taaatt

SEQ ID NO: 42514 - DNA, 9 bp, Unknown
  misc_feature (1)..( 9): Matrix.001 file - promoters60/1016343
atatttttt

SEQ ID NO: 42515 - DNA, 6 bp, Unknown
  misc_feature (1)..( 6): Matrix.001 file - promoters60/1016343
caatat

SEQ ID NO: 42516 - DNA, 9 bp, Unknown
  misc_feature (1)..( 9): Matrix.001 file - promoters60/1016343
atatcatat

SEQ ID NO: 42517 - DNA, 8 bp, Unknown
  misc_feature (1)..( 8): Matrix.001 file - promoters60/1016343
aaaaaaaa

SEQ ID NO: 42518 - DNA, 6 bp, Unknown
  misc_feature (1)..( 6): Matrix.001 file - promoters60/1016343
aatttt

SEQ ID NO: 42519 - DNA, 6 bp, Unknown
  misc_feature (1)..( 6): Matrix.001 file - promoters60/1016343
attttg

SEQ ID NO: 42520 - DNA, 6 bp, Unknown
  misc_feature (1)..( 6): Matrix.001 file - promoters60/1016343
aatttt

SEQ ID NO: 42521 - DNA, 7 bp, Unknown
  misc_feature (1)..( 7): Matrix.001 file - promoters60/1016343
tttcata

SEQ ID NO: 42522 - DNA, 7 bp, Unknown
  misc_feature (1)..( 7): Matrix.001 file - promoters60/1016343
tcacatt

SEQ ID NO: 42523 - DNA, 6 bp, Unknown
  misc_feature (1)..( 6): Matrix.001 file - promoters60/1016343
tgctca

SEQ ID NO: 42524 - DNA, 7 bp, Unknown
  misc_feature (1)..( 7): Matrix.001 file - promoters60/1016343
tgtgttc

SEQ ID NO: 42525 - DNA, 6 bp, Unknown
  misc_feature (1)..( 6): Matrix.001 file - promoters60/1016343
ttcaat

SEQ ID NO: 42526 - DNA, 7 bp, Unknown
  misc_feature (1)..( 7): Matrix.001 file - promoters60/1016382
ctgattc

SEQ ID NO: 42527 - DNA, 6 bp, Unknown
  misc_feature (1)..( 6): Matrix.001 file - promoters60/1016382
taggag

SEQ ID NO: 42528 - DNA, 6 bp, Unknown
  misc_feature (1)..( 6): Matrix.001 file - promoters60/1016382
gaaaga

SEQ ID NO: 42529 - DNA, 6 bp, Unknown
  misc_feature (1)..( 6): Matrix.001 file - promoters60/1016382
cttttg

SEQ ID NO: 42530 - DNA, 6 bp, Unknown
  misc_feature (1)..( 6): Matrix.001 file - promoters60/1016382
tttacc

SEQ ID NO: 42531 - DNA, 11 bp, Unknown
  misc_feature (1)..( 11): Matrix.001 file - promoters60/1016382
ttttaatatat

SEQ ID NO: 42532 - DNA, 6 bp, Unknown
  misc_feature (1)..( 6): Matrix.001 file - promoters60/1016382
gttagt

SEQ ID NO: 42533 - DNA, 6 bp, Unknown
  misc_feature (1)..( 6): Matrix.001 file - promoters60/1016382
taaaaa

SEQ ID NO: 42534 - DNA, 6 bp, Unknown
  misc_feature (1)..( 6): Matrix.001 file - promoters60/1016382
gagtgt

SEQ ID NO: 42535 - DNA, 7 bp, Unknown
  misc_feature (1)..( 7): Matrix.001 file - promoters60/1016382
tctctaa

SEQ ID NO: 42536 - DNA, 6 bp, Unknown
  misc_feature (1)..( 6): Matrix.001 file - promoters60/1016382
ttcaaa

SEQ ID NO: 42537 - DNA, 6 bp, Unknown
  misc_feature (1)..( 6): Matrix.001 file - promoters60/1016382
gtttaa

SEQ ID NO: 42538 - DNA, 6 bp, Unknown
  misc_feature (1)..( 6): Matrix.001 file - promoters60/1016382
tactgt

SEQ ID NO: 42539 - DNA, 9 bp, Unknown
  misc_feature (1)..( 9): Matrix.001 file - promoters60/1016382
tcaaaattt

SEQ ID NO: 42540 - DNA, 6 bp, Unknown
  misc_feature (1)..( 6): Matrix.001 file - promoters60/1016382
ttgaaa

SEQ ID NO: 42541 - DNA, 7 bp, Unknown
  misc_feature (1)..( 7): Matrix.001 file - promoters60/1016382
cttctcc

SEQ ID NO: 42542 - DNA, 7 bp, Unknown
  misc_feature (1)..( 7): Matrix.001 file - promoters60/1016382
ttcatgt

SEQ ID NO: 42543 - DNA, 7 bp, Unknown
  misc_feature (1)..( 7): Matrix.001 file - promoters60/1016382
aagattt

SEQ ID NO: 42544 - DNA, 10 bp, Unknown
  misc_feature (1)..( 10): Matrix.001 file - promoters60/1016382
atattttttt

SEQ ID NO: 42545 - DNA, 7 bp, Unknown
  misc_feature (1)..( 7): Matrix.001 file - promoters60/1016382
tacctca

SEQ ID NO: 42546 - DNA, 7 bp, Unknown
  misc_feature (1)..( 7): Matrix.001 file - promoters60/1016382
tttgata

SEQ ID NO: 42547 - DNA, 9 bp, Unknown
  misc_feature (1)..( 9): Matrix.001 file - promoters60/1016382
catcattat

SEQ ID NO: 42548 - DNA, 8 bp, Unknown
  misc_feature (1)..( 8): Matrix.001 file - promoters60/1016418
taatcaat

SEQ ID NO: 42549 - DNA, 9 bp, Unknown
  misc_feature (1)..( 9): Matrix.001 file - promoters60/1016418
ttatttgga

SEQ ID NO: 42550 - DNA, 7 bp, Unknown
  misc_feature (1)..( 7): Matrix.001 file - promoters60/1016418
tataaat

SEQ ID NO: 42551 - DNA, 8 bp, Unknown
  misc_feature (1)..( 8): Matrix.001 file - promoters60/1016418
attgttga

SEQ ID NO: 42552 - DNA, 6 bp, Unknown
  misc_feature (1)..( 6): Matrix.001 file - promoters60/1016418
agcaat

SEQ ID NO: 42553 - DNA, 7 bp, Unknown
  misc_feature (1)..( 7): Matrix.001 file - promoters60/1016426
aatagga

SEQ ID NO: 42554 - DNA, 9 bp, Unknown
  misc_feature (1)..( 9): Matrix.001 file - promoters60/1016426
tagaaatac

SEQ ID NO: 42555 - DNA, 9 bp, Unknown
  misc_feature (1)..( 9): Matrix.001 file - promoters60/1016426
gaaagttaa

SEQ ID NO: 42556 - DNA, 6 bp, Unknown
  misc_feature (1)..( 6): Matrix.001 file - promoters60/1016426
aatttt

SEQ ID NO: 42557 - DNA, 8 bp, Unknown
  misc_feature (1)..( 8): Matrix.001 file - promoters60/1016426
tttaaatt

SEQ ID NO: 42558 - DNA, 6 bp, Unknown
  misc_feature (1)..( 6): Matrix.001 file - promoters60/1016426
cctaaa

SEQ ID NO: 42559 - DNA, 11 bp, Unknown
  misc_feature (1)..( 11): Matrix.001 file - promoters60/1016426
taaaatattga

SEQ ID NO: 42560 - DNA, 12 bp, Unknown
  misc_feature (1)..( 12): Matrix.001 file - promoters60/1016426
gaaaagcaaaac

SEQ ID NO: 42561 - DNA, 9 bp, Unknown
  misc_feature (1)..( 9): Matrix.001 file - promoters60/1016426
ttaaatttt

SEQ ID NO: 42562 - DNA, 7 bp, Unknown
  misc_feature (1)..( 7): Matrix.001 file - promoters60/1016426
caagtgt

SEQ ID NO: 42563 - DNA, 7 bp, Unknown
  misc_feature (1)..( 7): Matrix.001 file - promoters60/1016426
ctgattt

SEQ ID NO: 42564 - DNA, 6 bp, Unknown
  misc_feature (1)..( 6): Matrix.001 file - promoters60/1016426
tcttcc

SEQ ID NO: 42565 - DNA, 8 bp, Unknown
  misc_feature (1)..( 8): Matrix.001 file - promoters60/1016426
ctctctcg

SEQ ID NO: 42566 - DNA, 9 bp, Unknown
  misc_feature (1)..( 9): Matrix.001 file - promoters60/1016468
ataaaacaa

SEQ ID NO: 42567 - DNA, 11 bp, Unknown
  misc_feature (1)..( 11): Matrix.001 file - promoters60/1016468
caactatataa

SEQ ID NO: 42568 - DNA, 11 bp, Unknown
  misc_feature (1)..( 11): Matrix.001 file - promoters60/1016468
taattatttta

SEQ ID NO: 42569 - DNA, 4 bp, Unknown
  misc_feature (1)..( 4): Matrix.001 file - promoters60/1016468
tatt

SEQ ID NO: 42570 - DNA, 10 bp, Unknown
  misc_feature (1)..( 10): Matrix.001 file - promoters60/1016468
tgttgacttt

SEQ ID NO: 42571 - DNA, 12 bp, Unknown
  misc_feature (1)..( 12): Matrix.001 file - promoters60/1016468
tataattatttt

SEQ ID NO: 42572 - DNA, 9 bp, Unknown
  misc_feature (1)..( 9): Matrix.001 file - promoters60/1016468
aatgaaaat

SEQ ID NO: 42573 - DNA, 13 bp, Unknown
  misc_feature (1)..( 13): Matrix.001 file - promoters60/1016468
agttaaattttta

SEQ ID NO: 42574 - DNA, 9 bp, Unknown
  misc_feature (1)..( 9): Matrix.001 file - promoters60/1016514
taagaaaat

SEQ ID NO: 42575 - DNA, 10 bp, Unknown
  misc_feature (1)..( 10): Matrix.001 file - promoters60/1016514
gtagcaaata

SEQ ID NO: 42576 - DNA, 7 bp, Unknown
  misc_feature (1)..( 7): Matrix.001 file - promoters60/1016514
tttctgt

SEQ ID NO: 42577 - DNA, 9 bp, Unknown
  misc_feature (1)..( 9): Matrix.001 file - promoters60/1016514
atggtgaca

SEQ ID NO: 42578 - DNA, 8 bp, Unknown
  misc_feature (1)..( 8): Matrix.001 file - promoters60/1016514
atacaaca

SEQ ID NO: 42579 - DNA, 8 bp, Unknown
  misc_feature (1)..( 8): Matrix.001 file - promoters60/1016514
aaaattct

SEQ ID NO: 42580 - DNA, 8 bp, Unknown
  misc_feature (1)..( 8): Matrix.001 file - promoters60/1016514
taatatta

SEQ ID NO: 42581 - DNA, 6 bp, Unknown
  misc_feature (1)..( 6): Matrix.001 file - promoters60/1016514
atacca

SEQ ID NO: 42582 - DNA, 8 bp, Unknown
  misc_feature (1)..( 8): Matrix.001 file - promoters60/1016514
ttaatttt

SEQ ID NO: 42583 - DNA, 16 bp, Unknown
  misc_feature (1)..( 16): Matrix.001 file - promoters60/1016514
ttttctgaaatagtta

SEQ ID NO: 42584 - DNA, 7 bp, Unknown
  misc_feature (1)..( 7): Matrix.001 file - promoters60/1016514
attgtat

SEQ ID NO: 42585 - DNA, 6 bp, Unknown
  misc_feature (1)..( 6): Matrix.001 file - promoters60/1016514
tatata

SEQ ID NO: 42586 - DNA, 6 bp, Unknown
  misc_feature (1)..( 6): Matrix.001 file - promoters60/1016514
atatat

SEQ ID NO: 42587 - DNA, 7 bp, Unknown
  misc_feature (1)..( 7): Matrix.001 file - promoters60/1016514
atctttt

SEQ ID NO: 42588 - DNA, 9 bp, Unknown
  misc_feature (1)..( 9): Matrix.001 file - promoters60/1016514
tttaaggtt

SEQ ID NO: 42589 - DNA, 7 bp, Unknown
  misc_feature (1)..( 7): Matrix.001 file - promoters60/1016514
tatatgt

SEQ ID NO: 42590 - DNA, 7 bp, Unknown
  misc_feature (1)..( 7): Matrix.001 file - promoters60/1016514
taaaatt

SEQ ID NO: 42591 - DNA, 8 bp, Unknown
  misc_feature (1)..( 8): Matrix.001 file - promoters60/1016514
ttagttta

SEQ ID NO: 42592 - DNA, 6 bp, Unknown
  misc_feature (1)..( 6): Matrix.001 file - promoters60/1016514
ttaatg

SEQ ID NO: 42593 - DNA, 11 bp, Unknown
  misc_feature (1)..( 11): Matrix.001 file - promoters60/1016514
atagaaatatc

SEQ ID NO: 42594 - DNA, 6 bp, Unknown
  misc_feature (1)..( 6): Matrix.001 file - promoters60/1016514
tatttg

SEQ ID NO: 42595 - DNA, 6 bp, Unknown
  misc_feature (1)..( 6): Matrix.001 file - promoters60/1016514
tttcaa

SEQ ID NO: 42596 - DNA, 6 bp, Unknown
  misc_feature (1)..( 6): Matrix.001 file - promoters60/1016514
aacatt

SEQ ID NO: 42597 - DNA, 6 bp, Unknown
  misc_feature (1)..( 6): Matrix.001 file - promoters60/1016514
taaaaa

SEQ ID NO: 42598 - DNA, 10 bp, Unknown
  misc_feature (1)..( 10): Matrix.001 file - promoters60/1016514
aaaatcatat

SEQ ID NO: 42599 - DNA, 6 bp, Unknown
  misc_feature (1)..( 6): Matrix.001 file - promoters60/1016514
ggaaaa

SEQ ID NO: 42600 - DNA, 6 bp, Unknown
  misc_feature (1)..( 6): Matrix.001 file - promoters60/1016514
aatttt

SEQ ID NO: 42601 - DNA, 6 bp, Unknown
  misc_feature (1)..( 6): Matrix.001 file - promoters60/1016514
ataatt

SEQ ID NO: 42602 - DNA, 7 bp, Unknown
  misc_feature (1)..( 7): Matrix.001 file - promoters60/1016514
ctacaaa

SEQ ID NO: 42603 - DNA, 7 bp, Unknown
  misc_feature (1)..( 7): Matrix.001 file - promoters60/1016525
cttttta

SEQ ID NO: 42604 - DNA, 12 bp, Unknown
  misc_feature (1)..( 12): Matrix.001 file - promoters60/1016525
ttgaaaatataa

SEQ ID NO: 42605 - DNA, 11 bp, Unknown
  misc_feature (1)..( 11): Matrix.001 file - promoters60/1016525
taaaaactaga

SEQ ID NO: 42606 - DNA, 7 bp, Unknown
  misc_feature (1)..( 7): Matrix.001 file - promoters60/1016525
caataaa

SEQ ID NO: 42607 - DNA, 6 bp, Unknown
  misc_feature (1)..( 6): Matrix.001 file - promoters60/1016525
aagata

SEQ ID NO: 42608 - DNA, 7 bp, Unknown
  misc_feature (1)..( 7): Matrix.001 file - promoters60/1016525
tttaaaa

SEQ ID NO: 42609 - DNA, 7 bp, Unknown
  misc_feature (1)..( 7): Matrix.001 file - promoters60/1016525
aataaac

SEQ ID NO: 42610 - DNA, 8 bp, Unknown
  misc_feature (1)..( 8): Matrix.001 file - promoters60/1016525
agaaaaat

SEQ ID NO: 42611 - DNA, 8 bp, Unknown
  misc_feature (1)..( 8): Matrix.001 file - promoters60/1016525
attttaaa

SEQ ID NO: 42612 - DNA, 11 bp, Unknown
  misc_feature (1)..( 11): Matrix.001 file - promoters60/1016525
ataaaaacttt

SEQ ID NO: 42613 - DNA, 8 bp, Unknown
  misc_feature (1)..( 8): Matrix.001 file - promoters60/1016525
tatataaa

SEQ ID NO: 42614 - DNA, 10 bp, Unknown
  misc_feature (1)..( 10): Matrix.001 file - promoters60/1016525
ttaaaaatat

SEQ ID NO: 42615 - DNA, 6 bp, Unknown
  misc_feature (1)..( 6): Matrix.001 file - promoters60/1016525
tttgaa

SEQ ID NO: 42616 - DNA, 7 bp, Unknown
  misc_feature (1)..( 7): Matrix.001 file - promoters60/1016624
ttgtttc

SEQ ID NO: 42617 - DNA, 8 bp, Unknown
  misc_feature (1)..( 8): Matrix.001 file - promoters60/1016624
gatctact

SEQ ID NO: 42618 - DNA, 8 bp, Unknown
  misc_feature (1)..( 8): Matrix.001 file - promoters60/1016624
ttcaactt

SEQ ID NO: 42619 - DNA, 7 bp, Unknown
  misc_feature (1)..( 7): Matrix.001 file - promoters60/1016624
aaatgaa

SEQ ID NO: 42620 - DNA, 8 bp, Unknown
  misc_feature (1)..( 8): Matrix.001 file - promoters60/1016624
tgaacatt

SEQ ID NO: 42621 - DNA, 8 bp, Unknown
  misc_feature (1)..( 8): Matrix.001 file - promoters60/1016624
cttctcaa

SEQ ID NO: 42622 - DNA, 7 bp, Unknown
  misc_feature (1)..( 7): Matrix.001 file - promoters60/1016624
cttcttc

SEQ ID NO: 42623 - DNA, 10 bp, Unknown
  misc_feature (1)..( 10): Matrix.001 file - promoters60/1016665
aatatatcat

SEQ ID NO: 42624 - DNA, 7 bp, Unknown
  misc_feature (1)..( 7): Matrix.001 file - promoters60/1016665
ttttgaa

SEQ ID NO: 42625 - DNA, 7 bp, Unknown
  misc_feature (1)..( 7): Matrix.001 file - promoters60/1016665
aacatat

SEQ ID NO: 42626 - DNA, 6 bp, Unknown
  misc_feature (1)..( 6): Matrix.001 file - promoters60/1016665
tttatt

SEQ ID NO: 42627 - DNA, 9 bp, Unknown
  misc_feature (1)..( 9): Matrix.001 file - promoters60/1016665
acaaccaca

SEQ ID NO: 42628 - DNA, 7 bp, Unknown
  misc_feature (1)..( 7): Matrix.001 file - promoters60/1016665
tatatgt

SEQ ID NO: 42629 - DNA, 6 bp, Unknown
  misc_feature (1)..( 6): Matrix.001 file - promoters60/1016665
cagaat

SEQ ID NO: 42630 - DNA, 6 bp, Unknown
  misc_feature (1)..( 6): Matrix.001 file - promoters60/1016665
aatttc

SEQ ID NO: 42631 - DNA, 6 bp, Unknown
  misc_feature (1)..( 6): Matrix.001 file - promoters60/1016665
ttttga

SEQ ID NO: 42632 - DNA, 6 bp, Unknown
  misc_feature (1)..( 6): Matrix.001 file - promoters60/1016665
aattaa

SEQ ID NO: 42633 - DNA, 6 bp, Unknown
  misc_feature (1)..( 6): Matrix.001 file - promoters60/1016665
ttgcta

SEQ ID NO: 42634 - DNA, 10 bp, Unknown
  misc_feature (1)..( 10): Matrix.001 file - promoters60/1016665
tcttttactt

SEQ ID NO: 42635 - DNA, 7 bp, Unknown
  misc_feature (1)..( 7): Matrix.001 file - promoters60/1016665
tttagtg

SEQ ID NO: 42636 - DNA, 7 bp, Unknown
  misc_feature (1)..( 7): Matrix.001 file - promoters60/1016665
tgtgttc

SEQ ID NO: 42637 - DNA, 6 bp, Unknown
  misc_feature (1)..( 6): Matrix.001 file - promoters60/1016665
atgttc

SEQ ID NO: 42638 - DNA, 11 bp, Unknown
  misc_feature (1)..( 11): Matrix.001 file - promoters60/1016665
gttttaattta

SEQ ID NO: 42639 - DNA, 6 bp, Unknown
  misc_feature (1)..( 6): Matrix.001 file - promoters60/1016665
aaaaat

SEQ ID NO: 42640 - DNA, 11 bp, Unknown
  misc_feature (1)..( 11): Matrix.001 file - promoters60/1016692
aaagaaaccaa

SEQ ID NO: 42641 - DNA, 9 bp, Unknown
  misc_feature (1)..( 9): Matrix.001 file - promoters60/1016692
ctaattatg

SEQ ID NO: 42642 - DNA, 8 bp, Unknown
  misc_feature (1)..( 8): Matrix.001 file - promoters60/1016692
gaaagtta

SEQ ID NO: 42643 - DNA, 9 bp, Unknown
  misc_feature (1)..( 9): Matrix.001 file - promoters60/1016692
aaaataaga

SEQ ID NO: 42644 - DNA, 6 bp, Unknown
  misc_feature (1)..( 6): Matrix.001 file - promoters60/1016729
agattc

SEQ ID NO: 42645 - DNA, 6 bp, Unknown
  misc_feature (1)..( 6): Matrix.001 file - promoters60/1016729
ttcata

SEQ ID NO: 42646 - DNA, 6 bp, Unknown
  misc_feature (1)..( 6): Matrix.001 file - promoters60/1016729
agcaac

SEQ ID NO: 42647 - DNA, 7 bp, Unknown
  misc_feature (1)..( 7): Matrix.001 file - promoters60/1016729
caaaaat

SEQ ID NO: 42648 - DNA, 6 bp, Unknown
  misc_feature (1)..( 6): Matrix.001 file - promoters60/1016729
attgtg

SEQ ID NO: 42649 - DNA, 11 bp, Unknown
  misc_feature (1)..( 11): Matrix.001 file - promoters60/1016729
gaaaccaacat

SEQ ID NO: 42650 - DNA, 6 bp, Unknown
  misc_feature (1)..( 6): Matrix.001 file - promoters60/1016729
gttttt

SEQ ID NO: 42651 - DNA, 7 bp, Unknown
  misc_feature (1)..( 7): Matrix.001 file - promoters60/1016729
cttattg

SEQ ID NO: 42652 - DNA, 8 bp, Unknown
  misc_feature (1)..( 8): Matrix.001 file - promoters60/1016729
gatgcaaa

SEQ ID NO: 42653 - DNA, 8 bp, Unknown
  misc_feature (1)..( 8): Matrix.001 file - promoters60/1016729
tgtggaaa

SEQ ID NO: 42654 - DNA, 7 bp, Unknown
  misc_feature (1)..( 7): Matrix.001 file - promoters60/1016729
ggcgtgt

SEQ ID NO: 42655 - DNA, 6 bp, Unknown
  misc_feature (1)..( 6): Matrix.001 file - promoters60/1016729
tctatt

SEQ ID NO: 42656 - DNA, 8 bp, Unknown
  misc_feature (1)..( 8): Matrix.001 file - promoters60/1016729
taccagat

SEQ ID NO: 42657 - DNA, 6 bp, Unknown
  misc_feature (1)..( 6): Matrix.001 file - promoters60/1016729
agatta

SEQ ID NO: 42658 - DNA, 10 bp, Unknown
  misc_feature (1)..( 10): Matrix.001 file - promoters60/1016771
gaaatcatta

SEQ ID NO: 42659 - DNA, 13 bp, Unknown
  misc_feature (1)..( 13): Matrix.001 file - promoters60/1016771
aaaatcaatgctt

SEQ ID NO: 42660 - DNA, 14 bp, Unknown
  misc_feature (1)..( 14): Matrix.001 file - promoters60/1016814
atctaaaaaatatt

SEQ ID NO: 42661 - DNA, 12 bp, Unknown
  misc_feature (1)..( 12): Matrix.001 file - promoters60/1016814
aattcaatcatc

SEQ ID NO: 42662 - DNA, 12 bp, Unknown
  misc_feature (1)..( 12): Matrix.001 file - promoters60/1016814
atacaaaaaaca

SEQ ID NO: 42663 - DNA, 9 bp, Unknown
  misc_feature (1)..( 9): Matrix.001 file - promoters60/1016886
agtttttct

SEQ ID NO: 42664 - DNA, 8 bp, Unknown
  misc_feature (1)..( 8): Matrix.001 file - promoters60/1016915
aaaataag

SEQ ID NO: 42665 - DNA, 12 bp, Unknown
  misc_feature (1)..( 12): Matrix.001 file - promoters60/1016915
ataagttaatca

SEQ ID NO: 42666 - DNA, 6 bp, Unknown
  misc_feature (1)..( 6): Matrix.001 file - promoters60/1016915
acgaat

SEQ ID NO: 42667 - DNA, 6 bp, Unknown
  misc_feature (1)..( 6): Matrix.001 file - promoters60/1016915
gtacga

SEQ ID NO: 42668 - DNA, 7 bp, Unknown
  misc_feature (1)..( 7): Matrix.001 file - promoters60/1016915
atgaaaa

SEQ ID NO: 42669 - DNA, 8 bp, Unknown
  misc_feature (1)..( 8): Matrix.001 file - promoters60/1016915
agatatat

SEQ ID NO: 42670 - DNA, 7 bp, Unknown
  misc_feature (1)..( 7): Matrix.001 file - promoters60/1016915
atgtttt

SEQ ID NO: 42671 - DNA, 7 bp, Unknown
  misc_feature (1)..( 7): Matrix.001 file - promoters60/1016915
attaaat

SEQ ID NO: 42672 - DNA, 8 bp, Unknown
  misc_feature (1)..( 8): Matrix.001 file - promoters60/1016915
caaataat

SEQ ID NO: 42673 - DNA, 6 bp, Unknown
  misc_feature (1)..( 6): Matrix.001 file - promoters60/1016915
aaatca

SEQ ID NO: 42674 - DNA, 7 bp, Unknown
  misc_feature (1)..( 7): Matrix.001 file - promoters60/1016915
caaatgt

SEQ ID NO: 42675 - DNA, 6 bp, Unknown
  misc_feature (1)..( 6): Matrix.001 file - promoters60/1016915
aagatt

SEQ ID NO: 42676 - DNA, 6 bp, Unknown
  misc_feature (1)..( 6): Matrix.001 file - promoters60/1016915
aagaaa

SEQ ID NO: 42677 - DNA, 6 bp, Unknown
  misc_feature (1)..( 6): Matrix.001 file - promoters60/1016915
aaaaag

SEQ ID NO: 42678 - DNA, 8 bp, Unknown
  misc_feature (1)..( 8): Matrix.001 file - promoters60/1016915
caatcaaa

SEQ ID NO: 42679 - DNA, 7 bp, Unknown
  misc_feature (1)..( 7): Matrix.001 file - promoters60/1016915
ttcgaaa

SEQ ID NO: 42680 - DNA, 8 bp, Unknown
  misc_feature (1)..( 8): Matrix.001 file - promoters60/1016915
aaatctcg

SEQ ID NO: 42681 - DNA, 6 bp, Unknown
  misc_feature (1)..( 6): Matrix.001 file - promoters60/1016915
tataaa

SEQ ID NO: 42682 - DNA, 8 bp, Unknown
  misc_feature (1)..( 8): Matrix.001 file - promoters60/1016915
taaattgt

SEQ ID NO: 42683 - DNA, 6 bp, Unknown
  misc_feature (1)..( 6): Matrix.001 file - promoters60/1016915
atagat

SEQ ID NO: 42684 - DNA, 6 bp, Unknown
  misc_feature (1)..( 6): Matrix.001 file - promoters60/1016915
ttttgg

SEQ ID NO: 42685 - DNA, 6 bp, Unknown
  misc_feature (1)..( 6): Matrix.001 file - promoters60/1016915
taagat

SEQ ID NO: 42686 - DNA, 6 bp, Unknown
  misc_feature (1)..( 6): Matrix.001 file - promoters60/1016915
aaagaa

SEQ ID NO: 42687 - DNA, 12 bp, Unknown
  misc_feature (1)..( 12): Matrix.001 file - promoters60/1016915
aaaaacaaaaca

SEQ ID NO: 42688 - DNA, 6 bp, Unknown
  misc_feature (1)..( 6): Matrix.001 file - promoters60/1016915
taaccc

SEQ ID NO: 42689 - DNA, 7 bp, Unknown
  misc_feature (1)..( 7): Matrix.001 file - promoters60/1016931
aaacaaa

SEQ ID NO: 42690 - DNA, 7 bp, Unknown
  misc_feature (1)..( 7): Matrix.001 file - promoters60/1016931
gtatctt

SEQ ID NO: 42691 - DNA, 6 bp, Unknown
  misc_feature (1)..( 6): Matrix.001 file - promoters60/1016931
ttatct

SEQ ID NO: 42692 - DNA, 8 bp, Unknown
  misc_feature (1)..( 8): Matrix.001 file - promoters60/1016931
aacaaatt

SEQ ID NO: 42693 - DNA, 7 bp, Unknown
  misc_feature (1)..( 7): Matrix.001 file - promoters60/1016931
tttgctt

SEQ ID NO: 42694 - DNA, 10 bp, Unknown
  misc_feature (1)..( 10): Matrix.001 file - promoters60/1016931
attattgttt

SEQ ID NO: 42695 - DNA, 6 bp, Unknown
  misc_feature (1)..( 6): Matrix.001 file - promoters60/1016931
tcagat

SEQ ID NO: 42696 - DNA, 7 bp, Unknown
  misc_feature (1)..( 7): Matrix.001 file - promoters60/1016931
taaataa

SEQ ID NO: 42697 - DNA, 6 bp, Unknown
  misc_feature (1)..( 6): Matrix.001 file - promoters60/1016931
ataaat

SEQ ID NO: 42698 - DNA, 7 bp, Unknown
  misc_feature (1)..( 7): Matrix.001 file - promoters60/1016931
tatgttt

SEQ ID NO: 42699 - DNA, 7 bp, Unknown
  misc_feature (1)..( 7): Matrix.001 file - promoters60/1016931
caaaaaa

SEQ ID NO: 42700 - DNA, 6 bp, Unknown
  misc_feature (1)..( 6): Matrix.001 file - promoters60/1016931
taaaca

SEQ ID NO: 42701 - DNA, 7 bp, Unknown
  misc_feature (1)..( 7): Matrix.001 file - promoters60/1016931
ttagatc

SEQ ID NO: 42702 - DNA, 7 bp, Unknown
  misc_feature (1)..( 7): Matrix.001 file - promoters60/1016931
atcattt

SEQ ID NO: 42703 - DNA, 7 bp, Unknown
  misc_feature (1)..( 7): Matrix.001 file - promoters60/1016931
gatctat

SEQ ID NO: 42704 - DNA, 6 bp, Unknown
  misc_feature (1)..( 6): Matrix.001 file - promoters60/1016931
ttttca

SEQ ID NO: 42705 - DNA, 7 bp, Unknown
  misc_feature (1)..( 7): Matrix.001 file - promoters60/1016931
cgaacaa

SEQ ID NO: 42706 - DNA, 6 bp, Unknown
  misc_feature (1)..( 6): Matrix.001 file - promoters60/1016931
tatcta

SEQ ID NO: 42707 - DNA, 7 bp, Unknown
  misc_feature (1)..( 7): Matrix.001 file - promoters60/1016951
agatttt

SEQ ID NO: 42708 - DNA, 7 bp, Unknown
  misc_feature (1)..( 7): Matrix.001 file - promoters60/1016951
caaacac

SEQ ID NO: 42709 - DNA, 7 bp, Unknown
  misc_feature (1)..( 7): Matrix.001 file - promoters60/1016951
ttaaata

SEQ ID NO: 42710 - DNA, 7 bp, Unknown
  misc_feature (1)..( 7): Matrix.001 file - promoters60/1016951
atatata

SEQ ID NO: 42711 - DNA, 7 bp, Unknown
  misc_feature (1)..( 7): Matrix.001 file - promoters60/1016951
aattttt

SEQ ID NO: 42712 - DNA, 7 bp, Unknown
  misc_feature (1)..( 7): Matrix.001 file - promoters60/1016951
aacataa

SEQ ID NO: 42713 - DNA, 8 bp, Unknown
  misc_feature (1)..( 8): Matrix.001 file - promoters60/1016951
atacataa

SEQ ID NO: 42714 - DNA, 8 bp, Unknown
  misc_feature (1)..( 8): Matrix.001 file - promoters60/1017020
aaaaacat

SEQ ID NO: 42715 - DNA, 8 bp, Unknown
  misc_feature (1)..( 8): Matrix.001 file - promoters60/1017020
ttaatagc

SEQ ID NO: 42716 - DNA, 14 bp, Unknown
  misc_feature (1)..( 14): Matrix.001 file - promoters60/1017020
ttgaatcaaaattc

SEQ ID NO: 42717 - DNA, 10 bp, Unknown
  misc_feature (1)..( 10): Matrix.001 file - promoters60/1017020
ctatactttg

SEQ ID NO: 42718 - DNA, 8 bp, Unknown
  misc_feature (1)..( 8): Matrix.001 file - promoters60/1017041
caagtttc

SEQ ID NO: 42719 - DNA, 6 bp, Unknown
  misc_feature (1)..( 6): Matrix.001 file - promoters60/1017041
attatg

SEQ ID NO: 42720 - DNA, 7 bp, Unknown
  misc_feature (1)..( 7): Matrix.001 file - promoters60/1017041
attcggc

SEQ ID NO: 42721 - DNA, 9 bp, Unknown
  misc_feature (1)..( 9): Matrix.001 file - promoters60/1017041
ttccatgga

SEQ ID NO: 42722 - DNA, 6 bp, Unknown
  misc_feature (1)..( 6): Matrix.001 file - promoters60/1017041
aacagt

SEQ ID NO: 42723 - DNA, 8 bp, Unknown
  misc_feature (1)..( 8): Matrix.001 file - promoters60/1017041
cagagatg

SEQ ID NO: 42724 - DNA, 6 bp, Unknown
  misc_feature (1)..( 6): Matrix.001 file - promoters60/1017041
attaga

SEQ ID NO: 42725 - DNA, 6 bp, Unknown
  misc_feature (1)..( 6): Matrix.001 file - promoters60/1017041
gaatca

SEQ ID NO: 42726 - DNA, 7 bp, Unknown
  misc_feature (1)..( 7): Matrix.001 file - promoters60/1017041
tccagtt

SEQ ID NO: 42727 - DNA, 6 bp, Unknown
  misc_feature (1)..( 6): Matrix.001 file - promoters60/1017041
tttccg

SEQ ID NO: 42728 - DNA, 6 bp, Unknown
  misc_feature (1)..( 6): Matrix.001 file - promoters60/1017041
ataaat

SEQ ID NO: 42729 - DNA, 6 bp, Unknown
  misc_feature (1)..( 6): Matrix.001 file - promoters60/1017041
aaccct

SEQ ID NO: 42730 - DNA, 8 bp, Unknown
  misc_feature (1)..( 8): Matrix.001 file - promoters60/1017046
taatattt

SEQ ID NO: 42731 - DNA, 8 bp, Unknown
  misc_feature (1)..( 8): Matrix.001 file - promoters60/1017046
aatacttt

SEQ ID NO: 42732 - DNA, 7 bp, Unknown
  misc_feature (1)..( 7): Matrix.001 file - promoters60/1017046
cttgaat

SEQ ID NO: 42733 - DNA, 7 bp, Unknown
  misc_feature (1)..( 7): Matrix.001 file - promoters60/1017046
tttattc

SEQ ID NO: 42734 - DNA, 6 bp, Unknown
  misc_feature (1)..( 6): Matrix.001 file - promoters60/1017046
ggtttt

SEQ ID NO: 42735 - DNA, 9 bp, Unknown
  misc_feature (1)..( 9): Matrix.001 file - promoters60/1017046
cctttttta

SEQ ID NO: 42736 - DNA, 6 bp, Unknown
  misc_feature (1)..( 6): Matrix.001 file - promoters60/1017046
ttttaa

SEQ ID NO: 42737 - DNA, 7 bp, Unknown
  misc_feature (1)..( 7): Matrix.001 file - promoters60/1017046
aaaaagt

SEQ ID NO: 42738 - DNA, 8 bp, Unknown
  misc_feature (1)..( 8): Matrix.001 file - promoters60/1017046
taaatttc

SEQ ID NO: 42739 - DNA, 7 bp, Unknown
  misc_feature (1)..( 7): Matrix.001 file - promoters60/1017046
agcaaca

SEQ ID NO: 42740 - DNA, 14 bp, Unknown
  misc_feature (1)..( 14): Matrix.001 file - promoters60/1017046
ttaacaatttattt

SEQ ID NO: 42741 - DNA, 7 bp, Unknown
  misc_feature (1)..( 7): Matrix.001 file - promoters60/1017046
ataattt

SEQ ID NO: 42742 - DNA, 7 bp, Unknown
  misc_feature (1)..( 7): Matrix.001 file - promoters60/1017046
tttactt

SEQ ID NO: 42743 - DNA, 7 bp, Unknown
  misc_feature (1)..( 7): Matrix.001 file - promoters60/1017046
aatattt

SEQ ID NO: 42744 - DNA, 7 bp, Unknown
  misc_feature (1)..( 7): Matrix.001 file - promoters60/1017046
tttattt

SEQ ID NO: 42745 - DNA, 6 bp, Unknown
  misc_feature (1)..( 6): Matrix.001 file - promoters60/1017046
attttt

SEQ ID NO: 42746 - DNA, 8 bp, Unknown
  misc_feature (1)..( 8): Matrix.001 file - promoters60/1017046
catctttt

SEQ ID NO: 42747 - DNA, 10 bp, Unknown
  misc_feature (1)..( 10): Matrix.001 file - promoters60/1017046
atgggttgga

SEQ ID NO: 42748 - DNA, 10 bp, Unknown
  misc_feature (1)..( 10): Matrix.001 file - promoters60/1017046
aaacaaagga

SEQ ID NO: 42749 - DNA, 12 bp, Unknown
  misc_feature (1)..( 12): Matrix.001 file - promoters60/1017046
tagaattactaa

SEQ ID NO: 42750 - DNA, 7 bp, Unknown
  misc_feature (1)..( 7): Matrix.001 file - promoters60/1017046
taataat

SEQ ID NO: 42751 - DNA, 6 bp, Unknown
  misc_feature (1)..( 6): Matrix.001 file - promoters60/1017046
atattt

SEQ ID NO: 42752 - DNA, 7 bp, Unknown
  misc_feature (1)..( 7): Matrix.001 file - promoters60/1017046
tatacaa

SEQ ID NO: 42753 - DNA, 7 bp, Unknown
  misc_feature (1)..( 7): Matrix.001 file - promoters60/1017046
tataatt

SEQ ID NO: 42754 - DNA, 6 bp, Unknown
  misc_feature (1)..( 6): Matrix.001 file - promoters60/1017046
aaaaaa

SEQ ID NO: 42755 - DNA, 7 bp, Unknown
  misc_feature (1)..( 7): Matrix.001 file - promoters60/1017046
aagagaa

SEQ ID NO: 42756 - DNA, 7 bp, Unknown
  misc_feature (1)..( 7): Matrix.001 file - promoters60/1017050
atattgt

SEQ ID NO: 42757 - DNA, 7 bp, Unknown
  misc_feature (1)..( 7): Matrix.001 file - promoters60/1017050
agaatcg

SEQ ID NO: 42758 - DNA, 7 bp, Unknown
  misc_feature (1)..( 7): Matrix.001 file - promoters60/1017050
tctaatg

SEQ ID NO: 42759 - DNA, 12 bp, Unknown
  misc_feature (1)..( 12): Matrix.001 file - promoters60/1017050
ttgattaaatga

SEQ ID NO: 42760 - DNA, 6 bp, Unknown
  misc_feature (1)..( 6): Matrix.001 file - promoters60/1017050
tacaca

SEQ ID NO: 42761 - DNA, 7 bp, Unknown
  misc_feature (1)..( 7): Matrix.001 file - promoters60/1017050
ttgaaat

SEQ ID NO: 42762 - DNA, 6 bp, Unknown
  misc_feature (1)..( 6): Matrix.001 file - promoters60/1017050
tgattt

SEQ ID NO: 42763 - DNA, 6 bp, Unknown
  misc_feature (1)..( 6): Matrix.001 file - promoters60/1017050
acttct

SEQ ID NO: 42764 - DNA, 7 bp, Unknown
  misc_feature (1)..( 7): Matrix.001 file - promoters60/1017050
tttaggg

SEQ ID NO: 42765 - DNA, 6 bp, Unknown
  misc_feature (1)..( 6): Matrix.001 file - promoters60/1017050
tacata

SEQ ID NO: 42766 - DNA, 7 bp, Unknown
  misc_feature (1)..( 7): Matrix.001 file - promoters60/1017050
ttgatat

SEQ ID NO: 42767 - DNA, 6 bp, Unknown
  misc_feature (1)..( 6): Matrix.001 file - promoters60/1017050
catctg

SEQ ID NO: 42768 - DNA, 9 bp, Unknown
  misc_feature (1)..( 9): Matrix.001 file - promoters60/1017050
ttgatgtag

SEQ ID NO: 42769 - DNA, 8 bp, Unknown
  misc_feature (1)..( 8): Matrix.001 file - promoters60/1017050
ttgagttt

SEQ ID NO: 42770 - DNA, 7 bp, Unknown
  misc_feature (1)..( 7): Matrix.001 file - promoters60/1017050
gttctgt

SEQ ID NO: 42771 - DNA, 7 bp, Unknown
  misc_feature (1)..( 7): Matrix.001 file - promoters60/1017094
cgatatt

SEQ ID NO: 42772 - DNA, 8 bp, Unknown
  misc_feature (1)..( 8): Matrix.001 file - promoters60/1017094
aaaattat

SEQ ID NO: 42773 - DNA, 8 bp, Unknown
  misc_feature (1)..( 8): Matrix.001 file - promoters60/1017094
aattatat

SEQ ID NO: 42774 - DNA, 11 bp, Unknown
  misc_feature (1)..( 11): Matrix.001 file - promoters60/1017094
ttcctagatac

SEQ ID NO: 42775 - DNA, 10 bp, Unknown
  misc_feature (1)..( 10): Matrix.001 file - promoters60/1017131
attaataaaa

SEQ ID NO: 42776 - DNA, 12 bp, Unknown
  misc_feature (1)..( 12): Matrix.001 file - promoters60/1017131
tttggataaaac

SEQ ID NO: 42777 - DNA, 10 bp, Unknown
  misc_feature (1)..( 10): Matrix.001 file - promoters60/1017131
ttggataaaa

SEQ ID NO: 42778 - DNA, 10 bp, Unknown
  misc_feature (1)..( 10): Matrix.001 file - promoters60/1017282
aaatcgatag

SEQ ID NO: 42779 - DNA, 10 bp, Unknown
  misc_feature (1)..( 10): Matrix.001 file - promoters60/1017282
aaatagataa

SEQ ID NO: 42780 - DNA, 10 bp, Unknown
  misc_feature (1)..( 10): Matrix.001 file - promoters60/1017286
aaaaaaatca

SEQ ID NO: 42781 - DNA, 8 bp, Unknown
  misc_feature (1)..( 8): Matrix.001 file - promoters60/1017286
caatatgt

SEQ ID NO: 42782 - DNA, 12 bp, Unknown
  misc_feature (1)..( 12): Matrix.001 file - promoters60/1017286
ttctaaaaaaat

SEQ ID NO: 42783 - DNA, 10 bp, Unknown
  misc_feature (1)..( 10): Matrix.001 file - promoters60/1017286
tcaatatttg

SEQ ID NO: 42784 - DNA, 11 bp, Unknown
  misc_feature (1)..( 11): Matrix.001 file - promoters60/1017286
gaacttttctc

SEQ ID NO: 42785 - DNA, 9 bp, Unknown
  misc_feature (1)..( 9): Matrix.001 file - promoters60/1017286
cttgtctcc

SEQ ID NO: 42786 - DNA, 9 bp, Unknown
  misc_feature (1)..( 9): Matrix.001 file - promoters60/1017316
aaaatttga

SEQ ID NO: 42787 - DNA, 10 bp, Unknown
  misc_feature (1)..( 10): Matrix.001 file - promoters60/1017316
agaaaatcat

SEQ ID NO: 42788 - DNA, 8 bp, Unknown
  misc_feature (1)..( 8): Matrix.001 file - promoters60/1017316
tttgtctg

SEQ ID NO: 42789 - DNA, 9 bp, Unknown
  misc_feature (1)..( 9): Matrix.001 file - promoters60/1017316
aaattaatt

SEQ ID NO: 42790 - DNA, 11 bp, Unknown
  misc_feature (1)..( 11): Matrix.001 file - promoters60/1017316
atgggcctata

SEQ ID NO: 42791 - DNA, 9 bp, Unknown
  misc_feature (1)..( 9): Matrix.001 file - promoters60/1017316
tttttactt

SEQ ID NO: 42792 - DNA, 7 bp, Unknown
  misc_feature (1)..( 7): Matrix.001 file - promoters60/1017316
ttacttt

SEQ ID NO: 42793 - DNA, 9 bp, Unknown
  misc_feature (1)..( 9): Matrix.001 file - promoters60/1017316
atgtttcaa

SEQ ID NO: 42794 - DNA, 10 bp, Unknown
  misc_feature (1)..( 10): Matrix.001 file - promoters60/1017358
ccttatatat

SEQ ID NO: 42795 - DNA, 11 bp, Unknown
  misc_feature (1)..( 11): Matrix.001 file - promoters60/1017434
aaaaaataccc

SEQ ID NO: 42796 - DNA, 10 bp, Unknown
  misc_feature (1)..( 10): Matrix.001 file - promoters60/1017434
tttaataaaa

SEQ ID NO: 42797 - DNA, 7 bp, Unknown
  misc_feature (1)..( 7): Matrix.001 file - promoters60/1017476
ttaaata

SEQ ID NO: 42798 - DNA, 12 bp, Unknown
  misc_feature (1)..( 12): Matrix.001 file - promoters60/1017476
aagaatttgttt

SEQ ID NO: 42799 - DNA, 8 bp, Unknown
  misc_feature (1)..( 8): Matrix.001 file - promoters60/1017476
aaagaacc

SEQ ID NO: 42800 - DNA, 7 bp, Unknown
  misc_feature (1)..( 7): Matrix.001 file - promoters60/1017476
tttgtga

SEQ ID NO: 42801 - DNA, 6 bp, Unknown
  misc_feature (1)..( 6): Matrix.001 file - promoters60/1017476
gtttgg

SEQ ID NO: 42802 - DNA, 8 bp, Unknown
  misc_feature (1)..( 8): Matrix.001 file - promoters60/1017476
aaggtttt

SEQ ID NO: 42803 - DNA, 9 bp, Unknown
  misc_feature (1)..( 9): Matrix.001 file - promoters60/1017476
ttttatttt

SEQ ID NO: 42804 - DNA, 8 bp, Unknown
  misc_feature (1)..( 8): Matrix.001 file - promoters60/1017476
tgaaatta

SEQ ID NO: 42805 - DNA, 6 bp, Unknown
  misc_feature (1)..( 6): Matrix.001 file - promoters60/1017476
gaaggt

SEQ ID NO: 42806 - DNA, 8 bp, Unknown
  misc_feature (1)..( 8): Matrix.001 file - promoters60/1017476
aaaaaaaa

SEQ ID NO: 42807 - DNA, 7 bp, Unknown
  misc_feature (1)..( 7): Matrix.001 file - promoters60/1017476
ttaatct

SEQ ID NO: 42808 - DNA, 6 bp, Unknown
  misc_feature (1)..( 6): Matrix.001 file - promoters60/1017476
atcaga

SEQ ID NO: 42809 - DNA, 6 bp, Unknown
  misc_feature (1)..( 6): Matrix.001 file - promoters60/1017476
acgaat

SEQ ID NO: 42810 - DNA, 7 bp, Unknown
  misc_feature (1)..( 7): Matrix.001 file - promoters60/1017476
gacatcg

SEQ ID NO: 42811 - DNA, 6 bp, Unknown
  misc_feature (1)..( 6): Matrix.001 file - promoters60/1017476
gaccat

SEQ ID NO: 42812 - DNA, 7 bp, Unknown
  misc_feature (1)..( 7): Matrix.001 file - promoters60/1017476
ttcgaga

SEQ ID NO: 42813 - DNA, 10 bp, Unknown
  misc_feature (1)..( 10): Matrix.001 file - promoters60/1017552
agaattataa

SEQ ID NO: 42814 - DNA, 6 bp, Unknown
  misc_feature (1)..( 6): Matrix.001 file - promoters60/1017552
ggaaaa

SEQ ID NO: 42815 - DNA, 7 bp, Unknown
  misc_feature (1)..( 7): Matrix.001 file - promoters60/1017552
ttagaac

SEQ ID NO: 42816 - DNA, 7 bp, Unknown
  misc_feature (1)..( 7): Matrix.001 file - promoters60/1017552
gacaaag

SEQ ID NO: 42817 - DNA, 6 bp, Unknown
  misc_feature (1)..( 6): Matrix.001 file - promoters60/1017562
ttacta

SEQ ID NO: 42818 - DNA, 7 bp, Unknown
  misc_feature (1)..( 7): Matrix.001 file - promoters60/1017562
atatata

SEQ ID NO: 42819 - DNA, 9 bp, Unknown
  misc_feature (1)..( 9): Matrix.001 file - promoters60/1017562
ataatatat

SEQ ID NO: 42820 - DNA, 7 bp, Unknown
  misc_feature (1)..( 7): Matrix.001 file - promoters60/1017562
tagactt

SEQ ID NO: 42821 - DNA, 7 bp, Unknown
  misc_feature (1)..( 7): Matrix.001 file - promoters60/1017562
tgggtgg

SEQ ID NO: 42822 - DNA, 9 bp, Unknown
  misc_feature (1)..( 9): Matrix.001 file - promoters60/1017562
aatcaaaca

SEQ ID NO: 42823 - DNA, 6 bp, Unknown
  misc_feature (1)..( 6): Matrix.001 file - promoters60/1017562
ccaaaa

SEQ ID NO: 42824 - DNA, 8 bp, Unknown
  misc_feature (1)..( 8): Matrix.001 file - promoters60/1017562
cttagata

SEQ ID NO: 42825 - DNA, 6 bp, Unknown
  misc_feature (1)..( 6): Matrix.001 file - promoters60/1017562
atataa

SEQ ID NO: 42826 - DNA, 9 bp, Unknown
  misc_feature (1)..( 9): Matrix.001 file - promoters60/1017562
ccattaaac

SEQ ID NO: 42827 - DNA, 8 bp, Unknown
  misc_feature (1)..( 8): Matrix.001 file - promoters60/1017562
caaagttt

SEQ ID NO: 42828 - DNA, 6 bp, Unknown
  misc_feature (1)..( 6): Matrix.001 file - promoters60/1017562
ttgttt

SEQ ID NO: 42829 - DNA, 9 bp, Unknown
  misc_feature (1)..( 9): Matrix.001 file - promoters60/1017562
aaaaactgt

SEQ ID NO: 42830 - DNA, 6 bp, Unknown
  misc_feature (1)..( 6): Matrix.001 file - promoters60/1017562
taacac

SEQ ID NO: 42831 - DNA, 6 bp, Unknown
  misc_feature (1)..( 6): Matrix.001 file - promoters60/1017562
caaaaa

SEQ ID NO: 42832 - DNA, 8 bp, Unknown
  misc_feature (1)..( 8): Matrix.001 file - promoters60/1017562
ataaatat

SEQ ID NO: 42833 - DNA, 7 bp, Unknown
  misc_feature (1)..( 7): Matrix.001 file - promoters60/1017562
aaaccag

SEQ ID NO: 42834 - DNA, 7 bp, Unknown
  misc_feature (1)..( 7): Matrix.001 file - promoters60/1017562
gaaaaaa

SEQ ID NO: 42835 - DNA, 7 bp, Unknown
  misc_feature (1)..( 7): Matrix.001 file - promoters60/1017562
accacat

SEQ ID NO: 42836 - DNA, 7 bp, Unknown
  misc_feature (1)..( 7): Matrix.001 file - promoters60/1017562
aaaagat

SEQ ID NO: 42837 - DNA, 6 bp, Unknown
  misc_feature (1)..( 6): Matrix.001 file - promoters60/1017618
atatca

SEQ ID NO: 42838 - DNA, 13 bp, Unknown
  misc_feature (1)..( 13): Matrix.001 file - promoters60/1017618
tcctataaaaaag

SEQ ID NO: 42839 - DNA, 8 bp, Unknown
  misc_feature (1)..( 8): Matrix.001 file - promoters60/1017618
ctatgaaa

SEQ ID NO: 42840 - DNA, 10 bp, Unknown
  misc_feature (1)..( 10): Matrix.001 file - promoters60/1017618
taatatctca

SEQ ID NO: 42841 - DNA, 10 bp, Unknown
  misc_feature (1)..( 10): Matrix.001 file - promoters60/1017626
tcagtaaaaa

SEQ ID NO: 42842 - DNA, 6 bp, Unknown
  misc_feature (1)..( 6): Matrix.001 file - promoters60/1017626
aaaaaa

SEQ ID NO: 42843 - DNA, 6 bp, Unknown
  misc_feature (1)..( 6): Matrix.001 file - promoters60/1017626
aattta

SEQ ID NO: 42844 - DNA, 6 bp, Unknown
  misc_feature (1)..( 6): Matrix.001 file - promoters60/1017626
tttaat

SEQ ID NO: 42845 - DNA, 9 bp, Unknown
  misc_feature (1)..( 9): Matrix.001 file - promoters60/1017626
ttttataat

SEQ ID NO: 42846 - DNA, 9 bp, Unknown
  misc_feature (1)..( 9): Matrix.001 file - promoters60/1017626
tatccggtt

SEQ ID NO: 42847 - DNA, 6 bp, Unknown
  misc_feature (1)..( 6): Matrix.001 file - promoters60/1017626
ataagt

SEQ ID NO: 42848 - DNA, 7 bp, Unknown
  misc_feature (1)..( 7): Matrix.001 file - promoters60/1017626
tctctct

SEQ ID NO: 42849 - DNA, 9 bp, Unknown
  misc_feature (1)..( 9): Matrix.001 file - promoters60/1017626
tcttcatct

SEQ ID NO: 42850 - DNA, 7 bp, Unknown
  misc_feature (1)..( 7): Matrix.001 file - promoters60/1017626
aaattgg

SEQ ID NO: 42851 - DNA, 7 bp, Unknown
  misc_feature (1)..( 7): Matrix.001 file - promoters60/1017626
gaacaaa

SEQ ID NO: 42852 - DNA, 7 bp, Unknown
  misc_feature (1)..( 7): Matrix.001 file - promoters60/1017626
atgaaat

SEQ ID NO: 42853 - DNA, 8 bp, Unknown
  misc_feature (1)..( 8): Matrix.001 file - promoters60/1017626
cttgaaat

SEQ ID NO: 42854 - DNA, 6 bp, Unknown
  misc_feature (1)..( 6): Matrix.001 file - promoters60/1017626
aattag

SEQ ID NO: 42855 - DNA, 7 bp, Unknown
  misc_feature (1)..( 7): Matrix.001 file - promoters60/1017626
tttgatc

SEQ ID NO: 42856 - DNA, 6 bp, Unknown
  misc_feature (1)..( 6): Matrix.001 file - promoters60/1017626
aaatta

SEQ ID NO: 42857 - DNA, 7 bp, Unknown
  misc_feature (1)..( 7): Matrix.001 file - promoters60/1017626
ccatcta

SEQ ID NO: 42858 - DNA, 7 bp, Unknown
  misc_feature (1)..( 7): Matrix.001 file - promoters60/1017626
aaaccaa

SEQ ID NO: 42859 - DNA, 6 bp, Unknown
  misc_feature (1)..( 6): Matrix.001 file - promoters60/1017626
taataa

SEQ ID NO: 42860 - DNA, 6 bp, Unknown
  misc_feature (1)..( 6): Matrix.001 file - promoters60/1017626
agttct

SEQ ID NO: 42861 - DNA, 7 bp, Unknown
  misc_feature (1)..( 7): Matrix.001 file - promoters60/1017626
gaaaact

SEQ ID NO: 42862 - DNA, 6 bp, Unknown
  misc_feature (1)..( 6): Matrix.001 file - promoters60/1017626
actcat

SEQ ID NO: 42863 - DNA, 7 bp, Unknown
  misc_feature (1)..( 7): Matrix.001 file - promoters60/1017626
gcctata

SEQ ID NO: 42864 - DNA, 7 bp, Unknown
  misc_feature (1)..( 7): Matrix.001 file - promoters60/1017626
tataaat

SEQ ID NO: 42865 - DNA, 6 bp, Unknown
  misc_feature (1)..( 6): Matrix.001 file - promoters60/1017649
caaaca

SEQ ID NO: 42866 - DNA, 8 bp, Unknown
  misc_feature (1)..( 8): Matrix.001 file - promoters60/1017649
caaataaa

SEQ ID NO: 42867 - DNA, 8 bp, Unknown
  misc_feature (1)..( 8): Matrix.001 file - promoters60/1017649
actactga

SEQ ID NO: 42868 - DNA, 7 bp, Unknown
  misc_feature (1)..( 7): Matrix.001 file - promoters60/1017649
ctttgaa

SEQ ID NO: 42869 - DNA, 9 bp, Unknown
  misc_feature (1)..( 9): Matrix.001 file - promoters60/1017649
taaactcta

SEQ ID NO: 42870 - DNA, 8 bp, Unknown
  misc_feature (1)..( 8): Matrix.001 file - promoters60/1017649
aattttat

SEQ ID NO: 42871 - DNA, 7 bp, Unknown
  misc_feature (1)..( 7): Matrix.001 file - promoters60/1017649
attatag

SEQ ID NO: 42872 - DNA, 7 bp, Unknown
  misc_feature (1)..( 7): Matrix.001 file - promoters60/1017649
ataaaaa

SEQ ID NO: 42873 - DNA, 6 bp, Unknown
  misc_feature (1)..( 6): Matrix.001 file - promoters60/1017649
aaataa

SEQ ID NO: 42874 - DNA, 7 bp, Unknown
  misc_feature (1)..( 7): Matrix.001 file - promoters60/1017649
aacattt

SEQ ID NO: 42875 - DNA, 6 bp, Unknown
  misc_feature (1)..( 6): Matrix.001 file - promoters60/1017649
tttgat

SEQ ID NO: 42876 - DNA, 7 bp, Unknown
  misc_feature (1)..( 7): Matrix.001 file - promoters60/1017649
aaactca

SEQ ID NO: 42877 - DNA, 8 bp, Unknown
  misc_feature (1)..( 8): Matrix.001 file - promoters60/1017649
aatttgat

SEQ ID NO: 42878 - DNA, 7 bp, Unknown
  misc_feature (1)..( 7): Matrix.001 file - promoters60/1017649
ataagac

SEQ ID NO: 42879 - DNA, 7 bp, Unknown
  misc_feature (1)..( 7): Matrix.001 file - promoters60/1017649
caaaaag

SEQ ID NO: 42880 - DNA, 6 bp, Unknown
  misc_feature (1)..( 6): Matrix.001 file - promoters60/1017649
ttgatg

SEQ ID NO: 42881 - DNA, 6 bp, Unknown
  misc_feature (1)..( 6): Matrix.001 file - promoters60/1017649
cacatc

SEQ ID NO: 42882 - DNA, 8 bp, Unknown
  misc_feature (1)..( 8): Matrix.001 file - promoters60/1017693
aataaagt

SEQ ID NO: 42883 - DNA, 7 bp, Unknown
  misc_feature (1)..( 7): Matrix.001 file - promoters60/1017693
attggta

SEQ ID NO: 42884 - DNA, 9 bp, Unknown
  misc_feature (1)..( 9): Matrix.001 file - promoters60/1017693
atgtctttg

SEQ ID NO: 42885 - DNA, 6 bp, Unknown
  misc_feature (1)..( 6): Matrix.001 file - promoters60/1017693
aaaaac

SEQ ID NO: 42886 - DNA, 6 bp, Unknown
  misc_feature (1)..( 6): Matrix.001 file - promoters60/1017693
tccaaa

SEQ ID NO: 42887 - DNA, 7 bp, Unknown
  misc_feature (1)..( 7): Matrix.001 file - promoters60/1017693
aatctat

SEQ ID NO: 42888 - DNA, 6 bp, Unknown
  misc_feature (1)..( 6): Matrix.001 file - promoters60/1017693
tgtgtt

SEQ ID NO: 42889 - DNA, 10 bp, Unknown
  misc_feature (1)..( 10): Matrix.001 file - promoters60/1017693
ttttcttctc

SEQ ID NO: 42890 - DNA, 6 bp, Unknown
  misc_feature (1)..( 6): Matrix.001 file - promoters60/1017693
tggtca

SEQ ID NO: 42891 - DNA, 6 bp, Unknown
  misc_feature (1)..( 6): Matrix.001 file - promoters60/1017693
tggaaa

SEQ ID NO: 42892 - DNA, 7 bp, Unknown
  misc_feature (1)..( 7): Matrix.001 file - promoters60/1017693
aaccata

SEQ ID NO: 42893 - DNA, 8 bp, Unknown
  misc_feature (1)..( 8): Matrix.001 file - promoters60/1017693
aagccttt

SEQ ID NO: 42894 - DNA, 7 bp, Unknown
  misc_feature (1)..( 7): Matrix.001 file - promoters60/1017693
caaagag

SEQ ID NO: 42895 - DNA, 10 bp, Unknown
  misc_feature (1)..( 10): Matrix.001 file - promoters60/1017693
ttttctgttg

SEQ ID NO: 42896 - DNA, 10 bp, Unknown
  misc_feature (1)..( 10): Matrix.001 file - promoters60/1017770
tacttcctta

SEQ ID NO: 42897 - DNA, 10 bp, Unknown
  misc_feature (1)..( 10): Matrix.001 file - promoters60/1017770
aaaaatgatt

SEQ ID NO: 42898 - DNA, 9 bp, Unknown
  misc_feature (1)..( 9): Matrix.001 file - promoters60/1017770
catatgtat

SEQ ID NO: 42899 - DNA, 13 bp, Unknown
  misc_feature (1)..( 13): Matrix.001 file - promoters60/1017777
aaagtgtatccaa

SEQ ID NO: 42900 - DNA, 6 bp, Unknown
  misc_feature (1)..( 6): Matrix.001 file - promoters60/1017802
atattg

SEQ ID NO: 42901 - DNA, 10 bp, Unknown
  misc_feature (1)..( 10): Matrix.001 file - promoters60/1017802
attacaatat

SEQ ID NO: 42902 - DNA, 20 bp, Unknown
  misc_feature (1)..( 20): Matrix.001 file - promoters60/1017802
aaagttgctacaaattatag

SEQ ID NO: 42903 - DNA, 22 bp, Unknown
  misc_feature (1)..( 22): Matrix.001 file - promoters60/1017802
tcttttctgattttgtttctca

SEQ ID NO: 42904 - DNA, 7 bp, Unknown
  misc_feature (1)..( 7): Matrix.001 file - promoters60/1017802
taccaaa

SEQ ID NO: 42905 - DNA, 8 bp, Unknown
  misc_feature (1)..( 8): Matrix.001 file - promoters60/1017802
caatatga

SEQ ID NO: 42906 - DNA, 7 bp, Unknown
  misc_feature (1)..( 7): Matrix.001 file - promoters60/1017802
ctcaaat

SEQ ID NO: 42907 - DNA, 7 bp, Unknown
  misc_feature (1)..( 7): Matrix.001 file - promoters60/1017802
aaatata

SEQ ID NO: 42908 - DNA, 7 bp, Unknown
  misc_feature (1)..( 7): Matrix.001 file - promoters60/1017802
ttcaatg

SEQ ID NO: 42909 - DNA, 7 bp, Unknown
  misc_feature (1)..( 7): Matrix.001 file - promoters60/1017802
caaatct

SEQ ID NO: 42910 - DNA, 7 bp, Unknown
  misc_feature (1)..( 7): Matrix.001 file - promoters60/1017802
aattctt

SEQ ID NO: 42911 - DNA, 8 bp, Unknown
  misc_feature (1)..( 8): Matrix.001 file - promoters60/1017802
tcttttct

SEQ ID NO: 42912 - DNA, 8 bp, Unknown
  misc_feature (1)..( 8): Matrix.001 file - promoters60/1017802
gataaaat

SEQ ID NO: 42913 - DNA, 6 bp, Unknown
  misc_feature (1)..( 6): Matrix.001 file - promoters60/1017802
atagga

SEQ ID NO: 42914 - DNA, 6 bp, Unknown
  misc_feature (1)..( 6): Matrix.001 file - promoters60/1017802
atagga

SEQ ID NO: 42915 - DNA, 8 bp, Unknown
  misc_feature (1)..( 8): Matrix.001 file - promoters60/1017802
ataaaatt

SEQ ID NO: 42916 - DNA, 6 bp, Unknown
  misc_feature (1)..( 6): Matrix.001 file - promoters60/1017802
aaaaaa

SEQ ID NO: 42917 - DNA, 12 bp, Unknown
  misc_feature (1)..( 12): Matrix.001 file - promoters60/1017802
aaaaaataaaaa

SEQ ID NO: 42918 - DNA, 7 bp, Unknown
  misc_feature (1)..( 7): Matrix.001 file - promoters60/1017802
gcacaaa

SEQ ID NO: 42919 - DNA, 6 bp, Unknown
  misc_feature (1)..( 6): Matrix.001 file - promoters60/1017802
ttgata

SEQ ID NO: 42920 - DNA, 7 bp, Unknown
  misc_feature (1)..( 7): Matrix.001 file - promoters60/1017802
tttccta

SEQ ID NO: 42921 - DNA, 9 bp, Unknown
  misc_feature (1)..( 9): Matrix.001 file - promoters60/1017802
aaaaataaa

SEQ ID NO: 42922 - DNA, 9 bp, Unknown
  misc_feature (1)..( 9): Matrix.001 file - promoters60/1017802
aaacaaaaa

SEQ ID NO: 42923 - DNA, 8 bp, Unknown
  misc_feature (1)..( 8): Matrix.001 file - promoters60/1017802
ctaaatat

SEQ ID NO: 42924 - DNA, 6 bp, Unknown
  misc_feature (1)..( 6): Matrix.001 file - promoters60/1017802
aaatta

SEQ ID NO: 42925 - DNA, 8 bp, Unknown
  misc_feature (1)..( 8): Matrix.001 file - promoters60/1017883
caagaaaa

SEQ ID NO: 42926 - DNA, 8 bp, Unknown
  misc_feature (1)..( 8): Matrix.001 file - promoters60/1017883
tataaata

SEQ ID NO: 42927 - DNA, 13 bp, Unknown
  misc_feature (1)..( 13): Matrix.001 file - promoters60/1017883
aacaaacttatat

SEQ ID NO: 42928 - DNA, 10 bp, Unknown
  misc_feature (1)..( 10): Matrix.001 file - promoters60/1017883
ttattatgtg

SEQ ID NO: 42929 - DNA, 10 bp, Unknown
  misc_feature (1)..( 10): Matrix.001 file - promoters60/1017883
caaactgata

SEQ ID NO: 42930 - DNA, 12 bp, Unknown
  misc_feature (1)..( 12): Matrix.001 file - promoters60/1017883
aaacaaatcttt

SEQ ID NO: 42931 - DNA, 9 bp, Unknown
  misc_feature (1)..( 9): Matrix.001 file - promoters60/1017883
gaaaaaaaa

SEQ ID NO: 42932 - DNA, 8 bp, Unknown
  misc_feature (1)..( 8): Matrix.001 file - promoters60/1017883
aaatttga

SEQ ID NO: 42933 - DNA, 6 bp, Unknown
  misc_feature (1)..( 6): Matrix.001 file - promoters60/1017964
aactgt

SEQ ID NO: 42934 - DNA, 9 bp, Unknown
  misc_feature (1)..( 9): Matrix.001 file - promoters60/1017964
tgaaaagaa

SEQ ID NO: 42935 - DNA, 7 bp, Unknown
  misc_feature (1)..( 7): Matrix.001 file - promoters60/1017964
tattgaa

SEQ ID NO: 42936 - DNA, 6 bp, Unknown
  misc_feature (1)..( 6): Matrix.001 file - promoters60/1017964
atattc

SEQ ID NO: 42937 - DNA, 6 bp, Unknown
  misc_feature (1)..( 6): Matrix.001 file - promoters60/1017964
tgatat

SEQ ID NO: 42938 - DNA, 7 bp, Unknown
  misc_feature (1)..( 7): Matrix.001 file - promoters60/1017964
ttgatga

SEQ ID NO: 42939 - DNA, 7 bp, Unknown
  misc_feature (1)..( 7): Matrix.001 file - promoters60/1017964
ggaatga

SEQ ID NO: 42940 - DNA, 8 bp, Unknown
  misc_feature (1)..( 8): Matrix.001 file - promoters60/1017964
agtataaa

SEQ ID NO: 42941 - DNA, 6 bp, Unknown
  misc_feature (1)..( 6): Matrix.001 file - promoters60/1017964
gtcgaa

SEQ ID NO: 42942 - DNA, 6 bp, Unknown
  misc_feature (1)..( 6): Matrix.001 file - promoters60/1017964
aaaata

SEQ ID NO: 42943 - DNA, 6 bp, Unknown
  misc_feature (1)..( 6): Matrix.001 file - promoters60/1017964
ttgtat

SEQ ID NO: 42944 - DNA, 7 bp, Unknown
  misc_feature (1)..( 7): Matrix.001 file - promoters60/1017964
cacggtc

SEQ ID NO: 42945 - DNA, 6 bp, Unknown
  misc_feature (1)..( 6): Matrix.001 file - promoters60/1017964
tctgaa

SEQ ID NO: 42946 - DNA, 6 bp, Unknown
  misc_feature (1)..( 6): Matrix.001 file - promoters60/1017964
ggttta

SEQ ID NO: 42947 - DNA, 6 bp, Unknown
  misc_feature (1)..( 6): Matrix.001 file - promoters60/1017964
ttgact

SEQ ID NO: 42948 - DNA, 6 bp, Unknown
  misc_feature (1)..( 6): Matrix.001 file - promoters60/1017964
ggctgt

SEQ ID NO: 42949 - DNA, 9 bp, Unknown
  misc_feature (1)..( 9): Matrix.001 file - promoters60/1018052
atcagtttt

SEQ ID NO: 42950 - DNA, 8 bp, Unknown
  misc_feature (1)..( 8): Matrix.001 file - promoters60/1018052
attgttgt

SEQ ID NO: 42951 - DNA, 9 bp, Unknown
  misc_feature (1)..( 9): Matrix.001 file - promoters60/1018052
atttccaat

SEQ ID NO: 42952 - DNA, 8 bp, Unknown
  misc_feature (1)..( 8): Matrix.001 file - promoters60/1018052
agtttcat

SEQ ID NO: 42953 - DNA, 6 bp, Unknown
  misc_feature (1)..( 6): Matrix.001 file - promoters60/1018055
tgattg

SEQ ID NO: 42954 - DNA, 7 bp, Unknown
  misc_feature (1)..( 7): Matrix.001 file - promoters60/1018055
ttaattt

SEQ ID NO: 42955 - DNA, 7 bp, Unknown
  misc_feature (1)..( 7): Matrix.001 file - promoters60/1018055
ttttctt

SEQ ID NO: 42956 - DNA, 7 bp, Unknown
  misc_feature (1)..( 7): Matrix.001 file - promoters60/1018055
ttatgtg

SEQ ID NO: 42957 - DNA, 6 bp, Unknown
  misc_feature (1)..( 6): Matrix.001 file - promoters60/1018055
tttctt

SEQ ID NO: 42958 - DNA, 8 bp, Unknown
  misc_feature (1)..( 8): Matrix.001 file - promoters60/1018055
aatcaatt

SEQ ID NO: 42959 - DNA, 6 bp, Unknown
  misc_feature (1)..( 6): Matrix.001 file - promoters60/1018055
ttattt

SEQ ID NO: 42960 - DNA, 11 bp, Unknown
  misc_feature (1)..( 11): Matrix.001 file - promoters60/1018055
aaagacaaaat

SEQ ID NO: 42961 - DNA, 8 bp, Unknown
  misc_feature (1)..( 8): Matrix.001 file - promoters60/1018055
gtagagaa

SEQ ID NO: 42962 - DNA, 6 bp, Unknown
  misc_feature (1)..( 6): Matrix.001 file - promoters60/1018055
agaaga

SEQ ID NO: 42963 - DNA, 6 bp, Unknown
  misc_feature (1)..( 6): Matrix.001 file - promoters60/1018055
gtgatt

SEQ ID NO: 42964 - DNA, 7 bp, Unknown
  misc_feature (1)..( 7): Matrix.001 file - promoters60/1018057
caacgaa

SEQ ID NO: 42965 - DNA, 8 bp, Unknown
  misc_feature (1)..( 8): Matrix.001 file - promoters60/1018057
aaatcgtt

SEQ ID NO: 42966 - DNA, 7 bp, Unknown
  misc_feature (1)..( 7): Matrix.001 file - promoters60/1018057
gataagc

SEQ ID NO: 42967 - DNA, 7 bp, Unknown
  misc_feature (1)..( 7): Matrix.001 file - promoters60/1018057
tggagac

SEQ ID NO: 42968 - DNA, 7 bp, Unknown
  misc_feature (1)..( 7): Matrix.001 file - promoters60/1018057
ggcgaag

SEQ ID NO: 42969 - DNA, 7 bp, Unknown
  misc_feature (1)..( 7): Matrix.001 file - promoters60/1018057
aataagc

SEQ ID NO: 42970 - DNA, 13 bp, Unknown
  misc_feature (1)..( 13): Matrix.001 file - promoters60/1018057
caaacaggagtat

SEQ ID NO: 42971 - DNA, 9 bp, Unknown
  misc_feature (1)..( 9): Matrix.001 file - promoters60/1018057
agtagattt

SEQ ID NO: 42972 - DNA, 7 bp, Unknown
  misc_feature (1)..( 7): Matrix.001 file - promoters60/1018057
atggtat

SEQ ID NO: 42973 - DNA, 6 bp, Unknown
  misc_feature (1)..( 6): Matrix.001 file - promoters60/1018057
taaata

SEQ ID NO: 42974 - DNA, 7 bp, Unknown
  misc_feature (1)..( 7): Matrix.001 file - promoters60/1018057
aacctta

SEQ ID NO: 42975 - DNA, 7 bp, Unknown
  misc_feature (1)..( 7): Matrix.001 file - promoters60/1018057
gaaatac

SEQ ID NO: 42976 - DNA, 6 bp, Unknown
  misc_feature (1)..( 6): Matrix.001 file - promoters60/1018057
aaggag

SEQ ID NO: 42977 - DNA, 6 bp, Unknown
  misc_feature (1)..( 6): Matrix.001 file - promoters60/1018057
gtccca

SEQ ID NO: 42978 - DNA, 7 bp, Unknown
  misc_feature (1)..( 7): Matrix.001 file - promoters60/1018057
tcagttt

SEQ ID NO: 42979 - DNA, 7 bp, Unknown
  misc_feature (1)..( 7): Matrix.001 file - promoters60/1018057
tttatat

SEQ ID NO: 42980 - DNA, 6 bp, Unknown
  misc_feature (1)..( 6): Matrix.001 file - promoters60/1018057
attatt

SEQ ID NO: 42981 - DNA, 9 bp, Unknown
  misc_feature (1)..( 9): Matrix.001 file - promoters60/1018159
agtaagaaa

SEQ ID NO: 42982 - DNA, 6 bp, Unknown
  misc_feature (1)..( 6): Matrix.001 file - promoters60/1018159
gaaatc

SEQ ID NO: 42983 - DNA, 7 bp, Unknown
  misc_feature (1)..( 7): Matrix.001 file - promoters60/1018159
tcagcct

SEQ ID NO: 42984 - DNA, 7 bp, Unknown
  misc_feature (1)..( 7): Matrix.001 file - promoters60/1018159
aatatta

SEQ ID NO: 42985 - DNA, 9 bp, Unknown
  misc_feature (1)..( 9): Matrix.001 file - promoters60/1018159
atttaaacc

SEQ ID NO: 42986 - DNA, 6 bp, Unknown
  misc_feature (1)..( 6): Matrix.001 file - promoters60/1018159
acatga

SEQ ID NO: 42987 - DNA, 9 bp, Unknown
  misc_feature (1)..( 9): Matrix.001 file - promoters60/1018159
ggcaaggaa

SEQ ID NO: 42988 - DNA, 9 bp, Unknown
  misc_feature (1)..( 9): Matrix.001 file - promoters60/1018159
agaaacata

SEQ ID NO: 42989 - DNA, 6 bp, Unknown
  misc_feature (1)..( 6): Matrix.001 file - promoters60/1018159
aggaag

SEQ ID NO: 42990 - DNA, 7 bp, Unknown
  misc_feature (1)..( 7): Matrix.001 file - promoters60/1018159
ataaacc

SEQ ID NO: 42991 - DNA, 8 bp, Unknown
  misc_feature (1)..( 8): Matrix.001 file - promoters60/1018159
taaagatt

SEQ ID NO: 42992 - DNA, 6 bp, Unknown
  misc_feature (1)..( 6): Matrix.001 file - promoters60/1018159
attggg

SEQ ID NO: 42993 - DNA, 6 bp, Unknown
  misc_feature (1)..( 6): Matrix.001 file - promoters60/1018159
ccattt

SEQ ID NO: 42994 - DNA, 7 bp, Unknown
  misc_feature (1)..( 7): Matrix.001 file - promoters60/1018159
aatggcg

SEQ ID NO: 42995 - DNA, 6 bp, Unknown
  misc_feature (1)..( 6): Matrix.001 file - promoters60/1018159
aaatta

SEQ ID NO: 42996 - DNA, 6 bp, Unknown
  misc_feature (1)..( 6): Matrix.001 file - promoters60/1018159
taagag

SEQ ID NO: 42997 - DNA, 7 bp, Unknown
  misc_feature (1)..( 7): Matrix.001 file - promoters60/1018159
taaattc

SEQ ID NO: 42998 - DNA, 9 bp, Unknown
  misc_feature (1)..( 9): Matrix.001 file - promoters60/1018159
cgattaaat

SEQ ID NO: 42999 - DNA, 9 bp, Unknown
  misc_feature (1)..( 9): Matrix.001 file - promoters60/1018159
aatttgcga

SEQ ID NO: 43000 - DNA, 7 bp, Unknown
  misc_feature (1)..( 7): Matrix.001 file - promoters60/1018159
tttagaa

SEQ ID NO: 43001 - DNA, 8 bp, Unknown
  misc_feature (1)..( 8): Matrix.001 file - promoters60/1018159
atttaaat

SEQ ID NO: 43002 - DNA, 12 bp, Unknown
  misc_feature (1)..( 12): Matrix.001 file - promoters60/1018159
tgaaatagttaa

SEQ ID NO: 43003 - DNA, 6 bp, Unknown
  misc_feature (1)..( 6): Matrix.001 file - promoters60/1018159
caactt

SEQ ID NO: 43004 - DNA, 10 bp, Unknown
  misc_feature (1)..( 10): Matrix.001 file - promoters60/1018190
gaatttgttg

SEQ ID NO: 43005 - DNA, 9 bp, Unknown
  misc_feature (1)..( 9): Matrix.001 file - promoters60/1018190
attttttta

SEQ ID NO: 43006 - DNA, 9 bp, Unknown
  misc_feature (1)..( 9): Matrix.001 file - promoters60/1018190
aaaatataa

SEQ ID NO: 43007 - DNA, 9 bp, Unknown
  misc_feature (1)..( 9): Matrix.001 file - promoters60/1018190
tgtttgatt

SEQ ID NO: 43008 - DNA, 10 bp, Unknown
  misc_feature (1)..( 10): Matrix.001 file - promoters60/1018276
aatttgtttg

SEQ ID NO: 43009 - DNA, 10 bp, Unknown
  misc_feature (1)..( 10): Matrix.001 file - promoters60/1018276
gaatttgttt

SEQ ID NO: 43010 - DNA, 12 bp, Unknown
  misc_feature (1)..( 12): Matrix.001 file - promoters60/1018276
aacattttttaa

SEQ ID NO: 43011 - DNA, 10 bp, Unknown
  misc_feature (1)..( 10): Matrix.001 file - promoters60/1018276
tataatgtaa

SEQ ID NO: 43012 - DNA, 7 bp, Unknown
  misc_feature (1)..( 7): Matrix.001 file - promoters60/1018276
atttgta

SEQ ID NO: 43013 - DNA, 13 bp, Unknown
  misc_feature (1)..( 13): Matrix.001 file - promoters60/1018276
aatatgtttgatt

SEQ ID NO: 43014 - DNA, 10 bp, Unknown
  misc_feature (1)..( 10): Matrix.001 file - promoters60/1018276
tcaatatcac

SEQ ID NO: 43015 - DNA, 5 bp, Unknown
  misc_feature (1)..( 5): Matrix.001 file - promoters60/1018391
aaaag

SEQ ID NO: 43016 - DNA, 10 bp, Unknown
  misc_feature (1)..( 10): Matrix.001 file - promoters60/1018454
agaaaatatt

SEQ ID NO: 43017 - DNA, 9 bp, Unknown
  misc_feature (1)..( 9): Matrix.001 file - promoters60/1018499
aataaaaat

SEQ ID NO: 43018 - DNA, 7 bp, Unknown
  misc_feature (1)..( 7): Matrix.001 file - promoters60/1018499
cataaac

SEQ ID NO: 43019 - DNA, 9 bp, Unknown
  misc_feature (1)..( 9): Matrix.001 file - promoters60/1018519
tcacaattg

SEQ ID NO: 43020 - DNA, 7 bp, Unknown
  misc_feature (1)..( 7): Matrix.001 file - promoters60/1018523
aaaatat

SEQ ID NO: 43021 - DNA, 10 bp, Unknown
  misc_feature (1)..( 10): Matrix.001 file - promoters60/1018523
aaaatataag

SEQ ID NO: 43022 - DNA, 9 bp, Unknown
  misc_feature (1)..( 9): Matrix.001 file - promoters60/1018523
aaaaaaaat

SEQ ID NO: 43023 - DNA, 14 bp, Unknown
  misc_feature (1)..( 14): Matrix.001 file - promoters60/1018523
aattacaaaaatac

SEQ ID NO: 43024 - DNA, 8 bp, Unknown
  misc_feature (1)..( 8): Matrix.001 file - promoters60/1018523
ataaaata

SEQ ID NO: 43025 - DNA, 10 bp, Unknown
  misc_feature (1)..( 10): Matrix.001 file - promoters60/1018523
atattattaa

SEQ ID NO: 43026 - DNA, 9 bp, Unknown
  misc_feature (1)..( 9): Matrix.001 file - promoters60/1018523
tcaacaata

SEQ ID NO: 43027 - DNA, 10 bp, Unknown
  misc_feature (1)..( 10): Matrix.001 file - promoters60/1018523
atgaaaaaaa

SEQ ID NO: 43028 - DNA, 11 bp, Unknown
  misc_feature (1)..( 11): Matrix.001 file - promoters60/1018523
taaaaattcaa

SEQ ID NO: 43029 - DNA, 10 bp, Unknown
  misc_feature (1)..( 10): Matrix.001 file - promoters60/1018529
tttttctatc

SEQ ID NO: 43030 - DNA, 5 bp, Unknown
  misc_feature (1)..( 5): Matrix.001 file - promoters60/1018536
taatt

SEQ ID NO: 43031 - DNA, 11 bp, Unknown
  misc_feature (1)..( 11): Matrix.001 file - promoters60/1018536
aaatcttgaaa

SEQ ID NO: 43032 - DNA, 9 bp, Unknown
  misc_feature (1)..( 9): Matrix.001 file - promoters60/1018536
aaaaagcta

SEQ ID NO: 43033 - DNA, 8 bp, Unknown
  misc_feature (1)..( 8): Matrix.001 file - promoters60/1018536
attttaaa

SEQ ID NO: 43034 - DNA, 8 bp, Unknown
  misc_feature (1)..( 8): Matrix.001 file - promoters60/1018536
attttaaa

SEQ ID NO: 43035 - DNA, 17 bp, Unknown
  misc_feature (1)..( 17): Matrix.001 file - promoters60/1018536
taaatgttaaaattatt

SEQ ID NO: 43036 - DNA, 10 bp, Unknown
  misc_feature (1)..( 10): Matrix.001 file - promoters60/1018536
tatataaata

SEQ ID NO: 43037 - DNA, 13 bp, Unknown
  misc_feature (1)..( 13): Matrix.001 file - promoters60/1018536
aactttataagta

SEQ ID NO: 43038 - DNA, 8 bp, Unknown
  misc_feature (1)..( 8): Matrix.001 file - promoters60/1018536
caaaatat

SEQ ID NO: 43039 - DNA, 11 bp, Unknown
  misc_feature (1)..( 11): Matrix.001 file - promoters60/1018536
taatataagta

SEQ ID NO: 43040 - DNA, 9 bp, Unknown
  misc_feature (1)..( 9): Matrix.001 file - promoters60/1018536
attattcat

SEQ ID NO: 43041 - DNA, 9 bp, Unknown
  misc_feature (1)..( 9): Matrix.001 file - promoters60/1018536
tttataagt

SEQ ID NO: 43042 - DNA, 9 bp, Unknown
  misc_feature (1)..( 9): Matrix.001 file - promoters60/1018536
aaaatatat

SEQ ID NO: 43043 - DNA, 13 bp, Unknown
  misc_feature (1)..( 13): Matrix.001 file - promoters60/1018755
aaaatcaatccta

SEQ ID NO: 43044 - DNA, 14 bp, Unknown
  misc_feature (1)..( 14): Matrix.001 file - promoters60/1018755
gaccttttagttta

SEQ ID NO: 43045 - DNA, 13 bp, Unknown
  misc_feature (1)..( 13): Matrix.001 file - promoters60/1018783
tgttaataattat

SEQ ID NO: 43046 - DNA, 9 bp, Unknown
  misc_feature (1)..( 9): Matrix.001 file - promoters60/1018783
ccaattaaa

SEQ ID NO: 43047 - DNA, 10 bp, Unknown
  misc_feature (1)..( 10): Matrix.001 file - promoters60/1018783
attcaacgta

SEQ ID NO: 43048 - DNA, 7 bp, Unknown
  misc_feature (1)..( 7): Matrix.001 file - promoters60/1018798
ctaaaat

SEQ ID NO: 43049 - DNA, 12 bp, Unknown
  misc_feature (1)..( 12): Matrix.001 file - promoters60/1018798
caatatttataa

SEQ ID NO: 43050 - DNA, 6 bp, Unknown
  misc_feature (1)..( 6): Matrix.001 file - promoters60/1018831
agaatc

SEQ ID NO: 43051 - DNA, 8 bp, Unknown
  misc_feature (1)..( 8): Matrix.001 file - promoters60/1018831
tccggagg

SEQ ID NO: 43052 - DNA, 6 bp, Unknown
  misc_feature (1)..( 6): Matrix.001 file - promoters60/1018831
gtactc

SEQ ID NO: 43053 - DNA, 6 bp, Unknown
  misc_feature (1)..( 6): Matrix.001 file - promoters60/1018831
aactct

SEQ ID NO: 43054 - DNA, 9 bp, Unknown
  misc_feature (1)..( 9): Matrix.001 file - promoters60/1018831
gaaaacata

SEQ ID NO: 43055 - DNA, 7 bp, Unknown
  misc_feature (1)..( 7): Matrix.001 file - promoters60/1018831
caaaagg

SEQ ID NO: 43056 - DNA, 6 bp, Unknown
  misc_feature (1)..( 6): Matrix.001 file - promoters60/1018831
aatcat

SEQ ID NO: 43057 - DNA, 10 bp, Unknown
  misc_feature (1)..( 10): Matrix.001 file - promoters60/1018831
ttcacaggtt

SEQ ID NO: 43058 - DNA, 8 bp, Unknown
  misc_feature (1)..( 8): Matrix.001 file - promoters60/1018831
aagcaact

SEQ ID NO: 43059 - DNA, 6 bp, Unknown
  misc_feature (1)..( 6): Matrix.001 file - promoters60/1018831
acaaaa

SEQ ID NO: 43060 - DNA, 7 bp, Unknown
  misc_feature (1)..( 7): Matrix.001 file - promoters60/1018831
aagaaaa

SEQ ID NO: 43061 - DNA, 8 bp, Unknown
  misc_feature (1)..( 8): Matrix.001 file - promoters60/1018831
aaactgtt

SEQ ID NO: 43062 - DNA, 6 bp, Unknown
  misc_feature (1)..( 6): Matrix.001 file - promoters60/1018831
ttggat

SEQ ID NO: 43063 - DNA, 6 bp, Unknown
  misc_feature (1)..( 6): Matrix.001 file - promoters60/1018831
tcaaca

SEQ ID NO: 43064 - DNA, 6 bp, Unknown
  misc_feature (1)..( 6): Matrix.001 file - promoters60/1018831
gtttgt

SEQ ID NO: 43065 - DNA, 6 bp, Unknown
  misc_feature (1)..( 6): Matrix.001 file - promoters60/1018831
cttcac

SEQ ID NO: 43066 - DNA, 7 bp, Unknown
  misc_feature (1)..( 7): Matrix.001 file - promoters60/1018835
cctttta

SEQ ID NO: 43067 - DNA, 8 bp, Unknown
  misc_feature (1)..( 8): Matrix.001 file - promoters60/1018835
gtttcaat

SEQ ID NO: 43068 - DNA, 8 bp, Unknown
  misc_feature (1)..( 8): Matrix.001 file - promoters60/1018835
gaaatgct

SEQ ID NO: 43069 - DNA, 8 bp, Unknown
  misc_feature (1)..( 8): Matrix.001 file - promoters60/1018835
ttgttaat

SEQ ID NO: 43070 - DNA, 10 bp, Unknown
  misc_feature (1)..( 10): Matrix.001 file - promoters60/1018835
aggctggaag

SEQ ID NO: 43071 - DNA, 7 bp, Unknown
  misc_feature (1)..( 7): Matrix.001 file - promoters60/1018835
gaagcga

SEQ ID NO: 43072 - DNA, 7 bp, Unknown
  misc_feature (1)..( 7): Matrix.001 file - promoters60/1018956
aatcaca

SEQ ID NO: 43073 - DNA, 10 bp, Unknown
  misc_feature (1)..( 10): Matrix.001 file - promoters60/1018956
ggaaaagaaa

SEQ ID NO: 43074 - DNA, 7 bp, Unknown
  misc_feature (1)..( 7): Matrix.001 file - promoters60/1018956
aaaagaa

SEQ ID NO: 43075 - DNA, 6 bp, Unknown
  misc_feature (1)..( 6): Matrix.001 file - promoters60/1018956
aatcaa

SEQ ID NO: 43076 - DNA, 6 bp, Unknown
  misc_feature (1)..( 6): Matrix.001 file - promoters60/1018956
aactca

SEQ ID NO: 43077 - DNA, 8 bp, Unknown
  misc_feature (1)..( 8): Matrix.001 file - promoters60/1018956
aatagcaa

SEQ ID NO: 43078 - DNA, 6 bp, Unknown
  misc_feature (1)..( 6): Matrix.001 file - promoters60/1018956
agagag

SEQ ID NO: 43079 - DNA, 6 bp, Unknown
  misc_feature (1)..( 6): Matrix.001 file - promoters60/1018956
taaaaa

SEQ ID NO: 43080 - DNA, 7 bp, Unknown
  misc_feature (1)..( 7): Matrix.001 file - promoters60/1018956
attatca

SEQ ID NO: 43081 - DNA, 6 bp, Unknown
  misc_feature (1)..( 6): Matrix.001 file - promoters60/1018956
agtaaa

SEQ ID NO: 43082 - DNA, 7 bp, Unknown
  misc_feature (1)..( 7): Matrix.001 file - promoters60/1018956
aatcggg

SEQ ID NO: 43083 - DNA, 8 bp, Unknown
  misc_feature (1)..( 8): Matrix.001 file - promoters60/1018956
gaaacaaa

SEQ ID NO: 43084 - DNA, 7 bp, Unknown
  misc_feature (1)..( 7): Matrix.001 file - promoters60/1018956
cccacta

SEQ ID NO: 43085 - DNA, 9 bp, Unknown
  misc_feature (1)..( 9): Matrix.001 file - promoters60/1018956
aaagaaaag

SEQ ID NO: 43086 - DNA, 7 bp, Unknown
  misc_feature (1)..( 7): Matrix.001 file - promoters60/1018956
gtatata

SEQ ID NO: 43087 - DNA, 13 bp, Unknown
  misc_feature (1)..( 13): Matrix.001 file - promoters60/1018973
caatctttgtatt

SEQ ID NO: 43088 - DNA, 9 bp, Unknown
  misc_feature (1)..( 9): Matrix.001 file - promoters60/1018973
tattttaga

SEQ ID NO: 43089 - DNA, 9 bp, Unknown
  misc_feature (1)..( 9): Matrix.001 file - promoters60/1018973
attctacat

SEQ ID NO: 43090 - DNA, 8 bp, Unknown
  misc_feature (1)..( 8): Matrix.001 file - promoters60/1018973
aaaaagct

SEQ ID NO: 43091 - DNA, 8 bp, Unknown
  misc_feature (1)..( 8): Matrix.001 file - promoters60/1018973
ttcccttc

SEQ ID NO: 43092 - DNA, 5 bp, Unknown
  misc_feature (1)..( 5): Matrix.001 file - promoters60/1018973
ttata

SEQ ID NO: 43093 - DNA, 10 bp, Unknown
  misc_feature (1)..( 10): Matrix.001 file - promoters60/1018973
tataaaaacc

SEQ ID NO: 43094 - DNA, 9 bp, Unknown
  misc_feature (1)..( 9): Matrix.001 file - promoters60/1018973
atataattt

SEQ ID NO: 43095 - DNA, 8 bp, Unknown
  misc_feature (1)..( 8): Matrix.001 file - promoters60/1019024
actaattt

SEQ ID NO: 43096 - DNA, 11 bp, Unknown
  misc_feature (1)..( 11): Matrix.001 file - promoters60/1019024
atttaattaac

SEQ ID NO: 43097 - DNA, 9 bp, Unknown
  misc_feature (1)..( 9): Matrix.001 file - promoters60/1019024
gaaacaata

SEQ ID NO: 43098 - DNA, 12 bp, Unknown
  misc_feature (1)..( 12): Matrix.001 file - promoters60/1019024
ccaattttttta

SEQ ID NO: 43099 - DNA, 8 bp, Unknown
  misc_feature (1)..( 8): Matrix.001 file - promoters60/1019024
aataaata

SEQ ID NO: 43100 - DNA, 8 bp, Unknown
  misc_feature (1)..( 8): Matrix.001 file - promoters60/1019030
attttgaa

SEQ ID NO: 43101 - DNA, 6 bp, Unknown
  misc_feature (1)..( 6): Matrix.001 file - promoters60/1019030
tatttt

SEQ ID NO: 43102 - DNA, 10 bp, Unknown
  misc_feature (1)..( 10): Matrix.001 file - promoters60/1019030
ttacaaaata

SEQ ID NO: 43103 - DNA, 6 bp, Unknown
  misc_feature (1)..( 6): Matrix.001 file - promoters60/1019030
gaaaaa

SEQ ID NO: 43104 - DNA, 7 bp, Unknown
  misc_feature (1)..( 7): Matrix.001 file - promoters60/1019030
attttag

SEQ ID NO: 43105 - DNA, 7 bp, Unknown
  misc_feature (1)..( 7): Matrix.001 file - promoters60/1019030
tttctta

SEQ ID NO: 43106 - DNA, 7 bp, Unknown
  misc_feature (1)..( 7): Matrix.001 file - promoters60/1019030
ataaaaa

SEQ ID NO: 43107 - DNA, 9 bp, Unknown
  misc_feature (1)..( 9): Matrix.001 file - promoters60/1019030
aaaacaaaa

SEQ ID NO: 43108 - DNA, 6 bp, Unknown
  misc_feature (1)..( 6): Matrix.001 file - promoters60/1019030
tatttt

SEQ ID NO: 43109 - DNA, 6 bp, Unknown
  misc_feature (1)..( 6): Matrix.001 file - promoters60/1019030
taaaaa

SEQ ID NO: 43110 - DNA, 8 bp, Unknown
  misc_feature (1)..( 8): Matrix.001 file - promoters60/1019030
aaaacatg

SEQ ID NO: 43111 - DNA, 6 bp, Unknown
  misc_feature (1)..( 6): Matrix.001 file - promoters60/1019030
tgtcaa

SEQ ID NO: 43112 - DNA, 7 bp, Unknown
  misc_feature (1)..( 7): Matrix.001 file - promoters60/1019030
cataaaa

SEQ ID NO: 43113 - DNA, 8 bp, Unknown
  misc_feature (1)..( 8): Matrix.001 file - promoters60/1019030
aaagaatt

SEQ ID NO: 43114 - DNA, 6 bp, Unknown
  misc_feature (1)..( 6): Matrix.001 file - promoters60/1019030
attttt

SEQ ID NO: 43115 - DNA, 6 bp, Unknown
  misc_feature (1)..( 6): Matrix.001 file - promoters60/1019030
ataaaa

SEQ ID NO: 43116 - DNA, 7 bp, Unknown
  misc_feature (1)..( 7): Matrix.001 file - promoters60/1019030
tgtataa

SEQ ID NO: 43117 - DNA, 8 bp, Unknown
  misc_feature (1)..( 8): Matrix.001 file - promoters60/1019030
ctttaatt

SEQ ID NO: 43118 - DNA, 6 bp, Unknown
  misc_feature (1)..( 6): Matrix.001 file - promoters60/1019030
aaaata

SEQ ID NO: 43119 - DNA, 7 bp, Unknown
  misc_feature (1)..( 7): Matrix.001 file - promoters60/1019030
ttcaagc

SEQ ID NO: 43120 - DNA, 7 bp, Unknown
  misc_feature (1)..( 7): Matrix.001 file - promoters60/1019030
tctcttc

SEQ ID NO: 43121 - DNA, 11 bp, Unknown
  misc_feature (1)..( 11): Matrix.001 file - promoters60/1019105
gctacgaaaaa

SEQ ID NO: 43122 - DNA, 7 bp, Unknown
  misc_feature (1)..( 7): Matrix.001 file - promoters60/1019111
tatgttc

SEQ ID NO: 43123 - DNA, 7 bp, Unknown
  misc_feature (1)..( 7): Matrix.001 file - promoters60/1019111
gttctag

SEQ ID NO: 43124 - DNA, 8 bp, Unknown
  misc_feature (1)..( 8): Matrix.001 file - promoters60/1019111
ataagata

SEQ ID NO: 43125 - DNA, 6 bp, Unknown
  misc_feature (1)..( 6): Matrix.001 file - promoters60/1019111
ttttaa

SEQ ID NO: 43126 - DNA, 8 bp, Unknown
  misc_feature (1)..( 8): Matrix.001 file - promoters60/1019111
aaaaaatg

SEQ ID NO: 43127 - DNA, 6 bp, Unknown
  misc_feature (1)..( 6): Matrix.001 file - promoters60/1019111
agaaat

SEQ ID NO: 43128 - DNA, 7 bp, Unknown
  misc_feature (1)..( 7): Matrix.001 file - promoters60/1019111
ataagat

SEQ ID NO: 43129 - DNA, 9 bp, Unknown
  misc_feature (1)..( 9): Matrix.001 file - promoters60/1019111
caagacaat

SEQ ID NO: 43130 - DNA, 6 bp, Unknown
  misc_feature (1)..( 6): Matrix.001 file - promoters60/1019111
atagta

SEQ ID NO: 43131 - DNA, 6 bp, Unknown
  misc_feature (1)..( 6): Matrix.001 file - promoters60/1019111
gaaaaa

SEQ ID NO: 43132 - DNA, 8 bp, Unknown
  misc_feature (1)..( 8): Matrix.001 file - promoters60/1019111
tgaaggtg

SEQ ID NO: 43133 - DNA, 8 bp, Unknown
  misc_feature (1)..( 8): Matrix.001 file - promoters60/1019111
aaatattt

SEQ ID NO: 43134 - DNA, 9 bp, Unknown
  misc_feature (1)..( 9): Matrix.001 file - promoters60/1019111
caagctcta

SEQ ID NO: 43135 - DNA, 8 bp, Unknown
  misc_feature (1)..( 8): Matrix.001 file - promoters60/1019111
attttcat

SEQ ID NO: 43136 - DNA, 8 bp, Unknown
  misc_feature (1)..( 8): Matrix.001 file - promoters60/1019111
attttttt

SEQ ID NO: 43137 - DNA, 6 bp, Unknown
  misc_feature (1)..( 6): Matrix.001 file - promoters60/1019111
tcatat

SEQ ID NO: 43138 - DNA, 6 bp, Unknown
  misc_feature (1)..( 6): Matrix.001 file - promoters60/1019111
agaaaa

SEQ ID NO: 43139 - DNA, 6 bp, Unknown
  misc_feature (1)..( 6): Matrix.001 file - promoters60/1019111
tttcaa

SEQ ID NO: 43140 - DNA, 8 bp, Unknown
  misc_feature (1)..( 8): Matrix.001 file - promoters60/1019111
atcaaaat

SEQ ID NO: 43141 - DNA, 8 bp, Unknown
  misc_feature (1)..( 8): Matrix.001 file - promoters60/1019257
ggaataga

SEQ ID NO: 43142 - DNA, 7 bp, Unknown
  misc_feature (1)..( 7): Matrix.001 file - promoters60/1019257
aaaaaag

SEQ ID NO: 43143 - DNA, 7 bp, Unknown
  misc_feature (1)..( 7): Matrix.001 file - promoters60/1019257
ttataaa

SEQ ID NO: 43144 - DNA, 11 bp, Unknown
  misc_feature (1)..( 11): Matrix.001 file - promoters60/1019257
atttgaattaa

SEQ ID NO: 43145 - DNA, 10 bp, Unknown
  misc_feature (1)..( 10): Matrix.001 file - promoters60/1019260
gttatgcttt

SEQ ID NO: 43146 - DNA, 8 bp, Unknown
  misc_feature (1)..( 8): Matrix.001 file - promoters60/1019260
aaaacctg

SEQ ID NO: 43147 - DNA, 7 bp, Unknown
  misc_feature (1)..( 7): Matrix.001 file - promoters60/1019278
gttcaga

SEQ ID NO: 43148 - DNA, 8 bp, Unknown
  misc_feature (1)..( 8): Matrix.001 file - promoters60/1019278
ttttattg

SEQ ID NO: 43149 - DNA, 6 bp, Unknown
  misc_feature (1)..( 6): Matrix.001 file - promoters60/1019278
ttactt

SEQ ID NO: 43150 - DNA, 11 bp, Unknown
  misc_feature (1)..( 11): Matrix.001 file - promoters60/1019278
aagacagaaca

SEQ ID NO: 43151 - DNA, 7 bp, Unknown
  misc_feature (1)..( 7): Matrix.001 file - promoters60/1019278
acaaaaa

SEQ ID NO: 43152 - DNA, 9 bp, Unknown
  misc_feature (1)..( 9): Matrix.001 file - promoters60/1019278
aagaagaca

SEQ ID NO: 43153 - DNA, 7 bp, Unknown
  misc_feature (1)..( 7): Matrix.001 file - promoters60/1019278
atttata

SEQ ID NO: 43154 - DNA, 10 bp, Unknown
  misc_feature (1)..( 10): Matrix.001 file - promoters60/1019278
aagctctgaa

SEQ ID NO: 43155 - DNA, 7 bp, Unknown
  misc_feature (1)..( 7): Matrix.001 file - promoters60/1019278
tttggat

SEQ ID NO: 43156 - DNA, 9 bp, Unknown
  misc_feature (1)..( 9): Matrix.001 file - promoters60/1019278
agacaaaac

SEQ ID NO: 43157 - DNA, 6 bp, Unknown
  misc_feature (1)..( 6): Matrix.001 file - promoters60/1019278
aaaaag

SEQ ID NO: 43158 - DNA, 7 bp, Unknown
  misc_feature (1)..( 7): Matrix.001 file - promoters60/1019278
tgaagaa

SEQ ID NO: 43159 - DNA, 7 bp, Unknown
  misc_feature (1)..( 7): Matrix.001 file - promoters60/1019278
aactatc

SEQ ID NO: 43160 - DNA, 8 bp, Unknown
  misc_feature (1)..( 8): Matrix.001 file - promoters60/1019278
agacatga

SEQ ID NO: 43161 - DNA, 6 bp, Unknown
  misc_feature (1)..( 6): Matrix.001 file - promoters60/1019278
actttt

SEQ ID NO: 43162 - DNA, 7 bp, Unknown
  misc_feature (1)..( 7): Matrix.001 file - promoters60/1019278
tttgatt

SEQ ID NO: 43163 - DNA, 6 bp, Unknown
  misc_feature (1)..( 6): Matrix.001 file - promoters60/1019278
acaaaa

SEQ ID NO: 43164 - DNA, 10 bp, Unknown
  misc_feature (1)..( 10): Matrix.001 file - promoters60/1019498
gcggtaacta

SEQ ID NO: 43165 - DNA, 15 bp, Unknown
  misc_feature (1)..( 15): Matrix.001 file - promoters60/1019498
caaagtataataaac

SEQ ID NO: 43166 - DNA, 9 bp, Unknown
  misc_feature (1)..( 9): Matrix.001 file - promoters60/1019498
cttatttaa

SEQ ID NO: 43167 - DNA, 8 bp, Unknown
  misc_feature (1)..( 8): Matrix.001 file - promoters60/1019498
atatatgt

SEQ ID NO: 43168 - DNA, 10 bp, Unknown
  misc_feature (1)..( 10): Matrix.001 file - promoters60/1019498
aatcatgtat

SEQ ID NO: 43169 - DNA, 12 bp, Unknown
  misc_feature (1)..( 12): Matrix.001 file - promoters60/1019498
agtataataaac

SEQ ID NO: 43170 - DNA, 8 bp, Unknown
  misc_feature (1)..( 8): Matrix.001 file - promoters60/1019498
ctttttca

SEQ ID NO: 43171 - DNA, 11 bp, Unknown
  misc_feature (1)..( 11): Matrix.001 file - promoters60/1019508
tcattatgtct

SEQ ID NO: 43172 - DNA, 6 bp, Unknown
  misc_feature (1)..( 6): Matrix.001 file - promoters60/1019508
ttgtta

SEQ ID NO: 43173 - DNA, 7 bp, Unknown
  misc_feature (1)..( 7): Matrix.001 file - promoters60/1019508
gatcgat

SEQ ID NO: 43174 - DNA, 9 bp, Unknown
  misc_feature (1)..( 9): Matrix.001 file - promoters60/1019524
gaattgaaa

SEQ ID NO: 43175 - DNA, 12 bp, Unknown
  misc_feature (1)..( 12): Matrix.001 file - promoters60/1019524
gagaatgaatag

SEQ ID NO: 43176 - DNA, 8 bp, Unknown
  misc_feature (1)..( 8): Matrix.001 file - promoters60/1019537
atttttgt

SEQ ID NO: 43177 - DNA, 7 bp, Unknown
  misc_feature (1)..( 7): Matrix.001 file - promoters60/1019537
atatatg

SEQ ID NO: 43178 - DNA, 10 bp, Unknown
  misc_feature (1)..( 10): Matrix.001 file - promoters60/1019559
aattttgaaa

SEQ ID NO: 43179 - DNA, 11 bp, Unknown
  misc_feature (1)..( 11): Matrix.001 file - promoters60/1019559
aaaagttgcag

SEQ ID NO: 43180 - DNA, 10 bp, Unknown
  misc_feature (1)..( 10): Matrix.001 file - promoters60/1019559
taaagtaaag

SEQ ID NO: 43181 - DNA, 9 bp, Unknown
  misc_feature (1)..( 9): Matrix.001 file - promoters60/1019559
ttcttagct

SEQ ID NO: 43182 - DNA, 9 bp, Unknown
  misc_feature (1)..( 9): Matrix.001 file - promoters60/1019559
agaaagcaa

SEQ ID NO: 43183 - DNA, 8 bp, Unknown
  misc_feature (1)..( 8): Matrix.001 file - promoters60/1019559
gaaagatt

SEQ ID NO: 43184 - DNA, 8 bp, Unknown
  misc_feature (1)..( 8): Matrix.001 file - promoters60/1019604
taaatcca

SEQ ID NO: 43185 - DNA, 7 bp, Unknown
  misc_feature (1)..( 7): Matrix.001 file - promoters60/1019604
gaaggca

SEQ ID NO: 43186 - DNA, 8 bp, Unknown
  misc_feature (1)..( 8): Matrix.001 file - promoters60/1019604
agggtata

SEQ ID NO: 43187 - DNA, 8 bp, Unknown
  misc_feature (1)..( 8): Matrix.001 file - promoters60/1019604
attttata

SEQ ID NO: 43188 - DNA, 12 bp, Unknown
  misc_feature (1)..( 12): Matrix.001 file - promoters60/1019604
aaagatagaaat

SEQ ID NO: 43189 - DNA, 6 bp, Unknown
  misc_feature (1)..( 6): Matrix.001 file - promoters60/1019604
taataa

SEQ ID NO: 43190 - DNA, 10 bp, Unknown
  misc_feature (1)..( 10): Matrix.001 file - promoters60/1019604
tgtctaaaaa

SEQ ID NO: 43191 - DNA, 6 bp, Unknown
  misc_feature (1)..( 6): Matrix.001 file - promoters60/1019604
actaaa

SEQ ID NO: 43192 - DNA, 6 bp, Unknown
  misc_feature (1)..( 6): Matrix.001 file - promoters60/1019604
atataa

SEQ ID NO: 43193 - DNA, 10 bp, Unknown
  misc_feature (1)..( 10): Matrix.001 file - promoters60/1019604
ttgaattttt

SEQ ID NO: 43194 - DNA, 9 bp, Unknown
  misc_feature (1)..( 9): Matrix.001 file - promoters60/1019604
tcaagattt

SEQ ID NO: 43195 - DNA, 8 bp, Unknown
  misc_feature (1)..( 8): Matrix.001 file - promoters60/1019604
ttgatttt

SEQ ID NO: 43196 - DNA, 8 bp, Unknown
  misc_feature (1)..( 8): Matrix.001 file - promoters60/1019604
aggaactt

SEQ ID NO: 43197 - DNA, 6 bp, Unknown
  misc_feature (1)..( 6): Matrix.001 file - promoters60/1019604
tattta

SEQ ID NO: 43198 - DNA, 7 bp, Unknown
  misc_feature (1)..( 7): Matrix.001 file - promoters60/1019604
caaaaca

SEQ ID NO: 43199 - DNA, 22 bp, Unknown
  misc_feature (1)..( 22): Matrix.001 file - promoters60/1019604
aaatataaccaaatttgaaatc

SEQ ID NO: 43200 - DNA, 6 bp, Unknown
  misc_feature (1)..( 6): Matrix.001 file - promoters60/1019604
atgaaa

SEQ ID NO: 43201 - DNA, 7 bp, Unknown
  misc_feature (1)..( 7): Matrix.001 file - promoters60/1019604
tatatat

SEQ ID NO: 43202 - DNA, 21 bp, Unknown
  misc_feature (1)..( 21): Matrix.001 file - promoters60/1019604
aaaaacaacattcatttacta

SEQ ID NO: 43203 - DNA, 6 bp, Unknown
  misc_feature (1)..( 6): Matrix.001 file - promoters60/1019604
atcatc

SEQ ID NO: 43204 - DNA, 6 bp, Unknown
  misc_feature (1)..( 6): Matrix.001 file - promoters60/1019604
atcatc

SEQ ID NO: 43205 - DNA, 9 bp, Unknown
  misc_feature (1)..( 9): Matrix.001 file - promoters60/1019648
agaaaagat

SEQ ID NO: 43206 - DNA, 6 bp, Unknown
  misc_feature (1)..( 6): Matrix.001 file - promoters60/1019695
gagctg

SEQ ID NO: 43207 - DNA, 6 bp, Unknown
  misc_feature (1)..( 6): Matrix.001 file - promoters60/1019695
gaaatc

SEQ ID NO: 43208 - DNA, 10 bp, Unknown
  misc_feature (1)..( 10): Matrix.001 file - promoters60/1019695
aaacgattcc

SEQ ID NO: 43209 - DNA, 7 bp, Unknown
  misc_feature (1)..( 7): Matrix.001 file - promoters60/1019695
attgtgt

SEQ ID NO: 43210 - DNA, 6 bp, Unknown
  misc_feature (1)..( 6): Matrix.001 file - promoters60/1019695
taaacc

SEQ ID NO: 43211 - DNA, 8 bp, Unknown
  misc_feature (1)..( 8): Matrix.001 file - promoters60/1019695
atttgtta

SEQ ID NO: 43212 - DNA, 6 bp, Unknown
  misc_feature (1)..( 6): Matrix.001 file - promoters60/1019695
aagacg

SEQ ID NO: 43213 - DNA, 6 bp, Unknown
  misc_feature (1)..( 6): Matrix.001 file - promoters60/1019695
agaaat

SEQ ID NO: 43214 - DNA, 6 bp, Unknown
  misc_feature (1)..( 6): Matrix.001 file - promoters60/1019695
cggttc

SEQ ID NO: 43215 - DNA, 7 bp, Unknown
  misc_feature (1)..( 7): Matrix.001 file - promoters60/1019695
tagggtt

SEQ ID NO: 43216 - DNA, 9 bp, Unknown
  misc_feature (1)..( 9): Matrix.001 file - promoters60/1019695
tttaattaa

SEQ ID NO: 43217 - DNA, 6 bp, Unknown
  misc_feature (1)..( 6): Matrix.001 file - promoters60/1019695
gaaccc

SEQ ID NO: 43218 - DNA, 7 bp, Unknown
  misc_feature (1)..( 7): Matrix.001 file - promoters60/1019695
attaata

SEQ ID NO: 43219 - DNA, 8 bp, Unknown
  misc_feature (1)..( 8): Matrix.001 file - promoters60/1019734
attgattt

SEQ ID NO: 43220 - DNA, 10 bp, Unknown
  misc_feature (1)..( 10): Matrix.001 file - promoters60/1019734
atttgaggat

SEQ ID NO: 43221 - DNA, 9 bp, Unknown
  misc_feature (1)..( 9): Matrix.001 file - promoters60/1019734
tttgaacat

SEQ ID NO: 43222 - DNA, 10 bp, Unknown
  misc_feature (1)..( 10): Matrix.001 file - promoters60/1019734
aaaacacgtg

SEQ ID NO: 43223 - DNA, 7 bp, Unknown
  misc_feature (1)..( 7): Matrix.001 file - promoters60/1019734
tctatat

SEQ ID NO: 43224 - DNA, 11 bp, Unknown
  misc_feature (1)..( 11): Matrix.001 file - promoters60/1019734
ataaattaatg

SEQ ID NO: 43225 - DNA, 9 bp, Unknown
  misc_feature (1)..( 9): Matrix.001 file - promoters60/1019734
tcaatcata

SEQ ID NO: 43226 - DNA, 9 bp, Unknown
  misc_feature (1)..( 9): Matrix.001 file - promoters60/1019734
taatttcat

SEQ ID NO: 43227 - DNA, 7 bp, Unknown
  misc_feature (1)..( 7): Matrix.001 file - promoters60/1019734
taacaaa

SEQ ID NO: 43228 - DNA, 6 bp, Unknown
  misc_feature (1)..( 6): Matrix.001 file - promoters60/1019734
aaactc

SEQ ID NO: 43229 - DNA, 7 bp, Unknown
  misc_feature (1)..( 7): Matrix.001 file - promoters60/1019734
cctttat

SEQ ID NO: 43230 - DNA, 6 bp, Unknown
  misc_feature (1)..( 6): Matrix.001 file - promoters60/1019734
tcattt

SEQ ID NO: 43231 - DNA, 6 bp, Unknown
  misc_feature (1)..( 6): Matrix.001 file - promoters60/1019734
aaacat

SEQ ID NO: 43232 - DNA, 9 bp, Unknown
  misc_feature (1)..( 9): Matrix.001 file - promoters60/1019734
aaaataata

SEQ ID NO: 43233 - DNA, 6 bp, Unknown
  misc_feature (1)..( 6): Matrix.001 file - promoters60/1019734
ataata

SEQ ID NO: 43234 - DNA, 8 bp, Unknown
  misc_feature (1)..( 8): Matrix.001 file - promoters60/1019734
aaaaagaa

SEQ ID NO: 43235 - DNA, 7 bp, Unknown
  misc_feature (1)..( 7): Matrix.001 file - promoters60/1019734
aatatct

SEQ ID NO: 43236 - DNA, 6 bp, Unknown
  misc_feature (1)..( 6): Matrix.001 file - promoters60/1019734
tatttc

SEQ ID NO: 43237 - DNA, 7 bp, Unknown
  misc_feature (1)..( 7): Matrix.001 file - promoters60/1019776
ttcattt

SEQ ID NO: 43238 - DNA, 6 bp, Unknown
  misc_feature (1)..( 6): Matrix.001 file - promoters60/1019776
gtttca

SEQ ID NO: 43239 - DNA, 6 bp, Unknown
  misc_feature (1)..( 6): Matrix.001 file - promoters60/1019776
aaacat

SEQ ID NO: 43240 - DNA, 8 bp, Unknown
  misc_feature (1)..( 8): Matrix.001 file - promoters60/1019776
aataagta

SEQ ID NO: 43241 - DNA, 8 bp, Unknown
  misc_feature (1)..( 8): Matrix.001 file - promoters60/1019776
taagatcc

SEQ ID NO: 43242 - DNA, 11 bp, Unknown
  misc_feature (1)..( 11): Matrix.001 file - promoters60/1019776
ataatttgttt

SEQ ID NO: 43243 - DNA, 6 bp, Unknown
  misc_feature (1)..( 6): Matrix.001 file - promoters60/1019776
aaaacc

SEQ ID NO: 43244 - DNA, 6 bp, Unknown
  misc_feature (1)..( 6): Matrix.001 file - promoters60/1019776
taaaaa

SEQ ID NO: 43245 - DNA, 6 bp, Unknown
  misc_feature (1)..( 6): Matrix.001 file - promoters60/1019776
aaaaag

SEQ ID NO: 43246 - DNA, 9 bp, Unknown
  misc_feature (1)..( 9): Matrix.001 file - promoters60/1019776
gtatataaa

SEQ ID NO: 43247 - DNA, 6 bp, Unknown
  misc_feature (1)..( 6): Matrix.001 file - promoters60/1019776
aacatt

SEQ ID NO: 43248 - DNA, 8 bp, Unknown
  misc_feature (1)..( 8): Matrix.001 file - promoters60/1019776
ccaccaaa

SEQ ID NO: 43249 - DNA, 6 bp, Unknown
  misc_feature (1)..( 6): Matrix.001 file - promoters60/1019776
ataaaa

SEQ ID NO: 43250 - DNA, 9 bp, Unknown
  misc_feature (1)..( 9): Matrix.001 file - promoters60/1019776
aaagtaaag

SEQ ID NO: 43251 - DNA, 6 bp, Unknown
  misc_feature (1)..( 6): Matrix.001 file - promoters60/1019776
agtaaa

SEQ ID NO: 43252 - DNA, 7 bp, Unknown
  misc_feature (1)..( 7): Matrix.001 file - promoters60/1019776
aatcggg

SEQ ID NO: 43253 - DNA, 8 bp, Unknown
  misc_feature (1)..( 8): Matrix.001 file - promoters60/1019776
gaaacaaa

SEQ ID NO: 43254 - DNA, 10 bp, Unknown
  misc_feature (1)..( 10): Matrix.001 file - promoters60/1019776
ggaaaagaaa

SEQ ID NO: 43255 - DNA, 7 bp, Unknown
  misc_feature (1)..( 7): Matrix.001 file - promoters60/1019776
cccacta

SEQ ID NO: 43256 - DNA, 12 bp, Unknown
  misc_feature (1)..( 12): Matrix.001 file - promoters60/1019898
gatatagataca

SEQ ID NO: 43257 - DNA, 9 bp, Unknown
  misc_feature (1)..( 9): Matrix.001 file - promoters60/1019898
aatatagat

SEQ ID NO: 43258 - DNA, 6 bp, Unknown
  misc_feature (1)..( 6): Matrix.001 file - promoters60/1019898
ctttta

SEQ ID NO: 43259 - DNA, 6 bp, Unknown
  misc_feature (1)..( 6): Matrix.001 file - promoters60/1019898
tttttg

SEQ ID NO: 43260 - DNA, 7 bp, Unknown
  misc_feature (1)..( 7): Matrix.001 file - promoters60/1019915
aactaga

SEQ ID NO: 43261 - DNA, 8 bp, Unknown
  misc_feature (1)..( 8): Matrix.001 file - promoters60/1019915
tgtcaaat

SEQ ID NO: 43262 - DNA, 10 bp, Unknown
  misc_feature (1)..( 10): Matrix.001 file - promoters60/1019915
ttaagaaaaa

SEQ ID NO: 43263 - DNA, 8 bp, Unknown
  misc_feature (1)..( 8): Matrix.001 file - promoters60/1019915
ctaaaaac

SEQ ID NO: 43264 - DNA, 8 bp, Unknown
  misc_feature (1)..( 8): Matrix.001 file - promoters60/1019915
aaaataaa

SEQ ID NO: 43265 - DNA, 8 bp, Unknown
  misc_feature (1)..( 8): Matrix.001 file - promoters60/1019915
tttttagt

SEQ ID NO: 43266 - DNA, 12 bp, Unknown
  misc_feature (1)..( 12): Matrix.001 file - promoters60/1019915
ataaaaccatta

SEQ ID NO: 43267 - DNA, 10 bp, Unknown
  misc_feature (1)..( 10): Matrix.001 file - promoters60/1019915
ttatattgat

SEQ ID NO: 43268 - DNA, 8 bp, Unknown
  misc_feature (1)..( 8): Matrix.001 file - promoters60/1019928
attagtta

SEQ ID NO: 43269 - DNA, 9 bp, Unknown
  misc_feature (1)..( 9): Matrix.001 file - promoters60/1019928
gatttgaaa

SEQ ID NO: 43270 - DNA, 16 bp, Unknown
  misc_feature (1)..( 16): Matrix.001 file - promoters60/1019928
attcgaatattttaaa

SEQ ID NO: 43271 - DNA, 9 bp, Unknown
  misc_feature (1)..( 9): Matrix.001 file - promoters60/1019928
tagaaaatt

SEQ ID NO: 43272 - DNA, 10 bp, Unknown
  misc_feature (1)..( 10): Matrix.001 file - promoters60/1019928
tataaaaatc

SEQ ID NO: 43273 - DNA, 13 bp, Unknown
  misc_feature (1)..( 13): Matrix.001 file - promoters60/1019928
atctttataatta

SEQ ID NO: 43274 - DNA, 10 bp, Unknown
  misc_feature (1)..( 10): Matrix.001 file - promoters60/1019928
ttatgtaatt

SEQ ID NO: 43275 - DNA, 5 bp, Unknown
  misc_feature (1)..( 5): Matrix.001 file - promoters60/1020023
aaatt

SEQ ID NO: 43276 - DNA, 12 bp, Unknown
  misc_feature (1)..( 12): Matrix.001 file - promoters60/1020023
tcctataaatat

SEQ ID NO: 43277 - DNA, 8 bp, Unknown
  misc_feature (1)..( 8): Matrix.001 file - promoters60/1020023
ataattaa

SEQ ID NO: 43278 - DNA, 11 bp, Unknown
  misc_feature (1)..( 11): Matrix.001 file - promoters60/1020023
agaaaatattc

SEQ ID NO: 43279 - DNA, 11 bp, Unknown
  misc_feature (1)..( 11): Matrix.001 file - promoters60/1020023
tttttatgtat

SEQ ID NO: 43280 - DNA, 7 bp, Unknown
  misc_feature (1)..( 7): Matrix.001 file - promoters60/1020023
cttaata

SEQ ID NO: 43281 - DNA, 10 bp, Unknown
  misc_feature (1)..( 10): Matrix.001 file - promoters60/1020023
ttaataacct

SEQ ID NO: 43282 - DNA, 8 bp, Unknown
  misc_feature (1)..( 8): Matrix.001 file - promoters60/1020046
atagttat

SEQ ID NO: 43283 - DNA, 7 bp, Unknown
  misc_feature (1)..( 7): Matrix.001 file - promoters60/1020046
ctttttc

SEQ ID NO: 43284 - DNA, 6 bp, Unknown
  misc_feature (1)..( 6): Matrix.001 file - promoters60/1020046
tttaac

SEQ ID NO: 43285 - DNA, 7 bp, Unknown
  misc_feature (1)..( 7): Matrix.001 file - promoters60/1020046
ttaattc

SEQ ID NO: 43286 - DNA, 7 bp, Unknown
  misc_feature (1)..( 7): Matrix.001 file - promoters60/1020046
tataaag

SEQ ID NO: 43287 - DNA, 6 bp, Unknown
  misc_feature (1)..( 6): Matrix.001 file - promoters60/1020046
acataa

SEQ ID NO: 43288 - DNA, 13 bp, Unknown
  misc_feature (1)..( 13): Matrix.001 file - promoters60/1020046
aaaaagtaaagga

SEQ ID NO: 43289 - DNA, 6 bp, Unknown
  misc_feature (1)..( 6): Matrix.001 file - promoters60/1020046
aaaata

SEQ ID NO: 43290 - DNA, 8 bp, Unknown
  misc_feature (1)..( 8): Matrix.001 file - promoters60/1020046
ttctctct

SEQ ID NO: 43291 - DNA, 8 bp, Unknown
  misc_feature (1)..( 8): Matrix.001 file - promoters60/1020046
taaacaca

SEQ ID NO: 43292 - DNA, 6 bp, Unknown
  misc_feature (1)..( 6): Matrix.001 file - promoters60/1020046
ttataa

SEQ ID NO: 43293 - DNA, 8 bp, Unknown
  misc_feature (1)..( 8): Matrix.001 file - promoters60/1020046
aaatatat

SEQ ID NO: 43294 - DNA, 10 bp, Unknown
  misc_feature (1)..( 10): Matrix.001 file - promoters60/1020046
tatctttaat

SEQ ID NO: 43295 - DNA, 19 bp, Unknown
  misc_feature (1)..( 19): Matrix.001 file - promoters60/1020046
taataaaagacatatttct

SEQ ID NO: 43296 - DNA, 9 bp, Unknown
  misc_feature (1)..( 9): Matrix.001 file - promoters60/1020046
aaaattaga

SEQ ID NO: 43297 - DNA, 6 bp, Unknown
  misc_feature (1)..( 6): Matrix.001 file - promoters60/1020046
aaaata

SEQ ID NO: 43298 - DNA, 9 bp, Unknown
  misc_feature (1)..( 9): Matrix.001 file - promoters60/1020046
ttaaaagat

SEQ ID NO: 43299 - DNA, 8 bp, Unknown
  misc_feature (1)..( 8): Matrix.001 file - promoters60/1020046
taaaaaaa

SEQ ID NO: 43300 - DNA, 8 bp, Unknown
  misc_feature (1)..( 8): Matrix.001 file - promoters60/1020046
aaaacttt

SEQ ID NO: 43301 - DNA, 6 bp, Unknown
  misc_feature (1)..( 6): Matrix.001 file - promoters60/1020046
ttctat

SEQ ID NO: 43302 - DNA, 7 bp, Unknown
  misc_feature (1)..( 7): Matrix.001 file - promoters60/1020046
ataaatt

SEQ ID NO: 43303 - DNA, 11 bp, Unknown
  misc_feature (1)..( 11): Matrix.001 file - promoters60/1020046
ttacaaaatta

SEQ ID NO: 43304 - DNA, 8 bp, Unknown
  misc_feature (1)..( 8): Matrix.001 file - promoters60/1020046
aaaaatat

SEQ ID NO: 43305 - DNA, 6 bp, Unknown
  misc_feature (1)..( 6): Matrix.001 file - promoters60/1020046
caactt

SEQ ID NO: 43306 - DNA, 6 bp, Unknown
  misc_feature (1)..( 6): Matrix.001 file - promoters60/1020046
aaataa

SEQ ID NO: 43307 - DNA, 6 bp, Unknown
  misc_feature (1)..( 6): Matrix.001 file - promoters60/1020046
aaaata

SEQ ID NO: 43308 - DNA, 6 bp, Unknown
  misc_feature (1)..( 6): Matrix.001 file - promoters60/1020046
aagatg

SEQ ID NO: 43309 - DNA, 6 bp, Unknown
  misc_feature (1)..( 6): Matrix.001 file - promoters60/1020046
cgcgtt

SEQ ID NO: 43310 - DNA, 9 bp, Unknown
  misc_feature (1)..( 9): Matrix.001 file - promoters60/1020069
aagaagaaa

SEQ ID NO: 43311 - DNA, 11 bp, Unknown
  misc_feature (1)..( 11): Matrix.001 file - promoters60/1020069
gaacttttctc

SEQ ID NO: 43312 - DNA, 9 bp, Unknown
  misc_feature (1)..( 9): Matrix.001 file - promoters60/1020069
cttgtctcc

SEQ ID NO: 43313 - DNA, 8 bp, Unknown
  misc_feature (1)..( 8): Matrix.001 file - promoters60/1020223
atcatatt

SEQ ID NO: 43314 - DNA, 9 bp, Unknown
  misc_feature (1)..( 9): Matrix.001 file - promoters60/1020223
tttgtagtg

SEQ ID NO: 43315 - DNA, 8 bp, Unknown
  misc_feature (1)..( 8): Matrix.001 file - promoters60/1020223
tgatttgt

SEQ ID NO: 43316 - DNA, 6 bp, Unknown
  misc_feature (1)..( 6): Matrix.001 file - promoters60/1020223
atattt

SEQ ID NO: 43317 - DNA, 7 bp, Unknown
  misc_feature (1)..( 7): Matrix.001 file - promoters60/1020223
gtttgtt

SEQ ID NO: 43318 - DNA, 6 bp, Unknown
  misc_feature (1)..( 6): Matrix.001 file - promoters60/1020223
tgatgt

SEQ ID NO: 43319 - DNA, 8 bp, Unknown
  misc_feature (1)..( 8): Matrix.001 file - promoters60/1020223
gatttgtt

SEQ ID NO: 43320 - DNA, 7 bp, Unknown
  misc_feature (1)..( 7): Matrix.001 file - promoters60/1020223
gttttgt

SEQ ID NO: 43321 - DNA, 7 bp, Unknown
  misc_feature (1)..( 7): Matrix.001 file - promoters60/1020223
aagaaca

SEQ ID NO: 43322 - DNA, 6 bp, Unknown
  misc_feature (1)..( 6): Matrix.001 file - promoters60/1020223
tgtgat

SEQ ID NO: 43323 - DNA, 8 bp, Unknown
  misc_feature (1)..( 8): Matrix.001 file - promoters60/1020223
ataatttg

SEQ ID NO: 43324 - DNA, 8 bp, Unknown
  misc_feature (1)..( 8): Matrix.001 file - promoters60/1020223
agtatgtt

SEQ ID NO: 43325 - DNA, 6 bp, Unknown
  misc_feature (1)..( 6): Matrix.001 file - promoters60/1020223
tgtttg

SEQ ID NO: 43326 - DNA, 6 bp, Unknown
  misc_feature (1)..( 6): Matrix.001 file - promoters60/1020223
gagttt

SEQ ID NO: 43327 - DNA, 6 bp, Unknown
  misc_feature (1)..( 6): Matrix.001 file - promoters60/1020223
ctgatt

SEQ ID NO: 43328 - DNA, 6 bp, Unknown
  misc_feature (1)..( 6): Matrix.001 file - promoters60/1020223
ttagtt

SEQ ID NO: 43329 - DNA, 8 bp, Unknown
  misc_feature (1)..( 8): Matrix.001 file - promoters60/1020265
atgactta

SEQ ID NO: 43330 - DNA, 7 bp, Unknown
  misc_feature (1)..( 7): Matrix.001 file - promoters60/1020265
attgtgt

SEQ ID NO: 43331 - DNA, 8 bp, Unknown
  misc_feature (1)..( 8): Matrix.001 file - promoters60/1020265
attattct

SEQ ID NO: 43332 - DNA, 8 bp, Unknown
  misc_feature (1)..( 8): Matrix.001 file - promoters60/1020265
tgaagaaa

SEQ ID NO: 43333 - DNA, 7 bp, Unknown
  misc_feature (1)..( 7): Matrix.001 file - promoters60/1020313
tgtttat

SEQ ID NO: 43334 - DNA, 15 bp, Unknown
  misc_feature (1)..( 15): Matrix.001 file - promoters60/1020364
acttatacaaaaagt

SEQ ID NO: 43335 - DNA, 9 bp, Unknown
  misc_feature (1)..( 9): Matrix.001 file - promoters60/1020430
ctaactaac

SEQ ID NO: 43336 - DNA, 9 bp, Unknown
  misc_feature (1)..( 9): Matrix.001 file - promoters60/1020430
ctaactaac

SEQ ID NO: 43337 - DNA, 9 bp, Unknown
  misc_feature (1)..( 9): Matrix.001 file - promoters60/1020430
atataatta

SEQ ID NO: 43338 - DNA, 6 bp, Unknown
  misc_feature (1)..( 6): Matrix.001 file - promoters60/1020442
taatac

SEQ ID NO: 43339 - DNA, 9 bp, Unknown
  misc_feature (1)..( 9): Matrix.001 file - promoters60/1020442
tttttattt

SEQ ID NO: 43340 - DNA, 6 bp, Unknown
  misc_feature (1)..( 6): Matrix.001 file - promoters60/1020442
tcaagt

SEQ ID NO: 43341 - DNA, 6 bp, Unknown
  misc_feature (1)..( 6): Matrix.001 file - promoters60/1020442
actagt

SEQ ID NO: 43342 - DNA, 7 bp, Unknown
  misc_feature (1)..( 7): Matrix.001 file - promoters60/1020442
attattt

SEQ ID NO: 43343 - DNA, 9 bp, Unknown
  misc_feature (1)..( 9): Matrix.001 file - promoters60/1020442
gataacaat

SEQ ID NO: 43344 - DNA, 8 bp, Unknown
  misc_feature (1)..( 8): Matrix.001 file - promoters60/1020442
gcaacaac

SEQ ID NO: 43345 - DNA, 6 bp, Unknown
  misc_feature (1)..( 6): Matrix.001 file - promoters60/1020442
agcaaa

SEQ ID NO: 43346 - DNA, 6 bp, Unknown
  misc_feature (1)..( 6): Matrix.001 file - promoters60/1020442
tttgaa

SEQ ID NO: 43347 - DNA, 9 bp, Unknown
  misc_feature (1)..( 9): Matrix.001 file - promoters60/1020442
aaaagattt

SEQ ID NO: 43348 - DNA, 7 bp, Unknown
  misc_feature (1)..( 7): Matrix.001 file - promoters60/1020442
gctggct

SEQ ID NO: 43349 - DNA, 9 bp, Unknown
  misc_feature (1)..( 9): Matrix.001 file - promoters60/1020442
aagaagatg

SEQ ID NO: 43350 - DNA, 10 bp, Unknown
  misc_feature (1)..( 10): Matrix.001 file - promoters60/1020442
tgagagattg

SEQ ID NO: 43351 - DNA, 7 bp, Unknown
  misc_feature (1)..( 7): Matrix.001 file - promoters60/1020442
ttgcaat

SEQ ID NO: 43352 - DNA, 8 bp, Unknown
  misc_feature (1)..( 8): Matrix.001 file - promoters60/1020442
tatatata

SEQ ID NO: 43353 - DNA, 8 bp, Unknown
  misc_feature (1)..( 8): Matrix.001 file - promoters60/1020460
gtatatgg

SEQ ID NO: 43354 - DNA, 11 bp, Unknown
  misc_feature (1)..( 11): Matrix.001 file - promoters60/1020460
agtgtatctct

SEQ ID NO: 43355 - DNA, 6 bp, Unknown
  misc_feature (1)..( 6): Matrix.001 file - promoters60/1020460
ttatga

SEQ ID NO: 43356 - DNA, 7 bp, Unknown
  misc_feature (1)..( 7): Matrix.001 file - promoters60/1020460
cttaata

SEQ ID NO: 43357 - DNA, 7 bp, Unknown
  misc_feature (1)..( 7): Matrix.001 file - promoters60/1020460
gtgaaaa

SEQ ID NO: 43358 - DNA, 6 bp, Unknown
  misc_feature (1)..( 6): Matrix.001 file - promoters60/1020460
agacaa

SEQ ID NO: 43359 - DNA, 6 bp, Unknown
  misc_feature (1)..( 6): Matrix.001 file - promoters60/1020460
ttctta

SEQ ID NO: 43360 - DNA, 8 bp, Unknown
  misc_feature (1)..( 8): Matrix.001 file - promoters60/1020460
ataaacaa

SEQ ID NO: 43361 - DNA, 7 bp, Unknown
  misc_feature (1)..( 7): Matrix.001 file - promoters60/1020460
aaatcca

SEQ ID NO: 43362 - DNA, 6 bp, Unknown
  misc_feature (1)..( 6): Matrix.001 file - promoters60/1020460
tcaaac

SEQ ID NO: 43363 - DNA, 7 bp, Unknown
  misc_feature (1)..( 7): Matrix.001 file - promoters60/1020460
attattc

SEQ ID NO: 43364 - DNA, 7 bp, Unknown
  misc_feature (1)..( 7): Matrix.001 file - promoters60/1020460
atgatat

SEQ ID NO: 43365 - DNA, 6 bp, Unknown
  misc_feature (1)..( 6): Matrix.001 file - promoters60/1020460
atctgg

SEQ ID NO: 43366 - DNA, 6 bp, Unknown
  misc_feature (1)..( 6): Matrix.001 file - promoters60/1020460
attatt

SEQ ID NO: 43367 - DNA, 7 bp, Unknown
  misc_feature (1)..( 7): Matrix.001 file - promoters60/1020460
tctaaaa

SEQ ID NO: 43368 - DNA, 7 bp, Unknown
  misc_feature (1)..( 7): Matrix.001 file - promoters60/1020460
tgtgtca

SEQ ID NO: 43369 - DNA, 7 bp, Unknown
  misc_feature (1)..( 7): Matrix.001 file - promoters60/1020508
ttaagaa

SEQ ID NO: 43370 - DNA, 6 bp, Unknown
  misc_feature (1)..( 6): Matrix.001 file - promoters60/1020508
gctaat

SEQ ID NO: 43371 - DNA, 6 bp, Unknown
  misc_feature (1)..( 6): Matrix.001 file - promoters60/1020508
taatga

SEQ ID NO: 43372 - DNA, 9 bp, Unknown
  misc_feature (1)..( 9): Matrix.001 file - promoters60/1020508
acaacatta

SEQ ID NO: 43373 - DNA, 6 bp, Unknown
  misc_feature (1)..( 6): Matrix.001 file - promoters60/1020508
tatatt

SEQ ID NO: 43374 - DNA, 11 bp, Unknown
  misc_feature (1)..( 11): Matrix.001 file - promoters60/1020508
tatttggattt

SEQ ID NO: 43375 - DNA, 6 bp, Unknown
  misc_feature (1)..( 6): Matrix.001 file - promoters60/1020508
ttcttc

SEQ ID NO: 43376 - DNA, 6 bp, Unknown
  misc_feature (1)..( 6): Matrix.001 file - promoters60/1020508
tcattt

SEQ ID NO: 43377 - DNA, 6 bp, Unknown
  misc_feature (1)..( 6): Matrix.001 file - promoters60/1020508
aatgaa

SEQ ID NO: 43378 - DNA, 7 bp, Unknown
  misc_feature (1)..( 7): Matrix.001 file - promoters60/1020508
caaatat

SEQ ID NO: 43379 - DNA, 7 bp, Unknown
  misc_feature (1)..( 7): Matrix.001 file - promoters60/1020508
tgcatac

SEQ ID NO: 43380 - DNA, 6 bp, Unknown
  misc_feature (1)..( 6): Matrix.001 file - promoters60/1020508
cattat

SEQ ID NO: 43381 - DNA, 8 bp, Unknown
  misc_feature (1)..( 8): Matrix.001 file - promoters60/1020508
ttactaca

SEQ ID NO: 43382 - DNA, 8 bp, Unknown
  misc_feature (1)..( 8): Matrix.001 file - promoters60/1020508
atgtcatt

SEQ ID NO: 43383 - DNA, 7 bp, Unknown
  misc_feature (1)..( 7): Matrix.001 file - promoters60/1020508
aaaagtt

SEQ ID NO: 43384 - DNA, 7 bp, Unknown
  misc_feature (1)..( 7): Matrix.001 file - promoters60/1020508
gaccctt

SEQ ID NO: 43385 - DNA, 7 bp, Unknown
  misc_feature (1)..( 7): Matrix.001 file - promoters60/1020508
atcgtaa

SEQ ID NO: 43386 - DNA, 6 bp, Unknown
  misc_feature (1)..( 6): Matrix.001 file - promoters60/1020508
ataaat

SEQ ID NO: 43387 - DNA, 7 bp, Unknown
  misc_feature (1)..( 7): Matrix.001 file - promoters60/1020508
aacataa

SEQ ID NO: 43388 - DNA, 8 bp, Unknown
  misc_feature (1)..( 8): Matrix.001 file - promoters60/1020508
taaaatat

SEQ ID NO: 43389 - DNA, 6 bp, Unknown
  misc_feature (1)..( 6): Matrix.001 file - promoters60/1020512
aacaaa

SEQ ID NO: 43390 - DNA, 9 bp, Unknown
  misc_feature (1)..( 9): Matrix.001 file - promoters60/1020512
aaaagtcta

SEQ ID NO: 43391 - DNA, 10 bp, Unknown
  misc_feature (1)..( 10): Matrix.001 file - promoters60/1020512
tattttccag

SEQ ID NO: 43392 - DNA, 7 bp, Unknown
  misc_feature (1)..( 7): Matrix.001 file - promoters60/1020543
tttgttg

SEQ ID NO: 43393 - DNA, 6 bp, Unknown
  misc_feature (1)..( 6): Matrix.001 file - promoters60/1020543
caaaaa

SEQ ID NO: 43394 - DNA, 8 bp, Unknown
  misc_feature (1)..( 8): Matrix.001 file - promoters60/1020543
gaaaaaaa

SEQ ID NO: 43395 - DNA, 8 bp, Unknown
  misc_feature (1)..( 8): Matrix.001 file - promoters60/1020543
caactatt

SEQ ID NO: 43396 - DNA, 7 bp, Unknown
  misc_feature (1)..( 7): Matrix.001 file - promoters60/1020543
tttcatg

SEQ ID NO: 43397 - DNA, 6 bp, Unknown
  misc_feature (1)..( 6): Matrix.001 file - promoters60/1020543
taaaaa

SEQ ID NO: 43398 - DNA, 8 bp, Unknown
  misc_feature (1)..( 8): Matrix.001 file - promoters60/1020543
tcgacatg

SEQ ID NO: 43399 - DNA, 7 bp, Unknown
  misc_feature (1)..( 7): Matrix.001 file - promoters60/1020543
acgtggt

SEQ ID NO: 43400 - DNA, 6 bp, Unknown
  misc_feature (1)..( 6): Matrix.001 file - promoters60/1020543
ggtgga

SEQ ID NO: 43401 - DNA, 6 bp, Unknown
  misc_feature (1)..( 6): Matrix.001 file - promoters60/1020543
aaagaa

SEQ ID NO: 43402 - DNA, 6 bp, Unknown
  misc_feature (1)..( 6): Matrix.001 file - promoters60/1020543
acaaca

SEQ ID NO: 43403 - DNA, 12 bp, Unknown
  misc_feature (1)..( 12): Matrix.001 file - promoters60/1020543
aaaaaagaagaa

SEQ ID NO: 43404 - DNA, 9 bp, Unknown
  misc_feature (1)..( 9): Matrix.001 file - promoters60/1020543
atgataaga

SEQ ID NO: 43405 - DNA, 6 bp, Unknown
  misc_feature (1)..( 6): Matrix.001 file - promoters60/1020543
aataaa

SEQ ID NO: 43406 - DNA, 6 bp, Unknown
  misc_feature (1)..( 6): Matrix.001 file - promoters60/1020543
aactag

SEQ ID NO: 43407 - DNA, 7 bp, Unknown
  misc_feature (1)..( 7): Matrix.001 file - promoters60/1020543
aatgttg

SEQ ID NO: 43408 - DNA, 8 bp, Unknown
  misc_feature (1)..( 8): Matrix.001 file - promoters60/1020543
tggcaaag

SEQ ID NO: 43409 - DNA, 7 bp, Unknown
  misc_feature (1)..( 7): Matrix.001 file - promoters60/1020543
cgtcttc

SEQ ID NO: 43410 - DNA, 6 bp, Unknown
  misc_feature (1)..( 6): Matrix.001 file - promoters60/1020557
atgaaa

SEQ ID NO: 43411 - DNA, 6 bp, Unknown
  misc_feature (1)..( 6): Matrix.001 file - promoters60/1020557
atttta

SEQ ID NO: 43412 - DNA, 7 bp, Unknown
  misc_feature (1)..( 7): Matrix.001 file - promoters60/1020557
tatatat

SEQ ID NO: 43413 - DNA, 21 bp, Unknown
  misc_feature (1)..( 21): Matrix.001 file - promoters60/1020557
aaaaacaacattcatttacta

SEQ ID NO: 43414 - DNA, 6 bp, Unknown
  misc_feature (1)..( 6): Matrix.001 file - promoters60/1020557
atcatc

SEQ ID NO: 43415 - DNA, 6 bp, Unknown
  misc_feature (1)..( 6): Matrix.001 file - promoters60/1020557
atcatc

SEQ ID NO: 43416 - DNA, 22 bp, Unknown
  misc_feature (1)..( 22): Matrix.001 file - promoters60/1020557
aaatataaccaactttgaaatc

SEQ ID NO: 43417 - DNA, 15 bp, Unknown
  misc_feature (1)..( 15): Matrix.001 file - promoters60/1020557
tctctactatataaa

SEQ ID NO: 43418 - DNA, 7 bp, Unknown
  misc_feature (1)..( 7): Matrix.001 file - promoters60/1020557
agagatc

SEQ ID NO: 43419 - DNA, 7 bp, Unknown
  misc_feature (1)..( 7): Matrix.001 file - promoters60/1020557
atcaaaa

SEQ ID NO: 43420 - DNA, 6 bp, Unknown
  misc_feature (1)..( 6): Matrix.001 file - promoters60/1020557
tagaaa

SEQ ID NO: 43421 - DNA, 6 bp, Unknown
  misc_feature (1)..( 6): Matrix.001 file - promoters60/1020557
attttt

SEQ ID NO: 43422 - DNA, 10 bp, Unknown
  misc_feature (1)..( 10): Matrix.001 file - promoters60/1020596
aatctttcaa

SEQ ID NO: 43423 - DNA, 9 bp, Unknown
  misc_feature (1)..( 9): Matrix.001 file - promoters60/1020596
tatggaaag

SEQ ID NO: 43424 - DNA, 9 bp, Unknown
  misc_feature (1)..( 9): Matrix.001 file - promoters60/1020596
gaagaaatg

SEQ ID NO: 43425 - DNA, 8 bp, Unknown
  misc_feature (1)..( 8): Matrix.001 file - promoters60/1020596
ccgaaaaa

SEQ ID NO: 43426 - DNA, 14 bp, Unknown
  misc_feature (1)..( 14): Matrix.001 file - promoters60/1020619
aaatttaatactct

SEQ ID NO: 43427 - DNA, 13 bp, Unknown
  misc_feature (1)..( 13): Matrix.001 file - promoters60/1020619
ctcctataaatta

SEQ ID NO: 43428 - DNA, 13 bp, Unknown
  misc_feature (1)..( 13): Matrix.001 file - promoters60/1020619
gcaattttattta

SEQ ID NO: 43429 - DNA, 9 bp, Unknown
  misc_feature (1)..( 9): Matrix.001 file - promoters60/1020634
aaaatactc

SEQ ID NO: 43430 - DNA, 9 bp, Unknown
  misc_feature (1)..( 9): Matrix.001 file - promoters60/1020634
tgtcaaatt

SEQ ID NO: 43431 - DNA, 9 bp, Unknown
  misc_feature (1)..( 9): Matrix.001 file - promoters60/1020634
tttttaaaa

SEQ ID NO: 43432 - DNA, 13 bp, Unknown
  misc_feature (1)..( 13): Matrix.001 file - promoters60/1020634
gatttcaaatagt

SEQ ID NO: 43433 - DNA, 7 bp, Unknown
  misc_feature (1)..( 7): Matrix.001 file - promoters60/1020634
taaaaat

SEQ ID NO: 43434 - DNA, 10 bp, Unknown
  misc_feature (1)..( 10): Matrix.001 file - promoters60/1020634
tttaaaattc

SEQ ID NO: 43435 - DNA, 6 bp, Unknown
  misc_feature (1)..( 6): Matrix.001 file - promoters60/1020642
ttttac

SEQ ID NO: 43436 - DNA, 9 bp, Unknown
  misc_feature (1)..( 9): Matrix.001 file - promoters60/1020642
aaacaaata

SEQ ID NO: 43437 - DNA, 8 bp, Unknown
  misc_feature (1)..( 8): Matrix.001 file - promoters60/1020642
agaaaaaa

SEQ ID NO: 43438 - DNA, 8 bp, Unknown
  misc_feature (1)..( 8): Matrix.001 file - promoters60/1020642
aattcttg

SEQ ID NO: 43439 - DNA, 7 bp, Unknown
  misc_feature (1)..( 7): Matrix.001 file - promoters60/1020642
ttgattt

SEQ ID NO: 43440 - DNA, 8 bp, Unknown
  misc_feature (1)..( 8): Matrix.001 file - promoters60/1020642
catcgtct

SEQ ID NO: 43441 - DNA, 6 bp, Unknown
  misc_feature (1)..( 6): Matrix.001 file - promoters60/1020642
tctaac

SEQ ID NO: 43442 - DNA, 9 bp, Unknown
  misc_feature (1)..( 9): Matrix.001 file - promoters60/1020642
ttttcagct

SEQ ID NO: 43443 - DNA, 11 bp, Unknown
  misc_feature (1)..( 11): Matrix.001 file - promoters60/1020646
aataatttgta

SEQ ID NO: 43444 - DNA, 7 bp, Unknown
  misc_feature (1)..( 7): Matrix.001 file - promoters60/1020646
ttgtaac

SEQ ID NO: 43445 - DNA, 7 bp, Unknown
  misc_feature (1)..( 7): Matrix.001 file - promoters60/1020646
atacaaa

SEQ ID NO: 43446 - DNA, 6 bp, Unknown
  misc_feature (1)..( 6): Matrix.001 file - promoters60/1020646
aaaaaa

SEQ ID NO: 43447 - DNA, 9 bp, Unknown
  misc_feature (1)..( 9): Matrix.001 file - promoters60/1020646
atcaatcat

SEQ ID NO: 43448 - DNA, 8 bp, Unknown
  misc_feature (1)..( 8): Matrix.001 file - promoters60/1020646
ttagttta

SEQ ID NO: 43449 - DNA, 7 bp, Unknown
  misc_feature (1)..( 7): Matrix.001 file - promoters60/1020646
aacagaa

SEQ ID NO: 43450 - DNA, 6 bp, Unknown
  misc_feature (1)..( 6): Matrix.001 file - promoters60/1020646
ctctta

SEQ ID NO: 43451 - DNA, 6 bp, Unknown
  misc_feature (1)..( 6): Matrix.001 file - promoters60/1020646
atcatt

SEQ ID NO: 43452 - DNA, 6 bp, Unknown
  misc_feature (1)..( 6): Matrix.001 file - promoters60/1020646
cattat

SEQ ID NO: 43453 - DNA, 7 bp, Unknown
  misc_feature (1)..( 7): Matrix.001 file - promoters60/1020646
gaaaaaa

SEQ ID NO: 43454 - DNA, 8 bp, Unknown
  misc_feature (1)..( 8): Matrix.001 file - promoters60/1020646
aacagtta

SEQ ID NO: 43455 - DNA, 11 bp, Unknown
  misc_feature (1)..( 11): Matrix.001 file - promoters60/1020646
actaaccaaat

SEQ ID NO: 43456 - DNA, 7 bp, Unknown
  misc_feature (1)..( 7): Matrix.001 file - promoters60/1020646
ttagtaa

SEQ ID NO: 43457 - DNA, 6 bp, Unknown
  misc_feature (1)..( 6): Matrix.001 file - promoters60/1020646
tttatt

SEQ ID NO: 43458 - DNA, 7 bp, Unknown
  misc_feature (1)..( 7): Matrix.001 file - promoters60/1020646
aaacaaa

SEQ ID NO: 43459 - DNA, 6 bp, Unknown
  misc_feature (1)..( 6): Matrix.001 file - promoters60/1020646
catgaa

SEQ ID NO: 43460 - DNA, 6 bp, Unknown
  misc_feature (1)..( 6): Matrix.001 file - promoters60/1020646
tcccaa

SEQ ID NO: 43461 - DNA, 6 bp, Unknown
  misc_feature (1)..( 6): Matrix.001 file - promoters60/1020646
agaaaa

SEQ ID NO: 43462 - DNA, 8 bp, Unknown
  misc_feature (1)..( 8): Matrix.001 file - promoters60/1020646
gcatccaa

SEQ ID NO: 43463 - DNA, 10 bp, Unknown
  misc_feature (1)..( 10): Matrix.001 file - promoters60/1020666
agaaatttaa

SEQ ID NO: 43464 - DNA, 12 bp, Unknown
  misc_feature (1)..( 12): Matrix.001 file - promoters60/1020666
tatcaaaaaaga

SEQ ID NO: 43465 - DNA, 9 bp, Unknown
  misc_feature (1)..( 9): Matrix.001 file - promoters60/1020701
gaaaataag

SEQ ID NO: 43466 - DNA, 11 bp, Unknown
  misc_feature (1)..( 11): Matrix.001 file - promoters60/1020701
caagtctctat

SEQ ID NO: 43467 - DNA, 10 bp, Unknown
  misc_feature (1)..( 10): Matrix.001 file - promoters60/1020701
atattaatgt

SEQ ID NO: 43468 - DNA, 10 bp, Unknown
  misc_feature (1)..( 10): Matrix.001 file - promoters60/1020701
aaatcatatt

SEQ ID NO: 43469 - DNA, 8 bp, Unknown
  misc_feature (1)..( 8): Matrix.001 file - promoters60/1020701
taatttca

SEQ ID NO: 43470 - DNA, 7 bp, Unknown
  misc_feature (1)..( 7): Matrix.001 file - promoters60/1020713
tttattt

SEQ ID NO: 43471 - DNA, 7 bp, Unknown
  misc_feature (1)..( 7): Matrix.001 file - promoters60/1020713
ttagtta

SEQ ID NO: 43472 - DNA, 7 bp, Unknown
  misc_feature (1)..( 7): Matrix.001 file - promoters60/1020713
taagtta

SEQ ID NO: 43473 - DNA, 12 bp, Unknown
  misc_feature (1)..( 12): Matrix.001 file - promoters60/1020713
taaatatccgta

SEQ ID NO: 43474 - DNA, 6 bp, Unknown
  misc_feature (1)..( 6): Matrix.001 file - promoters60/1020713
gtttga

SEQ ID NO: 43475 - DNA, 7 bp, Unknown
  misc_feature (1)..( 7): Matrix.001 file - promoters60/1020713
gttgaat

SEQ ID NO: 43476 - DNA, 7 bp, Unknown
  misc_feature (1)..( 7): Matrix.001 file - promoters60/1020713
ttcatac

SEQ ID NO: 43477 - DNA, 7 bp, Unknown
  misc_feature (1)..( 7): Matrix.001 file - promoters60/1020713
taggtta

SEQ ID NO: 43478 - DNA, 7 bp, Unknown
  misc_feature (1)..( 7): Matrix.001 file - promoters60/1020713
ttccata

SEQ ID NO: 43479 - DNA, 7 bp, Unknown
  misc_feature (1)..( 7): Matrix.001 file - promoters60/1020713
atcttct

SEQ ID NO: 43480 - DNA, 8 bp, Unknown
  misc_feature (1)..( 8): Matrix.001 file - promoters60/1020713
caagaaaa

SEQ ID NO: 43481 - DNA, 7 bp, Unknown
  misc_feature (1)..( 7): Matrix.001 file - promoters60/1020713
aaatttc

SEQ ID NO: 43482 - DNA, 6 bp, Unknown
  misc_feature (1)..( 6): Matrix.001 file - promoters60/1020713
aagctt

SEQ ID NO: 43483 - DNA, 6 bp, Unknown
  misc_feature (1)..( 6): Matrix.001 file - promoters60/1020713
tacgtt

SEQ ID NO: 43484 - DNA, 8 bp, Unknown
  misc_feature (1)..( 8): Matrix.001 file - promoters60/1020713
atccaatt

SEQ ID NO: 43485 - DNA, 6 bp, Unknown
  misc_feature (1)..( 6): Matrix.001 file - promoters60/1020713
cgtgag

SEQ ID NO: 43486 - DNA, 7 bp, Unknown
  misc_feature (1)..( 7): Matrix.001 file - promoters60/1020713
atttaaa

SEQ ID NO: 43487 - DNA, 6 bp, Unknown
  misc_feature (1)..( 6): Matrix.001 file - promoters60/1020713
aaaaaa

SEQ ID NO: 43488 - DNA, 6 bp, Unknown
  misc_feature (1)..( 6): Matrix.001 file - promoters60/1020713
gaacac

SEQ ID NO: 43489 - DNA, 7 bp, Unknown
  misc_feature (1)..( 7): Matrix.001 file - promoters60/1020713
ttttaaa

SEQ ID NO: 43490 - DNA, 7 bp, Unknown
  misc_feature (1)..( 7): Matrix.001 file - promoters60/1020713
gaaataa

SEQ ID NO: 43491 - DNA, 11 bp, Unknown
  misc_feature (1)..( 11): Matrix.001 file - promoters60/1020786
caaaaaaaata

SEQ ID NO: 43492 - DNA, 6 bp, Unknown
  misc_feature (1)..( 6): Matrix.001 file - promoters60/1020786
aaatac

SEQ ID NO: 43493 - DNA, 10 bp, Unknown
  misc_feature (1)..( 10): Matrix.001 file - promoters60/1020786
aaattaatat

SEQ ID NO: 43494 - DNA, 13 bp, Unknown
  misc_feature (1)..( 13): Matrix.001 file - promoters60/1020786
aaaacaaaaaaca

SEQ ID NO: 43495 - DNA, 7 bp, Unknown
  misc_feature (1)..( 7): Matrix.001 file - promoters60/1020786
aaaaata

SEQ ID NO: 43496 - DNA, 9 bp, Unknown
  misc_feature (1)..( 9): Matrix.001 file - promoters60/1020786
aattaaaaa

SEQ ID NO: 43497 - DNA, 10 bp, Unknown
  misc_feature (1)..( 10): Matrix.001 file - promoters60/1020786
acaaaaaaat

SEQ ID NO: 43498 - DNA, 10 bp, Unknown
  misc_feature (1)..( 10): Matrix.001 file - promoters60/1020786
aaaataaatt

SEQ ID NO: 43499 - DNA, 14 bp, Unknown
  misc_feature (1)..( 14): Matrix.001 file - promoters60/1020786
taacttttaaacta

SEQ ID NO: 43500 - DNA, 8 bp, Unknown
  misc_feature (1)..( 8): Matrix.001 file - promoters60/1020786
aaaaaatt

SEQ ID NO: 43501 - DNA, 9 bp, Unknown
  misc_feature (1)..( 9): Matrix.001 file - promoters60/1020786
atataaaaa

SEQ ID NO: 43502 - DNA, 9 bp, Unknown
  misc_feature (1)..( 9): Matrix.001 file - promoters60/1020818
aaataattt

SEQ ID NO: 43503 - DNA, 13 bp, Unknown
  misc_feature (1)..( 13): Matrix.001 file - promoters60/1020818
ataatttttcctt

SEQ ID NO: 43504 - DNA, 10 bp, Unknown
  misc_feature (1)..( 10): Matrix.001 file - promoters60/1020818
taaaaaagaa

SEQ ID NO: 43505 - DNA, 9 bp, Unknown
  misc_feature (1)..( 9): Matrix.001 file - promoters60/1020818
gtcaaaaaa

SEQ ID NO: 43506 - DNA, 6 bp, Unknown
  misc_feature (1)..( 6): Matrix.001 file - promoters60/1020826
acatag

SEQ ID NO: 43507 - DNA, 9 bp, Unknown
  misc_feature (1)..( 9): Matrix.001 file - promoters60/1020826
tttttcttc

SEQ ID NO: 43508 - DNA, 6 bp, Unknown
  misc_feature (1)..( 6): Matrix.001 file - promoters60/1020826
tagaat

SEQ ID NO: 43509 - DNA, 6 bp, Unknown
  misc_feature (1)..( 6): Matrix.001 file - promoters60/1020826
attttc

SEQ ID NO: 43510 - DNA, 6 bp, Unknown
  misc_feature (1)..( 6): Matrix.001 file - promoters60/1020826
taaatt

SEQ ID NO: 43511 - DNA, 6 bp, Unknown
  misc_feature (1)..( 6): Matrix.001 file - promoters60/1020826
aatata

SEQ ID NO: 43512 - DNA, 8 bp, Unknown
  misc_feature (1)..( 8): Matrix.001 file - promoters60/1020826
gaccattg

SEQ ID NO: 43513 - DNA, 7 bp, Unknown
  misc_feature (1)..( 7): Matrix.001 file - promoters60/1020826
ctcaaat

SEQ ID NO: 43514 - DNA, 7 bp, Unknown
  misc_feature (1)..( 7): Matrix.001 file - promoters60/1020826
ctacgtc

SEQ ID NO: 43515 - DNA, 7 bp, Unknown
  misc_feature (1)..( 7): Matrix.001 file - promoters60/1020826
gaagaaa

SEQ ID NO: 43516 - DNA, 6 bp, Unknown
  misc_feature (1)..( 6): Matrix.001 file - promoters60/1020826
tttcat

SEQ ID NO: 43517 - DNA, 7 bp, Unknown
  misc_feature (1)..( 7): Matrix.001 file - promoters60/1020826
gtcataa

SEQ ID NO: 43518 - DNA, 11 bp, Unknown
  misc_feature (1)..( 11): Matrix.001 file - promoters60/1020826
attataacctc

SEQ ID NO: 43519 - DNA, 6 bp, Unknown
  misc_feature (1)..( 6): Matrix.001 file - promoters60/1020826
aagtat

SEQ ID NO: 43520 - DNA, 6 bp, Unknown
  misc_feature (1)..( 6): Matrix.001 file - promoters60/1020826
tgagaa

SEQ ID NO: 43521 - DNA, 7 bp, Unknown
  misc_feature (1)..( 7): Matrix.001 file - promoters60/1020826
aagaaaa

SEQ ID NO: 43522 - DNA, 8 bp, Unknown
  misc_feature (1)..( 8): Matrix.001 file - promoters60/1020834
agaatacc

SEQ ID NO: 43523 - DNA, 6 bp, Unknown
  misc_feature (1)..( 6): Matrix.001 file - promoters60/1020834
gcacat

SEQ ID NO: 43524 - DNA, 6 bp, Unknown
  misc_feature (1)..( 6): Matrix.001 file - promoters60/1020834
cagaag

SEQ ID NO: 43525 - DNA, 9 bp, Unknown
  misc_feature (1)..( 9): Matrix.001 file - promoters60/1020834
ttatcaaaa

SEQ ID NO: 43526 - DNA, 6 bp, Unknown
  misc_feature (1)..( 6): Matrix.001 file - promoters60/1020834
tagatt

SEQ ID NO: 43527 - DNA, 7 bp, Unknown
  misc_feature (1)..( 7): Matrix.001 file - promoters60/1020834
ttggact

SEQ ID NO: 43528 - DNA, 6 bp, Unknown
  misc_feature (1)..( 6): Matrix.001 file - promoters60/1020834
cactta

SEQ ID NO: 43529 - DNA, 7 bp, Unknown
  misc_feature (1)..( 7): Matrix.001 file - promoters60/1020834
aaaatca

SEQ ID NO: 43530 - DNA, 6 bp, Unknown
  misc_feature (1)..( 6): Matrix.001 file - promoters60/1020834
tgagat

SEQ ID NO: 43531 - DNA, 8 bp, Unknown
  misc_feature (1)..( 8): Matrix.001 file - promoters60/1020834
agatcttc

SEQ ID NO: 43532 - DNA, 8 bp, Unknown
  misc_feature (1)..( 8): Matrix.001 file - promoters60/1020834
ttcactga

SEQ ID NO: 43533 - DNA, 6 bp, Unknown
  misc_feature (1)..( 6): Matrix.001 file - promoters60/1020838
atagaa

SEQ ID NO: 43534 - DNA, 9 bp, Unknown
  misc_feature (1)..( 9): Matrix.001 file - promoters60/1020838
cattgcaaa

SEQ ID NO: 43535 - DNA, 8 bp, Unknown
  misc_feature (1)..( 8): Matrix.001 file - promoters60/1020838
accaacta

SEQ ID NO: 43536 - DNA, 6 bp, Unknown
  misc_feature (1)..( 6): Matrix.001 file - promoters60/1020838
tatata

SEQ ID NO: 43537 - DNA, 9 bp, Unknown
  misc_feature (1)..( 9): Matrix.001 file - promoters60/1020838
aatgtcttt

SEQ ID NO: 43538 - DNA, 7 bp, Unknown
  misc_feature (1)..( 7): Matrix.001 file - promoters60/1020838
tttcaag

SEQ ID NO: 43539 - DNA, 6 bp, Unknown
  misc_feature (1)..( 6): Matrix.001 file - promoters60/1020838
gaacaa

SEQ ID NO: 43540 - DNA, 8 bp, Unknown
  misc_feature (1)..( 8): Matrix.001 file - promoters60/1020838
attacatg

SEQ ID NO: 43541 - DNA, 6 bp, Unknown
  misc_feature (1)..( 6): Matrix.001 file - promoters60/1020838
tagatg

SEQ ID NO: 43542 - DNA, 8 bp, Unknown
  misc_feature (1)..( 8): Matrix.001 file - promoters60/1020838
aaaacgtt

SEQ ID NO: 43543 - DNA, 7 bp, Unknown
  misc_feature (1)..( 7): Matrix.001 file - promoters60/1020838
caaaaag

SEQ ID NO: 43544 - DNA, 7 bp, Unknown
  misc_feature (1)..( 7): Matrix.001 file - promoters60/1020838
ataaaag

SEQ ID NO: 43545 - DNA, 7 bp, Unknown
  misc_feature (1)..( 7): Matrix.001 file - promoters60/1020838
ttgaagg

SEQ ID NO: 43546 - DNA, 6 bp, Unknown
  misc_feature (1)..( 6): Matrix.001 file - promoters60/1020838
ggagaa

SEQ ID NO: 43547 - DNA, 7 bp, Unknown
  misc_feature (1)..( 7): Matrix.001 file - promoters60/1020838
gaaagaa

SEQ ID NO: 43548 - DNA, 8 bp, Unknown
  misc_feature (1)..( 8): Matrix.001 file - promoters60/1020838
ctttggaa

SEQ ID NO: 43549 - DNA, 6 bp, Unknown
  misc_feature (1)..( 6): Matrix.001 file - promoters60/1020838
aatgaa

SEQ ID NO: 43550 - DNA, 7 bp, Unknown
  misc_feature (1)..( 7): Matrix.001 file - promoters60/1020838
ttcctaa

SEQ ID NO: 43551 - DNA, 7 bp, Unknown
  misc_feature (1)..( 7): Matrix.001 file - promoters60/1020838
aaatcaa

SEQ ID NO: 43552 - DNA, 7 bp, Unknown
  misc_feature (1)..( 7): Matrix.001 file - promoters60/1020838
aaggtaa

SEQ ID NO: 43553 - DNA, 9 bp, Unknown
  misc_feature (1)..( 9): Matrix.001 file - promoters60/1020838
aaaaaaaaa

SEQ ID NO: 43554 - DNA, 6 bp, Unknown
  misc_feature (1)..( 6): Matrix.001 file - promoters60/1020838
acatag

SEQ ID NO: 43555 - DNA, 8 bp, Unknown
  misc_feature (1)..( 8): Matrix.001 file - promoters60/1020838
acactttc

SEQ ID NO: 43556 - DNA, 6 bp, Unknown
  misc_feature (1)..( 6): Matrix.001 file - promoters60/1020838
tcagat

SEQ ID NO: 43557 - DNA, 7 bp, Unknown
  misc_feature (1)..( 7): Matrix.001 file - promoters60/1020838
tttgtaa

SEQ ID NO: 43558 - DNA, 6 bp, Unknown
  misc_feature (1)..( 6): Matrix.001 file - promoters60/1020838
aataaa

SEQ ID NO: 43559 - DNA, 7 bp, Unknown
  misc_feature (1)..( 7): Matrix.001 file - promoters60/1020838
tttatgt

SEQ ID NO: 43560 - DNA, 7 bp, Unknown
  misc_feature (1)..( 7): Matrix.001 file - promoters60/1020838
tatgtat

SEQ ID NO: 43561 - DNA, 8 bp, Unknown
  misc_feature (1)..( 8): Matrix.001 file - promoters60/1020838
taaaaccg

SEQ ID NO: 43562 - DNA, 8 bp, Unknown
  misc_feature (1)..( 8): Matrix.001 file - promoters60/1020848
ttttgaaa

SEQ ID NO: 43563 - DNA, 9 bp, Unknown
  misc_feature (1)..( 9): Matrix.001 file - promoters60/1020848
aacaaatat

SEQ ID NO: 43564 - DNA, 7 bp, Unknown
  misc_feature (1)..( 7): Matrix.001 file - promoters60/1020848
atatatg

SEQ ID NO: 43565 - DNA, 6 bp, Unknown
  misc_feature (1)..( 6): Matrix.001 file - promoters60/1020848
aattgg

SEQ ID NO: 43566 - DNA, 6 bp, Unknown
  misc_feature (1)..( 6): Matrix.001 file - promoters60/1020848
gtaata

SEQ ID NO: 43567 - DNA, 8 bp, Unknown
  misc_feature (1)..( 8): Matrix.001 file - promoters60/1020848
aacttatt

SEQ ID NO: 43568 - DNA, 6 bp, Unknown
  misc_feature (1)..( 6): Matrix.001 file - promoters60/1020848
tatttt

SEQ ID NO: 43569 - DNA, 7 bp, Unknown
  misc_feature (1)..( 7): Matrix.001 file - promoters60/1020848
attatat

SEQ ID NO: 43570 - DNA, 7 bp, Unknown
  misc_feature (1)..( 7): Matrix.001 file - promoters60/1020848
agaatat

SEQ ID NO: 43571 - DNA, 7 bp, Unknown
  misc_feature (1)..( 7): Matrix.001 file - promoters60/1020848
ttaaaac

SEQ ID NO: 43572 - DNA, 7 bp, Unknown
  misc_feature (1)..( 7): Matrix.001 file - promoters60/1020848
tttcaaa

SEQ ID NO: 43573 - DNA, 7 bp, Unknown
  misc_feature (1)..( 7): Matrix.001 file - promoters60/1020848
aaccatt

SEQ ID NO: 43574 - DNA, 7 bp, Unknown
  misc_feature (1)..( 7): Matrix.001 file - promoters60/1020848
atgggag

SEQ ID NO: 43575 - DNA, 8 bp, Unknown
  misc_feature (1)..( 8): Matrix.001 file - promoters60/1020848
caaatcaa

SEQ ID NO: 43576 - DNA, 7 bp, Unknown
  misc_feature (1)..( 7): Matrix.001 file - promoters60/1020848
attcaat

SEQ ID NO: 43577 - DNA, 8 bp, Unknown
  misc_feature (1)..( 8): Matrix.001 file - promoters60/1020848
atagcaat

SEQ ID NO: 43578 - DNA, 6 bp, Unknown
  misc_feature (1)..( 6): Matrix.001 file - promoters60/1020848
ttttat

SEQ ID NO: 43579 - DNA, 6 bp, Unknown
  misc_feature (1)..( 6): Matrix.001 file - promoters60/1020848
atattt

SEQ ID NO: 43580 - DNA, 7 bp, Unknown
  misc_feature (1)..( 7): Matrix.001 file - promoters60/1020848
tttcatg

SEQ ID NO: 43581 - DNA, 6 bp, Unknown
  misc_feature (1)..( 6): Matrix.001 file - promoters60/1020848
gatcat

SEQ ID NO: 43582 - DNA, 6 bp, Unknown
  misc_feature (1)..( 6): Matrix.001 file - promoters60/1020848
aaattt

SEQ ID NO: 43583 - DNA, 6 bp, Unknown
  misc_feature (1)..( 6): Matrix.001 file - promoters60/1020848
tgtttt

SEQ ID NO: 43584 - DNA, 6 bp, Unknown
  misc_feature (1)..( 6): Matrix.001 file - promoters60/1020848
atgcaa

SEQ ID NO: 43585 - DNA, 7 bp, Unknown
  misc_feature (1)..( 7): Matrix.001 file - promoters60/1020848
tacattt

SEQ ID NO: 43586 - DNA, 8 bp, Unknown
  misc_feature (1)..( 8): Matrix.001 file - promoters60/1020863
aaaaaata

SEQ ID NO: 43587 - DNA, 11 bp, Unknown
  misc_feature (1)..( 11): Matrix.001 file - promoters60/1020863
aaaataaaata

SEQ ID NO: 43588 - DNA, 8 bp, Unknown
  misc_feature (1)..( 8): Matrix.001 file - promoters60/1020863
aaaacaaa

SEQ ID NO: 43589 - DNA, 13 bp, Unknown
  misc_feature (1)..( 13): Matrix.001 file - promoters60/1020863
tcatttgcaataa

SEQ ID NO: 43590 - DNA, 9 bp, Unknown
  misc_feature (1)..( 9): Matrix.001 file - promoters60/1020863
ttgaatttt

SEQ ID NO: 43591 - DNA, 11 bp, Unknown
  misc_feature (1)..( 11): Matrix.001 file - promoters60/1020863
tccaaaaataa

SEQ ID NO: 43592 - DNA, 10 bp, Unknown
  misc_feature (1)..( 10): Matrix.001 file - promoters60/1020863
aaataataaa

SEQ ID NO: 43593 - DNA, 6 bp, Unknown
  misc_feature (1)..( 6): Matrix.001 file - promoters60/1020863
atatta

SEQ ID NO: 43594 - DNA, 11 bp, Unknown
  misc_feature (1)..( 11): Matrix.001 file - promoters60/1020863
gaaaaaaatag

SEQ ID NO: 43595 - DNA, 7 bp, Unknown
  misc_feature (1)..( 7): Matrix.001 file - promoters60/1020863
taaaaat

SEQ ID NO: 43596 - DNA, 8 bp, Unknown
  misc_feature (1)..( 8): Matrix.001 file - promoters60/1020863
atttattt

SEQ ID NO: 43597 - DNA, 8 bp, Unknown
  misc_feature (1)..( 8): Matrix.001 file - promoters60/1020892
gttttaca

SEQ ID NO: 43598 - DNA, 12 bp, Unknown
  misc_feature (1)..( 12): Matrix.001 file - promoters60/1020892
ttactgaaaaaa

SEQ ID NO: 43599 - DNA, 8 bp, Unknown
  misc_feature (1)..( 8): Matrix.001 file - promoters60/1020940
taaaatgg

SEQ ID NO: 43600 - DNA, 7 bp, Unknown
  misc_feature (1)..( 7): Matrix.001 file - promoters60/1020940
aaaaaaa

SEQ ID NO: 43601 - DNA, 9 bp, Unknown
  misc_feature (1)..( 9): Matrix.001 file - promoters60/1020940
aaacaaaat

SEQ ID NO: 43602 - DNA, 7 bp, Unknown
  misc_feature (1)..( 7): Matrix.001 file - promoters60/1020940
aaattat

SEQ ID NO: 43603 - DNA, 10 bp, Unknown
  misc_feature (1)..( 10): Matrix.001 file - promoters60/1020940
tatataaacc

SEQ ID NO: 43604 - DNA, 7 bp, Unknown
  misc_feature (1)..( 7): Matrix.001 file - promoters60/1020940
aaaatag

SEQ ID NO: 43605 - DNA, 9 bp, Unknown
  misc_feature (1)..( 9): Matrix.001 file - promoters60/1020940
tgaataatg

SEQ ID NO: 43606 - DNA, 10 bp, Unknown
  misc_feature (1)..( 10): Matrix.001 file - promoters60/1020940
ataataaata

SEQ ID NO: 43607 - DNA, 9 bp, Unknown
  misc_feature (1)..( 9): Matrix.001 file - promoters60/1020968
gtaatttaa

SEQ ID NO: 43608 - DNA, 11 bp, Unknown
  misc_feature (1)..( 11): Matrix.001 file - promoters60/1020968
atacttaagtt

SEQ ID NO: 43609 - DNA, 12 bp, Unknown
  misc_feature (1)..( 12): Matrix.001 file - promoters60/1020968
attaaattttca

SEQ ID NO: 43610 - DNA, 11 bp, Unknown
  misc_feature (1)..( 11): Matrix.001 file - promoters60/1020968
aattttcaaat

SEQ ID NO: 43611 - DNA, 9 bp, Unknown
  misc_feature (1)..( 9): Matrix.001 file - promoters60/1020968
ttaaaatat

SEQ ID NO: 43612 - DNA, 14 bp, Unknown
  misc_feature (1)..( 14): Matrix.001 file - promoters60/1020968
atataattaaacgt

SEQ ID NO: 43613 - DNA, 13 bp, Unknown
  misc_feature (1)..( 13): Matrix.001 file - promoters60/1020968
aatgcttaaattt

SEQ ID NO: 43614 - DNA, 8 bp, Unknown
  misc_feature (1)..( 8): Matrix.001 file - promoters60/1020968
aaaataaa

SEQ ID NO: 43615 - DNA, 11 bp, Unknown
  misc_feature (1)..( 11): Matrix.001 file - promoters60/1021001
aacaaagaaag

SEQ ID NO: 43616 - DNA, 6 bp, Unknown
  misc_feature (1)..( 6): Matrix.001 file - promoters60/1021047
tcaatg

SEQ ID NO: 43617 - DNA, 8 bp, Unknown
  misc_feature (1)..( 8): Matrix.001 file - promoters60/1021047
cacaccct

SEQ ID NO: 43618 - DNA, 9 bp, Unknown
  misc_feature (1)..( 9): Matrix.001 file - promoters60/1021047
tttatttta

SEQ ID NO: 43619 - DNA, 10 bp, Unknown
  misc_feature (1)..( 10): Matrix.001 file - promoters60/1021047
tttaattttg

SEQ ID NO: 43620 - DNA, 7 bp, Unknown
  misc_feature (1)..( 7): Matrix.001 file - promoters60/1021047
ttaagta

SEQ ID NO: 43621 - DNA, 8 bp, Unknown
  misc_feature (1)..( 8): Matrix.001 file - promoters60/1021047
aaatttta

SEQ ID NO: 43622 - DNA, 6 bp, Unknown
  misc_feature (1)..( 6): Matrix.001 file - promoters60/1021047
aaactt

SEQ ID NO: 43623 - DNA, 10 bp, Unknown
  misc_feature (1)..( 10): Matrix.001 file - promoters60/1021047
agatattttg

SEQ ID NO: 43624 - DNA, 7 bp, Unknown
  misc_feature (1)..( 7): Matrix.001 file - promoters60/1021047
tttctta

SEQ ID NO: 43625 - DNA, 6 bp, Unknown
  misc_feature (1)..( 6): Matrix.001 file - promoters60/1021047
atatta

SEQ ID NO: 43626 - DNA, 6 bp, Unknown
  misc_feature (1)..( 6): Matrix.001 file - promoters60/1021047
aatgtt

SEQ ID NO: 43627 - DNA, 8 bp, Unknown
  misc_feature (1)..( 8): Matrix.001 file - promoters60/1021047
tatataaa

SEQ ID NO: 43628 - DNA, 6 bp, Unknown
  misc_feature (1)..( 6): Matrix.001 file - promoters60/1021047
taattt

SEQ ID NO: 43629 - DNA, 7 bp, Unknown
  misc_feature (1)..( 7): Matrix.001 file - promoters60/1021047
tttattt

SEQ ID NO: 43630 - DNA, 6 bp, Unknown
  misc_feature (1)..( 6): Matrix.001 file - promoters60/1021047
tcatcc

SEQ ID NO: 43631 - DNA, 6 bp, Unknown
  misc_feature (1)..( 6): Matrix.001 file - promoters60/1021047
tttttt

SEQ ID NO: 43632 - DNA, 14 bp, Unknown
  misc_feature (1)..( 14): Matrix.001 file - promoters60/1021047
aaaattaagttcaa

SEQ ID NO: 43633 - DNA, 9 bp, Unknown
  misc_feature (1)..( 9): Matrix.001 file - promoters60/1021047
aagaaaaaa

SEQ ID NO: 43634 - DNA, 6 bp, Unknown
  misc_feature (1)..( 6): Matrix.001 file - promoters60/1021047
aaaaca

SEQ ID NO: 43635 - DNA, 6 bp, Unknown
  misc_feature (1)..( 6): Matrix.001 file - promoters60/1021047
ctaaga

SEQ ID NO: 43636 - DNA, 6 bp, Unknown
  misc_feature (1)..( 6): Matrix.001 file - promoters60/1021047
aataat

SEQ ID NO: 43637 - DNA, 9 bp, Unknown
  misc_feature (1)..( 9): Matrix.001 file - promoters60/1021079
gaaaatata

SEQ ID NO: 43638 - DNA, 12 bp, Unknown
  misc_feature (1)..( 12): Matrix.001 file - promoters60/1021079
aaaattttgttt

SEQ ID NO: 43639 - DNA, 12 bp, Unknown
  misc_feature (1)..( 12): Matrix.001 file - promoters60/1021079
ttattaagataa

SEQ ID NO: 43640 - DNA, 15 bp, Unknown
  misc_feature (1)..( 15): Matrix.001 file - promoters60/1021079
atataaataatatta

SEQ ID NO: 43641 - DNA, 9 bp, Unknown
  misc_feature (1)..( 9): Matrix.001 file - promoters60/1021079
taaaaaaca

SEQ ID NO: 43642 - DNA, 9 bp, Unknown
  misc_feature (1)..( 9): Matrix.001 file - promoters60/1021079
ttgaatcac

SEQ ID NO: 43643 - DNA, 10 bp, Unknown
  misc_feature (1)..( 10): Matrix.001 file - promoters60/1021079
taataaaaac

SEQ ID NO: 43644 - DNA, 11 bp, Unknown
  misc_feature (1)..( 11): Matrix.001 file - promoters60/1021079
cctaaaatttt

SEQ ID NO: 43645 - DNA, 11 bp, Unknown
  misc_feature (1)..( 11): Matrix.001 file - promoters60/1021104
gaaattcttct

SEQ ID NO: 43646 - DNA, 6 bp, Unknown
  misc_feature (1)..( 6): Matrix.001 file - promoters60/1021104
agaagt

SEQ ID NO: 43647 - DNA, 13 bp, Unknown
  misc_feature (1)..( 13): Matrix.001 file - promoters60/1021104
agttttgtaataa

SEQ ID NO: 43648 - DNA, 7 bp, Unknown
  misc_feature (1)..( 7): Matrix.001 file - promoters60/1021136
aatgttt

SEQ ID NO: 43649 - DNA, 6 bp, Unknown
  misc_feature (1)..( 6): Matrix.001 file - promoters60/1021136
tttgtt

SEQ ID NO: 43650 - DNA, 6 bp, Unknown
  misc_feature (1)..( 6): Matrix.001 file - promoters60/1021136
ctctca

SEQ ID NO: 43651 - DNA, 6 bp, Unknown
  misc_feature (1)..( 6): Matrix.001 file - promoters60/1021136
ttcaat

SEQ ID NO: 43652 - DNA, 8 bp, Unknown
  misc_feature (1)..( 8): Matrix.001 file - promoters60/1021136
ttgttaaa

SEQ ID NO: 43653 - DNA, 7 bp, Unknown
  misc_feature (1)..( 7): Matrix.001 file - promoters60/1021136
taatatg

SEQ ID NO: 43654 - DNA, 8 bp, Unknown
  misc_feature (1)..( 8): Matrix.001 file - promoters60/1021136
aaagaaaa

SEQ ID NO: 43655 - DNA, 9 bp, Unknown
  misc_feature (1)..( 9): Matrix.001 file - promoters60/1021136
actgtattt

SEQ ID NO: 43656 - DNA, 9 bp, Unknown
  misc_feature (1)..( 9): Matrix.001 file - promoters60/1021136
ttaaaaata

SEQ ID NO: 43657 - DNA, 10 bp, Unknown
  misc_feature (1)..( 10): Matrix.001 file - promoters60/1021136
tatatattct

SEQ ID NO: 43658 - DNA, 8 bp, Unknown
  misc_feature (1)..( 8): Matrix.001 file - promoters60/1021136
aaaaacaa

SEQ ID NO: 43659 - DNA, 7 bp, Unknown
  misc_feature (1)..( 7): Matrix.001 file - promoters60/1021136
aatctaa

SEQ ID NO: 43660 - DNA, 11 bp, Unknown
  misc_feature (1)..( 11): Matrix.001 file - promoters60/1021136
aaatcaatgca

SEQ ID NO: 43661 - DNA, 6 bp, Unknown
  misc_feature (1)..( 6): Matrix.001 file - promoters60/1021136
taaatt

SEQ ID NO: 43662 - DNA, 6 bp, Unknown
  misc_feature (1)..( 6): Matrix.001 file - promoters60/1021136
aaagaa

SEQ ID NO: 43663 - DNA, 7 bp, Unknown
  misc_feature (1)..( 7): Matrix.001 file - promoters60/1021136
aatagaa

SEQ ID NO: 43664 - DNA, 8 bp, Unknown
  misc_feature (1)..( 8): Matrix.001 file - promoters60/1021136
atataaga

SEQ ID NO: 43665 - DNA, 6 bp, Unknown
  misc_feature (1)..( 6): Matrix.001 file - promoters60/1021136
aatctt

SEQ ID NO: 43666 - DNA, 7 bp, Unknown
  misc_feature (1)..( 7): Matrix.001 file - promoters60/1021136
attaatt

SEQ ID NO: 43667 - DNA, 6 bp, Unknown
  misc_feature (1)..( 6): Matrix.001 file - promoters60/1021136
aaaaat

SEQ ID NO: 43668 - DNA, 8 bp, Unknown
  misc_feature (1)..( 8): Matrix.001 file - promoters60/1021136
aaagtaaa

SEQ ID NO: 43669 - DNA, 7 bp, Unknown
  misc_feature (1)..( 7): Matrix.001 file - promoters60/1021136
atcatca

SEQ ID NO: 43670 - DNA, 10 bp, Unknown
  misc_feature (1)..( 10): Matrix.001 file - promoters60/1021148
ttattttacg

SEQ ID NO: 43671 - DNA, 10 bp, Unknown
  misc_feature (1)..( 10): Matrix.001 file - promoters60/1021148
cctaaaaaga

SEQ ID NO: 43672 - DNA, 8 bp, Unknown
  misc_feature (1)..( 8): Matrix.001 file - promoters60/1021218
gaaagaaa

SEQ ID NO: 43673 - DNA, 9 bp, Unknown
  misc_feature (1)..( 9): Matrix.001 file - promoters60/1021239
taccaaaaa

SEQ ID NO: 43674 - DNA, 9 bp, Unknown
  misc_feature (1)..( 9): Matrix.001 file - promoters60/1021239
aagaaaaat

SEQ ID NO: 43675 - DNA, 6 bp, Unknown
  misc_feature (1)..( 6): Matrix.001 file - promoters60/1021239
aaatgt

SEQ ID NO: 43676 - DNA, 7 bp, Unknown
  misc_feature (1)..( 7): Matrix.001 file - promoters60/1021239
tcagttt

SEQ ID NO: 43677 - DNA, 9 bp, Unknown
  misc_feature (1)..( 9): Matrix.001 file - promoters60/1021239
aaaaacaaa

SEQ ID NO: 43678 - DNA, 7 bp, Unknown
  misc_feature (1)..( 7): Matrix.001 file - promoters60/1021239
aaaataa

SEQ ID NO: 43679 - DNA, 7 bp, Unknown
  misc_feature (1)..( 7): Matrix.001 file - promoters60/1021239
gaaagtt

SEQ ID NO: 43680 - DNA, 8 bp, Unknown
  misc_feature (1)..( 8): Matrix.001 file - promoters60/1021239
agagccca

SEQ ID NO: 43681 - DNA, 7 bp, Unknown
  misc_feature (1)..( 7): Matrix.001 file - promoters60/1021239
cacttaa

SEQ ID NO: 43682 - DNA, 9 bp, Unknown
  misc_feature (1)..( 9): Matrix.001 file - promoters60/1021239
ttaaaagaa

SEQ ID NO: 43683 - DNA, 6 bp, Unknown
  misc_feature (1)..( 6): Matrix.001 file - promoters60/1021239
tttttc

SEQ ID NO: 43684 - DNA, 8 bp, Unknown
  misc_feature (1)..( 8): Matrix.001 file - promoters60/1021239
gcaaatgg

SEQ ID NO: 43685 - DNA, 6 bp, Unknown
  misc_feature (1)..( 6): Matrix.001 file - promoters60/1021239
agaaac

SEQ ID NO: 43686 - DNA, 8 bp, Unknown
  misc_feature (1)..( 8): Matrix.001 file - promoters60/1021239
ttacatca

SEQ ID NO: 43687 - DNA, 7 bp, Unknown
  misc_feature (1)..( 7): Matrix.001 file - promoters60/1021239
taaacaa

SEQ ID NO: 43688 - DNA, 7 bp, Unknown
  misc_feature (1)..( 7): Matrix.001 file - promoters60/1021239
tttgtta

SEQ ID NO: 43689 - DNA, 7 bp, Unknown
  misc_feature (1)..( 7): Matrix.001 file - promoters60/1021242
attggtt

SEQ ID NO: 43690 - DNA, 7 bp, Unknown
  misc_feature (1)..( 7): Matrix.001 file - promoters60/1021242
atcgtca

SEQ ID NO: 43691 - DNA, 8 bp, Unknown
  misc_feature (1)..( 8): Matrix.001 file - promoters60/1021242
gattgtcc

SEQ ID NO: 43692 - DNA, 7 bp, Unknown
  misc_feature (1)..( 7): Matrix.001 file - promoters60/1021242
ttaagaa

SEQ ID NO: 43693 - DNA, 6 bp, Unknown
  misc_feature (1)..( 6): Matrix.001 file - promoters60/1021242
tactgt

SEQ ID NO: 43694 - DNA, 6 bp, Unknown
  misc_feature (1)..( 6): Matrix.001 file - promoters60/1021242
cacaga

SEQ ID NO: 43695 - DNA, 7 bp, Unknown
  misc_feature (1)..( 7): Matrix.001 file - promoters60/1021242
taaaaaa

SEQ ID NO: 43696 - DNA, 7 bp, Unknown
  misc_feature (1)..( 7): Matrix.001 file - promoters60/1021242
attatac

SEQ ID NO: 43697 - DNA, 8 bp, Unknown
  misc_feature (1)..( 8): Matrix.001 file - promoters60/1021242
caaaattt

SEQ ID NO: 43698 - DNA, 7 bp, Unknown
  misc_feature (1)..( 7): Matrix.001 file - promoters60/1021242
caaagtc

SEQ ID NO: 43699 - DNA, 7 bp, Unknown
  misc_feature (1)..( 7): Matrix.001 file - promoters60/1021242
tataaaa

SEQ ID NO: 43700 - DNA, 7 bp, Unknown
  misc_feature (1)..( 7): Matrix.001 file - promoters60/1021242
gcccaaa

SEQ ID NO: 43701 - DNA, 6 bp, Unknown
  misc_feature (1)..( 6): Matrix.001 file - promoters60/1021246
ataata

SEQ ID NO: 43702 - DNA, 6 bp, Unknown
  misc_feature (1)..( 6): Matrix.001 file - promoters60/1021246
tttgac

SEQ ID NO: 43703 - DNA, 7 bp, Unknown
  misc_feature (1)..( 7): Matrix.001 file - promoters60/1021246
cgaatgg

SEQ ID NO: 43704 - DNA, 8 bp, Unknown
  misc_feature (1)..( 8): Matrix.001 file - promoters60/1021246
tgccattt

SEQ ID NO: 43705 - DNA, 6 bp, Unknown
  misc_feature (1)..( 6): Matrix.001 file - promoters60/1021246
cggctc

SEQ ID NO: 43706 - DNA, 11 bp, Unknown
  misc_feature (1)..( 11): Matrix.001 file - promoters60/1021246
ttagtttcata

SEQ ID NO: 43707 - DNA, 6 bp, Unknown
  misc_feature (1)..( 6): Matrix.001 file - promoters60/1021246
agtatg

SEQ ID NO: 43708 - DNA, 6 bp, Unknown
  misc_feature (1)..( 6): Matrix.001 file - promoters60/1021246
aaaaga

SEQ ID NO: 43709 - DNA, 6 bp, Unknown
  misc_feature (1)..( 6): Matrix.001 file - promoters60/1021246
agaaaa

SEQ ID NO: 43710 - DNA, 7 bp, Unknown
  misc_feature (1)..( 7): Matrix.001 file - promoters60/1021246
aaaaaag

SEQ ID NO: 43711 - DNA, 6 bp, Unknown
  misc_feature (1)..( 6): Matrix.001 file - promoters60/1021246
actcca

SEQ ID NO: 43712 - DNA, 8 bp, Unknown
  misc_feature (1)..( 8): Matrix.001 file - promoters60/1021246
aagagaag

SEQ ID NO: 43713 - DNA, 7 bp, Unknown
  misc_feature (1)..( 7): Matrix.001 file - promoters60/1021246
tatcatt

SEQ ID NO: 43714 - DNA, 7 bp, Unknown
  misc_feature (1)..( 7): Matrix.001 file - promoters60/1021246
gaatttg

SEQ ID NO: 43715 - DNA, 7 bp, Unknown
  misc_feature (1)..( 7): Matrix.001 file - promoters60/1021246
tttgatt

SEQ ID NO: 43716 - DNA, 7 bp, Unknown
  misc_feature (1)..( 7): Matrix.001 file - promoters60/1021246
ttagatc

SEQ ID NO: 43717 - DNA, 6 bp, Unknown
  misc_feature (1)..( 6): Matrix.001 file - promoters60/1021246
catttg

SEQ ID NO: 43718 - DNA, 6 bp, Unknown
  misc_feature (1)..( 6): Matrix.001 file - promoters60/1021323
taacaa

SEQ ID NO: 43719 - DNA, 6 bp, Unknown
  misc_feature (1)..( 6): Matrix.001 file - promoters60/1021323
tttatt

SEQ ID NO: 43720 - DNA, 7 bp, Unknown
  misc_feature (1)..( 7): Matrix.001 file - promoters60/1021323
attgttt

SEQ ID NO: 43721 - DNA, 9 bp, Unknown
  misc_feature (1)..( 9): Matrix.001 file - promoters60/1021323
tttctaaaa

SEQ ID NO: 43722 - DNA, 6 bp, Unknown
  misc_feature (1)..( 6): Matrix.001 file - promoters60/1021323
tgttgc

SEQ ID NO: 43723 - DNA, 6 bp, Unknown
  misc_feature (1)..( 6): Matrix.001 file - promoters60/1021323
gttaat

SEQ ID NO: 43724 - DNA, 6 bp, Unknown
  misc_feature (1)..( 6): Matrix.001 file - promoters60/1021323
atattt

SEQ ID NO: 43725 - DNA, 8 bp, Unknown
  misc_feature (1)..( 8): Matrix.001 file - promoters60/1021323
atttggtt

SEQ ID NO: 43726 - DNA, 7 bp, Unknown
  misc_feature (1)..( 7): Matrix.001 file - promoters60/1021323
aatcatg

SEQ ID NO: 43727 - DNA, 9 bp, Unknown
  misc_feature (1)..( 9): Matrix.001 file - promoters60/1021323
gaaacctaa

SEQ ID NO: 43728 - DNA, 6 bp, Unknown
  misc_feature (1)..( 6): Matrix.001 file - promoters60/1021323
taaaca

SEQ ID NO: 43729 - DNA, 6 bp, Unknown
  misc_feature (1)..( 6): Matrix.001 file - promoters60/1021323
aagagt

SEQ ID NO: 43730 - DNA, 8 bp, Unknown
  misc_feature (1)..( 8): Matrix.001 file - promoters60/1021323
acacaaag

SEQ ID NO: 43731 - DNA, 7 bp, Unknown
  misc_feature (1)..( 7): Matrix.001 file - promoters60/1021323
agtcttc

SEQ ID NO: 43732 - DNA, 6 bp, Unknown
  misc_feature (1)..( 6): Matrix.001 file - promoters60/1021323
aaaata

SEQ ID NO: 43733 - DNA, 6 bp, Unknown
  misc_feature (1)..( 6): Matrix.001 file - promoters60/1021323
accgtt

SEQ ID NO: 43734 - DNA, 6 bp, Unknown
  misc_feature (1)..( 6): Matrix.001 file - promoters60/1021323
gaatca

SEQ ID NO: 43735 - DNA, 7 bp, Unknown
  misc_feature (1)..( 7): Matrix.001 file - promoters60/1021323
tccagtt

SEQ ID NO: 43736 - DNA, 6 bp, Unknown
  misc_feature (1)..( 6): Matrix.001 file - promoters60/1021323
tttccg

SEQ ID NO: 43737 - DNA, 6 bp, Unknown
  misc_feature (1)..( 6): Matrix.001 file - promoters60/1021323
ataaat

SEQ ID NO: 43738 - DNA, 6 bp, Unknown
  misc_feature (1)..( 6): Matrix.001 file - promoters60/1021323
aaccct

SEQ ID NO: 43739 - DNA, 6 bp, Unknown
  misc_feature (1)..( 6): Matrix.001 file - promoters60/1021326
caaaat

SEQ ID NO: 43740 - DNA, 7 bp, Unknown
  misc_feature (1)..( 7): Matrix.001 file - promoters60/1021326
agaattc

SEQ ID NO: 43741 - DNA, 6 bp, Unknown
  misc_feature (1)..( 6): Matrix.001 file - promoters60/1021326
gtaatc

SEQ ID NO: 43742 - DNA, 6 bp, Unknown
  misc_feature (1)..( 6): Matrix.001 file - promoters60/1021326
acaaaa

SEQ ID NO: 43743 - DNA, 7 bp, Unknown
  misc_feature (1)..( 7): Matrix.001 file - promoters60/1021326
actaaat

SEQ ID NO: 43744 - DNA, 7 bp, Unknown
  misc_feature (1)..( 7): Matrix.001 file - promoters60/1021326
ggtagtt

SEQ ID NO: 43745 - DNA, 7 bp, Unknown
  misc_feature (1)..( 7): Matrix.001 file - promoters60/1021326
gttaatt

SEQ ID NO: 43746 - DNA, 6 bp, Unknown
  misc_feature (1)..( 6): Matrix.001 file - promoters60/1021326
tattta

SEQ ID NO: 43747 - DNA, 10 bp, Unknown
  misc_feature (1)..( 10): Matrix.001 file - promoters60/1021419
attttatata

SEQ ID NO: 43748 - DNA, 11 bp, Unknown
  misc_feature (1)..( 11): Matrix.001 file - promoters60/1021419
atctatgtgat

SEQ ID NO: 43749 - DNA, 9 bp, Unknown
  misc_feature (1)..( 9): Matrix.001 file - promoters60/1021419
ggtaaatca

SEQ ID NO: 43750 - DNA, 11 bp, Unknown
  misc_feature (1)..( 11): Matrix.001 file - promoters60/1021445
atcaaaaaagt

SEQ ID NO: 43751 - DNA, 13 bp, Unknown
  misc_feature (1)..( 13): Matrix.001 file - promoters60/1021445
agtattaaagttt

SEQ ID NO: 43752 - DNA, 13 bp, Unknown
  misc_feature (1)..( 13): Matrix.001 file - promoters60/1021445
ctaataaaacaaa

SEQ ID NO: 43753 - DNA, 8 bp, Unknown
  misc_feature (1)..( 8): Matrix.001 file - promoters60/1021445
tgggccta

SEQ ID NO: 43754 - DNA, 9 bp, Unknown
  misc_feature (1)..( 9): Matrix.001 file - promoters60/1021445
tataaaaac

SEQ ID NO: 43755 - DNA, 12 bp, Unknown
  misc_feature (1)..( 12): Matrix.001 file - promoters60/1021549
gtatatatataa

SEQ ID NO: 43756 - DNA, 10 bp, Unknown
  misc_feature (1)..( 10): Matrix.001 file - promoters60/1021549
aaatcttttg

SEQ ID NO: 43757 - DNA, 7 bp, Unknown
  misc_feature (1)..( 7): Matrix.001 file - promoters60/1021563
ctggata

SEQ ID NO: 43758 - DNA, 9 bp, Unknown
  misc_feature (1)..( 9): Matrix.001 file - promoters60/1021563
catcgtctg

SEQ ID NO: 43759 - DNA, 9 bp, Unknown
  misc_feature (1)..( 9): Matrix.001 file - promoters60/1021563
gtttagcta

SEQ ID NO: 43760 - DNA, 10 bp, Unknown
  misc_feature (1)..( 10): Matrix.001 file - promoters60/1021563
agcggcggag

SEQ ID NO: 43761 - DNA, 11 bp, Unknown
  misc_feature (1)..( 11): Matrix.001 file - promoters60/1021655
ctacgaaaatg

SEQ ID NO: 43762 - DNA, 7 bp, Unknown
  misc_feature (1)..( 7): Matrix.001 file - promoters60/1021764
aaaaaat

SEQ ID NO: 43763 - DNA, 7 bp, Unknown
  misc_feature (1)..( 7): Matrix.001 file - promoters60/1021764
atacaaa

SEQ ID NO: 43764 - DNA, 7 bp, Unknown
  misc_feature (1)..( 7): Matrix.001 file - promoters60/1021764
aaatttt

SEQ ID NO: 43765 - DNA, 6 bp, Unknown
  misc_feature (1)..( 6): Matrix.001 file - promoters60/1021764
ttttat

SEQ ID NO: 43766 - DNA, 8 bp, Unknown
  misc_feature (1)..( 8): Matrix.001 file - promoters60/1021764
ataacatt

SEQ ID NO: 43767 - DNA, 6 bp, Unknown
  misc_feature (1)..( 6): Matrix.001 file - promoters60/1021764
ttaatt

SEQ ID NO: 43768 - DNA, 8 bp, Unknown
  misc_feature (1)..( 8): Matrix.001 file - promoters60/1021764
atatcaaa

SEQ ID NO: 43769 - DNA, 6 bp, Unknown
  misc_feature (1)..( 6): Matrix.001 file - promoters60/1021764
tttgaa

SEQ ID NO: 43770 - DNA, 8 bp, Unknown
  misc_feature (1)..( 8): Matrix.001 file - promoters60/1021764
aacattca

SEQ ID NO: 43771 - DNA, 6 bp, Unknown
  misc_feature (1)..( 6): Matrix.001 file - promoters60/1021764
ctctat

SEQ ID NO: 43772 - DNA, 8 bp, Unknown
  misc_feature (1)..( 8): Matrix.001 file - promoters60/1021764
atttagta

SEQ ID NO: 43773 - DNA, 7 bp, Unknown
  misc_feature (1)..( 7): Matrix.001 file - promoters60/1021764
taaatat

SEQ ID NO: 43774 - DNA, 7 bp, Unknown
  misc_feature (1)..( 7): Matrix.001 file - promoters60/1021764
gtttctt

SEQ ID NO: 43775 - DNA, 8 bp, Unknown
  misc_feature (1)..( 8): Matrix.001 file - promoters60/1021764
caaacaca

SEQ ID NO: 43776 - DNA, 6 bp, Unknown
  misc_feature (1)..( 6): Matrix.001 file - promoters60/1021764
tatttt

SEQ ID NO: 43777 - DNA, 11 bp, Unknown
  misc_feature (1)..( 11): Matrix.001 file - promoters60/1021764
ttttgtatttt

SEQ ID NO: 43778 - DNA, 6 bp, Unknown
  misc_feature (1)..( 6): Matrix.001 file - promoters60/1021764
ttattt

SEQ ID NO: 43779 - DNA, 8 bp, Unknown
  misc_feature (1)..( 8): Matrix.001 file - promoters60/1021764
ctacaaac

SEQ ID NO: 43780 - DNA, 6 bp, Unknown
  misc_feature (1)..( 6): Matrix.001 file - promoters60/1021764
ctaaaa

SEQ ID NO: 43781 - DNA, 10 bp, Unknown
  misc_feature (1)..( 10): Matrix.001 file - promoters60/1021764
aaaatattac

SEQ ID NO: 43782 - DNA, 6 bp, Unknown
  misc_feature (1)..( 6): Matrix.001 file - promoters60/1021764
caataa

SEQ ID NO: 43783 - DNA, 7 bp, Unknown
  misc_feature (1)..( 7): Matrix.001 file - promoters60/1021764
ctattta

SEQ ID NO: 43784 - DNA, 7 bp, Unknown
  misc_feature (1)..( 7): Matrix.001 file - promoters60/1021764
aaagata

SEQ ID NO: 43785 - DNA, 7 bp, Unknown
  misc_feature (1)..( 7): Matrix.001 file - promoters60/1021764
ttaatag

SEQ ID NO: 43786 - DNA, 7 bp, Unknown
  misc_feature (1)..( 7): Matrix.001 file - promoters60/1021764
ttagttt

SEQ ID NO: 43787 - DNA, 7 bp, Unknown
  misc_feature (1)..( 7): Matrix.001 file - promoters60/1021764
agagtct

SEQ ID NO: 43788 - DNA, 6 bp, Unknown
  misc_feature (1)..( 6): Matrix.001 file - promoters60/1021764
acaaat

SEQ ID NO: 43789 - DNA, 7 bp, Unknown
  misc_feature (1)..( 7): Matrix.001 file - promoters60/1021764
cttcttt

SEQ ID NO: 43790 - DNA, 7 bp, Unknown
  misc_feature (1)..( 7): Matrix.001 file - promoters60/1021833
taaatta

SEQ ID NO: 43791 - DNA, 7 bp, Unknown
  misc_feature (1)..( 7): Matrix.001 file - promoters60/1021833
atttttt

SEQ ID NO: 43792 - DNA, 9 bp, Unknown
  misc_feature (1)..( 9): Matrix.001 file - promoters60/1021833
aaaaaaatt

SEQ ID NO: 43793 - DNA, 9 bp, Unknown
  misc_feature (1)..( 9): Matrix.001 file - promoters60/1021833
ttatatatt

SEQ ID NO: 43794 - DNA, 8 bp, Unknown
  misc_feature (1)..( 8): Matrix.001 file - promoters60/1021833
aattttta

SEQ ID NO: 43795 - DNA, 10 bp, Unknown
  misc_feature (1)..( 10): Matrix.001 file - promoters60/1021833
tttttacttt

SEQ ID NO: 43796 - DNA, 12 bp, Unknown
  misc_feature (1)..( 12): Matrix.001 file - promoters60/1021862
ataaaattttaa

SEQ ID NO: 43797 - DNA, 10 bp, Unknown
  misc_feature (1)..( 10): Matrix.001 file - promoters60/1021862
ttttaattta

SEQ ID NO: 43798 - DNA, 14 bp, Unknown
  misc_feature (1)..( 14): Matrix.001 file - promoters60/1021862
aaaaaaaaaaaaaa

SEQ ID NO: 43799 - DNA, 9 bp, Unknown
  misc_feature (1)..( 9): Matrix.001 file - promoters60/1021870
aaaatctgg

SEQ ID NO: 43800 - DNA, 12 bp, Unknown
  misc_feature (1)..( 12): Matrix.001 file - promoters60/1021870
attaccaaaatt

SEQ ID NO: 43801 - DNA, 11 bp, Unknown
  misc_feature (1)..( 11): Matrix.001 file - promoters60/1021987
ttttgctaaaa

SEQ ID NO: 43802 - DNA, 9 bp, Unknown
  misc_feature (1)..( 9): Matrix.001 file - promoters60/1021987
atttgattt

SEQ ID NO: 43803 - DNA, 7 bp, Unknown
  misc_feature (1)..( 7): Matrix.001 file - promoters60/1021987
tattata

SEQ ID NO: 43804 - DNA, 8 bp, Unknown
  misc_feature (1)..( 8): Matrix.001 file - promoters60/1021987
caaacctg

SEQ ID NO: 43805 - DNA, 8 bp, Unknown
  misc_feature (1)..( 8): Matrix.001 file - promoters60/1021987
agatacag

SEQ ID NO: 43806 - DNA, 9 bp, Unknown
  misc_feature (1)..( 9): Matrix.001 file - promoters60/1021987
tttcaagtt

SEQ ID NO: 43807 - DNA, 8 bp, Unknown
  misc_feature (1)..( 8): Matrix.001 file - promoters60/1022111
gcggcaac

SEQ ID NO: 43808 - DNA, 7 bp, Unknown
  misc_feature (1)..( 7): Matrix.001 file - promoters60/1022111
tacattt

SEQ ID NO: 43809 - DNA, 9 bp, Unknown
  misc_feature (1)..( 9): Matrix.001 file - promoters60/1022111
ttattctaa

SEQ ID NO: 43810 - DNA, 8 bp, Unknown
  misc_feature (1)..( 8): Matrix.001 file - promoters60/1022111
caaagtat

SEQ ID NO: 43811 - DNA, 8 bp, Unknown
  misc_feature (1)..( 8): Matrix.001 file - promoters60/1022111
ttatttaa

SEQ ID NO: 43812 - DNA, 7 bp, Unknown
  misc_feature (1)..( 7): Matrix.001 file - promoters60/1022111
agaaatt

SEQ ID NO: 43813 - DNA, 7 bp, Unknown
  misc_feature (1)..( 7): Matrix.001 file - promoters60/1022111
tctaaaa

SEQ ID NO: 43814 - DNA, 6 bp, Unknown
  misc_feature (1)..( 6): Matrix.001 file - promoters60/1022111
ttagta

SEQ ID NO: 43815 - DNA, 9 bp, Unknown
  misc_feature (1)..( 9): Matrix.001 file - promoters60/1022111
atcatatat

SEQ ID NO: 43816 - DNA, 8 bp, Unknown
  misc_feature (1)..( 8): Matrix.001 file - promoters60/1022111
ttaataat

SEQ ID NO: 43817 - DNA, 8 bp, Unknown
  misc_feature (1)..( 8): Matrix.001 file - promoters60/1022111
taacatat

SEQ ID NO: 43818 - DNA, 7 bp, Unknown
  misc_feature (1)..( 7): Matrix.001 file - promoters60/1022111
aataaac

SEQ ID NO: 43819 - DNA, 6 bp, Unknown
  misc_feature (1)..( 6): Matrix.001 file - promoters60/1022111
tatgca

SEQ ID NO: 43820 - DNA, 13 bp, Unknown
  misc_feature (1)..( 13): Matrix.001 file - promoters60/1022131
tatttaaaagaga

SEQ ID NO: 43821 - DNA, 12 bp, Unknown
  misc_feature (1)..( 12): Matrix.001 file - promoters60/1022131
taatattttatt

SEQ ID NO: 43822 - DNA, 9 bp, Unknown
  misc_feature (1)..( 9): Matrix.001 file - promoters60/1022135
ctcttactg

SEQ ID NO: 43823 - DNA, 8 bp, Unknown
  misc_feature (1)..( 8): Matrix.001 file - promoters60/1022135
agagtttc

SEQ ID NO: 43824 - DNA, 7 bp, Unknown
  misc_feature (1)..( 7): Matrix.001 file - promoters60/1022170
tgggcct

SEQ ID NO: 43825 - DNA, 11 bp, Unknown
  misc_feature (1)..( 11): Matrix.001 file - promoters60/1022170
ctagagaaaaa

SEQ ID NO: 43826 - DNA, 8 bp, Unknown
  misc_feature (1)..( 8): Matrix.001 file - promoters60/1022170
gagaaaaa

SEQ ID NO: 43827 - DNA, 8 bp, Unknown
  misc_feature (1)..( 8): Matrix.001 file - promoters60/1022192
aaacgcat

SEQ ID NO: 43828 - DNA, 7 bp, Unknown
  misc_feature (1)..( 7): Matrix.001 file - promoters60/1022192
aaaattg

SEQ ID NO: 43829 - DNA, 7 bp, Unknown
  misc_feature (1)..( 7): Matrix.001 file - promoters60/1022192
aaaacta

SEQ ID NO: 43830 - DNA, 7 bp, Unknown
  misc_feature (1)..( 7): Matrix.001 file - promoters60/1022192
ttgttta

SEQ ID NO: 43831 - DNA, 6 bp, Unknown
  misc_feature (1)..( 6): Matrix.001 file - promoters60/1022192
aaacta

SEQ ID NO: 43832 - DNA, 6 bp, Unknown
  misc_feature (1)..( 6): Matrix.001 file - promoters60/1022192
taaaaa

SEQ ID NO: 43833 - DNA, 7 bp, Unknown
  misc_feature (1)..( 7): Matrix.001 file - promoters60/1022192
tcaaagt

SEQ ID NO: 43834 - DNA, 8 bp, Unknown
  misc_feature (1)..( 8): Matrix.001 file - promoters60/1022192
aaaatgtc

SEQ ID NO: 43835 - DNA, 8 bp, Unknown
  misc_feature (1)..( 8): Matrix.001 file - promoters60/1022192
tttgcttc

SEQ ID NO: 43836 - DNA, 6 bp, Unknown
  misc_feature (1)..( 6): Matrix.001 file - promoters60/1022192
tattta

SEQ ID NO: 43837 - DNA, 6 bp, Unknown
  misc_feature (1)..( 6): Matrix.001 file - promoters60/1022192
aattta

SEQ ID NO: 43838 - DNA, 6 bp, Unknown
  misc_feature (1)..( 6): Matrix.001 file - promoters60/1022192
aactta

SEQ ID NO: 43839 - DNA, 9 bp, Unknown
  misc_feature (1)..( 9): Matrix.001 file - promoters60/1022192
cttttgaaa

SEQ ID NO: 43840 - DNA, 6 bp, Unknown
  misc_feature (1)..( 6): Matrix.001 file - promoters60/1022192
tatatt

SEQ ID NO: 43841 - DNA, 10 bp, Unknown
  misc_feature (1)..( 10): Matrix.001 file - promoters60/1022192
ttctaatcaa

SEQ ID NO: 43842 - DNA, 8 bp, Unknown
  misc_feature (1)..( 8): Matrix.001 file - promoters60/1022192
ctaaaaag

SEQ ID NO: 43843 - DNA, 7 bp, Unknown
  misc_feature (1)..( 7): Matrix.001 file - promoters60/1022245
aaaatca

SEQ ID NO: 43844 - DNA, 7 bp, Unknown
  misc_feature (1)..( 7): Matrix.001 file - promoters60/1022252
ggcactt

SEQ ID NO: 43845 - DNA, 8 bp, Unknown
  misc_feature (1)..( 8): Matrix.001 file - promoters60/1022252
ttatcttt

SEQ ID NO: 43846 - DNA, 7 bp, Unknown
  misc_feature (1)..( 7): Matrix.001 file - promoters60/1022252
tttgaag

SEQ ID NO: 43847 - DNA, 8 bp, Unknown
  misc_feature (1)..( 8): Matrix.001 file - promoters60/1022252
taaaaatt

SEQ ID NO: 43848 - DNA, 6 bp, Unknown
  misc_feature (1)..( 6): Matrix.001 file - promoters60/1022252
tacaaa

SEQ ID NO: 43849 - DNA, 6 bp, Unknown
  misc_feature (1)..( 6): Matrix.001 file - promoters60/1022252
agaaaa

SEQ ID NO: 43850 - DNA, 6 bp, Unknown
  misc_feature (1)..( 6): Matrix.001 file - promoters60/1022252
aaagta

SEQ ID NO: 43851 - DNA, 8 bp, Unknown
  misc_feature (1)..( 8): Matrix.001 file - promoters60/1022252
aaaaaaat

SEQ ID NO: 43852 - DNA, 7 bp, Unknown
  misc_feature (1)..( 7): Matrix.001 file - promoters60/1022252
aaaatta

SEQ ID NO: 43853 - DNA, 10 bp, Unknown
  misc_feature (1)..( 10): Matrix.001 file - promoters60/1022252
taaatctatt

SEQ ID NO: 43854 - DNA, 7 bp, Unknown
  misc_feature (1)..( 7): Matrix.001 file - promoters60/1022252
ataaaag

SEQ ID NO: 43855 - DNA, 6 bp, Unknown
  misc_feature (1)..( 6): Matrix.001 file - promoters60/1022252
aaaaag

SEQ ID NO: 43856 - DNA, 7 bp, Unknown
  misc_feature (1)..( 7): Matrix.001 file - promoters60/1022252
aattatt

SEQ ID NO: 43857 - DNA, 6 bp, Unknown
  misc_feature (1)..( 6): Matrix.001 file - promoters60/1022252
atggaa

SEQ ID NO: 43858 - DNA, 6 bp, Unknown
  misc_feature (1)..( 6): Matrix.001 file - promoters60/1022252
ttattt

SEQ ID NO: 43859 - DNA, 6 bp, Unknown
  misc_feature (1)..( 6): Matrix.001 file - promoters60/1022252
cacaat

SEQ ID NO: 43860 - DNA, 7 bp, Unknown
  misc_feature (1)..( 7): Matrix.001 file - promoters60/1022252
aatcaca

SEQ ID NO: 43861 - DNA, 6 bp, Unknown
  misc_feature (1)..( 6): Matrix.001 file - promoters60/1022252
ttttaa

SEQ ID NO: 43862 - DNA, 7 bp, Unknown
  misc_feature (1)..( 7): Matrix.001 file - promoters60/1022252
aagattt

SEQ ID NO: 43863 - DNA, 8 bp, Unknown
  misc_feature (1)..( 8): Matrix.001 file - promoters60/1022252
aacatttt

SEQ ID NO: 43864 - DNA, 11 bp, Unknown
  misc_feature (1)..( 11): Matrix.001 file - promoters60/1022252
atataaacaaa

SEQ ID NO: 43865 - DNA, 7 bp, Unknown
  misc_feature (1)..( 7): Matrix.001 file - promoters60/1022252
ccaaaaa

SEQ ID NO: 43866 - DNA, 7 bp, Unknown
  misc_feature (1)..( 7): Matrix.001 file - promoters60/1022256
aaaagaa

SEQ ID NO: 43867 - DNA, 11 bp, Unknown
  misc_feature (1)..( 11): Matrix.001 file - promoters60/1022256
aaatattaaat

SEQ ID NO: 43868 - DNA, 10 bp, Unknown
  misc_feature (1)..( 10): Matrix.001 file - promoters60/1022256
agataatgag

SEQ ID NO: 43869 - DNA, 8 bp, Unknown
  misc_feature (1)..( 8): Matrix.001 file - promoters60/1022256
ttttatca

SEQ ID NO: 43870 - DNA, 9 bp, Unknown
  misc_feature (1)..( 9): Matrix.001 file - promoters60/1022256
tatataaat

SEQ ID NO: 43871 - DNA, 7 bp, Unknown
  misc_feature (1)..( 7): Matrix.001 file - promoters60/1022256
aaaacta

SEQ ID NO: 43872 - DNA, 6 bp, Unknown
  misc_feature (1)..( 6): Matrix.001 file - promoters60/1022268
aaacca

SEQ ID NO: 43873 - DNA, 6 bp, Unknown
  misc_feature (1)..( 6): Matrix.001 file - promoters60/1022268
aagatt

SEQ ID NO: 43874 - DNA, 9 bp, Unknown
  misc_feature (1)..( 9): Matrix.001 file - promoters60/1022268
ctccgccga

SEQ ID NO: 43875 - DNA, 6 bp, Unknown
  misc_feature (1)..( 6): Matrix.001 file - promoters60/1022268
tcacca

SEQ ID NO: 43876 - DNA, 6 bp, Unknown
  misc_feature (1)..( 6): Matrix.001 file - promoters60/1022268
aaaccg

SEQ ID NO: 43877 - DNA, 9 bp, Unknown
  misc_feature (1)..( 9): Matrix.001 file - promoters60/1022268
ctaaaccgg

SEQ ID NO: 43878 - DNA, 8 bp, Unknown
  misc_feature (1)..( 8): Matrix.001 file - promoters60/1022268
atcactgg

SEQ ID NO: 43879 - DNA, 6 bp, Unknown
  misc_feature (1)..( 6): Matrix.001 file - promoters60/1022268
tctaca

SEQ ID NO: 43880 - DNA, 6 bp, Unknown
  misc_feature (1)..( 6): Matrix.001 file - promoters60/1022268
tctccg

SEQ ID NO: 43881 - DNA, 7 bp, Unknown
  misc_feature (1)..( 7): Matrix.001 file - promoters60/1022268
gatacca

SEQ ID NO: 43882 - DNA, 7 bp, Unknown
  misc_feature (1)..( 7): Matrix.001 file - promoters60/1022292
aaaaatt

SEQ ID NO: 43883 - DNA, 12 bp, Unknown
  misc_feature (1)..( 12): Matrix.001 file - promoters60/1022292
tttaaaaactac

SEQ ID NO: 43884 - DNA, 9 bp, Unknown
  misc_feature (1)..( 9): Matrix.001 file - promoters60/1022296
cagaaggaa

SEQ ID NO: 43885 - DNA, 11 bp, Unknown
  misc_feature (1)..( 11): Matrix.001 file - promoters60/1022324
caattctcaaa

SEQ ID NO: 43886 - DNA, 6 bp, Unknown
  misc_feature (1)..( 6): Matrix.001 file - promoters60/1022383
attgcc

SEQ ID NO: 43887 - DNA, 6 bp, Unknown
  misc_feature (1)..( 6): Matrix.001 file - promoters60/1022383
tttcaa

SEQ ID NO: 43888 - DNA, 6 bp, Unknown
  misc_feature (1)..( 6): Matrix.001 file - promoters60/1022383
ctcatt

SEQ ID NO: 43889 - DNA, 7 bp, Unknown
  misc_feature (1)..( 7): Matrix.001 file - promoters60/1022383
ctcctcc

SEQ ID NO: 43890 - DNA, 6 bp, Unknown
  misc_feature (1)..( 6): Matrix.001 file - promoters60/1022383
taagtt

SEQ ID NO: 43891 - DNA, 9 bp, Unknown
  misc_feature (1)..( 9): Matrix.001 file - promoters60/1022383
caaaatgaa

SEQ ID NO: 43892 - DNA, 6 bp, Unknown
  misc_feature (1)..( 6): Matrix.001 file - promoters60/1022383
tatcca

SEQ ID NO: 43893 - DNA, 7 bp, Unknown
  misc_feature (1)..( 7): Matrix.001 file - promoters60/1022383
cttgatt

SEQ ID NO: 43894 - DNA, 7 bp, Unknown
  misc_feature (1)..( 7): Matrix.001 file - promoters60/1022383
caccaca

SEQ ID NO: 43895 - DNA, 7 bp, Unknown
  misc_feature (1)..( 7): Matrix.001 file - promoters60/1022383
agatctc

SEQ ID NO: 43896 - DNA, 6 bp, Unknown
  misc_feature (1)..( 6): Matrix.001 file - promoters60/1022383
aattaa

SEQ ID NO: 43897 - DNA, 6 bp, Unknown
  misc_feature (1)..( 6): Matrix.001 file - promoters60/1022383
tactaa

SEQ ID NO: 43898 - DNA, 6 bp, Unknown
  misc_feature (1)..( 6): Matrix.001 file - promoters60/1022383
aaaata

SEQ ID NO: 43899 - DNA, 8 bp, Unknown
  misc_feature (1)..( 8): Matrix.001 file - promoters60/1022383
ttaaattt

SEQ ID NO: 43900 - DNA, 8 bp, Unknown
  misc_feature (1)..( 8): Matrix.001 file - promoters60/1022383
ttcaaaaa

SEQ ID NO: 43901 - DNA, 9 bp, Unknown
  misc_feature (1)..( 9): Matrix.001 file - promoters60/1022401
gtatataaa

SEQ ID NO: 43902 - DNA, 8 bp, Unknown
  misc_feature (1)..( 8): Matrix.001 file - promoters60/1022401
tcataaag

SEQ ID NO: 43903 - DNA, 8 bp, Unknown
  misc_feature (1)..( 8): Matrix.001 file - promoters60/1022401
atttcttt

SEQ ID NO: 43904 - DNA, 17 bp, Unknown
  misc_feature (1)..( 17): Matrix.001 file - promoters60/1022401
taaagcccatttttaag

SEQ ID NO: 43905 - DNA, 7 bp, Unknown
  misc_feature (1)..( 7): Matrix.001 file - promoters60/1022474
gcacagc

SEQ ID NO: 43906 - DNA, 8 bp, Unknown
  misc_feature (1)..( 8): Matrix.001 file - promoters60/1022474
aaatcggg

SEQ ID NO: 43907 - DNA, 7 bp, Unknown
  misc_feature (1)..( 7): Matrix.001 file - promoters60/1022474
ttaaagt

SEQ ID NO: 43908 - DNA, 9 bp, Unknown
  misc_feature (1)..( 9): Matrix.001 file - promoters60/1022474
atggctgaa

SEQ ID NO: 43909 - DNA, 7 bp, Unknown
  misc_feature (1)..( 7): Matrix.001 file - promoters60/1022474
aagaaaa

SEQ ID NO: 43910 - DNA, 6 bp, Unknown
  misc_feature (1)..( 6): Matrix.001 file - promoters60/1022546
actgtt

SEQ ID NO: 43911 - DNA, 8 bp, Unknown
  misc_feature (1)..( 8): Matrix.001 file - promoters60/1022546
aagatttt

SEQ ID NO: 43912 - DNA, 6 bp, Unknown
  misc_feature (1)..( 6): Matrix.001 file - promoters60/1022546
gtttag

SEQ ID NO: 43913 - DNA, 6 bp, Unknown
  misc_feature (1)..( 6): Matrix.001 file - promoters60/1022546
ttattt

SEQ ID NO: 43914 - DNA, 6 bp, Unknown
  misc_feature (1)..( 6): Matrix.001 file - promoters60/1022546
tttgac

SEQ ID NO: 43915 - DNA, 8 bp, Unknown
  misc_feature (1)..( 8): Matrix.001 file - promoters60/1022546
caaccaat

SEQ ID NO: 43916 - DNA, 7 bp, Unknown
  misc_feature (1)..( 7): Matrix.001 file - promoters60/1022546
aatttca

SEQ ID NO: 43917 - DNA, 7 bp, Unknown
  misc_feature (1)..( 7): Matrix.001 file - promoters60/1022546
atctcaa

SEQ ID NO: 43918 - DNA, 6 bp, Unknown
  misc_feature (1)..( 6): Matrix.001 file - promoters60/1022546
ctttat

SEQ ID NO: 43919 - DNA, 7 bp, Unknown
  misc_feature (1)..( 7): Matrix.001 file - promoters60/1022546
ttcacac

SEQ ID NO: 43920 - DNA, 7 bp, Unknown
  misc_feature (1)..( 7): Matrix.001 file - promoters60/1022546
tttccgt

SEQ ID NO: 43921 - DNA, 7 bp, Unknown
  misc_feature (1)..( 7): Matrix.001 file - promoters60/1022546
accaaaa

SEQ ID NO: 43922 - DNA, 9 bp, Unknown
  misc_feature (1)..( 9): Matrix.001 file - promoters60/1022546
atttcacat

SEQ ID NO: 43923 - DNA, 6 bp, Unknown
  misc_feature (1)..( 6): Matrix.001 file - promoters60/1022546
aaccac

SEQ ID NO: 43924 - DNA, 6 bp, Unknown
  misc_feature (1)..( 6): Matrix.001 file - promoters60/1022546
aggctt

SEQ ID NO: 43925 - DNA, 6 bp, Unknown
  misc_feature (1)..( 6): Matrix.001 file - promoters60/1022546
caaaaa

SEQ ID NO: 43926 - DNA, 7 bp, Unknown
  misc_feature (1)..( 7): Matrix.001 file - promoters60/1022546
taaaata

SEQ ID NO: 43927 - DNA, 6 bp, Unknown
  misc_feature (1)..( 6): Matrix.001 file - promoters60/1022546
aaaaaa

SEQ ID NO: 43928 - DNA, 6 bp, Unknown
  misc_feature (1)..( 6): Matrix.001 file - promoters60/1022546
ctctct

SEQ ID NO: 43929 - DNA, 7 bp, Unknown
  misc_feature (1)..( 7): Matrix.001 file - promoters60/1022546
tctattt

SEQ ID NO: 43930 - DNA, 6 bp, Unknown
  misc_feature (1)..( 6): Matrix.001 file - promoters60/1022546
tttaca

SEQ ID NO: 43931 - DNA, 6 bp, Unknown
  misc_feature (1)..( 6): Matrix.001 file - promoters60/1022546
caaact

SEQ ID NO: 43932 - DNA, 6 bp, Unknown
  misc_feature (1)..( 6): Matrix.001 file - promoters60/1022546
ttcaaa

SEQ ID NO: 43933 - DNA, 6 bp, Unknown
  misc_feature (1)..( 6): Matrix.001 file - promoters60/1022586
tttttg

SEQ ID NO: 43934 - DNA, 8 bp, Unknown
  misc_feature (1)..( 8): Matrix.001 file - promoters60/1022586
tttatctt

SEQ ID NO: 43935 - DNA, 6 bp, Unknown
  misc_feature (1)..( 6): Matrix.001 file - promoters60/1022586
ttttat

SEQ ID NO: 43936 - DNA, 6 bp, Unknown
  misc_feature (1)..( 6): Matrix.001 file - promoters60/1022586
atttta

SEQ ID NO: 43937 - DNA, 6 bp, Unknown
  misc_feature (1)..( 6): Matrix.001 file - promoters60/1022586
aaattc

SEQ ID NO: 43938 - DNA, 6 bp, Unknown
  misc_feature (1)..( 6): Matrix.001 file - promoters60/1022586
agagag

SEQ ID NO: 43939 - DNA, 7 bp, Unknown
  misc_feature (1)..( 7): Matrix.001 file - promoters60/1022586
acaattc

SEQ ID NO: 43940 - DNA, 9 bp, Unknown
  misc_feature (1)..( 9): Matrix.001 file - promoters60/1022586
ttgaataat

SEQ ID NO: 43941 - DNA, 8 bp, Unknown
  misc_feature (1)..( 8): Matrix.001 file - promoters60/1022586
aaaaatat

SEQ ID NO: 43942 - DNA, 8 bp, Unknown
  misc_feature (1)..( 8): Matrix.001 file - promoters60/1022586
acgactct

SEQ ID NO: 43943 - DNA, 6 bp, Unknown
  misc_feature (1)..( 6): Matrix.001 file - promoters60/1022586
tataaa

SEQ ID NO: 43944 - DNA, 7 bp, Unknown
  misc_feature (1)..( 7): Matrix.001 file - promoters60/1022586
tttctct

SEQ ID NO: 43945 - DNA, 6 bp, Unknown
  misc_feature (1)..( 6): Matrix.001 file - promoters60/1022586
ttttct

SEQ ID NO: 43946 - DNA, 7 bp, Unknown
  misc_feature (1)..( 7): Matrix.001 file - promoters60/1022586
aaaatcc

SEQ ID NO: 43947 - DNA, 6 bp, Unknown
  misc_feature (1)..( 6): Matrix.001 file - promoters60/1022586
atatct

SEQ ID NO: 43948 - DNA, 7 bp, Unknown
  misc_feature (1)..( 7): Matrix.001 file - promoters60/1022586
ttacttt

SEQ ID NO: 43949 - DNA, 7 bp, Unknown
  misc_feature (1)..( 7): Matrix.001 file - promoters60/1022586
aacccaa

SEQ ID NO: 43950 - DNA, 7 bp, Unknown
  misc_feature (1)..( 7): Matrix.001 file - promoters60/1022586
tttaaag

SEQ ID NO: 43951 - DNA, 7 bp, Unknown
  misc_feature (1)..( 7): Matrix.001 file - promoters60/1022586
aatattt

SEQ ID NO: 43952 - DNA, 6 bp, Unknown
  misc_feature (1)..( 6): Matrix.001 file - promoters60/1022586
aaaaag

SEQ ID NO: 43953 - DNA, 6 bp, Unknown
  misc_feature (1)..( 6): Matrix.001 file - promoters60/1022586
tttgta

SEQ ID NO: 43954 - DNA, 8 bp, Unknown
  misc_feature (1)..( 8): Matrix.001 file - promoters60/1022598
taaatatc

SEQ ID NO: 43955 - DNA, 11 bp, Unknown
  misc_feature (1)..( 11): Matrix.001 file - promoters60/1022598
tatcagtgtct

SEQ ID NO: 43956 - DNA, 8 bp, Unknown
  misc_feature (1)..( 8): Matrix.001 file - promoters60/1022610
taattatt

SEQ ID NO: 43957 - DNA, 13 bp, Unknown
  misc_feature (1)..( 13): Matrix.001 file - promoters60/1022610
aaaaaatttataa

SEQ ID NO: 43958 - DNA, 13 bp, Unknown
  misc_feature (1)..( 13): Matrix.001 file - promoters60/1022662
ttcgttttaattt

SEQ ID NO: 43959 - DNA, 14 bp, Unknown
  misc_feature (1)..( 14): Matrix.001 file - promoters60/1022662
aaaaccatccaatt

SEQ ID NO: 43960 - DNA, 7 bp, Unknown
  misc_feature (1)..( 7): Matrix.001 file - promoters60/1022687
ttagtaa

SEQ ID NO: 43961 - DNA, 11 bp, Unknown
  misc_feature (1)..( 11): Matrix.001 file - promoters60/1022687
aaaattattaa

SEQ ID NO: 43962 - DNA, 11 bp, Unknown
  misc_feature (1)..( 11): Matrix.001 file - promoters60/1022687
gaaatattaga

SEQ ID NO: 43963 - DNA, 8 bp, Unknown
  misc_feature (1)..( 8): Matrix.001 file - promoters60/1022687
caatatta

SEQ ID NO: 43964 - DNA, 6 bp, Unknown
  misc_feature (1)..( 6): Matrix.001 file - promoters60/1022810
ttttaa

SEQ ID NO: 43965 - DNA, 6 bp, Unknown
  misc_feature (1)..( 6): Matrix.001 file - promoters60/1022810
taatat

SEQ ID NO: 43966 - DNA, 8 bp, Unknown
  misc_feature (1)..( 8): Matrix.001 file - promoters60/1022810
aaacacaa

SEQ ID NO: 43967 - DNA, 7 bp, Unknown
  misc_feature (1)..( 7): Matrix.001 file - promoters60/1022810
ataacaa

SEQ ID NO: 43968 - DNA, 7 bp, Unknown
  misc_feature (1)..( 7): Matrix.001 file - promoters60/1022810
tctgcga

SEQ ID NO: 43969 - DNA, 7 bp, Unknown
  misc_feature (1)..( 7): Matrix.001 file - promoters60/1022810
aatcatt

SEQ ID NO: 43970 - DNA, 7 bp, Unknown
  misc_feature (1)..( 7): Matrix.001 file - promoters60/1022810
ttacaat

SEQ ID NO: 43971 - DNA, 7 bp, Unknown
  misc_feature (1)..( 7): Matrix.001 file - promoters60/1022810
aatctgt

SEQ ID NO: 43972 - DNA, 7 bp, Unknown
  misc_feature (1)..( 7): Matrix.001 file - promoters60/1022824
agaagca

SEQ ID NO: 43973 - DNA, 8 bp, Unknown
  misc_feature (1)..( 8): Matrix.001 file - promoters60/1022824
tttgattt

SEQ ID NO: 43974 - DNA, 9 bp, Unknown
  misc_feature (1)..( 9): Matrix.001 file - promoters60/1022824
agttccata

SEQ ID NO: 43975 - DNA, 7 bp, Unknown
  misc_feature (1)..( 7): Matrix.001 file - promoters60/1022824
tctttta

SEQ ID NO: 43976 - DNA, 9 bp, Unknown
  misc_feature (1)..( 9): Matrix.001 file - promoters60/1022824
tctctcgtg

SEQ ID NO: 43977 - DNA, 6 bp, Unknown
  misc_feature (1)..( 6): Matrix.001 file - promoters60/1022824
tagact

SEQ ID NO: 43978 - DNA, 6 bp, Unknown
  misc_feature (1)..( 6): Matrix.001 file - promoters60/1022824
atgttg

SEQ ID NO: 43979 - DNA, 6 bp, Unknown
  misc_feature (1)..( 6): Matrix.001 file - promoters60/1022824
gtggtt

SEQ ID NO: 43980 - DNA, 6 bp, Unknown
  misc_feature (1)..( 6): Matrix.001 file - promoters60/1022824
tacaga

SEQ ID NO: 43981 - DNA, 7 bp, Unknown
  misc_feature (1)..( 7): Matrix.001 file - promoters60/1022824
ataaact

SEQ ID NO: 43982 - DNA, 7 bp, Unknown
  misc_feature (1)..( 7): Matrix.001 file - promoters60/1022824
gagaaga

SEQ ID NO: 43983 - DNA, 7 bp, Unknown
  misc_feature (1)..( 7): Matrix.001 file - promoters60/1022824
aaacagc

SEQ ID NO: 43984 - DNA, 7 bp, Unknown
  misc_feature (1)..( 7): Matrix.001 file - promoters60/1022824
ttctttg

SEQ ID NO: 43985 - DNA, 7 bp, Unknown
  misc_feature (1)..( 7): Matrix.001 file - promoters60/1022824
actaatt

SEQ ID NO: 43986 - DNA, 6 bp, Unknown
  misc_feature (1)..( 6): Matrix.001 file - promoters60/1022824
tcgttt

SEQ ID NO: 43987 - DNA, 10 bp, Unknown
  misc_feature (1)..( 10): Matrix.001 file - promoters60/1022932
catatgtagt

SEQ ID NO: 43988 - DNA, 10 bp, Unknown
  misc_feature (1)..( 10): Matrix.001 file - promoters60/1022932
gatctaatga

SEQ ID NO: 43989 - DNA, 8 bp, Unknown
  misc_feature (1)..( 8): Matrix.001 file - promoters60/1022983
cattaaaa

SEQ ID NO: 43990 - DNA, 8 bp, Unknown
  misc_feature (1)..( 8): Matrix.001 file - promoters60/1022983
tataaaaa

SEQ ID NO: 43991 - DNA, 12 bp, Unknown
  misc_feature (1)..( 12): Matrix.001 file - promoters60/1022983
aataaaaaaaaa

SEQ ID NO: 43992 - DNA, 11 bp, Unknown
  misc_feature (1)..( 11): Matrix.001 file - promoters60/1022983
tataaaaaaat

SEQ ID NO: 43993 - DNA, 10 bp, Unknown
  misc_feature (1)..( 10): Matrix.001 file - promoters60/1022983
atataaaaat

SEQ ID NO: 43994 - DNA, 11 bp, Unknown
  misc_feature (1)..( 11): Matrix.001 file - promoters60/1022983
acaaaaaaaaa

SEQ ID NO: 43995 - DNA, 9 bp, Unknown
  misc_feature (1)..( 9): Matrix.001 file - promoters60/1022987
tttaatgaa

SEQ ID NO: 43996 - DNA, 8 bp, Unknown
  misc_feature (1)..( 8): Matrix.001 file - promoters60/1023029
ctttgtta

SEQ ID NO: 43997 - DNA, 9 bp, Unknown
  misc_feature (1)..( 9): Matrix.001 file - promoters60/1023029
tataccaat

SEQ ID NO: 43998 - DNA, 6 bp, Unknown
  misc_feature (1)..( 6): Matrix.001 file - promoters60/1023029
ttatga

SEQ ID NO: 43999 - DNA, 7 bp, Unknown
  misc_feature (1)..( 7): Matrix.001 file - promoters60/1023029
aataatt

SEQ ID NO: 44000 - DNA, 8 bp, Unknown
  misc_feature (1)..( 8): Matrix.001 file - promoters60/1023029
aatcttaa

SEQ ID NO: 44001 - DNA, 6 bp, Unknown
  misc_feature (1)..( 6): Matrix.001 file - promoters60/1023029
cgtata

SEQ ID NO: 44002 - DNA, 7 bp, Unknown
  misc_feature (1)..( 7): Matrix.001 file - promoters60/1023029
ataggtt

SEQ ID NO: 44003 - DNA, 6 bp, Unknown
  misc_feature (1)..( 6): Matrix.001 file - promoters60/1023029
atttta

SEQ ID NO: 44004 - DNA, 6 bp, Unknown
  misc_feature (1)..( 6): Matrix.001 file - promoters60/1023029
ccaata

SEQ ID NO: 44005 - DNA, 11 bp, Unknown
  misc_feature (1)..( 11): Matrix.001 file - promoters60/1023029
agaagatgagt

SEQ ID NO: 44006 - DNA, 8 bp, Unknown
  misc_feature (1)..( 8): Matrix.001 file - promoters60/1023029
tatatgaa

SEQ ID NO: 44007 - DNA, 8 bp, Unknown
  misc_feature (1)..( 8): Matrix.001 file - promoters60/1023029
attacttc

SEQ ID NO: 44008 - DNA, 9 bp, Unknown
  misc_feature (1)..( 9): Matrix.001 file - promoters60/1023029
caatataaa

SEQ ID NO: 44009 - DNA, 6 bp, Unknown
  misc_feature (1)..( 6): Matrix.001 file - promoters60/1023029
ctcttt

SEQ ID NO: 44010 - DNA, 7 bp, Unknown
  misc_feature (1)..( 7): Matrix.001 file - promoters60/1023029
actccta

SEQ ID NO: 44011 - DNA, 6 bp, Unknown
  misc_feature (1)..( 6): Matrix.001 file - promoters60/1023029
caactt

SEQ ID NO: 44012 - DNA, 7 bp, Unknown
  misc_feature (1)..( 7): Matrix.001 file - promoters60/1023029
gatgctt

SEQ ID NO: 44013 - DNA, 8 bp, Unknown
  misc_feature (1)..( 8): Matrix.001 file - promoters60/1023029
tttaaatt

SEQ ID NO: 44014 - DNA, 7 bp, Unknown
  misc_feature (1)..( 7): Matrix.001 file - promoters60/1023029
tggatca

SEQ ID NO: 44015 - DNA, 8 bp, Unknown
  misc_feature (1)..( 8): Matrix.001 file - promoters60/1023029
aattatta

SEQ ID NO: 44016 - DNA, 9 bp, Unknown
  misc_feature (1)..( 9): Matrix.001 file - promoters60/1023037
aaattcact

SEQ ID NO: 44017 - DNA, 6 bp, Unknown
  misc_feature (1)..( 6): Matrix.001 file - promoters60/1023037
taaaga

SEQ ID NO: 44018 - DNA, 11 bp, Unknown
  misc_feature (1)..( 11): Matrix.001 file - promoters60/1023037
acagtttataa

SEQ ID NO: 44019 - DNA, 7 bp, Unknown
  misc_feature (1)..( 7): Matrix.001 file - promoters60/1023037
gtaacta

SEQ ID NO: 44020 - DNA, 7 bp, Unknown
  misc_feature (1)..( 7): Matrix.001 file - promoters60/1023037
aattttt

SEQ ID NO: 44021 - DNA, 9 bp, Unknown
  misc_feature (1)..( 9): Matrix.001 file - promoters60/1023037
gggtatata

SEQ ID NO: 44022 - DNA, 6 bp, Unknown
  misc_feature (1)..( 6): Matrix.001 file - promoters60/1023037
agtaat

SEQ ID NO: 44023 - DNA, 6 bp, Unknown
  misc_feature (1)..( 6): Matrix.001 file - promoters60/1023037
tttata

SEQ ID NO: 44024 - DNA, 6 bp, Unknown
  misc_feature (1)..( 6): Matrix.001 file - promoters60/1023037
ttaaaa

SEQ ID NO: 44025 - DNA, 8 bp, Unknown
  misc_feature (1)..( 8): Matrix.001 file - promoters60/1023037
ctaattat

SEQ ID NO: 44026 - DNA, 6 bp, Unknown
  misc_feature (1)..( 6): Matrix.001 file - promoters60/1023037
tttact

SEQ ID NO: 44027 - DNA, 9 bp, Unknown
  misc_feature (1)..( 9): Matrix.001 file - promoters60/1023037
gaaaatatc

SEQ ID NO: 44028 - DNA, 6 bp, Unknown
  misc_feature (1)..( 6): Matrix.001 file - promoters60/1023037
acacaa

SEQ ID NO: 44029 - DNA, 6 bp, Unknown
  misc_feature (1)..( 6): Matrix.001 file - promoters60/1023037
gagaga

SEQ ID NO: 44030 - DNA, 8 bp, Unknown
  misc_feature (1)..( 8): Matrix.001 file - promoters60/1023062
taaaaaat

SEQ ID NO: 44031 - DNA, 9 bp, Unknown
  misc_feature (1)..( 9): Matrix.001 file - promoters60/1023062
aattccaaa

SEQ ID NO: 44032 - DNA, 9 bp, Unknown
  misc_feature (1)..( 9): Matrix.001 file - promoters60/1023062
tttatgaca

SEQ ID NO: 44033 - DNA, 10 bp, Unknown
  misc_feature (1)..( 10): Matrix.001 file - promoters60/1023062
tttgaatttt

SEQ ID NO: 44034 - DNA, 8 bp, Unknown
  misc_feature (1)..( 8): Matrix.001 file - promoters60/1023062
aattttat

SEQ ID NO: 44035 - DNA, 13 bp, Unknown
  misc_feature (1)..( 13): Matrix.001 file - promoters60/1023062
taatggatctaca

SEQ ID NO: 44036 - DNA, 10 bp, Unknown
  misc_feature (1)..( 10): Matrix.001 file - promoters60/1023062
acaaaattag

SEQ ID NO: 44037 - DNA, 7 bp, Unknown
  misc_feature (1)..( 7): Matrix.001 file - promoters60/1023079
agtcatt

SEQ ID NO: 44038 - DNA, 6 bp, Unknown
  misc_feature (1)..( 6): Matrix.001 file - promoters60/1023079
tttcct

SEQ ID NO: 44039 - DNA, 6 bp, Unknown
  misc_feature (1)..( 6): Matrix.001 file - promoters60/1023079
agaaaa

SEQ ID NO: 44040 - DNA, 7 bp, Unknown
  misc_feature (1)..( 7): Matrix.001 file - promoters60/1023079
aaagttt

SEQ ID NO: 44041 - DNA, 8 bp, Unknown
  misc_feature (1)..( 8): Matrix.001 file - promoters60/1023079
ccaaactc

SEQ ID NO: 44042 - DNA, 6 bp, Unknown
  misc_feature (1)..( 6): Matrix.001 file - promoters60/1023079
atttta

SEQ ID NO: 44043 - DNA, 7 bp, Unknown
  misc_feature (1)..( 7): Matrix.001 file - promoters60/1023079
caaattt

SEQ ID NO: 44044 - DNA, 8 bp, Unknown
  misc_feature (1)..( 8): Matrix.001 file - promoters60/1023079
tttcttta

SEQ ID NO: 44045 - DNA, 8 bp, Unknown
  misc_feature (1)..( 8): Matrix.001 file - promoters60/1023079
taatacat

SEQ ID NO: 44046 - DNA, 6 bp, Unknown
  misc_feature (1)..( 6): Matrix.001 file - promoters60/1023079
tttaat

SEQ ID NO: 44047 - DNA, 7 bp, Unknown
  misc_feature (1)..( 7): Matrix.001 file - promoters60/1023079
taaatta

SEQ ID NO: 44048 - DNA, 6 bp, Unknown
  misc_feature (1)..( 6): Matrix.001 file - promoters60/1023079
aattag

SEQ ID NO: 44049 - DNA, 9 bp, Unknown
  misc_feature (1)..( 9): Matrix.001 file - promoters60/1023079
ttaaataat

SEQ ID NO: 44050 - DNA, 7 bp, Unknown
  misc_feature (1)..( 7): Matrix.001 file - promoters60/1023079
taaaatt

SEQ ID NO: 44051 - DNA, 7 bp, Unknown
  misc_feature (1)..( 7): Matrix.001 file - promoters60/1023079
ttagaat

SEQ ID NO: 44052 - DNA, 7 bp, Unknown
  misc_feature (1)..( 7): Matrix.001 file - promoters60/1023079
aaacata

SEQ ID NO: 44053 - DNA, 8 bp, Unknown
  misc_feature (1)..( 8): Matrix.001 file - promoters60/1023079
tttattaa

SEQ ID NO: 44054 - DNA, 6 bp, Unknown
  misc_feature (1)..( 6): Matrix.001 file - promoters60/1023079
ttaatt

SEQ ID NO: 44055 - DNA, 7 bp, Unknown
  misc_feature (1)..( 7): Matrix.001 file - promoters60/1023079
aattctt

SEQ ID NO: 44056 - DNA, 6 bp, Unknown
  misc_feature (1)..( 6): Matrix.001 file - promoters60/1023089
ttctag

SEQ ID NO: 44057 - DNA, 6 bp, Unknown
  misc_feature (1)..( 6): Matrix.001 file - promoters60/1023089
ttcaaa

SEQ ID NO: 44058 - DNA, 7 bp, Unknown
  misc_feature (1)..( 7): Matrix.001 file - promoters60/1023089
aaaaaac

SEQ ID NO: 44059 - DNA, 8 bp, Unknown
  misc_feature (1)..( 8): Matrix.001 file - promoters60/1023089
tttctttt

SEQ ID NO: 44060 - DNA, 7 bp, Unknown
  misc_feature (1)..( 7): Matrix.001 file - promoters60/1023089
tttcttt

SEQ ID NO: 44061 - DNA, 11 bp, Unknown
  misc_feature (1)..( 11): Matrix.001 file - promoters60/1023089
gattaatactt

SEQ ID NO: 44062 - DNA, 6 bp, Unknown
  misc_feature (1)..( 6): Matrix.001 file - promoters60/1023089
tatttt

SEQ ID NO: 44063 - DNA, 6 bp, Unknown
  misc_feature (1)..( 6): Matrix.001 file - promoters60/1023089
tttgat

SEQ ID NO: 44064 - DNA, 6 bp, Unknown
  misc_feature (1)..( 6): Matrix.001 file - promoters60/1023089
aaattg

SEQ ID NO: 44065 - DNA, 6 bp, Unknown
  misc_feature (1)..( 6): Matrix.001 file - promoters60/1023089
taatta

SEQ ID NO: 44066 - DNA, 9 bp, Unknown
  misc_feature (1)..( 9): Matrix.001 file - promoters60/1023089
tacaaaaat

SEQ ID NO: 44067 - DNA, 11 bp, Unknown
  misc_feature (1)..( 11): Matrix.001 file - promoters60/1023124
aaattatgatt

SEQ ID NO: 44068 - DNA, 7 bp, Unknown
  misc_feature (1)..( 7): Matrix.001 file - promoters60/1023124
tttttaa

SEQ ID NO: 44069 - DNA, 7 bp, Unknown
  misc_feature (1)..( 7): Matrix.001 file - promoters60/1023124
ttcatac

SEQ ID NO: 44070 - DNA, 6 bp, Unknown
  misc_feature (1)..( 6): Matrix.001 file - promoters60/1023124
catgtt

SEQ ID NO: 44071 - DNA, 8 bp, Unknown
  misc_feature (1)..( 8): Matrix.001 file - promoters60/1023124
taaacaat

SEQ ID NO: 44072 - DNA, 8 bp, Unknown
  misc_feature (1)..( 8): Matrix.001 file - promoters60/1023124
aaataatt

SEQ ID NO: 44073 - DNA, 6 bp, Unknown
  misc_feature (1)..( 6): Matrix.001 file - promoters60/1023124
gtttaa

SEQ ID NO: 44074 - DNA, 6 bp, Unknown
  misc_feature (1)..( 6): Matrix.001 file - promoters60/1023124
tataaa

SEQ ID NO: 44075 - DNA, 6 bp, Unknown
  misc_feature (1)..( 6): Matrix.001 file - promoters60/1023124
aatata

SEQ ID NO: 44076 - DNA, 8 bp, Unknown
  misc_feature (1)..( 8): Matrix.001 file - promoters60/1023124
atgaatat

SEQ ID NO: 44077 - DNA, 6 bp, Unknown
  misc_feature (1)..( 6): Matrix.001 file - promoters60/1023124
ctcgtg

SEQ ID NO: 44078 - DNA, 7 bp, Unknown
  misc_feature (1)..( 7): Matrix.001 file - promoters60/1023124
ttaatat

SEQ ID NO: 44079 - DNA, 8 bp, Unknown
  misc_feature (1)..( 8): Matrix.001 file - promoters60/1023124
tataattt

SEQ ID NO: 44080 - DNA, 8 bp, Unknown
  misc_feature (1)..( 8): Matrix.001 file - promoters60/1023124
gtaaatgt

SEQ ID NO: 44081 - DNA, 6 bp, Unknown
  misc_feature (1)..( 6): Matrix.001 file - promoters60/1023124
ctctaa

SEQ ID NO: 44082 - DNA, 6 bp, Unknown
  misc_feature (1)..( 6): Matrix.001 file - promoters60/1023124
ttaaaa

SEQ ID NO: 44083 - DNA, 9 bp, Unknown
  misc_feature (1)..( 9): Matrix.001 file - promoters60/1023124
atttttttt

SEQ ID NO: 44084 - DNA, 6 bp, Unknown
  misc_feature (1)..( 6): Matrix.001 file - promoters60/1023124
tgttgt

SEQ ID NO: 44085 - DNA, 15 bp, Unknown
  misc_feature (1)..( 15): Matrix.001 file - promoters60/1023124
ttttaaaaaaaaaaa

SEQ ID NO: 44086 - DNA, 8 bp, Unknown
  misc_feature (1)..( 8): Matrix.001 file - promoters60/1023124
taaataat

SEQ ID NO: 44087 - DNA, 7 bp, Unknown
  misc_feature (1)..( 7): Matrix.001 file - promoters60/1023124
atatata

SEQ ID NO: 44088 - DNA, 6 bp, Unknown
  misc_feature (1)..( 6): Matrix.001 file - promoters60/1023124
tatata

SEQ ID NO: 44089 - DNA, 6 bp, Unknown
  misc_feature (1)..( 6): Matrix.001 file - promoters60/1023124
gagaac

SEQ ID NO: 44090 - DNA, 7 bp, Unknown
  misc_feature (1)..( 7): Matrix.001 file - promoters60/1023124
atgctgc

SEQ ID NO: 44091 - DNA, 6 bp, Unknown
  misc_feature (1)..( 6): Matrix.001 file - promoters60/1023124
tttaaa

SEQ ID NO: 44092 - DNA, 14 bp, Unknown
  misc_feature (1)..( 14): Matrix.001 file - promoters60/1023124
tctaaaaaaaaaaa

SEQ ID NO: 44093 - DNA, 7 bp, Unknown
  misc_feature (1)..( 7): Matrix.001 file - promoters60/1023124
caaaatc

SEQ ID NO: 44094 - DNA, 7 bp, Unknown
  misc_feature (1)..( 7): Matrix.001 file - promoters60/1023143
tttgata

SEQ ID NO: 44095 - DNA, 8 bp, Unknown
  misc_feature (1)..( 8): Matrix.001 file - promoters60/1023143
ttgcaaat

SEQ ID NO: 44096 - DNA, 6 bp, Unknown
  misc_feature (1)..( 6): Matrix.001 file - promoters60/1023143
acattg

SEQ ID NO: 44097 - DNA, 8 bp, Unknown
  misc_feature (1)..( 8): Matrix.001 file - promoters60/1023143
tttagtat

SEQ ID NO: 44098 - DNA, 7 bp, Unknown
  misc_feature (1)..( 7): Matrix.001 file - promoters60/1023143
tattatg

SEQ ID NO: 44099 - DNA, 11 bp, Unknown
  misc_feature (1)..( 11): Matrix.001 file - promoters60/1023143
atgaaaactgt

SEQ ID NO: 44100 - DNA, 6 bp, Unknown
  misc_feature (1)..( 6): Matrix.001 file - promoters60/1023143
atacca

SEQ ID NO: 44101 - DNA, 7 bp, Unknown
  misc_feature (1)..( 7): Matrix.001 file - promoters60/1023143
atgactt

SEQ ID NO: 44102 - DNA, 6 bp, Unknown
  misc_feature (1)..( 6): Matrix.001 file - promoters60/1023143
ttcata

SEQ ID NO: 44103 - DNA, 9 bp, Unknown
  misc_feature (1)..( 9): Matrix.001 file - promoters60/1023143
ttttcagta

SEQ ID NO: 44104 - DNA, 6 bp, Unknown
  misc_feature (1)..( 6): Matrix.001 file - promoters60/1023143
tgcaaa

SEQ ID NO: 44105 - DNA, 8 bp, Unknown
  misc_feature (1)..( 8): Matrix.001 file - promoters60/1023143
tatcaaac

SEQ ID NO: 44106 - DNA, 6 bp, Unknown
  misc_feature (1)..( 6): Matrix.001 file - promoters60/1023143
aaaata

SEQ ID NO: 44107 - DNA, 7 bp, Unknown
  misc_feature (1)..( 7): Matrix.001 file - promoters60/1023143
ttaccaa

SEQ ID NO: 44108 - DNA, 9 bp, Unknown
  misc_feature (1)..( 9): Matrix.001 file - promoters60/1023143
tctttttct

SEQ ID NO: 44109 - DNA, 9 bp, Unknown
  misc_feature (1)..( 9): Matrix.001 file - promoters60/1023143
ataatgttt

SEQ ID NO: 44110 - DNA, 7 bp, Unknown
  misc_feature (1)..( 7): Matrix.001 file - promoters60/1023143
atagata

SEQ ID NO: 44111 - DNA, 7 bp, Unknown
  misc_feature (1)..( 7): Matrix.001 file - promoters60/1023143
atggaat

SEQ ID NO: 44112 - DNA, 7 bp, Unknown
  misc_feature (1)..( 7): Matrix.001 file - promoters60/1023143
accaaat

SEQ ID NO: 44113 - DNA, 6 bp, Unknown
  misc_feature (1)..( 6): Matrix.001 file - promoters60/1023143
aaaaaa

SEQ ID NO: 44114 - DNA, 6 bp, Unknown
  misc_feature (1)..( 6): Matrix.001 file - promoters60/1023143
gtcaaa

SEQ ID NO: 44115 - DNA, 6 bp, Unknown
  misc_feature (1)..( 6): Matrix.001 file - promoters60/1023143
ggcgag

SEQ ID NO: 44116 - DNA, 8 bp, Unknown
  misc_feature (1)..( 8): Matrix.001 file - promoters60/1023210
caaaaaaa

SEQ ID NO: 44117 - DNA, 6 bp, Unknown
  misc_feature (1)..( 6): Matrix.001 file - promoters60/1023210
aaaaca

SEQ ID NO: 44118 - DNA, 8 bp, Unknown
  misc_feature (1)..( 8): Matrix.001 file - promoters60/1023210
gaaataaa

SEQ ID NO: 44119 - DNA, 7 bp, Unknown
  misc_feature (1)..( 7): Matrix.001 file - promoters60/1023210
caaattt

SEQ ID NO: 44120 - DNA, 6 bp, Unknown
  misc_feature (1)..( 6): Matrix.001 file - promoters60/1023210
ttaaaa

SEQ ID NO: 44121 - DNA, 6 bp, Unknown
  misc_feature (1)..( 6): Matrix.001 file - promoters60/1023210
gtaacg

SEQ ID NO: 44122 - DNA, 7 bp, Unknown
  misc_feature (1)..( 7): Matrix.001 file - promoters60/1023210
gtggtta

SEQ ID NO: 44123 - DNA, 10 bp, Unknown
  misc_feature (1)..( 10): Matrix.001 file - promoters60/1023210
tacgtgtcaa

SEQ ID NO: 44124 - DNA, 20 bp, Unknown
  misc_feature (1)..( 20): Matrix.001 file - promoters60/1023210
ttggctattgcttcaccgcc

SEQ ID NO: 44125 - DNA, 16 bp, Unknown
  misc_feature (1)..( 16): Matrix.001 file - promoters60/1023210
gaccgagtcgtcctcg

SEQ ID NO: 44126 - DNA, 16 bp, Unknown
  misc_feature (1)..( 16): Matrix.001 file - promoters60/1023210
ttcttcttctataaat

SEQ ID NO: 44127 - DNA, 6 bp, Unknown
  misc_feature (1)..( 6): Matrix.001 file - promoters60/1023210
gcttct

SEQ ID NO: 44128 - DNA, 8 bp, Unknown
  misc_feature (1)..( 8): Matrix.001 file - promoters60/1023210
ttctggcc

SEQ ID NO: 44129 - DNA, 7 bp, Unknown
  misc_feature (1)..( 7): Matrix.001 file - promoters60/1023210
tacatat

SEQ ID NO: 44130 - DNA, 15 bp, Unknown
  misc_feature (1)..( 15): Matrix.001 file - promoters60/1023210
cgccttagctttctc

SEQ ID NO: 44131 - DNA, 6 bp, Unknown
  misc_feature (1)..( 6): Matrix.001 file - promoters60/1023210
tttttt

SEQ ID NO: 44132 - DNA, 9 bp, Unknown
  misc_feature (1)..( 9): Matrix.001 file - promoters60/1023210
acaaaaagg

SEQ ID NO: 44133 - DNA, 7 bp, Unknown
  misc_feature (1)..( 7): Matrix.001 file - promoters60/1023210
acgaaga

SEQ ID NO: 44134 - DNA, 6 bp, Unknown
  misc_feature (1)..( 6): Matrix.001 file - promoters60/1023210
gttcaa

SEQ ID NO: 44135 - DNA, 6 bp, Unknown
  misc_feature (1)..( 6): Matrix.001 file - promoters60/1023210
gtatat

SEQ ID NO: 44136 - DNA, 9 bp, Unknown
  misc_feature (1)..( 9): Matrix.001 file - promoters60/1023210
atctaatga

SEQ ID NO: 44137 - DNA, 6 bp, Unknown
  misc_feature (1)..( 6): Matrix.001 file - promoters60/1023210
tcagta

SEQ ID NO: 44138 - DNA, 10 bp, Unknown
  misc_feature (1)..( 10): Matrix.001 file - promoters60/1023210
tttaacaact

SEQ ID NO: 44139 - DNA, 15 bp, Unknown
  misc_feature (1)..( 15): Matrix.001 file - promoters60/1023210
aaatacttttcctca

SEQ ID NO: 44140 - DNA, 6 bp, Unknown
  misc_feature (1)..( 6): Matrix.001 file - promoters60/1023210
aacaac

SEQ ID NO: 44141 - DNA, 15 bp, Unknown
  misc_feature (1)..( 15): Matrix.001 file - promoters60/1023210
aatacccaaagagct

SEQ ID NO: 44142 - DNA, 15 bp, Unknown
  misc_feature (1)..( 15): Matrix.001 file - promoters60/1023221
aaataaaaactaata

SEQ ID NO: 44143 - DNA, 12 bp, Unknown
  misc_feature (1)..( 12): Matrix.001 file - promoters60/1023221
aaacattcttaa

SEQ ID NO: 44144 - DNA, 10 bp, Unknown
  misc_feature (1)..( 10): Matrix.001 file - promoters60/1023237
tactttttct

SEQ ID NO: 44145 - DNA, 11 bp, Unknown
  misc_feature (1)..( 11): Matrix.001 file - promoters60/1023237
atcttttttaa

SEQ ID NO: 44146 - DNA, 15 bp, Unknown
  misc_feature (1)..( 15): Matrix.001 file - promoters60/1023237
tatagttttgaagga

SEQ ID NO: 44147 - DNA, 12 bp, Unknown
  misc_feature (1)..( 12): Matrix.001 file - promoters60/1023237
ttgtggtttctt

SEQ ID NO: 44148 - DNA, 8 bp, Unknown
  misc_feature (1)..( 8): Matrix.001 file - promoters60/1023278
aaattttt

SEQ ID NO: 44149 - DNA, 14 bp, Unknown
  misc_feature (1)..( 14): Matrix.001 file - promoters60/1023278
aaaaagggcctgta

SEQ ID NO: 44150 - DNA, 8 bp, Unknown
  misc_feature (1)..( 8): Matrix.001 file - promoters60/1023299
gtaaaata

SEQ ID NO: 44151 - DNA, 10 bp, Unknown
  misc_feature (1)..( 10): Matrix.001 file - promoters60/1023299
ttttcatttt

SEQ ID NO: 44152 - DNA, 10 bp, Unknown
  misc_feature (1)..( 10): Matrix.001 file - promoters60/1023299
atttacaata

SEQ ID NO: 44153 - DNA, 9 bp, Unknown
  misc_feature (1)..( 9): Matrix.001 file - promoters60/1023299
cattttata

SEQ ID NO: 44154 - DNA, 11 bp, Unknown
  misc_feature (1)..( 11): Matrix.001 file - promoters60/1023299
ctataaataca

SEQ ID NO: 44155 - DNA, 9 bp, Unknown
  misc_feature (1)..( 9): Matrix.001 file - promoters60/1023299
acaatttta

SEQ ID NO: 44156 - DNA, 8 bp, Unknown
  misc_feature (1)..( 8): Matrix.001 file - promoters60/1023397
gattttcc

SEQ ID NO: 44157 - DNA, 12 bp, Unknown
  misc_feature (1)..( 12): Matrix.001 file - promoters60/1023397
cttttttttggt

SEQ ID NO: 44158 - DNA, 12 bp, Unknown
  misc_feature (1)..( 12): Matrix.001 file - promoters60/1023397
tctgtttatgtt

SEQ ID NO: 44159 - DNA, 15 bp, Unknown
  misc_feature (1)..( 15): Matrix.001 file - promoters60/1023397
tctggagagattttg

SEQ ID NO: 44160 - DNA, 8 bp, Unknown
  misc_feature (1)..( 8): Matrix.001 file - promoters60/1023397
gagttttc

SEQ ID NO: 44161 - DNA, 12 bp, Unknown
  misc_feature (1)..( 12): Matrix.001 file - promoters60/1023397
ctttcttttttt

SEQ ID NO: 44162 - DNA, 7 bp, Unknown
  misc_feature (1)..( 7): Matrix.001 file - promoters60/1023397
ttaaatt

SEQ ID NO: 44163 - DNA, 10 bp, Unknown
  misc_feature (1)..( 10): Matrix.001 file - promoters60/1023407
caaaattttg

SEQ ID NO: 44164 - DNA, 14 bp, Unknown
  misc_feature (1)..( 14): Matrix.001 file - promoters60/1023407
ttctcataatacat

SEQ ID NO: 44165 - DNA, 9 bp, Unknown
  misc_feature (1)..( 9): Matrix.001 file - promoters60/1023528
aaaaacaga

SEQ ID NO: 44166 - DNA, 8 bp, Unknown
  misc_feature (1)..( 8): Matrix.001 file - promoters60/1023528
gattaaag

SEQ ID NO: 44167 - DNA, 7 bp, Unknown
  misc_feature (1)..( 7): Matrix.001 file - promoters60/1023583
aataaga

SEQ ID NO: 44168 - DNA, 9 bp, Unknown
  misc_feature (1)..( 9): Matrix.001 file - promoters60/1023583
gtttataag

SEQ ID NO: 44169 - DNA, 10 bp, Unknown
  misc_feature (1)..( 10): Matrix.001 file - promoters60/1023583
tgaaaagaaa

SEQ ID NO: 44170 - DNA, 10 bp, Unknown
  misc_feature (1)..( 10): Matrix.001 file - promoters60/1023583
tgaaaaatat

SEQ ID NO: 44171 - DNA, 6 bp, Unknown
  misc_feature (1)..( 6): Matrix.001 file - promoters60/1023583
aatatg

SEQ ID NO: 44172 - DNA, 6 bp, Unknown
  misc_feature (1)..( 6): Matrix.001 file - promoters60/1023583
ttttaa

SEQ ID NO: 44173 - DNA, 7 bp, Unknown
  misc_feature (1)..( 7): Matrix.001 file - promoters60/1023583
aaaactg

SEQ ID NO: 44174 - DNA, 8 bp, Unknown
  misc_feature (1)..( 8): Matrix.001 file - promoters60/1023583
gttattat

SEQ ID NO: 44175 - DNA, 6 bp, Unknown
  misc_feature (1)..( 6): Matrix.001 file - promoters60/1023583
cgtctt

SEQ ID NO: 44176 - DNA, 8 bp, Unknown
  misc_feature (1)..( 8): Matrix.001 file - promoters60/1023583
caaatttc

SEQ ID NO: 44177 - DNA, 6 bp, Unknown
  misc_feature (1)..( 6): Matrix.001 file - promoters60/1023583
tggttc

SEQ ID NO: 44178 - DNA, 6 bp, Unknown
  misc_feature (1)..( 6): Matrix.001 file - promoters60/1023583
attata

SEQ ID NO: 44179 - DNA, 8 bp, Unknown
  misc_feature (1)..( 8): Matrix.001 file - promoters60/1023594
caaaaaaa

SEQ ID NO: 44180 - DNA, 11 bp, Unknown
  misc_feature (1)..( 11): Matrix.001 file - promoters60/1023594
caactagtcaa

SEQ ID NO: 44181 - DNA, 9 bp, Unknown
  misc_feature (1)..( 9): Matrix.001 file - promoters60/1023594
tgaaaaatt

SEQ ID NO: 44182 - DNA, 10 bp, Unknown
  misc_feature (1)..( 10): Matrix.001 file - promoters60/1023594
ctataaatat

SEQ ID NO: 44183 - DNA, 9 bp, Unknown
  misc_feature (1)..( 9): Matrix.001 file - promoters60/1023619
aattgattt

SEQ ID NO: 44184 - DNA, 9 bp, Unknown
  misc_feature (1)..( 9): Matrix.001 file - promoters60/1023619
aattgattt

SEQ ID NO: 44185 - DNA, 8 bp, Unknown
  misc_feature (1)..( 8): Matrix.001 file - promoters60/1023619
attgattt

SEQ ID NO: 44186 - DNA, 9 bp, Unknown
  misc_feature (1)..( 9): Matrix.001 file - promoters60/1023634
atttgagag

SEQ ID NO: 44187 - DNA, 6 bp, Unknown
  misc_feature (1)..( 6): Matrix.001 file - promoters60/1023698
tatttt

SEQ ID NO: 44188 - DNA, 6 bp, Unknown
  misc_feature (1)..( 6): Matrix.001 file - promoters60/1023698
ttttta

SEQ ID NO: 44189 - DNA, 7 bp, Unknown
  misc_feature (1)..( 7): Matrix.001 file - promoters60/1023698
taaaatt

SEQ ID NO: 44190 - DNA, 8 bp, Unknown
  misc_feature (1)..( 8): Matrix.001 file - promoters60/1023698
tacagtat

SEQ ID NO: 44191 - DNA, 7 bp, Unknown
  misc_feature (1)..( 7): Matrix.001 file - promoters60/1023698
ttatttt

SEQ ID NO: 44192 - DNA, 9 bp, Unknown
  misc_feature (1)..( 9): Matrix.001 file - promoters60/1023698
aagcaaaaa

SEQ ID NO: 44193 - DNA, 8 bp, Unknown
  misc_feature (1)..( 8): Matrix.001 file - promoters60/1023698
ctttattt

SEQ ID NO: 44194 - DNA, 7 bp, Unknown
  misc_feature (1)..( 7): Matrix.001 file - promoters60/1023698
atttttt

SEQ ID NO: 44195 - DNA, 8 bp, Unknown
  misc_feature (1)..( 8): Matrix.001 file - promoters60/1023698
ataaaaat

SEQ ID NO: 44196 - DNA, 8 bp, Unknown
  misc_feature (1)..( 8): Matrix.001 file - promoters60/1023698
aaaaataa

SEQ ID NO: 44197 - DNA, 8 bp, Unknown
  misc_feature (1)..( 8): Matrix.001 file - promoters60/1023698
tttcaaaa

SEQ ID NO: 44198 - DNA, 9 bp, Unknown
  misc_feature (1)..( 9): Matrix.001 file - promoters60/1023698
tcttaattt

SEQ ID NO: 44199 - DNA, 10 bp, Unknown
  misc_feature (1)..( 10): Matrix.001 file - promoters60/1023698
atatttagtt

SEQ ID NO: 44200 - DNA, 7 bp, Unknown
  misc_feature (1)..( 7): Matrix.001 file - promoters60/1023698
acattat

SEQ ID NO: 44201 - DNA, 8 bp, Unknown
  misc_feature (1)..( 8): Matrix.001 file - promoters60/1023698
taaacaat

SEQ ID NO: 44202 - DNA, 8 bp, Unknown
  misc_feature (1)..( 8): Matrix.001 file - promoters60/1023698
aagattaa

SEQ ID NO: 44203 - DNA, 6 bp, Unknown
  misc_feature (1)..( 6): Matrix.001 file - promoters60/1023698
aaaact

SEQ ID NO: 44204 - DNA, 8 bp, Unknown
  misc_feature (1)..( 8): Matrix.001 file - promoters60/1023698
ctatgtgg

SEQ ID NO: 44205 - DNA, 15 bp, Unknown
  misc_feature (1)..( 15): Matrix.001 file - promoters60/1023698
ggcatgaggtgtaaa

SEQ ID NO: 44206 - DNA, 20 bp, Unknown
  misc_feature (1)..( 20): Matrix.001 file - promoters60/1023698
ttttatatataagcaaaaaa

SEQ ID NO: 44207 - DNA, 8 bp, Unknown
  misc_feature (1)..( 8): Matrix.001 file - promoters60/1023698
atcatcat

SEQ ID NO: 44208 - DNA, 8 bp, Unknown
  misc_feature (1)..( 8): Matrix.001 file - promoters60/1023698
aaactaat

SEQ ID NO: 44209 - DNA, 7 bp, Unknown
  misc_feature (1)..( 7): Matrix.001 file - promoters60/1023698
taatttt

SEQ ID NO: 44210 - DNA, 11 bp, Unknown
  misc_feature (1)..( 11): Matrix.001 file - promoters60/1023698
ttattgtaaac

SEQ ID NO: 44211 - DNA, 15 bp, Unknown
  misc_feature (1)..( 15): Matrix.001 file - promoters60/1023698
tttgcttctactata

SEQ ID NO: 44212 - DNA, 19 bp, Unknown
  misc_feature (1)..( 19): Matrix.001 file - promoters60/1023698
ctcatcttgatcaaatctc

SEQ ID NO: 44213 - DNA, 6 bp, Unknown
  misc_feature (1)..( 6): Matrix.001 file - promoters60/1023698
aatttc

SEQ ID NO: 44214 - DNA, 7 bp, Unknown
  misc_feature (1)..( 7): Matrix.001 file - promoters60/1023698
taattta

SEQ ID NO: 44215 - DNA, 6 bp, Unknown
  misc_feature (1)..( 6): Matrix.001 file - promoters60/1023698
aaatct

SEQ ID NO: 44216 - DNA, 12 bp, Unknown
  misc_feature (1)..( 12): Matrix.001 file - promoters60/1023698
tacactattttt

SEQ ID NO: 44217 - DNA, 11 bp, Unknown
  misc_feature (1)..( 11): Matrix.001 file - promoters60/1023782
aaaataaaata

SEQ ID NO: 44218 - DNA, 7 bp, Unknown
  misc_feature (1)..( 7): Matrix.001 file - promoters60/1023782
gtaaaac

SEQ ID NO: 44219 - DNA, 10 bp, Unknown
  misc_feature (1)..( 10): Matrix.001 file - promoters60/1023782
ggaaatgaaa

SEQ ID NO: 44220 - DNA, 7 bp, Unknown
  misc_feature (1)..( 7): Matrix.001 file - promoters60/1023782
gaaccca

SEQ ID NO: 44221 - DNA, 8 bp, Unknown
  misc_feature (1)..( 8): Matrix.001 file - promoters60/1023782
gataatta

SEQ ID NO: 44222 - DNA, 10 bp, Unknown
  misc_feature (1)..( 10): Matrix.001 file - promoters60/1023782
atatttttta

SEQ ID NO: 44223 - DNA, 6 bp, Unknown
  misc_feature (1)..( 6): Matrix.001 file - promoters60/1023891
ttatat

SEQ ID NO: 44224 - DNA, 7 bp, Unknown
  misc_feature (1)..( 7): Matrix.001 file - promoters60/1023891
tatactc

SEQ ID NO: 44225 - DNA, 9 bp, Unknown
  misc_feature (1)..( 9): Matrix.001 file - promoters60/1023891
taataattt

SEQ ID NO: 44226 - DNA, 8 bp, Unknown
  misc_feature (1)..( 8): Matrix.001 file - promoters60/1023891
aaaagaaa

SEQ ID NO: 44227 - DNA, 12 bp, Unknown
  misc_feature (1)..( 12): Matrix.001 file - promoters60/1023891
agtcaacaaaag

SEQ ID NO: 44228 - DNA, 6 bp, Unknown
  misc_feature (1)..( 6): Matrix.001 file - promoters60/1023891
gtaacg

SEQ ID NO: 44229 - DNA, 9 bp, Unknown
  misc_feature (1)..( 9): Matrix.001 file - promoters60/1023891
ctttatata

SEQ ID NO: 44230 - DNA, 6 bp, Unknown
  misc_feature (1)..( 6): Matrix.001 file - promoters60/1023891
aaaaac

SEQ ID NO: 44231 - DNA, 7 bp, Unknown
  misc_feature (1)..( 7): Matrix.001 file - promoters60/1023891
aaaatca

SEQ ID NO: 44232 - DNA, 8 bp, Unknown
  misc_feature (1)..( 8): Matrix.001 file - promoters60/1023891
cattcaaa

SEQ ID NO: 44233 - DNA, 7 bp, Unknown
  misc_feature (1)..( 7): Matrix.001 file - promoters60/1023891
attcatt

SEQ ID NO: 44234 - DNA, 6 bp, Unknown
  misc_feature (1)..( 6): Matrix.001 file - promoters60/1023891
actaaa

SEQ ID NO: 44235 - DNA, 10 bp, Unknown
  misc_feature (1)..( 10): Matrix.001 file - promoters60/1023891
aaaattttaa

SEQ ID NO: 44236 - DNA, 6 bp, Unknown
  misc_feature (1)..( 6): Matrix.001 file - promoters60/1023891
aatgtc

SEQ ID NO: 44237 - DNA, 6 bp, Unknown
  misc_feature (1)..( 6): Matrix.001 file - promoters60/1023891
tagaat

SEQ ID NO: 44238 - DNA, 11 bp, Unknown
  misc_feature (1)..( 11): Matrix.001 file - promoters60/1023891
ataagagaaga

SEQ ID NO: 44239 - DNA, 6 bp, Unknown
  misc_feature (1)..( 6): Matrix.001 file - promoters60/1023891
aaaaag

SEQ ID NO: 44240 - DNA, 6 bp, Unknown
  misc_feature (1)..( 6): Matrix.001 file - promoters60/1023891
acacaa

SEQ ID NO: 44241 - DNA, 6 bp, Unknown
  misc_feature (1)..( 6): Matrix.001 file - promoters60/1023891
tgtcac

SEQ ID NO: 44242 - DNA, 6 bp, Unknown
  misc_feature (1)..( 6): Matrix.001 file - promoters60/1023891
acattt

SEQ ID NO: 44243 - DNA, 8 bp, Unknown
  misc_feature (1)..( 8): Matrix.001 file - promoters60/1023891
agtaacca

SEQ ID NO: 44244 - DNA, 12 bp, Unknown
  misc_feature (1)..( 12): Matrix.001 file - promoters60/1023963
gaaaacaaataa

SEQ ID NO: 44245 - DNA, 6 bp, Unknown
  misc_feature (1)..( 6): Matrix.001 file - promoters60/1023963
acatta

SEQ ID NO: 44246 - DNA, 6 bp, Unknown
  misc_feature (1)..( 6): Matrix.001 file - promoters60/1024037
ttacaa

SEQ ID NO: 44247 - DNA, 6 bp, Unknown
  misc_feature (1)..( 6): Matrix.001 file - promoters60/1024037
tattat

SEQ ID NO: 44248 - DNA, 8 bp, Unknown
  misc_feature (1)..( 8): Matrix.001 file - promoters60/1024037
aaaatctt

SEQ ID NO: 44249 - DNA, 8 bp, Unknown
  misc_feature (1)..( 8): Matrix.001 file - promoters60/1024037
atactatt

SEQ ID NO: 44250 - DNA, 7 bp, Unknown
  misc_feature (1)..( 7): Matrix.001 file - promoters60/1024037
ttaatac

SEQ ID NO: 44251 - DNA, 7 bp, Unknown
  misc_feature (1)..( 7): Matrix.001 file - promoters60/1024037
attaata

SEQ ID NO: 44252 - DNA, 11 bp, Unknown
  misc_feature (1)..( 11): Matrix.001 file - promoters60/1024037
taagtatatat

SEQ ID NO: 44253 - DNA, 6 bp, Unknown
  misc_feature (1)..( 6): Matrix.001 file - promoters60/1024037
agactt

SEQ ID NO: 44254 - DNA, 6 bp, Unknown
  misc_feature (1)..( 6): Matrix.001 file - promoters60/1024037
aagcca

SEQ ID NO: 44255 - DNA, 7 bp, Unknown
  misc_feature (1)..( 7): Matrix.001 file - promoters60/1024037
acaattt

SEQ ID NO: 44256 - DNA, 7 bp, Unknown
  misc_feature (1)..( 7): Matrix.001 file - promoters60/1024037
atgcatg

SEQ ID NO: 44257 - DNA, 7 bp, Unknown
  misc_feature (1)..( 7): Matrix.001 file - promoters60/1024037
aatttag

SEQ ID NO: 44258 - DNA, 6 bp, Unknown
  misc_feature (1)..( 6): Matrix.001 file - promoters60/1024037
gctgac

SEQ ID NO: 44259 - DNA, 7 bp, Unknown
  misc_feature (1)..( 7): Matrix.001 file - promoters60/1024037
ttcgtca

SEQ ID NO: 44260 - DNA, 6 bp, Unknown
  misc_feature (1)..( 6): Matrix.001 file - promoters60/1024037
ataaca

SEQ ID NO: 44261 - DNA, 6 bp, Unknown
  misc_feature (1)..( 6): Matrix.001 file - promoters60/1024037
tggttg

SEQ ID NO: 44262 - DNA, 4 bp, Unknown
  misc_feature (1)..( 4): Matrix.001 file - promoters60/1024060
aaat

SEQ ID NO: 44263 - DNA, 11 bp, Unknown
  misc_feature (1)..( 11): Matrix.001 file - promoters60/1024083
ttccttttttt

SEQ ID NO: 44264 - DNA, 11 bp, Unknown
  misc_feature (1)..( 11): Matrix.001 file - promoters60/1024083
attagactttt

SEQ ID NO: 44265 - DNA, 9 bp, Unknown
  misc_feature (1)..( 9): Matrix.001 file - promoters60/1024083
tagaataaa

SEQ ID NO: 44266 - DNA, 8 bp, Unknown
  misc_feature (1)..( 8): Matrix.001 file - promoters60/1024083
aaaattaa

SEQ ID NO: 44267 - DNA, 6 bp, Unknown
  misc_feature (1)..( 6): Matrix.001 file - promoters60/1024083
acattt

SEQ ID NO: 44268 - DNA, 7 bp, Unknown
  misc_feature (1)..( 7): Matrix.001 file - promoters60/1024083
atttaca

SEQ ID NO: 44269 - DNA, 7 bp, Unknown
  misc_feature (1)..( 7): Matrix.001 file - promoters60/1024083
tttaaaa

SEQ ID NO: 44270 - DNA, 6 bp, Unknown
  misc_feature (1)..( 6): Matrix.001 file - promoters60/1024083
agtttg

SEQ ID NO: 44271 - DNA, 7 bp, Unknown
  misc_feature (1)..( 7): Matrix.001 file - promoters60/1024083
attaata

SEQ ID NO: 44272 - DNA, 6 bp, Unknown
  misc_feature (1)..( 6): Matrix.001 file - promoters60/1024083
tctttt

SEQ ID NO: 44273 - DNA, 8 bp, Unknown
  misc_feature (1)..( 8): Matrix.001 file - promoters60/1024083
atattttt

SEQ ID NO: 44274 - DNA, 6 bp, Unknown
  misc_feature (1)..( 6): Matrix.001 file - promoters60/1024083
acaaaa

SEQ ID NO: 44275 - DNA, 8 bp, Unknown
  misc_feature (1)..( 8): Matrix.001 file - promoters60/1024083
ttatcctt

SEQ ID NO: 44276 - DNA, 7 bp, Unknown
  misc_feature (1)..( 7): Matrix.001 file - promoters60/1024083
attctat

SEQ ID NO: 44277 - DNA, 7 bp, Unknown
  misc_feature (1)..( 7): Matrix.001 file - promoters60/1024083
aaaacaa

SEQ ID NO: 44278 - DNA, 7 bp, Unknown
  misc_feature (1)..( 7): Matrix.001 file - promoters60/1024083
atagtta

SEQ ID NO: 44279 - DNA, 8 bp, Unknown
  misc_feature (1)..( 8): Matrix.001 file - promoters60/1024083
ttacttat

SEQ ID NO: 44280 - DNA, 7 bp, Unknown
  misc_feature (1)..( 7): Matrix.001 file - promoters60/1024083
attagaa

SEQ ID NO: 44281 - DNA, 6 bp, Unknown
  misc_feature (1)..( 6): Matrix.001 file - promoters60/1024083
tttgat

SEQ ID NO: 44282 - DNA, 6 bp, Unknown
  misc_feature (1)..( 6): Matrix.001 file - promoters60/1024083
attttg

SEQ ID NO: 44283 - DNA, 6 bp, Unknown
  misc_feature (1)..( 6): Matrix.001 file - promoters60/1024083
aaaaat

SEQ ID NO: 44284 - DNA, 6 bp, Unknown
  misc_feature (1)..( 6): Matrix.001 file - promoters60/1024083
ggtctc

SEQ ID NO: 44285 - DNA, 8 bp, Unknown
  misc_feature (1)..( 8): Matrix.001 file - promoters60/1024083
taaaatcc

SEQ ID NO: 44286 - DNA, 9 bp, Unknown
  misc_feature (1)..( 9): Matrix.001 file - promoters60/1024126
ataatcaat

SEQ ID NO: 44287 - DNA, 8 bp, Unknown
  misc_feature (1)..( 8): Matrix.001 file - promoters60/1024126
aaaaaaga

SEQ ID NO: 44288 - DNA, 9 bp, Unknown
  misc_feature (1)..( 9): Matrix.001 file - promoters60/1024126
aaaacacaa

SEQ ID NO: 44289 - DNA, 9 bp, Unknown
  misc_feature (1)..( 9): Matrix.001 file - promoters60/1024145
gagcgatga

SEQ ID NO: 44290 - DNA, 7 bp, Unknown
  misc_feature (1)..( 7): Matrix.001 file - promoters60/1024145
tgaaaga

SEQ ID NO: 44291 - DNA, 8 bp, Unknown
  misc_feature (1)..( 8): Matrix.001 file - promoters60/1024145
aaatctaa

SEQ ID NO: 44292 - DNA, 6 bp, Unknown
  misc_feature (1)..( 6): Matrix.001 file - promoters60/1024145
ccggtt

SEQ ID NO: 44293 - DNA, 11 bp, Unknown
  misc_feature (1)..( 11): Matrix.001 file - promoters60/1024145
tctggtcaaac

SEQ ID NO: 44294 - DNA, 6 bp, Unknown
  misc_feature (1)..( 6): Matrix.001 file - promoters60/1024145
attatt

SEQ ID NO: 44295 - DNA, 8 bp, Unknown
  misc_feature (1)..( 8): Matrix.001 file - promoters60/1024145
gtgacaaa

SEQ ID NO: 44296 - DNA, 7 bp, Unknown
  misc_feature (1)..( 7): Matrix.001 file - promoters60/1024145
attcttt

SEQ ID NO: 44297 - DNA, 8 bp, Unknown
  misc_feature (1)..( 8): Matrix.001 file - promoters60/1024145
gtttccct

SEQ ID NO: 44298 - DNA, 11 bp, Unknown
  misc_feature (1)..( 11): Matrix.001 file - promoters60/1024166
ataacaaaaaa

SEQ ID NO: 44299 - DNA, 10 bp, Unknown
  misc_feature (1)..( 10): Matrix.001 file - promoters60/1024166
atcaataaac

SEQ ID NO: 44300 - DNA, 7 bp, Unknown
  misc_feature (1)..( 7): Matrix.001 file - promoters60/1024166
atttatg

SEQ ID NO: 44301 - DNA, 10 bp, Unknown
  misc_feature (1)..( 10): Matrix.001 file - promoters60/1024189
taaaaaggaa

SEQ ID NO: 44302 - DNA, 7 bp, Unknown
  misc_feature (1)..( 7): Matrix.001 file - promoters60/1024189
atataat

SEQ ID NO: 44303 - DNA, 8 bp, Unknown
  misc_feature (1)..( 8): Matrix.001 file - promoters60/1024189
taaatata

SEQ ID NO: 44304 - DNA, 11 bp, Unknown
  misc_feature (1)..( 11): Matrix.001 file - promoters60/1024189
ataaaattaat

SEQ ID NO: 44305 - DNA, 6 bp, Unknown
  misc_feature (1)..( 6): Matrix.001 file - promoters60/1024189
aaatat

SEQ ID NO: 44306 - DNA, 12 bp, Unknown
  misc_feature (1)..( 12): Matrix.001 file - promoters60/1024189
ttttgtaaacaa

SEQ ID NO: 44307 - DNA, 8 bp, Unknown
  misc_feature (1)..( 8): Matrix.001 file - promoters60/1024189
aaatttat

SEQ ID NO: 44308 - DNA, 8 bp, Unknown
  misc_feature (1)..( 8): Matrix.001 file - promoters60/1024189
aatcaaaa

SEQ ID NO: 44309 - DNA, 11 bp, Unknown
  misc_feature (1)..( 11): Matrix.001 file - promoters60/1024189
aaaaacacgaa

SEQ ID NO: 44310 - DNA, 10 bp, Unknown
  misc_feature (1)..( 10): Matrix.001 file - promoters60/1024189
gaccaaaaat

SEQ ID NO: 44311 - DNA, 8 bp, Unknown
  misc_feature (1)..( 8): Matrix.001 file - promoters60/1024189
atataata

SEQ ID NO: 44312 - DNA, 10 bp, Unknown
  misc_feature (1)..( 10): Matrix.001 file - promoters60/1024199
aaataaaaca

SEQ ID NO: 44313 - DNA, 7 bp, Unknown
  misc_feature (1)..( 7): Matrix.001 file - promoters60/1024203
aggagag

SEQ ID NO: 44314 - DNA, 6 bp, Unknown
  misc_feature (1)..( 6): Matrix.001 file - promoters60/1024203
aagaag

SEQ ID NO: 44315 - DNA, 7 bp, Unknown
  misc_feature (1)..( 7): Matrix.001 file - promoters60/1024203
gtggtca

SEQ ID NO: 44316 - DNA, 9 bp, Unknown
  misc_feature (1)..( 9): Matrix.001 file - promoters60/1024203
agaaaagac

SEQ ID NO: 44317 - DNA, 9 bp, Unknown
  misc_feature (1)..( 9): Matrix.001 file - promoters60/1024203
aacacggga

SEQ ID NO: 44318 - DNA, 6 bp, Unknown
  misc_feature (1)..( 6): Matrix.001 file - promoters60/1024203
gaacac

SEQ ID NO: 44319 - DNA, 7 bp, Unknown
  misc_feature (1)..( 7): Matrix.001 file - promoters60/1024203
gaatgaa

SEQ ID NO: 44320 - DNA, 8 bp, Unknown
  misc_feature (1)..( 8): Matrix.001 file - promoters60/1024203
ccatatac

SEQ ID NO: 44321 - DNA, 8 bp, Unknown
  misc_feature (1)..( 8): Matrix.001 file - promoters60/1024203
ctctctcg

SEQ ID NO: 44322 - DNA, 7 bp, Unknown
  misc_feature (1)..( 7): Matrix.001 file - promoters60/1024203
acaagcg

SEQ ID NO: 44323 - DNA, 7 bp, Unknown
  misc_feature (1)..( 7): Matrix.001 file - promoters60/1024203
tcgatga

SEQ ID NO: 44324 - DNA, 7 bp, Unknown
  misc_feature (1)..( 7): Matrix.001 file - promoters60/1024203
gaagtca

SEQ ID NO: 44325 - DNA, 6 bp, Unknown
  misc_feature (1)..( 6): Matrix.001 file - promoters60/1024203
tgttct

SEQ ID NO: 44326 - DNA, 9 bp, Unknown
  misc_feature (1)..( 9): Matrix.001 file - promoters60/1024214
aattgattt

SEQ ID NO: 44327 - DNA, 9 bp, Unknown
  misc_feature (1)..( 9): Matrix.001 file - promoters60/1024214
aattgattt

SEQ ID NO: 44328 - DNA, 8 bp, Unknown
  misc_feature (1)..( 8): Matrix.001 file - promoters60/1024214
attgattt

SEQ ID NO: 44329 - DNA, 8 bp, Unknown
  misc_feature (1)..( 8): Matrix.001 file - promoters60/1024234
caaaaatt

SEQ ID NO: 44330 - DNA, 19 bp, Unknown
  misc_feature (1)..( 19): Matrix.001 file - promoters60/1024234
atagaacaaaaattataca

SEQ ID NO: 44331 - DNA, 9 bp, Unknown
  misc_feature (1)..( 9): Matrix.001 file - promoters60/1024234
ttagatatg

SEQ ID NO: 44332 - DNA, 16 bp, Unknown
  misc_feature (1)..( 16): Matrix.001 file - promoters60/1024234
caatttgaaagaaaac

SEQ ID NO: 44333 - DNA, 9 bp, Unknown
  misc_feature (1)..( 9): Matrix.001 file - promoters60/1024234
ccggttcga

SEQ ID NO: 44334 - DNA, 9 bp, Unknown
  misc_feature (1)..( 9): Matrix.001 file - promoters60/1024234
tctaacagt

SEQ ID NO: 44335 - DNA, 9 bp, Unknown
  misc_feature (1)..( 9): Matrix.001 file - promoters60/1024257
attctaaat

SEQ ID NO: 44336 - DNA, 9 bp, Unknown
  misc_feature (1)..( 9): Matrix.001 file - promoters60/1024355
ctatactct

SEQ ID NO: 44337 - DNA, 6 bp, Unknown
  misc_feature (1)..( 6): Matrix.001 file - promoters60/1024355
tactcg

SEQ ID NO: 44338 - DNA, 7 bp, Unknown
  misc_feature (1)..( 7): Matrix.001 file - promoters60/1024355
tgagctc

SEQ ID NO: 44339 - DNA, 7 bp, Unknown
  misc_feature (1)..( 7): Matrix.001 file - promoters60/1024355
aaactaa

SEQ ID NO: 44340 - DNA, 6 bp, Unknown
  misc_feature (1)..( 6): Matrix.001 file - promoters60/1024355
ttaatc

SEQ ID NO: 44341 - DNA, 6 bp, Unknown
  misc_feature (1)..( 6): Matrix.001 file - promoters60/1024355
gattta

SEQ ID NO: 44342 - DNA, 6 bp, Unknown
  misc_feature (1)..( 6): Matrix.001 file - promoters60/1024355
atcttt

SEQ ID NO: 44343 - DNA, 8 bp, Unknown
  misc_feature (1)..( 8): Matrix.001 file - promoters60/1024355
atactaaa

SEQ ID NO: 44344 - DNA, 6 bp, Unknown
  misc_feature (1)..( 6): Matrix.001 file - promoters60/1024355
aaagcg

SEQ ID NO: 44345 - DNA, 8 bp, Unknown
  misc_feature (1)..( 8): Matrix.001 file - promoters60/1024355
aagaagct

SEQ ID NO: 44346 - DNA, 6 bp, Unknown
  misc_feature (1)..( 6): Matrix.001 file - promoters60/1024355
acttcc

SEQ ID NO: 44347 - DNA, 7 bp, Unknown
  misc_feature (1)..( 7): Matrix.001 file - promoters60/1024355
caccctc

SEQ ID NO: 44348 - DNA, 6 bp, Unknown
  misc_feature (1)..( 6): Matrix.001 file - promoters60/1024355
gattaa

SEQ ID NO: 44349 - DNA, 6 bp, Unknown
  misc_feature (1)..( 6): Matrix.001 file - promoters60/1024355
tttgat

SEQ ID NO: 44350 - DNA, 8 bp, Unknown
  misc_feature (1)..( 8): Matrix.001 file - promoters60/1024355
cttcatat

SEQ ID NO: 44351 - DNA, 8 bp, Unknown
  misc_feature (1)..( 8): Matrix.001 file - promoters60/1024355
attgttca

SEQ ID NO: 44352 - DNA, 8 bp, Unknown
  misc_feature (1)..( 8): Matrix.001 file - promoters60/1024355
tttaacaa

SEQ ID NO: 44353 - DNA, 11 bp, Unknown
  misc_feature (1)..( 11): Matrix.001 file - promoters60/1024367
taaaataaaag

SEQ ID NO: 44354 - DNA, 12 bp, Unknown
  misc_feature (1)..( 12): Matrix.001 file - promoters60/1024367
ccactatatata

SEQ ID NO: 44355 - DNA, 12 bp, Unknown
  misc_feature (1)..( 12): Matrix.001 file - promoters60/1024367
aaataaaataaa

SEQ ID NO: 44356 - DNA, 10 bp, Unknown
  misc_feature (1)..( 10): Matrix.001 file - promoters60/1024367
ataagtttga

SEQ ID NO: 44357 - DNA, 10 bp, Unknown
  misc_feature (1)..( 10): Matrix.001 file - promoters60/1024367
ataaacaaaa

SEQ ID NO: 44358 - DNA, 8 bp, Unknown
  misc_feature (1)..( 8): Matrix.001 file - promoters60/1024375
atgtaaat

SEQ ID NO: 44359 - DNA, 9 bp, Unknown
  misc_feature (1)..( 9): Matrix.001 file - promoters60/1024375
cagtgaaag

SEQ ID NO: 44360 - DNA, 7 bp, Unknown
  misc_feature (1)..( 7): Matrix.001 file - promoters60/1024375
taaacat

SEQ ID NO: 44361 - DNA, 7 bp, Unknown
  misc_feature (1)..( 7): Matrix.001 file - promoters60/1024375
aaattat

SEQ ID NO: 44362 - DNA, 11 bp, Unknown
  misc_feature (1)..( 11): Matrix.001 file - promoters60/1024375
agtgaaagcaa

SEQ ID NO: 44363 - DNA, 8 bp, Unknown
  misc_feature (1)..( 8): Matrix.001 file - promoters60/1024375
aatttgtt

SEQ ID NO: 44364 - DNA, 9 bp, Unknown
  misc_feature (1)..( 9): Matrix.001 file - promoters60/1024375
atatataaa

SEQ ID NO: 44365 - DNA, 8 bp, Unknown
  misc_feature (1)..( 8): Matrix.001 file - promoters60/1024375
ttgaaaca

SEQ ID NO: 44366 - DNA, 9 bp, Unknown
  misc_feature (1)..( 9): Matrix.001 file - promoters60/1024375
aagaaaaaa

SEQ ID NO: 44367 - DNA, 8 bp, Unknown
  misc_feature (1)..( 8): Matrix.001 file - promoters60/1024392
tttataaa

SEQ ID NO: 44368 - DNA, 6 bp, Unknown
  misc_feature (1)..( 6): Matrix.001 file - promoters60/1024431
ttttta

SEQ ID NO: 44369 - DNA, 6 bp, Unknown
  misc_feature (1)..( 6): Matrix.001 file - promoters60/1024431
ataatt

SEQ ID NO: 44370 - DNA, 7 bp, Unknown
  misc_feature (1)..( 7): Matrix.001 file - promoters60/1024431
tttcctt

SEQ ID NO: 44371 - DNA, 7 bp, Unknown
  misc_feature (1)..( 7): Matrix.001 file - promoters60/1024431
aaaagac

SEQ ID NO: 44372 - DNA, 6 bp, Unknown
  misc_feature (1)..( 6): Matrix.001 file - promoters60/1024431
aaactg

SEQ ID NO: 44373 - DNA, 15 bp, Unknown
  misc_feature (1)..( 15): Matrix.001 file - promoters60/1024431
aatacctcatttata

SEQ ID NO: 44374 - DNA, 8 bp, Unknown
  misc_feature (1)..( 8): Matrix.001 file - promoters60/1024431
ttcaaaac

SEQ ID NO: 44375 - DNA, 11 bp, Unknown
  misc_feature (1)..( 11): Matrix.001 file - promoters60/1024431
aaataaatcac

SEQ ID NO: 44376 - DNA, 6 bp, Unknown
  misc_feature (1)..( 6): Matrix.001 file - promoters60/1024431
tactaa

SEQ ID NO: 44377 - DNA, 7 bp, Unknown
  misc_feature (1)..( 7): Matrix.001 file - promoters60/1024431
aaaacaa

SEQ ID NO: 44378 - DNA, 6 bp, Unknown
  misc_feature (1)..( 6): Matrix.001 file - promoters60/1024431
atattc

SEQ ID NO: 44379 - DNA, 6 bp, Unknown
  misc_feature (1)..( 6): Matrix.001 file - promoters60/1024431
tgtaaa

SEQ ID NO: 44380 - DNA, 6 bp, Unknown
  misc_feature (1)..( 6): Matrix.001 file - promoters60/1024431
attaat

SEQ ID NO: 44381 - DNA, 10 bp, Unknown
  misc_feature (1)..( 10): Matrix.001 file - promoters60/1024431
attaatattg

SEQ ID NO: 44382 - DNA, 8 bp, Unknown
  misc_feature (1)..( 8): Matrix.001 file - promoters60/1024431
taaaaaaa

SEQ ID NO: 44383 - DNA, 7 bp, Unknown
  misc_feature (1)..( 7): Matrix.001 file - promoters60/1024431
acattat

SEQ ID NO: 44384 - DNA, 7 bp, Unknown
  misc_feature (1)..( 7): Matrix.001 file - promoters60/1024431
ttacagt

SEQ ID NO: 44385 - DNA, 11 bp, Unknown
  misc_feature (1)..( 11): Matrix.001 file - promoters60/1024431
gttattaaaaa

SEQ ID NO: 44386 - DNA, 13 bp, Unknown
  misc_feature (1)..( 13): Matrix.001 file - promoters60/1024499
aaaatattttttt

SEQ ID NO: 44387 - DNA, 13 bp, Unknown
  misc_feature (1)..( 13): Matrix.001 file - promoters60/1024499
tatatataaataa

SEQ ID NO: 44388 - DNA, 10 bp, Unknown
  misc_feature (1)..( 10): Matrix.001 file - promoters60/1024499
aacattaata

SEQ ID NO: 44389 - DNA, 10 bp, Unknown
  misc_feature (1)..( 10): Matrix.001 file - promoters60/1024562
aggcccaatt

SEQ ID NO: 44390 - DNA, 10 bp, Unknown
  misc_feature (1)..( 10): Matrix.001 file - promoters60/1024562
taacaacaga

SEQ ID NO: 44391 - DNA, 8 bp, Unknown
  misc_feature (1)..( 8): Matrix.001 file - promoters60/1024562
gaagcttt

SEQ ID NO: 44392 - DNA, 13 bp, Unknown
  misc_feature (1)..( 13): Matrix.001 file - promoters60/1024562
tagaaaaaaacaa

SEQ ID NO: 44393 - DNA, 10 bp, Unknown
  misc_feature (1)..( 10): Matrix.001 file - promoters60/1024611
tcaaaagagc

SEQ ID NO: 44394 - DNA, 6 bp, Unknown
  misc_feature (1)..( 6): Matrix.001 file - promoters60/1024611
atgaaa

SEQ ID NO: 44395 - DNA, 8 bp, Unknown
  misc_feature (1)..( 8): Matrix.001 file - promoters60/1024611
ttgaaaca

SEQ ID NO: 44396 - DNA, 6 bp, Unknown
  misc_feature (1)..( 6): Matrix.001 file - promoters60/1024611
aagact

SEQ ID NO: 44397 - DNA, 7 bp, Unknown
  misc_feature (1)..( 7): Matrix.001 file - promoters60/1024611
agacaaa

SEQ ID NO: 44398 - DNA, 7 bp, Unknown
  misc_feature (1)..( 7): Matrix.001 file - promoters60/1024611
ctaatcc

SEQ ID NO: 44399 - DNA, 6 bp, Unknown
  misc_feature (1)..( 6): Matrix.001 file - promoters60/1024611
gaaagt

SEQ ID NO: 44400 - DNA, 7 bp, Unknown
  misc_feature (1)..( 7): Matrix.001 file - promoters60/1024611
tacctga

SEQ ID NO: 44401 - DNA, 7 bp, Unknown
  misc_feature (1)..( 7): Matrix.001 file - promoters60/1024611
atgctaa

SEQ ID NO: 44402 - DNA, 8 bp, Unknown
  misc_feature (1)..( 8): Matrix.001 file - promoters60/1024611
cggaaatt

SEQ ID NO: 44403 - DNA, 10 bp, Unknown
  misc_feature (1)..( 10): Matrix.001 file - promoters60/1024611
tttgttttgt

SEQ ID NO: 44404 - DNA, 6 bp, Unknown
  misc_feature (1)..( 6): Matrix.001 file - promoters60/1024611
aaagaa

SEQ ID NO: 44405 - DNA, 7 bp, Unknown
  misc_feature (1)..( 7): Matrix.001 file - promoters60/1024611
tagagaa

SEQ ID NO: 44406 - DNA, 7 bp, Unknown
  misc_feature (1)..( 7): Matrix.001 file - promoters60/1024611
aaggaga

SEQ ID NO: 44407 - DNA, 7 bp, Unknown
  misc_feature (1)..( 7): Matrix.001 file - promoters60/1024611
aaagaag

SEQ ID NO: 44408 - DNA, 6 bp, Unknown
  misc_feature (1)..( 6): Matrix.001 file - promoters60/1024611
caacac

SEQ ID NO: 44409 - DNA, 6 bp, Unknown
  misc_feature (1)..( 6): Matrix.001 file - promoters60/1024611
ttgaag

SEQ ID NO: 44410 - DNA, 7 bp, Unknown
  misc_feature (1)..( 7): Matrix.001 file - promoters60/1024611
ctccatt

SEQ ID NO: 44411 - DNA, 7 bp, Unknown
  misc_feature (1)..( 7): Matrix.001 file - promoters60/1024662
ataaaaa

SEQ ID NO: 44412 - DNA, 9 bp, Unknown
  misc_feature (1)..( 9): Matrix.001 file - promoters60/1024713
gaaatttgc

SEQ ID NO: 44413 - DNA, 7 bp, Unknown
  misc_feature (1)..( 7): Matrix.001 file - promoters60/1024713
ttgataa

SEQ ID NO: 44414 - DNA, 6 bp, Unknown
  misc_feature (1)..( 6): Matrix.001 file - promoters60/1024713
gtatat

SEQ ID NO: 44415 - DNA, 8 bp, Unknown
  misc_feature (1)..( 8): Matrix.001 file - promoters60/1024713
acaaaagt

SEQ ID NO: 44416 - DNA, 8 bp, Unknown
  misc_feature (1)..( 8): Matrix.001 file - promoters60/1024713
aaaacgtt

SEQ ID NO: 44417 - DNA, 11 bp, Unknown
  misc_feature (1)..( 11): Matrix.001 file - promoters60/1024713
gaaatttgctt

SEQ ID NO: 44418 - DNA, 10 bp, Unknown
  misc_feature (1)..( 10): Matrix.001 file - promoters60/1024713
aaatttgttt

SEQ ID NO: 44419 - DNA, 6 bp, Unknown
  misc_feature (1)..( 6): Matrix.001 file - promoters60/1024713
accttt

SEQ ID NO: 44420 - DNA, 7 bp, Unknown
  misc_feature (1)..( 7): Matrix.001 file - promoters60/1024713
tggatca

SEQ ID NO: 44421 - DNA, 6 bp, Unknown
  misc_feature (1)..( 6): Matrix.001 file - promoters60/1024713
tatttt

SEQ ID NO: 44422 - DNA, 6 bp, Unknown
  misc_feature (1)..( 6): Matrix.001 file - promoters60/1024713
tttggt

SEQ ID NO: 44423 - DNA, 7 bp, Unknown
  misc_feature (1)..( 7): Matrix.001 file - promoters60/1024713
ctgtatc

SEQ ID NO: 44424 - DNA, 7 bp, Unknown
  misc_feature (1)..( 7): Matrix.001 file - promoters60/1024713
tctctga

SEQ ID NO: 44425 - DNA, 9 bp, Unknown
  misc_feature (1)..( 9): Matrix.001 file - promoters60/1024713
tccataaat

SEQ ID NO: 44426 - DNA, 8 bp, Unknown
  misc_feature (1)..( 8): Matrix.001 file - promoters60/1024713
aatctgat

SEQ ID NO: 44427 - DNA, 6 bp, Unknown
  misc_feature (1)..( 6): Matrix.001 file - promoters60/1024713
gaaaaa

SEQ ID NO: 44428 - DNA, 6 bp, Unknown
  misc_feature (1)..( 6): Matrix.001 file - promoters60/1024713
aacctt

SEQ ID NO: 44429 - DNA, 8 bp, Unknown
  misc_feature (1)..( 8): Matrix.001 file - promoters60/1024713
ggtaggaa

SEQ ID NO: 44430 - DNA, 7 bp, Unknown
  misc_feature (1)..( 7): Matrix.001 file - promoters60/1024737
attaaaa

SEQ ID NO: 44431 - DNA, 6 bp, Unknown
  misc_feature (1)..( 6): Matrix.001 file - promoters60/1024737
tattta

SEQ ID NO: 44432 - DNA, 7 bp, Unknown
  misc_feature (1)..( 7): Matrix.001 file - promoters60/1024737
gatattc

SEQ ID NO: 44433 - DNA, 6 bp, Unknown
  misc_feature (1)..( 6): Matrix.001 file - promoters60/1024737
aaaaca

SEQ ID NO: 44434 - DNA, 10 bp, Unknown
  misc_feature (1)..( 10): Matrix.001 file - promoters60/1024737
agaaaaaaaa

SEQ ID NO: 44435 - DNA, 6 bp, Unknown
  misc_feature (1)..( 6): Matrix.001 file - promoters60/1024737
ataata

SEQ ID NO: 44436 - DNA, 7 bp, Unknown
  misc_feature (1)..( 7): Matrix.001 file - promoters60/1024737
aaacaca

SEQ ID NO: 44437 - DNA, 7 bp, Unknown
  misc_feature (1)..( 7): Matrix.001 file - promoters60/1024737
actatag

SEQ ID NO: 44438 - DNA, 6 bp, Unknown
  misc_feature (1)..( 6): Matrix.001 file - promoters60/1024737
actata

SEQ ID NO: 44439 - DNA, 7 bp, Unknown
  misc_feature (1)..( 7): Matrix.001 file - promoters60/1024737
acagtta

SEQ ID NO: 44440 - DNA, 6 bp, Unknown
  misc_feature (1)..( 6): Matrix.001 file - promoters60/1024737
ttaatc

SEQ ID NO: 44441 - DNA, 8 bp, Unknown
  misc_feature (1)..( 8): Matrix.001 file - promoters60/1024737
tacaaaaa

SEQ ID NO: 44442 - DNA, 6 bp, Unknown
  misc_feature (1)..( 6): Matrix.001 file - promoters60/1024737
aattat

SEQ ID NO: 44443 - DNA, 7 bp, Unknown
  misc_feature (1)..( 7): Matrix.001 file - promoters60/1024737
taaacac

SEQ ID NO: 44444 - DNA, 6 bp, Unknown
  misc_feature (1)..( 6): Matrix.001 file - promoters60/1024737
caaaac

SEQ ID NO: 44445 - DNA, 8 bp, Unknown
  misc_feature (1)..( 8): Matrix.001 file - promoters60/1024737
tacaattt

SEQ ID NO: 44446 - DNA, 9 bp, Unknown
  misc_feature (1)..( 9): Matrix.001 file - promoters60/1024737
cagcttttt

SEQ ID NO: 44447 - DNA, 6 bp, Unknown
  misc_feature (1)..( 6): Matrix.001 file - promoters60/1024737
acaact

SEQ ID NO: 44448 - DNA, 7 bp, Unknown
  misc_feature (1)..( 7): Matrix.001 file - promoters60/1024737
tttctaa

SEQ ID NO: 44449 - DNA, 6 bp, Unknown
  misc_feature (1)..( 6): Matrix.001 file - promoters60/1024737
ctccaa

SEQ ID NO: 44450 - DNA, 7 bp, Unknown
  misc_feature (1)..( 7): Matrix.001 file - promoters60/1024737
tacaatt

SEQ ID NO: 44451 - DNA, 7 bp, Unknown
  misc_feature (1)..( 7): Matrix.001 file - promoters60/1024737
acataaa

SEQ ID NO: 44452 - DNA, 7 bp, Unknown
  misc_feature (1)..( 7): Matrix.001 file - promoters60/1024737
aaacttt

SEQ ID NO: 44453 - DNA, 6 bp, Unknown
  misc_feature (1)..( 6): Matrix.001 file - promoters60/1024737
taaata

SEQ ID NO: 44454 - DNA, 9 bp, Unknown
  misc_feature (1)..( 9): Matrix.001 file - promoters60/1024756
ataattttt

SEQ ID NO: 44455 - DNA, 13 bp, Unknown
  misc_feature (1)..( 13): Matrix.001 file - promoters60/1024756
taaaagtcaaaaa

SEQ ID NO: 44456 - DNA, 9 bp, Unknown
  misc_feature (1)..( 9): Matrix.001 file - promoters60/1024756
ttaccaaag

SEQ ID NO: 44457 - DNA, 8 bp, Unknown
  misc_feature (1)..( 8): Matrix.001 file - promoters60/1024840
gataacat

SEQ ID NO: 44458 - DNA, 7 bp, Unknown
  misc_feature (1)..( 7): Matrix.001 file - promoters60/1024840
acaactt

SEQ ID NO: 44459 - DNA, 8 bp, Unknown
  misc_feature (1)..( 8): Matrix.001 file - promoters60/1024840
ttcctttg

SEQ ID NO: 44460 - DNA, 6 bp, Unknown
  misc_feature (1)..( 6): Matrix.001 file - promoters60/1024840
aaaaca

SEQ ID NO: 44461 - DNA, 7 bp, Unknown
  misc_feature (1)..( 7): Matrix.001 file - promoters60/1024840
cataaga

SEQ ID NO: 44462 - DNA, 8 bp, Unknown
  misc_feature (1)..( 8): Matrix.001 file - promoters60/1024840
gaataaag

SEQ ID NO: 44463 - DNA, 7 bp, Unknown
  misc_feature (1)..( 7): Matrix.001 file - promoters60/1024840
aaaatca

SEQ ID NO: 44464 - DNA, 7 bp, Unknown
  misc_feature (1)..( 7): Matrix.001 file - promoters60/1024840
taataat

SEQ ID NO: 44465 - DNA, 10 bp, Unknown
  misc_feature (1)..( 10): Matrix.001 file - promoters60/1024840
tttatacaaa

SEQ ID NO: 44466 - DNA, 8 bp, Unknown
  misc_feature (1)..( 8): Matrix.001 file - promoters60/1024840
aaaataaa

SEQ ID NO: 44467 - DNA, 7 bp, Unknown
  misc_feature (1)..( 7): Matrix.001 file - promoters60/1024840
aataatg

SEQ ID NO: 44468 - DNA, 7 bp, Unknown
  misc_feature (1)..( 7): Matrix.001 file - promoters60/1024840
taaattg

SEQ ID NO: 44469 - DNA, 7 bp, Unknown
  misc_feature (1)..( 7): Matrix.001 file - promoters60/1024840
ctaaaaa

SEQ ID NO: 44470 - DNA, 6 bp, Unknown
  misc_feature (1)..( 6): Matrix.001 file - promoters60/1024840
aagtaa

SEQ ID NO: 44471 - DNA, 6 bp, Unknown
  misc_feature (1)..( 6): Matrix.001 file - promoters60/1024840
cattta

SEQ ID NO: 44472 - DNA, 8 bp, Unknown
  misc_feature (1)..( 8): Matrix.001 file - promoters60/1024840
aaaaagaa

SEQ ID NO: 44473 - DNA, 9 bp, Unknown
  misc_feature (1)..( 9): Matrix.001 file - promoters60/1024840
acatgaacg

SEQ ID NO: 44474 - DNA, 10 bp, Unknown
  misc_feature (1)..( 10): Matrix.001 file - promoters60/1024889
gttaaagatt

SEQ ID NO: 44475 - DNA, 9 bp, Unknown
  misc_feature (1)..( 9): Matrix.001 file - promoters60/1024889
aaacaaaat

SEQ ID NO: 44476 - DNA, 9 bp, Unknown
  misc_feature (1)..( 9): Matrix.001 file - promoters60/1024889
tttgtttgg

SEQ ID NO: 44477 - DNA, 10 bp, Unknown
  misc_feature (1)..( 10): Matrix.001 file - promoters60/1024889
caagtttaaa

SEQ ID NO: 44478 - DNA, 9 bp, Unknown
  misc_feature (1)..( 9): Matrix.001 file - promoters60/1024889
ccaatattt

SEQ ID NO: 44479 - DNA, 9 bp, Unknown
  misc_feature (1)..( 9): Matrix.001 file - promoters60/1024940
aaagtaaat

SEQ ID NO: 44480 - DNA, 8 bp, Unknown
  misc_feature (1)..( 8): Matrix.001 file - promoters60/1024940
aaatatat

SEQ ID NO: 44481 - DNA, 7 bp, Unknown
  misc_feature (1)..( 7): Matrix.001 file - promoters60/1024961
aaacaat

SEQ ID NO: 44482 - DNA, 7 bp, Unknown
  misc_feature (1)..( 7): Matrix.001 file - promoters60/1024961
ataattg

SEQ ID NO: 44483 - DNA, 14 bp, Unknown
  misc_feature (1)..( 14): Matrix.001 file - promoters60/1024961
cttggttttgcttg

SEQ ID NO: 44484 - DNA, 7 bp, Unknown
  misc_feature (1)..( 7): Matrix.001 file - promoters60/1024961
aaaaaag

SEQ ID NO: 44485 - DNA, 6 bp, Unknown
  misc_feature (1)..( 6): Matrix.001 file - promoters60/1024961
gagttt

SEQ ID NO: 44486 - DNA, 8 bp, Unknown
  misc_feature (1)..( 8): Matrix.001 file - promoters60/1024961
ttctattc

SEQ ID NO: 44487 - DNA, 9 bp, Unknown
  misc_feature (1)..( 9): Matrix.001 file - promoters60/1024961
atctcactt

SEQ ID NO: 44488 - DNA, 11 bp, Unknown
  misc_feature (1)..( 11): Matrix.001 file - promoters60/1024961
agagagcatct

SEQ ID NO: 44489 - DNA, 7 bp, Unknown
  misc_feature (1)..( 7): Matrix.001 file - promoters60/1024961
agagaga

SEQ ID NO: 44490 - DNA, 7 bp, Unknown
  misc_feature (1)..( 7): Matrix.001 file - promoters60/1024961
tgagaaa

SEQ ID NO: 44491 - DNA, 6 bp, Unknown
  misc_feature (1)..( 6): Matrix.001 file - promoters60/1024961
tttcca

SEQ ID NO: 44492 - DNA, 8 bp, Unknown
  misc_feature (1)..( 8): Matrix.001 file - promoters60/1024961
aaataaat

SEQ ID NO: 44493 - DNA, 6 bp, Unknown
  misc_feature (1)..( 6): Matrix.001 file - promoters60/1024961
ttaatt

SEQ ID NO: 44494 - DNA, 6 bp, Unknown
  misc_feature (1)..( 6): Matrix.001 file - promoters60/1024961
aatttt

SEQ ID NO: 44495 - DNA, 6 bp, Unknown
  misc_feature (1)..( 6): Matrix.001 file - promoters60/1024961
ttatat

SEQ ID NO: 44496 - DNA, 7 bp, Unknown
  misc_feature (1)..( 7): Matrix.001 file - promoters60/1024961
aataaaa

SEQ ID NO: 44497 - DNA, 8 bp, Unknown
  misc_feature (1)..( 8): Matrix.001 file - promoters60/1024961
aataaata

SEQ ID NO: 44498 - DNA, 8 bp, Unknown
  misc_feature (1)..( 8): Matrix.001 file - promoters60/1024961
gaaactta

SEQ ID NO: 44499 - DNA, 8 bp, Unknown
  misc_feature (1)..( 8): Matrix.001 file - promoters60/1024961
ctttatat

SEQ ID NO: 44500 - DNA, 7 bp, Unknown
  misc_feature (1)..( 7): Matrix.001 file - promoters60/1024961
ttaaaat

SEQ ID NO: 44501 - DNA, 7 bp, Unknown
  misc_feature (1)..( 7): Matrix.001 file - promoters60/1024961
ttaaaat

SEQ ID NO: 44502 - DNA, 7 bp, Unknown
  misc_feature (1)..( 7): Matrix.001 file - promoters60/1024961
atatagc

SEQ ID NO: 44503 - DNA, 9 bp, Unknown
  misc_feature (1)..( 9): Matrix.001 file - promoters60/1024969
agaaagtag

SEQ ID NO: 44504 - DNA, 7 bp, Unknown
  misc_feature (1)..( 7): Matrix.001 file - promoters60/1024969
aaaatca

SEQ ID NO: 44505 - DNA, 8 bp, Unknown
  misc_feature (1)..( 8): Matrix.001 file - promoters60/1024969
gttactta

SEQ ID NO: 44506 - DNA, 6 bp, Unknown
  misc_feature (1)..( 6): Matrix.001 file - promoters60/1024969
gacttt

SEQ ID NO: 44507 - DNA, 8 bp, Unknown
  misc_feature (1)..( 8): Matrix.001 file - promoters60/1024969
ttaacata

SEQ ID NO: 44508 - DNA, 8 bp, Unknown
  misc_feature (1)..( 8): Matrix.001 file - promoters60/1024969
gttcttaa

SEQ ID NO: 44509 - DNA, 7 bp, Unknown
  misc_feature (1)..( 7): Matrix.001 file - promoters60/1024969
atcttct

SEQ ID NO: 44510 - DNA, 8 bp, Unknown
  misc_feature (1)..( 8): Matrix.001 file - promoters60/1024969
aaaaatat

SEQ ID NO: 44511 - DNA, 6 bp, Unknown
  misc_feature (1)..( 6): Matrix.001 file - promoters60/1024969
ggaaaa

SEQ ID NO: 44512 - DNA, 6 bp, Unknown
  misc_feature (1)..( 6): Matrix.001 file - promoters60/1024969
gatggt

SEQ ID NO: 44513 - DNA, 7 bp, Unknown
  misc_feature (1)..( 7): Matrix.001 file - promoters60/1024969
tctcttg

SEQ ID NO: 44514 - DNA, 7 bp, Unknown
  misc_feature (1)..( 7): Matrix.001 file - promoters60/1024969
tttactc

SEQ ID NO: 44515 - DNA, 7 bp, Unknown
  misc_feature (1)..( 7): Matrix.001 file - promoters60/1024969
ctgaaac

SEQ ID NO: 44516 - DNA, 8 bp, Unknown
  misc_feature (1)..( 8): Matrix.001 file - promoters60/1025087
tttttgaa

SEQ ID NO: 44517 - DNA, 8 bp, Unknown
  misc_feature (1)..( 8): Matrix.001 file - promoters60/1025087
aagttttt

SEQ ID NO: 44518 - DNA, 7 bp, Unknown
  misc_feature (1)..( 7): Matrix.001 file - promoters60/1025087
ttgaaat

SEQ ID NO: 44519 - DNA, 6 bp, Unknown
  misc_feature (1)..( 6): Matrix.001 file - promoters60/1025087
agattt

SEQ ID NO: 44520 - DNA, 9 bp, Unknown
  misc_feature (1)..( 9): Matrix.001 file - promoters60/1025087
ttcgataaa

SEQ ID NO: 44521 - DNA, 7 bp, Unknown
  misc_feature (1)..( 7): Matrix.001 file - promoters60/1025087
cttagtt

SEQ ID NO: 44522 - DNA, 9 bp, Unknown
  misc_feature (1)..( 9): Matrix.001 file - promoters60/1025087
gaaataaaa

SEQ ID NO: 44523 - DNA, 7 bp, Unknown
  misc_feature (1)..( 7): Matrix.001 file - promoters60/1025087
aaataaa

SEQ ID NO: 44524 - DNA, 6 bp, Unknown
  misc_feature (1)..( 6): Matrix.001 file - promoters60/1025087
caattt

SEQ ID NO: 44525 - DNA, 6 bp, Unknown
  misc_feature (1)..( 6): Matrix.001 file - promoters60/1025087
tctttt

SEQ ID NO: 44526 - DNA, 7 bp, Unknown
  misc_feature (1)..( 7): Matrix.001 file - promoters60/1025087
aacaatc

SEQ ID NO: 44527 - DNA, 8 bp, Unknown
  misc_feature (1)..( 8): Matrix.001 file - promoters60/1025087
aataccaa

SEQ ID NO: 44528 - DNA, 6 bp, Unknown
  misc_feature (1)..( 6): Matrix.001 file - promoters60/1025087
tttttt

SEQ ID NO: 44529 - DNA, 6 bp, Unknown
  misc_feature (1)..( 6): Matrix.001 file - promoters60/1025087
atagaa

SEQ ID NO: 44530 - DNA, 6 bp, Unknown
  misc_feature (1)..( 6): Matrix.001 file - promoters60/1025087
taagta

SEQ ID NO: 44531 - DNA, 9 bp, Unknown
  misc_feature (1)..( 9): Matrix.001 file - promoters60/1025087
aaaagaaaa

SEQ ID NO: 44532 - DNA, 6 bp, Unknown
  misc_feature (1)..( 6): Matrix.001 file - promoters60/1025087
aattaa

SEQ ID NO: 44533 - DNA, 7 bp, Unknown
  misc_feature (1)..( 7): Matrix.001 file - promoters60/1025100
caaaaat

SEQ ID NO: 44534 - DNA, 13 bp, Unknown
  misc_feature (1)..( 13): Matrix.001 file - promoters60/1025100
gataaaaaaaata

SEQ ID NO: 44535 - DNA, 7 bp, Unknown
  misc_feature (1)..( 7): Matrix.001 file - promoters60/1025100
ataatta

SEQ ID NO: 44536 - DNA, 9 bp, Unknown
  misc_feature (1)..( 9): Matrix.001 file - promoters60/1025100
aaattgtat

SEQ ID NO: 44537 - DNA, 6 bp, Unknown
  misc_feature (1)..( 6): Matrix.001 file - promoters60/1025100
tagttg

SEQ ID NO: 44538 - DNA, 6 bp, Unknown
  misc_feature (1)..( 6): Matrix.001 file - promoters60/1025100
tcaacc

SEQ ID NO: 44539 - DNA, 6 bp, Unknown
  misc_feature (1)..( 6): Matrix.001 file - promoters60/1025100
aaatca

SEQ ID NO: 44540 - DNA, 9 bp, Unknown
  misc_feature (1)..( 9): Matrix.001 file - promoters60/1025100
tatagatca

SEQ ID NO: 44541 - DNA, 6 bp, Unknown
  misc_feature (1)..( 6): Matrix.001 file - promoters60/1025100
tttgaa

SEQ ID NO: 44542 - DNA, 9 bp, Unknown
  misc_feature (1)..( 9): Matrix.001 file - promoters60/1025100
atagaaata

SEQ ID NO: 44543 - DNA, 6 bp, Unknown
  misc_feature (1)..( 6): Matrix.001 file - promoters60/1025100
aatttt

SEQ ID NO: 44544 - DNA, 8 bp, Unknown
  misc_feature (1)..( 8): Matrix.001 file - promoters60/1025100
acaatttt

SEQ ID NO: 44545 - DNA, 7 bp, Unknown
  misc_feature (1)..( 7): Matrix.001 file - promoters60/1025100
ttataaa

SEQ ID NO: 44546 - DNA, 9 bp, Unknown
  misc_feature (1)..( 9): Matrix.001 file - promoters60/1025100
attaattca

SEQ ID NO: 44547 - DNA, 6 bp, Unknown
  misc_feature (1)..( 6): Matrix.001 file - promoters60/1025100
attcga

SEQ ID NO: 44548 - DNA, 7 bp, Unknown
  misc_feature (1)..( 7): Matrix.001 file - promoters60/1025100
atacaat

SEQ ID NO: 44549 - DNA, 7 bp, Unknown
  misc_feature (1)..( 7): Matrix.001 file - promoters60/1025100
acaaaaa

SEQ ID NO: 44550 - DNA, 8 bp, Unknown
  misc_feature (1)..( 8): Matrix.001 file - promoters60/1025117
ttttttaa

SEQ ID NO: 44551 - DNA, 14 bp, Unknown
  misc_feature (1)..( 14): Matrix.001 file - promoters60/1025117
ttgtttaatgtttt

SEQ ID NO: 44552 - DNA, 9 bp, Unknown
  misc_feature (1)..( 9): Matrix.001 file - promoters60/1025117
atagagttt

SEQ ID NO: 44553 - DNA, 8 bp, Unknown
  misc_feature (1)..( 8): Matrix.001 file - promoters60/1025117
tttggtct

SEQ ID NO: 44554 - DNA, 6 bp, Unknown
  misc_feature (1)..( 6): Matrix.001 file - promoters60/1025117
agaaaa

SEQ ID NO: 44555 - DNA, 10 bp, Unknown
  misc_feature (1)..( 10): Matrix.001 file - promoters60/1025117
tattaaaata

SEQ ID NO: 44556 - DNA, 7 bp, Unknown
  misc_feature (1)..( 7): Matrix.001 file - promoters60/1025117
gttcaat

SEQ ID NO: 44557 - DNA, 9 bp, Unknown
  misc_feature (1)..( 9): Matrix.001 file - promoters60/1025117
cttaattac

SEQ ID NO: 44558 - DNA, 17 bp, Unknown
  misc_feature (1)..( 17): Matrix.001 file - promoters60/1025117
tagttgttcaatatttt

SEQ ID NO: 44559 - DNA, 7 bp, Unknown
  misc_feature (1)..( 7): Matrix.001 file - promoters60/1025117
tttggtg

SEQ ID NO: 44560 - DNA, 6 bp, Unknown
  misc_feature (1)..( 6): Matrix.001 file - promoters60/1025117
tcttta

SEQ ID NO: 44561 - DNA, 6 bp, Unknown
  misc_feature (1)..( 6): Matrix.001 file - promoters60/1025117
atcaag

SEQ ID NO: 44562 - DNA, 6 bp, Unknown
  misc_feature (1)..( 6): Matrix.001 file - promoters60/1025117
atattt

SEQ ID NO: 44563 - DNA, 6 bp, Unknown
  misc_feature (1)..( 6): Matrix.001 file - promoters60/1025117
ttctaa

SEQ ID NO: 44564 - DNA, 7 bp, Unknown
  misc_feature (1)..( 7): Matrix.001 file - promoters60/1025117
cagcaag

SEQ ID NO: 44565 - DNA, 6 bp, Unknown
  misc_feature (1)..( 6): Matrix.001 file - promoters60/1025202
atagat

SEQ ID NO: 44566 - DNA, 6 bp, Unknown
  misc_feature (1)..( 6): Matrix.001 file - promoters60/1025202
taaaga

SEQ ID NO: 44567 - DNA, 7 bp, Unknown
  misc_feature (1)..( 7): Matrix.001 file - promoters60/1025202
ataattt

SEQ ID NO: 44568 - DNA, 7 bp, Unknown
  misc_feature (1)..( 7): Matrix.001 file - promoters60/1025202
tttgctt

SEQ ID NO: 44569 - DNA, 8 bp, Unknown
  misc_feature (1)..( 8): Matrix.001 file - promoters60/1025202
atttctgt

SEQ ID NO: 44570 - DNA, 8 bp, Unknown
  misc_feature (1)..( 8): Matrix.001 file - promoters60/1025202
tttctctc

SEQ ID NO: 44571 - DNA, 6 bp, Unknown
  misc_feature (1)..( 6): Matrix.001 file - promoters60/1025202
agaact

SEQ ID NO: 44572 - DNA, 6 bp, Unknown
  misc_feature (1)..( 6): Matrix.001 file - promoters60/1025202
gctggt

SEQ ID NO: 44573 - DNA, 6 bp, Unknown
  misc_feature (1)..( 6): Matrix.001 file - promoters60/1025202
tctctg

SEQ ID NO: 44574 - DNA, 6 bp, Unknown
  misc_feature (1)..( 6): Matrix.001 file - promoters60/1025202
atatgg

SEQ ID NO: 44575 - DNA, 6 bp, Unknown
  misc_feature (1)..( 6): Matrix.001 file - promoters60/1025202
ttgttg

SEQ ID NO: 44576 - DNA, 7 bp, Unknown
  misc_feature (1)..( 7): Matrix.001 file - promoters60/1025202
ttaatgt

SEQ ID NO: 44577 - DNA, 6 bp, Unknown
  misc_feature (1)..( 6): Matrix.001 file - promoters60/1025202
agtaaa

SEQ ID NO: 44578 - DNA, 7 bp, Unknown
  misc_feature (1)..( 7): Matrix.001 file - promoters60/1025202
aatcggg

SEQ ID NO: 44579 - DNA, 8 bp, Unknown
  misc_feature (1)..( 8): Matrix.001 file - promoters60/1025202
gaaacaaa

SEQ ID NO: 44580 - DNA, 10 bp, Unknown
  misc_feature (1)..( 10): Matrix.001 file - promoters60/1025202
ggaaaagaaa

SEQ ID NO: 44581 - DNA, 7 bp, Unknown
  misc_feature (1)..( 7): Matrix.001 file - promoters60/1025202
cccacta

SEQ ID NO: 44582 - DNA, 9 bp, Unknown
  misc_feature (1)..( 9): Matrix.001 file - promoters60/1025202
aaagaaaag

SEQ ID NO: 44583 - DNA, 7 bp, Unknown
  misc_feature (1)..( 7): Matrix.001 file - promoters60/1025202
gtatata

SEQ ID NO: 44584 - DNA, 8 bp, Unknown
  misc_feature (1)..( 8): Matrix.001 file - promoters60/1025211
aaaaaata

SEQ ID NO: 44585 - DNA, 9 bp, Unknown
  misc_feature (1)..( 9): Matrix.001 file - promoters60/1025211
ataataaaa

SEQ ID NO: 44586 - DNA, 8 bp, Unknown
  misc_feature (1)..( 8): Matrix.001 file - promoters60/1025211
aaaacaaa

SEQ ID NO: 44587 - DNA, 14 bp, Unknown
  misc_feature (1)..( 14): Matrix.001 file - promoters60/1025211
ttcatttgaatgaa

SEQ ID NO: 44588 - DNA, 10 bp, Unknown
  misc_feature (1)..( 10): Matrix.001 file - promoters60/1025211
aaaaaataaa

SEQ ID NO: 44589 - DNA, 9 bp, Unknown
  misc_feature (1)..( 9): Matrix.001 file - promoters60/1025211
gaaaaaaat

SEQ ID NO: 44590 - DNA, 9 bp, Unknown
  misc_feature (1)..( 9): Matrix.001 file - promoters60/1025211
attttataa

SEQ ID NO: 44591 - DNA, 7 bp, Unknown
  misc_feature (1)..( 7): Matrix.001 file - promoters60/1025340
atgagaa

SEQ ID NO: 44592 - DNA, 8 bp, Unknown
  misc_feature (1)..( 8): Matrix.001 file - promoters60/1025340
agaagatg

SEQ ID NO: 44593 - DNA, 9 bp, Unknown
  misc_feature (1)..( 9): Matrix.001 file - promoters60/1025340
acattgttt

SEQ ID NO: 44594 - DNA, 7 bp, Unknown
  misc_feature (1)..( 7): Matrix.001 file - promoters60/1025340
aaactta

SEQ ID NO: 44595 - DNA, 11 bp, Unknown
  misc_feature (1)..( 11): Matrix.001 file - promoters60/1025468
ttttgtagatt

SEQ ID NO: 44596 - DNA, 8 bp, Unknown
  misc_feature (1)..( 8): Matrix.001 file - promoters60/1025468
ttatatat

SEQ ID NO: 44597 - DNA, 10 bp, Unknown
  misc_feature (1)..( 10): Matrix.001 file - promoters60/1025468
gaaaatatat

SEQ ID NO: 44598 - DNA, 9 bp, Unknown
  misc_feature (1)..( 9): Matrix.001 file - promoters60/1025468
aaatatagc

SEQ ID NO: 44599 - DNA, 10 bp, Unknown
  misc_feature (1)..( 10): Matrix.001 file - promoters60/1025468
ttagaaaagt

SEQ ID NO: 44600 - DNA, 11 bp, Unknown
  misc_feature (1)..( 11): Matrix.001 file - promoters60/1025468
ctagattaagt

SEQ ID NO: 44601 - DNA, 8 bp, Unknown
  misc_feature (1)..( 8): Matrix.001 file - promoters60/1025468
gtaaatag

SEQ ID NO: 44602 - DNA, 9 bp, Unknown
  misc_feature (1)..( 9): Matrix.001 file - promoters60/1025468
ataaaaaca

SEQ ID NO: 44603 - DNA, 6 bp, Unknown
  misc_feature (1)..( 6): Matrix.001 file - promoters60/1025468
aaaaca

SEQ ID NO: 44604 - DNA, 9 bp, Unknown
  misc_feature (1)..( 9): Matrix.001 file - promoters60/1025468
taaaagatg

SEQ ID NO: 44605 - DNA, 9 bp, Unknown
  misc_feature (1)..( 9): Matrix.001 file - promoters60/1025468
aaccaaagc

SEQ ID NO: 44606 - DNA, 9 bp, Unknown
  misc_feature (1)..( 9): Matrix.001 file - promoters60/1025471
aacgtatgt

SEQ ID NO: 44607 - DNA, 9 bp, Unknown
  misc_feature (1)..( 9): Matrix.001 file - promoters60/1025471
tgactaaga

SEQ ID NO: 44608 - DNA, 10 bp, Unknown
  misc_feature (1)..( 10): Matrix.001 file - promoters60/1025511
aaaataataa

SEQ ID NO: 44609 - DNA, 10 bp, Unknown
  misc_feature (1)..( 10): Matrix.001 file - promoters60/1025582
gagacaattg

SEQ ID NO: 44610 - DNA, 7 bp, Unknown
  misc_feature (1)..( 7): Matrix.001 file - promoters60/1025582
cagagat

SEQ ID NO: 44611 - DNA, 12 bp, Unknown
  misc_feature (1)..( 12): Matrix.001 file - promoters60/1025642
acataataatta

SEQ ID NO: 44612 - DNA, 11 bp, Unknown
  misc_feature (1)..( 11): Matrix.001 file - promoters60/1025642
ctaattattta

SEQ ID NO: 44613 - DNA, 9 bp, Unknown
  misc_feature (1)..( 9): Matrix.001 file - promoters60/1025642
aaaaatatt

SEQ ID NO: 44614 - DNA, 15 bp, Unknown
  misc_feature (1)..( 15): Matrix.001 file - promoters60/1025642
tttctaaaaaaatat

SEQ ID NO: 44615 - DNA, 8 bp, Unknown
  misc_feature (1)..( 8): Matrix.001 file - promoters60/1025683
cttatata

SEQ ID NO: 44616 - DNA, 12 bp, Unknown
  misc_feature (1)..( 12): Matrix.001 file - promoters60/1025683
ctatttaaaatg

SEQ ID NO: 44617 - DNA, 14 bp, Unknown
  misc_feature (1)..( 14): Matrix.001 file - promoters60/1025683
tataatgaaatttt

SEQ ID NO: 44618 - DNA, 13 bp, Unknown
  misc_feature (1)..( 13): Matrix.001 file - promoters60/1025683
aagaatataaatt

SEQ ID NO: 44619 - DNA, 10 bp, Unknown
  misc_feature (1)..( 10): Matrix.001 file - promoters60/1025707
aatcatacaa

SEQ ID NO: 44620 - DNA, 6 bp, Unknown
  misc_feature (1)..( 6): Matrix.001 file - promoters60/1025707
tcttga

SEQ ID NO: 44621 - DNA, 7 bp, Unknown
  misc_feature (1)..( 7): Matrix.001 file - promoters60/1025707
tagaata

SEQ ID NO: 44622 - DNA, 11 bp, Unknown
  misc_feature (1)..( 11): Matrix.001 file - promoters60/1025707
acacattaagt

SEQ ID NO: 44623 - DNA, 7 bp, Unknown
  misc_feature (1)..( 7): Matrix.001 file - promoters60/1025707
caaataa

SEQ ID NO: 44624 - DNA, 7 bp, Unknown
  misc_feature (1)..( 7): Matrix.001 file - promoters60/1025707
ctaaata

SEQ ID NO: 44625 - DNA, 6 bp, Unknown
  misc_feature (1)..( 6): Matrix.001 file - promoters60/1025707
tataaa

SEQ ID NO: 44626 - DNA, 7 bp, Unknown
  misc_feature (1)..( 7): Matrix.001 file - promoters60/1025707
cacacaa

SEQ ID NO: 44627 - DNA, 7 bp, Unknown
  misc_feature (1)..( 7): Matrix.001 file - promoters60/1025707
aatatca

SEQ ID NO: 44628 - DNA, 8 bp, Unknown
  misc_feature (1)..( 8): Matrix.001 file - promoters60/1025707
atacaaat

SEQ ID NO: 44629 - DNA, 7 bp, Unknown
  misc_feature (1)..( 7): Matrix.001 file - promoters60/1025707
ataaata

SEQ ID NO: 44630 - DNA, 8 bp, Unknown
  misc_feature (1)..( 8): Matrix.001 file - promoters60/1025707
aataataa

SEQ ID NO: 44631 - DNA, 8 bp, Unknown
  misc_feature (1)..( 8): Matrix.001 file - promoters60/1025707
acaaaaag

SEQ ID NO: 44632 - DNA, 6 bp, Unknown
  misc_feature (1)..( 6): Matrix.001 file - promoters60/1025707
ataaac

SEQ ID NO: 44633 - DNA, 7 bp, Unknown
  misc_feature (1)..( 7): Matrix.001 file - promoters60/1025707
tgaacaa

SEQ ID NO: 44634 - DNA, 6 bp, Unknown
  misc_feature (1)..( 6): Matrix.001 file - promoters60/1025707
cgatta

SEQ ID NO: 44635 - DNA, 6 bp, Unknown
  misc_feature (1)..( 6): Matrix.001 file - promoters60/1025707
ttttga

SEQ ID NO: 44636 - DNA, 6 bp, Unknown
  misc_feature (1)..( 6): Matrix.001 file - promoters60/1025707
acagta

SEQ ID NO: 44637 - DNA, 7 bp, Unknown
  misc_feature (1)..( 7): Matrix.001 file - promoters60/1025707
taaaata

SEQ ID NO: 44638 - DNA, 6 bp, Unknown
  misc_feature (1)..( 6): Matrix.001 file - promoters60/1025707
ttgaca

SEQ ID NO: 44639 - DNA, 7 bp, Unknown
  misc_feature (1)..( 7): Matrix.001 file - promoters60/1025707
aaccaag

SEQ ID NO: 44640 - DNA, 8 bp, Unknown
  misc_feature (1)..( 8): Matrix.001 file - promoters60/1025707
acgatgac

SEQ ID NO: 44641 - DNA, 11 bp, Unknown
  misc_feature (1)..( 11): Matrix.001 file - promoters60/1025791
ttaaccttaga

SEQ ID NO: 44642 - DNA, 7 bp, Unknown
  misc_feature (1)..( 7): Matrix.001 file - promoters60/1025791
aattggg

SEQ ID NO: 44643 - DNA, 8 bp, Unknown
  misc_feature (1)..( 8): Matrix.001 file - promoters60/1026014
aatatttt

SEQ ID NO: 44644 - DNA, 11 bp, Unknown
  misc_feature (1)..( 11): Matrix.001 file - promoters60/1026014
tttataacaaa

SEQ ID NO: 44645 - DNA, 9 bp, Unknown
  misc_feature (1)..( 9): Matrix.001 file - promoters60/1026014
taaaaaaaa

SEQ ID NO: 44646 - DNA, 11 bp, Unknown
  misc_feature (1)..( 11): Matrix.001 file - promoters60/1026014
gattttaaaaa

SEQ ID NO: 44647 - DNA, 10 bp, Unknown
  misc_feature (1)..( 10): Matrix.001 file - promoters60/1026014
atttatttga

SEQ ID NO: 44648 - DNA, 14 bp, Unknown
  misc_feature (1)..( 14): Matrix.001 file - promoters60/1026014
aattattttatttt

SEQ ID NO: 44649 - DNA, 9 bp, Unknown
  misc_feature (1)..( 9): Matrix.001 file - promoters60/1026014
acaaaattg

SEQ ID NO: 44650 - DNA, 12 bp, Unknown
  misc_feature (1)..( 12): Matrix.001 file - promoters60/1026014
aaagaaaaaata

SEQ ID NO: 44651 - DNA, 12 bp, Unknown
  misc_feature (1)..( 12): Matrix.001 file - promoters60/1026014
aataattttata

SEQ ID NO: 44652 - DNA, 10 bp, Unknown
  misc_feature (1)..( 10): Matrix.001 file - promoters60/1026014
aaaaaaaatt

SEQ ID NO: 44653 - DNA, 7 bp, Unknown
  misc_feature (1)..( 7): Matrix.001 file - promoters60/1026039
taacgtt

SEQ ID NO: 44654 - DNA, 15 bp, Unknown
  misc_feature (1)..( 15): Matrix.001 file - promoters60/1026039
aaaagcatacaaata

SEQ ID NO: 44655 - DNA, 6 bp, Unknown
  misc_feature (1)..( 6): Matrix.001 file - promoters60/1026039
tcaact

SEQ ID NO: 44656 - DNA, 7 bp, Unknown
  misc_feature (1)..( 7): Matrix.001 file - promoters60/1026039
aacgtcg

SEQ ID NO: 44657 - DNA, 7 bp, Unknown
  misc_feature (1)..( 7): Matrix.001 file - promoters60/1026039
ctattat

SEQ ID NO: 44658 - DNA, 8 bp, Unknown
  misc_feature (1)..( 8): Matrix.001 file - promoters60/1026039
attatatt

SEQ ID NO: 44659 - DNA, 9 bp, Unknown
  misc_feature (1)..( 9): Matrix.001 file - promoters60/1026039
aaataacaa

SEQ ID NO: 44660 - DNA, 7 bp, Unknown
  misc_feature (1)..( 7): Matrix.001 file - promoters60/1026039
ttaatca

SEQ ID NO: 44661 - DNA, 6 bp, Unknown
  misc_feature (1)..( 6): Matrix.001 file - promoters60/1026039
tttctt

SEQ ID NO: 44662 - DNA, 6 bp, Unknown
  misc_feature (1)..( 6): Matrix.001 file - promoters60/1026039
caagaa

SEQ ID NO: 44663 - DNA, 8 bp, Unknown
  misc_feature (1)..( 8): Matrix.001 file - promoters60/1026039
tggttatt

SEQ ID NO: 44664 - DNA, 6 bp, Unknown
  misc_feature (1)..( 6): Matrix.001 file - promoters60/1026039
ctttgt

SEQ ID NO: 44665 - DNA, 7 bp, Unknown
  misc_feature (1)..( 7): Matrix.001 file - promoters60/1026039
tttcaac

SEQ ID NO: 44666 - DNA, 6 bp, Unknown
  misc_feature (1)..( 6): Matrix.001 file - promoters60/1026039
attaaa

SEQ ID NO: 44667 - DNA, 7 bp, Unknown
  misc_feature (1)..( 7): Matrix.001 file - promoters60/1026039
tacataa

SEQ ID NO: 44668 - DNA, 6 bp, Unknown
  misc_feature (1)..( 6): Matrix.001 file - promoters60/1026039
gtaaaa

SEQ ID NO: 44669 - DNA, 9 bp, Unknown
  misc_feature (1)..( 9): Matrix.001 file - promoters60/1026039
aaatagtta

SEQ ID NO: 44670 - DNA, 8 bp, Unknown
  misc_feature (1)..( 8): Matrix.001 file - promoters60/1026039
caaaactt

SEQ ID NO: 44671 - DNA, 6 bp, Unknown
  misc_feature (1)..( 6): Matrix.001 file - promoters60/1026039
gttcta

SEQ ID NO: 44672 - DNA, 7 bp, Unknown
  misc_feature (1)..( 7): Matrix.001 file - promoters60/1026039
atacttt

SEQ ID NO: 44673 - DNA, 5 bp, Unknown
  misc_feature (1)..( 5): Matrix.001 file - promoters60/1026160
aaaaa

SEQ ID NO: 44674 - DNA, 9 bp, Unknown
  misc_feature (1)..( 9): Matrix.001 file - promoters60/1026160
actataaaa

SEQ ID NO: 44675 - DNA, 6 bp, Unknown
  misc_feature (1)..( 6): Matrix.001 file - promoters60/1026353
ttttag

SEQ ID NO: 44676 - DNA, 6 bp, Unknown
  misc_feature (1)..( 6): Matrix.001 file - promoters60/1026353
agtttt

SEQ ID NO: 44677 - DNA, 10 bp, Unknown
  misc_feature (1)..( 10): Matrix.001 file - promoters60/1026353
ttataattta

SEQ ID NO: 44678 - DNA, 10 bp, Unknown
  misc_feature (1)..( 10): Matrix.001 file - promoters60/1026353
atgcattata

SEQ ID NO: 44679 - DNA, 7 bp, Unknown
  misc_feature (1)..( 7): Matrix.001 file - promoters60/1026353
taggatt

SEQ ID NO: 44680 - DNA, 7 bp, Unknown
  misc_feature (1)..( 7): Matrix.001 file - promoters60/1026353
caaatca

SEQ ID NO: 44681 - DNA, 12 bp, Unknown
  misc_feature (1)..( 12): Matrix.001 file - promoters60/1026353
ttccactatgtt

SEQ ID NO: 44682 - DNA, 6 bp, Unknown
  misc_feature (1)..( 6): Matrix.001 file - promoters60/1026353
gataat

SEQ ID NO: 44683 - DNA, 8 bp, Unknown
  misc_feature (1)..( 8): Matrix.001 file - promoters60/1026353
aagagaaa

SEQ ID NO: 44684 - DNA, 8 bp, Unknown
  misc_feature (1)..( 8): Matrix.001 file - promoters60/1026353
tttgttgt

SEQ ID NO: 44685 - DNA, 7 bp, Unknown
  misc_feature (1)..( 7): Matrix.001 file - promoters60/1026353
tagaagc

SEQ ID NO: 44686 - DNA, 8 bp, Unknown
  misc_feature (1)..( 8): Matrix.001 file - promoters60/1026353
gactaaat

SEQ ID NO: 44687 - DNA, 7 bp, Unknown
  misc_feature (1)..( 7): Matrix.001 file - promoters60/1026353
tttaggt

SEQ ID NO: 44688 - DNA, 8 bp, Unknown
  misc_feature (1)..( 8): Matrix.001 file - promoters60/1026353
cctcgttt

SEQ ID NO: 44689 - DNA, 8 bp, Unknown
  misc_feature (1)..( 8): Matrix.001 file - promoters60/1026353
attccgaa

SEQ ID NO: 44690 - DNA, 10 bp, Unknown
  misc_feature (1)..( 10): Matrix.001 file - promoters60/1026412
ttttgttata

SEQ ID NO: 44691 - DNA, 12 bp, Unknown
  misc_feature (1)..( 12): Matrix.001 file - promoters60/1026412
aaatttgttata

SEQ ID NO: 44692 - DNA, 7 bp, Unknown
  misc_feature (1)..( 7): Matrix.001 file - promoters60/1026419
aatcttt

SEQ ID NO: 44693 - DNA, 10 bp, Unknown
  misc_feature (1)..( 10): Matrix.001 file - promoters60/1026419
gaaacaagta

SEQ ID NO: 44694 - DNA, 6 bp, Unknown
  misc_feature (1)..( 6): Matrix.001 file - promoters60/1026419
tttatc

SEQ ID NO: 44695 - DNA, 7 bp, Unknown
  misc_feature (1)..( 7): Matrix.001 file - promoters60/1026419
atcattt

SEQ ID NO: 44696 - DNA, 6 bp, Unknown
  misc_feature (1)..( 6): Matrix.001 file - promoters60/1026419
gcatgg

SEQ ID NO: 44697 - DNA, 6 bp, Unknown
  misc_feature (1)..( 6): Matrix.001 file - promoters60/1026419
aacaaa

SEQ ID NO: 44698 - DNA, 8 bp, Unknown
  misc_feature (1)..( 8): Matrix.001 file - promoters60/1026419
gaagagag

SEQ ID NO: 44699 - DNA, 7 bp, Unknown
  misc_feature (1)..( 7): Matrix.001 file - promoters60/1026419
ggtgaat

SEQ ID NO: 44700 - DNA, 6 bp, Unknown
  misc_feature (1)..( 6): Matrix.001 file - promoters60/1026419
ttgggt

SEQ ID NO: 44701 - DNA, 6 bp, Unknown
  misc_feature (1)..( 6): Matrix.001 file - promoters60/1026419
ataaaa

SEQ ID NO: 44702 - DNA, 6 bp, Unknown
  misc_feature (1)..( 6): Matrix.001 file - promoters60/1026419
aagaaa

SEQ ID NO: 44703 - DNA, 6 bp, Unknown
  misc_feature (1)..( 6): Matrix.001 file - promoters60/1026419
cacatg

SEQ ID NO: 44704 - DNA, 9 bp, Unknown
  misc_feature (1)..( 9): Matrix.001 file - promoters60/1026514
ggttttgct

SEQ ID NO: 44705 - DNA, 7 bp, Unknown
  misc_feature (1)..( 7): Matrix.001 file - promoters60/1026514
aagaagt

SEQ ID NO: 44706 - DNA, 7 bp, Unknown
  misc_feature (1)..( 7): Matrix.001 file - promoters60/1026514
aactttt

SEQ ID NO: 44707 - DNA, 10 bp, Unknown
  misc_feature (1)..( 10): Matrix.001 file - promoters60/1026514
gttaaattgt

SEQ ID NO: 44708 - DNA, 6 bp, Unknown
  misc_feature (1)..( 6): Matrix.001 file - promoters60/1026514
taaaat

SEQ ID NO: 44709 - DNA, 10 bp, Unknown
  misc_feature (1)..( 10): Matrix.001 file - promoters60/1026514
ttaaaaaaaa

SEQ ID NO: 44710 - DNA, 6 bp, Unknown
  misc_feature (1)..( 6): Matrix.001 file - promoters60/1026514
gaaaaa

SEQ ID NO: 44711 - DNA, 6 bp, Unknown
  misc_feature (1)..( 6): Matrix.001 file - promoters60/1026514
aataat

SEQ ID NO: 44712 - DNA, 8 bp, Unknown
  misc_feature (1)..( 8): Matrix.001 file - promoters60/1026514
gccactac

SEQ ID NO: 44713 - DNA, 7 bp, Unknown
  misc_feature (1)..( 7): Matrix.001 file - promoters60/1026514
actgttc

SEQ ID NO: 44714 - DNA, 6 bp, Unknown
  misc_feature (1)..( 6): Matrix.001 file - promoters60/1026514
actcaa

SEQ ID NO: 44715 - DNA, 7 bp, Unknown
  misc_feature (1)..( 7): Matrix.001 file - promoters60/1026514
aaagtaa

SEQ ID NO: 44716 - DNA, 8 bp, Unknown
  misc_feature (1)..( 8): Matrix.001 file - promoters60/1026514
ctcaatta

SEQ ID NO: 44717 - DNA, 7 bp, Unknown
  misc_feature (1)..( 7): Matrix.001 file - promoters60/1026514
tatttgt

SEQ ID NO: 44718 - DNA, 9 bp, Unknown
  misc_feature (1)..( 9): Matrix.001 file - promoters60/1026514
taatctatt

SEQ ID NO: 44719 - DNA, 6 bp, Unknown
  misc_feature (1)..( 6): Matrix.001 file - promoters60/1026514
atgacc

SEQ ID NO: 44720 - DNA, 7 bp, Unknown
  misc_feature (1)..( 7): Matrix.001 file - promoters60/1026514
cataaaa

SEQ ID NO: 44721 - DNA, 11 bp, Unknown
  misc_feature (1)..( 11): Matrix.001 file - promoters60/1026514
tttgaggcctt

SEQ ID NO: 44722 - DNA, 7 bp, Unknown
  misc_feature (1)..( 7): Matrix.001 file - promoters60/1026514
tttgctt

SEQ ID NO: 44723 - DNA, 10 bp, Unknown
  misc_feature (1)..( 10): Matrix.001 file - promoters60/1026551
taaattaata

SEQ ID NO: 44724 - DNA, 10 bp, Unknown
  misc_feature (1)..( 10): Matrix.001 file - promoters60/1026551
tcaatatata

SEQ ID NO: 44725 - DNA, 11 bp, Unknown
  misc_feature (1)..( 11): Matrix.001 file - promoters60/1026551
aagtataaaat

SEQ ID NO: 44726 - DNA, 8 bp, Unknown
  misc_feature (1)..( 8): Matrix.001 file - promoters60/1026551
ttatcaat

SEQ ID NO: 44727 - DNA, 7 bp, Unknown
  misc_feature (1)..( 7): Matrix.001 file - promoters60/1026551
aaatatg

SEQ ID NO: 44728 - DNA, 15 bp, Unknown
  misc_feature (1)..( 15): Matrix.001 file - promoters60/1026551
aaggatgatggacca

SEQ ID NO: 44729 - DNA, 21 bp, Unknown
  misc_feature (1)..( 21): Matrix.001 file - promoters60/1026551
tacacattaataacgtggtcc

SEQ ID NO: 44730 - DNA, 23 bp, Unknown
  misc_feature (1)..( 23): Matrix.001 file - promoters60/1026551
cgtttaccaaaataaagaaaata

SEQ ID NO: 44731 - DNA, 7 bp, Unknown
  misc_feature (1)..( 7): Matrix.001 file - promoters60/1026551
ttaattt

SEQ ID NO: 44732 - DNA, 11 bp, Unknown
  misc_feature (1)..( 11): Matrix.001 file - promoters60/1026551
attattttata

SEQ ID NO: 44733 - DNA, 7 bp, Unknown
  misc_feature (1)..( 7): Matrix.001 file - promoters60/1026551
tttcatg

SEQ ID NO: 44734 - DNA, 9 bp, Unknown
  misc_feature (1)..( 9): Matrix.001 file - promoters60/1026551
tatattaat

SEQ ID NO: 44735 - DNA, 7 bp, Unknown
  misc_feature (1)..( 7): Matrix.001 file - promoters60/1026551
tatatgt

SEQ ID NO: 44736 - DNA, 7 bp, Unknown
  misc_feature (1)..( 7): Matrix.001 file - promoters60/1026562
aataata

SEQ ID NO: 44737 - DNA, 8 bp, Unknown
  misc_feature (1)..( 8): Matrix.001 file - promoters60/1026562
ttgaagat

SEQ ID NO: 44738 - DNA, 6 bp, Unknown
  misc_feature (1)..( 6): Matrix.001 file - promoters60/1026562
agatta

SEQ ID NO: 44739 - DNA, 13 bp, Unknown
  misc_feature (1)..( 13): Matrix.001 file - promoters60/1026562
aacgagtttatcc

SEQ ID NO: 44740 - DNA, 8 bp, Unknown
  misc_feature (1)..( 8): Matrix.001 file - promoters60/1026562
tttcgtat

SEQ ID NO: 44741 - DNA, 7 bp, Unknown
  misc_feature (1)..( 7): Matrix.001 file - promoters60/1026562
caaatgg

SEQ ID NO: 44742 - DNA, 6 bp, Unknown
  misc_feature (1)..( 6): Matrix.001 file - promoters60/1026562
ataatt

SEQ ID NO: 44743 - DNA, 6 bp, Unknown
  misc_feature (1)..( 6): Matrix.001 file - promoters60/1026562
caatct

SEQ ID NO: 44744 - DNA, 7 bp, Unknown
  misc_feature (1)..( 7): Matrix.001 file - promoters60/1026562
aaaatct

SEQ ID NO: 44745 - DNA, 6 bp, Unknown
  misc_feature (1)..( 6): Matrix.001 file - promoters60/1026562
caactg

SEQ ID NO: 44746 - DNA, 7 bp, Unknown
  misc_feature (1)..( 7): Matrix.001 file - promoters60/1026562
aatcaat

SEQ ID NO: 44747 - DNA, 8 bp, Unknown
  misc_feature (1)..( 8): Matrix.001 file - promoters60/1026562
gagaaagt

SEQ ID NO: 44748 - DNA, 7 bp, Unknown
  misc_feature (1)..( 7): Matrix.001 file - promoters60/1026562
ttatcta

SEQ ID NO: 44749 - DNA, 6 bp, Unknown
  misc_feature (1)..( 6): Matrix.001 file - promoters60/1026562
tgtttc

SEQ ID NO: 44750 - DNA, 7 bp, Unknown
  misc_feature (1)..( 7): Matrix.001 file - promoters60/1026565
gttcaga

SEQ ID NO: 44751 - DNA, 8 bp, Unknown
  misc_feature (1)..( 8): Matrix.001 file - promoters60/1026565
ttttattg

SEQ ID NO: 44752 - DNA, 6 bp, Unknown
  misc_feature (1)..( 6): Matrix.001 file - promoters60/1026565
ttactt

SEQ ID NO: 44753 - DNA, 11 bp, Unknown
  misc_feature (1)..( 11): Matrix.001 file - promoters60/1026565
aagacagaaca

SEQ ID NO: 44754 - DNA, 7 bp, Unknown
  misc_feature (1)..( 7): Matrix.001 file - promoters60/1026565
acaaaaa

SEQ ID NO: 44755 - DNA, 9 bp, Unknown
  misc_feature (1)..( 9): Matrix.001 file - promoters60/1026565
aagaagaca

SEQ ID NO: 44756 - DNA, 7 bp, Unknown
  misc_feature (1)..( 7): Matrix.001 file - promoters60/1026565
atttata

SEQ ID NO: 44757 - DNA, 10 bp, Unknown
  misc_feature (1)..( 10): Matrix.001 file - promoters60/1026565
aagctctgaa

SEQ ID NO: 44758 - DNA, 7 bp, Unknown
  misc_feature (1)..( 7): Matrix.001 file - promoters60/1026565
tttggat

SEQ ID NO: 44759 - DNA, 9 bp, Unknown
  misc_feature (1)..( 9): Matrix.001 file - promoters60/1026565
agacaaaac

SEQ ID NO: 44760 - DNA, 6 bp, Unknown
  misc_feature (1)..( 6): Matrix.001 file - promoters60/1026565
aaaaag

SEQ ID NO: 44761 - DNA, 7 bp, Unknown
  misc_feature (1)..( 7): Matrix.001 file - promoters60/1026565
tgaagaa

SEQ ID NO: 44762 - DNA, 7 bp, Unknown
  misc_feature (1)..( 7): Matrix.001 file - promoters60/1026565
aactatc

SEQ ID NO: 44763 - DNA, 8 bp, Unknown
  misc_feature (1)..( 8): Matrix.001 file - promoters60/1026565
agacatga

SEQ ID NO: 44764 - DNA, 6 bp, Unknown
  misc_feature (1)..( 6): Matrix.001 file - promoters60/1026565
actttt

SEQ ID NO: 44765 - DNA, 7 bp, Unknown
  misc_feature (1)..( 7): Matrix.001 file - promoters60/1026565
tttgatt

SEQ ID NO: 44766 - DNA, 6 bp, Unknown
  misc_feature (1)..( 6): Matrix.001 file - promoters60/1026565
acaaaa

SEQ ID NO: 44767 - DNA, 9 bp, Unknown
  misc_feature (1)..( 9): Matrix.001 file - promoters60/1026578
attgttttc

SEQ ID NO: 44768 - DNA, 8 bp, Unknown
  misc_feature (1)..( 8): Matrix.001 file - promoters60/1026578
taaaagat

SEQ ID NO: 44769 - DNA, 7 bp, Unknown
  misc_feature (1)..( 7): Matrix.001 file - promoters60/1026578
taaattt

SEQ ID NO: 44770 - DNA, 10 bp, Unknown
  misc_feature (1)..( 10): Matrix.001 file - promoters60/1026618
aaataaatat

SEQ ID NO: 44771 - DNA, 11 bp, Unknown
  misc_feature (1)..( 11): Matrix.001 file - promoters60/1026618
aaatttaaaaa

SEQ ID NO: 44772 - DNA, 9 bp, Unknown
  misc_feature (1)..( 9): Matrix.001 file - promoters60/1026622
aatccaaag

SEQ ID NO: 44773 - DNA, 11 bp, Unknown
  misc_feature (1)..( 11): Matrix.001 file - promoters60/1026622
tgatataaaaa

SEQ ID NO: 44774 - DNA, 12 bp, Unknown
  misc_feature (1)..( 12): Matrix.001 file - promoters60/1026705
gtcaaaccataa

SEQ ID NO: 44775 - DNA, 9 bp, Unknown
  misc_feature (1)..( 9): Matrix.001 file - promoters60/1026742
ctcttactg

SEQ ID NO: 44776 - DNA, 8 bp, Unknown
  misc_feature (1)..( 8): Matrix.001 file - promoters60/1026742
ccgtcaat

SEQ ID NO: 44777 - DNA, 6 bp, Unknown
  misc_feature (1)..( 6): Matrix.001 file - promoters60/1026754
ttgtta

SEQ ID NO: 44778 - DNA, 6 bp, Unknown
  misc_feature (1)..( 6): Matrix.001 file - promoters60/1026754
tggaaa

SEQ ID NO: 44779 - DNA, 8 bp, Unknown
  misc_feature (1)..( 8): Matrix.001 file - promoters60/1026754
ttcattct

SEQ ID NO: 44780 - DNA, 9 bp, Unknown
  misc_feature (1)..( 9): Matrix.001 file - promoters60/1026754
gtttcttac

SEQ ID NO: 44781 - DNA, 7 bp, Unknown
  misc_feature (1)..( 7): Matrix.001 file - promoters60/1026754
ctttctc

SEQ ID NO: 44782 - DNA, 6 bp, Unknown
  misc_feature (1)..( 6): Matrix.001 file - promoters60/1026754
tacaag

SEQ ID NO: 44783 - DNA, 7 bp, Unknown
  misc_feature (1)..( 7): Matrix.001 file - promoters60/1026754
tttagtt

SEQ ID NO: 44784 - DNA, 7 bp, Unknown
  misc_feature (1)..( 7): Matrix.001 file - promoters60/1026754
tcacatt

SEQ ID NO: 44785 - DNA, 6 bp, Unknown
  misc_feature (1)..( 6): Matrix.001 file - promoters60/1026754
aagaaa

SEQ ID NO: 44786 - DNA, 7 bp, Unknown
  misc_feature (1)..( 7): Matrix.001 file - promoters60/1026754
agaaagt

SEQ ID NO: 44787 - DNA, 6 bp, Unknown
  misc_feature (1)..( 6): Matrix.001 file - promoters60/1026754
aaatgc

SEQ ID NO: 44788 - DNA, 7 bp, Unknown
  misc_feature (1)..( 7): Matrix.001 file - promoters60/1026754
ttaaaat

SEQ ID NO: 44789 - DNA, 9 bp, Unknown
  misc_feature (1)..( 9): Matrix.001 file - promoters60/1026754
tactcaatt

SEQ ID NO: 44790 - DNA, 8 bp, Unknown
  misc_feature (1)..( 8): Matrix.001 file - promoters60/1026822
aaacatat

SEQ ID NO: 44791 - DNA, 8 bp, Unknown
  misc_feature (1)..( 8): Matrix.001 file - promoters60/1026822
aaaaactt

SEQ ID NO: 44792 - DNA, 7 bp, Unknown
  misc_feature (1)..( 7): Matrix.001 file - promoters60/1026822
attttaa

SEQ ID NO: 44793 - DNA, 9 bp, Unknown
  misc_feature (1)..( 9): Matrix.001 file - promoters60/1026822
acaaaatag

SEQ ID NO: 44794 - DNA, 6 bp, Unknown
  misc_feature (1)..( 6): Matrix.001 file - promoters60/1026822
ttaatt

SEQ ID NO: 44795 - DNA, 7 bp, Unknown
  misc_feature (1)..( 7): Matrix.001 file - promoters60/1026822
ttacata

SEQ ID NO: 44796 - DNA, 6 bp, Unknown
  misc_feature (1)..( 6): Matrix.001 file - promoters60/1026822
tgatat

SEQ ID NO: 44797 - DNA, 6 bp, Unknown
  misc_feature (1)..( 6): Matrix.001 file - promoters60/1026822
aagatg

SEQ ID NO: 44798 - DNA, 6 bp, Unknown
  misc_feature (1)..( 6): Matrix.001 file - promoters60/1026822
ttaaac

SEQ ID NO: 44799 - DNA, 8 bp, Unknown
  misc_feature (1)..( 8): Matrix.001 file - promoters60/1026822
taatacat

SEQ ID NO: 44800 - DNA, 6 bp, Unknown
  misc_feature (1)..( 6): Matrix.001 file - promoters60/1026822
atcaag

SEQ ID NO: 44801 - DNA, 6 bp, Unknown
  misc_feature (1)..( 6): Matrix.001 file - promoters60/1026822
aaagtt

SEQ ID NO: 44802 - DNA, 7 bp, Unknown
  misc_feature (1)..( 7): Matrix.001 file - promoters60/1026822
tcattat

SEQ ID NO: 44803 - DNA, 7 bp, Unknown
  misc_feature (1)..( 7): Matrix.001 file - promoters60/1026822
tttaata

SEQ ID NO: 44804 - DNA, 8 bp, Unknown
  misc_feature (1)..( 8): Matrix.001 file - promoters60/1026822
acagaaca

SEQ ID NO: 44805 - DNA, 8 bp, Unknown
  misc_feature (1)..( 8): Matrix.001 file - promoters60/1026822
aagaccat

SEQ ID NO: 44806 - DNA, 12 bp, Unknown
  misc_feature (1)..( 12): Matrix.001 file - promoters60/1026861
acattctcgaat

SEQ ID NO: 44807 - DNA, 8 bp, Unknown
  misc_feature (1)..( 8): Matrix.001 file - promoters60/1026861
atataaaa

SEQ ID NO: 44808 - DNA, 9 bp, Unknown
  misc_feature (1)..( 9): Matrix.001 file - promoters60/1026883
taaaataaa

SEQ ID NO: 44809 - DNA, 10 bp, Unknown
  misc_feature (1)..( 10): Matrix.001 file - promoters60/1026883
aatttgtcta

SEQ ID NO: 44810 - DNA, 7 bp, Unknown
  misc_feature (1)..( 7): Matrix.001 file - promoters60/1026976
aatgtag

SEQ ID NO: 44811 - DNA, 13 bp, Unknown
  misc_feature (1)..( 13): Matrix.001 file - promoters60/1026976
ttgaatcaaaatt

SEQ ID NO: 44812 - DNA, 6 bp, Unknown
  misc_feature (1)..( 6): Matrix.001 file - promoters60/1026976
aagaga

SEQ ID NO: 44813 - DNA, 6 bp, Unknown
  misc_feature (1)..( 6): Matrix.001 file - promoters60/1026976
tttgca

SEQ ID NO: 44814 - DNA, 6 bp, Unknown
  misc_feature (1)..( 6): Matrix.001 file - promoters60/1026976
tgaatc

SEQ ID NO: 44815 - DNA, 7 bp, Unknown
  misc_feature (1)..( 7): Matrix.001 file - promoters60/1026976
ataaata

SEQ ID NO: 44816 - DNA, 8 bp, Unknown
  misc_feature (1)..( 8): Matrix.001 file - promoters60/1026976
atttctgc

SEQ ID NO: 44817 - DNA, 8 bp, Unknown
  misc_feature (1)..( 8): Matrix.001 file - promoters60/1026976
agaacaag

SEQ ID NO: 44818 - DNA, 6 bp, Unknown
  misc_feature (1)..( 6): Matrix.001 file - promoters60/1026976
caagaa

SEQ ID NO: 44819 - DNA, 8 bp, Unknown
  misc_feature (1)..( 8): Matrix.001 file - promoters60/1026976
agaaagag

SEQ ID NO: 44820 - DNA, 9 bp, Unknown
  misc_feature (1)..( 9): Matrix.001 file - promoters60/1026976
ttgagaaag

SEQ ID NO: 44821 - DNA, 6 bp, Unknown
  misc_feature (1)..( 6): Matrix.001 file - promoters60/1026976
gaatgc

SEQ ID NO: 44822 - DNA, 9 bp, Unknown
  misc_feature (1)..( 9): Matrix.001 file - promoters60/1026976
atacttaat

SEQ ID NO: 44823 - DNA, 7 bp, Unknown
  misc_feature (1)..( 7): Matrix.001 file - promoters60/1026976
tggattt

SEQ ID NO: 44824 - DNA, 6 bp, Unknown
  misc_feature (1)..( 6): Matrix.001 file - promoters60/1026976
aagatt

SEQ ID NO: 44825 - DNA, 6 bp, Unknown
  misc_feature (1)..( 6): Matrix.001 file - promoters60/1026976
ttggtt

SEQ ID NO: 44826 - DNA, 6 bp, Unknown
  misc_feature (1)..( 6): Matrix.001 file - promoters60/1026976
ttaacc

SEQ ID NO: 44827 - DNA, 7 bp, Unknown
  misc_feature (1)..( 7): Matrix.001 file - promoters60/1026976
ctcactc

SEQ ID NO: 44828 - DNA, 12 bp, Unknown
  misc_feature (1)..( 12): Matrix.001 file - promoters60/1026983
gtgaaaaaataa

SEQ ID NO: 44829 - DNA, 10 bp, Unknown
  misc_feature (1)..( 10): Matrix.001 file - promoters60/1026987
caacttcctt

SEQ ID NO: 44830 - DNA, 7 bp, Unknown
  misc_feature (1)..( 7): Matrix.001 file - promoters60/1026987
tctataa

SEQ ID NO: 44831 - DNA, 11 bp, Unknown
  misc_feature (1)..( 11): Matrix.001 file - promoters60/1026987
tatttaaaaaa

SEQ ID NO: 44832 - DNA, 10 bp, Unknown
  misc_feature (1)..( 10): Matrix.001 file - promoters60/1026987
ctaaaaaata

SEQ ID NO: 44833 - DNA, 10 bp, Unknown
  misc_feature (1)..( 10): Matrix.001 file - promoters60/1026987
attaaaaaga

SEQ ID NO: 44834 - DNA, 8 bp, Unknown
  misc_feature (1)..( 8): Matrix.001 file - promoters60/1027002
tttgagag

SEQ ID NO: 44835 - DNA, 8 bp, Unknown
  misc_feature (1)..( 8): Matrix.001 file - promoters60/1027002
aaaaaaaa

SEQ ID NO: 44836 - DNA, 8 bp, Unknown
  misc_feature (1)..( 8): Matrix.001 file - promoters60/1027002
agttttta

SEQ ID NO: 44837 - DNA, 8 bp, Unknown
  misc_feature (1)..( 8): Matrix.001 file - promoters60/1027002
aaaaaatg

SEQ ID NO: 44838 - DNA, 7 bp, Unknown
  misc_feature (1)..( 7): Matrix.001 file - promoters60/1027002
tgaaaaa

SEQ ID NO: 44839 - DNA, 11 bp, Unknown
  misc_feature (1)..( 11): Matrix.001 file - promoters60/1027032
ttttaattata

SEQ ID NO: 44840 - DNA, 3 bp, Unknown
  misc_feature (1)..( 3): Matrix.001 file - promoters60/1027125
tta

SEQ ID NO: 44841 - DNA, 10 bp, Unknown
  misc_feature (1)..( 10): Matrix.001 file - promoters60/1027125
aagtttttga

SEQ ID NO: 44842 - DNA, 7 bp, Unknown
  misc_feature (1)..( 7): Matrix.001 file - promoters60/1027125
ttttgta

SEQ ID NO: 44843 - DNA, 7 bp, Unknown
  misc_feature (1)..( 7): Matrix.001 file - promoters60/1027125
tgtaaaa

SEQ ID NO: 44844 - DNA, 9 bp, Unknown
  misc_feature (1)..( 9): Matrix.001 file - promoters60/1027125
acaaaaaga

SEQ ID NO: 44845 - DNA, 9 bp, Unknown
  misc_feature (1)..( 9): Matrix.001 file - promoters60/1027125
ttagctaaa

SEQ ID NO: 44846 - DNA, 12 bp, Unknown
  misc_feature (1)..( 12): Matrix.001 file - promoters60/1027125
aaaaataaaatt

SEQ ID NO: 44847 - DNA, 12 bp, Unknown
  misc_feature (1)..( 12): Matrix.001 file - promoters60/1027125
tgtatcatcatc

SEQ ID NO: 44848 - DNA, 8 bp, Unknown
  misc_feature (1)..( 8): Matrix.001 file - promoters60/1027156
atacaata

SEQ ID NO: 44849 - DNA, 9 bp, Unknown
  misc_feature (1)..( 9): Matrix.001 file - promoters60/1027156
aaagtaaac

SEQ ID NO: 44850 - DNA, 10 bp, Unknown
  misc_feature (1)..( 10): Matrix.001 file - promoters60/1027156
aaaataagtt

SEQ ID NO: 44851 - DNA, 9 bp, Unknown
  misc_feature (1)..( 9): Matrix.001 file - promoters60/1027156
caaaaacta

SEQ ID NO: 44852 - DNA, 8 bp, Unknown
  misc_feature (1)..( 8): Matrix.001 file - promoters60/1027171
ttttctta

SEQ ID NO: 44853 - DNA, 8 bp, Unknown
  misc_feature (1)..( 8): Matrix.001 file - promoters60/1027171
aaaaacaa

SEQ ID NO: 44854 - DNA, 7 bp, Unknown
  misc_feature (1)..( 7): Matrix.001 file - promoters60/1027171
attcaaa

SEQ ID NO: 44855 - DNA, 6 bp, Unknown
  misc_feature (1)..( 6): Matrix.001 file - promoters60/1027171
aaagat

SEQ ID NO: 44856 - DNA, 7 bp, Unknown
  misc_feature (1)..( 7): Matrix.001 file - promoters60/1027171
ttaatca

SEQ ID NO: 44857 - DNA, 7 bp, Unknown
  misc_feature (1)..( 7): Matrix.001 file - promoters60/1027171
ccaaagc

SEQ ID NO: 44858 - DNA, 6 bp, Unknown
  misc_feature (1)..( 6): Matrix.001 file - promoters60/1027171
aaaaca

SEQ ID NO: 44859 - DNA, 7 bp, Unknown
  misc_feature (1)..( 7): Matrix.001 file - promoters60/1027171
agtagga

SEQ ID NO: 44860 - DNA, 10 bp, Unknown
  misc_feature (1)..( 10): Matrix.001 file - promoters60/1027171
tataattcaa

SEQ ID NO: 44861 - DNA, 6 bp, Unknown
  misc_feature (1)..( 6): Matrix.001 file - promoters60/1027171
aaactc

SEQ ID NO: 44862 - DNA, 7 bp, Unknown
  misc_feature (1)..( 7): Matrix.001 file - promoters60/1027171
ttcaaca

SEQ ID NO: 44863 - DNA, 7 bp, Unknown
  misc_feature (1)..( 7): Matrix.001 file - promoters60/1027171
accatca

SEQ ID NO: 44864 - DNA, 6 bp, Unknown
  misc_feature (1)..( 6): Matrix.001 file - promoters60/1027171
ataaag

SEQ ID NO: 44865 - DNA, 10 bp, Unknown
  misc_feature (1)..( 10): Matrix.001 file - promoters60/1027171
caaaaaataa

SEQ ID NO: 44866 - DNA, 7 bp, Unknown
  misc_feature (1)..( 7): Matrix.001 file - promoters60/1027171
aatctag

SEQ ID NO: 44867 - DNA, 7 bp, Unknown
  misc_feature (1)..( 7): Matrix.001 file - promoters60/1027171
agataaa

SEQ ID NO: 44868 - DNA, 7 bp, Unknown
  misc_feature (1)..( 7): Matrix.001 file - promoters60/1027171
aaactta

SEQ ID NO: 44869 - DNA, 10 bp, Unknown
  misc_feature (1)..( 10): Matrix.001 file - promoters60/1027171
acaaacatta

SEQ ID NO: 44870 - DNA, 8 bp, Unknown
  misc_feature (1)..( 8): Matrix.001 file - promoters60/1027171
aaaaaaac

SEQ ID NO: 44871 - DNA, 6 bp, Unknown
  misc_feature (1)..( 6): Matrix.001 file - promoters60/1027171
aaacat

SEQ ID NO: 44872 - DNA, 6 bp, Unknown
  misc_feature (1)..( 6): Matrix.001 file - promoters60/1027171
taatat

SEQ ID NO: 44873 - DNA, 9 bp, Unknown
  misc_feature (1)..( 9): Matrix.001 file - promoters60/1027189
cagaaaaat

SEQ ID NO: 44874 - DNA, 9 bp, Unknown
  misc_feature (1)..( 9): Matrix.001 file - promoters60/1027189
cattgattt

SEQ ID NO: 44875 - DNA, 7 bp, Unknown
  misc_feature (1)..( 7): Matrix.001 file - promoters60/1027189
tattatg

SEQ ID NO: 44876 - DNA, 11 bp, Unknown
  misc_feature (1)..( 11): Matrix.001 file - promoters60/1027189
tatataacaaa

SEQ ID NO: 44877 - DNA, 7 bp, Unknown
  misc_feature (1)..( 7): Matrix.001 file - promoters60/1027189
aaacaaa

SEQ ID NO: 44878 - DNA, 15 bp, Unknown
  misc_feature (1)..( 15): Matrix.001 file - promoters60/1027189
ataattattttatcc

SEQ ID NO: 44879 - DNA, 15 bp, Unknown
  misc_feature (1)..( 15): Matrix.001 file - promoters60/1027201
aaatcatctcaatgc

SEQ ID NO: 44880 - DNA, 7 bp, Unknown
  misc_feature (1)..( 7): Matrix.001 file - promoters60/1027201
cataata

SEQ ID NO: 44881 - DNA, 8 bp, Unknown
  misc_feature (1)..( 8): Matrix.001 file - promoters60/1027201
caagaaca

SEQ ID NO: 44882 - DNA, 6 bp, Unknown
  misc_feature (1)..( 6): Matrix.001 file - promoters60/1027201
aattaa

SEQ ID NO: 44883 - DNA, 6 bp, Unknown
  misc_feature (1)..( 6): Matrix.001 file - promoters60/1027201
gatgaa

SEQ ID NO: 44884 - DNA, 6 bp, Unknown
  misc_feature (1)..( 6): Matrix.001 file - promoters60/1027201
ctctct

SEQ ID NO: 44885 - DNA, 7 bp, Unknown
  misc_feature (1)..( 7): Matrix.001 file - promoters60/1027201
tcgaatt

SEQ ID NO: 44886 - DNA, 9 bp, Unknown
  misc_feature (1)..( 9): Matrix.001 file - promoters60/1027201
aagctcgat

SEQ ID NO: 44887 - DNA, 6 bp, Unknown
  misc_feature (1)..( 6): Matrix.001 file - promoters60/1027201
gaaaaa

SEQ ID NO: 44888 - DNA, 7 bp, Unknown
  misc_feature (1)..( 7): Matrix.001 file - promoters60/1027201
aaaaaat

SEQ ID NO: 44889 - DNA, 7 bp, Unknown
  misc_feature (1)..( 7): Matrix.001 file - promoters60/1027201
attggtt

SEQ ID NO: 44890 - DNA, 6 bp, Unknown
  misc_feature (1)..( 6): Matrix.001 file - promoters60/1027201
aaactt

SEQ ID NO: 44891 - DNA, 8 bp, Unknown
  misc_feature (1)..( 8): Matrix.001 file - promoters60/1027201
aaaattaa

SEQ ID NO: 44892 - DNA, 7 bp, Unknown
  misc_feature (1)..( 7): Matrix.001 file - promoters60/1027201
tactata

SEQ ID NO: 44893 - DNA, 7 bp, Unknown
  misc_feature (1)..( 7): Matrix.001 file - promoters60/1027240
agatttt

SEQ ID NO: 44894 - DNA, 10 bp, Unknown
  misc_feature (1)..( 10): Matrix.001 file - promoters60/1027240
caaaatattt

SEQ ID NO: 44895 - DNA, 10 bp, Unknown
  misc_feature (1)..( 10): Matrix.001 file - promoters60/1027240
ttaaaccgaa

SEQ ID NO: 44896 - DNA, 8 bp, Unknown
  misc_feature (1)..( 8): Matrix.001 file - promoters60/1027240
aatcaaaa

SEQ ID NO: 44897 - DNA, 8 bp, Unknown
  misc_feature (1)..( 8): Matrix.001 file - promoters60/1027240
taacccta

SEQ ID NO: 44898 - DNA, 9 bp, Unknown
  misc_feature (1)..( 9): Matrix.001 file - promoters60/1027240
catggtcca

SEQ ID NO: 44899 - DNA, 12 bp, Unknown
  misc_feature (1)..( 12): Matrix.001 file - promoters60/1027240
atataaaacgaa

SEQ ID NO: 44900 - DNA, 6 bp, Unknown
  misc_feature (1)..( 6): Matrix.001 file - promoters60/1027240
aaaaac

SEQ ID NO: 44901 - DNA, 12 bp, Unknown
  misc_feature (1)..( 12): Matrix.001 file - promoters60/1027240
taagataaacac

SEQ ID NO: 44902 - DNA, 7 bp, Unknown
  misc_feature (1)..( 7): Matrix.001 file - promoters60/1027243
tatatat

SEQ ID NO: 44903 - DNA, 6 bp, Unknown
  misc_feature (1)..( 6): Matrix.001 file - promoters60/1027243
ttttat

SEQ ID NO: 44904 - DNA, 7 bp, Unknown
  misc_feature (1)..( 7): Matrix.001 file - promoters60/1027243
taaactt

SEQ ID NO: 44905 - DNA, 7 bp, Unknown
  misc_feature (1)..( 7): Matrix.001 file - promoters60/1027243
gcaaaat

SEQ ID NO: 44906 - DNA, 7 bp, Unknown
  misc_feature (1)..( 7): Matrix.001 file - promoters60/1027243
agtgttg

SEQ ID NO: 44907 - DNA, 8 bp, Unknown
  misc_feature (1)..( 8): Matrix.001 file - promoters60/1027243
tagaagtt

SEQ ID NO: 44908 - DNA, 7 bp, Unknown
  misc_feature (1)..( 7): Matrix.001 file - promoters60/1027243
agtgaat

SEQ ID NO: 44909 - DNA, 6 bp, Unknown
  misc_feature (1)..( 6): Matrix.001 file - promoters60/1027243
caaaac

SEQ ID NO: 44910 - DNA, 7 bp, Unknown
  misc_feature (1)..( 7): Matrix.001 file - promoters60/1027243
taactct

SEQ ID NO: 44911 - DNA, 7 bp, Unknown
  misc_feature (1)..( 7): Matrix.001 file - promoters60/1027243
attcata

SEQ ID NO: 44912 - DNA, 6 bp, Unknown
  misc_feature (1)..( 6): Matrix.001 file - promoters60/1027243
tattaa

SEQ ID NO: 44913 - DNA, 9 bp, Unknown
  misc_feature (1)..( 9): Matrix.001 file - promoters60/1027243
ataataaca

SEQ ID NO: 44914 - DNA, 7 bp, Unknown
  misc_feature (1)..( 7): Matrix.001 file - promoters60/1027243
atagtat

SEQ ID NO: 44915 - DNA, 6 bp, Unknown
  misc_feature (1)..( 6): Matrix.001 file - promoters60/1027243
aatctt

SEQ ID NO: 44916 - DNA, 6 bp, Unknown
  misc_feature (1)..( 6): Matrix.001 file - promoters60/1027243
tttttt

SEQ ID NO: 44917 - DNA, 11 bp, Unknown
  misc_feature (1)..( 11): Matrix.001 file - promoters60/1027243
cattgatactt

SEQ ID NO: 44918 - DNA, 8 bp, Unknown
  misc_feature (1)..( 8): Matrix.001 file - promoters60/1027243
aaagaaaa

SEQ ID NO: 44919 - DNA, 6 bp, Unknown
  misc_feature (1)..( 6): Matrix.001 file - promoters60/1027243
taataa

SEQ ID NO: 44920 - DNA, 6 bp, Unknown
  misc_feature (1)..( 6): Matrix.001 file - promoters60/1027243
cacaca

SEQ ID NO: 44921 - DNA, 8 bp, Unknown
  misc_feature (1)..( 8): Matrix.001 file - promoters60/1027243
atttactt

SEQ ID NO: 44922 - DNA, 8 bp, Unknown
  misc_feature (1)..( 8): Matrix.001 file - promoters60/1027243
atcaaaac

SEQ ID NO: 44923 - DNA, 8 bp, Unknown
  misc_feature (1)..( 8): Matrix.001 file - promoters60/1027243
cttcttca

SEQ ID NO: 44924 - DNA, 8 bp, Unknown
  misc_feature (1)..( 8): Matrix.001 file - promoters60/1027276
acatatta

SEQ ID NO: 44925 - DNA, 10 bp, Unknown
  misc_feature (1)..( 10): Matrix.001 file - promoters60/1027276
attttattct

SEQ ID NO: 44926 - DNA, 14 bp, Unknown
  misc_feature (1)..( 14): Matrix.001 file - promoters60/1027327
acttgtaaatgtat

SEQ ID NO: 44927 - DNA, 12 bp, Unknown
  misc_feature (1)..( 12): Matrix.001 file - promoters60/1027327
gaaaaaataaat

SEQ ID NO: 44928 - DNA, 11 bp, Unknown
  misc_feature (1)..( 11): Matrix.001 file - promoters60/1027327
aaaaatttata

SEQ ID NO: 44929 - DNA, 15 bp, Unknown
  misc_feature (1)..( 15): Matrix.001 file - promoters60/1027327
aataaaattttaact

SEQ ID NO: 44930 - DNA, 11 bp, Unknown
  misc_feature (1)..( 11): Matrix.001 file - promoters60/1027327
gtaaaaattaa

SEQ ID NO: 44931 - DNA, 11 bp, Unknown
  misc_feature (1)..( 11): Matrix.001 file - promoters60/1027399
tgataaaaata

SEQ ID NO: 44932 - DNA, 10 bp, Unknown
  misc_feature (1)..( 10): Matrix.001 file - promoters60/1027399
caaagtaatg

SEQ ID NO: 44933 - DNA, 12 bp, Unknown
  misc_feature (1)..( 12): Matrix.001 file - promoters60/1027406
aaaaaatatgaa

SEQ ID NO: 44934 - DNA, 10 bp, Unknown
  misc_feature (1)..( 10): Matrix.001 file - promoters60/1027406
acaatttttc

SEQ ID NO: 44935 - DNA, 8 bp, Unknown
  misc_feature (1)..( 8): Matrix.001 file - promoters60/1027406
aattttta

SEQ ID NO: 44936 - DNA, 9 bp, Unknown
  misc_feature (1)..( 9): Matrix.001 file - promoters60/1027406
aatgaatat

SEQ ID NO: 44937 - DNA, 11 bp, Unknown
  misc_feature (1)..( 11): Matrix.001 file - promoters60/1027406
taactttttgt

SEQ ID NO: 44938 - DNA, 12 bp, Unknown
  misc_feature (1)..( 12): Matrix.001 file - promoters60/1027406
taaagatttttc

SEQ ID NO: 44939 - DNA, 16 bp, Unknown
  misc_feature (1)..( 16): Matrix.001 file - promoters60/1027406
attttaaggaaaaatt

SEQ ID NO: 44940 - DNA, 14 bp, Unknown
  misc_feature (1)..( 14): Matrix.001 file - promoters60/1027406
attttaaaaaaaaa

SEQ ID NO: 44941 - DNA, 8 bp, Unknown
  misc_feature (1)..( 8): Matrix.001 file - promoters60/1027406
atgaaatg

SEQ ID NO: 44942 - DNA, 9 bp, Unknown
  misc_feature (1)..( 9): Matrix.001 file - promoters60/1027434
aaattattt

SEQ ID NO: 44943 - DNA, 11 bp, Unknown
  misc_feature (1)..( 11): Matrix.001 file - promoters60/1027452
taatttcgtaa

SEQ ID NO: 44944 - DNA, 9 bp, Unknown
  misc_feature (1)..( 9): Matrix.001 file - promoters60/1027456
actttattt

SEQ ID NO: 44945 - DNA, 8 bp, Unknown
  misc_feature (1)..( 8): Matrix.001 file - promoters60/1027456
tgtatctg

SEQ ID NO: 44946 - DNA, 7 bp, Unknown
  misc_feature (1)..( 7): Matrix.001 file - promoters60/1027456
attatcc

SEQ ID NO: 44947 - DNA, 9 bp, Unknown
  misc_feature (1)..( 9): Matrix.001 file - promoters60/1027456
tattttttt

SEQ ID NO: 44948 - DNA, 9 bp, Unknown
  misc_feature (1)..( 9): Matrix.001 file - promoters60/1027456
tatgagtca

SEQ ID NO: 44949 - DNA, 8 bp, Unknown
  misc_feature (1)..( 8): Matrix.001 file - promoters60/1027456
ataaattc

SEQ ID NO: 44950 - DNA, 15 bp, Unknown
  misc_feature (1)..( 15): Matrix.001 file - promoters60/1027456
tatatataaaaattc

SEQ ID NO: 44951 - DNA, 11 bp, Unknown
  misc_feature (1)..( 11): Matrix.001 file - promoters60/1027456
agaattgtatt

SEQ ID NO: 44952 - DNA, 12 bp, Unknown
  misc_feature (1)..( 12): Matrix.001 file - promoters60/1027456
gaaagaaatata

SEQ ID NO: 44953 - DNA, 10 bp, Unknown
  misc_feature (1)..( 10): Matrix.001 file - promoters60/1027456
attcatttta

SEQ ID NO: 44954 - DNA, 11 bp, Unknown
  misc_feature (1)..( 11): Matrix.001 file - promoters60/1027456
atatcttaaat

SEQ ID NO: 44955 - DNA, 13 bp, Unknown
  misc_feature (1)..( 13): Matrix.001 file - promoters60/1027456
ttattacttacaa

SEQ ID NO: 44956 - DNA, 12 bp, Unknown
  misc_feature (1)..( 12): Matrix.001 file - promoters60/1027456
tacaatatattt

SEQ ID NO: 44957 - DNA, 15 bp, Unknown
  misc_feature (1)..( 15): Matrix.001 file - promoters60/1027456
ttagtaaatcatcgt

SEQ ID NO: 44958 - DNA, 14 bp, Unknown
  misc_feature (1)..( 14): Matrix.001 file - promoters60/1027460
gactttgacacaaa

SEQ ID NO: 44959 - DNA, 7 bp, Unknown
  misc_feature (1)..( 7): Matrix.001 file - promoters60/1027460
aaaaata

SEQ ID NO: 44960 - DNA, 9 bp, Unknown
  misc_feature (1)..( 9): Matrix.001 file - promoters60/1027460
gaaaacata

SEQ ID NO: 44961 - DNA, 8 bp, Unknown
  misc_feature (1)..( 8): Matrix.001 file - promoters60/1027460
aagagaac

SEQ ID NO: 44962 - DNA, 7 bp, Unknown
  misc_feature (1)..( 7): Matrix.001 file - promoters60/1027460
gagtaaa

SEQ ID NO: 44963 - DNA, 13 bp, Unknown
  misc_feature (1)..( 13): Matrix.001 file - promoters60/1027460
agactttgaaaca

SEQ ID NO: 44964 - DNA, 10 bp, Unknown
  misc_feature (1)..( 10): Matrix.001 file - promoters60/1027492
tcagaagttt

SEQ ID NO: 44965 - DNA, 14 bp, Unknown
  misc_feature (1)..( 14): Matrix.001 file - promoters60/1027492
gagaattattgaaa

SEQ ID NO: 44966 - DNA, 10 bp, Unknown
  misc_feature (1)..( 10): Matrix.001 file - promoters60/1027492
aaaataggct

SEQ ID NO: 44967 - DNA, 15 bp, Unknown
  misc_feature (1)..( 15): Matrix.001 file - promoters60/1027590
aacaaagattcttta

SEQ ID NO: 44968 - DNA, 9 bp, Unknown
  misc_feature (1)..( 9): Matrix.001 file - promoters60/1027590
gatttttaa

SEQ ID NO: 44969 - DNA, 11 bp, Unknown
  misc_feature (1)..( 11): Matrix.001 file - promoters60/1027590
gtattttttcc

SEQ ID NO: 44970 - DNA, 12 bp, Unknown
  misc_feature (1)..( 12): Matrix.001 file - promoters60/1027596
tactttctggca

SEQ ID NO: 44971 - DNA, 8 bp, Unknown
  misc_feature (1)..( 8): Matrix.001 file - promoters60/1027596
aaaaagtt

SEQ ID NO: 44972 - DNA, 9 bp, Unknown
  misc_feature (1)..( 9): Matrix.001 file - promoters60/1027596
ctttattaa

SEQ ID NO: 44973 - DNA, 10 bp, Unknown
  misc_feature (1)..( 10): Matrix.001 file - promoters60/1027596
gacgaaatga

SEQ ID NO: 44974 - DNA, 10 bp, Unknown
  misc_feature (1)..( 10): Matrix.001 file - promoters60/1027596
taattttctt

SEQ ID NO: 44975 - DNA, 10 bp, Unknown
  misc_feature (1)..( 10): Matrix.001 file - promoters60/1027596
gttatcattc

SEQ ID NO: 44976 - DNA, 11 bp, Unknown
  misc_feature (1)..( 11): Matrix.001 file - promoters60/1027652
ttagcatttat

SEQ ID NO: 44977 - DNA, 9 bp, Unknown
  misc_feature (1)..( 9): Matrix.001 file - promoters60/1027652
tttatgttt

SEQ ID NO: 44978 - DNA, 10 bp, Unknown
  misc_feature (1)..( 10): Matrix.001 file - promoters60/1027652
atactcaaac

SEQ ID NO: 44979 - DNA, 8 bp, Unknown
  misc_feature (1)..( 8): Matrix.001 file - promoters60/1027652
taaagaaa

SEQ ID NO: 44980 - DNA, 7 bp, Unknown
  misc_feature (1)..( 7): Matrix.001 file - promoters60/1027652
ttttgta

SEQ ID NO: 44981 - DNA, 19 bp, Unknown
  misc_feature (1)..( 19): Matrix.001 file - promoters60/1027652
gaaaaattattaaattata

SEQ ID NO: 44982 - DNA, 10 bp, Unknown
  misc_feature (1)..( 10): Matrix.001 file - promoters60/1027652
gtaaaaaaag

SEQ ID NO: 44983 - DNA, 9 bp, Unknown
  misc_feature (1)..( 9): Matrix.001 file - promoters60/1027652
tatataaat

SEQ ID NO: 44984 - DNA, 8 bp, Unknown
  misc_feature (1)..( 8): Matrix.001 file - promoters60/1027652
aaattcca

SEQ ID NO: 44985 - DNA, 11 bp, Unknown
  misc_feature (1)..( 11): Matrix.001 file - promoters60/1027652
aaaatcaagat

SEQ ID NO: 44986 - DNA, 11 bp, Unknown
  misc_feature (1)..( 11): Matrix.001 file - promoters60/1027652
acaaatttcta

SEQ ID NO: 44987 - DNA, 9 bp, Unknown
  misc_feature (1)..( 9): Matrix.001 file - promoters60/1027652
aataatatt

SEQ ID NO: 44988 - DNA, 10 bp, Unknown
  misc_feature (1)..( 10): Matrix.001 file - promoters60/1027652
aaaaattaag

SEQ ID NO: 44989 - DNA, 6 bp, Unknown
  misc_feature (1)..( 6): Matrix.001 file - promoters60/1027673
atcaca

SEQ ID NO: 44990 - DNA, 7 bp, Unknown
  misc_feature (1)..( 7): Matrix.001 file - promoters60/1027673
tttcgta

SEQ ID NO: 44991 - DNA, 6 bp, Unknown
  misc_feature (1)..( 6): Matrix.001 file - promoters60/1027673
agaaga

SEQ ID NO: 44992 - DNA, 7 bp, Unknown
  misc_feature (1)..( 7): Matrix.001 file - promoters60/1027673
ttggaga

SEQ ID NO: 44993 - DNA, 9 bp, Unknown
  misc_feature (1)..( 9): Matrix.001 file - promoters60/1027673
gagagagag

SEQ ID NO: 44994 - DNA, 7 bp, Unknown
  misc_feature (1)..( 7): Matrix.001 file - promoters60/1027673
caaatta

SEQ ID NO: 44995 - DNA, 8 bp, Unknown
  misc_feature (1)..( 8): Matrix.001 file - promoters60/1027673
aaatacga

SEQ ID NO: 44996 - DNA, 8 bp, Unknown
  misc_feature (1)..( 8): Matrix.001 file - promoters60/1027673
agaagaag

SEQ ID NO: 44997 - DNA, 6 bp, Unknown
  misc_feature (1)..( 6): Matrix.001 file - promoters60/1027673
tgtttc

SEQ ID NO: 44998 - DNA, 9 bp, Unknown
  misc_feature (1)..( 9): Matrix.001 file - promoters60/1027725
cataaaagt

SEQ ID NO: 44999 - DNA, 10 bp, Unknown
  misc_feature (1)..( 10): Matrix.001 file - promoters60/1027725
ttgtatttgt

SEQ ID NO: 45000 - DNA, 12 bp, Unknown
  misc_feature (1)..( 12): Matrix.001 file - promoters60/1027725
ttactttcattg

SEQ ID NO: 45001 - DNA, 11 bp, Unknown
  misc_feature (1)..( 11): Matrix.001 file - promoters60/1027725
aaaagtttatg

SEQ ID NO: 45002 - DNA, 8 bp, Unknown
  misc_feature (1)..( 8): Matrix.001 file - promoters60/1027765
taaaaaaa

SEQ ID NO: 45003 - DNA, 11 bp, Unknown
  misc_feature (1)..( 11): Matrix.001 file - promoters60/1027765
aaaattttata

SEQ ID NO: 45004 - DNA, 7 bp, Unknown
  misc_feature (1)..( 7): Matrix.001 file - promoters60/1027765
ttacaaa

SEQ ID NO: 45005 - DNA, 12 bp, Unknown
  misc_feature (1)..( 12): Matrix.001 file - promoters60/1027765
atatttttttgt

SEQ ID NO: 45006 - DNA, 7 bp, Unknown
  misc_feature (1)..( 7): Matrix.001 file - promoters60/1027765
ttaaaat

SEQ ID NO: 45007 - DNA, 8 bp, Unknown
  misc_feature (1)..( 8): Matrix.001 file - promoters60/1027765
aaaagaac

SEQ ID NO: 45008 - DNA, 11 bp, Unknown
  misc_feature (1)..( 11): Matrix.001 file - promoters60/1027765
tataatttaca

SEQ ID NO: 45009 - DNA, 9 bp, Unknown
  misc_feature (1)..( 9): Matrix.001 file - promoters60/1027765
taaaaattg

SEQ ID NO: 45010 - DNA, 9 bp, Unknown
  misc_feature (1)..( 9): Matrix.001 file - promoters60/1027869
atcgtttac

SEQ ID NO: 45011 - DNA, 6 bp, Unknown
  misc_feature (1)..( 6): Matrix.001 file - promoters60/1027869
gatttg

SEQ ID NO: 45012 - DNA, 10 bp, Unknown
  misc_feature (1)..( 10): Matrix.001 file - promoters60/1027869
aaagatcgaa

SEQ ID NO: 45013 - DNA, 7 bp, Unknown
  misc_feature (1)..( 7): Matrix.001 file - promoters60/1027869
aacaaat

SEQ ID NO: 45014 - DNA, 6 bp, Unknown
  misc_feature (1)..( 6): Matrix.001 file - promoters60/1027869
aattta

SEQ ID NO: 45015 - DNA, 7 bp, Unknown
  misc_feature (1)..( 7): Matrix.001 file - promoters60/1027869
ttacaat

SEQ ID NO: 45016 - DNA, 7 bp, Unknown
  misc_feature (1)..( 7): Matrix.001 file - promoters60/1027869
tttacaa

SEQ ID NO: 45017 - DNA, 7 bp, Unknown
  misc_feature (1)..( 7): Matrix.001 file - promoters60/1027869
agaaaca

SEQ ID NO: 45018 - DNA, 11 bp, Unknown
  misc_feature (1)..( 11): Matrix.001 file - promoters60/1027869
tataaacatct

SEQ ID NO: 45019 - DNA, 7 bp, Unknown
  misc_feature (1)..( 7): Matrix.001 file - promoters60/1027869
atgaaga

SEQ ID NO: 45020 - DNA, 7 bp, Unknown
  misc_feature (1)..( 7): Matrix.001 file - promoters60/1027873
tttattt

SEQ ID NO: 45021 - DNA, 10 bp, Unknown
  misc_feature (1)..( 10): Matrix.001 file - promoters60/1027873
tttttaacaa

SEQ ID NO: 45022 - DNA, 6 bp, Unknown
  misc_feature (1)..( 6): Matrix.001 file - promoters60/1027873
agttaa

SEQ ID NO: 45023 - DNA, 6 bp, Unknown
  misc_feature (1)..( 6): Matrix.001 file - promoters60/1027873
ttttgg

SEQ ID NO: 45024 - DNA, 6 bp, Unknown
  misc_feature (1)..( 6): Matrix.001 file - promoters60/1027873
aataat

SEQ ID NO: 45025 - DNA, 7 bp, Unknown
  misc_feature (1)..( 7): Matrix.001 file - promoters60/1027873
taaatta

SEQ ID NO: 45026 - DNA, 13 bp, Unknown
  misc_feature (1)..( 13): Matrix.001 file - promoters60/1027873
accaaaatcatat

SEQ ID NO: 45027 - DNA, 8 bp, Unknown
  misc_feature (1)..( 8): Matrix.001 file - promoters60/1027873
tttgggta

SEQ ID NO: 45028 - DNA, 6 bp, Unknown
  misc_feature (1)..( 6): Matrix.001 file - promoters60/1027873
atggtt

SEQ ID NO: 45029 - DNA, 9 bp, Unknown
  misc_feature (1)..( 9): Matrix.001 file - promoters60/1027873
atttagcaa

SEQ ID NO: 45030 - DNA, 6 bp, Unknown
  misc_feature (1)..( 6): Matrix.001 file - promoters60/1027873
cgattt

SEQ ID NO: 45031 - DNA, 7 bp, Unknown
  misc_feature (1)..( 7): Matrix.001 file - promoters60/1027873
atgacta

SEQ ID NO: 45032 - DNA, 6 bp, Unknown
  misc_feature (1)..( 6): Matrix.001 file - promoters60/1027873
attttt

SEQ ID NO: 45033 - DNA, 8 bp, Unknown
  misc_feature (1)..( 8): Matrix.001 file - promoters60/1027873
catttttg

SEQ ID NO: 45034 - DNA, 8 bp, Unknown
  misc_feature (1)..( 8): Matrix.001 file - promoters60/1027873
tggggttg

SEQ ID NO: 45035 - DNA, 10 bp, Unknown
  misc_feature (1)..( 10): Matrix.001 file - promoters60/1027873
aaagagctta

SEQ ID NO: 45036 - DNA, 10 bp, Unknown
  misc_feature (1)..( 10): Matrix.001 file - promoters60/1027873
gaccaaacca

SEQ ID NO: 45037 - DNA, 7 bp, Unknown
  misc_feature (1)..( 7): Matrix.001 file - promoters60/1027873
taaaaag

SEQ ID NO: 45038 - DNA, 8 bp, Unknown
  misc_feature (1)..( 8): Matrix.001 file - promoters60/1027877
atcaagaa

SEQ ID NO: 45039 - DNA, 8 bp, Unknown
  misc_feature (1)..( 8): Matrix.001 file - promoters60/1027877
aatcgaaa

SEQ ID NO: 45040 - DNA, 8 bp, Unknown
  misc_feature (1)..( 8): Matrix.001 file - promoters60/1027877
taagaatc

SEQ ID NO: 45041 - DNA, 7 bp, Unknown
  misc_feature (1)..( 7): Matrix.001 file - promoters60/1027877
tttcttt

SEQ ID NO: 45042 - DNA, 8 bp, Unknown
  misc_feature (1)..( 8): Matrix.001 file - promoters60/1027877
ttgtagaa

SEQ ID NO: 45043 - DNA, 7 bp, Unknown
  misc_feature (1)..( 7): Matrix.001 file - promoters60/1027877
acaagta

SEQ ID NO: 45044 - DNA, 6 bp, Unknown
  misc_feature (1)..( 6): Matrix.001 file - promoters60/1027877
caagaa

SEQ ID NO: 45045 - DNA, 6 bp, Unknown
  misc_feature (1)..( 6): Matrix.001 file - promoters60/1027877
atgaca

SEQ ID NO: 45046 - DNA, 6 bp, Unknown
  misc_feature (1)..( 6): Matrix.001 file - promoters60/1027877
actggt

SEQ ID NO: 45047 - DNA, 10 bp, Unknown
  misc_feature (1)..( 10): Matrix.001 file - promoters60/1027877
atcacttgat

SEQ ID NO: 45048 - DNA, 9 bp, Unknown
  misc_feature (1)..( 9): Matrix.001 file - promoters60/1027877
attgaaata

SEQ ID NO: 45049 - DNA, 8 bp, Unknown
  misc_feature (1)..( 8): Matrix.001 file - promoters60/1027914
tctattct

SEQ ID NO: 45050 - DNA, 7 bp, Unknown
  misc_feature (1)..( 7): Matrix.001 file - promoters60/1027914
ttgatta

SEQ ID NO: 45051 - DNA, 11 bp, Unknown
  misc_feature (1)..( 11): Matrix.001 file - promoters60/1027914
tatataataac

SEQ ID NO: 45052 - DNA, 11 bp, Unknown
  misc_feature (1)..( 11): Matrix.001 file - promoters60/1027928
aatttttcaac

SEQ ID NO: 45053 - DNA, 13 bp, Unknown
  misc_feature (1)..( 13): Matrix.001 file - promoters60/1027928
actatttataaat

SEQ ID NO: 45054 - DNA, 10 bp, Unknown
  misc_feature (1)..( 10): Matrix.001 file - promoters60/1027928
agtgtcaaat

SEQ ID NO: 45055 - DNA, 8 bp, Unknown
  misc_feature (1)..( 8): Matrix.001 file - promoters60/1027928
tataaata

SEQ ID NO: 45056 - DNA, 6 bp, Unknown
  misc_feature (1)..( 6): Matrix.001 file - promoters60/1027970
ttttgt

SEQ ID NO: 45057 - DNA, 6 bp, Unknown
  misc_feature (1)..( 6): Matrix.001 file - promoters60/1027970
tatatt

SEQ ID NO: 45058 - DNA, 6 bp, Unknown
  misc_feature (1)..( 6): Matrix.001 file - promoters60/1027970
tattat

SEQ ID NO: 45059 - DNA, 7 bp, Unknown
  misc_feature (1)..( 7): Matrix.001 file - promoters60/1027970
attattc

SEQ ID NO: 45060 - DNA, 6 bp, Unknown
  misc_feature (1)..( 6): Matrix.001 file - promoters60/1027970
taaaga

SEQ ID NO: 45061 - DNA, 6 bp, Unknown
  misc_feature (1)..( 6): Matrix.001 file - promoters60/1027970
agtttt

SEQ ID NO: 45062 - DNA, 7 bp, Unknown
  misc_feature (1)..( 7): Matrix.001 file - promoters60/1027970
tcggtta

SEQ ID NO: 45063 - DNA, 8 bp, Unknown
  misc_feature (1)..( 8): Matrix.001 file - promoters60/1027970
taagattc

SEQ ID NO: 45064 - DNA, 6 bp, Unknown
  misc_feature (1)..( 6): Matrix.001 file - promoters60/1027970
aagtga

SEQ ID NO: 45065 - DNA, 10 bp, Unknown
  misc_feature (1)..( 10): Matrix.001 file - promoters60/1027970
ttaatttctt

SEQ ID NO: 45066 - DNA, 12 bp, Unknown
  misc_feature (1)..( 12): Matrix.001 file - promoters60/1027970
ttggaaaacatg

SEQ ID NO: 45067 - DNA, 7 bp, Unknown
  misc_feature (1)..( 7): Matrix.001 file - promoters60/1027970
cttccgt

SEQ ID NO: 45068 - DNA, 6 bp, Unknown
  misc_feature (1)..( 6): Matrix.001 file - promoters60/1027970
attatt

SEQ ID NO: 45069 - DNA, 7 bp, Unknown
  misc_feature (1)..( 7): Matrix.001 file - promoters60/1027970
gagctaa

SEQ ID NO: 45070 - DNA, 6 bp, Unknown
  misc_feature (1)..( 6): Matrix.001 file - promoters60/1027970
aataaa

SEQ ID NO: 45071 - DNA, 6 bp, Unknown
  misc_feature (1)..( 6): Matrix.001 file - promoters60/1027970
aaaatt

SEQ ID NO: 45072 - DNA, 7 bp, Unknown
  misc_feature (1)..( 7): Matrix.001 file - promoters60/1027990
aaaaccc

SEQ ID NO: 45073 - DNA, 6 bp, Unknown
  misc_feature (1)..( 6): Matrix.001 file - promoters60/1027990
tagaaa

SEQ ID NO: 45074 - DNA, 7 bp, Unknown
  misc_feature (1)..( 7): Matrix.001 file - promoters60/1027990
tgtcgtt

SEQ ID NO: 45075 - DNA, 6 bp, Unknown
  misc_feature (1)..( 6): Matrix.001 file - promoters60/1027990
caggaa

SEQ ID NO: 45076 - DNA, 7 bp, Unknown
  misc_feature (1)..( 7): Matrix.001 file - promoters60/1027990
tttctca

SEQ ID NO: 45077 - DNA, 7 bp, Unknown
  misc_feature (1)..( 7): Matrix.001 file - promoters60/1028013
atcaagc

SEQ ID NO: 45078 - DNA, 6 bp, Unknown
  misc_feature (1)..( 6): Matrix.001 file - promoters60/1028013
ttttct

SEQ ID NO: 45079 - DNA, 8 bp, Unknown
  misc_feature (1)..( 8): Matrix.001 file - promoters60/1028013
agagaaga

SEQ ID NO: 45080 - DNA, 8 bp, Unknown
  misc_feature (1)..( 8): Matrix.001 file - promoters60/1028013
tgggatta

SEQ ID NO: 45081 - DNA, 6 bp, Unknown
  misc_feature (1)..( 6): Matrix.001 file - promoters60/1028013
tttaaa

SEQ ID NO: 45082 - DNA, 7 bp, Unknown
  misc_feature (1)..( 7): Matrix.001 file - promoters60/1028013
aaagcat

SEQ ID NO: 45083 - DNA, 8 bp, Unknown
  misc_feature (1)..( 8): Matrix.001 file - promoters60/1028013
tctcgtct

SEQ ID NO: 45084 - DNA, 7 bp, Unknown
  misc_feature (1)..( 7): Matrix.001 file - promoters60/1028013
agaaaag

SEQ ID NO: 45085 - DNA, 6 bp, Unknown
  misc_feature (1)..( 6): Matrix.001 file - promoters60/1028013
acgtgg

SEQ ID NO: 45086 - DNA, 6 bp, Unknown
  misc_feature (1)..( 6): Matrix.001 file - promoters60/1028013
agatag

SEQ ID NO: 45087 - DNA, 8 bp, Unknown
  misc_feature (1)..( 8): Matrix.001 file - promoters60/1028013
tttatttt

SEQ ID NO: 45088 - DNA, 6 bp, Unknown
  misc_feature (1)..( 6): Matrix.001 file - promoters60/1028013
tgactc

SEQ ID NO: 45089 - DNA, 7 bp, Unknown
  misc_feature (1)..( 7): Matrix.001 file - promoters60/1028013
ttgagtc

SEQ ID NO: 45090 - DNA, 7 bp, Unknown
  misc_feature (1)..( 7): Matrix.001 file - promoters60/1028013
cttgttt

SEQ ID NO: 45091 - DNA, 7 bp, Unknown
  misc_feature (1)..( 7): Matrix.001 file - promoters60/1028013
taaaatt

SEQ ID NO: 45092 - DNA, 6 bp, Unknown
  misc_feature (1)..( 6): Matrix.001 file - promoters60/1028013
ttcaaa

SEQ ID NO: 45093 - DNA, 9 bp, Unknown
  misc_feature (1)..( 9): Matrix.001 file - promoters60/1028013
aaaaaaaac

SEQ ID NO: 45094 - DNA, 7 bp, Unknown
  misc_feature (1)..( 7): Matrix.001 file - promoters60/1028013
ttagtca

SEQ ID NO: 45095 - DNA, 7 bp, Unknown
  misc_feature (1)..( 7): Matrix.001 file - promoters60/1028013
aataaat

SEQ ID NO: 45096 - DNA, 6 bp, Unknown
  misc_feature (1)..( 6): Matrix.001 file - promoters60/1028013
aataat

SEQ ID NO: 45097 - DNA, 6 bp, Unknown
  misc_feature (1)..( 6): Matrix.001 file - promoters60/1028042
ttaaaa

SEQ ID NO: 45098 - DNA, 6 bp, Unknown
  misc_feature (1)..( 6): Matrix.001 file - promoters60/1028042
taaaac

SEQ ID NO: 45099 - DNA, 6 bp, Unknown
  misc_feature (1)..( 6): Matrix.001 file - promoters60/1028042
aaactt

SEQ ID NO: 45100 - DNA, 7 bp, Unknown
  misc_feature (1)..( 7): Matrix.001 file - promoters60/1028042
cacaatc

SEQ ID NO: 45101 - DNA, 7 bp, Unknown
  misc_feature (1)..( 7): Matrix.001 file - promoters60/1028042
aaaccaa

SEQ ID NO: 45102 - DNA, 6 bp, Unknown
  misc_feature (1)..( 6): Matrix.001 file - promoters60/1028042
agttaa

SEQ ID NO: 45103 - DNA, 7 bp, Unknown
  misc_feature (1)..( 7): Matrix.001 file - promoters60/1028042
aagcaat

SEQ ID NO: 45104 - DNA, 7 bp, Unknown
  misc_feature (1)..( 7): Matrix.001 file - promoters60/1028042
acatgtt

SEQ ID NO: 45105 - DNA, 7 bp, Unknown
  misc_feature (1)..( 7): Matrix.001 file - promoters60/1028042
aatgtaa

SEQ ID NO: 45106 - DNA, 13 bp, Unknown
  misc_feature (1)..( 13): Matrix.001 file - promoters60/1028042
cagaaaagaaaaa

SEQ ID NO: 45107 - DNA, 8 bp, Unknown
  misc_feature (1)..( 8): Matrix.001 file - promoters60/1028042
aaaacaaa

SEQ ID NO: 45108 - DNA, 7 bp, Unknown
  misc_feature (1)..( 7): Matrix.001 file - promoters60/1028042
acaaaag

SEQ ID NO: 45109 - DNA, 8 bp, Unknown
  misc_feature (1)..( 8): Matrix.001 file - promoters60/1028042
agacgaaa

SEQ ID NO: 45110 - DNA, 13 bp, Unknown
  misc_feature (1)..( 13): Matrix.001 file - promoters60/1028042
agaacaattaacc

SEQ ID NO: 45111 - DNA, 6 bp, Unknown
  misc_feature (1)..( 6): Matrix.001 file - promoters60/1028042
cctttc

SEQ ID NO: 45112 - DNA, 6 bp, Unknown
  misc_feature (1)..( 6): Matrix.001 file - promoters60/1028042
ctttaa

SEQ ID NO: 45113 - DNA, 9 bp, Unknown
  misc_feature (1)..( 9): Matrix.001 file - promoters60/1028042
aatttaagt

SEQ ID NO: 45114 - DNA, 8 bp, Unknown
  misc_feature (1)..( 8): Matrix.001 file - promoters60/1028042
atagttca

SEQ ID NO: 45115 - DNA, 7 bp, Unknown
  misc_feature (1)..( 7): Matrix.001 file - promoters60/1028042
ttttttt

SEQ ID NO: 45116 - DNA, 7 bp, Unknown
  misc_feature (1)..( 7): Matrix.001 file - promoters60/1028042
tttattt

SEQ ID NO: 45117 - DNA, 7 bp, Unknown
  misc_feature (1)..( 7): Matrix.001 file - promoters60/1028042
aaacttt

SEQ ID NO: 45118 - DNA, 7 bp, Unknown
  misc_feature (1)..( 7): Matrix.001 file - promoters60/1028042
cataata

SEQ ID NO: 45119 - DNA, 7 bp, Unknown
  misc_feature (1)..( 7): Matrix.001 file - promoters60/1028042
aaaagcg

SEQ ID NO: 45120 - DNA, 12 bp, Unknown
  misc_feature (1)..( 12): Matrix.001 file - promoters60/1028084
gaaattttattt

SEQ ID NO: 45121 - DNA, 8 bp, Unknown
  misc_feature (1)..( 8): Matrix.001 file - promoters60/1028084
catccaca

SEQ ID NO: 45122 - DNA, 6 bp, Unknown
  misc_feature (1)..( 6): Matrix.001 file - promoters60/1028084
cacaaa

SEQ ID NO: 45123 - DNA, 10 bp, Unknown
  misc_feature (1)..( 10): Matrix.001 file - promoters60/1028084
ataacaattt

SEQ ID NO: 45124 - DNA, 7 bp, Unknown
  misc_feature (1)..( 7): Matrix.001 file - promoters60/1028084
aaaaaaa

SEQ ID NO: 45125 - DNA, 8 bp, Unknown
  misc_feature (1)..( 8): Matrix.001 file - promoters60/1028084
aaaaagac

SEQ ID NO: 45126 - DNA, 6 bp, Unknown
  misc_feature (1)..( 6): Matrix.001 file - promoters60/1028084
tatata

SEQ ID NO: 45127 - DNA, 6 bp, Unknown
  misc_feature (1)..( 6): Matrix.001 file - promoters60/1028084
tgtatg

SEQ ID NO: 45128 - DNA, 6 bp, Unknown
  misc_feature (1)..( 6): Matrix.001 file - promoters60/1028084
ataata

SEQ ID NO: 45129 - DNA, 6 bp, Unknown
  misc_feature (1)..( 6): Matrix.001 file - promoters60/1028084
attatt

SEQ ID NO: 45130 - DNA, 7 bp, Unknown
  misc_feature (1)..( 7): Matrix.001 file - promoters60/1028084
gttaagt

SEQ ID NO: 45131 - DNA, 6 bp, Unknown
  misc_feature (1)..( 6): Matrix.001 file - promoters60/1028084
tagtgt

SEQ ID NO: 45132 - DNA, 7 bp, Unknown
  misc_feature (1)..( 7): Matrix.001 file - promoters60/1028084
tttgcac

SEQ ID NO: 45133 - DNA, 6 bp, Unknown
  misc_feature (1)..( 6): Matrix.001 file - promoters60/1028084
aagaaa

SEQ ID NO: 45134 - DNA, 6 bp, Unknown
  misc_feature (1)..( 6): Matrix.001 file - promoters60/1028084
aaatca

SEQ ID NO: 45135 - DNA, 7 bp, Unknown
  misc_feature (1)..( 7): Matrix.001 file - promoters60/1028084
aataact

SEQ ID NO: 45136 - DNA, 6 bp, Unknown
  misc_feature (1)..( 6): Matrix.001 file - promoters60/1028095
gattaa

SEQ ID NO: 45137 - DNA, 8 bp, Unknown
  misc_feature (1)..( 8): Matrix.001 file - promoters60/1028095
atatcttt

SEQ ID NO: 45138 - DNA, 9 bp, Unknown
  misc_feature (1)..( 9): Matrix.001 file - promoters60/1028095
aacaacatc

SEQ ID NO: 45139 - DNA, 8 bp, Unknown
  misc_feature (1)..( 8): Matrix.001 file - promoters60/1028095
tagctata

SEQ ID NO: 45140 - DNA, 6 bp, Unknown
  misc_feature (1)..( 6): Matrix.001 file - promoters60/1028095
tttttt

SEQ ID NO: 45141 - DNA, 9 bp, Unknown
  misc_feature (1)..( 9): Matrix.001 file - promoters60/1028095
tttatttta

SEQ ID NO: 45142 - DNA, 7 bp, Unknown
  misc_feature (1)..( 7): Matrix.001 file - promoters60/1028095
tataaaa

SEQ ID NO: 45143 - DNA, 7 bp, Unknown
  misc_feature (1)..( 7): Matrix.001 file - promoters60/1028095
tgaaatt

SEQ ID NO: 45144 - DNA, 7 bp, Unknown
  misc_feature (1)..( 7): Matrix.001 file - promoters60/1028095
cgttttt

SEQ ID NO: 45145 - DNA, 8 bp, Unknown
  misc_feature (1)..( 8): Matrix.001 file - promoters60/1028095
caaagaaa

SEQ ID NO: 45146 - DNA, 7 bp, Unknown
  misc_feature (1)..( 7): Matrix.001 file - promoters60/1028095
ttattat

SEQ ID NO: 45147 - DNA, 10 bp, Unknown
  misc_feature (1)..( 10): Matrix.001 file - promoters60/1028095
aaataaagtt

SEQ ID NO: 45148 - DNA, 6 bp, Unknown
  misc_feature (1)..( 6): Matrix.001 file - promoters60/1028095
aaaacg

SEQ ID NO: 45149 - DNA, 8 bp, Unknown
  misc_feature (1)..( 8): Matrix.001 file - promoters60/1028131
agtatata

SEQ ID NO: 45150 - DNA, 8 bp, Unknown
  misc_feature (1)..( 8): Matrix.001 file - promoters60/1028131
ttcaattt

SEQ ID NO: 45151 - DNA, 14 bp, Unknown
  misc_feature (1)..( 14): Matrix.001 file - promoters60/1028131
ccttcattttttta

SEQ ID NO: 45152 - DNA, 10 bp, Unknown
  misc_feature (1)..( 10): Matrix.001 file - promoters60/1028131
gaagcccaat

SEQ ID NO: 45153 - DNA, 6 bp, Unknown
  misc_feature (1)..( 6): Matrix.001 file - promoters60/1028151
aagatg

SEQ ID NO: 45154 - DNA, 9 bp, Unknown
  misc_feature (1)..( 9): Matrix.001 file - promoters60/1028151
tgattattt

SEQ ID NO: 45155 - DNA, 8 bp, Unknown
  misc_feature (1)..( 8): Matrix.001 file - promoters60/1028151
acagcttt

SEQ ID NO: 45156 - DNA, 6 bp, Unknown
  misc_feature (1)..( 6): Matrix.001 file - promoters60/1028151
tatttt

SEQ ID NO: 45157 - DNA, 7 bp, Unknown
  misc_feature (1)..( 7): Matrix.001 file - promoters60/1028151
agatttt

SEQ ID NO: 45158 - DNA, 7 bp, Unknown
  misc_feature (1)..( 7): Matrix.001 file - promoters60/1028151
aaacact

SEQ ID NO: 45159 - DNA, 6 bp, Unknown
  misc_feature (1)..( 6): Matrix.001 file - promoters60/1028151
tctctc

SEQ ID NO: 45160 - DNA, 7 bp, Unknown
  misc_feature (1)..( 7): Matrix.001 file - promoters60/1028151
atgatga

SEQ ID NO: 45161 - DNA, 8 bp, Unknown
  misc_feature (1)..( 8): Matrix.001 file - promoters60/1028151
attgtttt

SEQ ID NO: 45162 - DNA, 8 bp, Unknown
  misc_feature (1)..( 8): Matrix.001 file - promoters60/1028151
aagaggat

SEQ ID NO: 45163 - DNA, 10 bp, Unknown
  misc_feature (1)..( 10): Matrix.001 file - promoters60/1028151
tttatttata

SEQ ID NO: 45164 - DNA, 7 bp, Unknown
  misc_feature (1)..( 7): Matrix.001 file - promoters60/1028151
tctaaaa

SEQ ID NO: 45165 - DNA, 7 bp, Unknown
  misc_feature (1)..( 7): Matrix.001 file - promoters60/1028177
gatttta

SEQ ID NO: 45166 - DNA, 8 bp, Unknown
  misc_feature (1)..( 8): Matrix.001 file - promoters60/1028177
ttggacaa

SEQ ID NO: 45167 - DNA, 11 bp, Unknown
  misc_feature (1)..( 11): Matrix.001 file - promoters60/1028177
ctatcaatttt

SEQ ID NO: 45168 - DNA, 9 bp, Unknown
  misc_feature (1)..( 9): Matrix.001 file - promoters60/1028177
tgatttctt

SEQ ID NO: 45169 - DNA, 7 bp, Unknown
  misc_feature (1)..( 7): Matrix.001 file - promoters60/1028177
gatatgt

SEQ ID NO: 45170 - DNA, 9 bp, Unknown
  misc_feature (1)..( 9): Matrix.001 file - promoters60/1028177
gttctaact

SEQ ID NO: 45171 - DNA, 7 bp, Unknown
  misc_feature (1)..( 7): Matrix.001 file - promoters60/1028177
ctaagta

SEQ ID NO: 45172 - DNA, 6 bp, Unknown
  misc_feature (1)..( 6): Matrix.001 file - promoters60/1028177
aactct

SEQ ID NO: 45173 - DNA, 8 bp, Unknown
  misc_feature (1)..( 8): Matrix.001 file - promoters60/1028177
gttctact

SEQ ID NO: 45174 - DNA, 8 bp, Unknown
  misc_feature (1)..( 8): Matrix.001 file - promoters60/1028177
tggatttg

SEQ ID NO: 45175 - DNA, 6 bp, Unknown
  misc_feature (1)..( 6): Matrix.001 file - promoters60/1028177
tttttt

SEQ ID NO: 45176 - DNA, 7 bp, Unknown
  misc_feature (1)..( 7): Matrix.001 file - promoters60/1028177
ttagttt

SEQ ID NO: 45177 - DNA, 7 bp, Unknown
  misc_feature (1)..( 7): Matrix.001 file - promoters60/1028177
tctaaaa

SEQ ID NO: 45178 - DNA, 6 bp, Unknown
  misc_feature (1)..( 6): Matrix.001 file - promoters60/1028177
tagaaa

SEQ ID NO: 45179 - DNA, 8 bp, Unknown
  misc_feature (1)..( 8): Matrix.001 file - promoters60/1028177
cctagaat

SEQ ID NO: 45180 - DNA, 6 bp, Unknown
  misc_feature (1)..( 6): Matrix.001 file - promoters60/1028224
taagtt

SEQ ID NO: 45181 - DNA, 7 bp, Unknown
  misc_feature (1)..( 7): Matrix.001 file - promoters60/1028224
tcgtcaa

SEQ ID NO: 45182 - DNA, 6 bp, Unknown
  misc_feature (1)..( 6): Matrix.001 file - promoters60/1028224
caatta

SEQ ID NO: 45183 - DNA, 8 bp, Unknown
  misc_feature (1)..( 8): Matrix.001 file - promoters60/1028224
taatcagt

SEQ ID NO: 45184 - DNA, 6 bp, Unknown
  misc_feature (1)..( 6): Matrix.001 file - promoters60/1028224
acgact

SEQ ID NO: 45185 - DNA, 8 bp, Unknown
  misc_feature (1)..( 8): Matrix.001 file - promoters60/1028224
atgtttat

SEQ ID NO: 45186 - DNA, 6 bp, Unknown
  misc_feature (1)..( 6): Matrix.001 file - promoters60/1028224
ttaaaa

SEQ ID NO: 45187 - DNA, 8 bp, Unknown
  misc_feature (1)..( 8): Matrix.001 file - promoters60/1028224
ttatgttt

SEQ ID NO: 45188 - DNA, 6 bp, Unknown
  misc_feature (1)..( 6): Matrix.001 file - promoters60/1028224
tataaa

SEQ ID NO: 45189 - DNA, 7 bp, Unknown
  misc_feature (1)..( 7): Matrix.001 file - promoters60/1028224
acaattt

SEQ ID NO: 45190 - DNA, 7 bp, Unknown
  misc_feature (1)..( 7): Matrix.001 file - promoters60/1028224
taaaata

SEQ ID NO: 45191 - DNA, 6 bp, Unknown
  misc_feature (1)..( 6): Matrix.001 file - promoters60/1028224
tttcat

SEQ ID NO: 45192 - DNA, 6 bp, Unknown
  misc_feature (1)..( 6): Matrix.001 file - promoters60/1028224
tgaaat

SEQ ID NO: 45193 - DNA, 7 bp, Unknown
  misc_feature (1)..( 7): Matrix.001 file - promoters60/1028224
gttgaaa

SEQ ID NO: 45194 - DNA, 7 bp, Unknown
  misc_feature (1)..( 7): Matrix.001 file - promoters60/1028224
gtttttt

SEQ ID NO: 45195 - DNA, 7 bp, Unknown
  misc_feature (1)..( 7): Matrix.001 file - promoters60/1028224
ggtaaac

SEQ ID NO: 45196 - DNA, 6 bp, Unknown
  misc_feature (1)..( 6): Matrix.001 file - promoters60/1028224
atttga

SEQ ID NO: 45197 - DNA, 6 bp, Unknown
  misc_feature (1)..( 6): Matrix.001 file - promoters60/1028224
taaatt

SEQ ID NO: 45198 - DNA, 6 bp, Unknown
  misc_feature (1)..( 6): Matrix.001 file - promoters60/1028224
taatct

SEQ ID NO: 45199 - DNA, 9 bp, Unknown
  misc_feature (1)..( 9): Matrix.001 file - promoters60/1028224
taaccattt

SEQ ID NO: 45200 - DNA, 7 bp, Unknown
  misc_feature (1)..( 7): Matrix.001 file - promoters60/1028224
tatagtt

SEQ ID NO: 45201 - DNA, 11 bp, Unknown
  misc_feature (1)..( 11): Matrix.001 file - promoters60/1028224
aaacttcatct

SEQ ID NO: 45202 - DNA, 7 bp, Unknown
  misc_feature (1)..( 7): Matrix.001 file - promoters60/1028224
tatatgt

SEQ ID NO: 45203 - DNA, 7 bp, Unknown
  misc_feature (1)..( 7): Matrix.001 file - promoters60/1028224
taagatt

SEQ ID NO: 45204 - DNA, 7 bp, Unknown
  misc_feature (1)..( 7): Matrix.001 file - promoters60/1028224
tggatat

SEQ ID NO: 45205 - DNA, 8 bp, Unknown
  misc_feature (1)..( 8): Matrix.001 file - promoters60/1028243
tatataaa

SEQ ID NO: 45206 - DNA, 11 bp, Unknown
  misc_feature (1)..( 11): Matrix.001 file - promoters60/1028243
acaagttaaaa

SEQ ID NO: 45207 - DNA, 6 bp, Unknown
  misc_feature (1)..( 6): Matrix.001 file - promoters60/1028273
gccaat

SEQ ID NO: 45208 - DNA, 6 bp, Unknown
  misc_feature (1)..( 6): Matrix.001 file - promoters60/1028273
gcagag

SEQ ID NO: 45209 - DNA, 6 bp, Unknown
  misc_feature (1)..( 6): Matrix.001 file - promoters60/1028273
ttaaag

SEQ ID NO: 45210 - DNA, 8 bp, Unknown
  misc_feature (1)..( 8): Matrix.001 file - promoters60/1028273
aattctaa

SEQ ID NO: 45211 - DNA, 7 bp, Unknown
  misc_feature (1)..( 7): Matrix.001 file - promoters60/1028273
aatcgga

SEQ ID NO: 45212 - DNA, 11 bp, Unknown
  misc_feature (1)..( 11): Matrix.001 file - promoters60/1028273
agacagtgaag

SEQ ID NO: 45213 - DNA, 6 bp, Unknown
  misc_feature (1)..( 6): Matrix.001 file - promoters60/1028273
aagtgt

SEQ ID NO: 45214 - DNA, 6 bp, Unknown
  misc_feature (1)..( 6): Matrix.001 file - promoters60/1028273
atatat

SEQ ID NO: 45215 - DNA, 7 bp, Unknown
  misc_feature (1)..( 7): Matrix.001 file - promoters60/1028273
acaatac

SEQ ID NO: 45216 - DNA, 9 bp, Unknown
  misc_feature (1)..( 9): Matrix.001 file - promoters60/1028273
atacaaata

SEQ ID NO: 45217 - DNA, 6 bp, Unknown
  misc_feature (1)..( 6): Matrix.001 file - promoters60/1028273
tcaaat

SEQ ID NO: 45218 - DNA, 6 bp, Unknown
  misc_feature (1)..( 6): Matrix.001 file - promoters60/1028273
gagcag

SEQ ID NO: 45219 - DNA, 7 bp, Unknown
  misc_feature (1)..( 7): Matrix.001 file - promoters60/1028273
gaaataa

SEQ ID NO: 45220 - DNA, 10 bp, Unknown
  misc_feature (1)..( 10): Matrix.001 file - promoters60/1028318
ttcttaaaga

SEQ ID NO: 45221 - DNA, 8 bp, Unknown
  misc_feature (1)..( 8): Matrix.001 file - promoters60/1028318
tattattt

SEQ ID NO: 45222 - DNA, 8 bp, Unknown
  misc_feature (1)..( 8): Matrix.001 file - promoters60/1028318
ataaataa

SEQ ID NO: 45223 - DNA, 8 bp, Unknown
  misc_feature (1)..( 8): Matrix.001 file - promoters60/1028318
catcgttt

SEQ ID NO: 45224 - DNA, 11 bp, Unknown
  misc_feature (1)..( 11): Matrix.001 file - promoters60/1028368
agagaaaataa

SEQ ID NO: 45225 - DNA, 10 bp, Unknown
  misc_feature (1)..( 10): Matrix.001 file - promoters60/1028368
agactaaaaa

SEQ ID NO: 45226 - DNA, 10 bp, Unknown
  misc_feature (1)..( 10): Matrix.001 file - promoters60/1028413
attaaaattg

SEQ ID NO: 45227 - DNA, 8 bp, Unknown
  misc_feature (1)..( 8): Matrix.001 file - promoters60/1028413
ttaaattc

SEQ ID NO: 45228 - DNA, 11 bp, Unknown
  misc_feature (1)..( 11): Matrix.001 file - promoters60/1028470
aataaaattaa

SEQ ID NO: 45229 - DNA, 8 bp, Unknown
  misc_feature (1)..( 8): Matrix.001 file - promoters60/1028470
ttttcttt

SEQ ID NO: 45230 - DNA, 10 bp, Unknown
  misc_feature (1)..( 10): Matrix.001 file - promoters60/1028470
tttcaaatac

SEQ ID NO: 45231 - DNA, 10 bp, Unknown
  misc_feature (1)..( 10): Matrix.001 file - promoters60/1028470
cgataaaaaa

SEQ ID NO: 45232 - DNA, 7 bp, Unknown
  misc_feature (1)..( 7): Matrix.001 file - promoters60/1028508
tcttctt

SEQ ID NO: 45233 - DNA, 7 bp, Unknown
  misc_feature (1)..( 7): Matrix.001 file - promoters60/1028508
caaacaa

SEQ ID NO: 45234 - DNA, 7 bp, Unknown
  misc_feature (1)..( 7): Matrix.001 file - promoters60/1028508
aaaaatc

SEQ ID NO: 45235 - DNA, 11 bp, Unknown
  misc_feature (1)..( 11): Matrix.001 file - promoters60/1028508
tctatataaac

SEQ ID NO: 45236 - DNA, 7 bp, Unknown
  misc_feature (1)..( 7): Matrix.001 file - promoters60/1028508
gtcaagt

SEQ ID NO: 45237 - DNA, 6 bp, Unknown
  misc_feature (1)..( 6): Matrix.001 file - promoters60/1028508
ttggaa

SEQ ID NO: 45238 - DNA, 8 bp, Unknown
  misc_feature (1)..( 8): Matrix.001 file - promoters60/1028508
tcagaaaa

SEQ ID NO: 45239 - DNA, 7 bp, Unknown
  misc_feature (1)..( 7): Matrix.001 file - promoters60/1028508
aaaacaa

SEQ ID NO: 45240 - DNA, 12 bp, Unknown
  misc_feature (1)..( 12): Matrix.001 file - promoters60/1028508
taatagatctac

SEQ ID NO: 45241 - DNA, 6 bp, Unknown
  misc_feature (1)..( 6): Matrix.001 file - promoters60/1028508
aaaaaa

SEQ ID NO: 45242 - DNA, 6 bp, Unknown
  misc_feature (1)..( 6): Matrix.001 file - promoters60/1028508
tttggc

SEQ ID NO: 45243 - DNA, 6 bp, Unknown
  misc_feature (1)..( 6): Matrix.001 file - promoters60/1028508
tatgga

SEQ ID NO: 45244 - DNA, 7 bp, Unknown
  misc_feature (1)..( 7): Matrix.001 file - promoters60/1028508
tggacgt

SEQ ID NO: 45245 - DNA, 6 bp, Unknown
  misc_feature (1)..( 6): Matrix.001 file - promoters60/1028508
tggaat

SEQ ID NO: 45246 - DNA, 7 bp, Unknown
  misc_feature (1)..( 7): Matrix.001 file - promoters60/1028508
ttcaact

SEQ ID NO: 45247 - DNA, 7 bp, Unknown
  misc_feature (1)..( 7): Matrix.001 file - promoters60/1028508
cttgtaa

SEQ ID NO: 45248 - DNA, 9 bp, Unknown
  misc_feature (1)..( 9): Matrix.001 file - promoters60/1028508
ttctcaaaa

SEQ ID NO: 45249 - DNA, 6 bp, Unknown
  misc_feature (1)..( 6): Matrix.001 file - promoters60/1028508
aaattg

SEQ ID NO: 45250 - DNA, 8 bp, Unknown
  misc_feature (1)..( 8): Matrix.001 file - promoters60/1028508
accagcga

SEQ ID NO: 45251 - DNA, 8 bp, Unknown
  misc_feature (1)..( 8): Matrix.001 file - promoters60/1028508
aaaaaaaa

SEQ ID NO: 45252 - DNA, 10 bp, Unknown
  misc_feature (1)..( 10): Matrix.001 file - promoters60/1028545
ttattttaat

SEQ ID NO: 45253 - DNA, 11 bp, Unknown
  misc_feature (1)..( 11): Matrix.001 file - promoters60/1028545
ttaagtagatt

SEQ ID NO: 45254 - DNA, 8 bp, Unknown
  misc_feature (1)..( 8): Matrix.001 file - promoters60/1028545
aaatttta

SEQ ID NO: 45255 - DNA, 8 bp, Unknown
  misc_feature (1)..( 8): Matrix.001 file - promoters60/1028545
gtcttttt

SEQ ID NO: 45256 - DNA, 8 bp, Unknown
  misc_feature (1)..( 8): Matrix.001 file - promoters60/1028545
ctaatttc

SEQ ID NO: 45257 - DNA, 11 bp, Unknown
  misc_feature (1)..( 11): Matrix.001 file - promoters60/1028545
acaagaatata

SEQ ID NO: 45258 - DNA, 7 bp, Unknown
  misc_feature (1)..( 7): Matrix.001 file - promoters60/1028549
tctatat

SEQ ID NO: 45259 - DNA, 7 bp, Unknown
  misc_feature (1)..( 7): Matrix.001 file - promoters60/1028549
aaatcga

SEQ ID NO: 45260 - DNA, 7 bp, Unknown
  misc_feature (1)..( 7): Matrix.001 file - promoters60/1028549
actgttg

SEQ ID NO: 45261 - DNA, 6 bp, Unknown
  misc_feature (1)..( 6): Matrix.001 file - promoters60/1028549
tttaaa

SEQ ID NO: 45262 - DNA, 6 bp, Unknown
  misc_feature (1)..( 6): Matrix.001 file - promoters60/1028549
gtgaaa

SEQ ID NO: 45263 - DNA, 7 bp, Unknown
  misc_feature (1)..( 7): Matrix.001 file - promoters60/1028549
aaaagaa

SEQ ID NO: 45264 - DNA, 7 bp, Unknown
  misc_feature (1)..( 7): Matrix.001 file - promoters60/1028549
aaaccca

SEQ ID NO: 45265 - DNA, 7 bp, Unknown
  misc_feature (1)..( 7): Matrix.001 file - promoters60/1028549
aactgaa

SEQ ID NO: 45266 - DNA, 7 bp, Unknown
  misc_feature (1)..( 7): Matrix.001 file - promoters60/1028549
tttggtg

SEQ ID NO: 45267 - DNA, 7 bp, Unknown
  misc_feature (1)..( 7): Matrix.001 file - promoters60/1028549
gtttatc

SEQ ID NO: 45268 - DNA, 7 bp, Unknown
  misc_feature (1)..( 7): Matrix.001 file - promoters60/1028549
atcgtac

SEQ ID NO: 45269 - DNA, 6 bp, Unknown
  misc_feature (1)..( 6): Matrix.001 file - promoters60/1028549
ataaat

SEQ ID NO: 45270 - DNA, 7 bp, Unknown
  misc_feature (1)..( 7): Matrix.001 file - promoters60/1028549
ggtacaa

SEQ ID NO: 45271 - DNA, 8 bp, Unknown
  misc_feature (1)..( 8): Matrix.001 file - promoters60/1028549
cagtggat

SEQ ID NO: 45272 - DNA, 9 bp, Unknown
  misc_feature (1)..( 9): Matrix.001 file - promoters60/1028590
atgattatc

SEQ ID NO: 45273 - DNA, 8 bp, Unknown
  misc_feature (1)..( 8): Matrix.001 file - promoters60/1028590
aaaaaact

SEQ ID NO: 45274 - DNA, 6 bp, Unknown
  misc_feature (1)..( 6): Matrix.001 file - promoters60/1028590
tttctt

SEQ ID NO: 45275 - DNA, 8 bp, Unknown
  misc_feature (1)..( 8): Matrix.001 file - promoters60/1028590
caaccttg

SEQ ID NO: 45276 - DNA, 6 bp, Unknown
  misc_feature (1)..( 6): Matrix.001 file - promoters60/1028590
atcaag

SEQ ID NO: 45277 - DNA, 9 bp, Unknown
  misc_feature (1)..( 9): Matrix.001 file - promoters60/1028590
aactaaata

SEQ ID NO: 45278 - DNA, 7 bp, Unknown
  misc_feature (1)..( 7): Matrix.001 file - promoters60/1028590
aacaacg

SEQ ID NO: 45279 - DNA, 12 bp, Unknown
  misc_feature (1)..( 12): Matrix.001 file - promoters60/1028590
aaaacaaaaatg

SEQ ID NO: 45280 - DNA, 7 bp, Unknown
  misc_feature (1)..( 7): Matrix.001 file - promoters60/1028590
tacaata

SEQ ID NO: 45281 - DNA, 6 bp, Unknown
  misc_feature (1)..( 6): Matrix.001 file - promoters60/1028590
ccaaac

SEQ ID NO: 45282 - DNA, 8 bp, Unknown
  misc_feature (1)..( 8): Matrix.001 file - promoters60/1028590
aaaagttg

SEQ ID NO: 45283 - DNA, 10 bp, Unknown
  misc_feature (1)..( 10): Matrix.001 file - promoters60/1028590
ggtagaatac

SEQ ID NO: 45284 - DNA, 7 bp, Unknown
  misc_feature (1)..( 7): Matrix.001 file - promoters60/1028590
tataaat

SEQ ID NO: 45285 - DNA, 6 bp, Unknown
  misc_feature (1)..( 6): Matrix.001 file - promoters60/1028590
ttgatg

SEQ ID NO: 45286 - DNA, 7 bp, Unknown
  misc_feature (1)..( 7): Matrix.001 file - promoters60/1028590
tcaatca

SEQ ID NO: 45287 - DNA, 8 bp, Unknown
  misc_feature (1)..( 8): Matrix.001 file - promoters60/1028590
ttcatctt

SEQ ID NO: 45288 - DNA, 8 bp, Unknown
  misc_feature (1)..( 8): Matrix.001 file - promoters60/1028590
tcttctcc

SEQ ID NO: 45289 - DNA, 7 bp, Unknown
  misc_feature (1)..( 7): Matrix.001 file - promoters60/1028590
attatat

SEQ ID NO: 45290 - DNA, 6 bp, Unknown
  misc_feature (1)..( 6): Matrix.001 file - promoters60/1028590
ttctta

SEQ ID NO: 45291 - DNA, 6 bp, Unknown
  misc_feature (1)..( 6): Matrix.001 file - promoters60/1028590
taatta

SEQ ID NO: 45292 - DNA, 7 bp, Unknown
  misc_feature (1)..( 7): Matrix.001 file - promoters60/1028674
ttataat

SEQ ID NO: 45293 - DNA, 10 bp, Unknown
  misc_feature (1)..( 10): Matrix.001 file - promoters60/1028674
ttataacaaa

SEQ ID NO: 45294 - DNA, 9 bp, Unknown
  misc_feature (1)..( 9): Matrix.001 file - promoters60/1028674
aaaatttaa

SEQ ID NO: 45295 - DNA, 9 bp, Unknown
  misc_feature (1)..( 9): Matrix.001 file - promoters60/1028674
tttaaagat

SEQ ID NO: 45296 - DNA, 9 bp, Unknown
  misc_feature (1)..( 9): Matrix.001 file - promoters60/1028674
cattaatta

SEQ ID NO: 45297 - DNA, 8 bp, Unknown
  misc_feature (1)..( 8): Matrix.001 file - promoters60/1028674
atgaaaat

SEQ ID NO: 45298 - DNA, 8 bp, Unknown
  misc_feature (1)..( 8): Matrix.001 file - promoters60/1028674
tttaaaaa

SEQ ID NO: 45299 - DNA, 10 bp, Unknown
  misc_feature (1)..( 10): Matrix.001 file - promoters60/1028682
ttttcaattc

SEQ ID NO: 45300 - DNA, 9 bp, Unknown
  misc_feature (1)..( 9): Matrix.001 file - promoters60/1028682
ctatatata

SEQ ID NO: 45301 - DNA, 9 bp, Unknown
  misc_feature (1)..( 9): Matrix.001 file - promoters60/1028682
aaaaattca

SEQ ID NO: 45302 - DNA, 6 bp, Unknown
  misc_feature (1)..( 6): Matrix.001 file - promoters60/1028735
atatga

SEQ ID NO: 45303 - DNA, 7 bp, Unknown
  misc_feature (1)..( 7): Matrix.001 file - promoters60/1028735
aacacac

SEQ ID NO: 45304 - DNA, 7 bp, Unknown
  misc_feature (1)..( 7): Matrix.001 file - promoters60/1028735
aggatcc

SEQ ID NO: 45305 - DNA, 6 bp, Unknown
  misc_feature (1)..( 6): Matrix.001 file - promoters60/1028735
ttcttc

SEQ ID NO: 45306 - DNA, 11 bp, Unknown
  misc_feature (1)..( 11): Matrix.001 file - promoters60/1028735
gaaacacgcac

SEQ ID NO: 45307 - DNA, 6 bp, Unknown
  misc_feature (1)..( 6): Matrix.001 file - promoters60/1028735
ggaaaa

SEQ ID NO: 45308 - DNA, 7 bp, Unknown
  misc_feature (1)..( 7): Matrix.001 file - promoters60/1028735
aacaact

SEQ ID NO: 45309 - DNA, 6 bp, Unknown
  misc_feature (1)..( 6): Matrix.001 file - promoters60/1028735
aggtat

SEQ ID NO: 45310 - DNA, 9 bp, Unknown
  misc_feature (1)..( 9): Matrix.001 file - promoters60/1028735
cacttttac

SEQ ID NO: 45311 - DNA, 11 bp, Unknown
  misc_feature (1)..( 11): Matrix.001 file - promoters60/1028735
acaattggagg

SEQ ID NO: 45312 - DNA, 7 bp, Unknown
  misc_feature (1)..( 7): Matrix.001 file - promoters60/1028735
tacccac

SEQ ID NO: 45313 - DNA, 6 bp, Unknown
  misc_feature (1)..( 6): Matrix.001 file - promoters60/1028751
cagaaa

SEQ ID NO: 45314 - DNA, 10 bp, Unknown
  misc_feature (1)..( 10): Matrix.001 file - promoters60/1028751
tgcaacaaga

SEQ ID NO: 45315 - DNA, 6 bp, Unknown
  misc_feature (1)..( 6): Matrix.001 file - promoters60/1028751
aaaaaa

SEQ ID NO: 45316 - DNA, 6 bp, Unknown
  misc_feature (1)..( 6): Matrix.001 file - promoters60/1028751
cttttc

SEQ ID NO: 45317 - DNA, 7 bp, Unknown
  misc_feature (1)..( 7): Matrix.001 file - promoters60/1028751
ttcattt

SEQ ID NO: 45318 - DNA, 9 bp, Unknown
  misc_feature (1)..( 9): Matrix.001 file - promoters60/1028751
tttagttta

SEQ ID NO: 45319 - DNA, 6 bp, Unknown
  misc_feature (1)..( 6): Matrix.001 file - promoters60/1028751
taatgt

SEQ ID NO: 45320 - DNA, 10 bp, Unknown
  misc_feature (1)..( 10): Matrix.001 file - promoters60/1028751
gataattgat

SEQ ID NO: 45321 - DNA, 6 bp, Unknown
  misc_feature (1)..( 6): Matrix.001 file - promoters60/1028751
tcaaaa

SEQ ID NO: 45322 - DNA, 6 bp, Unknown
  misc_feature (1)..( 6): Matrix.001 file - promoters60/1028751
tggatt

SEQ ID NO: 45323 - DNA, 6 bp, Unknown
  misc_feature (1)..( 6): Matrix.001 file - promoters60/1028751
ttttgc

SEQ ID NO: 45324 - DNA, 9 bp, Unknown
  misc_feature (1)..( 9): Matrix.001 file - promoters60/1028751
gatataata

SEQ ID NO: 45325 - DNA, 7 bp, Unknown
  misc_feature (1)..( 7): Matrix.001 file - promoters60/1028751
attagag

SEQ ID NO: 45326 - DNA, 6 bp, Unknown
  misc_feature (1)..( 6): Matrix.001 file - promoters60/1028751
catgaa

SEQ ID NO: 45327 - DNA, 7 bp, Unknown
  misc_feature (1)..( 7): Matrix.001 file - promoters60/1028751
aatgctt

SEQ ID NO: 45328 - DNA, 7 bp, Unknown
  misc_feature (1)..( 7): Matrix.001 file - promoters60/1028751
gatacag

SEQ ID NO: 45329 - DNA, 6 bp, Unknown
  misc_feature (1)..( 6): Matrix.001 file - promoters60/1028751
attcca

SEQ ID NO: 45330 - DNA, 7 bp, Unknown
  misc_feature (1)..( 7): Matrix.001 file - promoters60/1028751
aaacctg

SEQ ID NO: 45331 - DNA, 6 bp, Unknown
  misc_feature (1)..( 6): Matrix.001 file - promoters60/1028751
tttgac

SEQ ID NO: 45332 - DNA, 6 bp, Unknown
  misc_feature (1)..( 6): Matrix.001 file - promoters60/1028751
acggta

SEQ ID NO: 45333 - DNA, 7 bp, Unknown
  misc_feature (1)..( 7): Matrix.001 file - promoters60/1028751
tcaagtt

SEQ ID NO: 45334 - DNA, 9 bp, Unknown
  misc_feature (1)..( 9): Matrix.001 file - promoters60/1028751
atttaattt

SEQ ID NO: 45335 - DNA, 13 bp, Unknown
  misc_feature (1)..( 13): Matrix.001 file - promoters60/1028826
atacgtttttttg

SEQ ID NO: 45336 - DNA, 12 bp, Unknown
  misc_feature (1)..( 12): Matrix.001 file - promoters60/1028826
tacatttgtctg

SEQ ID NO: 45337 - DNA, 10 bp, Unknown
  misc_feature (1)..( 10): Matrix.001 file - promoters60/1028859
aaagatatat

SEQ ID NO: 45338 - DNA, 6 bp, Unknown
  misc_feature (1)..( 6): Matrix.001 file - promoters60/1028859
aaaaaa

SEQ ID NO: 45339 - DNA, 7 bp, Unknown
  misc_feature (1)..( 7): Matrix.001 file - promoters60/1028859
atgattg

SEQ ID NO: 45340 - DNA, 14 bp, Unknown
  misc_feature (1)..( 14): Matrix.001 file - promoters60/1028859
attaaagttcaatt

SEQ ID NO: 45341 - DNA, 7 bp, Unknown
  misc_feature (1)..( 7): Matrix.001 file - promoters60/1028859
aagaaat

SEQ ID NO: 45342 - DNA, 8 bp, Unknown
  misc_feature (1)..( 8): Matrix.001 file - promoters60/1028859
aataaaat

SEQ ID NO: 45343 - DNA, 6 bp, Unknown
  misc_feature (1)..( 6): Matrix.001 file - promoters60/1028859
ctcaag

SEQ ID NO: 45344 - DNA, 7 bp, Unknown
  misc_feature (1)..( 7): Matrix.001 file - promoters60/1028859
tcttctt

SEQ ID NO: 45345 - DNA, 9 bp, Unknown
  misc_feature (1)..( 9): Matrix.001 file - promoters60/1028859
tctcttttt

SEQ ID NO: 45346 - DNA, 6 bp, Unknown
  misc_feature (1)..( 6): Matrix.001 file - promoters60/1028859
tgtgtt

SEQ ID NO: 45347 - DNA, 6 bp, Unknown
  misc_feature (1)..( 6): Matrix.001 file - promoters60/1028859
tttttt

SEQ ID NO: 45348 - DNA, 6 bp, Unknown
  misc_feature (1)..( 6): Matrix.001 file - promoters60/1028859
ttttta

SEQ ID NO: 45349 - DNA, 6 bp, Unknown
  misc_feature (1)..( 6): Matrix.001 file - promoters60/1028859
ttgttt

SEQ ID NO: 45350 - DNA, 9 bp, Unknown
  misc_feature (1)..( 9): Matrix.001 file - promoters60/1028863
tttcattaa

SEQ ID NO: 45351 - DNA, 6 bp, Unknown
  misc_feature (1)..( 6): Matrix.001 file - promoters60/1028878
attcga

SEQ ID NO: 45352 - DNA, 9 bp, Unknown
  misc_feature (1)..( 9): Matrix.001 file - promoters60/1028878
cttcaagaa

SEQ ID NO: 45353 - DNA, 6 bp, Unknown
  misc_feature (1)..( 6): Matrix.001 file - promoters60/1028878
tcttct

SEQ ID NO: 45354 - DNA, 6 bp, Unknown
  misc_feature (1)..( 6): Matrix.001 file - promoters60/1028878
tctgta

SEQ ID NO: 45355 - DNA, 6 bp, Unknown
  misc_feature (1)..( 6): Matrix.001 file - promoters60/1028878
gataaa

SEQ ID NO: 45356 - DNA, 6 bp, Unknown
  misc_feature (1)..( 6): Matrix.001 file - promoters60/1028878
cttctt

SEQ ID NO: 45357 - DNA, 6 bp, Unknown
  misc_feature (1)..( 6): Matrix.001 file - promoters60/1028878
catctc

SEQ ID NO: 45358 - DNA, 6 bp, Unknown
  misc_feature (1)..( 6): Matrix.001 file - promoters60/1028878
agtttt

SEQ ID NO: 45359 - DNA, 7 bp, Unknown
  misc_feature (1)..( 7): Matrix.001 file - promoters60/1028878
acaaaaa

SEQ ID NO: 45360 - DNA, 11 bp, Unknown
  misc_feature (1)..( 11): Matrix.001 file - promoters60/1028908
acaaatacgaa

SEQ ID NO: 45361 - DNA, 12 bp, Unknown
  misc_feature (1)..( 12): Matrix.001 file - promoters60/1028908
aatggttaatca

SEQ ID NO: 45362 - DNA, 8 bp, Unknown
  misc_feature (1)..( 8): Matrix.001 file - promoters60/1028908
actttttc

SEQ ID NO: 45363 - DNA, 8 bp, Unknown
  misc_feature (1)..( 8): Matrix.001 file - promoters60/1028908
gaaaaaac

SEQ ID NO: 45364 - DNA, 6 bp, Unknown
  misc_feature (1)..( 6): Matrix.001 file - promoters60/1028908
atctat

SEQ ID NO: 45365 - DNA, 6 bp, Unknown
  misc_feature (1)..( 6): Matrix.001 file - promoters60/1028908
atctct

SEQ ID NO: 45366 - DNA, 7 bp, Unknown
  misc_feature (1)..( 7): Matrix.001 file - promoters60/1028908
ttcaatc

SEQ ID NO: 45367 - DNA, 8 bp, Unknown
  misc_feature (1)..( 8): Matrix.001 file - promoters60/1028908
gcgtcgtc

SEQ ID NO: 45368 - DNA, 6 bp, Unknown
  misc_feature (1)..( 6): Matrix.001 file - promoters60/1028908
tcagat

SEQ ID NO: 45369 - DNA, 7 bp, Unknown
  misc_feature (1)..( 7): Matrix.001 file - promoters60/1028908
acacgca

SEQ ID NO: 45370 - DNA, 6 bp, Unknown
  misc_feature (1)..( 6): Matrix.001 file - promoters60/1028908
ttcctt

SEQ ID NO: 45371 - DNA, 12 bp, Unknown
  misc_feature (1)..( 12): Matrix.001 file - promoters60/1028937
acaataatataa

SEQ ID NO: 45372 - DNA, 12 bp, Unknown
  misc_feature (1)..( 12): Matrix.001 file - promoters60/1028937
attatataaaaa

SEQ ID NO: 45373 - DNA, 7 bp, Unknown
  misc_feature (1)..( 7): Matrix.001 file - promoters60/1028937
aaaacaa

SEQ ID NO: 45374 - DNA, 9 bp, Unknown
  misc_feature (1)..( 9): Matrix.001 file - promoters60/1028937
aaatgaaac

SEQ ID NO: 45375 - DNA, 7 bp, Unknown
  misc_feature (1)..( 7): Matrix.001 file - promoters60/1028937
taatttt

SEQ ID NO: 45376 - DNA, 11 bp, Unknown
  misc_feature (1)..( 11): Matrix.001 file - promoters60/1028937
atatatataat

SEQ ID NO: 45377 - DNA, 11 bp, Unknown
  misc_feature (1)..( 11): Matrix.001 file - promoters60/1028937
agattatcaaa

SEQ ID NO: 45378 - DNA, 8 bp, Unknown
  misc_feature (1)..( 8): Matrix.001 file - promoters60/1028937
attttata

SEQ ID NO: 45379 - DNA, 15 bp, Unknown
  misc_feature (1)..( 15): Matrix.001 file - promoters60/1028937
aaaaacaatttatat

SEQ ID NO: 45380 - DNA, 9 bp, Unknown
  misc_feature (1)..( 9): Matrix.001 file - promoters60/1028937
gtaaaaaaa

SEQ ID NO: 45381 - DNA, 12 bp, Unknown
  misc_feature (1)..( 12): Matrix.001 file - promoters60/1028937
acaaaaatgaat

SEQ ID NO: 45382 - DNA, 8 bp, Unknown
  misc_feature (1)..( 8): Matrix.001 file - promoters60/1028937
aagaaata

SEQ ID NO: 45383 - DNA, 11 bp, Unknown
  misc_feature (1)..( 11): Matrix.001 file - promoters60/1028937
taataaaacaa

SEQ ID NO: 45384 - DNA, 10 bp, Unknown
  misc_feature (1)..( 10): Matrix.001 file - promoters60/1028937
atatatttta

SEQ ID NO: 45385 - DNA, 10 bp, Unknown
  misc_feature (1)..( 10): Matrix.001 file - promoters60/1028955
aaagatagat

SEQ ID NO: 45386 - DNA, 8 bp, Unknown
  misc_feature (1)..( 8): Matrix.001 file - promoters60/1028963
tgttttgc

SEQ ID NO: 45387 - DNA, 6 bp, Unknown
  misc_feature (1)..( 6): Matrix.001 file - promoters60/1028963
tttcaa

SEQ ID NO: 45388 - DNA, 9 bp, Unknown
  misc_feature (1)..( 9): Matrix.001 file - promoters60/1028963
gattaaaca

SEQ ID NO: 45389 - DNA, 10 bp, Unknown
  misc_feature (1)..( 10): Matrix.001 file - promoters60/1028963
aaataaaata

SEQ ID NO: 45390 - DNA, 8 bp, Unknown
  misc_feature (1)..( 8): Matrix.001 file - promoters60/1028963
tatcttct

SEQ ID NO: 45391 - DNA, 6 bp, Unknown
  misc_feature (1)..( 6): Matrix.001 file - promoters60/1028963
aaatcg

SEQ ID NO: 45392 - DNA, 6 bp, Unknown
  misc_feature (1)..( 6): Matrix.001 file - promoters60/1028963
atctga

SEQ ID NO: 45393 - DNA, 7 bp, Unknown
  misc_feature (1)..( 7): Matrix.001 file - promoters60/1028963
tatatat

SEQ ID NO: 45394 - DNA, 7 bp, Unknown
  misc_feature (1)..( 7): Matrix.001 file - promoters60/1028963
gaaaaaa

SEQ ID NO: 45395 - DNA, 6 bp, Unknown
  misc_feature (1)..( 6): Matrix.001 file - promoters60/1028963
agtaaa

SEQ ID NO: 45396 - DNA, 7 bp, Unknown
  misc_feature (1)..( 7): Matrix.001 file - promoters60/1028963
aatcggg

SEQ ID NO: 45397 - DNA, 8 bp, Unknown
  misc_feature (1)..( 8): Matrix.001 file - promoters60/1028963
gaaacaaa

SEQ ID NO: 45398 - DNA, 10 bp, Unknown
  misc_feature (1)..( 10): Matrix.001 file - promoters60/1028963
ggaaaagaaa

SEQ ID NO: 45399 - DNA, 7 bp, Unknown
  misc_feature (1)..( 7): Matrix.001 file - promoters60/1028963
cccacta

SEQ ID NO: 45400 - DNA, 9 bp, Unknown
  misc_feature (1)..( 9): Matrix.001 file - promoters60/1028963
aaagaaaag

SEQ ID NO: 45401 - DNA, 7 bp, Unknown
  misc_feature (1)..( 7): Matrix.001 file - promoters60/1028963
gtatata

SEQ ID NO: 45402 - DNA, 7 bp, Unknown
  misc_feature (1)..( 7): Matrix.001 file - promoters60/1028984
aaaaacc

SEQ ID NO: 45403 - DNA, 7 bp, Unknown
  misc_feature (1)..( 7): Matrix.001 file - promoters60/1028984
taaaatg

SEQ ID NO: 45404 - DNA, 7 bp, Unknown
  misc_feature (1)..( 7): Matrix.001 file - promoters60/1028984
aaaatca

SEQ ID NO: 45405 - DNA, 6 bp, Unknown
  misc_feature (1)..( 6): Matrix.001 file - promoters60/1028984
ggttta

SEQ ID NO: 45406 - DNA, 7 bp, Unknown
  misc_feature (1)..( 7): Matrix.001 file - promoters60/1028984
gattata

SEQ ID NO: 45407 - DNA, 9 bp, Unknown
  misc_feature (1)..( 9): Matrix.001 file - promoters60/1028984
cagtaacaa

SEQ ID NO: 45408 - DNA, 6 bp, Unknown
  misc_feature (1)..( 6): Matrix.001 file - promoters60/1028984
tcaaca

SEQ ID NO: 45409 - DNA, 7 bp, Unknown
  misc_feature (1)..( 7): Matrix.001 file - promoters60/1028984
attacag

SEQ ID NO: 45410 - DNA, 8 bp, Unknown
  misc_feature (1)..( 8): Matrix.001 file - promoters60/1028984
agtagttt

SEQ ID NO: 45411 - DNA, 7 bp, Unknown
  misc_feature (1)..( 7): Matrix.001 file - promoters60/1028984
ttaatcg

SEQ ID NO: 45412 - DNA, 6 bp, Unknown
  misc_feature (1)..( 6): Matrix.001 file - promoters60/1028984
tacgaa

SEQ ID NO: 45413 - DNA, 7 bp, Unknown
  misc_feature (1)..( 7): Matrix.001 file - promoters60/1028984
aaaaatc

SEQ ID NO: 45414 - DNA, 7 bp, Unknown
  misc_feature (1)..( 7): Matrix.001 file - promoters60/1028984
gataaac

SEQ ID NO: 45415 - DNA, 6 bp, Unknown
  misc_feature (1)..( 6): Matrix.001 file - promoters60/1028984
atcgtc

SEQ ID NO: 45416 - DNA, 6 bp, Unknown
  misc_feature (1)..( 6): Matrix.001 file - promoters60/1028984
tttcac

SEQ ID NO: 45417 - DNA, 8 bp, Unknown
  misc_feature (1)..( 8): Matrix.001 file - promoters60/1028984
taacacgt

SEQ ID NO: 45418 - DNA, 7 bp, Unknown
  misc_feature (1)..( 7): Matrix.001 file - promoters60/1029005
attacat

SEQ ID NO: 45419 - DNA, 12 bp, Unknown
  misc_feature (1)..( 12): Matrix.001 file - promoters60/1029005
ttaaaagaaaaa

SEQ ID NO: 45420 - DNA, 9 bp, Unknown
  misc_feature (1)..( 9): Matrix.001 file - promoters60/1029005
aaattatat

SEQ ID NO: 45421 - DNA, 7 bp, Unknown
  misc_feature (1)..( 7): Matrix.001 file - promoters60/1029005
tttttct

SEQ ID NO: 45422 - DNA, 6 bp, Unknown
  misc_feature (1)..( 6): Matrix.001 file - promoters60/1029005
tttttc

SEQ ID NO: 45423 - DNA, 12 bp, Unknown
  misc_feature (1)..( 12): Matrix.001 file - promoters60/1029005
aaaaacaaattt

SEQ ID NO: 45424 - DNA, 9 bp, Unknown
  misc_feature (1)..( 9): Matrix.001 file - promoters60/1029085
gtttaattt

SEQ ID NO: 45425 - DNA, 7 bp, Unknown
  misc_feature (1)..( 7): Matrix.001 file - promoters60/1029085
caaaaag

SEQ ID NO: 45426 - DNA, 8 bp, Unknown
  misc_feature (1)..( 8): Matrix.001 file - promoters60/1029085
taaaaaat

SEQ ID NO: 45427 - DNA, 8 bp, Unknown
  misc_feature (1)..( 8): Matrix.001 file - promoters60/1029085
gattcata

SEQ ID NO: 45428 - DNA, 8 bp, Unknown
  misc_feature (1)..( 8): Matrix.001 file - promoters60/1029242
attccaaa

SEQ ID NO: 45429 - DNA, 7 bp, Unknown
  misc_feature (1)..( 7): Matrix.001 file - promoters60/1029242
ttttgaa

SEQ ID NO: 45430 - DNA, 10 bp, Unknown
  misc_feature (1)..( 10): Matrix.001 file - promoters60/1029242
gagtaaaatt

SEQ ID NO: 45431 - DNA, 8 bp, Unknown
  misc_feature (1)..( 8): Matrix.001 file - promoters60/1029242
aattctta

SEQ ID NO: 45432 - DNA, 7 bp, Unknown
  misc_feature (1)..( 7): Matrix.001 file - promoters60/1029242
ataaaac

SEQ ID NO: 45433 - DNA, 6 bp, Unknown
  misc_feature (1)..( 6): Matrix.001 file - promoters60/1029242
tactta

SEQ ID NO: 45434 - DNA, 7 bp, Unknown
  misc_feature (1)..( 7): Matrix.001 file - promoters60/1029242
aattaaa

SEQ ID NO: 45435 - DNA, 6 bp, Unknown
  misc_feature (1)..( 6): Matrix.001 file - promoters60/1029242
aaaaga

SEQ ID NO: 45436 - DNA, 8 bp, Unknown
  misc_feature (1)..( 8): Matrix.001 file - promoters60/1029242
aaaccaaa

SEQ ID NO: 45437 - DNA, 6 bp, Unknown
  misc_feature (1)..( 6): Matrix.001 file - promoters60/1029242
agagta

SEQ ID NO: 45438 - DNA, 10 bp, Unknown
  misc_feature (1)..( 10): Matrix.001 file - promoters60/1029242
caaatatctt

SEQ ID NO: 45439 - DNA, 7 bp, Unknown
  misc_feature (1)..( 7): Matrix.001 file - promoters60/1029242
tttactt

SEQ ID NO: 45440 - DNA, 6 bp, Unknown
  misc_feature (1)..( 6): Matrix.001 file - promoters60/1029242
aaaaat

SEQ ID NO: 45441 - DNA, 8 bp, Unknown
  misc_feature (1)..( 8): Matrix.001 file - promoters60/1029242
tatataca

SEQ ID NO: 45442 - DNA, 9 bp, Unknown
  misc_feature (1)..( 9): Matrix.001 file - promoters60/1029315
ttttgattt

SEQ ID NO: 45443 - DNA, 7 bp, Unknown
  misc_feature (1)..( 7): Matrix.001 file - promoters60/1029315
caaaatt

SEQ ID NO: 45444 - DNA, 9 bp, Unknown
  misc_feature (1)..( 9): Matrix.001 file - promoters60/1029315
aacaatcac

SEQ ID NO: 45445 - DNA, 7 bp, Unknown
  misc_feature (1)..( 7): Matrix.001 file - promoters60/1029315
atataat

SEQ ID NO: 45446 - DNA, 9 bp, Unknown
  misc_feature (1)..( 9): Matrix.001 file - promoters60/1029315
ttttcatta

SEQ ID NO: 45447 - DNA, 9 bp, Unknown
  misc_feature (1)..( 9): Matrix.001 file - promoters60/1029315
aaactaatt

SEQ ID NO: 45448 - DNA, 9 bp, Unknown
  misc_feature (1)..( 9): Matrix.001 file - promoters60/1029395
aattgatga

SEQ ID NO: 45449 - DNA, 7 bp, Unknown
  misc_feature (1)..( 7): Matrix.001 file - promoters60/1029395
ataaatc

SEQ ID NO: 45450 - DNA, 8 bp, Unknown
  misc_feature (1)..( 8): Matrix.001 file - promoters60/1029395
atgaataa

SEQ ID NO: 45451 - DNA, 7 bp, Unknown
  misc_feature (1)..( 7): Matrix.001 file - promoters60/1029395
ctaattg

SEQ ID NO: 45452 - DNA, 6 bp, Unknown
  misc_feature (1)..( 6): Matrix.001 file - promoters60/1029395
tagcta

SEQ ID NO: 45453 - DNA, 7 bp, Unknown
  misc_feature (1)..( 7): Matrix.001 file - promoters60/1029395
tcaattt

SEQ ID NO: 45454 - DNA, 6 bp, Unknown
  misc_feature (1)..( 6): Matrix.001 file - promoters60/1029395
atctcg

SEQ ID NO: 45455 - DNA, 6 bp, Unknown
  misc_feature (1)..( 6): Matrix.001 file - promoters60/1029395
ctaaat

SEQ ID NO: 45456 - DNA, 9 bp, Unknown
  misc_feature (1)..( 9): Matrix.001 file - promoters60/1029395
aattaaaaa

SEQ ID NO: 45457 - DNA, 9 bp, Unknown
  misc_feature (1)..( 9): Matrix.001 file - promoters60/1029395
cttttgtat

SEQ ID NO: 45458 - DNA, 6 bp, Unknown
  misc_feature (1)..( 6): Matrix.001 file - promoters60/1029395
aaaaga

SEQ ID NO: 45459 - DNA, 6 bp, Unknown
  misc_feature (1)..( 6): Matrix.001 file - promoters60/1029395
aataat

SEQ ID NO: 45460 - DNA, 8 bp, Unknown
  misc_feature (1)..( 8): Matrix.001 file - promoters60/1029395
aaacatgt

SEQ ID NO: 45461 - DNA, 9 bp, Unknown
  misc_feature (1)..( 9): Matrix.001 file - promoters60/1029395
tttatttga

SEQ ID NO: 45462 - DNA, 6 bp, Unknown
  misc_feature (1)..( 6): Matrix.001 file - promoters60/1029395
actatt

SEQ ID NO: 45463 - DNA, 8 bp, Unknown
  misc_feature (1)..( 8): Matrix.001 file - promoters60/1029395
tctcttat

SEQ ID NO: 45464 - DNA, 6 bp, Unknown
  misc_feature (1)..( 6): Matrix.001 file - promoters60/1029395
tttgta

SEQ ID NO: 45465 - DNA, 6 bp, Unknown
  misc_feature (1)..( 6): Matrix.001 file - promoters60/1029395
tcactc

SEQ ID NO: 45466 - DNA, 6 bp, Unknown
  misc_feature (1)..( 6): Matrix.001 file - promoters60/1029636
atcatt

SEQ ID NO: 45467 - DNA, 8 bp, Unknown
  misc_feature (1)..( 8): Matrix.001 file - promoters60/1029636
aatcattt

SEQ ID NO: 45468 - DNA, 15 bp, Unknown
  misc_feature (1)..( 15): Matrix.001 file - promoters60/1029636
attattaaaaaaaaa

SEQ ID NO: 45469 - DNA, 6 bp, Unknown
  misc_feature (1)..( 6): Matrix.001 file - promoters60/1029636
agagaa

SEQ ID NO: 45470 - DNA, 7 bp, Unknown
  misc_feature (1)..( 7): Matrix.001 file - promoters60/1029636
gatagga

SEQ ID NO: 45471 - DNA, 8 bp, Unknown
  misc_feature (1)..( 8): Matrix.001 file - promoters60/1029636
agtgacat

SEQ ID NO: 45472 - DNA, 12 bp, Unknown
  misc_feature (1)..( 12): Matrix.001 file - promoters60/1029636
gttaggttcgat

SEQ ID NO: 45473 - DNA, 7 bp, Unknown
  misc_feature (1)..( 7): Matrix.001 file - promoters60/1029636
aaaaccg

SEQ ID NO: 45474 - DNA, 6 bp, Unknown
  misc_feature (1)..( 6): Matrix.001 file - promoters60/1029636
tgtttc

SEQ ID NO: 45475 - DNA, 6 bp, Unknown
  misc_feature (1)..( 6): Matrix.001 file - promoters60/1029837
ataaat

SEQ ID NO: 45476 - DNA, 6 bp, Unknown
  misc_feature (1)..( 6): Matrix.001 file - promoters60/1029837
caaaat

SEQ ID NO: 45477 - DNA, 6 bp, Unknown
  misc_feature (1)..( 6): Matrix.001 file - promoters60/1029837
ataata

SEQ ID NO: 45478 - DNA, 6 bp, Unknown
  misc_feature (1)..( 6): Matrix.001 file - promoters60/1029837
aatttt

SEQ ID NO: 45479 - DNA, 8 bp, Unknown
  misc_feature (1)..( 8): Matrix.001 file - promoters60/1029837
ataaagaa

SEQ ID NO: 45480 - DNA, 6 bp, Unknown
  misc_feature (1)..( 6): Matrix.001 file - promoters60/1029837
agtcgc

SEQ ID NO: 45481 - DNA, 7 bp, Unknown
  misc_feature (1)..( 7): Matrix.001 file - promoters60/1029837
gccgagt

SEQ ID NO: 45482 - DNA, 7 bp, Unknown
  misc_feature (1)..( 7): Matrix.001 file - promoters60/1029837
acggttc

SEQ ID NO: 45483 - DNA, 8 bp, Unknown
  misc_feature (1)..( 8): Matrix.001 file - promoters60/1029837
tctaactc

SEQ ID NO: 45484 - DNA, 6 bp, Unknown
  misc_feature (1)..( 6): Matrix.001 file - promoters60/1029837
agatta

SEQ ID NO: 45485 - DNA, 17 bp, Unknown
  misc_feature (1)..( 17): Matrix.001 file - promoters60/1029837
aaatattaataataaaa

SEQ ID NO: 45486 - DNA, 7 bp, Unknown
  misc_feature (1)..( 7): Matrix.001 file - promoters60/1029837
tttttga

SEQ ID NO: 45487 - DNA, 7 bp, Unknown
  misc_feature (1)..( 7): Matrix.001 file - promoters60/1029837
tttaaat

SEQ ID NO: 45488 - DNA, 8 bp, Unknown
  misc_feature (1)..( 8): Matrix.001 file - promoters60/1029837
aataaatt

SEQ ID NO: 45489 - DNA, 7 bp, Unknown
  misc_feature (1)..( 7): Matrix.001 file - promoters60/1029837
tcattaa

SEQ ID NO: 45490 - DNA, 7 bp, Unknown
  misc_feature (1)..( 7): Matrix.001 file - promoters60/1029837
tctctga

SEQ ID NO: 45491 - DNA, 6 bp, Unknown
  misc_feature (1)..( 6): Matrix.001 file - promoters60/1029837
cctata

SEQ ID NO: 45492 - DNA, 8 bp, Unknown
  misc_feature (1)..( 8): Matrix.001 file - promoters60/1029837
aaaattta

SEQ ID NO: 45493 - DNA, 6 bp, Unknown
  misc_feature (1)..( 6): Matrix.001 file - promoters60/1029837
aacttt

SEQ ID NO: 45494 - DNA, 7 bp, Unknown
  misc_feature (1)..( 7): Matrix.001 file - promoters60/1029837
agatcca

SEQ ID NO: 45495 - DNA, 6 bp, Unknown
  misc_feature (1)..( 6): Matrix.001 file - promoters60/1029837
ttaatg

SEQ ID NO: 45496 - DNA, 6 bp, Unknown
  misc_feature (1)..( 6): Matrix.001 file - promoters60/1029837
gaaaaa

SEQ ID NO: 45497 - DNA, 8 bp, Unknown
  misc_feature (1)..( 8): Matrix.001 file - promoters60/1029841
aaaacaaa

SEQ ID NO: 45498 - DNA, 8 bp, Unknown
  misc_feature (1)..( 8): Matrix.001 file - promoters60/1029841
cataagat

SEQ ID NO: 45499 - DNA, 10 bp, Unknown
  misc_feature (1)..( 10): Matrix.001 file - promoters60/1029841
aaaaaaaaag

SEQ ID NO: 45500 - DNA, 9 bp, Unknown
  misc_feature (1)..( 9): Matrix.001 file - promoters60/1029841
taataatca

SEQ ID NO: 45501 - DNA, 7 bp, Unknown
  misc_feature (1)..( 7): Matrix.001 file - promoters60/1029841
taaattg

SEQ ID NO: 45502 - DNA, 11 bp, Unknown
  misc_feature (1)..( 11): Matrix.001 file - promoters60/1029841
aaaacaaaaca

SEQ ID NO: 45503 - DNA, 10 bp, Unknown
  misc_feature (1)..( 10): Matrix.001 file - promoters60/1029841
gtaatgtaca

SEQ ID NO: 45504 - DNA, 8 bp, Unknown
  misc_feature (1)..( 8): Matrix.001 file - promoters60/1029841
aaaaagaa

SEQ ID NO: 45505 - DNA, 15 bp, Unknown
  misc_feature (1)..( 15): Matrix.001 file - promoters60/1029908
gagaaagattaagta

SEQ ID NO: 45506 - DNA, 12 bp, Unknown
  misc_feature (1)..( 12): Matrix.001 file - promoters60/1029931
gaaagctttaaa

SEQ ID NO: 45507 - DNA, 6 bp, Unknown
  misc_feature (1)..( 6): Matrix.001 file - promoters60/1030139
ttcaca

SEQ ID NO: 45508 - DNA, 6 bp, Unknown
  misc_feature (1)..( 6): Matrix.001 file - promoters60/1030139
agcttt

SEQ ID NO: 45509 - DNA, 6 bp, Unknown
  misc_feature (1)..( 6): Matrix.001 file - promoters60/1030139
ttttca

SEQ ID NO: 45510 - DNA, 7 bp, Unknown
  misc_feature (1)..( 7): Matrix.001 file - promoters60/1030139
atataag

SEQ ID NO: 45511 - DNA, 6 bp, Unknown
  misc_feature (1)..( 6): Matrix.001 file - promoters60/1030139
tcacta

SEQ ID NO: 45512 - DNA, 6 bp, Unknown
  misc_feature (1)..( 6): Matrix.001 file - promoters60/1030139
tcaatc

SEQ ID NO: 45513 - DNA, 6 bp, Unknown
  misc_feature (1)..( 6): Matrix.001 file - promoters60/1030139
agtaag

SEQ ID NO: 45514 - DNA, 7 bp, Unknown
  misc_feature (1)..( 7): Matrix.001 file - promoters60/1030139
accaaac

SEQ ID NO: 45515 - DNA, 7 bp, Unknown
  misc_feature (1)..( 7): Matrix.001 file - promoters60/1030139
ttgatgt

SEQ ID NO: 45516 - DNA, 7 bp, Unknown
  misc_feature (1)..( 7): Matrix.001 file - promoters60/1030157
aacattt

SEQ ID NO: 45517 - DNA, 7 bp, Unknown
  misc_feature (1)..( 7): Matrix.001 file - promoters60/1030157
taaacta

SEQ ID NO: 45518 - DNA, 6 bp, Unknown
  misc_feature (1)..( 6): Matrix.001 file - promoters60/1030157
gaaatt

SEQ ID NO: 45519 - DNA, 7 bp, Unknown
  misc_feature (1)..( 7): Matrix.001 file - promoters60/1030157
taaaata

SEQ ID NO: 45520 - DNA, 6 bp, Unknown
  misc_feature (1)..( 6): Matrix.001 file - promoters60/1030157
taatta

SEQ ID NO: 45521 - DNA, 6 bp, Unknown
  misc_feature (1)..( 6): Matrix.001 file - promoters60/1030157
aaaata

SEQ ID NO: 45522 - DNA, 7 bp, Unknown
  misc_feature (1)..( 7): Matrix.001 file - promoters60/1030157
aataaca

SEQ ID NO: 45523 - DNA, 7 bp, Unknown
  misc_feature (1)..( 7): Matrix.001 file - promoters60/1030157
tttcttt

SEQ ID NO: 45524 - DNA, 8 bp, Unknown
  misc_feature (1)..( 8): Matrix.001 file - promoters60/1030157
tgaaatat

SEQ ID NO: 45525 - DNA, 6 bp, Unknown
  misc_feature (1)..( 6): Matrix.001 file - promoters60/1030157
tcaaat

SEQ ID NO: 45526 - DNA, 7 bp, Unknown
  misc_feature (1)..( 7): Matrix.001 file - promoters60/1030157
caaatcg

SEQ ID NO: 45527 - DNA, 6 bp, Unknown
  misc_feature (1)..( 6): Matrix.001 file - promoters60/1030157
aaaata

SEQ ID NO: 45528 - DNA, 6 bp, Unknown
  misc_feature (1)..( 6): Matrix.001 file - promoters60/1030157
tataac

SEQ ID NO: 45529 - DNA, 8 bp, Unknown
  misc_feature (1)..( 8): Matrix.001 file - promoters60/1030157
agtgaaga

SEQ ID NO: 45530 - DNA, 6 bp, Unknown
  misc_feature (1)..( 6): Matrix.001 file - promoters60/1030157
agacga

SEQ ID NO: 45531 - DNA, 6 bp, Unknown
  misc_feature (1)..( 6): Matrix.001 file - promoters60/1030209
tattct

SEQ ID NO: 45532 - DNA, 9 bp, Unknown
  misc_feature (1)..( 9): Matrix.001 file - promoters60/1030209
atgatatct

SEQ ID NO: 45533 - DNA, 11 bp, Unknown
  misc_feature (1)..( 11): Matrix.001 file - promoters60/1030209
tctactcaaca

SEQ ID NO: 45534 - DNA, 11 bp, Unknown
  misc_feature (1)..( 11): Matrix.001 file - promoters60/1030209
gttacatcaag

SEQ ID NO: 45535 - DNA, 7 bp, Unknown
  misc_feature (1)..( 7): Matrix.001 file - promoters60/1030209
aagaaaa

SEQ ID NO: 45536 - DNA, 7 bp, Unknown
  misc_feature (1)..( 7): Matrix.001 file - promoters60/1030209
aaagccc

SEQ ID NO: 45537 - DNA, 6 bp, Unknown
  misc_feature (1)..( 6): Matrix.001 file - promoters60/1030209
tatttt

SEQ ID NO: 45538 - DNA, 9 bp, Unknown
  misc_feature (1)..( 9): Matrix.001 file - promoters60/1030209
ttttaaaaa

SEQ ID NO: 45539 - DNA, 6 bp, Unknown
  misc_feature (1)..( 6): Matrix.001 file - promoters60/1030209
aaacag

SEQ ID NO: 45540 - DNA, 8 bp, Unknown
  misc_feature (1)..( 8): Matrix.001 file - promoters60/1030209
aaaaagtt

SEQ ID NO: 45541 - DNA, 11 bp, Unknown
  misc_feature (1)..( 11): Matrix.001 file - promoters60/1030209
gatcagagaaa

SEQ ID NO: 45542 - DNA, 7 bp, Unknown
  misc_feature (1)..( 7): Matrix.001 file - promoters60/1030209
gaaaatt

SEQ ID NO: 45543 - DNA, 6 bp, Unknown
  misc_feature (1)..( 6): Matrix.001 file - promoters60/1030209
tttctc

SEQ ID NO: 45544 - DNA, 6 bp, Unknown
  misc_feature (1)..( 6): Matrix.001 file - promoters60/1030209
aaaaat

SEQ ID NO: 45545 - DNA, 7 bp, Unknown
  misc_feature (1)..( 7): Matrix.001 file - promoters60/1030209
aaaataa

SEQ ID NO: 45546 - DNA, 6 bp, Unknown
  misc_feature (1)..( 6): Matrix.001 file - promoters60/1030209
aaaaac

SEQ ID NO: 45547 - DNA, 12 bp, Unknown
  misc_feature (1)..( 12): Matrix.001 file - promoters60/1030259
atttatttctat

SEQ ID NO: 45548 - DNA, 7 bp, Unknown
  misc_feature (1)..( 7): Matrix.001 file - promoters60/1030336
cgccgcc

SEQ ID NO: 45549 - DNA, 10 bp, Unknown
  misc_feature (1)..( 10): Matrix.001 file - promoters60/1030336
aatcattcaa

SEQ ID NO: 45550 - DNA, 7 bp, Unknown
  misc_feature (1)..( 7): Matrix.001 file - promoters60/1030336
caaattc

SEQ ID NO: 45551 - DNA, 12 bp, Unknown
  misc_feature (1)..( 12): Matrix.001 file - promoters60/1030336
ggtaaaacagaa

SEQ ID NO: 45552 - DNA, 8 bp, Unknown
  misc_feature (1)..( 8): Matrix.001 file - promoters60/1030336
tttaagaa

SEQ ID NO: 45553 - DNA, 6 bp, Unknown
  misc_feature (1)..( 6): Matrix.001 file - promoters60/1030336
gtttcg

SEQ ID NO: 45554 - DNA, 7 bp, Unknown
  misc_feature (1)..( 7): Matrix.001 file - promoters60/1030336
cgccttt

SEQ ID NO: 45555 - DNA, 6 bp, Unknown
  misc_feature (1)..( 6): Matrix.001 file - promoters60/1030336
aatttc

SEQ ID NO: 45556 - DNA, 8 bp, Unknown
  misc_feature (1)..( 8): Matrix.001 file - promoters60/1030336
ccaaaaga

SEQ ID NO: 45557 - DNA, 6 bp, Unknown
  misc_feature (1)..( 6): Matrix.001 file - promoters60/1030336
aagaga

SEQ ID NO: 45558 - DNA, 7 bp, Unknown
  misc_feature (1)..( 7): Matrix.001 file - promoters60/1030336
atcatcg

SEQ ID NO: 45559 - DNA, 6 bp, Unknown
  misc_feature (1)..( 6): Matrix.001 file - promoters60/1030336
cggtta

SEQ ID NO: 45560 - DNA, 8 bp, Unknown
  misc_feature (1)..( 8): Matrix.001 file - promoters60/1030428
tattttta

SEQ ID NO: 45561 - DNA, 8 bp, Unknown
  misc_feature (1)..( 8): Matrix.001 file - promoters60/1030428
atatgtta

SEQ ID NO: 45562 - DNA, 7 bp, Unknown
  misc_feature (1)..( 7): Matrix.001 file - promoters60/1030428
tataaag

SEQ ID NO: 45563 - DNA, 9 bp, Unknown
  misc_feature (1)..( 9): Matrix.001 file - promoters60/1030428
gattacata

SEQ ID NO: 45564 - DNA, 7 bp, Unknown
  misc_feature (1)..( 7): Matrix.001 file - promoters60/1030428
aaaagaa

SEQ ID NO: 45565 - DNA, 8 bp, Unknown
  misc_feature (1)..( 8): Matrix.001 file - promoters60/1030428
cttgtttt

SEQ ID NO: 45566 - DNA, 7 bp, Unknown
  misc_feature (1)..( 7): Matrix.001 file - promoters60/1030528
ttaaaaa

SEQ ID NO: 45567 - DNA, 9 bp, Unknown
  misc_feature (1)..( 9): Matrix.001 file - promoters60/1030528
ataataatt

SEQ ID NO: 45568 - DNA, 11 bp, Unknown
  misc_feature (1)..( 11): Matrix.001 file - promoters60/1030528
taattctttta

SEQ ID NO: 45569 - DNA, 7 bp, Unknown
  misc_feature (1)..( 7): Matrix.001 file - promoters60/1030528
aaaagtt

SEQ ID NO: 45570 - DNA, 9 bp, Unknown
  misc_feature (1)..( 9): Matrix.001 file - promoters60/1030528
tataaaaac

SEQ ID NO: 45571 - DNA, 17 bp, Unknown
  misc_feature (1)..( 17): Matrix.001 file - promoters60/1030530
ttttaattatttaaata

SEQ ID NO: 45572 - DNA, 8 bp, Unknown
  misc_feature (1)..( 8): Matrix.001 file - promoters60/1030530
aacatgta

SEQ ID NO: 45573 - DNA, 13 bp, Unknown
  misc_feature (1)..( 13): Matrix.001 file - promoters60/1030530
aacatgtatgaat

SEQ ID NO: 45574 - DNA, 14 bp, Unknown
  misc_feature (1)..( 14): Matrix.001 file - promoters60/1030547
taaatttgttaaca

SEQ ID NO: 45575 - DNA, 10 bp, Unknown
  misc_feature (1)..( 10): Matrix.001 file - promoters60/1030547
aaatcaaaat

SEQ ID NO: 45576 - DNA, 16 bp, Unknown
  misc_feature (1)..( 16): Matrix.001 file - promoters60/1030547
attagaatttttaaaa

SEQ ID NO: 45577 - DNA, 8 bp, Unknown
  misc_feature (1)..( 8): Matrix.001 file - promoters60/1030547
ttttgaag

SEQ ID NO: 45578 - DNA, 15 bp, Unknown
  misc_feature (1)..( 15): Matrix.001 file - promoters60/1030547
atataaattttaaaa

SEQ ID NO: 45579 - DNA, 11 bp, Unknown
  misc_feature (1)..( 11): Matrix.001 file - promoters60/1030547
tatatataaac

SEQ ID NO: 45580 - DNA, 10 bp, Unknown
  misc_feature (1)..( 10): Matrix.001 file - promoters60/1030547
tataaaaacc

SEQ ID NO: 45581 - DNA, 11 bp, Unknown
  misc_feature (1)..( 11): Matrix.001 file - promoters60/1030547
gaataatttta

SEQ ID NO: 45582 - DNA, 10 bp, Unknown
  misc_feature (1)..( 10): Matrix.001 file - promoters60/1030547
gattagaaaa

SEQ ID NO: 45583 - DNA, 10 bp, Unknown
  misc_feature (1)..( 10): Matrix.001 file - promoters60/1030547
attattttaa

SEQ ID NO: 45584 - DNA, 8 bp, Unknown
  misc_feature (1)..( 8): Matrix.001 file - promoters60/1030547
aaaacctt

SEQ ID NO: 45585 - DNA, 10 bp, Unknown
  misc_feature (1)..( 10): Matrix.001 file - promoters60/1030581
aattttgaaa

SEQ ID NO: 45586 - DNA, 11 bp, Unknown
  misc_feature (1)..( 11): Matrix.001 file - promoters60/1030605
ttaaactataa

SEQ ID NO: 45587 - DNA, 14 bp, Unknown
  misc_feature (1)..( 14): Matrix.001 file - promoters60/1030605
ttaaactatattta

SEQ ID NO: 45588 - DNA, 12 bp, Unknown
  misc_feature (1)..( 12): Matrix.001 file - promoters60/1030605
caaaaaaaaaaa

SEQ ID NO: 45589 - DNA, 13 bp, Unknown
  misc_feature (1)..( 13): Matrix.001 file - promoters60/1030605
taattttgatatc

SEQ ID NO: 45590 - DNA, 8 bp, Unknown
  misc_feature (1)..( 8): Matrix.001 file - promoters60/1030605
aacaaatt

SEQ ID NO: 45591 - DNA, 11 bp, Unknown
  misc_feature (1)..( 11): Matrix.001 file - promoters60/1030605
tttgaaaaatt

SEQ ID NO: 45592 - DNA, 7 bp, Unknown
  misc_feature (1)..( 7): Matrix.001 file - promoters60/1030605
atataaa

SEQ ID NO: 45593 - DNA, 7 bp, Unknown
  misc_feature (1)..( 7): Matrix.001 file - promoters60/1030605
atatatt

SEQ ID NO: 45594 - DNA, 10 bp, Unknown
  misc_feature (1)..( 10): Matrix.001 file - promoters60/1030605
taaattggaa

SEQ ID NO: 45595 - DNA, 14 bp, Unknown
  misc_feature (1)..( 14): Matrix.001 file - promoters60/1030605
cttactatataaaa

SEQ ID NO: 45596 - DNA, 10 bp, Unknown
  misc_feature (1)..( 10): Matrix.001 file - promoters60/1030605
tatttagaaa

SEQ ID NO: 45597 - DNA, 8 bp, Unknown
  misc_feature (1)..( 8): Matrix.001 file - promoters60/1030616
ttctataa

SEQ ID NO: 45598 - DNA, 6 bp, Unknown
  misc_feature (1)..( 6): Matrix.001 file - promoters60/1030616
tttgct

SEQ ID NO: 45599 - DNA, 7 bp, Unknown
  misc_feature (1)..( 7): Matrix.001 file - promoters60/1030616
gaaatta

SEQ ID NO: 45600 - DNA, 6 bp, Unknown
  misc_feature (1)..( 6): Matrix.001 file - promoters60/1030616
atttgt

SEQ ID NO: 45601 - DNA, 7 bp, Unknown
  misc_feature (1)..( 7): Matrix.001 file - promoters60/1030616
tgtaaat

SEQ ID NO: 45602 - DNA, 10 bp, Unknown
  misc_feature (1)..( 10): Matrix.001 file - promoters60/1030616
ctacaattag

SEQ ID NO: 45603 - DNA, 6 bp, Unknown
  misc_feature (1)..( 6): Matrix.001 file - promoters60/1030616
gattta

SEQ ID NO: 45604 - DNA, 6 bp, Unknown
  misc_feature (1)..( 6): Matrix.001 file - promoters60/1030616
aaatga

SEQ ID NO: 45605 - DNA, 10 bp, Unknown
  misc_feature (1)..( 10): Matrix.001 file - promoters60/1030616
ccgaaatttt

SEQ ID NO: 45606 - DNA, 6 bp, Unknown
  misc_feature (1)..( 6): Matrix.001 file - promoters60/1030616
caaaaa

SEQ ID NO: 45607 - DNA, 7 bp, Unknown
  misc_feature (1)..( 7): Matrix.001 file - promoters60/1030616
gccaaat

SEQ ID NO: 45608 - DNA, 8 bp, Unknown
  misc_feature (1)..( 8): Matrix.001 file - promoters60/1030616
aaatcctc

SEQ ID NO: 45609 - DNA, 8 bp, Unknown
  misc_feature (1)..( 8): Matrix.001 file - promoters60/1030616
aaatttct

SEQ ID NO: 45610 - DNA, 7 bp, Unknown
  misc_feature (1)..( 7): Matrix.001 file - promoters60/1030616
tttataa

SEQ ID NO: 45611 - DNA, 6 bp, Unknown
  misc_feature (1)..( 6): Matrix.001 file - promoters60/1030616
ttgtta

SEQ ID NO: 45612 - DNA, 7 bp, Unknown
  misc_feature (1)..( 7): Matrix.001 file - promoters60/1030616
ttttgat

SEQ ID NO: 45613 - DNA, 8 bp, Unknown
  misc_feature (1)..( 8): Matrix.001 file - promoters60/1030616
agaccctt

SEQ ID NO: 45614 - DNA, 6 bp, Unknown
  misc_feature (1)..( 6): Matrix.001 file - promoters60/1030616
ttgaga

SEQ ID NO: 45615 - DNA, 7 bp, Unknown
  misc_feature (1)..( 7): Matrix.001 file - promoters60/1030616
taaattg

SEQ ID NO: 45616 - DNA, 10 bp, Unknown
  misc_feature (1)..( 10): Matrix.001 file - promoters60/1030616
aaacttttaa

SEQ ID NO: 45617 - DNA, 6 bp, Unknown
  misc_feature (1)..( 6): Matrix.001 file - promoters60/1030616
atacct

SEQ ID NO: 45618 - DNA, 7 bp, Unknown
  misc_feature (1)..( 7): Matrix.001 file - promoters60/1030616
aaacata

SEQ ID NO: 45619 - DNA, 9 bp, Unknown
  misc_feature (1)..( 9): Matrix.001 file - promoters60/1030616
taaaacatt

SEQ ID NO: 45620 - DNA, 8 bp, Unknown
  misc_feature (1)..( 8): Matrix.001 file - promoters60/1030616
ctttacat

SEQ ID NO: 45621 - DNA, 7 bp, Unknown
  misc_feature (1)..( 7): Matrix.001 file - promoters60/1030616
aaagaaa

SEQ ID NO: 45622 - DNA, 6 bp, Unknown
  misc_feature (1)..( 6): Matrix.001 file - promoters60/1030616
ttacct

SEQ ID NO: 45623 - DNA, 9 bp, Unknown
  misc_feature (1)..( 9): Matrix.001 file - promoters60/1030699
ttaacaaaa

SEQ ID NO: 45624 - DNA, 9 bp, Unknown
  misc_feature (1)..( 9): Matrix.001 file - promoters60/1030699
acaaatttt

SEQ ID NO: 45625 - DNA, 15 bp, Unknown
  misc_feature (1)..( 15): Matrix.001 file - promoters60/1030699
tttaattttttcaaa

SEQ ID NO: 45626 - DNA, 11 bp, Unknown
  misc_feature (1)..( 11): Matrix.001 file - promoters60/1030699
aacaaaaacaa

SEQ ID NO: 45627 - DNA, 15 bp, Unknown
  misc_feature (1)..( 15): Matrix.001 file - promoters60/1030699
caaactttttatttt

SEQ ID NO: 45628 - DNA, 7 bp, Unknown
  misc_feature (1)..( 7): Matrix.001 file - promoters60/1030699
atgtttg

SEQ ID NO: 45629 - DNA, 9 bp, Unknown
  misc_feature (1)..( 9): Matrix.001 file - promoters60/1030715
ttcataata

SEQ ID NO: 45630 - DNA, 6 bp, Unknown
  misc_feature (1)..( 6): Matrix.001 file - promoters60/1030715
acaaag

SEQ ID NO: 45631 - DNA, 8 bp, Unknown
  misc_feature (1)..( 8): Matrix.001 file - promoters60/1030715
atgaattc

SEQ ID NO: 45632 - DNA, 7 bp, Unknown
  misc_feature (1)..( 7): Matrix.001 file - promoters60/1030715
aaattga

SEQ ID NO: 45633 - DNA, 7 bp, Unknown
  misc_feature (1)..( 7): Matrix.001 file - promoters60/1030715
atatttc

SEQ ID NO: 45634 - DNA, 7 bp, Unknown
  misc_feature (1)..( 7): Matrix.001 file - promoters60/1030715
aagaatg

SEQ ID NO: 45635 - DNA, 7 bp, Unknown
  misc_feature (1)..( 7): Matrix.001 file - promoters60/1030715
gtttgtg

SEQ ID NO: 45636 - DNA, 6 bp, Unknown
  misc_feature (1)..( 6): Matrix.001 file - promoters60/1030715
tgctaa

SEQ ID NO: 45637 - DNA, 8 bp, Unknown
  misc_feature (1)..( 8): Matrix.001 file - promoters60/1030715
taaaagtt

SEQ ID NO: 45638 - DNA, 11 bp, Unknown
  misc_feature (1)..( 11): Matrix.001 file - promoters60/1030715
ttgtacttatt

SEQ ID NO: 45639 - DNA, 6 bp, Unknown
  misc_feature (1)..( 6): Matrix.001 file - promoters60/1030715
tttatt

SEQ ID NO: 45640 - DNA, 7 bp, Unknown
  misc_feature (1)..( 7): Matrix.001 file - promoters60/1030715
tttaaga

SEQ ID NO: 45641 - DNA, 6 bp, Unknown
  misc_feature (1)..( 6): Matrix.001 file - promoters60/1030715
tttgtg

SEQ ID NO: 45642 - DNA, 7 bp, Unknown
  misc_feature (1)..( 7): Matrix.001 file - promoters60/1030715
aaaatga

SEQ ID NO: 45643 - DNA, 6 bp, Unknown
  misc_feature (1)..( 6): Matrix.001 file - promoters60/1030715
ttaaac

SEQ ID NO: 45644 - DNA, 6 bp, Unknown
  misc_feature (1)..( 6): Matrix.001 file - promoters60/1030715
gaattt

SEQ ID NO: 45645 - DNA, 6 bp, Unknown
  misc_feature (1)..( 6): Matrix.001 file - promoters60/1030715
ttatta

SEQ ID NO: 45646 - DNA, 8 bp, Unknown
  misc_feature (1)..( 8): Matrix.001 file - promoters60/1030715
ttacaaat

SEQ ID NO: 45647 - DNA, 6 bp, Unknown
  misc_feature (1)..( 6): Matrix.001 file - promoters60/1030715
taataa

SEQ ID NO: 45648 - DNA, 8 bp, Unknown
  misc_feature (1)..( 8): Matrix.001 file - promoters60/1030715
taaagatt

SEQ ID NO: 45649 - DNA, 7 bp, Unknown
  misc_feature (1)..( 7): Matrix.001 file - promoters60/1030715
tttcttt

SEQ ID NO: 45650 - DNA, 7 bp, Unknown
  misc_feature (1)..( 7): Matrix.001 file - promoters60/1030715
ttggatg

SEQ ID NO: 45651 - DNA, 7 bp, Unknown
  misc_feature (1)..( 7): Matrix.001 file - promoters60/1030715
tgactat

SEQ ID NO: 45652 - DNA, 6 bp, Unknown
  misc_feature (1)..( 6): Matrix.001 file - promoters60/1030715
atctaa

SEQ ID NO: 45653 - DNA, 6 bp, Unknown
  misc_feature (1)..( 6): Matrix.001 file - promoters60/1030715
taggtg

SEQ ID NO: 45654 - DNA, 11 bp, Unknown
  misc_feature (1)..( 11): Matrix.001 file - promoters60/1030757
caaatacattt

SEQ ID NO: 45655 - DNA, 8 bp, Unknown
  misc_feature (1)..( 8): Matrix.001 file - promoters60/1030757
caaataat

SEQ ID NO: 45656 - DNA, 6 bp, Unknown
  misc_feature (1)..( 6): Matrix.001 file - promoters60/1030757
tttttt

SEQ ID NO: 45657 - DNA, 8 bp, Unknown
  misc_feature (1)..( 8): Matrix.001 file - promoters60/1030757
cttttgaa

SEQ ID NO: 45658 - DNA, 10 bp, Unknown
  misc_feature (1)..( 10): Matrix.001 file - promoters60/1030757
gttttttgag

SEQ ID NO: 45659 - DNA, 10 bp, Unknown
  misc_feature (1)..( 10): Matrix.001 file - promoters60/1030757
aatatatttc

SEQ ID NO: 45660 - DNA, 11 bp, Unknown
  misc_feature (1)..( 11): Matrix.001 file - promoters60/1030757
aattttatata

SEQ ID NO: 45661 - DNA, 9 bp, Unknown
  misc_feature (1)..( 9): Matrix.001 file - promoters60/1030757
tttgtataa

SEQ ID NO: 45662 - DNA, 8 bp, Unknown
  misc_feature (1)..( 8): Matrix.001 file - promoters60/1030757
aatttttt

SEQ ID NO: 45663 - DNA, 9 bp, Unknown
  misc_feature (1)..( 9): Matrix.001 file - promoters60/1030757
caccagtct

SEQ ID NO: 45664 - DNA, 9 bp, Unknown
  misc_feature (1)..( 9): Matrix.001 file - promoters60/1030757
tttcatttt

SEQ ID NO: 45665 - DNA, 11 bp, Unknown
  misc_feature (1)..( 11): Matrix.001 file - promoters60/1030757
tatataaaaat

SEQ ID NO: 45666 - DNA, 11 bp, Unknown
  misc_feature (1)..( 11): Matrix.001 file - promoters60/1030757
aaaagtgaaag

SEQ ID NO: 45667 - DNA, 7 bp, Unknown
  misc_feature (1)..( 7): Matrix.001 file - promoters60/1030757
ggattta

SEQ ID NO: 45668 - DNA, 8 bp, Unknown
  misc_feature (1)..( 8): Matrix.001 file - promoters60/1030771
tgtatctc

SEQ ID NO: 45669 - DNA, 7 bp, Unknown
  misc_feature (1)..( 7): Matrix.001 file - promoters60/1030771
agagtct

SEQ ID NO: 45670 - DNA, 7 bp, Unknown
  misc_feature (1)..( 7): Matrix.001 file - promoters60/1030771
cttactc

SEQ ID NO: 45671 - DNA, 6 bp, Unknown
  misc_feature (1)..( 6): Matrix.001 file - promoters60/1030771
ctttta

SEQ ID NO: 45672 - DNA, 6 bp, Unknown
  misc_feature (1)..( 6): Matrix.001 file - promoters60/1030771
ccaatc

SEQ ID NO: 45673 - DNA, 9 bp, Unknown
  misc_feature (1)..( 9): Matrix.001 file - promoters60/1030771
tgaaaaagt

SEQ ID NO: 45674 - DNA, 6 bp, Unknown
  misc_feature (1)..( 6): Matrix.001 file - promoters60/1030771
aaaaac

SEQ ID NO: 45675 - DNA, 6 bp, Unknown
  misc_feature (1)..( 6): Matrix.001 file - promoters60/1030771
taaaaa

SEQ ID NO: 45676 - DNA, 7 bp, Unknown
  misc_feature (1)..( 7): Matrix.001 file - promoters60/1030771
aagccca

SEQ ID NO: 45677 - DNA, 6 bp, Unknown
  misc_feature (1)..( 6): Matrix.001 file - promoters60/1030771
atccaa

SEQ ID NO: 45678 - DNA, 7 bp, Unknown
  misc_feature (1)..( 7): Matrix.001 file - promoters60/1030771
catattt

SEQ ID NO: 45679 - DNA, 6 bp, Unknown
  misc_feature (1)..( 6): Matrix.001 file - promoters60/1030771
tttcat

SEQ ID NO: 45680 - DNA, 6 bp, Unknown
  misc_feature (1)..( 6): Matrix.001 file - promoters60/1030771
ttatta

SEQ ID NO: 45681 - DNA, 7 bp, Unknown
  misc_feature (1)..( 7): Matrix.001 file - promoters60/1030771
gcccatt

SEQ ID NO: 45682 - DNA, 7 bp, Unknown
  misc_feature (1)..( 7): Matrix.001 file - promoters60/1030771
tctgcct

SEQ ID NO: 45683 - DNA, 6 bp, Unknown
  misc_feature (1)..( 6): Matrix.001 file - promoters60/1030771
gtaata

SEQ ID NO: 45684 - DNA, 6 bp, Unknown
  misc_feature (1)..( 6): Matrix.001 file - promoters60/1030778
agagca

SEQ ID NO: 45685 - DNA, 6 bp, Unknown
  misc_feature (1)..( 6): Matrix.001 file - promoters60/1030778
atagag

SEQ ID NO: 45686 - DNA, 7 bp, Unknown
  misc_feature (1)..( 7): Matrix.001 file - promoters60/1030778
tatattg

SEQ ID NO: 45687 - DNA, 6 bp, Unknown
  misc_feature (1)..( 6): Matrix.001 file - promoters60/1030778
aaagac

SEQ ID NO: 45688 - DNA, 7 bp, Unknown
  misc_feature (1)..( 7): Matrix.001 file - promoters60/1030778
taaaaaa

SEQ ID NO: 45689 - DNA, 6 bp, Unknown
  misc_feature (1)..( 6): Matrix.001 file - promoters60/1030778
taaaaa

SEQ ID NO: 45690 - DNA, 6 bp, Unknown
  misc_feature (1)..( 6): Matrix.001 file - promoters60/1030778
cttcta

SEQ ID NO: 45691 - DNA, 7 bp, Unknown
  misc_feature (1)..( 7): Matrix.001 file - promoters60/1030778
tttctat

SEQ ID NO: 45692 - DNA, 7 bp, Unknown
  misc_feature (1)..( 7): Matrix.001 file - promoters60/1030778
tatattg

SEQ ID NO: 45693 - DNA, 8 bp, Unknown
  misc_feature (1)..( 8): Matrix.001 file - promoters60/1030778
tgttaaaa

SEQ ID NO: 45694 - DNA, 8 bp, Unknown
  misc_feature (1)..( 8): Matrix.001 file - promoters60/1030778
cattaaac

SEQ ID NO: 45695 - DNA, 6 bp, Unknown
  misc_feature (1)..( 6): Matrix.001 file - promoters60/1030778
tctcca

SEQ ID NO: 45696 - DNA, 7 bp, Unknown
  misc_feature (1)..( 7): Matrix.001 file - promoters60/1030778
ccatttt

SEQ ID NO: 45697 - DNA, 6 bp, Unknown
  misc_feature (1)..( 6): Matrix.001 file - promoters60/1030778
ttttca

SEQ ID NO: 45698 - DNA, 6 bp, Unknown
  misc_feature (1)..( 6): Matrix.001 file - promoters60/1030778
tgtctt

SEQ ID NO: 45699 - DNA, 6 bp, Unknown
  misc_feature (1)..( 6): Matrix.001 file - promoters60/1030778
caagct

SEQ ID NO: 45700 - DNA, 7 bp, Unknown
  misc_feature (1)..( 7): Matrix.001 file - promoters60/1030778
ataaata

SEQ ID NO: 45701 - DNA, 7 bp, Unknown
  misc_feature (1)..( 7): Matrix.001 file - promoters60/1030782
atgcctg

SEQ ID NO: 45702 - DNA, 8 bp, Unknown
  misc_feature (1)..( 8): Matrix.001 file - promoters60/1030782
tcataatg

SEQ ID NO: 45703 - DNA, 8 bp, Unknown
  misc_feature (1)..( 8): Matrix.001 file - promoters60/1030782
atttggat

SEQ ID NO: 45704 - DNA, 8 bp, Unknown
  misc_feature (1)..( 8): Matrix.001 file - promoters60/1030782
cgttcaaa

SEQ ID NO: 45705 - DNA, 7 bp, Unknown
  misc_feature (1)..( 7): Matrix.001 file - promoters60/1030782
gaaataa

SEQ ID NO: 45706 - DNA, 6 bp, Unknown
  misc_feature (1)..( 6): Matrix.001 file - promoters60/1030782
aataaa

SEQ ID NO: 45707 - DNA, 7 bp, Unknown
  misc_feature (1)..( 7): Matrix.001 file - promoters60/1030782
atagttt

SEQ ID NO: 45708 - DNA, 6 bp, Unknown
  misc_feature (1)..( 6): Matrix.001 file - promoters60/1030782
agatca

SEQ ID NO: 45709 - DNA, 7 bp, Unknown
  misc_feature (1)..( 7): Matrix.001 file - promoters60/1030782
aaagaaa

SEQ ID NO: 45710 - DNA, 6 bp, Unknown
  misc_feature (1)..( 6): Matrix.001 file - promoters60/1030782
atgaca

SEQ ID NO: 45711 - DNA, 7 bp, Unknown
  misc_feature (1)..( 7): Matrix.001 file - promoters60/1030782
aaaggta

SEQ ID NO: 45712 - DNA, 9 bp, Unknown
  misc_feature (1)..( 9): Matrix.001 file - promoters60/1030782
attaacacc

SEQ ID NO: 45713 - DNA, 6 bp, Unknown
  misc_feature (1)..( 6): Matrix.001 file - promoters60/1030782
caatca

SEQ ID NO: 45714 - DNA, 8 bp, Unknown
  misc_feature (1)..( 8): Matrix.001 file - promoters60/1030782
aaagagaa

SEQ ID NO: 45715 - DNA, 6 bp, Unknown
  misc_feature (1)..( 6): Matrix.001 file - promoters60/1030782
atgaga

SEQ ID NO: 45716 - DNA, 9 bp, Unknown
  misc_feature (1)..( 9): Matrix.001 file - promoters60/1030803
tcggtgaag

SEQ ID NO: 45717 - DNA, 8 bp, Unknown
  misc_feature (1)..( 8): Matrix.001 file - promoters60/1030803
tcggagaa

SEQ ID NO: 45718 - DNA, 8 bp, Unknown
  misc_feature (1)..( 8): Matrix.001 file - promoters60/1030803
aatattac

SEQ ID NO: 45719 - DNA, 7 bp, Unknown
  misc_feature (1)..( 7): Matrix.001 file - promoters60/1030803
aggcaaa

SEQ ID NO: 45720 - DNA, 7 bp, Unknown
  misc_feature (1)..( 7): Matrix.001 file - promoters60/1030803
gtgggtt

SEQ ID NO: 45721 - DNA, 7 bp, Unknown
  misc_feature (1)..( 7): Matrix.001 file - promoters60/1030803
caaccac

SEQ ID NO: 45722 - DNA, 6 bp, Unknown
  misc_feature (1)..( 6): Matrix.001 file - promoters60/1030803
ggctga

SEQ ID NO: 45723 - DNA, 11 bp, Unknown
  misc_feature (1)..( 11): Matrix.001 file - promoters60/1030803
agggtctcaga

SEQ ID NO: 45724 - DNA, 6 bp, Unknown
  misc_feature (1)..( 6): Matrix.001 file - promoters60/1030803
agattt

SEQ ID NO: 45725 - DNA, 9 bp, Unknown
  misc_feature (1)..( 9): Matrix.001 file - promoters60/1030821
cttgtttaa

SEQ ID NO: 45726 - DNA, 8 bp, Unknown
  misc_feature (1)..( 8): Matrix.001 file - promoters60/1030894
attgtttt

SEQ ID NO: 45727 - DNA, 13 bp, Unknown
  misc_feature (1)..( 13): Matrix.001 file - promoters60/1030894
caaaaacaacaat

SEQ ID NO: 45728 - DNA, 8 bp, Unknown
  misc_feature (1)..( 8): Matrix.001 file - promoters60/1030894
aaaaacaa

SEQ ID NO: 45729 - DNA, 13 bp, Unknown
  misc_feature (1)..( 13): Matrix.001 file - promoters60/1030902
gtcatataaataa

SEQ ID NO: 45730 - DNA, 5 bp, Unknown
  misc_feature (1)..( 5): Matrix.001 file - promoters60/1030916
gtaat

SEQ ID NO: 45731 - DNA, 11 bp, Unknown
  misc_feature (1)..( 11): Matrix.001 file - promoters60/1030916
agcaaaaacgt

SEQ ID NO: 45732 - DNA, 12 bp, Unknown
  misc_feature (1)..( 12): Matrix.001 file - promoters60/1030916
atttgcttttaa

SEQ ID NO: 45733 - DNA, 10 bp, Unknown
  misc_feature (1)..( 10): Matrix.001 file - promoters60/1030916
actttataat

SEQ ID NO: 45734 - DNA, 7 bp, Unknown
  misc_feature (1)..( 7): Matrix.001 file - promoters60/1030916
acaaaat

SEQ ID NO: 45735 - DNA, 11 bp, Unknown
  misc_feature (1)..( 11): Matrix.001 file - promoters60/1030918
ctttattgaaa

SEQ ID NO: 45736 - DNA, 7 bp, Unknown
  misc_feature (1)..( 7): Matrix.001 file - promoters60/1030933
taaagtt

SEQ ID NO: 45737 - DNA, 7 bp, Unknown
  misc_feature (1)..( 7): Matrix.001 file - promoters60/1030933
tgttaag

SEQ ID NO: 45738 - DNA, 7 bp, Unknown
  misc_feature (1)..( 7): Matrix.001 file - promoters60/1030933
ttttaga

SEQ ID NO: 45739 - DNA, 9 bp, Unknown
  misc_feature (1)..( 9): Matrix.001 file - promoters60/1030933
tataaccat

SEQ ID NO: 45740 - DNA, 9 bp, Unknown
  misc_feature (1)..( 9): Matrix.001 file - promoters60/1030933
tgaaaaaaa

SEQ ID NO: 45741 - DNA, 6 bp, Unknown
  misc_feature (1)..( 6): Matrix.001 file - promoters60/1030933
aagata

SEQ ID NO: 45742 - DNA, 7 bp, Unknown
  misc_feature (1)..( 7): Matrix.001 file - promoters60/1030933
taaaaat

SEQ ID NO: 45743 - DNA, 8 bp, Unknown
  misc_feature (1)..( 8): Matrix.001 file - promoters60/1030933
ttaaacca

SEQ ID NO: 45744 - DNA, 6 bp, Unknown
  misc_feature (1)..( 6): Matrix.001 file - promoters60/1030933
acaaaa

SEQ ID NO: 45745 - DNA, 6 bp, Unknown
  misc_feature (1)..( 6): Matrix.001 file - promoters60/1030933
tttata

SEQ ID NO: 45746 - DNA, 7 bp, Unknown
  misc_feature (1)..( 7): Matrix.001 file - promoters60/1030933
tttcttt

SEQ ID NO: 45747 - DNA, 6 bp, Unknown
  misc_feature (1)..( 6): Matrix.001 file - promoters60/1030933
tttttc

SEQ ID NO: 45748 - DNA, 6 bp, Unknown
  misc_feature (1)..( 6): Matrix.001 file - promoters60/1030933
agatat

SEQ ID NO: 45749 - DNA, 11 bp, Unknown
  misc_feature (1)..( 11): Matrix.001 file - promoters60/1030933
agccaatgttt

SEQ ID NO: 45750 - DNA, 6 bp, Unknown
  misc_feature (1)..( 6): Matrix.001 file - promoters60/1030933
gatatc

SEQ ID NO: 45751 - DNA, 7 bp, Unknown
  misc_feature (1)..( 7): Matrix.001 file - promoters60/1030933
aatcaaa

SEQ ID NO: 45752 - DNA, 6 bp, Unknown
  misc_feature (1)..( 6): Matrix.001 file - promoters60/1030933
gaaaat

SEQ ID NO: 45753 - DNA, 8 bp, Unknown
  misc_feature (1)..( 8): Matrix.001 file - promoters60/1030933
aaattgaa

SEQ ID NO: 45754 - DNA, 6 bp, Unknown
  misc_feature (1)..( 6): Matrix.001 file - promoters60/1030933
attttt

SEQ ID NO: 45755 - DNA, 7 bp, Unknown
  misc_feature (1)..( 7): Matrix.001 file - promoters60/1030933
tagatga

SEQ ID NO: 45756 - DNA, 7 bp, Unknown
  misc_feature (1)..( 7): Matrix.001 file - promoters60/1030933
gagataa

SEQ ID NO: 45757 - DNA, 7 bp, Unknown
  misc_feature (1)..( 7): Matrix.001 file - promoters60/1030933
caacaag

SEQ ID NO: 45758 - DNA, 6 bp, Unknown
  misc_feature (1)..( 6): Matrix.001 file - promoters60/1030933
aaatct

SEQ ID NO: 45759 - DNA, 6 bp, Unknown
  misc_feature (1)..( 6): Matrix.001 file - promoters60/1030933
aattgt

SEQ ID NO: 45760 - DNA, 7 bp, Unknown
  misc_feature (1)..( 7): Matrix.001 file - promoters60/1030933
aataaat

SEQ ID NO: 45761 - DNA, 6 bp, Unknown
  misc_feature (1)..( 6): Matrix.001 file - promoters60/1030933
gaaaac

SEQ ID NO: 45762 - DNA, 6 bp, Unknown
  misc_feature (1)..( 6): Matrix.001 file - promoters60/1030933
ccaatc

SEQ ID NO: 45763 - DNA, 6 bp, Unknown
  misc_feature (1)..( 6): Matrix.001 file - promoters60/1030933
agaaat

SEQ ID NO: 45764 - DNA, 13 bp, Unknown
  misc_feature (1)..( 13): Matrix.001 file - promoters60/1030940
actaaacaaagta

SEQ ID NO: 45765 - DNA, 6 bp, Unknown
  misc_feature (1)..( 6): Matrix.001 file - promoters60/1030940
catgaa

SEQ ID NO: 45766 - DNA, 6 bp, Unknown
  misc_feature (1)..( 6): Matrix.001 file - promoters60/1031035
tttgat

SEQ ID NO: 45767 - DNA, 10 bp, Unknown
  misc_feature (1)..( 10): Matrix.001 file - promoters60/1031035
acaaacaaaa

SEQ ID NO: 45768 - DNA, 11 bp, Unknown
  misc_feature (1)..( 11): Matrix.001 file - promoters60/1031035
acagacaaaac

SEQ ID NO: 45769 - DNA, 7 bp, Unknown
  misc_feature (1)..( 7): Matrix.001 file - promoters60/1031035
acaaaaa

SEQ ID NO: 45770 - DNA, 8 bp, Unknown
  misc_feature (1)..( 8): Matrix.001 file - promoters60/1031048
tggtatta

SEQ ID NO: 45771 - DNA, 7 bp, Unknown
  misc_feature (1)..( 7): Matrix.001 file - promoters60/1031048
aacctca

SEQ ID NO: 45772 - DNA, 8 bp, Unknown
  misc_feature (1)..( 8): Matrix.001 file - promoters60/1031048
acgctgcc

SEQ ID NO: 45773 - DNA, 7 bp, Unknown
  misc_feature (1)..( 7): Matrix.001 file - promoters60/1031048
tggagtt

SEQ ID NO: 45774 - DNA, 7 bp, Unknown
  misc_feature (1)..( 7): Matrix.001 file - promoters60/1031048
ttaatgg

SEQ ID NO: 45775 - DNA, 8 bp, Unknown
  misc_feature (1)..( 8): Matrix.001 file - promoters60/1031048
ttcaacta

SEQ ID NO: 45776 - DNA, 6 bp, Unknown
  misc_feature (1)..( 6): Matrix.001 file - promoters60/1031048
tacaaa

SEQ ID NO: 45777 - DNA, 6 bp, Unknown
  misc_feature (1)..( 6): Matrix.001 file - promoters60/1031048
gttttt

SEQ ID NO: 45778 - DNA, 9 bp, Unknown
  misc_feature (1)..( 9): Matrix.001 file - promoters60/1031084
tagagaatg

SEQ ID NO: 45779 - DNA, 8 bp, Unknown
  misc_feature (1)..( 8): Matrix.001 file - promoters60/1031084
taataagt

SEQ ID NO: 45780 - DNA, 7 bp, Unknown
  misc_feature (1)..( 7): Matrix.001 file - promoters60/1031084
attaaaa

SEQ ID NO: 45781 - DNA, 12 bp, Unknown
  misc_feature (1)..( 12): Matrix.001 file - promoters60/1031084
aaaatagaaaaa

SEQ ID NO: 45782 - DNA, 10 bp, Unknown
  misc_feature (1)..( 10): Matrix.001 file - promoters60/1031084
aaaaaagaaa

SEQ ID NO: 45783 - DNA, 7 bp, Unknown
  misc_feature (1)..( 7): Matrix.001 file - promoters60/1031084
taaacca

SEQ ID NO: 45784 - DNA, 7 bp, Unknown
  misc_feature (1)..( 7): Matrix.001 file - promoters60/1031084
atcaaaa

SEQ ID NO: 45785 - DNA, 8 bp, Unknown
  misc_feature (1)..( 8): Matrix.001 file - promoters60/1031084
cacaagca

SEQ ID NO: 45786 - DNA, 9 bp, Unknown
  misc_feature (1)..( 9): Matrix.001 file - promoters60/1031103
gtgttattt

SEQ ID NO: 45787 - DNA, 6 bp, Unknown
  misc_feature (1)..( 6): Matrix.001 file - promoters60/1031103
aattat

SEQ ID NO: 45788 - DNA, 7 bp, Unknown
  misc_feature (1)..( 7): Matrix.001 file - promoters60/1031103
aaagtgg

SEQ ID NO: 45789 - DNA, 6 bp, Unknown
  misc_feature (1)..( 6): Matrix.001 file - promoters60/1031103
ttttga

SEQ ID NO: 45790 - DNA, 8 bp, Unknown
  misc_feature (1)..( 8): Matrix.001 file - promoters60/1031103
aatacaaa

SEQ ID NO: 45791 - DNA, 7 bp, Unknown
  misc_feature (1)..( 7): Matrix.001 file - promoters60/1031103
aaaaccc

SEQ ID NO: 45792 - DNA, 8 bp, Unknown
  misc_feature (1)..( 8): Matrix.001 file - promoters60/1031103
agattgat

SEQ ID NO: 45793 - DNA, 7 bp, Unknown
  misc_feature (1)..( 7): Matrix.001 file - promoters60/1031103
ttatgga

SEQ ID NO: 45794 - DNA, 6 bp, Unknown
  misc_feature (1)..( 6): Matrix.001 file - promoters60/1031103
tatttt

SEQ ID NO: 45795 - DNA, 6 bp, Unknown
  misc_feature (1)..( 6): Matrix.001 file - promoters60/1031103
ttttct

SEQ ID NO: 45796 - DNA, 6 bp, Unknown
  misc_feature (1)..( 6): Matrix.001 file - promoters60/1031103
tttaga

SEQ ID NO: 45797 - DNA, 7 bp, Unknown
  misc_feature (1)..( 7): Matrix.001 file - promoters60/1031103
agaaaat

SEQ ID NO: 45798 - DNA, 6 bp, Unknown
  misc_feature (1)..( 6): Matrix.001 file - promoters60/1031103
atgtag

SEQ ID NO: 45799 - DNA, 7 bp, Unknown
  misc_feature (1)..( 7): Matrix.001 file - promoters60/1031103
gcactaa

SEQ ID NO: 45800 - DNA, 7 bp, Unknown
  misc_feature (1)..( 7): Matrix.001 file - promoters60/1031103
taaattt

SEQ ID NO: 45801 - DNA, 6 bp, Unknown
  misc_feature (1)..( 6): Matrix.001 file - promoters60/1031103
tttcta

SEQ ID NO: 45802 - DNA, 7 bp, Unknown
  misc_feature (1)..( 7): Matrix.001 file - promoters60/1031103
tatattc

SEQ ID NO: 45803 - DNA, 7 bp, Unknown
  misc_feature (1)..( 7): Matrix.001 file - promoters60/1031103
ttacatt

SEQ ID NO: 45804 - DNA, 6 bp, Unknown
  misc_feature (1)..( 6): Matrix.001 file - promoters60/1031208
tataat

SEQ ID NO: 45805 - DNA, 11 bp, Unknown
  misc_feature (1)..( 11): Matrix.001 file - promoters60/1031208
aaaaagaaaaa

SEQ ID NO: 45806 - DNA, 8 bp, Unknown
  misc_feature (1)..( 8): Matrix.001 file - promoters60/1031208
aatttttt

SEQ ID NO: 45807 - DNA, 10 bp, Unknown
  misc_feature (1)..( 10): Matrix.001 file - promoters60/1031208
tcaattaaaa

SEQ ID NO: 45808 - DNA, 6 bp, Unknown
  misc_feature (1)..( 6): Matrix.001 file - promoters60/1031208
aaaaaa

SEQ ID NO: 45809 - DNA, 9 bp, Unknown
  misc_feature (1)..( 9): Matrix.001 file - promoters60/1031208
cttaatttg

SEQ ID NO: 45810 - DNA, 8 bp, Unknown
  misc_feature (1)..( 8): Matrix.001 file - promoters60/1031208
attatctt

SEQ ID NO: 45811 - DNA, 14 bp, Unknown
  misc_feature (1)..( 14): Matrix.001 file - promoters60/1031208
aatatggtctaaaa

SEQ ID NO: 45812 - DNA, 7 bp, Unknown
  misc_feature (1)..( 7): Matrix.001 file - promoters60/1031208
ttttgtt

SEQ ID NO: 45813 - DNA, 7 bp, Unknown
  misc_feature (1)..( 7): Matrix.001 file - promoters60/1031208
ttatttg

SEQ ID NO: 45814 - DNA, 10 bp, Unknown
  misc_feature (1)..( 10): Matrix.001 file - promoters60/1031208
ttattctcta

SEQ ID NO: 45815 - DNA, 7 bp, Unknown
  misc_feature (1)..( 7): Matrix.001 file - promoters60/1031208
ataatta

SEQ ID NO: 45816 - DNA, 7 bp, Unknown
  misc_feature (1)..( 7): Matrix.001 file - promoters60/1031208
attaatc

SEQ ID NO: 45817 - DNA, 10 bp, Unknown
  misc_feature (1)..( 10): Matrix.001 file - promoters60/1031208
ttttattatt

SEQ ID NO: 45818 - DNA, 6 bp, Unknown
  misc_feature (1)..( 6): Matrix.001 file - promoters60/1031208
gtatgt

SEQ ID NO: 45819 - DNA, 8 bp, Unknown
  misc_feature (1)..( 8): Matrix.001 file - promoters60/1031208
tcaacaac

SEQ ID NO: 45820 - DNA, 6 bp, Unknown
  misc_feature (1)..( 6): Matrix.001 file - promoters60/1031208
tcggcc

SEQ ID NO: 45821 - DNA, 10 bp, Unknown
  misc_feature (1)..( 10): Matrix.001 file - promoters60/1031229
agttttactc

SEQ ID NO: 45822 - DNA, 12 bp, Unknown
  misc_feature (1)..( 12): Matrix.001 file - promoters60/1031229
ttttcttgttgt

SEQ ID NO: 45823 - DNA, 11 bp, Unknown
  misc_feature (1)..( 11): Matrix.001 file - promoters60/1031229
ttactttttta

SEQ ID NO: 45824 - DNA, 10 bp, Unknown
  misc_feature (1)..( 10): Matrix.001 file - promoters60/1031267
atgacttgga

SEQ ID NO: 45825 - DNA, 15 bp, Unknown
  misc_feature (1)..( 15): Matrix.001 file - promoters60/1031291
actctcaaaaaatga

SEQ ID NO: 45826 - DNA, 7 bp, Unknown
  misc_feature (1)..( 7): Matrix.001 file - promoters60/1031299
taaacat

SEQ ID NO: 45827 - DNA, 16 bp, Unknown
  misc_feature (1)..( 16): Matrix.001 file - promoters60/1031299
ttaatttaactgataa

SEQ ID NO: 45828 - DNA, 8 bp, Unknown
  misc_feature (1)..( 8): Matrix.001 file - promoters60/1031299
agatttta

SEQ ID NO: 45829 - DNA, 8 bp, Unknown
  misc_feature (1)..( 8): Matrix.001 file - promoters60/1031299
aaatatat

SEQ ID NO: 45830 - DNA, 10 bp, Unknown
  misc_feature (1)..( 10): Matrix.001 file - promoters60/1031299
acaattttta

SEQ ID NO: 45831 - DNA, 8 bp, Unknown
  misc_feature (1)..( 8): Matrix.001 file - promoters60/1031299
tttaaaat

SEQ ID NO: 45832 - DNA, 7 bp, Unknown
  misc_feature (1)..( 7): Matrix.001 file - promoters60/1031299
aatgtta

SEQ ID NO: 45833 - DNA, 14 bp, Unknown
  misc_feature (1)..( 14): Matrix.001 file - promoters60/1031299
taatttaaaataaa

SEQ ID NO: 45834 - DNA, 8 bp, Unknown
  misc_feature (1)..( 8): Matrix.001 file - promoters60/1031299
tataaata

SEQ ID NO: 45835 - DNA, 8 bp, Unknown
  misc_feature (1)..( 8): Matrix.001 file - promoters60/1031336
tgttgact

SEQ ID NO: 45836 - DNA, 6 bp, Unknown
  misc_feature (1)..( 6): Matrix.001 file - promoters60/1031336
ctttgt

SEQ ID NO: 45837 - DNA, 6 bp, Unknown
  misc_feature (1)..( 6): Matrix.001 file - promoters60/1031336
gtagct

SEQ ID NO: 45838 - DNA, 7 bp, Unknown
  misc_feature (1)..( 7): Matrix.001 file - promoters60/1031336
ttcttct

SEQ ID NO: 45839 - DNA, 8 bp, Unknown
  misc_feature (1)..( 8): Matrix.001 file - promoters60/1031336
ccagattt

SEQ ID NO: 45840 - DNA, 7 bp, Unknown
  misc_feature (1)..( 7): Matrix.001 file - promoters60/1031336
tttaact

SEQ ID NO: 45841 - DNA, 9 bp, Unknown
  misc_feature (1)..( 9): Matrix.001 file - promoters60/1031336
aaaacaaaa

SEQ ID NO: 45842 - DNA, 6 bp, Unknown
  misc_feature (1)..( 6): Matrix.001 file - promoters60/1031336
aaatat

SEQ ID NO: 45843 - DNA, 6 bp, Unknown
  misc_feature (1)..( 6): Matrix.001 file - promoters60/1031336
caaaaa

SEQ ID NO: 45844 - DNA, 7 bp, Unknown
  misc_feature (1)..( 7): Matrix.001 file - promoters60/1031336
actgaat

SEQ ID NO: 45845 - DNA, 9 bp, Unknown
  misc_feature (1)..( 9): Matrix.001 file - promoters60/1031336
ctcaaattt

SEQ ID NO: 45846 - DNA, 6 bp, Unknown
  misc_feature (1)..( 6): Matrix.001 file - promoters60/1031336
aaacaa

SEQ ID NO: 45847 - DNA, 10 bp, Unknown
  misc_feature (1)..( 10): Matrix.001 file - promoters60/1031336
attaaaggaa

SEQ ID NO: 45848 - DNA, 9 bp, Unknown
  misc_feature (1)..( 9): Matrix.001 file - promoters60/1031336
aaaacaaaa

SEQ ID NO: 45849 - DNA, 7 bp, Unknown
  misc_feature (1)..( 7): Matrix.001 file - promoters60/1031336
aaaaacg

SEQ ID NO: 45850 - DNA, 7 bp, Unknown
  misc_feature (1)..( 7): Matrix.001 file - promoters60/1031336
tgtaatt

SEQ ID NO: 45851 - DNA, 8 bp, Unknown
  misc_feature (1)..( 8): Matrix.001 file - promoters60/1031336
attattat

SEQ ID NO: 45852 - DNA, 10 bp, Unknown
  misc_feature (1)..( 10): Matrix.001 file - promoters60/1031336
ttgtaatgat

SEQ ID NO: 45853 - DNA, 6 bp, Unknown
  misc_feature (1)..( 6): Matrix.001 file - promoters60/1031336
tagaat

SEQ ID NO: 45854 - DNA, 9 bp, Unknown
  misc_feature (1)..( 9): Matrix.001 file - promoters60/1031336
taaagtttt

SEQ ID NO: 45855 - DNA, 8 bp, Unknown
  misc_feature (1)..( 8): Matrix.001 file - promoters60/1031336
ttttagtt

SEQ ID NO: 45856 - DNA, 10 bp, Unknown
  misc_feature (1)..( 10): Matrix.001 file - promoters60/1031368
ttcgtagaca

SEQ ID NO: 45857 - DNA, 7 bp, Unknown
  misc_feature (1)..( 7): Matrix.001 file - promoters60/1031368
tgactat

SEQ ID NO: 45858 - DNA, 6 bp, Unknown
  misc_feature (1)..( 6): Matrix.001 file - promoters60/1031368
gtcaat

SEQ ID NO: 45859 - DNA, 9 bp, Unknown
  misc_feature (1)..( 9): Matrix.001 file - promoters60/1031368
tttattgtt

SEQ ID NO: 45860 - DNA, 6 bp, Unknown
  misc_feature (1)..( 6): Matrix.001 file - promoters60/1031368
attgta

SEQ ID NO: 45861 - DNA, 8 bp, Unknown
  misc_feature (1)..( 8): Matrix.001 file - promoters60/1031368
caaataat

SEQ ID NO: 45862 - DNA, 6 bp, Unknown
  misc_feature (1)..( 6): Matrix.001 file - promoters60/1031368
tacaaa

SEQ ID NO: 45863 - DNA, 9 bp, Unknown
  misc_feature (1)..( 9): Matrix.001 file - promoters60/1031368
cataaattt

SEQ ID NO: 45864 - DNA, 6 bp, Unknown
  misc_feature (1)..( 6): Matrix.001 file - promoters60/1031368
ttatat

SEQ ID NO: 45865 - DNA, 6 bp, Unknown
  misc_feature (1)..( 6): Matrix.001 file - promoters60/1031368
ggtttg

SEQ ID NO: 45866 - DNA, 6 bp, Unknown
  misc_feature (1)..( 6): Matrix.001 file - promoters60/1031368
ggttga

SEQ ID NO: 45867 - DNA, 6 bp, Unknown
  misc_feature (1)..( 6): Matrix.001 file - promoters60/1031368
ttattg

SEQ ID NO: 45868 - DNA, 7 bp, Unknown
  misc_feature (1)..( 7): Matrix.001 file - promoters60/1031368
ttgtatg

SEQ ID NO: 45869 - DNA, 6 bp, Unknown
  misc_feature (1)..( 6): Matrix.001 file - promoters60/1031368
cgtgtc

SEQ ID NO: 45870 - DNA, 7 bp, Unknown
  misc_feature (1)..( 7): Matrix.001 file - promoters60/1031368
aatatat

SEQ ID NO: 45871 - DNA, 8 bp, Unknown
  misc_feature (1)..( 8): Matrix.001 file - promoters60/1031386
attaataa

SEQ ID NO: 45872 - DNA, 6 bp, Unknown
  misc_feature (1)..( 6): Matrix.001 file - promoters60/1031386
tcaaat

SEQ ID NO: 45873 - DNA, 8 bp, Unknown
  misc_feature (1)..( 8): Matrix.001 file - promoters60/1031386
tgaataaa

SEQ ID NO: 45874 - DNA, 8 bp, Unknown
  misc_feature (1)..( 8): Matrix.001 file - promoters60/1031386
atttaaat

SEQ ID NO: 45875 - DNA, 8 bp, Unknown
  misc_feature (1)..( 8): Matrix.001 file - promoters60/1031386
ttatgagt

SEQ ID NO: 45876 - DNA, 6 bp, Unknown
  misc_feature (1)..( 6): Matrix.001 file - promoters60/1031386
atatat

SEQ ID NO: 45877 - DNA, 7 bp, Unknown
  misc_feature (1)..( 7): Matrix.001 file - promoters60/1031386
aaccaaa

SEQ ID NO: 45878 - DNA, 6 bp, Unknown
  misc_feature (1)..( 6): Matrix.001 file - promoters60/1031386
gtcatg

SEQ ID NO: 45879 - DNA, 6 bp, Unknown
  misc_feature (1)..( 6): Matrix.001 file - promoters60/1031386
ttttag

SEQ ID NO: 45880 - DNA, 8 bp, Unknown
  misc_feature (1)..( 8): Matrix.001 file - promoters60/1031386
aatccaat

SEQ ID NO: 45881 - DNA, 6 bp, Unknown
  misc_feature (1)..( 6): Matrix.001 file - promoters60/1031386
ttacat

SEQ ID NO: 45882 - DNA, 8 bp, Unknown
  misc_feature (1)..( 8): Matrix.001 file - promoters60/1031386
aaatatcc

SEQ ID NO: 45883 - DNA, 7 bp, Unknown
  misc_feature (1)..( 7): Matrix.001 file - promoters60/1031386
cgaaatc

SEQ ID NO: 45884 - DNA, 8 bp, Unknown
  misc_feature (1)..( 8): Matrix.001 file - promoters60/1031386
agaaaaca

SEQ ID NO: 45885 - DNA, 6 bp, Unknown
  misc_feature (1)..( 6): Matrix.001 file - promoters60/1031386
aagaaa

SEQ ID NO: 45886 - DNA, 10 bp, Unknown
  misc_feature (1)..( 10): Matrix.001 file - promoters60/1031386
ataaatttag

SEQ ID NO: 45887 - DNA, 6 bp, Unknown
  misc_feature (1)..( 6): Matrix.001 file - promoters60/1031386
tttcat

SEQ ID NO: 45888 - DNA, 7 bp, Unknown
  misc_feature (1)..( 7): Matrix.001 file - promoters60/1031386
tgagttt

SEQ ID NO: 45889 - DNA, 6 bp, Unknown
  misc_feature (1)..( 6): Matrix.001 file - promoters60/1031386
gaaaaa

SEQ ID NO: 45890 - DNA, 8 bp, Unknown
  misc_feature (1)..( 8): Matrix.001 file - promoters60/1031386
taaacgat

SEQ ID NO: 45891 - DNA, 7 bp, Unknown
  misc_feature (1)..( 7): Matrix.001 file - promoters60/1031386
tatacta

SEQ ID NO: 45892 - DNA, 6 bp, Unknown
  misc_feature (1)..( 6): Matrix.001 file - promoters60/1031386
taaaat

SEQ ID NO: 45893 - DNA, 7 bp, Unknown
  misc_feature (1)..( 7): Matrix.001 file - promoters60/1031386
ataggaa

SEQ ID NO: 45894 - DNA, 7 bp, Unknown
  misc_feature (1)..( 7): Matrix.001 file - promoters60/1031386
cgaacaa

SEQ ID NO: 45895 - DNA, 9 bp, Unknown
  misc_feature (1)..( 9): Matrix.001 file - promoters60/1031386
atgtaaaat

SEQ ID NO: 45896 - DNA, 9 bp, Unknown
  misc_feature (1)..( 9): Matrix.001 file - promoters60/1031386
gttcacttt

SEQ ID NO: 45897 - DNA, 8 bp, Unknown
  misc_feature (1)..( 8): Matrix.001 file - promoters60/1031386
gtttgttt

SEQ ID NO: 45898 - DNA, 13 bp, Unknown
  misc_feature (1)..( 13): Matrix.001 file - promoters60/1031390
actattttcaaaa

SEQ ID NO: 45899 - DNA, 8 bp, Unknown
  misc_feature (1)..( 8): Matrix.001 file - promoters60/1031390
taaaaagg

SEQ ID NO: 45900 - DNA, 6 bp, Unknown
  misc_feature (1)..( 6): Matrix.001 file - promoters60/1031390
tgatat

SEQ ID NO: 45901 - DNA, 10 bp, Unknown
  misc_feature (1)..( 10): Matrix.001 file - promoters60/1031390
attattataa

SEQ ID NO: 45902 - DNA, 7 bp, Unknown
  misc_feature (1)..( 7): Matrix.001 file - promoters60/1031425
tcaaacc

SEQ ID NO: 45903 - DNA, 8 bp, Unknown
  misc_feature (1)..( 8): Matrix.001 file - promoters60/1031425
caatattt

SEQ ID NO: 45904 - DNA, 15 bp, Unknown
  misc_feature (1)..( 15): Matrix.001 file - promoters60/1031563
acaatagtcttaaac

SEQ ID NO: 45905 - DNA, 7 bp, Unknown
  misc_feature (1)..( 7): Matrix.001 file - promoters60/1031563
gtgtagt

SEQ ID NO: 45906 - DNA, 7 bp, Unknown
  misc_feature (1)..( 7): Matrix.001 file - promoters60/1031563
acaaaat

SEQ ID NO: 45907 - DNA, 7 bp, Unknown
  misc_feature (1)..( 7): Matrix.001 file - promoters60/1031563
cacacaa

SEQ ID NO: 45908 - DNA, 6 bp, Unknown
  misc_feature (1)..( 6): Matrix.001 file - promoters60/1031563
gaaact

SEQ ID NO: 45909 - DNA, 7 bp, Unknown
  misc_feature (1)..( 7): Matrix.001 file - promoters60/1031563
gaaacgt

SEQ ID NO: 45910 - DNA, 8 bp, Unknown
  misc_feature (1)..( 8): Matrix.001 file - promoters60/1031563
ctaaagag

SEQ ID NO: 45911 - DNA, 7 bp, Unknown
  misc_feature (1)..( 7): Matrix.001 file - promoters60/1031563
caaaagt

SEQ ID NO: 45912 - DNA, 8 bp, Unknown
  misc_feature (1)..( 8): Matrix.001 file - promoters60/1031563
agcgattt

SEQ ID NO: 45913 - DNA, 7 bp, Unknown
  misc_feature (1)..( 7): Matrix.001 file - promoters60/1031563
tacaaac

SEQ ID NO: 45914 - DNA, 8 bp, Unknown
  misc_feature (1)..( 8): Matrix.001 file - promoters60/1031563
ttataaca

SEQ ID NO: 45915 - DNA, 6 bp, Unknown
  misc_feature (1)..( 6): Matrix.001 file - promoters60/1031563
agattc

SEQ ID NO: 45916 - DNA, 7 bp, Unknown
  misc_feature (1)..( 7): Matrix.001 file - promoters60/1031563
tttagta

SEQ ID NO: 45917 - DNA, 7 bp, Unknown
  misc_feature (1)..( 7): Matrix.001 file - promoters60/1031563
attacct

SEQ ID NO: 45918 - DNA, 7 bp, Unknown
  misc_feature (1)..( 7): Matrix.001 file - promoters60/1031563
cctattc

SEQ ID NO: 45919 - DNA, 7 bp, Unknown
  misc_feature (1)..( 7): Matrix.001 file - promoters60/1031563
ttgtgtt

SEQ ID NO: 45920 - DNA, 8 bp, Unknown
  misc_feature (1)..( 8): Matrix.001 file - promoters60/1031563
tgttaata

SEQ ID NO: 45921 - DNA, 7 bp, Unknown
  misc_feature (1)..( 7): Matrix.001 file - promoters60/1031563
aaaaaat

SEQ ID NO: 45922 - DNA, 7 bp, Unknown
  misc_feature (1)..( 7): Matrix.001 file - promoters60/1031563
aaatact

SEQ ID NO: 45923 - DNA, 9 bp, Unknown
  misc_feature (1)..( 9): Matrix.001 file - promoters60/1031563
tttaataga

SEQ ID NO: 45924 - DNA, 6 bp, Unknown
  misc_feature (1)..( 6): Matrix.001 file - promoters60/1031563
aaaagc

SEQ ID NO: 45925 - DNA, 6 bp, Unknown
  misc_feature (1)..( 6): Matrix.001 file - promoters60/1031563
aatttc

SEQ ID NO: 45926 - DNA, 6 bp, Unknown
  misc_feature (1)..( 6): Matrix.001 file - promoters60/1031563
ttgaaa

SEQ ID NO: 45927 - DNA, 6 bp, Unknown
  misc_feature (1)..( 6): Matrix.001 file - promoters60/1031563
aaaaaa

SEQ ID NO: 45928 - DNA, 7 bp, Unknown
  misc_feature (1)..( 7): Matrix.001 file - promoters60/1031638
tccaaaa

SEQ ID NO: 45929 - DNA, 9 bp, Unknown
  misc_feature (1)..( 9): Matrix.001 file - promoters60/1031638
aaaaacaaa

SEQ ID NO: 45930 - DNA, 7 bp, Unknown
  misc_feature (1)..( 7): Matrix.001 file - promoters60/1031638
cccacga

SEQ ID NO: 45931 - DNA, 8 bp, Unknown
  misc_feature (1)..( 8): Matrix.001 file - promoters60/1031638
aaattata

SEQ ID NO: 45932 - DNA, 8 bp, Unknown
  misc_feature (1)..( 8): Matrix.001 file - promoters60/1031638
aaaaataa

SEQ ID NO: 45933 - DNA, 10 bp, Unknown
  misc_feature (1)..( 10): Matrix.001 file - promoters60/1031638
aaatatttaa

SEQ ID NO: 45934 - DNA, 9 bp, Unknown
  misc_feature (1)..( 9): Matrix.001 file - promoters60/1031638
ttaaacata

SEQ ID NO: 45935 - DNA, 9 bp, Unknown
  misc_feature (1)..( 9): Matrix.001 file - promoters60/1031638
attttgtaa

SEQ ID NO: 45936 - DNA, 7 bp, Unknown
  misc_feature (1)..( 7): Matrix.001 file - promoters60/1031638
aaaatta

SEQ ID NO: 45937 - DNA, 7 bp, Unknown
  misc_feature (1)..( 7): Matrix.001 file - promoters60/1031638
gtaaaat

SEQ ID NO: 45938 - DNA, 9 bp, Unknown
  misc_feature (1)..( 9): Matrix.001 file - promoters60/1031638
ataatattt

SEQ ID NO: 45939 - DNA, 6 bp, Unknown
  misc_feature (1)..( 6): Matrix.001 file - promoters60/1031638
ttcaaa

SEQ ID NO: 45940 - DNA, 9 bp, Unknown
  misc_feature (1)..( 9): Matrix.001 file - promoters60/1031638
tttttttta

SEQ ID NO: 45941 - DNA, 10 bp, Unknown
  misc_feature (1)..( 10): Matrix.001 file - promoters60/1031638
attaatgttc

SEQ ID NO: 45942 - DNA, 9 bp, Unknown
  misc_feature (1)..( 9): Matrix.001 file - promoters60/1031638
ttaaaaata

SEQ ID NO: 45943 - DNA, 9 bp, Unknown
  misc_feature (1)..( 9): Matrix.001 file - promoters60/1031638
ttaaaaata

SEQ ID NO: 45944 - DNA, 7 bp, Unknown
  misc_feature (1)..( 7): Matrix.001 file - promoters60/1031665
ttagtca

SEQ ID NO: 45945 - DNA, 7 bp, Unknown
  misc_feature (1)..( 7): Matrix.001 file - promoters60/1031665
atagatt

SEQ ID NO: 45946 - DNA, 9 bp, Unknown
  misc_feature (1)..( 9): Matrix.001 file - promoters60/1031665
gtataaatt

SEQ ID NO: 45947 - DNA, 7 bp, Unknown
  misc_feature (1)..( 7): Matrix.001 file - promoters60/1031665
ttttgtt

SEQ ID NO: 45948 - DNA, 6 bp, Unknown
  misc_feature (1)..( 6): Matrix.001 file - promoters60/1031665
ttgttt

SEQ ID NO: 45949 - DNA, 9 bp, Unknown
  misc_feature (1)..( 9): Matrix.001 file - promoters60/1031665
aaatcaaat

SEQ ID NO: 45950 - DNA, 12 bp, Unknown
  misc_feature (1)..( 12): Matrix.001 file - promoters60/1031665
aaaaaaataaaa

SEQ ID NO: 45951 - DNA, 7 bp, Unknown
  misc_feature (1)..( 7): Matrix.001 file - promoters60/1031665
tttattt

SEQ ID NO: 45952 - DNA, 8 bp, Unknown
  misc_feature (1)..( 8): Matrix.001 file - promoters60/1031665
gtccaaac

SEQ ID NO: 45953 - DNA, 8 bp, Unknown
  misc_feature (1)..( 8): Matrix.001 file - promoters60/1031665
ttgaactc

SEQ ID NO: 45954 - DNA, 7 bp, Unknown
  misc_feature (1)..( 7): Matrix.001 file - promoters60/1031665
ttttaat

SEQ ID NO: 45955 - DNA, 7 bp, Unknown
  misc_feature (1)..( 7): Matrix.001 file - promoters60/1031665
aaaccaa

SEQ ID NO: 45956 - DNA, 6 bp, Unknown
  misc_feature (1)..( 6): Matrix.001 file - promoters60/1031665
aaccaa

SEQ ID NO: 45957 - DNA, 6 bp, Unknown
  misc_feature (1)..( 6): Matrix.001 file - promoters60/1031665
aagaaa

SEQ ID NO: 45958 - DNA, 7 bp, Unknown
  misc_feature (1)..( 7): Matrix.001 file - promoters60/1031665
aataatt

SEQ ID NO: 45959 - DNA, 9 bp, Unknown
  misc_feature (1)..( 9): Matrix.001 file - promoters60/1031665
caaaaagag

SEQ ID NO: 45960 - DNA, 6 bp, Unknown
  misc_feature (1)..( 6): Matrix.001 file - promoters60/1031665
aaattg

SEQ ID NO: 45961 - DNA, 9 bp, Unknown
  misc_feature (1)..( 9): Matrix.001 file - promoters60/1031665
tgaaacaaa

SEQ ID NO: 45962 - DNA, 7 bp, Unknown
  misc_feature (1)..( 7): Matrix.001 file - promoters60/1031665
tattgtg

SEQ ID NO: 45963 - DNA, 10 bp, Unknown
  misc_feature (1)..( 10): Matrix.001 file - promoters60/1031706
tcaaccaaat

SEQ ID NO: 45964 - DNA, 8 bp, Unknown
  misc_feature (1)..( 8): Matrix.001 file - promoters60/1031706
aaaacaaa

SEQ ID NO: 45965 - DNA, 9 bp, Unknown
  misc_feature (1)..( 9): Matrix.001 file - promoters60/1031706
taacaaaca

SEQ ID NO: 45966 - DNA, 9 bp, Unknown
  misc_feature (1)..( 9): Matrix.001 file - promoters60/1031706
gataaaaat

SEQ ID NO: 45967 - DNA, 13 bp, Unknown
  misc_feature (1)..( 13): Matrix.001 file - promoters60/1031706
tcctttatatata

SEQ ID NO: 45968 - DNA, 11 bp, Unknown
  misc_feature (1)..( 11): Matrix.001 file - promoters60/1031706
aaataatttta

SEQ ID NO: 45969 - DNA, 6 bp, Unknown
  misc_feature (1)..( 6): Matrix.001 file - promoters60/1031706
aaaaac

SEQ ID NO: 45970 - DNA, 11 bp, Unknown
  misc_feature (1)..( 11): Matrix.001 file - promoters60/1031706
aaattccataa

SEQ ID NO: 45971 - DNA, 7 bp, Unknown
  misc_feature (1)..( 7): Matrix.001 file - promoters60/1032026
attaaaa

SEQ ID NO: 45972 - DNA, 6 bp, Unknown
  misc_feature (1)..( 6): Matrix.001 file - promoters60/1032026
tattta

SEQ ID NO: 45973 - DNA, 7 bp, Unknown
  misc_feature (1)..( 7): Matrix.001 file - promoters60/1032026
gatattc

SEQ ID NO: 45974 - DNA, 6 bp, Unknown
  misc_feature (1)..( 6): Matrix.001 file - promoters60/1032026
aaaaca

SEQ ID NO: 45975 - DNA, 10 bp, Unknown
  misc_feature (1)..( 10): Matrix.001 file - promoters60/1032026
agaaaaaaaa

SEQ ID NO: 45976 - DNA, 6 bp, Unknown
  misc_feature (1)..( 6): Matrix.001 file - promoters60/1032026
ataata

SEQ ID NO: 45977 - DNA, 7 bp, Unknown
  misc_feature (1)..( 7): Matrix.001 file - promoters60/1032026
aaacaca

SEQ ID NO: 45978 - DNA, 7 bp, Unknown
  misc_feature (1)..( 7): Matrix.001 file - promoters60/1032026
actatag

SEQ ID NO: 45979 - DNA, 6 bp, Unknown
  misc_feature (1)..( 6): Matrix.001 file - promoters60/1032026
actata

SEQ ID NO: 45980 - DNA, 7 bp, Unknown
  misc_feature (1)..( 7): Matrix.001 file - promoters60/1032026
acagtta

SEQ ID NO: 45981 - DNA, 6 bp, Unknown
  misc_feature (1)..( 6): Matrix.001 file - promoters60/1032026
ttaatc

SEQ ID NO: 45982 - DNA, 8 bp, Unknown
  misc_feature (1)..( 8): Matrix.001 file - promoters60/1032026
tacaaaaa

SEQ ID NO: 45983 - DNA, 6 bp, Unknown
  misc_feature (1)..( 6): Matrix.001 file - promoters60/1032026
aattat

SEQ ID NO: 45984 - DNA, 7 bp, Unknown
  misc_feature (1)..( 7): Matrix.001 file - promoters60/1032026
taaacac

SEQ ID NO: 45985 - DNA, 6 bp, Unknown
  misc_feature (1)..( 6): Matrix.001 file - promoters60/1032026
caaaac

SEQ ID NO: 45986 - DNA, 8 bp, Unknown
  misc_feature (1)..( 8): Matrix.001 file - promoters60/1032026
tacaattt

SEQ ID NO: 45987 - DNA, 9 bp, Unknown
  misc_feature (1)..( 9): Matrix.001 file - promoters60/1032026
cagcttttt

SEQ ID NO: 45988 - DNA, 6 bp, Unknown
  misc_feature (1)..( 6): Matrix.001 file - promoters60/1032026
acaact

SEQ ID NO: 45989 - DNA, 7 bp, Unknown
  misc_feature (1)..( 7): Matrix.001 file - promoters60/1032026
tttctaa

SEQ ID NO: 45990 - DNA, 6 bp, Unknown
  misc_feature (1)..( 6): Matrix.001 file - promoters60/1032026
ctccaa

SEQ ID NO: 45991 - DNA, 7 bp, Unknown
  misc_feature (1)..( 7): Matrix.001 file - promoters60/1032026
tacaatt

SEQ ID NO: 45992 - DNA, 7 bp, Unknown
  misc_feature (1)..( 7): Matrix.001 file - promoters60/1032026
acataaa

SEQ ID NO: 45993 - DNA, 7 bp, Unknown
  misc_feature (1)..( 7): Matrix.001 file - promoters60/1032026
aaacttt

SEQ ID NO: 45994 - DNA, 6 bp, Unknown
  misc_feature (1)..( 6): Matrix.001 file - promoters60/1032026
taaata

SEQ ID NO: 45995 - DNA, 7 bp, Unknown
  misc_feature (1)..( 7): Matrix.001 file - promoters60/1032047
caatatt

SEQ ID NO: 45996 - DNA, 7 bp, Unknown
  misc_feature (1)..( 7): Matrix.001 file - promoters60/1032047
tttttac

SEQ ID NO: 45997 - DNA, 12 bp, Unknown
  misc_feature (1)..( 12): Matrix.001 file - promoters60/1032047
aaaggaaaaaat

SEQ ID NO: 45998 - DNA, 13 bp, Unknown
  misc_feature (1)..( 13): Matrix.001 file - promoters60/1032047
ctcctataaattg

SEQ ID NO: 45999 - DNA, 15 bp, Unknown
  misc_feature (1)..( 15): Matrix.001 file - promoters60/1032047
acataaaagaaatat

SEQ ID NO: 46000 - DNA, 9 bp, Unknown
  misc_feature (1)..( 9): Matrix.001 file - promoters60/1032047
ataggaata

SEQ ID NO: 46001 - DNA, 13 bp, Unknown
  misc_feature (1)..( 13): Matrix.001 file - promoters60/1032047
ccataaaggaaaa

SEQ ID NO: 46002 - DNA, 8 bp, Unknown
  misc_feature (1)..( 8): Matrix.001 file - promoters60/1032149
ttagtgca

SEQ ID NO: 46003 - DNA, 6 bp, Unknown
  misc_feature (1)..( 6): Matrix.001 file - promoters60/1032149
aaatta

SEQ ID NO: 46004 - DNA, 9 bp, Unknown
  misc_feature (1)..( 9): Matrix.001 file - promoters60/1032149
ataaaaata

SEQ ID NO: 46005 - DNA, 9 bp, Unknown
  misc_feature (1)..( 9): Matrix.001 file - promoters60/1032149
tttgcataa

SEQ ID NO: 46006 - DNA, 12 bp, Unknown
  misc_feature (1)..( 12): Matrix.001 file - promoters60/1032149
agtgattaatca

SEQ ID NO: 46007 - DNA, 11 bp, Unknown
  misc_feature (1)..( 11): Matrix.001 file - promoters60/1032149
agttattaatc

SEQ ID NO: 46008 - DNA, 6 bp, Unknown
  misc_feature (1)..( 6): Matrix.001 file - promoters60/1032149
ttttac

SEQ ID NO: 46009 - DNA, 11 bp, Unknown
  misc_feature (1)..( 11): Matrix.001 file - promoters60/1032149
tttcttacaca

SEQ ID NO: 46010 - DNA, 6 bp, Unknown
  misc_feature (1)..( 6): Matrix.001 file - promoters60/1032149
ctaaca

SEQ ID NO: 46011 - DNA, 7 bp, Unknown
  misc_feature (1)..( 7): Matrix.001 file - promoters60/1032149
caactaa

SEQ ID NO: 46012 - DNA, 7 bp, Unknown
  misc_feature (1)..( 7): Matrix.001 file - promoters60/1032149
tacaatt

SEQ ID NO: 46013 - DNA, 6 bp, Unknown
  misc_feature (1)..( 6): Matrix.001 file - promoters60/1032149
taaaaa

SEQ ID NO: 46014 - DNA, 6 bp, Unknown
  misc_feature (1)..( 6): Matrix.001 file - promoters60/1032149
atttat

SEQ ID NO: 46015 - DNA, 6 bp, Unknown
  misc_feature (1)..( 6): Matrix.001 file - promoters60/1032149
ttcttt

SEQ ID NO: 46016 - DNA, 9 bp, Unknown
  misc_feature (1)..( 9): Matrix.001 file - promoters60/1032149
aataaatta

SEQ ID NO: 46017 - DNA, 8 bp, Unknown
  misc_feature (1)..( 8): Matrix.001 file - promoters60/1032149
gatcggta

SEQ ID NO: 46018 - DNA, 6 bp, Unknown
  misc_feature (1)..( 6): Matrix.001 file - promoters60/1032149
atagtt

SEQ ID NO: 46019 - DNA, 10 bp, Unknown
  misc_feature (1)..( 10): Matrix.001 file - promoters60/1032149
atttttaatc

SEQ ID NO: 46020 - DNA, 8 bp, Unknown
  misc_feature (1)..( 8): Matrix.001 file - promoters60/1032149
catactgt

SEQ ID NO: 46021 - DNA, 9 bp, Unknown
  misc_feature (1)..( 9): Matrix.001 file - promoters60/1032149
tttattaaa

SEQ ID NO: 46022 - DNA, 6 bp, Unknown
  misc_feature (1)..( 6): Matrix.001 file - promoters60/1032149
acaaaa

SEQ ID NO: 46023 - DNA, 7 bp, Unknown
  misc_feature (1)..( 7): Matrix.001 file - promoters60/1032149
aaaagtt

SEQ ID NO: 46024 - DNA, 7 bp, Unknown
  misc_feature (1)..( 7): Matrix.001 file - promoters60/1032149
tttctta

SEQ ID NO: 46025 - DNA, 9 bp, Unknown
  misc_feature (1)..( 9): Matrix.001 file - promoters60/1032160
caaagagac

SEQ ID NO: 46026 - DNA, 12 bp, Unknown
  misc_feature (1)..( 12): Matrix.001 file - promoters60/1032160
aattttacgatt

SEQ ID NO: 46027 - DNA, 8 bp, Unknown
  misc_feature (1)..( 8): Matrix.001 file - promoters60/1032258
tgttgcta

SEQ ID NO: 46028 - DNA, 7 bp, Unknown
  misc_feature (1)..( 7): Matrix.001 file - promoters60/1032258
gcagttt

SEQ ID NO: 46029 - DNA, 6 bp, Unknown
  misc_feature (1)..( 6): Matrix.001 file - promoters60/1032258
atattg

SEQ ID NO: 46030 - DNA, 7 bp, Unknown
  misc_feature (1)..( 7): Matrix.001 file - promoters60/1032258
ccacata

SEQ ID NO: 46031 - DNA, 6 bp, Unknown
  misc_feature (1)..( 6): Matrix.001 file - promoters60/1032258
attgaa

SEQ ID NO: 46032 - DNA, 7 bp, Unknown
  misc_feature (1)..( 7): Matrix.001 file - promoters60/1032258
attataa

SEQ ID NO: 46033 - DNA, 6 bp, Unknown
  misc_feature (1)..( 6): Matrix.001 file - promoters60/1032258
aaaaac

SEQ ID NO: 46034 - DNA, 6 bp, Unknown
  misc_feature (1)..( 6): Matrix.001 file - promoters60/1032258
gaaaat

SEQ ID NO: 46035 - DNA, 6 bp, Unknown
  misc_feature (1)..( 6): Matrix.001 file - promoters60/1032258
atgatg

SEQ ID NO: 46036 - DNA, 6 bp, Unknown
  misc_feature (1)..( 6): Matrix.001 file - promoters60/1032258
tattgt

SEQ ID NO: 46037 - DNA, 7 bp, Unknown
  misc_feature (1)..( 7): Matrix.001 file - promoters60/1032258
atattta

SEQ ID NO: 46038 - DNA, 6 bp, Unknown
  misc_feature (1)..( 6): Matrix.001 file - promoters60/1032258
agtatt

SEQ ID NO: 46039 - DNA, 6 bp, Unknown
  misc_feature (1)..( 6): Matrix.001 file - promoters60/1032258
aataca

SEQ ID NO: 46040 - DNA, 7 bp, Unknown
  misc_feature (1)..( 7): Matrix.001 file - promoters60/1032258
attctct

SEQ ID NO: 46041 - DNA, 7 bp, Unknown
  misc_feature (1)..( 7): Matrix.001 file - promoters60/1032258
tttataa

SEQ ID NO: 46042 - DNA, 6 bp, Unknown
  misc_feature (1)..( 6): Matrix.001 file - promoters60/1032258
tgtaaa

SEQ ID NO: 46043 - DNA, 7 bp, Unknown
  misc_feature (1)..( 7): Matrix.001 file - promoters60/1032266
agtcttt

SEQ ID NO: 46044 - DNA, 6 bp, Unknown
  misc_feature (1)..( 6): Matrix.001 file - promoters60/1032266
attcta

SEQ ID NO: 46045 - DNA, 6 bp, Unknown
  misc_feature (1)..( 6): Matrix.001 file - promoters60/1032266
gaacat

SEQ ID NO: 46046 - DNA, 6 bp, Unknown
  misc_feature (1)..( 6): Matrix.001 file - promoters60/1032266
tctaca

SEQ ID NO: 46047 - DNA, 6 bp, Unknown
  misc_feature (1)..( 6): Matrix.001 file - promoters60/1032266
cgtaga

SEQ ID NO: 46048 - DNA, 11 bp, Unknown
  misc_feature (1)..( 11): Matrix.001 file - promoters60/1032266
atttattagtg

SEQ ID NO: 46049 - DNA, 6 bp, Unknown
  misc_feature (1)..( 6): Matrix.001 file - promoters60/1032266
aaatat

SEQ ID NO: 46050 - DNA, 8 bp, Unknown
  misc_feature (1)..( 8): Matrix.001 file - promoters60/1032266
atatcttc

SEQ ID NO: 46051 - DNA, 8 bp, Unknown
  misc_feature (1)..( 8): Matrix.001 file - promoters60/1032266
aaaatttg

SEQ ID NO: 46052 - DNA, 7 bp, Unknown
  misc_feature (1)..( 7): Matrix.001 file - promoters60/1032266
atgaact

SEQ ID NO: 46053 - DNA, 6 bp, Unknown
  misc_feature (1)..( 6): Matrix.001 file - promoters60/1032266
aaaaag

SEQ ID NO: 46054 - DNA, 7 bp, Unknown
  misc_feature (1)..( 7): Matrix.001 file - promoters60/1032266
agattta

SEQ ID NO: 46055 - DNA, 6 bp, Unknown
  misc_feature (1)..( 6): Matrix.001 file - promoters60/1032266
attatt

SEQ ID NO: 46056 - DNA, 10 bp, Unknown
  misc_feature (1)..( 10): Matrix.001 file - promoters60/1032266
tttgcaacgt

SEQ ID NO: 46057 - DNA, 6 bp, Unknown
  misc_feature (1)..( 6): Matrix.001 file - promoters60/1032266
tgatat

SEQ ID NO: 46058 - DNA, 6 bp, Unknown
  misc_feature (1)..( 6): Matrix.001 file - promoters60/1032266
ttaaaa

SEQ ID NO: 46059 - DNA, 8 bp, Unknown
  misc_feature (1)..( 8): Matrix.001 file - promoters60/1032266
ttcattaa

SEQ ID NO: 46060 - DNA, 11 bp, Unknown
  misc_feature (1)..( 11): Matrix.001 file - promoters60/1032316
actaaaaacac

SEQ ID NO: 46061 - DNA, 9 bp, Unknown
  misc_feature (1)..( 9): Matrix.001 file - promoters60/1032400
gaagaggaa

SEQ ID NO: 46062 - DNA, 8 bp, Unknown
  misc_feature (1)..( 8): Matrix.001 file - promoters60/1032400
aatgagct

SEQ ID NO: 46063 - DNA, 9 bp, Unknown
  misc_feature (1)..( 9): Matrix.001 file - promoters60/1032400
tgctaaatt

SEQ ID NO: 46064 - DNA, 7 bp, Unknown
  misc_feature (1)..( 7): Matrix.001 file - promoters60/1032400
taatgaa

SEQ ID NO: 46065 - DNA, 8 bp, Unknown
  misc_feature (1)..( 8): Matrix.001 file - promoters60/1032400
tggctgtt

SEQ ID NO: 46066 - DNA, 8 bp, Unknown
  misc_feature (1)..( 8): Matrix.001 file - promoters60/1032400
aattgatt

SEQ ID NO: 46067 - DNA, 7 bp, Unknown
  misc_feature (1)..( 7): Matrix.001 file - promoters60/1032400
gttaaat

SEQ ID NO: 46068 - DNA, 9 bp, Unknown
  misc_feature (1)..( 9): Matrix.001 file - promoters60/1032400
cccgagaaa

SEQ ID NO: 46069 - DNA, 7 bp, Unknown
  misc_feature (1)..( 7): Matrix.001 file - promoters60/1032400
acacaag

SEQ ID NO: 46070 - DNA, 7 bp, Unknown
  misc_feature (1)..( 7): Matrix.001 file - promoters60/1032400
agaaaaa

SEQ ID NO: 46071 - DNA, 7 bp, Unknown
  misc_feature (1)..( 7): Matrix.001 file - promoters60/1032400
ttcaatg

SEQ ID NO: 46072 - DNA, 8 bp, Unknown
  misc_feature (1)..( 8): Matrix.001 file - promoters60/1032400
tcttaatt

SEQ ID NO: 46073 - DNA, 6 bp, Unknown
  misc_feature (1)..( 6): Matrix.001 file - promoters60/1032436
ttggtt

SEQ ID NO: 46074 - DNA, 8 bp, Unknown
  misc_feature (1)..( 8): Matrix.001 file - promoters60/1032436
tactcaaa

SEQ ID NO: 46075 - DNA, 6 bp, Unknown
  misc_feature (1)..( 6): Matrix.001 file - promoters60/1032436
ttctgt

SEQ ID NO: 46076 - DNA, 7 bp, Unknown
  misc_feature (1)..( 7): Matrix.001 file - promoters60/1032436
gaaaata

SEQ ID NO: 46077 - DNA, 7 bp, Unknown
  misc_feature (1)..( 7): Matrix.001 file - promoters60/1032436
ggttttg

SEQ ID NO: 46078 - DNA, 6 bp, Unknown
  misc_feature (1)..( 6): Matrix.001 file - promoters60/1032436
gaaaaa

SEQ ID NO: 46079 - DNA, 6 bp, Unknown
  misc_feature (1)..( 6): Matrix.001 file - promoters60/1032436
aataat

SEQ ID NO: 46080 - DNA, 8 bp, Unknown
  misc_feature (1)..( 8): Matrix.001 file - promoters60/1032436
gccactac

SEQ ID NO: 46081 - DNA, 7 bp, Unknown
  misc_feature (1)..( 7): Matrix.001 file - promoters60/1032436
actgttc

SEQ ID NO: 46082 - DNA, 7 bp, Unknown
  misc_feature (1)..( 7): Matrix.001 file - promoters60/1032436
aaagtaa

SEQ ID NO: 46083 - DNA, 9 bp, Unknown
  misc_feature (1)..( 9): Matrix.001 file - promoters60/1032436
ttaaaaaaa

SEQ ID NO: 46084 - DNA, 8 bp, Unknown
  misc_feature (1)..( 8): Matrix.001 file - promoters60/1032436
ctcaatta

SEQ ID NO: 46085 - DNA, 7 bp, Unknown
  misc_feature (1)..( 7): Matrix.001 file - promoters60/1032436
tatttgt

SEQ ID NO: 46086 - DNA, 9 bp, Unknown
  misc_feature (1)..( 9): Matrix.001 file - promoters60/1032436
taatctatt

SEQ ID NO: 46087 - DNA, 9 bp, Unknown
  misc_feature (1)..( 9): Matrix.001 file - promoters60/1032436
gattcgttt

SEQ ID NO: 46088 - DNA, 7 bp, Unknown
  misc_feature (1)..( 7): Matrix.001 file - promoters60/1032436
gttcctt

SEQ ID NO: 46089 - DNA, 13 bp, Unknown
  misc_feature (1)..( 13): Matrix.001 file - promoters60/1032436
aagaattaatgat

SEQ ID NO: 46090 - DNA, 11 bp, Unknown
  misc_feature (1)..( 11): Matrix.001 file - promoters60/1032668
taaaaaggatt

SEQ ID NO: 46091 - DNA, 9 bp, Unknown
  misc_feature (1)..( 9): Matrix.001 file - promoters60/1032668
aaaaatgaa

SEQ ID NO: 46092 - DNA, 6 bp, Unknown
  misc_feature (1)..( 6): Matrix.001 file - promoters60/1032698
caaatc

SEQ ID NO: 46093 - DNA, 7 bp, Unknown
  misc_feature (1)..( 7): Matrix.001 file - promoters60/1032698
ttcacta

SEQ ID NO: 46094 - DNA, 7 bp, Unknown
  misc_feature (1)..( 7): Matrix.001 file - promoters60/1032698
agacgga

SEQ ID NO: 46095 - DNA, 7 bp, Unknown
  misc_feature (1)..( 7): Matrix.001 file - promoters60/1032698
cataatt

SEQ ID NO: 46096 - DNA, 7 bp, Unknown
  misc_feature (1)..( 7): Matrix.001 file - promoters60/1032698
tttcagc

SEQ ID NO: 46097 - DNA, 6 bp, Unknown
  misc_feature (1)..( 6): Matrix.001 file - promoters60/1032698
actttt

SEQ ID NO: 46098 - DNA, 7 bp, Unknown
  misc_feature (1)..( 7): Matrix.001 file - promoters60/1032698
tataaaa

SEQ ID NO: 46099 - DNA, 6 bp, Unknown
  misc_feature (1)..( 6): Matrix.001 file - promoters60/1032698
gaatct

SEQ ID NO: 46100 - DNA, 7 bp, Unknown
  misc_feature (1)..( 7): Matrix.001 file - promoters60/1032698
tggaaat

SEQ ID NO: 46101 - DNA, 6 bp, Unknown
  misc_feature (1)..( 6): Matrix.001 file - promoters60/1032698
gagata

SEQ ID NO: 46102 - DNA, 9 bp, Unknown
  misc_feature (1)..( 9): Matrix.001 file - promoters60/1032698
caaacaaaa

SEQ ID NO: 46103 - DNA, 7 bp, Unknown
  misc_feature (1)..( 7): Matrix.001 file - promoters60/1032698
tatattt

SEQ ID NO: 46104 - DNA, 8 bp, Unknown
  misc_feature (1)..( 8): Matrix.001 file - promoters60/1032698
atcagaaa

SEQ ID NO: 46105 - DNA, 7 bp, Unknown
  misc_feature (1)..( 7): Matrix.001 file - promoters60/1032698
atgagaa

SEQ ID NO: 46106 - DNA, 7 bp, Unknown
  misc_feature (1)..( 7): Matrix.001 file - promoters60/1032698
aggctca

SEQ ID NO: 46107 - DNA, 6 bp, Unknown
  misc_feature (1)..( 6): Matrix.001 file - promoters60/1032698
gaagat

SEQ ID NO: 46108 - DNA, 7 bp, Unknown
  misc_feature (1)..( 7): Matrix.001 file - promoters60/1032698
ttgatcc

SEQ ID NO: 46109 - DNA, 6 bp, Unknown
  misc_feature (1)..( 6): Matrix.001 file - promoters60/1032698
acttgg

SEQ ID NO: 46110 - DNA, 8 bp, Unknown
  misc_feature (1)..( 8): Matrix.001 file - promoters60/1032698
aaagaaaa

SEQ ID NO: 46111 - DNA, 7 bp, Unknown
  misc_feature (1)..( 7): Matrix.001 file - promoters60/1032709
aatatgt

SEQ ID NO: 46112 - DNA, 8 bp, Unknown
  misc_feature (1)..( 8): Matrix.001 file - promoters60/1032709
tgatggat

SEQ ID NO: 46113 - DNA, 6 bp, Unknown
  misc_feature (1)..( 6): Matrix.001 file - promoters60/1032709
cagtct

SEQ ID NO: 46114 - DNA, 8 bp, Unknown
  misc_feature (1)..( 8): Matrix.001 file - promoters60/1032709
tcctagaa

SEQ ID NO: 46115 - DNA, 7 bp, Unknown
  misc_feature (1)..( 7): Matrix.001 file - promoters60/1032709
ctggtct

SEQ ID NO: 46116 - DNA, 7 bp, Unknown
  misc_feature (1)..( 7): Matrix.001 file - promoters60/1032709
ttgactc

SEQ ID NO: 46117 - DNA, 7 bp, Unknown
  misc_feature (1)..( 7): Matrix.001 file - promoters60/1032709
agacgag

SEQ ID NO: 46118 - DNA, 9 bp, Unknown
  misc_feature (1)..( 9): Matrix.001 file - promoters60/1032709
agaaaaaaa

SEQ ID NO: 46119 - DNA, 7 bp, Unknown
  misc_feature (1)..( 7): Matrix.001 file - promoters60/1032709
atattta

SEQ ID NO: 46120 - DNA, 7 bp, Unknown
  misc_feature (1)..( 7): Matrix.001 file - promoters60/1032709
aacacag

SEQ ID NO: 46121 - DNA, 9 bp, Unknown
  misc_feature (1)..( 9): Matrix.001 file - promoters60/1032709
ttgttatta

SEQ ID NO: 46122 - DNA, 6 bp, Unknown
  misc_feature (1)..( 6): Matrix.001 file - promoters60/1032709
aatatc

SEQ ID NO: 46123 - DNA, 7 bp, Unknown
  misc_feature (1)..( 7): Matrix.001 file - promoters60/1032709
ctaaacc

SEQ ID NO: 46124 - DNA, 7 bp, Unknown
  misc_feature (1)..( 7): Matrix.001 file - promoters60/1032709
cgtattg

SEQ ID NO: 46125 - DNA, 7 bp, Unknown
  misc_feature (1)..( 7): Matrix.001 file - promoters60/1032709
aaaccaa

SEQ ID NO: 46126 - DNA, 7 bp, Unknown
  misc_feature (1)..( 7): Matrix.001 file - promoters60/1032709
gaaaaaa

SEQ ID NO: 46127 - DNA, 9 bp, Unknown
  misc_feature (1)..( 9): Matrix.001 file - promoters60/1032713
tttgaaaca

SEQ ID NO: 46128 - DNA, 9 bp, Unknown
  misc_feature (1)..( 9): Matrix.001 file - promoters60/1032713
aaacgccaa

SEQ ID NO: 46129 - DNA, 7 bp, Unknown
  misc_feature (1)..( 7): Matrix.001 file - promoters60/1032713
caaaata

SEQ ID NO: 46130 - DNA, 10 bp, Unknown
  misc_feature (1)..( 10): Matrix.001 file - promoters60/1032713
attacttact

SEQ ID NO: 46131 - DNA, 9 bp, Unknown
  misc_feature (1)..( 9): Matrix.001 file - promoters60/1032713
aaaagccat

SEQ ID NO: 46132 - DNA, 7 bp, Unknown
  misc_feature (1)..( 7): Matrix.001 file - promoters60/1032730
ctaaata

SEQ ID NO: 46133 - DNA, 9 bp, Unknown
  misc_feature (1)..( 9): Matrix.001 file - promoters60/1032730
gtagtatat

SEQ ID NO: 46134 - DNA, 8 bp, Unknown
  misc_feature (1)..( 8): Matrix.001 file - promoters60/1032730
tgtcgttt

SEQ ID NO: 46135 - DNA, 6 bp, Unknown
  misc_feature (1)..( 6): Matrix.001 file - promoters60/1032730
cccaaa

SEQ ID NO: 46136 - DNA, 6 bp, Unknown
  misc_feature (1)..( 6): Matrix.001 file - promoters60/1032730
acaaat

SEQ ID NO: 46137 - DNA, 7 bp, Unknown
  misc_feature (1)..( 7): Matrix.001 file - promoters60/1032730
aaaatca

SEQ ID NO: 46138 - DNA, 8 bp, Unknown
  misc_feature (1)..( 8): Matrix.001 file - promoters60/1032730
ttttaaaa

SEQ ID NO: 46139 - DNA, 7 bp, Unknown
  misc_feature (1)..( 7): Matrix.001 file - promoters60/1032730
aaaaaga

SEQ ID NO: 46140 - DNA, 8 bp, Unknown
  misc_feature (1)..( 8): Matrix.001 file - promoters60/1032730
cgttaata

SEQ ID NO: 46141 - DNA, 6 bp, Unknown
  misc_feature (1)..( 6): Matrix.001 file - promoters60/1032730
agaatc

SEQ ID NO: 46142 - DNA, 6 bp, Unknown
  misc_feature (1)..( 6): Matrix.001 file - promoters60/1032730
actcaa

SEQ ID NO: 46143 - DNA, 8 bp, Unknown
  misc_feature (1)..( 8): Matrix.001 file - promoters60/1032730
aatcaaaa

SEQ ID NO: 46144 - DNA, 6 bp, Unknown
  misc_feature (1)..( 6): Matrix.001 file - promoters60/1032730
cagaaa

SEQ ID NO: 46145 - DNA, 7 bp, Unknown
  misc_feature (1)..( 7): Matrix.001 file - promoters60/1032730
attaaaa

SEQ ID NO: 46146 - DNA, 6 bp, Unknown
  misc_feature (1)..( 6): Matrix.001 file - promoters60/1032730
acgaaa

SEQ ID NO: 46147 - DNA, 6 bp, Unknown
  misc_feature (1)..( 6): Matrix.001 file - promoters60/1032730
gacttt

SEQ ID NO: 46148 - DNA, 8 bp, Unknown
  misc_feature (1)..( 8): Matrix.001 file - promoters60/1032752
aaaaaaat

SEQ ID NO: 46149 - DNA, 12 bp, Unknown
  misc_feature (1)..( 12): Matrix.001 file - promoters60/1032752
cttttctatttg

SEQ ID NO: 46150 - DNA, 9 bp, Unknown
  misc_feature (1)..( 9): Matrix.001 file - promoters60/1032752
aatttataa

SEQ ID NO: 46151 - DNA, 16 bp, Unknown
  misc_feature (1)..( 16): Matrix.001 file - promoters60/1032752
tacaaaaaaaagtaat

SEQ ID NO: 46152 - DNA, 11 bp, Unknown
  misc_feature (1)..( 11): Matrix.001 file - promoters60/1032752
attgtcttatt

SEQ ID NO: 46153 - DNA, 9 bp, Unknown
  misc_feature (1)..( 9): Matrix.001 file - promoters60/1032752
catgaataa

SEQ ID NO: 46154 - DNA, 9 bp, Unknown
  misc_feature (1)..( 9): Matrix.001 file - promoters60/1032752
aaagaaagt

SEQ ID NO: 46155 - DNA, 10 bp, Unknown
  misc_feature (1)..( 10): Matrix.001 file - promoters60/1032752
aaaaattaat

SEQ ID NO: 46156 - DNA, 10 bp, Unknown
  misc_feature (1)..( 10): Matrix.001 file - promoters60/1032752
aaatttaatt

SEQ ID NO: 46157 - DNA, 11 bp, Unknown
  misc_feature (1)..( 11): Matrix.001 file - promoters60/1032752
atttaaattta

SEQ ID NO: 46158 - DNA, 12 bp, Unknown
  misc_feature (1)..( 12): Matrix.001 file - promoters60/1032788
ataagtttaaaa

SEQ ID NO: 46159 - DNA, 7 bp, Unknown
  misc_feature (1)..( 7): Matrix.001 file - promoters60/1032788
aaaaata

SEQ ID NO: 46160 - DNA, 12 bp, Unknown
  misc_feature (1)..( 12): Matrix.001 file - promoters60/1032788
aaaaaattaaaa

SEQ ID NO: 46161 - DNA, 10 bp, Unknown
  misc_feature (1)..( 10): Matrix.001 file - promoters60/1032788
atattattaa

SEQ ID NO: 46162 - DNA, 8 bp, Unknown
  misc_feature (1)..( 8): Matrix.001 file - promoters60/1032788
ttttattt

SEQ ID NO: 46163 - DNA, 11 bp, Unknown
  misc_feature (1)..( 11): Matrix.001 file - promoters60/1032788
aaattaaaaac

SEQ ID NO: 46164 - DNA, 9 bp, Unknown
  misc_feature (1)..( 9): Matrix.001 file - promoters60/1032788
taaaaattc

SEQ ID NO: 46165 - DNA, 8 bp, Unknown
  misc_feature (1)..( 8): Matrix.001 file - promoters60/1032788
aaaacaaa

SEQ ID NO: 46166 - DNA, 9 bp, Unknown
  misc_feature (1)..( 9): Matrix.001 file - promoters60/1032788
tgaaaaaat

SEQ ID NO: 46167 - DNA, 9 bp, Unknown
  misc_feature (1)..( 9): Matrix.001 file - promoters60/1032788
atataataa

SEQ ID NO: 46168 - DNA, 10 bp, Unknown
  misc_feature (1)..( 10): Matrix.001 file - promoters60/1032815
gaagtttcta

SEQ ID NO: 46169 - DNA, 6 bp, Unknown
  misc_feature (1)..( 6): Matrix.001 file - promoters60/1032844
aatcgt

SEQ ID NO: 46170 - DNA, 9 bp, Unknown
  misc_feature (1)..( 9): Matrix.001 file - promoters60/1032844
taagattgg

SEQ ID NO: 46171 - DNA, 7 bp, Unknown
  misc_feature (1)..( 7): Matrix.001 file - promoters60/1032844
ataaaaa

SEQ ID NO: 46172 - DNA, 7 bp, Unknown
  misc_feature (1)..( 7): Matrix.001 file - promoters60/1032844
agaagct

SEQ ID NO: 46173 - DNA, 15 bp, Unknown
  misc_feature (1)..( 15): Matrix.001 file - promoters60/1032844
ttaatatatattact

SEQ ID NO: 46174 - DNA, 6 bp, Unknown
  misc_feature (1)..( 6): Matrix.001 file - promoters60/1032844
ttttaa

SEQ ID NO: 46175 - DNA, 7 bp, Unknown
  misc_feature (1)..( 7): Matrix.001 file - promoters60/1032844
actcaaa

SEQ ID NO: 46176 - DNA, 7 bp, Unknown
  misc_feature (1)..( 7): Matrix.001 file - promoters60/1032844
tttagtt

SEQ ID NO: 46177 - DNA, 9 bp, Unknown
  misc_feature (1)..( 9): Matrix.001 file - promoters60/1032844
agcccaata

SEQ ID NO: 46178 - DNA, 6 bp, Unknown
  misc_feature (1)..( 6): Matrix.001 file - promoters60/1032844
agccca

SEQ ID NO: 46179 - DNA, 8 bp, Unknown
  misc_feature (1)..( 8): Matrix.001 file - promoters60/1032844
tcatcatc

SEQ ID NO: 46180 - DNA, 8 bp, Unknown
  misc_feature (1)..( 8): Matrix.001 file - promoters60/1032844
aagtggta

SEQ ID NO: 46181 - DNA, 7 bp, Unknown
  misc_feature (1)..( 7): Matrix.001 file - promoters60/1032844
gctcatt

SEQ ID NO: 46182 - DNA, 12 bp, Unknown
  misc_feature (1)..( 12): Matrix.001 file - promoters60/1032897
agaattaaaatc

SEQ ID NO: 46183 - DNA, 11 bp, Unknown
  misc_feature (1)..( 11): Matrix.001 file - promoters60/1032897
tatataaagcc

SEQ ID NO: 46184 - DNA, 11 bp, Unknown
  misc_feature (1)..( 11): Matrix.001 file - promoters60/1032897
ctatataaaaa

SEQ ID NO: 46185 - DNA, 7 bp, Unknown
  misc_feature (1)..( 7): Matrix.001 file - promoters60/1032940
taaacgc

SEQ ID NO: 46186 - DNA, 7 bp, Unknown
  misc_feature (1)..( 7): Matrix.001 file - promoters60/1032940
agaccca

SEQ ID NO: 46187 - DNA, 7 bp, Unknown
  misc_feature (1)..( 7): Matrix.001 file - promoters60/1032940
aaagtaa

SEQ ID NO: 46188 - DNA, 6 bp, Unknown
  misc_feature (1)..( 6): Matrix.001 file - promoters60/1032940
aataaa

SEQ ID NO: 46189 - DNA, 7 bp, Unknown
  misc_feature (1)..( 7): Matrix.001 file - promoters60/1032940
tttaaaa

SEQ ID NO: 46190 - DNA, 8 bp, Unknown
  misc_feature (1)..( 8): Matrix.001 file - promoters60/1032940
ttcggaaa

SEQ ID NO: 46191 - DNA, 6 bp, Unknown
  misc_feature (1)..( 6): Matrix.001 file - promoters60/1032940
agttgt

SEQ ID NO: 46192 - DNA, 7 bp, Unknown
  misc_feature (1)..( 7): Matrix.001 file - promoters60/1032940
tttagga

SEQ ID NO: 46193 - DNA, 8 bp, Unknown
  misc_feature (1)..( 8): Matrix.001 file - promoters60/1032940
taaagttt

SEQ ID NO: 46194 - DNA, 8 bp, Unknown
  misc_feature (1)..( 8): Matrix.001 file - promoters60/1032940
atataata

SEQ ID NO: 46195 - DNA, 6 bp, Unknown
  misc_feature (1)..( 6): Matrix.001 file - promoters60/1032940
tttttt

SEQ ID NO: 46196 - DNA, 6 bp, Unknown
  misc_feature (1)..( 6): Matrix.001 file - promoters60/1032940
tatata

SEQ ID NO: 46197 - DNA, 6 bp, Unknown
  misc_feature (1)..( 6): Matrix.001 file - promoters60/1032940
ttagaa

SEQ ID NO: 46198 - DNA, 8 bp, Unknown
  misc_feature (1)..( 8): Matrix.001 file - promoters60/1032940
ttttgtat

SEQ ID NO: 46199 - DNA, 10 bp, Unknown
  misc_feature (1)..( 10): Matrix.001 file - promoters60/1032940
ttttaaatta

SEQ ID NO: 46200 - DNA, 9 bp, Unknown
  misc_feature (1)..( 9): Matrix.001 file - promoters60/1032940
aatctttga

SEQ ID NO: 46201 - DNA, 8 bp, Unknown
  misc_feature (1)..( 8): Matrix.001 file - promoters60/1032940
ttaaatta

SEQ ID NO: 46202 - DNA, 7 bp, Unknown
  misc_feature (1)..( 7): Matrix.001 file - promoters60/1032940
tttgtta

SEQ ID NO: 46203 - DNA, 9 bp, Unknown
  misc_feature (1)..( 9): Matrix.001 file - promoters60/1032940
aattaaaat

SEQ ID NO: 46204 - DNA, 6 bp, Unknown
  misc_feature (1)..( 6): Matrix.001 file - promoters60/1032940
tcaatt

SEQ ID NO: 46205 - DNA, 7 bp, Unknown
  misc_feature (1)..( 7): Matrix.001 file - promoters60/1032940
aaataca

SEQ ID NO: 46206 - DNA, 8 bp, Unknown
  misc_feature (1)..( 8): Matrix.001 file - promoters60/1032940
taaataca

SEQ ID NO: 46207 - DNA, 9 bp, Unknown
  misc_feature (1)..( 9): Matrix.001 file - promoters60/1032940
caatttaaa

SEQ ID NO: 46208 - DNA, 10 bp, Unknown
  misc_feature (1)..( 10): Matrix.001 file - promoters60/1032940
atataaaata

SEQ ID NO: 46209 - DNA, 11 bp, Unknown
  misc_feature (1)..( 11): Matrix.001 file - promoters60/1033164
ctttatttgat

SEQ ID NO: 46210 - DNA, 7 bp, Unknown
  misc_feature (1)..( 7): Matrix.001 file - promoters60/1033164
cgagaga

SEQ ID NO: 46211 - DNA, 10 bp, Unknown
  misc_feature (1)..( 10): Matrix.001 file - promoters60/1033184
acttaattca

SEQ ID NO: 46212 - DNA, 14 bp, Unknown
  misc_feature (1)..( 14): Matrix.001 file - promoters60/1033184
ttatataagtccta

SEQ ID NO: 46213 - DNA, 13 bp, Unknown
  misc_feature (1)..( 13): Matrix.001 file - promoters60/1033184
tgattatgttttt

SEQ ID NO: 46214 - DNA, 9 bp, Unknown
  misc_feature (1)..( 9): Matrix.001 file - promoters60/1033208
taacttttg

SEQ ID NO: 46215 - DNA, 7 bp, Unknown
  misc_feature (1)..( 7): Matrix.001 file - promoters60/1033208
ttaacaa

SEQ ID NO: 46216 - DNA, 11 bp, Unknown
  misc_feature (1)..( 11): Matrix.001 file - promoters60/1033208
ttggaaaatgt

SEQ ID NO: 46217 - DNA, 11 bp, Unknown
  misc_feature (1)..( 11): Matrix.001 file - promoters60/1033208
cactttttaaa

SEQ ID NO: 46218 - DNA, 10 bp, Unknown
  misc_feature (1)..( 10): Matrix.001 file - promoters60/1033208
aagtaaatga

SEQ ID NO: 46219 - DNA, 7 bp, Unknown
  misc_feature (1)..( 7): Matrix.001 file - promoters60/1033217
aagatga

SEQ ID NO: 46220 - DNA, 6 bp, Unknown
  misc_feature (1)..( 6): Matrix.001 file - promoters60/1033217
tgaaga

SEQ ID NO: 46221 - DNA, 7 bp, Unknown
  misc_feature (1)..( 7): Matrix.001 file - promoters60/1033217
tatcaac

SEQ ID NO: 46222 - DNA, 6 bp, Unknown
  misc_feature (1)..( 6): Matrix.001 file - promoters60/1033217
ggggaa

SEQ ID NO: 46223 - DNA, 6 bp, Unknown
  misc_feature (1)..( 6): Matrix.001 file - promoters60/1033217
ttgaag

SEQ ID NO: 46224 - DNA, 7 bp, Unknown
  misc_feature (1)..( 7): Matrix.001 file - promoters60/1033217
tatttta

SEQ ID NO: 46225 - DNA, 7 bp, Unknown
  misc_feature (1)..( 7): Matrix.001 file - promoters60/1033217
aaaaaaa

SEQ ID NO: 46226 - DNA, 6 bp, Unknown
  misc_feature (1)..( 6): Matrix.001 file - promoters60/1033217
taaaaa

SEQ ID NO: 46227 - DNA, 6 bp, Unknown
  misc_feature (1)..( 6): Matrix.001 file - promoters60/1033217
aaaaca

SEQ ID NO: 46228 - DNA, 6 bp, Unknown
  misc_feature (1)..( 6): Matrix.001 file - promoters60/1033217
acaaac

SEQ ID NO: 46229 - DNA, 7 bp, Unknown
  misc_feature (1)..( 7): Matrix.001 file - promoters60/1033217
atgatga

SEQ ID NO: 46230 - DNA, 8 bp, Unknown
  misc_feature (1)..( 8): Matrix.001 file - promoters60/1033217
attgtttt

SEQ ID NO: 46231 - DNA, 8 bp, Unknown
  misc_feature (1)..( 8): Matrix.001 file - promoters60/1033217
tgagtatt

SEQ ID NO: 46232 - DNA, 8 bp, Unknown
  misc_feature (1)..( 8): Matrix.001 file - promoters60/1033217
aagaggat

SEQ ID NO: 46233 - DNA, 10 bp, Unknown
  misc_feature (1)..( 10): Matrix.001 file - promoters60/1033217
tttatttata

SEQ ID NO: 46234 - DNA, 7 bp, Unknown
  misc_feature (1)..( 7): Matrix.001 file - promoters60/1033217
tctaaaa

SEQ ID NO: 46235 - DNA, 9 bp, Unknown
  misc_feature (1)..( 9): Matrix.001 file - promoters60/1033262
agtacaaat

SEQ ID NO: 46236 - DNA, 13 bp, Unknown
  misc_feature (1)..( 13): Matrix.001 file - promoters60/1033262
taagaacaaaaat

SEQ ID NO: 46237 - DNA, 14 bp, Unknown
  misc_feature (1)..( 14): Matrix.001 file - promoters60/1033262
cccatataaaaatc

SEQ ID NO: 46238 - DNA, 13 bp, Unknown
  misc_feature (1)..( 13): Matrix.001 file - promoters60/1033360
tgtttaaagaatt

SEQ ID NO: 46239 - DNA, 11 bp, Unknown
  misc_feature (1)..( 11): Matrix.001 file - promoters60/1033360
taaatttttca

SEQ ID NO: 46240 - DNA, 14 bp, Unknown
  misc_feature (1)..( 14): Matrix.001 file - promoters60/1033360
tgagatataattga

SEQ ID NO: 46241 - DNA, 8 bp, Unknown
  misc_feature (1)..( 8): Matrix.001 file - promoters60/1033360
attgattt

SEQ ID NO: 46242 - DNA, 11 bp, Unknown
  misc_feature (1)..( 11): Matrix.001 file - promoters60/1033360
gtttattattt

SEQ ID NO: 46243 - DNA, 13 bp, Unknown
  misc_feature (1)..( 13): Matrix.001 file - promoters60/1033360
tatgaataaacat

SEQ ID NO: 46244 - DNA, 11 bp, Unknown
  misc_feature (1)..( 11): Matrix.001 file - promoters60/1033430
cttttggtttt

SEQ ID NO: 46245 - DNA, 7 bp, Unknown
  misc_feature (1)..( 7): Matrix.001 file - promoters60/1033430
ttaattt

SEQ ID NO: 46246 - DNA, 9 bp, Unknown
  misc_feature (1)..( 9): Matrix.001 file - promoters60/1033430
tttggtttt

SEQ ID NO: 46247 - DNA, 7 bp, Unknown
  misc_feature (1)..( 7): Matrix.001 file - promoters60/1033430
gttataa

SEQ ID NO: 46248 - DNA, 7 bp, Unknown
  misc_feature (1)..( 7): Matrix.001 file - promoters60/1033430
taatttt

SEQ ID NO: 46249 - DNA, 13 bp, Unknown
  misc_feature (1)..( 13): Matrix.001 file - promoters60/1033430
ttgattcaatatt

SEQ ID NO: 46250 - DNA, 8 bp, Unknown
  misc_feature (1)..( 8): Matrix.001 file - promoters60/1033430
atttctct

SEQ ID NO: 46251 - DNA, 13 bp, Unknown
  misc_feature (1)..( 13): Matrix.001 file - promoters60/1033430
ttgaatcaaaatt

SEQ ID NO: 46252 - DNA, 6 bp, Unknown
  misc_feature (1)..( 6): Matrix.001 file - promoters60/1033430
tggatt

SEQ ID NO: 46253 - DNA, 13 bp, Unknown
  misc_feature (1)..( 13): Matrix.001 file - promoters60/1033430
ttgaatcaaaatt

SEQ ID NO: 46254 - DNA, 6 bp, Unknown
  misc_feature (1)..( 6): Matrix.001 file - promoters60/1033526
ttgaag

SEQ ID NO: 46255 - DNA, 6 bp, Unknown
  misc_feature (1)..( 6): Matrix.001 file - promoters60/1033526
acgagc

SEQ ID NO: 46256 - DNA, 8 bp, Unknown
  misc_feature (1)..( 8): Matrix.001 file - promoters60/1033526
cttacttt

SEQ ID NO: 46257 - DNA, 7 bp, Unknown
  misc_feature (1)..( 7): Matrix.001 file - promoters60/1033526
cttttgt

SEQ ID NO: 46258 - DNA, 10 bp, Unknown
  misc_feature (1)..( 10): Matrix.001 file - promoters60/1033526
ttgtttctct

SEQ ID NO: 46259 - DNA, 7 bp, Unknown
  misc_feature (1)..( 7): Matrix.001 file - promoters60/1033526
actgact

SEQ ID NO: 46260 - DNA, 7 bp, Unknown
  misc_feature (1)..( 7): Matrix.001 file - promoters60/1033526
agattat

SEQ ID NO: 46261 - DNA, 7 bp, Unknown
  misc_feature (1)..( 7): Matrix.001 file - promoters60/1033526
tatgatt

SEQ ID NO: 46262 - DNA, 7 bp, Unknown
  misc_feature (1)..( 7): Matrix.001 file - promoters60/1033526
gcaatta

SEQ ID NO: 46263 - DNA, 9 bp, Unknown
  misc_feature (1)..( 9): Matrix.001 file - promoters60/1033526
aagaaaatt

SEQ ID NO: 46264 - DNA, 7 bp, Unknown
  misc_feature (1)..( 7): Matrix.001 file - promoters60/1033526
gacattg

SEQ ID NO: 46265 - DNA, 6 bp, Unknown
  misc_feature (1)..( 6): Matrix.001 file - promoters60/1033526
cttgat

SEQ ID NO: 46266 - DNA, 7 bp, Unknown
  misc_feature (1)..( 7): Matrix.001 file - promoters60/1033526
gaggtaa

SEQ ID NO: 46267 - DNA, 8 bp, Unknown
  misc_feature (1)..( 8): Matrix.001 file - promoters60/1033526
tctgcatt

SEQ ID NO: 46268 - DNA, 8 bp, Unknown
  misc_feature (1)..( 8): Matrix.001 file - promoters60/1033526
tttatatc

SEQ ID NO: 46269 - DNA, 6 bp, Unknown
  misc_feature (1)..( 6): Matrix.001 file - promoters60/1033526
atcttc

SEQ ID NO: 46270 - DNA, 7 bp, Unknown
  misc_feature (1)..( 7): Matrix.001 file - promoters60/1033526
tgagatt

SEQ ID NO: 46271 - DNA, 8 bp, Unknown
  misc_feature (1)..( 8): Matrix.001 file - promoters60/1033526
tatattta

SEQ ID NO: 46272 - DNA, 6 bp, Unknown
  misc_feature (1)..( 6): Matrix.001 file - promoters60/1033679
gttgta

SEQ ID NO: 46273 - DNA, 6 bp, Unknown
  misc_feature (1)..( 6): Matrix.001 file - promoters60/1033679
aaacaa

SEQ ID NO: 46274 - DNA, 6 bp, Unknown
  misc_feature (1)..( 6): Matrix.001 file - promoters60/1033679
acaatc

SEQ ID NO: 46275 - DNA, 7 bp, Unknown
  misc_feature (1)..( 7): Matrix.001 file - promoters60/1033679
ctagttc

SEQ ID NO: 46276 - DNA, 6 bp, Unknown
  misc_feature (1)..( 6): Matrix.001 file - promoters60/1033679
gcgttt

SEQ ID NO: 46277 - DNA, 8 bp, Unknown
  misc_feature (1)..( 8): Matrix.001 file - promoters60/1033679
gtaaaaat

SEQ ID NO: 46278 - DNA, 7 bp, Unknown
  misc_feature (1)..( 7): Matrix.001 file - promoters60/1033679
acattgt

SEQ ID NO: 46279 - DNA, 6 bp, Unknown
  misc_feature (1)..( 6): Matrix.001 file - promoters60/1033679
caaaaa

SEQ ID NO: 46280 - DNA, 8 bp, Unknown
  misc_feature (1)..( 8): Matrix.001 file - promoters60/1033679
ttgttcta

SEQ ID NO: 46281 - DNA, 6 bp, Unknown
  misc_feature (1)..( 6): Matrix.001 file - promoters60/1033679
aaaaac

SEQ ID NO: 46282 - DNA, 6 bp, Unknown
  misc_feature (1)..( 6): Matrix.001 file - promoters60/1033679
ttaaaa

SEQ ID NO: 46283 - DNA, 7 bp, Unknown
  misc_feature (1)..( 7): Matrix.001 file - promoters60/1033679
agtattc

SEQ ID NO: 46284 - DNA, 6 bp, Unknown
  misc_feature (1)..( 6): Matrix.001 file - promoters60/1033679
aatgga

SEQ ID NO: 46285 - DNA, 6 bp, Unknown
  misc_feature (1)..( 6): Matrix.001 file - promoters60/1033679
ttcata

SEQ ID NO: 46286 - DNA, 6 bp, Unknown
  misc_feature (1)..( 6): Matrix.001 file - promoters60/1033679
cccaat

SEQ ID NO: 46287 - DNA, 6 bp, Unknown
  misc_feature (1)..( 6): Matrix.001 file - promoters60/1033679
ttacgt

SEQ ID NO: 46288 - DNA, 6 bp, Unknown
  misc_feature (1)..( 6): Matrix.001 file - promoters60/1033716
ttaaaa

SEQ ID NO: 46289 - DNA, 6 bp, Unknown
  misc_feature (1)..( 6): Matrix.001 file - promoters60/1033716
aaaaga

SEQ ID NO: 46290 - DNA, 6 bp, Unknown
  misc_feature (1)..( 6): Matrix.001 file - promoters60/1033716
aaaacg

SEQ ID NO: 46291 - DNA, 8 bp, Unknown
  misc_feature (1)..( 8): Matrix.001 file - promoters60/1033716
gtagtaac

SEQ ID NO: 46292 - DNA, 6 bp, Unknown
  misc_feature (1)..( 6): Matrix.001 file - promoters60/1033716
agatga

SEQ ID NO: 46293 - DNA, 10 bp, Unknown
  misc_feature (1)..( 10): Matrix.001 file - promoters60/1033716
aaaagaaaaa

SEQ ID NO: 46294 - DNA, 7 bp, Unknown
  misc_feature (1)..( 7): Matrix.001 file - promoters60/1033716
agattct

SEQ ID NO: 46295 - DNA, 8 bp, Unknown
  misc_feature (1)..( 8): Matrix.001 file - promoters60/1033716
ctcaaagc

SEQ ID NO: 46296 - DNA, 6 bp, Unknown
  misc_feature (1)..( 6): Matrix.001 file - promoters60/1033716
attatc

SEQ ID NO: 46297 - DNA, 9 bp, Unknown
  misc_feature (1)..( 9): Matrix.001 file - promoters60/1033716
tattgaaaa

SEQ ID NO: 46298 - DNA, 8 bp, Unknown
  misc_feature (1)..( 8): Matrix.001 file - promoters60/1033716
aaaacgac

SEQ ID NO: 46299 - DNA, 9 bp, Unknown
  misc_feature (1)..( 9): Matrix.001 file - promoters60/1033716
gggtaagag

SEQ ID NO: 46300 - DNA, 8 bp, Unknown
  misc_feature (1)..( 8): Matrix.001 file - promoters60/1033716
aatcgaat

SEQ ID NO: 46301 - DNA, 7 bp, Unknown
  misc_feature (1)..( 7): Matrix.001 file - promoters60/1033716
tattggt

SEQ ID NO: 46302 - DNA, 7 bp, Unknown
  misc_feature (1)..( 7): Matrix.001 file - promoters60/1033716
ttctcat

SEQ ID NO: 46303 - DNA, 10 bp, Unknown
  misc_feature (1)..( 10): Matrix.001 file - promoters60/1033723
atggaaatta

SEQ ID NO: 46304 - DNA, 7 bp, Unknown
  misc_feature (1)..( 7): Matrix.001 file - promoters60/1033723
gatgatg

SEQ ID NO: 46305 - DNA, 7 bp, Unknown
  misc_feature (1)..( 7): Matrix.001 file - promoters60/1033723
atgaaga

SEQ ID NO: 46306 - DNA, 7 bp, Unknown
  misc_feature (1)..( 7): Matrix.001 file - promoters60/1033723
agaagga

SEQ ID NO: 46307 - DNA, 6 bp, Unknown
  misc_feature (1)..( 6): Matrix.001 file - promoters60/1033723
ataatt

SEQ ID NO: 46308 - DNA, 9 bp, Unknown
  misc_feature (1)..( 9): Matrix.001 file - promoters60/1033723
ggatcgggt

SEQ ID NO: 46309 - DNA, 6 bp, Unknown
  misc_feature (1)..( 6): Matrix.001 file - promoters60/1033723
ttcgga

SEQ ID NO: 46310 - DNA, 6 bp, Unknown
  misc_feature (1)..( 6): Matrix.001 file - promoters60/1033723
cggcga

SEQ ID NO: 46311 - DNA, 8 bp, Unknown
  misc_feature (1)..( 8): Matrix.001 file - promoters60/1033723
ggaggatc

SEQ ID NO: 46312 - DNA, 11 bp, Unknown
  misc_feature (1)..( 11): Matrix.001 file - promoters60/1033723
gaagggagatg

SEQ ID NO: 46313 - DNA, 12 bp, Unknown
  misc_feature (1)..( 12): Matrix.001 file - promoters60/1033781
taaatcaaaaaa

SEQ ID NO: 46314 - DNA, 13 bp, Unknown
  misc_feature (1)..( 13): Matrix.001 file - promoters60/1033781
aggcccaaaaaaa

SEQ ID NO: 46315 - DNA, 9 bp, Unknown
  misc_feature (1)..( 9): Matrix.001 file - promoters60/1033781
acataaatc

SEQ ID NO: 46316 - DNA, 7 bp, Unknown
  misc_feature (1)..( 7): Matrix.001 file - promoters60/1033781
taattaa

SEQ ID NO: 46317 - DNA, 10 bp, Unknown
  misc_feature (1)..( 10): Matrix.001 file - promoters60/1033781
ttcaaaaaat

SEQ ID NO: 46318 - DNA, 14 bp, Unknown
  misc_feature (1)..( 14): Matrix.001 file - promoters60/1033841
aaatgggcttatta

SEQ ID NO: 46319 - DNA, 7 bp, Unknown
  misc_feature (1)..( 7): Matrix.001 file - promoters60/1033849
attcact

SEQ ID NO: 46320 - DNA, 6 bp, Unknown
  misc_feature (1)..( 6): Matrix.001 file - promoters60/1033849
taaaga

SEQ ID NO: 46321 - DNA, 11 bp, Unknown
  misc_feature (1)..( 11): Matrix.001 file - promoters60/1033849
acaatttataa

SEQ ID NO: 46322 - DNA, 7 bp, Unknown
  misc_feature (1)..( 7): Matrix.001 file - promoters60/1033849
gtaacta

SEQ ID NO: 46323 - DNA, 7 bp, Unknown
  misc_feature (1)..( 7): Matrix.001 file - promoters60/1033849
aattttt

SEQ ID NO: 46324 - DNA, 7 bp, Unknown
  misc_feature (1)..( 7): Matrix.001 file - promoters60/1033849
tttgttt

SEQ ID NO: 46325 - DNA, 7 bp, Unknown
  misc_feature (1)..( 7): Matrix.001 file - promoters60/1033849
tgtcaaa

SEQ ID NO: 46326 - DNA, 7 bp, Unknown
  misc_feature (1)..( 7): Matrix.001 file - promoters60/1033849
tagaaaa

SEQ ID NO: 46327 - DNA, 7 bp, Unknown
  misc_feature (1)..( 7): Matrix.001 file - promoters60/1033849
tatataa

SEQ ID NO: 46328 - DNA, 8 bp, Unknown
  misc_feature (1)..( 8): Matrix.001 file - promoters60/1033849
atatatac

SEQ ID NO: 46329 - DNA, 6 bp, Unknown
  misc_feature (1)..( 6): Matrix.001 file - promoters60/1033849
tagata

SEQ ID NO: 46330 - DNA, 7 bp, Unknown
  misc_feature (1)..( 7): Matrix.001 file - promoters60/1033849
caaaaag

SEQ ID NO: 46331 - DNA, 6 bp, Unknown
  misc_feature (1)..( 6): Matrix.001 file - promoters60/1033849
gcaata

SEQ ID NO: 46332 - DNA, 7 bp, Unknown
  misc_feature (1)..( 7): Matrix.001 file - promoters60/1033849
aaactat

SEQ ID NO: 46333 - DNA, 6 bp, Unknown
  misc_feature (1)..( 6): Matrix.001 file - promoters60/1033849
aaaata

SEQ ID NO: 46334 - DNA, 13 bp, Unknown
  misc_feature (1)..( 13): Matrix.001 file - promoters60/1033865
aaaagcttttttt

SEQ ID NO: 46335 - DNA, 8 bp, Unknown
  misc_feature (1)..( 8): Matrix.001 file - promoters60/1033865
attatttg

SEQ ID NO: 46336 - DNA, 10 bp, Unknown
  misc_feature (1)..( 10): Matrix.001 file - promoters60/1033865
atgctttttt

SEQ ID NO: 46337 - DNA, 14 bp, Unknown
  misc_feature (1)..( 14): Matrix.001 file - promoters60/1033865
tagaaagattcttt

SEQ ID NO: 46338 - DNA, 9 bp, Unknown
  misc_feature (1)..( 9): Matrix.001 file - promoters60/1034030
tttttaaat

SEQ ID NO: 46339 - DNA, 12 bp, Unknown
  misc_feature (1)..( 12): Matrix.001 file - promoters60/1034030
cattagtcaatt

SEQ ID NO: 46340 - DNA, 13 bp, Unknown
  misc_feature (1)..( 13): Matrix.001 file - promoters60/1034030
aaaccaaaaaagt

SEQ ID NO: 46341 - DNA, 6 bp, Unknown
  misc_feature (1)..( 6): Matrix.001 file - promoters60/1034034
tttatt

SEQ ID NO: 46342 - DNA, 7 bp, Unknown
  misc_feature (1)..( 7): Matrix.001 file - promoters60/1034034
ttgcggt

SEQ ID NO: 46343 - DNA, 7 bp, Unknown
  misc_feature (1)..( 7): Matrix.001 file - promoters60/1034034
cttctgt

SEQ ID NO: 46344 - DNA, 7 bp, Unknown
  misc_feature (1)..( 7): Matrix.001 file - promoters60/1034034
ttactcc

SEQ ID NO: 46345 - DNA, 9 bp, Unknown
  misc_feature (1)..( 9): Matrix.001 file - promoters60/1034034
tttggattt

SEQ ID NO: 46346 - DNA, 7 bp, Unknown
  misc_feature (1)..( 7): Matrix.001 file - promoters60/1034034
agaaatg

SEQ ID NO: 46347 - DNA, 6 bp, Unknown
  misc_feature (1)..( 6): Matrix.001 file - promoters60/1034034
gagaag

SEQ ID NO: 46348 - DNA, 7 bp, Unknown
  misc_feature (1)..( 7): Matrix.001 file - promoters60/1034034
agaattt

SEQ ID NO: 46349 - DNA, 8 bp, Unknown
  misc_feature (1)..( 8): Matrix.001 file - promoters60/1034034
tcaaagat

SEQ ID NO: 46350 - DNA, 8 bp, Unknown
  misc_feature (1)..( 8): Matrix.001 file - promoters60/1034034
ttcaattc

SEQ ID NO: 46351 - DNA, 8 bp, Unknown
  misc_feature (1)..( 8): Matrix.001 file - promoters60/1034034
gaacaaac

SEQ ID NO: 46352 - DNA, 6 bp, Unknown
  misc_feature (1)..( 6): Matrix.001 file - promoters60/1034034
gaatca

SEQ ID NO: 46353 - DNA, 7 bp, Unknown
  misc_feature (1)..( 7): Matrix.001 file - promoters60/1034034
tccagtt

SEQ ID NO: 46354 - DNA, 6 bp, Unknown
  misc_feature (1)..( 6): Matrix.001 file - promoters60/1034034
tttccg

SEQ ID NO: 46355 - DNA, 6 bp, Unknown
  misc_feature (1)..( 6): Matrix.001 file - promoters60/1034034
ataaat

SEQ ID NO: 46356 - DNA, 6 bp, Unknown
  misc_feature (1)..( 6): Matrix.001 file - promoters60/1034034
aaccct

SEQ ID NO: 46357 - DNA, 6 bp, Unknown
  misc_feature (1)..( 6): Matrix.001 file - promoters60/1034119
aataat

SEQ ID NO: 46358 - DNA, 11 bp, Unknown
  misc_feature (1)..( 11): Matrix.001 file - promoters60/1034119
ataataataat

SEQ ID NO: 46359 - DNA, 7 bp, Unknown
  misc_feature (1)..( 7): Matrix.001 file - promoters60/1034119
atcgtca

SEQ ID NO: 46360 - DNA, 10 bp, Unknown
  misc_feature (1)..( 10): Matrix.001 file - promoters60/1034119
aacataaggc

SEQ ID NO: 46361 - DNA, 6 bp, Unknown
  misc_feature (1)..( 6): Matrix.001 file - promoters60/1034119
aattta

SEQ ID NO: 46362 - DNA, 6 bp, Unknown
  misc_feature (1)..( 6): Matrix.001 file - promoters60/1034119
tttatt

SEQ ID NO: 46363 - DNA, 7 bp, Unknown
  misc_feature (1)..( 7): Matrix.001 file - promoters60/1034119
tatgtta

SEQ ID NO: 46364 - DNA, 6 bp, Unknown
  misc_feature (1)..( 6): Matrix.001 file - promoters60/1034119
taaaaa

SEQ ID NO: 46365 - DNA, 6 bp, Unknown
  misc_feature (1)..( 6): Matrix.001 file - promoters60/1034119
tataaa

SEQ ID NO: 46366 - DNA, 9 bp, Unknown
  misc_feature (1)..( 9): Matrix.001 file - promoters60/1034137
ttaaaaaaa

SEQ ID NO: 46367 - DNA, 10 bp, Unknown
  misc_feature (1)..( 10): Matrix.001 file - promoters60/1034137
acaaatggaa

SEQ ID NO: 46368 - DNA, 28 bp, Unknown
  misc_feature (1)..( 28): Matrix.001 file - promoters60/1034137
aagcctatataaaaggctacaagcatga

SEQ ID NO: 46369 - DNA, 8 bp, Unknown
  misc_feature (1)..( 8): Matrix.001 file - promoters60/1034145
taataagt

SEQ ID NO: 46370 - DNA, 6 bp, Unknown
  misc_feature (1)..( 6): Matrix.001 file - promoters60/1034145
atatcc

SEQ ID NO: 46371 - DNA, 8 bp, Unknown
  misc_feature (1)..( 8): Matrix.001 file - promoters60/1034145
tctatata

SEQ ID NO: 46372 - DNA, 7 bp, Unknown
  misc_feature (1)..( 7): Matrix.001 file - promoters60/1034145
aaaaaat

SEQ ID NO: 46373 - DNA, 9 bp, Unknown
  misc_feature (1)..( 9): Matrix.001 file - promoters60/1034145
aaagagagt

SEQ ID NO: 46374 - DNA, 6 bp, Unknown
  misc_feature (1)..( 6): Matrix.001 file - promoters60/1034145
ctttat

SEQ ID NO: 46375 - DNA, 10 bp, Unknown
  misc_feature (1)..( 10): Matrix.001 file - promoters60/1034145
ctaatatgaa

SEQ ID NO: 46376 - DNA, 7 bp, Unknown
  misc_feature (1)..( 7): Matrix.001 file - promoters60/1034145
tctagca

SEQ ID NO: 46377 - DNA, 7 bp, Unknown
  misc_feature (1)..( 7): Matrix.001 file - promoters60/1034145
aaaagag

SEQ ID NO: 46378 - DNA, 6 bp, Unknown
  misc_feature (1)..( 6): Matrix.001 file - promoters60/1034145
agcctt

SEQ ID NO: 46379 - DNA, 7 bp, Unknown
  misc_feature (1)..( 7): Matrix.001 file - promoters60/1034145
gagcaaa

SEQ ID NO: 46380 - DNA, 7 bp, Unknown
  misc_feature (1)..( 7): Matrix.001 file - promoters60/1034145
ttgttgt

SEQ ID NO: 46381 - DNA, 9 bp, Unknown
  misc_feature (1)..( 9): Matrix.001 file - promoters60/1034145
ttgaatttt

SEQ ID NO: 46382 - DNA, 6 bp, Unknown
  misc_feature (1)..( 6): Matrix.001 file - promoters60/1034145
ttttga

SEQ ID NO: 46383 - DNA, 8 bp, Unknown
  misc_feature (1)..( 8): Matrix.001 file - promoters60/1034145
aagagatt

SEQ ID NO: 46384 - DNA, 6 bp, Unknown
  misc_feature (1)..( 6): Matrix.001 file - promoters60/1034145
taaaaa

SEQ ID NO: 46385 - DNA, 10 bp, Unknown
  misc_feature (1)..( 10): Matrix.001 file - promoters60/1034306
taaataaatt

SEQ ID NO: 46386 - DNA, 9 bp, Unknown
  misc_feature (1)..( 9): Matrix.001 file - promoters60/1034306
taaataaaa

SEQ ID NO: 46387 - DNA, 12 bp, Unknown
  misc_feature (1)..( 12): Matrix.001 file - promoters60/1034306
attttttaatat

SEQ ID NO: 46388 - DNA, 9 bp, Unknown
  misc_feature (1)..( 9): Matrix.001 file - promoters60/1034306
aacataaaa

SEQ ID NO: 46389 - DNA, 6 bp, Unknown
  misc_feature (1)..( 6): Matrix.001 file - promoters60/1034306
acattt

SEQ ID NO: 46390 - DNA, 11 bp, Unknown
  misc_feature (1)..( 11): Matrix.001 file - promoters60/1034306
tataatatgaa

SEQ ID NO: 46391 - DNA, 9 bp, Unknown
  misc_feature (1)..( 9): Matrix.001 file - promoters60/1034306
gttagatat

SEQ ID NO: 46392 - DNA, 9 bp, Unknown
  misc_feature (1)..( 9): Matrix.001 file - promoters60/1034322
tataaatat

SEQ ID NO: 46393 - DNA, 10 bp, Unknown
  misc_feature (1)..( 10): Matrix.001 file - promoters60/1034349
atcaaaaaaa

SEQ ID NO: 46394 - DNA, 9 bp, Unknown
  misc_feature (1)..( 9): Matrix.001 file - promoters60/1034349
tatatttaa

SEQ ID NO: 46395 - DNA, 10 bp, Unknown
  misc_feature (1)..( 10): Matrix.001 file - promoters60/1034349
tatataaata

SEQ ID NO: 46396 - DNA, 10 bp, Unknown
  misc_feature (1)..( 10): Matrix.001 file - promoters60/1034349
atcaacaaaa

SEQ ID NO: 46397 - DNA, 10 bp, Unknown
  misc_feature (1)..( 10): Matrix.001 file - promoters60/1034353
ataatagaca

SEQ ID NO: 46398 - DNA, 9 bp, Unknown
  misc_feature (1)..( 9): Matrix.001 file - promoters60/1034497
agattttct

SEQ ID NO: 46399 - DNA, 14 bp, Unknown
  misc_feature (1)..( 14): Matrix.001 file - promoters60/1034497
gacaatattttatt

SEQ ID NO: 46400 - DNA, 10 bp, Unknown
  misc_feature (1)..( 10): Matrix.001 file - promoters60/1034497
tattttattt

SEQ ID NO: 46401 - DNA, 9 bp, Unknown
  misc_feature (1)..( 9): Matrix.001 file - promoters60/1034497
tttaaatag

SEQ ID NO: 46402 - DNA, 12 bp, Unknown
  misc_feature (1)..( 12): Matrix.001 file - promoters60/1034497
atttaatcgatt

SEQ ID NO: 46403 - DNA, 8 bp, Unknown
  misc_feature (1)..( 8): Matrix.001 file - promoters60/1034497
tattacca

SEQ ID NO: 46404 - DNA, 11 bp, Unknown
  misc_feature (1)..( 11): Matrix.001 file - promoters60/1034497
atttatttgtg

SEQ ID NO: 46405 - DNA, 8 bp, Unknown
  misc_feature (1)..( 8): Matrix.001 file - promoters60/1034497
atgtacta

SEQ ID NO: 46406 - DNA, 9 bp, Unknown
  misc_feature (1)..( 9): Matrix.001 file - promoters60/1034497
accaagtag

SEQ ID NO: 46407 - DNA, 11 bp, Unknown
  misc_feature (1)..( 11): Matrix.001 file - promoters60/1034497
atttattagtg

SEQ ID NO: 46408 - DNA, 10 bp, Unknown
  misc_feature (1)..( 10): Matrix.001 file - promoters60/1034497
attcaattct

SEQ ID NO: 46409 - DNA, 10 bp, Unknown
  misc_feature (1)..( 10): Matrix.001 file - promoters60/1034497
ttatattttc

SEQ ID NO: 46410 - DNA, 9 bp, Unknown
  misc_feature (1)..( 9): Matrix.001 file - promoters60/1034652
caaaaaaaa

SEQ ID NO: 46411 - DNA, 6 bp, Unknown
  misc_feature (1)..( 6): Matrix.001 file - promoters60/1034692
ttactt

SEQ ID NO: 46412 - DNA, 9 bp, Unknown
  misc_feature (1)..( 9): Matrix.001 file - promoters60/1034692
aaaatcaac

SEQ ID NO: 46413 - DNA, 8 bp, Unknown
  misc_feature (1)..( 8): Matrix.001 file - promoters60/1034692
aaaaggaa

SEQ ID NO: 46414 - DNA, 9 bp, Unknown
  misc_feature (1)..( 9): Matrix.001 file - promoters60/1034715
tgtcagatg

SEQ ID NO: 46415 - DNA, 6 bp, Unknown
  misc_feature (1)..( 6): Matrix.001 file - promoters60/1034715
tagttt

SEQ ID NO: 46416 - DNA, 7 bp, Unknown
  misc_feature (1)..( 7): Matrix.001 file - promoters60/1034715
tagatca

SEQ ID NO: 46417 - DNA, 6 bp, Unknown
  misc_feature (1)..( 6): Matrix.001 file - promoters60/1034715
ccgtga

SEQ ID NO: 46418 - DNA, 7 bp, Unknown
  misc_feature (1)..( 7): Matrix.001 file - promoters60/1034715
tcttctg

SEQ ID NO: 46419 - DNA, 6 bp, Unknown
  misc_feature (1)..( 6): Matrix.001 file - promoters60/1034715
catttt

SEQ ID NO: 46420 - DNA, 9 bp, Unknown
  misc_feature (1)..( 9): Matrix.001 file - promoters60/1034715
tttacagat

SEQ ID NO: 46421 - DNA, 7 bp, Unknown
  misc_feature (1)..( 7): Matrix.001 file - promoters60/1034715
cagggaa

SEQ ID NO: 46422 - DNA, 9 bp, Unknown
  misc_feature (1)..( 9): Matrix.001 file - promoters60/1034810
aacaaggca

SEQ ID NO: 46423 - DNA, 7 bp, Unknown
  misc_feature (1)..( 7): Matrix.001 file - promoters60/1034810
gagtgtt

SEQ ID NO: 46424 - DNA, 6 bp, Unknown
  misc_feature (1)..( 6): Matrix.001 file - promoters60/1034810
ggaagc

SEQ ID NO: 46425 - DNA, 7 bp, Unknown
  misc_feature (1)..( 7): Matrix.001 file - promoters60/1034810
aaaagtg

SEQ ID NO: 46426 - DNA, 6 bp, Unknown
  misc_feature (1)..( 6): Matrix.001 file - promoters60/1034810
atacac

SEQ ID NO: 46427 - DNA, 9 bp, Unknown
  misc_feature (1)..( 9): Matrix.001 file - promoters60/1034810
cattaactt

SEQ ID NO: 46428 - DNA, 8 bp, Unknown
  misc_feature (1)..( 8): Matrix.001 file - promoters60/1034810
gctgaact

SEQ ID NO: 46429 - DNA, 6 bp, Unknown
  misc_feature (1)..( 6): Matrix.001 file - promoters60/1034810
cttagg

SEQ ID NO: 46430 - DNA, 6 bp, Unknown
  misc_feature (1)..( 6): Matrix.001 file - promoters60/1034810
tcttga

SEQ ID NO: 46431 - DNA, 8 bp, Unknown
  misc_feature (1)..( 8): Matrix.001 file - promoters60/1034810
gttcattg

SEQ ID NO: 46432 - DNA, 6 bp, Unknown
  misc_feature (1)..( 6): Matrix.001 file - promoters60/1034810
ggcttg

SEQ ID NO: 46433 - DNA, 10 bp, Unknown
  misc_feature (1)..( 10): Matrix.001 file - promoters60/1034837
tcaaaaaaaa

SEQ ID NO: 46434 - DNA, 12 bp, Unknown
  misc_feature (1)..( 12): Matrix.001 file - promoters60/1034837
aaacaatttaca

SEQ ID NO: 46435 - DNA, 12 bp, Unknown
  misc_feature (1)..( 12): Matrix.001 file - promoters60/1034837
ttaaaaacattt

SEQ ID NO: 46436 - DNA, 8 bp, Unknown
  misc_feature (1)..( 8): Matrix.001 file - promoters60/1034837
attaaatt

SEQ ID NO: 46437 - DNA, 10 bp, Unknown
  misc_feature (1)..( 10): Matrix.001 file - promoters60/1034870
agagcaatga

SEQ ID NO: 46438 - DNA, 8 bp, Unknown
  misc_feature (1)..( 8): Matrix.001 file - promoters60/1034962
attttttt

SEQ ID NO: 46439 - DNA, 7 bp, Unknown
  misc_feature (1)..( 7): Matrix.001 file - promoters60/1034962
aatatta

SEQ ID NO: 46440 - DNA, 7 bp, Unknown
  misc_feature (1)..( 7): Matrix.001 file - promoters60/1034962
aatgaaa

SEQ ID NO: 46441 - DNA, 9 bp, Unknown
  misc_feature (1)..( 9): Matrix.001 file - promoters60/1034962
caatcattt

SEQ ID NO: 46442 - DNA, 6 bp, Unknown
  misc_feature (1)..( 6): Matrix.001 file - promoters60/1034962
gattta

SEQ ID NO: 46443 - DNA, 7 bp, Unknown
  misc_feature (1)..( 7): Matrix.001 file - promoters60/1034962
agaacat

SEQ ID NO: 46444 - DNA, 8 bp, Unknown
  misc_feature (1)..( 8): Matrix.001 file - promoters60/1034962
taatccac

SEQ ID NO: 46445 - DNA, 11 bp, Unknown
  misc_feature (1)..( 11): Matrix.001 file - promoters60/1034962
tctgataacaa

SEQ ID NO: 46446 - DNA, 6 bp, Unknown
  misc_feature (1)..( 6): Matrix.001 file - promoters60/1034962
tcaatt

SEQ ID NO: 46447 - DNA, 7 bp, Unknown
  misc_feature (1)..( 7): Matrix.001 file - promoters60/1034962
aataaat

SEQ ID NO: 46448 - DNA, 8 bp, Unknown
  misc_feature (1)..( 8): Matrix.002 file - promoters60/1034962
tctaggga

SEQ ID NO: 46449 - DNA, 10 bp, Unknown
  misc_feature (1)..( 10): Matrix.002 file - promoters60/1034962
aatttaaaag

SEQ ID NO: 46450 - DNA, 7 bp, Unknown
  misc_feature (1)..( 7): Matrix.002 file - promoters60/1034962
ttcggtt

SEQ ID NO: 46451 - DNA, 7 bp, Unknown
  misc_feature (1)..( 7): Matrix.002 file - promoters60/1034962
gaagaga

SEQ ID NO: 46452 - DNA, 7 bp, Unknown
  misc_feature (1)..( 7): Matrix.002 file - promoters60/1034962
tatttta

SEQ ID NO: 46453 - DNA, 7 bp, Unknown
  misc_feature (1)..( 7): Matrix.002 file - promoters60/1034962
tttagaa

SEQ ID NO: 46454 - DNA, 7 bp, Unknown
  misc_feature (1)..( 7): Matrix.002 file - promoters60/1034962
cttcctc

SEQ ID NO: 46455 - DNA, 7 bp, Unknown
  misc_feature (1)..( 7): Matrix.002 file - promoters60/1035027
tttatat

SEQ ID NO: 46456 - DNA, 7 bp, Unknown
  misc_feature (1)..( 7): Matrix.002 file - promoters60/1035027
gtaaata

SEQ ID NO: 46457 - DNA, 6 bp, Unknown
  misc_feature (1)..( 6): Matrix.002 file - promoters60/1035027
atatat

SEQ ID NO: 46458 - DNA, 8 bp, Unknown
  misc_feature (1)..( 8): Matrix.002 file - promoters60/1035027
aatataca

SEQ ID NO: 46459 - DNA, 7 bp, Unknown
  misc_feature (1)..( 7): Matrix.002 file - promoters60/1035027
aaagaaa

SEQ ID NO: 46460 - DNA, 12 bp, Unknown
  misc_feature (1)..( 12): Matrix.002 file - promoters60/1035027
aattatatttta

SEQ ID NO: 46461 - DNA, 6 bp, Unknown
  misc_feature (1)..( 6): Matrix.002 file - promoters60/1035027
tttcct

SEQ ID NO: 46462 - DNA, 6 bp, Unknown
  misc_feature (1)..( 6): Matrix.002 file - promoters60/1035027
caaact

SEQ ID NO: 46463 - DNA, 6 bp, Unknown
  misc_feature (1)..( 6): Matrix.002 file - promoters60/1035027
ctatac

SEQ ID NO: 46464 - DNA, 6 bp, Unknown
  misc_feature (1)..( 6): Matrix.002 file - promoters60/1035027
tttgtt

SEQ ID NO: 46465 - DNA, 7 bp, Unknown
  misc_feature (1)..( 7): Matrix.002 file - promoters60/1035027
aatagaa

SEQ ID NO: 46466 - DNA, 7 bp, Unknown
  misc_feature (1)..( 7): Matrix.002 file - promoters60/1035027
aaataat

SEQ ID NO: 46467 - DNA, 7 bp, Unknown
  misc_feature (1)..( 7): Matrix.002 file - promoters60/1035027
aatcaat

SEQ ID NO: 46468 - DNA, 8 bp, Unknown
  misc_feature (1)..( 8): Matrix.002 file - promoters60/1035027
aactaatc

SEQ ID NO: 46469 - DNA, 13 bp, Unknown
  misc_feature (1)..( 13): Matrix.002 file - promoters60/1035027
ctttcactttttt

SEQ ID NO: 46470 - DNA, 9 bp, Unknown
  misc_feature (1)..( 9): Matrix.002 file - promoters60/1035027
attaaaaaa

SEQ ID NO: 46471 - DNA, 15 bp, Unknown
  misc_feature (1)..( 15): Matrix.002 file - promoters60/1035027
aaaaagaagaaaatg

SEQ ID NO: 46472 - DNA, 7 bp, Unknown
  misc_feature (1)..( 7): Matrix.002 file - promoters60/1035027
tataaac

SEQ ID NO: 46473 - DNA, 6 bp, Unknown
  misc_feature (1)..( 6): Matrix.002 file - promoters60/1035027
agtatt

SEQ ID NO: 46474 - DNA, 6 bp, Unknown
  misc_feature (1)..( 6): Matrix.002 file - promoters60/1035027
tattta

SEQ ID NO: 46475 - DNA, 6 bp, Unknown
  misc_feature (1)..( 6): Matrix.002 file - promoters60/1035027
aaataa

SEQ ID NO: 46476 - DNA, 9 bp, Unknown
  misc_feature (1)..( 9): Matrix.002 file - promoters60/1035027
gaaaacagt

SEQ ID NO: 46477 - DNA, 13 bp, Unknown
  misc_feature (1)..( 13): Matrix.002 file - promoters60/1035083
caatatttgtatt

SEQ ID NO: 46478 - DNA, 13 bp, Unknown
  misc_feature (1)..( 13): Matrix.002 file - promoters60/1035083
atattttatgaat

SEQ ID NO: 46479 - DNA, 14 bp, Unknown
  misc_feature (1)..( 14): Matrix.002 file - promoters60/1035083
taaattttttataa

SEQ ID NO: 46480 - DNA, 9 bp, Unknown
  misc_feature (1)..( 9): Matrix.002 file - promoters60/1035083
tataaataa

SEQ ID NO: 46481 - DNA, 10 bp, Unknown
  misc_feature (1)..( 10): Matrix.002 file - promoters60/1035083
tataaaaaaa

SEQ ID NO: 46482 - DNA, 10 bp, Unknown
  misc_feature (1)..( 10): Matrix.002 file - promoters60/1035083
caatatttta

SEQ ID NO: 46483 - DNA, 7 bp, Unknown
  misc_feature (1)..( 7): Matrix.002 file - promoters60/1035083
tattata

SEQ ID NO: 46484 - DNA, 12 bp, Unknown
  misc_feature (1)..( 12): Matrix.002 file - promoters60/1035083
gttataccacaa

SEQ ID NO: 46485 - DNA, 7 bp, Unknown
  misc_feature (1)..( 7): Matrix.002 file - promoters60/1035097
aaaataa

SEQ ID NO: 46486 - DNA, 8 bp, Unknown
  misc_feature (1)..( 8): Matrix.002 file - promoters60/1035097
gaaaaaat

SEQ ID NO: 46487 - DNA, 9 bp, Unknown
  misc_feature (1)..( 9): Matrix.002 file - promoters60/1035117
tattttttg

SEQ ID NO: 46488 - DNA, 9 bp, Unknown
  misc_feature (1)..( 9): Matrix.002 file - promoters60/1035117
tattcttca

SEQ ID NO: 46489 - DNA, 7 bp, Unknown
  misc_feature (1)..( 7): Matrix.002 file - promoters60/1035117
aaactct

SEQ ID NO: 46490 - DNA, 9 bp, Unknown
  misc_feature (1)..( 9): Matrix.002 file - promoters60/1035117
ctttgttat

SEQ ID NO: 46491 - DNA, 6 bp, Unknown
  misc_feature (1)..( 6): Matrix.002 file - promoters60/1035117
tataca

SEQ ID NO: 46492 - DNA, 10 bp, Unknown
  misc_feature (1)..( 10): Matrix.002 file - promoters60/1035117
tctatagaaa

SEQ ID NO: 46493 - DNA, 6 bp, Unknown
  misc_feature (1)..( 6): Matrix.002 file - promoters60/1035117
aaaact

SEQ ID NO: 46494 - DNA, 6 bp, Unknown
  misc_feature (1)..( 6): Matrix.002 file - promoters60/1035117
ctttta

SEQ ID NO: 46495 - DNA, 8 bp, Unknown
  misc_feature (1)..( 8): Matrix.002 file - promoters60/1035117
atcaaaaa

SEQ ID NO: 46496 - DNA, 8 bp, Unknown
  misc_feature (1)..( 8): Matrix.002 file - promoters60/1035117
ttaaagtt

SEQ ID NO: 46497 - DNA, 11 bp, Unknown
  misc_feature (1)..( 11): Matrix.002 file - promoters60/1035117
aaacaacaaat

SEQ ID NO: 46498 - DNA, 7 bp, Unknown
  misc_feature (1)..( 7): Matrix.002 file - promoters60/1035117
ctattta

SEQ ID NO: 46499 - DNA, 8 bp, Unknown
  misc_feature (1)..( 8): Matrix.002 file - promoters60/1035117
gatatgtc

SEQ ID NO: 46500 - DNA, 11 bp, Unknown
  misc_feature (1)..( 11): Matrix.002 file - promoters60/1035117
tttatttaatt

SEQ ID NO: 46501 - DNA, 8 bp, Unknown
  misc_feature (1)..( 8): Matrix.002 file - promoters60/1035117
tataacaa

SEQ ID NO: 46502 - DNA, 6 bp, Unknown
  misc_feature (1)..( 6): Matrix.002 file - promoters60/1035117
aaaatc

SEQ ID NO: 46503 - DNA, 8 bp, Unknown
  misc_feature (1)..( 8): Matrix.002 file - promoters60/1035117
ttacatat

SEQ ID NO: 46504 - DNA, 7 bp, Unknown
  misc_feature (1)..( 7): Matrix.002 file - promoters60/1035117
acgattc

SEQ ID NO: 46505 - DNA, 8 bp, Unknown
  misc_feature (1)..( 8): Matrix.002 file - promoters60/1035160
attgattt

SEQ ID NO: 46506 - DNA, 10 bp, Unknown
  misc_feature (1)..( 10): Matrix.002 file - promoters60/1035160
atttgaggat

SEQ ID NO: 46507 - DNA, 9 bp, Unknown
  misc_feature (1)..( 9): Matrix.002 file - promoters60/1035160
tttgaacat

SEQ ID NO: 46508 - DNA, 10 bp, Unknown
  misc_feature (1)..( 10): Matrix.002 file - promoters60/1035160
aaaacacgtg

SEQ ID NO: 46509 - DNA, 7 bp, Unknown
  misc_feature (1)..( 7): Matrix.002 file - promoters60/1035160
tctatat

SEQ ID NO: 46510 - DNA, 7 bp, Unknown
  misc_feature (1)..( 7): Matrix.002 file - promoters60/1035160
caacgaa

SEQ ID NO: 46511 - DNA, 9 bp, Unknown
  misc_feature (1)..( 9): Matrix.002 file - promoters60/1035160
gaaaacagg

SEQ ID NO: 46512 - DNA, 8 bp, Unknown
  misc_feature (1)..( 8): Matrix.002 file - promoters60/1035172
ctataaaa

SEQ ID NO: 46513 - DNA, 8 bp, Unknown
  misc_feature (1)..( 8): Matrix.002 file - promoters60/1035172
aaaaataa

SEQ ID NO: 46514 - DNA, 10 bp, Unknown
  misc_feature (1)..( 10): Matrix.002 file - promoters60/1035176
aatataaaaa

SEQ ID NO: 46515 - DNA, 9 bp, Unknown
  misc_feature (1)..( 9): Matrix.002 file - promoters60/1035176
cctataaat

SEQ ID NO: 46516 - DNA, 10 bp, Unknown
  misc_feature (1)..( 10): Matrix.002 file - promoters60/1035176
ttaaaaaaag

SEQ ID NO: 46517 - DNA, 8 bp, Unknown
  misc_feature (1)..( 8): Matrix.002 file - promoters60/1035176
taaaaaaa

SEQ ID NO: 46518 - DNA, 9 bp, Unknown
  misc_feature (1)..( 9): Matrix.002 file - promoters60/1035267
taaaataaa

SEQ ID NO: 46519 - DNA, 10 bp, Unknown
  misc_feature (1)..( 10): Matrix.002 file - promoters60/1035267
aatttgtcta

SEQ ID NO: 46520 - DNA, 7 bp, Unknown
  misc_feature (1)..( 7): Matrix.002 file - promoters60/1035306
tgtagtt

SEQ ID NO: 46521 - DNA, 6 bp, Unknown
  misc_feature (1)..( 6): Matrix.002 file - promoters60/1035306
cgtaaa

SEQ ID NO: 46522 - DNA, 8 bp, Unknown
  misc_feature (1)..( 8): Matrix.002 file - promoters60/1035306
taaaacaa

SEQ ID NO: 46523 - DNA, 11 bp, Unknown
  misc_feature (1)..( 11): Matrix.002 file - promoters60/1035306
caaataatatt

SEQ ID NO: 46524 - DNA, 6 bp, Unknown
  misc_feature (1)..( 6): Matrix.002 file - promoters60/1035306
atattt

SEQ ID NO: 46525 - DNA, 6 bp, Unknown
  misc_feature (1)..( 6): Matrix.002 file - promoters60/1035306
ttgtat

SEQ ID NO: 46526 - DNA, 7 bp, Unknown
  misc_feature (1)..( 7): Matrix.002 file - promoters60/1035306
ataataa

SEQ ID NO: 46527 - DNA, 7 bp, Unknown
  misc_feature (1)..( 7): Matrix.002 file - promoters60/1035306
tatatat

SEQ ID NO: 46528 - DNA, 7 bp, Unknown
  misc_feature (1)..( 7): Matrix.002 file - promoters60/1035306
tgtaaaa

SEQ ID NO: 46529 - DNA, 6 bp, Unknown
  misc_feature (1)..( 6): Matrix.002 file - promoters60/1035306
gtagaa

SEQ ID NO: 46530 - DNA, 8 bp, Unknown
  misc_feature (1)..( 8): Matrix.002 file - promoters60/1035306
aacatgca

SEQ ID NO: 46531 - DNA, 10 bp, Unknown
  misc_feature (1)..( 10): Matrix.002 file - promoters60/1035306
ctttaaaaaa

SEQ ID NO: 46532 - DNA, 9 bp, Unknown
  misc_feature (1)..( 9): Matrix.002 file - promoters60/1035306
tattaaaat

SEQ ID NO: 46533 - DNA, 7 bp, Unknown
  misc_feature (1)..( 7): Matrix.002 file - promoters60/1035306
atcaaat

SEQ ID NO: 46534 - DNA, 6 bp, Unknown
  misc_feature (1)..( 6): Matrix.002 file - promoters60/1035306
aattat

SEQ ID NO: 46535 - DNA, 11 bp, Unknown
  misc_feature (1)..( 11): Matrix.002 file - promoters60/1035306
atttataaaat

SEQ ID NO: 46536 - DNA, 9 bp, Unknown
  misc_feature (1)..( 9): Matrix.002 file - promoters60/1035306
aaaagttat

SEQ ID NO: 46537 - DNA, 12 bp, Unknown
  misc_feature (1)..( 12): Matrix.002 file - promoters60/1035312
aaaatcaaaaat

SEQ ID NO: 46538 - DNA, 10 bp, Unknown
  misc_feature (1)..( 10): Matrix.002 file - promoters60/1035312
aaatgttttt

SEQ ID NO: 46539 - DNA, 6 bp, Unknown
  misc_feature (1)..( 6): Matrix.002 file - promoters60/1035323
acaaaa

SEQ ID NO: 46540 - DNA, 6 bp, Unknown
  misc_feature (1)..( 6): Matrix.002 file - promoters60/1035323
ttgaaa

SEQ ID NO: 46541 - DNA, 7 bp, Unknown
  misc_feature (1)..( 7): Matrix.002 file - promoters60/1035323
ttccttt

SEQ ID NO: 46542 - DNA, 8 bp, Unknown
  misc_feature (1)..( 8): Matrix.002 file - promoters60/1035323
tttatttt

SEQ ID NO: 46543 - DNA, 7 bp, Unknown
  misc_feature (1)..( 7): Matrix.002 file - promoters60/1035323
ttcgtct

SEQ ID NO: 46544 - DNA, 6 bp, Unknown
  misc_feature (1)..( 6): Matrix.002 file - promoters60/1035323
tgatca

SEQ ID NO: 46545 - DNA, 9 bp, Unknown
  misc_feature (1)..( 9): Matrix.002 file - promoters60/1035323
tgaacaact

SEQ ID NO: 46546 - DNA, 12 bp, Unknown
  misc_feature (1)..( 12): Matrix.002 file - promoters60/1035323
tttatgaaattt

SEQ ID NO: 46547 - DNA, 8 bp, Unknown
  misc_feature (1)..( 8): Matrix.002 file - promoters60/1035323
aaactgtt

SEQ ID NO: 46548 - DNA, 6 bp, Unknown
  misc_feature (1)..( 6): Matrix.002 file - promoters60/1035323
taataa

SEQ ID NO: 46549 - DNA, 6 bp, Unknown
  misc_feature (1)..( 6): Matrix.002 file - promoters60/1035323
ttttct

SEQ ID NO: 46550 - DNA, 7 bp, Unknown
  misc_feature (1)..( 7): Matrix.002 file - promoters60/1035323
atcgtca

SEQ ID NO: 46551 - DNA, 7 bp, Unknown
  misc_feature (1)..( 7): Matrix.002 file - promoters60/1035323
aaaccgg

SEQ ID NO: 46552 - DNA, 9 bp, Unknown
  misc_feature (1)..( 9): Matrix.002 file - promoters60/1035323
cttttttcc

SEQ ID NO: 46553 - DNA, 6 bp, Unknown
  misc_feature (1)..( 6): Matrix.002 file - promoters60/1035323
aatttg

SEQ ID NO: 46554 - DNA, 7 bp, Unknown
  misc_feature (1)..( 7): Matrix.002 file - promoters60/1035323
ttgataa

SEQ ID NO: 46555 - DNA, 6 bp, Unknown
  misc_feature (1)..( 6): Matrix.002 file - promoters60/1035323
gtatat

SEQ ID NO: 46556 - DNA, 6 bp, Unknown
  misc_feature (1)..( 6): Matrix.002 file - promoters60/1035373
taaagg

SEQ ID NO: 46557 - DNA, 7 bp, Unknown
  misc_feature (1)..( 7): Matrix.002 file - promoters60/1035373
ctacaaa

SEQ ID NO: 46558 - DNA, 7 bp, Unknown
  misc_feature (1)..( 7): Matrix.002 file - promoters60/1035373
aaacgct

SEQ ID NO: 46559 - DNA, 7 bp, Unknown
  misc_feature (1)..( 7): Matrix.002 file - promoters60/1035373
attgaga

SEQ ID NO: 46560 - DNA, 7 bp, Unknown
  misc_feature (1)..( 7): Matrix.002 file - promoters60/1035373
gatacag

SEQ ID NO: 46561 - DNA, 6 bp, Unknown
  misc_feature (1)..( 6): Matrix.002 file - promoters60/1035373
attcca

SEQ ID NO: 46562 - DNA, 7 bp, Unknown
  misc_feature (1)..( 7): Matrix.002 file - promoters60/1035373
aaacctg

SEQ ID NO: 46563 - DNA, 6 bp, Unknown
  misc_feature (1)..( 6): Matrix.002 file - promoters60/1035373
tttgac

SEQ ID NO: 46564 - DNA, 6 bp, Unknown
  misc_feature (1)..( 6): Matrix.002 file - promoters60/1035373
acggta

SEQ ID NO: 46565 - DNA, 7 bp, Unknown
  misc_feature (1)..( 7): Matrix.002 file - promoters60/1035373
tcaagtt

SEQ ID NO: 46566 - DNA, 9 bp, Unknown
  misc_feature (1)..( 9): Matrix.002 file - promoters60/1035373
atttaattt

SEQ ID NO: 46567 - DNA, 8 bp, Unknown
  misc_feature (1)..( 8): Matrix.002 file - promoters60/1035507
caaaaagt

SEQ ID NO: 46568 - DNA, 9 bp, Unknown
  misc_feature (1)..( 9): Matrix.002 file - promoters60/1035507
tttaaattt

SEQ ID NO: 46569 - DNA, 9 bp, Unknown
  misc_feature (1)..( 9): Matrix.002 file - promoters60/1035507
ttcaatttg

SEQ ID NO: 46570 - DNA, 12 bp, Unknown
  misc_feature (1)..( 12): Matrix.002 file - promoters60/1035507
tctttgtttatt

SEQ ID NO: 46571 - DNA, 7 bp, Unknown
  misc_feature (1)..( 7): Matrix.002 file - promoters60/1035507
cataaaa

SEQ ID NO: 46572 - DNA, 7 bp, Unknown
  misc_feature (1)..( 7): Matrix.002 file - promoters60/1035623
ttagcca

SEQ ID NO: 46573 - DNA, 7 bp, Unknown
  misc_feature (1)..( 7): Matrix.002 file - promoters60/1035623
cagagac

SEQ ID NO: 46574 - DNA, 6 bp, Unknown
  misc_feature (1)..( 6): Matrix.002 file - promoters60/1035623
tttgtt

SEQ ID NO: 46575 - DNA, 6 bp, Unknown
  misc_feature (1)..( 6): Matrix.002 file - promoters60/1035623
cttctt

SEQ ID NO: 46576 - DNA, 7 bp, Unknown
  misc_feature (1)..( 7): Matrix.002 file - promoters60/1035623
ttctgga

SEQ ID NO: 46577 - DNA, 7 bp, Unknown
  misc_feature (1)..( 7): Matrix.002 file - promoters60/1035623
tgtatat

SEQ ID NO: 46578 - DNA, 8 bp, Unknown
  misc_feature (1)..( 8): Matrix.002 file - promoters60/1035623
tctggttt

SEQ ID NO: 46579 - DNA, 7 bp, Unknown
  misc_feature (1)..( 7): Matrix.002 file - promoters60/1035623
tttactt

SEQ ID NO: 46580 - DNA, 8 bp, Unknown
  misc_feature (1)..( 8): Matrix.002 file - promoters60/1035623
cttgtctc

SEQ ID NO: 46581 - DNA, 7 bp, Unknown
  misc_feature (1)..( 7): Matrix.002 file - promoters60/1035623
ttgaagc

SEQ ID NO: 46582 - DNA, 6 bp, Unknown
  misc_feature (1)..( 6): Matrix.002 file - promoters60/1035623
cctttt

SEQ ID NO: 46583 - DNA, 7 bp, Unknown
  misc_feature (1)..( 7): Matrix.002 file - promoters60/1035623
ttttttt

SEQ ID NO: 46584 - DNA, 7 bp, Unknown
  misc_feature (1)..( 7): Matrix.002 file - promoters60/1035623
ggcctat

SEQ ID NO: 46585 - DNA, 8 bp, Unknown
  misc_feature (1)..( 8): Matrix.002 file - promoters60/1035632
taataaaa

SEQ ID NO: 46586 - DNA, 6 bp, Unknown
  misc_feature (1)..( 6): Matrix.002 file - promoters60/1035632
cacaaa

SEQ ID NO: 46587 - DNA, 8 bp, Unknown
  misc_feature (1)..( 8): Matrix.002 file - promoters60/1035632
gtgttttt

SEQ ID NO: 46588 - DNA, 6 bp, Unknown
  misc_feature (1)..( 6): Matrix.002 file - promoters60/1035632
ttttct

SEQ ID NO: 46589 - DNA, 7 bp, Unknown
  misc_feature (1)..( 7): Matrix.002 file - promoters60/1035665
gtgaaat

SEQ ID NO: 46590 - DNA, 7 bp, Unknown
  misc_feature (1)..( 7): Matrix.002 file - promoters60/1035665
taaatta

SEQ ID NO: 46591 - DNA, 16 bp, Unknown
  misc_feature (1)..( 16): Matrix.002 file - promoters60/1035665
ttatttactaattttt

SEQ ID NO: 46592 - DNA, 7 bp, Unknown
  misc_feature (1)..( 7): Matrix.002 file - promoters60/1035665
catctta

SEQ ID NO: 46593 - DNA, 7 bp, Unknown
  misc_feature (1)..( 7): Matrix.002 file - promoters60/1035665
tgcattt

SEQ ID NO: 46594 - DNA, 6 bp, Unknown
  misc_feature (1)..( 6): Matrix.002 file - promoters60/1035665
ttaaaa

SEQ ID NO: 46595 - DNA, 7 bp, Unknown
  misc_feature (1)..( 7): Matrix.002 file - promoters60/1035665
aaaagta

SEQ ID NO: 46596 - DNA, 9 bp, Unknown
  misc_feature (1)..( 9): Matrix.002 file - promoters60/1035665
atcagtttt

SEQ ID NO: 46597 - DNA, 8 bp, Unknown
  misc_feature (1)..( 8): Matrix.002 file - promoters60/1035665
tgaatttt

SEQ ID NO: 46598 - DNA, 6 bp, Unknown
  misc_feature (1)..( 6): Matrix.002 file - promoters60/1035665
tttgtt

SEQ ID NO: 46599 - DNA, 8 bp, Unknown
  misc_feature (1)..( 8): Matrix.002 file - promoters60/1035665
atttcatt

SEQ ID NO: 46600 - DNA, 6 bp, Unknown
  misc_feature (1)..( 6): Matrix.002 file - promoters60/1035665
aaaaaa

SEQ ID NO: 46601 - DNA, 8 bp, Unknown
  misc_feature (1)..( 8): Matrix.002 file - promoters60/1035665
caaaaact

SEQ ID NO: 46602 - DNA, 9 bp, Unknown
  misc_feature (1)..( 9): Matrix.002 file - promoters60/1035665
ttgggcctt

SEQ ID NO: 46603 - DNA, 12 bp, Unknown
  misc_feature (1)..( 12): Matrix.002 file - promoters60/1035665
ttttctttattt

SEQ ID NO: 46604 - DNA, 8 bp, Unknown
  misc_feature (1)..( 8): Matrix.002 file - promoters60/1035665
ttaaatat

SEQ ID NO: 46605 - DNA, 6 bp, Unknown
  misc_feature (1)..( 6): Matrix.002 file - promoters60/1035665
tttaat

SEQ ID NO: 46606 - DNA, 6 bp, Unknown
  misc_feature (1)..( 6): Matrix.002 file - promoters60/1035665
ccaagt

SEQ ID NO: 46607 - DNA, 11 bp, Unknown
  misc_feature (1)..( 11): Matrix.002 file - promoters60/1035665
taaaatttgat

SEQ ID NO: 46608 - DNA, 7 bp, Unknown
  misc_feature (1)..( 7): Matrix.002 file - promoters60/1035665
aaaaagt

SEQ ID NO: 46609 - DNA, 6 bp, Unknown
  misc_feature (1)..( 6): Matrix.002 file - promoters60/1035665
caaaaa

SEQ ID NO: 46610 - DNA, 6 bp, Unknown
  misc_feature (1)..( 6): Matrix.002 file - promoters60/1035665
ttgtgt

SEQ ID NO: 46611 - DNA, 11 bp, Unknown
  misc_feature (1)..( 11): Matrix.002 file - promoters60/1035665
gtttgacatat

SEQ ID NO: 46612 - DNA, 7 bp, Unknown
  misc_feature (1)..( 7): Matrix.002 file - promoters60/1035665
ttacttc

SEQ ID NO: 46613 - DNA, 6 bp, Unknown
  misc_feature (1)..( 6): Matrix.002 file - promoters60/1035665
tttgat

SEQ ID NO: 46614 - DNA, 9 bp, Unknown
  misc_feature (1)..( 9): Matrix.002 file - promoters60/1375217
tttacaaaa

SEQ ID NO: 46615 - DNA, 9 bp, Unknown
  misc_feature (1)..( 9): Matrix.002 file - promoters60/1375217
taaaaattc

SEQ ID NO: 46616 - DNA, 6 bp, Unknown
  misc_feature (1)..( 6): Matrix.002 file - promoters60/1375217
aaaatt

SEQ ID NO: 46617 - DNA, 6 bp, Unknown
  misc_feature (1)..( 6): Matrix.002 file - promoters60/1375217
aataaa

SEQ ID NO: 46618 - DNA, 9 bp, Unknown
  misc_feature (1)..( 9): Matrix.002 file - promoters60/1375217
aaaacaaat

SEQ ID NO: 46619 - DNA, 10 bp, Unknown
  misc_feature (1)..( 10): Matrix.002 file - promoters60/1375217
atattattaa

SEQ ID NO: 46620 - DNA, 9 bp, Unknown
  misc_feature (1)..( 9): Matrix.002 file - promoters60/1375217
ctttttttt

SEQ ID NO: 46621 - DNA, 9 bp, Unknown
  misc_feature (1)..( 9): Matrix.002 file - promoters60/1375217
attaaaaaa

SEQ ID NO: 46622 - DNA, 13 bp, Unknown
  misc_feature (1)..( 13): Matrix.002 file - promoters60/1375217
tcctttatatata

SEQ ID NO: 46623 - DNA, 11 bp, Unknown
  misc_feature (1)..( 11): Matrix.002 file - promoters60/1375217
atttaaaaaca

SEQ ID NO: 46624 - DNA, 8 bp, Unknown
  misc_feature (1)..( 8): Matrix.002 file - promoters60/1375217
ttaatatt

SEQ ID NO: 46625 - DNA, 7 bp, Unknown
  misc_feature (1)..( 7): Matrix.002 file - promoters60/1375217
aaatttt

SEQ ID NO: 46626 - DNA, 5 bp, Unknown
  misc_feature (1)..( 5): Matrix.002 file - promoters60/1375217
agtta

SEQ ID NO: 46627 - DNA, 8 bp, Unknown
  misc_feature (1)..( 8): Matrix.002 file - promoters60/1375252
ataaatag

SEQ ID NO: 46628 - DNA, 7 bp, Unknown
  misc_feature (1)..( 7): Matrix.002 file - promoters60/1375252
actgtct

SEQ ID NO: 46629 - DNA, 7 bp, Unknown
  misc_feature (1)..( 7): Matrix.002 file - promoters60/1375266
gaaacgt

SEQ ID NO: 46630 - DNA, 6 bp, Unknown
  misc_feature (1)..( 6): Matrix.002 file - promoters60/1375266
tctctc

SEQ ID NO: 46631 - DNA, 8 bp, Unknown
  misc_feature (1)..( 8): Matrix.002 file - promoters60/1375266
ccgataac

SEQ ID NO: 46632 - DNA, 6 bp, Unknown
  misc_feature (1)..( 6): Matrix.002 file - promoters60/1375266
ttgaag

SEQ ID NO: 46633 - DNA, 7 bp, Unknown
  misc_feature (1)..( 7): Matrix.002 file - promoters60/1375266
aaaaaaa

SEQ ID NO: 46634 - DNA, 7 bp, Unknown
  misc_feature (1)..( 7): Matrix.002 file - promoters60/1375266
acaaaat

SEQ ID NO: 46635 - DNA, 8 bp, Unknown
  misc_feature (1)..( 8): Matrix.002 file - promoters60/1375266
ataaaaaa

SEQ ID NO: 46636 - DNA, 9 bp, Unknown
  misc_feature (1)..( 9): Matrix.002 file - promoters60/1375266
taaataaaa

SEQ ID NO: 46637 - DNA, 7 bp, Unknown
  misc_feature (1)..( 7): Matrix.002 file - promoters60/1375266
atgatga

SEQ ID NO: 46638 - DNA, 8 bp, Unknown
  misc_feature (1)..( 8): Matrix.002 file - promoters60/1375266
attgtttt

SEQ ID NO: 46639 - DNA, 8 bp, Unknown
  misc_feature (1)..( 8): Matrix.002 file - promoters60/1375266
tgagtatt

SEQ ID NO: 46640 - DNA, 8 bp, Unknown
  misc_feature (1)..( 8): Matrix.002 file - promoters60/1375266
aagaggat

SEQ ID NO: 46641 - DNA, 10 bp, Unknown
  misc_feature (1)..( 10): Matrix.002 file - promoters60/1375266
tttatttata

SEQ ID NO: 46642 - DNA, 7 bp, Unknown
  misc_feature (1)..( 7): Matrix.002 file - promoters60/1375266
tctaaaa

SEQ ID NO: 46643 - DNA, 6 bp, Unknown
  misc_feature (1)..( 6): Matrix.002 file - promoters60/1375329
aaaaca

SEQ ID NO: 46644 - DNA, 7 bp, Unknown
  misc_feature (1)..( 7): Matrix.002 file - promoters60/1375329
atcatga

SEQ ID NO: 46645 - DNA, 6 bp, Unknown
  misc_feature (1)..( 6): Matrix.002 file - promoters60/1375329
gtttta

SEQ ID NO: 46646 - DNA, 7 bp, Unknown
  misc_feature (1)..( 7): Matrix.002 file - promoters60/1375329
tttatgt

SEQ ID NO: 46647 - DNA, 7 bp, Unknown
  misc_feature (1)..( 7): Matrix.002 file - promoters60/1375329
ttaaaac

SEQ ID NO: 46648 - DNA, 8 bp, Unknown
  misc_feature (1)..( 8): Matrix.002 file - promoters60/1375329
tctgtttg

SEQ ID NO: 46649 - DNA, 8 bp, Unknown
  misc_feature (1)..( 8): Matrix.002 file - promoters60/1375329
aaaaacat

SEQ ID NO: 46650 - DNA, 7 bp, Unknown
  misc_feature (1)..( 7): Matrix.002 file - promoters60/1375329
aaccaat

SEQ ID NO: 46651 - DNA, 6 bp, Unknown
  misc_feature (1)..( 6): Matrix.002 file - promoters60/1375329
cctata

SEQ ID NO: 46652 - DNA, 15 bp, Unknown
  misc_feature (1)..( 15): Matrix.002 file - promoters60/1375329
aaggcaggctgtcac

SEQ ID NO: 46653 - DNA, 27 bp, Unknown
  misc_feature (1)..( 27): Matrix.002 file - promoters60/1375329
tggcggaccccaacaaattatcaaatc

SEQ ID NO: 46654 - DNA, 8 bp, Unknown
  misc_feature (1)..( 8): Matrix.002 file - promoters60/1375329
aataaatt

SEQ ID NO: 46655 - DNA, 10 bp, Unknown
  misc_feature (1)..( 10): Matrix.002 file - promoters60/1375329
aaaccaatcc

SEQ ID NO: 46656 - DNA, 10 bp, Unknown
  misc_feature (1)..( 10): Matrix.002 file - promoters60/1375329
ataacaataa

SEQ ID NO: 46657 - DNA, 7 bp, Unknown
  misc_feature (1)..( 7): Matrix.002 file - promoters60/1375329
taaataa

SEQ ID NO: 46658 - DNA, 8 bp, Unknown
  misc_feature (1)..( 8): Matrix.002 file - promoters60/1375329
acaacctt

SEQ ID NO: 46659 - DNA, 6 bp, Unknown
  misc_feature (1)..( 6): Matrix.002 file - promoters60/1375329
cttaca

SEQ ID NO: 46660 - DNA, 7 bp, Unknown
  misc_feature (1)..( 7): Matrix.002 file - promoters60/1375329
ttccttt

SEQ ID NO: 46661 - DNA, 8 bp, Unknown
  misc_feature (1)..( 8): Matrix.002 file - promoters60/1375456
gcttcgtt

SEQ ID NO: 46662 - DNA, 7 bp, Unknown
  misc_feature (1)..( 7): Matrix.002 file - promoters60/1375456
aaaagca

SEQ ID NO: 46663 - DNA, 9 bp, Unknown
  misc_feature (1)..( 9): Matrix.002 file - promoters60/1375456
ttggaacaa

SEQ ID NO: 46664 - DNA, 9 bp, Unknown
  misc_feature (1)..( 9): Matrix.002 file - promoters60/1375456
agaaagaaa

SEQ ID NO: 46665 - DNA, 10 bp, Unknown
  misc_feature (1)..( 10): Matrix.002 file - promoters60/1375456
agaaaagaaa

SEQ ID NO: 46666 - DNA, 6 bp, Unknown
  misc_feature (1)..( 6): Matrix.002 file - promoters60/1375456
gaagaa

SEQ ID NO: 46667 - DNA, 6 bp, Unknown
  misc_feature (1)..( 6): Matrix.002 file - promoters60/1375456
ttctct

SEQ ID NO: 46668 - DNA, 11 bp, Unknown
  misc_feature (1)..( 11): Matrix.002 file - promoters60/1375456
gaaatataata

SEQ ID NO: 46669 - DNA, 6 bp, Unknown
  misc_feature (1)..( 6): Matrix.002 file - promoters60/1375456
agtaaa

SEQ ID NO: 46670 - DNA, 7 bp, Unknown
  misc_feature (1)..( 7): Matrix.002 file - promoters60/1375456
aatcggg

SEQ ID NO: 46671 - DNA, 7 bp, Unknown
  misc_feature (1)..( 7): Matrix.002 file - promoters60/1375456
cccacta

SEQ ID NO: 46672 - DNA, 9 bp, Unknown
  misc_feature (1)..( 9): Matrix.002 file - promoters60/1375456
aaagaaaag

SEQ ID NO: 46673 - DNA, 7 bp, Unknown
  misc_feature (1)..( 7): Matrix.002 file - promoters60/1375456
gtatata

SEQ ID NO: 46674 - DNA, 8 bp, Unknown
  misc_feature (1)..( 8): Matrix.002 file - promoters60/1375471
tttaattc

SEQ ID NO: 46675 - DNA, 8 bp, Unknown
  misc_feature (1)..( 8): Matrix.002 file - promoters60/1375471
gaatctaa

SEQ ID NO: 46676 - DNA, 7 bp, Unknown
  misc_feature (1)..( 7): Matrix.002 file - promoters60/1375471
aaaaaat

SEQ ID NO: 46677 - DNA, 13 bp, Unknown
  misc_feature (1)..( 13): Matrix.002 file - promoters60/1375471
tgataaaatttca

SEQ ID NO: 46678 - DNA, 10 bp, Unknown
  misc_feature (1)..( 10): Matrix.002 file - promoters60/1375471
caatattata

SEQ ID NO: 46679 - DNA, 8 bp, Unknown
  misc_feature (1)..( 8): Matrix.002 file - promoters60/1375474
taatgtca

SEQ ID NO: 46680 - DNA, 7 bp, Unknown
  misc_feature (1)..( 7): Matrix.002 file - promoters60/1375474
atgccat

SEQ ID NO: 46681 - DNA, 6 bp, Unknown
  misc_feature (1)..( 6): Matrix.002 file - promoters60/1375474
attagt

SEQ ID NO: 46682 - DNA, 7 bp, Unknown
  misc_feature (1)..( 7): Matrix.002 file - promoters60/1375474
tcatata

SEQ ID NO: 46683 - DNA, 10 bp, Unknown
  misc_feature (1)..( 10): Matrix.002 file - promoters60/1375474
aaacctaaat

SEQ ID NO: 46684 - DNA, 9 bp, Unknown
  misc_feature (1)..( 9): Matrix.002 file - promoters60/1375474
gtagtatta

SEQ ID NO: 46685 - DNA, 7 bp, Unknown
  misc_feature (1)..( 7): Matrix.002 file - promoters60/1375474
aatgtaa

SEQ ID NO: 46686 - DNA, 6 bp, Unknown
  misc_feature (1)..( 6): Matrix.002 file - promoters60/1375474
aaccaa

SEQ ID NO: 46687 - DNA, 10 bp, Unknown
  misc_feature (1)..( 10): Matrix.002 file - promoters60/1375474
tatcatattt

SEQ ID NO: 46688 - DNA, 8 bp, Unknown
  misc_feature (1)..( 8): Matrix.002 file - promoters60/1375474
aatacgtt

SEQ ID NO: 46689 - DNA, 10 bp, Unknown
  misc_feature (1)..( 10): Matrix.002 file - promoters60/1375474
cactttcttc

SEQ ID NO: 46690 - DNA, 6 bp, Unknown
  misc_feature (1)..( 6): Matrix.002 file - promoters60/1375474
aagttg

SEQ ID NO: 46691 - DNA, 6 bp, Unknown
  misc_feature (1)..( 6): Matrix.002 file - promoters60/1375474
cattct

SEQ ID NO: 46692 - DNA, 6 bp, Unknown
  misc_feature (1)..( 6): Matrix.002 file - promoters60/1375474
tctgga

SEQ ID NO: 46693 - DNA, 7 bp, Unknown
  misc_feature (1)..( 7): Matrix.002 file - promoters60/1375474
attgtta

SEQ ID NO: 46694 - DNA, 10 bp, Unknown
  misc_feature (1)..( 10): Matrix.002 file - promoters60/1375547
cgaaagacag

SEQ ID NO: 46695 - DNA, 11 bp, Unknown
  misc_feature (1)..( 11): Matrix.002 file - promoters60/1375547
ctttattcgat

SEQ ID NO: 46696 - DNA, 8 bp, Unknown
  misc_feature (1)..( 8): Matrix.002 file - promoters60/1375547
ataactgg

SEQ ID NO: 46697 - DNA, 7 bp, Unknown
  misc_feature (1)..( 7): Matrix.002 file - promoters60/1375547
cttattc

SEQ ID NO: 46698 - DNA, 6 bp, Unknown
  misc_feature (1)..( 6): Matrix.002 file - promoters60/1375547
ttcatc

SEQ ID NO: 46699 - DNA, 7 bp, Unknown
  misc_feature (1)..( 7): Matrix.002 file - promoters60/1375547
atttgtt

SEQ ID NO: 46700 - DNA, 6 bp, Unknown
  misc_feature (1)..( 6): Matrix.002 file - promoters60/1375547
tctcgc

SEQ ID NO: 46701 - DNA, 6 bp, Unknown
  misc_feature (1)..( 6): Matrix.002 file - promoters60/1375547
gaacat

SEQ ID NO: 46702 - DNA, 6 bp, Unknown
  misc_feature (1)..( 6): Matrix.002 file - promoters60/1375547
aagaaa

SEQ ID NO: 46703 - DNA, 6 bp, Unknown
  misc_feature (1)..( 6): Matrix.002 file - promoters60/1375547
acgccg

SEQ ID NO: 46704 - DNA, 6 bp, Unknown
  misc_feature (1)..( 6): Matrix.002 file - promoters60/1375547
gcggcg

SEQ ID NO: 46705 - DNA, 7 bp, Unknown
  misc_feature (1)..( 7): Matrix.002 file - promoters60/1375547
gttcgtt

SEQ ID NO: 46706 - DNA, 7 bp, Unknown
  misc_feature (1)..( 7): Matrix.002 file - promoters60/1375547
tttattc

SEQ ID NO: 46707 - DNA, 6 bp, Unknown
  misc_feature (1)..( 6): Matrix.002 file - promoters60/1375570
tgaaga

SEQ ID NO: 46708 - DNA, 6 bp, Unknown
  misc_feature (1)..( 6): Matrix.002 file - promoters60/1375570
tgttac

SEQ ID NO: 46709 - DNA, 7 bp, Unknown
  misc_feature (1)..( 7): Matrix.002 file - promoters60/1375570
agaagaa

SEQ ID NO: 46710 - DNA, 6 bp, Unknown
  misc_feature (1)..( 6): Matrix.002 file - promoters60/1375570
tggaag

SEQ ID NO: 46711 - DNA, 11 bp, Unknown
  misc_feature (1)..( 11): Matrix.002 file - promoters60/1375570
tgtgatgatgt

SEQ ID NO: 46712 - DNA, 10 bp, Unknown
  misc_feature (1)..( 10): Matrix.002 file - promoters60/1375570
aaatcgaacc

SEQ ID NO: 46713 - DNA, 7 bp, Unknown
  misc_feature (1)..( 7): Matrix.002 file - promoters60/1375570
tgaacaa

SEQ ID NO: 46714 - DNA, 6 bp, Unknown
  misc_feature (1)..( 6): Matrix.002 file - promoters60/1375570
tgaaag

SEQ ID NO: 46715 - DNA, 6 bp, Unknown
  misc_feature (1)..( 6): Matrix.002 file - promoters60/1375570
tttgtc

SEQ ID NO: 46716 - DNA, 7 bp, Unknown
  misc_feature (1)..( 7): Matrix.002 file - promoters60/1375570
aaggaca

SEQ ID NO: 46717 - DNA, 7 bp, Unknown
  misc_feature (1)..( 7): Matrix.002 file - promoters60/1375570
gtcaagg

SEQ ID NO: 46718 - DNA, 6 bp, Unknown
  misc_feature (1)..( 6): Matrix.002 file - promoters60/1375570
gttgga

SEQ ID NO: 46719 - DNA, 7 bp, Unknown
  misc_feature (1)..( 7): Matrix.002 file - promoters60/1375570
gagcttc

SEQ ID NO: 46720 - DNA, 8 bp, Unknown
  misc_feature (1)..( 8): Matrix.002 file - promoters60/1375615
atcatatt

SEQ ID NO: 46721 - DNA, 9 bp, Unknown
  misc_feature (1)..( 9): Matrix.002 file - promoters60/1375615
tttgtagtg

SEQ ID NO: 46722 - DNA, 8 bp, Unknown
  misc_feature (1)..( 8): Matrix.002 file - promoters60/1375615
tgatttgt

SEQ ID NO: 46723 - DNA, 6 bp, Unknown
  misc_feature (1)..( 6): Matrix.002 file - promoters60/1375615
atattt

SEQ ID NO: 46724 - DNA, 7 bp, Unknown
  misc_feature (1)..( 7): Matrix.002 file - promoters60/1375615
gtttgtt

SEQ ID NO: 46725 - DNA, 6 bp, Unknown
  misc_feature (1)..( 6): Matrix.002 file - promoters60/1375615
tgatgt

SEQ ID NO: 46726 - DNA, 8 bp, Unknown
  misc_feature (1)..( 8): Matrix.002 file - promoters60/1375615
gatttgtt

SEQ ID NO: 46727 - DNA, 7 bp, Unknown
  misc_feature (1)..( 7): Matrix.002 file - promoters60/1375615
gttttgt

SEQ ID NO: 46728 - DNA, 7 bp, Unknown
  misc_feature (1)..( 7): Matrix.002 file - promoters60/1375615
aagaaca

SEQ ID NO: 46729 - DNA, 6 bp, Unknown
  misc_feature (1)..( 6): Matrix.002 file - promoters60/1375615
tgtgat

SEQ ID NO: 46730 - DNA, 8 bp, Unknown
  misc_feature (1)..( 8): Matrix.002 file - promoters60/1375615
ataatttg

SEQ ID NO: 46731 - DNA, 8 bp, Unknown
  misc_feature (1)..( 8): Matrix.002 file - promoters60/1375615
agtatgtt

SEQ ID NO: 46732 - DNA, 6 bp, Unknown
  misc_feature (1)..( 6): Matrix.002 file - promoters60/1375615
tgtttg

SEQ ID NO: 46733 - DNA, 6 bp, Unknown
  misc_feature (1)..( 6): Matrix.002 file - promoters60/1375615
gagttt

SEQ ID NO: 46734 - DNA, 6 bp, Unknown
  misc_feature (1)..( 6): Matrix.002 file - promoters60/1375615
ctgatt

SEQ ID NO: 46735 - DNA, 6 bp, Unknown
  misc_feature (1)..( 6): Matrix.002 file - promoters60/1375615
ttagtt

SEQ ID NO: 46736 - DNA, 11 bp, Unknown
  misc_feature (1)..( 11): Matrix.002 file - promoters60/1375634
tcaattttatc

SEQ ID NO: 46737 - DNA, 7 bp, Unknown
  misc_feature (1)..( 7): Matrix.002 file - promoters60/1375634
aaatatg

SEQ ID NO: 46738 - DNA, 9 bp, Unknown
  misc_feature (1)..( 9): Matrix.002 file - promoters60/1375634
aatatgtac

SEQ ID NO: 46739 - DNA, 8 bp, Unknown
  misc_feature (1)..( 8): Matrix.002 file - promoters60/1375634
aaaacaac

SEQ ID NO: 46740 - DNA, 9 bp, Unknown
  misc_feature (1)..( 9): Matrix.002 file - promoters60/1375634
tgtatgcat

SEQ ID NO: 46741 - DNA, 10 bp, Unknown
  misc_feature (1)..( 10): Matrix.002 file - promoters60/1375634
tcaattttat

SEQ ID NO: 46742 - DNA, 10 bp, Unknown
  misc_feature (1)..( 10): Matrix.002 file - promoters60/1375634
tcaattttat

SEQ ID NO: 46743 - DNA, 9 bp, Unknown
  misc_feature (1)..( 9): Matrix.002 file - promoters60/1375634
tatttaaaa

SEQ ID NO: 46744 - DNA, 6 bp, Unknown
  misc_feature (1)..( 6): Matrix.002 file - promoters60/1375634
aaactt

SEQ ID NO: 46745 - DNA, 9 bp, Unknown
  misc_feature (1)..( 9): Matrix.002 file - promoters60/1375793
tgtttgttt

SEQ ID NO: 46746 - DNA, 7 bp, Unknown
  misc_feature (1)..( 7): Matrix.002 file - promoters60/1375957
taaacat

SEQ ID NO: 46747 - DNA, 15 bp, Unknown
  misc_feature (1)..( 15): Matrix.002 file - promoters60/1375957
aaacttaactgataa

SEQ ID NO: 46748 - DNA, 8 bp, Unknown
  misc_feature (1)..( 8): Matrix.002 file - promoters60/1375957
agatttta

SEQ ID NO: 46749 - DNA, 9 bp, Unknown
  misc_feature (1)..( 9): Matrix.002 file - promoters60/1375957
ataaatata

SEQ ID NO: 46750 - DNA, 10 bp, Unknown
  misc_feature (1)..( 10): Matrix.002 file - promoters60/1375957
tttttggtgc

SEQ ID NO: 46751 - DNA, 9 bp, Unknown
  misc_feature (1)..( 9): Matrix.002 file - promoters60/1375957
cttattatg

SEQ ID NO: 46752 - DNA, 9 bp, Unknown
  misc_feature (1)..( 9): Matrix.002 file - promoters60/1375957
aacctattt

SEQ ID NO: 46753 - DNA, 7 bp, Unknown
  misc_feature (1)..( 7): Matrix.002 file - promoters60/1375975
tttcatt

SEQ ID NO: 46754 - DNA, 6 bp, Unknown
  misc_feature (1)..( 6): Matrix.002 file - promoters60/1375975
aatgtt

SEQ ID NO: 46755 - DNA, 8 bp, Unknown
  misc_feature (1)..( 8): Matrix.002 file - promoters60/1375975
aatcttct

SEQ ID NO: 46756 - DNA, 7 bp, Unknown
  misc_feature (1)..( 7): Matrix.002 file - promoters60/1375975
actgaaa

SEQ ID NO: 46757 - DNA, 8 bp, Unknown
  misc_feature (1)..( 8): Matrix.002 file - promoters60/1375975
ttaaaata

SEQ ID NO: 46758 - DNA, 7 bp, Unknown
  misc_feature (1)..( 7): Matrix.002 file - promoters60/1375975
aatataa

SEQ ID NO: 46759 - DNA, 7 bp, Unknown
  misc_feature (1)..( 7): Matrix.002 file - promoters60/1375975
ttggatg

SEQ ID NO: 46760 - DNA, 7 bp, Unknown
  misc_feature (1)..( 7): Matrix.002 file - promoters60/1375975
gttcata

SEQ ID NO: 46761 - DNA, 9 bp, Unknown
  misc_feature (1)..( 9): Matrix.002 file - promoters60/1375975
atgtagata

SEQ ID NO: 46762 - DNA, 6 bp, Unknown
  misc_feature (1)..( 6): Matrix.002 file - promoters60/1375975
gaatat

SEQ ID NO: 46763 - DNA, 7 bp, Unknown
  misc_feature (1)..( 7): Matrix.002 file - promoters60/1375975
aacagtt

SEQ ID NO: 46764 - DNA, 7 bp, Unknown
  misc_feature (1)..( 7): Matrix.002 file - promoters60/1375975
aaaaatt

SEQ ID NO: 46765 - DNA, 8 bp, Unknown
  misc_feature (1)..( 8): Matrix.002 file - promoters60/1375975
atccatca

SEQ ID NO: 46766 - DNA, 8 bp, Unknown
  misc_feature (1)..( 8): Matrix.002 file - promoters60/1375975
aaaggcta

SEQ ID NO: 46767 - DNA, 6 bp, Unknown
  misc_feature (1)..( 6): Matrix.002 file - promoters60/1375975
caaaaa

SEQ ID NO: 46768 - DNA, 8 bp, Unknown
  misc_feature (1)..( 8): Matrix.002 file - promoters60/1375975
aaataaaa

SEQ ID NO: 46769 - DNA, 6 bp, Unknown
  misc_feature (1)..( 6): Matrix.002 file - promoters60/1375975
tgaaat

SEQ ID NO: 46770 - DNA, 6 bp, Unknown
  misc_feature (1)..( 6): Matrix.002 file - promoters60/1375975
atatta

SEQ ID NO: 46771 - DNA, 6 bp, Unknown
  misc_feature (1)..( 6): Matrix.002 file - promoters60/1375975
aagaat

SEQ ID NO: 46772 - DNA, 8 bp, Unknown
  misc_feature (1)..( 8): Matrix.002 file - promoters60/1375975
cttataat

SEQ ID NO: 46773 - DNA, 6 bp, Unknown
  misc_feature (1)..( 6): Matrix.002 file - promoters60/1375975
atttgg

SEQ ID NO: 46774 - DNA, 7 bp, Unknown
  misc_feature (1)..( 7): Matrix.002 file - promoters60/1375975
ttaattt

SEQ ID NO: 46775 - DNA, 7 bp, Unknown
  misc_feature (1)..( 7): Matrix.002 file - promoters60/1376361
cgatcat

SEQ ID NO: 46776 - DNA, 3 bp, Unknown
  misc_feature (1)..( 3): Matrix.002 file - promoters60/1376455
taa

SEQ ID NO: 46777 - DNA, 12 bp, Unknown
  misc_feature (1)..( 12): Matrix.002 file - promoters60/1376455
attgataaatat

SEQ ID NO: 46778 - DNA, 7 bp, Unknown
  misc_feature (1)..( 7): Matrix.002 file - promoters60/1376455
ataataa

SEQ ID NO: 46779 - DNA, 11 bp, Unknown
  misc_feature (1)..( 11): Matrix.002 file - promoters60/1376455
attaaaaaaaa

SEQ ID NO: 46780 - DNA, 8 bp, Unknown
  misc_feature (1)..( 8): Matrix.002 file - promoters60/1376650
gaaatcaa

SEQ ID NO: 46781 - DNA, 8 bp, Unknown
  misc_feature (1)..( 8): Matrix.002 file - promoters60/1376650
gaactcag

SEQ ID NO: 46782 - DNA, 9 bp, Unknown
  misc_feature (1)..( 9): Matrix.002 file - promoters60/1376650
aagaaaaaa

SEQ ID NO: 46783 - DNA, 8 bp, Unknown
  misc_feature (1)..( 8): Matrix.002 file - promoters60/1376650
tgggaaat

SEQ ID NO: 46784 - DNA, 9 bp, Unknown
  misc_feature (1)..( 9): Matrix.002 file - promoters60/1376650
atatataaa

SEQ ID NO: 46785 - DNA, 9 bp, Unknown
  misc_feature (1)..( 9): Matrix.002 file - promoters60/1376650
tgaaacaaa

SEQ ID NO: 46786 - DNA, 6 bp, Unknown
  misc_feature (1)..( 6): Matrix.002 file - promoters60/1376726
agaatt

SEQ ID NO: 46787 - DNA, 8 bp, Unknown
  misc_feature (1)..( 8): Matrix.002 file - promoters60/1376726
agtttgat

SEQ ID NO: 46788 - DNA, 7 bp, Unknown
  misc_feature (1)..( 7): Matrix.002 file - promoters60/1376726
attagaa

SEQ ID NO: 46789 - DNA, 8 bp, Unknown
  misc_feature (1)..( 8): Matrix.002 file - promoters60/1376726
taataatc

SEQ ID NO: 46790 - DNA, 7 bp, Unknown
  misc_feature (1)..( 7): Matrix.002 file - promoters60/1376726
aataaaa

SEQ ID NO: 46791 - DNA, 7 bp, Unknown
  misc_feature (1)..( 7): Matrix.002 file - promoters60/1376726
cagagga

SEQ ID NO: 46792 - DNA, 7 bp, Unknown
  misc_feature (1)..( 7): Matrix.002 file - promoters60/1376726
tttggac

SEQ ID NO: 46793 - DNA, 6 bp, Unknown
  misc_feature (1)..( 6): Matrix.002 file - promoters60/1376726
ctggga

SEQ ID NO: 46794 - DNA, 7 bp, Unknown
  misc_feature (1)..( 7): Matrix.002 file - promoters60/1376726
atctgat

SEQ ID NO: 46795 - DNA, 8 bp, Unknown
  misc_feature (1)..( 8): Matrix.002 file - promoters60/1376726
tcttaatt

SEQ ID NO: 46796 - DNA, 8 bp, Unknown
  misc_feature (1)..( 8): Matrix.002 file - promoters60/1376726
tattctct

SEQ ID NO: 46797 - DNA, 7 bp, Unknown
  misc_feature (1)..( 7): Matrix.002 file - promoters60/1376726
aaaatct

SEQ ID NO: 46798 - DNA, 7 bp, Unknown
  misc_feature (1)..( 7): Matrix.002 file - promoters60/1376726
aaaaatt

SEQ ID NO: 46799 - DNA, 10 bp, Unknown
  misc_feature (1)..( 10): Matrix.002 file - promoters60/1376726
aattacattt

SEQ ID NO: 46800 - DNA, 6 bp, Unknown
  misc_feature (1)..( 6): Matrix.002 file - promoters60/1376881
taaaca

SEQ ID NO: 46801 - DNA, 6 bp, Unknown
  misc_feature (1)..( 6): Matrix.002 file - promoters60/1376881
ttaata

SEQ ID NO: 46802 - DNA, 6 bp, Unknown
  misc_feature (1)..( 6): Matrix.002 file - promoters60/1376881
agtaaa

SEQ ID NO: 46803 - DNA, 8 bp, Unknown
  misc_feature (1)..( 8): Matrix.002 file - promoters60/1376881
aaaaccct

SEQ ID NO: 46804 - DNA, 7 bp, Unknown
  misc_feature (1)..( 7): Matrix.002 file - promoters60/1376881
gctggtt

SEQ ID NO: 46805 - DNA, 10 bp, Unknown
  misc_feature (1)..( 10): Matrix.002 file - promoters60/1376881
aagagaatga

SEQ ID NO: 46806 - DNA, 10 bp, Unknown
  misc_feature (1)..( 10): Matrix.002 file - promoters60/1376881
gaaacaaaaa

SEQ ID NO: 46807 - DNA, 11 bp, Unknown
  misc_feature (1)..( 11): Matrix.002 file - promoters60/1376881
tgaacgtcatt

SEQ ID NO: 46808 - DNA, 7 bp, Unknown
  misc_feature (1)..( 7): Matrix.002 file - promoters60/1376881
aatcggg

SEQ ID NO: 46809 - DNA, 10 bp, Unknown
  misc_feature (1)..( 10): Matrix.002 file - promoters60/1376881
ggaaaagaaa

SEQ ID NO: 46810 - DNA, 7 bp, Unknown
  misc_feature (1)..( 7): Matrix.002 file - promoters60/1376881
cccacta

SEQ ID NO: 46811 - DNA, 9 bp, Unknown
  misc_feature (1)..( 9): Matrix.002 file - promoters60/1376881
aaagaaaag

SEQ ID NO: 46812 - DNA, 7 bp, Unknown
  misc_feature (1)..( 7): Matrix.002 file - promoters60/1376881
gtatata

SEQ ID NO: 46813 - DNA, 6 bp, Unknown
  misc_feature (1)..( 6): Matrix.002 file - promoters60/1376888
ctttat

SEQ ID NO: 46814 - DNA, 7 bp, Unknown
  misc_feature (1)..( 7): Matrix.002 file - promoters60/1376888
tatattt

SEQ ID NO: 46815 - DNA, 8 bp, Unknown
  misc_feature (1)..( 8): Matrix.002 file - promoters60/1376888
tttagttt

SEQ ID NO: 46816 - DNA, 8 bp, Unknown
  misc_feature (1)..( 8): Matrix.002 file - promoters60/1376888
ttttgttt

SEQ ID NO: 46817 - DNA, 6 bp, Unknown
  misc_feature (1)..( 6): Matrix.002 file - promoters60/1376902
taatgc

SEQ ID NO: 46818 - DNA, 7 bp, Unknown
  misc_feature (1)..( 7): Matrix.002 file - promoters60/1376902
atactaa

SEQ ID NO: 46819 - DNA, 8 bp, Unknown
  misc_feature (1)..( 8): Matrix.002 file - promoters60/1376902
aagggtaa

SEQ ID NO: 46820 - DNA, 7 bp, Unknown
  misc_feature (1)..( 7): Matrix.002 file - promoters60/1376902
tttgttg

SEQ ID NO: 46821 - DNA, 7 bp, Unknown
  misc_feature (1)..( 7): Matrix.002 file - promoters60/1376902
ttccatt

SEQ ID NO: 46822 - DNA, 7 bp, Unknown
  misc_feature (1)..( 7): Matrix.002 file - promoters60/1376902
acaaact

SEQ ID NO: 46823 - DNA, 7 bp, Unknown
  misc_feature (1)..( 7): Matrix.002 file - promoters60/1376902
ccttttg

SEQ ID NO: 46824 - DNA, 8 bp, Unknown
  misc_feature (1)..( 8): Matrix.002 file - promoters60/1376902
caacatca

SEQ ID NO: 46825 - DNA, 7 bp, Unknown
  misc_feature (1)..( 7): Matrix.002 file - promoters60/1376902
aacattt

SEQ ID NO: 46826 - DNA, 6 bp, Unknown
  misc_feature (1)..( 6): Matrix.002 file - promoters60/1376902
cttctt

SEQ ID NO: 46827 - DNA, 6 bp, Unknown
  misc_feature (1)..( 6): Matrix.002 file - promoters60/1376902
catctc

SEQ ID NO: 46828 - DNA, 6 bp, Unknown
  misc_feature (1)..( 6): Matrix.002 file - promoters60/1376902
agtttt

SEQ ID NO: 46829 - DNA, 7 bp, Unknown
  misc_feature (1)..( 7): Matrix.002 file - promoters60/1376902
acaaaaa

SEQ ID NO: 46830 - DNA, 10 bp, Unknown
  misc_feature (1)..( 10): Matrix.002 file - promoters60/1376958
aatcatacaa

SEQ ID NO: 46831 - DNA, 6 bp, Unknown
  misc_feature (1)..( 6): Matrix.002 file - promoters60/1376958
tcttga

SEQ ID NO: 46832 - DNA, 7 bp, Unknown
  misc_feature (1)..( 7): Matrix.002 file - promoters60/1376958
tagaata

SEQ ID NO: 46833 - DNA, 11 bp, Unknown
  misc_feature (1)..( 11): Matrix.002 file - promoters60/1376958
acacattaagt

SEQ ID NO: 46834 - DNA, 7 bp, Unknown
  misc_feature (1)..( 7): Matrix.002 file - promoters60/1376958
caaataa

SEQ ID NO: 46835 - DNA, 7 bp, Unknown
  misc_feature (1)..( 7): Matrix.002 file - promoters60/1376958
ctaaata

SEQ ID NO: 46836 - DNA, 6 bp, Unknown
  misc_feature (1)..( 6): Matrix.002 file - promoters60/1376958
tataaa

SEQ ID NO: 46837 - DNA, 7 bp, Unknown
  misc_feature (1)..( 7): Matrix.002 file - promoters60/1376958
cacacaa

SEQ ID NO: 46838 - DNA, 7 bp, Unknown
  misc_feature (1)..( 7): Matrix.002 file - promoters60/1376958
aatatca

SEQ ID NO: 46839 - DNA, 8 bp, Unknown
  misc_feature (1)..( 8): Matrix.002 file - promoters60/1376958
atacaaat

SEQ ID NO: 46840 - DNA, 7 bp, Unknown
  misc_feature (1)..( 7): Matrix.002 file - promoters60/1376958
ataaata

SEQ ID NO: 46841 - DNA, 8 bp, Unknown
  misc_feature (1)..( 8): Matrix.002 file - promoters60/1376958
aataataa

SEQ ID NO: 46842 - DNA, 8 bp, Unknown
  misc_feature (1)..( 8): Matrix.002 file - promoters60/1376958
acaaaaag

SEQ ID NO: 46843 - DNA, 6 bp, Unknown
  misc_feature (1)..( 6): Matrix.002 file - promoters60/1376958
ataaac

SEQ ID NO: 46844 - DNA, 7 bp, Unknown
  misc_feature (1)..( 7): Matrix.002 file - promoters60/1376958
tgaacaa

SEQ ID NO: 46845 - DNA, 6 bp, Unknown
  misc_feature (1)..( 6): Matrix.002 file - promoters60/1376958
cgatta

SEQ ID NO: 46846 - DNA, 6 bp, Unknown
  misc_feature (1)..( 6): Matrix.002 file - promoters60/1376958
ttttga

SEQ ID NO: 46847 - DNA, 6 bp, Unknown
  misc_feature (1)..( 6): Matrix.002 file - promoters60/1376958
acagta

SEQ ID NO: 46848 - DNA, 7 bp, Unknown
  misc_feature (1)..( 7): Matrix.002 file - promoters60/1376958
taaaata

SEQ ID NO: 46849 - DNA, 6 bp, Unknown
  misc_feature (1)..( 6): Matrix.002 file - promoters60/1376958
ttgaca

SEQ ID NO: 46850 - DNA, 7 bp, Unknown
  misc_feature (1)..( 7): Matrix.002 file - promoters60/1376958
aaccaag

SEQ ID NO: 46851 - DNA, 8 bp, Unknown
  misc_feature (1)..( 8): Matrix.002 file - promoters60/1376958
acgatgac

SEQ ID NO: 46852 - DNA, 6 bp, Unknown
  misc_feature (1)..( 6): Matrix.002 file - promoters60/1377045
aatatc

SEQ ID NO: 46853 - DNA, 6 bp, Unknown
  misc_feature (1)..( 6): Matrix.002 file - promoters60/1377045
aatgaa

SEQ ID NO: 46854 - DNA, 7 bp, Unknown
  misc_feature (1)..( 7): Matrix.002 file - promoters60/1377045
ataattg

SEQ ID NO: 46855 - DNA, 6 bp, Unknown
  misc_feature (1)..( 6): Matrix.002 file - promoters60/1377045
gggtaa

SEQ ID NO: 46856 - DNA, 8 bp, Unknown
  misc_feature (1)..( 8): Matrix.002 file - promoters60/1377045
aaagaaaa

SEQ ID NO: 46857 - DNA, 8 bp, Unknown
  misc_feature (1)..( 8): Matrix.002 file - promoters60/1377045
aaaacaaa

SEQ ID NO: 46858 - DNA, 8 bp, Unknown
  misc_feature (1)..( 8): Matrix.002 file - promoters60/1377045
ttttgaaa

SEQ ID NO: 46859 - DNA, 6 bp, Unknown
  misc_feature (1)..( 6): Matrix.002 file - promoters60/1377045
agttaa

SEQ ID NO: 46860 - DNA, 6 bp, Unknown
  misc_feature (1)..( 6): Matrix.002 file - promoters60/1377045
accaaa

SEQ ID NO: 46861 - DNA, 8 bp, Unknown
  misc_feature (1)..( 8): Matrix.002 file - promoters60/1377045
aatgcttt

SEQ ID NO: 46862 - DNA, 7 bp, Unknown
  misc_feature (1)..( 7): Matrix.002 file - promoters60/1377045
atatttt

SEQ ID NO: 46863 - DNA, 7 bp, Unknown
  misc_feature (1)..( 7): Matrix.002 file - promoters60/1377045
aaataaa

SEQ ID NO: 46864 - DNA, 7 bp, Unknown
  misc_feature (1)..( 7): Matrix.002 file - promoters60/1377045
gtaaaac

SEQ ID NO: 46865 - DNA, 6 bp, Unknown
  misc_feature (1)..( 6): Matrix.002 file - promoters60/1377045
caaagg

SEQ ID NO: 46866 - DNA, 9 bp, Unknown
  misc_feature (1)..( 9): Matrix.002 file - promoters60/1377139
agttgaaga

SEQ ID NO: 46867 - DNA, 8 bp, Unknown
  misc_feature (1)..( 8): Matrix.002 file - promoters60/1377139
gaaactct

SEQ ID NO: 46868 - DNA, 11 bp, Unknown
  misc_feature (1)..( 11): Matrix.002 file - promoters60/1377139
gattttgttta

SEQ ID NO: 46869 - DNA, 11 bp, Unknown
  misc_feature (1)..( 11): Matrix.002 file - promoters60/1377139
tcaatttaaaa

SEQ ID NO: 46870 - DNA, 8 bp, Unknown
  misc_feature (1)..( 8): Matrix.002 file - promoters60/1377139
tttgagag

SEQ ID NO: 46871 - DNA, 11 bp, Unknown
  misc_feature (1)..( 11): Matrix.002 file - promoters60/1377192
taaaaaaaaaa

SEQ ID NO: 46872 - DNA, 16 bp, Unknown
  misc_feature (1)..( 16): Matrix.002 file - promoters60/1377192
tttactcaacagcttg

SEQ ID NO: 46873 - DNA, 13 bp, Unknown
  misc_feature (1)..( 13): Matrix.002 file - promoters60/1377192
aaataaacaaaaa

SEQ ID NO: 46874 - DNA, 11 bp, Unknown
  misc_feature (1)..( 11): Matrix.002 file - promoters60/1377192
ttaatctttaa

SEQ ID NO: 46875 - DNA, 9 bp, Unknown
  misc_feature (1)..( 9): Matrix.002 file - promoters60/1377192
aaagaaaca

SEQ ID NO: 46876 - DNA, 10 bp, Unknown
  misc_feature (1)..( 10): Matrix.002 file - promoters60/1377192
cgttttcaca

SEQ ID NO: 46877 - DNA, 10 bp, Unknown
  misc_feature (1)..( 10): Matrix.002 file - promoters60/1377192
gacattcact

SEQ ID NO: 46878 - DNA, 8 bp, Unknown
  misc_feature (1)..( 8): Matrix.002 file - promoters60/1377197
caaagaaa

SEQ ID NO: 46879 - DNA, 9 bp, Unknown
  misc_feature (1)..( 9): Matrix.002 file - promoters60/1377197
aaagaaaga

SEQ ID NO: 46880 - DNA, 7 bp, Unknown
  misc_feature (1)..( 7): Matrix.002 file - promoters60/1377197
ataaaaa

SEQ ID NO: 46881 - DNA, 11 bp, Unknown
  misc_feature (1)..( 11): Matrix.002 file - promoters60/1377197
tatgaaaaaaa

SEQ ID NO: 46882 - DNA, 11 bp, Unknown
  misc_feature (1)..( 11): Matrix.002 file - promoters60/1377268
ctaatcagaaa

SEQ ID NO: 46883 - DNA, 7 bp, Unknown
  misc_feature (1)..( 7): Matrix.002 file - promoters60/1377268
tctattt

SEQ ID NO: 46884 - DNA, 10 bp, Unknown
  misc_feature (1)..( 10): Matrix.002 file - promoters60/1377268
aaactacaac

SEQ ID NO: 46885 - DNA, 10 bp, Unknown
  misc_feature (1)..( 10): Matrix.002 file - promoters60/1377268
aaacgtgaaa

SEQ ID NO: 46886 - DNA, 6 bp, Unknown
  misc_feature (1)..( 6): Matrix.002 file - promoters60/1377268
tttact

SEQ ID NO: 46887 - DNA, 14 bp, Unknown
  misc_feature (1)..( 14): Matrix.002 file - promoters60/1377268
taccttttgttaac

SEQ ID NO: 46888 - DNA, 6 bp, Unknown
  misc_feature (1)..( 6): Matrix.002 file - promoters60/1377268
acaatt

SEQ ID NO: 46889 - DNA, 6 bp, Unknown
  misc_feature (1)..( 6): Matrix.002 file - promoters60/1377268
cttcaa

SEQ ID NO: 46890 - DNA, 6 bp, Unknown
  misc_feature (1)..( 6): Matrix.002 file - promoters60/1377268
tattta

SEQ ID NO: 46891 - DNA, 7 bp, Unknown
  misc_feature (1)..( 7): Matrix.002 file - promoters60/1377268
ctaccaa

SEQ ID NO: 46892 - DNA, 7 bp, Unknown
  misc_feature (1)..( 7): Matrix.002 file - promoters60/1377268
tacgaaa

SEQ ID NO: 46893 - DNA, 7 bp, Unknown
  misc_feature (1)..( 7): Matrix.002 file - promoters60/1377268
agaaata

SEQ ID NO: 46894 - DNA, 8 bp, Unknown
  misc_feature (1)..( 8): Matrix.002 file - promoters60/1377268
taagatta

SEQ ID NO: 46895 - DNA, 11 bp, Unknown
  misc_feature (1)..( 11): Matrix.002 file - promoters60/1377268
tatatataaag

SEQ ID NO: 46896 - DNA, 6 bp, Unknown
  misc_feature (1)..( 6): Matrix.002 file - promoters60/1377268
aatatt

SEQ ID NO: 46897 - DNA, 6 bp, Unknown
  misc_feature (1)..( 6): Matrix.002 file - promoters60/1377268
acttat

SEQ ID NO: 46898 - DNA, 6 bp, Unknown
  misc_feature (1)..( 6): Matrix.002 file - promoters60/1377268
ataaac

SEQ ID NO: 46899 - DNA, 6 bp, Unknown
  misc_feature (1)..( 6): Matrix.002 file - promoters60/1377268
aagata

SEQ ID NO: 46900 - DNA, 7 bp, Unknown
  misc_feature (1)..( 7): Matrix.002 file - promoters60/1377268
atttatt

SEQ ID NO: 46901 - DNA, 8 bp, Unknown
  misc_feature (1)..( 8): Matrix.002 file - promoters60/1377412
tactattt

SEQ ID NO: 46902 - DNA, 7 bp, Unknown
  misc_feature (1)..( 7): Matrix.002 file - promoters60/1377472
aaaacaa

SEQ ID NO: 46903 - DNA, 8 bp, Unknown
  misc_feature (1)..( 8): Matrix.002 file - promoters60/1377472
catcgttt

SEQ ID NO: 46904 - DNA, 8 bp, Unknown
  misc_feature (1)..( 8): Matrix.002 file - promoters60/1377472
gattcttt

SEQ ID NO: 46905 - DNA, 7 bp, Unknown
  misc_feature (1)..( 7): Matrix.002 file - promoters60/1377522
gttcctt

SEQ ID NO: 46906 - DNA, 8 bp, Unknown
  misc_feature (1)..( 8): Matrix.002 file - promoters60/1377522
aaatgtta

SEQ ID NO: 46907 - DNA, 7 bp, Unknown
  misc_feature (1)..( 7): Matrix.002 file - promoters60/1377522
gttgatt

SEQ ID NO: 46908 - DNA, 8 bp, Unknown
  misc_feature (1)..( 8): Matrix.002 file - promoters60/1377522
cgacatgt

SEQ ID NO: 46909 - DNA, 6 bp, Unknown
  misc_feature (1)..( 6): Matrix.002 file - promoters60/1377522
acatgt

SEQ ID NO: 46910 - DNA, 7 bp, Unknown
  misc_feature (1)..( 7): Matrix.002 file - promoters60/1377564
attttac

SEQ ID NO: 46911 - DNA, 9 bp, Unknown
  misc_feature (1)..( 9): Matrix.002 file - promoters60/1377564
aagtaataa

SEQ ID NO: 46912 - DNA, 7 bp, Unknown
  misc_feature (1)..( 7): Matrix.002 file - promoters60/1377564
caaaatc

SEQ ID NO: 46913 - DNA, 8 bp, Unknown
  misc_feature (1)..( 8): Matrix.002 file - promoters60/1377564
ttatgtct

SEQ ID NO: 46914 - DNA, 7 bp, Unknown
  misc_feature (1)..( 7): Matrix.002 file - promoters60/1377564
gatcgat

SEQ ID NO: 46915 - DNA, 10 bp, Unknown
  misc_feature (1)..( 10): Matrix.002 file - promoters60/1377642
taaaaaggat

SEQ ID NO: 46916 - DNA, 13 bp, Unknown
  misc_feature (1)..( 13): Matrix.002 file - promoters60/1377642
acttataataaaa

SEQ ID NO: 46917 - DNA, 7 bp, Unknown
  misc_feature (1)..( 7): Matrix.002 file - promoters60/1377642
atataat

SEQ ID NO: 46918 - DNA, 9 bp, Unknown
  misc_feature (1)..( 9): Matrix.002 file - promoters60/1377642
aaaatatat

SEQ ID NO: 46919 - DNA, 11 bp, Unknown
  misc_feature (1)..( 11): Matrix.002 file - promoters60/1377642
ataaaattaat

SEQ ID NO: 46920 - DNA, 12 bp, Unknown
  misc_feature (1)..( 12): Matrix.002 file - promoters60/1377642
ttttgtaaacaa

SEQ ID NO: 46921 - DNA, 8 bp, Unknown
  misc_feature (1)..( 8): Matrix.002 file - promoters60/1377642
aaatttat

SEQ ID NO: 46922 - DNA, 8 bp, Unknown
  misc_feature (1)..( 8): Matrix.002 file - promoters60/1377642
aatcaaaa

SEQ ID NO: 46923 - DNA, 11 bp, Unknown
  misc_feature (1)..( 11): Matrix.002 file - promoters60/1377642
aaaaacacgaa

SEQ ID NO: 46924 - DNA, 8 bp, Unknown
  misc_feature (1)..( 8): Matrix.002 file - promoters60/1377642
aaacttta

SEQ ID NO: 46925 - DNA, 10 bp, Unknown
  misc_feature (1)..( 10): Matrix.002 file - promoters60/1377642
ctttattgat

SEQ ID NO: 46926 - DNA, 8 bp, Unknown
  misc_feature (1)..( 8): Matrix.002 file - promoters60/1377642
tttcaaat

SEQ ID NO: 46927 - DNA, 11 bp, Unknown
  misc_feature (1)..( 11): Matrix.002 file - promoters60/1377642
tgaccaaaaat

SEQ ID NO: 46928 - DNA, 8 bp, Unknown
  misc_feature (1)..( 8): Matrix.002 file - promoters60/1377642
atataata

SEQ ID NO: 46929 - DNA, 7 bp, Unknown
  misc_feature (1)..( 7): Matrix.002 file - promoters60/1377642
aattttt

SEQ ID NO: 46930 - DNA, 10 bp, Unknown
  misc_feature (1)..( 10): Matrix.002 file - promoters60/1377680
aaatcatatt

SEQ ID NO: 46931 - DNA, 6 bp, Unknown
  misc_feature (1)..( 6): Matrix.002 file - promoters60/1377687
attcaa

SEQ ID NO: 46932 - DNA, 7 bp, Unknown
  misc_feature (1)..( 7): Matrix.002 file - promoters60/1377687
cttatct

SEQ ID NO: 46933 - DNA, 8 bp, Unknown
  misc_feature (1)..( 8): Matrix.002 file - promoters60/1377687
tctaaaac

SEQ ID NO: 46934 - DNA, 8 bp, Unknown
  misc_feature (1)..( 8): Matrix.002 file - promoters60/1377687
aaaacaat

SEQ ID NO: 46935 - DNA, 6 bp, Unknown
  misc_feature (1)..( 6): Matrix.002 file - promoters60/1377687
gcaaaa

SEQ ID NO: 46936 - DNA, 8 bp, Unknown
  misc_feature (1)..( 8): Matrix.002 file - promoters60/1377687
tatatata

SEQ ID NO: 46937 - DNA, 8 bp, Unknown
  misc_feature (1)..( 8): Matrix.002 file - promoters60/1377687
ttcaaaac

SEQ ID NO: 46938 - DNA, 15 bp, Unknown
  misc_feature (1)..( 15): Matrix.002 file - promoters60/1377687
acaaaaataaatcac

SEQ ID NO: 46939 - DNA, 6 bp, Unknown
  misc_feature (1)..( 6): Matrix.002 file - promoters60/1377687
tactaa

SEQ ID NO: 46940 - DNA, 7 bp, Unknown
  misc_feature (1)..( 7): Matrix.002 file - promoters60/1377687
aaaatca

SEQ ID NO: 46941 - DNA, 6 bp, Unknown
  misc_feature (1)..( 6): Matrix.002 file - promoters60/1377687
aattat

SEQ ID NO: 46942 - DNA, 7 bp, Unknown
  misc_feature (1)..( 7): Matrix.002 file - promoters60/1377687
ataaatt

SEQ ID NO: 46943 - DNA, 8 bp, Unknown
  misc_feature (1)..( 8): Matrix.002 file - promoters60/1377714
gaaaccac

SEQ ID NO: 46944 - DNA, 8 bp, Unknown
  misc_feature (1)..( 8): Matrix.002 file - promoters60/1377714
gaagaaat

SEQ ID NO: 46945 - DNA, 13 bp, Unknown
  misc_feature (1)..( 13): Matrix.002 file - promoters60/1377714
gttataatttttt

SEQ ID NO: 46946 - DNA, 8 bp, Unknown
  misc_feature (1)..( 8): Matrix.002 file - promoters60/1377714
ttgatata

SEQ ID NO: 46947 - DNA, 7 bp, Unknown
  misc_feature (1)..( 7): Matrix.002 file - promoters60/1377718
gtcgaaa

SEQ ID NO: 46948 - DNA, 7 bp, Unknown
  misc_feature (1)..( 7): Matrix.002 file - promoters60/1377718
aaacatt

SEQ ID NO: 46949 - DNA, 10 bp, Unknown
  misc_feature (1)..( 10): Matrix.002 file - promoters60/1377718
taaatttgct

SEQ ID NO: 46950 - DNA, 9 bp, Unknown
  misc_feature (1)..( 9): Matrix.002 file - promoters60/1377718
tcagtaaga

SEQ ID NO: 46951 - DNA, 7 bp, Unknown
  misc_feature (1)..( 7): Matrix.002 file - promoters60/1377718
tttattg

SEQ ID NO: 46952 - DNA, 7 bp, Unknown
  misc_feature (1)..( 7): Matrix.002 file - promoters60/1377718
tgaaaaa

SEQ ID NO: 46953 - DNA, 6 bp, Unknown
  misc_feature (1)..( 6): Matrix.002 file - promoters60/1377718
aatatt

SEQ ID NO: 46954 - DNA, 12 bp, Unknown
  misc_feature (1)..( 12): Matrix.002 file - promoters60/1377718
ttagtttggtct

SEQ ID NO: 46955 - DNA, 6 bp, Unknown
  misc_feature (1)..( 6): Matrix.002 file - promoters60/1377718
ttttat

SEQ ID NO: 46956 - DNA, 9 bp, Unknown
  misc_feature (1)..( 9): Matrix.002 file - promoters60/1377718
attagaaga

SEQ ID NO: 46957 - DNA, 7 bp, Unknown
  misc_feature (1)..( 7): Matrix.002 file - promoters60/1377734
tatgtgc

SEQ ID NO: 46958 - DNA, 6 bp, Unknown
  misc_feature (1)..( 6): Matrix.002 file - promoters60/1377734
tcatct

SEQ ID NO: 46959 - DNA, 6 bp, Unknown
  misc_feature (1)..( 6): Matrix.002 file - promoters60/1377734
ttttcc

SEQ ID NO: 46960 - DNA, 7 bp, Unknown
  misc_feature (1)..( 7): Matrix.002 file - promoters60/1377734
ttagttt

SEQ ID NO: 46961 - DNA, 6 bp, Unknown
  misc_feature (1)..( 6): Matrix.002 file - promoters60/1377734
agagct

SEQ ID NO: 46962 - DNA, 7 bp, Unknown
  misc_feature (1)..( 7): Matrix.002 file - promoters60/1377734
taaaaat

SEQ ID NO: 46963 - DNA, 7 bp, Unknown
  misc_feature (1)..( 7): Matrix.002 file - promoters60/1377734
tttaatt

SEQ ID NO: 46964 - DNA, 8 bp, Unknown
  misc_feature (1)..( 8): Matrix.002 file - promoters60/1377734
tgaaatat

SEQ ID NO: 46965 - DNA, 7 bp, Unknown
  misc_feature (1)..( 7): Matrix.002 file - promoters60/1377734
ttgactc

SEQ ID NO: 46966 - DNA, 6 bp, Unknown
  misc_feature (1)..( 6): Matrix.002 file - promoters60/1377734
ctaaat

SEQ ID NO: 46967 - DNA, 9 bp, Unknown
  misc_feature (1)..( 9): Matrix.002 file - promoters60/1377734
gagcctgat

SEQ ID NO: 46968 - DNA, 6 bp, Unknown
  misc_feature (1)..( 6): Matrix.002 file - promoters60/1377734
aattgc

SEQ ID NO: 46969 - DNA, 6 bp, Unknown
  misc_feature (1)..( 6): Matrix.002 file - promoters60/1377734
tccaaa

SEQ ID NO: 46970 - DNA, 6 bp, Unknown
  misc_feature (1)..( 6): Matrix.002 file - promoters60/1377734
aaacga

SEQ ID NO: 46971 - DNA, 6 bp, Unknown
  misc_feature (1)..( 6): Matrix.002 file - promoters60/1377734
tctaaa

SEQ ID NO: 46972 - DNA, 8 bp, Unknown
  misc_feature (1)..( 8): Matrix.002 file - promoters60/1377734
aacaaaaa

SEQ ID NO: 46973 - DNA, 8 bp, Unknown
  misc_feature (1)..( 8): Matrix.002 file - promoters60/1377734
ccaagacg

SEQ ID NO: 46974 - DNA, 7 bp, Unknown
  misc_feature (1)..( 7): Matrix.002 file - promoters60/1377734
aggccca

SEQ ID NO: 46975 - DNA, 6 bp, Unknown
  misc_feature (1)..( 6): Matrix.002 file - promoters60/1377835
ttgttt

SEQ ID NO: 46976 - DNA, 6 bp, Unknown
  misc_feature (1)..( 6): Matrix.002 file - promoters60/1377835
tatttt

SEQ ID NO: 46977 - DNA, 7 bp, Unknown
  misc_feature (1)..( 7): Matrix.002 file - promoters60/1377835
tttactt

SEQ ID NO: 46978 - DNA, 6 bp, Unknown
  misc_feature (1)..( 6): Matrix.002 file - promoters60/1377835
aaaaga

SEQ ID NO: 46979 - DNA, 6 bp, Unknown
  misc_feature (1)..( 6): Matrix.002 file - promoters60/1377835
aataaa

SEQ ID NO: 46980 - DNA, 7 bp, Unknown
  misc_feature (1)..( 7): Matrix.002 file - promoters60/1377835
ttcctcc

SEQ ID NO: 46981 - DNA, 10 bp, Unknown
  misc_feature (1)..( 10): Matrix.002 file - promoters60/1377835
gtaaaaattt

SEQ ID NO: 46982 - DNA, 7 bp, Unknown
  misc_feature (1)..( 7): Matrix.002 file - promoters60/1377835
ttgctca

SEQ ID NO: 46983 - DNA, 7 bp, Unknown
  misc_feature (1)..( 7): Matrix.002 file - promoters60/1377835
ccactaa

SEQ ID NO: 46984 - DNA, 6 bp, Unknown
  misc_feature (1)..( 6): Matrix.002 file - promoters60/1377835
ataaaa

SEQ ID NO: 46985 - DNA, 8 bp, Unknown
  misc_feature (1)..( 8): Matrix.002 file - promoters60/1377835
tttatttt

SEQ ID NO: 46986 - DNA, 6 bp, Unknown
  misc_feature (1)..( 6): Matrix.002 file - promoters60/1377835
tttact

SEQ ID NO: 46987 - DNA, 9 bp, Unknown
  misc_feature (1)..( 9): Matrix.002 file - promoters60/1377835
cttagtttt

SEQ ID NO: 46988 - DNA, 8 bp, Unknown
  misc_feature (1)..( 8): Matrix.002 file - promoters60/1377835
tttgtttg

SEQ ID NO: 46989 - DNA, 6 bp, Unknown
  misc_feature (1)..( 6): Matrix.002 file - promoters60/1377835
aagttt

SEQ ID NO: 46990 - DNA, 10 bp, Unknown
  misc_feature (1)..( 10): Matrix.002 file - promoters60/1377835
caaactaatt

SEQ ID NO: 46991 - DNA, 7 bp, Unknown
  misc_feature (1)..( 7): Matrix.002 file - promoters60/1377835
attagaa

SEQ ID NO: 46992 - DNA, 8 bp, Unknown
  misc_feature (1)..( 8): Matrix.002 file - promoters60/1377835
aacaaaat

SEQ ID NO: 46993 - DNA, 8 bp, Unknown
  misc_feature (1)..( 8): Matrix.002 file - promoters60/1377847
aaaaaata

SEQ ID NO: 46994 - DNA, 10 bp, Unknown
  misc_feature (1)..( 10): Matrix.002 file - promoters60/1377847
aaattataaa

SEQ ID NO: 46995 - DNA, 5 bp, Unknown
  misc_feature (1)..( 5): Matrix.002 file - promoters60/1377847
taaaa

SEQ ID NO: 46996 - DNA, 13 bp, Unknown
  misc_feature (1)..( 13): Matrix.002 file - promoters60/1377847
attacaaaaataa

SEQ ID NO: 46997 - DNA, 10 bp, Unknown
  misc_feature (1)..( 10): Matrix.002 file - promoters60/1377847
aaaaaataaa

SEQ ID NO: 46998 - DNA, 10 bp, Unknown
  misc_feature (1)..( 10): Matrix.002 file - promoters60/1377847
atattattat

SEQ ID NO: 46999 - DNA, 8 bp, Unknown
  misc_feature (1)..( 8): Matrix.002 file - promoters60/1377847
aaaccaat

SEQ ID NO: 47000 - DNA, 10 bp, Unknown
  misc_feature (1)..( 10): Matrix.002 file - promoters60/1377847
gaaaaaataa

SEQ ID NO: 47001 - DNA, 9 bp, Unknown
  misc_feature (1)..( 9): Matrix.002 file - promoters60/1377847
aaatgttta

SEQ ID NO: 47002 - DNA, 8 bp, Unknown
  misc_feature (1)..( 8): Matrix.002 file - promoters60/1378049
aaaaattt

SEQ ID NO: 47003 - DNA, 8 bp, Unknown
  misc_feature (1)..( 8): Matrix.002 file - promoters60/1378049
aaaacaaa

SEQ ID NO: 47004 - DNA, 12 bp, Unknown
  misc_feature (1)..( 12): Matrix.002 file - promoters60/1378049
tcatttgaataa

SEQ ID NO: 47005 - DNA, 12 bp, Unknown
  misc_feature (1)..( 12): Matrix.002 file - promoters60/1378049
ttgagttttaaa

SEQ ID NO: 47006 - DNA, 12 bp, Unknown
  misc_feature (1)..( 12): Matrix.002 file - promoters60/1378049
ttccaaaaataa

SEQ ID NO: 47007 - DNA, 10 bp, Unknown
  misc_feature (1)..( 10): Matrix.002 file - promoters60/1378049
atatatataa

SEQ ID NO: 47008 - DNA, 14 bp, Unknown
  misc_feature (1)..( 14): Matrix.002 file - promoters60/1378049
attttagatttgcg

SEQ ID NO: 47009 - DNA, 12 bp, Unknown
  misc_feature (1)..( 12): Matrix.002 file - promoters60/1378088
aaattattttat

SEQ ID NO: 47010 - DNA, 9 bp, Unknown
  misc_feature (1)..( 9): Matrix.002 file - promoters60/1378088
aaaaatttt

SEQ ID NO: 47011 - DNA, 11 bp, Unknown
  misc_feature (1)..( 11): Matrix.002 file - promoters60/1378088
aaaattgtttt

SEQ ID NO: 47012 - DNA, 13 bp, Unknown
  misc_feature (1)..( 13): Matrix.002 file - promoters60/1378088
taaaaaaacataa

SEQ ID NO: 47013 - DNA, 8 bp, Unknown
  misc_feature (1)..( 8): Matrix.002 file - promoters60/1378088
aatattta

SEQ ID NO: 47014 - DNA, 7 bp, Unknown
  misc_feature (1)..( 7): Matrix.002 file - promoters60/1378088
tagattt

SEQ ID NO: 47015 - DNA, 8 bp, Unknown
  misc_feature (1)..( 8): Matrix.002 file - promoters60/1378088
aaattatt

SEQ ID NO: 47016 - DNA, 12 bp, Unknown
  misc_feature (1)..( 12): Matrix.002 file - promoters60/1378088
aattagattcga

SEQ ID NO: 47017 - DNA, 9 bp, Unknown
  misc_feature (1)..( 9): Matrix.002 file - promoters60/1378088
aaaaacatt

SEQ ID NO: 47018 - DNA, 9 bp, Unknown
  misc_feature (1)..( 9): Matrix.002 file - promoters60/1378088
aaaaaatta

SEQ ID NO: 47019 - DNA, 7 bp, Unknown
  misc_feature (1)..( 7): Matrix.002 file - promoters60/1378088
taaaaat

SEQ ID NO: 47020 - DNA, 8 bp, Unknown
  misc_feature (1)..( 8): Matrix.002 file - promoters60/1378088
aatcataa

SEQ ID NO: 47021 - DNA, 17 bp, Unknown
  misc_feature (1)..( 17): Matrix.002 file - promoters60/1378088
attttaatcaacaataa

SEQ ID NO: 47022 - DNA, 11 bp, Unknown
  misc_feature (1)..( 11): Matrix.002 file - promoters60/1378088
ttaatttttta

SEQ ID NO: 47023 - DNA, 10 bp, Unknown
  misc_feature (1)..( 10): Matrix.002 file - promoters60/1378088
attttaaaat

SEQ ID NO: 47024 - DNA, 13 bp, Unknown
  misc_feature (1)..( 13): Matrix.002 file - promoters60/1378088
ttataaaaagata

SEQ ID NO: 47025 - DNA, 9 bp, Unknown
  misc_feature (1)..( 9): Matrix.002 file - promoters60/1378088
gttaaaaaa

SEQ ID NO: 47026 - DNA, 12 bp, Unknown
  misc_feature (1)..( 12): Matrix.002 file - promoters60/1378088
taaaaaacaatg

SEQ ID NO: 47027 - DNA, 9 bp, Unknown
  misc_feature (1)..( 9): Matrix.002 file - promoters60/1378088
aaaattaac

SEQ ID NO: 47028 - DNA, 10 bp, Unknown
  misc_feature (1)..( 10): Matrix.002 file - promoters60/1378088
caaaaaaaaa

SEQ ID NO: 47029 - DNA, 8 bp, Unknown
  misc_feature (1)..( 8): Matrix.002 file - promoters60/1378088
aaaacaaa

SEQ ID NO: 47030 - DNA, 9 bp, Unknown
  misc_feature (1)..( 9): Matrix.002 file - promoters60/1378287
atttgagag

SEQ ID NO: 47031 - DNA, 11 bp, Unknown
  misc_feature (1)..( 11): Matrix.002 file - promoters60/1378287
aaaatgtgaaa

SEQ ID NO: 47032 - DNA, 8 bp, Unknown
  misc_feature (1)..( 8): Matrix.002 file - promoters60/1378287
aaatatta

SEQ ID NO: 47033 - DNA, 10 bp, Unknown
  misc_feature (1)..( 10): Matrix.002 file - promoters60/1378287
taaattgaaa

SEQ ID NO: 47034 - DNA, 8 bp, Unknown
  misc_feature (1)..( 8): Matrix.002 file - promoters60/1378297
taagattt

SEQ ID NO: 47035 - DNA, 9 bp, Unknown
  misc_feature (1)..( 9): Matrix.002 file - promoters60/1378297
aaatggttt

SEQ ID NO: 47036 - DNA, 6 bp, Unknown
  misc_feature (1)..( 6): Matrix.002 file - promoters60/1378297
aaaaaa

SEQ ID NO: 47037 - DNA, 6 bp, Unknown
  misc_feature (1)..( 6): Matrix.002 file - promoters60/1378297
aaaaat

SEQ ID NO: 47038 - DNA, 7 bp, Unknown
  misc_feature (1)..( 7): Matrix.002 file - promoters60/1378297
aaacaaa

SEQ ID NO: 47039 - DNA, 6 bp, Unknown
  misc_feature (1)..( 6): Matrix.002 file - promoters60/1378297
aaataa

SEQ ID NO: 47040 - DNA, 6 bp, Unknown
  misc_feature (1)..( 6): Matrix.002 file - promoters60/1378297
atttcc

SEQ ID NO: 47041 - DNA, 8 bp, Unknown
  misc_feature (1)..( 8): Matrix.002 file - promoters60/1378297
aaataatc

SEQ ID NO: 47042 - DNA, 6 bp, Unknown
  misc_feature (1)..( 6): Matrix.002 file - promoters60/1378297
aaaatc

SEQ ID NO: 47043 - DNA, 7 bp, Unknown
  misc_feature (1)..( 7): Matrix.002 file - promoters60/1378297
tatgctt

SEQ ID NO: 47044 - DNA, 8 bp, Unknown
  misc_feature (1)..( 8): Matrix.002 file - promoters60/1378297
aaaataca

SEQ ID NO: 47045 - DNA, 6 bp, Unknown
  misc_feature (1)..( 6): Matrix.002 file - promoters60/1378297
ttgatc

SEQ ID NO: 47046 - DNA, 6 bp, Unknown
  misc_feature (1)..( 6): Matrix.002 file - promoters60/1378297
cacaga

SEQ ID NO: 47047 - DNA, 7 bp, Unknown
  misc_feature (1)..( 7): Matrix.002 file - promoters60/1378297
tacatta

SEQ ID NO: 47048 - DNA, 10 bp, Unknown
  misc_feature (1)..( 10): Matrix.002 file - promoters60/1378297
tgatatcatt

SEQ ID NO: 47049 - DNA, 9 bp, Unknown
  misc_feature (1)..( 9): Matrix.002 file - promoters60/1378297
ataaagaaa

SEQ ID NO: 47050 - DNA, 7 bp, Unknown
  misc_feature (1)..( 7): Matrix.002 file - promoters60/1378297
gtggagc

SEQ ID NO: 47051 - DNA, 8 bp, Unknown
  misc_feature (1)..( 8): Matrix.002 file - promoters60/1378297
gcttttgc

SEQ ID NO: 47052 - DNA, 6 bp, Unknown
  misc_feature (1)..( 6): Matrix.002 file - promoters60/1378333
cgtgga

SEQ ID NO: 47053 - DNA, 7 bp, Unknown
  misc_feature (1)..( 7): Matrix.002 file - promoters60/1378333
gctgaaa

SEQ ID NO: 47054 - DNA, 6 bp, Unknown
  misc_feature (1)..( 6): Matrix.002 file - promoters60/1378333
attcaa

SEQ ID NO: 47055 - DNA, 9 bp, Unknown
  misc_feature (1)..( 9): Matrix.002 file - promoters60/1378333
tttggattt

SEQ ID NO: 47056 - DNA, 8 bp, Unknown
  misc_feature (1)..( 8): Matrix.002 file - promoters60/1378333
cacaccgt

SEQ ID NO: 47057 - DNA, 7 bp, Unknown
  misc_feature (1)..( 7): Matrix.002 file - promoters60/1378333
gtgaatt

SEQ ID NO: 47058 - DNA, 6 bp, Unknown
  misc_feature (1)..( 6): Matrix.002 file - promoters60/1378333
ccgttg

SEQ ID NO: 47059 - DNA, 6 bp, Unknown
  misc_feature (1)..( 6): Matrix.002 file - promoters60/1378333
atcgta

SEQ ID NO: 47060 - DNA, 6 bp, Unknown
  misc_feature (1)..( 6): Matrix.002 file - promoters60/1378333
agtcga

SEQ ID NO: 47061 - DNA, 9 bp, Unknown
  misc_feature (1)..( 9): Matrix.002 file - promoters60/1378333
gtgtcctct

SEQ ID NO: 47062 - DNA, 6 bp, Unknown
  misc_feature (1)..( 6): Matrix.002 file - promoters60/1378333
aaccgt

SEQ ID NO: 47063 - DNA, 7 bp, Unknown
  misc_feature (1)..( 7): Matrix.002 file - promoters60/1378333
aatacaa

SEQ ID NO: 47064 - DNA, 7 bp, Unknown
  misc_feature (1)..( 7): Matrix.002 file - promoters60/1378333
agaaagg

SEQ ID NO: 47065 - DNA, 7 bp, Unknown
  misc_feature (1)..( 7): Matrix.002 file - promoters60/1378333
ttgaaga

SEQ ID NO: 47066 - DNA, 7 bp, Unknown
  misc_feature (1)..( 7): Matrix.002 file - promoters60/1378333
cgtggat

SEQ ID NO: 47067 - DNA, 7 bp, Unknown
  misc_feature (1)..( 7): Matrix.002 file - promoters60/1378333
catcgag

SEQ ID NO: 47068 - DNA, 6 bp, Unknown
  misc_feature (1)..( 6): Matrix.002 file - promoters60/1378333
atcgga

SEQ ID NO: 47069 - DNA, 8 bp, Unknown
  misc_feature (1)..( 8): Matrix.002 file - promoters60/1378333
gtaagttt

SEQ ID NO: 47070 - DNA, 7 bp, Unknown
  misc_feature (1)..( 7): Matrix.002 file - promoters60/1378333
ctaaaca

SEQ ID NO: 47071 - DNA, 14 bp, Unknown
  misc_feature (1)..( 14): Matrix.002 file - promoters60/1378393
gaaaatatcagaat

SEQ ID NO: 47072 - DNA, 15 bp, Unknown
  misc_feature (1)..( 15): Matrix.002 file - promoters60/1378400
cccatagctccttaa

SEQ ID NO: 47073 - DNA, 7 bp, Unknown
  misc_feature (1)..( 7): Matrix.002 file - promoters60/1378400
tttggtt

SEQ ID NO: 47074 - DNA, 8 bp, Unknown
  misc_feature (1)..( 8): Matrix.002 file - promoters60/1378400
gaagagaa

SEQ ID NO: 47075 - DNA, 14 bp, Unknown
  misc_feature (1)..( 14): Matrix.002 file - promoters60/1378400
ttagcttcagcttc

SEQ ID NO: 47076 - DNA, 13 bp, Unknown
  misc_feature (1)..( 13): Matrix.002 file - promoters60/1378400
agagagagagaga

SEQ ID NO: 47077 - DNA, 7 bp, Unknown
  misc_feature (1)..( 7): Matrix.002 file - promoters60/1378400
agagaag

SEQ ID NO: 47078 - DNA, 7 bp, Unknown
  misc_feature (1)..( 7): Matrix.002 file - promoters60/1378400
ggatcaa

SEQ ID NO: 47079 - DNA, 11 bp, Unknown
  misc_feature (1)..( 11): Matrix.002 file - promoters60/1378400
attcagggttt

SEQ ID NO: 47080 - DNA, 8 bp, Unknown
  misc_feature (1)..( 8): Matrix.002 file - promoters60/1378400
aaacaatt

SEQ ID NO: 47081 - DNA, 7 bp, Unknown
  misc_feature (1)..( 7): Matrix.002 file - promoters60/1378400
aacgcga

SEQ ID NO: 47082 - DNA, 8 bp, Unknown
  misc_feature (1)..( 8): Matrix.002 file - promoters60/1378400
aaagagaa

SEQ ID NO: 47083 - DNA, 8 bp, Unknown
  misc_feature (1)..( 8): Matrix.002 file - promoters60/1378400
aacgcgaa

SEQ ID NO: 47084 - DNA, 6 bp, Unknown
  misc_feature (1)..( 6): Matrix.002 file - promoters60/1378400
ttatat

SEQ ID NO: 47085 - DNA, 7 bp, Unknown
  misc_feature (1)..( 7): Matrix.002 file - promoters60/1378400
tttggtt

SEQ ID NO: 47086 - DNA, 6 bp, Unknown
  misc_feature (1)..( 6): Matrix.002 file - promoters60/1378400
tagctt

SEQ ID NO: 47087 - DNA, 7 bp, Unknown
  misc_feature (1)..( 7): Matrix.002 file - promoters60/1378400
aacgcga

SEQ ID NO: 47088 - DNA, 7 bp, Unknown
  misc_feature (1)..( 7): Matrix.002 file - promoters60/1378458
gcttctc

SEQ ID NO: 47089 - DNA, 8 bp, Unknown
  misc_feature (1)..( 8): Matrix.002 file - promoters60/1378458
aaagaaaa

SEQ ID NO: 47090 - DNA, 9 bp, Unknown
  misc_feature (1)..( 9): Matrix.002 file - promoters60/1378458
aaccaatcc

SEQ ID NO: 47091 - DNA, 6 bp, Unknown
  misc_feature (1)..( 6): Matrix.002 file - promoters60/1378458
tgtcaa

SEQ ID NO: 47092 - DNA, 10 bp, Unknown
  misc_feature (1)..( 10): Matrix.002 file - promoters60/1378458
ttcttcatta

SEQ ID NO: 47093 - DNA, 8 bp, Unknown
  misc_feature (1)..( 8): Matrix.002 file - promoters60/1378458
gatgggaa

SEQ ID NO: 47094 - DNA, 7 bp, Unknown
  misc_feature (1)..( 7): Matrix.002 file - promoters60/1378458
tctgcag

SEQ ID NO: 47095 - DNA, 7 bp, Unknown
  misc_feature (1)..( 7): Matrix.002 file - promoters60/1378458
gtcctat

SEQ ID NO: 47096 - DNA, 7 bp, Unknown
  misc_feature (1)..( 7): Matrix.002 file - promoters60/1378458
tggtggg

SEQ ID NO: 47097 - DNA, 7 bp, Unknown
  misc_feature (1)..( 7): Matrix.002 file - promoters60/1378458
gaagttg

SEQ ID NO: 47098 - DNA, 8 bp, Unknown
  misc_feature (1)..( 8): Matrix.002 file - promoters60/1378458
tttagctt

SEQ ID NO: 47099 - DNA, 6 bp, Unknown
  misc_feature (1)..( 6): Matrix.002 file - promoters60/1378458
gaatta

SEQ ID NO: 47100 - DNA, 6 bp, Unknown
  misc_feature (1)..( 6): Matrix.002 file - promoters60/1378458
gcggaa

SEQ ID NO: 47101 - DNA, 7 bp, Unknown
  misc_feature (1)..( 7): Matrix.002 file - promoters60/1378458
tatcttc

SEQ ID NO: 47102 - DNA, 6 bp, Unknown
  misc_feature (1)..( 6): Matrix.002 file - promoters60/1378458
tccttg

SEQ ID NO: 47103 - DNA, 7 bp, Unknown
  misc_feature (1)..( 7): Matrix.002 file - promoters60/1378458
gatatat

SEQ ID NO: 47104 - DNA, 10 bp, Unknown
  misc_feature (1)..( 10): Matrix.002 file - promoters60/1378528
taattttgga

SEQ ID NO: 47105 - DNA, 7 bp, Unknown
  misc_feature (1)..( 7): Matrix.002 file - promoters60/1378528
aaaaaaa

SEQ ID NO: 47106 - DNA, 9 bp, Unknown
  misc_feature (1)..( 9): Matrix.002 file - promoters60/1378528
agtatttag

SEQ ID NO: 47107 - DNA, 7 bp, Unknown
  misc_feature (1)..( 7): Matrix.002 file - promoters60/1378528
tatacaa

SEQ ID NO: 47108 - DNA, 11 bp, Unknown
  misc_feature (1)..( 11): Matrix.002 file - promoters60/1378528
ccaaaataaaa

SEQ ID NO: 47109 - DNA, 9 bp, Unknown
  misc_feature (1)..( 9): Matrix.002 file - promoters60/1378528
ataaaataa

SEQ ID NO: 47110 - DNA, 9 bp, Unknown
  misc_feature (1)..( 9): Matrix.002 file - promoters60/1378528
tttttaatt

SEQ ID NO: 47111 - DNA, 11 bp, Unknown
  misc_feature (1)..( 11): Matrix.002 file - promoters60/1378528
tttaaaagatt

SEQ ID NO: 47112 - DNA, 6 bp, Unknown
  misc_feature (1)..( 6): Matrix.002 file - promoters60/1378528
ttttct

SEQ ID NO: 47113 - DNA, 7 bp, Unknown
  misc_feature (1)..( 7): Matrix.002 file - promoters60/1378622
tttatta

SEQ ID NO: 47114 - DNA, 8 bp, Unknown
  misc_feature (1)..( 8): Matrix.002 file - promoters60/1378622
tttatcta

SEQ ID NO: 47115 - DNA, 6 bp, Unknown
  misc_feature (1)..( 6): Matrix.002 file - promoters60/1378622
attttt

SEQ ID NO: 47116 - DNA, 8 bp, Unknown
  misc_feature (1)..( 8): Matrix.002 file - promoters60/1378622
aaagattt

SEQ ID NO: 47117 - DNA, 8 bp, Unknown
  misc_feature (1)..( 8): Matrix.002 file - promoters60/1378622
ggtatttg

SEQ ID NO: 47118 - DNA, 6 bp, Unknown
  misc_feature (1)..( 6): Matrix.002 file - promoters60/1378622
atgaat

SEQ ID NO: 47119 - DNA, 7 bp, Unknown
  misc_feature (1)..( 7): Matrix.002 file - promoters60/1378622
ttacaat

SEQ ID NO: 47120 - DNA, 9 bp, Unknown
  misc_feature (1)..( 9): Matrix.002 file - promoters60/1378622
aattttaac

SEQ ID NO: 47121 - DNA, 14 bp, Unknown
  misc_feature (1)..( 14): Matrix.002 file - promoters60/1378622
aatttctcccaaaa

SEQ ID NO: 47122 - DNA, 8 bp, Unknown
  misc_feature (1)..( 8): Matrix.002 file - promoters60/1378622
ttaacctt

SEQ ID NO: 47123 - DNA, 13 bp, Unknown
  misc_feature (1)..( 13): Matrix.002 file - promoters60/1378622
ttgaatcaaaatt

SEQ ID NO: 47124 - DNA, 7 bp, Unknown
  misc_feature (1)..( 7): Matrix.002 file - promoters60/1378622
tggattt

SEQ ID NO: 47125 - DNA, 6 bp, Unknown
  misc_feature (1)..( 6): Matrix.002 file - promoters60/1378622
ttggtt

SEQ ID NO: 47126 - DNA, 7 bp, Unknown
  misc_feature (1)..( 7): Matrix.002 file - promoters60/1378622
ctcactc

SEQ ID NO: 47127 - DNA, 8 bp, Unknown
  misc_feature (1)..( 8): Matrix.002 file - promoters60/1378692
attatata

SEQ ID NO: 47128 - DNA, 8 bp, Unknown
  misc_feature (1)..( 8): Matrix.002 file - promoters60/1378692
aatattta

SEQ ID NO: 47129 - DNA, 12 bp, Unknown
  misc_feature (1)..( 12): Matrix.002 file - promoters60/1378692
cgctatttctca

SEQ ID NO: 47130 - DNA, 11 bp, Unknown
  misc_feature (1)..( 11): Matrix.002 file - promoters60/1378692
gaattttataa

SEQ ID NO: 47131 - DNA, 9 bp, Unknown
  misc_feature (1)..( 9): Matrix.002 file - promoters60/1378692
tatacaatg

SEQ ID NO: 47132 - DNA, 8 bp, Unknown
  misc_feature (1)..( 8): Matrix.002 file - promoters60/1378692
aacaatca

SEQ ID NO: 47133 - DNA, 9 bp, Unknown
  misc_feature (1)..( 9): Matrix.002 file - promoters60/1378692
tattataaa

SEQ ID NO: 47134 - DNA, 9 bp, Unknown
  misc_feature (1)..( 9): Matrix.002 file - promoters60/1378692
gatattatt

SEQ ID NO: 47135 - DNA, 6 bp, Unknown
  misc_feature (1)..( 6): Matrix.002 file - promoters60/1378800
gttttt

SEQ ID NO: 47136 - DNA, 8 bp, Unknown
  misc_feature (1)..( 8): Matrix.002 file - promoters60/1378800
gtttcttt

SEQ ID NO: 47137 - DNA, 7 bp, Unknown
  misc_feature (1)..( 7): Matrix.002 file - promoters60/1378800
tttcttt

SEQ ID NO: 47138 - DNA, 8 bp, Unknown
  misc_feature (1)..( 8): Matrix.002 file - promoters60/1378800
attttttt

SEQ ID NO: 47139 - DNA, 9 bp, Unknown
  misc_feature (1)..( 9): Matrix.002 file - promoters60/1378800
ttttttaaa

SEQ ID NO: 47140 - DNA, 8 bp, Unknown
  misc_feature (1)..( 8): Matrix.002 file - promoters60/1378800
cataaaaa

SEQ ID NO: 47141 - DNA, 6 bp, Unknown
  misc_feature (1)..( 6): Matrix.002 file - promoters60/1378880
tgaata

SEQ ID NO: 47142 - DNA, 7 bp, Unknown
  misc_feature (1)..( 7): Matrix.002 file - promoters60/1378880
aaagaaa

SEQ ID NO: 47143 - DNA, 7 bp, Unknown
  misc_feature (1)..( 7): Matrix.002 file - promoters60/1378880
aaaatat

SEQ ID NO: 47144 - DNA, 6 bp, Unknown
  misc_feature (1)..( 6): Matrix.002 file - promoters60/1378880
tcacaa

SEQ ID NO: 47145 - DNA, 7 bp, Unknown
  misc_feature (1)..( 7): Matrix.002 file - promoters60/1378880
atctaac

SEQ ID NO: 47146 - DNA, 15 bp, Unknown
  misc_feature (1)..( 15): Matrix.002 file - promoters60/1378880
gcttatgatgtgtcg

SEQ ID NO: 47147 - DNA, 7 bp, Unknown
  misc_feature (1)..( 7): Matrix.002 file - promoters60/1378880
atacaaa

SEQ ID NO: 47148 - DNA, 7 bp, Unknown
  misc_feature (1)..( 7): Matrix.002 file - promoters60/1378880
atatata

SEQ ID NO: 47149 - DNA, 7 bp, Unknown
  misc_feature (1)..( 7): Matrix.002 file - promoters60/1378880
aaaatat

SEQ ID NO: 47150 - DNA, 7 bp, Unknown
  misc_feature (1)..( 7): Matrix.002 file - promoters60/1378880
aaacaaa

SEQ ID NO: 47151 - DNA, 8 bp, Unknown
  misc_feature (1)..( 8): Matrix.002 file - promoters60/1378880
ctaatttc

SEQ ID NO: 47152 - DNA, 6 bp, Unknown
  misc_feature (1)..( 6): Matrix.002 file - promoters60/1378880
gattct

SEQ ID NO: 47153 - DNA, 7 bp, Unknown
  misc_feature (1)..( 7): Matrix.002 file - promoters60/1378880
cacctgt

SEQ ID NO: 47154 - DNA, 9 bp, Unknown
  misc_feature (1)..( 9): Matrix.002 file - promoters60/1378880
ttcacaata

SEQ ID NO: 47155 - DNA, 6 bp, Unknown
  misc_feature (1)..( 6): Matrix.002 file - promoters60/1378880
gcaaag

SEQ ID NO: 47156 - DNA, 6 bp, Unknown
  misc_feature (1)..( 6): Matrix.002 file - promoters60/1378880
gtaacg

SEQ ID NO: 47157 - DNA, 6 bp, Unknown
  misc_feature (1)..( 6): Matrix.002 file - promoters60/1378888
cttttg

SEQ ID NO: 47158 - DNA, 6 bp, Unknown
  misc_feature (1)..( 6): Matrix.002 file - promoters60/1378888
atctct

SEQ ID NO: 47159 - DNA, 11 bp, Unknown
  misc_feature (1)..( 11): Matrix.002 file - promoters60/1378888
caagtatctga

SEQ ID NO: 47160 - DNA, 6 bp, Unknown
  misc_feature (1)..( 6): Matrix.002 file - promoters60/1378888
tttcat

SEQ ID NO: 47161 - DNA, 6 bp, Unknown
  misc_feature (1)..( 6): Matrix.002 file - promoters60/1378888
gaaatt

SEQ ID NO: 47162 - DNA, 7 bp, Unknown
  misc_feature (1)..( 7): Matrix.002 file - promoters60/1378888
agtttga

SEQ ID NO: 47163 - DNA, 8 bp, Unknown
  misc_feature (1)..( 8): Matrix.002 file - promoters60/1378888
actacttt

SEQ ID NO: 47164 - DNA, 8 bp, Unknown
  misc_feature (1)..( 8): Matrix.002 file - promoters60/1378888
tgtcagaa

SEQ ID NO: 47165 - DNA, 6 bp, Unknown
  misc_feature (1)..( 6): Matrix.002 file - promoters60/1378888
attact

SEQ ID NO: 47166 - DNA, 8 bp, Unknown
  misc_feature (1)..( 8): Matrix.002 file - promoters60/1378888
ttgaaatt

SEQ ID NO: 47167 - DNA, 8 bp, Unknown
  misc_feature (1)..( 8): Matrix.002 file - promoters60/1378888
atatttgt

SEQ ID NO: 47168 - DNA, 7 bp, Unknown
  misc_feature (1)..( 7): Matrix.002 file - promoters60/1378888
tatctat

SEQ ID NO: 47169 - DNA, 8 bp, Unknown
  misc_feature (1)..( 8): Matrix.002 file - promoters60/1378888
ttgaatga

SEQ ID NO: 47170 - DNA, 6 bp, Unknown
  misc_feature (1)..( 6): Matrix.002 file - promoters60/1378888
aaaaat

SEQ ID NO: 47171 - DNA, 6 bp, Unknown
  misc_feature (1)..( 6): Matrix.002 file - promoters60/1378888
tttcag

SEQ ID NO: 47172 - DNA, 7 bp, Unknown
  misc_feature (1)..( 7): Matrix.002 file - promoters60/1378888
aaaatga

SEQ ID NO: 47173 - DNA, 6 bp, Unknown
  misc_feature (1)..( 6): Matrix.002 file - promoters60/1378888
tgtatt

SEQ ID NO: 47174 - DNA, 7 bp, Unknown
  misc_feature (1)..( 7): Matrix.002 file - promoters60/1378888
attgtat

SEQ ID NO: 47175 - DNA, 9 bp, Unknown
  misc_feature (1)..( 9): Matrix.002 file - promoters60/1378888
tttctgttt

SEQ ID NO: 47176 - DNA, 8 bp, Unknown
  misc_feature (1)..( 8): Matrix.002 file - promoters60/1378888
cttaaaat

SEQ ID NO: 47177 - DNA, 11 bp, Unknown
  misc_feature (1)..( 11): Matrix.002 file - promoters60/1378888
aaataataatt

SEQ ID NO: 47178 - DNA, 6 bp, Unknown
  misc_feature (1)..( 6): Matrix.002 file - promoters60/1378888
acaaaa

SEQ ID NO: 47179 - DNA, 6 bp, Unknown
  misc_feature (1)..( 6): Matrix.002 file - promoters60/1379005
ttaaaa

SEQ ID NO: 47180 - DNA, 6 bp, Unknown
  misc_feature (1)..( 6): Matrix.002 file - promoters60/1379005
taaaac

SEQ ID NO: 47181 - DNA, 6 bp, Unknown
  misc_feature (1)..( 6): Matrix.002 file - promoters60/1379005
aaactt

SEQ ID NO: 47182 - DNA, 7 bp, Unknown
  misc_feature (1)..( 7): Matrix.002 file - promoters60/1379005
cacaatc

SEQ ID NO: 47183 - DNA, 7 bp, Unknown
  misc_feature (1)..( 7): Matrix.002 file - promoters60/1379005
aaaccaa

SEQ ID NO: 47184 - DNA, 7 bp, Unknown
  misc_feature (1)..( 7): Matrix.002 file - promoters60/1379005
aaaccaa

SEQ ID NO: 47185 - DNA, 6 bp, Unknown
  misc_feature (1)..( 6): Matrix.002 file - promoters60/1379005
aataaa

SEQ ID NO: 47186 - DNA, 7 bp, Unknown
  misc_feature (1)..( 7): Matrix.002 file - promoters60/1379005
aagaaga

SEQ ID NO: 47187 - DNA, 9 bp, Unknown
  misc_feature (1)..( 9): Matrix.002 file - promoters60/1379005
ttacagtta

SEQ ID NO: 47188 - DNA, 6 bp, Unknown
  misc_feature (1)..( 6): Matrix.002 file - promoters60/1379005
cagaaa

SEQ ID NO: 47189 - DNA, 7 bp, Unknown
  misc_feature (1)..( 7): Matrix.002 file - promoters60/1379005
tccacca

SEQ ID NO: 47190 - DNA, 6 bp, Unknown
  misc_feature (1)..( 6): Matrix.002 file - promoters60/1379005
ttttga

SEQ ID NO: 47191 - DNA, 6 bp, Unknown
  misc_feature (1)..( 6): Matrix.002 file - promoters60/1379005
tcttct

SEQ ID NO: 47192 - DNA, 7 bp, Unknown
  misc_feature (1)..( 7): Matrix.002 file - promoters60/1379005
cacacca

SEQ ID NO: 47193 - DNA, 11 bp, Unknown
  misc_feature (1)..( 11): Matrix.002 file - promoters60/1379005
ctttcttcttt

SEQ ID NO: 47194 - DNA, 8 bp, Unknown
  misc_feature (1)..( 8): Matrix.002 file - promoters60/1379005
tttgcttc

SEQ ID NO: 47195 - DNA, 7 bp, Unknown
  misc_feature (1)..( 7): Matrix.002 file - promoters60/1379005
caagttg

SEQ ID NO: 47196 - DNA, 8 bp, Unknown
  misc_feature (1)..( 8): Matrix.002 file - promoters60/1379005
taaaaaaa

SEQ ID NO: 47197 - DNA, 8 bp, Unknown
  misc_feature (1)..( 8): Matrix.002 file - promoters60/1379005
caagaaaa

SEQ ID NO: 47198 - DNA, 8 bp, Unknown
  misc_feature (1)..( 8): Matrix.002 file - promoters60/1379005
aagaatct

SEQ ID NO: 47199 - DNA, 8 bp, Unknown
  misc_feature (1)..( 8): Matrix.002 file - promoters60/1379005
tccaacaa

SEQ ID NO: 47200 - DNA, 7 bp, Unknown
  misc_feature (1)..( 7): Matrix.002 file - promoters60/1379014
ttagttt

SEQ ID NO: 47201 - DNA, 7 bp, Unknown
  misc_feature (1)..( 7): Matrix.002 file - promoters60/1379014
aaaaaag

SEQ ID NO: 47202 - DNA, 7 bp, Unknown
  misc_feature (1)..( 7): Matrix.002 file - promoters60/1379014
catgcaa

SEQ ID NO: 47203 - DNA, 6 bp, Unknown
  misc_feature (1)..( 6): Matrix.002 file - promoters60/1379014
cataga

SEQ ID NO: 47204 - DNA, 7 bp, Unknown
  misc_feature (1)..( 7): Matrix.002 file - promoters60/1379014
aatctat

SEQ ID NO: 47205 - DNA, 6 bp, Unknown
  misc_feature (1)..( 6): Matrix.002 file - promoters60/1379014
caaaac

SEQ ID NO: 47206 - DNA, 6 bp, Unknown
  misc_feature (1)..( 6): Matrix.002 file - promoters60/1379014
ccaaaa

SEQ ID NO: 47207 - DNA, 6 bp, Unknown
  misc_feature (1)..( 6): Matrix.002 file - promoters60/1379014
atacaa

SEQ ID NO: 47208 - DNA, 6 bp, Unknown
  misc_feature (1)..( 6): Matrix.002 file - promoters60/1379014
aaattc

SEQ ID NO: 47209 - DNA, 8 bp, Unknown
  misc_feature (1)..( 8): Matrix.002 file - promoters60/1379014
aatttaaa

SEQ ID NO: 47210 - DNA, 6 bp, Unknown
  misc_feature (1)..( 6): Matrix.002 file - promoters60/1379014
aaataa

SEQ ID NO: 47211 - DNA, 6 bp, Unknown
  misc_feature (1)..( 6): Matrix.002 file - promoters60/1379014
taaata

SEQ ID NO: 47212 - DNA, 6 bp, Unknown
  misc_feature (1)..( 6): Matrix.002 file - promoters60/1379014
atgaag

SEQ ID NO: 47213 - DNA, 11 bp, Unknown
  misc_feature (1)..( 11): Matrix.002 file - promoters60/1379014
tttctctttca

SEQ ID NO: 47214 - DNA, 6 bp, Unknown
  misc_feature (1)..( 6): Matrix.002 file - promoters60/1379014
acaatt

SEQ ID NO: 47215 - DNA, 6 bp, Unknown
  misc_feature (1)..( 6): Matrix.002 file - promoters60/1379014
aaaata

SEQ ID NO: 47216 - DNA, 7 bp, Unknown
  misc_feature (1)..( 7): Matrix.002 file - promoters60/1379014
aaaaaga

SEQ ID NO: 47217 - DNA, 6 bp, Unknown
  misc_feature (1)..( 6): Matrix.002 file - promoters60/1379014
atagac

SEQ ID NO: 47218 - DNA, 7 bp, Unknown
  misc_feature (1)..( 7): Matrix.002 file - promoters60/1379014
agaattt

SEQ ID NO: 47219 - DNA, 11 bp, Unknown
  misc_feature (1)..( 11): Matrix.002 file - promoters60/1379037
ttcaaataaaa

SEQ ID NO: 47220 - DNA, 10 bp, Unknown
  misc_feature (1)..( 10): Matrix.002 file - promoters60/1379037
ccaaaatagt

SEQ ID NO: 47221 - DNA, 9 bp, Unknown
  misc_feature (1)..( 9): Matrix.002 file - promoters60/1379037
aagaaaaaa

SEQ ID NO: 47222 - DNA, 11 bp, Unknown
  misc_feature (1)..( 11): Matrix.002 file - promoters60/1379037
aaaaaactcaa

SEQ ID NO: 47223 - DNA, 12 bp, Unknown
  misc_feature (1)..( 12): Matrix.002 file - promoters60/1379037
aaataaatggaa

SEQ ID NO: 47224 - DNA, 6 bp, Unknown
  misc_feature (1)..( 6): Matrix.002 file - promoters60/1379037
cagaaa

SEQ ID NO: 47225 - DNA, 11 bp, Unknown
  misc_feature (1)..( 11): Matrix.002 file - promoters60/1379037
agaaaagaaaa

SEQ ID NO: 47226 - DNA, 10 bp, Unknown
  misc_feature (1)..( 10): Matrix.002 file - promoters60/1379037
aaataaaata

SEQ ID NO: 47227 - DNA, 9 bp, Unknown
  misc_feature (1)..( 9): Matrix.002 file - promoters60/1379037
aaagtaaag

SEQ ID NO: 47228 - DNA, 8 bp, Unknown
  misc_feature (1)..( 8): Matrix.002 file - promoters60/1379043
atttgatt

SEQ ID NO: 47229 - DNA, 7 bp, Unknown
  misc_feature (1)..( 7): Matrix.002 file - promoters60/1379043
ttctccc

SEQ ID NO: 47230 - DNA, 7 bp, Unknown
  misc_feature (1)..( 7): Matrix.002 file - promoters60/1379043
acaatct

SEQ ID NO: 47231 - DNA, 7 bp, Unknown
  misc_feature (1)..( 7): Matrix.002 file - promoters60/1379043
tctatat

SEQ ID NO: 47232 - DNA, 8 bp, Unknown
  misc_feature (1)..( 8): Matrix.002 file - promoters60/1379043
tatcgttg

SEQ ID NO: 47233 - DNA, 6 bp, Unknown
  misc_feature (1)..( 6): Matrix.002 file - promoters60/1379043
ctccaa

SEQ ID NO: 47234 - DNA, 6 bp, Unknown
  misc_feature (1)..( 6): Matrix.002 file - promoters60/1379043
ttaaca

SEQ ID NO: 47235 - DNA, 6 bp, Unknown
  misc_feature (1)..( 6): Matrix.002 file - promoters60/1379043
gtggac

SEQ ID NO: 47236 - DNA, 6 bp, Unknown
  misc_feature (1)..( 6): Matrix.002 file - promoters60/1379043
attata

SEQ ID NO: 47237 - DNA, 6 bp, Unknown
  misc_feature (1)..( 6): Matrix.002 file - promoters60/1379043
tatttt

SEQ ID NO: 47238 - DNA, 11 bp, Unknown
  misc_feature (1)..( 11): Matrix.002 file - promoters60/1379043
ccaaatattaa

SEQ ID NO: 47239 - DNA, 6 bp, Unknown
  misc_feature (1)..( 6): Matrix.002 file - promoters60/1379043
ataaaa

SEQ ID NO: 47240 - DNA, 8 bp, Unknown
  misc_feature (1)..( 8): Matrix.002 file - promoters60/1379043
aaaagaag

SEQ ID NO: 47241 - DNA, 7 bp, Unknown
  misc_feature (1)..( 7): Matrix.002 file - promoters60/1379043
aaaaaga

SEQ ID NO: 47242 - DNA, 7 bp, Unknown
  misc_feature (1)..( 7): Matrix.002 file - promoters60/1379043
aaaacaa

SEQ ID NO: 47243 - DNA, 6 bp, Unknown
  misc_feature (1)..( 6): Matrix.002 file - promoters60/1379043
ggtctc

SEQ ID NO: 47244 - DNA, 7 bp, Unknown
  misc_feature (1)..( 7): Matrix.002 file - promoters60/1379043
ctaattt

SEQ ID NO: 47245 - DNA, 6 bp, Unknown
  misc_feature (1)..( 6): Matrix.002 file - promoters60/1379043
tttgga

SEQ ID NO: 47246 - DNA, 6 bp, Unknown
  misc_feature (1)..( 6): Matrix.002 file - promoters60/1379043
gatttg

SEQ ID NO: 47247 - DNA, 8 bp, Unknown
  misc_feature (1)..( 8): Matrix.002 file - promoters60/1379043
aaaacttt

SEQ ID NO: 47248 - DNA, 6 bp, Unknown
  misc_feature (1)..( 6): Matrix.002 file - promoters60/1379050
aacaaa

SEQ ID NO: 47249 - DNA, 7 bp, Unknown
  misc_feature (1)..( 7): Matrix.002 file - promoters60/1379050
tttaaac

SEQ ID NO: 47250 - DNA, 6 bp, Unknown
  misc_feature (1)..( 6): Matrix.002 file - promoters60/1379050
tgaaga

SEQ ID NO: 47251 - DNA, 9 bp, Unknown
  misc_feature (1)..( 9): Matrix.002 file - promoters60/1379050
tgaaggaaa

SEQ ID NO: 47252 - DNA, 6 bp, Unknown
  misc_feature (1)..( 6): Matrix.002 file - promoters60/1379050
tctctc

SEQ ID NO: 47253 - DNA, 7 bp, Unknown
  misc_feature (1)..( 7): Matrix.002 file - promoters60/1379050
taaagag

SEQ ID NO: 47254 - DNA, 6 bp, Unknown
  misc_feature (1)..( 6): Matrix.002 file - promoters60/1379050
acgctt

SEQ ID NO: 47255 - DNA, 7 bp, Unknown
  misc_feature (1)..( 7): Matrix.002 file - promoters60/1379050
tatataa

SEQ ID NO: 47256 - DNA, 7 bp, Unknown
  misc_feature (1)..( 7): Matrix.002 file - promoters60/1379050
cttgtat

SEQ ID NO: 47257 - DNA, 7 bp, Unknown
  misc_feature (1)..( 7): Matrix.002 file - promoters60/1379050
cgaggaa

SEQ ID NO: 47258 - DNA, 7 bp, Unknown
  misc_feature (1)..( 7): Matrix.002 file - promoters60/1379050
ttacacg

SEQ ID NO: 47259 - DNA, 8 bp, Unknown
  misc_feature (1)..( 8): Matrix.002 file - promoters60/1379050
agatgttt

SEQ ID NO: 47260 - DNA, 9 bp, Unknown
  misc_feature (1)..( 9): Matrix.002 file - promoters60/1379050
gaggtttat

SEQ ID NO: 47261 - DNA, 6 bp, Unknown
  misc_feature (1)..( 6): Matrix.002 file - promoters60/1379050
ctaata

SEQ ID NO: 47262 - DNA, 7 bp, Unknown
  misc_feature (1)..( 7): Matrix.002 file - promoters60/1379050
aattata

SEQ ID NO: 47263 - DNA, 7 bp, Unknown
  misc_feature (1)..( 7): Matrix.002 file - promoters60/1379075
tatctta

SEQ ID NO: 47264 - DNA, 6 bp, Unknown
  misc_feature (1)..( 6): Matrix.002 file - promoters60/1379075
tattaa

SEQ ID NO: 47265 - DNA, 9 bp, Unknown
  misc_feature (1)..( 9): Matrix.002 file - promoters60/1379075
gaatataaa

SEQ ID NO: 47266 - DNA, 8 bp, Unknown
  misc_feature (1)..( 8): Matrix.002 file - promoters60/1379075
aaattaaa

SEQ ID NO: 47267 - DNA, 10 bp, Unknown
  misc_feature (1)..( 10): Matrix.002 file - promoters60/1379075
tttaaacaaa

SEQ ID NO: 47268 - DNA, 6 bp, Unknown
  misc_feature (1)..( 6): Matrix.002 file - promoters60/1379075
attaat

SEQ ID NO: 47269 - DNA, 12 bp, Unknown
  misc_feature (1)..( 12): Matrix.002 file - promoters60/1379075
attaaaaaataa

SEQ ID NO: 47270 - DNA, 6 bp, Unknown
  misc_feature (1)..( 6): Matrix.002 file - promoters60/1379075
taaaat

SEQ ID NO: 47271 - DNA, 9 bp, Unknown
  misc_feature (1)..( 9): Matrix.002 file - promoters60/1379075
ccataaaca

SEQ ID NO: 47272 - DNA, 7 bp, Unknown
  misc_feature (1)..( 7): Matrix.002 file - promoters60/1379075
agaagaa

SEQ ID NO: 47273 - DNA, 6 bp, Unknown
  misc_feature (1)..( 6): Matrix.002 file - promoters60/1379075
cgttaa

SEQ ID NO: 47274 - DNA, 6 bp, Unknown
  misc_feature (1)..( 6): Matrix.002 file - promoters60/1379075
ttttta

SEQ ID NO: 47275 - DNA, 11 bp, Unknown
  misc_feature (1)..( 11): Matrix.002 file - promoters60/1379075
ataaataaata

SEQ ID NO: 47276 - DNA, 7 bp, Unknown
  misc_feature (1)..( 7): Matrix.002 file - promoters60/1379075
aaacttt

SEQ ID NO: 47277 - DNA, 13 bp, Unknown
  misc_feature (1)..( 13): Matrix.002 file - promoters60/1379075
cttttaaatactt

SEQ ID NO: 47278 - DNA, 13 bp, Unknown
  misc_feature (1)..( 13): Matrix.002 file - promoters60/1379075
ttaaaaacttttt

SEQ ID NO: 47279 - DNA, 15 bp, Unknown
  misc_feature (1)..( 15): Matrix.002 file - promoters60/1379075
tttaattctcaattt

SEQ ID NO: 47280 - DNA, 6 bp, Unknown
  misc_feature (1)..( 6): Matrix.002 file - promoters60/1379075
gtattc

SEQ ID NO: 47281 - DNA, 7 bp, Unknown
  misc_feature (1)..( 7): Matrix.002 file - promoters60/1379075
tgtagct

SEQ ID NO: 47282 - DNA, 8 bp, Unknown
  misc_feature (1)..( 8): Matrix.002 file - promoters60/1379075
ggataaga

SEQ ID NO: 47283 - DNA, 7 bp, Unknown
  misc_feature (1)..( 7): Matrix.002 file - promoters60/1379075
tttatga

SEQ ID NO: 47284 - DNA, 8 bp, Unknown
  misc_feature (1)..( 8): Matrix.002 file - promoters60/1379075
aatcaccc

SEQ ID NO: 47285 - DNA, 8 bp, Unknown
  misc_feature (1)..( 8): Matrix.002 file - promoters60/1379141
aatcattt

SEQ ID NO: 47286 - DNA, 7 bp, Unknown
  misc_feature (1)..( 7): Matrix.002 file - promoters60/1379141
aaaatta

SEQ ID NO: 47287 - DNA, 8 bp, Unknown
  misc_feature (1)..( 8): Matrix.002 file - promoters60/1379141
tatcggtt

SEQ ID NO: 47288 - DNA, 9 bp, Unknown
  misc_feature (1)..( 9): Matrix.002 file - promoters60/1379141
tttcaataa

SEQ ID NO: 47289 - DNA, 7 bp, Unknown
  misc_feature (1)..( 7): Matrix.002 file - promoters60/1379141
tattttc

SEQ ID NO: 47290 - DNA, 7 bp, Unknown
  misc_feature (1)..( 7): Matrix.002 file - promoters60/1379141
aaataaa

SEQ ID NO: 47291 - DNA, 6 bp, Unknown
  misc_feature (1)..( 6): Matrix.002 file - promoters60/1379141
taacaa

SEQ ID NO: 47292 - DNA, 8 bp, Unknown
  misc_feature (1)..( 8): Matrix.002 file - promoters60/1379141
aagttgat

SEQ ID NO: 47293 - DNA, 6 bp, Unknown
  misc_feature (1)..( 6): Matrix.002 file - promoters60/1379141
tagtat

SEQ ID NO: 47294 - DNA, 8 bp, Unknown
  misc_feature (1)..( 8): Matrix.002 file - promoters60/1379141
tttcagga

SEQ ID NO: 47295 - DNA, 7 bp, Unknown
  misc_feature (1)..( 7): Matrix.002 file - promoters60/1379141
tcacaaa

SEQ ID NO: 47296 - DNA, 7 bp, Unknown
  misc_feature (1)..( 7): Matrix.002 file - promoters60/1379141
aataaaa

SEQ ID NO: 47297 - DNA, 9 bp, Unknown
  misc_feature (1)..( 9): Matrix.002 file - promoters60/1379141
taaaaaaat

SEQ ID NO: 47298 - DNA, 7 bp, Unknown
  misc_feature (1)..( 7): Matrix.002 file - promoters60/1379141
acggttc

SEQ ID NO: 47299 - DNA, 9 bp, Unknown
  misc_feature (1)..( 9): Matrix.002 file - promoters60/1379141
aagaattta

SEQ ID NO: 47300 - DNA, 6 bp, Unknown
  misc_feature (1)..( 6): Matrix.002 file - promoters60/1379141
tttttg

SEQ ID NO: 47301 - DNA, 6 bp, Unknown
  misc_feature (1)..( 6): Matrix.002 file - promoters60/1379141
ttagct

SEQ ID NO: 47302 - DNA, 8 bp, Unknown
  misc_feature (1)..( 8): Matrix.002 file - promoters60/1379141
taagaata

SEQ ID NO: 47303 - DNA, 6 bp, Unknown
  misc_feature (1)..( 6): Matrix.002 file - promoters60/1379141
caaaaa

SEQ ID NO: 47304 - DNA, 7 bp, Unknown
  misc_feature (1)..( 7): Matrix.002 file - promoters60/1379141
ttcctct

SEQ ID NO: 47305 - DNA, 7 bp, Unknown
  misc_feature (1)..( 7): Matrix.002 file - promoters60/1379166
ttgctat

SEQ ID NO: 47306 - DNA, 7 bp, Unknown
  misc_feature (1)..( 7): Matrix.002 file - promoters60/1379166
gttttgt

SEQ ID NO: 47307 - DNA, 7 bp, Unknown
  misc_feature (1)..( 7): Matrix.002 file - promoters60/1379166
aaattaa

SEQ ID NO: 47308 - DNA, 6 bp, Unknown
  misc_feature (1)..( 6): Matrix.002 file - promoters60/1379166
atctcc

SEQ ID NO: 47309 - DNA, 6 bp, Unknown
  misc_feature (1)..( 6): Matrix.002 file - promoters60/1379166
ctaaat

SEQ ID NO: 47310 - DNA, 6 bp, Unknown
  misc_feature (1)..( 6): Matrix.002 file - promoters60/1379166
attttg

SEQ ID NO: 47311 - DNA, 6 bp, Unknown
  misc_feature (1)..( 6): Matrix.002 file - promoters60/1379166
tttgtt

SEQ ID NO: 47312 - DNA, 8 bp, Unknown
  misc_feature (1)..( 8): Matrix.002 file - promoters60/1379166
cattgtta

SEQ ID NO: 47313 - DNA, 7 bp, Unknown
  misc_feature (1)..( 7): Matrix.002 file - promoters60/1379166
aacaaaa

SEQ ID NO: 47314 - DNA, 7 bp, Unknown
  misc_feature (1)..( 7): Matrix.002 file - promoters60/1379166
aaaactt

SEQ ID NO: 47315 - DNA, 6 bp, Unknown
  misc_feature (1)..( 6): Matrix.002 file - promoters60/1379166
ttattg

SEQ ID NO: 47316 - DNA, 6 bp, Unknown
  misc_feature (1)..( 6): Matrix.002 file - promoters60/1379166
agaaga

SEQ ID NO: 47317 - DNA, 6 bp, Unknown
  misc_feature (1)..( 6): Matrix.002 file - promoters60/1379166
tggtta

SEQ ID NO: 47318 - DNA, 8 bp, Unknown
  misc_feature (1)..( 8): Matrix.002 file - promoters60/1379166
atcgagaa

SEQ ID NO: 47319 - DNA, 6 bp, Unknown
  misc_feature (1)..( 6): Matrix.002 file - promoters60/1379166
cgattc

SEQ ID NO: 47320 - DNA, 7 bp, Unknown
  misc_feature (1)..( 7): Matrix.002 file - promoters60/1379166
tccaaag

SEQ ID NO: 47321 - DNA, 7 bp, Unknown
  misc_feature (1)..( 7): Matrix.002 file - promoters60/1379166
aaaacaa

SEQ ID NO: 47322 - DNA, 12 bp, Unknown
  misc_feature (1)..( 12): Matrix.002 file - promoters60/1379201
caaattacgaag

SEQ ID NO: 47323 - DNA, 8 bp, Unknown
  misc_feature (1)..( 8): Matrix.002 file - promoters60/1379201
acatttta

SEQ ID NO: 47324 - DNA, 12 bp, Unknown
  misc_feature (1)..( 12): Matrix.002 file - promoters60/1379201
aaaatacgaaga

SEQ ID NO: 47325 - DNA, 10 bp, Unknown
  misc_feature (1)..( 10): Matrix.002 file - promoters60/1379201
ccgattctct

SEQ ID NO: 47326 - DNA, 6 bp, Unknown
  misc_feature (1)..( 6): Matrix.002 file - promoters60/1379229
atttat

SEQ ID NO: 47327 - DNA, 7 bp, Unknown
  misc_feature (1)..( 7): Matrix.002 file - promoters60/1379229
taaaaga

SEQ ID NO: 47328 - DNA, 8 bp, Unknown
  misc_feature (1)..( 8): Matrix.002 file - promoters60/1379229
tttaaaaa

SEQ ID NO: 47329 - DNA, 6 bp, Unknown
  misc_feature (1)..( 6): Matrix.002 file - promoters60/1379229
tgaaat

SEQ ID NO: 47330 - DNA, 9 bp, Unknown
  misc_feature (1)..( 9): Matrix.002 file - promoters60/1379229
acaaaagaa

SEQ ID NO: 47331 - DNA, 9 bp, Unknown
  misc_feature (1)..( 9): Matrix.002 file - promoters60/1379229
ggtcacacc

SEQ ID NO: 47332 - DNA, 6 bp, Unknown
  misc_feature (1)..( 6): Matrix.002 file - promoters60/1379229
ataatt

SEQ ID NO: 47333 - DNA, 6 bp, Unknown
  misc_feature (1)..( 6): Matrix.002 file - promoters60/1379229
tgaaga

SEQ ID NO: 47334 - DNA, 6 bp, Unknown
  misc_feature (1)..( 6): Matrix.002 file - promoters60/1379229
acaaat

SEQ ID NO: 47335 - DNA, 6 bp, Unknown
  misc_feature (1)..( 6): Matrix.002 file - promoters60/1379229
gatacc

SEQ ID NO: 47336 - DNA, 6 bp, Unknown
  misc_feature (1)..( 6): Matrix.002 file - promoters60/1379229
tagata

SEQ ID NO: 47337 - DNA, 9 bp, Unknown
  misc_feature (1)..( 9): Matrix.002 file - promoters60/1379229
actaaactc

SEQ ID NO: 47338 - DNA, 6 bp, Unknown
  misc_feature (1)..( 6): Matrix.002 file - promoters60/1379239
atttta

SEQ ID NO: 47339 - DNA, 9 bp, Unknown
  misc_feature (1)..( 9): Matrix.002 file - promoters60/1379239
aaattaaac

SEQ ID NO: 47340 - DNA, 6 bp, Unknown
  misc_feature (1)..( 6): Matrix.002 file - promoters60/1379239
agttaa

SEQ ID NO: 47341 - DNA, 9 bp, Unknown
  misc_feature (1)..( 9): Matrix.002 file - promoters60/1379239
atacccggt

SEQ ID NO: 47342 - DNA, 9 bp, Unknown
  misc_feature (1)..( 9): Matrix.002 file - promoters60/1379239
tataaaaac

SEQ ID NO: 47343 - DNA, 6 bp, Unknown
  misc_feature (1)..( 6): Matrix.002 file - promoters60/1379239
ttggaa

SEQ ID NO: 47344 - DNA, 8 bp, Unknown
  misc_feature (1)..( 8): Matrix.002 file - promoters60/1379239
aacattag

SEQ ID NO: 47345 - DNA, 8 bp, Unknown
  misc_feature (1)..( 8): Matrix.002 file - promoters60/1379239
caataaat

SEQ ID NO: 47346 - DNA, 7 bp, Unknown
  misc_feature (1)..( 7): Matrix.002 file - promoters60/1379239
tccaatt

SEQ ID NO: 47347 - DNA, 6 bp, Unknown
  misc_feature (1)..( 6): Matrix.002 file - promoters60/1379239
tttgtt

SEQ ID NO: 47348 - DNA, 8 bp, Unknown
  misc_feature (1)..( 8): Matrix.002 file - promoters60/1379239
aaaacaaa

SEQ ID NO: 47349 - DNA, 6 bp, Unknown
  misc_feature (1)..( 6): Matrix.002 file - promoters60/1379239
cagaaa

SEQ ID NO: 47350 - DNA, 7 bp, Unknown
  misc_feature (1)..( 7): Matrix.002 file - promoters60/1379239
ttcaaga

SEQ ID NO: 47351 - DNA, 8 bp, Unknown
  misc_feature (1)..( 8): Matrix.002 file - promoters60/1379239
aatatctc

SEQ ID NO: 47352 - DNA, 6 bp, Unknown
  misc_feature (1)..( 6): Matrix.002 file - promoters60/1379239
taatgt

SEQ ID NO: 47353 - DNA, 6 bp, Unknown
  misc_feature (1)..( 6): Matrix.002 file - promoters60/1379239
tcgact

SEQ ID NO: 47354 - DNA, 8 bp, Unknown
  misc_feature (1)..( 8): Matrix.002 file - promoters60/1379239
aaataata

SEQ ID NO: 47355 - DNA, 7 bp, Unknown
  misc_feature (1)..( 7): Matrix.002 file - promoters60/1379239
tatagct

SEQ ID NO: 47356 - DNA, 9 bp, Unknown
  misc_feature (1)..( 9): Matrix.002 file - promoters60/1379607
tttataaaa

SEQ ID NO: 47357 - DNA, 8 bp, Unknown
  misc_feature (1)..( 8): Matrix.002 file - promoters60/1379607
ttaattaa

SEQ ID NO: 47358 - DNA, 8 bp, Unknown
  misc_feature (1)..( 8): Matrix.002 file - promoters60/1379607
taatttaa

SEQ ID NO: 47359 - DNA, 7 bp, Unknown
  misc_feature (1)..( 7): Matrix.002 file - promoters60/1379671
tggagag

SEQ ID NO: 47360 - DNA, 6 bp, Unknown
  misc_feature (1)..( 6): Matrix.002 file - promoters60/1379671
agtatc

SEQ ID NO: 47361 - DNA, 7 bp, Unknown
  misc_feature (1)..( 7): Matrix.002 file - promoters60/1379671
tgatctt

SEQ ID NO: 47362 - DNA, 7 bp, Unknown
  misc_feature (1)..( 7): Matrix.002 file - promoters60/1379671
acaaagt

SEQ ID NO: 47363 - DNA, 6 bp, Unknown
  misc_feature (1)..( 6): Matrix.002 file - promoters60/1379671
attatt

SEQ ID NO: 47364 - DNA, 7 bp, Unknown
  misc_feature (1)..( 7): Matrix.002 file - promoters60/1379671
attgtgt

SEQ ID NO: 47365 - DNA, 6 bp, Unknown
  misc_feature (1)..( 6): Matrix.002 file - promoters60/1379671
cttcag

SEQ ID NO: 47366 - DNA, 6 bp, Unknown
  misc_feature (1)..( 6): Matrix.002 file - promoters60/1379671
ttaata

SEQ ID NO: 47367 - DNA, 9 bp, Unknown
  misc_feature (1)..( 9): Matrix.002 file - promoters60/1379671
gaataaatt

SEQ ID NO: 47368 - DNA, 7 bp, Unknown
  misc_feature (1)..( 7): Matrix.002 file - promoters60/1379671
caccacc

SEQ ID NO: 47369 - DNA, 7 bp, Unknown
  misc_feature (1)..( 7): Matrix.002 file - promoters60/1379671
gtatcaa

SEQ ID NO: 47370 - DNA, 9 bp, Unknown
  misc_feature (1)..( 9): Matrix.002 file - promoters60/1379671
aataaccaa

SEQ ID NO: 47371 - DNA, 8 bp, Unknown
  misc_feature (1)..( 8): Matrix.002 file - promoters60/1379671
cagctatt

SEQ ID NO: 47372 - DNA, 7 bp, Unknown
  misc_feature (1)..( 7): Matrix.002 file - promoters60/1379671
attgttg

SEQ ID NO: 47373 - DNA, 8 bp, Unknown
  misc_feature (1)..( 8): Matrix.002 file - promoters60/1379671
cataaaaa

SEQ ID NO: 47374 - DNA, 7 bp, Unknown
  misc_feature (1)..( 7): Matrix.002 file - promoters60/1379671
acagatt

SEQ ID NO: 47375 - DNA, 7 bp, Unknown
  misc_feature (1)..( 7): Matrix.002 file - promoters60/1379671
tttagtt

SEQ ID NO: 47376 - DNA, 8 bp, Unknown
  misc_feature (1)..( 8): Matrix.002 file - promoters60/1379671
ttcaaaaa

SEQ ID NO: 47377 - DNA, 7 bp, Unknown
  misc_feature (1)..( 7): Matrix.002 file - promoters60/1379818
agaacgt

SEQ ID NO: 47378 - DNA, 6 bp, Unknown
  misc_feature (1)..( 6): Matrix.002 file - promoters60/1379818
gttttg

SEQ ID NO: 47379 - DNA, 6 bp, Unknown
  misc_feature (1)..( 6): Matrix.002 file - promoters60/1379818
tgtata

SEQ ID NO: 47380 - DNA, 8 bp, Unknown
  misc_feature (1)..( 8): Matrix.002 file - promoters60/1379818
tgtcaatt

SEQ ID NO: 47381 - DNA, 6 bp, Unknown
  misc_feature (1)..( 6): Matrix.002 file - promoters60/1379818
aattca

SEQ ID NO: 47382 - DNA, 6 bp, Unknown
  misc_feature (1)..( 6): Matrix.002 file - promoters60/1379818
ttttta

SEQ ID NO: 47383 - DNA, 9 bp, Unknown
  misc_feature (1)..( 9): Matrix.002 file - promoters60/1379818
aaaatctct

SEQ ID NO: 47384 - DNA, 6 bp, Unknown
  misc_feature (1)..( 6): Matrix.002 file - promoters60/1379818
gaatta

SEQ ID NO: 47385 - DNA, 8 bp, Unknown
  misc_feature (1)..( 8): Matrix.002 file - promoters60/1379818
atttattt

SEQ ID NO: 47386 - DNA, 11 bp, Unknown
  misc_feature (1)..( 11): Matrix.002 file - promoters60/1379818
tactgtattag

SEQ ID NO: 47387 - DNA, 6 bp, Unknown
  misc_feature (1)..( 6): Matrix.002 file - promoters60/1379818
aatatt

SEQ ID NO: 47388 - DNA, 6 bp, Unknown
  misc_feature (1)..( 6): Matrix.002 file - promoters60/1379818
tataat

SEQ ID NO: 47389 - DNA, 8 bp, Unknown
  misc_feature (1)..( 8): Matrix.002 file - promoters60/1379818
taatatta

SEQ ID NO: 47390 - DNA, 8 bp, Unknown
  misc_feature (1)..( 8): Matrix.002 file - promoters60/1379818
attaaaaa

SEQ ID NO: 47391 - DNA, 6 bp, Unknown
  misc_feature (1)..( 6): Matrix.002 file - promoters60/1379981
cgatta

SEQ ID NO: 47392 - DNA, 6 bp, Unknown
  misc_feature (1)..( 6): Matrix.002 file - promoters60/1379981
atttaa

SEQ ID NO: 47393 - DNA, 7 bp, Unknown
  misc_feature (1)..( 7): Matrix.002 file - promoters60/1379981
tcatttt

SEQ ID NO: 47394 - DNA, 8 bp, Unknown
  misc_feature (1)..( 8): Matrix.002 file - promoters60/1379981
ttttaata

SEQ ID NO: 47395 - DNA, 7 bp, Unknown
  misc_feature (1)..( 7): Matrix.002 file - promoters60/1379981
gttatgt

SEQ ID NO: 47396 - DNA, 9 bp, Unknown
  misc_feature (1)..( 9): Matrix.002 file - promoters60/1379981
attaataaa

SEQ ID NO: 47397 - DNA, 10 bp, Unknown
  misc_feature (1)..( 10): Matrix.002 file - promoters60/1379981
ctaataaatt

SEQ ID NO: 47398 - DNA, 8 bp, Unknown
  misc_feature (1)..( 8): Matrix.002 file - promoters60/1379981
cattcttt

SEQ ID NO: 47399 - DNA, 7 bp, Unknown
  misc_feature (1)..( 7): Matrix.002 file - promoters60/1379981
tgtttca

SEQ ID NO: 47400 - DNA, 10 bp, Unknown
  misc_feature (1)..( 10): Matrix.002 file - promoters60/1379981
cttaaataat

SEQ ID NO: 47401 - DNA, 7 bp, Unknown
  misc_feature (1)..( 7): Matrix.002 file - promoters60/1379981
aatattt

SEQ ID NO: 47402 - DNA, 7 bp, Unknown
  misc_feature (1)..( 7): Matrix.002 file - promoters60/1379981
ttcattc

SEQ ID NO: 47403 - DNA, 6 bp, Unknown
  misc_feature (1)..( 6): Matrix.002 file - promoters60/1379981
aaatct

SEQ ID NO: 47404 - DNA, 7 bp, Unknown
  misc_feature (1)..( 7): Matrix.002 file - promoters60/1379981
ataaata

SEQ ID NO: 47405 - DNA, 6 bp, Unknown
  misc_feature (1)..( 6): Matrix.002 file - promoters60/1379981
aatttt

SEQ ID NO: 47406 - DNA, 6 bp, Unknown
  misc_feature (1)..( 6): Matrix.002 file - promoters60/1379981
aaaaag

SEQ ID NO: 47407 - DNA, 7 bp, Unknown
  misc_feature (1)..( 7): Matrix.002 file - promoters60/1379981
aagatat

SEQ ID NO: 47408 - DNA, 7 bp, Unknown
  misc_feature (1)..( 7): Matrix.002 file - promoters60/1379981
aaaccac

SEQ ID NO: 47409 - DNA, 8 bp, Unknown
  misc_feature (1)..( 8): Matrix.002 file - promoters60/1379981
aaaataag

SEQ ID NO: 47410 - DNA, 8 bp, Unknown
  misc_feature (1)..( 8): Matrix.002 file - promoters60/1379981
taaattgt

SEQ ID NO: 47411 - DNA, 6 bp, Unknown
  misc_feature (1)..( 6): Matrix.002 file - promoters60/1379981
atagat

SEQ ID NO: 47412 - DNA, 7 bp, Unknown
  misc_feature (1)..( 7): Matrix.002 file - promoters60/1379981
agagata

SEQ ID NO: 47413 - DNA, 6 bp, Unknown
  misc_feature (1)..( 6): Matrix.002 file - promoters60/1379981
ttttgg

SEQ ID NO: 47414 - DNA, 6 bp, Unknown
  misc_feature (1)..( 6): Matrix.002 file - promoters60/1379981
taagat

SEQ ID NO: 47415 - DNA, 6 bp, Unknown
  misc_feature (1)..( 6): Matrix.002 file - promoters60/1379981
aaagaa

SEQ ID NO: 47416 - DNA, 12 bp, Unknown
  misc_feature (1)..( 12): Matrix.002 file - promoters60/1379981
aaaaacaaaaca

SEQ ID NO: 47417 - DNA, 6 bp, Unknown
  misc_feature (1)..( 6): Matrix.002 file - promoters60/1379981
aaaaat

SEQ ID NO: 47418 - DNA, 6 bp, Unknown
  misc_feature (1)..( 6): Matrix.002 file - promoters60/1379981
taaccc

SEQ ID NO: 47419 - DNA, 6 bp, Unknown
  misc_feature (1)..( 6): Matrix.002 file - promoters60/1379998
aacata

SEQ ID NO: 47420 - DNA, 6 bp, Unknown
  misc_feature (1)..( 6): Matrix.002 file - promoters60/1379998
gagata

SEQ ID NO: 47421 - DNA, 7 bp, Unknown
  misc_feature (1)..( 7): Matrix.002 file - promoters60/1379998
tttataa

SEQ ID NO: 47422 - DNA, 6 bp, Unknown
  misc_feature (1)..( 6): Matrix.002 file - promoters60/1379998
caaaaa

SEQ ID NO: 47423 - DNA, 8 bp, Unknown
  misc_feature (1)..( 8): Matrix.002 file - promoters60/1379998
gtcacaaa

SEQ ID NO: 47424 - DNA, 6 bp, Unknown
  misc_feature (1)..( 6): Matrix.002 file - promoters60/1379998
atattt

SEQ ID NO: 47425 - DNA, 7 bp, Unknown
  misc_feature (1)..( 7): Matrix.002 file - promoters60/1379998
aaaacaa

SEQ ID NO: 47426 - DNA, 6 bp, Unknown
  misc_feature (1)..( 6): Matrix.002 file - promoters60/1379998
agtaaa

SEQ ID NO: 47427 - DNA, 6 bp, Unknown
  misc_feature (1)..( 6): Matrix.002 file - promoters60/1379998
ttccaa

SEQ ID NO: 47428 - DNA, 6 bp, Unknown
  misc_feature (1)..( 6): Matrix.002 file - promoters60/1379998
gttttc

SEQ ID NO: 47429 - DNA, 7 bp, Unknown
  misc_feature (1)..( 7): Matrix.002 file - promoters60/1379998
tttcgaa

SEQ ID NO: 47430 - DNA, 8 bp, Unknown
  misc_feature (1)..( 8): Matrix.002 file - promoters60/1379998
ttttgttt

SEQ ID NO: 47431 - DNA, 6 bp, Unknown
  misc_feature (1)..( 6): Matrix.002 file - promoters60/1379998
tttgtt

SEQ ID NO: 47432 - DNA, 7 bp, Unknown
  misc_feature (1)..( 7): Matrix.002 file - promoters60/1379998
aaaactt

SEQ ID NO: 47433 - DNA, 7 bp, Unknown
  misc_feature (1)..( 7): Matrix.002 file - promoters60/1379998
attaaag

SEQ ID NO: 47434 - DNA, 6 bp, Unknown
  misc_feature (1)..( 6): Matrix.002 file - promoters60/1379998
agtaaa

SEQ ID NO: 47435 - DNA, 7 bp, Unknown
  misc_feature (1)..( 7): Matrix.002 file - promoters60/1379998
aatcggg

SEQ ID NO: 47436 - DNA, 8 bp, Unknown
  misc_feature (1)..( 8): Matrix.002 file - promoters60/1379998
gaaacaaa

SEQ ID NO: 47437 - DNA, 10 bp, Unknown
  misc_feature (1)..( 10): Matrix.002 file - promoters60/1379998
ggaaaagaaa

SEQ ID NO: 47438 - DNA, 7 bp, Unknown
  misc_feature (1)..( 7): Matrix.002 file - promoters60/1379998
cccacta

SEQ ID NO: 47439 - DNA, 9 bp, Unknown
  misc_feature (1)..( 9): Matrix.002 file - promoters60/1379998
aaagaaaag

SEQ ID NO: 47440 - DNA, 7 bp, Unknown
  misc_feature (1)..( 7): Matrix.002 file - promoters60/1379998
gtatata

SEQ ID NO: 47441 - DNA, 9 bp, Unknown
  misc_feature (1)..( 9): Matrix.002 file - promoters60/1380309
acaaatcta

SEQ ID NO: 47442 - DNA, 8 bp, Unknown
  misc_feature (1)..( 8): Matrix.002 file - promoters60/1380309
taaatata

SEQ ID NO: 47443 - DNA, 6 bp, Unknown
  misc_feature (1)..( 6): Matrix.002 file - promoters60/1380309
tataaa

SEQ ID NO: 47444 - DNA, 12 bp, Unknown
  misc_feature (1)..( 12): Matrix.002 file - promoters60/1380309
agtttaaaattt

SEQ ID NO: 47445 - DNA, 9 bp, Unknown
  misc_feature (1)..( 9): Matrix.002 file - promoters60/1380309
atcaatact

SEQ ID NO: 47446 - DNA, 7 bp, Unknown
  misc_feature (1)..( 7): Matrix.002 file - promoters60/1380309
tttaatt

SEQ ID NO: 47447 - DNA, 7 bp, Unknown
  misc_feature (1)..( 7): Matrix.002 file - promoters60/1380309
aaacagt

SEQ ID NO: 47448 - DNA, 6 bp, Unknown
  misc_feature (1)..( 6): Matrix.002 file - promoters60/1380309
aaaaat

SEQ ID NO: 47449 - DNA, 10 bp, Unknown
  misc_feature (1)..( 10): Matrix.002 file - promoters60/1380309
atggaacaaa

SEQ ID NO: 47450 - DNA, 10 bp, Unknown
  misc_feature (1)..( 10): Matrix.002 file - promoters60/1380309
aataattaaa

SEQ ID NO: 47451 - DNA, 7 bp, Unknown
  misc_feature (1)..( 7): Matrix.002 file - promoters60/1380309
attgaag

SEQ ID NO: 47452 - DNA, 7 bp, Unknown
  misc_feature (1)..( 7): Matrix.002 file - promoters60/1380309
tataaat

SEQ ID NO: 47453 - DNA, 8 bp, Unknown
  misc_feature (1)..( 8): Matrix.002 file - promoters60/1380309
tcttaaaa

SEQ ID NO: 47454 - DNA, 6 bp, Unknown
  misc_feature (1)..( 6): Matrix.002 file - promoters60/1380309
gtagtt

SEQ ID NO: 47455 - DNA, 6 bp, Unknown
  misc_feature (1)..( 6): Matrix.002 file - promoters60/1380309
gtatat

SEQ ID NO: 47456 - DNA, 7 bp, Unknown
  misc_feature (1)..( 7): Matrix.002 file - promoters60/1380309
taaacaa

SEQ ID NO: 47457 - DNA, 6 bp, Unknown
  misc_feature (1)..( 6): Matrix.002 file - promoters60/1380309
tggaag

SEQ ID NO: 47458 - DNA, 6 bp, Unknown
  misc_feature (1)..( 6): Matrix.002 file - promoters60/1380309
tttgtt

SEQ ID NO: 47459 - DNA, 6 bp, Unknown
  misc_feature (1)..( 6): Matrix.002 file - promoters60/1380309
ttttta

SEQ ID NO: 47460 - DNA, 12 bp, Unknown
  misc_feature (1)..( 12): Matrix.002 file - promoters60/1380385
tggaaacactgt

SEQ ID NO: 47461 - DNA, 8 bp, Unknown
  misc_feature (1)..( 8): Matrix.002 file - promoters60/1380385
tgtcattt

SEQ ID NO: 47462 - DNA, 6 bp, Unknown
  misc_feature (1)..( 6): Matrix.002 file - promoters60/1380385
agacag

SEQ ID NO: 47463 - DNA, 9 bp, Unknown
  misc_feature (1)..( 9): Matrix.002 file - promoters60/1380385
ggctgaatc

SEQ ID NO: 47464 - DNA, 6 bp, Unknown
  misc_feature (1)..( 6): Matrix.002 file - promoters60/1380385
tctgac

SEQ ID NO: 47465 - DNA, 6 bp, Unknown
  misc_feature (1)..( 6): Matrix.002 file - promoters60/1380385
ttgtgt

SEQ ID NO: 47466 - DNA, 8 bp, Unknown
  misc_feature (1)..( 8): Matrix.002 file - promoters60/1380385
attatcaa

SEQ ID NO: 47467 - DNA, 7 bp, Unknown
  misc_feature (1)..( 7): Matrix.002 file - promoters60/1380385
tttctct

SEQ ID NO: 47468 - DNA, 6 bp, Unknown
  misc_feature (1)..( 6): Matrix.002 file - promoters60/1380385
cttttt

SEQ ID NO: 47469 - DNA, 9 bp, Unknown
  misc_feature (1)..( 9): Matrix.002 file - promoters60/1380389
caaaaatat

SEQ ID NO: 47470 - DNA, 7 bp, Unknown
  misc_feature (1)..( 7): Matrix.002 file - promoters60/1380389
caagacg

SEQ ID NO: 47471 - DNA, 7 bp, Unknown
  misc_feature (1)..( 7): Matrix.002 file - promoters60/1380389
tttggtt

SEQ ID NO: 47472 - DNA, 8 bp, Unknown
  misc_feature (1)..( 8): Matrix.002 file - promoters60/1380389
taaattga

SEQ ID NO: 47473 - DNA, 9 bp, Unknown
  misc_feature (1)..( 9): Matrix.002 file - promoters60/1380389
aaaaacaat

SEQ ID NO: 47474 - DNA, 7 bp, Unknown
  misc_feature (1)..( 7): Matrix.002 file - promoters60/1380418
aagagat

SEQ ID NO: 47475 - DNA, 7 bp, Unknown
  misc_feature (1)..( 7): Matrix.002 file - promoters60/1380418
agtttct

SEQ ID NO: 47476 - DNA, 10 bp, Unknown
  misc_feature (1)..( 10): Matrix.002 file - promoters60/1380418
aaaaatggtt

SEQ ID NO: 47477 - DNA, 7 bp, Unknown
  misc_feature (1)..( 7): Matrix.002 file - promoters60/1380418
ttttgtt

SEQ ID NO: 47478 - DNA, 8 bp, Unknown
  misc_feature (1)..( 8): Matrix.002 file - promoters60/1380418
cagtgata

SEQ ID NO: 47479 - DNA, 10 bp, Unknown
  misc_feature (1)..( 10): Matrix.002 file - promoters60/1380418
agatgagttt

SEQ ID NO: 47480 - DNA, 7 bp, Unknown
  misc_feature (1)..( 7): Matrix.002 file - promoters60/1380418
caaaatg

SEQ ID NO: 47481 - DNA, 7 bp, Unknown
  misc_feature (1)..( 7): Matrix.002 file - promoters60/1380418
caaccaa

SEQ ID NO: 47482 - DNA, 7 bp, Unknown
  misc_feature (1)..( 7): Matrix.002 file - promoters60/1380418
acaagaa

SEQ ID NO: 47483 - DNA, 7 bp, Unknown
  misc_feature (1)..( 7): Matrix.002 file - promoters60/1380437
aacaatt

SEQ ID NO: 47484 - DNA, 11 bp, Unknown
  misc_feature (1)..( 11): Matrix.002 file - promoters60/1380437
tttcaaataaa

SEQ ID NO: 47485 - DNA, 7 bp, Unknown
  misc_feature (1)..( 7): Matrix.002 file - promoters60/1380437
tcaattt

SEQ ID NO: 47486 - DNA, 6 bp, Unknown
  misc_feature (1)..( 6): Matrix.002 file - promoters60/1380437
tttgta

SEQ ID NO: 47487 - DNA, 7 bp, Unknown
  misc_feature (1)..( 7): Matrix.002 file - promoters60/1380437
aacaaaa

SEQ ID NO: 47488 - DNA, 6 bp, Unknown
  misc_feature (1)..( 6): Matrix.002 file - promoters60/1380437
gatatt

SEQ ID NO: 47489 - DNA, 6 bp, Unknown
  misc_feature (1)..( 6): Matrix.002 file - promoters60/1380437
tattta

SEQ ID NO: 47490 - DNA, 12 bp, Unknown
  misc_feature (1)..( 12): Matrix.002 file - promoters60/1380437
aaaacaagataa

SEQ ID NO: 47491 - DNA, 11 bp, Unknown
  misc_feature (1)..( 11): Matrix.002 file - promoters60/1380437
aaaggggtaaa

SEQ ID NO: 47492 - DNA, 9 bp, Unknown
  misc_feature (1)..( 9): Matrix.002 file - promoters60/1380437
aaagaaaag

SEQ ID NO: 47493 - DNA, 6 bp, Unknown
  misc_feature (1)..( 6): Matrix.002 file - promoters60/1380437
aaatcg

SEQ ID NO: 47494 - DNA, 6 bp, Unknown
  misc_feature (1)..( 6): Matrix.002 file - promoters60/1380437
agagta

SEQ ID NO: 47495 - DNA, 6 bp, Unknown
  misc_feature (1)..( 6): Matrix.002 file - promoters60/1380437
taaaaa

SEQ ID NO: 47496 - DNA, 7 bp, Unknown
  misc_feature (1)..( 7): Matrix.002 file - promoters60/1380437
tttcttg

SEQ ID NO: 47497 - DNA, 7 bp, Unknown
  misc_feature (1)..( 7): Matrix.002 file - promoters60/1380437
ttgttat

SEQ ID NO: 47498 - DNA, 6 bp, Unknown
  misc_feature (1)..( 6): Matrix.002 file - promoters60/1380437
aatatc

SEQ ID NO: 47499 - DNA, 7 bp, Unknown
  misc_feature (1)..( 7): Matrix.002 file - promoters60/1380437
aaaacaa

SEQ ID NO: 47500 - DNA, 7 bp, Unknown
  misc_feature (1)..( 7): Matrix.002 file - promoters60/1380437
gtcaaaa

SEQ ID NO: 47501 - DNA, 6 bp, Unknown
  misc_feature (1)..( 6): Matrix.002 file - promoters60/1380437
agtaaa

SEQ ID NO: 47502 - DNA, 7 bp, Unknown
  misc_feature (1)..( 7): Matrix.002 file - promoters60/1380437
aatcggg

SEQ ID NO: 47503 - DNA, 8 bp, Unknown
  misc_feature (1)..( 8): Matrix.002 file - promoters60/1380437
gaaacaaa

SEQ ID NO: 47504 - DNA, 10 bp, Unknown
  misc_feature (1)..( 10): Matrix.002 file - promoters60/1380437
ggaaaagaaa

SEQ ID NO: 47505 - DNA, 7 bp, Unknown
  misc_feature (1)..( 7): Matrix.002 file - promoters60/1380437
cccacta

SEQ ID NO: 47506 - DNA, 7 bp, Unknown
  misc_feature (1)..( 7): Matrix.002 file - promoters60/1380437
gtatata

SEQ ID NO: 47507 - DNA, 6 bp, Unknown
  misc_feature (1)..( 6): Matrix.002 file - promoters60/1380478
ctgatg

SEQ ID NO: 47508 - DNA, 6 bp, Unknown
  misc_feature (1)..( 6): Matrix.002 file - promoters60/1380478
cattac

SEQ ID NO: 47509 - DNA, 6 bp, Unknown
  misc_feature (1)..( 6): Matrix.002 file - promoters60/1380478
catttt

SEQ ID NO: 47510 - DNA, 7 bp, Unknown
  misc_feature (1)..( 7): Matrix.002 file - promoters60/1380478
tatacaa

SEQ ID NO: 47511 - DNA, 8 bp, Unknown
  misc_feature (1)..( 8): Matrix.002 file - promoters60/1380478
ggtgggat

SEQ ID NO: 47512 - DNA, 6 bp, Unknown
  misc_feature (1)..( 6): Matrix.002 file - promoters60/1380478
tggaaa

SEQ ID NO: 47513 - DNA, 8 bp, Unknown
  misc_feature (1)..( 8): Matrix.002 file - promoters60/1380478
caacacca

SEQ ID NO: 47514 - DNA, 7 bp, Unknown
  misc_feature (1)..( 7): Matrix.002 file - promoters60/1380478
ttaattg

SEQ ID NO: 47515 - DNA, 8 bp, Unknown
  misc_feature (1)..( 8): Matrix.002 file - promoters60/1380478
acttcata

SEQ ID NO: 47516 - DNA, 7 bp, Unknown
  misc_feature (1)..( 7): Matrix.002 file - promoters60/1380478
catatcc

SEQ ID NO: 47517 - DNA, 9 bp, Unknown
  misc_feature (1)..( 9): Matrix.002 file - promoters60/1380519
tctcaaact

SEQ ID NO: 47518 - DNA, 8 bp, Unknown
  misc_feature (1)..( 8): Matrix.002 file - promoters60/1380519
gagcaaaa

SEQ ID NO: 47519 - DNA, 7 bp, Unknown
  misc_feature (1)..( 7): Matrix.002 file - promoters60/1380545
attgatt

SEQ ID NO: 47520 - DNA, 9 bp, Unknown
  misc_feature (1)..( 9): Matrix.002 file - promoters60/1380545
tgttcatac

SEQ ID NO: 47521 - DNA, 6 bp, Unknown
  misc_feature (1)..( 6): Matrix.002 file - promoters60/1380545
ataaac

SEQ ID NO: 47522 - DNA, 9 bp, Unknown
  misc_feature (1)..( 9): Matrix.002 file - promoters60/1380545
gttataaaa

SEQ ID NO: 47523 - DNA, 6 bp, Unknown
  misc_feature (1)..( 6): Matrix.002 file - promoters60/1380545
ttaacc

SEQ ID NO: 47524 - DNA, 8 bp, Unknown
  misc_feature (1)..( 8): Matrix.002 file - promoters60/1380545
acaaaatg

SEQ ID NO: 47525 - DNA, 9 bp, Unknown
  misc_feature (1)..( 9): Matrix.002 file - promoters60/1380545
caaaaaaac

SEQ ID NO: 47526 - DNA, 9 bp, Unknown
  misc_feature (1)..( 9): Matrix.002 file - promoters60/1380545
aatcataat

SEQ ID NO: 47527 - DNA, 7 bp, Unknown
  misc_feature (1)..( 7): Matrix.002 file - promoters60/1380545
tgaacag

SEQ ID NO: 47528 - DNA, 6 bp, Unknown
  misc_feature (1)..( 6): Matrix.002 file - promoters60/1380545
actcaa

SEQ ID NO: 47529 - DNA, 7 bp, Unknown
  misc_feature (1)..( 7): Matrix.002 file - promoters60/1380545
caacgta

SEQ ID NO: 47530 - DNA, 8 bp, Unknown
  misc_feature (1)..( 8): Matrix.002 file - promoters60/1380545
ttagacac

SEQ ID NO: 47531 - DNA, 11 bp, Unknown
  misc_feature (1)..( 11): Matrix.002 file - promoters60/1380708
taaaatttttt

SEQ ID NO: 47532 - DNA, 9 bp, Unknown
  misc_feature (1)..( 9): Matrix.002 file - promoters60/1380708
tttattcag

SEQ ID NO: 47533 - DNA, 6 bp, Unknown
  misc_feature (1)..( 6): Matrix.002 file - promoters60/1380708
tgcaat

SEQ ID NO: 47534 - DNA, 8 bp, Unknown
  misc_feature (1)..( 8): Matrix.002 file - promoters60/1380708
ttcattta

SEQ ID NO: 47535 - DNA, 6 bp, Unknown
  misc_feature (1)..( 6): Matrix.002 file - promoters60/1380708
tatttt

SEQ ID NO: 47536 - DNA, 6 bp, Unknown
  misc_feature (1)..( 6): Matrix.002 file - promoters60/1380708
taattt

SEQ ID NO: 47537 - DNA, 6 bp, Unknown
  misc_feature (1)..( 6): Matrix.002 file - promoters60/1380708
tttcac

SEQ ID NO: 47538 - DNA, 7 bp, Unknown
  misc_feature (1)..( 7): Matrix.002 file - promoters60/1380708
attctca

SEQ ID NO: 47539 - DNA, 7 bp, Unknown
  misc_feature (1)..( 7): Matrix.002 file - promoters60/1380708
atggtat

SEQ ID NO: 47540 - DNA, 6 bp, Unknown
  misc_feature (1)..( 6): Matrix.002 file - promoters60/1380708
aatatt

SEQ ID NO: 47541 - DNA, 6 bp, Unknown
  misc_feature (1)..( 6): Matrix.002 file - promoters60/1380708
gaaaat

SEQ ID NO: 47542 - DNA, 7 bp, Unknown
  misc_feature (1)..( 7): Matrix.002 file - promoters60/1380708
taaatct

SEQ ID NO: 47543 - DNA, 12 bp, Unknown
  misc_feature (1)..( 12): Matrix.002 file - promoters60/1380708
aaaaaatctctg

SEQ ID NO: 47544 - DNA, 7 bp, Unknown
  misc_feature (1)..( 7): Matrix.002 file - promoters60/1380708
aattttt

SEQ ID NO: 47545 - DNA, 7 bp, Unknown
  misc_feature (1)..( 7): Matrix.002 file - promoters60/1380708
ttaatgt

SEQ ID NO: 47546 - DNA, 6 bp, Unknown
  misc_feature (1)..( 6): Matrix.002 file - promoters60/1380708
aatttt

SEQ ID NO: 47547 - DNA, 6 bp, Unknown
  misc_feature (1)..( 6): Matrix.002 file - promoters60/1380708
tattcg

SEQ ID NO: 47548 - DNA, 6 bp, Unknown
  misc_feature (1)..( 6): Matrix.002 file - promoters60/1380708
acctat

SEQ ID NO: 47549 - DNA, 8 bp, Unknown
  misc_feature (1)..( 8): Matrix.002 file - promoters60/1380708
caaaactt

SEQ ID NO: 47550 - DNA, 7 bp, Unknown
  misc_feature (1)..( 7): Matrix.002 file - promoters60/1380708
gaaaaaa

SEQ ID NO: 47551 - DNA, 6 bp, Unknown
  misc_feature (1)..( 6): Matrix.002 file - promoters60/1380708
atttaa

SEQ ID NO: 47552 - DNA, 6 bp, Unknown
  misc_feature (1)..( 6): Matrix.002 file - promoters60/1380708
taaaat

SEQ ID NO: 47553 - DNA, 7 bp, Unknown
  misc_feature (1)..( 7): Matrix.002 file - promoters60/1380708
aaaatca

SEQ ID NO: 47554 - DNA, 6 bp, Unknown
  misc_feature (1)..( 6): Matrix.002 file - promoters60/1380708
tcacat

SEQ ID NO: 47555 - DNA, 6 bp, Unknown
  misc_feature (1)..( 6): Matrix.002 file - promoters60/1380708
aatcat

SEQ ID NO: 47556 - DNA, 6 bp, Unknown
  misc_feature (1)..( 6): Matrix.002 file - promoters60/1380708
tttgta

SEQ ID NO: 47557 - DNA, 9 bp, Unknown
  misc_feature (1)..( 9): Matrix.002 file - promoters60/1380738
tctaaatta

SEQ ID NO: 47558 - DNA, 7 bp, Unknown
  misc_feature (1)..( 7): Matrix.002 file - promoters60/1380738
tatctgt

SEQ ID NO: 47559 - DNA, 10 bp, Unknown
  misc_feature (1)..( 10): Matrix.002 file - promoters60/1380738
tgttcattta

SEQ ID NO: 47560 - DNA, 6 bp, Unknown
  misc_feature (1)..( 6): Matrix.002 file - promoters60/1380738
acgtgt

SEQ ID NO: 47561 - DNA, 7 bp, Unknown
  misc_feature (1)..( 7): Matrix.002 file - promoters60/1380738
ggcttaa

SEQ ID NO: 47562 - DNA, 8 bp, Unknown
  misc_feature (1)..( 8): Matrix.002 file - promoters60/1380738
ggtcaggg

SEQ ID NO: 47563 - DNA, 8 bp, Unknown
  misc_feature (1)..( 8): Matrix.002 file - promoters60/1380738
gacaagag

SEQ ID NO: 47564 - DNA, 6 bp, Unknown
  misc_feature (1)..( 6): Matrix.002 file - promoters60/1380738
ttttta

SEQ ID NO: 47565 - DNA, 7 bp, Unknown
  misc_feature (1)..( 7): Matrix.002 file - promoters60/1380738
aaaaaca

SEQ ID NO: 47566 - DNA, 6 bp, Unknown
  misc_feature (1)..( 6): Matrix.002 file - promoters60/1380738
aagaaa

SEQ ID NO: 47567 - DNA, 6 bp, Unknown
  misc_feature (1)..( 6): Matrix.002 file - promoters60/1380738
taattt

SEQ ID NO: 47568 - DNA, 6 bp, Unknown
  misc_feature (1)..( 6): Matrix.002 file - promoters60/1380738
tttacc

SEQ ID NO: 47569 - DNA, 6 bp, Unknown
  misc_feature (1)..( 6): Matrix.002 file - promoters60/1380738
ttattt

SEQ ID NO: 47570 - DNA, 8 bp, Unknown
  misc_feature (1)..( 8): Matrix.002 file - promoters60/1380738
tacaatat

SEQ ID NO: 47571 - DNA, 8 bp, Unknown
  misc_feature (1)..( 8): Matrix.002 file - promoters60/1380738
attacaaa

SEQ ID NO: 47572 - DNA, 8 bp, Unknown
  misc_feature (1)..( 8): Matrix.002 file - promoters60/1380738
taatcaaa

SEQ ID NO: 47573 - DNA, 7 bp, Unknown
  misc_feature (1)..( 7): Matrix.002 file - promoters60/1380738
acaaaac

SEQ ID NO: 47574 - DNA, 8 bp, Unknown
  misc_feature (1)..( 8): Matrix.002 file - promoters60/1380738
ctgacaag

SEQ ID NO: 47575 - DNA, 7 bp, Unknown
  misc_feature (1)..( 7): Matrix.002 file - promoters60/1380738
attaaaa

SEQ ID NO: 47576 - DNA, 6 bp, Unknown
  misc_feature (1)..( 6): Matrix.002 file - promoters60/1380738
aaaccc

SEQ ID NO: 47577 - DNA, 7 bp, Unknown
  misc_feature (1)..( 7): Matrix.002 file - promoters60/1380797
taaattt

SEQ ID NO: 47578 - DNA, 7 bp, Unknown
  misc_feature (1)..( 7): Matrix.002 file - promoters60/1380797
taaaaat

SEQ ID NO: 47579 - DNA, 7 bp, Unknown
  misc_feature (1)..( 7): Matrix.002 file - promoters60/1380797
tatcatt

SEQ ID NO: 47580 - DNA, 8 bp, Unknown
  misc_feature (1)..( 8): Matrix.002 file - promoters60/1380797
tctcatta

SEQ ID NO: 47581 - DNA, 8 bp, Unknown
  misc_feature (1)..( 8): Matrix.002 file - promoters60/1380797
aaaaaata

SEQ ID NO: 47582 - DNA, 7 bp, Unknown
  misc_feature (1)..( 7): Matrix.002 file - promoters60/1380797
ataatat

SEQ ID NO: 47583 - DNA, 7 bp, Unknown
  misc_feature (1)..( 7): Matrix.002 file - promoters60/1380797
atgtatt

SEQ ID NO: 47584 - DNA, 8 bp, Unknown
  misc_feature (1)..( 8): Matrix.002 file - promoters60/1380797
taatgaat

SEQ ID NO: 47585 - DNA, 12 bp, Unknown
  misc_feature (1)..( 12): Matrix.002 file - promoters60/1380797
taataaaaaaag

SEQ ID NO: 47586 - DNA, 7 bp, Unknown
  misc_feature (1)..( 7): Matrix.002 file - promoters60/1380797
aaaaagt

SEQ ID NO: 47587 - DNA, 6 bp, Unknown
  misc_feature (1)..( 6): Matrix.002 file - promoters60/1380797
tataaa

SEQ ID NO: 47588 - DNA, 7 bp, Unknown
  misc_feature (1)..( 7): Matrix.002 file - promoters60/1380797
tttggaa

SEQ ID NO: 47589 - DNA, 7 bp, Unknown
  misc_feature (1)..( 7): Matrix.002 file - promoters60/1380797
aaaggtt

SEQ ID NO: 47590 - DNA, 8 bp, Unknown
  misc_feature (1)..( 8): Matrix.002 file - promoters60/1380797
tgtaaatt

SEQ ID NO: 47591 - DNA, 8 bp, Unknown
  misc_feature (1)..( 8): Matrix.002 file - promoters60/1380797
taaaaaca

SEQ ID NO: 47592 - DNA, 7 bp, Unknown
  misc_feature (1)..( 7): Matrix.002 file - promoters60/1380797
caacaaa

SEQ ID NO: 47593 - DNA, 8 bp, Unknown
  misc_feature (1)..( 8): Matrix.002 file - promoters60/1380797
aaagaacg

SEQ ID NO: 47594 - DNA, 6 bp, Unknown
  misc_feature (1)..( 6): Matrix.002 file - promoters60/1380797
acaaat

SEQ ID NO: 47595 - DNA, 7 bp, Unknown
  misc_feature (1)..( 7): Matrix.002 file - promoters60/1380797
tttcttg

SEQ ID NO: 47596 - DNA, 6 bp, Unknown
  misc_feature (1)..( 6): Matrix.002 file - promoters60/1380797
taacaa

SEQ ID NO: 47597 - DNA, 7 bp, Unknown
  misc_feature (1)..( 7): Matrix.002 file - promoters60/1380797
ttatgga

SEQ ID NO: 47598 - DNA, 6 bp, Unknown
  misc_feature (1)..( 6): Matrix.002 file - promoters60/1380797
cgtttt

SEQ ID NO: 47599 - DNA, 6 bp, Unknown
  misc_feature (1)..( 6): Matrix.002 file - promoters60/1380797
aaatta

SEQ ID NO: 47600 - DNA, 6 bp, Unknown
  misc_feature (1)..( 6): Matrix.002 file - promoters60/1380797
agaaaa

SEQ ID NO: 47601 - DNA, 10 bp, Unknown
  misc_feature (1)..( 10): Matrix.002 file - promoters60/1380797
caaatggtta

SEQ ID NO: 47602 - DNA, 9 bp, Unknown
  misc_feature (1)..( 9): Matrix.002 file - promoters60/1380947
tggggttat

SEQ ID NO: 47603 - DNA, 7 bp, Unknown
  misc_feature (1)..( 7): Matrix.002 file - promoters60/1380947
atcactt

SEQ ID NO: 47604 - DNA, 6 bp, Unknown
  misc_feature (1)..( 6): Matrix.002 file - promoters60/1380947
tgaaaa

SEQ ID NO: 47605 - DNA, 8 bp, Unknown
  misc_feature (1)..( 8): Matrix.002 file - promoters60/1380947
aaaaacaa

SEQ ID NO: 47606 - DNA, 7 bp, Unknown
  misc_feature (1)..( 7): Matrix.002 file - promoters60/1380947
aataaca

SEQ ID NO: 47607 - DNA, 6 bp, Unknown
  misc_feature (1)..( 6): Matrix.002 file - promoters60/1380947
ttcttc

SEQ ID NO: 47608 - DNA, 8 bp, Unknown
  misc_feature (1)..( 8): Matrix.002 file - promoters60/1380947
ttaatact

SEQ ID NO: 47609 - DNA, 6 bp, Unknown
  misc_feature (1)..( 6): Matrix.002 file - promoters60/1380947
aaatat

SEQ ID NO: 47610 - DNA, 7 bp, Unknown
  misc_feature (1)..( 7): Matrix.002 file - promoters60/1380947
tattaaa

SEQ ID NO: 47611 - DNA, 7 bp, Unknown
  misc_feature (1)..( 7): Matrix.002 file - promoters60/1380947
gttaatt

SEQ ID NO: 47612 - DNA, 7 bp, Unknown
  misc_feature (1)..( 7): Matrix.002 file - promoters60/1380947
aaaaaca

SEQ ID NO: 47613 - DNA, 8 bp, Unknown
  misc_feature (1)..( 8): Matrix.002 file - promoters60/1380947
tataacaa

SEQ ID NO: 47614 - DNA, 7 bp, Unknown
  misc_feature (1)..( 7): Matrix.002 file - promoters60/1380947
aacactt

SEQ ID NO: 47615 - DNA, 6 bp, Unknown
  misc_feature (1)..( 6): Matrix.002 file - promoters60/1380947
atgtct

SEQ ID NO: 47616 - DNA, 7 bp, Unknown
  misc_feature (1)..( 7): Matrix.002 file - promoters60/1380947
ttggaga

SEQ ID NO: 47617 - DNA, 6 bp, Unknown
  misc_feature (1)..( 6): Matrix.002 file - promoters60/1380947
gaagat

SEQ ID NO: 47618 - DNA, 6 bp, Unknown
  misc_feature (1)..( 6): Matrix.002 file - promoters60/1380947
gatcga

SEQ ID NO: 47619 - DNA, 6 bp, Unknown
  misc_feature (1)..( 6): Matrix.002 file - promoters60/1380947
aaatgc

SEQ ID NO: 47620 - DNA, 8 bp, Unknown
  misc_feature (1)..( 8): Matrix.002 file - promoters60/1380947
ggacttgt

SEQ ID NO: 47621 - DNA, 7 bp, Unknown
  misc_feature (1)..( 7): Matrix.002 file - promoters60/1380963
atatata

SEQ ID NO: 47622 - DNA, 7 bp, Unknown
  misc_feature (1)..( 7): Matrix.002 file - promoters60/1380963
tgggtct

SEQ ID NO: 47623 - DNA, 10 bp, Unknown
  misc_feature (1)..( 10): Matrix.002 file - promoters60/1380963
tatactttta

SEQ ID NO: 47624 - DNA, 7 bp, Unknown
  misc_feature (1)..( 7): Matrix.002 file - promoters60/1380963
accaatt

SEQ ID NO: 47625 - DNA, 9 bp, Unknown
  misc_feature (1)..( 9): Matrix.002 file - promoters60/1380963
tatataaat

SEQ ID NO: 47626 - DNA, 6 bp, Unknown
  misc_feature (1)..( 6): Matrix.002 file - promoters60/1380963
taaaat

SEQ ID NO: 47627 - DNA, 7 bp, Unknown
  misc_feature (1)..( 7): Matrix.002 file - promoters60/1380963
aatttta

SEQ ID NO: 47628 - DNA, 6 bp, Unknown
  misc_feature (1)..( 6): Matrix.002 file - promoters60/1380963
atttct

SEQ ID NO: 47629 - DNA, 6 bp, Unknown
  misc_feature (1)..( 6): Matrix.002 file - promoters60/1380963
taatgt

SEQ ID NO: 47630 - DNA, 6 bp, Unknown
  misc_feature (1)..( 6): Matrix.002 file - promoters60/1380963
tatata

SEQ ID NO: 47631 - DNA, 7 bp, Unknown
  misc_feature (1)..( 7): Matrix.002 file - promoters60/1380963
aagaaaa

SEQ ID NO: 47632 - DNA, 7 bp, Unknown
  misc_feature (1)..( 7): Matrix.002 file - promoters60/1380963
atctttt

SEQ ID NO: 47633 - DNA, 9 bp, Unknown
  misc_feature (1)..( 9): Matrix.002 file - promoters60/1380963
tttaaggtt

SEQ ID NO: 47634 - DNA, 7 bp, Unknown
  misc_feature (1)..( 7): Matrix.002 file - promoters60/1380963
tatatgt

SEQ ID NO: 47635 - DNA, 7 bp, Unknown
  misc_feature (1)..( 7): Matrix.002 file - promoters60/1380963
taaaatt

SEQ ID NO: 47636 - DNA, 8 bp, Unknown
  misc_feature (1)..( 8): Matrix.002 file - promoters60/1380963
ttagttta

SEQ ID NO: 47637 - DNA, 6 bp, Unknown
  misc_feature (1)..( 6): Matrix.002 file - promoters60/1380963
ttaatg

SEQ ID NO: 47638 - DNA, 8 bp, Unknown
  misc_feature (1)..( 8): Matrix.002 file - promoters60/1380963
tatcatat

SEQ ID NO: 47639 - DNA, 8 bp, Unknown
  misc_feature (1)..( 8): Matrix.002 file - promoters60/1380963
tttactgt

SEQ ID NO: 47640 - DNA, 6 bp, Unknown
  misc_feature (1)..( 6): Matrix.002 file - promoters60/1380963
aaaaag

SEQ ID NO: 47641 - DNA, 7 bp, Unknown
  misc_feature (1)..( 7): Matrix.002 file - promoters60/1380963
gtacaat

SEQ ID NO: 47642 - DNA, 8 bp, Unknown
  misc_feature (1)..( 8): Matrix.002 file - promoters60/1380963
cttaacaa

SEQ ID NO: 47643 - DNA, 6 bp, Unknown
  misc_feature (1)..( 6): Matrix.002 file - promoters60/1380963
tatata

SEQ ID NO: 47644 - DNA, 7 bp, Unknown
  misc_feature (1)..( 7): Matrix.002 file - promoters60/1380963
aaaagaa

SEQ ID NO: 47645 - DNA, 6 bp, Unknown
  misc_feature (1)..( 6): Matrix.002 file - promoters60/1380963
gattag

SEQ ID NO: 47646 - DNA, 7 bp, Unknown
  misc_feature (1)..( 7): Matrix.002 file - promoters60/1380963
attatta

SEQ ID NO: 47647 - DNA, 11 bp, Unknown
  misc_feature (1)..( 11): Matrix.002 file - promoters60/1381002
aataaaaatta

SEQ ID NO: 47648 - DNA, 16 bp, Unknown
  misc_feature (1)..( 16): Matrix.002 file - promoters60/1381002
tataaaactttcttaa

SEQ ID NO: 47649 - DNA, 9 bp, Unknown
  misc_feature (1)..( 9): Matrix.002 file - promoters60/1381033
ataaatatg

SEQ ID NO: 47650 - DNA, 8 bp, Unknown
  misc_feature (1)..( 8): Matrix.002 file - promoters60/1381033
atatgaaa

SEQ ID NO: 47651 - DNA, 9 bp, Unknown
  misc_feature (1)..( 9): Matrix.002 file - promoters60/1381033
atatcattc

SEQ ID NO: 47652 - DNA, 7 bp, Unknown
  misc_feature (1)..( 7): Matrix.002 file - promoters60/1381033
tttattc

SEQ ID NO: 47653 - DNA, 6 bp, Unknown
  misc_feature (1)..( 6): Matrix.002 file - promoters60/1381033
atgacc

SEQ ID NO: 47654 - DNA, 11 bp, Unknown
  misc_feature (1)..( 11): Matrix.002 file - promoters60/1381033
agataatgatt

SEQ ID NO: 47655 - DNA, 8 bp, Unknown
  misc_feature (1)..( 8): Matrix.002 file - promoters60/1381033
gaaaaata

SEQ ID NO: 47656 - DNA, 8 bp, Unknown
  misc_feature (1)..( 8): Matrix.002 file - promoters60/1381033
aacacaca

SEQ ID NO: 47657 - DNA, 7 bp, Unknown
  misc_feature (1)..( 7): Matrix.002 file - promoters60/1381033
aaaaaaa

SEQ ID NO: 47658 - DNA, 6 bp, Unknown
  misc_feature (1)..( 6): Matrix.002 file - promoters60/1381033
aaatta

SEQ ID NO: 47659 - DNA, 8 bp, Unknown
  misc_feature (1)..( 8): Matrix.002 file - promoters60/1381033
actctaaa

SEQ ID NO: 47660 - DNA, 6 bp, Unknown
  misc_feature (1)..( 6): Matrix.002 file - promoters60/1381033
tatgtg

SEQ ID NO: 47661 - DNA, 11 bp, Unknown
  misc_feature (1)..( 11): Matrix.002 file - promoters60/1381033
ctttttttttt

SEQ ID NO: 47662 - DNA, 7 bp, Unknown
  misc_feature (1)..( 7): Matrix.002 file - promoters60/1381033
cacaaaa

SEQ ID NO: 47663 - DNA, 6 bp, Unknown
  misc_feature (1)..( 6): Matrix.002 file - promoters60/1381195
tattct

SEQ ID NO: 47664 - DNA, 7 bp, Unknown
  misc_feature (1)..( 7): Matrix.002 file - promoters60/1381195
taaatgg

SEQ ID NO: 47665 - DNA, 8 bp, Unknown
  misc_feature (1)..( 8): Matrix.002 file - promoters60/1381195
atatatgt

SEQ ID NO: 47666 - DNA, 8 bp, Unknown
  misc_feature (1)..( 8): Matrix.002 file - promoters60/1381195
tcaatatt

SEQ ID NO: 47667 - DNA, 7 bp, Unknown
  misc_feature (1)..( 7): Matrix.002 file - promoters60/1381195
aacatta

SEQ ID NO: 47668 - DNA, 6 bp, Unknown
  misc_feature (1)..( 6): Matrix.002 file - promoters60/1381195
ttttgt

SEQ ID NO: 47669 - DNA, 6 bp, Unknown
  misc_feature (1)..( 6): Matrix.002 file - promoters60/1381195
gcttaa

SEQ ID NO: 47670 - DNA, 7 bp, Unknown
  misc_feature (1)..( 7): Matrix.002 file - promoters60/1381195
aacacaa

SEQ ID NO: 47671 - DNA, 7 bp, Unknown
  misc_feature (1)..( 7): Matrix.002 file - promoters60/1381195
attgata

SEQ ID NO: 47672 - DNA, 6 bp, Unknown
  misc_feature (1)..( 6): Matrix.002 file - promoters60/1381195
taatta

SEQ ID NO: 47673 - DNA, 8 bp, Unknown
  misc_feature (1)..( 8): Matrix.002 file - promoters60/1381195
ttaactac

SEQ ID NO: 47674 - DNA, 6 bp, Unknown
  misc_feature (1)..( 6): Matrix.002 file - promoters60/1381195
gtaaat

SEQ ID NO: 47675 - DNA, 8 bp, Unknown
  misc_feature (1)..( 8): Matrix.002 file - promoters60/1381195
tttactat

SEQ ID NO: 47676 - DNA, 7 bp, Unknown
  misc_feature (1)..( 7): Matrix.002 file - promoters60/1381195
ctttatt

SEQ ID NO: 47677 - DNA, 10 bp, Unknown
  misc_feature (1)..( 10): Matrix.002 file - promoters60/1381195
tgtctagatt

SEQ ID NO: 47678 - DNA, 6 bp, Unknown
  misc_feature (1)..( 6): Matrix.002 file - promoters60/1381195
tatagt

SEQ ID NO: 47679 - DNA, 7 bp, Unknown
  misc_feature (1)..( 7): Matrix.002 file - promoters60/1381195
attgtaa

SEQ ID NO: 47680 - DNA, 6 bp, Unknown
  misc_feature (1)..( 6): Matrix.002 file - promoters60/1381195
tgattc

SEQ ID NO: 47681 - DNA, 10 bp, Unknown
  misc_feature (1)..( 10): Matrix.002 file - promoters60/1381457
ggcttttgaa

SEQ ID NO: 47682 - DNA, 9 bp, Unknown
  misc_feature (1)..( 9): Matrix.002 file - promoters60/1381494
tgtgttaat

SEQ ID NO: 47683 - DNA, 9 bp, Unknown
  misc_feature (1)..( 9): Matrix.002 file - promoters60/1381494
aaatgcttt

SEQ ID NO: 47684 - DNA, 7 bp, Unknown
  misc_feature (1)..( 7): Matrix.002 file - promoters60/1381494
ttctttg

SEQ ID NO: 47685 - DNA, 6 bp, Unknown
  misc_feature (1)..( 6): Matrix.002 file - promoters60/1381494
atttat

SEQ ID NO: 47686 - DNA, 8 bp, Unknown
  misc_feature (1)..( 8): Matrix.002 file - promoters60/1381494
ggggtaaa

SEQ ID NO: 47687 - DNA, 7 bp, Unknown
  misc_feature (1)..( 7): Matrix.002 file - promoters60/1381494
ttagatc

SEQ ID NO: 47688 - DNA, 8 bp, Unknown
  misc_feature (1)..( 8): Matrix.002 file - promoters60/1381494
aatccctg

SEQ ID NO: 47689 - DNA, 6 bp, Unknown
  misc_feature (1)..( 6): Matrix.002 file - promoters60/1381494
tccaaa

SEQ ID NO: 47690 - DNA, 8 bp, Unknown
  misc_feature (1)..( 8): Matrix.002 file - promoters60/1381494
tccaaaga

SEQ ID NO: 47691 - DNA, 9 bp, Unknown
  misc_feature (1)..( 9): Matrix.002 file - promoters60/1381494
aattaatgg

SEQ ID NO: 47692 - DNA, 7 bp, Unknown
  misc_feature (1)..( 7): Matrix.002 file - promoters60/1381494
attgtca

SEQ ID NO: 47693 - DNA, 6 bp, Unknown
  misc_feature (1)..( 6): Matrix.002 file - promoters60/1381494
agtaaa

SEQ ID NO: 47694 - DNA, 7 bp, Unknown
  misc_feature (1)..( 7): Matrix.002 file - promoters60/1381494
aatcggg

SEQ ID NO: 47695 - DNA, 8 bp, Unknown
  misc_feature (1)..( 8): Matrix.002 file - promoters60/1381494
gaaacaaa

SEQ ID NO: 47696 - DNA, 10 bp, Unknown
  misc_feature (1)..( 10): Matrix.002 file - promoters60/1381494
ggaaaagaaa

SEQ ID NO: 47697 - DNA, 7 bp, Unknown
  misc_feature (1)..( 7): Matrix.002 file - promoters60/1381494
cccacta

SEQ ID NO: 47698 - DNA, 9 bp, Unknown
  misc_feature (1)..( 9): Matrix.002 file - promoters60/1381494
aaagaaaag

SEQ ID NO: 47699 - DNA, 7 bp, Unknown
  misc_feature (1)..( 7): Matrix.002 file - promoters60/1381494
gtatata

SEQ ID NO: 47700 - DNA, 8 bp, Unknown
  misc_feature (1)..( 8): Matrix.002 file - promoters60/1381537
ggattctt

SEQ ID NO: 47701 - DNA, 8 bp, Unknown
  misc_feature (1)..( 8): Matrix.002 file - promoters60/1381537
agatagat

SEQ ID NO: 47702 - DNA, 7 bp, Unknown
  misc_feature (1)..( 7): Matrix.002 file - promoters60/1381537
catcttc

SEQ ID NO: 47703 - DNA, 7 bp, Unknown
  misc_feature (1)..( 7): Matrix.002 file - promoters60/1381537
tcacttt

SEQ ID NO: 47704 - DNA, 10 bp, Unknown
  misc_feature (1)..( 10): Matrix.002 file - promoters60/1381537
aaaatccttt

SEQ ID NO: 47705 - DNA, 9 bp, Unknown
  misc_feature (1)..( 9): Matrix.002 file - promoters60/1381537
taaaacaaa

SEQ ID NO: 47706 - DNA, 7 bp, Unknown
  misc_feature (1)..( 7): Matrix.002 file - promoters60/1381537
gaaaaat

SEQ ID NO: 47707 - DNA, 9 bp, Unknown
  misc_feature (1)..( 9): Matrix.002 file - promoters60/1381537
tcctaattt

SEQ ID NO: 47708 - DNA, 6 bp, Unknown
  misc_feature (1)..( 6): Matrix.002 file - promoters60/1381537
tttgtt

SEQ ID NO: 47709 - DNA, 6 bp, Unknown
  misc_feature (1)..( 6): Matrix.002 file - promoters60/1381537
taaagg

SEQ ID NO: 47710 - DNA, 6 bp, Unknown
  misc_feature (1)..( 6): Matrix.002 file - promoters60/1381537
ttagat

SEQ ID NO: 47711 - DNA, 7 bp, Unknown
  misc_feature (1)..( 7): Matrix.002 file - promoters60/1381537
ggttgaa

SEQ ID NO: 47712 - DNA, 6 bp, Unknown
  misc_feature (1)..( 6): Matrix.002 file - promoters60/1381537
tttaat

SEQ ID NO: 47713 - DNA, 8 bp, Unknown
  misc_feature (1)..( 8): Matrix.002 file - promoters60/1381537
agaaaaaa

SEQ ID NO: 47714 - DNA, 8 bp, Unknown
  misc_feature (1)..( 8): Matrix.002 file - promoters60/1381537
aaaaaaaa

SEQ ID NO: 47715 - DNA, 8 bp, Unknown
  misc_feature (1)..( 8): Matrix.002 file - promoters60/1381537
gcccatta

SEQ ID NO: 47716 - DNA, 6 bp, Unknown
  misc_feature (1)..( 6): Matrix.002 file - promoters60/1381537
agtaaa

SEQ ID NO: 47717 - DNA, 7 bp, Unknown
  misc_feature (1)..( 7): Matrix.002 file - promoters60/1381537
aatcggg

SEQ ID NO: 47718 - DNA, 8 bp, Unknown
  misc_feature (1)..( 8): Matrix.002 file - promoters60/1381537
gaaacaaa

SEQ ID NO: 47719 - DNA, 10 bp, Unknown
  misc_feature (1)..( 10): Matrix.002 file - promoters60/1381537
ggaaaagaaa

SEQ ID NO: 47720 - DNA, 7 bp, Unknown
  misc_feature (1)..( 7): Matrix.002 file - promoters60/1381537
cccacta

SEQ ID NO: 47721 - DNA, 9 bp, Unknown
  misc_feature (1)..( 9): Matrix.002 file - promoters60/1381537
aaagaaaag

SEQ ID NO: 47722 - DNA, 7 bp, Unknown
  misc_feature (1)..( 7): Matrix.002 file - promoters60/1381537
gtatata

SEQ ID NO: 47723 - DNA, 8 bp, Unknown
  misc_feature (1)..( 8): Matrix.002 file - promoters60/1381563
tgataaaa

SEQ ID NO: 47724 - DNA, 9 bp, Unknown
  misc_feature (1)..( 9): Matrix.002 file - promoters60/1381563
ttacaaaaa

SEQ ID NO: 47725 - DNA, 10 bp, Unknown
  misc_feature (1)..( 10): Matrix.002 file - promoters60/1381563
taaaaattga

SEQ ID NO: 47726 - DNA, 9 bp, Unknown
  misc_feature (1)..( 9): Matrix.002 file - promoters60/1381563
aaccattaa

SEQ ID NO: 47727 - DNA, 8 bp, Unknown
  misc_feature (1)..( 8): Matrix.002 file - promoters60/1381563
atctttaa

SEQ ID NO: 47728 - DNA, 9 bp, Unknown
  misc_feature (1)..( 9): Matrix.002 file - promoters60/1381566
tagaaaaac

SEQ ID NO: 47729 - DNA, 7 bp, Unknown
  misc_feature (1)..( 7): Matrix.002 file - promoters60/1381615
acaaagt

SEQ ID NO: 47730 - DNA, 6 bp, Unknown
  misc_feature (1)..( 6): Matrix.002 file - promoters60/1381615
taacaa

SEQ ID NO: 47731 - DNA, 6 bp, Unknown
  misc_feature (1)..( 6): Matrix.002 file - promoters60/1381615
atctga

SEQ ID NO: 47732 - DNA, 8 bp, Unknown
  misc_feature (1)..( 8): Matrix.002 file - promoters60/1381615
actcttca

SEQ ID NO: 47733 - DNA, 8 bp, Unknown
  misc_feature (1)..( 8): Matrix.002 file - promoters60/1381615
atgtatat

SEQ ID NO: 47734 - DNA, 6 bp, Unknown
  misc_feature (1)..( 6): Matrix.002 file - promoters60/1381615
ctgttt

SEQ ID NO: 47735 - DNA, 7 bp, Unknown
  misc_feature (1)..( 7): Matrix.002 file - promoters60/1381615
tcaacag

SEQ ID NO: 47736 - DNA, 7 bp, Unknown
  misc_feature (1)..( 7): Matrix.002 file - promoters60/1381615
ttacagg

SEQ ID NO: 47737 - DNA, 7 bp, Unknown
  misc_feature (1)..( 7): Matrix.002 file - promoters60/1381615
tacaact

SEQ ID NO: 47738 - DNA, 9 bp, Unknown
  misc_feature (1)..( 9): Matrix.002 file - promoters60/1381615
tttcatgat

SEQ ID NO: 47739 - DNA, 6 bp, Unknown
  misc_feature (1)..( 6): Matrix.002 file - promoters60/1381615
caacat

SEQ ID NO: 47740 - DNA, 6 bp, Unknown
  misc_feature (1)..( 6): Matrix.002 file - promoters60/1381647
aagtct

SEQ ID NO: 47741 - DNA, 10 bp, Unknown
  misc_feature (1)..( 10): Matrix.002 file - promoters60/1381647
aaaatgaaga

SEQ ID NO: 47742 - DNA, 10 bp, Unknown
  misc_feature (1)..( 10): Matrix.002 file - promoters60/1381647
atcttcttcc

SEQ ID NO: 47743 - DNA, 9 bp, Unknown
  misc_feature (1)..( 9): Matrix.002 file - promoters60/1381647
gttttcttt

SEQ ID NO: 47744 - DNA, 9 bp, Unknown
  misc_feature (1)..( 9): Matrix.002 file - promoters60/1381647
ataaatatg

SEQ ID NO: 47745 - DNA, 7 bp, Unknown
  misc_feature (1)..( 7): Matrix.002 file - promoters60/1381647
tttgttt

SEQ ID NO: 47746 - DNA, 9 bp, Unknown
  misc_feature (1)..( 9): Matrix.002 file - promoters60/1381704
gtttccttt

SEQ ID NO: 47747 - DNA, 8 bp, Unknown
  misc_feature (1)..( 8): Matrix.002 file - promoters60/1381704
aaccaata

SEQ ID NO: 47748 - DNA, 9 bp, Unknown
  misc_feature (1)..( 9): Matrix.002 file - promoters60/1381704
tttccttat

SEQ ID NO: 47749 - DNA, 9 bp, Unknown
  misc_feature (1)..( 9): Matrix.002 file - promoters60/1381818
taaaaattc

SEQ ID NO: 47750 - DNA, 9 bp, Unknown
  misc_feature (1)..( 9): Matrix.002 file - promoters60/1381818
taaaacaaa

SEQ ID NO: 47751 - DNA, 11 bp, Unknown
  misc_feature (1)..( 11): Matrix.002 file - promoters60/1381818
ccagtatatat

SEQ ID NO: 47752 - DNA, 11 bp, Unknown
  misc_feature (1)..( 11): Matrix.002 file - promoters60/1381818
gttttaaataa

SEQ ID NO: 47753 - DNA, 10 bp, Unknown
  misc_feature (1)..( 10): Matrix.002 file - promoters60/1381818
aaattatttt

SEQ ID NO: 47754 - DNA, 9 bp, Unknown
  misc_feature (1)..( 9): Matrix.002 file - promoters60/1381818
aaaaatata

SEQ ID NO: 47755 - DNA, 9 bp, Unknown
  misc_feature (1)..( 9): Matrix.002 file - promoters60/1381818
aaataaaat

SEQ ID NO: 47756 - DNA, 8 bp, Unknown
  misc_feature (1)..( 8): Matrix.002 file - promoters60/1381818
acttttgt

SEQ ID NO: 47757 - DNA, 8 bp, Unknown
  misc_feature (1)..( 8): Matrix.002 file - promoters60/1381896
ttggtttt

SEQ ID NO: 47758 - DNA, 6 bp, Unknown
  misc_feature (1)..( 6): Matrix.002 file - promoters60/1381896
ctgatg

SEQ ID NO: 47759 - DNA, 7 bp, Unknown
  misc_feature (1)..( 7): Matrix.002 file - promoters60/1381896
ttagaaa

SEQ ID NO: 47760 - DNA, 8 bp, Unknown
  misc_feature (1)..( 8): Matrix.002 file - promoters60/1381896
aaagacta

SEQ ID NO: 47761 - DNA, 8 bp, Unknown
  misc_feature (1)..( 8): Matrix.002 file - promoters60/1381896
ctcatgta

SEQ ID NO: 47762 - DNA, 7 bp, Unknown
  misc_feature (1)..( 7): Matrix.002 file - promoters60/1381896
ttaagaa

SEQ ID NO: 47763 - DNA, 10 bp, Unknown
  misc_feature (1)..( 10): Matrix.002 file - promoters60/1381896
agatatttat

SEQ ID NO: 47764 - DNA, 6 bp, Unknown
  misc_feature (1)..( 6): Matrix.002 file - promoters60/1381896
ttgaat

SEQ ID NO: 47765 - DNA, 7 bp, Unknown
  misc_feature (1)..( 7): Matrix.002 file - promoters60/1381896
ttctctt

SEQ ID NO: 47766 - DNA, 7 bp, Unknown
  misc_feature (1)..( 7): Matrix.002 file - promoters60/1381896
aaaatca

SEQ ID NO: 47767 - DNA, 6 bp, Unknown
  misc_feature (1)..( 6): Matrix.002 file - promoters60/1381896
atgtct

SEQ ID NO: 47768 - DNA, 7 bp, Unknown
  misc_feature (1)..( 7): Matrix.002 file - promoters60/1381896
tgtacaa

SEQ ID NO: 47769 - DNA, 7 bp, Unknown
  misc_feature (1)..( 7): Matrix.002 file - promoters60/1381896
accagac

SEQ ID NO: 47770 - DNA, 7 bp, Unknown
  misc_feature (1)..( 7): Matrix.002 file - promoters60/1381896
cttagga

SEQ ID NO: 47771 - DNA, 7 bp, Unknown
  misc_feature (1)..( 7): Matrix.002 file - promoters60/1381896
ctaccta

SEQ ID NO: 47772 - DNA, 8 bp, Unknown
  misc_feature (1)..( 8): Matrix.002 file - promoters60/1381896
ttgaagta

SEQ ID NO: 47773 - DNA, 17 bp, Unknown
  misc_feature (1)..( 17): Matrix.002 file - promoters60/1381926
gcccattaatgagtgca

SEQ ID NO: 47774 - DNA, 10 bp, Unknown
  misc_feature (1)..( 10): Matrix.002 file - promoters60/1381926
gaaatagatt

SEQ ID NO: 47775 - DNA, 15 bp, Unknown
  misc_feature (1)..( 15): Matrix.002 file - promoters60/1381926
gcccatataatttga

SEQ ID NO: 47776 - DNA, 7 bp, Unknown
  misc_feature (1)..( 7): Matrix.002 file - promoters60/1382119
gaggaga

SEQ ID NO: 47777 - DNA, 6 bp, Unknown
  misc_feature (1)..( 6): Matrix.002 file - promoters60/1382119
tttctt

SEQ ID NO: 47778 - DNA, 8 bp, Unknown
  misc_feature (1)..( 8): Matrix.002 file - promoters60/1382119
attcacca

SEQ ID NO: 47779 - DNA, 7 bp, Unknown
  misc_feature (1)..( 7): Matrix.002 file - promoters60/1382119
aatgaaa

SEQ ID NO: 47780 - DNA, 8 bp, Unknown
  misc_feature (1)..( 8): Matrix.002 file - promoters60/1382119
acaaagaa

SEQ ID NO: 47781 - DNA, 6 bp, Unknown
  misc_feature (1)..( 6): Matrix.002 file - promoters60/1382119
aaaata

SEQ ID NO: 47782 - DNA, 10 bp, Unknown
  misc_feature (1)..( 10): Matrix.002 file - promoters60/1382119
tataaataaa

SEQ ID NO: 47783 - DNA, 6 bp, Unknown
  misc_feature (1)..( 6): Matrix.002 file - promoters60/1382119
caaaag

SEQ ID NO: 47784 - DNA, 8 bp, Unknown
  misc_feature (1)..( 8): Matrix.002 file - promoters60/1382119
ttctctct

SEQ ID NO: 47785 - DNA, 8 bp, Unknown
  misc_feature (1)..( 8): Matrix.002 file - promoters60/1382119
tataacca

SEQ ID NO: 47786 - DNA, 8 bp, Unknown
  misc_feature (1)..( 8): Matrix.002 file - promoters60/1382119
gttatcgt

SEQ ID NO: 47787 - DNA, 8 bp, Unknown
  misc_feature (1)..( 8): Matrix.002 file - promoters60/1382119
aaaacaaa

SEQ ID NO: 47788 - DNA, 7 bp, Unknown
  misc_feature (1)..( 7): Matrix.002 file - promoters60/1382134
tgaaatt

SEQ ID NO: 47789 - DNA, 7 bp, Unknown
  misc_feature (1)..( 7): Matrix.002 file - promoters60/1382134
taaacat

SEQ ID NO: 47790 - DNA, 6 bp, Unknown
  misc_feature (1)..( 6): Matrix.002 file - promoters60/1382134
ttaact

SEQ ID NO: 47791 - DNA, 6 bp, Unknown
  misc_feature (1)..( 6): Matrix.002 file - promoters60/1382134
taaaat

SEQ ID NO: 47792 - DNA, 8 bp, Unknown
  misc_feature (1)..( 8): Matrix.002 file - promoters60/1382134
agatttta

SEQ ID NO: 47793 - DNA, 6 bp, Unknown
  misc_feature (1)..( 6): Matrix.002 file - promoters60/1382134
taataa

SEQ ID NO: 47794 - DNA, 7 bp, Unknown
  misc_feature (1)..( 7): Matrix.002 file - promoters60/1382134
aatatat

SEQ ID NO: 47795 - DNA, 7 bp, Unknown
  misc_feature (1)..( 7): Matrix.002 file - promoters60/1382134
taccaaa

SEQ ID NO: 47796 - DNA, 10 bp, Unknown
  misc_feature (1)..( 10): Matrix.002 file - promoters60/1382134
acaattttta

SEQ ID NO: 47797 - DNA, 6 bp, Unknown
  misc_feature (1)..( 6): Matrix.002 file - promoters60/1382134
cttcta

SEQ ID NO: 47798 - DNA, 7 bp, Unknown
  misc_feature (1)..( 7): Matrix.002 file - promoters60/1382134
cacgtga

SEQ ID NO: 47799 - DNA, 6 bp, Unknown
  misc_feature (1)..( 6): Matrix.002 file - promoters60/1382134
aaaaat

SEQ ID NO: 47800 - DNA, 6 bp, Unknown
  misc_feature (1)..( 6): Matrix.002 file - promoters60/1382134
gatgat

SEQ ID NO: 47801 - DNA, 13 bp, Unknown
  misc_feature (1)..( 13): Matrix.002 file - promoters60/1382134
ataatttaaaatt

SEQ ID NO: 47802 - DNA, 8 bp, Unknown
  misc_feature (1)..( 8): Matrix.002 file - promoters60/1382134
agacgtgt

SEQ ID NO: 47803 - DNA, 6 bp, Unknown
  misc_feature (1)..( 6): Matrix.002 file - promoters60/1382134
taaaat

SEQ ID NO: 47804 - DNA, 6 bp, Unknown
  misc_feature (1)..( 6): Matrix.002 file - promoters60/1382134
aatgtt

SEQ ID NO: 47805 - DNA, 6 bp, Unknown
  misc_feature (1)..( 6): Matrix.002 file - promoters60/1382134
ttaatt

SEQ ID NO: 47806 - DNA, 7 bp, Unknown
  misc_feature (1)..( 7): Matrix.002 file - promoters60/1382134
aatttaa

SEQ ID NO: 47807 - DNA, 6 bp, Unknown
  misc_feature (1)..( 6): Matrix.002 file - promoters60/1382134
ttttaa

SEQ ID NO: 47808 - DNA, 9 bp, Unknown
  misc_feature (1)..( 9): Matrix.002 file - promoters60/1382134
tcaaaataa

SEQ ID NO: 47809 - DNA, 7 bp, Unknown
  misc_feature (1)..( 7): Matrix.002 file - promoters60/1382134
ataaata

SEQ ID NO: 47810 - DNA, 9 bp, Unknown
  misc_feature (1)..( 9): Matrix.002 file - promoters60/1382281
attaaatga

SEQ ID NO: 47811 - DNA, 9 bp, Unknown
  misc_feature (1)..( 9): Matrix.002 file - promoters60/1382281
aaaataaat

SEQ ID NO: 47812 - DNA, 11 bp, Unknown
  misc_feature (1)..( 11): Matrix.002 file - promoters60/1382281
ttttcgaaaaa

SEQ ID NO: 47813 - DNA, 9 bp, Unknown
  misc_feature (1)..( 9): Matrix.002 file - promoters60/1382302
gtttgagtt

SEQ ID NO: 47814 - DNA, 10 bp, Unknown
  misc_feature (1)..( 10): Matrix.002 file - promoters60/1382302
aattatataa

SEQ ID NO: 47815 - DNA, 9 bp, Unknown
  misc_feature (1)..( 9): Matrix.002 file - promoters60/1382302
taatacagt

SEQ ID NO: 47816 - DNA, 11 bp, Unknown
  misc_feature (1)..( 11): Matrix.002 file - promoters60/1382302
ctatttgtctc

SEQ ID NO: 47817 - DNA, 10 bp, Unknown
  misc_feature (1)..( 10): Matrix.002 file - promoters60/1382302
attttataat

SEQ ID NO: 47818 - DNA, 7 bp, Unknown
  misc_feature (1)..( 7): Matrix.002 file - promoters60/1382302
aaaattg

SEQ ID NO: 47819 - DNA, 8 bp, Unknown
  misc_feature (1)..( 8): Matrix.002 file - promoters60/1382302
attttatt

SEQ ID NO: 47820 - DNA, 9 bp, Unknown
  misc_feature (1)..( 9): Matrix.002 file - promoters60/1382302
agattttat

SEQ ID NO: 47821 - DNA, 10 bp, Unknown
  misc_feature (1)..( 10): Matrix.002 file - promoters60/1382302
atacaattta

SEQ ID NO: 47822 - DNA, 6 bp, Unknown
  misc_feature (1)..( 6): Matrix.002 file - promoters60/1382302
ttttct

SEQ ID NO: 47823 - DNA, 8 bp, Unknown
  misc_feature (1)..( 8): Matrix.002 file - promoters60/1382713
atgactta

SEQ ID NO: 47824 - DNA, 7 bp, Unknown
  misc_feature (1)..( 7): Matrix.002 file - promoters60/1382713
attgtgt

SEQ ID NO: 47825 - DNA, 8 bp, Unknown
  misc_feature (1)..( 8): Matrix.002 file - promoters60/1382713
attattct

SEQ ID NO: 47826 - DNA, 8 bp, Unknown
  misc_feature (1)..( 8): Matrix.002 file - promoters60/1382713
tgaagaaa

SEQ ID NO: 47827 - DNA, 10 bp, Unknown
  misc_feature (1)..( 10): Matrix.002 file - promoters60/1382959
gtaaataaat

SEQ ID NO: 47828 - DNA, 10 bp, Unknown
  misc_feature (1)..( 10): Matrix.002 file - promoters60/1382959
gcaaataaat

SEQ ID NO: 47829 - DNA, 7 bp, Unknown
  misc_feature (1)..( 7): Matrix.002 file - promoters60/1383074
tagactt

SEQ ID NO: 47830 - DNA, 7 bp, Unknown
  misc_feature (1)..( 7): Matrix.002 file - promoters60/1383074
ggtattg

SEQ ID NO: 47831 - DNA, 10 bp, Unknown
  misc_feature (1)..( 10): Matrix.002 file - promoters60/1383074
atacatataa

SEQ ID NO: 47832 - DNA, 6 bp, Unknown
  misc_feature (1)..( 6): Matrix.002 file - promoters60/1383074
tatgaa

SEQ ID NO: 47833 - DNA, 10 bp, Unknown
  misc_feature (1)..( 10): Matrix.002 file - promoters60/1383074
aaatacaaag

SEQ ID NO: 47834 - DNA, 7 bp, Unknown
  misc_feature (1)..( 7): Matrix.002 file - promoters60/1383074
caataat

SEQ ID NO: 47835 - DNA, 7 bp, Unknown
  misc_feature (1)..( 7): Matrix.002 file - promoters60/1383074
aaaaaaa

SEQ ID NO: 47836 - DNA, 11 bp, Unknown
  misc_feature (1)..( 11): Matrix.002 file - promoters60/1383074
aaaaaaaattc

SEQ ID NO: 47837 - DNA, 7 bp, Unknown
  misc_feature (1)..( 7): Matrix.002 file - promoters60/1383074
ttgtttt

SEQ ID NO: 47838 - DNA, 7 bp, Unknown
  misc_feature (1)..( 7): Matrix.002 file - promoters60/1383074
tgacata

SEQ ID NO: 47839 - DNA, 7 bp, Unknown
  misc_feature (1)..( 7): Matrix.002 file - promoters60/1383074
atattgt

SEQ ID NO: 47840 - DNA, 7 bp, Unknown
  misc_feature (1)..( 7): Matrix.002 file - promoters60/1383074
cataaat

SEQ ID NO: 47841 - DNA, 8 bp, Unknown
  misc_feature (1)..( 8): Matrix.002 file - promoters60/1383074
gatcgaag

SEQ ID NO: 47842 - DNA, 7 bp, Unknown
  misc_feature (1)..( 7): Matrix.002 file - promoters60/1383074
aagaatg

SEQ ID NO: 47843 - DNA, 7 bp, Unknown
  misc_feature (1)..( 7): Matrix.002 file - promoters60/1383074
gtagctt

SEQ ID NO: 47844 - DNA, 9 bp, Unknown
  misc_feature (1)..( 9): Matrix.002 file - promoters60/1383074
aagtaaaca

SEQ ID NO: 47845 - DNA, 6 bp, Unknown
  misc_feature (1)..( 6): Matrix.002 file - promoters60/1383074
attata

SEQ ID NO: 47846 - DNA, 8 bp, Unknown
  misc_feature (1)..( 8): Matrix.002 file - promoters60/1383074
aaaaaaaa

SEQ ID NO: 47847 - DNA, 7 bp, Unknown
  misc_feature (1)..( 7): Matrix.002 file - promoters60/1383074
ttggttt

SEQ ID NO: 47848 - DNA, 6 bp, Unknown
  misc_feature (1)..( 6): Matrix.002 file - promoters60/1383214
cataat

SEQ ID NO: 47849 - DNA, 6 bp, Unknown
  misc_feature (1)..( 6): Matrix.002 file - promoters60/1383214
tggttt

SEQ ID NO: 47850 - DNA, 7 bp, Unknown
  misc_feature (1)..( 7): Matrix.002 file - promoters60/1383214
accagaa

SEQ ID NO: 47851 - DNA, 7 bp, Unknown
  misc_feature (1)..( 7): Matrix.002 file - promoters60/1383214
tcaaaac

SEQ ID NO: 47852 - DNA, 8 bp, Unknown
  misc_feature (1)..( 8): Matrix.002 file - promoters60/1383214
tttcattt

SEQ ID NO: 47853 - DNA, 7 bp, Unknown
  misc_feature (1)..( 7): Matrix.002 file - promoters60/1383214
aaaaatt

SEQ ID NO: 47854 - DNA, 8 bp, Unknown
  misc_feature (1)..( 8): Matrix.002 file - promoters60/1383214
ataaataa

SEQ ID NO: 47855 - DNA, 10 bp, Unknown
  misc_feature (1)..( 10): Matrix.002 file - promoters60/1383214
atatatataa

SEQ ID NO: 47856 - DNA, 9 bp, Unknown
  misc_feature (1)..( 9): Matrix.002 file - promoters60/1383214
tttaagttt

SEQ ID NO: 47857 - DNA, 9 bp, Unknown
  misc_feature (1)..( 9): Matrix.002 file - promoters60/1383214
acatggttt

SEQ ID NO: 47858 - DNA, 7 bp, Unknown
  misc_feature (1)..( 7): Matrix.002 file - promoters60/1383214
aaacata

SEQ ID NO: 47859 - DNA, 7 bp, Unknown
  misc_feature (1)..( 7): Matrix.002 file - promoters60/1383214
atataca

SEQ ID NO: 47860 - DNA, 7 bp, Unknown
  misc_feature (1)..( 7): Matrix.002 file - promoters60/1383214
ttaagtt

SEQ ID NO: 47861 - DNA, 7 bp, Unknown
  misc_feature (1)..( 7): Matrix.002 file - promoters60/1383214
taaaact

SEQ ID NO: 47862 - DNA, 7 bp, Unknown
  misc_feature (1)..( 7): Matrix.002 file - promoters60/1383214
aaaatca

SEQ ID NO: 47863 - DNA, 8 bp, Unknown
  misc_feature (1)..( 8): Matrix.002 file - promoters60/1383214
attcacat

SEQ ID NO: 47864 - DNA, 6 bp, Unknown
  misc_feature (1)..( 6): Matrix.002 file - promoters60/1383214
atattt

SEQ ID NO: 47865 - DNA, 7 bp, Unknown
  misc_feature (1)..( 7): Matrix.002 file - promoters60/1383214
tcaaaaa

SEQ ID NO: 47866 - DNA, 6 bp, Unknown
  misc_feature (1)..( 6): Matrix.002 file - promoters60/1383214
attgct

SEQ ID NO: 47867 - DNA, 6 bp, Unknown
  misc_feature (1)..( 6): Matrix.002 file - promoters60/1383214
atctaa

SEQ ID NO: 47868 - DNA, 7 bp, Unknown
  misc_feature (1)..( 7): Matrix.002 file - promoters60/1383214
aaccacc

SEQ ID NO: 47869 - DNA, 7 bp, Unknown
  misc_feature (1)..( 7): Matrix.002 file - promoters60/1383214
atggtca

SEQ ID NO: 47870 - DNA, 8 bp, Unknown
  misc_feature (1)..( 8): Matrix.002 file - promoters60/1383214
agaacaat

SEQ ID NO: 47871 - DNA, 10 bp, Unknown
  misc_feature (1)..( 10): Matrix.002 file - promoters60/1383312
tggaaacaat

SEQ ID NO: 47872 - DNA, 12 bp, Unknown
  misc_feature (1)..( 12): Matrix.002 file - promoters60/1383312
ctaatttcttgt

SEQ ID NO: 47873 - DNA, 8 bp, Unknown
  misc_feature (1)..( 8): Matrix.002 file - promoters60/1383312
tcaacttt

SEQ ID NO: 47874 - DNA, 11 bp, Unknown
  misc_feature (1)..( 11): Matrix.002 file - promoters60/1383341
aaataagaaat

SEQ ID NO: 47875 - DNA, 15 bp, Unknown
  misc_feature (1)..( 15): Matrix.002 file - promoters60/1383341
ctaaaaagtaaaaaa

SEQ ID NO: 47876 - DNA, 11 bp, Unknown
  misc_feature (1)..( 11): Matrix.002 file - promoters60/1383341
attttataata

SEQ ID NO: 47877 - DNA, 9 bp, Unknown
  misc_feature (1)..( 9): Matrix.002 file - promoters60/1383341
ctttaatgt

SEQ ID NO: 47878 - DNA, 9 bp, Unknown
  misc_feature (1)..( 9): Matrix.002 file - promoters60/1383341
aaatgaaaa

SEQ ID NO: 47879 - DNA, 8 bp, Unknown
  misc_feature (1)..( 8): Matrix.002 file - promoters60/1383341
ttaaaaat

SEQ ID NO: 47880 - DNA, 12 bp, Unknown
  misc_feature (1)..( 12): Matrix.002 file - promoters60/1383341
tttgaaatagta

SEQ ID NO: 47881 - DNA, 12 bp, Unknown
  misc_feature (1)..( 12): Matrix.002 file - promoters60/1383341
taacaaaaaaca

SEQ ID NO: 47882 - DNA, 11 bp, Unknown
  misc_feature (1)..( 11): Matrix.002 file - promoters60/1383485
acataattaag

SEQ ID NO: 47883 - DNA, 9 bp, Unknown
  misc_feature (1)..( 9): Matrix.002 file - promoters60/1383485
tgtaaaaaa

SEQ ID NO: 47884 - DNA, 10 bp, Unknown
  misc_feature (1)..( 10): Matrix.002 file - promoters60/1383514
aaatacattt

SEQ ID NO: 47885 - DNA, 10 bp, Unknown
  misc_feature (1)..( 10): Matrix.002 file - promoters60/1383514
caataaaata

SEQ ID NO: 47886 - DNA, 8 bp, Unknown
  misc_feature (1)..( 8): Matrix.002 file - promoters60/1383514
catctaaa

SEQ ID NO: 47887 - DNA, 8 bp, Unknown
  misc_feature (1)..( 8): Matrix.002 file - promoters60/1383514
taaaaaac

SEQ ID NO: 47888 - DNA, 8 bp, Unknown
  misc_feature (1)..( 8): Matrix.002 file - promoters60/1383514
ataaatac

SEQ ID NO: 47889 - DNA, 7 bp, Unknown
  misc_feature (1)..( 7): Matrix.002 file - promoters60/1383514
tttgtta

SEQ ID NO: 47890 - DNA, 8 bp, Unknown
  misc_feature (1)..( 8): Matrix.002 file - promoters60/1383514
atatctta

SEQ ID NO: 47891 - DNA, 7 bp, Unknown
  misc_feature (1)..( 7): Matrix.002 file - promoters60/1383514
aataaaa

SEQ ID NO: 47892 - DNA, 11 bp, Unknown
  misc_feature (1)..( 11): Matrix.002 file - promoters60/1383552
accaaaaaaca

SEQ ID NO: 47893 - DNA, 8 bp, Unknown
  misc_feature (1)..( 8): Matrix.002 file - promoters60/1383552
acacaaac

SEQ ID NO: 47894 - DNA, 8 bp, Unknown
  misc_feature (1)..( 8): Matrix.002 file - promoters60/1383569
attttaaa

SEQ ID NO: 47895 - DNA, 14 bp, Unknown
  misc_feature (1)..( 14): Matrix.002 file - promoters60/1383569
atattagctggtgc

SEQ ID NO: 47896 - DNA, 7 bp, Unknown
  misc_feature (1)..( 7): Matrix.002 file - promoters60/1383569
taagatg

SEQ ID NO: 47897 - DNA, 11 bp, Unknown
  misc_feature (1)..( 11): Matrix.002 file - promoters60/1383569
aatgaaatagt

SEQ ID NO: 47898 - DNA, 7 bp, Unknown
  misc_feature (1)..( 7): Matrix.002 file - promoters60/1383569
atttaaa

SEQ ID NO: 47899 - DNA, 10 bp, Unknown
  misc_feature (1)..( 10): Matrix.002 file - promoters60/1383569
aatttaaact

SEQ ID NO: 47900 - DNA, 13 bp, Unknown
  misc_feature (1)..( 13): Matrix.002 file - promoters60/1383569
aatattaaaataa

SEQ ID NO: 47901 - DNA, 7 bp, Unknown
  misc_feature (1)..( 7): Matrix.002 file - promoters60/1383569
gattgat

SEQ ID NO: 47902 - DNA, 11 bp, Unknown
  misc_feature (1)..( 11): Matrix.002 file - promoters60/1383661
agacctgaatc

SEQ ID NO: 47903 - DNA, 10 bp, Unknown
  misc_feature (1)..( 10): Matrix.002 file - promoters60/1384016
tgcaaaaaac

SEQ ID NO: 47904 - DNA, 7 bp, Unknown
  misc_feature (1)..( 7): Matrix.002 file - promoters60/1384161
aatgttg

SEQ ID NO: 47905 - DNA, 12 bp, Unknown
  misc_feature (1)..( 12): Matrix.002 file - promoters60/1384161
cctgctttaaat

SEQ ID NO: 47906 - DNA, 13 bp, Unknown
  misc_feature (1)..( 13): Matrix.002 file - promoters60/1384161
tctttttaatttt

SEQ ID NO: 47907 - DNA, 7 bp, Unknown
  misc_feature (1)..( 7): Matrix.002 file - promoters60/1384161
aatatct

SEQ ID NO: 47908 - DNA, 6 bp, Unknown
  misc_feature (1)..( 6): Matrix.002 file - promoters60/1384161
ctaaat

SEQ ID NO: 47909 - DNA, 7 bp, Unknown
  misc_feature (1)..( 7): Matrix.002 file - promoters60/1384161
ctgcaaa

SEQ ID NO: 47910 - DNA, 9 bp, Unknown
  misc_feature (1)..( 9): Matrix.002 file - promoters60/1384161
taaaaatgt

SEQ ID NO: 47911 - DNA, 6 bp, Unknown
  misc_feature (1)..( 6): Matrix.002 file - promoters60/1384161
tgttga

SEQ ID NO: 47912 - DNA, 8 bp, Unknown
  misc_feature (1)..( 8): Matrix.002 file - promoters60/1384161
tttgaact

SEQ ID NO: 47913 - DNA, 6 bp, Unknown
  misc_feature (1)..( 6): Matrix.002 file - promoters60/1384161
cagttg

SEQ ID NO: 47914 - DNA, 8 bp, Unknown
  misc_feature (1)..( 8): Matrix.002 file - promoters60/1384161
gtttatta

SEQ ID NO: 47915 - DNA, 7 bp, Unknown
  misc_feature (1)..( 7): Matrix.002 file - promoters60/1384161
tttagct

SEQ ID NO: 47916 - DNA, 6 bp, Unknown
  misc_feature (1)..( 6): Matrix.002 file - promoters60/1384161
tctata

SEQ ID NO: 47917 - DNA, 8 bp, Unknown
  misc_feature (1)..( 8): Matrix.002 file - promoters60/1384161
atagtttt

SEQ ID NO: 47918 - DNA, 9 bp, Unknown
  misc_feature (1)..( 9): Matrix.002 file - promoters60/1384161
tttccttag

SEQ ID NO: 47919 - DNA, 7 bp, Unknown
  misc_feature (1)..( 7): Matrix.002 file - promoters60/1384161
tatatgt

SEQ ID NO: 47920 - DNA, 8 bp, Unknown
  misc_feature (1)..( 8): Matrix.002 file - promoters60/1384161
attgattt

SEQ ID NO: 47921 - DNA, 15 bp, Unknown
  misc_feature (1)..( 15): Matrix.002 file - promoters60/1384169
cttatcaaaaaataa

SEQ ID NO: 47922 - DNA, 8 bp, Unknown
  misc_feature (1)..( 8): Matrix.002 file - promoters60/1384261
taatattt

SEQ ID NO: 47923 - DNA, 8 bp, Unknown
  misc_feature (1)..( 8): Matrix.002 file - promoters60/1384261
aaaaaaac

SEQ ID NO: 47924 - DNA, 6 bp, Unknown
  misc_feature (1)..( 6): Matrix.002 file - promoters60/1384261
aattta

SEQ ID NO: 47925 - DNA, 6 bp, Unknown
  misc_feature (1)..( 6): Matrix.002 file - promoters60/1384261
caaata

SEQ ID NO: 47926 - DNA, 8 bp, Unknown
  misc_feature (1)..( 8): Matrix.002 file - promoters60/1384261
ccaaaata

SEQ ID NO: 47927 - DNA, 6 bp, Unknown
  misc_feature (1)..( 6): Matrix.002 file - promoters60/1384261
aattta

SEQ ID NO: 47928 - DNA, 10 bp, Unknown
  misc_feature (1)..( 10): Matrix.002 file - promoters60/1384261
aaaaatataa

SEQ ID NO: 47929 - DNA, 6 bp, Unknown
  misc_feature (1)..( 6): Matrix.002 file - promoters60/1384261
taaaaa

SEQ ID NO: 47930 - DNA, 9 bp, Unknown
  misc_feature (1)..( 9): Matrix.002 file - promoters60/1384261
atttcattc

SEQ ID NO: 47931 - DNA, 7 bp, Unknown
  misc_feature (1)..( 7): Matrix.002 file - promoters60/1384261
attaacc

SEQ ID NO: 47932 - DNA, 7 bp, Unknown
  misc_feature (1)..( 7): Matrix.002 file - promoters60/1384261
aaacaga

SEQ ID NO: 47933 - DNA, 6 bp, Unknown
  misc_feature (1)..( 6): Matrix.002 file - promoters60/1384261
aaaatg

SEQ ID NO: 47934 - DNA, 7 bp, Unknown
  misc_feature (1)..( 7): Matrix.002 file - promoters60/1384261
aatcttt

SEQ ID NO: 47935 - DNA, 7 bp, Unknown
  misc_feature (1)..( 7): Matrix.002 file - promoters60/1384261
actaaaa

SEQ ID NO: 47936 - DNA, 6 bp, Unknown
  misc_feature (1)..( 6): Matrix.002 file - promoters60/1384261
aaaatt

SEQ ID NO: 47937 - DNA, 11 bp, Unknown
  misc_feature (1)..( 11): Matrix.002 file - promoters60/1384261
aaaatgaatat

SEQ ID NO: 47938 - DNA, 7 bp, Unknown
  misc_feature (1)..( 7): Matrix.002 file - promoters60/1384261
acagatc

SEQ ID NO: 47939 - DNA, 8 bp, Unknown
  misc_feature (1)..( 8): Matrix.002 file - promoters60/1384261
tatgaaat

SEQ ID NO: 47940 - DNA, 7 bp, Unknown
  misc_feature (1)..( 7): Matrix.002 file - promoters60/1384261
ctccctt

SEQ ID NO: 47941 - DNA, 7 bp, Unknown
  misc_feature (1)..( 7): Matrix.002 file - promoters60/1384261
aaaaagt

SEQ ID NO: 47942 - DNA, 9 bp, Unknown
  misc_feature (1)..( 9): Matrix.002 file - promoters60/1384329
gtatgaatc

SEQ ID NO: 47943 - DNA, 9 bp, Unknown
  misc_feature (1)..( 9): Matrix.002 file - promoters60/1384329
aataaaaca

SEQ ID NO: 47944 - DNA, 7 bp, Unknown
  misc_feature (1)..( 7): Matrix.002 file - promoters60/1384329
tgaccaa

SEQ ID NO: 47945 - DNA, 7 bp, Unknown
  misc_feature (1)..( 7): Matrix.002 file - promoters60/1384329
tgaccaa

SEQ ID NO: 47946 - DNA, 7 bp, Unknown
  misc_feature (1)..( 7): Matrix.002 file - promoters60/1384329
ggaaaaa

SEQ ID NO: 47947 - DNA, 11 bp, Unknown
  misc_feature (1)..( 11): Matrix.002 file - promoters60/1385347
aaaatatgata

SEQ ID NO: 47948 - DNA, 8 bp, Unknown
  misc_feature (1)..( 8): Matrix.002 file - promoters60/1385347
tttgtgat

SEQ ID NO: 47949 - DNA, 9 bp, Unknown
  misc_feature (1)..( 9): Matrix.002 file - promoters60/1385347
atgttttaa

SEQ ID NO: 47950 - DNA, 8 bp, Unknown
  misc_feature (1)..( 8): Matrix.002 file - promoters60/1385347
ctgaaatg

SEQ ID NO: 47951 - DNA, 9 bp, Unknown
  misc_feature (1)..( 9): Matrix.002 file - promoters60/1385347
ttttaatac

SEQ ID NO: 47952 - DNA, 7 bp, Unknown
  misc_feature (1)..( 7): Matrix.002 file - promoters60/1385376
attgttg

SEQ ID NO: 47953 - DNA, 9 bp, Unknown
  misc_feature (1)..( 9): Matrix.002 file - promoters60/1385376
taaaagatt

SEQ ID NO: 47954 - DNA, 7 bp, Unknown
  misc_feature (1)..( 7): Matrix.002 file - promoters60/1385376
ttggttt

SEQ ID NO: 47955 - DNA, 9 bp, Unknown
  misc_feature (1)..( 9): Matrix.002 file - promoters60/1385376
tttggtttt

SEQ ID NO: 47956 - DNA, 7 bp, Unknown
  misc_feature (1)..( 7): Matrix.002 file - promoters60/1385376
aaagaga

SEQ ID NO: 47957 - DNA, 8 bp, Unknown
  misc_feature (1)..( 8): Matrix.002 file - promoters60/1385376
taaatagt

SEQ ID NO: 47958 - DNA, 8 bp, Unknown
  misc_feature (1)..( 8): Matrix.002 file - promoters60/1385376
gaaacaat

SEQ ID NO: 47959 - DNA, 7 bp, Unknown
  misc_feature (1)..( 7): Matrix.002 file - promoters60/1385376
ataattg

SEQ ID NO: 47960 - DNA, 6 bp, Unknown
  misc_feature (1)..( 6): Matrix.002 file - promoters60/1385376
ttttga

SEQ ID NO: 47961 - DNA, 7 bp, Unknown
  misc_feature (1)..( 7): Matrix.002 file - promoters60/1385376
tgagatt

SEQ ID NO: 47962 - DNA, 6 bp, Unknown
  misc_feature (1)..( 6): Matrix.002 file - promoters60/1385376
ttggaa

SEQ ID NO: 47963 - DNA, 8 bp, Unknown
  misc_feature (1)..( 8): Matrix.002 file - promoters60/1385376
gaaaatga

SEQ ID NO: 47964 - DNA, 10 bp, Unknown
  misc_feature (1)..( 10): Matrix.002 file - promoters60/1385376
ttgaggttca

SEQ ID NO: 47965 - DNA, 9 bp, Unknown
  misc_feature (1)..( 9): Matrix.002 file - promoters60/1385376
agagagcaa

SEQ ID NO: 47966 - DNA, 7 bp, Unknown
  misc_feature (1)..( 7): Matrix.002 file - promoters60/1385376
ttgagaa

SEQ ID NO: 47967 - DNA, 6 bp, Unknown
  misc_feature (1)..( 6): Matrix.002 file - promoters60/1385376
tcttat

SEQ ID NO: 47968 - DNA, 7 bp, Unknown
  misc_feature (1)..( 7): Matrix.002 file - promoters60/1385376
aagctgt

SEQ ID NO: 47969 - DNA, 8 bp, Unknown
  misc_feature (1)..( 8): Matrix.002 file - promoters60/1385376
cctaagaa

SEQ ID NO: 47970 - DNA, 13 bp, Unknown
  misc_feature (1)..( 13): Matrix.002 file - promoters60/1385376
ttgaatcaaaatt

SEQ ID NO: 47971 - DNA, 7 bp, Unknown
  misc_feature (1)..( 7): Matrix.002 file - promoters60/1385376
tggattt

SEQ ID NO: 47972 - DNA, 6 bp, Unknown
  misc_feature (1)..( 6): Matrix.002 file - promoters60/1385376
ttaacc

SEQ ID NO: 47973 - DNA, 7 bp, Unknown
  misc_feature (1)..( 7): Matrix.002 file - promoters60/1385376
ctcactc

SEQ ID NO: 47974 - DNA, 6 bp, Unknown
  misc_feature (1)..( 6): Matrix.002 file - promoters60/1385376
atttct

SEQ ID NO: 47975 - DNA, 11 bp, Unknown
  misc_feature (1)..( 11): Matrix.002 file - promoters60/1386215
atcaaaatttg

SEQ ID NO: 47976 - DNA, 8 bp, Unknown
  misc_feature (1)..( 8): Matrix.002 file - promoters60/1386215
gctttatc

SEQ ID NO: 47977 - DNA, 9 bp, Unknown
  misc_feature (1)..( 9): Matrix.002 file - promoters60/1386215
tccaatttc

SEQ ID NO: 47978 - DNA, 10 bp, Unknown
  misc_feature (1)..( 10): Matrix.002 file - promoters60/1386215
aaaatgtgaa

SEQ ID NO: 47979 - DNA, 9 bp, Unknown
  misc_feature (1)..( 9): Matrix.002 file - promoters60/1386215
gatttgtaa

SEQ ID NO: 47980 - DNA, 10 bp, Unknown
  misc_feature (1)..( 10): Matrix.002 file - promoters60/1386215
aaaatgtgaa

SEQ ID NO: 47981 - DNA, 6 bp, Unknown
  misc_feature (1)..( 6): Matrix.002 file - promoters60/1386628
gaacat

SEQ ID NO: 47982 - DNA, 9 bp, Unknown
  misc_feature (1)..( 9): Matrix.002 file - promoters60/1386628
atttcttac

SEQ ID NO: 47983 - DNA, 9 bp, Unknown
  misc_feature (1)..( 9): Matrix.002 file - promoters60/1386628
aagatgcta

SEQ ID NO: 47984 - DNA, 6 bp, Unknown
  misc_feature (1)..( 6): Matrix.002 file - promoters60/1386778
tgtttt

SEQ ID NO: 47985 - DNA, 6 bp, Unknown
  misc_feature (1)..( 6): Matrix.002 file - promoters60/1386778
gtaatc

SEQ ID NO: 47986 - DNA, 7 bp, Unknown
  misc_feature (1)..( 7): Matrix.002 file - promoters60/1386778
aagaaat

SEQ ID NO: 47987 - DNA, 9 bp, Unknown
  misc_feature (1)..( 9): Matrix.002 file - promoters60/1386778
aaacaaaaa

SEQ ID NO: 47988 - DNA, 10 bp, Unknown
  misc_feature (1)..( 10): Matrix.002 file - promoters60/1386778
agaaaagaaa

SEQ ID NO: 47989 - DNA, 14 bp, Unknown
  misc_feature (1)..( 14): Matrix.002 file - promoters60/1386778
gtatataaaaaaaa

SEQ ID NO: 47990 - DNA, 7 bp, Unknown
  misc_feature (1)..( 7): Matrix.002 file - promoters60/1386778
tgagctt

SEQ ID NO: 47991 - DNA, 7 bp, Unknown
  misc_feature (1)..( 7): Matrix.002 file - promoters60/1386778
gaaagat

SEQ ID NO: 47992 - DNA, 6 bp, Unknown
  misc_feature (1)..( 6): Matrix.002 file - promoters60/1386778
ttttaa

SEQ ID NO: 47993 - DNA, 7 bp, Unknown
  misc_feature (1)..( 7): Matrix.002 file - promoters60/1386778
aaaaatt

SEQ ID NO: 47994 - DNA, 11 bp, Unknown
  misc_feature (1)..( 11): Matrix.002 file - promoters60/1386778
ccaatttgtta

SEQ ID NO: 47995 - DNA, 6 bp, Unknown
  misc_feature (1)..( 6): Matrix.002 file - promoters60/1386778
ataatt

SEQ ID NO: 47996 - DNA, 7 bp, Unknown
  misc_feature (1)..( 7): Matrix.002 file - promoters60/1386778
tttaggc

SEQ ID NO: 47997 - DNA, 6 bp, Unknown
  misc_feature (1)..( 6): Matrix.002 file - promoters60/1386778
agtaaa

SEQ ID NO: 47998 - DNA, 7 bp, Unknown
  misc_feature (1)..( 7): Matrix.002 file - promoters60/1386778
aatcggg

SEQ ID NO: 47999 - DNA, 7 bp, Unknown
  misc_feature (1)..( 7): Matrix.002 file - promoters60/1386778
cccacta

SEQ ID NO: 48000 - DNA, 9 bp, Unknown
  misc_feature (1)..( 9): Matrix.002 file - promoters60/1386778
aaagaaaag

SEQ ID NO: 48001 - DNA, 8 bp, Unknown
  misc_feature (1)..( 8): Matrix.002 file - promoters60/1386786
attcttta

SEQ ID NO: 48002 - DNA, 8 bp, Unknown
  misc_feature (1)..( 8): Matrix.002 file - promoters60/1386786
tttacttt

SEQ ID NO: 48003 - DNA, 8 bp, Unknown
  misc_feature (1)..( 8): Matrix.002 file - promoters60/1386786
ccgagctg

SEQ ID NO: 48004 - DNA, 6 bp, Unknown
  misc_feature (1)..( 6): Matrix.002 file - promoters60/1386786
attgtt

SEQ ID NO: 48005 - DNA, 6 bp, Unknown
  misc_feature (1)..( 6): Matrix.002 file - promoters60/1386786
agtttt

SEQ ID NO: 48006 - DNA, 8 bp, Unknown
  misc_feature (1)..( 8): Matrix.002 file - promoters60/1386786
ttttaatt

SEQ ID NO: 48007 - DNA, 6 bp, Unknown
  misc_feature (1)..( 6): Matrix.002 file - promoters60/1386786
actttt

SEQ ID NO: 48008 - DNA, 9 bp, Unknown
  misc_feature (1)..( 9): Matrix.002 file - promoters60/1386786
aaacgaatt

SEQ ID NO: 48009 - DNA, 9 bp, Unknown
  misc_feature (1)..( 9): Matrix.002 file - promoters60/1386786
aatcagagc

SEQ ID NO: 48010 - DNA, 7 bp, Unknown
  misc_feature (1)..( 7): Matrix.002 file - promoters60/1386786
cggagag

SEQ ID NO: 48011 - DNA, 6 bp, Unknown
  misc_feature (1)..( 6): Matrix.002 file - promoters60/1386786
ttatct

SEQ ID NO: 48012 - DNA, 6 bp, Unknown
  misc_feature (1)..( 6): Matrix.002 file - promoters60/1386786
gattaa

SEQ ID NO: 48013 - DNA, 6 bp, Unknown
  misc_feature (1)..( 6): Matrix.002 file - promoters60/1386861
gttata

SEQ ID NO: 48014 - DNA, 7 bp, Unknown
  misc_feature (1)..( 7): Matrix.002 file - promoters60/1386861
tttgttt

SEQ ID NO: 48015 - DNA, 9 bp, Unknown
  misc_feature (1)..( 9): Matrix.002 file - promoters60/1386861
tttattttc

SEQ ID NO: 48016 - DNA, 6 bp, Unknown
  misc_feature (1)..( 6): Matrix.002 file - promoters60/1386861
tataaa

SEQ ID NO: 48017 - DNA, 7 bp, Unknown
  misc_feature (1)..( 7): Matrix.002 file - promoters60/1386861
tgaattt

SEQ ID NO: 48018 - DNA, 7 bp, Unknown
  misc_feature (1)..( 7): Matrix.002 file - promoters60/1386861
catatga

SEQ ID NO: 48019 - DNA, 7 bp, Unknown
  misc_feature (1)..( 7): Matrix.002 file - promoters60/1386861
aacctta

SEQ ID NO: 48020 - DNA, 7 bp, Unknown
  misc_feature (1)..( 7): Matrix.002 file - promoters60/1386861
attgata

SEQ ID NO: 48021 - DNA, 6 bp, Unknown
  misc_feature (1)..( 6): Matrix.002 file - promoters60/1386861
cagaaa

SEQ ID NO: 48022 - DNA, 9 bp, Unknown
  misc_feature (1)..( 9): Matrix.002 file - promoters60/1386861
tcatcggtg

SEQ ID NO: 48023 - DNA, 7 bp, Unknown
  misc_feature (1)..( 7): Matrix.002 file - promoters60/1386861
gagatct

SEQ ID NO: 48024 - DNA, 6 bp, Unknown
  misc_feature (1)..( 6): Matrix.002 file - promoters60/1386861
tttcta

SEQ ID NO: 48025 - DNA, 6 bp, Unknown
  misc_feature (1)..( 6): Matrix.002 file - promoters60/1386861
tcttta

SEQ ID NO: 48026 - DNA, 6 bp, Unknown
  misc_feature (1)..( 6): Matrix.002 file - promoters60/1386861
taaaga

SEQ ID NO: 48027 - DNA, 7 bp, Unknown
  misc_feature (1)..( 7): Matrix.002 file - promoters60/1386861
aaggata

SEQ ID NO: 48028 - DNA, 9 bp, Unknown
  misc_feature (1)..( 9): Matrix.002 file - promoters60/1387072
aaagaaaaa

SEQ ID NO: 48029 - DNA, 9 bp, Unknown
  misc_feature (1)..( 9): Matrix.002 file - promoters60/1387072
ttatttgga

SEQ ID NO: 48030 - DNA, 7 bp, Unknown
  misc_feature (1)..( 7): Matrix.002 file - promoters60/1387072
tataaat

SEQ ID NO: 48031 - DNA, 11 bp, Unknown
  misc_feature (1)..( 11): Matrix.002 file - promoters60/1387123
tgtttgaacat

SEQ ID NO: 48032 - DNA, 8 bp, Unknown
  misc_feature (1)..( 8): Matrix.002 file - promoters60/1387123
caacgaaa

SEQ ID NO: 48033 - DNA, 10 bp, Unknown
  misc_feature (1)..( 10): Matrix.002 file - promoters60/1387123
aaatcatatt

SEQ ID NO: 48034 - DNA, 9 bp, Unknown
  misc_feature (1)..( 9): Matrix.002 file - promoters60/1387123
ataagaaaa

SEQ ID NO: 48035 - DNA, 9 bp, Unknown
  misc_feature (1)..( 9): Matrix.002 file - promoters60/1387123
tcaatcata

SEQ ID NO: 48036 - DNA, 8 bp, Unknown
  misc_feature (1)..( 8): Matrix.002 file - promoters60/1387123
taatttca

SEQ ID NO: 48037 - DNA, 9 bp, Unknown
  misc_feature (1)..( 9): Matrix.002 file - promoters60/1387123
ataataaaa

SEQ ID NO: 48038 - DNA, 8 bp, Unknown
  misc_feature (1)..( 8): Matrix.002 file - promoters60/1387123
aaatatct

SEQ ID NO: 48039 - DNA, 7 bp, Unknown
  misc_feature (1)..( 7): Matrix.002 file - promoters60/1387123
tatcata

SEQ ID NO: 48040 - DNA, 8 bp, Unknown
  misc_feature (1)..( 8): Matrix.002 file - promoters60/1387123
taataaag

SEQ ID NO: 48041 - DNA, 12 bp, Unknown
  misc_feature (1)..( 12): Matrix.002 file - promoters60/1387123
ataaattaatgt

SEQ ID NO: 48042 - DNA, 6 bp, Unknown
  misc_feature (1)..( 6): Matrix.002 file - promoters60/1387191
caaaaa

SEQ ID NO: 48043 - DNA, 6 bp, Unknown
  misc_feature (1)..( 6): Matrix.002 file - promoters60/1387191
caaaaa

SEQ ID NO: 48044 - DNA, 8 bp, Unknown
  misc_feature (1)..( 8): Matrix.002 file - promoters60/1387191
tactcaaa

SEQ ID NO: 48045 - DNA, 6 bp, Unknown
  misc_feature (1)..( 6): Matrix.002 file - promoters60/1387191
tttacc

SEQ ID NO: 48046 - DNA, 6 bp, Unknown
  misc_feature (1)..( 6): Matrix.002 file - promoters60/1387191
ctcaaa

SEQ ID NO: 48047 - DNA, 7 bp, Unknown
  misc_feature (1)..( 7): Matrix.002 file - promoters60/1387191
aatctgg

SEQ ID NO: 48048 - DNA, 6 bp, Unknown
  misc_feature (1)..( 6): Matrix.002 file - promoters60/1387191
aaaatt

SEQ ID NO: 48049 - DNA, 9 bp, Unknown
  misc_feature (1)..( 9): Matrix.002 file - promoters60/1387191
ggtctaaaa

SEQ ID NO: 48050 - DNA, 6 bp, Unknown
  misc_feature (1)..( 6): Matrix.002 file - promoters60/1387191
gaaccg

SEQ ID NO: 48051 - DNA, 7 bp, Unknown
  misc_feature (1)..( 7): Matrix.002 file - promoters60/1387191
cccgatt

SEQ ID NO: 48052 - DNA, 7 bp, Unknown
  misc_feature (1)..( 7): Matrix.002 file - promoters60/1387191
ttaaaaa

SEQ ID NO: 48053 - DNA, 10 bp, Unknown
  misc_feature (1)..( 10): Matrix.002 file - promoters60/1387191
gtaaacattt

SEQ ID NO: 48054 - DNA, 8 bp, Unknown
  misc_feature (1)..( 8): Matrix.002 file - promoters60/1387191
aaggatag

SEQ ID NO: 48055 - DNA, 6 bp, Unknown
  misc_feature (1)..( 6): Matrix.002 file - promoters60/1387211
tcatct

SEQ ID NO: 48056 - DNA, 7 bp, Unknown
  misc_feature (1)..( 7): Matrix.002 file - promoters60/1387211
attttaa

SEQ ID NO: 48057 - DNA, 9 bp, Unknown
  misc_feature (1)..( 9): Matrix.002 file - promoters60/1387211
tatgtatgt

SEQ ID NO: 48058 - DNA, 7 bp, Unknown
  misc_feature (1)..( 7): Matrix.002 file - promoters60/1387211
acaaaac

SEQ ID NO: 48059 - DNA, 7 bp, Unknown
  misc_feature (1)..( 7): Matrix.002 file - promoters60/1387211
aaacagt

SEQ ID NO: 48060 - DNA, 10 bp, Unknown
  misc_feature (1)..( 10): Matrix.002 file - promoters60/1387211
gctttagata

SEQ ID NO: 48061 - DNA, 7 bp, Unknown
  misc_feature (1)..( 7): Matrix.002 file - promoters60/1387211
ctgaata

SEQ ID NO: 48062 - DNA, 6 bp, Unknown
  misc_feature (1)..( 6): Matrix.002 file - promoters60/1387211
aaaaaa

SEQ ID NO: 48063 - DNA, 7 bp, Unknown
  misc_feature (1)..( 7): Matrix.002 file - promoters60/1387211
aaaatat

SEQ ID NO: 48064 - DNA, 9 bp, Unknown
  misc_feature (1)..( 9): Matrix.002 file - promoters60/1387211
aagacaaaa

SEQ ID NO: 48065 - DNA, 9 bp, Unknown
  misc_feature (1)..( 9): Matrix.002 file - promoters60/1387211
ctctctgtt

SEQ ID NO: 48066 - DNA, 9 bp, Unknown
  misc_feature (1)..( 9): Matrix.002 file - promoters60/1387211
aattaaact

SEQ ID NO: 48067 - DNA, 7 bp, Unknown
  misc_feature (1)..( 7): Matrix.002 file - promoters60/1387211
attatat

SEQ ID NO: 48068 - DNA, 7 bp, Unknown
  misc_feature (1)..( 7): Matrix.002 file - promoters60/1387211
attttca

SEQ ID NO: 48069 - DNA, 6 bp, Unknown
  misc_feature (1)..( 6): Matrix.002 file - promoters60/1387211
tcaatt

SEQ ID NO: 48070 - DNA, 9 bp, Unknown
  misc_feature (1)..( 9): Matrix.002 file - promoters60/1387211
aaaaagaaa

SEQ ID NO: 48071 - DNA, 13 bp, Unknown
  misc_feature (1)..( 13): Matrix.002 file - promoters60/1387349
aaacaaaccaaat

SEQ ID NO: 48072 - DNA, 10 bp, Unknown
  misc_feature (1)..( 10): Matrix.002 file - promoters60/1387349
acacaaaaac

SEQ ID NO: 48073 - DNA, 9 bp, Unknown
  misc_feature (1)..( 9): Matrix.002 file - promoters60/1387349
tcaaagatt

SEQ ID NO: 48074 - DNA, 12 bp, Unknown
  misc_feature (1)..( 12): Matrix.002 file - promoters60/1387349
aagaaaatgaac

SEQ ID NO: 48075 - DNA, 6 bp, Unknown
  misc_feature (1)..( 6): Matrix.002 file - promoters60/1387356
agttta

SEQ ID NO: 48076 - DNA, 7 bp, Unknown
  misc_feature (1)..( 7): Matrix.002 file - promoters60/1387356
aaaagtt

SEQ ID NO: 48077 - DNA, 6 bp, Unknown
  misc_feature (1)..( 6): Matrix.002 file - promoters60/1387356
ttaaaa

SEQ ID NO: 48078 - DNA, 6 bp, Unknown
  misc_feature (1)..( 6): Matrix.002 file - promoters60/1387356
caaaag

SEQ ID NO: 48079 - DNA, 9 bp, Unknown
  misc_feature (1)..( 9): Matrix.002 file - promoters60/1387356
aaacatctt

SEQ ID NO: 48080 - DNA, 6 bp, Unknown
  misc_feature (1)..( 6): Matrix.002 file - promoters60/1387356
caataa

SEQ ID NO: 48081 - DNA, 6 bp, Unknown
  misc_feature (1)..( 6): Matrix.002 file - promoters60/1387356
gatttt

SEQ ID NO: 48082 - DNA, 6 bp, Unknown
  misc_feature (1)..( 6): Matrix.002 file - promoters60/1387356
acacgt

SEQ ID NO: 48083 - DNA, 11 bp, Unknown
  misc_feature (1)..( 11): Matrix.002 file - promoters60/1387356
aaagtaaaaat

SEQ ID NO: 48084 - DNA, 6 bp, Unknown
  misc_feature (1)..( 6): Matrix.002 file - promoters60/1387356
aatgta

SEQ ID NO: 48085 - DNA, 7 bp, Unknown
  misc_feature (1)..( 7): Matrix.002 file - promoters60/1387356
catttaa

SEQ ID NO: 48086 - DNA, 10 bp, Unknown
  misc_feature (1)..( 10): Matrix.002 file - promoters60/1387356
taaaaatttt

SEQ ID NO: 48087 - DNA, 6 bp, Unknown
  misc_feature (1)..( 6): Matrix.002 file - promoters60/1387356
ataatt

SEQ ID NO: 48088 - DNA, 6 bp, Unknown
  misc_feature (1)..( 6): Matrix.002 file - promoters60/1387356
atacaa

SEQ ID NO: 48089 - DNA, 6 bp, Unknown
  misc_feature (1)..( 6): Matrix.002 file - promoters60/1387356
atattt

SEQ ID NO: 48090 - DNA, 13 bp, Unknown
  misc_feature (1)..( 13): Matrix.002 file - promoters60/1387356
aaagaaagaaaga

SEQ ID NO: 48091 - DNA, 7 bp, Unknown
  misc_feature (1)..( 7): Matrix.002 file - promoters60/1387356
ttataaa

SEQ ID NO: 48092 - DNA, 8 bp, Unknown
  misc_feature (1)..( 8): Matrix.002 file - promoters60/1387417
attttctg

SEQ ID NO: 48093 - DNA, 7 bp, Unknown
  misc_feature (1)..( 7): Matrix.002 file - promoters60/1387417
ttcttat

SEQ ID NO: 48094 - DNA, 9 bp, Unknown
  misc_feature (1)..( 9): Matrix.002 file - promoters60/1387417
aatgatttc

SEQ ID NO: 48095 - DNA, 8 bp, Unknown
  misc_feature (1)..( 8): Matrix.002 file - promoters60/1387417
tgtgatcg

SEQ ID NO: 48096 - DNA, 9 bp, Unknown
  misc_feature (1)..( 9): Matrix.002 file - promoters60/1387417
ttttgctaa

SEQ ID NO: 48097 - DNA, 8 bp, Unknown
  misc_feature (1)..( 8): Matrix.002 file - promoters60/1387429
gttctatt

SEQ ID NO: 48098 - DNA, 7 bp, Unknown
  misc_feature (1)..( 7): Matrix.002 file - promoters60/1387429
cctagtt

SEQ ID NO: 48099 - DNA, 8 bp, Unknown
  misc_feature (1)..( 8): Matrix.002 file - promoters60/1387429
caaattat

SEQ ID NO: 48100 - DNA, 7 bp, Unknown
  misc_feature (1)..( 7): Matrix.002 file - promoters60/1387429
actcaat

SEQ ID NO: 48101 - DNA, 8 bp, Unknown
  misc_feature (1)..( 8): Matrix.002 file - promoters60/1387429
tgtaactt

SEQ ID NO: 48102 - DNA, 9 bp, Unknown
  misc_feature (1)..( 9): Matrix.002 file - promoters60/1387429
aatgatttg

SEQ ID NO: 48103 - DNA, 6 bp, Unknown
  misc_feature (1)..( 6): Matrix.002 file - promoters60/1387429
aaaatt

SEQ ID NO: 48104 - DNA, 10 bp, Unknown
  misc_feature (1)..( 10): Matrix.002 file - promoters60/1387429
taatattaaa

SEQ ID NO: 48105 - DNA, 8 bp, Unknown
  misc_feature (1)..( 8): Matrix.002 file - promoters60/1387429
aaaaacct

SEQ ID NO: 48106 - DNA, 7 bp, Unknown
  misc_feature (1)..( 7): Matrix.002 file - promoters60/1387429
aaattgg

SEQ ID NO: 48107 - DNA, 7 bp, Unknown
  misc_feature (1)..( 7): Matrix.002 file - promoters60/1387429
tagaaaa

SEQ ID NO: 48108 - DNA, 7 bp, Unknown
  misc_feature (1)..( 7): Matrix.002 file - promoters60/1387429
accgcca

SEQ ID NO: 48109 - DNA, 6 bp, Unknown
  misc_feature (1)..( 6): Matrix.002 file - promoters60/1387429
cataaa

SEQ ID NO: 48110 - DNA, 8 bp, Unknown
  misc_feature (1)..( 8): Matrix.002 file - promoters60/1387429
agtaagaa

SEQ ID NO: 48111 - DNA, 6 bp, Unknown
  misc_feature (1)..( 6): Matrix.002 file - promoters60/1387429
taagag

SEQ ID NO: 48112 - DNA, 7 bp, Unknown
  misc_feature (1)..( 7): Matrix.002 file - promoters60/1387429
taaattc

SEQ ID NO: 48113 - DNA, 9 bp, Unknown
  misc_feature (1)..( 9): Matrix.002 file - promoters60/1387429
cgattaaat

SEQ ID NO: 48114 - DNA, 9 bp, Unknown
  misc_feature (1)..( 9): Matrix.002 file - promoters60/1387429
aatttgcga

SEQ ID NO: 48115 - DNA, 7 bp, Unknown
  misc_feature (1)..( 7): Matrix.002 file - promoters60/1387429
tttagaa

SEQ ID NO: 48116 - DNA, 8 bp, Unknown
  misc_feature (1)..( 8): Matrix.002 file - promoters60/1387429
atttaaat

SEQ ID NO: 48117 - DNA, 12 bp, Unknown
  misc_feature (1)..( 12): Matrix.002 file - promoters60/1387429
tgaaatagttaa

SEQ ID NO: 48118 - DNA, 6 bp, Unknown
  misc_feature (1)..( 6): Matrix.002 file - promoters60/1387429
caactt

SEQ ID NO: 48119 - DNA, 7 bp, Unknown
  misc_feature (1)..( 7): Matrix.002 file - promoters60/1387429
agattgg

SEQ ID NO: 48120 - DNA, 7 bp, Unknown
  misc_feature (1)..( 7): Matrix.002 file - promoters60/1387429
ttttctt

SEQ ID NO: 48121 - DNA, 6 bp, Unknown
  misc_feature (1)..( 6): Matrix.002 file - promoters60/1387429
aatgga

SEQ ID NO: 48122 - DNA, 8 bp, Unknown
  misc_feature (1)..( 8): Matrix.002 file - promoters60/1387429
gaaattag

SEQ ID NO: 48123 - DNA, 6 bp, Unknown
  misc_feature (1)..( 6): Matrix.002 file - promoters60/1387429
aaaaat

SEQ ID NO: 48124 - DNA, 6 bp, Unknown
  misc_feature (1)..( 6): Matrix.002 file - promoters60/1387429
atttta

SEQ ID NO: 48125 - DNA, 11 bp, Unknown
  misc_feature (1)..( 11): Matrix.002 file - promoters60/1387449
tatacttttta

SEQ ID NO: 48126 - DNA, 13 bp, Unknown
  misc_feature (1)..( 13): Matrix.002 file - promoters60/1387449
taatgtttttcta

SEQ ID NO: 48127 - DNA, 6 bp, Unknown
  misc_feature (1)..( 6): Matrix.002 file - promoters60/1387524
ttgtgg

SEQ ID NO: 48128 - DNA, 14 bp, Unknown
  misc_feature (1)..( 14): Matrix.002 file - promoters60/1387524
ctttattcttctaa

SEQ ID NO: 48129 - DNA, 8 bp, Unknown
  misc_feature (1)..( 8): Matrix.002 file - promoters60/1387524
tgtgccta

SEQ ID NO: 48130 - DNA, 8 bp, Unknown
  misc_feature (1)..( 8): Matrix.002 file - promoters60/1387524
agaaaaca

SEQ ID NO: 48131 - DNA, 6 bp, Unknown
  misc_feature (1)..( 6): Matrix.002 file - promoters60/1387524
gtaaaa

SEQ ID NO: 48132 - DNA, 7 bp, Unknown
  misc_feature (1)..( 7): Matrix.002 file - promoters60/1387524
aaaaaga

SEQ ID NO: 48133 - DNA, 10 bp, Unknown
  misc_feature (1)..( 10): Matrix.002 file - promoters60/1387524
agggataaaa

SEQ ID NO: 48134 - DNA, 7 bp, Unknown
  misc_feature (1)..( 7): Matrix.002 file - promoters60/1387524
tggccct

SEQ ID NO: 48135 - DNA, 6 bp, Unknown
  misc_feature (1)..( 6): Matrix.002 file - promoters60/1387524
gtcctt

SEQ ID NO: 48136 - DNA, 8 bp, Unknown
  misc_feature (1)..( 8): Matrix.002 file - promoters60/1387524
ttatctat

SEQ ID NO: 48137 - DNA, 6 bp, Unknown
  misc_feature (1)..( 6): Matrix.002 file - promoters60/1387524
gaaccc

SEQ ID NO: 48138 - DNA, 8 bp, Unknown
  misc_feature (1)..( 8): Matrix.002 file - promoters60/1387524
gtctaaat

SEQ ID NO: 48139 - DNA, 6 bp, Unknown
  misc_feature (1)..( 6): Matrix.002 file - promoters60/1387524
agtaaa

SEQ ID NO: 48140 - DNA, 7 bp, Unknown
  misc_feature (1)..( 7): Matrix.002 file - promoters60/1387524
aatcggg

SEQ ID NO: 48141 - DNA, 8 bp, Unknown
  misc_feature (1)..( 8): Matrix.002 file - promoters60/1387524
gaaacaaa

SEQ ID NO: 48142 - DNA, 10 bp, Unknown
  misc_feature (1)..( 10): Matrix.002 file - promoters60/1387524
ggaaaagaaa

SEQ ID NO: 48143 - DNA, 7 bp, Unknown
  misc_feature (1)..( 7): Matrix.002 file - promoters60/1387524
cccacta

SEQ ID NO: 48144 - DNA, 9 bp, Unknown
  misc_feature (1)..( 9): Matrix.002 file - promoters60/1387524
aaagaaaag

SEQ ID NO: 48145 - DNA, 7 bp, Unknown
  misc_feature (1)..( 7): Matrix.002 file - promoters60/1387524
gtatata

SEQ ID NO: 48146 - DNA, 9 bp, Unknown
  misc_feature (1)..( 9): Matrix.002 file - promoters60/1387601
ggtttgatg

SEQ ID NO: 48147 - DNA, 11 bp, Unknown
  misc_feature (1)..( 11): Matrix.002 file - promoters60/1387601
tccaaacagag

SEQ ID NO: 48148 - DNA, 8 bp, Unknown
  misc_feature (1)..( 8): Matrix.002 file - promoters60/1387616
aaaaataa

SEQ ID NO: 48149 - DNA, 7 bp, Unknown
  misc_feature (1)..( 7): Matrix.002 file - promoters60/1387616
aataaat

SEQ ID NO: 48150 - DNA, 10 bp, Unknown
  misc_feature (1)..( 10): Matrix.002 file - promoters60/1387616
atattattaa

SEQ ID NO: 48151 - DNA, 9 bp, Unknown
  misc_feature (1)..( 9): Matrix.002 file - promoters60/1387616
aataaaaaa

SEQ ID NO: 48152 - DNA, 10 bp, Unknown
  misc_feature (1)..( 10): Matrix.002 file - promoters60/1387616
taaaattaaa

SEQ ID NO: 48153 - DNA, 9 bp, Unknown
  misc_feature (1)..( 9): Matrix.002 file - promoters60/1387616
aaataaata

SEQ ID NO: 48154 - DNA, 12 bp, Unknown
  misc_feature (1)..( 12): Matrix.002 file - promoters60/1387616
gtataaacaaat

SEQ ID NO: 48155 - DNA, 8 bp, Unknown
  misc_feature (1)..( 8): Matrix.002 file - promoters60/1387616
aaaatata

SEQ ID NO: 48156 - DNA, 12 bp, Unknown
  misc_feature (1)..( 12): Matrix.002 file - promoters60/1387616
taatctatatat

SEQ ID NO: 48157 - DNA, 8 bp, Unknown
  misc_feature (1)..( 8): Matrix.002 file - promoters60/1387649
gctaggtt

SEQ ID NO: 48158 - DNA, 7 bp, Unknown
  misc_feature (1)..( 7): Matrix.002 file - promoters60/1387649
ttaaatt

SEQ ID NO: 48159 - DNA, 6 bp, Unknown
  misc_feature (1)..( 6): Matrix.002 file - promoters60/1387649
aaaatg

SEQ ID NO: 48160 - DNA, 7 bp, Unknown
  misc_feature (1)..( 7): Matrix.002 file - promoters60/1387649
aaaggtt

SEQ ID NO: 48161 - DNA, 6 bp, Unknown
  misc_feature (1)..( 6): Matrix.002 file - promoters60/1387649
taataa

SEQ ID NO: 48162 - DNA, 6 bp, Unknown
  misc_feature (1)..( 6): Matrix.002 file - promoters60/1387649
tgtcaa

SEQ ID NO: 48163 - DNA, 6 bp, Unknown
  misc_feature (1)..( 6): Matrix.002 file - promoters60/1387649
tcaatt

SEQ ID NO: 48164 - DNA, 7 bp, Unknown
  misc_feature (1)..( 7): Matrix.002 file - promoters60/1387649
taccata

SEQ ID NO: 48165 - DNA, 7 bp, Unknown
  misc_feature (1)..( 7): Matrix.002 file - promoters60/1387649
caaccac

SEQ ID NO: 48166 - DNA, 6 bp, Unknown
  misc_feature (1)..( 6): Matrix.002 file - promoters60/1387649
ggctga

SEQ ID NO: 48167 - DNA, 11 bp, Unknown
  misc_feature (1)..( 11): Matrix.002 file - promoters60/1387649
agggtctcaga

SEQ ID NO: 48168 - DNA, 6 bp, Unknown
  misc_feature (1)..( 6): Matrix.002 file - promoters60/1387649
agattt

SEQ ID NO: 48169 - DNA, 8 bp, Unknown
  misc_feature (1)..( 8): Matrix.002 file - promoters60/1387671
tatatata

SEQ ID NO: 48170 - DNA, 8 bp, Unknown
  misc_feature (1)..( 8): Matrix.002 file - promoters60/1387671
aatacatt

SEQ ID NO: 48171 - DNA, 6 bp, Unknown
  misc_feature (1)..( 6): Matrix.002 file - promoters60/1387793
ttttac

SEQ ID NO: 48172 - DNA, 6 bp, Unknown
  misc_feature (1)..( 6): Matrix.002 file - promoters60/1387793
aaaacc

SEQ ID NO: 48173 - DNA, 8 bp, Unknown
  misc_feature (1)..( 8): Matrix.002 file - promoters60/1387793
aaaaaaca

SEQ ID NO: 48174 - DNA, 8 bp, Unknown
  misc_feature (1)..( 8): Matrix.002 file - promoters60/1387793
caaaaaaa

SEQ ID NO: 48175 - DNA, 7 bp, Unknown
  misc_feature (1)..( 7): Matrix.002 file - promoters60/1387793
taaattt

SEQ ID NO: 48176 - DNA, 7 bp, Unknown
  misc_feature (1)..( 7): Matrix.002 file - promoters60/1387793
ttttgtt

SEQ ID NO: 48177 - DNA, 7 bp, Unknown
  misc_feature (1)..( 7): Matrix.002 file - promoters60/1387793
ttaaaat

SEQ ID NO: 48178 - DNA, 8 bp, Unknown
  misc_feature (1)..( 8): Matrix.002 file - promoters60/1387793
atataatt

SEQ ID NO: 48179 - DNA, 6 bp, Unknown
  misc_feature (1)..( 6): Matrix.002 file - promoters60/1387793
gaaaaa

SEQ ID NO: 48180 - DNA, 7 bp, Unknown
  misc_feature (1)..( 7): Matrix.002 file - promoters60/1387793
aaaatat

SEQ ID NO: 48181 - DNA, 6 bp, Unknown
  misc_feature (1)..( 6): Matrix.002 file - promoters60/1387793
aaaact

SEQ ID NO: 48182 - DNA, 11 bp, Unknown
  misc_feature (1)..( 11): Matrix.002 file - promoters60/1387793
ctttaaaaaaa

SEQ ID NO: 48183 - DNA, 7 bp, Unknown
  misc_feature (1)..( 7): Matrix.002 file - promoters60/1387793
aaaaatt

SEQ ID NO: 48184 - DNA, 6 bp, Unknown
  misc_feature (1)..( 6): Matrix.002 file - promoters60/1387793
gtgtac

SEQ ID NO: 48185 - DNA, 10 bp, Unknown
  misc_feature (1)..( 10): Matrix.002 file - promoters60/1387793
aaccgtcgga

SEQ ID NO: 48186 - DNA, 9 bp, Unknown
  misc_feature (1)..( 9): Matrix.002 file - promoters60/1387793
aaaagggca

SEQ ID NO: 48187 - DNA, 6 bp, Unknown
  misc_feature (1)..( 6): Matrix.002 file - promoters60/1387793
ttaaaa

SEQ ID NO: 48188 - DNA, 8 bp, Unknown
  misc_feature (1)..( 8): Matrix.002 file - promoters60/1387818
aacaaaaa

SEQ ID NO: 48189 - DNA, 9 bp, Unknown
  misc_feature (1)..( 9): Matrix.002 file - promoters60/1387818
tcaaagaaa

SEQ ID NO: 48190 - DNA, 9 bp, Unknown
  misc_feature (1)..( 9): Matrix.002 file - promoters60/1387818
actaaaaat

SEQ ID NO: 48191 - DNA, 8 bp, Unknown
  misc_feature (1)..( 8): Matrix.002 file - promoters60/1387818
aaagtttc

SEQ ID NO: 48192 - DNA, 7 bp, Unknown
  misc_feature (1)..( 7): Matrix.002 file - promoters60/1387818
gaagaat

SEQ ID NO: 48193 - DNA, 12 bp, Unknown
  misc_feature (1)..( 12): Matrix.002 file - promoters60/1387818
tttagtaaaatg

SEQ ID NO: 48194 - DNA, 10 bp, Unknown
  misc_feature (1)..( 10): Matrix.002 file - promoters60/1387906
tttgaaggtt

SEQ ID NO: 48195 - DNA, 7 bp, Unknown
  misc_feature (1)..( 7): Matrix.002 file - promoters60/1387906
gaaaata

SEQ ID NO: 48196 - DNA, 11 bp, Unknown
  misc_feature (1)..( 11): Matrix.002 file - promoters60/1387906
ttttaataaca

SEQ ID NO: 48197 - DNA, 10 bp, Unknown
  misc_feature (1)..( 10): Matrix.002 file - promoters60/1387906
aaaatctgtt

SEQ ID NO: 48198 - DNA, 10 bp, Unknown
  misc_feature (1)..( 10): Matrix.002 file - promoters60/1387906
actttataat

SEQ ID NO: 48199 - DNA, 10 bp, Unknown
  misc_feature (1)..( 10): Matrix.002 file - promoters60/1387947
ttttggaaga

SEQ ID NO: 48200 - DNA, 7 bp, Unknown
  misc_feature (1)..( 7): Matrix.002 file - promoters60/1387947
tgtagaa

SEQ ID NO: 48201 - DNA, 6 bp, Unknown
  misc_feature (1)..( 6): Matrix.002 file - promoters60/1387947
acaatt

SEQ ID NO: 48202 - DNA, 7 bp, Unknown
  misc_feature (1)..( 7): Matrix.002 file - promoters60/1387947
attttaa

SEQ ID NO: 48203 - DNA, 7 bp, Unknown
  misc_feature (1)..( 7): Matrix.002 file - promoters60/1387947
attaact

SEQ ID NO: 48204 - DNA, 8 bp, Unknown
  misc_feature (1)..( 8): Matrix.002 file - promoters60/1387947
tgggtcta

SEQ ID NO: 48205 - DNA, 6 bp, Unknown
  misc_feature (1)..( 6): Matrix.002 file - promoters60/1387947
aaaact

SEQ ID NO: 48206 - DNA, 6 bp, Unknown
  misc_feature (1)..( 6): Matrix.002 file - promoters60/1387947
gaaaaa

SEQ ID NO: 48207 - DNA, 7 bp, Unknown
  misc_feature (1)..( 7): Matrix.002 file - promoters60/1387947
aaaagaa

SEQ ID NO: 48208 - DNA, 9 bp, Unknown
  misc_feature (1)..( 9): Matrix.002 file - promoters60/1387947
agacagaaa

SEQ ID NO: 48209 - DNA, 7 bp, Unknown
  misc_feature (1)..( 7): Matrix.002 file - promoters60/1387947
gaaagaa

SEQ ID NO: 48210 - DNA, 8 bp, Unknown
  misc_feature (1)..( 8): Matrix.002 file - promoters60/1387947
gttactta

SEQ ID NO: 48211 - DNA, 6 bp, Unknown
  misc_feature (1)..( 6): Matrix.002 file - promoters60/1387947
accatt

SEQ ID NO: 48212 - DNA, 7 bp, Unknown
  misc_feature (1)..( 7): Matrix.002 file - promoters60/1387947
agaagtt

SEQ ID NO: 48213 - DNA, 7 bp, Unknown
  misc_feature (1)..( 7): Matrix.002 file - promoters60/1387947
aatatta

SEQ ID NO: 48214 - DNA, 7 bp, Unknown
  misc_feature (1)..( 7): Matrix.002 file - promoters60/1387947
aaaaaaa

SEQ ID NO: 48215 - DNA, 8 bp, Unknown
  misc_feature (1)..( 8): Matrix.002 file - promoters60/1387947
aaacgtta

SEQ ID NO: 48216 - DNA, 6 bp, Unknown
  misc_feature (1)..( 6): Matrix.002 file - promoters60/1387947
taaacg

SEQ ID NO: 48217 - DNA, 11 bp, Unknown
  misc_feature (1)..( 11): Matrix.002 file - promoters60/1388009
tattaaaatat

SEQ ID NO: 48218 - DNA, 7 bp, Unknown
  misc_feature (1)..( 7): Matrix.002 file - promoters60/1388009
atatttt

SEQ ID NO: 48219 - DNA, 7 bp, Unknown
  misc_feature (1)..( 7): Matrix.002 file - promoters60/1388009
attttac

SEQ ID NO: 48220 - DNA, 8 bp, Unknown
  misc_feature (1)..( 8): Matrix.002 file - promoters60/1388009
cttctgtt

SEQ ID NO: 48221 - DNA, 10 bp, Unknown
  misc_feature (1)..( 10): Matrix.002 file - promoters60/1388009
cgaaatcata

SEQ ID NO: 48222 - DNA, 6 bp, Unknown
  misc_feature (1)..( 6): Matrix.002 file - promoters60/1388009
gtaaca

SEQ ID NO: 48223 - DNA, 7 bp, Unknown
  misc_feature (1)..( 7): Matrix.002 file - promoters60/1388009
ctatatg

SEQ ID NO: 48224 - DNA, 9 bp, Unknown
  misc_feature (1)..( 9): Matrix.002 file - promoters60/1388009
aaattataa

SEQ ID NO: 48225 - DNA, 6 bp, Unknown
  misc_feature (1)..( 6): Matrix.002 file - promoters60/1388009
gtatat

SEQ ID NO: 48226 - DNA, 8 bp, Unknown
  misc_feature (1)..( 8): Matrix.002 file - promoters60/1388009
attttact

SEQ ID NO: 48227 - DNA, 8 bp, Unknown
  misc_feature (1)..( 8): Matrix.002 file - promoters60/1388009
tgctaacc

SEQ ID NO: 48228 - DNA, 7 bp, Unknown
  misc_feature (1)..( 7): Matrix.002 file - promoters60/1388009
ttactaa

SEQ ID NO: 48229 - DNA, 8 bp, Unknown
  misc_feature (1)..( 8): Matrix.002 file - promoters60/1388009
taatttta

SEQ ID NO: 48230 - DNA, 8 bp, Unknown
  misc_feature (1)..( 8): Matrix.002 file - promoters60/1388009
agtcggtc

SEQ ID NO: 48231 - DNA, 6 bp, Unknown
  misc_feature (1)..( 6): Matrix.002 file - promoters60/1388009
gaattc

SEQ ID NO: 48232 - DNA, 6 bp, Unknown
  misc_feature (1)..( 6): Matrix.002 file - promoters60/1388009
atattt

SEQ ID NO: 48233 - DNA, 6 bp, Unknown
  misc_feature (1)..( 6): Matrix.002 file - promoters60/1388009
taatat

SEQ ID NO: 48234 - DNA, 6 bp, Unknown
  misc_feature (1)..( 6): Matrix.002 file - promoters60/1388069
tattgt

SEQ ID NO: 48235 - DNA, 7 bp, Unknown
  misc_feature (1)..( 7): Matrix.002 file - promoters60/1388069
aaactta

SEQ ID NO: 48236 - DNA, 6 bp, Unknown
  misc_feature (1)..( 6): Matrix.002 file - promoters60/1388069
tagaaa

SEQ ID NO: 48237 - DNA, 10 bp, Unknown
  misc_feature (1)..( 10): Matrix.002 file - promoters60/1388069
caattaaaaa

SEQ ID NO: 48238 - DNA, 8 bp, Unknown
  misc_feature (1)..( 8): Matrix.002 file - promoters60/1388069
tttataat

SEQ ID NO: 48239 - DNA, 6 bp, Unknown
  misc_feature (1)..( 6): Matrix.002 file - promoters60/1388069
agatat

SEQ ID NO: 48240 - DNA, 6 bp, Unknown
  misc_feature (1)..( 6): Matrix.002 file - promoters60/1388069
aaagat

SEQ ID NO: 48241 - DNA, 6 bp, Unknown
  misc_feature (1)..( 6): Matrix.002 file - promoters60/1388069
tctaag

SEQ ID NO: 48242 - DNA, 6 bp, Unknown
  misc_feature (1)..( 6): Matrix.002 file - promoters60/1388069
aaaaat

SEQ ID NO: 48243 - DNA, 7 bp, Unknown
  misc_feature (1)..( 7): Matrix.002 file - promoters60/1388069
tttgaag

SEQ ID NO: 48244 - DNA, 8 bp, Unknown
  misc_feature (1)..( 8): Matrix.002 file - promoters60/1388069
aaaccaac

SEQ ID NO: 48245 - DNA, 7 bp, Unknown
  misc_feature (1)..( 7): Matrix.002 file - promoters60/1388069
cttcaag

SEQ ID NO: 48246 - DNA, 8 bp, Unknown
  misc_feature (1)..( 8): Matrix.002 file - promoters60/1388069
atcttcct

SEQ ID NO: 48247 - DNA, 8 bp, Unknown
  misc_feature (1)..( 8): Matrix.002 file - promoters60/1388545
aaagaaaa

SEQ ID NO: 48248 - DNA, 15 bp, Unknown
  misc_feature (1)..( 15): Matrix.002 file - promoters60/1388793
aacaaaaaaagttta

SEQ ID NO: 48249 - DNA, 15 bp, Unknown
  misc_feature (1)..( 15): Matrix.002 file - promoters60/1388793
atcactgatccaaca

SEQ ID NO: 48250 - DNA, 7 bp, Unknown
  misc_feature (1)..( 7): Matrix.002 file - promoters60/1388793
aattatc

SEQ ID NO: 48251 - DNA, 7 bp, Unknown
  misc_feature (1)..( 7): Matrix.002 file - promoters60/1388808
attttaa

SEQ ID NO: 48252 - DNA, 7 bp, Unknown
  misc_feature (1)..( 7): Matrix.002 file - promoters60/1388808
aatattg

SEQ ID NO: 48253 - DNA, 7 bp, Unknown
  misc_feature (1)..( 7): Matrix.002 file - promoters60/1388808
atcctac

SEQ ID NO: 48254 - DNA, 6 bp, Unknown
  misc_feature (1)..( 6): Matrix.002 file - promoters60/1388808
tttttt

SEQ ID NO: 48255 - DNA, 6 bp, Unknown
  misc_feature (1)..( 6): Matrix.002 file - promoters60/1388808
attttg

SEQ ID NO: 48256 - DNA, 6 bp, Unknown
  misc_feature (1)..( 6): Matrix.002 file - promoters60/1388808
atttgt

SEQ ID NO: 48257 - DNA, 7 bp, Unknown
  misc_feature (1)..( 7): Matrix.002 file - promoters60/1388808
atgattt

SEQ ID NO: 48258 - DNA, 7 bp, Unknown
  misc_feature (1)..( 7): Matrix.002 file - promoters60/1388808
tgttttg

SEQ ID NO: 48259 - DNA, 6 bp, Unknown
  misc_feature (1)..( 6): Matrix.002 file - promoters60/1388808
aaaatt

SEQ ID NO: 48260 - DNA, 6 bp, Unknown
  misc_feature (1)..( 6): Matrix.002 file - promoters60/1388808
tctcaa

SEQ ID NO: 48261 - DNA, 6 bp, Unknown
  misc_feature (1)..( 6): Matrix.002 file - promoters60/1388808
tagttt

SEQ ID NO: 48262 - DNA, 6 bp, Unknown
  misc_feature (1)..( 6): Matrix.002 file - promoters60/1388808
gtggat

SEQ ID NO: 48263 - DNA, 6 bp, Unknown
  misc_feature (1)..( 6): Matrix.002 file - promoters60/1388808
tttgca

SEQ ID NO: 48264 - DNA, 7 bp, Unknown
  misc_feature (1)..( 7): Matrix.002 file - promoters60/1388808
aaaagag

SEQ ID NO: 48265 - DNA, 6 bp, Unknown
  misc_feature (1)..( 6): Matrix.002 file - promoters60/1388808
aaaata

SEQ ID NO: 48266 - DNA, 8 bp, Unknown
  misc_feature (1)..( 8): Matrix.002 file - promoters60/1388808
ttagagat

SEQ ID NO: 48267 - DNA, 7 bp, Unknown
  misc_feature (1)..( 7): Matrix.002 file - promoters60/1388808
tttataa

SEQ ID NO: 48268 - DNA, 7 bp, Unknown
  misc_feature (1)..( 7): Matrix.002 file - promoters60/1388808
aacagtc

SEQ ID NO: 48269 - DNA, 7 bp, Unknown
  misc_feature (1)..( 7): Matrix.002 file - promoters60/1388808
ttaaaaa

SEQ ID NO: 48270 - DNA, 8 bp, Unknown
  misc_feature (1)..( 8): Matrix.002 file - promoters60/1388808
tcaaaaaa

SEQ ID NO: 48271 - DNA, 7 bp, Unknown
  misc_feature (1)..( 7): Matrix.002 file - promoters60/1388808
agtgcgg

SEQ ID NO: 48272 - DNA, 7 bp, Unknown
  misc_feature (1)..( 7): Matrix.002 file - promoters60/1388864
gttagaa

SEQ ID NO: 48273 - DNA, 7 bp, Unknown
  misc_feature (1)..( 7): Matrix.002 file - promoters60/1388864
aaattaa

SEQ ID NO: 48274 - DNA, 7 bp, Unknown
  misc_feature (1)..( 7): Matrix.002 file - promoters60/1388864
ctcagaa

SEQ ID NO: 48275 - DNA, 8 bp, Unknown
  misc_feature (1)..( 8): Matrix.002 file - promoters60/1388864
ttgaaaga

SEQ ID NO: 48276 - DNA, 8 bp, Unknown
  misc_feature (1)..( 8): Matrix.002 file - promoters60/1388864
agaaaaga

SEQ ID NO: 48277 - DNA, 7 bp, Unknown
  misc_feature (1)..( 7): Matrix.002 file - promoters60/1388864
aagaaac

SEQ ID NO: 48278 - DNA, 8 bp, Unknown
  misc_feature (1)..( 8): Matrix.002 file - promoters60/1388864
gaaaaagt

SEQ ID NO: 48279 - DNA, 6 bp, Unknown
  misc_feature (1)..( 6): Matrix.002 file - promoters60/1388864
gttgtg

SEQ ID NO: 48280 - DNA, 9 bp, Unknown
  misc_feature (1)..( 9): Matrix.002 file - promoters60/1388864
gatcaggaa

SEQ ID NO: 48281 - DNA, 8 bp, Unknown
  misc_feature (1)..( 8): Matrix.002 file - promoters60/1388864
atttggac

SEQ ID NO: 48282 - DNA, 11 bp, Unknown
  misc_feature (1)..( 11): Matrix.002 file - promoters60/1388872
ataacattttt

SEQ ID NO: 48283 - DNA, 8 bp, Unknown
  misc_feature (1)..( 8): Matrix.002 file - promoters60/1388872
aaaatatt

SEQ ID NO: 48284 - DNA, 9 bp, Unknown
  misc_feature (1)..( 9): Matrix.002 file - promoters60/1388872
ataacatta

SEQ ID NO: 48285 - DNA, 9 bp, Unknown
  misc_feature (1)..( 9): Matrix.002 file - promoters60/1388872
aatttggct

SEQ ID NO: 48286 - DNA, 7 bp, Unknown
  misc_feature (1)..( 7): Matrix.002 file - promoters60/1388872
aattttt

SEQ ID NO: 48287 - DNA, 8 bp, Unknown
  misc_feature (1)..( 8): Matrix.002 file - promoters60/1388872
gttattgt

SEQ ID NO: 48288 - DNA, 7 bp, Unknown
  misc_feature (1)..( 7): Matrix.002 file - promoters60/1388872
ataaaat

SEQ ID NO: 48289 - DNA, 9 bp, Unknown
  misc_feature (1)..( 9): Matrix.002 file - promoters60/1388872
caaatcttc

SEQ ID NO: 48290 - DNA, 9 bp, Unknown
  misc_feature (1)..( 9): Matrix.002 file - promoters60/1388872
tttattcag

SEQ ID NO: 48291 - DNA, 12 bp, Unknown
  misc_feature (1)..( 12): Matrix.002 file - promoters60/1388973
ttataaaaaatc

SEQ ID NO: 48292 - DNA, 12 bp, Unknown
  misc_feature (1)..( 12): Matrix.002 file - promoters60/1389243
tcatttaatata

SEQ ID NO: 48293 - DNA, 6 bp, Unknown
  misc_feature (1)..( 6): Matrix.002 file - promoters60/1389279
tctttt

SEQ ID NO: 48294 - DNA, 12 bp, Unknown
  misc_feature (1)..( 12): Matrix.002 file - promoters60/1389279
ttttcttacttt

SEQ ID NO: 48295 - DNA, 7 bp, Unknown
  misc_feature (1)..( 7): Matrix.002 file - promoters60/1389279
tggcata

SEQ ID NO: 48296 - DNA, 7 bp, Unknown
  misc_feature (1)..( 7): Matrix.002 file - promoters60/1389279
aattttg

SEQ ID NO: 48297 - DNA, 7 bp, Unknown
  misc_feature (1)..( 7): Matrix.002 file - promoters60/1389279
caatgtt

SEQ ID NO: 48298 - DNA, 8 bp, Unknown
  misc_feature (1)..( 8): Matrix.002 file - promoters60/1389279
agaaaaaa

SEQ ID NO: 48299 - DNA, 7 bp, Unknown
  misc_feature (1)..( 7): Matrix.002 file - promoters60/1389279
acaaaaa

SEQ ID NO: 48300 - DNA, 8 bp, Unknown
  misc_feature (1)..( 8): Matrix.002 file - promoters60/1389279
tatatata

SEQ ID NO: 48301 - DNA, 6 bp, Unknown
  misc_feature (1)..( 6): Matrix.002 file - promoters60/1389279
aaagaa

SEQ ID NO: 48302 - DNA, 9 bp, Unknown
  misc_feature (1)..( 9): Matrix.002 file - promoters60/1389279
atgttccag

SEQ ID NO: 48303 - DNA, 6 bp, Unknown
  misc_feature (1)..( 6): Matrix.002 file - promoters60/1389279
acaaga

SEQ ID NO: 48304 - DNA, 9 bp, Unknown
  misc_feature (1)..( 9): Matrix.002 file - promoters60/1389279
aaaacaagt

SEQ ID NO: 48305 - DNA, 6 bp, Unknown
  misc_feature (1)..( 6): Matrix.002 file - promoters60/1389279
aaaaaa

SEQ ID NO: 48306 - DNA, 6 bp, Unknown
  misc_feature (1)..( 6): Matrix.002 file - promoters60/1389279
aacaat

SEQ ID NO: 48307 - DNA, 8 bp, Unknown
  misc_feature (1)..( 8): Matrix.002 file - promoters60/1389330
taaaaaaa

SEQ ID NO: 48308 - DNA, 7 bp, Unknown
  misc_feature (1)..( 7): Matrix.002 file - promoters60/1389330
ataatct

SEQ ID NO: 48309 - DNA, 8 bp, Unknown
  misc_feature (1)..( 8): Matrix.002 file - promoters60/1389330
aaatattt

SEQ ID NO: 48310 - DNA, 6 bp, Unknown
  misc_feature (1)..( 6): Matrix.002 file - promoters60/1389330
tttaaa

SEQ ID NO: 48311 - DNA, 7 bp, Unknown
  misc_feature (1)..( 7): Matrix.002 file - promoters60/1389330
tgtaatg

SEQ ID NO: 48312 - DNA, 6 bp, Unknown
  misc_feature (1)..( 6): Matrix.002 file - promoters60/1389330
ccaaaa

SEQ ID NO: 48313 - DNA, 8 bp, Unknown
  misc_feature (1)..( 8): Matrix.002 file - promoters60/1389330
aaaatgaa

SEQ ID NO: 48314 - DNA, 10 bp, Unknown
  misc_feature (1)..( 10): Matrix.002 file - promoters60/1389330
acatatctca

SEQ ID NO: 48315 - DNA, 7 bp, Unknown
  misc_feature (1)..( 7): Matrix.002 file - promoters60/1389330
gaaaaat

SEQ ID NO: 48316 - DNA, 7 bp, Unknown
  misc_feature (1)..( 7): Matrix.002 file - promoters60/1389330
ttgacaa

SEQ ID NO: 48317 - DNA, 8 bp, Unknown
  misc_feature (1)..( 8): Matrix.002 file - promoters60/1389330
aacaataa

SEQ ID NO: 48318 - DNA, 10 bp, Unknown
  misc_feature (1)..( 10): Matrix.002 file - promoters60/1389330
gtaacaataa

SEQ ID NO: 48319 - DNA, 7 bp, Unknown
  misc_feature (1)..( 7): Matrix.002 file - promoters60/1389330
aaaatca

SEQ ID NO: 48320 - DNA, 7 bp, Unknown
  misc_feature (1)..( 7): Matrix.002 file - promoters60/1389330
ctcaaaa

SEQ ID NO: 48321 - DNA, 7 bp, Unknown
  misc_feature (1)..( 7): Matrix.002 file - promoters60/1389330
gacaaga

SEQ ID NO: 48322 - DNA, 8 bp, Unknown
  misc_feature (1)..( 8): Matrix.002 file - promoters60/1389330
tttattag

SEQ ID NO: 48323 - DNA, 10 bp, Unknown
  misc_feature (1)..( 10): Matrix.002 file - promoters60/1389330
ttttcttatt

SEQ ID NO: 48324 - DNA, 7 bp, Unknown
  misc_feature (1)..( 7): Matrix.002 file - promoters60/1389330
attaaat

SEQ ID NO: 48325 - DNA, 7 bp, Unknown
  misc_feature (1)..( 7): Matrix.002 file - promoters60/1389330
aaaaata

SEQ ID NO: 48326 - DNA, 6 bp, Unknown
  misc_feature (1)..( 6): Matrix.002 file - promoters60/1389330
caaaaa

SEQ ID NO: 48327 - DNA, 6 bp, Unknown
  misc_feature (1)..( 6): Matrix.002 file - promoters60/1389330
tagata

SEQ ID NO: 48328 - DNA, 7 bp, Unknown
  misc_feature (1)..( 7): Matrix.002 file - promoters60/1389330
aataaga

SEQ ID NO: 48329 - DNA, 10 bp, Unknown
  misc_feature (1)..( 10): Matrix.002 file - promoters60/1389330
ttaggcccat

SEQ ID NO: 48330 - DNA, 6 bp, Unknown
  misc_feature (1)..( 6): Matrix.002 file - promoters60/1389330
ggccca

SEQ ID NO: 48331 - DNA, 6 bp, Unknown
  misc_feature (1)..( 6): Matrix.002 file - promoters60/1389330
tctcat

SEQ ID NO: 48332 - DNA, 8 bp, Unknown
  misc_feature (1)..( 8): Matrix.002 file - promoters60/1389330
ttgtaacc

SEQ ID NO: 48333 - DNA, 9 bp, Unknown
  misc_feature (1)..( 9): Matrix.002 file - promoters60/1389330
tgtaacaaa

SEQ ID NO: 48334 - DNA, 6 bp, Unknown
  misc_feature (1)..( 6): Matrix.002 file - promoters60/1389330
tatttt

SEQ ID NO: 48335 - DNA, 7 bp, Unknown
  misc_feature (1)..( 7): Matrix.002 file - promoters60/1389330
aagatat

SEQ ID NO: 48336 - DNA, 6 bp, Unknown
  misc_feature (1)..( 6): Matrix.002 file - promoters60/1389330
catcat

SEQ ID NO: 48337 - DNA, 11 bp, Unknown
  misc_feature (1)..( 11): Matrix.002 file - promoters60/1390240
caaaaaaagtt

SEQ ID NO: 48338 - DNA, 7 bp, Unknown
  misc_feature (1)..( 7): Matrix.002 file - promoters60/1390376
ttccctt

SEQ ID NO: 48339 - DNA, 6 bp, Unknown
  misc_feature (1)..( 6): Matrix.002 file - promoters60/1390376
ctttct

SEQ ID NO: 48340 - DNA, 6 bp, Unknown
  misc_feature (1)..( 6): Matrix.002 file - promoters60/1390376
ttctct

SEQ ID NO: 48341 - DNA, 6 bp, Unknown
  misc_feature (1)..( 6): Matrix.002 file - promoters60/1390376
ttctat

SEQ ID NO: 48342 - DNA, 7 bp, Unknown
  misc_feature (1)..( 7): Matrix.002 file - promoters60/1390376
tatctat

SEQ ID NO: 48343 - DNA, 7 bp, Unknown
  misc_feature (1)..( 7): Matrix.002 file - promoters60/1390376
atagtgt

SEQ ID NO: 48344 - DNA, 6 bp, Unknown
  misc_feature (1)..( 6): Matrix.002 file - promoters60/1390376
aacttg

SEQ ID NO: 48345 - DNA, 6 bp, Unknown
  misc_feature (1)..( 6): Matrix.002 file - promoters60/1390376
tcatat

SEQ ID NO: 48346 - DNA, 7 bp, Unknown
  misc_feature (1)..( 7): Matrix.002 file - promoters60/1390376
ttacgta

SEQ ID NO: 48347 - DNA, 7 bp, Unknown
  misc_feature (1)..( 7): Matrix.002 file - promoters60/1390376
ctgatta

SEQ ID NO: 48348 - DNA, 6 bp, Unknown
  misc_feature (1)..( 6): Matrix.002 file - promoters60/1390376
atcatt

SEQ ID NO: 48349 - DNA, 11 bp, Unknown
  misc_feature (1)..( 11): Matrix.002 file - promoters60/1390376
ttactgaagtt

SEQ ID NO: 48350 - DNA, 7 bp, Unknown
  misc_feature (1)..( 7): Matrix.002 file - promoters60/1390376
tttccat

SEQ ID NO: 48351 - DNA, 8 bp, Unknown
  misc_feature (1)..( 8): Matrix.002 file - promoters60/1390376
atctcgtg

SEQ ID NO: 48352 - DNA, 6 bp, Unknown
  misc_feature (1)..( 6): Matrix.002 file - promoters60/1391420
aagaaa

SEQ ID NO: 48353 - DNA, 10 bp, Unknown
  misc_feature (1)..( 10): Matrix.002 file - promoters60/1391420
aagaaagatt

SEQ ID NO: 48354 - DNA, 13 bp, Unknown
  misc_feature (1)..( 13): Matrix.002 file - promoters60/1391420
attgggcttgact

SEQ ID NO: 48355 - DNA, 8 bp, Unknown
  misc_feature (1)..( 8): Matrix.002 file - promoters60/1391420
aatgggct

SEQ ID NO: 48356 - DNA, 9 bp, Unknown
  misc_feature (1)..( 9): Matrix.002 file - promoters60/1391420
agaagaaag

SEQ ID NO: 48357 - DNA, 5 bp, Unknown
  misc_feature (1)..( 5): Matrix.002 file - promoters60/1391420
gtaaa

SEQ ID NO: 48358 - DNA, 7 bp, Unknown
  misc_feature (1)..( 7): Matrix.002 file - promoters60/1393104
ttaccct

SEQ ID NO: 48359 - DNA, 6 bp, Unknown
  misc_feature (1)..( 6): Matrix.002 file - promoters60/1393104
taaccg

SEQ ID NO: 48360 - DNA, 6 bp, Unknown
  misc_feature (1)..( 6): Matrix.002 file - promoters60/1393104
gttaaa

SEQ ID NO: 48361 - DNA, 7 bp, Unknown
  misc_feature (1)..( 7): Matrix.002 file - promoters60/1393104
caaagtc

SEQ ID NO: 48362 - DNA, 8 bp, Unknown
  misc_feature (1)..( 8): Matrix.002 file - promoters60/1393104
atatcttc

SEQ ID NO: 48363 - DNA, 6 bp, Unknown
  misc_feature (1)..( 6): Matrix.002 file - promoters60/1393104
gagata

SEQ ID NO: 48364 - DNA, 7 bp, Unknown
  misc_feature (1)..( 7): Matrix.002 file - promoters60/1393104
atgtgga

SEQ ID NO: 48365 - DNA, 7 bp, Unknown
  misc_feature (1)..( 7): Matrix.002 file - promoters60/1393104
agcaaat

SEQ ID NO: 48366 - DNA, 6 bp, Unknown
  misc_feature (1)..( 6): Matrix.002 file - promoters60/1393104
aatgct

SEQ ID NO: 48367 - DNA, 7 bp, Unknown
  misc_feature (1)..( 7): Matrix.002 file - promoters60/1393104
caatcta

SEQ ID NO: 48368 - DNA, 8 bp, Unknown
  misc_feature (1)..( 8): Matrix.002 file - promoters60/1393104
atttcaaa

SEQ ID NO: 48369 - DNA, 8 bp, Unknown
  misc_feature (1)..( 8): Matrix.002 file - promoters60/1393104
tttgcgaa

SEQ ID NO: 48370 - DNA, 10 bp, Unknown
  misc_feature (1)..( 10): Matrix.002 file - promoters60/1393104
ttcaagaaga

SEQ ID NO: 48371 - DNA, 6 bp, Unknown
  misc_feature (1)..( 6): Matrix.002 file - promoters60/1393104
cgttga

SEQ ID NO: 48372 - DNA, 9 bp, Unknown
  misc_feature (1)..( 9): Matrix.002 file - promoters60/1393104
aataaagat

SEQ ID NO: 48373 - DNA, 9 bp, Unknown
  misc_feature (1)..( 9): Matrix.002 file - promoters60/1393139
aagatttga

SEQ ID NO: 48374 - DNA, 7 bp, Unknown
  misc_feature (1)..( 7): Matrix.002 file - promoters60/1393139
cttcatt

SEQ ID NO: 48375 - DNA, 13 bp, Unknown
  misc_feature (1)..( 13): Matrix.002 file - promoters60/1393139
tcaacttttgaga

SEQ ID NO: 48376 - DNA, 11 bp, Unknown
  misc_feature (1)..( 11): Matrix.002 file - promoters60/1393139
aataaaagacg

SEQ ID NO: 48377 - DNA, 12 bp, Unknown
  misc_feature (1)..( 12): Matrix.002 file - promoters60/1393139
tttatagaaaaa

SEQ ID NO: 48378 - DNA, 9 bp, Unknown
  misc_feature (1)..( 9): Matrix.002 file - promoters60/1393139
tgataataa

SEQ ID NO: 48379 - DNA, 8 bp, Unknown
  misc_feature (1)..( 8): Matrix.002 file - promoters60/1393181
taactaat

SEQ ID NO: 48380 - DNA, 16 bp, Unknown
  misc_feature (1)..( 16): Matrix.002 file - promoters60/1393181
attaaaaaaaaaatct

SEQ ID NO: 48381 - DNA, 8 bp, Unknown
  misc_feature (1)..( 8): Matrix.002 file - promoters60/1393181
aaatcttt

SEQ ID NO: 48382 - DNA, 9 bp, Unknown
  misc_feature (1)..( 9): Matrix.002 file - promoters60/1393181
tttttaaaa

SEQ ID NO: 48383 - DNA, 7 bp, Unknown
  misc_feature (1)..( 7): Matrix.002 file - promoters60/1393181
tataatt

SEQ ID NO: 48384 - DNA, 9 bp, Unknown
  misc_feature (1)..( 9): Matrix.002 file - promoters60/1393181
ttacccaaa

SEQ ID NO: 48385 - DNA, 7 bp, Unknown
  misc_feature (1)..( 7): Matrix.002 file - promoters60/1393181
ctatctt

SEQ ID NO: 48386 - DNA, 9 bp, Unknown
  misc_feature (1)..( 9): Matrix.002 file - promoters60/1393181
ttcttttta

SEQ ID NO: 48387 - DNA, 8 bp, Unknown
  misc_feature (1)..( 8): Matrix.002 file - promoters60/1393181
aaagatgt

SEQ ID NO: 48388 - DNA, 7 bp, Unknown
  misc_feature (1)..( 7): Matrix.002 file - promoters60/1393181
accagct

SEQ ID NO: 48389 - DNA, 11 bp, Unknown
  misc_feature (1)..( 11): Matrix.002 file - promoters60/1393181
tcaacctctct

SEQ ID NO: 48390 - DNA, 6 bp, Unknown
  misc_feature (1)..( 6): Matrix.002 file - promoters60/1393181
caatta

SEQ ID NO: 48391 - DNA, 6 bp, Unknown
  misc_feature (1)..( 6): Matrix.002 file - promoters60/1393181
ggtttt

SEQ ID NO: 48392 - DNA, 7 bp, Unknown
  misc_feature (1)..( 7): Matrix.002 file - promoters60/1393181
ttttgtc

SEQ ID NO: 48393 - DNA, 7 bp, Unknown
  misc_feature (1)..( 7): Matrix.002 file - promoters60/1393181
agaggat

SEQ ID NO: 48394 - DNA, 7 bp, Unknown
  misc_feature (1)..( 7): Matrix.002 file - promoters60/1393181
ttacaag

SEQ ID NO: 48395 - DNA, 8 bp, Unknown
  misc_feature (1)..( 8): Matrix.002 file - promoters60/1393181
caaaatta

SEQ ID NO: 48396 - DNA, 9 bp, Unknown
  misc_feature (1)..( 9): Matrix.002 file - promoters60/1393181
taaataaat

SEQ ID NO: 48397 - DNA, 15 bp, Unknown
  misc_feature (1)..( 15): Matrix.002 file - promoters60/1393187
taatgcatgtgatgc

SEQ ID NO: 48398 - DNA, 7 bp, Unknown
  misc_feature (1)..( 7): Matrix.002 file - promoters60/1393187
caacttt

SEQ ID NO: 48399 - DNA, 7 bp, Unknown
  misc_feature (1)..( 7): Matrix.002 file - promoters60/1393187
aattttg

SEQ ID NO: 48400 - DNA, 6 bp, Unknown
  misc_feature (1)..( 6): Matrix.002 file - promoters60/1393187
atcaac

SEQ ID NO: 48401 - DNA, 8 bp, Unknown
  misc_feature (1)..( 8): Matrix.002 file - promoters60/1393187
aataaatc

SEQ ID NO: 48402 - DNA, 7 bp, Unknown
  misc_feature (1)..( 7): Matrix.002 file - promoters60/1393187
aactaaa

SEQ ID NO: 48403 - DNA, 6 bp, Unknown
  misc_feature (1)..( 6): Matrix.002 file - promoters60/1393187
tttttt

SEQ ID NO: 48404 - DNA, 7 bp, Unknown
  misc_feature (1)..( 7): Matrix.002 file - promoters60/1393187
aattatt

SEQ ID NO: 48405 - DNA, 6 bp, Unknown
  misc_feature (1)..( 6): Matrix.002 file - promoters60/1393187
attatt

SEQ ID NO: 48406 - DNA, 9 bp, Unknown
  misc_feature (1)..( 9): Matrix.002 file - promoters60/1393187
attagtcga

SEQ ID NO: 48407 - DNA, 7 bp, Unknown
  misc_feature (1)..( 7): Matrix.002 file - promoters60/1393187
taaaaga

SEQ ID NO: 48408 - DNA, 10 bp, Unknown
  misc_feature (1)..( 10): Matrix.002 file - promoters60/1393187
aaaaaaagaa

SEQ ID NO: 48409 - DNA, 6 bp, Unknown
  misc_feature (1)..( 6): Matrix.002 file - promoters60/1393187
tggatt

SEQ ID NO: 48410 - DNA, 6 bp, Unknown
  misc_feature (1)..( 6): Matrix.002 file - promoters60/1393187
gatttt

SEQ ID NO: 48411 - DNA, 6 bp, Unknown
  misc_feature (1)..( 6): Matrix.002 file - promoters60/1393187
cacgtg

SEQ ID NO: 48412 - DNA, 7 bp, Unknown
  misc_feature (1)..( 7): Matrix.002 file - promoters60/1393187
aataaat

SEQ ID NO: 48413 - DNA, 8 bp, Unknown
  misc_feature (1)..( 8): Matrix.002 file - promoters60/1393187
atttgaat

SEQ ID NO: 48414 - DNA, 6 bp, Unknown
  misc_feature (1)..( 6): Matrix.002 file - promoters60/1393187
aaattt

SEQ ID NO: 48415 - DNA, 8 bp, Unknown
  misc_feature (1)..( 8): Matrix.002 file - promoters60/1393187
ggactaaa

SEQ ID NO: 48416 - DNA, 7 bp, Unknown
  misc_feature (1)..( 7): Matrix.002 file - promoters60/1393187
aaatttt

SEQ ID NO: 48417 - DNA, 7 bp, Unknown
  misc_feature (1)..( 7): Matrix.002 file - promoters60/1393187
ataaaag

SEQ ID NO: 48418 - DNA, 6 bp, Unknown
  misc_feature (1)..( 6): Matrix.002 file - promoters60/1393187
ctatta

SEQ ID NO: 48419 - DNA, 7 bp, Unknown
  misc_feature (1)..( 7): Matrix.002 file - promoters60/1393187
gacaaat

SEQ ID NO: 48420 - DNA, 9 bp, Unknown
  misc_feature (1)..( 9): Matrix.002 file - promoters60/1393187
gagaaaatt

SEQ ID NO: 48421 - DNA, 8 bp, Unknown
  misc_feature (1)..( 8): Matrix.002 file - promoters60/1393187
tctaacat

SEQ ID NO: 48422 - DNA, 9 bp, Unknown
  misc_feature (1)..( 9): Matrix.002 file - promoters60/1393290
gaacaactc

SEQ ID NO: 48423 - DNA, 10 bp, Unknown
  misc_feature (1)..( 10): Matrix.002 file - promoters60/1393290
aaggcccaat

SEQ ID NO: 48424 - DNA, 12 bp, Unknown
  misc_feature (1)..( 12): Matrix.002 file - promoters60/1393326
aattttctttat

SEQ ID NO: 48425 - DNA, 9 bp, Unknown
  misc_feature (1)..( 9): Matrix.002 file - promoters60/1393326
cttttaata

SEQ ID NO: 48426 - DNA, 11 bp, Unknown
  misc_feature (1)..( 11): Matrix.002 file - promoters60/1393326
agatttgttag

SEQ ID NO: 48427 - DNA, 7 bp, Unknown
  misc_feature (1)..( 7): Matrix.002 file - promoters60/1393326
gaaaaaa

SEQ ID NO: 48428 - DNA, 10 bp, Unknown
  misc_feature (1)..( 10): Matrix.002 file - promoters60/1393326
aaataaagtt

SEQ ID NO: 48429 - DNA, 8 bp, Unknown
  misc_feature (1)..( 8): Matrix.002 file - promoters60/1393326
aagaaaat

SEQ ID NO: 48430 - DNA, 10 bp, Unknown
  misc_feature (1)..( 10): Matrix.002 file - promoters60/1393383
atcgaaatta

SEQ ID NO: 48431 - DNA, 10 bp, Unknown
  misc_feature (1)..( 10): Matrix.002 file - promoters60/1393383
taaataaaat

SEQ ID NO: 48432 - DNA, 9 bp, Unknown
  misc_feature (1)..( 9): Matrix.002 file - promoters60/1393478
gttaataaa

SEQ ID NO: 48433 - DNA, 10 bp, Unknown
  misc_feature (1)..( 10): Matrix.002 file - promoters60/1393478
tgataaatat

SEQ ID NO: 48434 - DNA, 10 bp, Unknown
  misc_feature (1)..( 10): Matrix.002 file - promoters60/1393478
tacaatttat

SEQ ID NO: 48435 - DNA, 7 bp, Unknown
  misc_feature (1)..( 7): Matrix.002 file - promoters60/1393478
atttttt

SEQ ID NO: 48436 - DNA, 10 bp, Unknown
  misc_feature (1)..( 10): Matrix.002 file - promoters60/1393478
ttttttaata

SEQ ID NO: 48437 - DNA, 7 bp, Unknown
  misc_feature (1)..( 7): Matrix.002 file - promoters60/1393478
taaatgc

SEQ ID NO: 48438 - DNA, 8 bp, Unknown
  misc_feature (1)..( 8): Matrix.002 file - promoters60/1393478
ttgacttt

SEQ ID NO: 48439 - DNA, 8 bp, Unknown
  misc_feature (1)..( 8): Matrix.002 file - promoters60/1393478
attgtttt

SEQ ID NO: 48440 - DNA, 9 bp, Unknown
  misc_feature (1)..( 9): Matrix.002 file - promoters60/1393478
ttgtttgat

SEQ ID NO: 48441 - DNA, 9 bp, Unknown
  misc_feature (1)..( 9): Matrix.002 file - promoters60/1393478
ataaacaca

SEQ ID NO: 48442 - DNA, 8 bp, Unknown
  misc_feature (1)..( 8): Matrix.002 file - promoters60/1393478
atattatg

SEQ ID NO: 48443 - DNA, 8 bp, Unknown
  misc_feature (1)..( 8): Matrix.002 file - promoters60/1393478
aatcttat

SEQ ID NO: 48444 - DNA, 7 bp, Unknown
  misc_feature (1)..( 7): Matrix.002 file - promoters60/1393478
ttaataa

SEQ ID NO: 48445 - DNA, 7 bp, Unknown
  misc_feature (1)..( 7): Matrix.002 file - promoters60/1393478
taataac

SEQ ID NO: 48446 - DNA, 9 bp, Unknown
  misc_feature (1)..( 9): Matrix.002 file - promoters60/1393478
aaacacaca

SEQ ID NO: 48447 - DNA, 9 bp, Unknown
  misc_feature (1)..( 9): Matrix.002 file - promoters60/1393478
tttttatat

SEQ ID NO: 48448 - DNA, 12 bp, Unknown
  misc_feature (1)..( 12): Matrix.002 file - promoters60/1393492
ccttttcagaat

SEQ ID NO: 48449 - DNA, 8 bp, Unknown
  misc_feature (1)..( 8): Matrix.002 file - promoters60/1393492
caatataa

SEQ ID NO: 48450 - DNA, 14 bp, Unknown
  misc_feature (1)..( 14): Matrix.002 file - promoters60/1393492
ttaacattgtttat

SEQ ID NO: 48451 - DNA, 9 bp, Unknown
  misc_feature (1)..( 9): Matrix.002 file - promoters60/1393498
atgtcaaaa

SEQ ID NO: 48452 - DNA, 7 bp, Unknown
  misc_feature (1)..( 7): Matrix.002 file - promoters60/1393498
aaataat

SEQ ID NO: 48453 - DNA, 8 bp, Unknown
  misc_feature (1)..( 8): Matrix.002 file - promoters60/1393498
acaatttt

SEQ ID NO: 48454 - DNA, 10 bp, Unknown
  misc_feature (1)..( 10): Matrix.002 file - promoters60/1393498
atattaaatg

SEQ ID NO: 48455 - DNA, 6 bp, Unknown
  misc_feature (1)..( 6): Matrix.002 file - promoters60/1393498
aaattt

SEQ ID NO: 48456 - DNA, 7 bp, Unknown
  misc_feature (1)..( 7): Matrix.002 file - promoters60/1393498
gaaaatt

SEQ ID NO: 48457 - DNA, 7 bp, Unknown
  misc_feature (1)..( 7): Matrix.002 file - promoters60/1393498
aaactgt

SEQ ID NO: 48458 - DNA, 6 bp, Unknown
  misc_feature (1)..( 6): Matrix.002 file - promoters60/1393498
tttaga

SEQ ID NO: 48459 - DNA, 12 bp, Unknown
  misc_feature (1)..( 12): Matrix.002 file - promoters60/1393498
tttatacaacaa

SEQ ID NO: 48460 - DNA, 8 bp, Unknown
  misc_feature (1)..( 8): Matrix.002 file - promoters60/1393498
tctaaggc

SEQ ID NO: 48461 - DNA, 6 bp, Unknown
  misc_feature (1)..( 6): Matrix.002 file - promoters60/1393498
tttttt

SEQ ID NO: 48462 - DNA, 6 bp, Unknown
  misc_feature (1)..( 6): Matrix.002 file - promoters60/1393498
taagga

SEQ ID NO: 48463 - DNA, 8 bp, Unknown
  misc_feature (1)..( 8): Matrix.002 file - promoters60/1393498
ttaaaatt

SEQ ID NO: 48464 - DNA, 10 bp, Unknown
  misc_feature (1)..( 10): Matrix.002 file - promoters60/1393498
ttattaaatg

SEQ ID NO: 48465 - DNA, 7 bp, Unknown
  misc_feature (1)..( 7): Matrix.002 file - promoters60/1393498
actgtag

SEQ ID NO: 48466 - DNA, 7 bp, Unknown
  misc_feature (1)..( 7): Matrix.002 file - promoters60/1393498
gtgcatg

SEQ ID NO: 48467 - DNA, 14 bp, Unknown
  misc_feature (1)..( 14): Matrix.002 file - promoters60/1393498
taaaaacaggattt

SEQ ID NO: 48468 - DNA, 8 bp, Unknown
  misc_feature (1)..( 8): Matrix.002 file - promoters60/1393498
ttcagaga

SEQ ID NO: 48469 - DNA, 7 bp, Unknown
  misc_feature (1)..( 7): Matrix.002 file - promoters60/1393498
tcaaaat

SEQ ID NO: 48470 - DNA, 7 bp, Unknown
  misc_feature (1)..( 7): Matrix.002 file - promoters60/1393545
atcaaca

SEQ ID NO: 48471 - DNA, 6 bp, Unknown
  misc_feature (1)..( 6): Matrix.002 file - promoters60/1393545
aatcta

SEQ ID NO: 48472 - DNA, 6 bp, Unknown
  misc_feature (1)..( 6): Matrix.002 file - promoters60/1393545
tagctc

SEQ ID NO: 48473 - DNA, 8 bp, Unknown
  misc_feature (1)..( 8): Matrix.002 file - promoters60/1393545
attcgcta

SEQ ID NO: 48474 - DNA, 7 bp, Unknown
  misc_feature (1)..( 7): Matrix.002 file - promoters60/1393545
gcaaaag

SEQ ID NO: 48475 - DNA, 6 bp, Unknown
  misc_feature (1)..( 6): Matrix.002 file - promoters60/1393545
cattag

SEQ ID NO: 48476 - DNA, 8 bp, Unknown
  misc_feature (1)..( 8): Matrix.002 file - promoters60/1393545
tggctctg

SEQ ID NO: 48477 - DNA, 7 bp, Unknown
  misc_feature (1)..( 7): Matrix.002 file - promoters60/1393545
ctgagat

SEQ ID NO: 48478 - DNA, 8 bp, Unknown
  misc_feature (1)..( 8): Matrix.002 file - promoters60/1393545
ttttgttt

SEQ ID NO: 48479 - DNA, 8 bp, Unknown
  misc_feature (1)..( 8): Matrix.002 file - promoters60/1393545
ttgtatat

SEQ ID NO: 48480 - DNA, 6 bp, Unknown
  misc_feature (1)..( 6): Matrix.002 file - promoters60/1393545
tatatt

SEQ ID NO: 48481 - DNA, 6 bp, Unknown
  misc_feature (1)..( 6): Matrix.002 file - promoters60/1393545
tattat

SEQ ID NO: 48482 - DNA, 8 bp, Unknown
  misc_feature (1)..( 8): Matrix.002 file - promoters60/1393545
atttttca

SEQ ID NO: 48483 - DNA, 6 bp, Unknown
  misc_feature (1)..( 6): Matrix.002 file - promoters60/1393545
agctac

SEQ ID NO: 48484 - DNA, 9 bp, Unknown
  misc_feature (1)..( 9): Matrix.002 file - promoters60/1393596
attttattg

SEQ ID NO: 48485 - DNA, 6 bp, Unknown
  misc_feature (1)..( 6): Matrix.002 file - promoters60/1393596
ttcttg

SEQ ID NO: 48486 - DNA, 9 bp, Unknown
  misc_feature (1)..( 9): Matrix.002 file - promoters60/1393596
tgttttctc

SEQ ID NO: 48487 - DNA, 14 bp, Unknown
  misc_feature (1)..( 14): Matrix.002 file - promoters60/1393596
ataatcttttcttg

SEQ ID NO: 48488 - DNA, 7 bp, Unknown
  misc_feature (1)..( 7): Matrix.002 file - promoters60/1393596
aatatgt

SEQ ID NO: 48489 - DNA, 9 bp, Unknown
  misc_feature (1)..( 9): Matrix.002 file - promoters60/1393596
attatattg

SEQ ID NO: 48490 - DNA, 6 bp, Unknown
  misc_feature (1)..( 6): Matrix.002 file - promoters60/1393596
ccctct

SEQ ID NO: 48491 - DNA, 10 bp, Unknown
  misc_feature (1)..( 10): Matrix.002 file - promoters60/1393596
tttttttttt

SEQ ID NO: 48492 - DNA, 8 bp, Unknown
  misc_feature (1)..( 8): Matrix.002 file - promoters60/1393596
agaaaatc

SEQ ID NO: 48493 - DNA, 7 bp, Unknown
  misc_feature (1)..( 7): Matrix.002 file - promoters60/1393596
ttcagaa

SEQ ID NO: 48494 - DNA, 11 bp, Unknown
  misc_feature (1)..( 11): Matrix.002 file - promoters60/1393596
tttcataaaaa

SEQ ID NO: 48495 - DNA, 6 bp, Unknown
  misc_feature (1)..( 6): Matrix.002 file - promoters60/1393596
agtctc

SEQ ID NO: 48496 - DNA, 9 bp, Unknown
  misc_feature (1)..( 9): Matrix.002 file - promoters60/1393596
tattacaca

SEQ ID NO: 48497 - DNA, 13 bp, Unknown
  misc_feature (1)..( 13): Matrix.002 file - promoters60/1393596
actgtaaattacg

SEQ ID NO: 48498 - DNA, 6 bp, Unknown
  misc_feature (1)..( 6): Matrix.002 file - promoters60/1393596
gaaaat

SEQ ID NO: 48499 - DNA, 7 bp, Unknown
  misc_feature (1)..( 7): Matrix.002 file - promoters60/1393596
actgatt

SEQ ID NO: 48500 - DNA, 7 bp, Unknown
  misc_feature (1)..( 7): Matrix.002 file - promoters60/1393596
ttcttct

SEQ ID NO: 48501 - DNA, 6 bp, Unknown
  misc_feature (1)..( 6): Matrix.002 file - promoters60/1393596
aatctc

SEQ ID NO: 48502 - DNA, 6 bp, Unknown
  misc_feature (1)..( 6): Matrix.002 file - promoters60/1393651
tatatg

SEQ ID NO: 48503 - DNA, 6 bp, Unknown
  misc_feature (1)..( 6): Matrix.002 file - promoters60/1393651
gtttgg

SEQ ID NO: 48504 - DNA, 6 bp, Unknown
  misc_feature (1)..( 6): Matrix.002 file - promoters60/1393651
gccttt

SEQ ID NO: 48505 - DNA, 7 bp, Unknown
  misc_feature (1)..( 7): Matrix.002 file - promoters60/1393651
attattt

SEQ ID NO: 48506 - DNA, 7 bp, Unknown
  misc_feature (1)..( 7): Matrix.002 file - promoters60/1393651
aaccaaa

SEQ ID NO: 48507 - DNA, 8 bp, Unknown
  misc_feature (1)..( 8): Matrix.002 file - promoters60/1393651
aaataaaa

SEQ ID NO: 48508 - DNA, 6 bp, Unknown
  misc_feature (1)..( 6): Matrix.002 file - promoters60/1393651
aaataa

SEQ ID NO: 48509 - DNA, 8 bp, Unknown
  misc_feature (1)..( 8): Matrix.002 file - promoters60/1393651
aaattgga

SEQ ID NO: 48510 - DNA, 6 bp, Unknown
  misc_feature (1)..( 6): Matrix.002 file - promoters60/1393651
ggaaga

SEQ ID NO: 48511 - DNA, 6 bp, Unknown
  misc_feature (1)..( 6): Matrix.002 file - promoters60/1393651
catcac

SEQ ID NO: 48512 - DNA, 6 bp, Unknown
  misc_feature (1)..( 6): Matrix.002 file - promoters60/1393651
ttccat

SEQ ID NO: 48513 - DNA, 7 bp, Unknown
  misc_feature (1)..( 7): Matrix.002 file - promoters60/1393651
tatatta

SEQ ID NO: 48514 - DNA, 6 bp, Unknown
  misc_feature (1)..( 6): Matrix.002 file - promoters60/1393651
ataaaa

SEQ ID NO: 48515 - DNA, 9 bp, Unknown
  misc_feature (1)..( 9): Matrix.002 file - promoters60/1393651
atataacat

SEQ ID NO: 48516 - DNA, 6 bp, Unknown
  misc_feature (1)..( 6): Matrix.002 file - promoters60/1393651
aatctt

SEQ ID NO: 48517 - DNA, 8 bp, Unknown
  misc_feature (1)..( 8): Matrix.002 file - promoters60/1393651
attaaata

SEQ ID NO: 48518 - DNA, 12 bp, Unknown
  misc_feature (1)..( 12): Matrix.002 file - promoters60/1393684
ataatttaagtt

SEQ ID NO: 48519 - DNA, 8 bp, Unknown
  misc_feature (1)..( 8): Matrix.002 file - promoters60/1393684
aggaggaa

SEQ ID NO: 48520 - DNA, 6 bp, Unknown
  misc_feature (1)..( 6): Matrix.002 file - promoters60/1393684
gaaaat

SEQ ID NO: 48521 - DNA, 6 bp, Unknown
  misc_feature (1)..( 6): Matrix.002 file - promoters60/1393684
aggtct

SEQ ID NO: 48522 - DNA, 7 bp, Unknown
  misc_feature (1)..( 7): Matrix.002 file - promoters60/1393684
gttacaa

SEQ ID NO: 48523 - DNA, 7 bp, Unknown
  misc_feature (1)..( 7): Matrix.002 file - promoters60/1393684
taattaa

SEQ ID NO: 48524 - DNA, 12 bp, Unknown
  misc_feature (1)..( 12): Matrix.002 file - promoters60/1393684
taaaaagaaaaa

SEQ ID NO: 48525 - DNA, 9 bp, Unknown
  misc_feature (1)..( 9): Matrix.002 file - promoters60/1393684
acatggttt

SEQ ID NO: 48526 - DNA, 7 bp, Unknown
  misc_feature (1)..( 7): Matrix.002 file - promoters60/1393684
aaacata

SEQ ID NO: 48527 - DNA, 7 bp, Unknown
  misc_feature (1)..( 7): Matrix.002 file - promoters60/1393684
atataca

SEQ ID NO: 48528 - DNA, 7 bp, Unknown
  misc_feature (1)..( 7): Matrix.002 file - promoters60/1393684
ttaagtt

SEQ ID NO: 48529 - DNA, 7 bp, Unknown
  misc_feature (1)..( 7): Matrix.002 file - promoters60/1393684
taaaact

SEQ ID NO: 48530 - DNA, 12 bp, Unknown
  misc_feature (1)..( 12): Matrix.002 file - promoters60/1393684
atatatataaag

SEQ ID NO: 48531 - DNA, 10 bp, Unknown
  misc_feature (1)..( 10): Matrix.002 file - promoters60/1393684
acataagatt

SEQ ID NO: 48532 - DNA, 8 bp, Unknown
  misc_feature (1)..( 8): Matrix.002 file - promoters60/1393684
attcacat

SEQ ID NO: 48533 - DNA, 6 bp, Unknown
  misc_feature (1)..( 6): Matrix.002 file - promoters60/1393684
tttcaa

SEQ ID NO: 48534 - DNA, 7 bp, Unknown
  misc_feature (1)..( 7): Matrix.002 file - promoters60/1393684
attttag

SEQ ID NO: 48535 - DNA, 8 bp, Unknown
  misc_feature (1)..( 8): Matrix.002 file - promoters60/1393684
aagtgttt

SEQ ID NO: 48536 - DNA, 8 bp, Unknown
  misc_feature (1)..( 8): Matrix.002 file - promoters60/1393684
tttattta

SEQ ID NO: 48537 - DNA, 6 bp, Unknown
  misc_feature (1)..( 6): Matrix.002 file - promoters60/1393684
taaacg

SEQ ID NO: 48538 - DNA, 9 bp, Unknown
  misc_feature (1)..( 9): Matrix.002 file - promoters60/1393684
atattacca

SEQ ID NO: 48539 - DNA, 11 bp, Unknown
  misc_feature (1)..( 11): Matrix.002 file - promoters60/1393684
caaaatgtcaa

SEQ ID NO: 48540 - DNA, 6 bp, Unknown
  misc_feature (1)..( 6): Matrix.002 file - promoters60/1393684
aaacat

SEQ ID NO: 48541 - DNA, 9 bp, Unknown
  misc_feature (1)..( 9): Matrix.002 file - promoters60/1393684
caaaaccta

SEQ ID NO: 48542 - DNA, 12 bp, Unknown
  misc_feature (1)..( 12): Matrix.002 file - promoters60/1393751
tactaacataag

SEQ ID NO: 48543 - DNA, 6 bp, Unknown
  misc_feature (1)..( 6): Matrix.002 file - promoters60/1393761
tttttt

SEQ ID NO: 48544 - DNA, 9 bp, Unknown
  misc_feature (1)..( 9): Matrix.002 file - promoters60/1393761
aaatgaaat

SEQ ID NO: 48545 - DNA, 9 bp, Unknown
  misc_feature (1)..( 9): Matrix.002 file - promoters60/1393761
ttctgtttt

SEQ ID NO: 48546 - DNA, 9 bp, Unknown
  misc_feature (1)..( 9): Matrix.002 file - promoters60/1393761
aagttaata

SEQ ID NO: 48547 - DNA, 11 bp, Unknown
  misc_feature (1)..( 11): Matrix.002 file - promoters60/1393761
attttcataat

SEQ ID NO: 48548 - DNA, 10 bp, Unknown
  misc_feature (1)..( 10): Matrix.002 file - promoters60/1393761
ttttcttaat

SEQ ID NO: 48549 - DNA, 7 bp, Unknown
  misc_feature (1)..( 7): Matrix.002 file - promoters60/1393761
ttatttt

SEQ ID NO: 48550 - DNA, 12 bp, Unknown
  misc_feature (1)..( 12): Matrix.002 file - promoters60/1393777
atattttttata

SEQ ID NO: 48551 - DNA, 8 bp, Unknown
  misc_feature (1)..( 8): Matrix.002 file - promoters60/1393777
atttttaa

SEQ ID NO: 48552 - DNA, 7 bp, Unknown
  misc_feature (1)..( 7): Matrix.002 file - promoters60/1393777
tttatat

SEQ ID NO: 48553 - DNA, 9 bp, Unknown
  misc_feature (1)..( 9): Matrix.002 file - promoters60/1393777
agttttatt

SEQ ID NO: 48554 - DNA, 8 bp, Unknown
  misc_feature (1)..( 8): Matrix.002 file - promoters60/1393777
atttattt

SEQ ID NO: 48555 - DNA, 7 bp, Unknown
  misc_feature (1)..( 7): Matrix.002 file - promoters60/1393777
ttttttg

SEQ ID NO: 48556 - DNA, 7 bp, Unknown
  misc_feature (1)..( 7): Matrix.002 file - promoters60/1393777
attaaaa

SEQ ID NO: 48557 - DNA, 10 bp, Unknown
  misc_feature (1)..( 10): Matrix.002 file - promoters60/1393777
tattttattt

SEQ ID NO: 48558 - DNA, 10 bp, Unknown
  misc_feature (1)..( 10): Matrix.002 file - promoters60/1393777
aaaattgtta

SEQ ID NO: 48559 - DNA, 11 bp, Unknown
  misc_feature (1)..( 11): Matrix.002 file - promoters60/1393777
ttaaggattaa

SEQ ID NO: 48560 - DNA, 9 bp, Unknown
  misc_feature (1)..( 9): Matrix.002 file - promoters60/1393777
ccaatcagt

SEQ ID NO: 48561 - DNA, 9 bp, Unknown
  misc_feature (1)..( 9): Matrix.002 file - promoters60/1393777
attaaaaac

SEQ ID NO: 48562 - DNA, 7 bp, Unknown
  misc_feature (1)..( 7): Matrix.002 file - promoters60/1393777
aacaaat

SEQ ID NO: 48563 - DNA, 9 bp, Unknown
  misc_feature (1)..( 9): Matrix.002 file - promoters60/1393777
aatttataa

SEQ ID NO: 48564 - DNA, 9 bp, Unknown
  misc_feature (1)..( 9): Matrix.002 file - promoters60/1393787
aaaagttat

SEQ ID NO: 48565 - DNA, 7 bp, Unknown
  misc_feature (1)..( 7): Matrix.002 file - promoters60/1393802
gtcctca

SEQ ID NO: 48566 - DNA, 7 bp, Unknown
  misc_feature (1)..( 7): Matrix.002 file - promoters60/1393802
agagata

SEQ ID NO: 48567 - DNA, 9 bp, Unknown
  misc_feature (1)..( 9): Matrix.002 file - promoters60/1393802
ttttaattt

SEQ ID NO: 48568 - DNA, 9 bp, Unknown
  misc_feature (1)..( 9): Matrix.002 file - promoters60/1393802
aacagtttt

SEQ ID NO: 48569 - DNA, 6 bp, Unknown
  misc_feature (1)..( 6): Matrix.002 file - promoters60/1393802
ttttac

SEQ ID NO: 48570 - DNA, 6 bp, Unknown
  misc_feature (1)..( 6): Matrix.002 file - promoters60/1393802
caaaaa

SEQ ID NO: 48571 - DNA, 6 bp, Unknown
  misc_feature (1)..( 6): Matrix.002 file - promoters60/1393802
attttt

SEQ ID NO: 48572 - DNA, 11 bp, Unknown
  misc_feature (1)..( 11): Matrix.002 file - promoters60/1393802
taaccaaaaaa

SEQ ID NO: 48573 - DNA, 6 bp, Unknown
  misc_feature (1)..( 6): Matrix.002 file - promoters60/1393802
atgcac

SEQ ID NO: 48574 - DNA, 7 bp, Unknown
  misc_feature (1)..( 7): Matrix.002 file - promoters60/1393802
cttagaa

SEQ ID NO: 48575 - DNA, 8 bp, Unknown
  misc_feature (1)..( 8): Matrix.002 file - promoters60/1393802
gaaacctt

SEQ ID NO: 48576 - DNA, 9 bp, Unknown
  misc_feature (1)..( 9): Matrix.002 file - promoters60/1393802
aaacacaaa

SEQ ID NO: 48577 - DNA, 11 bp, Unknown
  misc_feature (1)..( 11): Matrix.002 file - promoters60/1393802
aaagttcatct

SEQ ID NO: 48578 - DNA, 6 bp, Unknown
  misc_feature (1)..( 6): Matrix.002 file - promoters60/1393802
atattt

SEQ ID NO: 48579 - DNA, 7 bp, Unknown
  misc_feature (1)..( 7): Matrix.002 file - promoters60/1393802
agaaaaa

SEQ ID NO: 48580 - DNA, 7 bp, Unknown
  misc_feature (1)..( 7): Matrix.002 file - promoters60/1393802
gttaaaa

SEQ ID NO: 48581 - DNA, 8 bp, Unknown
  misc_feature (1)..( 8): Matrix.002 file - promoters60/1393802
tgaatatt

SEQ ID NO: 48582 - DNA, 7 bp, Unknown
  misc_feature (1)..( 7): Matrix.002 file - promoters60/1393802
tatagtt

SEQ ID NO: 48583 - DNA, 7 bp, Unknown
  misc_feature (1)..( 7): Matrix.002 file - promoters60/1393802
tatatgt

SEQ ID NO: 48584 - DNA, 7 bp, Unknown
  misc_feature (1)..( 7): Matrix.002 file - promoters60/1393802
taagatt

SEQ ID NO: 48585 - DNA, 7 bp, Unknown
  misc_feature (1)..( 7): Matrix.002 file - promoters60/1393802
tggatat

SEQ ID NO: 48586 - DNA, 8 bp, Unknown
  misc_feature (1)..( 8): Matrix.002 file - promoters60/1393802
attgtttt

SEQ ID NO: 48587 - DNA, 8 bp, Unknown
  misc_feature (1)..( 8): Matrix.002 file - promoters60/1393805
attttact

SEQ ID NO: 48588 - DNA, 9 bp, Unknown
  misc_feature (1)..( 9): Matrix.002 file - promoters60/1393845
attaaaata

SEQ ID NO: 48589 - DNA, 10 bp, Unknown
  misc_feature (1)..( 10): Matrix.002 file - promoters60/1393845
attcaaaatg

SEQ ID NO: 48590 - DNA, 11 bp, Unknown
  misc_feature (1)..( 11): Matrix.002 file - promoters60/1393845
aattctaaaat

SEQ ID NO: 48591 - DNA, 11 bp, Unknown
  misc_feature (1)..( 11): Matrix.002 file - promoters60/1393845
aattattaaat

SEQ ID NO: 48592 - DNA, 6 bp, Unknown
  misc_feature (1)..( 6): Matrix.002 file - promoters60/1394110
tttaaa

SEQ ID NO: 48593 - DNA, 7 bp, Unknown
  misc_feature (1)..( 7): Matrix.002 file - promoters60/1394110
cacatat

SEQ ID NO: 48594 - DNA, 8 bp, Unknown
  misc_feature (1)..( 8): Matrix.002 file - promoters60/1394110
attaataa

SEQ ID NO: 48595 - DNA, 8 bp, Unknown
  misc_feature (1)..( 8): Matrix.002 file - promoters60/1394110
aaactaaa

SEQ ID NO: 48596 - DNA, 10 bp, Unknown
  misc_feature (1)..( 10): Matrix.002 file - promoters60/1394110
ttttcaaaaa

SEQ ID NO: 48597 - DNA, 8 bp, Unknown
  misc_feature (1)..( 8): Matrix.002 file - promoters60/1394110
taatgtaa

SEQ ID NO: 48598 - DNA, 6 bp, Unknown
  misc_feature (1)..( 6): Matrix.002 file - promoters60/1394110
aaacat

SEQ ID NO: 48599 - DNA, 7 bp, Unknown
  misc_feature (1)..( 7): Matrix.002 file - promoters60/1394110
taatata

SEQ ID NO: 48600 - DNA, 7 bp, Unknown
  misc_feature (1)..( 7): Matrix.002 file - promoters60/1394110
aagactc

SEQ ID NO: 48601 - DNA, 7 bp, Unknown
  misc_feature (1)..( 7): Matrix.002 file - promoters60/1394110
atactaa

SEQ ID NO: 48602 - DNA, 5 bp, Unknown
  misc_feature (1)..( 5): Matrix.002 file - promoters60/1394110
aaaag

SEQ ID NO: 48603 - DNA, 8 bp, Unknown
  misc_feature (1)..( 8): Matrix.002 file - promoters60/1394110
aaaaagac

SEQ ID NO: 48604 - DNA, 6 bp, Unknown
  misc_feature (1)..( 6): Matrix.002 file - promoters60/1394110
tcttgg

SEQ ID NO: 48605 - DNA, 7 bp, Unknown
  misc_feature (1)..( 7): Matrix.002 file - promoters60/1394110
cacttgt

SEQ ID NO: 48606 - DNA, 6 bp, Unknown
  misc_feature (1)..( 6): Matrix.002 file - promoters60/1394110
acattt

SEQ ID NO: 48607 - DNA, 7 bp, Unknown
  misc_feature (1)..( 7): Matrix.002 file - promoters60/1394110
tatgtgt

SEQ ID NO: 48608 - DNA, 8 bp, Unknown
  misc_feature (1)..( 8): Matrix.002 file - promoters60/1394110
gtttattt

SEQ ID NO: 48609 - DNA, 9 bp, Unknown
  misc_feature (1)..( 9): Matrix.002 file - promoters60/1394110
aaaatcaag

SEQ ID NO: 48610 - DNA, 8 bp, Unknown
  misc_feature (1)..( 8): Matrix.002 file - promoters60/1394110
cttaatat

SEQ ID NO: 48611 - DNA, 7 bp, Unknown
  misc_feature (1)..( 7): Matrix.002 file - promoters60/1394110
caaatac

SEQ ID NO: 48612 - DNA, 7 bp, Unknown
  misc_feature (1)..( 7): Matrix.002 file - promoters60/1394110
attatca

SEQ ID NO: 48613 - DNA, 6 bp, Unknown
  misc_feature (1)..( 6): Matrix.002 file - promoters60/1394110
aataaa

SEQ ID NO: 48614 - DNA, 7 bp, Unknown
  misc_feature (1)..( 7): Matrix.002 file - promoters60/1394110
aaacaaa

SEQ ID NO: 48615 - DNA, 6 bp, Unknown
  misc_feature (1)..( 6): Matrix.002 file - promoters60/1394110
aataaa

SEQ ID NO: 48616 - DNA, 6 bp, Unknown
  misc_feature (1)..( 6): Matrix.002 file - promoters60/1394110
agacaa

SEQ ID NO: 48617 - DNA, 9 bp, Unknown
  misc_feature (1)..( 9): Matrix.002 file - promoters60/1394110
gagaaaacc

SEQ ID NO: 48618 - DNA, 6 bp, Unknown
  misc_feature (1)..( 6): Matrix.002 file - promoters60/1394178
ttcaca

SEQ ID NO: 48619 - DNA, 8 bp, Unknown
  misc_feature (1)..( 8): Matrix.002 file - promoters60/1394178
tgaatgaa

SEQ ID NO: 48620 - DNA, 6 bp, Unknown
  misc_feature (1)..( 6): Matrix.002 file - promoters60/1394178
gccaag

SEQ ID NO: 48621 - DNA, 8 bp, Unknown
  misc_feature (1)..( 8): Matrix.002 file - promoters60/1394178
tggaaagg

SEQ ID NO: 48622 - DNA, 12 bp, Unknown
  misc_feature (1)..( 12): Matrix.002 file - promoters60/1394178
aaatctctcatt

SEQ ID NO: 48623 - DNA, 8 bp, Unknown
  misc_feature (1)..( 8): Matrix.002 file - promoters60/1394178
tttattaa

SEQ ID NO: 48624 - DNA, 9 bp, Unknown
  misc_feature (1)..( 9): Matrix.002 file - promoters60/1394178
ttttattct

SEQ ID NO: 48625 - DNA, 9 bp, Unknown
  misc_feature (1)..( 9): Matrix.002 file - promoters60/1394178
tttttctta

SEQ ID NO: 48626 - DNA, 7 bp, Unknown
  misc_feature (1)..( 7): Matrix.002 file - promoters60/1394178
aatataa

SEQ ID NO: 48627 - DNA, 7 bp, Unknown
  misc_feature (1)..( 7): Matrix.002 file - promoters60/1394178
gtatcaa

SEQ ID NO: 48628 - DNA, 9 bp, Unknown
  misc_feature (1)..( 9): Matrix.002 file - promoters60/1394178
aataaccaa

SEQ ID NO: 48629 - DNA, 8 bp, Unknown
  misc_feature (1)..( 8): Matrix.002 file - promoters60/1394178
cagctatt

SEQ ID NO: 48630 - DNA, 7 bp, Unknown
  misc_feature (1)..( 7): Matrix.002 file - promoters60/1394178
attgttg

SEQ ID NO: 48631 - DNA, 8 bp, Unknown
  misc_feature (1)..( 8): Matrix.002 file - promoters60/1394178
cataaaaa

SEQ ID NO: 48632 - DNA, 7 bp, Unknown
  misc_feature (1)..( 7): Matrix.002 file - promoters60/1394178
acagatt

SEQ ID NO: 48633 - DNA, 7 bp, Unknown
  misc_feature (1)..( 7): Matrix.002 file - promoters60/1394178
tttagtt

SEQ ID NO: 48634 - DNA, 8 bp, Unknown
  misc_feature (1)..( 8): Matrix.002 file - promoters60/1394178
ttcaaaaa

SEQ ID NO: 48635 - DNA, 8 bp, Unknown
  misc_feature (1)..( 8): Matrix.002 file - promoters60/1394302
ttgttaat

SEQ ID NO: 48636 - DNA, 17 bp, Unknown
  misc_feature (1)..( 17): Matrix.002 file - promoters60/1394302
actgtttaaaaaaaaaa

SEQ ID NO: 48637 - DNA, 9 bp, Unknown
  misc_feature (1)..( 9): Matrix.002 file - promoters60/1394327
caaaacttt

SEQ ID NO: 48638 - DNA, 6 bp, Unknown
  misc_feature (1)..( 6): Matrix.002 file - promoters60/1394327
ataatt

SEQ ID NO: 48639 - DNA, 6 bp, Unknown
  misc_feature (1)..( 6): Matrix.002 file - promoters60/1394327
tttctt

SEQ ID NO: 48640 - DNA, 7 bp, Unknown
  misc_feature (1)..( 7): Matrix.002 file - promoters60/1394327
ccaagct

SEQ ID NO: 48641 - DNA, 7 bp, Unknown
  misc_feature (1)..( 7): Matrix.002 file - promoters60/1394327
gctttta

SEQ ID NO: 48642 - DNA, 8 bp, Unknown
  misc_feature (1)..( 8): Matrix.002 file - promoters60/1394327
tgttatct

SEQ ID NO: 48643 - DNA, 7 bp, Unknown
  misc_feature (1)..( 7): Matrix.002 file - promoters60/1394327
tcacata

SEQ ID NO: 48644 - DNA, 7 bp, Unknown
  misc_feature (1)..( 7): Matrix.002 file - promoters60/1394327
ttttcaa

SEQ ID NO: 48645 - DNA, 6 bp, Unknown
  misc_feature (1)..( 6): Matrix.002 file - promoters60/1394327
ccatat

SEQ ID NO: 48646 - DNA, 6 bp, Unknown
  misc_feature (1)..( 6): Matrix.002 file - promoters60/1394327
aagtct

SEQ ID NO: 48647 - DNA, 6 bp, Unknown
  misc_feature (1)..( 6): Matrix.002 file - promoters60/1394327
tcttct

SEQ ID NO: 48648 - DNA, 7 bp, Unknown
  misc_feature (1)..( 7): Matrix.002 file - promoters60/1394327
agaattt

SEQ ID NO: 48649 - DNA, 7 bp, Unknown
  misc_feature (1)..( 7): Matrix.002 file - promoters60/1394327
caaacat

SEQ ID NO: 48650 - DNA, 7 bp, Unknown
  misc_feature (1)..( 7): Matrix.002 file - promoters60/1394327
tccaaat

SEQ ID NO: 48651 - DNA, 7 bp, Unknown
  misc_feature (1)..( 7): Matrix.002 file - promoters60/1394327
aaagatg

SEQ ID NO: 48652 - DNA, 6 bp, Unknown
  misc_feature (1)..( 6): Matrix.002 file - promoters60/1394327
gcaaaa

SEQ ID NO: 48653 - DNA, 7 bp, Unknown
  misc_feature (1)..( 7): Matrix.002 file - promoters60/1394327
ataggga

SEQ ID NO: 48654 - DNA, 9 bp, Unknown
  misc_feature (1)..( 9): Matrix.002 file - promoters60/1394465
atttgattt

SEQ ID NO: 48655 - DNA, 8 bp, Unknown
  misc_feature (1)..( 8): Matrix.002 file - promoters60/1394465
atttgata

SEQ ID NO: 48656 - DNA, 6 bp, Unknown
  misc_feature (1)..( 6): Matrix.002 file - promoters60/1394465
catctt

SEQ ID NO: 48657 - DNA, 9 bp, Unknown
  misc_feature (1)..( 9): Matrix.002 file - promoters60/1394480
aaaatttct

SEQ ID NO: 48658 - DNA, 8 bp, Unknown
  misc_feature (1)..( 8): Matrix.002 file - promoters60/1394480
tgtgaaac

SEQ ID NO: 48659 - DNA, 9 bp, Unknown
  misc_feature (1)..( 9): Matrix.002 file - promoters60/1394480
aaaatttct

SEQ ID NO: 48660 - DNA, 9 bp, Unknown
  misc_feature (1)..( 9): Matrix.002 file - promoters60/1394480
tttcaaaat

SEQ ID NO: 48661 - DNA, 6 bp, Unknown
  misc_feature (1)..( 6): Matrix.002 file - promoters60/1394480
taacat

SEQ ID NO: 48662 - DNA, 7 bp, Unknown
  misc_feature (1)..( 7): Matrix.002 file - promoters60/1394480
aaaatat

SEQ ID NO: 48663 - DNA, 8 bp, Unknown
  misc_feature (1)..( 8): Matrix.002 file - promoters60/1394480
taactaaa

SEQ ID NO: 48664 - DNA, 6 bp, Unknown
  misc_feature (1)..( 6): Matrix.002 file - promoters60/1394480
aatcaa

SEQ ID NO: 48665 - DNA, 14 bp, Unknown
  misc_feature (1)..( 14): Matrix.002 file - promoters60/1394480
tcaataaatacaca

SEQ ID NO: 48666 - DNA, 7 bp, Unknown
  misc_feature (1)..( 7): Matrix.002 file - promoters60/1394480
aaaaaaa

SEQ ID NO: 48667 - DNA, 9 bp, Unknown
  misc_feature (1)..( 9): Matrix.002 file - promoters60/1394480
ctgctttca

SEQ ID NO: 48668 - DNA, 7 bp, Unknown
  misc_feature (1)..( 7): Matrix.002 file - promoters60/1394480
attttgg

SEQ ID NO: 48669 - DNA, 8 bp, Unknown
  misc_feature (1)..( 8): Matrix.002 file - promoters60/1394480
tcaaattt

SEQ ID NO: 48670 - DNA, 7 bp, Unknown
  misc_feature (1)..( 7): Matrix.002 file - promoters60/1394480
gtaatgg

SEQ ID NO: 48671 - DNA, 6 bp, Unknown
  misc_feature (1)..( 6): Matrix.002 file - promoters60/1394480
aaaatg

SEQ ID NO: 48672 - DNA, 6 bp, Unknown
  misc_feature (1)..( 6): Matrix.002 file - promoters60/1394480
aagatt

SEQ ID NO: 48673 - DNA, 8 bp, Unknown
  misc_feature (1)..( 8): Matrix.002 file - promoters60/1394480
atgtaaac

SEQ ID NO: 48674 - DNA, 7 bp, Unknown
  misc_feature (1)..( 7): Matrix.002 file - promoters60/1394480
gaaaaat

SEQ ID NO: 48675 - DNA, 7 bp, Unknown
  misc_feature (1)..( 7): Matrix.002 file - promoters60/1394480
caaaatt

SEQ ID NO: 48676 - DNA, 7 bp, Unknown
  misc_feature (1)..( 7): Matrix.002 file - promoters60/1394480
acaactt

SEQ ID NO: 48677 - DNA, 7 bp, Unknown
  misc_feature (1)..( 7): Matrix.002 file - promoters60/1394480
tttattt

SEQ ID NO: 48678 - DNA, 6 bp, Unknown
  misc_feature (1)..( 6): Matrix.002 file - promoters60/1394480
ttggtt

SEQ ID NO: 48679 - DNA, 6 bp, Unknown
  misc_feature (1)..( 6): Matrix.002 file - promoters60/1394480
aaaagt

SEQ ID NO: 48680 - DNA, 12 bp, Unknown
  misc_feature (1)..( 12): Matrix.002 file - promoters60/1394510
ttaagatttttt

SEQ ID NO: 48681 - DNA, 14 bp, Unknown
  misc_feature (1)..( 14): Matrix.002 file - promoters60/1394510
acattaaactatat

SEQ ID NO: 48682 - DNA, 11 bp, Unknown
  misc_feature (1)..( 11): Matrix.002 file - promoters60/1394510
ttaacattttt

SEQ ID NO: 48683 - DNA, 9 bp, Unknown
  misc_feature (1)..( 9): Matrix.002 file - promoters60/1394510
aattttgct

SEQ ID NO: 48684 - DNA, 9 bp, Unknown
  misc_feature (1)..( 9): Matrix.002 file - promoters60/1394510
aaaattttt

SEQ ID NO: 48685 - DNA, 15 bp, Unknown
  misc_feature (1)..( 15): Matrix.002 file - promoters60/1394592
tgtaaaatttcaaaa

SEQ ID NO: 48686 - DNA, 17 bp, Unknown
  misc_feature (1)..( 17): Matrix.002 file - promoters60/1394592
agaattttttaaataac

SEQ ID NO: 48687 - DNA, 10 bp, Unknown
  misc_feature (1)..( 10): Matrix.002 file - promoters60/1394625
caaattaaaa

SEQ ID NO: 48688 - DNA, 8 bp, Unknown
  misc_feature (1)..( 8): Matrix.002 file - promoters60/1394625
ttttaatt

SEQ ID NO: 48689 - DNA, 7 bp, Unknown
  misc_feature (1)..( 7): Matrix.002 file - promoters60/1394625
taatttt

SEQ ID NO: 48690 - DNA, 6 bp, Unknown
  misc_feature (1)..( 6): Matrix.002 file - promoters60/1394625
ttggta

SEQ ID NO: 48691 - DNA, 11 bp, Unknown
  misc_feature (1)..( 11): Matrix.002 file - promoters60/1394625
atttaataaaa

SEQ ID NO: 48692 - DNA, 6 bp, Unknown
  misc_feature (1)..( 6): Matrix.002 file - promoters60/1394625
aaaacg

SEQ ID NO: 48693 - DNA, 6 bp, Unknown
  misc_feature (1)..( 6): Matrix.002 file - promoters60/1394625
tgggaa

SEQ ID NO: 48694 - DNA, 9 bp, Unknown
  misc_feature (1)..( 9): Matrix.002 file - promoters60/1394625
taaaccatt

SEQ ID NO: 48695 - DNA, 6 bp, Unknown
  misc_feature (1)..( 6): Matrix.002 file - promoters60/1394625
gaataa

SEQ ID NO: 48696 - DNA, 17 bp, Unknown
  misc_feature (1)..( 17): Matrix.002 file - promoters60/1394625
gattataaaaaaaatct

SEQ ID NO: 48697 - DNA, 9 bp, Unknown
  misc_feature (1)..( 9): Matrix.002 file - promoters60/1394625
tttcttata

SEQ ID NO: 48698 - DNA, 8 bp, Unknown
  misc_feature (1)..( 8): Matrix.002 file - promoters60/1394625
tataaatt

SEQ ID NO: 48699 - DNA, 7 bp, Unknown
  misc_feature (1)..( 7): Matrix.002 file - promoters60/1394625
attactt

SEQ ID NO: 48700 - DNA, 9 bp, Unknown
  misc_feature (1)..( 9): Matrix.002 file - promoters60/1394625
aaaatatat

SEQ ID NO: 48701 - DNA, 6 bp, Unknown
  misc_feature (1)..( 6): Matrix.002 file - promoters60/1394625
tatata

SEQ ID NO: 48702 - DNA, 6 bp, Unknown
  misc_feature (1)..( 6): Matrix.002 file - promoters60/1394625
aaattt

SEQ ID NO: 48703 - DNA, 8 bp, Unknown
  misc_feature (1)..( 8): Matrix.002 file - promoters60/1394625
aaaaaata

SEQ ID NO: 48704 - DNA, 7 bp, Unknown
  misc_feature (1)..( 7): Matrix.002 file - promoters60/1394625
taaataa

SEQ ID NO: 48705 - DNA, 11 bp, Unknown
  misc_feature (1)..( 11): Matrix.002 file - promoters60/1394625
ctcattccctt

SEQ ID NO: 48706 - DNA, 6 bp, Unknown
  misc_feature (1)..( 6): Matrix.002 file - promoters60/1394625
actaat

SEQ ID NO: 48707 - DNA, 7 bp, Unknown
  misc_feature (1)..( 7): Matrix.002 file - promoters60/1394625
tataatt

SEQ ID NO: 48708 - DNA, 9 bp, Unknown
  misc_feature (1)..( 9): Matrix.002 file - promoters60/1394625
ttacccaaa

SEQ ID NO: 48709 - DNA, 7 bp, Unknown
  misc_feature (1)..( 7): Matrix.002 file - promoters60/1394625
ctatctt

SEQ ID NO: 48710 - DNA, 9 bp, Unknown
  misc_feature (1)..( 9): Matrix.002 file - promoters60/1394625
ttcttttta

SEQ ID NO: 48711 - DNA, 7 bp, Unknown
  misc_feature (1)..( 7): Matrix.002 file - promoters60/1394625
accagct

SEQ ID NO: 48712 - DNA, 11 bp, Unknown
  misc_feature (1)..( 11): Matrix.002 file - promoters60/1394625
tcaacctctct

SEQ ID NO: 48713 - DNA, 12 bp, Unknown
  misc_feature (1)..( 12): Matrix.002 file - promoters60/1394643
gttatatatatt

SEQ ID NO: 48714 - DNA, 6 bp, Unknown
  misc_feature (1)..( 6): Matrix.002 file - promoters60/1394643
ttaata

SEQ ID NO: 48715 - DNA, 7 bp, Unknown
  misc_feature (1)..( 7): Matrix.002 file - promoters60/1394643
tttagtt

SEQ ID NO: 48716 - DNA, 8 bp, Unknown
  misc_feature (1)..( 8): Matrix.002 file - promoters60/1394643
tttgccgt

SEQ ID NO: 48717 - DNA, 9 bp, Unknown
  misc_feature (1)..( 9): Matrix.002 file - promoters60/1394643
tatttagga

SEQ ID NO: 48718 - DNA, 9 bp, Unknown
  misc_feature (1)..( 9): Matrix.002 file - promoters60/1394643
tgagtttct

SEQ ID NO: 48719 - DNA, 6 bp, Unknown
  misc_feature (1)..( 6): Matrix.002 file - promoters60/1394643
tttttc

SEQ ID NO: 48720 - DNA, 6 bp, Unknown
  misc_feature (1)..( 6): Matrix.002 file - promoters60/1394643
gggaaa

SEQ ID NO: 48721 - DNA, 6 bp, Unknown
  misc_feature (1)..( 6): Matrix.002 file - promoters60/1394643
tccatg

SEQ ID NO: 48722 - DNA, 8 bp, Unknown
  misc_feature (1)..( 8): Matrix.002 file - promoters60/1394643
tttcttct

SEQ ID NO: 48723 - DNA, 12 bp, Unknown
  misc_feature (1)..( 12): Matrix.002 file - promoters60/1394643
atgctattaaat

SEQ ID NO: 48724 - DNA, 6 bp, Unknown
  misc_feature (1)..( 6): Matrix.002 file - promoters60/1394643
aatatt

SEQ ID NO: 48725 - DNA, 6 bp, Unknown
  misc_feature (1)..( 6): Matrix.002 file - promoters60/1394643
acttat

SEQ ID NO: 48726 - DNA, 7 bp, Unknown
  misc_feature (1)..( 7): Matrix.002 file - promoters60/1394643
tacaaaa

SEQ ID NO: 48727 - DNA, 6 bp, Unknown
  misc_feature (1)..( 6): Matrix.002 file - promoters60/1394643
catcgt

SEQ ID NO: 48728 - DNA, 7 bp, Unknown
  misc_feature (1)..( 7): Matrix.002 file - promoters60/1394643
tcttatt

SEQ ID NO: 48729 - DNA, 7 bp, Unknown
  misc_feature (1)..( 7): Matrix.002 file - promoters60/1394676
tttctag

SEQ ID NO: 48730 - DNA, 6 bp, Unknown
  misc_feature (1)..( 6): Matrix.002 file - promoters60/1394676
attaag

SEQ ID NO: 48731 - DNA, 9 bp, Unknown
  misc_feature (1)..( 9): Matrix.002 file - promoters60/1394676
tttgattga

SEQ ID NO: 48732 - DNA, 7 bp, Unknown
  misc_feature (1)..( 7): Matrix.002 file - promoters60/1394676
ggctgaa

SEQ ID NO: 48733 - DNA, 7 bp, Unknown
  misc_feature (1)..( 7): Matrix.002 file - promoters60/1394676
aaaatta

SEQ ID NO: 48734 - DNA, 7 bp, Unknown
  misc_feature (1)..( 7): Matrix.002 file - promoters60/1394676
attaaaa

SEQ ID NO: 48735 - DNA, 7 bp, Unknown
  misc_feature (1)..( 7): Matrix.002 file - promoters60/1394676
attactg

SEQ ID NO: 48736 - DNA, 10 bp, Unknown
  misc_feature (1)..( 10): Matrix.002 file - promoters60/1394676
accaaactta

SEQ ID NO: 48737 - DNA, 8 bp, Unknown
  misc_feature (1)..( 8): Matrix.002 file - promoters60/1394676
ctgatttg

SEQ ID NO: 48738 - DNA, 7 bp, Unknown
  misc_feature (1)..( 7): Matrix.002 file - promoters60/1394676
tatcatt

SEQ ID NO: 48739 - DNA, 7 bp, Unknown
  misc_feature (1)..( 7): Matrix.002 file - promoters60/1394676
gaatttg

SEQ ID NO: 48740 - DNA, 7 bp, Unknown
  misc_feature (1)..( 7): Matrix.002 file - promoters60/1394676
ttagatc

SEQ ID NO: 48741 - DNA, 6 bp, Unknown
  misc_feature (1)..( 6): Matrix.002 file - promoters60/1394676
catttg

SEQ ID NO: 48742 - DNA, 11 bp, Unknown
  misc_feature (1)..( 11): Matrix.002 file - promoters60/1394697
gaaattaattt

SEQ ID NO: 48743 - DNA, 13 bp, Unknown
  misc_feature (1)..( 13): Matrix.002 file - promoters60/1394697
aaattttaaataa

SEQ ID NO: 48744 - DNA, 11 bp, Unknown
  misc_feature (1)..( 11): Matrix.002 file - promoters60/1394697
taagaaaaatc

SEQ ID NO: 48745 - DNA, 7 bp, Unknown
  misc_feature (1)..( 7): Matrix.002 file - promoters60/1394697
aaaactt

SEQ ID NO: 48746 - DNA, 12 bp, Unknown
  misc_feature (1)..( 12): Matrix.002 file - promoters60/1394697
ataattatttat

SEQ ID NO: 48747 - DNA, 10 bp, Unknown
  misc_feature (1)..( 10): Matrix.002 file - promoters60/1394697
tatttttatg

SEQ ID NO: 48748 - DNA, 9 bp, Unknown
  misc_feature (1)..( 9): Matrix.002 file - promoters60/1394697
tattattat

SEQ ID NO: 48749 - DNA, 7 bp, Unknown
  misc_feature (1)..( 7): Matrix.002 file - promoters60/1394795
attaact

SEQ ID NO: 48750 - DNA, 9 bp, Unknown
  misc_feature (1)..( 9): Matrix.002 file - promoters60/1394795
aaacttttt

SEQ ID NO: 48751 - DNA, 6 bp, Unknown
  misc_feature (1)..( 6): Matrix.002 file - promoters60/1394795
tttcta

SEQ ID NO: 48752 - DNA, 7 bp, Unknown
  misc_feature (1)..( 7): Matrix.002 file - promoters60/1394795
taaaaaa

SEQ ID NO: 48753 - DNA, 6 bp, Unknown
  misc_feature (1)..( 6): Matrix.002 file - promoters60/1394795
gcataa

SEQ ID NO: 48754 - DNA, 9 bp, Unknown
  misc_feature (1)..( 9): Matrix.002 file - promoters60/1394795
gaatctctt

SEQ ID NO: 48755 - DNA, 8 bp, Unknown
  misc_feature (1)..( 8): Matrix.002 file - promoters60/1394795
attttttt

SEQ ID NO: 48756 - DNA, 6 bp, Unknown
  misc_feature (1)..( 6): Matrix.002 file - promoters60/1394795
ttttct

SEQ ID NO: 48757 - DNA, 7 bp, Unknown
  misc_feature (1)..( 7): Matrix.002 file - promoters60/1394795
gataaaa

SEQ ID NO: 48758 - DNA, 8 bp, Unknown
  misc_feature (1)..( 8): Matrix.002 file - promoters60/1394795
tatatatt

SEQ ID NO: 48759 - DNA, 7 bp, Unknown
  misc_feature (1)..( 7): Matrix.002 file - promoters60/1394795
actatta

SEQ ID NO: 48760 - DNA, 9 bp, Unknown
  misc_feature (1)..( 9): Matrix.002 file - promoters60/1394795
tattttaaa

SEQ ID NO: 48761 - DNA, 6 bp, Unknown
  misc_feature (1)..( 6): Matrix.002 file - promoters60/1394795
ttttat

SEQ ID NO: 48762 - DNA, 6 bp, Unknown
  misc_feature (1)..( 6): Matrix.002 file - promoters60/1394795
attttt

SEQ ID NO: 48763 - DNA, 6 bp, Unknown
  misc_feature (1)..( 6): Matrix.002 file - promoters60/1394795
ttctgc

SEQ ID NO: 48764 - DNA, 8 bp, Unknown
  misc_feature (1)..( 8): Matrix.002 file - promoters60/1394795
tatataaa

SEQ ID NO: 48765 - DNA, 6 bp, Unknown
  misc_feature (1)..( 6): Matrix.002 file - promoters60/1394795
aacttt

SEQ ID NO: 48766 - DNA, 6 bp, Unknown
  misc_feature (1)..( 6): Matrix.002 file - promoters60/1394795
tataaa

SEQ ID NO: 48767 - DNA, 7 bp, Unknown
  misc_feature (1)..( 7): Matrix.002 file - promoters60/1394795
tcttttt

SEQ ID NO: 48768 - DNA, 8 bp, Unknown
  misc_feature (1)..( 8): Matrix.002 file - promoters60/1394795
tatgtttt

SEQ ID NO: 48769 - DNA, 7 bp, Unknown
  misc_feature (1)..( 7): Matrix.002 file - promoters60/1394795
tctagtt

SEQ ID NO: 48770 - DNA, 6 bp, Unknown
  misc_feature (1)..( 6): Matrix.002 file - promoters60/1394795
taaaat

SEQ ID NO: 48771 - DNA, 7 bp, Unknown
  misc_feature (1)..( 7): Matrix.002 file - promoters60/1394795
aaaatat

SEQ ID NO: 48772 - DNA, 6 bp, Unknown
  misc_feature (1)..( 6): Matrix.002 file - promoters60/1394795
ttttga

SEQ ID NO: 48773 - DNA, 6 bp, Unknown
  misc_feature (1)..( 6): Matrix.002 file - promoters60/1394795
ttttaa

SEQ ID NO: 48774 - DNA, 8 bp, Unknown
  misc_feature (1)..( 8): Matrix.002 file - promoters60/1394795
aacactag

SEQ ID NO: 48775 - DNA, 6 bp, Unknown
  misc_feature (1)..( 6): Matrix.002 file - promoters60/1394795
caaatg

SEQ ID NO: 48776 - DNA, 7 bp, Unknown
  misc_feature (1)..( 7): Matrix.002 file - promoters60/1394795
aagatca

SEQ ID NO: 48777 - DNA, 6 bp, Unknown
  misc_feature (1)..( 6): Matrix.002 file - promoters60/1394795
ctgaca

SEQ ID NO: 48778 - DNA, 16 bp, Unknown
  misc_feature (1)..( 16): Matrix.002 file - promoters60/1394836
gcccattaatgagttc

SEQ ID NO: 48779 - DNA, 9 bp, Unknown
  misc_feature (1)..( 9): Matrix.002 file - promoters60/1394884
aattttttt

SEQ ID NO: 48780 - DNA, 8 bp, Unknown
  misc_feature (1)..( 8): Matrix.002 file - promoters60/1394884
atttgttt

SEQ ID NO: 48781 - DNA, 9 bp, Unknown
  misc_feature (1)..( 9): Matrix.002 file - promoters60/1394884
taatcttag

SEQ ID NO: 48782 - DNA, 6 bp, Unknown
  misc_feature (1)..( 6): Matrix.002 file - promoters60/1394884
tataat

SEQ ID NO: 48783 - DNA, 11 bp, Unknown
  misc_feature (1)..( 11): Matrix.002 file - promoters60/1394884
aaatttatata

SEQ ID NO: 48784 - DNA, 6 bp, Unknown
  misc_feature (1)..( 6): Matrix.002 file - promoters60/1394884
atttaa

SEQ ID NO: 48785 - DNA, 10 bp, Unknown
  misc_feature (1)..( 10): Matrix.002 file - promoters60/1394884
gaattatatc

SEQ ID NO: 48786 - DNA, 9 bp, Unknown
  misc_feature (1)..( 9): Matrix.002 file - promoters60/1394884
atttgtata

SEQ ID NO: 48787 - DNA, 7 bp, Unknown
  misc_feature (1)..( 7): Matrix.002 file - promoters60/1394884
aatttaa

SEQ ID NO: 48788 - DNA, 8 bp, Unknown
  misc_feature (1)..( 8): Matrix.002 file - promoters60/1395001
ttgtattc

SEQ ID NO: 48789 - DNA, 7 bp, Unknown
  misc_feature (1)..( 7): Matrix.002 file - promoters60/1395027
ttaaata

SEQ ID NO: 48790 - DNA, 7 bp, Unknown
  misc_feature (1)..( 7): Matrix.002 file - promoters60/1395027
ccaattt

SEQ ID NO: 48791 - DNA, 7 bp, Unknown
  misc_feature (1)..( 7): Matrix.002 file - promoters60/1395027
tttctat

SEQ ID NO: 48792 - DNA, 8 bp, Unknown
  misc_feature (1)..( 8): Matrix.002 file - promoters60/1395027
aaaacaaa

SEQ ID NO: 48793 - DNA, 6 bp, Unknown
  misc_feature (1)..( 6): Matrix.002 file - promoters60/1395027
gatttt

SEQ ID NO: 48794 - DNA, 7 bp, Unknown
  misc_feature (1)..( 7): Matrix.002 file - promoters60/1395027
cattttt

SEQ ID NO: 48795 - DNA, 11 bp, Unknown
  misc_feature (1)..( 11): Matrix.002 file - promoters60/1395027
aataaaaaata

SEQ ID NO: 48796 - DNA, 7 bp, Unknown
  misc_feature (1)..( 7): Matrix.002 file - promoters60/1395027
agaaaat

SEQ ID NO: 48797 - DNA, 7 bp, Unknown
  misc_feature (1)..( 7): Matrix.002 file - promoters60/1395027
agcaaat

SEQ ID NO: 48798 - DNA, 7 bp, Unknown
  misc_feature (1)..( 7): Matrix.002 file - promoters60/1395027
ttaaagt

SEQ ID NO: 48799 - DNA, 9 bp, Unknown
  misc_feature (1)..( 9): Matrix.002 file - promoters60/1395027
taaactaat

SEQ ID NO: 48800 - DNA, 10 bp, Unknown
  misc_feature (1)..( 10): Matrix.002 file - promoters60/1395027
ataaataata

SEQ ID NO: 48801 - DNA, 7 bp, Unknown
  misc_feature (1)..( 7): Matrix.002 file - promoters60/1395027
ttggtct

SEQ ID NO: 48802 - DNA, 6 bp, Unknown
  misc_feature (1)..( 6): Matrix.002 file - promoters60/1395027
aaataa

SEQ ID NO: 48803 - DNA, 7 bp, Unknown
  misc_feature (1)..( 7): Matrix.002 file - promoters60/1395027
atacaaa

SEQ ID NO: 48804 - DNA, 7 bp, Unknown
  misc_feature (1)..( 7): Matrix.002 file - promoters60/1395027
tataatt

SEQ ID NO: 48805 - DNA, 8 bp, Unknown
  misc_feature (1)..( 8): Matrix.002 file - promoters60/1395027
acaaattg

SEQ ID NO: 48806 - DNA, 7 bp, Unknown
  misc_feature (1)..( 7): Matrix.002 file - promoters60/1395066
gcaatag

SEQ ID NO: 48807 - DNA, 7 bp, Unknown
  misc_feature (1)..( 7): Matrix.002 file - promoters60/1395066
aaactat

SEQ ID NO: 48808 - DNA, 6 bp, Unknown
  misc_feature (1)..( 6): Matrix.002 file - promoters60/1395066
aaaata

SEQ ID NO: 48809 - DNA, 11 bp, Unknown
  misc_feature (1)..( 11): Matrix.002 file - promoters60/1395066
aaaaagagacc

SEQ ID NO: 48810 - DNA, 6 bp, Unknown
  misc_feature (1)..( 6): Matrix.002 file - promoters60/1395066
gaattt

SEQ ID NO: 48811 - DNA, 8 bp, Unknown
  misc_feature (1)..( 8): Matrix.002 file - promoters60/1395066
aaagttga

SEQ ID NO: 48812 - DNA, 9 bp, Unknown
  misc_feature (1)..( 9): Matrix.002 file - promoters60/1395066
atttaatta

SEQ ID NO: 48813 - DNA, 7 bp, Unknown
  misc_feature (1)..( 7): Matrix.002 file - promoters60/1395066
actatag

SEQ ID NO: 48814 - DNA, 7 bp, Unknown
  misc_feature (1)..( 7): Matrix.002 file - promoters60/1395066
tattctt

SEQ ID NO: 48815 - DNA, 7 bp, Unknown
  misc_feature (1)..( 7): Matrix.002 file - promoters60/1395066
tgtgaaa

SEQ ID NO: 48816 - DNA, 9 bp, Unknown
  misc_feature (1)..( 9): Matrix.002 file - promoters60/1395066
tttattcaa

SEQ ID NO: 48817 - DNA, 6 bp, Unknown
  misc_feature (1)..( 6): Matrix.002 file - promoters60/1395066
ttatct

SEQ ID NO: 48818 - DNA, 9 bp, Unknown
  misc_feature (1)..( 9): Matrix.002 file - promoters60/1395066
gaaaactat

SEQ ID NO: 48819 - DNA, 10 bp, Unknown
  misc_feature (1)..( 10): Matrix.002 file - promoters60/1395066
ctagacatcc

SEQ ID NO: 48820 - DNA, 15 bp, Unknown
  misc_feature (1)..( 15): Matrix.002 file - promoters60/1395066
ttagcttattgacgt

SEQ ID NO: 48821 - DNA, 7 bp, Unknown
  misc_feature (1)..( 7): Matrix.002 file - promoters60/1395066
tagtttg

SEQ ID NO: 48822 - DNA, 15 bp, Unknown
  misc_feature (1)..( 15): Matrix.002 file - promoters60/1395066
tttgaaagatgcatc

SEQ ID NO: 48823 - DNA, 28 bp, Unknown
  misc_feature (1)..( 28): Matrix.002 file - promoters60/1395066
agaactactcagacaggtaaaagtagaa

SEQ ID NO: 48824 - DNA, 6 bp, Unknown
  misc_feature (1)..( 6): Matrix.002 file - promoters60/1395066
gtgtga

SEQ ID NO: 48825 - DNA, 11 bp, Unknown
  misc_feature (1)..( 11): Matrix.002 file - promoters60/1395066
attatatgtta

SEQ ID NO: 48826 - DNA, 6 bp, Unknown
  misc_feature (1)..( 6): Matrix.002 file - promoters60/1395066
taaact

SEQ ID NO: 48827 - DNA, 10 bp, Unknown
  misc_feature (1)..( 10): Matrix.002 file - promoters60/1395066
aagatatata

SEQ ID NO: 48828 - DNA, 16 bp, Unknown
  misc_feature (1)..( 16): Matrix.002 file - promoters60/1395066
aatggaagataaaaac

SEQ ID NO: 48829 - DNA, 8 bp, Unknown
  misc_feature (1)..( 8): Matrix.002 file - promoters60/1395066
ttagtctg

SEQ ID NO: 48830 - DNA, 14 bp, Unknown
  misc_feature (1)..( 14): Matrix.002 file - promoters60/1395066
tttggaaatgagta

SEQ ID NO: 48831 - DNA, 22 bp, Unknown
  misc_feature (1)..( 22): Matrix.002 file - promoters60/1395066
agatattggcatctagagttac

SEQ ID NO: 48832 - DNA, 9 bp, Unknown
  misc_feature (1)..( 9): Matrix.002 file - promoters60/1395066
taccatgga

SEQ ID NO: 48833 - DNA, 8 bp, Unknown
  misc_feature (1)..( 8): Matrix.002 file - promoters60/1395066
caaaagtc

SEQ ID NO: 48834 - DNA, 13 bp, Unknown
  misc_feature (1)..( 13): Matrix.002 file - promoters60/1395066
gtgaaaatgctac

SEQ ID NO: 48835 - DNA, 11 bp, Unknown
  misc_feature (1)..( 11): Matrix.002 file - promoters60/1395066
aagcatttaca

SEQ ID NO: 48836 - DNA, 10 bp, Unknown
  misc_feature (1)..( 10): Matrix.002 file - promoters60/1395066
cggtaaaaaa

SEQ ID NO: 48837 - DNA, 11 bp, Unknown
  misc_feature (1)..( 11): Matrix.002 file - promoters60/1395095
actactaaaaa

SEQ ID NO: 48838 - DNA, 10 bp, Unknown
  misc_feature (1)..( 10): Matrix.002 file - promoters60/1395095
taaaataaga

SEQ ID NO: 48839 - DNA, 7 bp, Unknown
  misc_feature (1)..( 7): Matrix.002 file - promoters60/1395095
aatagat

SEQ ID NO: 48840 - DNA, 9 bp, Unknown
  misc_feature (1)..( 9): Matrix.002 file - promoters60/1395095
ctttgtttc

SEQ ID NO: 48841 - DNA, 7 bp, Unknown
  misc_feature (1)..( 7): Matrix.002 file - promoters60/1395095
aaaaaaa

SEQ ID NO: 48842 - DNA, 11 bp, Unknown
  misc_feature (1)..( 11): Matrix.002 file - promoters60/1395095
caaattttttt

SEQ ID NO: 48843 - DNA, 8 bp, Unknown
  misc_feature (1)..( 8): Matrix.002 file - promoters60/1395095
aaagtctt

SEQ ID NO: 48844 - DNA, 8 bp, Unknown
  misc_feature (1)..( 8): Matrix.002 file - promoters60/1395095
catttttt

SEQ ID NO: 48845 - DNA, 8 bp, Unknown
  misc_feature (1)..( 8): Matrix.002 file - promoters60/1395095
aaaattct

SEQ ID NO: 48846 - DNA, 8 bp, Unknown
  misc_feature (1)..( 8): Matrix.002 file - promoters60/1395095
tataaata

SEQ ID NO: 48847 - DNA, 7 bp, Unknown
  misc_feature (1)..( 7): Matrix.002 file - promoters60/1395215
aatgaca

SEQ ID NO: 48848 - DNA, 6 bp, Unknown
  misc_feature (1)..( 6): Matrix.002 file - promoters60/1395215
attcaa

SEQ ID NO: 48849 - DNA, 7 bp, Unknown
  misc_feature (1)..( 7): Matrix.002 file - promoters60/1395215
aaaattg

SEQ ID NO: 48850 - DNA, 8 bp, Unknown
  misc_feature (1)..( 8): Matrix.002 file - promoters60/1395215
ttgttagt

SEQ ID NO: 48851 - DNA, 8 bp, Unknown
  misc_feature (1)..( 8): Matrix.002 file - promoters60/1395215
taatctcc

SEQ ID NO: 48852 - DNA, 8 bp, Unknown
  misc_feature (1)..( 8): Matrix.002 file - promoters60/1395215
taaaaaga

SEQ ID NO: 48853 - DNA, 6 bp, Unknown
  misc_feature (1)..( 6): Matrix.002 file - promoters60/1395215
gagaac

SEQ ID NO: 48854 - DNA, 8 bp, Unknown
  misc_feature (1)..( 8): Matrix.002 file - promoters60/1395215
gaaacaaa

SEQ ID NO: 48855 - DNA, 6 bp, Unknown
  misc_feature (1)..( 6): Matrix.002 file - promoters60/1395215
tattaa

SEQ ID NO: 48856 - DNA, 6 bp, Unknown
  misc_feature (1)..( 6): Matrix.002 file - promoters60/1395215
ttatct

SEQ ID NO: 48857 - DNA, 6 bp, Unknown
  misc_feature (1)..( 6): Matrix.002 file - promoters60/1395215
attgtg

SEQ ID NO: 48858 - DNA, 6 bp, Unknown
  misc_feature (1)..( 6): Matrix.002 file - promoters60/1395215
taataa

SEQ ID NO: 48859 - DNA, 6 bp, Unknown
  misc_feature (1)..( 6): Matrix.002 file - promoters60/1395215
agtaaa

SEQ ID NO: 48860 - DNA, 7 bp, Unknown
  misc_feature (1)..( 7): Matrix.002 file - promoters60/1395215
aatcggg

SEQ ID NO: 48861 - DNA, 10 bp, Unknown
  misc_feature (1)..( 10): Matrix.002 file - promoters60/1395215
ggaaaagaaa

SEQ ID NO: 48862 - DNA, 7 bp, Unknown
  misc_feature (1)..( 7): Matrix.002 file - promoters60/1395215
cccacta

SEQ ID NO: 48863 - DNA, 9 bp, Unknown
  misc_feature (1)..( 9): Matrix.002 file - promoters60/1395215
aaagaaaag

SEQ ID NO: 48864 - DNA, 7 bp, Unknown
  misc_feature (1)..( 7): Matrix.002 file - promoters60/1395215
gtatata

SEQ ID NO: 48865 - DNA, 7 bp, Unknown
  misc_feature (1)..( 7): Matrix.002 file - promoters60/1395254
ttaagaa

SEQ ID NO: 48866 - DNA, 7 bp, Unknown
  misc_feature (1)..( 7): Matrix.002 file - promoters60/1395254
tttgctt

SEQ ID NO: 48867 - DNA, 10 bp, Unknown
  misc_feature (1)..( 10): Matrix.002 file - promoters60/1395254
acttttgaaa

SEQ ID NO: 48868 - DNA, 8 bp, Unknown
  misc_feature (1)..( 8): Matrix.002 file - promoters60/1395254
attcttat

SEQ ID NO: 48869 - DNA, 9 bp, Unknown
  misc_feature (1)..( 9): Matrix.002 file - promoters60/1395254
ttttttatt

SEQ ID NO: 48870 - DNA, 8 bp, Unknown
  misc_feature (1)..( 8): Matrix.002 file - promoters60/1395254
tctcgtta

SEQ ID NO: 48871 - DNA, 6 bp, Unknown
  misc_feature (1)..( 6): Matrix.002 file - promoters60/1395254
atcttg

SEQ ID NO: 48872 - DNA, 7 bp, Unknown
  misc_feature (1)..( 7): Matrix.002 file - promoters60/1395254
ttgtttg

SEQ ID NO: 48873 - DNA, 8 bp, Unknown
  misc_feature (1)..( 8): Matrix.002 file - promoters60/1395254
gagatctc

SEQ ID NO: 48874 - DNA, 6 bp, Unknown
  misc_feature (1)..( 6): Matrix.002 file - promoters60/1395254
tttata

SEQ ID NO: 48875 - DNA, 7 bp, Unknown
  misc_feature (1)..( 7): Matrix.002 file - promoters60/1395254
taagtta

SEQ ID NO: 48876 - DNA, 7 bp, Unknown
  misc_feature (1)..( 7): Matrix.002 file - promoters60/1395254
gaaatga

SEQ ID NO: 48877 - DNA, 9 bp, Unknown
  misc_feature (1)..( 9): Matrix.002 file - promoters60/1395254
tctaattaa

SEQ ID NO: 48878 - DNA, 6 bp, Unknown
  misc_feature (1)..( 6): Matrix.002 file - promoters60/1395254
aaacag

SEQ ID NO: 48879 - DNA, 6 bp, Unknown
  misc_feature (1)..( 6): Matrix.002 file - promoters60/1395254
tccact

SEQ ID NO: 48880 - DNA, 8 bp, Unknown
  misc_feature (1)..( 8): Matrix.002 file - promoters60/1395254
attaatga

SEQ ID NO: 48881 - DNA, 7 bp, Unknown
  misc_feature (1)..( 7): Matrix.002 file - promoters60/1395254
taacaga

SEQ ID NO: 48882 - DNA, 6 bp, Unknown
  misc_feature (1)..( 6): Matrix.002 file - promoters60/1395254
cgggtc

SEQ ID NO: 48883 - DNA, 10 bp, Unknown
  misc_feature (1)..( 10): Matrix.002 file - promoters60/1395485
ataataattt

SEQ ID NO: 48884 - DNA, 12 bp, Unknown
  misc_feature (1)..( 12): Matrix.002 file - promoters60/1395485
taaactttttgt

SEQ ID NO: 48885 - DNA, 7 bp, Unknown
  misc_feature (1)..( 7): Matrix.002 file - promoters60/1395485
catagat

SEQ ID NO: 48886 - DNA, 7 bp, Unknown
  misc_feature (1)..( 7): Matrix.002 file - promoters60/1395485
atcattt

SEQ ID NO: 48887 - DNA, 8 bp, Unknown
  misc_feature (1)..( 8): Matrix.002 file - promoters60/1395485
actaaatt

SEQ ID NO: 48888 - DNA, 8 bp, Unknown
  misc_feature (1)..( 8): Matrix.002 file - promoters60/1395485
aggcactt

SEQ ID NO: 48889 - DNA, 7 bp, Unknown
  misc_feature (1)..( 7): Matrix.002 file - promoters60/1395485
gaaaaat

SEQ ID NO: 48890 - DNA, 8 bp, Unknown
  misc_feature (1)..( 8): Matrix.002 file - promoters60/1395485
tgtttact

SEQ ID NO: 48891 - DNA, 8 bp, Unknown
  misc_feature (1)..( 8): Matrix.002 file - promoters60/1395485
tgttaatc

SEQ ID NO: 48892 - DNA, 8 bp, Unknown
  misc_feature (1)..( 8): Matrix.002 file - promoters60/1395485
aaaatctc

SEQ ID NO: 48893 - DNA, 6 bp, Unknown
  misc_feature (1)..( 6): Matrix.002 file - promoters60/1395485
cttctt

SEQ ID NO: 48894 - DNA, 6 bp, Unknown
  misc_feature (1)..( 6): Matrix.002 file - promoters60/1395485
catctc

SEQ ID NO: 48895 - DNA, 6 bp, Unknown
  misc_feature (1)..( 6): Matrix.002 file - promoters60/1395485
agtttt

SEQ ID NO: 48896 - DNA, 7 bp, Unknown
  misc_feature (1)..( 7): Matrix.002 file - promoters60/1395485
acaaaaa

SEQ ID NO: 48897 - DNA, 7 bp, Unknown
  misc_feature (1)..( 7): Matrix.002 file - promoters60/1395568
gagaaat

SEQ ID NO: 48898 - DNA, 7 bp, Unknown
  misc_feature (1)..( 7): Matrix.002 file - promoters60/1395568
aaaagga

SEQ ID NO: 48899 - DNA, 9 bp, Unknown
  misc_feature (1)..( 9): Matrix.002 file - promoters60/1395568
tgtaaataa

SEQ ID NO: 48900 - DNA, 8 bp, Unknown
  misc_feature (1)..( 8): Matrix.002 file - promoters60/1395568
cagtataa

SEQ ID NO: 48901 - DNA, 6 bp, Unknown
  misc_feature (1)..( 6): Matrix.002 file - promoters60/1395568
aaatgt

SEQ ID NO: 48902 - DNA, 8 bp, Unknown
  misc_feature (1)..( 8): Matrix.002 file - promoters60/1395568
ggcggcga

SEQ ID NO: 48903 - DNA, 7 bp, Unknown
  misc_feature (1)..( 7): Matrix.002 file - promoters60/1395568
gagccaa

SEQ ID NO: 48904 - DNA, 8 bp, Unknown
  misc_feature (1)..( 8): Matrix.002 file - promoters60/1395568
atctatat

SEQ ID NO: 48905 - DNA, 6 bp, Unknown
  misc_feature (1)..( 6): Matrix.002 file - promoters60/1395568
gataat

SEQ ID NO: 48906 - DNA, 7 bp, Unknown
  misc_feature (1)..( 7): Matrix.002 file - promoters60/1395636
tttttac

SEQ ID NO: 48907 - DNA, 13 bp, Unknown
  misc_feature (1)..( 13): Matrix.002 file - promoters60/1395636
ctcgtataaattg

SEQ ID NO: 48908 - DNA, 11 bp, Unknown
  misc_feature (1)..( 11): Matrix.002 file - promoters60/1395636
aaataggaata

SEQ ID NO: 48909 - DNA, 8 bp, Unknown
  misc_feature (1)..( 8): Matrix.002 file - promoters60/1395781
taaaaaaa

SEQ ID NO: 48910 - DNA, 9 bp, Unknown
  misc_feature (1)..( 9): Matrix.002 file - promoters60/1395781
acaaaaatt

SEQ ID NO: 48911 - DNA, 9 bp, Unknown
  misc_feature (1)..( 9): Matrix.002 file - promoters60/1395781
catttttgt

SEQ ID NO: 48912 - DNA, 10 bp, Unknown
  misc_feature (1)..( 10): Matrix.002 file - promoters60/1395781
aaaatgttac

SEQ ID NO: 48913 - DNA, 9 bp, Unknown
  misc_feature (1)..( 9): Matrix.002 file - promoters60/1395781
tctataaaa

SEQ ID NO: 48914 - DNA, 12 bp, Unknown
  misc_feature (1)..( 12): Matrix.002 file - promoters60/1395781
ctggatgtacat

SEQ ID NO: 48915 - DNA, 14 bp, Unknown
  misc_feature (1)..( 14): Matrix.002 file - promoters60/1395824
aaaatattaaaaat

SEQ ID NO: 48916 - DNA, 10 bp, Unknown
  misc_feature (1)..( 10): Matrix.002 file - promoters60/1395824
tacaaacata

SEQ ID NO: 48917 - DNA, 12 bp, Unknown
  misc_feature (1)..( 12): Matrix.002 file - promoters60/1395824
aagcaataaacg

SEQ ID NO: 48918 - DNA, 9 bp, Unknown
  misc_feature (1)..( 9): Matrix.002 file - promoters60/1395824
ctagtcaca

SEQ ID NO: 48919 - DNA, 10 bp, Unknown
  misc_feature (1)..( 10): Matrix.002 file - promoters60/1395824
tacaaatata

SEQ ID NO: 48920 - DNA, 8 bp, Unknown
  misc_feature (1)..( 8): Matrix.002 file - promoters60/1395832
ttatataa

SEQ ID NO: 48921 - DNA, 12 bp, Unknown
  misc_feature (1)..( 12): Matrix.002 file - promoters60/1395832
tgaaaaagtaat

SEQ ID NO: 48922 - DNA, 7 bp, Unknown
  misc_feature (1)..( 7): Matrix.002 file - promoters60/1395832
tatttaa

SEQ ID NO: 48923 - DNA, 8 bp, Unknown
  misc_feature (1)..( 8): Matrix.002 file - promoters60/1395839
ggataaaa

SEQ ID NO: 48924 - DNA, 8 bp, Unknown
  misc_feature (1)..( 8): Matrix.002 file - promoters60/1395839
caaataaa

SEQ ID NO: 48925 - DNA, 9 bp, Unknown
  misc_feature (1)..( 9): Matrix.002 file - promoters60/1395839
taaataaaa

SEQ ID NO: 48926 - DNA, 11 bp, Unknown
  misc_feature (1)..( 11): Matrix.002 file - promoters60/1395839
atttttgtttg

SEQ ID NO: 48927 - DNA, 9 bp, Unknown
  misc_feature (1)..( 9): Matrix.002 file - promoters60/1395839
aaataactt

SEQ ID NO: 48928 - DNA, 6 bp, Unknown
  misc_feature (1)..( 6): Matrix.002 file - promoters60/1395958
accaaa

SEQ ID NO: 48929 - DNA, 7 bp, Unknown
  misc_feature (1)..( 7): Matrix.002 file - promoters60/1395958
taaaaat

SEQ ID NO: 48930 - DNA, 6 bp, Unknown
  misc_feature (1)..( 6): Matrix.002 file - promoters60/1395958
aaaaat

SEQ ID NO: 48931 - DNA, 7 bp, Unknown
  misc_feature (1)..( 7): Matrix.002 file - promoters60/1395958
attttaa

SEQ ID NO: 48932 - DNA, 6 bp, Unknown
  misc_feature (1)..( 6): Matrix.002 file - promoters60/1395958
gtaaaa

SEQ ID NO: 48933 - DNA, 6 bp, Unknown
  misc_feature (1)..( 6): Matrix.002 file - promoters60/1395958
cgaata

SEQ ID NO: 48934 - DNA, 6 bp, Unknown
  misc_feature (1)..( 6): Matrix.002 file - promoters60/1395958
ctgaaa

SEQ ID NO: 48935 - DNA, 6 bp, Unknown
  misc_feature (1)..( 6): Matrix.002 file - promoters60/1395958
tgttta

SEQ ID NO: 48936 - DNA, 11 bp, Unknown
  misc_feature (1)..( 11): Matrix.002 file - promoters60/1395958
gttaacaagtc

SEQ ID NO: 48937 - DNA, 6 bp, Unknown
  misc_feature (1)..( 6): Matrix.002 file - promoters60/1395958
agaaat

SEQ ID NO: 48938 - DNA, 9 bp, Unknown
  misc_feature (1)..( 9): Matrix.002 file - promoters60/1395958
taatcaaag

SEQ ID NO: 48939 - DNA, 7 bp, Unknown
  misc_feature (1)..( 7): Matrix.002 file - promoters60/1395958
ttaattt

SEQ ID NO: 48940 - DNA, 7 bp, Unknown
  misc_feature (1)..( 7): Matrix.002 file - promoters60/1395958
tttcaaa

SEQ ID NO: 48941 - DNA, 8 bp, Unknown
  misc_feature (1)..( 8): Matrix.002 file - promoters60/1395958
aaaggtga

SEQ ID NO: 48942 - DNA, 6 bp, Unknown
  misc_feature (1)..( 6): Matrix.002 file - promoters60/1395958
tttcga

SEQ ID NO: 48943 - DNA, 8 bp, Unknown
  misc_feature (1)..( 8): Matrix.002 file - promoters60/1395958
tagagaat

SEQ ID NO: 48944 - DNA, 8 bp, Unknown
  misc_feature (1)..( 8): Matrix.002 file - promoters60/1395958
aacaaaaa

SEQ ID NO: 48945 - DNA, 6 bp, Unknown
  misc_feature (1)..( 6): Matrix.002 file - promoters60/1395958
aaaaca

SEQ ID NO: 48946 - DNA, 7 bp, Unknown
  misc_feature (1)..( 7): Matrix.002 file - promoters60/1395958
gaaaaat

SEQ ID NO: 48947 - DNA, 7 bp, Unknown
  misc_feature (1)..( 7): Matrix.002 file - promoters60/1395958
attacag

SEQ ID NO: 48948 - DNA, 7 bp, Unknown
  misc_feature (1)..( 7): Matrix.002 file - promoters60/1395958
cgctgtt

SEQ ID NO: 48949 - DNA, 8 bp, Unknown
  misc_feature (1)..( 8): Matrix.002 file - promoters60/1395972
aattagta

SEQ ID NO: 48950 - DNA, 7 bp, Unknown
  misc_feature (1)..( 7): Matrix.002 file - promoters60/1395972
taaaata

SEQ ID NO: 48951 - DNA, 6 bp, Unknown
  misc_feature (1)..( 6): Matrix.002 file - promoters60/1395972
actaaa

SEQ ID NO: 48952 - DNA, 9 bp, Unknown
  misc_feature (1)..( 9): Matrix.002 file - promoters60/1395972
tcacgtaca

SEQ ID NO: 48953 - DNA, 11 bp, Unknown
  misc_feature (1)..( 11): Matrix.002 file - promoters60/1395972
ttcaaataaaa

SEQ ID NO: 48954 - DNA, 7 bp, Unknown
  misc_feature (1)..( 7): Matrix.002 file - promoters60/1395972
gcaaaac

SEQ ID NO: 48955 - DNA, 8 bp, Unknown
  misc_feature (1)..( 8): Matrix.002 file - promoters60/1395972
aaaataga

SEQ ID NO: 48956 - DNA, 6 bp, Unknown
  misc_feature (1)..( 6): Matrix.002 file - promoters60/1395972
ttatat

SEQ ID NO: 48957 - DNA, 6 bp, Unknown
  misc_feature (1)..( 6): Matrix.002 file - promoters60/1395972
ataaaa

SEQ ID NO: 48958 - DNA, 6 bp, Unknown
  misc_feature (1)..( 6): Matrix.002 file - promoters60/1395972
aagaaa

SEQ ID NO: 48959 - DNA, 9 bp, Unknown
  misc_feature (1)..( 9): Matrix.002 file - promoters60/1395972
aaaactcaa

SEQ ID NO: 48960 - DNA, 9 bp, Unknown
  misc_feature (1)..( 9): Matrix.002 file - promoters60/1395972
aaaaaaaaa

SEQ ID NO: 48961 - DNA, 9 bp, Unknown
  misc_feature (1)..( 9): Matrix.002 file - promoters60/1395972
catataact

SEQ ID NO: 48962 - DNA, 8 bp, Unknown
  misc_feature (1)..( 8): Matrix.002 file - promoters60/1395972
taaacatt

SEQ ID NO: 48963 - DNA, 6 bp, Unknown
  misc_feature (1)..( 6): Matrix.002 file - promoters60/1395972
attttc

SEQ ID NO: 48964 - DNA, 6 bp, Unknown
  misc_feature (1)..( 6): Matrix.002 file - promoters60/1395972
caaaat

SEQ ID NO: 48965 - DNA, 7 bp, Unknown
  misc_feature (1)..( 7): Matrix.002 file - promoters60/1395972
tatcttc

SEQ ID NO: 48966 - DNA, 8 bp, Unknown
  misc_feature (1)..( 8): Matrix.002 file - promoters60/1395972
ttgccaaa

SEQ ID NO: 48967 - DNA, 6 bp, Unknown
  misc_feature (1)..( 6): Matrix.002 file - promoters60/1395972
caaaat

SEQ ID NO: 48968 - DNA, 6 bp, Unknown
  misc_feature (1)..( 6): Matrix.002 file - promoters60/1395972
agacaa

SEQ ID NO: 48969 - DNA, 6 bp, Unknown
  misc_feature (1)..( 6): Matrix.002 file - promoters60/1395972
agctaa

SEQ ID NO: 48970 - DNA, 12 bp, Unknown
  misc_feature (1)..( 12): Matrix.002 file - promoters60/1395972
aaagaaagggaa

SEQ ID NO: 48971 - DNA, 9 bp, Unknown
  misc_feature (1)..( 9): Matrix.002 file - promoters60/1395972
acattttca

SEQ ID NO: 48972 - DNA, 6 bp, Unknown
  misc_feature (1)..( 6): Matrix.002 file - promoters60/1395972
tcttct

SEQ ID NO: 48973 - DNA, 6 bp, Unknown
  misc_feature (1)..( 6): Matrix.002 file - promoters60/1395972
tcaaaa

SEQ ID NO: 48974 - DNA, 6 bp, Unknown
  misc_feature (1)..( 6): Matrix.002 file - promoters60/1395972
agaaag

SEQ ID NO: 48975 - DNA, 7 bp, Unknown
  misc_feature (1)..( 7): Matrix.002 file - promoters60/1395972
aagaaaa

SEQ ID NO: 48976 - DNA, 7 bp, Unknown
  misc_feature (1)..( 7): Matrix.002 file - promoters60/1395972
aaataaa

SEQ ID NO: 48977 - DNA, 7 bp, Unknown
  misc_feature (1)..( 7): Matrix.002 file - promoters60/1395972
ataaatg

SEQ ID NO: 48978 - DNA, 9 bp, Unknown
  misc_feature (1)..( 9): Matrix.002 file - promoters60/1396038
cctctttat

SEQ ID NO: 48979 - DNA, 6 bp, Unknown
  misc_feature (1)..( 6): Matrix.002 file - promoters60/1396038
tataaa

SEQ ID NO: 48980 - DNA, 16 bp, Unknown
  misc_feature (1)..( 16): Matrix.002 file - promoters60/1396038
cattttattttagatt

SEQ ID NO: 48981 - DNA, 10 bp, Unknown
  misc_feature (1)..( 10): Matrix.002 file - promoters60/1396085
tcaaattttc

SEQ ID NO: 48982 - DNA, 4 bp, Unknown
  misc_feature (1)..( 4): Matrix.002 file - promoters60/1396085
aaac

SEQ ID NO: 48983 - DNA, 11 bp, Unknown
  misc_feature (1)..( 11): Matrix.002 file - promoters60/1396085
tttgtactgat

SEQ ID NO: 48984 - DNA, 5 bp, Unknown
  misc_feature (1)..( 5): Matrix.002 file - promoters60/1396085
ttttt

SEQ ID NO: 48985 - DNA, 8 bp, Unknown
  misc_feature (1)..( 8): Matrix.002 file - promoters60/1396085
ataatatt

SEQ ID NO: 48986 - DNA, 10 bp, Unknown
  misc_feature (1)..( 10): Matrix.002 file - promoters60/1396085
atttcttaat

SEQ ID NO: 48987 - DNA, 12 bp, Unknown
  misc_feature (1)..( 12): Matrix.002 file - promoters60/1396085
aaatttgtagta

SEQ ID NO: 48988 - DNA, 6 bp, Unknown
  misc_feature (1)..( 6): Matrix.002 file - promoters60/1396085
atattt

SEQ ID NO: 48989 - DNA, 11 bp, Unknown
  misc_feature (1)..( 11): Matrix.002 file - promoters60/1396085
cataattaaac

SEQ ID NO: 48990 - DNA, 11 bp, Unknown
  misc_feature (1)..( 11): Matrix.002 file - promoters60/1396085
ttaccatttct

SEQ ID NO: 48991 - DNA, 7 bp, Unknown
  misc_feature (1)..( 7): Matrix.002 file - promoters60/1396104
tatcaaa

SEQ ID NO: 48992 - DNA, 6 bp, Unknown
  misc_feature (1)..( 6): Matrix.002 file - promoters60/1396123
aatata

SEQ ID NO: 48993 - DNA, 7 bp, Unknown
  misc_feature (1)..( 7): Matrix.002 file - promoters60/1396123
ttaatat

SEQ ID NO: 48994 - DNA, 6 bp, Unknown
  misc_feature (1)..( 6): Matrix.002 file - promoters60/1396123
tattaa

SEQ ID NO: 48995 - DNA, 6 bp, Unknown
  misc_feature (1)..( 6): Matrix.002 file - promoters60/1396123
tatatt

SEQ ID NO: 48996 - DNA, 7 bp, Unknown
  misc_feature (1)..( 7): Matrix.002 file - promoters60/1396123
attatca

SEQ ID NO: 48997 - DNA, 6 bp, Unknown
  misc_feature (1)..( 6): Matrix.002 file - promoters60/1396123
aataaa

SEQ ID NO: 48998 - DNA, 11 bp, Unknown
  misc_feature (1)..( 11): Matrix.002 file - promoters60/1396123
ataaacgcaaa

SEQ ID NO: 48999 - DNA, 8 bp, Unknown
  misc_feature (1)..( 8): Matrix.002 file - promoters60/1396123
ctgaaata

SEQ ID NO: 49000 - DNA, 6 bp, Unknown
  misc_feature (1)..( 6): Matrix.002 file - promoters60/1396123
aaacct

SEQ ID NO: 49001 - DNA, 6 bp, Unknown
  misc_feature (1)..( 6): Matrix.002 file - promoters60/1396123
aaatag

SEQ ID NO: 49002 - DNA, 6 bp, Unknown
  misc_feature (1)..( 6): Matrix.002 file - promoters60/1396123
aacacg

SEQ ID NO: 49003 - DNA, 9 bp, Unknown
  misc_feature (1)..( 9): Matrix.002 file - promoters60/1396123
aatactttg

SEQ ID NO: 49004 - DNA, 7 bp, Unknown
  misc_feature (1)..( 7): Matrix.002 file - promoters60/1396123
acaaaaa

SEQ ID NO: 49005 - DNA, 8 bp, Unknown
  misc_feature (1)..( 8): Matrix.002 file - promoters60/1396123
aaaaaata

SEQ ID NO: 49006 - DNA, 7 bp, Unknown
  misc_feature (1)..( 7): Matrix.002 file - promoters60/1396123
atagagg

SEQ ID NO: 49007 - DNA, 6 bp, Unknown
  misc_feature (1)..( 6): Matrix.002 file - promoters60/1396123
tgaaga

SEQ ID NO: 49008 - DNA, 7 bp, Unknown
  misc_feature (1)..( 7): Matrix.002 file - promoters60/1396123
atcaaag

SEQ ID NO: 49009 - DNA, 7 bp, Unknown
  misc_feature (1)..( 7): Matrix.002 file - promoters60/1396123
acacatg

SEQ ID NO: 49010 - DNA, 7 bp, Unknown
  misc_feature (1)..( 7): Matrix.002 file - promoters60/1396123
ttagatc

SEQ ID NO: 49011 - DNA, 6 bp, Unknown
  misc_feature (1)..( 6): Matrix.002 file - promoters60/1396123
tgtttc

SEQ ID NO: 49012 - DNA, 6 bp, Unknown
  misc_feature (1)..( 6): Matrix.002 file - promoters60/1396123
ttcact

SEQ ID NO: 49013 - DNA, 9 bp, Unknown
  misc_feature (1)..( 9): Matrix.002 file - promoters60/1396123
ggaacactt

SEQ ID NO: 49014 - DNA, 9 bp, Unknown
  misc_feature (1)..( 9): Matrix.002 file - promoters60/1396127
ataaattaa

SEQ ID NO: 49015 - DNA, 8 bp, Unknown
  misc_feature (1)..( 8): Matrix.002 file - promoters60/1396127
aaatttgt

SEQ ID NO: 49016 - DNA, 12 bp, Unknown
  misc_feature (1)..( 12): Matrix.002 file - promoters60/1396147
atattaattata

SEQ ID NO: 49017 - DNA, 13 bp, Unknown
  misc_feature (1)..( 13): Matrix.002 file - promoters60/1396151
ttgaatcaaaatt

SEQ ID NO: 49018 - DNA, 7 bp, Unknown
  misc_feature (1)..( 7): Matrix.002 file - promoters60/1396151
tatccaa

SEQ ID NO: 49019 - DNA, 7 bp, Unknown
  misc_feature (1)..( 7): Matrix.002 file - promoters60/1396151
tttcatt

SEQ ID NO: 49020 - DNA, 8 bp, Unknown
  misc_feature (1)..( 8): Matrix.002 file - promoters60/1396151
aattaatg

SEQ ID NO: 49021 - DNA, 6 bp, Unknown
  misc_feature (1)..( 6): Matrix.002 file - promoters60/1396151
ggttat

SEQ ID NO: 49022 - DNA, 7 bp, Unknown
  misc_feature (1)..( 7): Matrix.002 file - promoters60/1396151
gatttcc

SEQ ID NO: 49023 - DNA, 9 bp, Unknown
  misc_feature (1)..( 9): Matrix.002 file - promoters60/1396151
ttcaaaatt

SEQ ID NO: 49024 - DNA, 7 bp, Unknown
  misc_feature (1)..( 7): Matrix.002 file - promoters60/1396151
agaactc

SEQ ID NO: 49025 - DNA, 7 bp, Unknown
  misc_feature (1)..( 7): Matrix.002 file - promoters60/1396151
tatttct

SEQ ID NO: 49026 - DNA, 6 bp, Unknown
  misc_feature (1)..( 6): Matrix.002 file - promoters60/1396151
ttaatt

SEQ ID NO: 49027 - DNA, 7 bp, Unknown
  misc_feature (1)..( 7): Matrix.002 file - promoters60/1396151
tggattt

SEQ ID NO: 49028 - DNA, 6 bp, Unknown
  misc_feature (1)..( 6): Matrix.002 file - promoters60/1396151
aagatt

SEQ ID NO: 49029 - DNA, 6 bp, Unknown
  misc_feature (1)..( 6): Matrix.002 file - promoters60/1396151
ttggtt

SEQ ID NO: 49030 - DNA, 6 bp, Unknown
  misc_feature (1)..( 6): Matrix.002 file - promoters60/1396151
ttaacc

SEQ ID NO: 49031 - DNA, 7 bp, Unknown
  misc_feature (1)..( 7): Matrix.002 file - promoters60/1396151
ctcactc

SEQ ID NO: 49032 - DNA, 7 bp, Unknown
  misc_feature (1)..( 7): Matrix.002 file - promoters60/1396182
ttttgct

SEQ ID NO: 49033 - DNA, 6 bp, Unknown
  misc_feature (1)..( 6): Matrix.002 file - promoters60/1396182
cttgtg

SEQ ID NO: 49034 - DNA, 9 bp, Unknown
  misc_feature (1)..( 9): Matrix.002 file - promoters60/1396182
aagaataag

SEQ ID NO: 49035 - DNA, 8 bp, Unknown
  misc_feature (1)..( 8): Matrix.002 file - promoters60/1396182
tttattct

SEQ ID NO: 49036 - DNA, 7 bp, Unknown
  misc_feature (1)..( 7): Matrix.002 file - promoters60/1396182
ttctaat

SEQ ID NO: 49037 - DNA, 7 bp, Unknown
  misc_feature (1)..( 7): Matrix.002 file - promoters60/1396182
aaaacaa

SEQ ID NO: 49038 - DNA, 7 bp, Unknown
  misc_feature (1)..( 7): Matrix.002 file - promoters60/1396182
actagat

SEQ ID NO: 49039 - DNA, 6 bp, Unknown
  misc_feature (1)..( 6): Matrix.002 file - promoters60/1396182
atattt

SEQ ID NO: 49040 - DNA, 7 bp, Unknown
  misc_feature (1)..( 7): Matrix.002 file - promoters60/1396182
ataactt

SEQ ID NO: 49041 - DNA, 6 bp, Unknown
  misc_feature (1)..( 6): Matrix.002 file - promoters60/1396182
tccaaa

SEQ ID NO: 49042 - DNA, 7 bp, Unknown
  misc_feature (1)..( 7): Matrix.002 file - promoters60/1396182
cttgaaa

SEQ ID NO: 49043 - DNA, 9 bp, Unknown
  misc_feature (1)..( 9): Matrix.002 file - promoters60/1396182
attgtgatt

SEQ ID NO: 49044 - DNA, 11 bp, Unknown
  misc_feature (1)..( 11): Matrix.002 file - promoters60/1396182
ggaaatgaaat

SEQ ID NO: 49045 - DNA, 7 bp, Unknown
  misc_feature (1)..( 7): Matrix.002 file - promoters60/1396182
tctattg

SEQ ID NO: 49046 - DNA, 8 bp, Unknown
  misc_feature (1)..( 8): Matrix.002 file - promoters60/1396182
aaaaagaa

SEQ ID NO: 49047 - DNA, 7 bp, Unknown
  misc_feature (1)..( 7): Matrix.002 file - promoters60/1396182
gtatata

SEQ ID NO: 49048 - DNA, 7 bp, Unknown
  misc_feature (1)..( 7): Matrix.002 file - promoters60/1396182
aatcggg

SEQ ID NO: 49049 - DNA, 7 bp, Unknown
  misc_feature (1)..( 7): Matrix.002 file - promoters60/1396182
cccacta

SEQ ID NO: 49050 - DNA, 9 bp, Unknown
  misc_feature (1)..( 9): Matrix.002 file - promoters60/1396182
aaagaaaag

SEQ ID NO: 49051 - DNA, 9 bp, Unknown
  misc_feature (1)..( 9): Matrix.002 file - promoters60/1396238
caaaatgac

SEQ ID NO: 49052 - DNA, 11 bp, Unknown
  misc_feature (1)..( 11): Matrix.002 file - promoters60/1396238
acagacataaa

SEQ ID NO: 49053 - DNA, 8 bp, Unknown
  misc_feature (1)..( 8): Matrix.002 file - promoters60/1396238
ataataag

SEQ ID NO: 49054 - DNA, 7 bp, Unknown
  misc_feature (1)..( 7): Matrix.002 file - promoters60/1396238
taaaggg

SEQ ID NO: 49055 - DNA, 9 bp, Unknown
  misc_feature (1)..( 9): Matrix.002 file - promoters60/1396238
aatgacaac

SEQ ID NO: 49056 - DNA, 9 bp, Unknown
  misc_feature (1)..( 9): Matrix.002 file - promoters60/1396238
tatttgtaa

SEQ ID NO: 49057 - DNA, 9 bp, Unknown
  misc_feature (1)..( 9): Matrix.002 file - promoters60/1396238
tatatacga

SEQ ID NO: 49058 - DNA, 10 bp, Unknown
  misc_feature (1)..( 10): Matrix.002 file - promoters60/1396256
aaatttaatt

SEQ ID NO: 49059 - DNA, 9 bp, Unknown
  misc_feature (1)..( 9): Matrix.002 file - promoters60/1396256
ttgttgttt

SEQ ID NO: 49060 - DNA, 12 bp, Unknown
  misc_feature (1)..( 12): Matrix.002 file - promoters60/1396256
tcctataaaaaa

SEQ ID NO: 49061 - DNA, 9 bp, Unknown
  misc_feature (1)..( 9): Matrix.002 file - promoters60/1396256
aattttatt

SEQ ID NO: 49062 - DNA, 10 bp, Unknown
  misc_feature (1)..( 10): Matrix.002 file - promoters60/1396256
taatgtctcg

SEQ ID NO: 49063 - DNA, 10 bp, Unknown
  misc_feature (1)..( 10): Matrix.002 file - promoters60/1396256
aatcttactc

SEQ ID NO: 49064 - DNA, 8 bp, Unknown
  misc_feature (1)..( 8): Matrix.002 file - promoters60/1396256
cacaaaaa

SEQ ID NO: 49065 - DNA, 8 bp, Unknown
  misc_feature (1)..( 8): Matrix.002 file - promoters60/1396256
caaaaaaa

SEQ ID NO: 49066 - DNA, 7 bp, Unknown
  misc_feature (1)..( 7): Matrix.002 file - promoters60/1396296
tatctaa

SEQ ID NO: 49067 - DNA, 7 bp, Unknown
  misc_feature (1)..( 7): Matrix.002 file - promoters60/1396296
atatttg

SEQ ID NO: 49068 - DNA, 7 bp, Unknown
  misc_feature (1)..( 7): Matrix.002 file - promoters60/1396296
tttgaag

SEQ ID NO: 49069 - DNA, 6 bp, Unknown
  misc_feature (1)..( 6): Matrix.002 file - promoters60/1396296
ttgttt

SEQ ID NO: 49070 - DNA, 11 bp, Unknown
  misc_feature (1)..( 11): Matrix.002 file - promoters60/1396296
agacagaaaga

SEQ ID NO: 49071 - DNA, 6 bp, Unknown
  misc_feature (1)..( 6): Matrix.002 file - promoters60/1396296
taataa

SEQ ID NO: 49072 - DNA, 9 bp, Unknown
  misc_feature (1)..( 9): Matrix.002 file - promoters60/1396296
ataaacgaa

SEQ ID NO: 49073 - DNA, 8 bp, Unknown
  misc_feature (1)..( 8): Matrix.002 file - promoters60/1396296
ctaatcac

SEQ ID NO: 49074 - DNA, 7 bp, Unknown
  misc_feature (1)..( 7): Matrix.002 file - promoters60/1396296
taaaggg

SEQ ID NO: 49075 - DNA, 6 bp, Unknown
  misc_feature (1)..( 6): Matrix.002 file - promoters60/1396296
tctctc

SEQ ID NO: 49076 - DNA, 6 bp, Unknown
  misc_feature (1)..( 6): Matrix.002 file - promoters60/1396296
tcatat

SEQ ID NO: 49077 - DNA, 6 bp, Unknown
  misc_feature (1)..( 6): Matrix.002 file - promoters60/1396296
acaatt

SEQ ID NO: 49078 - DNA, 6 bp, Unknown
  misc_feature (1)..( 6): Matrix.002 file - promoters60/1396296
atgatt

SEQ ID NO: 49079 - DNA, 8 bp, Unknown
  misc_feature (1)..( 8): Matrix.002 file - promoters60/1396296
ataaaagt

SEQ ID NO: 49080 - DNA, 8 bp, Unknown
  misc_feature (1)..( 8): Matrix.002 file - promoters60/1396296
ttttcttt

SEQ ID NO: 49081 - DNA, 6 bp, Unknown
  misc_feature (1)..( 6): Matrix.002 file - promoters60/1396296
aaataa

SEQ ID NO: 49082 - DNA, 6 bp, Unknown
  misc_feature (1)..( 6): Matrix.002 file - promoters60/1396296
aattta

SEQ ID NO: 49083 - DNA, 6 bp, Unknown
  misc_feature (1)..( 6): Matrix.002 file - promoters60/1396296
ttttct

SEQ ID NO: 49084 - DNA, 10 bp, Unknown
  misc_feature (1)..( 10): Matrix.002 file - promoters60/1396308
taaaaaggat

SEQ ID NO: 49085 - DNA, 14 bp, Unknown
  misc_feature (1)..( 14): Matrix.002 file - promoters60/1396308
acttataatataat

SEQ ID NO: 49086 - DNA, 9 bp, Unknown
  misc_feature (1)..( 9): Matrix.002 file - promoters60/1396308
atatataat

SEQ ID NO: 49087 - DNA, 9 bp, Unknown
  misc_feature (1)..( 9): Matrix.002 file - promoters60/1396308
aaaatatat

SEQ ID NO: 49088 - DNA, 11 bp, Unknown
  misc_feature (1)..( 11): Matrix.002 file - promoters60/1396308
agaaaatcaat

SEQ ID NO: 49089 - DNA, 11 bp, Unknown
  misc_feature (1)..( 11): Matrix.002 file - promoters60/1396308
tcctattatat

SEQ ID NO: 49090 - DNA, 8 bp, Unknown
  misc_feature (1)..( 8): Matrix.002 file - promoters60/1396308
ttgtatca

SEQ ID NO: 49091 - DNA, 11 bp, Unknown
  misc_feature (1)..( 11): Matrix.002 file - promoters60/1396308
tcaattcaaac

SEQ ID NO: 49092 - DNA, 8 bp, Unknown
  misc_feature (1)..( 8): Matrix.002 file - promoters60/1396308
atttgttt

SEQ ID NO: 49093 - DNA, 8 bp, Unknown
  misc_feature (1)..( 8): Matrix.002 file - promoters60/1396312
aaaaataa

SEQ ID NO: 49094 - DNA, 11 bp, Unknown
  misc_feature (1)..( 11): Matrix.002 file - promoters60/1396312
ttattaacatt

SEQ ID NO: 49095 - DNA, 6 bp, Unknown
  misc_feature (1)..( 6): Matrix.002 file - promoters60/1396312
gattga

SEQ ID NO: 49096 - DNA, 10 bp, Unknown
  misc_feature (1)..( 10): Matrix.002 file - promoters60/1396312
aaacaaaaaa

SEQ ID NO: 49097 - DNA, 10 bp, Unknown
  misc_feature (1)..( 10): Matrix.002 file - promoters60/1396312
aaagaaaata

SEQ ID NO: 49098 - DNA, 8 bp, Unknown
  misc_feature (1)..( 8): Matrix.002 file - promoters60/1396312
aaaaatga

SEQ ID NO: 49099 - DNA, 11 bp, Unknown
  misc_feature (1)..( 11): Matrix.002 file - promoters60/1396312
tatagaaaaaa

SEQ ID NO: 49100 - DNA, 8 bp, Unknown
  misc_feature (1)..( 8): Matrix.002 file - promoters60/1396312
ggaaaaag

SEQ ID NO: 49101 - DNA, 10 bp, Unknown
  misc_feature (1)..( 10): Matrix.002 file - promoters60/1396354
gctgtgtgtc

SEQ ID NO: 49102 - DNA, 9 bp, Unknown
  misc_feature (1)..( 9): Matrix.002 file - promoters60/1396354
actatataa

SEQ ID NO: 49103 - DNA, 9 bp, Unknown
  misc_feature (1)..( 9): Matrix.002 file - promoters60/1396364
attttagtt

SEQ ID NO: 49104 - DNA, 8 bp, Unknown
  misc_feature (1)..( 8): Matrix.002 file - promoters60/1396364
tattaatg

SEQ ID NO: 49105 - DNA, 7 bp, Unknown
  misc_feature (1)..( 7): Matrix.002 file - promoters60/1396364
aatattt

SEQ ID NO: 49106 - DNA, 8 bp, Unknown
  misc_feature (1)..( 8): Matrix.002 file - promoters60/1396364
tttagttt

SEQ ID NO: 49107 - DNA, 9 bp, Unknown
  misc_feature (1)..( 9): Matrix.002 file - promoters60/1396364
tgaaaccaa

SEQ ID NO: 49108 - DNA, 7 bp, Unknown
  misc_feature (1)..( 7): Matrix.002 file - promoters60/1396364
ttttgat

SEQ ID NO: 49109 - DNA, 9 bp, Unknown
  misc_feature (1)..( 9): Matrix.002 file - promoters60/1396364
aatttattt

SEQ ID NO: 49110 - DNA, 11 bp, Unknown
  misc_feature (1)..( 11): Matrix.002 file - promoters60/1396364
tacgtaacatg

SEQ ID NO: 49111 - DNA, 11 bp, Unknown
  misc_feature (1)..( 11): Matrix.002 file - promoters60/1396462
gaacaataaca

SEQ ID NO: 49112 - DNA, 10 bp, Unknown
  misc_feature (1)..( 10): Matrix.002 file - promoters60/1396462
taaaaagtaa

SEQ ID NO: 49113 - DNA, 7 bp, Unknown
  misc_feature (1)..( 7): Matrix.002 file - promoters60/1396462
ataaaac

SEQ ID NO: 49114 - DNA, 7 bp, Unknown
  misc_feature (1)..( 7): Matrix.002 file - promoters60/1396462
ttgtaac

SEQ ID NO: 49115 - DNA, 7 bp, Unknown
  misc_feature (1)..( 7): Matrix.002 file - promoters60/1396462
aaaacaa

SEQ ID NO: 49116 - DNA, 10 bp, Unknown
  misc_feature (1)..( 10): Matrix.002 file - promoters60/1396462
aaacaaattt

SEQ ID NO: 49117 - DNA, 9 bp, Unknown
  misc_feature (1)..( 9): Matrix.002 file - promoters60/1396462
ttttgaaaa

SEQ ID NO: 49118 - DNA, 10 bp, Unknown
  misc_feature (1)..( 10): Matrix.002 file - promoters60/1396462
ggaaaagaaa

SEQ ID NO: 49119 - DNA, 11 bp, Unknown
  misc_feature (1)..( 11): Matrix.002 file - promoters60/1396462
aaaataaaata

SEQ ID NO: 49120 - DNA, 13 bp, Unknown
  misc_feature (1)..( 13): Matrix.002 file - promoters60/1396462
aatattttctttg

SEQ ID NO: 49121 - DNA, 8 bp, Unknown
  misc_feature (1)..( 8): Matrix.002 file - promoters60/1396462
caaaataa

SEQ ID NO: 49122 - DNA, 6 bp, Unknown
  misc_feature (1)..( 6): Matrix.002 file - promoters60/1396462
gaaaaa

SEQ ID NO: 49123 - DNA, 9 bp, Unknown
  misc_feature (1)..( 9): Matrix.002 file - promoters60/1396462
aaaaggaaa

SEQ ID NO: 49124 - DNA, 7 bp, Unknown
  misc_feature (1)..( 7): Matrix.002 file - promoters60/1396462
ttgagaa

SEQ ID NO: 49125 - DNA, 8 bp, Unknown
  misc_feature (1)..( 8): Matrix.002 file - promoters60/1396462
tatctgag

SEQ ID NO: 49126 - DNA, 7 bp, Unknown
  misc_feature (1)..( 7): Matrix.002 file - promoters60/1396462
tttattt

SEQ ID NO: 49127 - DNA, 10 bp, Unknown
  misc_feature (1)..( 10): Matrix.002 file - promoters60/1396462
tttaattaat

SEQ ID NO: 49128 - DNA, 8 bp, Unknown
  misc_feature (1)..( 8): Matrix.002 file - promoters60/1396462
aatattgt

SEQ ID NO: 49129 - DNA, 7 bp, Unknown
  misc_feature (1)..( 7): Matrix.002 file - promoters60/1396462
aaaaaaa

SEQ ID NO: 49130 - DNA, 6 bp, Unknown
  misc_feature (1)..( 6): Matrix.002 file - promoters60/1396462
taataa

SEQ ID NO: 49131 - DNA, 7 bp, Unknown
  misc_feature (1)..( 7): Matrix.002 file - promoters60/1396462
aatcggg

SEQ ID NO: 49132 - DNA, 7 bp, Unknown
  misc_feature (1)..( 7): Matrix.002 file - promoters60/1396462
cccacta

SEQ ID NO: 49133 - DNA, 7 bp, Unknown
  misc_feature (1)..( 7): Matrix.002 file - promoters60/1396462
gtatata

SEQ ID NO: 49134 - DNA, 11 bp, Unknown
  misc_feature (1)..( 11): Matrix.002 file - promoters60/1396469
cattcttattt

SEQ ID NO: 49135 - DNA, 11 bp, Unknown
  misc_feature (1)..( 11): Matrix.002 file - promoters60/1396469
atacttacaaa

SEQ ID NO: 49136 - DNA, 11 bp, Unknown
  misc_feature (1)..( 11): Matrix.002 file - promoters60/1396469
tcatatatata

SEQ ID NO: 49137 - DNA, 12 bp, Unknown
  misc_feature (1)..( 12): Matrix.002 file - promoters60/1396469
aattttttttca

SEQ ID NO: 49138 - DNA, 14 bp, Unknown
  misc_feature (1)..( 14): Matrix.002 file - promoters60/1396469
ttagctataaatta

SEQ ID NO: 49139 - DNA, 7 bp, Unknown
  misc_feature (1)..( 7): Matrix.002 file - promoters60/1396469
aactaaa

SEQ ID NO: 49140 - DNA, 14 bp, Unknown
  misc_feature (1)..( 14): Matrix.002 file - promoters60/1396469
ttttatatagataa

SEQ ID NO: 49141 - DNA, 9 bp, Unknown
  misc_feature (1)..( 9): Matrix.002 file - promoters60/1396469
aactaaaca

SEQ ID NO: 49142 - DNA, 10 bp, Unknown
  misc_feature (1)..( 10): Matrix.002 file - promoters60/1396482
tttaaaaaat

SEQ ID NO: 49143 - DNA, 7 bp, Unknown
  misc_feature (1)..( 7): Matrix.002 file - promoters60/1396519
gttacaa

SEQ ID NO: 49144 - DNA, 7 bp, Unknown
  misc_feature (1)..( 7): Matrix.002 file - promoters60/1396519
aaaattt

SEQ ID NO: 49145 - DNA, 6 bp, Unknown
  misc_feature (1)..( 6): Matrix.002 file - promoters60/1396519
accaaa

SEQ ID NO: 49146 - DNA, 6 bp, Unknown
  misc_feature (1)..( 6): Matrix.002 file - promoters60/1396519
gaaaaa

SEQ ID NO: 49147 - DNA, 7 bp, Unknown
  misc_feature (1)..( 7): Matrix.002 file - promoters60/1396519
aaacaaa

SEQ ID NO: 49148 - DNA, 6 bp, Unknown
  misc_feature (1)..( 6): Matrix.002 file - promoters60/1396519
caaaaa

SEQ ID NO: 49149 - DNA, 8 bp, Unknown
  misc_feature (1)..( 8): Matrix.002 file - promoters60/1396519
agaataaa

SEQ ID NO: 49150 - DNA, 7 bp, Unknown
  misc_feature (1)..( 7): Matrix.002 file - promoters60/1396519
atataaa

SEQ ID NO: 49151 - DNA, 6 bp, Unknown
  misc_feature (1)..( 6): Matrix.002 file - promoters60/1396519
aaaaag

SEQ ID NO: 49152 - DNA, 7 bp, Unknown
  misc_feature (1)..( 7): Matrix.002 file - promoters60/1396519
aagaaat

SEQ ID NO: 49153 - DNA, 10 bp, Unknown
  misc_feature (1)..( 10): Matrix.002 file - promoters60/1396519
gaaaataaaa

SEQ ID NO: 49154 - DNA, 7 bp, Unknown
  misc_feature (1)..( 7): Matrix.002 file - promoters60/1396519
aaaataa

SEQ ID NO: 49155 - DNA, 8 bp, Unknown
  misc_feature (1)..( 8): Matrix.002 file - promoters60/1396519
tttgttta

SEQ ID NO: 49156 - DNA, 6 bp, Unknown
  misc_feature (1)..( 6): Matrix.002 file - promoters60/1396519
aagtta

SEQ ID NO: 49157 - DNA, 9 bp, Unknown
  misc_feature (1)..( 9): Matrix.002 file - promoters60/1396519
aagagtaaa

SEQ ID NO: 49158 - DNA, 11 bp, Unknown
  misc_feature (1)..( 11): Matrix.002 file - promoters60/1396519
aaacaagctaa

SEQ ID NO: 49159 - DNA, 8 bp, Unknown
  misc_feature (1)..( 8): Matrix.002 file - promoters60/1396519
agagatag

SEQ ID NO: 49160 - DNA, 13 bp, Unknown
  misc_feature (1)..( 13): Matrix.002 file - promoters60/1396519
acattttcagata

SEQ ID NO: 49161 - DNA, 8 bp, Unknown
  misc_feature (1)..( 8): Matrix.002 file - promoters60/1396519
tgcaggag

SEQ ID NO: 49162 - DNA, 7 bp, Unknown
  misc_feature (1)..( 7): Matrix.002 file - promoters60/1396519
attcatg

SEQ ID NO: 49163 - DNA, 7 bp, Unknown
  misc_feature (1)..( 7): Matrix.002 file - promoters60/1396519
cacgaga

SEQ ID NO: 49164 - DNA, 6 bp, Unknown
  misc_feature (1)..( 6): Matrix.002 file - promoters60/1396519
gctaag

SEQ ID NO: 49165 - DNA, 7 bp, Unknown
  misc_feature (1)..( 7): Matrix.002 file - promoters60/1396519
aaagaaa

SEQ ID NO: 49166 - DNA, 6 bp, Unknown
  misc_feature (1)..( 6): Matrix.002 file - promoters60/1396519
taaaaa

SEQ ID NO: 49167 - DNA, 7 bp, Unknown
  misc_feature (1)..( 7): Matrix.002 file - promoters60/1396519
agatttc

SEQ ID NO: 49168 - DNA, 7 bp, Unknown
  misc_feature (1)..( 7): Matrix.002 file - promoters60/1396767
atgtata

SEQ ID NO: 49169 - DNA, 7 bp, Unknown
  misc_feature (1)..( 7): Matrix.002 file - promoters60/1396767
tttacag

SEQ ID NO: 49170 - DNA, 7 bp, Unknown
  misc_feature (1)..( 7): Matrix.002 file - promoters60/1396767
tacgatt

SEQ ID NO: 49171 - DNA, 8 bp, Unknown
  misc_feature (1)..( 8): Matrix.002 file - promoters60/1396767
tttgattt

SEQ ID NO: 49172 - DNA, 7 bp, Unknown
  misc_feature (1)..( 7): Matrix.002 file - promoters60/1396767
aaaatac

SEQ ID NO: 49173 - DNA, 9 bp, Unknown
  misc_feature (1)..( 9): Matrix.002 file - promoters60/1396767
caaactaaa

SEQ ID NO: 49174 - DNA, 8 bp, Unknown
  misc_feature (1)..( 8): Matrix.002 file - promoters60/1396767
tgttgtaa

SEQ ID NO: 49175 - DNA, 7 bp, Unknown
  misc_feature (1)..( 7): Matrix.002 file - promoters60/1396767
aaaaaaa

SEQ ID NO: 49176 - DNA, 8 bp, Unknown
  misc_feature (1)..( 8): Matrix.002 file - promoters60/1396767
cttacaaa

SEQ ID NO: 49177 - DNA, 7 bp, Unknown
  misc_feature (1)..( 7): Matrix.002 file - promoters60/1396767
aagaaaa

SEQ ID NO: 49178 - DNA, 6 bp, Unknown
  misc_feature (1)..( 6): Matrix.002 file - promoters60/1396767
gccttg

SEQ ID NO: 49179 - DNA, 8 bp, Unknown
  misc_feature (1)..( 8): Matrix.002 file - promoters60/1396767
aaacttaa

SEQ ID NO: 49180 - DNA, 8 bp, Unknown
  misc_feature (1)..( 8): Matrix.002 file - promoters60/1396767
ttgatgaa

SEQ ID NO: 49181 - DNA, 8 bp, Unknown
  misc_feature (1)..( 8): Matrix.002 file - promoters60/1396767
agccttac

SEQ ID NO: 49182 - DNA, 6 bp, Unknown
  misc_feature (1)..( 6): Matrix.002 file - promoters60/1396767
ttgcaa

SEQ ID NO: 49183 - DNA, 6 bp, Unknown
  misc_feature (1)..( 6): Matrix.002 file - promoters60/1396767
ttttga

SEQ ID NO: 49184 - DNA, 8 bp, Unknown
  misc_feature (1)..( 8): Matrix.002 file - promoters60/1396767
agaaaaga

SEQ ID NO: 49185 - DNA, 9 bp, Unknown
  misc_feature (1)..( 9): Matrix.002 file - promoters60/1396816
agattagaa

SEQ ID NO: 49186 - DNA, 10 bp, Unknown
  misc_feature (1)..( 10): Matrix.002 file - promoters60/1396816
gatgacaaaa

SEQ ID NO: 49187 - DNA, 6 bp, Unknown
  misc_feature (1)..( 6): Matrix.002 file - promoters60/1396951
atttgc

SEQ ID NO: 49188 - DNA, 6 bp, Unknown
  misc_feature (1)..( 6): Matrix.002 file - promoters60/1396951
aaaaat

SEQ ID NO: 49189 - DNA, 6 bp, Unknown
  misc_feature (1)..( 6): Matrix.002 file - promoters60/1396951
ttcaaa

SEQ ID NO: 49190 - DNA, 7 bp, Unknown
  misc_feature (1)..( 7): Matrix.002 file - promoters60/1396951
aaacttc

SEQ ID NO: 49191 - DNA, 6 bp, Unknown
  misc_feature (1)..( 6): Matrix.002 file - promoters60/1396951
agaaga

SEQ ID NO: 49192 - DNA, 6 bp, Unknown
  misc_feature (1)..( 6): Matrix.002 file - promoters60/1396951
aaatgc

SEQ ID NO: 49193 - DNA, 8 bp, Unknown
  misc_feature (1)..( 8): Matrix.002 file - promoters60/1396951
aaaatgta

SEQ ID NO: 49194 - DNA, 7 bp, Unknown
  misc_feature (1)..( 7): Matrix.002 file - promoters60/1396951
acaatta

SEQ ID NO: 49195 - DNA, 8 bp, Unknown
  misc_feature (1)..( 8): Matrix.002 file - promoters60/1396951
tcttcttc

SEQ ID NO: 49196 - DNA, 6 bp, Unknown
  misc_feature (1)..( 6): Matrix.002 file - promoters60/1396951
aaaaat

SEQ ID NO: 49197 - DNA, 8 bp, Unknown
  misc_feature (1)..( 8): Matrix.002 file - promoters60/1396951
attaattt

SEQ ID NO: 49198 - DNA, 8 bp, Unknown
  misc_feature (1)..( 8): Matrix.002 file - promoters60/1396951
gttaggtt

SEQ ID NO: 49199 - DNA, 6 bp, Unknown
  misc_feature (1)..( 6): Matrix.002 file - promoters60/1396951
ttatat

SEQ ID NO: 49200 - DNA, 7 bp, Unknown
  misc_feature (1)..( 7): Matrix.002 file - promoters60/1396951
aaaagta

SEQ ID NO: 49201 - DNA, 7 bp, Unknown
  misc_feature (1)..( 7): Matrix.002 file - promoters60/1396951
gtaatat

SEQ ID NO: 49202 - DNA, 10 bp, Unknown
  misc_feature (1)..( 10): Matrix.002 file - promoters60/1396951
aaaatacaac

SEQ ID NO: 49203 - DNA, 7 bp, Unknown
  misc_feature (1)..( 7): Matrix.002 file - promoters60/1396951
attaaat

SEQ ID NO: 49204 - DNA, 10 bp, Unknown
  misc_feature (1)..( 10): Matrix.002 file - promoters60/1396951
taagaaataa

SEQ ID NO: 49205 - DNA, 6 bp, Unknown
  misc_feature (1)..( 6): Matrix.002 file - promoters60/1396951
aataat

SEQ ID NO: 49206 - DNA, 7 bp, Unknown
  misc_feature (1)..( 7): Matrix.002 file - promoters60/1396951
tttaata

SEQ ID NO: 49207 - DNA, 8 bp, Unknown
  misc_feature (1)..( 8): Matrix.002 file - promoters60/1396951
acttgatt

SEQ ID NO: 49208 - DNA, 11 bp, Unknown
  misc_feature (1)..( 11): Matrix.002 file - promoters60/1396951
ccaaaatcaca

SEQ ID NO: 49209 - DNA, 9 bp, Unknown
  misc_feature (1)..( 9): Matrix.002 file - promoters60/1397029
taatcgttt

SEQ ID NO: 49210 - DNA, 7 bp, Unknown
  misc_feature (1)..( 7): Matrix.002 file - promoters60/1397029
ttttagt

SEQ ID NO: 49211 - DNA, 12 bp, Unknown
  misc_feature (1)..( 12): Matrix.002 file - promoters60/1397029
aacctttatgta

SEQ ID NO: 49212 - DNA, 10 bp, Unknown
  misc_feature (1)..( 10): Matrix.002 file - promoters60/1397029
ttttgatttg

SEQ ID NO: 49213 - DNA, 12 bp, Unknown
  misc_feature (1)..( 12): Matrix.002 file - promoters60/1397029
aacttttaagta

SEQ ID NO: 49214 - DNA, 7 bp, Unknown
  misc_feature (1)..( 7): Matrix.002 file - promoters60/1397033
aacagag

SEQ ID NO: 49215 - DNA, 6 bp, Unknown
  misc_feature (1)..( 6): Matrix.002 file - promoters60/1397033
tttctc

SEQ ID NO: 49216 - DNA, 6 bp, Unknown
  misc_feature (1)..( 6): Matrix.002 file - promoters60/1397033
tttgtc

SEQ ID NO: 49217 - DNA, 7 bp, Unknown
  misc_feature (1)..( 7): Matrix.002 file - promoters60/1397033
agagtca

SEQ ID NO: 49218 - DNA, 7 bp, Unknown
  misc_feature (1)..( 7): Matrix.002 file - promoters60/1397033
aagcaaa

SEQ ID NO: 49219 - DNA, 7 bp, Unknown
  misc_feature (1)..( 7): Matrix.002 file - promoters60/1397033
aaaattc

SEQ ID NO: 49220 - DNA, 11 bp, Unknown
  misc_feature (1)..( 11): Matrix.002 file - promoters60/1397033
atagaaggaca

SEQ ID NO: 49221 - DNA, 8 bp, Unknown
  misc_feature (1)..( 8): Matrix.002 file - promoters60/1397033
atctggaa

SEQ ID NO: 49222 - DNA, 13 bp, Unknown
  misc_feature (1)..( 13): Matrix.002 file - promoters60/1397033
attctcgcacgaa

SEQ ID NO: 49223 - DNA, 6 bp, Unknown
  misc_feature (1)..( 6): Matrix.002 file - promoters60/1397033
ttctct

SEQ ID NO: 49224 - DNA, 6 bp, Unknown
  misc_feature (1)..( 6): Matrix.002 file - promoters60/1397033
aaataa

SEQ ID NO: 49225 - DNA, 7 bp, Unknown
  misc_feature (1)..( 7): Matrix.002 file - promoters60/1397033
atttttt

SEQ ID NO: 49226 - DNA, 6 bp, Unknown
  misc_feature (1)..( 6): Matrix.002 file - promoters60/1397033
ttcatt

SEQ ID NO: 49227 - DNA, 10 bp, Unknown
  misc_feature (1)..( 10): Matrix.002 file - promoters60/1397080
taaaaacaaa

SEQ ID NO: 49228 - DNA, 10 bp, Unknown
  misc_feature (1)..( 10): Matrix.002 file - promoters60/1397080
agaaaaacaa

SEQ ID NO: 49229 - DNA, 12 bp, Unknown
  misc_feature (1)..( 12): Matrix.002 file - promoters60/1397080
aaaaatataaga

SEQ ID NO: 49230 - DNA, 8 bp, Unknown
  misc_feature (1)..( 8): Matrix.002 file - promoters60/1397111
tttgtctt

SEQ ID NO: 49231 - DNA, 8 bp, Unknown
  misc_feature (1)..( 8): Matrix.002 file - promoters60/1397111
aaaatttc

SEQ ID NO: 49232 - DNA, 8 bp, Unknown
  misc_feature (1)..( 8): Matrix.002 file - promoters60/1397111
aataaaaa

SEQ ID NO: 49233 - DNA, 12 bp, Unknown
  misc_feature (1)..( 12): Matrix.002 file - promoters60/1397111
attaagttttat

SEQ ID NO: 49234 - DNA, 11 bp, Unknown
  misc_feature (1)..( 11): Matrix.002 file - promoters60/1397111
tttgatggtta

SEQ ID NO: 49235 - DNA, 8 bp, Unknown
  misc_feature (1)..( 8): Matrix.002 file - promoters60/1397111
ttgtttat

SEQ ID NO: 49236 - DNA, 8 bp, Unknown
  misc_feature (1)..( 8): Matrix.002 file - promoters60/1397125
taaaaaaa

SEQ ID NO: 49237 - DNA, 10 bp, Unknown
  misc_feature (1)..( 10): Matrix.002 file - promoters60/1397125
ccaaaaaaaa

SEQ ID NO: 49238 - DNA, 6 bp, Unknown
  misc_feature (1)..( 6): Matrix.002 file - promoters60/1397130
gagatt

SEQ ID NO: 49239 - DNA, 7 bp, Unknown
  misc_feature (1)..( 7): Matrix.002 file - promoters60/1397130
gagagaa

SEQ ID NO: 49240 - DNA, 6 bp, Unknown
  misc_feature (1)..( 6): Matrix.002 file - promoters60/1397130
tgatct

SEQ ID NO: 49241 - DNA, 10 bp, Unknown
  misc_feature (1)..( 10): Matrix.002 file - promoters60/1397130
aattaagggc

SEQ ID NO: 49242 - DNA, 7 bp, Unknown
  misc_feature (1)..( 7): Matrix.002 file - promoters60/1397130
agcacaa

SEQ ID NO: 49243 - DNA, 6 bp, Unknown
  misc_feature (1)..( 6): Matrix.002 file - promoters60/1397130
ttattt

SEQ ID NO: 49244 - DNA, 7 bp, Unknown
  misc_feature (1)..( 7): Matrix.002 file - promoters60/1397130
aatctaa

SEQ ID NO: 49245 - DNA, 8 bp, Unknown
  misc_feature (1)..( 8): Matrix.002 file - promoters60/1397130
tttccggt

SEQ ID NO: 49246 - DNA, 9 bp, Unknown
  misc_feature (1)..( 9): Matrix.002 file - promoters60/1397130
tatgtggtc

SEQ ID NO: 49247 - DNA, 7 bp, Unknown
  misc_feature (1)..( 7): Matrix.002 file - promoters60/1397130
tataaat

SEQ ID NO: 49248 - DNA, 6 bp, Unknown
  misc_feature (1)..( 6): Matrix.002 file - promoters60/1397130
gaagag

SEQ ID NO: 49249 - DNA, 8 bp, Unknown
  misc_feature (1)..( 8): Matrix.002 file - promoters60/1397130
tccggtgc

SEQ ID NO: 49250 - DNA, 7 bp, Unknown
  misc_feature (1)..( 7): Matrix.002 file - promoters60/1397130
acgaaaa

SEQ ID NO: 49251 - DNA, 6 bp, Unknown
  misc_feature (1)..( 6): Matrix.002 file - promoters60/1397130
agattt

SEQ ID NO: 49252 - DNA, 8 bp, Unknown
  misc_feature (1)..( 8): Matrix.002 file - promoters60/1397130
aaacagaa

SEQ ID NO: 49253 - DNA, 8 bp, Unknown
  misc_feature (1)..( 8): Matrix.002 file - promoters60/1397130
ataatttc

SEQ ID NO: 49254 - DNA, 7 bp, Unknown
  misc_feature (1)..( 7): Matrix.002 file - promoters60/1397178
tttatta

SEQ ID NO: 49255 - DNA, 8 bp, Unknown
  misc_feature (1)..( 8): Matrix.002 file - promoters60/1397178
tttatcta

SEQ ID NO: 49256 - DNA, 6 bp, Unknown
  misc_feature (1)..( 6): Matrix.002 file - promoters60/1397178
attttt

SEQ ID NO: 49257 - DNA, 8 bp, Unknown
  misc_feature (1)..( 8): Matrix.002 file - promoters60/1397178
aaagattt

SEQ ID NO: 49258 - DNA, 8 bp, Unknown
  misc_feature (1)..( 8): Matrix.002 file - promoters60/1397178
ggtatttg

SEQ ID NO: 49259 - DNA, 6 bp, Unknown
  misc_feature (1)..( 6): Matrix.002 file - promoters60/1397178
atgaat

SEQ ID NO: 49260 - DNA, 7 bp, Unknown
  misc_feature (1)..( 7): Matrix.002 file - promoters60/1397178
ttacaat

SEQ ID NO: 49261 - DNA, 9 bp, Unknown
  misc_feature (1)..( 9): Matrix.002 file - promoters60/1397178
aattttaac

SEQ ID NO: 49262 - DNA, 14 bp, Unknown
  misc_feature (1)..( 14): Matrix.002 file - promoters60/1397178
aatttctcccaaaa

SEQ ID NO: 49263 - DNA, 8 bp, Unknown
  misc_feature (1)..( 8): Matrix.002 file - promoters60/1397178
ttaacctt

SEQ ID NO: 49264 - DNA, 13 bp, Unknown
  misc_feature (1)..( 13): Matrix.002 file - promoters60/1397178
ttgaatcaaaatt

SEQ ID NO: 49265 - DNA, 7 bp, Unknown
  misc_feature (1)..( 7): Matrix.002 file - promoters60/1397178
tggattt

SEQ ID NO: 49266 - DNA, 6 bp, Unknown
  misc_feature (1)..( 6): Matrix.002 file - promoters60/1397178
ttggtt

SEQ ID NO: 49267 - DNA, 7 bp, Unknown
  misc_feature (1)..( 7): Matrix.002 file - promoters60/1397178
ctcactc

SEQ ID NO: 49268 - DNA, 15 bp, Unknown
  misc_feature (1)..( 15): Matrix.002 file - promoters60/1397203
gttaacattaaatat

SEQ ID NO: 49269 - DNA, 9 bp, Unknown
  misc_feature (1)..( 9): Matrix.002 file - promoters60/1397203
tataaaaaa

SEQ ID NO: 49270 - DNA, 11 bp, Unknown
  misc_feature (1)..( 11): Matrix.002 file - promoters60/1397203
aaaaaacaata

SEQ ID NO: 49271 - DNA, 14 bp, Unknown
  misc_feature (1)..( 14): Matrix.002 file - promoters60/1397203
ttcataaaatcaat

SEQ ID NO: 49272 - DNA, 7 bp, Unknown
  misc_feature (1)..( 7): Matrix.002 file - promoters60/1397332
aactcag

SEQ ID NO: 49273 - DNA, 6 bp, Unknown
  misc_feature (1)..( 6): Matrix.002 file - promoters60/1397332
tttcga

SEQ ID NO: 49274 - DNA, 7 bp, Unknown
  misc_feature (1)..( 7): Matrix.002 file - promoters60/1397332
caaaaac

SEQ ID NO: 49275 - DNA, 7 bp, Unknown
  misc_feature (1)..( 7): Matrix.002 file - promoters60/1397332
acattgt

SEQ ID NO: 49276 - DNA, 7 bp, Unknown
  misc_feature (1)..( 7): Matrix.002 file - promoters60/1397332
aaaccaa

SEQ ID NO: 49277 - DNA, 11 bp, Unknown
  misc_feature (1)..( 11): Matrix.002 file - promoters60/1397332
ccctctaaacc

SEQ ID NO: 49278 - DNA, 7 bp, Unknown
  misc_feature (1)..( 7): Matrix.002 file - promoters60/1397332
agaagag

SEQ ID NO: 49279 - DNA, 10 bp, Unknown
  misc_feature (1)..( 10): Matrix.002 file - promoters60/1397332
aaagaaaaaa

SEQ ID NO: 49280 - DNA, 6 bp, Unknown
  misc_feature (1)..( 6): Matrix.002 file - promoters60/1397332
gatgtt

SEQ ID NO: 49281 - DNA, 7 bp, Unknown
  misc_feature (1)..( 7): Matrix.002 file - promoters60/1397332
catcact

SEQ ID NO: 49282 - DNA, 9 bp, Unknown
  misc_feature (1)..( 9): Matrix.002 file - promoters60/1397332
tagcattgt

SEQ ID NO: 49283 - DNA, 7 bp, Unknown
  misc_feature (1)..( 7): Matrix.002 file - promoters60/1397332
tagggtt

SEQ ID NO: 49284 - DNA, 9 bp, Unknown
  misc_feature (1)..( 9): Matrix.002 file - promoters60/1397332
tttaattaa

SEQ ID NO: 49285 - DNA, 8 bp, Unknown
  misc_feature (1)..( 8): Matrix.002 file - promoters60/1397332
atttgtta

SEQ ID NO: 49286 - DNA, 6 bp, Unknown
  misc_feature (1)..( 6): Matrix.002 file - promoters60/1397332
gaaccc

SEQ ID NO: 49287 - DNA, 7 bp, Unknown
  misc_feature (1)..( 7): Matrix.002 file - promoters60/1397332
attaata

SEQ ID NO: 49288 - DNA, 13 bp, Unknown
  misc_feature (1)..( 13): Matrix.002 file - promoters60/1397350
gtctcatggattc

SEQ ID NO: 49289 - DNA, 7 bp, Unknown
  misc_feature (1)..( 7): Matrix.002 file - promoters60/1397350
aataaca

SEQ ID NO: 49290 - DNA, 7 bp, Unknown
  misc_feature (1)..( 7): Matrix.002 file - promoters60/1397350
aacaatt

SEQ ID NO: 49291 - DNA, 6 bp, Unknown
  misc_feature (1)..( 6): Matrix.002 file - promoters60/1397350
ttaaac

SEQ ID NO: 49292 - DNA, 7 bp, Unknown
  misc_feature (1)..( 7): Matrix.002 file - promoters60/1397350
aaacatt

SEQ ID NO: 49293 - DNA, 6 bp, Unknown
  misc_feature (1)..( 6): Matrix.002 file - promoters60/1397350
ttaata

SEQ ID NO: 49294 - DNA, 7 bp, Unknown
  misc_feature (1)..( 7): Matrix.002 file - promoters60/1397350
aaaacgt

SEQ ID NO: 49295 - DNA, 7 bp, Unknown
  misc_feature (1)..( 7): Matrix.002 file - promoters60/1397350
taaaatc

SEQ ID NO: 49296 - DNA, 7 bp, Unknown
  misc_feature (1)..( 7): Matrix.002 file - promoters60/1397350
aaaccaa

SEQ ID NO: 49297 - DNA, 6 bp, Unknown
  misc_feature (1)..( 6): Matrix.002 file - promoters60/1397350
aatgaa

SEQ ID NO: 49298 - DNA, 7 bp, Unknown
  misc_feature (1)..( 7): Matrix.002 file - promoters60/1397350
gttaaga

SEQ ID NO: 49299 - DNA, 6 bp, Unknown
  misc_feature (1)..( 6): Matrix.002 file - promoters60/1397350
aaaacc

SEQ ID NO: 49300 - DNA, 7 bp, Unknown
  misc_feature (1)..( 7): Matrix.002 file - promoters60/1397350
ttgcaag

SEQ ID NO: 49301 - DNA, 6 bp, Unknown
  misc_feature (1)..( 6): Matrix.002 file - promoters60/1397350
taaaaa

SEQ ID NO: 49302 - DNA, 7 bp, Unknown
  misc_feature (1)..( 7): Matrix.002 file - promoters60/1397350
aaaaaca

SEQ ID NO: 49303 - DNA, 7 bp, Unknown
  misc_feature (1)..( 7): Matrix.002 file - promoters60/1397350
gaaaaaa

SEQ ID NO: 49304 - DNA, 6 bp, Unknown
  misc_feature (1)..( 6): Matrix.002 file - promoters60/1397350
agtaaa

SEQ ID NO: 49305 - DNA, 7 bp, Unknown
  misc_feature (1)..( 7): Matrix.002 file - promoters60/1397350
aatcggg

SEQ ID NO: 49306 - DNA, 8 bp, Unknown
  misc_feature (1)..( 8): Matrix.002 file - promoters60/1397350
gaaacaaa

SEQ ID NO: 49307 - DNA, 10 bp, Unknown
  misc_feature (1)..( 10): Matrix.002 file - promoters60/1397350
ggaaaagaaa

SEQ ID NO: 49308 - DNA, 7 bp, Unknown
  misc_feature (1)..( 7): Matrix.002 file - promoters60/1397350
cccacta

SEQ ID NO: 49309 - DNA, 9 bp, Unknown
  misc_feature (1)..( 9): Matrix.002 file - promoters60/1397350
aaagaaaag

SEQ ID NO: 49310 - DNA, 7 bp, Unknown
  misc_feature (1)..( 7): Matrix.002 file - promoters60/1397350
gtatata

SEQ ID NO: 49311 - DNA, 8 bp, Unknown
  misc_feature (1)..( 8): Matrix.002 file - promoters60/1397425
tactaagg

SEQ ID NO: 49312 - DNA, 6 bp, Unknown
  misc_feature (1)..( 6): Matrix.002 file - promoters60/1397425
taattt

SEQ ID NO: 49313 - DNA, 8 bp, Unknown
  misc_feature (1)..( 8): Matrix.002 file - promoters60/1397425
atatgtaa

SEQ ID NO: 49314 - DNA, 7 bp, Unknown
  misc_feature (1)..( 7): Matrix.002 file - promoters60/1397425
ttaaaat

SEQ ID NO: 49315 - DNA, 8 bp, Unknown
  misc_feature (1)..( 8): Matrix.002 file - promoters60/1397425
tcataatt

SEQ ID NO: 49316 - DNA, 6 bp, Unknown
  misc_feature (1)..( 6): Matrix.002 file - promoters60/1397425
ttttct

SEQ ID NO: 49317 - DNA, 6 bp, Unknown
  misc_feature (1)..( 6): Matrix.002 file - promoters60/1397425
ttacct

SEQ ID NO: 49318 - DNA, 6 bp, Unknown
  misc_feature (1)..( 6): Matrix.002 file - promoters60/1397425
attgtt

SEQ ID NO: 49319 - DNA, 9 bp, Unknown
  misc_feature (1)..( 9): Matrix.002 file - promoters60/1397500
agtgccaat

SEQ ID NO: 49320 - DNA, 10 bp, Unknown
  misc_feature (1)..( 10): Matrix.002 file - promoters60/1397500
aattttttaa

SEQ ID NO: 49321 - DNA, 9 bp, Unknown
  misc_feature (1)..( 9): Matrix.002 file - promoters60/1397500
acaatcata

SEQ ID NO: 49322 - DNA, 12 bp, Unknown
  misc_feature (1)..( 12): Matrix.002 file - promoters60/1397500
acataaaaattt

SEQ ID NO: 49323 - DNA, 10 bp, Unknown
  misc_feature (1)..( 10): Matrix.002 file - promoters60/1397500
taaatcataa

SEQ ID NO: 49324 - DNA, 6 bp, Unknown
  misc_feature (1)..( 6): Matrix.002 file - promoters60/1397556
attcac

SEQ ID NO: 49325 - DNA, 6 bp, Unknown
  misc_feature (1)..( 6): Matrix.002 file - promoters60/1397556
caaata

SEQ ID NO: 49326 - DNA, 8 bp, Unknown
  misc_feature (1)..( 8): Matrix.002 file - promoters60/1397556
ataacaat

SEQ ID NO: 49327 - DNA, 6 bp, Unknown
  misc_feature (1)..( 6): Matrix.002 file - promoters60/1397556
ctttca

SEQ ID NO: 49328 - DNA, 6 bp, Unknown
  misc_feature (1)..( 6): Matrix.002 file - promoters60/1397556
aataac

SEQ ID NO: 49329 - DNA, 7 bp, Unknown
  misc_feature (1)..( 7): Matrix.002 file - promoters60/1397556
aaacaat

SEQ ID NO: 49330 - DNA, 11 bp, Unknown
  misc_feature (1)..( 11): Matrix.002 file - promoters60/1397556
agttattttgc

SEQ ID NO: 49331 - DNA, 7 bp, Unknown
  misc_feature (1)..( 7): Matrix.002 file - promoters60/1397556
tctgtga

SEQ ID NO: 49332 - DNA, 7 bp, Unknown
  misc_feature (1)..( 7): Matrix.002 file - promoters60/1397556
acgatta

SEQ ID NO: 49333 - DNA, 8 bp, Unknown
  misc_feature (1)..( 8): Matrix.002 file - promoters60/1397556
ataatttt

SEQ ID NO: 49334 - DNA, 8 bp, Unknown
  misc_feature (1)..( 8): Matrix.002 file - promoters60/1397556
ttttctgc

SEQ ID NO: 49335 - DNA, 6 bp, Unknown
  misc_feature (1)..( 6): Matrix.002 file - promoters60/1397556
ctcttc

SEQ ID NO: 49336 - DNA, 8 bp, Unknown
  misc_feature (1)..( 8): Matrix.002 file - promoters60/1397568
caatctaa

SEQ ID NO: 49337 - DNA, 6 bp, Unknown
  misc_feature (1)..( 6): Matrix.002 file - promoters60/1397568
taagtt

SEQ ID NO: 49338 - DNA, 9 bp, Unknown
  misc_feature (1)..( 9): Matrix.002 file - promoters60/1397568
aacaacaat

SEQ ID NO: 49339 - DNA, 6 bp, Unknown
  misc_feature (1)..( 6): Matrix.002 file - promoters60/1397568
caaatt

SEQ ID NO: 49340 - DNA, 7 bp, Unknown
  misc_feature (1)..( 7): Matrix.002 file - promoters60/1397568
atttgaa

SEQ ID NO: 49341 - DNA, 7 bp, Unknown
  misc_feature (1)..( 7): Matrix.002 file - promoters60/1397568
ttcaaat

SEQ ID NO: 49342 - DNA, 7 bp, Unknown
  misc_feature (1)..( 7): Matrix.002 file - promoters60/1397568
ttgagct

SEQ ID NO: 49343 - DNA, 8 bp, Unknown
  misc_feature (1)..( 8): Matrix.002 file - promoters60/1397568
aaaacata

SEQ ID NO: 49344 - DNA, 6 bp, Unknown
  misc_feature (1)..( 6): Matrix.002 file - promoters60/1397568
ataaat

SEQ ID NO: 49345 - DNA, 6 bp, Unknown
  misc_feature (1)..( 6): Matrix.002 file - promoters60/1397568
gatgac

SEQ ID NO: 49346 - DNA, 7 bp, Unknown
  misc_feature (1)..( 7): Matrix.002 file - promoters60/1397568
catttga

SEQ ID NO: 49347 - DNA, 6 bp, Unknown
  misc_feature (1)..( 6): Matrix.002 file - promoters60/1397568
tgacac

SEQ ID NO: 49348 - DNA, 9 bp, Unknown
  misc_feature (1)..( 9): Matrix.002 file - promoters60/1397568
actagattc

SEQ ID NO: 49349 - DNA, 7 bp, Unknown
  misc_feature (1)..( 7): Matrix.002 file - promoters60/1397568
aagccaa

SEQ ID NO: 49350 - DNA, 9 bp, Unknown
  misc_feature (1)..( 9): Matrix.002 file - promoters60/1397568
caagatcaa

SEQ ID NO: 49351 - DNA, 10 bp, Unknown
  misc_feature (1)..( 10): Matrix.002 file - promoters60/1397568
tttcaatttt

SEQ ID NO: 49352 - DNA, 10 bp, Unknown
  misc_feature (1)..( 10): Matrix.002 file - promoters60/1397568
aacttttgat

SEQ ID NO: 49353 - DNA, 6 bp, Unknown
  misc_feature (1)..( 6): Matrix.002 file - promoters60/1397568
tttata

SEQ ID NO: 49354 - DNA, 7 bp, Unknown
  misc_feature (1)..( 7): Matrix.002 file - promoters60/1397568
tttaaaa

SEQ ID NO: 49355 - DNA, 8 bp, Unknown
  misc_feature (1)..( 8): Matrix.002 file - promoters60/1397568
gattcaag

SEQ ID NO: 49356 - DNA, 8 bp, Unknown
  misc_feature (1)..( 8): Matrix.002 file - promoters60/1397568
aatcttct

SEQ ID NO: 49357 - DNA, 7 bp, Unknown
  misc_feature (1)..( 7): Matrix.002 file - promoters60/1397568
tatataa

SEQ ID NO: 49358 - DNA, 10 bp, Unknown
  misc_feature (1)..( 10): Matrix.002 file - promoters60/1397568
atttaacttt

SEQ ID NO: 49359 - DNA, 7 bp, Unknown
  misc_feature (1)..( 7): Matrix.002 file - promoters60/1397568
caaaaat

SEQ ID NO: 49360 - DNA, 9 bp, Unknown
  misc_feature (1)..( 9): Matrix.002 file - promoters60/1397568
tgacaattt

SEQ ID NO: 49361 - DNA, 8 bp, Unknown
  misc_feature (1)..( 8): Matrix.002 file - promoters60/1397568
taaactgt

SEQ ID NO: 49362 - DNA, 9 bp, Unknown
  misc_feature (1)..( 9): Matrix.002 file - promoters60/1397568
gcttattaa

SEQ ID NO: 49363 - DNA, 7 bp, Unknown
  misc_feature (1)..( 7): Matrix.002 file - promoters60/1397590
ttatttt

SEQ ID NO: 49364 - DNA, 6 bp, Unknown
  misc_feature (1)..( 6): Matrix.002 file - promoters60/1397590
taacaa

SEQ ID NO: 49365 - DNA, 8 bp, Unknown
  misc_feature (1)..( 8): Matrix.002 file - promoters60/1397590
atttaaaa

SEQ ID NO: 49366 - DNA, 6 bp, Unknown
  misc_feature (1)..( 6): Matrix.002 file - promoters60/1397590
taatta

SEQ ID NO: 49367 - DNA, 7 bp, Unknown
  misc_feature (1)..( 7): Matrix.002 file - promoters60/1397590
gataata

SEQ ID NO: 49368 - DNA, 7 bp, Unknown
  misc_feature (1)..( 7): Matrix.002 file - promoters60/1397590
ttaaaaa

SEQ ID NO: 49369 - DNA, 6 bp, Unknown
  misc_feature (1)..( 6): Matrix.002 file - promoters60/1397590
aataaa

SEQ ID NO: 49370 - DNA, 12 bp, Unknown
  misc_feature (1)..( 12): Matrix.002 file - promoters60/1397590
ctcctatatatt

SEQ ID NO: 49371 - DNA, 7 bp, Unknown
  misc_feature (1)..( 7): Matrix.002 file - promoters60/1397590
agcacat

SEQ ID NO: 49372 - DNA, 7 bp, Unknown
  misc_feature (1)..( 7): Matrix.002 file - promoters60/1397590
tatatct

SEQ ID NO: 49373 - DNA, 10 bp, Unknown
  misc_feature (1)..( 10): Matrix.002 file - promoters60/1397590
atagtttaac

SEQ ID NO: 49374 - DNA, 7 bp, Unknown
  misc_feature (1)..( 7): Matrix.002 file - promoters60/1397590
aaggaaa

SEQ ID NO: 49375 - DNA, 8 bp, Unknown
  misc_feature (1)..( 8): Matrix.002 file - promoters60/1397590
aactattt

SEQ ID NO: 49376 - DNA, 6 bp, Unknown
  misc_feature (1)..( 6): Matrix.002 file - promoters60/1397590
ttaggc

SEQ ID NO: 49377 - DNA, 12 bp, Unknown
  misc_feature (1)..( 12): Matrix.002 file - promoters60/1397590
ctcctatatatt

SEQ ID NO: 49378 - DNA, 6 bp, Unknown
  misc_feature (1)..( 6): Matrix.002 file - promoters60/1397590
ttttta

SEQ ID NO: 49379 - DNA, 7 bp, Unknown
  misc_feature (1)..( 7): Matrix.002 file - promoters60/1397590
atagatt

SEQ ID NO: 49380 - DNA, 7 bp, Unknown
  misc_feature (1)..( 7): Matrix.002 file - promoters60/1397590
attacca

SEQ ID NO: 49381 - DNA, 10 bp, Unknown
  misc_feature (1)..( 10): Matrix.002 file - promoters60/1397590
aagaaatatg

SEQ ID NO: 49382 - DNA, 7 bp, Unknown
  misc_feature (1)..( 7): Matrix.002 file - promoters60/1397590
ataggaa

SEQ ID NO: 49383 - DNA, 7 bp, Unknown
  misc_feature (1)..( 7): Matrix.002 file - promoters60/1397590
aaaacaa

SEQ ID NO: 49384 - DNA, 12 bp, Unknown
  misc_feature (1)..( 12): Matrix.002 file - promoters60/1397590
aaaagaagaaag

SEQ ID NO: 49385 - DNA, 8 bp, Unknown
  misc_feature (1)..( 8): Matrix.002 file - promoters60/1397594
gaacaatt

SEQ ID NO: 49386 - DNA, 8 bp, Unknown
  misc_feature (1)..( 8): Matrix.002 file - promoters60/1397594
ttgtggaa

SEQ ID NO: 49387 - DNA, 6 bp, Unknown
  misc_feature (1)..( 6): Matrix.002 file - promoters60/1397594
gttctt

SEQ ID NO: 49388 - DNA, 9 bp, Unknown
  misc_feature (1)..( 9): Matrix.002 file - promoters60/1397594
cctcgttgt

SEQ ID NO: 49389 - DNA, 7 bp, Unknown
  misc_feature (1)..( 7): Matrix.002 file - promoters60/1397594
tttcttt

SEQ ID NO: 49390 - DNA, 6 bp, Unknown
  misc_feature (1)..( 6): Matrix.002 file - promoters60/1397594
tcacaa

SEQ ID NO: 49391 - DNA, 6 bp, Unknown
  misc_feature (1)..( 6): Matrix.002 file - promoters60/1397594
ttgcca

SEQ ID NO: 49392 - DNA, 8 bp, Unknown
  misc_feature (1)..( 8): Matrix.002 file - promoters60/1397594
ccaaaatc

SEQ ID NO: 49393 - DNA, 6 bp, Unknown
  misc_feature (1)..( 6): Matrix.002 file - promoters60/1397594
tctttg

SEQ ID NO: 49394 - DNA, 9 bp, Unknown
  misc_feature (1)..( 9): Matrix.002 file - promoters60/1397594
tggattttg

SEQ ID NO: 49395 - DNA, 6 bp, Unknown
  misc_feature (1)..( 6): Matrix.002 file - promoters60/1397594
attctt

SEQ ID NO: 49396 - DNA, 8 bp, Unknown
  misc_feature (1)..( 8): Matrix.002 file - promoters60/1397594
tgtaatcg

SEQ ID NO: 49397 - DNA, 6 bp, Unknown
  misc_feature (1)..( 6): Matrix.002 file - promoters60/1397594
caggag

SEQ ID NO: 49398 - DNA, 6 bp, Unknown
  misc_feature (1)..( 6): Matrix.002 file - promoters60/1397594
tatgtt

SEQ ID NO: 49399 - DNA, 6 bp, Unknown
  misc_feature (1)..( 6): Matrix.002 file - promoters60/1397594
agggaa

SEQ ID NO: 49400 - DNA, 9 bp, Unknown
  misc_feature (1)..( 9): Matrix.002 file - promoters60/1397700
aattgtaat

SEQ ID NO: 49401 - DNA, 10 bp, Unknown
  misc_feature (1)..( 10): Matrix.002 file - promoters60/1397700
aaatttcaaa

SEQ ID NO: 49402 - DNA, 8 bp, Unknown
  misc_feature (1)..( 8): Matrix.002 file - promoters60/1397700
attcaaga

SEQ ID NO: 49403 - DNA, 8 bp, Unknown
  misc_feature (1)..( 8): Matrix.002 file - promoters60/1397700
gaaacaaa

SEQ ID NO: 49404 - DNA, 7 bp, Unknown
  misc_feature (1)..( 7): Matrix.002 file - promoters60/1397700
tttcttg

SEQ ID NO: 49405 - DNA, 8 bp, Unknown
  misc_feature (1)..( 8): Matrix.002 file - promoters60/1397700
attgaaat

SEQ ID NO: 49406 - DNA, 9 bp, Unknown
  misc_feature (1)..( 9): Matrix.002 file - promoters60/1397700
taatatata

SEQ ID NO: 49407 - DNA, 7 bp, Unknown
  misc_feature (1)..( 7): Matrix.002 file - promoters60/1397700
ttctctg

SEQ ID NO: 49408 - DNA, 9 bp, Unknown
  misc_feature (1)..( 9): Matrix.002 file - promoters60/1397700
caattaaat

SEQ ID NO: 49409 - DNA, 7 bp, Unknown
  misc_feature (1)..( 7): Matrix.002 file - promoters60/1397700
gtgtttg

SEQ ID NO: 49410 - DNA, 11 bp, Unknown
  misc_feature (1)..( 11): Matrix.002 file - promoters60/1397700
taaagtcaaaa

SEQ ID NO: 49411 - DNA, 10 bp, Unknown
  misc_feature (1)..( 10): Matrix.002 file - promoters60/1397700
aaagtcaaaa

SEQ ID NO: 49412 - DNA, 9 bp, Unknown
  misc_feature (1)..( 9): Matrix.002 file - promoters60/1397753
aataatttg

SEQ ID NO: 49413 - DNA, 10 bp, Unknown
  misc_feature (1)..( 10): Matrix.002 file - promoters60/1397753
aatattttga

SEQ ID NO: 49414 - DNA, 15 bp, Unknown
  misc_feature (1)..( 15): Matrix.002 file - promoters60/1397753
tttaggattttatta

SEQ ID NO: 49415 - DNA, 13 bp, Unknown
  misc_feature (1)..( 13): Matrix.002 file - promoters60/1397753
atactaaaataat

SEQ ID NO: 49416 - DNA, 10 bp, Unknown
  misc_feature (1)..( 10): Matrix.002 file - promoters60/1397821
gaattgatta

SEQ ID NO: 49417 - DNA, 10 bp, Unknown
  misc_feature (1)..( 10): Matrix.002 file - promoters60/1397821
gtcttttcaa

SEQ ID NO: 49418 - DNA, 11 bp, Unknown
  misc_feature (1)..( 11): Matrix.002 file - promoters60/1397821
acaagtttgat

SEQ ID NO: 49419 - DNA, 9 bp, Unknown
  misc_feature (1)..( 9): Matrix.002 file - promoters60/1397821
aaaacattg

SEQ ID NO: 49420 - DNA, 10 bp, Unknown
  misc_feature (1)..( 10): Matrix.002 file - promoters60/1397867
tatggtttct

SEQ ID NO: 49421 - DNA, 10 bp, Unknown
  misc_feature (1)..( 10): Matrix.002 file - promoters60/1397867
aattcatata

SEQ ID NO: 49422 - DNA, 8 bp, Unknown
  misc_feature (1)..( 8): Matrix.002 file - promoters60/1397898
ttgtgtat

SEQ ID NO: 49423 - DNA, 7 bp, Unknown
  misc_feature (1)..( 7): Matrix.002 file - promoters60/1397898
tgtagtt

SEQ ID NO: 49424 - DNA, 6 bp, Unknown
  misc_feature (1)..( 6): Matrix.002 file - promoters60/1397898
aattct

SEQ ID NO: 49425 - DNA, 6 bp, Unknown
  misc_feature (1)..( 6): Matrix.002 file - promoters60/1397898
tacata

SEQ ID NO: 49426 - DNA, 8 bp, Unknown
  misc_feature (1)..( 8): Matrix.002 file - promoters60/1397898
gaatgatt

SEQ ID NO: 49427 - DNA, 7 bp, Unknown
  misc_feature (1)..( 7): Matrix.002 file - promoters60/1397898
caacgag

SEQ ID NO: 49428 - DNA, 7 bp, Unknown
  misc_feature (1)..( 7): Matrix.002 file - promoters60/1397898
atggttg

SEQ ID NO: 49429 - DNA, 6 bp, Unknown
  misc_feature (1)..( 6): Matrix.002 file - promoters60/1397898
ttgctg

SEQ ID NO: 49430 - DNA, 7 bp, Unknown
  misc_feature (1)..( 7): Matrix.002 file - promoters60/1397898
tttaaca

SEQ ID NO: 49431 - DNA, 11 bp, Unknown
  misc_feature (1)..( 11): Matrix.002 file - promoters60/1397898
tccctttctgc

SEQ ID NO: 49432 - DNA, 9 bp, Unknown
  misc_feature (1)..( 9): Matrix.002 file - promoters60/1397919
aataacaag

SEQ ID NO: 49433 - DNA, 8 bp, Unknown
  misc_feature (1)..( 8): Matrix.002 file - promoters60/1397923
cttttttt

SEQ ID NO: 49434 - DNA, 8 bp, Unknown
  misc_feature (1)..( 8): Matrix.002 file - promoters60/1397923
tttataaa

SEQ ID NO: 49435 - DNA, 8 bp, Unknown
  misc_feature (1)..( 8): Matrix.002 file - promoters60/1397923
aaaatttt

SEQ ID NO: 49436 - DNA, 16 bp, Unknown
  misc_feature (1)..( 16): Matrix.002 file - promoters60/1397923
taacaaaaatgacatt

SEQ ID NO: 49437 - DNA, 7 bp, Unknown
  misc_feature (1)..( 7): Matrix.002 file - promoters60/1397923
aaaaaaa

SEQ ID NO: 49438 - DNA, 9 bp, Unknown
  misc_feature (1)..( 9): Matrix.002 file - promoters60/1397923
attttgttt

SEQ ID NO: 49439 - DNA, 9 bp, Unknown
  misc_feature (1)..( 9): Matrix.002 file - promoters60/1397923
aaacaaaaa

SEQ ID NO: 49440 - DNA, 9 bp, Unknown
  misc_feature (1)..( 9): Matrix.002 file - promoters60/1397923
tttaattat

SEQ ID NO: 49441 - DNA, 13 bp, Unknown
  misc_feature (1)..( 13): Matrix.002 file - promoters60/1397923
aaaaatttgtaaa

SEQ ID NO: 49442 - DNA, 11 bp, Unknown
  misc_feature (1)..( 11): Matrix.002 file - promoters60/1397923
aaatttgaaaa

SEQ ID NO: 49443 - DNA, 7 bp, Unknown
  misc_feature (1)..( 7): Matrix.002 file - promoters60/1397923
attttac

SEQ ID NO: 49444 - DNA, 8 bp, Unknown
  misc_feature (1)..( 8): Matrix.002 file - promoters60/1398081
ttatatca

SEQ ID NO: 49445 - DNA, 8 bp, Unknown
  misc_feature (1)..( 8): Matrix.002 file - promoters60/1398081
agataagt

SEQ ID NO: 49446 - DNA, 6 bp, Unknown
  misc_feature (1)..( 6): Matrix.002 file - promoters60/1398081
agtaaa

SEQ ID NO: 49447 - DNA, 13 bp, Unknown
  misc_feature (1)..( 13): Matrix.002 file - promoters60/1398081
caataaaatttgg

SEQ ID NO: 49448 - DNA, 13 bp, Unknown
  misc_feature (1)..( 13): Matrix.002 file - promoters60/1398081
ataggatatcttt

SEQ ID NO: 49449 - DNA, 9 bp, Unknown
  misc_feature (1)..( 9): Matrix.002 file - promoters60/1398081
ttaaataaa

SEQ ID NO: 49450 - DNA, 9 bp, Unknown
  misc_feature (1)..( 9): Matrix.002 file - promoters60/1398114
caaagaatt

SEQ ID NO: 49451 - DNA, 9 bp, Unknown
  misc_feature (1)..( 9): Matrix.002 file - promoters60/1398114
aaataactt

SEQ ID NO: 49452 - DNA, 14 bp, Unknown
  misc_feature (1)..( 14): Matrix.002 file - promoters60/1398114
tcagtggaaattat

SEQ ID NO: 49453 - DNA, 8 bp, Unknown
  misc_feature (1)..( 8): Matrix.002 file - promoters60/1398114
caaaacaa

SEQ ID NO: 49454 - DNA, 8 bp, Unknown
  misc_feature (1)..( 8): Matrix.002 file - promoters60/1398124
caaatatt

SEQ ID NO: 49455 - DNA, 10 bp, Unknown
  misc_feature (1)..( 10): Matrix.002 file - promoters60/1398124
acttatttta

SEQ ID NO: 49456 - DNA, 11 bp, Unknown
  misc_feature (1)..( 11): Matrix.002 file - promoters60/1398124
ttaagtagatt

SEQ ID NO: 49457 - DNA, 7 bp, Unknown
  misc_feature (1)..( 7): Matrix.002 file - promoters60/1398270
cgaattt

SEQ ID NO: 49458 - DNA, 7 bp, Unknown
  misc_feature (1)..( 7): Matrix.002 file - promoters60/1398270
tgcaaac

SEQ ID NO: 49459 - DNA, 9 bp, Unknown
  misc_feature (1)..( 9): Matrix.002 file - promoters60/1398270
tagaacgga

SEQ ID NO: 49460 - DNA, 7 bp, Unknown
  misc_feature (1)..( 7): Matrix.002 file - promoters60/1398270
aaacgat

SEQ ID NO: 49461 - DNA, 6 bp, Unknown
  misc_feature (1)..( 6): Matrix.002 file - promoters60/1398270
aaagag

SEQ ID NO: 49462 - DNA, 6 bp, Unknown
  misc_feature (1)..( 6): Matrix.002 file - promoters60/1398270
ctcagt

SEQ ID NO: 49463 - DNA, 6 bp, Unknown
  misc_feature (1)..( 6): Matrix.002 file - promoters60/1398270
ttttgt

SEQ ID NO: 49464 - DNA, 6 bp, Unknown
  misc_feature (1)..( 6): Matrix.002 file - promoters60/1398270
taacta

SEQ ID NO: 49465 - DNA, 6 bp, Unknown
  misc_feature (1)..( 6): Matrix.002 file - promoters60/1398270
tgactc

SEQ ID NO: 49466 - DNA, 7 bp, Unknown
  misc_feature (1)..( 7): Matrix.002 file - promoters60/1398270
aaaccaa

SEQ ID NO: 49467 - DNA, 6 bp, Unknown
  misc_feature (1)..( 6): Matrix.002 file - promoters60/1398270
gaaaaa

SEQ ID NO: 49468 - DNA, 9 bp, Unknown
  misc_feature (1)..( 9): Matrix.002 file - promoters60/1398270
agataataa

SEQ ID NO: 49469 - DNA, 7 bp, Unknown
  misc_feature (1)..( 7): Matrix.002 file - promoters60/1398270
ttaataa

SEQ ID NO: 49470 - DNA, 7 bp, Unknown
  misc_feature (1)..( 7): Matrix.002 file - promoters60/1398270
ttccaaa

SEQ ID NO: 49471 - DNA, 6 bp, Unknown
  misc_feature (1)..( 6): Matrix.002 file - promoters60/1398270
ccaaac

SEQ ID NO: 49472 - DNA, 6 bp, Unknown
  misc_feature (1)..( 6): Matrix.002 file - promoters60/1398270
ggtttt

SEQ ID NO: 49473 - DNA, 6 bp, Unknown
  misc_feature (1)..( 6): Matrix.002 file - promoters60/1398270
ttaatt

SEQ ID NO: 49474 - DNA, 8 bp, Unknown
  misc_feature (1)..( 8): Matrix.002 file - promoters60/1398270
gttagtat

SEQ ID NO: 49475 - DNA, 6 bp, Unknown
  misc_feature (1)..( 6): Matrix.002 file - promoters60/1398270
ttggcg

SEQ ID NO: 49476 - DNA, 7 bp, Unknown
  misc_feature (1)..( 7): Matrix.002 file - promoters60/1398270
atattta

SEQ ID NO: 49477 - DNA, 7 bp, Unknown
  misc_feature (1)..( 7): Matrix.002 file - promoters60/1398328
acgaagc

SEQ ID NO: 49478 - DNA, 7 bp, Unknown
  misc_feature (1)..( 7): Matrix.002 file - promoters60/1398328
caatttt

SEQ ID NO: 49479 - DNA, 6 bp, Unknown
  misc_feature (1)..( 6): Matrix.002 file - promoters60/1398328
gaaaaa

SEQ ID NO: 49480 - DNA, 6 bp, Unknown
  misc_feature (1)..( 6): Matrix.002 file - promoters60/1398328
taataa

SEQ ID NO: 49481 - DNA, 9 bp, Unknown
  misc_feature (1)..( 9): Matrix.002 file - promoters60/1398328
agaacccta

SEQ ID NO: 49482 - DNA, 6 bp, Unknown
  misc_feature (1)..( 6): Matrix.002 file - promoters60/1398328
attgag

SEQ ID NO: 49483 - DNA, 7 bp, Unknown
  misc_feature (1)..( 7): Matrix.002 file - promoters60/1398328
gataatt

SEQ ID NO: 49484 - DNA, 6 bp, Unknown
  misc_feature (1)..( 6): Matrix.002 file - promoters60/1398328
tccttg

SEQ ID NO: 49485 - DNA, 6 bp, Unknown
  misc_feature (1)..( 6): Matrix.002 file - promoters60/1398328
aattaa

SEQ ID NO: 49486 - DNA, 7 bp, Unknown
  misc_feature (1)..( 7): Matrix.002 file - promoters60/1398328
gataaca

SEQ ID NO: 49487 - DNA, 7 bp, Unknown
  misc_feature (1)..( 7): Matrix.002 file - promoters60/1398328
ttagttc

SEQ ID NO: 49488 - DNA, 6 bp, Unknown
  misc_feature (1)..( 6): Matrix.002 file - promoters60/1398328
ttatat

SEQ ID NO: 49489 - DNA, 7 bp, Unknown
  misc_feature (1)..( 7): Matrix.002 file - promoters60/1398328
aaaaatt

SEQ ID NO: 49490 - DNA, 9 bp, Unknown
  misc_feature (1)..( 9): Matrix.002 file - promoters60/1398328
ttgtataaa

SEQ ID NO: 49491 - DNA, 7 bp, Unknown
  misc_feature (1)..( 7): Matrix.002 file - promoters60/1398328
aatcgag

SEQ ID NO: 49492 - DNA, 6 bp, Unknown
  misc_feature (1)..( 6): Matrix.002 file - promoters60/1398337
taaaga

SEQ ID NO: 49493 - DNA, 7 bp, Unknown
  misc_feature (1)..( 7): Matrix.002 file - promoters60/1398337
attgttg

SEQ ID NO: 49494 - DNA, 6 bp, Unknown
  misc_feature (1)..( 6): Matrix.002 file - promoters60/1398337
agagag

SEQ ID NO: 49495 - DNA, 8 bp, Unknown
  misc_feature (1)..( 8): Matrix.002 file - promoters60/1398337
ttttaatt

SEQ ID NO: 49496 - DNA, 11 bp, Unknown
  misc_feature (1)..( 11): Matrix.002 file - promoters60/1398337
gaaacaaaaac

SEQ ID NO: 49497 - DNA, 6 bp, Unknown
  misc_feature (1)..( 6): Matrix.002 file - promoters60/1398337
aaccaa

SEQ ID NO: 49498 - DNA, 7 bp, Unknown
  misc_feature (1)..( 7): Matrix.002 file - promoters60/1398337
ttgactc

SEQ ID NO: 49499 - DNA, 6 bp, Unknown
  misc_feature (1)..( 6): Matrix.002 file - promoters60/1398337
aaagaa

SEQ ID NO: 49500 - DNA, 6 bp, Unknown
  misc_feature (1)..( 6): Matrix.002 file - promoters60/1398337
taattg

SEQ ID NO: 49501 - DNA, 6 bp, Unknown
  misc_feature (1)..( 6): Matrix.002 file - promoters60/1398337
aataaa

SEQ ID NO: 49502 - DNA, 6 bp, Unknown
  misc_feature (1)..( 6): Matrix.002 file - promoters60/1398337
agtaaa

SEQ ID NO: 49503 - DNA, 7 bp, Unknown
  misc_feature (1)..( 7): Matrix.002 file - promoters60/1398337
aatcggg

SEQ ID NO: 49504 - DNA, 10 bp, Unknown
  misc_feature (1)..( 10): Matrix.002 file - promoters60/1398337
ggaaaagaaa

SEQ ID NO: 49505 - DNA, 7 bp, Unknown
  misc_feature (1)..( 7): Matrix.002 file - promoters60/1398337
cccacta

SEQ ID NO: 49506 - DNA, 9 bp, Unknown
  misc_feature (1)..( 9): Matrix.002 file - promoters60/1398337
aaagaaaag

SEQ ID NO: 49507 - DNA, 7 bp, Unknown
  misc_feature (1)..( 7): Matrix.002 file - promoters60/1398337
gtatata

SEQ ID NO: 49508 - DNA, 8 bp, Unknown
  misc_feature (1)..( 8): Matrix.002 file - promoters60/1398345
gattggta

SEQ ID NO: 49509 - DNA, 8 bp, Unknown
  misc_feature (1)..( 8): Matrix.002 file - promoters60/1398345
aaaaatat

SEQ ID NO: 49510 - DNA, 6 bp, Unknown
  misc_feature (1)..( 6): Matrix.002 file - promoters60/1398345
tcatca

SEQ ID NO: 49511 - DNA, 7 bp, Unknown
  misc_feature (1)..( 7): Matrix.002 file - promoters60/1398345
cacccct

SEQ ID NO: 49512 - DNA, 7 bp, Unknown
  misc_feature (1)..( 7): Matrix.002 file - promoters60/1398345
ctataaa

SEQ ID NO: 49513 - DNA, 6 bp, Unknown
  misc_feature (1)..( 6): Matrix.002 file - promoters60/1398345
cggttt

SEQ ID NO: 49514 - DNA, 7 bp, Unknown
  misc_feature (1)..( 7): Matrix.002 file - promoters60/1398345
tttaagc

SEQ ID NO: 49515 - DNA, 6 bp, Unknown
  misc_feature (1)..( 6): Matrix.002 file - promoters60/1398345
gtttgg

SEQ ID NO: 49516 - DNA, 6 bp, Unknown
  misc_feature (1)..( 6): Matrix.002 file - promoters60/1398345
aagaaa

SEQ ID NO: 49517 - DNA, 10 bp, Unknown
  misc_feature (1)..( 10): Matrix.002 file - promoters60/1398401
tcatatgcat

SEQ ID NO: 49518 - DNA, 10 bp, Unknown
  misc_feature (1)..( 10): Matrix.002 file - promoters60/1398401
gtaaaatacg

SEQ ID NO: 49519 - DNA, 7 bp, Unknown
  misc_feature (1)..( 7): Matrix.002 file - promoters60/1398401
agaaagt

SEQ ID NO: 49520 - DNA, 8 bp, Unknown
  misc_feature (1)..( 8): Matrix.002 file - promoters60/1398401
atttgtat

SEQ ID NO: 49521 - DNA, 9 bp, Unknown
  misc_feature (1)..( 9): Matrix.002 file - promoters60/1398401
aggtacttt

SEQ ID NO: 49522 - DNA, 9 bp, Unknown
  misc_feature (1)..( 9): Matrix.002 file - promoters60/1398401
gaaatagtt

SEQ ID NO: 49523 - DNA, 9 bp, Unknown
  misc_feature (1)..( 9): Matrix.002 file - promoters60/1398401
ttaagaaga

SEQ ID NO: 49524 - DNA, 13 bp, Unknown
  misc_feature (1)..( 13): Matrix.002 file - promoters60/1398444
aaaaaaaataact

SEQ ID NO: 49525 - DNA, 9 bp, Unknown
  misc_feature (1)..( 9): Matrix.002 file - promoters60/1398444
attgaagct

SEQ ID NO: 49526 - DNA, 14 bp, Unknown
  misc_feature (1)..( 14): Matrix.002 file - promoters60/1398444
aatttaaaaaacaa

SEQ ID NO: 49527 - DNA, 7 bp, Unknown
  misc_feature (1)..( 7): Matrix.002 file - promoters60/1398444
ggattga

SEQ ID NO: 49528 - DNA, 7 bp, Unknown
  misc_feature (1)..( 7): Matrix.002 file - promoters60/1398444
tatgatt

SEQ ID NO: 49529 - DNA, 11 bp, Unknown
  misc_feature (1)..( 11): Matrix.002 file - promoters60/1398444
aaactataaat

SEQ ID NO: 49530 - DNA, 10 bp, Unknown
  misc_feature (1)..( 10): Matrix.002 file - promoters60/1398444
gattaaaatg

SEQ ID NO: 49531 - DNA, 8 bp, Unknown
  misc_feature (1)..( 8): Matrix.002 file - promoters60/1398444
tctaattt

SEQ ID NO: 49532 - DNA, 9 bp, Unknown
  misc_feature (1)..( 9): Matrix.002 file - promoters60/1398444
gaaacaaag

SEQ ID NO: 49533 - DNA, 8 bp, Unknown
  misc_feature (1)..( 8): Matrix.002 file - promoters60/1398558
ttatataa

SEQ ID NO: 49534 - DNA, 12 bp, Unknown
  misc_feature (1)..( 12): Matrix.002 file - promoters60/1398558
tgaaaaagtaat

SEQ ID NO: 49535 - DNA, 7 bp, Unknown
  misc_feature (1)..( 7): Matrix.002 file - promoters60/1398558
tatttaa

SEQ ID NO: 49536 - DNA, 11 bp, Unknown
  misc_feature (1)..( 11): Matrix.002 file - promoters60/1398565
tttgtatttta

SEQ ID NO: 49537 - DNA, 7 bp, Unknown
  misc_feature (1)..( 7): Matrix.002 file - promoters60/1398565
tatgtaa

SEQ ID NO: 49538 - DNA, 7 bp, Unknown
  misc_feature (1)..( 7): Matrix.002 file - promoters60/1398565
ttacttg

SEQ ID NO: 49539 - DNA, 7 bp, Unknown
  misc_feature (1)..( 7): Matrix.002 file - promoters60/1398565
tctaatt

SEQ ID NO: 49540 - DNA, 8 bp, Unknown
  misc_feature (1)..( 8): Matrix.002 file - promoters60/1398565
acaaacca

SEQ ID NO: 49541 - DNA, 7 bp, Unknown
  misc_feature (1)..( 7): Matrix.002 file - promoters60/1398565
aagcata

SEQ ID NO: 49542 - DNA, 13 bp, Unknown
  misc_feature (1)..( 13): Matrix.002 file - promoters60/1398565
aatataaaaatat

SEQ ID NO: 49543 - DNA, 7 bp, Unknown
  misc_feature (1)..( 7): Matrix.002 file - promoters60/1398565
tttcaaa

SEQ ID NO: 49544 - DNA, 8 bp, Unknown
  misc_feature (1)..( 8): Matrix.002 file - promoters60/1398565
atatatat

SEQ ID NO: 49545 - DNA, 7 bp, Unknown
  misc_feature (1)..( 7): Matrix.002 file - promoters60/1398565
aagaaaa

SEQ ID NO: 49546 - DNA, 6 bp, Unknown
  misc_feature (1)..( 6): Matrix.002 file - promoters60/1398565
caaaaa

SEQ ID NO: 49547 - DNA, 7 bp, Unknown
  misc_feature (1)..( 7): Matrix.002 file - promoters60/1398565
aaacaaa

SEQ ID NO: 49548 - DNA, 6 bp, Unknown
  misc_feature (1)..( 6): Matrix.002 file - promoters60/1398565
aatata

SEQ ID NO: 49549 - DNA, 7 bp, Unknown
  misc_feature (1)..( 7): Matrix.002 file - promoters60/1398565
aataaat

SEQ ID NO: 49550 - DNA, 6 bp, Unknown
  misc_feature (1)..( 6): Matrix.002 file - promoters60/1398565
gataga

SEQ ID NO: 49551 - DNA, 7 bp, Unknown
  misc_feature (1)..( 7): Matrix.002 file - promoters60/1398565
aaactca

SEQ ID NO: 49552 - DNA, 9 bp, Unknown
  misc_feature (1)..( 9): Matrix.002 file - promoters60/1398704
accgttcat

SEQ ID NO: 49553 - DNA, 6 bp, Unknown
  misc_feature (1)..( 6): Matrix.002 file - promoters60/1398704
tatatc

SEQ ID NO: 49554 - DNA, 7 bp, Unknown
  misc_feature (1)..( 7): Matrix.002 file - promoters60/1398704
ttagtgt

SEQ ID NO: 49555 - DNA, 7 bp, Unknown
  misc_feature (1)..( 7): Matrix.002 file - promoters60/1398704
tttccta

SEQ ID NO: 49556 - DNA, 6 bp, Unknown
  misc_feature (1)..( 6): Matrix.002 file - promoters60/1398704
gtcttc

SEQ ID NO: 49557 - DNA, 7 bp, Unknown
  misc_feature (1)..( 7): Matrix.002 file - promoters60/1398704
catacaa

SEQ ID NO: 49558 - DNA, 7 bp, Unknown
  misc_feature (1)..( 7): Matrix.002 file - promoters60/1398704
caaaaca

SEQ ID NO: 49559 - DNA, 7 bp, Unknown
  misc_feature (1)..( 7): Matrix.002 file - promoters60/1398704
aacacga

SEQ ID NO: 49560 - DNA, 7 bp, Unknown
  misc_feature (1)..( 7): Matrix.002 file - promoters60/1398704
ttcttct

SEQ ID NO: 49561 - DNA, 7 bp, Unknown
  misc_feature (1)..( 7): Matrix.002 file - promoters60/1398704
ccaatag

SEQ ID NO: 49562 - DNA, 6 bp, Unknown
  misc_feature (1)..( 6): Matrix.002 file - promoters60/1398704
tttttg

SEQ ID NO: 49563 - DNA, 11 bp, Unknown
  misc_feature (1)..( 11): Matrix.002 file - promoters60/1398704
attgttgtttt

SEQ ID NO: 49564 - DNA, 7 bp, Unknown
  misc_feature (1)..( 7): Matrix.002 file - promoters60/1398704
aaaaaag

SEQ ID NO: 49565 - DNA, 7 bp, Unknown
  misc_feature (1)..( 7): Matrix.002 file - promoters60/1398704
acaaaat

SEQ ID NO: 49566 - DNA, 8 bp, Unknown
  misc_feature (1)..( 8): Matrix.002 file - promoters60/1398704
aattttgg

SEQ ID NO: 49567 - DNA, 8 bp, Unknown
  misc_feature (1)..( 8): Matrix.002 file - promoters60/1398737
ttagattt

SEQ ID NO: 49568 - DNA, 10 bp, Unknown
  misc_feature (1)..( 10): Matrix.002 file - promoters60/1398737
ctataaaaag

SEQ ID NO: 49569 - DNA, 11 bp, Unknown
  misc_feature (1)..( 11): Matrix.002 file - promoters60/1398737
gccaataaaaa

SEQ ID NO: 49570 - DNA, 10 bp, Unknown
  misc_feature (1)..( 10): Matrix.002 file - promoters60/1398737
ccaaatttaa

SEQ ID NO: 49571 - DNA, 11 bp, Unknown
  misc_feature (1)..( 11): Matrix.002 file - promoters60/1398737
tttatagaaaa

SEQ ID NO: 49572 - DNA, 9 bp, Unknown
  misc_feature (1)..( 9): Matrix.002 file - promoters60/1398737
gattagttt

SEQ ID NO: 49573 - DNA, 8 bp, Unknown
  misc_feature (1)..( 8): Matrix.002 file - promoters60/1398784
aattaagt

SEQ ID NO: 49574 - DNA, 7 bp, Unknown
  misc_feature (1)..( 7): Matrix.002 file - promoters60/1398784
gaaacaa

SEQ ID NO: 49575 - DNA, 10 bp, Unknown
  misc_feature (1)..( 10): Matrix.002 file - promoters60/1398784
gaaaattaaa

SEQ ID NO: 49576 - DNA, 8 bp, Unknown
  misc_feature (1)..( 8): Matrix.002 file - promoters60/1398784
aaatcaat

SEQ ID NO: 49577 - DNA, 7 bp, Unknown
  misc_feature (1)..( 7): Matrix.002 file - promoters60/1398784
aaaattt

SEQ ID NO: 49578 - DNA, 9 bp, Unknown
  misc_feature (1)..( 9): Matrix.002 file - promoters60/1398784
aagaaaaaa

SEQ ID NO: 49579 - DNA, 6 bp, Unknown
  misc_feature (1)..( 6): Matrix.002 file - promoters60/1398784
tttttc

SEQ ID NO: 49580 - DNA, 6 bp, Unknown
  misc_feature (1)..( 6): Matrix.002 file - promoters60/1398784
ggaaat

SEQ ID NO: 49581 - DNA, 7 bp, Unknown
  misc_feature (1)..( 7): Matrix.002 file - promoters60/1398784
ataaaat

SEQ ID NO: 49582 - DNA, 6 bp, Unknown
  misc_feature (1)..( 6): Matrix.002 file - promoters60/1398784
ttaaga

SEQ ID NO: 49583 - DNA, 7 bp, Unknown
  misc_feature (1)..( 7): Matrix.002 file - promoters60/1398784
aaaattg

SEQ ID NO: 49584 - DNA, 6 bp, Unknown
  misc_feature (1)..( 6): Matrix.002 file - promoters60/1398784
ccaatt

SEQ ID NO: 49585 - DNA, 7 bp, Unknown
  misc_feature (1)..( 7): Matrix.002 file - promoters60/1398784
ttgaaat

SEQ ID NO: 49586 - DNA, 6 bp, Unknown
  misc_feature (1)..( 6): Matrix.002 file - promoters60/1398784
aatccg

SEQ ID NO: 49587 - DNA, 6 bp, Unknown
  misc_feature (1)..( 6): Matrix.002 file - promoters60/1398784
agaagt

SEQ ID NO: 49588 - DNA, 6 bp, Unknown
  misc_feature (1)..( 6): Matrix.002 file - promoters60/1398784
aaatga

SEQ ID NO: 49589 - DNA, 6 bp, Unknown
  misc_feature (1)..( 6): Matrix.002 file - promoters60/1398784
taaaaa

SEQ ID NO: 49590 - DNA, 6 bp, Unknown
  misc_feature (1)..( 6): Matrix.002 file - promoters60/1398784
aaaatt

SEQ ID NO: 49591 - DNA, 8 bp, Unknown
  misc_feature (1)..( 8): Matrix.002 file - promoters60/1398784
tttcaaat

SEQ ID NO: 49592 - DNA, 6 bp, Unknown
  misc_feature (1)..( 6): Matrix.002 file - promoters60/1398784
ttttcc

SEQ ID NO: 49593 - DNA, 6 bp, Unknown
  misc_feature (1)..( 6): Matrix.002 file - promoters60/1398799
tgttct

SEQ ID NO: 49594 - DNA, 7 bp, Unknown
  misc_feature (1)..( 7): Matrix.002 file - promoters60/1398799
agatata

SEQ ID NO: 49595 - DNA, 11 bp, Unknown
  misc_feature (1)..( 11): Matrix.002 file - promoters60/1398799
ataaacaagaa

SEQ ID NO: 49596 - DNA, 10 bp, Unknown
  misc_feature (1)..( 10): Matrix.002 file - promoters60/1398799
gagtcatttg

SEQ ID NO: 49597 - DNA, 8 bp, Unknown
  misc_feature (1)..( 8): Matrix.002 file - promoters60/1398799
attactac

SEQ ID NO: 49598 - DNA, 6 bp, Unknown
  misc_feature (1)..( 6): Matrix.002 file - promoters60/1398799
acataa

SEQ ID NO: 49599 - DNA, 9 bp, Unknown
  misc_feature (1)..( 9): Matrix.002 file - promoters60/1398799
ataaatacc

SEQ ID NO: 49600 - DNA, 7 bp, Unknown
  misc_feature (1)..( 7): Matrix.002 file - promoters60/1398799
gctgctg

SEQ ID NO: 49601 - DNA, 9 bp, Unknown
  misc_feature (1)..( 9): Matrix.002 file - promoters60/1398799
tttaactct

SEQ ID NO: 49602 - DNA, 8 bp, Unknown
  misc_feature (1)..( 8): Matrix.002 file - promoters60/1398799
gtctacga

SEQ ID NO: 49603 - DNA, 8 bp, Unknown
  misc_feature (1)..( 8): Matrix.002 file - promoters60/1398799
aatcaagt

SEQ ID NO: 49604 - DNA, 9 bp, Unknown
  misc_feature (1)..( 9): Matrix.002 file - promoters60/1398799
tgggcccat

SEQ ID NO: 49605 - DNA, 7 bp, Unknown
  misc_feature (1)..( 7): Matrix.002 file - promoters60/1398799
cctctgt

SEQ ID NO: 49606 - DNA, 8 bp, Unknown
  misc_feature (1)..( 8): Matrix.002 file - promoters60/1398799
accctttt

SEQ ID NO: 49607 - DNA, 7 bp, Unknown
  misc_feature (1)..( 7): Matrix.002 file - promoters60/1398799
gttatga

SEQ ID NO: 49608 - DNA, 8 bp, Unknown
  misc_feature (1)..( 8): Matrix.002 file - promoters60/1398799
cttcatta

SEQ ID NO: 49609 - DNA, 6 bp, Unknown
  misc_feature (1)..( 6): Matrix.002 file - promoters60/1398846
tttact

SEQ ID NO: 49610 - DNA, 6 bp, Unknown
  misc_feature (1)..( 6): Matrix.002 file - promoters60/1398846
gtttct

SEQ ID NO: 49611 - DNA, 7 bp, Unknown
  misc_feature (1)..( 7): Matrix.002 file - promoters60/1398846
tttgtta

SEQ ID NO: 49612 - DNA, 7 bp, Unknown
  misc_feature (1)..( 7): Matrix.002 file - promoters60/1398846
tatacca

SEQ ID NO: 49613 - DNA, 6 bp, Unknown
  misc_feature (1)..( 6): Matrix.002 file - promoters60/1398846
tcctat

SEQ ID NO: 49614 - DNA, 6 bp, Unknown
  misc_feature (1)..( 6): Matrix.002 file - promoters60/1398846
aaaaat

SEQ ID NO: 49615 - DNA, 6 bp, Unknown
  misc_feature (1)..( 6): Matrix.002 file - promoters60/1398846
taaact

SEQ ID NO: 49616 - DNA, 6 bp, Unknown
  misc_feature (1)..( 6): Matrix.002 file - promoters60/1398846
attaat

SEQ ID NO: 49617 - DNA, 9 bp, Unknown
  misc_feature (1)..( 9): Matrix.002 file - promoters60/1398846
ttaattaaa

SEQ ID NO: 49618 - DNA, 11 bp, Unknown
  misc_feature (1)..( 11): Matrix.002 file - promoters60/1398846
atatatataaa

SEQ ID NO: 49619 - DNA, 6 bp, Unknown
  misc_feature (1)..( 6): Matrix.002 file - promoters60/1398846
ttatta

SEQ ID NO: 49620 - DNA, 7 bp, Unknown
  misc_feature (1)..( 7): Matrix.002 file - promoters60/1398846
tctaatt

SEQ ID NO: 49621 - DNA, 7 bp, Unknown
  misc_feature (1)..( 7): Matrix.002 file - promoters60/1398846
aaaaaaa

SEQ ID NO: 49622 - DNA, 7 bp, Unknown
  misc_feature (1)..( 7): Matrix.002 file - promoters60/1398846
ctaaccc

SEQ ID NO: 49623 - DNA, 6 bp, Unknown
  misc_feature (1)..( 6): Matrix.002 file - promoters60/1398846
tcaccc

SEQ ID NO: 49624 - DNA, 6 bp, Unknown
  misc_feature (1)..( 6): Matrix.002 file - promoters60/1398846
attaaa

SEQ ID NO: 49625 - DNA, 6 bp, Unknown
  misc_feature (1)..( 6): Matrix.002 file - promoters60/1398846
gaaaaa

SEQ ID NO: 49626 - DNA, 8 bp, Unknown
  misc_feature (1)..( 8): Matrix.002 file - promoters60/1398846
ttagctta

SEQ ID NO: 49627 - DNA, 6 bp, Unknown
  misc_feature (1)..( 6): Matrix.002 file - promoters60/1398846
ttttca

SEQ ID NO: 49628 - DNA, 7 bp, Unknown
  misc_feature (1)..( 7): Matrix.002 file - promoters60/1398846
aagaaac

SEQ ID NO: 49629 - DNA, 14 bp, Unknown
  misc_feature (1)..( 14): Matrix.002 file - promoters60/1399037
aatatttgaactaa

SEQ ID NO: 49630 - DNA, 8 bp, Unknown
  misc_feature (1)..( 8): Matrix.002 file - promoters60/1399074
agtaaaga

SEQ ID NO: 49631 - DNA, 7 bp, Unknown
  misc_feature (1)..( 7): Matrix.002 file - promoters60/1399074
ttggaac

SEQ ID NO: 49632 - DNA, 10 bp, Unknown
  misc_feature (1)..( 10): Matrix.002 file - promoters60/1399074
gaaagaaagc

SEQ ID NO: 49633 - DNA, 10 bp, Unknown
  misc_feature (1)..( 10): Matrix.002 file - promoters60/1399074
ggaaaagaaa

SEQ ID NO: 49634 - DNA, 6 bp, Unknown
  misc_feature (1)..( 6): Matrix.002 file - promoters60/1399074
agggaa

SEQ ID NO: 49635 - DNA, 6 bp, Unknown
  misc_feature (1)..( 6): Matrix.002 file - promoters60/1399074
taaagg

SEQ ID NO: 49636 - DNA, 7 bp, Unknown
  misc_feature (1)..( 7): Matrix.002 file - promoters60/1399074
gatatgg

SEQ ID NO: 49637 - DNA, 7 bp, Unknown
  misc_feature (1)..( 7): Matrix.002 file - promoters60/1399074
ttgagtc

SEQ ID NO: 49638 - DNA, 6 bp, Unknown
  misc_feature (1)..( 6): Matrix.002 file - promoters60/1399074
ctgttc

SEQ ID NO: 49639 - DNA, 7 bp, Unknown
  misc_feature (1)..( 7): Matrix.002 file - promoters60/1399074
aatcggg

SEQ ID NO: 49640 - DNA, 7 bp, Unknown
  misc_feature (1)..( 7): Matrix.002 file - promoters60/1399074
cccacta

SEQ ID NO: 49641 - DNA, 9 bp, Unknown
  misc_feature (1)..( 9): Matrix.002 file - promoters60/1399074
aaagaaaag

SEQ ID NO: 49642 - DNA, 7 bp, Unknown
  misc_feature (1)..( 7): Matrix.002 file - promoters60/1399074
gtatata

SEQ ID NO: 49643 - DNA, 9 bp, Unknown
  misc_feature (1)..( 9): Matrix.002 file - promoters60/1399140
tttgttttc

SEQ ID NO: 49644 - DNA, 8 bp, Unknown
  misc_feature (1)..( 8): Matrix.002 file - promoters60/1399265
aatattta

SEQ ID NO: 49645 - DNA, 8 bp, Unknown
  misc_feature (1)..( 8): Matrix.002 file - promoters60/1399265
tttatata

SEQ ID NO: 49646 - DNA, 9 bp, Unknown
  misc_feature (1)..( 9): Matrix.002 file - promoters60/1399265
ttaaaaatt

SEQ ID NO: 49647 - DNA, 13 bp, Unknown
  misc_feature (1)..( 13): Matrix.002 file - promoters60/1399265
ctatttttattta

SEQ ID NO: 49648 - DNA, 11 bp, Unknown
  misc_feature (1)..( 11): Matrix.002 file - promoters60/1399265
aatgtgtttta

SEQ ID NO: 49649 - DNA, 9 bp, Unknown
  misc_feature (1)..( 9): Matrix.002 file - promoters60/1399265
tattatttt

SEQ ID NO: 49650 - DNA, 7 bp, Unknown
  misc_feature (1)..( 7): Matrix.002 file - promoters60/1399265
ttatttt

SEQ ID NO: 49651 - DNA, 8 bp, Unknown
  misc_feature (1)..( 8): Matrix.002 file - promoters60/1399265
attttttt

SEQ ID NO: 49652 - DNA, 7 bp, Unknown
  misc_feature (1)..( 7): Matrix.002 file - promoters60/1399265
tttataa

SEQ ID NO: 49653 - DNA, 12 bp, Unknown
  misc_feature (1)..( 12): Matrix.002 file - promoters60/1399265
ttttatttttgc

SEQ ID NO: 49654 - DNA, 7 bp, Unknown
  misc_feature (1)..( 7): Matrix.002 file - promoters60/1399265
ataaaaa

SEQ ID NO: 49655 - DNA, 12 bp, Unknown
  misc_feature (1)..( 12): Matrix.002 file - promoters60/1399265
aataaaataata

SEQ ID NO: 49656 - DNA, 8 bp, Unknown
  misc_feature (1)..( 8): Matrix.002 file - promoters60/1399265
tctgtttt

SEQ ID NO: 49657 - DNA, 9 bp, Unknown
  misc_feature (1)..( 9): Matrix.002 file - promoters60/1399265
tcagaaaaa

SEQ ID NO: 49658 - DNA, 7 bp, Unknown
  misc_feature (1)..( 7): Matrix.002 file - promoters60/1399277
aaaacaa

SEQ ID NO: 49659 - DNA, 6 bp, Unknown
  misc_feature (1)..( 6): Matrix.002 file - promoters60/1399277
attatt

SEQ ID NO: 49660 - DNA, 6 bp, Unknown
  misc_feature (1)..( 6): Matrix.002 file - promoters60/1399277
aataaa

SEQ ID NO: 49661 - DNA, 6 bp, Unknown
  misc_feature (1)..( 6): Matrix.002 file - promoters60/1399277
acaatt

SEQ ID NO: 49662 - DNA, 16 bp, Unknown
  misc_feature (1)..( 16): Matrix.002 file - promoters60/1399277
taaacacaaaaatttt

SEQ ID NO: 49663 - DNA, 8 bp, Unknown
  misc_feature (1)..( 8): Matrix.002 file - promoters60/1399277
ttacaaaa

SEQ ID NO: 49664 - DNA, 6 bp, Unknown
  misc_feature (1)..( 6): Matrix.002 file - promoters60/1399277
ttttat

SEQ ID NO: 49665 - DNA, 8 bp, Unknown
  misc_feature (1)..( 8): Matrix.002 file - promoters60/1399277
atttttta

SEQ ID NO: 49666 - DNA, 6 bp, Unknown
  misc_feature (1)..( 6): Matrix.002 file - promoters60/1399277
gataaa

SEQ ID NO: 49667 - DNA, 10 bp, Unknown
  misc_feature (1)..( 10): Matrix.002 file - promoters60/1399277
gaataaccac

SEQ ID NO: 49668 - DNA, 6 bp, Unknown
  misc_feature (1)..( 6): Matrix.002 file - promoters60/1399277
accaat

SEQ ID NO: 49669 - DNA, 7 bp, Unknown
  misc_feature (1)..( 7): Matrix.002 file - promoters60/1399277
aaacttt

SEQ ID NO: 49670 - DNA, 6 bp, Unknown
  misc_feature (1)..( 6): Matrix.002 file - promoters60/1399277
aaatca

SEQ ID NO: 49671 - DNA, 7 bp, Unknown
  misc_feature (1)..( 7): Matrix.002 file - promoters60/1399277
aagattt

SEQ ID NO: 49672 - DNA, 6 bp, Unknown
  misc_feature (1)..( 6): Matrix.002 file - promoters60/1399277
acatat

SEQ ID NO: 49673 - DNA, 9 bp, Unknown
  misc_feature (1)..( 9): Matrix.002 file - promoters60/1399277
tcaaagtga

SEQ ID NO: 49674 - DNA, 9 bp, Unknown
  misc_feature (1)..( 9): Matrix.002 file - promoters60/1399277
tttattaaa

SEQ ID NO: 49675 - DNA, 7 bp, Unknown
  misc_feature (1)..( 7): Matrix.002 file - promoters60/1399277
aaaagtt

SEQ ID NO: 49676 - DNA, 14 bp, Unknown
  misc_feature (1)..( 14): Matrix.002 file - promoters60/1399325
gataaattatctta

SEQ ID NO: 49677 - DNA, 7 bp, Unknown
  misc_feature (1)..( 7): Matrix.002 file - promoters60/1399417
cgattcc

SEQ ID NO: 49678 - DNA, 7 bp, Unknown
  misc_feature (1)..( 7): Matrix.002 file - promoters60/1399417
agaaaaa

SEQ ID NO: 49679 - DNA, 11 bp, Unknown
  misc_feature (1)..( 11): Matrix.002 file - promoters60/1399417
agctagagaga

SEQ ID NO: 49680 - DNA, 6 bp, Unknown
  misc_feature (1)..( 6): Matrix.002 file - promoters60/1399417
gttttg

SEQ ID NO: 49681 - DNA, 6 bp, Unknown
  misc_feature (1)..( 6): Matrix.002 file - promoters60/1399417
tcgaaa

SEQ ID NO: 49682 - DNA, 7 bp, Unknown
  misc_feature (1)..( 7): Matrix.002 file - promoters60/1399417
atctgag

SEQ ID NO: 49683 - DNA, 8 bp, Unknown
  misc_feature (1)..( 8): Matrix.002 file - promoters60/1399417
gaaacaaa

SEQ ID NO: 49684 - DNA, 6 bp, Unknown
  misc_feature (1)..( 6): Matrix.002 file - promoters60/1399417
attgtg

SEQ ID NO: 49685 - DNA, 6 bp, Unknown
  misc_feature (1)..( 6): Matrix.002 file - promoters60/1399417
tgttcg

SEQ ID NO: 49686 - DNA, 6 bp, Unknown
  misc_feature (1)..( 6): Matrix.002 file - promoters60/1399417
tctgtt

SEQ ID NO: 49687 - DNA, 7 bp, Unknown
  misc_feature (1)..( 7): Matrix.002 file - promoters60/1399417
ataaaaa

SEQ ID NO: 49688 - DNA, 6 bp, Unknown
  misc_feature (1)..( 6): Matrix.002 file - promoters60/1399417
atatat

SEQ ID NO: 49689 - DNA, 9 bp, Unknown
  misc_feature (1)..( 9): Matrix.002 file - promoters60/1399417
gagcctgat

SEQ ID NO: 49690 - DNA, 6 bp, Unknown
  misc_feature (1)..( 6): Matrix.002 file - promoters60/1399417
aattgc

SEQ ID NO: 49691 - DNA, 6 bp, Unknown
  misc_feature (1)..( 6): Matrix.002 file - promoters60/1399417
tccaaa

SEQ ID NO: 49692 - DNA, 6 bp, Unknown
  misc_feature (1)..( 6): Matrix.002 file - promoters60/1399417
aaacga

SEQ ID NO: 49693 - DNA, 6 bp, Unknown
  misc_feature (1)..( 6): Matrix.002 file - promoters60/1399417
tctaaa

SEQ ID NO: 49694 - DNA, 6 bp, Unknown
  misc_feature (1)..( 6): Matrix.002 file - promoters60/1399417
ttgact

SEQ ID NO: 49695 - DNA, 8 bp, Unknown
  misc_feature (1)..( 8): Matrix.002 file - promoters60/1399417
ccaagacg

SEQ ID NO: 49696 - DNA, 7 bp, Unknown
  misc_feature (1)..( 7): Matrix.002 file - promoters60/1399417
aggccca

SEQ ID NO: 49697 - DNA, 8 bp, Unknown
  misc_feature (1)..( 8): Matrix.002 file - promoters60/1399541
atttcttc

SEQ ID NO: 49698 - DNA, 7 bp, Unknown
  misc_feature (1)..( 7): Matrix.002 file - promoters60/1399541
tcaaatt

SEQ ID NO: 49699 - DNA, 8 bp, Unknown
  misc_feature (1)..( 8): Matrix.002 file - promoters60/1399541
ccagtatt

SEQ ID NO: 49700 - DNA, 6 bp, Unknown
  misc_feature (1)..( 6): Matrix.002 file - promoters60/1399541
tttttt

SEQ ID NO: 49701 - DNA, 7 bp, Unknown
  misc_feature (1)..( 7): Matrix.002 file - promoters60/1399541
ttctttt

SEQ ID NO: 49702 - DNA, 8 bp, Unknown
  misc_feature (1)..( 8): Matrix.002 file - promoters60/1399541
aggcaatt

SEQ ID NO: 49703 - DNA, 7 bp, Unknown
  misc_feature (1)..( 7): Matrix.002 file - promoters60/1399541
attagtt

SEQ ID NO: 49704 - DNA, 6 bp, Unknown
  misc_feature (1)..( 6): Matrix.002 file - promoters60/1399541
tgttgg

SEQ ID NO: 49705 - DNA, 6 bp, Unknown
  misc_feature (1)..( 6): Matrix.002 file - promoters60/1399541
actcct

SEQ ID NO: 49706 - DNA, 7 bp, Unknown
  misc_feature (1)..( 7): Matrix.002 file - promoters60/1399541
cctcttc

SEQ ID NO: 49707 - DNA, 7 bp, Unknown
  misc_feature (1)..( 7): Matrix.002 file - promoters60/1399541
cttttgt

SEQ ID NO: 49708 - DNA, 6 bp, Unknown
  misc_feature (1)..( 6): Matrix.002 file - promoters60/1399541
gaaaaa

SEQ ID NO: 49709 - DNA, 8 bp, Unknown
  misc_feature (1)..( 8): Matrix.002 file - promoters60/1399541
aaaccact

SEQ ID NO: 49710 - DNA, 8 bp, Unknown
  misc_feature (1)..( 8): Matrix.002 file - promoters60/1399634
tatacata

SEQ ID NO: 49711 - DNA, 9 bp, Unknown
  misc_feature (1)..( 9): Matrix.002 file - promoters60/1399634
tcgaaatag

SEQ ID NO: 49712 - DNA, 9 bp, Unknown
  misc_feature (1)..( 9): Matrix.002 file - promoters60/1399634
gcgcaatta

SEQ ID NO: 49713 - DNA, 6 bp, Unknown
  misc_feature (1)..( 6): Matrix.002 file - promoters60/1399634
taaaca

SEQ ID NO: 49714 - DNA, 8 bp, Unknown
  misc_feature (1)..( 8): Matrix.002 file - promoters60/1399634
attattta

SEQ ID NO: 49715 - DNA, 6 bp, Unknown
  misc_feature (1)..( 6): Matrix.002 file - promoters60/1399634
tttctc

SEQ ID NO: 49716 - DNA, 6 bp, Unknown
  misc_feature (1)..( 6): Matrix.002 file - promoters60/1399634
aatttt

SEQ ID NO: 49717 - DNA, 7 bp, Unknown
  misc_feature (1)..( 7): Matrix.002 file - promoters60/1399634
atacata

SEQ ID NO: 49718 - DNA, 8 bp, Unknown
  misc_feature (1)..( 8): Matrix.002 file - promoters60/1399634
acatacat

SEQ ID NO: 49719 - DNA, 7 bp, Unknown
  misc_feature (1)..( 7): Matrix.002 file - promoters60/1399634
atactag

SEQ ID NO: 49720 - DNA, 7 bp, Unknown
  misc_feature (1)..( 7): Matrix.002 file - promoters60/1399634
catctat

SEQ ID NO: 49721 - DNA, 7 bp, Unknown
  misc_feature (1)..( 7): Matrix.002 file - promoters60/1399634
acatttc

SEQ ID NO: 49722 - DNA, 7 bp, Unknown
  misc_feature (1)..( 7): Matrix.002 file - promoters60/1399634
tcacata

SEQ ID NO: 49723 - DNA, 6 bp, Unknown
  misc_feature (1)..( 6): Matrix.002 file - promoters60/1399634
atttat

SEQ ID NO: 49724 - DNA, 6 bp, Unknown
  misc_feature (1)..( 6): Matrix.002 file - promoters60/1399634
taataa

SEQ ID NO: 49725 - DNA, 6 bp, Unknown
  misc_feature (1)..( 6): Matrix.002 file - promoters60/1399634
tcgatc

SEQ ID NO: 49726 - DNA, 6 bp, Unknown
  misc_feature (1)..( 6): Matrix.002 file - promoters60/1399634
tagatt

SEQ ID NO: 49727 - DNA, 7 bp, Unknown
  misc_feature (1)..( 7): Matrix.002 file - promoters60/1399709
attaaga

SEQ ID NO: 49728 - DNA, 6 bp, Unknown
  misc_feature (1)..( 6): Matrix.002 file - promoters60/1399709
cttttt

SEQ ID NO: 49729 - DNA, 6 bp, Unknown
  misc_feature (1)..( 6): Matrix.002 file - promoters60/1399709
gacatc

SEQ ID NO: 49730 - DNA, 7 bp, Unknown
  misc_feature (1)..( 7): Matrix.002 file - promoters60/1399709
aaggaaa

SEQ ID NO: 49731 - DNA, 8 bp, Unknown
  misc_feature (1)..( 8): Matrix.002 file - promoters60/1399709
gaagatcg

SEQ ID NO: 49732 - DNA, 6 bp, Unknown
  misc_feature (1)..( 6): Matrix.002 file - promoters60/1399709
gtttcg

SEQ ID NO: 49733 - DNA, 6 bp, Unknown
  misc_feature (1)..( 6): Matrix.002 file - promoters60/1399709
aggcct

SEQ ID NO: 49734 - DNA, 7 bp, Unknown
  misc_feature (1)..( 7): Matrix.002 file - promoters60/1399709
tatcatt

SEQ ID NO: 49735 - DNA, 7 bp, Unknown
  misc_feature (1)..( 7): Matrix.002 file - promoters60/1399709
gaatttg

SEQ ID NO: 49736 - DNA, 7 bp, Unknown
  misc_feature (1)..( 7): Matrix.002 file - promoters60/1399709
tttgatt

SEQ ID NO: 49737 - DNA, 7 bp, Unknown
  misc_feature (1)..( 7): Matrix.002 file - promoters60/1399709
ttagatc

SEQ ID NO: 49738 - DNA, 6 bp, Unknown
  misc_feature (1)..( 6): Matrix.002 file - promoters60/1399709
catttg

SEQ ID NO: 49739 - DNA, 11 bp, Unknown
  misc_feature (1)..( 11): Matrix.002 file - promoters60/1399726
caattcattaa

SEQ ID NO: 49740 - DNA, 7 bp, Unknown
  misc_feature (1)..( 7): Matrix.002 file - promoters60/1399726
ctaattc

SEQ ID NO: 49741 - DNA, 12 bp, Unknown
  misc_feature (1)..( 12): Matrix.002 file - promoters60/1399726
aacaaattatga

SEQ ID NO: 49742 - DNA, 11 bp, Unknown
  misc_feature (1)..( 11): Matrix.002 file - promoters60/1399726
tagataaatta

SEQ ID NO: 49743 - DNA, 13 bp, Unknown
  misc_feature (1)..( 13): Matrix.002 file - promoters60/1399726
caaactaattctc

SEQ ID NO: 49744 - DNA, 12 bp, Unknown
  misc_feature (1)..( 12): Matrix.002 file - promoters60/1399726
tagacaaaattc

SEQ ID NO: 49745 - DNA, 8 bp, Unknown
  misc_feature (1)..( 8): Matrix.002 file - promoters60/1403210
aaaaaagt

SEQ ID NO: 49746 - DNA, 7 bp, Unknown
  misc_feature (1)..( 7): Matrix.002 file - promoters60/1403210
aagaaag

SEQ ID NO: 49747 - DNA, 10 bp, Unknown
  misc_feature (1)..( 10): Matrix.002 file - promoters60/1403210
tgagtaaaat

SEQ ID NO: 49748 - DNA, 7 bp, Unknown
  misc_feature (1)..( 7): Matrix.002 file - promoters60/1403210
ttgaaaa

SEQ ID NO: 49749 - DNA, 9 bp, Unknown
  misc_feature (1)..( 9): Matrix.002 file - promoters60/1403210
tggctttct

SEQ ID NO: 49750 - DNA, 7 bp, Unknown
  misc_feature (1)..( 7): Matrix.002 file - promoters60/1403210
aaaattt

SEQ ID NO: 49751 - DNA, 6 bp, Unknown
  misc_feature (1)..( 6): Matrix.002 file - promoters60/1403210
ttgaga

SEQ ID NO: 49752 - DNA, 7 bp, Unknown
  misc_feature (1)..( 7): Matrix.002 file - promoters60/1403210
tttaggg

SEQ ID NO: 49753 - DNA, 8 bp, Unknown
  misc_feature (1)..( 8): Matrix.002 file - promoters60/1403210
ttttcatt

SEQ ID NO: 49754 - DNA, 7 bp, Unknown
  misc_feature (1)..( 7): Matrix.002 file - promoters60/1403210
tgatgaa

SEQ ID NO: 49755 - DNA, 8 bp, Unknown
  misc_feature (1)..( 8): Matrix.002 file - promoters60/1403210
atcaactt

SEQ ID NO: 49756 - DNA, 10 bp, Unknown
  misc_feature (1)..( 10): Matrix.002 file - promoters60/1403210
tttttaattt

SEQ ID NO: 49757 - DNA, 9 bp, Unknown
  misc_feature (1)..( 9): Matrix.002 file - promoters60/1403210
atggatact

SEQ ID NO: 49758 - DNA, 7 bp, Unknown
  misc_feature (1)..( 7): Matrix.002 file - promoters60/1403210
tttactc

SEQ ID NO: 49759 - DNA, 8 bp, Unknown
  misc_feature (1)..( 8): Matrix.002 file - promoters60/1403210
ttctcttc

SEQ ID NO: 49760 - DNA, 6 bp, Unknown
  misc_feature (1)..( 6): Matrix.002 file - promoters60/1403210
tttctt

SEQ ID NO: 49761 - DNA, 7 bp, Unknown
  misc_feature (1)..( 7): Matrix.002 file - promoters60/1411578
atgagaa

SEQ ID NO: 49762 - DNA, 8 bp, Unknown
  misc_feature (1)..( 8): Matrix.002 file - promoters60/1411578
agaagatg

SEQ ID NO: 49763 - DNA, 9 bp, Unknown
  misc_feature (1)..( 9): Matrix.002 file - promoters60/1411578
acattgttt

SEQ ID NO: 49764 - DNA, 7 bp, Unknown
  misc_feature (1)..( 7): Matrix.002 file - promoters60/1411578
aaactta

SEQ ID NO: 49765 - DNA, 6 bp, Unknown
  misc_feature (1)..( 6): Matrix.002 file - promoters60/1411598
aaaaga

SEQ ID NO: 49766 - DNA, 7 bp, Unknown
  misc_feature (1)..( 7): Matrix.002 file - promoters60/1411598
acaaaaa

SEQ ID NO: 49767 - DNA, 6 bp, Unknown
  misc_feature (1)..( 6): Matrix.002 file - promoters60/1411598
cttgaa

SEQ ID NO: 49768 - DNA, 8 bp, Unknown
  misc_feature (1)..( 8): Matrix.002 file - promoters60/1411598
ttaaaaaa

SEQ ID NO: 49769 - DNA, 6 bp, Unknown
  misc_feature (1)..( 6): Matrix.002 file - promoters60/1411598
tacttt

SEQ ID NO: 49770 - DNA, 7 bp, Unknown
  misc_feature (1)..( 7): Matrix.002 file - promoters60/1411598
acataaa

SEQ ID NO: 49771 - DNA, 8 bp, Unknown
  misc_feature (1)..( 8): Matrix.002 file - promoters60/1411598
aggaagtt

SEQ ID NO: 49772 - DNA, 6 bp, Unknown
  misc_feature (1)..( 6): Matrix.002 file - promoters60/1411598
caaaat

SEQ ID NO: 49773 - DNA, 9 bp, Unknown
  misc_feature (1)..( 9): Matrix.002 file - promoters60/1411598
tacccaaat

SEQ ID NO: 49774 - DNA, 9 bp, Unknown
  misc_feature (1)..( 9): Matrix.002 file - promoters60/1411598
atatgattt

SEQ ID NO: 49775 - DNA, 8 bp, Unknown
  misc_feature (1)..( 8): Matrix.002 file - promoters60/1411598
ttctatct

SEQ ID NO: 49776 - DNA, 7 bp, Unknown
  misc_feature (1)..( 7): Matrix.002 file - promoters60/1411598
cttagaa

SEQ ID NO: 49777 - DNA, 7 bp, Unknown
  misc_feature (1)..( 7): Matrix.002 file - promoters60/1411598
gaaaaat

SEQ ID NO: 49778 - DNA, 6 bp, Unknown
  misc_feature (1)..( 6): Matrix.002 file - promoters60/1411598
attgga

SEQ ID NO: 49779 - DNA, 6 bp, Unknown
  misc_feature (1)..( 6): Matrix.002 file - promoters60/1411598
agttgg

SEQ ID NO: 49780 - DNA, 6 bp, Unknown
  misc_feature (1)..( 6): Matrix.002 file - promoters60/1411598
tttaat

SEQ ID NO: 49781 - DNA, 6 bp, Unknown
  misc_feature (1)..( 6): Matrix.002 file - promoters60/1411598
ttgatt

SEQ ID NO: 49782 - DNA, 9 bp, Unknown
  misc_feature (1)..( 9): Matrix.002 file - promoters60/1411616
tttagaaga

SEQ ID NO: 49783 - DNA, 6 bp, Unknown
  misc_feature (1)..( 6): Matrix.002 file - promoters60/1411616
aaaata

SEQ ID NO: 49784 - DNA, 7 bp, Unknown
  misc_feature (1)..( 7): Matrix.002 file - promoters60/1411616
aaaatca

SEQ ID NO: 49785 - DNA, 14 bp, Unknown
  misc_feature (1)..( 14): Matrix.002 file - promoters60/1411616
aaaaaacttgtttt

SEQ ID NO: 49786 - DNA, 9 bp, Unknown
  misc_feature (1)..( 9): Matrix.002 file - promoters60/1411616
attttaatt

SEQ ID NO: 49787 - DNA, 9 bp, Unknown
  misc_feature (1)..( 9): Matrix.002 file - promoters60/1411616
attttcatt

SEQ ID NO: 49788 - DNA, 8 bp, Unknown
  misc_feature (1)..( 8): Matrix.002 file - promoters60/1411616
agaaaata

SEQ ID NO: 49789 - DNA, 7 bp, Unknown
  misc_feature (1)..( 7): Matrix.002 file - promoters60/1411616
aaaaaaa

SEQ ID NO: 49790 - DNA, 8 bp, Unknown
  misc_feature (1)..( 8): Matrix.002 file - promoters60/1411616
tattattt

SEQ ID NO: 49791 - DNA, 8 bp, Unknown
  misc_feature (1)..( 8): Matrix.002 file - promoters60/1411616
tataaaga

SEQ ID NO: 49792 - DNA, 7 bp, Unknown
  misc_feature (1)..( 7): Matrix.002 file - promoters60/1413159
tttaggt

SEQ ID NO: 49793 - DNA, 7 bp, Unknown
  misc_feature (1)..( 7): Matrix.002 file - promoters60/1413159
acaaagg

SEQ ID NO: 49794 - DNA, 7 bp, Unknown
  misc_feature (1)..( 7): Matrix.002 file - promoters60/1413159
tttggtt

SEQ ID NO: 49795 - DNA, 7 bp, Unknown
  misc_feature (1)..( 7): Matrix.002 file - promoters60/1413159
ttgtgat

SEQ ID NO: 49796 - DNA, 7 bp, Unknown
  misc_feature (1)..( 7): Matrix.002 file - promoters60/1413159
aaaagat

SEQ ID NO: 49797 - DNA, 6 bp, Unknown
  misc_feature (1)..( 6): Matrix.002 file - promoters60/1413159
tggaga

SEQ ID NO: 49798 - DNA, 7 bp, Unknown
  misc_feature (1)..( 7): Matrix.002 file - promoters60/1413159
gaagcta

SEQ ID NO: 49799 - DNA, 6 bp, Unknown
  misc_feature (1)..( 6): Matrix.002 file - promoters60/1413159
atgaaa

SEQ ID NO: 49800 - DNA, 6 bp, Unknown
  misc_feature (1)..( 6): Matrix.002 file - promoters60/1413159
acactt

SEQ ID NO: 49801 - DNA, 7 bp, Unknown
  misc_feature (1)..( 7): Matrix.002 file - promoters60/1413159
tgtcttg

SEQ ID NO: 49802 - DNA, 8 bp, Unknown
  misc_feature (1)..( 8): Matrix.002 file - promoters60/1413159
ttacattt

SEQ ID NO: 49803 - DNA, 6 bp, Unknown
  misc_feature (1)..( 6): Matrix.002 file - promoters60/1413159
ttataa

SEQ ID NO: 49804 - DNA, 10 bp, Unknown
  misc_feature (1)..( 10): Matrix.002 file - promoters60/1413159
atacaacaaa

SEQ ID NO: 49805 - DNA, 11 bp, Unknown
  misc_feature (1)..( 11): Matrix.002 file - promoters60/1413191
tctattttgac

SEQ ID NO: 49806 - DNA, 9 bp, Unknown
  misc_feature (1)..( 9): Matrix.002 file - promoters60/1413191
gatttaaaa

SEQ ID NO: 49807 - DNA, 9 bp, Unknown
  misc_feature (1)..( 9): Matrix.002 file - promoters60/1413211
gtcagatca

SEQ ID NO: 49808 - DNA, 9 bp, Unknown
  misc_feature (1)..( 9): Matrix.002 file - promoters60/1413211
atagtcaac

SEQ ID NO: 49809 - DNA, 6 bp, Unknown
  misc_feature (1)..( 6): Matrix.002 file - promoters60/1413211
aataat

SEQ ID NO: 49810 - DNA, 7 bp, Unknown
  misc_feature (1)..( 7): Matrix.002 file - promoters60/1413211
tctaatt

SEQ ID NO: 49811 - DNA, 9 bp, Unknown
  misc_feature (1)..( 9): Matrix.002 file - promoters60/1413211
aaaaaagaa

SEQ ID NO: 49812 - DNA, 7 bp, Unknown
  misc_feature (1)..( 7): Matrix.002 file - promoters60/1413211
ccaacat

SEQ ID NO: 49813 - DNA, 6 bp, Unknown
  misc_feature (1)..( 6): Matrix.002 file - promoters60/1413211
taattt

SEQ ID NO: 49814 - DNA, 13 bp, Unknown
  misc_feature (1)..( 13): Matrix.002 file - promoters60/1413211
tgatgaaaatgat

SEQ ID NO: 49815 - DNA, 7 bp, Unknown
  misc_feature (1)..( 7): Matrix.002 file - promoters60/1413211
gacaaaa

SEQ ID NO: 49816 - DNA, 6 bp, Unknown
  misc_feature (1)..( 6): Matrix.002 file - promoters60/1413211
aaaagg

SEQ ID NO: 49817 - DNA, 6 bp, Unknown
  misc_feature (1)..( 6): Matrix.002 file - promoters60/1413211
ctactt

SEQ ID NO: 49818 - DNA, 7 bp, Unknown
  misc_feature (1)..( 7): Matrix.002 file - promoters60/1413211
ctctact

SEQ ID NO: 49819 - DNA, 6 bp, Unknown
  misc_feature (1)..( 6): Matrix.002 file - promoters60/1413211
atttaa

SEQ ID NO: 49820 - DNA, 7 bp, Unknown
  misc_feature (1)..( 7): Matrix.002 file - promoters60/1413211
ccaaatc

SEQ ID NO: 49821 - DNA, 8 bp, Unknown
  misc_feature (1)..( 8): Matrix.002 file - promoters60/1413211
tctggttt

SEQ ID NO: 49822 - DNA, 7 bp, Unknown
  misc_feature (1)..( 7): Matrix.002 file - promoters60/1413211
aaactat

SEQ ID NO: 49823 - DNA, 7 bp, Unknown
  misc_feature (1)..( 7): Matrix.002 file - promoters60/1413211
taaatta

SEQ ID NO: 49824 - DNA, 6 bp, Unknown
  misc_feature (1)..( 6): Matrix.002 file - promoters60/1420853
tttagt

SEQ ID NO: 49825 - DNA, 7 bp, Unknown
  misc_feature (1)..( 7): Matrix.002 file - promoters60/1420853
gaaaata

SEQ ID NO: 49826 - DNA, 8 bp, Unknown
  misc_feature (1)..( 8): Matrix.002 file - promoters60/1420853
ttcgacat

SEQ ID NO: 49827 - DNA, 8 bp, Unknown
  misc_feature (1)..( 8): Matrix.002 file - promoters60/1420853
tatggttt

SEQ ID NO: 49828 - DNA, 9 bp, Unknown
  misc_feature (1)..( 9): Matrix.002 file - promoters60/1420853
cgtatgtaa

SEQ ID NO: 49829 - DNA, 8 bp, Unknown
  misc_feature (1)..( 8): Matrix.002 file - promoters60/1420853
aatataat

SEQ ID NO: 49830 - DNA, 8 bp, Unknown
  misc_feature (1)..( 8): Matrix.002 file - promoters60/1420853
aggattta

SEQ ID NO: 49831 - DNA, 6 bp, Unknown
  misc_feature (1)..( 6): Matrix.002 file - promoters60/1420853
aaatat

SEQ ID NO: 49832 - DNA, 7 bp, Unknown
  misc_feature (1)..( 7): Matrix.002 file - promoters60/1420853
cagcctt

SEQ ID NO: 49833 - DNA, 6 bp, Unknown
  misc_feature (1)..( 6): Matrix.002 file - promoters60/1420853
tataca

SEQ ID NO: 49834 - DNA, 7 bp, Unknown
  misc_feature (1)..( 7): Matrix.002 file - promoters60/1420853
ttagatc

SEQ ID NO: 49835 - DNA, 8 bp, Unknown
  misc_feature (1)..( 8): Matrix.002 file - promoters60/1420853
taaatgta

SEQ ID NO: 49836 - DNA, 6 bp, Unknown
  misc_feature (1)..( 6): Matrix.002 file - promoters60/1420853
atgtct

SEQ ID NO: 49837 - DNA, 7 bp, Unknown
  misc_feature (1)..( 7): Matrix.002 file - promoters60/1420853
ttggaga

SEQ ID NO: 49838 - DNA, 6 bp, Unknown
  misc_feature (1)..( 6): Matrix.002 file - promoters60/1420853
gaagat

SEQ ID NO: 49839 - DNA, 6 bp, Unknown
  misc_feature (1)..( 6): Matrix.002 file - promoters60/1420853
gatcga

SEQ ID NO: 49840 - DNA, 6 bp, Unknown
  misc_feature (1)..( 6): Matrix.002 file - promoters60/1420853
aaatgc

SEQ ID NO: 49841 - DNA, 8 bp, Unknown
  misc_feature (1)..( 8): Matrix.002 file - promoters60/1420853
ggacttgt

SEQ ID NO: 49842 - DNA, 10 bp, Unknown
  misc_feature (1)..( 10): Matrix.002 file - promoters60/1440865
gaaaaataga

SEQ ID NO: 49843 - DNA, 6 bp, Unknown
  misc_feature (1)..( 6): Matrix.002 file - promoters60/1440865
agaaaa

SEQ ID NO: 49844 - DNA, 6 bp, Unknown
  misc_feature (1)..( 6): Matrix.002 file - promoters60/1440865
aacaga

SEQ ID NO: 49845 - DNA, 7 bp, Unknown
  misc_feature (1)..( 7): Matrix.002 file - promoters60/1440865
aataaaa

SEQ ID NO: 49846 - DNA, 7 bp, Unknown
  misc_feature (1)..( 7): Matrix.002 file - promoters60/1440865
accaaaa

SEQ ID NO: 49847 - DNA, 6 bp, Unknown
  misc_feature (1)..( 6): Matrix.002 file - promoters60/1440865
aaaaag

SEQ ID NO: 49848 - DNA, 7 bp, Unknown
  misc_feature (1)..( 7): Matrix.002 file - promoters60/1440865
attacgt

SEQ ID NO: 49849 - DNA, 9 bp, Unknown
  misc_feature (1)..( 9): Matrix.002 file - promoters60/1440865
aaaatgaat

SEQ ID NO: 49850 - DNA, 10 bp, Unknown
  misc_feature (1)..( 10): Matrix.002 file - promoters60/1440865
aatatgaaat

SEQ ID NO: 49851 - DNA, 12 bp, Unknown
  misc_feature (1)..( 12): Matrix.002 file - promoters60/1440865
tacaaaaaaaat

SEQ ID NO: 49852 - DNA, 6 bp, Unknown
  misc_feature (1)..( 6): Matrix.002 file - promoters60/1440865
aactaa

SEQ ID NO: 49853 - DNA, 7 bp, Unknown
  misc_feature (1)..( 7): Matrix.002 file - promoters60/1440865
agcaagt

SEQ ID NO: 49854 - DNA, 7 bp, Unknown
  misc_feature (1)..( 7): Matrix.002 file - promoters60/1440865
taacatt

SEQ ID NO: 49855 - DNA, 6 bp, Unknown
  misc_feature (1)..( 6): Matrix.002 file - promoters60/1440865
aaaaaa

SEQ ID NO: 49856 - DNA, 7 bp, Unknown
  misc_feature (1)..( 7): Matrix.002 file - promoters60/1440865
tcaaaag

SEQ ID NO: 49857 - DNA, 7 bp, Unknown
  misc_feature (1)..( 7): Matrix.002 file - promoters60/1440865
caaaaag

SEQ ID NO: 49858 - DNA, 6 bp, Unknown
  misc_feature (1)..( 6): Matrix.002 file - promoters60/1440865
aatata

SEQ ID NO: 49859 - DNA, 7 bp, Unknown
  misc_feature (1)..( 7): Matrix.002 file - promoters60/1440865
gacattt

SEQ ID NO: 49860 - DNA, 9 bp, Unknown
  misc_feature (1)..( 9): Matrix.002 file - promoters60/1440873
caaaaaaac

SEQ ID NO: 49861 - DNA, 10 bp, Unknown
  misc_feature (1)..( 10): Matrix.002 file - promoters60/1440873
aatcataata

SEQ ID NO: 49862 - DNA, 7 bp, Unknown
  misc_feature (1)..( 7): Matrix.002 file - promoters60/1440873
tgaacag

SEQ ID NO: 49863 - DNA, 6 bp, Unknown
  misc_feature (1)..( 6): Matrix.002 file - promoters60/1440873
actcaa

SEQ ID NO: 49864 - DNA, 7 bp, Unknown
  misc_feature (1)..( 7): Matrix.002 file - promoters60/1440873
caacgta

SEQ ID NO: 49865 - DNA, 8 bp, Unknown
  misc_feature (1)..( 8): Matrix.002 file - promoters60/1440873
ttagacac

SEQ ID NO: 49866 - DNA, 9 bp, Unknown
  misc_feature (1)..( 9): Matrix.002 file - promoters60/1440873
acagtttgt

SEQ ID NO: 49867 - DNA, 7 bp, Unknown
  misc_feature (1)..( 7): Matrix.002 file - promoters60/1440873
tcaacaa

SEQ ID NO: 49868 - DNA, 7 bp, Unknown
  misc_feature (1)..( 7): Matrix.002 file - promoters60/1440873
aaatttt

SEQ ID NO: 49869 - DNA, 6 bp, Unknown
  misc_feature (1)..( 6): Matrix.002 file - promoters60/1440873
tctttc

SEQ ID NO: 49870 - DNA, 7 bp, Unknown
  misc_feature (1)..( 7): Matrix.002 file - promoters60/1440873
taagaat

SEQ ID NO: 49871 - DNA, 8 bp, Unknown
  misc_feature (1)..( 8): Matrix.002 file - promoters60/1440873
caaactta

SEQ ID NO: 49872 - DNA, 8 bp, Unknown
  misc_feature (1)..( 8): Matrix.002 file - promoters60/1440920
ttgacata

SEQ ID NO: 49873 - DNA, 10 bp, Unknown
  misc_feature (1)..( 10): Matrix.002 file - promoters60/1440920
aaaattcttg

SEQ ID NO: 49874 - DNA, 6 bp, Unknown
  misc_feature (1)..( 6): Matrix.002 file - promoters60/1440920
aaacaa

SEQ ID NO: 49875 - DNA, 7 bp, Unknown
  misc_feature (1)..( 7): Matrix.002 file - promoters60/1440920
aaaaaat

SEQ ID NO: 49876 - DNA, 7 bp, Unknown
  misc_feature (1)..( 7): Matrix.002 file - promoters60/1440920
ataaaat

SEQ ID NO: 49877 - DNA, 8 bp, Unknown
  misc_feature (1)..( 8): Matrix.002 file - promoters60/1440920
aaacaaaa

SEQ ID NO: 49878 - DNA, 7 bp, Unknown
  misc_feature (1)..( 7): Matrix.002 file - promoters60/1440920
aaaaaga

SEQ ID NO: 49879 - DNA, 8 bp, Unknown
  misc_feature (1)..( 8): Matrix.002 file - promoters60/1440920
gtgaactt

SEQ ID NO: 49880 - DNA, 13 bp, Unknown
  misc_feature (1)..( 13): Matrix.002 file - promoters60/1440920
aaagtctccacat

SEQ ID NO: 49881 - DNA, 6 bp, Unknown
  misc_feature (1)..( 6): Matrix.002 file - promoters60/1440920
aatgct

SEQ ID NO: 49882 - DNA, 6 bp, Unknown
  misc_feature (1)..( 6): Matrix.002 file - promoters60/1440920
atttga

SEQ ID NO: 49883 - DNA, 12 bp, Unknown
  misc_feature (1)..( 12): Matrix.002 file - promoters60/1440967
attcaaaaaaaa

SEQ ID NO: 49884 - DNA, 9 bp, Unknown
  misc_feature (1)..( 9): Matrix.002 file - promoters60/1440967
aattaacat

SEQ ID NO: 49885 - DNA, 11 bp, Unknown
  misc_feature (1)..( 11): Matrix.002 file - promoters60/1441000
caaattgctaa

SEQ ID NO: 49886 - DNA, 9 bp, Unknown
  misc_feature (1)..( 9): Matrix.002 file - promoters60/1441000
acaaaacat

SEQ ID NO: 49887 - DNA, 7 bp, Unknown
  misc_feature (1)..( 7): Matrix.002 file - promoters60/1441020
tagaaag

SEQ ID NO: 49888 - DNA, 6 bp, Unknown
  misc_feature (1)..( 6): Matrix.002 file - promoters60/1441020
atcaaa

SEQ ID NO: 49889 - DNA, 6 bp, Unknown
  misc_feature (1)..( 6): Matrix.002 file - promoters60/1441020
atttgg

SEQ ID NO: 49890 - DNA, 6 bp, Unknown
  misc_feature (1)..( 6): Matrix.002 file - promoters60/1441020
atttga

SEQ ID NO: 49891 - DNA, 7 bp, Unknown
  misc_feature (1)..( 7): Matrix.002 file - promoters60/1441020
agaatga

SEQ ID NO: 49892 - DNA, 8 bp, Unknown
  misc_feature (1)..( 8): Matrix.002 file - promoters60/1441020
aattgaaa

SEQ ID NO: 49893 - DNA, 7 bp, Unknown
  misc_feature (1)..( 7): Matrix.002 file - promoters60/1441020
gcccaat

SEQ ID NO: 49894 - DNA, 6 bp, Unknown
  misc_feature (1)..( 6): Matrix.002 file - promoters60/1441020
actttt

SEQ ID NO: 49895 - DNA, 6 bp, Unknown
  misc_feature (1)..( 6): Matrix.002 file - promoters60/1441020
attctc

SEQ ID NO: 49896 - DNA, 6 bp, Unknown
  misc_feature (1)..( 6): Matrix.002 file - promoters60/1441020
aatttg

SEQ ID NO: 49897 - DNA, 9 bp, Unknown
  misc_feature (1)..( 9): Matrix.002 file - promoters60/1441020
gatggcaaa

SEQ ID NO: 49898 - DNA, 7 bp, Unknown
  misc_feature (1)..( 7): Matrix.002 file - promoters60/1441020
tgggctc

SEQ ID NO: 49899 - DNA, 6 bp, Unknown
  misc_feature (1)..( 6): Matrix.002 file - promoters60/1441020
gattca

SEQ ID NO: 49900 - DNA, 14 bp, Unknown
  misc_feature (1)..( 14): Matrix.002 file - promoters60/1441044
ttttatatagataa

SEQ ID NO: 49901 - DNA, 12 bp, Unknown
  misc_feature (1)..( 12): Matrix.002 file - promoters60/1441044
actcatatataa

SEQ ID NO: 49902 - DNA, 13 bp, Unknown
  misc_feature (1)..( 13): Matrix.002 file - promoters60/1441044
acaaacttttagt

SEQ ID NO: 49903 - DNA, 9 bp, Unknown
  misc_feature (1)..( 9): Matrix.002 file - promoters60/1441044
aactaaaca

SEQ ID NO: 49904 - DNA, 9 bp, Unknown
  misc_feature (1)..( 9): Matrix.002 file - promoters60/1441134
ttttccttt

SEQ ID NO: 49905 - DNA, 6 bp, Unknown
  misc_feature (1)..( 6): Matrix.002 file - promoters60/1441134
ctttca

SEQ ID NO: 49906 - DNA, 7 bp, Unknown
  misc_feature (1)..( 7): Matrix.002 file - promoters60/1441134
tgaactt

SEQ ID NO: 49907 - DNA, 8 bp, Unknown
  misc_feature (1)..( 8): Matrix.002 file - promoters60/1441134
tatataca

SEQ ID NO: 49908 - DNA, 6 bp, Unknown
  misc_feature (1)..( 6): Matrix.002 file - promoters60/1441134
atatta

SEQ ID NO: 49909 - DNA, 8 bp, Unknown
  misc_feature (1)..( 8): Matrix.002 file - promoters60/1441134
attaacaa

SEQ ID NO: 49910 - DNA, 6 bp, Unknown
  misc_feature (1)..( 6): Matrix.002 file - promoters60/1441134
aaattt

SEQ ID NO: 49911 - DNA, 6 bp, Unknown
  misc_feature (1)..( 6): Matrix.002 file - promoters60/1441134
ctttca

SEQ ID NO: 49912 - DNA, 9 bp, Unknown
  misc_feature (1)..( 9): Matrix.002 file - promoters60/1441134
aacacaatg

SEQ ID NO: 49913 - DNA, 6 bp, Unknown
  misc_feature (1)..( 6): Matrix.002 file - promoters60/1441134
caaaaa

SEQ ID NO: 49914 - DNA, 7 bp, Unknown
  misc_feature (1)..( 7): Matrix.002 file - promoters60/1441134
tctagtg

SEQ ID NO: 49915 - DNA, 7 bp, Unknown
  misc_feature (1)..( 7): Matrix.002 file - promoters60/1441134
aaaaata

SEQ ID NO: 49916 - DNA, 6 bp, Unknown
  misc_feature (1)..( 6): Matrix.002 file - promoters60/1441134
aacttt

SEQ ID NO: 49917 - DNA, 7 bp, Unknown
  misc_feature (1)..( 7): Matrix.002 file - promoters60/1441134
ttacaat

SEQ ID NO: 49918 - DNA, 9 bp, Unknown
  misc_feature (1)..( 9): Matrix.002 file - promoters60/1441170
tttttaaat

SEQ ID NO: 49919 - DNA, 12 bp, Unknown
  misc_feature (1)..( 12): Matrix.002 file - promoters60/1441170
tattagtcaatt

SEQ ID NO: 49920 - DNA, 6 bp, Unknown
  misc_feature (1)..( 6): Matrix.002 file - promoters60/1441170
aatttg

SEQ ID NO: 49921 - DNA, 6 bp, Unknown
  misc_feature (1)..( 6): Matrix.002 file - promoters60/1441170
tttaaa

SEQ ID NO: 49922 - DNA, 8 bp, Unknown
  misc_feature (1)..( 8): Matrix.002 file - promoters60/1441170
aaatcaaa

SEQ ID NO: 49923 - DNA, 7 bp, Unknown
  misc_feature (1)..( 7): Matrix.002 file - promoters60/1441170
gaacaaa

SEQ ID NO: 49924 - DNA, 8 bp, Unknown
  misc_feature (1)..( 8): Matrix.002 file - promoters60/1441170
aaacaata

SEQ ID NO: 49925 - DNA, 8 bp, Unknown
  misc_feature (1)..( 8): Matrix.002 file - promoters60/1441170
agtcttac

SEQ ID NO: 49926 - DNA, 6 bp, Unknown
  misc_feature (1)..( 6): Matrix.002 file - promoters60/1441170
taagag

SEQ ID NO: 49927 - DNA, 6 bp, Unknown
  misc_feature (1)..( 6): Matrix.002 file - promoters60/1441170
taaaag

SEQ ID NO: 49928 - DNA, 7 bp, Unknown
  misc_feature (1)..( 7): Matrix.002 file - promoters60/1441170
tttattt

SEQ ID NO: 49929 - DNA, 6 bp, Unknown
  misc_feature (1)..( 6): Matrix.002 file - promoters60/1441170
actttc

SEQ ID NO: 49930 - DNA, 9 bp, Unknown
  misc_feature (1)..( 9): Matrix.002 file - promoters60/1441170
ggataaaca

SEQ ID NO: 49931 - DNA, 10 bp, Unknown
  misc_feature (1)..( 10): Matrix.002 file - promoters60/1441184
aattgtgtgt

SEQ ID NO: 49932 - DNA, 10 bp, Unknown
  misc_feature (1)..( 10): Matrix.002 file - promoters60/1441184
gcataatttt

SEQ ID NO: 49933 - DNA, 10 bp, Unknown
  misc_feature (1)..( 10): Matrix.002 file - promoters60/1441184
catgtttaac

SEQ ID NO: 49934 - DNA, 8 bp, Unknown
  misc_feature (1)..( 8): Matrix.002 file - promoters60/1441184
tgtataaa

SEQ ID NO: 49935 - DNA, 7 bp, Unknown
  misc_feature (1)..( 7): Matrix.002 file - promoters60/1441190
catatat

SEQ ID NO: 49936 - DNA, 9 bp, Unknown
  misc_feature (1)..( 9): Matrix.002 file - promoters60/1441237
aataatttt

SEQ ID NO: 49937 - DNA, 9 bp, Unknown
  misc_feature (1)..( 9): Matrix.002 file - promoters60/1441237
attattttt

SEQ ID NO: 49938 - DNA, 9 bp, Unknown
  misc_feature (1)..( 9): Matrix.002 file - promoters60/1441237
tataaaaac

SEQ ID NO: 49939 - DNA, 10 bp, Unknown
  misc_feature (1)..( 10): Matrix.002 file - promoters60/1441237
tataaaaaca

SEQ ID NO: 49940 - DNA, 9 bp, Unknown
  misc_feature (1)..( 9): Matrix.002 file - promoters60/1441249
ttatacata

SEQ ID NO: 49941 - DNA, 6 bp, Unknown
  misc_feature (1)..( 6): Matrix.002 file - promoters60/1441249
tgatat

SEQ ID NO: 49942 - DNA, 6 bp, Unknown
  misc_feature (1)..( 6): Matrix.002 file - promoters60/1441249
aaatat

SEQ ID NO: 49943 - DNA, 7 bp, Unknown
  misc_feature (1)..( 7): Matrix.002 file - promoters60/1441249
ttcgtaa

SEQ ID NO: 49944 - DNA, 7 bp, Unknown
  misc_feature (1)..( 7): Matrix.002 file - promoters60/1441249
tgaccat

SEQ ID NO: 49945 - DNA, 10 bp, Unknown
  misc_feature (1)..( 10): Matrix.002 file - promoters60/1441249
ttttattttt

SEQ ID NO: 49946 - DNA, 7 bp, Unknown
  misc_feature (1)..( 7): Matrix.002 file - promoters60/1441249
tttaaga

SEQ ID NO: 49947 - DNA, 7 bp, Unknown
  misc_feature (1)..( 7): Matrix.002 file - promoters60/1441249
attcaag

SEQ ID NO: 49948 - DNA, 8 bp, Unknown
  misc_feature (1)..( 8): Matrix.002 file - promoters60/1441249
gtgtcttt

SEQ ID NO: 49949 - DNA, 6 bp, Unknown
  misc_feature (1)..( 6): Matrix.002 file - promoters60/1441249
cttcaa

SEQ ID NO: 49950 - DNA, 6 bp, Unknown
  misc_feature (1)..( 6): Matrix.002 file - promoters60/1441249
aatata

SEQ ID NO: 49951 - DNA, 7 bp, Unknown
  misc_feature (1)..( 7): Matrix.002 file - promoters60/1441249
aaattat

SEQ ID NO: 49952 - DNA, 8 bp, Unknown
  misc_feature (1)..( 8): Matrix.002 file - promoters60/1441249
actttaaa

SEQ ID NO: 49953 - DNA, 9 bp, Unknown
  misc_feature (1)..( 9): Matrix.002 file - promoters60/1441249
caataatcc

SEQ ID NO: 49954 - DNA, 7 bp, Unknown
  misc_feature (1)..( 7): Matrix.002 file - promoters60/1441249
aatcatg

SEQ ID NO: 49955 - DNA, 6 bp, Unknown
  misc_feature (1)..( 6): Matrix.002 file - promoters60/1441249
acataa

SEQ ID NO: 49956 - DNA, 6 bp, Unknown
  misc_feature (1)..( 6): Matrix.002 file - promoters60/1441249
caaaat

SEQ ID NO: 49957 - DNA, 8 bp, Unknown
  misc_feature (1)..( 8): Matrix.002 file - promoters60/1441249
aaagcaaa

SEQ ID NO: 49958 - DNA, 8 bp, Unknown
  misc_feature (1)..( 8): Matrix.002 file - promoters60/1441291
tatgatgg

SEQ ID NO: 49959 - DNA, 9 bp, Unknown
  misc_feature (1)..( 9): Matrix.002 file - promoters60/1441291
ataacctta

SEQ ID NO: 49960 - DNA, 8 bp, Unknown
  misc_feature (1)..( 8): Matrix.002 file - promoters60/1441291
agaaccaa

SEQ ID NO: 49961 - DNA, 6 bp, Unknown
  misc_feature (1)..( 6): Matrix.002 file - promoters60/1441291
ggctga

SEQ ID NO: 49962 - DNA, 11 bp, Unknown
  misc_feature (1)..( 11): Matrix.002 file - promoters60/1441291
agggtctcaga

SEQ ID NO: 49963 - DNA, 6 bp, Unknown
  misc_feature (1)..( 6): Matrix.002 file - promoters60/1441291
agattt

SEQ ID NO: 49964 - DNA, 9 bp, Unknown
  misc_feature (1)..( 9): Matrix.002 file - promoters60/1441395
atgttaaaa

SEQ ID NO: 49965 - DNA, 11 bp, Unknown
  misc_feature (1)..( 11): Matrix.002 file - promoters60/1441395
aaaaaatcaaa

SEQ ID NO: 49966 - DNA, 8 bp, Unknown
  misc_feature (1)..( 8): Matrix.002 file - promoters60/1441395
tatataaa

SEQ ID NO: 49967 - DNA, 7 bp, Unknown
  misc_feature (1)..( 7): Matrix.002 file - promoters60/1441395
aaatcaa

SEQ ID NO: 49968 - DNA, 6 bp, Unknown
  misc_feature (1)..( 6): Matrix.002 file - promoters60/1441460
agccag

SEQ ID NO: 49969 - DNA, 7 bp, Unknown
  misc_feature (1)..( 7): Matrix.002 file - promoters60/1441460
gaaacca

SEQ ID NO: 49970 - DNA, 7 bp, Unknown
  misc_feature (1)..( 7): Matrix.002 file - promoters60/1441460
ttaggat

SEQ ID NO: 49971 - DNA, 12 bp, Unknown
  misc_feature (1)..( 12): Matrix.002 file - promoters60/1441460
atattcatgatc

SEQ ID NO: 49972 - DNA, 10 bp, Unknown
  misc_feature (1)..( 10): Matrix.002 file - promoters60/1441460
gaaaaaatga

SEQ ID NO: 49973 - DNA, 6 bp, Unknown
  misc_feature (1)..( 6): Matrix.002 file - promoters60/1441460
aaacga

SEQ ID NO: 49974 - DNA, 9 bp, Unknown
  misc_feature (1)..( 9): Matrix.002 file - promoters60/1441460
aatgttttg

SEQ ID NO: 49975 - DNA, 8 bp, Unknown
  misc_feature (1)..( 8): Matrix.002 file - promoters60/1441460
gttttgtt

SEQ ID NO: 49976 - DNA, 8 bp, Unknown
  misc_feature (1)..( 8): Matrix.002 file - promoters60/1441460
atatcaga

SEQ ID NO: 49977 - DNA, 9 bp, Unknown
  misc_feature (1)..( 9): Matrix.002 file - promoters60/1441460
tttatttta

SEQ ID NO: 49978 - DNA, 8 bp, Unknown
  misc_feature (1)..( 8): Matrix.002 file - promoters60/1441460
accaaatt

SEQ ID NO: 49979 - DNA, 6 bp, Unknown
  misc_feature (1)..( 6): Matrix.002 file - promoters60/1441460
agagaa

SEQ ID NO: 49980 - DNA, 7 bp, Unknown
  misc_feature (1)..( 7): Matrix.002 file - promoters60/1441460
tttaagt

SEQ ID NO: 49981 - DNA, 8 bp, Unknown
  misc_feature (1)..( 8): Matrix.002 file - promoters60/1441460
tttcttgt

SEQ ID NO: 49982 - DNA, 7 bp, Unknown
  misc_feature (1)..( 7): Matrix.002 file - promoters60/1441460
gagaatt

SEQ ID NO: 49983 - DNA, 6 bp, Unknown
  misc_feature (1)..( 6): Matrix.002 file - promoters60/1441460
aagcaa

SEQ ID NO: 49984 - DNA, 6 bp, Unknown
  misc_feature (1)..( 6): Matrix.002 file - promoters60/1441460
aagggt

SEQ ID NO: 49985 - DNA, 7 bp, Unknown
  misc_feature (1)..( 7): Matrix.002 file - promoters60/1441465
agaaaaa

SEQ ID NO: 49986 - DNA, 6 bp, Unknown
  misc_feature (1)..( 6): Matrix.002 file - promoters60/1441465
tgcaaa

SEQ ID NO: 49987 - DNA, 6 bp, Unknown
  misc_feature (1)..( 6): Matrix.002 file - promoters60/1441465
ttatcg

SEQ ID NO: 49988 - DNA, 7 bp, Unknown
  misc_feature (1)..( 7): Matrix.002 file - promoters60/1441465
tataaaa

SEQ ID NO: 49989 - DNA, 12 bp, Unknown
  misc_feature (1)..( 12): Matrix.002 file - promoters60/1441465
aaaaaattcgtc

SEQ ID NO: 49990 - DNA, 6 bp, Unknown
  misc_feature (1)..( 6): Matrix.002 file - promoters60/1441465
agattt

SEQ ID NO: 49991 - DNA, 7 bp, Unknown
  misc_feature (1)..( 7): Matrix.002 file - promoters60/1441465
taaccga

SEQ ID NO: 49992 - DNA, 6 bp, Unknown
  misc_feature (1)..( 6): Matrix.002 file - promoters60/1441465
aaattt

SEQ ID NO: 49993 - DNA, 7 bp, Unknown
  misc_feature (1)..( 7): Matrix.002 file - promoters60/1441465
attttct

SEQ ID NO: 49994 - DNA, 8 bp, Unknown
  misc_feature (1)..( 8): Matrix.002 file - promoters60/1441465
aacacaaa

SEQ ID NO: 49995 - DNA, 7 bp, Unknown
  misc_feature (1)..( 7): Matrix.002 file - promoters60/1441465
caaacca

SEQ ID NO: 49996 - DNA, 6 bp, Unknown
  misc_feature (1)..( 6): Matrix.002 file - promoters60/1441465
catttt

SEQ ID NO: 49997 - DNA, 7 bp, Unknown
  misc_feature (1)..( 7): Matrix.002 file - promoters60/1441465
ttttcat

SEQ ID NO: 49998 - DNA, 8 bp, Unknown
  misc_feature (1)..( 8): Matrix.002 file - promoters60/1441465
tttcttta

SEQ ID NO: 49999 - DNA, 6 bp, Unknown
  misc_feature (1)..( 6): Matrix.002 file - promoters60/1441465
ttatac

SEQ ID NO: 50000 - DNA, 6 bp, Unknown
  misc_feature (1)..( 6): Matrix.002 file - promoters60/1441465
gtgata

SEQ ID NO: 50001 - DNA, 8 bp, Unknown
  misc_feature (1)..( 8): Matrix.002 file - promoters60/1441533
ttacatat

SEQ ID NO: 50002 - DNA, 7 bp, Unknown
  misc_feature (1)..( 7): Matrix.002 file - promoters60/1441533
acaattt

SEQ ID NO: 50003 - DNA, 7 bp, Unknown
  misc_feature (1)..( 7): Matrix.002 file - promoters60/1441533
ccaaaat

SEQ ID NO: 50004 - DNA, 6 bp, Unknown
  misc_feature (1)..( 6): Matrix.002 file - promoters60/1441533
ggtttt

SEQ ID NO: 50005 - DNA, 6 bp, Unknown
  misc_feature (1)..( 6): Matrix.002 file - promoters60/1441533
ttttga

SEQ ID NO: 50006 - DNA, 9 bp, Unknown
  misc_feature (1)..( 9): Matrix.002 file - promoters60/1441533
attattttt

SEQ ID NO: 50007 - DNA, 6 bp, Unknown
  misc_feature (1)..( 6): Matrix.002 file - promoters60/1441533
aaatga

SEQ ID NO: 50008 - DNA, 7 bp, Unknown
  misc_feature (1)..( 7): Matrix.002 file - promoters60/1441533
aagatgt

SEQ ID NO: 50009 - DNA, 7 bp, Unknown
  misc_feature (1)..( 7): Matrix.002 file - promoters60/1441533
acgagga

SEQ ID NO: 50010 - DNA, 9 bp, Unknown
  misc_feature (1)..( 9): Matrix.002 file - promoters60/1441533
atataaata

SEQ ID NO: 50011 - DNA, 8 bp, Unknown
  misc_feature (1)..( 8): Matrix.002 file - promoters60/1441533
ttttactt

SEQ ID NO: 50012 - DNA, 7 bp, Unknown
  misc_feature (1)..( 7): Matrix.002 file - promoters60/1441533
acgaact

SEQ ID NO: 50013 - DNA, 7 bp, Unknown
  misc_feature (1)..( 7): Matrix.002 file - promoters60/1441533
tatctcg

SEQ ID NO: 50014 - DNA, 8 bp, Unknown
  misc_feature (1)..( 8): Matrix.002 file - promoters60/1441533
atttgcac

SEQ ID NO: 50015 - DNA, 7 bp, Unknown
  misc_feature (1)..( 7): Matrix.002 file - promoters60/1441533
ttaatat

SEQ ID NO: 50016 - DNA, 6 bp, Unknown
  misc_feature (1)..( 6): Matrix.002 file - promoters60/1441533
aatata

SEQ ID NO: 50017 - DNA, 7 bp, Unknown
  misc_feature (1)..( 7): Matrix.002 file - promoters60/1441533
tgactaa

SEQ ID NO: 50018 - DNA, 6 bp, Unknown
  misc_feature (1)..( 6): Matrix.002 file - promoters60/1441533
tactcg

SEQ ID NO: 50019 - DNA, 6 bp, Unknown
  misc_feature (1)..( 6): Matrix.002 file - promoters60/1441533
tatact

SEQ ID NO: 50020 - DNA, 6 bp, Unknown
  misc_feature (1)..( 6): Matrix.002 file - promoters60/1441533
tttgtt

SEQ ID NO: 50021 - DNA, 7 bp, Unknown
  misc_feature (1)..( 7): Matrix.002 file - promoters60/1441533
aaaaaaa

SEQ ID NO: 50022 - DNA, 7 bp, Unknown
  misc_feature (1)..( 7): Matrix.002 file - promoters60/1441533
aacattt

SEQ ID NO: 50023 - DNA, 10 bp, Unknown
  misc_feature (1)..( 10): Matrix.002 file - promoters60/1441533
aaactaaaaa

SEQ ID NO: 50024 - DNA, 9 bp, Unknown
  misc_feature (1)..( 9): Matrix.002 file - promoters60/1441533
agaaaaaaa

SEQ ID NO: 50025 - DNA, 7 bp, Unknown
  misc_feature (1)..( 7): Matrix.002 file - promoters60/1441533
taggaaa

SEQ ID NO: 50026 - DNA, 6 bp, Unknown
  misc_feature (1)..( 6): Matrix.002 file - promoters60/1441539
tatata

SEQ ID NO: 50027 - DNA, 6 bp, Unknown
  misc_feature (1)..( 6): Matrix.002 file - promoters60/1441539
tttgac

SEQ ID NO: 50028 - DNA, 8 bp, Unknown
  misc_feature (1)..( 8): Matrix.002 file - promoters60/1441539
ttgggaaa

SEQ ID NO: 50029 - DNA, 7 bp, Unknown
  misc_feature (1)..( 7): Matrix.002 file - promoters60/1441539
tgaattg

SEQ ID NO: 50030 - DNA, 8 bp, Unknown
  misc_feature (1)..( 8): Matrix.002 file - promoters60/1441539
ttttcttt

SEQ ID NO: 50031 - DNA, 6 bp, Unknown
  misc_feature (1)..( 6): Matrix.002 file - promoters60/1441539
aacaaa

SEQ ID NO: 50032 - DNA, 7 bp, Unknown
  misc_feature (1)..( 7): Matrix.002 file - promoters60/1441539
aaacatt

SEQ ID NO: 50033 - DNA, 6 bp, Unknown
  misc_feature (1)..( 6): Matrix.002 file - promoters60/1441539
aaaaag

SEQ ID NO: 50034 - DNA, 7 bp, Unknown
  misc_feature (1)..( 7): Matrix.002 file - promoters60/1441539
aaaactt

SEQ ID NO: 50035 - DNA, 6 bp, Unknown
  misc_feature (1)..( 6): Matrix.002 file - promoters60/1441539
aaccct

SEQ ID NO: 50036 - DNA, 9 bp, Unknown
  misc_feature (1)..( 9): Matrix.002 file - promoters60/1441539
atggctgaa

SEQ ID NO: 50037 - DNA, 7 bp, Unknown
  misc_feature (1)..( 7): Matrix.002 file - promoters60/1441539
aagaaaa

SEQ ID NO: 50038 - DNA, 8 bp, Unknown
  misc_feature (1)..( 8): Matrix.002 file - promoters60/1441569
ttacatat

SEQ ID NO: 50039 - DNA, 7 bp, Unknown
  misc_feature (1)..( 7): Matrix.002 file - promoters60/1441569
acaattt

SEQ ID NO: 50040 - DNA, 7 bp, Unknown
  misc_feature (1)..( 7): Matrix.002 file - promoters60/1441569
ccaaaat

SEQ ID NO: 50041 - DNA, 6 bp, Unknown
  misc_feature (1)..( 6): Matrix.002 file - promoters60/1441569
ggtttt

SEQ ID NO: 50042 - DNA, 6 bp, Unknown
  misc_feature (1)..( 6): Matrix.002 file - promoters60/1441569
ttttga

SEQ ID NO: 50043 - DNA, 9 bp, Unknown
  misc_feature (1)..( 9): Matrix.002 file - promoters60/1441569
atttttttt

SEQ ID NO: 50044 - DNA, 6 bp, Unknown
  misc_feature (1)..( 6): Matrix.002 file - promoters60/1441569
aaatga

SEQ ID NO: 50045 - DNA, 7 bp, Unknown
  misc_feature (1)..( 7): Matrix.002 file - promoters60/1441569
aagatgt

SEQ ID NO: 50046 - DNA, 7 bp, Unknown
  misc_feature (1)..( 7): Matrix.002 file - promoters60/1441569
acgagga

SEQ ID NO: 50047 - DNA, 9 bp, Unknown
  misc_feature (1)..( 9): Matrix.002 file - promoters60/1441569
atataaata

SEQ ID NO: 50048 - DNA, 8 bp, Unknown
  misc_feature (1)..( 8): Matrix.002 file - promoters60/1441569
gaaactac

SEQ ID NO: 50049 - DNA, 8 bp, Unknown
  misc_feature (1)..( 8): Matrix.002 file - promoters60/1441569
aattttgt

SEQ ID NO: 50050 - DNA, 6 bp, Unknown
  misc_feature (1)..( 6): Matrix.002 file - promoters60/1441569
gttatt

SEQ ID NO: 50051 - DNA, 7 bp, Unknown
  misc_feature (1)..( 7): Matrix.002 file - promoters60/1441569
gaaaatt

SEQ ID NO: 50052 - DNA, 7 bp, Unknown
  misc_feature (1)..( 7): Matrix.002 file - promoters60/1441569
acgaata

SEQ ID NO: 50053 - DNA, 6 bp, Unknown
  misc_feature (1)..( 6): Matrix.002 file - promoters60/1441569
aaaaca

SEQ ID NO: 50054 - DNA, 6 bp, Unknown
  misc_feature (1)..( 6): Matrix.002 file - promoters60/1441569
gtaacc

SEQ ID NO: 50055 - DNA, 8 bp, Unknown
  misc_feature (1)..( 8): Matrix.002 file - promoters60/1441569
atagaaat

SEQ ID NO: 50056 - DNA, 11 bp, Unknown
  misc_feature (1)..( 11): Matrix.002 file - promoters60/1441569
aatcacaaaaa

SEQ ID NO: 50057 - DNA, 6 bp, Unknown
  misc_feature (1)..( 6): Matrix.002 file - promoters60/1441569
ctcagt

SEQ ID NO: 50058 - DNA, 7 bp, Unknown
  misc_feature (1)..( 7): Matrix.002 file - promoters60/1441569
tttctta

SEQ ID NO: 50059 - DNA, 6 bp, Unknown
  misc_feature (1)..( 6): Matrix.002 file - promoters60/1441569
tttcta

SEQ ID NO: 50060 - DNA, 7 bp, Unknown
  misc_feature (1)..( 7): Matrix.002 file - promoters60/1441569
caaataa

SEQ ID NO: 50061 - DNA, 9 bp, Unknown
  misc_feature (1)..( 9): Matrix.002 file - promoters60/1441569
cttgtacaa

SEQ ID NO: 50062 - DNA, 6 bp, Unknown
  misc_feature (1)..( 6): Matrix.002 file - promoters60/1441569
ttggtt

SEQ ID NO: 50063 - DNA, 6 bp, Unknown
  misc_feature (1)..( 6): Matrix.002 file - promoters60/1441569
cataaa

SEQ ID NO: 50064 - DNA, 6 bp, Unknown
  misc_feature (1)..( 6): Matrix.002 file - promoters60/1441569
ttttaa

SEQ ID NO: 50065 - DNA, 11 bp, Unknown
  misc_feature (1)..( 11): Matrix.002 file - promoters60/1441657
aacttctattt

SEQ ID NO: 50066 - DNA, 9 bp, Unknown
  misc_feature (1)..( 9): Matrix.002 file - promoters60/1441657
ccaaaccta

SEQ ID NO: 50067 - DNA, 7 bp, Unknown
  misc_feature (1)..( 7): Matrix.002 file - promoters60/1441657
ataattt

SEQ ID NO: 50068 - DNA, 7 bp, Unknown
  misc_feature (1)..( 7): Matrix.002 file - promoters60/1441665
aaacaaa

SEQ ID NO: 50069 - DNA, 12 bp, Unknown
  misc_feature (1)..( 12): Matrix.002 file - promoters60/1441665
aaaatgggccaa

SEQ ID NO: 50070 - DNA, 7 bp, Unknown
  misc_feature (1)..( 7): Matrix.002 file - promoters60/1441814
aatttta

SEQ ID NO: 50071 - DNA, 10 bp, Unknown
  misc_feature (1)..( 10): Matrix.002 file - promoters60/1441814
aaatatccta

SEQ ID NO: 50072 - DNA, 5 bp, Unknown
  misc_feature (1)..( 5): Matrix.002 file - promoters60/1441814
taatg

SEQ ID NO: 50073 - DNA, 7 bp, Unknown
  misc_feature (1)..( 7): Matrix.002 file - promoters60/1441814
tatttta

SEQ ID NO: 50074 - DNA, 14 bp, Unknown
  misc_feature (1)..( 14): Matrix.002 file - promoters60/1441814
atataattttataa

SEQ ID NO: 50075 - DNA, 10 bp, Unknown
  misc_feature (1)..( 10): Matrix.002 file - promoters60/1441814
ataaataatg

SEQ ID NO: 50076 - DNA, 10 bp, Unknown
  misc_feature (1)..( 10): Matrix.002 file - promoters60/1441814
aaattttgat

SEQ ID NO: 50077 - DNA, 10 bp, Unknown
  misc_feature (1)..( 10): Matrix.002 file - promoters60/1441814
taatattagt

SEQ ID NO: 50078 - DNA, 11 bp, Unknown
  misc_feature (1)..( 11): Matrix.002 file - promoters60/1441835
ctaatttacta

SEQ ID NO: 50079 - DNA, 12 bp, Unknown
  misc_feature (1)..( 12): Matrix.002 file - promoters60/1441841
tctcacacgaaa

SEQ ID NO: 50080 - DNA, 10 bp, Unknown
  misc_feature (1)..( 10): Matrix.002 file - promoters60/1441841
aaaatgtttt

SEQ ID NO: 50081 - DNA, 8 bp, Unknown
  misc_feature (1)..( 8): Matrix.002 file - promoters60/1441841
tttgtttc

SEQ ID NO: 50082 - DNA, 14 bp, Unknown
  misc_feature (1)..( 14): Matrix.002 file - promoters60/1441841
acatttgttaatat

SEQ ID NO: 50083 - DNA, 7 bp, Unknown
  misc_feature (1)..( 7): Matrix.002 file - promoters60/1441841
cttctaa

SEQ ID NO: 50084 - DNA, 8 bp, Unknown
  misc_feature (1)..( 8): Matrix.002 file - promoters60/1441841
ttttgttt

SEQ ID NO: 50085 - DNA, 6 bp, Unknown
  misc_feature (1)..( 6): Matrix.002 file - promoters60/1441851
ttgaga

SEQ ID NO: 50086 - DNA, 10 bp, Unknown
  misc_feature (1)..( 10): Matrix.002 file - promoters60/1441851
taacgtttaa

SEQ ID NO: 50087 - DNA, 6 bp, Unknown
  misc_feature (1)..( 6): Matrix.002 file - promoters60/1441851
aacatt

SEQ ID NO: 50088 - DNA, 7 bp, Unknown
  misc_feature (1)..( 7): Matrix.002 file - promoters60/1441851
ttcaaag

SEQ ID NO: 50089 - DNA, 7 bp, Unknown
  misc_feature (1)..( 7): Matrix.002 file - promoters60/1441851
aagaact

SEQ ID NO: 50090 - DNA, 7 bp, Unknown
  misc_feature (1)..( 7): Matrix.002 file - promoters60/1441851
agtaaac

SEQ ID NO: 50091 - DNA, 7 bp, Unknown
  misc_feature (1)..( 7): Matrix.002 file - promoters60/1441851
attcata

SEQ ID NO: 50092 - DNA, 6 bp, Unknown
  misc_feature (1)..( 6): Matrix.002 file - promoters60/1441851
taacat

SEQ ID NO: 50093 - DNA, 10 bp, Unknown
  misc_feature (1)..( 10): Matrix.002 file - promoters60/1441851
agtctaaaaa

SEQ ID NO: 50094 - DNA, 9 bp, Unknown
  misc_feature (1)..( 9): Matrix.002 file - promoters60/1441851
ataatgttt

SEQ ID NO: 50095 - DNA, 7 bp, Unknown
  misc_feature (1)..( 7): Matrix.002 file - promoters60/1441851
atagata

SEQ ID NO: 50096 - DNA, 7 bp, Unknown
  misc_feature (1)..( 7): Matrix.002 file - promoters60/1441851
atggaat

SEQ ID NO: 50097 - DNA, 7 bp, Unknown
  misc_feature (1)..( 7): Matrix.002 file - promoters60/1441851
accaaat

SEQ ID NO: 50098 - DNA, 6 bp, Unknown
  misc_feature (1)..( 6): Matrix.002 file - promoters60/1441851
tattat

SEQ ID NO: 50099 - DNA, 6 bp, Unknown
  misc_feature (1)..( 6): Matrix.002 file - promoters60/1441851
aaaaaa

SEQ ID NO: 50100 - DNA, 6 bp, Unknown
  misc_feature (1)..( 6): Matrix.002 file - promoters60/1441851
gtcaaa

SEQ ID NO: 50101 - DNA, 6 bp, Unknown
  misc_feature (1)..( 6): Matrix.002 file - promoters60/1441851
ggcgag

SEQ ID NO: 50102 - DNA, 8 bp, Unknown
  misc_feature (1)..( 8): Matrix.002 file - promoters60/1441859
tttagttt

SEQ ID NO: 50103 - DNA, 8 bp, Unknown
  misc_feature (1)..( 8): Matrix.002 file - promoters60/1441859
taaaaaaa

SEQ ID NO: 50104 - DNA, 9 bp, Unknown
  misc_feature (1)..( 9): Matrix.002 file - promoters60/1441859
attttgttt

SEQ ID NO: 50105 - DNA, 13 bp, Unknown
  misc_feature (1)..( 13): Matrix.002 file - promoters60/1441859
ataaaaaaagttt

SEQ ID NO: 50106 - DNA, 8 bp, Unknown
  misc_feature (1)..( 8): Matrix.002 file - promoters60/1441912
ataaatat

SEQ ID NO: 50107 - DNA, 6 bp, Unknown
  misc_feature (1)..( 6): Matrix.002 file - promoters60/1441912
ataata

SEQ ID NO: 50108 - DNA, 8 bp, Unknown
  misc_feature (1)..( 8): Matrix.002 file - promoters60/1441937
taaaaatc

SEQ ID NO: 50109 - DNA, 8 bp, Unknown
  misc_feature (1)..( 8): Matrix.002 file - promoters60/1441937
ctgtgttg

SEQ ID NO: 50110 - DNA, 8 bp, Unknown
  misc_feature (1)..( 8): Matrix.002 file - promoters60/1441937
tcttgttt

SEQ ID NO: 50111 - DNA, 8 bp, Unknown
  misc_feature (1)..( 8): Matrix.002 file - promoters60/1441937
caatttat

SEQ ID NO: 50112 - DNA, 8 bp, Unknown
  misc_feature (1)..( 8): Matrix.002 file - promoters60/1441985
ttacatat

SEQ ID NO: 50113 - DNA, 7 bp, Unknown
  misc_feature (1)..( 7): Matrix.002 file - promoters60/1441985
acaattt

SEQ ID NO: 50114 - DNA, 7 bp, Unknown
  misc_feature (1)..( 7): Matrix.002 file - promoters60/1441985
ccaaaat

SEQ ID NO: 50115 - DNA, 6 bp, Unknown
  misc_feature (1)..( 6): Matrix.002 file - promoters60/1441985
ggtttt

SEQ ID NO: 50116 - DNA, 6 bp, Unknown
  misc_feature (1)..( 6): Matrix.002 file - promoters60/1441985
ttttga

SEQ ID NO: 50117 - DNA, 9 bp, Unknown
  misc_feature (1)..( 9): Matrix.002 file - promoters60/1441985
atttttttt

SEQ ID NO: 50118 - DNA, 6 bp, Unknown
  misc_feature (1)..( 6): Matrix.002 file - promoters60/1441985
aaatga

SEQ ID NO: 50119 - DNA, 7 bp, Unknown
  misc_feature (1)..( 7): Matrix.002 file - promoters60/1441985
aagatgt

SEQ ID NO: 50120 - DNA, 7 bp, Unknown
  misc_feature (1)..( 7): Matrix.002 file - promoters60/1441985
acgagga

SEQ ID NO: 50121 - DNA, 9 bp, Unknown
  misc_feature (1)..( 9): Matrix.002 file - promoters60/1441985
atataaata

SEQ ID NO: 50122 - DNA, 8 bp, Unknown
  misc_feature (1)..( 8): Matrix.002 file - promoters60/1441985
gaaactac

SEQ ID NO: 50123 - DNA, 8 bp, Unknown
  misc_feature (1)..( 8): Matrix.002 file - promoters60/1441985
aattttgt

SEQ ID NO: 50124 - DNA, 6 bp, Unknown
  misc_feature (1)..( 6): Matrix.002 file - promoters60/1441985
gttatt

SEQ ID NO: 50125 - DNA, 7 bp, Unknown
  misc_feature (1)..( 7): Matrix.002 file - promoters60/1441985
gaaaatt

SEQ ID NO: 50126 - DNA, 7 bp, Unknown
  misc_feature (1)..( 7): Matrix.002 file - promoters60/1441985
acgaata

SEQ ID NO: 50127 - DNA, 6 bp, Unknown
  misc_feature (1)..( 6): Matrix.002 file - promoters60/1441985
aaaaca

SEQ ID NO: 50128 - DNA, 6 bp, Unknown
  misc_feature (1)..( 6): Matrix.002 file - promoters60/1441985
gtaacc

SEQ ID NO: 50129 - DNA, 8 bp, Unknown
  misc_feature (1)..( 8): Matrix.002 file - promoters60/1441985
atagaaat

SEQ ID NO: 50130 - DNA, 11 bp, Unknown
  misc_feature (1)..( 11): Matrix.002 file - promoters60/1441985
aatcacaaaaa

SEQ ID NO: 50131 - DNA, 6 bp, Unknown
  misc_feature (1)..( 6): Matrix.002 file - promoters60/1441985
ctcagt

SEQ ID NO: 50132 - DNA, 7 bp, Unknown
  misc_feature (1)..( 7): Matrix.002 file - promoters60/1441985
tttctta

SEQ ID NO: 50133 - DNA, 6 bp, Unknown
  misc_feature (1)..( 6): Matrix.002 file - promoters60/1441985
tttcta

SEQ ID NO: 50134 - DNA, 7 bp, Unknown
  misc_feature (1)..( 7): Matrix.002 file - promoters60/1441985
caaataa

SEQ ID NO: 50135 - DNA, 9 bp, Unknown
  misc_feature (1)..( 9): Matrix.002 file - promoters60/1441985
cttgtacaa

SEQ ID NO: 50136 - DNA, 6 bp, Unknown
  misc_feature (1)..( 6): Matrix.002 file - promoters60/1441985
ttggtt

SEQ ID NO: 50137 - DNA, 6 bp, Unknown
  misc_feature (1)..( 6): Matrix.002 file - promoters60/1441985
cataaa

SEQ ID NO: 50138 - DNA, 6 bp, Unknown
  misc_feature (1)..( 6): Matrix.002 file - promoters60/1441985
ttttaa

SEQ ID NO: 50139 - DNA, 10 bp, Unknown
  misc_feature (1)..( 10): Matrix.002 file - promoters60/1441990
ttatataaat

SEQ ID NO: 50140 - DNA, 13 bp, Unknown
  misc_feature (1)..( 13): Matrix.002 file - promoters60/1441990
cgagaataaataa

SEQ ID NO: 50141 - DNA, 17 bp, Unknown
  misc_feature (1)..( 17): Matrix.002 file - promoters60/1441990
aatacaaaaaaaaaaac

SEQ ID NO: 50142 - DNA, 7 bp, Unknown
  misc_feature (1)..( 7): Matrix.002 file - promoters60/1442104
actagat

SEQ ID NO: 50143 - DNA, 6 bp, Unknown
  misc_feature (1)..( 6): Matrix.002 file - promoters60/1442104
aataat

SEQ ID NO: 50144 - DNA, 6 bp, Unknown
  misc_feature (1)..( 6): Matrix.002 file - promoters60/1442104
ttgtgg

SEQ ID NO: 50145 - DNA, 7 bp, Unknown
  misc_feature (1)..( 7): Matrix.002 file - promoters60/1442104
tataaat

SEQ ID NO: 50146 - DNA, 13 bp, Unknown
  misc_feature (1)..( 13): Matrix.002 file - promoters60/1442104
attattcgacctt

SEQ ID NO: 50147 - DNA, 6 bp, Unknown
  misc_feature (1)..( 6): Matrix.002 file - promoters60/1442104
tttgaa

SEQ ID NO: 50148 - DNA, 6 bp, Unknown
  misc_feature (1)..( 6): Matrix.002 file - promoters60/1442104
taattt

SEQ ID NO: 50149 - DNA, 7 bp, Unknown
  misc_feature (1)..( 7): Matrix.002 file - promoters60/1442104
aaacaaa

SEQ ID NO: 50150 - DNA, 6 bp, Unknown
  misc_feature (1)..( 6): Matrix.002 file - promoters60/1442104
tttatc

SEQ ID NO: 50151 - DNA, 7 bp, Unknown
  misc_feature (1)..( 7): Matrix.002 file - promoters60/1442104
tctccca

SEQ ID NO: 50152 - DNA, 6 bp, Unknown
  misc_feature (1)..( 6): Matrix.002 file - promoters60/1442104
acaatt

SEQ ID NO: 50153 - DNA, 7 bp, Unknown
  misc_feature (1)..( 7): Matrix.002 file - promoters60/1442104
attactt

SEQ ID NO: 50154 - DNA, 6 bp, Unknown
  misc_feature (1)..( 6): Matrix.002 file - promoters60/1442104
ccgaca

SEQ ID NO: 50155 - DNA, 8 bp, Unknown
  misc_feature (1)..( 8): Matrix.002 file - promoters60/1442104
attgtgat

SEQ ID NO: 50156 - DNA, 6 bp, Unknown
  misc_feature (1)..( 6): Matrix.002 file - promoters60/1442104
ttttaa

SEQ ID NO: 50157 - DNA, 10 bp, Unknown
  misc_feature (1)..( 10): Matrix.002 file - promoters60/1442156
aaatagttaa

SEQ ID NO: 50158 - DNA, 15 bp, Unknown
  misc_feature (1)..( 15): Matrix.002 file - promoters60/1442156
attttatttcagcca

SEQ ID NO: 50159 - DNA, 7 bp, Unknown
  misc_feature (1)..( 7): Matrix.002 file - promoters60/1442156
ttcttct

SEQ ID NO: 50160 - DNA, 8 bp, Unknown
  misc_feature (1)..( 8): Matrix.002 file - promoters60/1442156
attttaaa

SEQ ID NO: 50161 - DNA, 9 bp, Unknown
  misc_feature (1)..( 9): Matrix.002 file - promoters60/1442156
aacaaataa

SEQ ID NO: 50162 - DNA, 11 bp, Unknown
  misc_feature (1)..( 11): Matrix.002 file - promoters60/1442156
tttttatccta

SEQ ID NO: 50163 - DNA, 11 bp, Unknown
  misc_feature (1)..( 11): Matrix.002 file - promoters60/1442156
gaaaaaaataa

SEQ ID NO: 50164 - DNA, 11 bp, Unknown
  misc_feature (1)..( 11): Matrix.002 file - promoters60/1442156
ttatctgaaat

SEQ ID NO: 50165 - DNA, 7 bp, Unknown
  misc_feature (1)..( 7): Matrix.002 file - promoters60/1442156
aaaataa

SEQ ID NO: 50166 - DNA, 7 bp, Unknown
  misc_feature (1)..( 7): Matrix.002 file - promoters60/1442156
cacgtgc

SEQ ID NO: 50167 - DNA, 7 bp, Unknown
  misc_feature (1)..( 7): Matrix.002 file - promoters60/1442179
tcaacaa

SEQ ID NO: 50168 - DNA, 7 bp, Unknown
  misc_feature (1)..( 7): Matrix.002 file - promoters60/1442179
gatcaag

SEQ ID NO: 50169 - DNA, 9 bp, Unknown
  misc_feature (1)..( 9): Matrix.002 file - promoters60/1442179
gagctcttg

SEQ ID NO: 50170 - DNA, 7 bp, Unknown
  misc_feature (1)..( 7): Matrix.002 file - promoters60/1442179
aatagta

SEQ ID NO: 50171 - DNA, 7 bp, Unknown
  misc_feature (1)..( 7): Matrix.002 file - promoters60/1442179
attattt

SEQ ID NO: 50172 - DNA, 6 bp, Unknown
  misc_feature (1)..( 6): Matrix.002 file - promoters60/1442179
ggatat

SEQ ID NO: 50173 - DNA, 7 bp, Unknown
  misc_feature (1)..( 7): Matrix.002 file - promoters60/1442179
tttttaa

SEQ ID NO: 50174 - DNA, 7 bp, Unknown
  misc_feature (1)..( 7): Matrix.002 file - promoters60/1442179
taaaaat

SEQ ID NO: 50175 - DNA, 6 bp, Unknown
  misc_feature (1)..( 6): Matrix.002 file - promoters60/1442179
cgagcc

SEQ ID NO: 50176 - DNA, 6 bp, Unknown
  misc_feature (1)..( 6): Matrix.002 file - promoters60/1442179
aaatcg

SEQ ID NO: 50177 - DNA, 9 bp, Unknown
  misc_feature (1)..( 9): Matrix.002 file - promoters60/1442179
gttggtgtt

SEQ ID NO: 50178 - DNA, 8 bp, Unknown
  misc_feature (1)..( 8): Matrix.002 file - promoters60/1442179
gtttaaga

SEQ ID NO: 50179 - DNA, 7 bp, Unknown
  misc_feature (1)..( 7): Matrix.002 file - promoters60/1442189
cttatta

SEQ ID NO: 50180 - DNA, 11 bp, Unknown
  misc_feature (1)..( 11): Matrix.002 file - promoters60/1442189
aaaaaatatca

SEQ ID NO: 50181 - DNA, 10 bp, Unknown
  misc_feature (1)..( 10): Matrix.002 file - promoters60/1442189
aaaaactaga

SEQ ID NO: 50182 - DNA, 7 bp, Unknown
  misc_feature (1)..( 7): Matrix.002 file - promoters60/1442189
caataaa

SEQ ID NO: 50183 - DNA, 6 bp, Unknown
  misc_feature (1)..( 6): Matrix.002 file - promoters60/1442189
aagata

SEQ ID NO: 50184 - DNA, 6 bp, Unknown
  misc_feature (1)..( 6): Matrix.002 file - promoters60/1442189
ttttcc

SEQ ID NO: 50185 - DNA, 6 bp, Unknown
  misc_feature (1)..( 6): Matrix.002 file - promoters60/1442189
ttaaaa

SEQ ID NO: 50186 - DNA, 6 bp, Unknown
  misc_feature (1)..( 6): Matrix.002 file - promoters60/1442189
atataa

SEQ ID NO: 50187 - DNA, 6 bp, Unknown
  misc_feature (1)..( 6): Matrix.002 file - promoters60/1442189
ataaac

SEQ ID NO: 50188 - DNA, 7 bp, Unknown
  misc_feature (1)..( 7): Matrix.002 file - promoters60/1442189
gtgggat

SEQ ID NO: 50189 - DNA, 6 bp, Unknown
  misc_feature (1)..( 6): Matrix.002 file - promoters60/1442189
aaaaat

SEQ ID NO: 50190 - DNA, 9 bp, Unknown
  misc_feature (1)..( 9): Matrix.002 file - promoters60/1442189
aaacgaaga

SEQ ID NO: 50191 - DNA, 7 bp, Unknown
  misc_feature (1)..( 7): Matrix.002 file - promoters60/1442189
attctaa

SEQ ID NO: 50192 - DNA, 6 bp, Unknown
  misc_feature (1)..( 6): Matrix.002 file - promoters60/1442189
aacgga

SEQ ID NO: 50193 - DNA, 8 bp, Unknown
  misc_feature (1)..( 8): Matrix.002 file - promoters60/1442189
aaaatata

SEQ ID NO: 50194 - DNA, 6 bp, Unknown
  misc_feature (1)..( 6): Matrix.002 file - promoters60/1442189
tttgaa

SEQ ID NO: 50195 - DNA, 7 bp, Unknown
  misc_feature (1)..( 7): Matrix.002 file - promoters60/1442189
tatcgca

SEQ ID NO: 50196 - DNA, 8 bp, Unknown
  misc_feature (1)..( 8): Matrix.002 file - promoters60/1442189
agatccac

SEQ ID NO: 50197 - DNA, 13 bp, Unknown
  misc_feature (1)..( 13): Matrix.002 file - promoters60/1442189
ttttctctcattc

SEQ ID NO: 50198 - DNA, 8 bp, Unknown
  misc_feature (1)..( 8): Matrix.002 file - promoters60/1442240
tgcataag

SEQ ID NO: 50199 - DNA, 10 bp, Unknown
  misc_feature (1)..( 10): Matrix.002 file - promoters60/1442240
tgaatctatt

SEQ ID NO: 50200 - DNA, 13 bp, Unknown
  misc_feature (1)..( 13): Matrix.002 file - promoters60/1442240
agattttcaaaac

SEQ ID NO: 50201 - DNA, 12 bp, Unknown
  misc_feature (1)..( 12): Matrix.002 file - promoters60/1442240
agtttttgatat

SEQ ID NO: 50202 - DNA, 9 bp, Unknown
  misc_feature (1)..( 9): Matrix.002 file - promoters60/1442240
agattttca

SEQ ID NO: 50203 - DNA, 10 bp, Unknown
  misc_feature (1)..( 10): Matrix.002 file - promoters60/1442240
acattttcaa

SEQ ID NO: 50204 - DNA, 9 bp, Unknown
  misc_feature (1)..( 9): Matrix.002 file - promoters60/1442240
atcaacaaa

SEQ ID NO: 50205 - DNA, 9 bp, Unknown
  misc_feature (1)..( 9): Matrix.002 file - promoters60/1442244
acatcttta

SEQ ID NO: 50206 - DNA, 12 bp, Unknown
  misc_feature (1)..( 12): Matrix.002 file - promoters60/1442244
gcagttacaaaa

SEQ ID NO: 50207 - DNA, 8 bp, Unknown
  misc_feature (1)..( 8): Matrix.002 file - promoters60/1442244
attaaaaa

SEQ ID NO: 50208 - DNA, 12 bp, Unknown
  misc_feature (1)..( 12): Matrix.002 file - promoters60/1442244
atgtaataacac

SEQ ID NO: 50209 - DNA, 8 bp, Unknown
  misc_feature (1)..( 8): Matrix.002 file - promoters60/1442244
tataaaaa

SEQ ID NO: 50210 - DNA, 12 bp, Unknown
  misc_feature (1)..( 12): Matrix.002 file - promoters60/1442244
aaaagaaaaaaa

SEQ ID NO: 50211 - DNA, 6 bp, Unknown
  misc_feature (1)..( 6): Matrix.002 file - promoters60/1442316
aaaaga

SEQ ID NO: 50212 - DNA, 7 bp, Unknown
  misc_feature (1)..( 7): Matrix.002 file - promoters60/1442316
attaaaa

SEQ ID NO: 50213 - DNA, 10 bp, Unknown
  misc_feature (1)..( 10): Matrix.002 file - promoters60/1442316
taacaaatta

SEQ ID NO: 50214 - DNA, 10 bp, Unknown
  misc_feature (1)..( 10): Matrix.002 file - promoters60/1442316
aattataatt

SEQ ID NO: 50215 - DNA, 11 bp, Unknown
  misc_feature (1)..( 11): Matrix.002 file - promoters60/1442326
gaaaaaggccc

SEQ ID NO: 50216 - DNA, 7 bp, Unknown
  misc_feature (1)..( 7): Matrix.002 file - promoters60/1442326
aaaaaag

SEQ ID NO: 50217 - DNA, 8 bp, Unknown
  misc_feature (1)..( 8): Matrix.002 file - promoters60/1442326
caaaaaaa

SEQ ID NO: 50218 - DNA, 8 bp, Unknown
  misc_feature (1)..( 8): Matrix.002 file - promoters60/1442326
caaaagac

SEQ ID NO: 50219 - DNA, 10 bp, Unknown
  misc_feature (1)..( 10): Matrix.002 file - promoters60/1442408
ataatattaa

SEQ ID NO: 50220 - DNA, 11 bp, Unknown
  misc_feature (1)..( 11): Matrix.002 file - promoters60/1442408
cataaatgtat

SEQ ID NO: 50221 - DNA, 8 bp, Unknown
  misc_feature (1)..( 8): Matrix.002 file - promoters60/1442408
ttaatatt

SEQ ID NO: 50222 - DNA, 9 bp, Unknown
  misc_feature (1)..( 9): Matrix.002 file - promoters60/1442408
tatatttaa

SEQ ID NO: 50223 - DNA, 10 bp, Unknown
  misc_feature (1)..( 10): Matrix.002 file - promoters60/1442408
aaatcaaatg

SEQ ID NO: 50224 - DNA, 7 bp, Unknown
  misc_feature (1)..( 7): Matrix.002 file - promoters60/1442427
gtcgaaa

SEQ ID NO: 50225 - DNA, 7 bp, Unknown
  misc_feature (1)..( 7): Matrix.002 file - promoters60/1442427
aaacatt

SEQ ID NO: 50226 - DNA, 10 bp, Unknown
  misc_feature (1)..( 10): Matrix.002 file - promoters60/1442427
taaatttgct

SEQ ID NO: 50227 - DNA, 9 bp, Unknown
  misc_feature (1)..( 9): Matrix.002 file - promoters60/1442427
tcagtaaga

SEQ ID NO: 50228 - DNA, 7 bp, Unknown
  misc_feature (1)..( 7): Matrix.002 file - promoters60/1442427
tttattg

SEQ ID NO: 50229 - DNA, 7 bp, Unknown
  misc_feature (1)..( 7): Matrix.002 file - promoters60/1442427
tgaaaaa

SEQ ID NO: 50230 - DNA, 6 bp, Unknown
  misc_feature (1)..( 6): Matrix.002 file - promoters60/1442427
aatatt

SEQ ID NO: 50231 - DNA, 12 bp, Unknown
  misc_feature (1)..( 12): Matrix.002 file - promoters60/1442427
ttagtttggtct

SEQ ID NO: 50232 - DNA, 6 bp, Unknown
  misc_feature (1)..( 6): Matrix.002 file - promoters60/1442427
ttttat

SEQ ID NO: 50233 - DNA, 9 bp, Unknown
  misc_feature (1)..( 9): Matrix.002 file - promoters60/1442427
attagaaga

SEQ ID NO: 50234 - DNA, 6 bp, Unknown
  misc_feature (1)..( 6): Matrix.002 file - promoters60/1442452
atgttt

SEQ ID NO: 50235 - DNA, 18 bp, Unknown
  misc_feature (1)..( 18): Matrix.002 file - promoters60/1442452
tttatattttagaaaaat

SEQ ID NO: 50236 - DNA, 11 bp, Unknown
  misc_feature (1)..( 11): Matrix.002 file - promoters60/1442452
ttttgaagaat

SEQ ID NO: 50237 - DNA, 11 bp, Unknown
  misc_feature (1)..( 11): Matrix.002 file - promoters60/1442452
atttccataaa

SEQ ID NO: 50238 - DNA, 10 bp, Unknown
  misc_feature (1)..( 10): Matrix.002 file - promoters60/1442452
aaaatgttag

SEQ ID NO: 50239 - DNA, 6 bp, Unknown
  misc_feature (1)..( 6): Matrix.002 file - promoters60/1442452
taaaat

SEQ ID NO: 50240 - DNA, 7 bp, Unknown
  misc_feature (1)..( 7): Matrix.002 file - promoters60/1442452
attaaag

SEQ ID NO: 50241 - DNA, 11 bp, Unknown
  misc_feature (1)..( 11): Matrix.002 file - promoters60/1442452
atccaacggca

SEQ ID NO: 50242 - DNA, 7 bp, Unknown
  misc_feature (1)..( 7): Matrix.002 file - promoters60/1442452
tccacgt

SEQ ID NO: 50243 - DNA, 8 bp, Unknown
  misc_feature (1)..( 8): Matrix.002 file - promoters60/1442452
tatataaa

SEQ ID NO: 50244 - DNA, 10 bp, Unknown
  misc_feature (1)..( 10): Matrix.002 file - promoters60/1442452
tataaacaaa

SEQ ID NO: 50245 - DNA, 6 bp, Unknown
  misc_feature (1)..( 6): Matrix.002 file - promoters60/1442452
aaattc

SEQ ID NO: 50246 - DNA, 7 bp, Unknown
  misc_feature (1)..( 7): Matrix.002 file - promoters60/1442452
tttgaaa

SEQ ID NO: 50247 - DNA, 7 bp, Unknown
  misc_feature (1)..( 7): Matrix.002 file - promoters60/1442452
actctgt

SEQ ID NO: 50248 - DNA, 6 bp, Unknown
  misc_feature (1)..( 6): Matrix.002 file - promoters60/1442452
atctcc

SEQ ID NO: 50249 - DNA, 8 bp, Unknown
  misc_feature (1)..( 8): Matrix.002 file - promoters60/1442452
atccgcgt

SEQ ID NO: 50250 - DNA, 14 bp, Unknown
  misc_feature (1)..( 14): Matrix.002 file - promoters60/1442452
taaccaatcagatc

SEQ ID NO: 50251 - DNA, 6 bp, Unknown
  misc_feature (1)..( 6): Matrix.002 file - promoters60/1442452
tattct

SEQ ID NO: 50252 - DNA, 9 bp, Unknown
  misc_feature (1)..( 9): Matrix.002 file - promoters60/1442452
aatacaaca

SEQ ID NO: 50253 - DNA, 7 bp, Unknown
  misc_feature (1)..( 7): Matrix.002 file - promoters60/1442452
atactat

SEQ ID NO: 50254 - DNA, 8 bp, Unknown
  misc_feature (1)..( 8): Matrix.002 file - promoters60/1442452
agatatgt

SEQ ID NO: 50255 - DNA, 15 bp, Unknown
  misc_feature (1)..( 15): Matrix.002 file - promoters60/1442452
ttataaaccgtcgat

SEQ ID NO: 50256 - DNA, 8 bp, Unknown
  misc_feature (1)..( 8): Matrix.002 file - promoters60/1442468
gttgtttc

SEQ ID NO: 50257 - DNA, 8 bp, Unknown
  misc_feature (1)..( 8): Matrix.002 file - promoters60/1442468
tttttttg

SEQ ID NO: 50258 - DNA, 12 bp, Unknown
  misc_feature (1)..( 12): Matrix.002 file - promoters60/1442468
tttcgtttttgt

SEQ ID NO: 50259 - DNA, 8 bp, Unknown
  misc_feature (1)..( 8): Matrix.002 file - promoters60/1442468
ctatttga

SEQ ID NO: 50260 - DNA, 10 bp, Unknown
  misc_feature (1)..( 10): Matrix.002 file - promoters60/1442468
aaattgtaaa

SEQ ID NO: 50261 - DNA, 8 bp, Unknown
  misc_feature (1)..( 8): Matrix.002 file - promoters60/1442468
ctaaacat

SEQ ID NO: 50262 - DNA, 14 bp, Unknown
  misc_feature (1)..( 14): Matrix.002 file - promoters60/1442468
attgccaaaaccaa

SEQ ID NO: 50263 - DNA, 7 bp, Unknown
  misc_feature (1)..( 7): Matrix.002 file - promoters60/1442468
gaaacag

SEQ ID NO: 50264 - DNA, 11 bp, Unknown
  misc_feature (1)..( 11): Matrix.002 file - promoters60/1442504
aacaaaaaaag

SEQ ID NO: 50265 - DNA, 12 bp, Unknown
  misc_feature (1)..( 12): Matrix.002 file - promoters60/1442649
tatcatttttag

SEQ ID NO: 50266 - DNA, 8 bp, Unknown
  misc_feature (1)..( 8): Matrix.002 file - promoters60/1442649
tttatttt

SEQ ID NO: 50267 - DNA, 8 bp, Unknown
  misc_feature (1)..( 8): Matrix.002 file - promoters60/1442649
aaacaaat

SEQ ID NO: 50268 - DNA, 8 bp, Unknown
  misc_feature (1)..( 8): Matrix.002 file - promoters60/1442777
atatcttt

SEQ ID NO: 50269 - DNA, 10 bp, Unknown
  misc_feature (1)..( 10): Matrix.002 file - promoters60/1442777
atatcaaaaa

SEQ ID NO: 50270 - DNA, 11 bp, Unknown
  misc_feature (1)..( 11): Matrix.002 file - promoters60/1442777
taatcccaacg

SEQ ID NO: 50271 - DNA, 9 bp, Unknown
  misc_feature (1)..( 9): Matrix.002 file - promoters60/1442777
gatgtataa

SEQ ID NO: 50272 - DNA, 16 bp, Unknown
  misc_feature (1)..( 16): Matrix.002 file - promoters60/1442777
attttgaaataaattt

SEQ ID NO: 50273 - DNA, 17 bp, Unknown
  misc_feature (1)..( 17): Matrix.002 file - promoters60/1442777
aattgttaattaaattt

SEQ ID NO: 50274 - DNA, 9 bp, Unknown
  misc_feature (1)..( 9): Matrix.002 file - promoters60/1442777
taatgtgac

SEQ ID NO: 50275 - DNA, 11 bp, Unknown
  misc_feature (1)..( 11): Matrix.002 file - promoters60/1442777
atgtataactt

SEQ ID NO: 50276 - DNA, 14 bp, Unknown
  misc_feature (1)..( 14): Matrix.002 file - promoters60/1442777
atgtataactttat

SEQ ID NO: 50277 - DNA, 9 bp, Unknown
  misc_feature (1)..( 9): Matrix.002 file - promoters60/1442777
tatataaat

SEQ ID NO: 50278 - DNA, 12 bp, Unknown
  misc_feature (1)..( 12): Matrix.002 file - promoters60/1442880
aaataattgtat

SEQ ID NO: 50279 - DNA, 10 bp, Unknown
  misc_feature (1)..( 10): Matrix.002 file - promoters60/1442880
gaaatagatt

SEQ ID NO: 50280 - DNA, 11 bp, Unknown
  misc_feature (1)..( 11): Matrix.002 file - promoters60/1442880
ttacttaaatt

SEQ ID NO: 50281 - DNA, 8 bp, Unknown
  misc_feature (1)..( 8): Matrix.002 file - promoters60/1442887
cataatta

SEQ ID NO: 50282 - DNA, 9 bp, Unknown
  misc_feature (1)..( 9): Matrix.002 file - promoters60/1442887
tcaatcact

SEQ ID NO: 50283 - DNA, 8 bp, Unknown
  misc_feature (1)..( 8): Matrix.002 file - promoters60/1442887
tttctttg

SEQ ID NO: 50284 - DNA, 9 bp, Unknown
  misc_feature (1)..( 9): Matrix.002 file - promoters60/1442887
gctaatcac

SEQ ID NO: 50285 - DNA, 6 bp, Unknown
  misc_feature (1)..( 6): Matrix.002 file - promoters60/1442887
aatgaa

SEQ ID NO: 50286 - DNA, 8 bp, Unknown
  misc_feature (1)..( 8): Matrix.002 file - promoters60/1442887
tattagtt

SEQ ID NO: 50287 - DNA, 7 bp, Unknown
  misc_feature (1)..( 7): Matrix.002 file - promoters60/1442887
ttagatc

SEQ ID NO: 50288 - DNA, 6 bp, Unknown
  misc_feature (1)..( 6): Matrix.002 file - promoters60/1442887
gaaatc

SEQ ID NO: 50289 - DNA, 6 bp, Unknown
  misc_feature (1)..( 6): Matrix.002 file - promoters60/1442887
ttgaac

SEQ ID NO: 50290 - DNA, 6 bp, Unknown
  misc_feature (1)..( 6): Matrix.002 file - promoters60/1442887
attttg

SEQ ID NO: 50291 - DNA, 6 bp, Unknown
  misc_feature (1)..( 6): Matrix.002 file - promoters60/1442887
ttgggt

SEQ ID NO: 50292 - DNA, 6 bp, Unknown
  misc_feature (1)..( 6): Matrix.002 file - promoters60/1442887
ttatta

SEQ ID NO: 50293 - DNA, 6 bp, Unknown
  misc_feature (1)..( 6): Matrix.002 file - promoters60/1442887
tttgtt

SEQ ID NO: 50294 - DNA, 6 bp, Unknown
  misc_feature (1)..( 6): Matrix.002 file - promoters60/1442887
agtaaa

SEQ ID NO: 50295 - DNA, 7 bp, Unknown
  misc_feature (1)..( 7): Matrix.002 file - promoters60/1442887
aatcggg

SEQ ID NO: 50296 - DNA, 8 bp, Unknown
  misc_feature (1)..( 8): Matrix.002 file - promoters60/1442887
gaaacaaa

SEQ ID NO: 50297 - DNA, 10 bp, Unknown
  misc_feature (1)..( 10): Matrix.002 file - promoters60/1442887
ggaaaagaaa

SEQ ID NO: 50298 - DNA, 7 bp, Unknown
  misc_feature (1)..( 7): Matrix.002 file - promoters60/1442887
cccacta

SEQ ID NO: 50299 - DNA, 9 bp, Unknown
  misc_feature (1)..( 9): Matrix.002 file - promoters60/1442887
aaagaaaag

SEQ ID NO: 50300 - DNA, 7 bp, Unknown
  misc_feature (1)..( 7): Matrix.002 file - promoters60/1442887
gtatata

SEQ ID NO: 50301 - DNA, 6 bp, Unknown
  misc_feature (1)..( 6): Matrix.002 file - promoters60/1442945
aaagaa

SEQ ID NO: 50302 - DNA, 8 bp, Unknown
  misc_feature (1)..( 8): Matrix.002 file - promoters60/1442945
attttaat

SEQ ID NO: 50303 - DNA, 6 bp, Unknown
  misc_feature (1)..( 6): Matrix.002 file - promoters60/1442945
aaccaa

SEQ ID NO: 50304 - DNA, 6 bp, Unknown
  misc_feature (1)..( 6): Matrix.002 file - promoters60/1442945
aaaatt

SEQ ID NO: 50305 - DNA, 9 bp, Unknown
  misc_feature (1)..( 9): Matrix.002 file - promoters60/1442945
ttcaaattc

SEQ ID NO: 50306 - DNA, 8 bp, Unknown
  misc_feature (1)..( 8): Matrix.002 file - promoters60/1442945
ttagctgg

SEQ ID NO: 50307 - DNA, 9 bp, Unknown
  misc_feature (1)..( 9): Matrix.002 file - promoters60/1442945
agtacaatg

SEQ ID NO: 50308 - DNA, 6 bp, Unknown
  misc_feature (1)..( 6): Matrix.002 file - promoters60/1442945
gaacat

SEQ ID NO: 50309 - DNA, 6 bp, Unknown
  misc_feature (1)..( 6): Matrix.002 file - promoters60/1442945
ttattt

SEQ ID NO: 50310 - DNA, 6 bp, Unknown
  misc_feature (1)..( 6): Matrix.002 file - promoters60/1442945
tctttt

SEQ ID NO: 50311 - DNA, 10 bp, Unknown
  misc_feature (1)..( 10): Matrix.002 file - promoters60/1442945
ttttaattaa

SEQ ID NO: 50312 - DNA, 6 bp, Unknown
  misc_feature (1)..( 6): Matrix.002 file - promoters60/1442945
aatttc

SEQ ID NO: 50313 - DNA, 8 bp, Unknown
  misc_feature (1)..( 8): Matrix.002 file - promoters60/1442945
aaaatttc

SEQ ID NO: 50314 - DNA, 7 bp, Unknown
  misc_feature (1)..( 7): Matrix.002 file - promoters60/1442945
tttaata

SEQ ID NO: 50315 - DNA, 7 bp, Unknown
  misc_feature (1)..( 7): Matrix.002 file - promoters60/1442945
caaaaac

SEQ ID NO: 50316 - DNA, 8 bp, Unknown
  misc_feature (1)..( 8): Matrix.002 file - promoters60/1442945
aaaagcgc

SEQ ID NO: 50317 - DNA, 8 bp, Unknown
  misc_feature (1)..( 8): Matrix.002 file - promoters60/1442945
tatacata

SEQ ID NO: 50318 - DNA, 7 bp, Unknown
  misc_feature (1)..( 7): Matrix.002 file - promoters60/1442945
aaccgaa

SEQ ID NO: 50319 - DNA, 6 bp, Unknown
  misc_feature (1)..( 6): Matrix.002 file - promoters60/1442945
aatttt

SEQ ID NO: 50320 - DNA, 7 bp, Unknown
  misc_feature (1)..( 7): Matrix.002 file - promoters60/1442945
cataaac

SEQ ID NO: 50321 - DNA, 6 bp, Unknown
  misc_feature (1)..( 6): Matrix.002 file - promoters60/1442945
ctcctt

SEQ ID NO: 50322 - DNA, 9 bp, Unknown
  misc_feature (1)..( 9): Matrix.002 file - promoters60/1442945
tttcaattt

SEQ ID NO: 50323 - DNA, 7 bp, Unknown
  misc_feature (1)..( 7): Matrix.002 file - promoters60/1442945
tttctct

SEQ ID NO: 50324 - DNA, 6 bp, Unknown
  misc_feature (1)..( 6): Matrix.002 file - promoters60/1442945
taacat

SEQ ID NO: 50325 - DNA, 6 bp, Unknown
  misc_feature (1)..( 6): Matrix.002 file - promoters60/1442945
ttttta

SEQ ID NO: 50326 - DNA, 6 bp, Unknown
  misc_feature (1)..( 6): Matrix.002 file - promoters60/1442945
ataata

SEQ ID NO: 50327 - DNA, 8 bp, Unknown
  misc_feature (1)..( 8): Matrix.002 file - promoters60/1442945
catatata

SEQ ID NO: 50328 - DNA, 9 bp, Unknown
  misc_feature (1)..( 9): Matrix.002 file - promoters60/1442953
aaaaaatct

SEQ ID NO: 50329 - DNA, 9 bp, Unknown
  misc_feature (1)..( 9): Matrix.002 file - promoters60/1442953
tcaaacaaa

SEQ ID NO: 50330 - DNA, 7 bp, Unknown
  misc_feature (1)..( 7): Matrix.002 file - promoters60/1442953
tagaaca

SEQ ID NO: 50331 - DNA, 11 bp, Unknown
  misc_feature (1)..( 11): Matrix.002 file - promoters60/1442953
tttagtcaaaa

SEQ ID NO: 50332 - DNA, 9 bp, Unknown
  misc_feature (1)..( 9): Matrix.002 file - promoters60/1442953
aaaagaaat

SEQ ID NO: 50333 - DNA, 8 bp, Unknown
  misc_feature (1)..( 8): Matrix.002 file - promoters60/1442967
acaataaa

SEQ ID NO: 50334 - DNA, 6 bp, Unknown
  misc_feature (1)..( 6): Matrix.002 file - promoters60/1442967
acaaaa

SEQ ID NO: 50335 - DNA, 6 bp, Unknown
  misc_feature (1)..( 6): Matrix.002 file - promoters60/1442967
tatata

SEQ ID NO: 50336 - DNA, 7 bp, Unknown
  misc_feature (1)..( 7): Matrix.002 file - promoters60/1442967
tatataa

SEQ ID NO: 50337 - DNA, 6 bp, Unknown
  misc_feature (1)..( 6): Matrix.002 file - promoters60/1442967
aaggtc

SEQ ID NO: 50338 - DNA, 10 bp, Unknown
  misc_feature (1)..( 10): Matrix.002 file - promoters60/1442967
aagtaggact

SEQ ID NO: 50339 - DNA, 8 bp, Unknown
  misc_feature (1)..( 8): Matrix.002 file - promoters60/1442967
aaagaaac

SEQ ID NO: 50340 - DNA, 6 bp, Unknown
  misc_feature (1)..( 6): Matrix.002 file - promoters60/1442967
caagaa

SEQ ID NO: 50341 - DNA, 6 bp, Unknown
  misc_feature (1)..( 6): Matrix.002 file - promoters60/1442967
tcttct

SEQ ID NO: 50342 - DNA, 8 bp, Unknown
  misc_feature (1)..( 8): Matrix.002 file - promoters60/1442967
aacacaaa

SEQ ID NO: 50343 - DNA, 6 bp, Unknown
  misc_feature (1)..( 6): Matrix.002 file - promoters60/1442967
tctcac

SEQ ID NO: 50344 - DNA, 6 bp, Unknown
  misc_feature (1)..( 6): Matrix.002 file - promoters60/1442967
tctcta

SEQ ID NO: 50345 - DNA, 6 bp, Unknown
  misc_feature (1)..( 6): Matrix.002 file - promoters60/1442967
attatc

SEQ ID NO: 50346 - DNA, 6 bp, Unknown
  misc_feature (1)..( 6): Matrix.002 file - promoters60/1442967
agaaat

SEQ ID NO: 50347 - DNA, 6 bp, Unknown
  misc_feature (1)..( 6): Matrix.002 file - promoters60/1442967
tcaaac

SEQ ID NO: 50348 - DNA, 6 bp, Unknown
  misc_feature (1)..( 6): Matrix.002 file - promoters60/1442967
caaagt

SEQ ID NO: 50349 - DNA, 9 bp, Unknown
  misc_feature (1)..( 9): Matrix.002 file - promoters60/1442967
aaaagtctc

SEQ ID NO: 50350 - DNA, 8 bp, Unknown
  misc_feature (1)..( 8): Matrix.002 file - promoters60/1442967
cttactat

SEQ ID NO: 50351 - DNA, 12 bp, Unknown
  misc_feature (1)..( 12): Matrix.002 file - promoters60/1442975
ctttttgtatat

SEQ ID NO: 50352 - DNA, 6 bp, Unknown
  misc_feature (1)..( 6): Matrix.002 file - promoters60/1442975
attgaa

SEQ ID NO: 50353 - DNA, 6 bp, Unknown
  misc_feature (1)..( 6): Matrix.002 file - promoters60/1442975
tgaaca

SEQ ID NO: 50354 - DNA, 7 bp, Unknown
  misc_feature (1)..( 7): Matrix.002 file - promoters60/1442975
tctacga

SEQ ID NO: 50355 - DNA, 7 bp, Unknown
  misc_feature (1)..( 7): Matrix.002 file - promoters60/1442975
aggattt

SEQ ID NO: 50356 - DNA, 10 bp, Unknown
  misc_feature (1)..( 10): Matrix.002 file - promoters60/1442975
gcaggagatg

SEQ ID NO: 50357 - DNA, 8 bp, Unknown
  misc_feature (1)..( 8): Matrix.002 file - promoters60/1442975
tctgaatt

SEQ ID NO: 50358 - DNA, 6 bp, Unknown
  misc_feature (1)..( 6): Matrix.002 file - promoters60/1442975
aatcta

SEQ ID NO: 50359 - DNA, 6 bp, Unknown
  misc_feature (1)..( 6): Matrix.002 file - promoters60/1442975
catcaa

SEQ ID NO: 50360 - DNA, 8 bp, Unknown
  misc_feature (1)..( 8): Matrix.002 file - promoters60/1442975
gattcgtg

SEQ ID NO: 50361 - DNA, 7 bp, Unknown
  misc_feature (1)..( 7): Matrix.002 file - promoters60/1442975
cacggtc

SEQ ID NO: 50362 - DNA, 6 bp, Unknown
  misc_feature (1)..( 6): Matrix.002 file - promoters60/1442975
ggttta

SEQ ID NO: 50363 - DNA, 6 bp, Unknown
  misc_feature (1)..( 6): Matrix.002 file - promoters60/1442975
ttgact

SEQ ID NO: 50364 - DNA, 6 bp, Unknown
  misc_feature (1)..( 6): Matrix.002 file - promoters60/1442975
ggctgt

SEQ ID NO: 50365 - DNA, 9 bp, Unknown
  misc_feature (1)..( 9): Matrix.002 file - promoters60/1442993
acctctttt

SEQ ID NO: 50366 - DNA, 8 bp, Unknown
  misc_feature (1)..( 8): Matrix.002 file - promoters60/1442993
aaatctac

SEQ ID NO: 50367 - DNA, 12 bp, Unknown
  misc_feature (1)..( 12): Matrix.002 file - promoters60/1442993
aaataattgtat

SEQ ID NO: 50368 - DNA, 10 bp, Unknown
  misc_feature (1)..( 10): Matrix.002 file - promoters60/1442993
gaaatagatt

SEQ ID NO: 50369 - DNA, 11 bp, Unknown
  misc_feature (1)..( 11): Matrix.002 file - promoters60/1442993
ttacttaaatt

SEQ ID NO: 50370 - DNA, 7 bp, Unknown
  misc_feature (1)..( 7): Matrix.002 file - promoters60/1442993
taattca

SEQ ID NO: 50371 - DNA, 7 bp, Unknown
  misc_feature (1)..( 7): Matrix.002 file - promoters60/1443011
ataagca

SEQ ID NO: 50372 - DNA, 7 bp, Unknown
  misc_feature (1)..( 7): Matrix.002 file - promoters60/1443011
aataata

SEQ ID NO: 50373 - DNA, 6 bp, Unknown
  misc_feature (1)..( 6): Matrix.002 file - promoters60/1443011
aatcaa

SEQ ID NO: 50374 - DNA, 8 bp, Unknown
  misc_feature (1)..( 8): Matrix.002 file - promoters60/1443011
aaaccgtc

SEQ ID NO: 50375 - DNA, 7 bp, Unknown
  misc_feature (1)..( 7): Matrix.002 file - promoters60/1443011
aataatt

SEQ ID NO: 50376 - DNA, 6 bp, Unknown
  misc_feature (1)..( 6): Matrix.002 file - promoters60/1443011
taatat

SEQ ID NO: 50377 - DNA, 6 bp, Unknown
  misc_feature (1)..( 6): Matrix.002 file - promoters60/1443011
tgattg

SEQ ID NO: 50378 - DNA, 7 bp, Unknown
  misc_feature (1)..( 7): Matrix.002 file - promoters60/1443011
tttcaag

SEQ ID NO: 50379 - DNA, 11 bp, Unknown
  misc_feature (1)..( 11): Matrix.002 file - promoters60/1443011
agacagaaaga

SEQ ID NO: 50380 - DNA, 9 bp, Unknown
  misc_feature (1)..( 9): Matrix.002 file - promoters60/1443011
ataaacgaa

SEQ ID NO: 50381 - DNA, 8 bp, Unknown
  misc_feature (1)..( 8): Matrix.002 file - promoters60/1443011
ctaatcac

SEQ ID NO: 50382 - DNA, 7 bp, Unknown
  misc_feature (1)..( 7): Matrix.002 file - promoters60/1443011
taaaggg

SEQ ID NO: 50383 - DNA, 6 bp, Unknown
  misc_feature (1)..( 6): Matrix.002 file - promoters60/1443011
tctctc

SEQ ID NO: 50384 - DNA, 6 bp, Unknown
  misc_feature (1)..( 6): Matrix.002 file - promoters60/1443011
gtaatc

SEQ ID NO: 50385 - DNA, 6 bp, Unknown
  misc_feature (1)..( 6): Matrix.002 file - promoters60/1443011
tatttt

SEQ ID NO: 50386 - DNA, 6 bp, Unknown
  misc_feature (1)..( 6): Matrix.002 file - promoters60/1443011
aaataa

SEQ ID NO: 50387 - DNA, 6 bp, Unknown
  misc_feature (1)..( 6): Matrix.002 file - promoters60/1443011
acaaaa

SEQ ID NO: 50388 - DNA, 6 bp, Unknown
  misc_feature (1)..( 6): Matrix.002 file - promoters60/1443011
gaaaaa

SEQ ID NO: 50389 - DNA, 12 bp, Unknown
  misc_feature (1)..( 12): Matrix.002 file - promoters60/1443021
tcaaaatttatc

SEQ ID NO: 50390 - DNA, 7 bp, Unknown
  misc_feature (1)..( 7): Matrix.002 file - promoters60/1443021
caacaaa

SEQ ID NO: 50391 - DNA, 8 bp, Unknown
  misc_feature (1)..( 8): Matrix.002 file - promoters60/1443021
atccaata

SEQ ID NO: 50392 - DNA, 6 bp, Unknown
  misc_feature (1)..( 6): Matrix.002 file - promoters60/1443021
tgttca

SEQ ID NO: 50393 - DNA, 8 bp, Unknown
  misc_feature (1)..( 8): Matrix.002 file - promoters60/1443021
gtcatttt

SEQ ID NO: 50394 - DNA, 8 bp, Unknown
  misc_feature (1)..( 8): Matrix.002 file - promoters60/1443021
tctggact

SEQ ID NO: 50395 - DNA, 6 bp, Unknown
  misc_feature (1)..( 6): Matrix.002 file - promoters60/1443021
tatagt

SEQ ID NO: 50396 - DNA, 7 bp, Unknown
  misc_feature (1)..( 7): Matrix.002 file - promoters60/1443021
aatatta

SEQ ID NO: 50397 - DNA, 6 bp, Unknown
  misc_feature (1)..( 6): Matrix.002 file - promoters60/1443021
tactgt

SEQ ID NO: 50398 - DNA, 6 bp, Unknown
  misc_feature (1)..( 6): Matrix.002 file - promoters60/1443021
ttgaaa

SEQ ID NO: 50399 - DNA, 7 bp, Unknown
  misc_feature (1)..( 7): Matrix.002 file - promoters60/1443021
cttctcc

SEQ ID NO: 50400 - DNA, 7 bp, Unknown
  misc_feature (1)..( 7): Matrix.002 file - promoters60/1443021
ttcatgt

SEQ ID NO: 50401 - DNA, 7 bp, Unknown
  misc_feature (1)..( 7): Matrix.002 file - promoters60/1443021
aagattt

SEQ ID NO: 50402 - DNA, 10 bp, Unknown
  misc_feature (1)..( 10): Matrix.002 file - promoters60/1443021
atattttttt

SEQ ID NO: 50403 - DNA, 7 bp, Unknown
  misc_feature (1)..( 7): Matrix.002 file - promoters60/1443021
tacctca

SEQ ID NO: 50404 - DNA, 7 bp, Unknown
  misc_feature (1)..( 7): Matrix.002 file - promoters60/1443021
tttgata

SEQ ID NO: 50405 - DNA, 9 bp, Unknown
  misc_feature (1)..( 9): Matrix.002 file - promoters60/1443021
catcattat

SEQ ID NO: 50406 - DNA, 11 bp, Unknown
  misc_feature (1)..( 11): Matrix.002 file - promoters60/1443029
agaattgacat

SEQ ID NO: 50407 - DNA, 6 bp, Unknown
  misc_feature (1)..( 6): Matrix.002 file - promoters60/1443075
aacgaa

SEQ ID NO: 50408 - DNA, 13 bp, Unknown
  misc_feature (1)..( 13): Matrix.002 file - promoters60/1443075
aaatcattttcaa

SEQ ID NO: 50409 - DNA, 8 bp, Unknown
  misc_feature (1)..( 8): Matrix.002 file - promoters60/1443075
gtgacaaa

SEQ ID NO: 50410 - DNA, 8 bp, Unknown
  misc_feature (1)..( 8): Matrix.002 file - promoters60/1443075
ataagaaa

SEQ ID NO: 50411 - DNA, 7 bp, Unknown
  misc_feature (1)..( 7): Matrix.002 file - promoters60/1443075
tgtgtga

SEQ ID NO: 50412 - DNA, 11 bp, Unknown
  misc_feature (1)..( 11): Matrix.002 file - promoters60/1443075
aaaaatgtcta

SEQ ID NO: 50413 - DNA, 6 bp, Unknown
  misc_feature (1)..( 6): Matrix.002 file - promoters60/1443075
ttaaaa

SEQ ID NO: 50414 - DNA, 8 bp, Unknown
  misc_feature (1)..( 8): Matrix.002 file - promoters60/1443075
aactgaca

SEQ ID NO: 50415 - DNA, 9 bp, Unknown
  misc_feature (1)..( 9): Matrix.002 file - promoters60/1443075
ctaaaatat

SEQ ID NO: 50416 - DNA, 10 bp, Unknown
  misc_feature (1)..( 10): Matrix.002 file - promoters60/1443075
aaaaagaaaa

SEQ ID NO: 50417 - DNA, 6 bp, Unknown
  misc_feature (1)..( 6): Matrix.002 file - promoters60/1443075
aagaaa

SEQ ID NO: 50418 - DNA, 6 bp, Unknown
  misc_feature (1)..( 6): Matrix.002 file - promoters60/1443075
aaaaaa

SEQ ID NO: 50419 - DNA, 6 bp, Unknown
  misc_feature (1)..( 6): Matrix.002 file - promoters60/1443075
taaaaa

SEQ ID NO: 50420 - DNA, 6 bp, Unknown
  misc_feature (1)..( 6): Matrix.002 file - promoters60/1443075
taaata

SEQ ID NO: 50421 - DNA, 11 bp, Unknown
  misc_feature (1)..( 11): Matrix.002 file - promoters60/1443075
taaaaaaaatt

SEQ ID NO: 50422 - DNA, 7 bp, Unknown
  misc_feature (1)..( 7): Matrix.002 file - promoters60/1443075
ttcgttc

SEQ ID NO: 50423 - DNA, 8 bp, Unknown
  misc_feature (1)..( 8): Matrix.002 file - promoters60/1443075
cattaatt

SEQ ID NO: 50424 - DNA, 6 bp, Unknown
  misc_feature (1)..( 6): Matrix.002 file - promoters60/1443075
agaaaa

SEQ ID NO: 50425 - DNA, 6 bp, Unknown
  misc_feature (1)..( 6): Matrix.002 file - promoters60/1443075
aaaaac

SEQ ID NO: 50426 - DNA, 11 bp, Unknown
  misc_feature (1)..( 11): Matrix.002 file - promoters60/1443083
atgttaaacat

SEQ ID NO: 50427 - DNA, 13 bp, Unknown
  misc_feature (1)..( 13): Matrix.002 file - promoters60/1443083
cagtaaatcatta

SEQ ID NO: 50428 - DNA, 10 bp, Unknown
  misc_feature (1)..( 10): Matrix.002 file - promoters60/1443114
attgtctttt

SEQ ID NO: 50429 - DNA, 7 bp, Unknown
  misc_feature (1)..( 7): Matrix.002 file - promoters60/1443114
gaaaaaa

SEQ ID NO: 50430 - DNA, 9 bp, Unknown
  misc_feature (1)..( 9): Matrix.002 file - promoters60/1443114
tctaagaat

SEQ ID NO: 50431 - DNA, 12 bp, Unknown
  misc_feature (1)..( 12): Matrix.002 file - promoters60/1443114
aaaactaagaat

SEQ ID NO: 50432 - DNA, 11 bp, Unknown
  misc_feature (1)..( 11): Matrix.002 file - promoters60/1443114
gcatttaaatt

SEQ ID NO: 50433 - DNA, 9 bp, Unknown
  misc_feature (1)..( 9): Matrix.002 file - promoters60/1443114
catttatca

SEQ ID NO: 50434 - DNA, 12 bp, Unknown
  misc_feature (1)..( 12): Matrix.002 file - promoters60/1443114
agaaaaaagtaa

SEQ ID NO: 50435 - DNA, 12 bp, Unknown
  misc_feature (1)..( 12): Matrix.002 file - promoters60/1443114
aaaaataaatat

SEQ ID NO: 50436 - DNA, 11 bp, Unknown
  misc_feature (1)..( 11): Matrix.002 file - promoters60/1443184
ataatttgagt

SEQ ID NO: 50437 - DNA, 8 bp, Unknown
  misc_feature (1)..( 8): Matrix.002 file - promoters60/1443184
aggaggaa

SEQ ID NO: 50438 - DNA, 8 bp, Unknown
  misc_feature (1)..( 8): Matrix.002 file - promoters60/1443184
gttacaac

SEQ ID NO: 50439 - DNA, 10 bp, Unknown
  misc_feature (1)..( 10): Matrix.002 file - promoters60/1443184
aatttataaa

SEQ ID NO: 50440 - DNA, 10 bp, Unknown
  misc_feature (1)..( 10): Matrix.002 file - promoters60/1443184
agaaaaaaga

SEQ ID NO: 50441 - DNA, 9 bp, Unknown
  misc_feature (1)..( 9): Matrix.002 file - promoters60/1443184
acttataaa

SEQ ID NO: 50442 - DNA, 18 bp, Unknown
  misc_feature (1)..( 18): Matrix.002 file - promoters60/1443192
aaaaattattaaataaaa

SEQ ID NO: 50443 - DNA, 9 bp, Unknown
  misc_feature (1)..( 9): Matrix.002 file - promoters60/1443192
atactaata

SEQ ID NO: 50444 - DNA, 13 bp, Unknown
  misc_feature (1)..( 13): Matrix.002 file - promoters60/1443192
ataatttttagtt

SEQ ID NO: 50445 - DNA, 7 bp, Unknown
  misc_feature (1)..( 7): Matrix.002 file - promoters60/1443192
attttac

SEQ ID NO: 50446 - DNA, 10 bp, Unknown
  misc_feature (1)..( 10): Matrix.002 file - promoters60/1443192
ctatataaat

SEQ ID NO: 50447 - DNA, 7 bp, Unknown
  misc_feature (1)..( 7): Matrix.002 file - promoters60/1443192
aatttta

SEQ ID NO: 50448 - DNA, 8 bp, Unknown
  misc_feature (1)..( 8): Matrix.002 file - promoters60/1443192
taattgaa

SEQ ID NO: 50449 - DNA, 7 bp, Unknown
  misc_feature (1)..( 7): Matrix.002 file - promoters60/1443192
gaaaaat

SEQ ID NO: 50450 - DNA, 9 bp, Unknown
  misc_feature (1)..( 9): Matrix.002 file - promoters60/1443256
aattattga

SEQ ID NO: 50451 - DNA, 10 bp, Unknown
  misc_feature (1)..( 10): Matrix.002 file - promoters60/1443271
aaaatatata

SEQ ID NO: 50452 - DNA, 9 bp, Unknown
  misc_feature (1)..( 9): Matrix.002 file - promoters60/1443271
ccataaaaa

SEQ ID NO: 50453 - DNA, 7 bp, Unknown
  misc_feature (1)..( 7): Matrix.002 file - promoters60/1443271
aaaatat

SEQ ID NO: 50454 - DNA, 8 bp, Unknown
  misc_feature (1)..( 8): Matrix.002 file - promoters60/1443271
atttcttt

SEQ ID NO: 50455 - DNA, 8 bp, Unknown
  misc_feature (1)..( 8): Matrix.002 file - promoters60/1443271
tgtttttc

SEQ ID NO: 50456 - DNA, 7 bp, Unknown
  misc_feature (1)..( 7): Matrix.002 file - promoters60/1443271
tttaaag

SEQ ID NO: 50457 - DNA, 6 bp, Unknown
  misc_feature (1)..( 6): Matrix.002 file - promoters60/1443271
aaacca

SEQ ID NO: 50458 - DNA, 7 bp, Unknown
  misc_feature (1)..( 7): Matrix.002 file - promoters60/1443271
tttattg

SEQ ID NO: 50459 - DNA, 9 bp, Unknown
  misc_feature (1)..( 9): Matrix.002 file - promoters60/1443271
tgtataagc

SEQ ID NO: 50460 - DNA, 8 bp, Unknown
  misc_feature (1)..( 8): Matrix.002 file - promoters60/1443271
aaaaatta

SEQ ID NO: 50461 - DNA, 6 bp, Unknown
  misc_feature (1)..( 6): Matrix.002 file - promoters60/1443271
gttaaa

SEQ ID NO: 50462 - DNA, 6 bp, Unknown
  misc_feature (1)..( 6): Matrix.002 file - promoters60/1443271
tgaaat

SEQ ID NO: 50463 - DNA, 8 bp, Unknown
  misc_feature (1)..( 8): Matrix.002 file - promoters60/1443271
ttttattt

SEQ ID NO: 50464 - DNA, 6 bp, Unknown
  misc_feature (1)..( 6): Matrix.002 file - promoters60/1443271
tttaaa

SEQ ID NO: 50465 - DNA, 7 bp, Unknown
  misc_feature (1)..( 7): Matrix.002 file - promoters60/1443271
tctcaat

SEQ ID NO: 50466 - DNA, 9 bp, Unknown
  misc_feature (1)..( 9): Matrix.002 file - promoters60/1443271
gtttaattt

SEQ ID NO: 50467 - DNA, 6 bp, Unknown
  misc_feature (1)..( 6): Matrix.002 file - promoters60/1443271
ttaatt

SEQ ID NO: 50468 - DNA, 6 bp, Unknown
  misc_feature (1)..( 6): Matrix.002 file - promoters60/1443271
atcact

SEQ ID NO: 50469 - DNA, 9 bp, Unknown
  misc_feature (1)..( 9): Matrix.002 file - promoters60/1443271
caaatatat

SEQ ID NO: 50470 - DNA, 7 bp, Unknown
  misc_feature (1)..( 7): Matrix.002 file - promoters60/1443271
tgtagat

SEQ ID NO: 50471 - DNA, 8 bp, Unknown
  misc_feature (1)..( 8): Matrix.002 file - promoters60/1443271
aatcttat

SEQ ID NO: 50472 - DNA, 6 bp, Unknown
  misc_feature (1)..( 6): Matrix.002 file - promoters60/1443271
ctatta

SEQ ID NO: 50473 - DNA, 9 bp, Unknown
  misc_feature (1)..( 9): Matrix.002 file - promoters60/1443271
ccatatata

SEQ ID NO: 50474 - DNA, 9 bp, Unknown
  misc_feature (1)..( 9): Matrix.002 file - promoters60/1443276
aatttaata

SEQ ID NO: 50475 - DNA, 7 bp, Unknown
  misc_feature (1)..( 7): Matrix.002 file - promoters60/1443276
atgaacg

SEQ ID NO: 50476 - DNA, 6 bp, Unknown
  misc_feature (1)..( 6): Matrix.002 file - promoters60/1443276
caacga

SEQ ID NO: 50477 - DNA, 6 bp, Unknown
  misc_feature (1)..( 6): Matrix.002 file - promoters60/1443276
ttgata

SEQ ID NO: 50478 - DNA, 8 bp, Unknown
  misc_feature (1)..( 8): Matrix.002 file - promoters60/1443276
aaaaggaa

SEQ ID NO: 50479 - DNA, 7 bp, Unknown
  misc_feature (1)..( 7): Matrix.002 file - promoters60/1443276
tttgtgt

SEQ ID NO: 50480 - DNA, 10 bp, Unknown
  misc_feature (1)..( 10): Matrix.002 file - promoters60/1443276
aaatattatt

SEQ ID NO: 50481 - DNA, 7 bp, Unknown
  misc_feature (1)..( 7): Matrix.002 file - promoters60/1443276
cgaattg

SEQ ID NO: 50482 - DNA, 7 bp, Unknown
  misc_feature (1)..( 7): Matrix.002 file - promoters60/1443276
ataaaac

SEQ ID NO: 50483 - DNA, 6 bp, Unknown
  misc_feature (1)..( 6): Matrix.002 file - promoters60/1443276
accaaa

SEQ ID NO: 50484 - DNA, 9 bp, Unknown
  misc_feature (1)..( 9): Matrix.002 file - promoters60/1443276
gactaaaag

SEQ ID NO: 50485 - DNA, 6 bp, Unknown
  misc_feature (1)..( 6): Matrix.002 file - promoters60/1443276
aagtct

SEQ ID NO: 50486 - DNA, 8 bp, Unknown
  misc_feature (1)..( 8): Matrix.002 file - promoters60/1443276
tcaataaa

SEQ ID NO: 50487 - DNA, 6 bp, Unknown
  misc_feature (1)..( 6): Matrix.002 file - promoters60/1443276
aaaaaa

SEQ ID NO: 50488 - DNA, 6 bp, Unknown
  misc_feature (1)..( 6): Matrix.002 file - promoters60/1443276
aaaaat

SEQ ID NO: 50489 - DNA, 6 bp, Unknown
  misc_feature (1)..( 6): Matrix.002 file - promoters60/1443276
gaagac

SEQ ID NO: 50490 - DNA, 6 bp, Unknown
  misc_feature (1)..( 6): Matrix.002 file - promoters60/1443276
aaataa

SEQ ID NO: 50491 - DNA, 9 bp, Unknown
  misc_feature (1)..( 9): Matrix.002 file - promoters60/1443276
agcatttaa

SEQ ID NO: 50492 - DNA, 8 bp, Unknown
  misc_feature (1)..( 8): Matrix.002 file - promoters60/1443276
tataaaaa

SEQ ID NO: 50493 - DNA, 8 bp, Unknown
  misc_feature (1)..( 8): Matrix.002 file - promoters60/1443306
tttgtaat

SEQ ID NO: 50494 - DNA, 12 bp, Unknown
  misc_feature (1)..( 12): Matrix.002 file - promoters60/1443306
taaaatattttt

SEQ ID NO: 50495 - DNA, 7 bp, Unknown
  misc_feature (1)..( 7): Matrix.002 file - promoters60/1443306
tttattt

SEQ ID NO: 50496 - DNA, 7 bp, Unknown
  misc_feature (1)..( 7): Matrix.002 file - promoters60/1443306
cataaac

SEQ ID NO: 50497 - DNA, 11 bp, Unknown
  misc_feature (1)..( 11): Matrix.002 file - promoters60/1443306
tatatataaat

SEQ ID NO: 50498 - DNA, 10 bp, Unknown
  misc_feature (1)..( 10): Matrix.002 file - promoters60/1443306
ttaattttac

SEQ ID NO: 50499 - DNA, 9 bp, Unknown
  misc_feature (1)..( 9): Matrix.002 file - promoters60/1443338
tcttataat

SEQ ID NO: 50500 - DNA, 7 bp, Unknown
  misc_feature (1)..( 7): Matrix.002 file - promoters60/1443338
acaccaa

SEQ ID NO: 50501 - DNA, 8 bp, Unknown
  misc_feature (1)..( 8): Matrix.002 file - promoters60/1443338
tcttataa

SEQ ID NO: 50502 - DNA, 8 bp, Unknown
  misc_feature (1)..( 8): Matrix.002 file - promoters60/1443338
aaaacaca

SEQ ID NO: 50503 - DNA, 8 bp, Unknown
  misc_feature (1)..( 8): Matrix.002 file - promoters60/1443338
caaacttt

SEQ ID NO: 50504 - DNA, 6 bp, Unknown
  misc_feature (1)..( 6): Matrix.002 file - promoters60/1443338
aatatt

SEQ ID NO: 50505 - DNA, 6 bp, Unknown
  misc_feature (1)..( 6): Matrix.002 file - promoters60/1443338
atcaaa

SEQ ID NO: 50506 - DNA, 7 bp, Unknown
  misc_feature (1)..( 7): Matrix.002 file - promoters60/1443338
caaatcc

SEQ ID NO: 50507 - DNA, 7 bp, Unknown
  misc_feature (1)..( 7): Matrix.002 file - promoters60/1443338
cacaaga

SEQ ID NO: 50508 - DNA, 8 bp, Unknown
  misc_feature (1)..( 8): Matrix.002 file - promoters60/1443338
ctcgcttc

SEQ ID NO: 50509 - DNA, 8 bp, Unknown
  misc_feature (1)..( 8): Matrix.002 file - promoters60/1443338
cttctcga

SEQ ID NO: 50510 - DNA, 14 bp, Unknown
  misc_feature (1)..( 14): Matrix.002 file - promoters60/1443349
taaatttgttaaaa

SEQ ID NO: 50511 - DNA, 11 bp, Unknown
  misc_feature (1)..( 11): Matrix.002 file - promoters60/1443349
ttttgatgaat

SEQ ID NO: 50512 - DNA, 18 bp, Unknown
  misc_feature (1)..( 18): Matrix.002 file - promoters60/1443349
atttcataaaaaatagat

SEQ ID NO: 50513 - DNA, 10 bp, Unknown
  misc_feature (1)..( 10): Matrix.002 file - promoters60/1443349
gataagaaaa

SEQ ID NO: 50514 - DNA, 13 bp, Unknown
  misc_feature (1)..( 13): Matrix.002 file - promoters60/1443349
ctagtatatataa

SEQ ID NO: 50515 - DNA, 15 bp, Unknown
  misc_feature (1)..( 15): Matrix.002 file - promoters60/1443349
atataaatttgaaaa

SEQ ID NO: 50516 - DNA, 9 bp, Unknown
  misc_feature (1)..( 9): Matrix.002 file - promoters60/1443349
aattaatac

SEQ ID NO: 50517 - DNA, 12 bp, Unknown
  misc_feature (1)..( 12): Matrix.002 file - promoters60/1443349
tataaaaaccaa

SEQ ID NO: 50518 - DNA, 10 bp, Unknown
  misc_feature (1)..( 10): Matrix.002 file - promoters60/1443349
aattagttta

SEQ ID NO: 50519 - DNA, 8 bp, Unknown
  misc_feature (1)..( 8): Matrix.002 file - promoters60/1443356
actaattt

SEQ ID NO: 50520 - DNA, 6 bp, Unknown
  misc_feature (1)..( 6): Matrix.002 file - promoters60/1443356
attact

SEQ ID NO: 50521 - DNA, 6 bp, Unknown
  misc_feature (1)..( 6): Matrix.002 file - promoters60/1443356
taataa

SEQ ID NO: 50522 - DNA, 6 bp, Unknown
  misc_feature (1)..( 6): Matrix.002 file - promoters60/1443356
atattt

SEQ ID NO: 50523 - DNA, 8 bp, Unknown
  misc_feature (1)..( 8): Matrix.002 file - promoters60/1443356
ttaaaaga

SEQ ID NO: 50524 - DNA, 6 bp, Unknown
  misc_feature (1)..( 6): Matrix.002 file - promoters60/1443356
tacaat

SEQ ID NO: 50525 - DNA, 7 bp, Unknown
  misc_feature (1)..( 7): Matrix.002 file - promoters60/1443356
tttattt

SEQ ID NO: 50526 - DNA, 7 bp, Unknown
  misc_feature (1)..( 7): Matrix.002 file - promoters60/1443356
aatatat

SEQ ID NO: 50527 - DNA, 7 bp, Unknown
  misc_feature (1)..( 7): Matrix.002 file - promoters60/1443356
tatacct

SEQ ID NO: 50528 - DNA, 7 bp, Unknown
  misc_feature (1)..( 7): Matrix.002 file - promoters60/1443356
caggtat

SEQ ID NO: 50529 - DNA, 7 bp, Unknown
  misc_feature (1)..( 7): Matrix.002 file - promoters60/1443356
tgacaat

SEQ ID NO: 50530 - DNA, 7 bp, Unknown
  misc_feature (1)..( 7): Matrix.002 file - promoters60/1443356
atcggcc

SEQ ID NO: 50531 - DNA, 6 bp, Unknown
  misc_feature (1)..( 6): Matrix.002 file - promoters60/1443356
aggttt

SEQ ID NO: 50532 - DNA, 6 bp, Unknown
  misc_feature (1)..( 6): Matrix.002 file - promoters60/1443356
ggtaat

SEQ ID NO: 50533 - DNA, 7 bp, Unknown
  misc_feature (1)..( 7): Matrix.002 file - promoters60/1443356
aatctat

SEQ ID NO: 50534 - DNA, 7 bp, Unknown
  misc_feature (1)..( 7): Matrix.002 file - promoters60/1443356
atgcgga

SEQ ID NO: 50535 - DNA, 7 bp, Unknown
  misc_feature (1)..( 7): Matrix.002 file - promoters60/1443356
cttggct

SEQ ID NO: 50536 - DNA, 6 bp, Unknown
  misc_feature (1)..( 6): Matrix.002 file - promoters60/1443356
atttaa

SEQ ID NO: 50537 - DNA, 8 bp, Unknown
  misc_feature (1)..( 8): Matrix.002 file - promoters60/1443356
attcttac

SEQ ID NO: 50538 - DNA, 6 bp, Unknown
  misc_feature (1)..( 6): Matrix.002 file - promoters60/1443356
aaatgt

SEQ ID NO: 50539 - DNA, 7 bp, Unknown
  misc_feature (1)..( 7): Matrix.002 file - promoters60/1443356
atttttg

SEQ ID NO: 50540 - DNA, 6 bp, Unknown
  misc_feature (1)..( 6): Matrix.002 file - promoters60/1443356
gtcaat

SEQ ID NO: 50541 - DNA, 6 bp, Unknown
  misc_feature (1)..( 6): Matrix.002 file - promoters60/1443356
aattca

SEQ ID NO: 50542 - DNA, 7 bp, Unknown
  misc_feature (1)..( 7): Matrix.002 file - promoters60/1443356
aatctct

SEQ ID NO: 50543 - DNA, 6 bp, Unknown
  misc_feature (1)..( 6): Matrix.002 file - promoters60/1443356
tttgtt

SEQ ID NO: 50544 - DNA, 6 bp, Unknown
  misc_feature (1)..( 6): Matrix.002 file - promoters60/1443387
ggtaga

SEQ ID NO: 50545 - DNA, 7 bp, Unknown
  misc_feature (1)..( 7): Matrix.002 file - promoters60/1443387
aagaaaa

SEQ ID NO: 50546 - DNA, 6 bp, Unknown
  misc_feature (1)..( 6): Matrix.002 file - promoters60/1443387
ccatat

SEQ ID NO: 50547 - DNA, 6 bp, Unknown
  misc_feature (1)..( 6): Matrix.002 file - promoters60/1443387
tataaa

SEQ ID NO: 50548 - DNA, 6 bp, Unknown
  misc_feature (1)..( 6): Matrix.002 file - promoters60/1443387
gttttg

SEQ ID NO: 50549 - DNA, 8 bp, Unknown
  misc_feature (1)..( 8): Matrix.002 file - promoters60/1443387
ctttaaaa

SEQ ID NO: 50550 - DNA, 7 bp, Unknown
  misc_feature (1)..( 7): Matrix.002 file - promoters60/1443387
tcagaaa

SEQ ID NO: 50551 - DNA, 8 bp, Unknown
  misc_feature (1)..( 8): Matrix.002 file - promoters60/1443387
aaaagggc

SEQ ID NO: 50552 - DNA, 8 bp, Unknown
  misc_feature (1)..( 8): Matrix.002 file - promoters60/1443387
aaaaaaac

SEQ ID NO: 50553 - DNA, 11 bp, Unknown
  misc_feature (1)..( 11): Matrix.002 file - promoters60/1443387
atcaaatgcaa

SEQ ID NO: 50554 - DNA, 7 bp, Unknown
  misc_feature (1)..( 7): Matrix.002 file - promoters60/1443387
aaaattg

SEQ ID NO: 50555 - DNA, 11 bp, Unknown
  misc_feature (1)..( 11): Matrix.002 file - promoters60/1443418
gtgtaaaaatt

SEQ ID NO: 50556 - DNA, 10 bp, Unknown
  misc_feature (1)..( 10): Matrix.002 file - promoters60/1443418
taaaaaaata

SEQ ID NO: 50557 - DNA, 9 bp, Unknown
  misc_feature (1)..( 9): Matrix.002 file - promoters60/1443418
ttattattt

SEQ ID NO: 50558 - DNA, 18 bp, Unknown
  misc_feature (1)..( 18): Matrix.002 file - promoters60/1443418
gtaaattattcatacaat

SEQ ID NO: 50559 - DNA, 14 bp, Unknown
  misc_feature (1)..( 14): Matrix.002 file - promoters60/1443418
taattttaaactaa

SEQ ID NO: 50560 - DNA, 11 bp, Unknown
  misc_feature (1)..( 11): Matrix.002 file - promoters60/1443418
aatgatattca

SEQ ID NO: 50561 - DNA, 10 bp, Unknown
  misc_feature (1)..( 10): Matrix.002 file - promoters60/1443418
tttcaaataa

SEQ ID NO: 50562 - DNA, 12 bp, Unknown
  misc_feature (1)..( 12): Matrix.002 file - promoters60/1443433
ctattatatata

SEQ ID NO: 50563 - DNA, 11 bp, Unknown
  misc_feature (1)..( 11): Matrix.002 file - promoters60/1443433
tactaacatta

SEQ ID NO: 50564 - DNA, 6 bp, Unknown
  misc_feature (1)..( 6): Matrix.002 file - promoters60/1443475
ttgaat

SEQ ID NO: 50565 - DNA, 8 bp, Unknown
  misc_feature (1)..( 8): Matrix.002 file - promoters60/1443475
caagtttt

SEQ ID NO: 50566 - DNA, 6 bp, Unknown
  misc_feature (1)..( 6): Matrix.002 file - promoters60/1443475
tatgta

SEQ ID NO: 50567 - DNA, 7 bp, Unknown
  misc_feature (1)..( 7): Matrix.002 file - promoters60/1443475
ttttctc

SEQ ID NO: 50568 - DNA, 8 bp, Unknown
  misc_feature (1)..( 8): Matrix.002 file - promoters60/1443475
ttatcaat

SEQ ID NO: 50569 - DNA, 6 bp, Unknown
  misc_feature (1)..( 6): Matrix.002 file - promoters60/1443475
gttaaa

SEQ ID NO: 50570 - DNA, 7 bp, Unknown
  misc_feature (1)..( 7): Matrix.002 file - promoters60/1443475
attagtt

SEQ ID NO: 50571 - DNA, 6 bp, Unknown
  misc_feature (1)..( 6): Matrix.002 file - promoters60/1443475
atcaga

SEQ ID NO: 50572 - DNA, 7 bp, Unknown
  misc_feature (1)..( 7): Matrix.002 file - promoters60/1443475
ttttttc

SEQ ID NO: 50573 - DNA, 6 bp, Unknown
  misc_feature (1)..( 6): Matrix.002 file - promoters60/1443475
taaatc

SEQ ID NO: 50574 - DNA, 6 bp, Unknown
  misc_feature (1)..( 6): Matrix.002 file - promoters60/1443475
actatt

SEQ ID NO: 50575 - DNA, 6 bp, Unknown
  misc_feature (1)..( 6): Matrix.002 file - promoters60/1443475
cgaaac

SEQ ID NO: 50576 - DNA, 6 bp, Unknown
  misc_feature (1)..( 6): Matrix.002 file - promoters60/1443475
gaaaga

SEQ ID NO: 50577 - DNA, 6 bp, Unknown
  misc_feature (1)..( 6): Matrix.002 file - promoters60/1443475
aagaaa

SEQ ID NO: 50578 - DNA, 8 bp, Unknown
  misc_feature (1)..( 8): Matrix.002 file - promoters60/1443475
aaaggtct

SEQ ID NO: 50579 - DNA, 6 bp, Unknown
  misc_feature (1)..( 6): Matrix.002 file - promoters60/1443475
aaaata

SEQ ID NO: 50580 - DNA, 7 bp, Unknown
  misc_feature (1)..( 7): Matrix.002 file - promoters60/1443475
gtgaaga

SEQ ID NO: 50581 - DNA, 10 bp, Unknown
  misc_feature (1)..( 10): Matrix.002 file - promoters60/1443512
gccttcactt

SEQ ID NO: 50582 - DNA, 11 bp, Unknown
  misc_feature (1)..( 11): Matrix.002 file - promoters60/1443512
ggatccataac

SEQ ID NO: 50583 - DNA, 8 bp, Unknown
  misc_feature (1)..( 8): Matrix.002 file - promoters60/1443633
ggttcttt

SEQ ID NO: 50584 - DNA, 10 bp, Unknown
  misc_feature (1)..( 10): Matrix.002 file - promoters60/1443633
aaaaagaaca

SEQ ID NO: 50585 - DNA, 12 bp, Unknown
  misc_feature (1)..( 12): Matrix.002 file - promoters60/1443640
attgagattggg

SEQ ID NO: 50586 - DNA, 13 bp, Unknown
  misc_feature (1)..( 13): Matrix.002 file - promoters60/1443674
aatttatccaaaa

SEQ ID NO: 50587 - DNA, 9 bp, Unknown
  misc_feature (1)..( 9): Matrix.002 file - promoters60/1443674
aaataaaat

SEQ ID NO: 50588 - DNA, 8 bp, Unknown
  misc_feature (1)..( 8): Matrix.002 file - promoters60/1443674
aaaaaaaa

SEQ ID NO: 50589 - DNA, 8 bp, Unknown
  misc_feature (1)..( 8): Matrix.002 file - promoters60/1443674
acatatta

SEQ ID NO: 50590 - DNA, 8 bp, Unknown
  misc_feature (1)..( 8): Matrix.002 file - promoters60/1443687
aaacactt

SEQ ID NO: 50591 - DNA, 6 bp, Unknown
  misc_feature (1)..( 6): Matrix.002 file - promoters60/1443687
atattt

SEQ ID NO: 50592 - DNA, 7 bp, Unknown
  misc_feature (1)..( 7): Matrix.002 file - promoters60/1443687
aaaattt

SEQ ID NO: 50593 - DNA, 7 bp, Unknown
  misc_feature (1)..( 7): Matrix.002 file - promoters60/1443687
gaacaaa

SEQ ID NO: 50594 - DNA, 6 bp, Unknown
  misc_feature (1)..( 6): Matrix.002 file - promoters60/1443687
agttta

SEQ ID NO: 50595 - DNA, 9 bp, Unknown
  misc_feature (1)..( 9): Matrix.002 file - promoters60/1443687
tattttgaa

SEQ ID NO: 50596 - DNA, 6 bp, Unknown
  misc_feature (1)..( 6): Matrix.002 file - promoters60/1443687
tgaaaa

SEQ ID NO: 50597 - DNA, 7 bp, Unknown
  misc_feature (1)..( 7): Matrix.002 file - promoters60/1443687
tcacttt

SEQ ID NO: 50598 - DNA, 9 bp, Unknown
  misc_feature (1)..( 9): Matrix.002 file - promoters60/1443687
ttttgttat

SEQ ID NO: 50599 - DNA, 6 bp, Unknown
  misc_feature (1)..( 6): Matrix.002 file - promoters60/1443687
tatttt

SEQ ID NO: 50600 - DNA, 7 bp, Unknown
  misc_feature (1)..( 7): Matrix.002 file - promoters60/1443687
taaaata

SEQ ID NO: 50601 - DNA, 6 bp, Unknown
  misc_feature (1)..( 6): Matrix.002 file - promoters60/1443687
atcaaa

SEQ ID NO: 50602 - DNA, 10 bp, Unknown
  misc_feature (1)..( 10): Matrix.002 file - promoters60/1443687
gaatattttt

SEQ ID NO: 50603 - DNA, 7 bp, Unknown
  misc_feature (1)..( 7): Matrix.002 file - promoters60/1443687
attattt

SEQ ID NO: 50604 - DNA, 6 bp, Unknown
  misc_feature (1)..( 6): Matrix.002 file - promoters60/1443687
atttgg

SEQ ID NO: 50605 - DNA, 6 bp, Unknown
  misc_feature (1)..( 6): Matrix.002 file - promoters60/1443687
tttggt

SEQ ID NO: 50606 - DNA, 8 bp, Unknown
  misc_feature (1)..( 8): Matrix.002 file - promoters60/1443687
aaaacccc

SEQ ID NO: 50607 - DNA, 7 bp, Unknown
  misc_feature (1)..( 7): Matrix.002 file - promoters60/1443687
taattca

SEQ ID NO: 50608 - DNA, 8 bp, Unknown
  misc_feature (1)..( 8): Matrix.002 file - promoters60/1443687
aaacttat

SEQ ID NO: 50609 - DNA, 7 bp, Unknown
  misc_feature (1)..( 7): Matrix.002 file - promoters60/1443687
tttaaca

SEQ ID NO: 50610 - DNA, 7 bp, Unknown
  misc_feature (1)..( 7): Matrix.002 file - promoters60/1443687
ataccac

SEQ ID NO: 50611 - DNA, 7 bp, Unknown
  misc_feature (1)..( 7): Matrix.002 file - promoters60/1443687
tattttt

SEQ ID NO: 50612 - DNA, 6 bp, Unknown
  misc_feature (1)..( 6): Matrix.002 file - promoters60/1443687
acttgt

SEQ ID NO: 50613 - DNA, 6 bp, Unknown
  misc_feature (1)..( 6): Matrix.002 file - promoters60/1444100
ttatca

SEQ ID NO: 50614 - DNA, 8 bp, Unknown
  misc_feature (1)..( 8): Matrix.002 file - promoters60/1444100
ttttattt

SEQ ID NO: 50615 - DNA, 8 bp, Unknown
  misc_feature (1)..( 8): Matrix.002 file - promoters60/1444100
cctacttt

SEQ ID NO: 50616 - DNA, 7 bp, Unknown
  misc_feature (1)..( 7): Matrix.002 file - promoters60/1444100
tttggtt

SEQ ID NO: 50617 - DNA, 7 bp, Unknown
  misc_feature (1)..( 7): Matrix.002 file - promoters60/1444100
tttctct

SEQ ID NO: 50618 - DNA, 6 bp, Unknown
  misc_feature (1)..( 6): Matrix.002 file - promoters60/1444100
cactta

SEQ ID NO: 50619 - DNA, 6 bp, Unknown
  misc_feature (1)..( 6): Matrix.002 file - promoters60/1444100
gaaagt

SEQ ID NO: 50620 - DNA, 9 bp, Unknown
  misc_feature (1)..( 9): Matrix.002 file - promoters60/1444100
ttgggatcc

SEQ ID NO: 50621 - DNA, 8 bp, Unknown
  misc_feature (1)..( 8): Matrix.002 file - promoters60/1444100
tatgtgtg

SEQ ID NO: 50622 - DNA, 6 bp, Unknown
  misc_feature (1)..( 6): Matrix.002 file - promoters60/1444100
ttttca

SEQ ID NO: 50623 - DNA, 7 bp, Unknown
  misc_feature (1)..( 7): Matrix.002 file - promoters60/1444100
gttcaaa

SEQ ID NO: 50624 - DNA, 7 bp, Unknown
  misc_feature (1)..( 7): Matrix.002 file - promoters60/1444100
gcaatga

SEQ ID NO: 50625 - DNA, 6 bp, Unknown
  misc_feature (1)..( 6): Matrix.002 file - promoters60/1444100
tgtttt

SEQ ID NO: 50626 - DNA, 6 bp, Unknown
  misc_feature (1)..( 6): Matrix.002 file - promoters60/1444100
accttc

SEQ ID NO: 50627 - DNA, 6 bp, Unknown
  misc_feature (1)..( 6): Matrix.002 file - promoters60/1444100
tctttt

SEQ ID NO: 50628 - DNA, 7 bp, Unknown
  misc_feature (1)..( 7): Matrix.002 file - promoters60/1444100
cttgatt

SEQ ID NO: 50629 - DNA, 7 bp, Unknown
  misc_feature (1)..( 7): Matrix.002 file - promoters60/1444100
aatataa

SEQ ID NO: 50630 - DNA, 7 bp, Unknown
  misc_feature (1)..( 7): Matrix.002 file - promoters60/1444100
tatcttt

SEQ ID NO: 50631 - DNA, 7 bp, Unknown
  misc_feature (1)..( 7): Matrix.002 file - promoters60/1444100
tttcttt

SEQ ID NO: 50632 - DNA, 7 bp, Unknown
  misc_feature (1)..( 7): Matrix.002 file - promoters60/1444100
aataaac

SEQ ID NO: 50633 - DNA, 8 bp, Unknown
  misc_feature (1)..( 8): Matrix.002 file - promoters60/1444100
ccgtgtta

SEQ ID NO: 50634 - DNA, 14 bp, Unknown
  misc_feature (1)..( 14): Matrix.002 file - promoters60/1444131
tgaaaaaaataaac

SEQ ID NO: 50635 - DNA, 11 bp, Unknown
  misc_feature (1)..( 11): Matrix.002 file - promoters60/1444131
gacattataaa

SEQ ID NO: 50636 - DNA, 8 bp, Unknown
  misc_feature (1)..( 8): Matrix.002 file - promoters60/1444131
ttattttg

SEQ ID NO: 50637 - DNA, 7 bp, Unknown
  misc_feature (1)..( 7): Matrix.002 file - promoters60/1444131
atttttt

SEQ ID NO: 50638 - DNA, 9 bp, Unknown
  misc_feature (1)..( 9): Matrix.002 file - promoters60/1444131
tcaatattt

SEQ ID NO: 50639 - DNA, 7 bp, Unknown
  misc_feature (1)..( 7): Matrix.002 file - promoters60/1444131
taaacaa

SEQ ID NO: 50640 - DNA, 5 bp, Unknown
  misc_feature (1)..( 5): Matrix.002 file - promoters60/1444131
agtta

SEQ ID NO: 50641 - DNA, 10 bp, Unknown
  misc_feature (1)..( 10): Matrix.002 file - promoters60/1444131
aaatcaaatg

SEQ ID NO: 50642 - DNA, 10 bp, Unknown
  misc_feature (1)..( 10): Matrix.002 file - promoters60/1444131
gaaaaaaaaa

SEQ ID NO: 50643 - DNA, 10 bp, Unknown
  misc_feature (1)..( 10): Matrix.002 file - promoters60/1444137
gataaaggtc

SEQ ID NO: 50644 - DNA, 11 bp, Unknown
  misc_feature (1)..( 11): Matrix.002 file - promoters60/1444137
aaagtatgact

SEQ ID NO: 50645 - DNA, 8 bp, Unknown
  misc_feature (1)..( 8): Matrix.002 file - promoters60/1444137
aaagaaac

SEQ ID NO: 50646 - DNA, 10 bp, Unknown
  misc_feature (1)..( 10): Matrix.002 file - promoters60/1444137
tcagtagtta

SEQ ID NO: 50647 - DNA, 9 bp, Unknown
  misc_feature (1)..( 9): Matrix.002 file - promoters60/1444137
tctccattc

SEQ ID NO: 50648 - DNA, 7 bp, Unknown
  misc_feature (1)..( 7): Matrix.002 file - promoters60/1444137
tctctaa

SEQ ID NO: 50649 - DNA, 6 bp, Unknown
  misc_feature (1)..( 6): Matrix.002 file - promoters60/1444149
atttga

SEQ ID NO: 50650 - DNA, 6 bp, Unknown
  misc_feature (1)..( 6): Matrix.002 file - promoters60/1444149
gacact

SEQ ID NO: 50651 - DNA, 8 bp, Unknown
  misc_feature (1)..( 8): Matrix.002 file - promoters60/1444149
cggagatg

SEQ ID NO: 50652 - DNA, 8 bp, Unknown
  misc_feature (1)..( 8): Matrix.002 file - promoters60/1444149
ttgtaaca

SEQ ID NO: 50653 - DNA, 8 bp, Unknown
  misc_feature (1)..( 8): Matrix.002 file - promoters60/1444149
ttgtgatg

SEQ ID NO: 50654 - DNA, 9 bp, Unknown
  misc_feature (1)..( 9): Matrix.002 file - promoters60/1444149
ccgacagac

SEQ ID NO: 50655 - DNA, 6 bp, Unknown
  misc_feature (1)..( 6): Matrix.002 file - promoters60/1444149
tatttt

SEQ ID NO: 50656 - DNA, 9 bp, Unknown
  misc_feature (1)..( 9): Matrix.002 file - promoters60/1444149
caacatttt

SEQ ID NO: 50657 - DNA, 7 bp, Unknown
  misc_feature (1)..( 7): Matrix.002 file - promoters60/1444149
tttattt

SEQ ID NO: 50658 - DNA, 9 bp, Unknown
  misc_feature (1)..( 9): Matrix.002 file - promoters60/1444149
aaaagtaat

SEQ ID NO: 50659 - DNA, 6 bp, Unknown
  misc_feature (1)..( 6): Matrix.002 file - promoters60/1444149
ttagtt

SEQ ID NO: 50660 - DNA, 6 bp, Unknown
  misc_feature (1)..( 6): Matrix.002 file - promoters60/1444149
aagatt

SEQ ID NO: 50661 - DNA, 6 bp, Unknown
  misc_feature (1)..( 6): Matrix.002 file - promoters60/1444149
atttga

SEQ ID NO: 50662 - DNA, 8 bp, Unknown
  misc_feature (1)..( 8): Matrix.002 file - promoters60/1444149
tgacaatt

SEQ ID NO: 50663 - DNA, 8 bp, Unknown
  misc_feature (1)..( 8): Matrix.002 file - promoters60/1444149
aattttct

SEQ ID NO: 50664 - DNA, 8 bp, Unknown
  misc_feature (1)..( 8): Matrix.002 file - promoters60/1444156
aatcaaaa

SEQ ID NO: 50665 - DNA, 7 bp, Unknown
  misc_feature (1)..( 7): Matrix.002 file - promoters60/1444156
tttaata

SEQ ID NO: 50666 - DNA, 6 bp, Unknown
  misc_feature (1)..( 6): Matrix.002 file - promoters60/1444156
gaaaat

SEQ ID NO: 50667 - DNA, 7 bp, Unknown
  misc_feature (1)..( 7): Matrix.002 file - promoters60/1444156
ttggtaa

SEQ ID NO: 50668 - DNA, 9 bp, Unknown
  misc_feature (1)..( 9): Matrix.002 file - promoters60/1444156
taaaaacta

SEQ ID NO: 50669 - DNA, 6 bp, Unknown
  misc_feature (1)..( 6): Matrix.002 file - promoters60/1444156
ttaaac

SEQ ID NO: 50670 - DNA, 6 bp, Unknown
  misc_feature (1)..( 6): Matrix.002 file - promoters60/1444156
tcaaca

SEQ ID NO: 50671 - DNA, 6 bp, Unknown
  misc_feature (1)..( 6): Matrix.002 file - promoters60/1444156
ttttca

SEQ ID NO: 50672 - DNA, 8 bp, Unknown
  misc_feature (1)..( 8): Matrix.002 file - promoters60/1444156
tcaaaaag

SEQ ID NO: 50673 - DNA, 9 bp, Unknown
  misc_feature (1)..( 9): Matrix.002 file - promoters60/1444156
aaaataaaa

SEQ ID NO: 50674 - DNA, 6 bp, Unknown
  misc_feature (1)..( 6): Matrix.002 file - promoters60/1444156
aaaaga

SEQ ID NO: 50675 - DNA, 7 bp, Unknown
  misc_feature (1)..( 7): Matrix.002 file - promoters60/1444156
aaaaaaa

SEQ ID NO: 50676 - DNA, 7 bp, Unknown
  misc_feature (1)..( 7): Matrix.002 file - promoters60/1444156
atgaaga

SEQ ID NO: 50677 - DNA, 13 bp, Unknown
  misc_feature (1)..( 13): Matrix.002 file - promoters60/1444156
atttgtttattta

SEQ ID NO: 50678 - DNA, 6 bp, Unknown
  misc_feature (1)..( 6): Matrix.002 file - promoters60/1444180
tcatat

SEQ ID NO: 50679 - DNA, 7 bp, Unknown
  misc_feature (1)..( 7): Matrix.002 file - promoters60/1444180
aaaagct

SEQ ID NO: 50680 - DNA, 7 bp, Unknown
  misc_feature (1)..( 7): Matrix.002 file - promoters60/1444180
ccaaaat

SEQ ID NO: 50681 - DNA, 7 bp, Unknown
  misc_feature (1)..( 7): Matrix.002 file - promoters60/1444180
gaaatca

SEQ ID NO: 50682 - DNA, 6 bp, Unknown
  misc_feature (1)..( 6): Matrix.002 file - promoters60/1444180
atatct

SEQ ID NO: 50683 - DNA, 7 bp, Unknown
  misc_feature (1)..( 7): Matrix.002 file - promoters60/1444180
gtcaaaa

SEQ ID NO: 50684 - DNA, 6 bp, Unknown
  misc_feature (1)..( 6): Matrix.002 file - promoters60/1444180
aatggg

SEQ ID NO: 50685 - DNA, 9 bp, Unknown
  misc_feature (1)..( 9): Matrix.002 file - promoters60/1444180
gaaacaaaa

SEQ ID NO: 50686 - DNA, 6 bp, Unknown
  misc_feature (1)..( 6): Matrix.002 file - promoters60/1444180
ttaaag

SEQ ID NO: 50687 - DNA, 6 bp, Unknown
  misc_feature (1)..( 6): Matrix.002 file - promoters60/1444180
agtaaa

SEQ ID NO: 50688 - DNA, 7 bp, Unknown
  misc_feature (1)..( 7): Matrix.002 file - promoters60/1444180
aatcggg

SEQ ID NO: 50689 - DNA, 10 bp, Unknown
  misc_feature (1)..( 10): Matrix.002 file - promoters60/1444180
ggaaaagaaa

SEQ ID NO: 50690 - DNA, 7 bp, Unknown
  misc_feature (1)..( 7): Matrix.002 file - promoters60/1444180
cccacta

SEQ ID NO: 50691 - DNA, 9 bp, Unknown
  misc_feature (1)..( 9): Matrix.002 file - promoters60/1444180
aaagaaaag

SEQ ID NO: 50692 - DNA, 7 bp, Unknown
  misc_feature (1)..( 7): Matrix.002 file - promoters60/1444180
gtatata

SEQ ID NO: 50693 - DNA, 6 bp, Unknown
  misc_feature (1)..( 6): Matrix.002 file - promoters60/1444400
acaaac

SEQ ID NO: 50694 - DNA, 8 bp, Unknown
  misc_feature (1)..( 8): Matrix.002 file - promoters60/1444400
caaaagta

SEQ ID NO: 50695 - DNA, 6 bp, Unknown
  misc_feature (1)..( 6): Matrix.002 file - promoters60/1444400
aattaa

SEQ ID NO: 50696 - DNA, 7 bp, Unknown
  misc_feature (1)..( 7): Matrix.002 file - promoters60/1444400
aataaac

SEQ ID NO: 50697 - DNA, 7 bp, Unknown
  misc_feature (1)..( 7): Matrix.002 file - promoters60/1444400
atatata

SEQ ID NO: 50698 - DNA, 6 bp, Unknown
  misc_feature (1)..( 6): Matrix.002 file - promoters60/1444400
atatat

SEQ ID NO: 50699 - DNA, 14 bp, Unknown
  misc_feature (1)..( 14): Matrix.002 file - promoters60/1444400
tgtgttcgtttggt

SEQ ID NO: 50700 - DNA, 7 bp, Unknown
  misc_feature (1)..( 7): Matrix.002 file - promoters60/1444400
tggacgc

SEQ ID NO: 50701 - DNA, 7 bp, Unknown
  misc_feature (1)..( 7): Matrix.002 file - promoters60/1444400
caaacgc

SEQ ID NO: 50702 - DNA, 7 bp, Unknown
  misc_feature (1)..( 7): Matrix.002 file - promoters60/1444400
gcgacaa

SEQ ID NO: 50703 - DNA, 7 bp, Unknown
  misc_feature (1)..( 7): Matrix.002 file - promoters60/1444400
tttttca

SEQ ID NO: 50704 - DNA, 6 bp, Unknown
  misc_feature (1)..( 6): Matrix.002 file - promoters60/1444400
cccaat

SEQ ID NO: 50705 - DNA, 6 bp, Unknown
  misc_feature (1)..( 6): Matrix.002 file - promoters60/1444400
tatgtg

SEQ ID NO: 50706 - DNA, 8 bp, Unknown
  misc_feature (1)..( 8): Matrix.002 file - promoters60/1444400
tataatta

SEQ ID NO: 50707 - DNA, 9 bp, Unknown
  misc_feature (1)..( 9): Matrix.002 file - promoters60/1444400
ttgctaata

SEQ ID NO: 50708 - DNA, 8 bp, Unknown
  misc_feature (1)..( 8): Matrix.002 file - promoters60/1444400
acgaacat

SEQ ID NO: 50709 - DNA, 8 bp, Unknown
  misc_feature (1)..( 8): Matrix.002 file - promoters60/1444400
attatatc

SEQ ID NO: 50710 - DNA, 12 bp, Unknown
  misc_feature (1)..( 12): Matrix.002 file - promoters60/1444400
aaacatttgatt

SEQ ID NO: 50711 - DNA, 6 bp, Unknown
  misc_feature (1)..( 6): Matrix.002 file - promoters60/1444400
ctacaa

SEQ ID NO: 50712 - DNA, 8 bp, Unknown
  misc_feature (1)..( 8): Matrix.002 file - promoters60/1444400
aaaaccta

SEQ ID NO: 50713 - DNA, 7 bp, Unknown
  misc_feature (1)..( 7): Matrix.002 file - promoters60/1444448
tgtttta

SEQ ID NO: 50714 - DNA, 6 bp, Unknown
  misc_feature (1)..( 6): Matrix.002 file - promoters60/1444448
agaagt

SEQ ID NO: 50715 - DNA, 6 bp, Unknown
  misc_feature (1)..( 6): Matrix.002 file - promoters60/1444448
tttaaa

SEQ ID NO: 50716 - DNA, 8 bp, Unknown
  misc_feature (1)..( 8): Matrix.002 file - promoters60/1444448
ataaataa

SEQ ID NO: 50717 - DNA, 8 bp, Unknown
  misc_feature (1)..( 8): Matrix.002 file - promoters60/1444448
ttaaattc

SEQ ID NO: 50718 - DNA, 7 bp, Unknown
  misc_feature (1)..( 7): Matrix.002 file - promoters60/1444448
tttttga

SEQ ID NO: 50719 - DNA, 8 bp, Unknown
  misc_feature (1)..( 8): Matrix.002 file - promoters60/1444448
gtacaatt

SEQ ID NO: 50720 - DNA, 7 bp, Unknown
  misc_feature (1)..( 7): Matrix.002 file - promoters60/1444448
ttcggtt

SEQ ID NO: 50721 - DNA, 6 bp, Unknown
  misc_feature (1)..( 6): Matrix.002 file - promoters60/1444448
tttcaa

SEQ ID NO: 50722 - DNA, 6 bp, Unknown
  misc_feature (1)..( 6): Matrix.002 file - promoters60/1444448
ccaata

SEQ ID NO: 50723 - DNA, 9 bp, Unknown
  misc_feature (1)..( 9): Matrix.002 file - promoters60/1444448
cattgctta

SEQ ID NO: 50724 - DNA, 7 bp, Unknown
  misc_feature (1)..( 7): Matrix.002 file - promoters60/1444448
gttctaa

SEQ ID NO: 50725 - DNA, 6 bp, Unknown
  misc_feature (1)..( 6): Matrix.002 file - promoters60/1444448
taaaat

SEQ ID NO: 50726 - DNA, 7 bp, Unknown
  misc_feature (1)..( 7): Matrix.002 file - promoters60/1444448
gaagaat

SEQ ID NO: 50727 - DNA, 7 bp, Unknown
  misc_feature (1)..( 7): Matrix.002 file - promoters60/1444448
gatgaat

SEQ ID NO: 50728 - DNA, 11 bp, Unknown
  misc_feature (1)..( 11): Matrix.002 file - promoters60/1444460
aaatttcttca

SEQ ID NO: 50729 - DNA, 8 bp, Unknown
  misc_feature (1)..( 8): Matrix.002 file - promoters60/1444460
caaaagag

SEQ ID NO: 50730 - DNA, 12 bp, Unknown
  misc_feature (1)..( 12): Matrix.002 file - promoters60/1444473
cttcttattggt

SEQ ID NO: 50731 - DNA, 11 bp, Unknown
  misc_feature (1)..( 11): Matrix.002 file - promoters60/1444473
caaagaattta

SEQ ID NO: 50732 - DNA, 18 bp, Unknown
  misc_feature (1)..( 18): Matrix.002 file - promoters60/1444479
aaaaattattaaataaaa

SEQ ID NO: 50733 - DNA, 10 bp, Unknown
  misc_feature (1)..( 10): Matrix.002 file - promoters60/1444479
tttactaatc

SEQ ID NO: 50734 - DNA, 11 bp, Unknown
  misc_feature (1)..( 11): Matrix.002 file - promoters60/1444479
ataatttttaa

SEQ ID NO: 50735 - DNA, 8 bp, Unknown
  misc_feature (1)..( 8): Matrix.002 file - promoters60/1444479
tattttac

SEQ ID NO: 50736 - DNA, 10 bp, Unknown
  misc_feature (1)..( 10): Matrix.002 file - promoters60/1444479
ctatatatat

SEQ ID NO: 50737 - DNA, 9 bp, Unknown
  misc_feature (1)..( 9): Matrix.002 file - promoters60/1444479
ctaatttta

SEQ ID NO: 50738 - DNA, 11 bp, Unknown
  misc_feature (1)..( 11): Matrix.002 file - promoters60/1444479
aaaaaaatcat

SEQ ID NO: 50739 - DNA, 7 bp, Unknown
  misc_feature (1)..( 7): Matrix.002 file - promoters60/1444479
aattttg

SEQ ID NO: 50740 - DNA, 9 bp, Unknown
  misc_feature (1)..( 9): Matrix.002 file - promoters60/1444502
tttgtttgt

SEQ ID NO: 50741 - DNA, 7 bp, Unknown
  misc_feature (1)..( 7): Matrix.002 file - promoters60/1444502
gacacgt

SEQ ID NO: 50742 - DNA, 6 bp, Unknown
  misc_feature (1)..( 6): Matrix.002 file - promoters60/1444502
ggcttt

SEQ ID NO: 50743 - DNA, 7 bp, Unknown
  misc_feature (1)..( 7): Matrix.002 file - promoters60/1444502
gaatata

SEQ ID NO: 50744 - DNA, 7 bp, Unknown
  misc_feature (1)..( 7): Matrix.002 file - promoters60/1444502
attcttt

SEQ ID NO: 50745 - DNA, 7 bp, Unknown
  misc_feature (1)..( 7): Matrix.002 file - promoters60/1444502
aagaaga

SEQ ID NO: 50746 - DNA, 9 bp, Unknown
  misc_feature (1)..( 9): Matrix.002 file - promoters60/1444502
agttgaaaa

SEQ ID NO: 50747 - DNA, 7 bp, Unknown
  misc_feature (1)..( 7): Matrix.002 file - promoters60/1444502
aggccca

SEQ ID NO: 50748 - DNA, 6 bp, Unknown
  misc_feature (1)..( 6): Matrix.002 file - promoters60/1444502
aaagga

SEQ ID NO: 50749 - DNA, 7 bp, Unknown
  misc_feature (1)..( 7): Matrix.002 file - promoters60/1444502
tcacttt

SEQ ID NO: 50750 - DNA, 8 bp, Unknown
  misc_feature (1)..( 8): Matrix.002 file - promoters60/1444502
aaaaaaaa

SEQ ID NO: 50751 - DNA, 15 bp, Unknown
  misc_feature (1)..( 15): Matrix.002 file - promoters60/1444506
aaaaattattaaatt

SEQ ID NO: 50752 - DNA, 10 bp, Unknown
  misc_feature (1)..( 10): Matrix.002 file - promoters60/1444506
tttactaaaa

SEQ ID NO: 50753 - DNA, 8 bp, Unknown
  misc_feature (1)..( 8): Matrix.002 file - promoters60/1444506
ataatttt

SEQ ID NO: 50754 - DNA, 7 bp, Unknown
  misc_feature (1)..( 7): Matrix.002 file - promoters60/1444506
tatttta

SEQ ID NO: 50755 - DNA, 10 bp, Unknown
  misc_feature (1)..( 10): Matrix.002 file - promoters60/1444506
ctatatatat

SEQ ID NO: 50756 - DNA, 9 bp, Unknown
  misc_feature (1)..( 9): Matrix.002 file - promoters60/1444506
ctaatttta

SEQ ID NO: 50757 - DNA, 8 bp, Unknown
  misc_feature (1)..( 8): Matrix.002 file - promoters60/1444506
ttttgtta

SEQ ID NO: 50758 - DNA, 8 bp, Unknown
  misc_feature (1)..( 8): Matrix.002 file - promoters60/1444506
acaaaaaa

SEQ ID NO: 50759 - DNA, 10 bp, Unknown
  misc_feature (1)..( 10): Matrix.002 file - promoters60/1444506
aaaaaataat

SEQ ID NO: 50760 - DNA, 8 bp, Unknown
  misc_feature (1)..( 8): Matrix.002 file - promoters60/1444506
taattgaa

SEQ ID NO: 50761 - DNA, 9 bp, Unknown
  misc_feature (1)..( 9): Matrix.002 file - promoters60/1444506
aaaatattt

SEQ ID NO: 50762 - DNA, 7 bp, Unknown
  misc_feature (1)..( 7): Matrix.002 file - promoters60/1444506
attttgt

SEQ ID NO: 50763 - DNA, 8 bp, Unknown
  misc_feature (1)..( 8): Matrix.002 file - promoters60/1444506
aaaaaaat

SEQ ID NO: 50764 - DNA, 18 bp, Unknown
  misc_feature (1)..( 18): Matrix.002 file - promoters60/1444514
aaaaattattgaaagtat

SEQ ID NO: 50765 - DNA, 10 bp, Unknown
  misc_feature (1)..( 10): Matrix.002 file - promoters60/1444514
tttactaaaa

SEQ ID NO: 50766 - DNA, 12 bp, Unknown
  misc_feature (1)..( 12): Matrix.002 file - promoters60/1444514
ccctatatatat

SEQ ID NO: 50767 - DNA, 10 bp, Unknown
  misc_feature (1)..( 10): Matrix.002 file - promoters60/1444514
ttttaatttt

SEQ ID NO: 50768 - DNA, 8 bp, Unknown
  misc_feature (1)..( 8): Matrix.002 file - promoters60/1444514
atttgtta

SEQ ID NO: 50769 - DNA, 10 bp, Unknown
  misc_feature (1)..( 10): Matrix.002 file - promoters60/1444514
attttgtaat

SEQ ID NO: 50770 - DNA, 8 bp, Unknown
  misc_feature (1)..( 8): Matrix.002 file - promoters60/1444629
gattctta

SEQ ID NO: 50771 - DNA, 10 bp, Unknown
  misc_feature (1)..( 10): Matrix.002 file - promoters60/1444629
accttatcca

SEQ ID NO: 50772 - DNA, 6 bp, Unknown
  misc_feature (1)..( 6): Matrix.002 file - promoters60/1444629
attatc

SEQ ID NO: 50773 - DNA, 7 bp, Unknown
  misc_feature (1)..( 7): Matrix.002 file - promoters60/1444629
attatca

SEQ ID NO: 50774 - DNA, 7 bp, Unknown
  misc_feature (1)..( 7): Matrix.002 file - promoters60/1446456
aaataaa

SEQ ID NO: 50775 - DNA, 8 bp, Unknown
  misc_feature (1)..( 8): Matrix.002 file - promoters60/1446456
ctttttat

SEQ ID NO: 50776 - DNA, 11 bp, Unknown
  misc_feature (1)..( 11): Matrix.002 file - promoters60/1446456
tttctaactcc

SEQ ID NO: 50777 - DNA, 8 bp, Unknown
  misc_feature (1)..( 8): Matrix.002 file - promoters60/1446456
aagaataa

SEQ ID NO: 50778 - DNA, 9 bp, Unknown
  misc_feature (1)..( 9): Matrix.002 file - promoters60/1446456
atacttttt

SEQ ID NO: 50779 - DNA, 10 bp, Unknown
  misc_feature (1)..( 10): Matrix.002 file - promoters60/1446456
actttttctg

SEQ ID NO: 50780 - DNA, 8 bp, Unknown
  misc_feature (1)..( 8): Matrix.002 file - promoters60/1446456
aagaaatt

SEQ ID NO: 50781 - DNA, 12 bp, Unknown
  misc_feature (1)..( 12): Matrix.002 file - promoters60/1446636
actattaataaa

SEQ ID NO: 50782 - DNA, 6 bp, Unknown
  misc_feature (1)..( 6): Matrix.002 file - promoters60/1446636
attaat

SEQ ID NO: 50783 - DNA, 12 bp, Unknown
  misc_feature (1)..( 12): Matrix.002 file - promoters60/1446636
ctttttttgttt

SEQ ID NO: 50784 - DNA, 10 bp, Unknown
  misc_feature (1)..( 10): Matrix.002 file - promoters60/1446975
gataacctta

SEQ ID NO: 50785 - DNA, 9 bp, Unknown
  misc_feature (1)..( 9): Matrix.002 file - promoters60/1446975
aacattttg

SEQ ID NO: 50786 - DNA, 6 bp, Unknown
  misc_feature (1)..( 6): Matrix.002 file - promoters60/1446975
ctgatt

SEQ ID NO: 50787 - DNA, 6 bp, Unknown
  misc_feature (1)..( 6): Matrix.002 file - promoters60/1446975
gatcta

SEQ ID NO: 50788 - DNA, 7 bp, Unknown
  misc_feature (1)..( 7): Matrix.002 file - promoters60/1446975
agaaaga

SEQ ID NO: 50789 - DNA, 7 bp, Unknown
  misc_feature (1)..( 7): Matrix.002 file - promoters60/1446975
tcataat

SEQ ID NO: 50790 - DNA, 6 bp, Unknown
  misc_feature (1)..( 6): Matrix.002 file - promoters60/1446975
attgtt

SEQ ID NO: 50791 - DNA, 6 bp, Unknown
  misc_feature (1)..( 6): Matrix.002 file - promoters60/1447064
agagca

SEQ ID NO: 50792 - DNA, 6 bp, Unknown
  misc_feature (1)..( 6): Matrix.002 file - promoters60/1447064
atagag

SEQ ID NO: 50793 - DNA, 7 bp, Unknown
  misc_feature (1)..( 7): Matrix.002 file - promoters60/1447064
tatattg

SEQ ID NO: 50794 - DNA, 6 bp, Unknown
  misc_feature (1)..( 6): Matrix.002 file - promoters60/1447064
aaagac

SEQ ID NO: 50795 - DNA, 7 bp, Unknown
  misc_feature (1)..( 7): Matrix.002 file - promoters60/1447064
taaaaaa

SEQ ID NO: 50796 - DNA, 6 bp, Unknown
  misc_feature (1)..( 6): Matrix.002 file - promoters60/1447064
taaaaa

SEQ ID NO: 50797 - DNA, 6 bp, Unknown
  misc_feature (1)..( 6): Matrix.002 file - promoters60/1447064
cttcta

SEQ ID NO: 50798 - DNA, 7 bp, Unknown
  misc_feature (1)..( 7): Matrix.002 file - promoters60/1447064
tttctat

SEQ ID NO: 50799 - DNA, 7 bp, Unknown
  misc_feature (1)..( 7): Matrix.002 file - promoters60/1447064
tatattg

SEQ ID NO: 50800 - DNA, 8 bp, Unknown
  misc_feature (1)..( 8): Matrix.002 file - promoters60/1447064
tgttaaaa

SEQ ID NO: 50801 - DNA, 8 bp, Unknown
  misc_feature (1)..( 8): Matrix.002 file - promoters60/1447064
cattaaac

SEQ ID NO: 50802 - DNA, 6 bp, Unknown
  misc_feature (1)..( 6): Matrix.002 file - promoters60/1447064
tctcca

SEQ ID NO: 50803 - DNA, 7 bp, Unknown
  misc_feature (1)..( 7): Matrix.002 file - promoters60/1447064
ccatttt

SEQ ID NO: 50804 - DNA, 6 bp, Unknown
  misc_feature (1)..( 6): Matrix.002 file - promoters60/1447064
ttttca

SEQ ID NO: 50805 - DNA, 6 bp, Unknown
  misc_feature (1)..( 6): Matrix.002 file - promoters60/1447064
tgtctt

SEQ ID NO: 50806 - DNA, 6 bp, Unknown
  misc_feature (1)..( 6): Matrix.002 file - promoters60/1447064
caagct

SEQ ID NO: 50807 - DNA, 7 bp, Unknown
  misc_feature (1)..( 7): Matrix.002 file - promoters60/1447064
ataaata

SEQ ID NO: 50808 - DNA, 12 bp, Unknown
  misc_feature (1)..( 12): Matrix.002 file - promoters60/1447217
gaaaaaaaaaaa

SEQ ID NO: 50809 - DNA, 10 bp, Unknown
  misc_feature (1)..( 10): Matrix.002 file - promoters60/1447217
tttattatgt

SEQ ID NO: 50810 - DNA, 8 bp, Unknown
  misc_feature (1)..( 8): Matrix.002 file - promoters60/1447217
agaataaa

SEQ ID NO: 50811 - DNA, 9 bp, Unknown
  misc_feature (1)..( 9): Matrix.002 file - promoters60/1447217
aaaataaaa

SEQ ID NO: 50812 - DNA, 10 bp, Unknown
  misc_feature (1)..( 10): Matrix.002 file - promoters60/1447217
aaaaaagagt

SEQ ID NO: 50813 - DNA, 8 bp, Unknown
  misc_feature (1)..( 8): Matrix.002 file - promoters60/1447217
ataaataa

SEQ ID NO: 50814 - DNA, 9 bp, Unknown
  misc_feature (1)..( 9): Matrix.002 file - promoters60/1447217
ttttgaacg

SEQ ID NO: 50815 - DNA, 9 bp, Unknown
  misc_feature (1)..( 9): Matrix.002 file - promoters60/1447217
gaaatacaa

SEQ ID NO: 50816 - DNA, 10 bp, Unknown
  misc_feature (1)..( 10): Matrix.002 file - promoters60/1447217
caaaacaaaa

SEQ ID NO: 50817 - DNA, 14 bp, Unknown
  misc_feature (1)..( 14): Matrix.002 file - promoters60/1447217
gaaatattttaaac

SEQ ID NO: 50818 - DNA, 7 bp, Unknown
  misc_feature (1)..( 7): Matrix.002 file - promoters60/1447217
tataatt

SEQ ID NO: 50819 - DNA, 8 bp, Unknown
  misc_feature (1)..( 8): Matrix.002 file - promoters60/1447321
ttttgaat

SEQ ID NO: 50820 - DNA, 9 bp, Unknown
  misc_feature (1)..( 9): Matrix.002 file - promoters60/1447321
tataataca

SEQ ID NO: 50821 - DNA, 11 bp, Unknown
  misc_feature (1)..( 11): Matrix.002 file - promoters60/1447321
aaaatgtgaaa

SEQ ID NO: 50822 - DNA, 7 bp, Unknown
  misc_feature (1)..( 7): Matrix.002 file - promoters60/1447321
aatctaa

SEQ ID NO: 50823 - DNA, 8 bp, Unknown
  misc_feature (1)..( 8): Matrix.002 file - promoters60/1447321
ccaaattt

SEQ ID NO: 50824 - DNA, 6 bp, Unknown
  misc_feature (1)..( 6): Matrix.002 file - promoters60/1447321
aatatt

SEQ ID NO: 50825 - DNA, 9 bp, Unknown
  misc_feature (1)..( 9): Matrix.002 file - promoters60/1447321
tataaaata

SEQ ID NO: 50826 - DNA, 8 bp, Unknown
  misc_feature (1)..( 8): Matrix.002 file - promoters60/1447321
agcccaaa

SEQ ID NO: 50827 - DNA, 7 bp, Unknown
  misc_feature (1)..( 7): Matrix.002 file - promoters60/1447321
aatcttc

SEQ ID NO: 50828 - DNA, 7 bp, Unknown
  misc_feature (1)..( 7): Matrix.002 file - promoters60/1447321
tgaattt

SEQ ID NO: 50829 - DNA, 9 bp, Unknown
  misc_feature (1)..( 9): Matrix.002 file - promoters60/1447321
aaagaacat

SEQ ID NO: 50830 - DNA, 6 bp, Unknown
  misc_feature (1)..( 6): Matrix.002 file - promoters60/1447321
actaaa

SEQ ID NO: 50831 - DNA, 6 bp, Unknown
  misc_feature (1)..( 6): Matrix.002 file - promoters60/1447321
ttttgt

SEQ ID NO: 50832 - DNA, 6 bp, Unknown
  misc_feature (1)..( 6): Matrix.002 file - promoters60/1447321
tttaga

SEQ ID NO: 50833 - DNA, 6 bp, Unknown
  misc_feature (1)..( 6): Matrix.002 file - promoters60/1447321
ctttta

SEQ ID NO: 50834 - DNA, 6 bp, Unknown
  misc_feature (1)..( 6): Matrix.002 file - promoters60/1447321
aatttg

SEQ ID NO: 50835 - DNA, 9 bp, Unknown
  misc_feature (1)..( 9): Matrix.002 file - promoters60/1447321
tgtaatatt

SEQ ID NO: 50836 - DNA, 6 bp, Unknown
  misc_feature (1)..( 6): Matrix.002 file - promoters60/1447321
ctacat

SEQ ID NO: 50837 - DNA, 7 bp, Unknown
  misc_feature (1)..( 7): Matrix.002 file - promoters60/1447321
aatatat

SEQ ID NO: 50838 - DNA, 6 bp, Unknown
  misc_feature (1)..( 6): Matrix.002 file - promoters60/1447321
tttaat

SEQ ID NO: 50839 - DNA, 10 bp, Unknown
  misc_feature (1)..( 10): Matrix.002 file - promoters60/1447321
aaatgtttgt

SEQ ID NO: 50840 - DNA, 7 bp, Unknown
  misc_feature (1)..( 7): Matrix.002 file - promoters60/1447321
cctcttc

SEQ ID NO: 50841 - DNA, 7 bp, Unknown
  misc_feature (1)..( 7): Matrix.002 file - promoters60/1447352
gaattca

SEQ ID NO: 50842 - DNA, 10 bp, Unknown
  misc_feature (1)..( 10): Matrix.002 file - promoters60/1447352
tttgcgaatt

SEQ ID NO: 50843 - DNA, 9 bp, Unknown
  misc_feature (1)..( 9): Matrix.002 file - promoters60/1447352
ttttgattt

SEQ ID NO: 50844 - DNA, 7 bp, Unknown
  misc_feature (1)..( 7): Matrix.002 file - promoters60/1447352
aagattt

SEQ ID NO: 50845 - DNA, 6 bp, Unknown
  misc_feature (1)..( 6): Matrix.002 file - promoters60/1447352
aaaatt

SEQ ID NO: 50846 - DNA, 7 bp, Unknown
  misc_feature (1)..( 7): Matrix.002 file - promoters60/1447352
ttgcttt

SEQ ID NO: 50847 - DNA, 7 bp, Unknown
  misc_feature (1)..( 7): Matrix.002 file - promoters60/1447352
gaagctt

SEQ ID NO: 50848 - DNA, 6 bp, Unknown
  misc_feature (1)..( 6): Matrix.002 file - promoters60/1447352
atggcg

SEQ ID NO: 50849 - DNA, 9 bp, Unknown
  misc_feature (1)..( 9): Matrix.002 file - promoters60/1447352
ataatcatc

SEQ ID NO: 50850 - DNA, 6 bp, Unknown
  misc_feature (1)..( 6): Matrix.002 file - promoters60/1447352
ttgaat

SEQ ID NO: 50851 - DNA, 11 bp, Unknown
  misc_feature (1)..( 11): Matrix.002 file - promoters60/1447352
attgatttcgt

SEQ ID NO: 50852 - DNA, 8 bp, Unknown
  misc_feature (1)..( 8): Matrix.002 file - promoters60/1447352
aaaaattg

SEQ ID NO: 50853 - DNA, 6 bp, Unknown
  misc_feature (1)..( 6): Matrix.002 file - promoters60/1447352
tcttgt

SEQ ID NO: 50854 - DNA, 8 bp, Unknown
  misc_feature (1)..( 8): Matrix.002 file - promoters60/1447352
atgaccag

SEQ ID NO: 50855 - DNA, 6 bp, Unknown
  misc_feature (1)..( 6): Matrix.002 file - promoters60/1447352
taatat

SEQ ID NO: 50856 - DNA, 7 bp, Unknown
  misc_feature (1)..( 7): Matrix.002 file - promoters60/1447352
ataatgc

SEQ ID NO: 50857 - DNA, 6 bp, Unknown
  misc_feature (1)..( 6): Matrix.002 file - promoters60/1447352
tcatcc

SEQ ID NO: 50858 - DNA, 10 bp, Unknown
  misc_feature (1)..( 10): Matrix.002 file - promoters60/1447352
tccctcgtga

SEQ ID NO: 50859 - DNA, 6 bp, Unknown
  misc_feature (1)..( 6): Matrix.002 file - promoters60/1447352
aaaacc

SEQ ID NO: 50860 - DNA, 6 bp, Unknown
  misc_feature (1)..( 6): Matrix.002 file - promoters60/1447425
tcaatg

SEQ ID NO: 50861 - DNA, 6 bp, Unknown
  misc_feature (1)..( 6): Matrix.002 file - promoters60/1447425
aaaaga

SEQ ID NO: 50862 - DNA, 6 bp, Unknown
  misc_feature (1)..( 6): Matrix.002 file - promoters60/1447425
aatcaa

SEQ ID NO: 50863 - DNA, 7 bp, Unknown
  misc_feature (1)..( 7): Matrix.002 file - promoters60/1447425
atcataa

SEQ ID NO: 50864 - DNA, 8 bp, Unknown
  misc_feature (1)..( 8): Matrix.002 file - promoters60/1447425
ggatgtta

SEQ ID NO: 50865 - DNA, 6 bp, Unknown
  misc_feature (1)..( 6): Matrix.002 file - promoters60/1447425
ctaatg

SEQ ID NO: 50866 - DNA, 10 bp, Unknown
  misc_feature (1)..( 10): Matrix.002 file - promoters60/1447425
aatttgatag

SEQ ID NO: 50867 - DNA, 7 bp, Unknown
  misc_feature (1)..( 7): Matrix.002 file - promoters60/1447425
gatacag

SEQ ID NO: 50868 - DNA, 6 bp, Unknown
  misc_feature (1)..( 6): Matrix.002 file - promoters60/1447425
attcca

SEQ ID NO: 50869 - DNA, 7 bp, Unknown
  misc_feature (1)..( 7): Matrix.002 file - promoters60/1447425
aaacctg

SEQ ID NO: 50870 - DNA, 6 bp, Unknown
  misc_feature (1)..( 6): Matrix.002 file - promoters60/1447425
tttgac

SEQ ID NO: 50871 - DNA, 6 bp, Unknown
  misc_feature (1)..( 6): Matrix.002 file - promoters60/1447425
acggta

SEQ ID NO: 50872 - DNA, 7 bp, Unknown
  misc_feature (1)..( 7): Matrix.002 file - promoters60/1447425
tcaagtt

SEQ ID NO: 50873 - DNA, 6 bp, Unknown
  misc_feature (1)..( 6): Matrix.002 file - promoters60/1447591
tttgat

SEQ ID NO: 50874 - DNA, 10 bp, Unknown
  misc_feature (1)..( 10): Matrix.002 file - promoters60/1447591
acaaacaaaa

SEQ ID NO: 50875 - DNA, 11 bp, Unknown
  misc_feature (1)..( 11): Matrix.002 file - promoters60/1447591
acagacaaaac

SEQ ID NO: 50876 - DNA, 7 bp, Unknown
  misc_feature (1)..( 7): Matrix.002 file - promoters60/1447591
acaaaaa

SEQ ID NO: 50877 - DNA, 12 bp, Unknown
  misc_feature (1)..( 12): Matrix.002 file - promoters60/1447646
taaagaagaaga

SEQ ID NO: 50878 - DNA, 6 bp, Unknown
  misc_feature (1)..( 6): Matrix.002 file - promoters60/1447686
acaaac

SEQ ID NO: 50879 - DNA, 6 bp, Unknown
  misc_feature (1)..( 6): Matrix.002 file - promoters60/1447686
tttgta

SEQ ID NO: 50880 - DNA, 6 bp, Unknown
  misc_feature (1)..( 6): Matrix.002 file - promoters60/1447686
atttta

SEQ ID NO: 50881 - DNA, 7 bp, Unknown
  misc_feature (1)..( 7): Matrix.002 file - promoters60/1447686
agtgctt

SEQ ID NO: 50882 - DNA, 7 bp, Unknown
  misc_feature (1)..( 7): Matrix.002 file - promoters60/1447686
ttaaaaa

SEQ ID NO: 50883 - DNA, 7 bp, Unknown
  misc_feature (1)..( 7): Matrix.002 file - promoters60/1447686
ataaaca

SEQ ID NO: 50884 - DNA, 9 bp, Unknown
  misc_feature (1)..( 9): Matrix.002 file - promoters60/1447686
aatatatgt

SEQ ID NO: 50885 - DNA, 6 bp, Unknown
  misc_feature (1)..( 6): Matrix.002 file - promoters60/1447686
agaatc

SEQ ID NO: 50886 - DNA, 7 bp, Unknown
  misc_feature (1)..( 7): Matrix.002 file - promoters60/1447686
aattaag

SEQ ID NO: 50887 - DNA, 13 bp, Unknown
  misc_feature (1)..( 13): Matrix.002 file - promoters60/1447953
caatctttgtatt

SEQ ID NO: 50888 - DNA, 9 bp, Unknown
  misc_feature (1)..( 9): Matrix.002 file - promoters60/1447953
tattttaga

SEQ ID NO: 50889 - DNA, 9 bp, Unknown
  misc_feature (1)..( 9): Matrix.002 file - promoters60/1447953
attctacat

SEQ ID NO: 50890 - DNA, 8 bp, Unknown
  misc_feature (1)..( 8): Matrix.002 file - promoters60/1447953
aaaaagct

SEQ ID NO: 50891 - DNA, 8 bp, Unknown
  misc_feature (1)..( 8): Matrix.002 file - promoters60/1447953
ttcccttc

SEQ ID NO: 50892 - DNA, 5 bp, Unknown
  misc_feature (1)..( 5): Matrix.002 file - promoters60/1447953
ttata

SEQ ID NO: 50893 - DNA, 10 bp, Unknown
  misc_feature (1)..( 10): Matrix.002 file - promoters60/1447953
tataaaaacc

SEQ ID NO: 50894 - DNA, 9 bp, Unknown
  misc_feature (1)..( 9): Matrix.002 file - promoters60/1447953
atataattt

SEQ ID NO: 50895 - DNA, 13 bp, Unknown
  misc_feature (1)..( 13): Matrix.002 file - promoters60/1448022
aataaaaaaatat

SEQ ID NO: 50896 - DNA, 10 bp, Unknown
  misc_feature (1)..( 10): Matrix.002 file - promoters60/1448022
aacaatgtaa

SEQ ID NO: 50897 - DNA, 10 bp, Unknown
  misc_feature (1)..( 10): Matrix.002 file - promoters60/1448022
atatcaatat

SEQ ID NO: 50898 - DNA, 10 bp, Unknown
  misc_feature (1)..( 10): Matrix.002 file - promoters60/1448022
aattttatat

SEQ ID NO: 50899 - DNA, 9 bp, Unknown
  misc_feature (1)..( 9): Matrix.002 file - promoters60/1448022
aatatgtaa

SEQ ID NO: 50900 - DNA, 12 bp, Unknown
  misc_feature (1)..( 12): Matrix.002 file - promoters60/1448022
tgattaaaaata

SEQ ID NO: 50901 - DNA, 14 bp, Unknown
  misc_feature (1)..( 14): Matrix.002 file - promoters60/1448022
attaagaaaaaaaa

SEQ ID NO: 50902 - DNA, 8 bp, Unknown
  misc_feature (1)..( 8): Matrix.002 file - promoters60/1448022
attgtaat

SEQ ID NO: 50903 - DNA, 8 bp, Unknown
  misc_feature (1)..( 8): Matrix.002 file - promoters60/1448022
atagattt

SEQ ID NO: 50904 - DNA, 9 bp, Unknown
  misc_feature (1)..( 9): Matrix.002 file - promoters60/1448022
caatcacaa

SEQ ID NO: 50905 - DNA, 13 bp, Unknown
  misc_feature (1)..( 13): Matrix.002 file - promoters60/1448022
ctattatttagaa

SEQ ID NO: 50906 - DNA, 15 bp, Unknown
  misc_feature (1)..( 15): Matrix.002 file - promoters60/1448022
aaaaattatttttaa

SEQ ID NO: 50907 - DNA, 7 bp, Unknown
  misc_feature (1)..( 7): Matrix.002 file - promoters60/1448078
tttcttc

SEQ ID NO: 50908 - DNA, 8 bp, Unknown
  misc_feature (1)..( 8): Matrix.002 file - promoters60/1448078
aattagtc

SEQ ID NO: 50909 - DNA, 7 bp, Unknown
  misc_feature (1)..( 7): Matrix.002 file - promoters60/1448078
cataaaa

SEQ ID NO: 50910 - DNA, 6 bp, Unknown
  misc_feature (1)..( 6): Matrix.002 file - promoters60/1448078
aagaag

SEQ ID NO: 50911 - DNA, 6 bp, Unknown
  misc_feature (1)..( 6): Matrix.002 file - promoters60/1448078
ccatct

SEQ ID NO: 50912 - DNA, 6 bp, Unknown
  misc_feature (1)..( 6): Matrix.002 file - promoters60/1448078
tcactt

SEQ ID NO: 50913 - DNA, 6 bp, Unknown
  misc_feature (1)..( 6): Matrix.002 file - promoters60/1448078
tttgat

SEQ ID NO: 50914 - DNA, 6 bp, Unknown
  misc_feature (1)..( 6): Matrix.002 file - promoters60/1448078
ttctct

SEQ ID NO: 50915 - DNA, 6 bp, Unknown
  misc_feature (1)..( 6): Matrix.002 file - promoters60/1448078
ctcttt

SEQ ID NO: 50916 - DNA, 8 bp, Unknown
  misc_feature (1)..( 8): Matrix.002 file - promoters60/1448078
ctctcttt

SEQ ID NO: 50917 - DNA, 5 bp, Unknown
  misc_feature (1)..( 5): Matrix.002 file - promoters60/1448078
ttttg

SEQ ID NO: 50918 - DNA, 6 bp, Unknown
  misc_feature (1)..( 6): Matrix.002 file - promoters60/1448078
tttcca

SEQ ID NO: 50919 - DNA, 6 bp, Unknown
  misc_feature (1)..( 6): Matrix.002 file - promoters60/1448078
aaagat

SEQ ID NO: 50920 - DNA, 6 bp, Unknown
  misc_feature (1)..( 6): Matrix.002 file - promoters60/1448078
ctttaa

SEQ ID NO: 50921 - DNA, 8 bp, Unknown
  misc_feature (1)..( 8): Matrix.002 file - promoters60/1448078
tttcattt

SEQ ID NO: 50922 - DNA, 6 bp, Unknown
  misc_feature (1)..( 6): Matrix.002 file - promoters60/1448078
tcttct

SEQ ID NO: 50923 - DNA, 8 bp, Unknown
  misc_feature (1)..( 8): Matrix.002 file - promoters60/1448078
tttattaa

SEQ ID NO: 50924 - DNA, 10 bp, Unknown
  misc_feature (1)..( 10): Matrix.002 file - promoters60/1448078
aactttactt

SEQ ID NO: 50925 - DNA, 7 bp, Unknown
  misc_feature (1)..( 7): Matrix.002 file - promoters60/1448078
aaaaaaa

SEQ ID NO: 50926 - DNA, 7 bp, Unknown
  misc_feature (1)..( 7): Matrix.002 file - promoters60/1448078
acacaaa

SEQ ID NO: 50927 - DNA, 6 bp, Unknown
  misc_feature (1)..( 6): Matrix.002 file - promoters60/1448078
aaaaat

SEQ ID NO: 50928 - DNA, 9 bp, Unknown
  misc_feature (1)..( 9): Matrix.002 file - promoters60/1448078
aaagaaaaa

SEQ ID NO: 50929 - DNA, 8 bp, Unknown
  misc_feature (1)..( 8): Matrix.002 file - promoters60/1448078
attagata

SEQ ID NO: 50930 - DNA, 7 bp, Unknown
  misc_feature (1)..( 7): Matrix.002 file - promoters60/1448078
attaccc

SEQ ID NO: 50931 - DNA, 6 bp, Unknown
  misc_feature (1)..( 6): Matrix.002 file - promoters60/1448078
aagaga

SEQ ID NO: 50932 - DNA, 8 bp, Unknown
  misc_feature (1)..( 8): Matrix.002 file - promoters60/1448105
ataaataa

SEQ ID NO: 50933 - DNA, 6 bp, Unknown
  misc_feature (1)..( 6): Matrix.002 file - promoters60/1448105
aattat

SEQ ID NO: 50934 - DNA, 6 bp, Unknown
  misc_feature (1)..( 6): Matrix.002 file - promoters60/1448105
tttgtt

SEQ ID NO: 50935 - DNA, 6 bp, Unknown
  misc_feature (1)..( 6): Matrix.002 file - promoters60/1448105
aaattg

SEQ ID NO: 50936 - DNA, 7 bp, Unknown
  misc_feature (1)..( 7): Matrix.002 file - promoters60/1448105
aaaaatt

SEQ ID NO: 50937 - DNA, 6 bp, Unknown
  misc_feature (1)..( 6): Matrix.002 file - promoters60/1448105
tttgat

SEQ ID NO: 50938 - DNA, 6 bp, Unknown
  misc_feature (1)..( 6): Matrix.002 file - promoters60/1448105
tcaaat

SEQ ID NO: 50939 - DNA, 9 bp, Unknown
  misc_feature (1)..( 9): Matrix.002 file - promoters60/1448105
taaatatga

SEQ ID NO: 50940 - DNA, 7 bp, Unknown
  misc_feature (1)..( 7): Matrix.002 file - promoters60/1448105
aatactt

SEQ ID NO: 50941 - DNA, 7 bp, Unknown
  misc_feature (1)..( 7): Matrix.002 file - promoters60/1448105
aaactct

SEQ ID NO: 50942 - DNA, 6 bp, Unknown
  misc_feature (1)..( 6): Matrix.002 file - promoters60/1448105
gttttt

SEQ ID NO: 50943 - DNA, 8 bp, Unknown
  misc_feature (1)..( 8): Matrix.002 file - promoters60/1448105
gaaacaga

SEQ ID NO: 50944 - DNA, 7 bp, Unknown
  misc_feature (1)..( 7): Matrix.002 file - promoters60/1448105
aaagctt

SEQ ID NO: 50945 - DNA, 8 bp, Unknown
  misc_feature (1)..( 8): Matrix.002 file - promoters60/1448105
aatatgat

SEQ ID NO: 50946 - DNA, 7 bp, Unknown
  misc_feature (1)..( 7): Matrix.002 file - promoters60/1448105
ctcaaca

SEQ ID NO: 50947 - DNA, 8 bp, Unknown
  misc_feature (1)..( 8): Matrix.002 file - promoters60/1448105
ataaaaca

SEQ ID NO: 50948 - DNA, 8 bp, Unknown
  misc_feature (1)..( 8): Matrix.002 file - promoters60/1448105
tatatttt

SEQ ID NO: 50949 - DNA, 6 bp, Unknown
  misc_feature (1)..( 6): Matrix.002 file - promoters60/1448105
tatttc

SEQ ID NO: 50950 - DNA, 8 bp, Unknown
  misc_feature (1)..( 8): Matrix.002 file - promoters60/1448105
atcaggaa

SEQ ID NO: 50951 - DNA, 8 bp, Unknown
  misc_feature (1)..( 8): Matrix.002 file - promoters60/1448105
tttaaaag

SEQ ID NO: 50952 - DNA, 6 bp, Unknown
  misc_feature (1)..( 6): Matrix.002 file - promoters60/1448105
aggttt

SEQ ID NO: 50953 - DNA, 9 bp, Unknown
  misc_feature (1)..( 9): Matrix.002 file - promoters60/1448135
aatcctcca

SEQ ID NO: 50954 - DNA, 9 bp, Unknown
  misc_feature (1)..( 9): Matrix.002 file - promoters60/1448135
tgaatgata

SEQ ID NO: 50955 - DNA, 9 bp, Unknown
  misc_feature (1)..( 9): Matrix.002 file - promoters60/1448135
aagaataaa

SEQ ID NO: 50956 - DNA, 9 bp, Unknown
  misc_feature (1)..( 9): Matrix.002 file - promoters60/1448135
tatttaaag

SEQ ID NO: 50957 - DNA, 10 bp, Unknown
  misc_feature (1)..( 10): Matrix.002 file - promoters60/1448185
aaggttggat

SEQ ID NO: 50958 - DNA, 6 bp, Unknown
  misc_feature (1)..( 6): Matrix.002 file - promoters60/1448185
ggataa

SEQ ID NO: 50959 - DNA, 7 bp, Unknown
  misc_feature (1)..( 7): Matrix.002 file - promoters60/1448185
gtaataa

SEQ ID NO: 50960 - DNA, 7 bp, Unknown
  misc_feature (1)..( 7): Matrix.002 file - promoters60/1448185
gatcctc

SEQ ID NO: 50961 - DNA, 9 bp, Unknown
  misc_feature (1)..( 9): Matrix.002 file - promoters60/1448185
atctcgatt

SEQ ID NO: 50962 - DNA, 7 bp, Unknown
  misc_feature (1)..( 7): Matrix.002 file - promoters60/1448185
aaagctt

SEQ ID NO: 50963 - DNA, 6 bp, Unknown
  misc_feature (1)..( 6): Matrix.002 file - promoters60/1448185
atctac

SEQ ID NO: 50964 - DNA, 7 bp, Unknown
  misc_feature (1)..( 7): Matrix.002 file - promoters60/1448185
tcataat

SEQ ID NO: 50965 - DNA, 6 bp, Unknown
  misc_feature (1)..( 6): Matrix.002 file - promoters60/1448185
attgtt

SEQ ID NO: 50966 - DNA, 9 bp, Unknown
  misc_feature (1)..( 9): Matrix.002 file - promoters60/1448231
tcaaatttg

SEQ ID NO: 50967 - DNA, 7 bp, Unknown
  misc_feature (1)..( 7): Matrix.002 file - promoters60/1448231
aaatcag

SEQ ID NO: 50968 - DNA, 9 bp, Unknown
  misc_feature (1)..( 9): Matrix.002 file - promoters60/1448231
attctaaac

SEQ ID NO: 50969 - DNA, 10 bp, Unknown
  misc_feature (1)..( 10): Matrix.002 file - promoters60/1448231
taaaagaatc

SEQ ID NO: 50970 - DNA, 13 bp, Unknown
  misc_feature (1)..( 13): Matrix.002 file - promoters60/1448231
tatgaatcagcta

SEQ ID NO: 50971 - DNA, 8 bp, Unknown
  misc_feature (1)..( 8): Matrix.002 file - promoters60/1448231
caaaagag

SEQ ID NO: 50972 - DNA, 10 bp, Unknown
  misc_feature (1)..( 10): Matrix.002 file - promoters60/1448231
tgtttgattt

SEQ ID NO: 50973 - DNA, 11 bp, Unknown
  misc_feature (1)..( 11): Matrix.002 file - promoters60/1448231
ttttgctaaaa

SEQ ID NO: 50974 - DNA, 10 bp, Unknown
  misc_feature (1)..( 10): Matrix.002 file - promoters60/1448231
aacagagtaa

SEQ ID NO: 50975 - DNA, 9 bp, Unknown
  misc_feature (1)..( 9): Matrix.002 file - promoters60/1448235
cttctgttt

SEQ ID NO: 50976 - DNA, 12 bp, Unknown
  misc_feature (1)..( 12): Matrix.002 file - promoters60/1448235
tttcatctatct

SEQ ID NO: 50977 - DNA, 11 bp, Unknown
  misc_feature (1)..( 11): Matrix.002 file - promoters60/1448235
caattcgatat

SEQ ID NO: 50978 - DNA, 6 bp, Unknown
  misc_feature (1)..( 6): Matrix.002 file - promoters60/1448235
gttttt

SEQ ID NO: 50979 - DNA, 6 bp, Unknown
  misc_feature (1)..( 6): Matrix.002 file - promoters60/1448235
tataaa

SEQ ID NO: 50980 - DNA, 13 bp, Unknown
  misc_feature (1)..( 13): Matrix.002 file - promoters60/1448235
aaattaaaactta

SEQ ID NO: 50981 - DNA, 6 bp, Unknown
  misc_feature (1)..( 6): Matrix.002 file - promoters60/1448235
tttttt

SEQ ID NO: 50982 - DNA, 8 bp, Unknown
  misc_feature (1)..( 8): Matrix.002 file - promoters60/1448235
acaaataa

SEQ ID NO: 50983 - DNA, 7 bp, Unknown
  misc_feature (1)..( 7): Matrix.002 file - promoters60/1448235
tttgacc

SEQ ID NO: 50984 - DNA, 8 bp, Unknown
  misc_feature (1)..( 8): Matrix.002 file - promoters60/1448235
tcaaatct

SEQ ID NO: 50985 - DNA, 8 bp, Unknown
  misc_feature (1)..( 8): Matrix.002 file - promoters60/1448235
atctaaag

SEQ ID NO: 50986 - DNA, 6 bp, Unknown
  misc_feature (1)..( 6): Matrix.002 file - promoters60/1448235
caatct

SEQ ID NO: 50987 - DNA, 8 bp, Unknown
  misc_feature (1)..( 8): Matrix.002 file - promoters60/1448235
agacgaag

SEQ ID NO: 50988 - DNA, 6 bp, Unknown
  misc_feature (1)..( 6): Matrix.002 file - promoters60/1448235
atctac

SEQ ID NO: 50989 - DNA, 7 bp, Unknown
  misc_feature (1)..( 7): Matrix.002 file - promoters60/1448235
ttttttt

SEQ ID NO: 50990 - DNA, 9 bp, Unknown
  misc_feature (1)..( 9): Matrix.002 file - promoters60/1448251
aaaataatc

SEQ ID NO: 50991 - DNA, 9 bp, Unknown
  misc_feature (1)..( 9): Matrix.002 file - promoters60/1448251
ctaagtttt

SEQ ID NO: 50992 - DNA, 10 bp, Unknown
  misc_feature (1)..( 10): Matrix.002 file - promoters60/1448251
aaaaaaaaat

SEQ ID NO: 50993 - DNA, 7 bp, Unknown
  misc_feature (1)..( 7): Matrix.002 file - promoters60/1448251
agtatat

SEQ ID NO: 50994 - DNA, 7 bp, Unknown
  misc_feature (1)..( 7): Matrix.002 file - promoters60/1448251
agacaaa

SEQ ID NO: 50995 - DNA, 8 bp, Unknown
  misc_feature (1)..( 8): Matrix.002 file - promoters60/1448251
aaaaaatt

SEQ ID NO: 50996 - DNA, 9 bp, Unknown
  misc_feature (1)..( 9): Matrix.002 file - promoters60/1448251
tattattag

SEQ ID NO: 50997 - DNA, 8 bp, Unknown
  misc_feature (1)..( 8): Matrix.002 file - promoters60/1448251
tttagatg

SEQ ID NO: 50998 - DNA, 7 bp, Unknown
  misc_feature (1)..( 7): Matrix.002 file - promoters60/1448251
ggaataa

SEQ ID NO: 50999 - DNA, 7 bp, Unknown
  misc_feature (1)..( 7): Matrix.002 file - promoters60/1448251
ataatta

SEQ ID NO: 51000 - DNA, 11 bp, Unknown
  misc_feature (1)..( 11): Matrix.002 file - promoters60/1448251
ataaactaaaa

SEQ ID NO: 51001 - DNA, 9 bp, Unknown
  misc_feature (1)..( 9): Matrix.002 file - promoters60/1448251
aaaaaacat

SEQ ID NO: 51002 - DNA, 6 bp, Unknown
  misc_feature (1)..( 6): Matrix.002 file - promoters60/1448251
atttta

SEQ ID NO: 51003 - DNA, 6 bp, Unknown
  misc_feature (1)..( 6): Matrix.002 file - promoters60/1448251
ttttat

SEQ ID NO: 51004 - DNA, 7 bp, Unknown
  misc_feature (1)..( 7): Matrix.002 file - promoters60/1448251
tcactta

SEQ ID NO: 51005 - DNA, 6 bp, Unknown
  misc_feature (1)..( 6): Matrix.002 file - promoters60/1448251
aaattt

SEQ ID NO: 51006 - DNA, 7 bp, Unknown
  misc_feature (1)..( 7): Matrix.002 file - promoters60/1448251
attttaa

SEQ ID NO: 51007 - DNA, 10 bp, Unknown
  misc_feature (1)..( 10): Matrix.002 file - promoters60/1448251
ttaaataaaa

SEQ ID NO: 51008 - DNA, 6 bp, Unknown
  misc_feature (1)..( 6): Matrix.002 file - promoters60/1448251
tggatt

SEQ ID NO: 51009 - DNA, 6 bp, Unknown
  misc_feature (1)..( 6): Matrix.002 file - promoters60/1448251
tttgtt

SEQ ID NO: 51010 - DNA, 6 bp, Unknown
  misc_feature (1)..( 6): Matrix.002 file - promoters60/1448251
aaaaat

SEQ ID NO: 51011 - DNA, 6 bp, Unknown
  misc_feature (1)..( 6): Matrix.002 file - promoters60/1448251
aagaga

SEQ ID NO: 51012 - DNA, 6 bp, Unknown
  misc_feature (1)..( 6): Matrix.002 file - promoters60/1448251
tttttt

SEQ ID NO: 51013 - DNA, 7 bp, Unknown
  misc_feature (1)..( 7): Matrix.002 file - promoters60/1448251
aaaccca

SEQ ID NO: 51014 - DNA, 7 bp, Unknown
  misc_feature (1)..( 7): Matrix.002 file - promoters60/1448251
ataaata

SEQ ID NO: 51015 - DNA, 14 bp, Unknown
  misc_feature (1)..( 14): Matrix.002 file - promoters60/1450099
tcacatttaatgaa

SEQ ID NO: 51016 - DNA, 10 bp, Unknown
  misc_feature (1)..( 10): Matrix.002 file - promoters60/1450137
ttaaattttg

SEQ ID NO: 51017 - DNA, 11 bp, Unknown
  misc_feature (1)..( 11): Matrix.002 file - promoters60/1450137
cactttttaaa

SEQ ID NO: 51018 - DNA, 8 bp, Unknown
  misc_feature (1)..( 8): Matrix.002 file - promoters60/1450204
caaagctc

SEQ ID NO: 51019 - DNA, 13 bp, Unknown
  misc_feature (1)..( 13): Matrix.002 file - promoters60/1450204
catttgaatgcta

SEQ ID NO: 51020 - DNA, 8 bp, Unknown
  misc_feature (1)..( 8): Matrix.002 file - promoters60/1450224
gtaaacat

SEQ ID NO: 51021 - DNA, 6 bp, Unknown
  misc_feature (1)..( 6): Matrix.002 file - promoters60/1450224
acatat

SEQ ID NO: 51022 - DNA, 7 bp, Unknown
  misc_feature (1)..( 7): Matrix.002 file - promoters60/1450224
ttttcta

SEQ ID NO: 51023 - DNA, 7 bp, Unknown
  misc_feature (1)..( 7): Matrix.002 file - promoters60/1450224
ccaattc

SEQ ID NO: 51024 - DNA, 8 bp, Unknown
  misc_feature (1)..( 8): Matrix.002 file - promoters60/1450224
aaaagaaa

SEQ ID NO: 51025 - DNA, 7 bp, Unknown
  misc_feature (1)..( 7): Matrix.002 file - promoters60/1450224
tatttta

SEQ ID NO: 51026 - DNA, 7 bp, Unknown
  misc_feature (1)..( 7): Matrix.002 file - promoters60/1450224
taaaata

SEQ ID NO: 51027 - DNA, 6 bp, Unknown
  misc_feature (1)..( 6): Matrix.002 file - promoters60/1450224
aagtta

SEQ ID NO: 51028 - DNA, 9 bp, Unknown
  misc_feature (1)..( 9): Matrix.002 file - promoters60/1450224
atttttaat

SEQ ID NO: 51029 - DNA, 8 bp, Unknown
  misc_feature (1)..( 8): Matrix.002 file - promoters60/1450224
aaaaaaag

SEQ ID NO: 51030 - DNA, 9 bp, Unknown
  misc_feature (1)..( 9): Matrix.002 file - promoters60/1450224
aaaataatc

SEQ ID NO: 51031 - DNA, 7 bp, Unknown
  misc_feature (1)..( 7): Matrix.002 file - promoters60/1450224
aatagat

SEQ ID NO: 51032 - DNA, 8 bp, Unknown
  misc_feature (1)..( 8): Matrix.002 file - promoters60/1450224
gaaaacaa

SEQ ID NO: 51033 - DNA, 7 bp, Unknown
  misc_feature (1)..( 7): Matrix.002 file - promoters60/1450224
aaaccaa

SEQ ID NO: 51034 - DNA, 8 bp, Unknown
  misc_feature (1)..( 8): Matrix.002 file - promoters60/1450224
tttcagta

SEQ ID NO: 51035 - DNA, 7 bp, Unknown
  misc_feature (1)..( 7): Matrix.002 file - promoters60/1450224
aaagtct

SEQ ID NO: 51036 - DNA, 6 bp, Unknown
  misc_feature (1)..( 6): Matrix.002 file - promoters60/1450224
aaaatc

SEQ ID NO: 51037 - DNA, 7 bp, Unknown
  misc_feature (1)..( 7): Matrix.002 file - promoters60/1450224
cttgcta

SEQ ID NO: 51038 - DNA, 7 bp, Unknown
  misc_feature (1)..( 7): Matrix.002 file - promoters60/1450224
ataaaaa

SEQ ID NO: 51039 - DNA, 8 bp, Unknown
  misc_feature (1)..( 8): Matrix.002 file - promoters60/1450309
aaagaaag

SEQ ID NO: 51040 - DNA, 6 bp, Unknown
  misc_feature (1)..( 6): Matrix.002 file - promoters60/1450309
ttgttt

SEQ ID NO: 51041 - DNA, 6 bp, Unknown
  misc_feature (1)..( 6): Matrix.002 file - promoters60/1450309
aagtcc

SEQ ID NO: 51042 - DNA, 7 bp, Unknown
  misc_feature (1)..( 7): Matrix.002 file - promoters60/1450309
aagtctt

SEQ ID NO: 51043 - DNA, 6 bp, Unknown
  misc_feature (1)..( 6): Matrix.002 file - promoters60/1450309
tcttca

SEQ ID NO: 51044 - DNA, 6 bp, Unknown
  misc_feature (1)..( 6): Matrix.002 file - promoters60/1450309
tcctgg

SEQ ID NO: 51045 - DNA, 8 bp, Unknown
  misc_feature (1)..( 8): Matrix.002 file - promoters60/1450309
ctagaaag

SEQ ID NO: 51046 - DNA, 6 bp, Unknown
  misc_feature (1)..( 6): Matrix.002 file - promoters60/1450309
gagata

SEQ ID NO: 51047 - DNA, 6 bp, Unknown
  misc_feature (1)..( 6): Matrix.002 file - promoters60/1450309
caagac

SEQ ID NO: 51048 - DNA, 7 bp, Unknown
  misc_feature (1)..( 7): Matrix.002 file - promoters60/1450309
taatatt

SEQ ID NO: 51049 - DNA, 8 bp, Unknown
  misc_feature (1)..( 8): Matrix.002 file - promoters60/1450309
ttttgagt

SEQ ID NO: 51050 - DNA, 7 bp, Unknown
  misc_feature (1)..( 7): Matrix.002 file - promoters60/1450309
tattttt

SEQ ID NO: 51051 - DNA, 6 bp, Unknown
  misc_feature (1)..( 6): Matrix.002 file - promoters60/1450309
agattt

SEQ ID NO: 51052 - DNA, 9 bp, Unknown
  misc_feature (1)..( 9): Matrix.002 file - promoters60/1450309
attataata

SEQ ID NO: 51053 - DNA, 6 bp, Unknown
  misc_feature (1)..( 6): Matrix.002 file - promoters60/1450309
cattaa

SEQ ID NO: 51054 - DNA, 8 bp, Unknown
  misc_feature (1)..( 8): Matrix.002 file - promoters60/1450309
aatgatct

SEQ ID NO: 51055 - DNA, 7 bp, Unknown
  misc_feature (1)..( 7): Matrix.002 file - promoters60/1450309
tttacca

SEQ ID NO: 51056 - DNA, 7 bp, Unknown
  misc_feature (1)..( 7): Matrix.002 file - promoters60/1450309
tcaactc

SEQ ID NO: 51057 - DNA, 9 bp, Unknown
  misc_feature (1)..( 9): Matrix.002 file - promoters60/1450309
attaaccga

SEQ ID NO: 51058 - DNA, 6 bp, Unknown
  misc_feature (1)..( 6): Matrix.002 file - promoters60/1450309
tttttt

SEQ ID NO: 51059 - DNA, 7 bp, Unknown
  misc_feature (1)..( 7): Matrix.002 file - promoters60/1450309
tatttct

SEQ ID NO: 51060 - DNA, 6 bp, Unknown
  misc_feature (1)..( 6): Matrix.002 file - promoters60/1450309
tgactt

SEQ ID NO: 51061 - DNA, 7 bp, Unknown
  misc_feature (1)..( 7): Matrix.002 file - promoters60/1450321
gtaaagt

SEQ ID NO: 51062 - DNA, 6 bp, Unknown
  misc_feature (1)..( 6): Matrix.002 file - promoters60/1450321
ttttga

SEQ ID NO: 51063 - DNA, 8 bp, Unknown
  misc_feature (1)..( 8): Matrix.002 file - promoters60/1450321
atttgtag

SEQ ID NO: 51064 - DNA, 7 bp, Unknown
  misc_feature (1)..( 7): Matrix.002 file - promoters60/1450321
ttaattt

SEQ ID NO: 51065 - DNA, 7 bp, Unknown
  misc_feature (1)..( 7): Matrix.002 file - promoters60/1450321
gacctct

SEQ ID NO: 51066 - DNA, 6 bp, Unknown
  misc_feature (1)..( 6): Matrix.002 file - promoters60/1450321
tgagct

SEQ ID NO: 51067 - DNA, 8 bp, Unknown
  misc_feature (1)..( 8): Matrix.002 file - promoters60/1450321
gcttactc

SEQ ID NO: 51068 - DNA, 8 bp, Unknown
  misc_feature (1)..( 8): Matrix.002 file - promoters60/1450321
ttagctca

SEQ ID NO: 51069 - DNA, 7 bp, Unknown
  misc_feature (1)..( 7): Matrix.002 file - promoters60/1450321
actcgta

SEQ ID NO: 51070 - DNA, 9 bp, Unknown
  misc_feature (1)..( 9): Matrix.002 file - promoters60/1450321
tgaaaaact

SEQ ID NO: 51071 - DNA, 8 bp, Unknown
  misc_feature (1)..( 8): Matrix.002 file - promoters60/1450321
aatcaagt

SEQ ID NO: 51072 - DNA, 7 bp, Unknown
  misc_feature (1)..( 7): Matrix.002 file - promoters60/1450321
caaaaaa

SEQ ID NO: 51073 - DNA, 6 bp, Unknown
  misc_feature (1)..( 6): Matrix.002 file - promoters60/1450357
aatact

SEQ ID NO: 51074 - DNA, 8 bp, Unknown
  misc_feature (1)..( 8): Matrix.002 file - promoters60/1450357
atatataa

SEQ ID NO: 51075 - DNA, 11 bp, Unknown
  misc_feature (1)..( 11): Matrix.002 file - promoters60/1450357
tttctttattt

SEQ ID NO: 51076 - DNA, 7 bp, Unknown
  misc_feature (1)..( 7): Matrix.002 file - promoters60/1450357
attatca

SEQ ID NO: 51077 - DNA, 7 bp, Unknown
  misc_feature (1)..( 7): Matrix.002 file - promoters60/1450357
tagaaaa

SEQ ID NO: 51078 - DNA, 7 bp, Unknown
  misc_feature (1)..( 7): Matrix.002 file - promoters60/1450357
atggatg

SEQ ID NO: 51079 - DNA, 12 bp, Unknown
  misc_feature (1)..( 12): Matrix.002 file - promoters60/1450357
taaggcaaattt

SEQ ID NO: 51080 - DNA, 8 bp, Unknown
  misc_feature (1)..( 8): Matrix.002 file - promoters60/1450357
tattaaaa

SEQ ID NO: 51081 - DNA, 10 bp, Unknown
  misc_feature (1)..( 10): Matrix.002 file - promoters60/1450357
tttatacaat

SEQ ID NO: 51082 - DNA, 6 bp, Unknown
  misc_feature (1)..( 6): Matrix.002 file - promoters60/1450357
agaaaa

SEQ ID NO: 51083 - DNA, 8 bp, Unknown
  misc_feature (1)..( 8): Matrix.002 file - promoters60/1450357
aaaaaata

SEQ ID NO: 51084 - DNA, 6 bp, Unknown
  misc_feature (1)..( 6): Matrix.002 file - promoters60/1450357
ctaaac

SEQ ID NO: 51085 - DNA, 6 bp, Unknown
  misc_feature (1)..( 6): Matrix.002 file - promoters60/1450357
caaaat

SEQ ID NO: 51086 - DNA, 6 bp, Unknown
  misc_feature (1)..( 6): Matrix.002 file - promoters60/1450357
ccatac

SEQ ID NO: 51087 - DNA, 6 bp, Unknown
  misc_feature (1)..( 6): Matrix.002 file - promoters60/1450357
cacgtg

SEQ ID NO: 51088 - DNA, 8 bp, Unknown
  misc_feature (1)..( 8): Matrix.002 file - promoters60/1450357
atgccagc

SEQ ID NO: 51089 - DNA, 7 bp, Unknown
  misc_feature (1)..( 7): Matrix.002 file - promoters60/1450357
gtgagat

SEQ ID NO: 51090 - DNA, 7 bp, Unknown
  misc_feature (1)..( 7): Matrix.002 file - promoters60/1450357
gaagaga

SEQ ID NO: 51091 - DNA, 7 bp, Unknown
  misc_feature (1)..( 7): Matrix.002 file - promoters60/1450473
aacattc

SEQ ID NO: 51092 - DNA, 8 bp, Unknown
  misc_feature (1)..( 8): Matrix.002 file - promoters60/1450473
aaaaaaaa

SEQ ID NO: 51093 - DNA, 8 bp, Unknown
  misc_feature (1)..( 8): Matrix.002 file - promoters60/1450473
gaacaaca

SEQ ID NO: 51094 - DNA, 6 bp, Unknown
  misc_feature (1)..( 6): Matrix.002 file - promoters60/1450473
gaagaa

SEQ ID NO: 51095 - DNA, 8 bp, Unknown
  misc_feature (1)..( 8): Matrix.002 file - promoters60/1450473
agagtttg

SEQ ID NO: 51096 - DNA, 7 bp, Unknown
  misc_feature (1)..( 7): Matrix.002 file - promoters60/1450473
aaaatgt

SEQ ID NO: 51097 - DNA, 8 bp, Unknown
  misc_feature (1)..( 8): Matrix.002 file - promoters60/1450473
aatctgct

SEQ ID NO: 51098 - DNA, 6 bp, Unknown
  misc_feature (1)..( 6): Matrix.002 file - promoters60/1450473
aatatt

SEQ ID NO: 51099 - DNA, 7 bp, Unknown
  misc_feature (1)..( 7): Matrix.002 file - promoters60/1450473
aatgaga

SEQ ID NO: 51100 - DNA, 7 bp, Unknown
  misc_feature (1)..( 7): Matrix.002 file - promoters60/1450473
gaacaaa

SEQ ID NO: 51101 - DNA, 6 bp, Unknown
  misc_feature (1)..( 6): Matrix.002 file - promoters60/1450473
aaatca

SEQ ID NO: 51102 - DNA, 7 bp, Unknown
  misc_feature (1)..( 7): Matrix.002 file - promoters60/1450473
cagaact

SEQ ID NO: 51103 - DNA, 7 bp, Unknown
  misc_feature (1)..( 7): Matrix.002 file - promoters60/1450477
aatgaaa

SEQ ID NO: 51104 - DNA, 9 bp, Unknown
  misc_feature (1)..( 9): Matrix.002 file - promoters60/1450477
aagcactta

SEQ ID NO: 51105 - DNA, 9 bp, Unknown
  misc_feature (1)..( 9): Matrix.002 file - promoters60/1450477
atctctatt

SEQ ID NO: 51106 - DNA, 6 bp, Unknown
  misc_feature (1)..( 6): Matrix.002 file - promoters60/1450477
caaaag

SEQ ID NO: 51107 - DNA, 7 bp, Unknown
  misc_feature (1)..( 7): Matrix.002 file - promoters60/1450477
ttaaaat

SEQ ID NO: 51108 - DNA, 6 bp, Unknown
  misc_feature (1)..( 6): Matrix.002 file - promoters60/1450477
tatata

SEQ ID NO: 51109 - DNA, 7 bp, Unknown
  misc_feature (1)..( 7): Matrix.002 file - promoters60/1450477
aaagtgt

SEQ ID NO: 51110 - DNA, 7 bp, Unknown
  misc_feature (1)..( 7): Matrix.002 file - promoters60/1450477
tccatta

SEQ ID NO: 51111 - DNA, 9 bp, Unknown
  misc_feature (1)..( 9): Matrix.002 file - promoters60/1450477
taattgaag

SEQ ID NO: 51112 - DNA, 6 bp, Unknown
  misc_feature (1)..( 6): Matrix.002 file - promoters60/1450477
aaagaa

SEQ ID NO: 51113 - DNA, 7 bp, Unknown
  misc_feature (1)..( 7): Matrix.002 file - promoters60/1450477
tagagaa

SEQ ID NO: 51114 - DNA, 7 bp, Unknown
  misc_feature (1)..( 7): Matrix.002 file - promoters60/1450477
aaggaga

SEQ ID NO: 51115 - DNA, 7 bp, Unknown
  misc_feature (1)..( 7): Matrix.002 file - promoters60/1450477
aaagaag

SEQ ID NO: 51116 - DNA, 6 bp, Unknown
  misc_feature (1)..( 6): Matrix.002 file - promoters60/1450477
caaaag

SEQ ID NO: 51117 - DNA, 6 bp, Unknown
  misc_feature (1)..( 6): Matrix.002 file - promoters60/1450477
caacac

SEQ ID NO: 51118 - DNA, 8 bp, Unknown
  misc_feature (1)..( 8): Matrix.002 file - promoters60/1450610
ataatata

SEQ ID NO: 51119 - DNA, 8 bp, Unknown
  misc_feature (1)..( 8): Matrix.002 file - promoters60/1450610
tatagaat

SEQ ID NO: 51120 - DNA, 10 bp, Unknown
  misc_feature (1)..( 10): Matrix.002 file - promoters60/1450610
aatctgattc

SEQ ID NO: 51121 - DNA, 12 bp, Unknown
  misc_feature (1)..( 12): Matrix.002 file - promoters60/1450610
ttatcaaaatta

SEQ ID NO: 51122 - DNA, 9 bp, Unknown
  misc_feature (1)..( 9): Matrix.002 file - promoters60/1450610
taaacatat

SEQ ID NO: 51123 - DNA, 9 bp, Unknown
  misc_feature (1)..( 9): Matrix.002 file - promoters60/1450610
aatcataaa

SEQ ID NO: 51124 - DNA, 10 bp, Unknown
  misc_feature (1)..( 10): Matrix.002 file - promoters60/1450610
aatcataaaa

SEQ ID NO: 51125 - DNA, 10 bp, Unknown
  misc_feature (1)..( 10): Matrix.002 file - promoters60/1450610
aaaaaaaata

SEQ ID NO: 51126 - DNA, 11 bp, Unknown
  misc_feature (1)..( 11): Matrix.002 file - promoters60/1450625
aattttgataa

SEQ ID NO: 51127 - DNA, 8 bp, Unknown
  misc_feature (1)..( 8): Matrix.002 file - promoters60/1450625
atatatct

SEQ ID NO: 51128 - DNA, 11 bp, Unknown
  misc_feature (1)..( 11): Matrix.002 file - promoters60/1450625
tttattcagct

SEQ ID NO: 51129 - DNA, 8 bp, Unknown
  misc_feature (1)..( 8): Matrix.002 file - promoters60/1450682
tcacattt

SEQ ID NO: 51130 - DNA, 6 bp, Unknown
  misc_feature (1)..( 6): Matrix.002 file - promoters60/1450682
aaaaaa

SEQ ID NO: 51131 - DNA, 8 bp, Unknown
  misc_feature (1)..( 8): Matrix.002 file - promoters60/1450682
aaatagta

SEQ ID NO: 51132 - DNA, 8 bp, Unknown
  misc_feature (1)..( 8): Matrix.002 file - promoters60/1450682
atatatac

SEQ ID NO: 51133 - DNA, 10 bp, Unknown
  misc_feature (1)..( 10): Matrix.002 file - promoters60/1450682
ataattaaaa

SEQ ID NO: 51134 - DNA, 6 bp, Unknown
  misc_feature (1)..( 6): Matrix.002 file - promoters60/1450682
aaacac

SEQ ID NO: 51135 - DNA, 7 bp, Unknown
  misc_feature (1)..( 7): Matrix.002 file - promoters60/1450682
ataaaat

SEQ ID NO: 51136 - DNA, 6 bp, Unknown
  misc_feature (1)..( 6): Matrix.002 file - promoters60/1450682
tagttt

SEQ ID NO: 51137 - DNA, 8 bp, Unknown
  misc_feature (1)..( 8): Matrix.002 file - promoters60/1450682
taaatttt

SEQ ID NO: 51138 - DNA, 8 bp, Unknown
  misc_feature (1)..( 8): Matrix.002 file - promoters60/1450682
tttttaat

SEQ ID NO: 51139 - DNA, 6 bp, Unknown
  misc_feature (1)..( 6): Matrix.002 file - promoters60/1450682
tcatat

SEQ ID NO: 51140 - DNA, 7 bp, Unknown
  misc_feature (1)..( 7): Matrix.002 file - promoters60/1450682
ttaggtg

SEQ ID NO: 51141 - DNA, 6 bp, Unknown
  misc_feature (1)..( 6): Matrix.002 file - promoters60/1450682
ttcaaa

SEQ ID NO: 51142 - DNA, 6 bp, Unknown
  misc_feature (1)..( 6): Matrix.002 file - promoters60/1450792
gttttt

SEQ ID NO: 51143 - DNA, 11 bp, Unknown
  misc_feature (1)..( 11): Matrix.002 file - promoters60/1450792
aactacaattt

SEQ ID NO: 51144 - DNA, 6 bp, Unknown
  misc_feature (1)..( 6): Matrix.002 file - promoters60/1450792
tctttt

SEQ ID NO: 51145 - DNA, 7 bp, Unknown
  misc_feature (1)..( 7): Matrix.002 file - promoters60/1450792
aacaatc

SEQ ID NO: 51146 - DNA, 8 bp, Unknown
  misc_feature (1)..( 8): Matrix.002 file - promoters60/1450792
aataccaa

SEQ ID NO: 51147 - DNA, 6 bp, Unknown
  misc_feature (1)..( 6): Matrix.002 file - promoters60/1450792
tttttt

SEQ ID NO: 51148 - DNA, 6 bp, Unknown
  misc_feature (1)..( 6): Matrix.002 file - promoters60/1450792
tttctt

SEQ ID NO: 51149 - DNA, 8 bp, Unknown
  misc_feature (1)..( 8): Matrix.002 file - promoters60/1450792
aataactt

SEQ ID NO: 51150 - DNA, 6 bp, Unknown
  misc_feature (1)..( 6): Matrix.002 file - promoters60/1450792
tctttt

SEQ ID NO: 51151 - DNA, 8 bp, Unknown
  misc_feature (1)..( 8): Matrix.002 file - promoters60/1450792
tgagcttt

SEQ ID NO: 51152 - DNA, 7 bp, Unknown
  misc_feature (1)..( 7): Matrix.002 file - promoters60/1450792
ccaaatt

SEQ ID NO: 51153 - DNA, 7 bp, Unknown
  misc_feature (1)..( 7): Matrix.002 file - promoters60/1450792
tttatat

SEQ ID NO: 51154 - DNA, 8 bp, Unknown
  misc_feature (1)..( 8): Matrix.002 file - promoters60/1450792
aaaaagaa

SEQ ID NO: 51155 - DNA, 6 bp, Unknown
  misc_feature (1)..( 6): Matrix.002 file - promoters60/1450792
agggtc

SEQ ID NO: 51156 - DNA, 6 bp, Unknown
  misc_feature (1)..( 6): Matrix.002 file - promoters60/1450792
tgcttt

SEQ ID NO: 51157 - DNA, 6 bp, Unknown
  misc_feature (1)..( 6): Matrix.002 file - promoters60/1450792
tttatt

SEQ ID NO: 51158 - DNA, 6 bp, Unknown
  misc_feature (1)..( 6): Matrix.002 file - promoters60/1450792
caacaa

SEQ ID NO: 51159 - DNA, 6 bp, Unknown
  misc_feature (1)..( 6): Matrix.002 file - promoters60/1450792
gaaaca

SEQ ID NO: 51160 - DNA, 8 bp, Unknown
  misc_feature (1)..( 8): Matrix.002 file - promoters60/1450792
aaaataag

SEQ ID NO: 51161 - DNA, 8 bp, Unknown
  misc_feature (1)..( 8): Matrix.002 file - promoters60/1450807
taaaaaca

SEQ ID NO: 51162 - DNA, 10 bp, Unknown
  misc_feature (1)..( 10): Matrix.002 file - promoters60/1450807
aaacgaatca

SEQ ID NO: 51163 - DNA, 9 bp, Unknown
  misc_feature (1)..( 9): Matrix.002 file - promoters60/1450811
aaagattgt

SEQ ID NO: 51164 - DNA, 8 bp, Unknown
  misc_feature (1)..( 8): Matrix.002 file - promoters60/1450811
ttacaaaa

SEQ ID NO: 51165 - DNA, 9 bp, Unknown
  misc_feature (1)..( 9): Matrix.002 file - promoters60/1450811
agatactta

SEQ ID NO: 51166 - DNA, 8 bp, Unknown
  misc_feature (1)..( 8): Matrix.002 file - promoters60/1450811
ccattaat

SEQ ID NO: 51167 - DNA, 8 bp, Unknown
  misc_feature (1)..( 8): Matrix.002 file - promoters60/1450811
tagttttg

SEQ ID NO: 51168 - DNA, 10 bp, Unknown
  misc_feature (1)..( 10): Matrix.002 file - promoters60/1450811
tcttaatatg

SEQ ID NO: 51169 - DNA, 12 bp, Unknown
  misc_feature (1)..( 12): Matrix.002 file - promoters60/1450863
atggacttgtta

SEQ ID NO: 51170 - DNA, 7 bp, Unknown
  misc_feature (1)..( 7): Matrix.002 file - promoters60/1450863
actatgt

SEQ ID NO: 51171 - DNA, 6 bp, Unknown
  misc_feature (1)..( 6): Matrix.002 file - promoters60/1450863
tgagga

SEQ ID NO: 51172 - DNA, 7 bp, Unknown
  misc_feature (1)..( 7): Matrix.002 file - promoters60/1450863
attagtt

SEQ ID NO: 51173 - DNA, 8 bp, Unknown
  misc_feature (1)..( 8): Matrix.002 file - promoters60/1450863
ttagtgat

SEQ ID NO: 51174 - DNA, 7 bp, Unknown
  misc_feature (1)..( 7): Matrix.002 file - promoters60/1450863
tcaaact

SEQ ID NO: 51175 - DNA, 9 bp, Unknown
  misc_feature (1)..( 9): Matrix.002 file - promoters60/1450863
tgtggtttc

SEQ ID NO: 51176 - DNA, 7 bp, Unknown
  misc_feature (1)..( 7): Matrix.002 file - promoters60/1450863
aatgttc

SEQ ID NO: 51177 - DNA, 7 bp, Unknown
  misc_feature (1)..( 7): Matrix.002 file - promoters60/1450863
gaaaaag

SEQ ID NO: 51178 - DNA, 6 bp, Unknown
  misc_feature (1)..( 6): Matrix.002 file - promoters60/1455879
attaca

SEQ ID NO: 51179 - DNA, 6 bp, Unknown
  misc_feature (1)..( 6): Matrix.002 file - promoters60/1455879
tgatta

SEQ ID NO: 51180 - DNA, 6 bp, Unknown
  misc_feature (1)..( 6): Matrix.002 file - promoters60/1455879
aaagtt

SEQ ID NO: 51181 - DNA, 8 bp, Unknown
  misc_feature (1)..( 8): Matrix.002 file - promoters60/1455879
agaagatt

SEQ ID NO: 51182 - DNA, 8 bp, Unknown
  misc_feature (1)..( 8): Matrix.002 file - promoters60/1455879
tcacaaaa

SEQ ID NO: 51183 - DNA, 11 bp, Unknown
  misc_feature (1)..( 11): Matrix.002 file - promoters60/1455879
aaaaaaatgaa

SEQ ID NO: 51184 - DNA, 9 bp, Unknown
  misc_feature (1)..( 9): Matrix.002 file - promoters60/1455879
gaaattatg

SEQ ID NO: 51185 - DNA, 7 bp, Unknown
  misc_feature (1)..( 7): Matrix.002 file - promoters60/1455879
tttattt

SEQ ID NO: 51186 - DNA, 6 bp, Unknown
  misc_feature (1)..( 6): Matrix.002 file - promoters60/1455879
tattta

SEQ ID NO: 51187 - DNA, 6 bp, Unknown
  misc_feature (1)..( 6): Matrix.002 file - promoters60/1455879
aaacga

SEQ ID NO: 51188 - DNA, 7 bp, Unknown
  misc_feature (1)..( 7): Matrix.002 file - promoters60/1455879
agacatg

SEQ ID NO: 51189 - DNA, 6 bp, Unknown
  misc_feature (1)..( 6): Matrix.002 file - promoters60/1455879
agtaaa

SEQ ID NO: 51190 - DNA, 7 bp, Unknown
  misc_feature (1)..( 7): Matrix.002 file - promoters60/1455879
aatcggg

SEQ ID NO: 51191 - DNA, 8 bp, Unknown
  misc_feature (1)..( 8): Matrix.002 file - promoters60/1455879
gaaacaaa

SEQ ID NO: 51192 - DNA, 10 bp, Unknown
  misc_feature (1)..( 10): Matrix.002 file - promoters60/1455879
ggaaaagaaa

SEQ ID NO: 51193 - DNA, 7 bp, Unknown
  misc_feature (1)..( 7): Matrix.002 file - promoters60/1455879
cccacta

SEQ ID NO: 51194 - DNA, 9 bp, Unknown
  misc_feature (1)..( 9): Matrix.002 file - promoters60/1455879
aaagaaaag

SEQ ID NO: 51195 - DNA, 7 bp, Unknown
  misc_feature (1)..( 7): Matrix.002 file - promoters60/1455879
gtatata

SEQ ID NO: 51196 - DNA, 7 bp, Unknown
  misc_feature (1)..( 7): Matrix.002 file - promoters60/1455908
aagatta

SEQ ID NO: 51197 - DNA, 9 bp, Unknown
  misc_feature (1)..( 9): Matrix.002 file - promoters60/1455908
tatttgttc

SEQ ID NO: 51198 - DNA, 8 bp, Unknown
  misc_feature (1)..( 8): Matrix.002 file - promoters60/1455908
atgaatca

SEQ ID NO: 51199 - DNA, 6 bp, Unknown
  misc_feature (1)..( 6): Matrix.002 file - promoters60/1455908
aagaaa

SEQ ID NO: 51200 - DNA, 9 bp, Unknown
  misc_feature (1)..( 9): Matrix.002 file - promoters60/1455908
tttaataat

SEQ ID NO: 51201 - DNA, 6 bp, Unknown
  misc_feature (1)..( 6): Matrix.002 file - promoters60/1455908
tataat

SEQ ID NO: 51202 - DNA, 12 bp, Unknown
  misc_feature (1)..( 12): Matrix.002 file - promoters60/1455908
taatctaagaag

SEQ ID NO: 51203 - DNA, 7 bp, Unknown
  misc_feature (1)..( 7): Matrix.002 file - promoters60/1455908
attctat

SEQ ID NO: 51204 - DNA, 7 bp, Unknown
  misc_feature (1)..( 7): Matrix.002 file - promoters60/1455908
ataatag

SEQ ID NO: 51205 - DNA, 8 bp, Unknown
  misc_feature (1)..( 8): Matrix.002 file - promoters60/1455908
tataatat

SEQ ID NO: 51206 - DNA, 6 bp, Unknown
  misc_feature (1)..( 6): Matrix.002 file - promoters60/1455908
attttt

SEQ ID NO: 51207 - DNA, 6 bp, Unknown
  misc_feature (1)..( 6): Matrix.002 file - promoters60/1455908
catgaa

SEQ ID NO: 51208 - DNA, 7 bp, Unknown
  misc_feature (1)..( 7): Matrix.002 file - promoters60/1455908
tatcctc

SEQ ID NO: 51209 - DNA, 9 bp, Unknown
  misc_feature (1)..( 9): Matrix.002 file - promoters60/1455908
atttaacaa

SEQ ID NO: 51210 - DNA, 12 bp, Unknown
  misc_feature (1)..( 12): Matrix.002 file - promoters60/1455908
tagaattactaa

SEQ ID NO: 51211 - DNA, 6 bp, Unknown
  misc_feature (1)..( 6): Matrix.002 file - promoters60/1455908
aatttt

SEQ ID NO: 51212 - DNA, 6 bp, Unknown
  misc_feature (1)..( 6): Matrix.002 file - promoters60/1455908
atattt

SEQ ID NO: 51213 - DNA, 7 bp, Unknown
  misc_feature (1)..( 7): Matrix.002 file - promoters60/1455908
tatacaa

SEQ ID NO: 51214 - DNA, 11 bp, Unknown
  misc_feature (1)..( 11): Matrix.002 file - promoters60/1455908
ttttctaaaat

SEQ ID NO: 51215 - DNA, 7 bp, Unknown
  misc_feature (1)..( 7): Matrix.002 file - promoters60/1455908
tataatt

SEQ ID NO: 51216 - DNA, 6 bp, Unknown
  misc_feature (1)..( 6): Matrix.002 file - promoters60/1455908
aaaaaa

SEQ ID NO: 51217 - DNA, 8 bp, Unknown
  misc_feature (1)..( 8): Matrix.002 file - promoters60/1455908
taaatttc

SEQ ID NO: 51218 - DNA, 7 bp, Unknown
  misc_feature (1)..( 7): Matrix.002 file - promoters60/1455908
aagagaa

SEQ ID NO: 51219 - DNA, 8 bp, Unknown
  misc_feature (1)..( 8): Matrix.002 file - promoters60/1455908
atggcttg

SEQ ID NO: 51220 - DNA, 11 bp, Unknown
  misc_feature (1)..( 11): Matrix.002 file - promoters60/1455928
tcacaaataca

SEQ ID NO: 51221 - DNA, 12 bp, Unknown
  misc_feature (1)..( 12): Matrix.002 file - promoters60/1455928
tatataaacaga

SEQ ID NO: 51222 - DNA, 8 bp, Unknown
  misc_feature (1)..( 8): Matrix.002 file - promoters60/1455928
atgtattt

SEQ ID NO: 51223 - DNA, 8 bp, Unknown
  misc_feature (1)..( 8): Matrix.002 file - promoters60/1455932
aataatat

SEQ ID NO: 51224 - DNA, 9 bp, Unknown
  misc_feature (1)..( 9): Matrix.002 file - promoters60/1455932
atgtttttg

SEQ ID NO: 51225 - DNA, 10 bp, Unknown
  misc_feature (1)..( 10): Matrix.002 file - promoters60/1455932
atgtcttttg

SEQ ID NO: 51226 - DNA, 8 bp, Unknown
  misc_feature (1)..( 8): Matrix.002 file - promoters60/1455932
atttgtat

SEQ ID NO: 51227 - DNA, 8 bp, Unknown
  misc_feature (1)..( 8): Matrix.002 file - promoters60/1455932
aaaaacaa

SEQ ID NO: 51228 - DNA, 7 bp, Unknown
  misc_feature (1)..( 7): Matrix.002 file - promoters60/1455936
ttagtta

SEQ ID NO: 51229 - DNA, 8 bp, Unknown
  misc_feature (1)..( 8): Matrix.002 file - promoters60/1455936
aatataaa

SEQ ID NO: 51230 - DNA, 9 bp, Unknown
  misc_feature (1)..( 9): Matrix.002 file - promoters60/1455936
aaaagctaa

SEQ ID NO: 51231 - DNA, 7 bp, Unknown
  misc_feature (1)..( 7): Matrix.002 file - promoters60/1455936
aatttag

SEQ ID NO: 51232 - DNA, 8 bp, Unknown
  misc_feature (1)..( 8): Matrix.002 file - promoters60/1455936
aaaaataa

SEQ ID NO: 51233 - DNA, 8 bp, Unknown
  misc_feature (1)..( 8): Matrix.002 file - promoters60/1455936
atgaaaag

SEQ ID NO: 51234 - DNA, 11 bp, Unknown
  misc_feature (1)..( 11): Matrix.002 file - promoters60/1455944
aaataaaattg

SEQ ID NO: 51235 - DNA, 11 bp, Unknown
  misc_feature (1)..( 11): Matrix.002 file - promoters60/1455944
aaaaaaagaat

SEQ ID NO: 51236 - DNA, 11 bp, Unknown
  misc_feature (1)..( 11): Matrix.002 file - promoters60/1455944
aaacaaagaaa

SEQ ID NO: 51237 - DNA, 7 bp, Unknown
  misc_feature (1)..( 7): Matrix.002 file - promoters60/1455944
aaattaa

SEQ ID NO: 51238 - DNA, 8 bp, Unknown
  misc_feature (1)..( 8): Matrix.002 file - promoters60/1455944
tgaacaaa

SEQ ID NO: 51239 - DNA, 11 bp, Unknown
  misc_feature (1)..( 11): Matrix.002 file - promoters60/1455944
caatcactctc

SEQ ID NO: 51240 - DNA, 10 bp, Unknown
  misc_feature (1)..( 10): Matrix.002 file - promoters60/1455944
tatataaaac

SEQ ID NO: 51241 - DNA, 9 bp, Unknown
  misc_feature (1)..( 9): Matrix.002 file - promoters60/1455944
ttgaccaaa

SEQ ID NO: 51242 - DNA, 9 bp, Unknown
  misc_feature (1)..( 9): Matrix.002 file - promoters60/1455956
ttgattaga

SEQ ID NO: 51243 - DNA, 7 bp, Unknown
  misc_feature (1)..( 7): Matrix.002 file - promoters60/1455972
aaaatga

SEQ ID NO: 51244 - DNA, 10 bp, Unknown
  misc_feature (1)..( 10): Matrix.002 file - promoters60/1455972
atagattttt

SEQ ID NO: 51245 - DNA, 11 bp, Unknown
  misc_feature (1)..( 11): Matrix.002 file - promoters60/1455972
gacgactagtg

SEQ ID NO: 51246 - DNA, 10 bp, Unknown
  misc_feature (1)..( 10): Matrix.002 file - promoters60/1455972
aacaaacata

SEQ ID NO: 51247 - DNA, 12 bp, Unknown
  misc_feature (1)..( 12): Matrix.002 file - promoters60/1455972
aagcaataaacg

SEQ ID NO: 51248 - DNA, 9 bp, Unknown
  misc_feature (1)..( 9): Matrix.002 file - promoters60/1455972
ctagttaca

SEQ ID NO: 51249 - DNA, 7 bp, Unknown
  misc_feature (1)..( 7): Matrix.002 file - promoters60/1455972
gacaaac

SEQ ID NO: 51250 - DNA, 9 bp, Unknown
  misc_feature (1)..( 9): Matrix.002 file - promoters60/1455972
ataataagc

SEQ ID NO: 51251 - DNA, 9 bp, Unknown
  misc_feature (1)..( 9): Matrix.002 file - promoters60/1455972
caaaatgac

SEQ ID NO: 51252 - DNA, 11 bp, Unknown
  misc_feature (1)..( 11): Matrix.002 file - promoters60/1456000
aacaaaaaaaa

SEQ ID NO: 51253 - DNA, 7 bp, Unknown
  misc_feature (1)..( 7): Matrix.002 file - promoters60/1456000
tggacaa

SEQ ID NO: 51254 - DNA, 8 bp, Unknown
  misc_feature (1)..( 8): Matrix.002 file - promoters60/1456000
caacagaa

SEQ ID NO: 51255 - DNA, 7 bp, Unknown
  misc_feature (1)..( 7): Matrix.002 file - promoters60/1456000
aaccaaa

SEQ ID NO: 51256 - DNA, 8 bp, Unknown
  misc_feature (1)..( 8): Matrix.002 file - promoters60/1456000
aaaaaaat

SEQ ID NO: 51257 - DNA, 9 bp, Unknown
  misc_feature (1)..( 9): Matrix.002 file - promoters60/1456000
aaaaaaaga

SEQ ID NO: 51258 - DNA, 6 bp, Unknown
  misc_feature (1)..( 6): Matrix.002 file - promoters60/1456000
attaaa

SEQ ID NO: 51259 - DNA, 6 bp, Unknown
  misc_feature (1)..( 6): Matrix.002 file - promoters60/1456000
gagaaa

SEQ ID NO: 51260 - DNA, 9 bp, Unknown
  misc_feature (1)..( 9): Matrix.002 file - promoters60/1456000
tggagacaa

SEQ ID NO: 51261 - DNA, 6 bp, Unknown
  misc_feature (1)..( 6): Matrix.002 file - promoters60/1456000
ttaaaa

SEQ ID NO: 51262 - DNA, 6 bp, Unknown
  misc_feature (1)..( 6): Matrix.002 file - promoters60/1456000
ccaaaa

SEQ ID NO: 51263 - DNA, 15 bp, Unknown
  misc_feature (1)..( 15): Matrix.002 file - promoters60/1456000
aaagaaaaatcccaa

SEQ ID NO: 51264 - DNA, 13 bp, Unknown
  misc_feature (1)..( 13): Matrix.002 file - promoters60/1456000
caaaaaaaacaaa

SEQ ID NO: 51265 - DNA, 7 bp, Unknown
  misc_feature (1)..( 7): Matrix.002 file - promoters60/1456000
aacaaaa

SEQ ID NO: 51266 - DNA, 8 bp, Unknown
  misc_feature (1)..( 8): Matrix.002 file - promoters60/1456000
aaaaaaaa

SEQ ID NO: 51267 - DNA, 6 bp, Unknown
  misc_feature (1)..( 6): Matrix.002 file - promoters60/1456000
acggaa

SEQ ID NO: 51268 - DNA, 6 bp, Unknown
  misc_feature (1)..( 6): Matrix.002 file - promoters60/1456000
ttctgg

SEQ ID NO: 51269 - DNA, 7 bp, Unknown
  misc_feature (1)..( 7): Matrix.002 file - promoters60/1456000
acaatag

SEQ ID NO: 51270 - DNA, 9 bp, Unknown
  misc_feature (1)..( 9): Matrix.002 file - promoters60/1456000
aaagtattg

SEQ ID NO: 51271 - DNA, 6 bp, Unknown
  misc_feature (1)..( 6): Matrix.002 file - promoters60/1456000
gaaaaa

SEQ ID NO: 51272 - DNA, 7 bp, Unknown
  misc_feature (1)..( 7): Matrix.002 file - promoters60/1456083
tatatat

SEQ ID NO: 51273 - DNA, 7 bp, Unknown
  misc_feature (1)..( 7): Matrix.002 file - promoters60/1456128
aaacagt

SEQ ID NO: 51274 - DNA, 14 bp, Unknown
  misc_feature (1)..( 14): Matrix.002 file - promoters60/1456128
taagattttattat

SEQ ID NO: 51275 - DNA, 9 bp, Unknown
  misc_feature (1)..( 9): Matrix.002 file - promoters60/1456128
tatatagat

SEQ ID NO: 51276 - DNA, 10 bp, Unknown
  misc_feature (1)..( 10): Matrix.002 file - promoters60/1456128
atttttttct

SEQ ID NO: 51277 - DNA, 6 bp, Unknown
  misc_feature (1)..( 6): Matrix.002 file - promoters60/1456128
aataaa

SEQ ID NO: 51278 - DNA, 7 bp, Unknown
  misc_feature (1)..( 7): Matrix.002 file - promoters60/1456128
aaagaaa

SEQ ID NO: 51279 - DNA, 7 bp, Unknown
  misc_feature (1)..( 7): Matrix.002 file - promoters60/1456128
gaaaaaa

SEQ ID NO: 51280 - DNA, 6 bp, Unknown
  misc_feature (1)..( 6): Matrix.002 file - promoters60/1456128
gaaaaa

SEQ ID NO: 51281 - DNA, 7 bp, Unknown
  misc_feature (1)..( 7): Matrix.002 file - promoters60/1456128
taaatta

SEQ ID NO: 51282 - DNA, 9 bp, Unknown
  misc_feature (1)..( 9): Matrix.002 file - promoters60/1456128
tttattaaa

SEQ ID NO: 51283 - DNA, 7 bp, Unknown
  misc_feature (1)..( 7): Matrix.002 file - promoters60/1456128
agaaaaa

SEQ ID NO: 51284 - DNA, 8 bp, Unknown
  misc_feature (1)..( 8): Matrix.002 file - promoters60/1456128
gaaaaaaa

SEQ ID NO: 51285 - DNA, 6 bp, Unknown
  misc_feature (1)..( 6): Matrix.002 file - promoters60/1456128
aacaaa

SEQ ID NO: 51286 - DNA, 9 bp, Unknown
  misc_feature (1)..( 9): Matrix.002 file - promoters60/1456128
ctttattaa

SEQ ID NO: 51287 - DNA, 7 bp, Unknown
  misc_feature (1)..( 7): Matrix.002 file - promoters60/1456128
taaaaac

SEQ ID NO: 51288 - DNA, 6 bp, Unknown
  misc_feature (1)..( 6): Matrix.002 file - promoters60/1456128
atttat

SEQ ID NO: 51289 - DNA, 6 bp, Unknown
  misc_feature (1)..( 6): Matrix.002 file - promoters60/1456128
aattat

SEQ ID NO: 51290 - DNA, 6 bp, Unknown
  misc_feature (1)..( 6): Matrix.002 file - promoters60/1456128
tcaaaa

SEQ ID NO: 51291 - DNA, 6 bp, Unknown
  misc_feature (1)..( 6): Matrix.002 file - promoters60/1456128
gtataa

SEQ ID NO: 51292 - DNA, 9 bp, Unknown
  misc_feature (1)..( 9): Matrix.002 file - promoters60/1456128
aaagagtta

SEQ ID NO: 51293 - DNA, 6 bp, Unknown
  misc_feature (1)..( 6): Matrix.002 file - promoters60/1456128
aaaaag

SEQ ID NO: 51294 - DNA, 7 bp, Unknown
  misc_feature (1)..( 7): Matrix.002 file - promoters60/1456128
agtcttt

SEQ ID NO: 51295 - DNA, 8 bp, Unknown
  misc_feature (1)..( 8): Matrix.002 file - promoters60/1456228
atgattaa

SEQ ID NO: 51296 - DNA, 8 bp, Unknown
  misc_feature (1)..( 8): Matrix.002 file - promoters60/1456228
atagagag

SEQ ID NO: 51297 - DNA, 8 bp, Unknown
  misc_feature (1)..( 8): Matrix.002 file - promoters60/1456228
tgttaata

SEQ ID NO: 51298 - DNA, 6 bp, Unknown
  misc_feature (1)..( 6): Matrix.002 file - promoters60/1456228
aaaaag

SEQ ID NO: 51299 - DNA, 7 bp, Unknown
  misc_feature (1)..( 7): Matrix.002 file - promoters60/1456228
aaaataa

SEQ ID NO: 51300 - DNA, 8 bp, Unknown
  misc_feature (1)..( 8): Matrix.002 file - promoters60/1456228
tgaagaat

SEQ ID NO: 51301 - DNA, 7 bp, Unknown
  misc_feature (1)..( 7): Matrix.002 file - promoters60/1456228
tttccca

SEQ ID NO: 51302 - DNA, 6 bp, Unknown
  misc_feature (1)..( 6): Matrix.002 file - promoters60/1456228
gtttat

SEQ ID NO: 51303 - DNA, 10 bp, Unknown
  misc_feature (1)..( 10): Matrix.002 file - promoters60/1456228
aaagaaaacc

SEQ ID NO: 51304 - DNA, 8 bp, Unknown
  misc_feature (1)..( 8): Matrix.002 file - promoters60/1456228
tatttaaa

SEQ ID NO: 51305 - DNA, 6 bp, Unknown
  misc_feature (1)..( 6): Matrix.002 file - promoters60/1456228
atggat

SEQ ID NO: 51306 - DNA, 8 bp, Unknown
  misc_feature (1)..( 8): Matrix.002 file - promoters60/1456228
gataactt

SEQ ID NO: 51307 - DNA, 8 bp, Unknown
  misc_feature (1)..( 8): Matrix.002 file - promoters60/1456228
gattccaa

SEQ ID NO: 51308 - DNA, 6 bp, Unknown
  misc_feature (1)..( 6): Matrix.002 file - promoters60/1456228
tctaaa

SEQ ID NO: 51309 - DNA, 7 bp, Unknown
  misc_feature (1)..( 7): Matrix.002 file - promoters60/1456228
taattaa

SEQ ID NO: 51310 - DNA, 6 bp, Unknown
  misc_feature (1)..( 6): Matrix.002 file - promoters60/1456228
caaaaa

SEQ ID NO: 51311 - DNA, 10 bp, Unknown
  misc_feature (1)..( 10): Matrix.002 file - promoters60/1456228
aaatataata

SEQ ID NO: 51312 - DNA, 7 bp, Unknown
  misc_feature (1)..( 7): Matrix.002 file - promoters60/1456228
ttaaata

SEQ ID NO: 51313 - DNA, 7 bp, Unknown
  misc_feature (1)..( 7): Matrix.002 file - promoters60/1456228
gtcgcct

SEQ ID NO: 51314 - DNA, 6 bp, Unknown
  misc_feature (1)..( 6): Matrix.002 file - promoters60/1456228
agtaaa

SEQ ID NO: 51315 - DNA, 7 bp, Unknown
  misc_feature (1)..( 7): Matrix.002 file - promoters60/1456228
aatcggg

SEQ ID NO: 51316 - DNA, 8 bp, Unknown
  misc_feature (1)..( 8): Matrix.002 file - promoters60/1456228
gaaacaaa

SEQ ID NO: 51317 - DNA, 10 bp, Unknown
  misc_feature (1)..( 10): Matrix.002 file - promoters60/1456228
ggaaaagaaa

SEQ ID NO: 51318 - DNA, 7 bp, Unknown
  misc_feature (1)..( 7): Matrix.002 file - promoters60/1456228
cccacta

SEQ ID NO: 51319 - DNA, 9 bp, Unknown
  misc_feature (1)..( 9): Matrix.002 file - promoters60/1456228
aaagaaaag

SEQ ID NO: 51320 - DNA, 10 bp, Unknown
  misc_feature (1)..( 10): Matrix.002 file - promoters60/1458991
taatcattga

SEQ ID NO: 51321 - DNA, 12 bp, Unknown
  misc_feature (1)..( 12): Matrix.002 file - promoters60/1458991
ttgaagtttttt

SEQ ID NO: 51322 - DNA, 10 bp, Unknown
  misc_feature (1)..( 10): Matrix.002 file - promoters60/1459039
aatataaatt

SEQ ID NO: 51323 - DNA, 9 bp, Unknown
  misc_feature (1)..( 9): Matrix.002 file - promoters60/1459039
tttggttta

SEQ ID NO: 51324 - DNA, 8 bp, Unknown
  misc_feature (1)..( 8): Matrix.002 file - promoters60/1459039
taaaaaaa

SEQ ID NO: 51325 - DNA, 7 bp, Unknown
  misc_feature (1)..( 7): Matrix.002 file - promoters60/1459199
agatttt

SEQ ID NO: 51326 - DNA, 7 bp, Unknown
  misc_feature (1)..( 7): Matrix.002 file - promoters60/1459199
tttattt

SEQ ID NO: 51327 - DNA, 8 bp, Unknown
  misc_feature (1)..( 8): Matrix.002 file - promoters60/1459199
tttacttg

SEQ ID NO: 51328 - DNA, 6 bp, Unknown
  misc_feature (1)..( 6): Matrix.002 file - promoters60/1459199
tctcgt

SEQ ID NO: 51329 - DNA, 7 bp, Unknown
  misc_feature (1)..( 7): Matrix.002 file - promoters60/1459199
ttaatcg

SEQ ID NO: 51330 - DNA, 7 bp, Unknown
  misc_feature (1)..( 7): Matrix.002 file - promoters60/1459199
actaggg

SEQ ID NO: 51331 - DNA, 6 bp, Unknown
  misc_feature (1)..( 6): Matrix.002 file - promoters60/1459199
gtacta

SEQ ID NO: 51332 - DNA, 7 bp, Unknown
  misc_feature (1)..( 7): Matrix.002 file - promoters60/1459199
taccacc

SEQ ID NO: 51333 - DNA, 8 bp, Unknown
  misc_feature (1)..( 8): Matrix.002 file - promoters60/1459199
accaagta

SEQ ID NO: 51334 - DNA, 9 bp, Unknown
  misc_feature (1)..( 9): Matrix.002 file - promoters60/1459199
aatccatga

SEQ ID NO: 51335 - DNA, 7 bp, Unknown
  misc_feature (1)..( 7): Matrix.002 file - promoters60/1459199
tttcatt

SEQ ID NO: 51336 - DNA, 6 bp, Unknown
  misc_feature (1)..( 6): Matrix.002 file - promoters60/1459199
ttactc

SEQ ID NO: 51337 - DNA, 7 bp, Unknown
  misc_feature (1)..( 7): Matrix.002 file - promoters60/1459199
aaagctt

SEQ ID NO: 51338 - DNA, 9 bp, Unknown
  misc_feature (1)..( 9): Matrix.002 file - promoters60/1459199
tttgactag

SEQ ID NO: 51339 - DNA, 8 bp, Unknown
  misc_feature (1)..( 8): Matrix.002 file - promoters60/1459199
tctgatat

SEQ ID NO: 51340 - DNA, 6 bp, Unknown
  misc_feature (1)..( 6): Matrix.002 file - promoters60/1459223
aaatat

SEQ ID NO: 51341 - DNA, 9 bp, Unknown
  misc_feature (1)..( 9): Matrix.002 file - promoters60/1459223
aaaatattt

SEQ ID NO: 51342 - DNA, 12 bp, Unknown
  misc_feature (1)..( 12): Matrix.002 file - promoters60/1459223
ttttttcttctc

SEQ ID NO: 51343 - DNA, 6 bp, Unknown
  misc_feature (1)..( 6): Matrix.002 file - promoters60/1460386
acattt

SEQ ID NO: 51344 - DNA, 11 bp, Unknown
  misc_feature (1)..( 11): Matrix.002 file - promoters60/1460386
ttttactttat

SEQ ID NO: 51345 - DNA, 16 bp, Unknown
  misc_feature (1)..( 16): Matrix.002 file - promoters60/1460386
agaaagattttgaaaa

SEQ ID NO: 51346 - DNA, 19 bp, Unknown
  misc_feature (1)..( 19): Matrix.002 file - promoters60/1460386
agaaagatttgaaaaaatt

SEQ ID NO: 51347 - DNA, 7 bp, Unknown
  misc_feature (1)..( 7): Matrix.002 file - promoters60/1460386
agtgtta

SEQ ID NO: 51348 - DNA, 7 bp, Unknown
  misc_feature (1)..( 7): Matrix.002 file - promoters60/1460386
tattctt

SEQ ID NO: 51349 - DNA, 6 bp, Unknown
  misc_feature (1)..( 6): Matrix.002 file - promoters60/1460386
cggctt

SEQ ID NO: 51350 - DNA, 6 bp, Unknown
  misc_feature (1)..( 6): Matrix.002 file - promoters60/1460386
taatat

SEQ ID NO: 51351 - DNA, 7 bp, Unknown
  misc_feature (1)..( 7): Matrix.002 file - promoters60/1460386
agaaaga

SEQ ID NO: 51352 - DNA, 6 bp, Unknown
  misc_feature (1)..( 6): Matrix.002 file - promoters60/1460386
aagatt

SEQ ID NO: 51353 - DNA, 7 bp, Unknown
  misc_feature (1)..( 7): Matrix.002 file - promoters60/1460386
aaaaaca

SEQ ID NO: 51354 - DNA, 6 bp, Unknown
  misc_feature (1)..( 6): Matrix.002 file - promoters60/1460386
ttgcag

SEQ ID NO: 51355 - DNA, 7 bp, Unknown
  misc_feature (1)..( 7): Matrix.002 file - promoters60/1460386
aaaagtt

SEQ ID NO: 51356 - DNA, 8 bp, Unknown
  misc_feature (1)..( 8): Matrix.002 file - promoters60/1460386
aaaataaa

SEQ ID NO: 51357 - DNA, 7 bp, Unknown
  misc_feature (1)..( 7): Matrix.002 file - promoters60/1460386
aaaagaa

SEQ ID NO: 51358 - DNA, 7 bp, Unknown
  misc_feature (1)..( 7): Matrix.002 file - promoters60/1460386
aataaat

SEQ ID NO: 51359 - DNA, 7 bp, Unknown
  misc_feature (1)..( 7): Matrix.002 file - promoters60/1460386
tttgcta

SEQ ID NO: 51360 - DNA, 8 bp, Unknown
  misc_feature (1)..( 8): Matrix.002 file - promoters60/1460386
aaaacaaa

SEQ ID NO: 51361 - DNA, 7 bp, Unknown
  misc_feature (1)..( 7): Matrix.002 file - promoters60/1460386
tttattt

SEQ ID NO: 51362 - DNA, 6 bp, Unknown
  misc_feature (1)..( 6): Matrix.002 file - promoters60/1460386
attttt

SEQ ID NO: 51363 - DNA, 6 bp, Unknown
  misc_feature (1)..( 6): Matrix.002 file - promoters60/1460386
aaaaga

SEQ ID NO: 51364 - DNA, 7 bp, Unknown
  misc_feature (1)..( 7): Matrix.002 file - promoters60/1461720
aaatata

SEQ ID NO: 51365 - DNA, 10 bp, Unknown
  misc_feature (1)..( 10): Matrix.002 file - promoters60/1461720
ataaacgaca

SEQ ID NO: 51366 - DNA, 7 bp, Unknown
  misc_feature (1)..( 7): Matrix.002 file - promoters60/1461720
aatcgaa

SEQ ID NO: 51367 - DNA, 10 bp, Unknown
  misc_feature (1)..( 10): Matrix.002 file - promoters60/1461720
atttatttga

SEQ ID NO: 51368 - DNA, 6 bp, Unknown
  misc_feature (1)..( 6): Matrix.002 file - promoters60/1461720
atttgt

SEQ ID NO: 51369 - DNA, 6 bp, Unknown
  misc_feature (1)..( 6): Matrix.002 file - promoters60/1461720
gctctg

SEQ ID NO: 51370 - DNA, 6 bp, Unknown
  misc_feature (1)..( 6): Matrix.002 file - promoters60/1461720
taataa

SEQ ID NO: 51371 - DNA, 7 bp, Unknown
  misc_feature (1)..( 7): Matrix.002 file - promoters60/1461720
taagtta

SEQ ID NO: 51372 - DNA, 7 bp, Unknown
  misc_feature (1)..( 7): Matrix.002 file - promoters60/1461720
attaatt

SEQ ID NO: 51373 - DNA, 10 bp, Unknown
  misc_feature (1)..( 10): Matrix.002 file - promoters60/1461720
attagtaatt

SEQ ID NO: 51374 - DNA, 7 bp, Unknown
  misc_feature (1)..( 7): Matrix.002 file - promoters60/1461720
tgaaaaa

SEQ ID NO: 51375 - DNA, 6 bp, Unknown
  misc_feature (1)..( 6): Matrix.002 file - promoters60/1461720
tatcaa

SEQ ID NO: 51376 - DNA, 7 bp, Unknown
  misc_feature (1)..( 7): Matrix.002 file - promoters60/1461720
taatttt

SEQ ID NO: 51377 - DNA, 6 bp, Unknown
  misc_feature (1)..( 6): Matrix.002 file - promoters60/1461720
ttagaa

SEQ ID NO: 51378 - DNA, 6 bp, Unknown
  misc_feature (1)..( 6): Matrix.002 file - promoters60/1461720
atattt

SEQ ID NO: 51379 - DNA, 8 bp, Unknown
  misc_feature (1)..( 8): Matrix.002 file - promoters60/1461720
tagaagta

SEQ ID NO: 51380 - DNA, 6 bp, Unknown
  misc_feature (1)..( 6): Matrix.002 file - promoters60/1461720
taatct

SEQ ID NO: 51381 - DNA, 10 bp, Unknown
  misc_feature (1)..( 10): Matrix.002 file - promoters60/1461720
gaaatatata

SEQ ID NO: 51382 - DNA, 6 bp, Unknown
  misc_feature (1)..( 6): Matrix.002 file - promoters60/1461720
aaacat

SEQ ID NO: 51383 - DNA, 7 bp, Unknown
  misc_feature (1)..( 7): Matrix.002 file - promoters60/1461720
ataattt

SEQ ID NO: 51384 - DNA, 10 bp, Unknown
  misc_feature (1)..( 10): Matrix.002 file - promoters60/1461720
agatatattt

SEQ ID NO: 51385 - DNA, 7 bp, Unknown
  misc_feature (1)..( 7): Matrix.002 file - promoters60/1461756
agaagaa

SEQ ID NO: 51386 - DNA, 6 bp, Unknown
  misc_feature (1)..( 6): Matrix.002 file - promoters60/1461756
ttgaaa

SEQ ID NO: 51387 - DNA, 6 bp, Unknown
  misc_feature (1)..( 6): Matrix.002 file - promoters60/1461756
tggtta

SEQ ID NO: 51388 - DNA, 8 bp, Unknown
  misc_feature (1)..( 8): Matrix.002 file - promoters60/1461756
atcgagaa

SEQ ID NO: 51389 - DNA, 6 bp, Unknown
  misc_feature (1)..( 6): Matrix.002 file - promoters60/1461756
cgattc

SEQ ID NO: 51390 - DNA, 7 bp, Unknown
  misc_feature (1)..( 7): Matrix.002 file - promoters60/1461756
tccaaag

SEQ ID NO: 51391 - DNA, 7 bp, Unknown
  misc_feature (1)..( 7): Matrix.002 file - promoters60/1461756
aaaacaa

SEQ ID NO: 51392 - DNA, 6 bp, Unknown
  misc_feature (1)..( 6): Matrix.002 file - promoters60/1461756
tggata

SEQ ID NO: 51393 - DNA, 6 bp, Unknown
  misc_feature (1)..( 6): Matrix.002 file - promoters60/1461756
agaact

SEQ ID NO: 51394 - DNA, 6 bp, Unknown
  misc_feature (1)..( 6): Matrix.002 file - promoters60/1461756
tctgaa

SEQ ID NO: 51395 - DNA, 7 bp, Unknown
  misc_feature (1)..( 7): Matrix.002 file - promoters60/1461756
tgttatt

SEQ ID NO: 51396 - DNA, 6 bp, Unknown
  misc_feature (1)..( 6): Matrix.002 file - promoters60/1461756
gggaaa

SEQ ID NO: 51397 - DNA, 6 bp, Unknown
  misc_feature (1)..( 6): Matrix.002 file - promoters60/1461756
aaatga

SEQ ID NO: 51398 - DNA, 7 bp, Unknown
  misc_feature (1)..( 7): Matrix.002 file - promoters60/1461756
attatct

SEQ ID NO: 51399 - DNA, 12 bp, Unknown
  misc_feature (1)..( 12): Matrix.002 file - promoters60/1461756
gtccccttctat

SEQ ID NO: 51400 - DNA, 9 bp, Unknown
  misc_feature (1)..( 9): Matrix.002 file - promoters60/1461768
caaaaaaaa

SEQ ID NO: 51401 - DNA, 6 bp, Unknown
  misc_feature (1)..( 6): Matrix.002 file - promoters60/1461768
tctatt

SEQ ID NO: 51402 - DNA, 10 bp, Unknown
  misc_feature (1)..( 10): Matrix.002 file - promoters60/1461776
agaaaatttg

SEQ ID NO: 51403 - DNA, 10 bp, Unknown
  misc_feature (1)..( 10): Matrix.002 file - promoters60/1461776
ctcttatata

SEQ ID NO: 51404 - DNA, 11 bp, Unknown
  misc_feature (1)..( 11): Matrix.002 file - promoters60/1461776
cattttttgtt

SEQ ID NO: 51405 - DNA, 7 bp, Unknown
  misc_feature (1)..( 7): Matrix.002 file - promoters60/1461780
aaaagag

SEQ ID NO: 51406 - DNA, 8 bp, Unknown
  misc_feature (1)..( 8): Matrix.002 file - promoters60/1461780
attctcac

SEQ ID NO: 51407 - DNA, 11 bp, Unknown
  misc_feature (1)..( 11): Matrix.002 file - promoters60/1461780
tttactcaatt

SEQ ID NO: 51408 - DNA, 12 bp, Unknown
  misc_feature (1)..( 12): Matrix.002 file - promoters60/1461780
aaccctaaaaaa

SEQ ID NO: 51409 - DNA, 11 bp, Unknown
  misc_feature (1)..( 11): Matrix.002 file - promoters60/1461780
aaaattaaata

SEQ ID NO: 51410 - DNA, 7 bp, Unknown
  misc_feature (1)..( 7): Matrix.002 file - promoters60/1461780
cattttt

SEQ ID NO: 51411 - DNA, 8 bp, Unknown
  misc_feature (1)..( 8): Matrix.002 file - promoters60/1461780
taatcttc

SEQ ID NO: 51412 - DNA, 6 bp, Unknown
  misc_feature (1)..( 6): Matrix.002 file - promoters60/1461780
tttcct

SEQ ID NO: 51413 - DNA, 8 bp, Unknown
  misc_feature (1)..( 8): Matrix.002 file - promoters60/1461780
ttcacttt

SEQ ID NO: 51414 - DNA, 7 bp, Unknown
  misc_feature (1)..( 7): Matrix.002 file - promoters60/1461780
ctcaatt

SEQ ID NO: 51415 - DNA, 7 bp, Unknown
  misc_feature (1)..( 7): Matrix.002 file - promoters60/1461780
gagcaaa

SEQ ID NO: 51416 - DNA, 7 bp, Unknown
  misc_feature (1)..( 7): Matrix.002 file - promoters60/1461780
aaaaaaa

SEQ ID NO: 51417 - DNA, 6 bp, Unknown
  misc_feature (1)..( 6): Matrix.002 file - promoters60/1461780
atcttt

SEQ ID NO: 51418 - DNA, 8 bp, Unknown
  misc_feature (1)..( 8): Matrix.002 file - promoters60/1461780
catcacat

SEQ ID NO: 51419 - DNA, 6 bp, Unknown
  misc_feature (1)..( 6): Matrix.002 file - promoters60/1461780
aagaaa

SEQ ID NO: 51420 - DNA, 7 bp, Unknown
  misc_feature (1)..( 7): Matrix.002 file - promoters60/1461780
agaaagt

SEQ ID NO: 51421 - DNA, 6 bp, Unknown
  misc_feature (1)..( 6): Matrix.002 file - promoters60/1461780
aaatgc

SEQ ID NO: 51422 - DNA, 7 bp, Unknown
  misc_feature (1)..( 7): Matrix.002 file - promoters60/1461780
ttaaaat

SEQ ID NO: 51423 - DNA, 9 bp, Unknown
  misc_feature (1)..( 9): Matrix.002 file - promoters60/1461791
actcttttc

SEQ ID NO: 51424 - DNA, 10 bp, Unknown
  misc_feature (1)..( 10): Matrix.002 file - promoters60/1461791
ggaatataaa

SEQ ID NO: 51425 - DNA, 11 bp, Unknown
  misc_feature (1)..( 11): Matrix.002 file - promoters60/1461791
gaagttgtaat

SEQ ID NO: 51426 - DNA, 9 bp, Unknown
  misc_feature (1)..( 9): Matrix.002 file - promoters60/1461791
tttgtttta

SEQ ID NO: 51427 - DNA, 8 bp, Unknown
  misc_feature (1)..( 8): Matrix.002 file - promoters60/1461791
tgaaacaa

SEQ ID NO: 51428 - DNA, 8 bp, Unknown
  misc_feature (1)..( 8): Matrix.002 file - promoters60/1461795
ttaaatgg

SEQ ID NO: 51429 - DNA, 12 bp, Unknown
  misc_feature (1)..( 12): Matrix.002 file - promoters60/1461795
actatttgactt

SEQ ID NO: 51430 - DNA, 7 bp, Unknown
  misc_feature (1)..( 7): Matrix.002 file - promoters60/1461799
agaagca

SEQ ID NO: 51431 - DNA, 8 bp, Unknown
  misc_feature (1)..( 8): Matrix.002 file - promoters60/1461799
tttgattt

SEQ ID NO: 51432 - DNA, 9 bp, Unknown
  misc_feature (1)..( 9): Matrix.002 file - promoters60/1461799
agttccata

SEQ ID NO: 51433 - DNA, 7 bp, Unknown
  misc_feature (1)..( 7): Matrix.002 file - promoters60/1461799
tctttta

SEQ ID NO: 51434 - DNA, 9 bp, Unknown
  misc_feature (1)..( 9): Matrix.002 file - promoters60/1461799
tctctcgtg

SEQ ID NO: 51435 - DNA, 6 bp, Unknown
  misc_feature (1)..( 6): Matrix.002 file - promoters60/1461799
tagact

SEQ ID NO: 51436 - DNA, 6 bp, Unknown
  misc_feature (1)..( 6): Matrix.002 file - promoters60/1461799
atgttg

SEQ ID NO: 51437 - DNA, 6 bp, Unknown
  misc_feature (1)..( 6): Matrix.002 file - promoters60/1461799
gtggtt

SEQ ID NO: 51438 - DNA, 6 bp, Unknown
  misc_feature (1)..( 6): Matrix.002 file - promoters60/1461799
tacaga

SEQ ID NO: 51439 - DNA, 7 bp, Unknown
  misc_feature (1)..( 7): Matrix.002 file - promoters60/1461799
ataaact

SEQ ID NO: 51440 - DNA, 7 bp, Unknown
  misc_feature (1)..( 7): Matrix.002 file - promoters60/1461799
gagaaga

SEQ ID NO: 51441 - DNA, 7 bp, Unknown
  misc_feature (1)..( 7): Matrix.002 file - promoters60/1461799
aaacagc

SEQ ID NO: 51442 - DNA, 7 bp, Unknown
  misc_feature (1)..( 7): Matrix.002 file - promoters60/1461799
ttctttg

SEQ ID NO: 51443 - DNA, 7 bp, Unknown
  misc_feature (1)..( 7): Matrix.002 file - promoters60/1461799
actaatt

SEQ ID NO: 51444 - DNA, 6 bp, Unknown
  misc_feature (1)..( 6): Matrix.002 file - promoters60/1461799
tcgttt

SEQ ID NO: 51445 - DNA, 8 bp, Unknown
  misc_feature (1)..( 8): Matrix.002 file - promoters60/1461803
attcttat

SEQ ID NO: 51446 - DNA, 8 bp, Unknown
  misc_feature (1)..( 8): Matrix.002 file - promoters60/1461803
aagcaaaa

SEQ ID NO: 51447 - DNA, 15 bp, Unknown
  misc_feature (1)..( 15): Matrix.002 file - promoters60/1461803
actacatttaattat

SEQ ID NO: 51448 - DNA, 12 bp, Unknown
  misc_feature (1)..( 12): Matrix.002 file - promoters60/1461803
accaagaaaaga

SEQ ID NO: 51449 - DNA, 9 bp, Unknown
  misc_feature (1)..( 9): Matrix.002 file - promoters60/1461803
aataatttt

SEQ ID NO: 51450 - DNA, 10 bp, Unknown
  misc_feature (1)..( 10): Matrix.002 file - promoters60/1461803
accaagaaaa

SEQ ID NO: 51451 - DNA, 8 bp, Unknown
  misc_feature (1)..( 8): Matrix.002 file - promoters60/1461803
gattattt

SEQ ID NO: 51452 - DNA, 8 bp, Unknown
  misc_feature (1)..( 8): Matrix.002 file - promoters60/1461837
tggattca

SEQ ID NO: 51453 - DNA, 9 bp, Unknown
  misc_feature (1)..( 9): Matrix.002 file - promoters60/1461837
ttttgttat

SEQ ID NO: 51454 - DNA, 7 bp, Unknown
  misc_feature (1)..( 7): Matrix.002 file - promoters60/1461837
gataaat

SEQ ID NO: 51455 - DNA, 6 bp, Unknown
  misc_feature (1)..( 6): Matrix.002 file - promoters60/1461837
aaacaa

SEQ ID NO: 51456 - DNA, 6 bp, Unknown
  misc_feature (1)..( 6): Matrix.002 file - promoters60/1461837
agctta

SEQ ID NO: 51457 - DNA, 8 bp, Unknown
  misc_feature (1)..( 8): Matrix.002 file - promoters60/1461837
ttgataaa

SEQ ID NO: 51458 - DNA, 6 bp, Unknown
  misc_feature (1)..( 6): Matrix.002 file - promoters60/1461837
aaatat

SEQ ID NO: 51459 - DNA, 9 bp, Unknown
  misc_feature (1)..( 9): Matrix.002 file - promoters60/1461837
tcgggggat

SEQ ID NO: 51460 - DNA, 7 bp, Unknown
  misc_feature (1)..( 7): Matrix.002 file - promoters60/1461837
ttccttc

SEQ ID NO: 51461 - DNA, 7 bp, Unknown
  misc_feature (1)..( 7): Matrix.002 file - promoters60/1461837
agagggg

SEQ ID NO: 51462 - DNA, 7 bp, Unknown
  misc_feature (1)..( 7): Matrix.002 file - promoters60/1461837
ataaatt

SEQ ID NO: 51463 - DNA, 8 bp, Unknown
  misc_feature (1)..( 8): Matrix.002 file - promoters60/1461837
tatccaaa

SEQ ID NO: 51464 - DNA, 6 bp, Unknown
  misc_feature (1)..( 6): Matrix.002 file - promoters60/1461837
ctttga

SEQ ID NO: 51465 - DNA, 6 bp, Unknown
  misc_feature (1)..( 6): Matrix.002 file - promoters60/1461837
aggtaa

SEQ ID NO: 51466 - DNA, 6 bp, Unknown
  misc_feature (1)..( 6): Matrix.002 file - promoters60/1461837
tgaaag

SEQ ID NO: 51467 - DNA, 10 bp, Unknown
  misc_feature (1)..( 10): Matrix.002 file - promoters60/1461837
aaaaaagttg

SEQ ID NO: 51468 - DNA, 8 bp, Unknown
  misc_feature (1)..( 8): Matrix.002 file - promoters60/1461837
aaaaaagt

SEQ ID NO: 51469 - DNA, 7 bp, Unknown
  misc_feature (1)..( 7): Matrix.002 file - promoters60/1461837
actagga

SEQ ID NO: 51470 - DNA, 6 bp, Unknown
  misc_feature (1)..( 6): Matrix.002 file - promoters60/1461837
acgaag

SEQ ID NO: 51471 - DNA, 6 bp, Unknown
  misc_feature (1)..( 6): Matrix.002 file - promoters60/1461837
aaaaat

SEQ ID NO: 51472 - DNA, 6 bp, Unknown
  misc_feature (1)..( 6): Matrix.002 file - promoters60/1461837
aagaga

SEQ ID NO: 51473 - DNA, 6 bp, Unknown
  misc_feature (1)..( 6): Matrix.002 file - promoters60/1461837
tttttt

SEQ ID NO: 51474 - DNA, 7 bp, Unknown
  misc_feature (1)..( 7): Matrix.002 file - promoters60/1461837
aaaccca

SEQ ID NO: 51475 - DNA, 7 bp, Unknown
  misc_feature (1)..( 7): Matrix.002 file - promoters60/1461837
ttaaata

SEQ ID NO: 51476 - DNA, 7 bp, Unknown
  misc_feature (1)..( 7): Matrix.002 file - promoters60/1461837
ataaata

SEQ ID NO: 51477 - DNA, 7 bp, Unknown
  misc_feature (1)..( 7): Matrix.002 file - promoters60/1465863
tcgcttt

SEQ ID NO: 51478 - DNA, 9 bp, Unknown
  misc_feature (1)..( 9): Matrix.002 file - promoters60/1465863
ttcttagct

SEQ ID NO: 51479 - DNA, 9 bp, Unknown
  misc_feature (1)..( 9): Matrix.002 file - promoters60/1465863
agaaagcaa

SEQ ID NO: 51480 - DNA, 8 bp, Unknown
  misc_feature (1)..( 8): Matrix.002 file - promoters60/1465863
gaaagatt

SEQ ID NO: 51481 - DNA, 8 bp, Unknown
  misc_feature (1)..( 8): Matrix.002 file - promoters60/1465863
tccaaagg

SEQ ID NO: 51482 - DNA, 9 bp, Unknown
  misc_feature (1)..( 9): Matrix.002 file - promoters60/1465863
ctagggttt

SEQ ID NO: 51483 - DNA, 8 bp, Unknown
  misc_feature (1)..( 8): Matrix.002 file - promoters60/1465863
agtttaat

SEQ ID NO: 51484 - DNA, 8 bp, Unknown
  misc_feature (1)..( 8): Matrix.002 file - promoters60/1465863
atattttt

SEQ ID NO: 51485 - DNA, 9 bp, Unknown
  misc_feature (1)..( 9): Matrix.002 file - promoters60/1465943
attggcaac

SEQ ID NO: 51486 - DNA, 6 bp, Unknown
  misc_feature (1)..( 6): Matrix.002 file - promoters60/1465943
atttct

SEQ ID NO: 51487 - DNA, 6 bp, Unknown
  misc_feature (1)..( 6): Matrix.002 file - promoters60/1465943
aagaga

SEQ ID NO: 51488 - DNA, 8 bp, Unknown
  misc_feature (1)..( 8): Matrix.002 file - promoters60/1465943
gcaaaatt

SEQ ID NO: 51489 - DNA, 8 bp, Unknown
  misc_feature (1)..( 8): Matrix.002 file - promoters60/1465943
aaacctga

SEQ ID NO: 51490 - DNA, 10 bp, Unknown
  misc_feature (1)..( 10): Matrix.002 file - promoters60/1465943
actcttcata

SEQ ID NO: 51491 - DNA, 6 bp, Unknown
  misc_feature (1)..( 6): Matrix.002 file - promoters60/1465943
ctctcc

SEQ ID NO: 51492 - DNA, 11 bp, Unknown
  misc_feature (1)..( 11): Matrix.002 file - promoters60/1465943
aaactaaacaa

SEQ ID NO: 51493 - DNA, 8 bp, Unknown
  misc_feature (1)..( 8): Matrix.002 file - promoters60/1465943
tgcaaaaa

SEQ ID NO: 51494 - DNA, 9 bp, Unknown
  misc_feature (1)..( 9): Matrix.002 file - promoters60/1465943
atgaaaatt

SEQ ID NO: 51495 - DNA, 6 bp, Unknown
  misc_feature (1)..( 6): Matrix.002 file - promoters60/1470582
taaaaa

SEQ ID NO: 51496 - DNA, 7 bp, Unknown
  misc_feature (1)..( 7): Matrix.002 file - promoters60/1470582
aacaaaa

SEQ ID NO: 51497 - DNA, 6 bp, Unknown
  misc_feature (1)..( 6): Matrix.002 file - promoters60/1470582
tcaaaa

SEQ ID NO: 51498 - DNA, 8 bp, Unknown
  misc_feature (1)..( 8): Matrix.002 file - promoters60/1470582
aaacattc

SEQ ID NO: 51499 - DNA, 9 bp, Unknown
  misc_feature (1)..( 9): Matrix.002 file - promoters60/1470582
gtttggatt

SEQ ID NO: 51500 - DNA, 6 bp, Unknown
  misc_feature (1)..( 6): Matrix.002 file - promoters60/1470582
tttaca

SEQ ID NO: 51501 - DNA, 8 bp, Unknown
  misc_feature (1)..( 8): Matrix.002 file - promoters60/1470582
atcaaatt

SEQ ID NO: 51502 - DNA, 6 bp, Unknown
  misc_feature (1)..( 6): Matrix.002 file - promoters60/1470582
aagata

SEQ ID NO: 51503 - DNA, 15 bp, Unknown
  misc_feature (1)..( 15): Matrix.002 file - promoters60/1470903
cccatagctccttaa

SEQ ID NO: 51504 - DNA, 7 bp, Unknown
  misc_feature (1)..( 7): Matrix.002 file - promoters60/1470903
tttggtt

SEQ ID NO: 51505 - DNA, 8 bp, Unknown
  misc_feature (1)..( 8): Matrix.002 file - promoters60/1470903
gaagagaa

SEQ ID NO: 51506 - DNA, 14 bp, Unknown
  misc_feature (1)..( 14): Matrix.002 file - promoters60/1470903
ttagcttcagcttc

SEQ ID NO: 51507 - DNA, 13 bp, Unknown
  misc_feature (1)..( 13): Matrix.002 file - promoters60/1470903
agagagagagaga

SEQ ID NO: 51508 - DNA, 7 bp, Unknown
  misc_feature (1)..( 7): Matrix.002 file - promoters60/1470903
agagaag

SEQ ID NO: 51509 - DNA, 7 bp, Unknown
  misc_feature (1)..( 7): Matrix.002 file - promoters60/1470903
ggatcaa

SEQ ID NO: 51510 - DNA, 11 bp, Unknown
  misc_feature (1)..( 11): Matrix.002 file - promoters60/1470903
attcagggttt

SEQ ID NO: 51511 - DNA, 8 bp, Unknown
  misc_feature (1)..( 8): Matrix.002 file - promoters60/1470903
aaacaatt

SEQ ID NO: 51512 - DNA, 7 bp, Unknown
  misc_feature (1)..( 7): Matrix.002 file - promoters60/1470903
aacgcga

SEQ ID NO: 51513 - DNA, 8 bp, Unknown
  misc_feature (1)..( 8): Matrix.002 file - promoters60/1470903
aaagagaa

SEQ ID NO: 51514 - DNA, 8 bp, Unknown
  misc_feature (1)..( 8): Matrix.002 file - promoters60/1470903
aacgcgaa

SEQ ID NO: 51515 - DNA, 6 bp, Unknown
  misc_feature (1)..( 6): Matrix.002 file - promoters60/1470903
ttatat

SEQ ID NO: 51516 - DNA, 7 bp, Unknown
  misc_feature (1)..( 7): Matrix.002 file - promoters60/1470903
tttggtt

SEQ ID NO: 51517 - DNA, 6 bp, Unknown
  misc_feature (1)..( 6): Matrix.002 file - promoters60/1470903
tagctt

SEQ ID NO: 51518 - DNA, 7 bp, Unknown
  misc_feature (1)..( 7): Matrix.002 file - promoters60/1470903
aacgcga

SEQ ID NO: 51519 - DNA, 11 bp, Unknown
  misc_feature (1)..( 11): Matrix.002 file - promoters60/1470993
gtagatattta

SEQ ID NO: 51520 - DNA, 8 bp, Unknown
  misc_feature (1)..( 8): Matrix.002 file - promoters60/1470993
tgatgaat

SEQ ID NO: 51521 - DNA, 10 bp, Unknown
  misc_feature (1)..( 10): Matrix.002 file - promoters60/1470993
ttagaaaaaa

SEQ ID NO: 51522 - DNA, 11 bp, Unknown
  misc_feature (1)..( 11): Matrix.002 file - promoters60/1470993
cggtacacgtg

SEQ ID NO: 51523 - DNA, 9 bp, Unknown
  misc_feature (1)..( 9): Matrix.002 file - promoters60/1470993
taaaaattg

SEQ ID NO: 51524 - DNA, 9 bp, Unknown
  misc_feature (1)..( 9): Matrix.002 file - promoters60/1470993
aaccattaa

SEQ ID NO: 51525 - DNA, 8 bp, Unknown
  misc_feature (1)..( 8): Matrix.002 file - promoters60/1470993
tagttttg

SEQ ID NO: 51526 - DNA, 14 bp, Unknown
  misc_feature (1)..( 14): Matrix.002 file - promoters60/1470993
tttaaatttgatga

SEQ ID NO: 51527 - DNA, 9 bp, Unknown
  misc_feature (1)..( 9): Matrix.002 file - promoters60/1471001
ctatacata

SEQ ID NO: 51528 - DNA, 11 bp, Unknown
  misc_feature (1)..( 11): Matrix.002 file - promoters60/1471001
tataaaaacaa

SEQ ID NO: 51529 - DNA, 7 bp, Unknown
  misc_feature (1)..( 7): Matrix.002 file - promoters60/1471001
tcatgat

SEQ ID NO: 51530 - DNA, 6 bp, Unknown
  misc_feature (1)..( 6): Matrix.002 file - promoters60/1471001
aaatat

SEQ ID NO: 51531 - DNA, 7 bp, Unknown
  misc_feature (1)..( 7): Matrix.002 file - promoters60/1471001
ctatatt

SEQ ID NO: 51532 - DNA, 6 bp, Unknown
  misc_feature (1)..( 6): Matrix.002 file - promoters60/1471001
tttttt

SEQ ID NO: 51533 - DNA, 6 bp, Unknown
  misc_feature (1)..( 6): Matrix.002 file - promoters60/1471001
tttcca

SEQ ID NO: 51534 - DNA, 7 bp, Unknown
  misc_feature (1)..( 7): Matrix.002 file - promoters60/1471001
aaactaa

SEQ ID NO: 51535 - DNA, 8 bp, Unknown
  misc_feature (1)..( 8): Matrix.002 file - promoters60/1471001
aaataata

SEQ ID NO: 51536 - DNA, 7 bp, Unknown
  misc_feature (1)..( 7): Matrix.002 file - promoters60/1471001
aatcttg

SEQ ID NO: 51537 - DNA, 7 bp, Unknown
  misc_feature (1)..( 7): Matrix.002 file - promoters60/1471001
ttaattt

SEQ ID NO: 51538 - DNA, 6 bp, Unknown
  misc_feature (1)..( 6): Matrix.002 file - promoters60/1471001
attttt

SEQ ID NO: 51539 - DNA, 8 bp, Unknown
  misc_feature (1)..( 8): Matrix.002 file - promoters60/1471001
gatatgta

SEQ ID NO: 51540 - DNA, 6 bp, Unknown
  misc_feature (1)..( 6): Matrix.002 file - promoters60/1471001
atgaga

SEQ ID NO: 51541 - DNA, 8 bp, Unknown
  misc_feature (1)..( 8): Matrix.002 file - promoters60/1471001
tgtgtcaa

SEQ ID NO: 51542 - DNA, 8 bp, Unknown
  misc_feature (1)..( 8): Matrix.002 file - promoters60/1471001
caaattaa

SEQ ID NO: 51543 - DNA, 8 bp, Unknown
  misc_feature (1)..( 8): Matrix.002 file - promoters60/1471001
atataatt

SEQ ID NO: 51544 - DNA, 9 bp, Unknown
  misc_feature (1)..( 9): Matrix.002 file - promoters60/1471001
atataatta

SEQ ID NO: 51545 - DNA, 6 bp, Unknown
  misc_feature (1)..( 6): Matrix.002 file - promoters60/1471001
aggaaa

SEQ ID NO: 51546 - DNA, 7 bp, Unknown
  misc_feature (1)..( 7): Matrix.002 file - promoters60/1471001
cttttct

SEQ ID NO: 51547 - DNA, 8 bp, Unknown
  misc_feature (1)..( 8): Matrix.002 file - promoters60/1471001
aaagaaaa

SEQ ID NO: 51548 - DNA, 6 bp, Unknown
  misc_feature (1)..( 6): Matrix.002 file - promoters60/1471001
tataaa

SEQ ID NO: 51549 - DNA, 6 bp, Unknown
  misc_feature (1)..( 6): Matrix.002 file - promoters60/1471001
gaaaca

SEQ ID NO: 51550 - DNA, 6 bp, Unknown
  misc_feature (1)..( 6): Matrix.002 file - promoters60/1471001
tcaaaa

SEQ ID NO: 51551 - DNA, 8 bp, Unknown
  misc_feature (1)..( 8): Matrix.002 file - promoters60/1471009
aattaaaa

SEQ ID NO: 51552 - DNA, 8 bp, Unknown
  misc_feature (1)..( 8): Matrix.002 file - promoters60/1471009
tttaaaaa

SEQ ID NO: 51553 - DNA, 7 bp, Unknown
  misc_feature (1)..( 7): Matrix.002 file - promoters60/1471009
aataaac

SEQ ID NO: 51554 - DNA, 7 bp, Unknown
  misc_feature (1)..( 7): Matrix.002 file - promoters60/1471009
tcctata

SEQ ID NO: 51555 - DNA, 10 bp, Unknown
  misc_feature (1)..( 10): Matrix.002 file - promoters60/1471009
caagatttta

SEQ ID NO: 51556 - DNA, 8 bp, Unknown
  misc_feature (1)..( 8): Matrix.002 file - promoters60/1471041
attaattt

SEQ ID NO: 51557 - DNA, 8 bp, Unknown
  misc_feature (1)..( 8): Matrix.002 file - promoters60/1471041
aaaataaa

SEQ ID NO: 51558 - DNA, 11 bp, Unknown
  misc_feature (1)..( 11): Matrix.002 file - promoters60/1471041
caaaaaagaaa

SEQ ID NO: 51559 - DNA, 7 bp, Unknown
  misc_feature (1)..( 7): Matrix.002 file - promoters60/1471073
tttctta

SEQ ID NO: 51560 - DNA, 6 bp, Unknown
  misc_feature (1)..( 6): Matrix.002 file - promoters60/1471073
attttt

SEQ ID NO: 51561 - DNA, 8 bp, Unknown
  misc_feature (1)..( 8): Matrix.002 file - promoters60/1471073
aaaaaata

SEQ ID NO: 51562 - DNA, 7 bp, Unknown
  misc_feature (1)..( 7): Matrix.002 file - promoters60/1471073
aataaaa

SEQ ID NO: 51563 - DNA, 8 bp, Unknown
  misc_feature (1)..( 8): Matrix.002 file - promoters60/1471073
ataaaata

SEQ ID NO: 51564 - DNA, 11 bp, Unknown
  misc_feature (1)..( 11): Matrix.002 file - promoters60/1471073
tgataaatgaa

SEQ ID NO: 51565 - DNA, 6 bp, Unknown
  misc_feature (1)..( 6): Matrix.002 file - promoters60/1471073
tgaata

SEQ ID NO: 51566 - DNA, 7 bp, Unknown
  misc_feature (1)..( 7): Matrix.002 file - promoters60/1471073
attatat

SEQ ID NO: 51567 - DNA, 8 bp, Unknown
  misc_feature (1)..( 8): Matrix.002 file - promoters60/1471073
aaatataa

SEQ ID NO: 51568 - DNA, 6 bp, Unknown
  misc_feature (1)..( 6): Matrix.002 file - promoters60/1471073
atttaa

SEQ ID NO: 51569 - DNA, 6 bp, Unknown
  misc_feature (1)..( 6): Matrix.002 file - promoters60/1471073
ttctca

SEQ ID NO: 51570 - DNA, 6 bp, Unknown
  misc_feature (1)..( 6): Matrix.002 file - promoters60/1471073
aaatca

SEQ ID NO: 51571 - DNA, 10 bp, Unknown
  misc_feature (1)..( 10): Matrix.002 file - promoters60/1471073
ataaaatcat

SEQ ID NO: 51572 - DNA, 6 bp, Unknown
  misc_feature (1)..( 6): Matrix.002 file - promoters60/1471073
tattaa

SEQ ID NO: 51573 - DNA, 6 bp, Unknown
  misc_feature (1)..( 6): Matrix.002 file - promoters60/1471073
aattta

SEQ ID NO: 51574 - DNA, 10 bp, Unknown
  misc_feature (1)..( 10): Matrix.002 file - promoters60/1471073
aattatttgc

SEQ ID NO: 51575 - DNA, 7 bp, Unknown
  misc_feature (1)..( 7): Matrix.002 file - promoters60/1471073
aaaagtc

SEQ ID NO: 51576 - DNA, 9 bp, Unknown
  misc_feature (1)..( 9): Matrix.002 file - promoters60/1471073
agtaaccat

SEQ ID NO: 51577 - DNA, 8 bp, Unknown
  misc_feature (1)..( 8): Matrix.002 file - promoters60/1471073
ataatttt

SEQ ID NO: 51578 - DNA, 7 bp, Unknown
  misc_feature (1)..( 7): Matrix.002 file - promoters60/1471073
tacctta

SEQ ID NO: 51579 - DNA, 6 bp, Unknown
  misc_feature (1)..( 6): Matrix.002 file - promoters60/1471073
aaaaag

SEQ ID NO: 51580 - DNA, 7 bp, Unknown
  misc_feature (1)..( 7): Matrix.002 file - promoters60/1471073
aagaaaa

SEQ ID NO: 51581 - DNA, 7 bp, Unknown
  misc_feature (1)..( 7): Matrix.002 file - promoters60/1471073
aaagaat

SEQ ID NO: 51582 - DNA, 9 bp, Unknown
  misc_feature (1)..( 9): Matrix.002 file - promoters60/1471073
attaaaaat

SEQ ID NO: 51583 - DNA, 7 bp, Unknown
  misc_feature (1)..( 7): Matrix.002 file - promoters60/1471073
attaaac

SEQ ID NO: 51584 - DNA, 6 bp, Unknown
  misc_feature (1)..( 6): Matrix.002 file - promoters60/1471073
atgttt

SEQ ID NO: 51585 - DNA, 8 bp, Unknown
  misc_feature (1)..( 8): Matrix.002 file - promoters60/1471073
aaagtaaa

SEQ ID NO: 51586 - DNA, 7 bp, Unknown
  misc_feature (1)..( 7): Matrix.002 file - promoters60/1471073
atcatca

SEQ ID NO: 51587 - DNA, 6 bp, Unknown
  misc_feature (1)..( 6): Matrix.002 file - promoters60/1471106
atgtca

SEQ ID NO: 51588 - DNA, 6 bp, Unknown
  misc_feature (1)..( 6): Matrix.002 file - promoters60/1471106
aaactt

SEQ ID NO: 51589 - DNA, 7 bp, Unknown
  misc_feature (1)..( 7): Matrix.002 file - promoters60/1471106
ttataaa

SEQ ID NO: 51590 - DNA, 6 bp, Unknown
  misc_feature (1)..( 6): Matrix.002 file - promoters60/1471106
atgatg

SEQ ID NO: 51591 - DNA, 9 bp, Unknown
  misc_feature (1)..( 9): Matrix.002 file - promoters60/1471106
agaagctaa

SEQ ID NO: 51592 - DNA, 6 bp, Unknown
  misc_feature (1)..( 6): Matrix.002 file - promoters60/1471106
tcagca

SEQ ID NO: 51593 - DNA, 6 bp, Unknown
  misc_feature (1)..( 6): Matrix.002 file - promoters60/1471106
aatttg

SEQ ID NO: 51594 - DNA, 8 bp, Unknown
  misc_feature (1)..( 8): Matrix.002 file - promoters60/1471106
tttctttt

SEQ ID NO: 51595 - DNA, 6 bp, Unknown
  misc_feature (1)..( 6): Matrix.002 file - promoters60/1471106
taaaac

SEQ ID NO: 51596 - DNA, 8 bp, Unknown
  misc_feature (1)..( 8): Matrix.002 file - promoters60/1471106
taaaaccc

SEQ ID NO: 51597 - DNA, 7 bp, Unknown
  misc_feature (1)..( 7): Matrix.002 file - promoters60/1471106
aacacaa

SEQ ID NO: 51598 - DNA, 8 bp, Unknown
  misc_feature (1)..( 8): Matrix.002 file - promoters60/1471106
acaagctt

SEQ ID NO: 51599 - DNA, 8 bp, Unknown
  misc_feature (1)..( 8): Matrix.002 file - promoters60/1471106
tcaagaat

SEQ ID NO: 51600 - DNA, 8 bp, Unknown
  misc_feature (1)..( 8): Matrix.002 file - promoters60/1471106
aacaaaat

SEQ ID NO: 51601 - DNA, 6 bp, Unknown
  misc_feature (1)..( 6): Matrix.002 file - promoters60/1471106
tttaca

SEQ ID NO: 51602 - DNA, 6 bp, Unknown
  misc_feature (1)..( 6): Matrix.002 file - promoters60/1471106
acattt

SEQ ID NO: 51603 - DNA, 6 bp, Unknown
  misc_feature (1)..( 6): Matrix.002 file - promoters60/1471106
tttgct

SEQ ID NO: 51604 - DNA, 8 bp, Unknown
  misc_feature (1)..( 8): Matrix.002 file - promoters60/1471106
agtgaaac

SEQ ID NO: 51605 - DNA, 6 bp, Unknown
  misc_feature (1)..( 6): Matrix.002 file - promoters60/1471106
cccata

SEQ ID NO: 51606 - DNA, 8 bp, Unknown
  misc_feature (1)..( 8): Matrix.002 file - promoters60/1471140
atacaaaa

SEQ ID NO: 51607 - DNA, 8 bp, Unknown
  misc_feature (1)..( 8): Matrix.002 file - promoters60/1471140
ataaaata

SEQ ID NO: 51608 - DNA, 9 bp, Unknown
  misc_feature (1)..( 9): Matrix.002 file - promoters60/1471140
aaacaaaaa

SEQ ID NO: 51609 - DNA, 8 bp, Unknown
  misc_feature (1)..( 8): Matrix.002 file - promoters60/1471140
aaatttat

SEQ ID NO: 51610 - DNA, 11 bp, Unknown
  misc_feature (1)..( 11): Matrix.002 file - promoters60/1471140
gaaatttcaac

SEQ ID NO: 51611 - DNA, 11 bp, Unknown
  misc_feature (1)..( 11): Matrix.002 file - promoters60/1472778
taaaaaagaaa

SEQ ID NO: 51612 - DNA, 6 bp, Unknown
  misc_feature (1)..( 6): Matrix.002 file - promoters60/1472778
atttta

SEQ ID NO: 51613 - DNA, 7 bp, Unknown
  misc_feature (1)..( 7): Matrix.002 file - promoters60/1472778
ttaaatt

SEQ ID NO: 51614 - DNA, 12 bp, Unknown
  misc_feature (1)..( 12): Matrix.002 file - promoters60/1472778
tataaataacac

SEQ ID NO: 51615 - DNA, 11 bp, Unknown
  misc_feature (1)..( 11): Matrix.002 file - promoters60/1472778
gatacacttat

SEQ ID NO: 51616 - DNA, 8 bp, Unknown
  misc_feature (1)..( 8): Matrix.002 file - promoters60/1472799
atcatatt

SEQ ID NO: 51617 - DNA, 9 bp, Unknown
  misc_feature (1)..( 9): Matrix.002 file - promoters60/1472799
tttgtagtg

SEQ ID NO: 51618 - DNA, 8 bp, Unknown
  misc_feature (1)..( 8): Matrix.002 file - promoters60/1472799
tgatttgt

SEQ ID NO: 51619 - DNA, 6 bp, Unknown
  misc_feature (1)..( 6): Matrix.002 file - promoters60/1472799
atattt

SEQ ID NO: 51620 - DNA, 7 bp, Unknown
  misc_feature (1)..( 7): Matrix.002 file - promoters60/1472799
gtttgtt

SEQ ID NO: 51621 - DNA, 6 bp, Unknown
  misc_feature (1)..( 6): Matrix.002 file - promoters60/1472799
tgatgt

SEQ ID NO: 51622 - DNA, 8 bp, Unknown
  misc_feature (1)..( 8): Matrix.002 file - promoters60/1472799
gatttgtt

SEQ ID NO: 51623 - DNA, 7 bp, Unknown
  misc_feature (1)..( 7): Matrix.002 file - promoters60/1472799
gttttgt

SEQ ID NO: 51624 - DNA, 7 bp, Unknown
  misc_feature (1)..( 7): Matrix.002 file - promoters60/1472799
aagaaca

SEQ ID NO: 51625 - DNA, 6 bp, Unknown
  misc_feature (1)..( 6): Matrix.002 file - promoters60/1472799
tgtgat

SEQ ID NO: 51626 - DNA, 8 bp, Unknown
  misc_feature (1)..( 8): Matrix.002 file - promoters60/1472799
ataatttg

SEQ ID NO: 51627 - DNA, 8 bp, Unknown
  misc_feature (1)..( 8): Matrix.002 file - promoters60/1472799
agtatgtt

SEQ ID NO: 51628 - DNA, 6 bp, Unknown
  misc_feature (1)..( 6): Matrix.002 file - promoters60/1472799
tgtttg

SEQ ID NO: 51629 - DNA, 6 bp, Unknown
  misc_feature (1)..( 6): Matrix.002 file - promoters60/1472799
gagttt

SEQ ID NO: 51630 - DNA, 6 bp, Unknown
  misc_feature (1)..( 6): Matrix.002 file - promoters60/1472799
ctgatt

SEQ ID NO: 51631 - DNA, 6 bp, Unknown
  misc_feature (1)..( 6): Matrix.002 file - promoters60/1472799
ttagtt

SEQ ID NO: 51632 - DNA, 9 bp, Unknown
  misc_feature (1)..( 9): Matrix.002 file - promoters60/1473014
atatataac

SEQ ID NO: 51633 - DNA, 13 bp, Unknown
  misc_feature (1)..( 13): Matrix.002 file - promoters60/1473014
gcttattcactct

SEQ ID NO: 51634 - DNA, 8 bp, Unknown
  misc_feature (1)..( 8): Matrix.002 file - promoters60/1473014
atttagtt

SEQ ID NO: 51635 - DNA, 7 bp, Unknown
  misc_feature (1)..( 7): Matrix.002 file - promoters60/1473014
ataatat

SEQ ID NO: 51636 - DNA, 6 bp, Unknown
  misc_feature (1)..( 6): Matrix.002 file - promoters60/1473014
aataat

SEQ ID NO: 51637 - DNA, 10 bp, Unknown
  misc_feature (1)..( 10): Matrix.002 file - promoters60/1473014
ttaaaaccct

SEQ ID NO: 51638 - DNA, 6 bp, Unknown
  misc_feature (1)..( 6): Matrix.002 file - promoters60/1473014
aagtca

SEQ ID NO: 51639 - DNA, 13 bp, Unknown
  misc_feature (1)..( 13): Matrix.002 file - promoters60/1473014
acccattttctgc

SEQ ID NO: 51640 - DNA, 6 bp, Unknown
  misc_feature (1)..( 6): Matrix.002 file - promoters60/1473014
agaaga

SEQ ID NO: 51641 - DNA, 6 bp, Unknown
  misc_feature (1)..( 6): Matrix.002 file - promoters60/1473014
atatta

SEQ ID NO: 51642 - DNA, 7 bp, Unknown
  misc_feature (1)..( 7): Matrix.002 file - promoters60/1473014
gtataaa

SEQ ID NO: 51643 - DNA, 7 bp, Unknown
  misc_feature (1)..( 7): Matrix.002 file - promoters60/1473014
cataaac

SEQ ID NO: 51644 - DNA, 7 bp, Unknown
  misc_feature (1)..( 7): Matrix.002 file - promoters60/1473014
gcgagtt

SEQ ID NO: 51645 - DNA, 12 bp, Unknown
  misc_feature (1)..( 12): Matrix.002 file - promoters60/1481334
ctggagaggaga

SEQ ID NO: 51646 - DNA, 8 bp, Unknown
  misc_feature (1)..( 8): Matrix.002 file - promoters60/1481334
agagagga

SEQ ID NO: 51647 - DNA, 14 bp, Unknown
  misc_feature (1)..( 14): Matrix.002 file - promoters60/1481334
agaaataaaagaaa

SEQ ID NO: 51648 - DNA, 12 bp, Unknown
  misc_feature (1)..( 12): Matrix.002 file - promoters60/1481334
agagaatattta

SEQ ID NO: 51649 - DNA, 6 bp, Unknown
  misc_feature (1)..( 6): Matrix.002 file - promoters60/1481568
caatta

SEQ ID NO: 51650 - DNA, 7 bp, Unknown
  misc_feature (1)..( 7): Matrix.002 file - promoters60/1481568
atacaga

SEQ ID NO: 51651 - DNA, 7 bp, Unknown
  misc_feature (1)..( 7): Matrix.002 file - promoters60/1481568
aagacat

SEQ ID NO: 51652 - DNA, 8 bp, Unknown
  misc_feature (1)..( 8): Matrix.002 file - promoters60/1481568
agacaaaa

SEQ ID NO: 51653 - DNA, 7 bp, Unknown
  misc_feature (1)..( 7): Matrix.002 file - promoters60/1481568
tgaagaa

SEQ ID NO: 51654 - DNA, 6 bp, Unknown
  misc_feature (1)..( 6): Matrix.002 file - promoters60/1481568
gctagt

SEQ ID NO: 51655 - DNA, 8 bp, Unknown
  misc_feature (1)..( 8): Matrix.002 file - promoters60/1481568
agaaaacc

SEQ ID NO: 51656 - DNA, 10 bp, Unknown
  misc_feature (1)..( 10): Matrix.002 file - promoters60/1481568
aacgcgtttt

SEQ ID NO: 51657 - DNA, 6 bp, Unknown
  misc_feature (1)..( 6): Matrix.002 file - promoters60/1481568
aaaaat

SEQ ID NO: 51658 - DNA, 9 bp, Unknown
  misc_feature (1)..( 9): Matrix.002 file - promoters60/1481568
aagagtaaa

SEQ ID NO: 51659 - DNA, 8 bp, Unknown
  misc_feature (1)..( 8): Matrix.002 file - promoters60/1481568
cattgtta

SEQ ID NO: 51660 - DNA, 10 bp, Unknown
  misc_feature (1)..( 10): Matrix.002 file - promoters60/1481568
ggaaatgaaa

SEQ ID NO: 51661 - DNA, 7 bp, Unknown
  misc_feature (1)..( 7): Matrix.002 file - promoters60/1481568
aaaccaa

SEQ ID NO: 51662 - DNA, 7 bp, Unknown
  misc_feature (1)..( 7): Matrix.002 file - promoters60/1481568
cgaaccc

SEQ ID NO: 51663 - DNA, 7 bp, Unknown
  misc_feature (1)..( 7): Matrix.002 file - promoters60/1481568
aatcggg

SEQ ID NO: 51664 - DNA, 8 bp, Unknown
  misc_feature (1)..( 8): Matrix.002 file - promoters60/1481568
gaaacaaa

SEQ ID NO: 51665 - DNA, 7 bp, Unknown
  misc_feature (1)..( 7): Matrix.002 file - promoters60/1481568
cccacta

SEQ ID NO: 51666 - DNA, 9 bp, Unknown
  misc_feature (1)..( 9): Matrix.002 file - promoters60/1481568
aaagaaaag

SEQ ID NO: 51667 - DNA, 7 bp, Unknown
  misc_feature (1)..( 7): Matrix.002 file - promoters60/1481568
gtatata

SEQ ID NO: 51668 - DNA, 10 bp, Unknown
  misc_feature (1)..( 10): Matrix.002 file - promoters60/1481696
agtgattaat

SEQ ID NO: 51669 - DNA, 12 bp, Unknown
  misc_feature (1)..( 12): Matrix.002 file - promoters60/1481696
aaatcaaagttt

SEQ ID NO: 51670 - DNA, 6 bp, Unknown
  misc_feature (1)..( 6): Matrix.002 file - promoters60/1482017
atttat

SEQ ID NO: 51671 - DNA, 10 bp, Unknown
  misc_feature (1)..( 10): Matrix.002 file - promoters60/1482017
gatgatactc

SEQ ID NO: 51672 - DNA, 8 bp, Unknown
  misc_feature (1)..( 8): Matrix.002 file - promoters60/1482017
ataaaata

SEQ ID NO: 51673 - DNA, 7 bp, Unknown
  misc_feature (1)..( 7): Matrix.002 file - promoters60/1482017
tctatat

SEQ ID NO: 51674 - DNA, 11 bp, Unknown
  misc_feature (1)..( 11): Matrix.002 file - promoters60/1482017
tttttgttaac

SEQ ID NO: 51675 - DNA, 9 bp, Unknown
  misc_feature (1)..( 9): Matrix.002 file - promoters60/1482017
ttttttttt

SEQ ID NO: 51676 - DNA, 6 bp, Unknown
  misc_feature (1)..( 6): Matrix.002 file - promoters60/1482201
atccaa

SEQ ID NO: 51677 - DNA, 7 bp, Unknown
  misc_feature (1)..( 7): Matrix.002 file - promoters60/1482448
ccctaac

SEQ ID NO: 51678 - DNA, 8 bp, Unknown
  misc_feature (1)..( 8): Matrix.002 file - promoters60/1482448
actatata

SEQ ID NO: 51679 - DNA, 9 bp, Unknown
  misc_feature (1)..( 9): Matrix.002 file - promoters60/1482448
aggaaaaaa

SEQ ID NO: 51680 - DNA, 8 bp, Unknown
  misc_feature (1)..( 8): Matrix.002 file - promoters60/1482448
tgtaaaac

SEQ ID NO: 51681 - DNA, 6 bp, Unknown
  misc_feature (1)..( 6): Matrix.002 file - promoters60/1482448
attgat

SEQ ID NO: 51682 - DNA, 6 bp, Unknown
  misc_feature (1)..( 6): Matrix.002 file - promoters60/1482448
attcat

SEQ ID NO: 51683 - DNA, 6 bp, Unknown
  misc_feature (1)..( 6): Matrix.002 file - promoters60/1482448
atataa

SEQ ID NO: 51684 - DNA, 8 bp, Unknown
  misc_feature (1)..( 8): Matrix.002 file - promoters60/1482448
tggaaata

SEQ ID NO: 51685 - DNA, 7 bp, Unknown
  misc_feature (1)..( 7): Matrix.002 file - promoters60/1482448
taatttg

SEQ ID NO: 51686 - DNA, 6 bp, Unknown
  misc_feature (1)..( 6): Matrix.002 file - promoters60/1482448
aatcaa

SEQ ID NO: 51687 - DNA, 8 bp, Unknown
  misc_feature (1)..( 8): Matrix.002 file - promoters60/1482448
catttttt

SEQ ID NO: 51688 - DNA, 8 bp, Unknown
  misc_feature (1)..( 8): Matrix.002 file - promoters60/1482448
attttaaa

SEQ ID NO: 51689 - DNA, 8 bp, Unknown
  misc_feature (1)..( 8): Matrix.002 file - promoters60/1482448
gtagttaa

SEQ ID NO: 51690 - DNA, 6 bp, Unknown
  misc_feature (1)..( 6): Matrix.002 file - promoters60/1482448
ttttta

SEQ ID NO: 51691 - DNA, 6 bp, Unknown
  misc_feature (1)..( 6): Matrix.002 file - promoters60/1482448
aacgta

SEQ ID NO: 51692 - DNA, 6 bp, Unknown
  misc_feature (1)..( 6): Matrix.002 file - promoters60/1482448
atttag

SEQ ID NO: 51693 - DNA, 7 bp, Unknown
  misc_feature (1)..( 7): Matrix.002 file - promoters60/1482448
atccaaa

SEQ ID NO: 51694 - DNA, 9 bp, Unknown
  misc_feature (1)..( 9): Matrix.002 file - promoters60/1482527
aatttttgg

SEQ ID NO: 51695 - DNA, 11 bp, Unknown
  misc_feature (1)..( 11): Matrix.002 file - promoters60/1482527
ctcttaaatat

SEQ ID NO: 51696 - DNA, 9 bp, Unknown
  misc_feature (1)..( 9): Matrix.002 file - promoters60/1482527
aattggtta

SEQ ID NO: 51697 - DNA, 8 bp, Unknown
  misc_feature (1)..( 8): Matrix.002 file - promoters60/1482527
cttcatct

SEQ ID NO: 51698 - DNA, 8 bp, Unknown
  misc_feature (1)..( 8): Matrix.002 file - promoters60/1482527
aaaaattc

SEQ ID NO: 51699 - DNA, 6 bp, Unknown
  misc_feature (1)..( 6): Matrix.002 file - promoters60/1482546
accgac

SEQ ID NO: 51700 - DNA, 7 bp, Unknown
  misc_feature (1)..( 7): Matrix.002 file - promoters60/1482546
acaaatt

SEQ ID NO: 51701 - DNA, 7 bp, Unknown
  misc_feature (1)..( 7): Matrix.002 file - promoters60/1482546
gtcggat

SEQ ID NO: 51702 - DNA, 12 bp, Unknown
  misc_feature (1)..( 12): Matrix.002 file - promoters60/1482546
ctgaagaagaaa

SEQ ID NO: 51703 - DNA, 9 bp, Unknown
  misc_feature (1)..( 9): Matrix.002 file - promoters60/1482546
caaaagctt

SEQ ID NO: 51704 - DNA, 7 bp, Unknown
  misc_feature (1)..( 7): Matrix.002 file - promoters60/1482546
tgataac

SEQ ID NO: 51705 - DNA, 10 bp, Unknown
  misc_feature (1)..( 10): Matrix.002 file - promoters60/1482546
gagagtgaaa

SEQ ID NO: 51706 - DNA, 7 bp, Unknown
  misc_feature (1)..( 7): Matrix.002 file - promoters60/1482546
gagaaag

SEQ ID NO: 51707 - DNA, 7 bp, Unknown
  misc_feature (1)..( 7): Matrix.002 file - promoters60/1482546
tcaaaga

SEQ ID NO: 51708 - DNA, 7 bp, Unknown
  misc_feature (1)..( 7): Matrix.002 file - promoters60/1482546
aaaagct

SEQ ID NO: 51709 - DNA, 11 bp, Unknown
  misc_feature (1)..( 11): Matrix.002 file - promoters60/1532660
ttaatcaaaaa

SEQ ID NO: 51710 - DNA, 12 bp, Unknown
  misc_feature (1)..( 12): Matrix.002 file - promoters60/1532821
tactaacatatg

SEQ ID NO: 51711 - DNA, 7 bp, Unknown
  misc_feature (1)..( 7): Matrix.002 file - promoters60/1532821
aaatatt

SEQ ID NO: 51712 - DNA, 12 bp, Unknown
  misc_feature (1)..( 12): Matrix.002 file - promoters60/1532821
ccaccacttttt

SEQ ID NO: 51713 - DNA, 7 bp, Unknown
  misc_feature (1)..( 7): Matrix.002 file - promoters60/1532925
aaagaag

SEQ ID NO: 51714 - DNA, 7 bp, Unknown
  misc_feature (1)..( 7): Matrix.002 file - promoters60/1532925
gatcaaa

SEQ ID NO: 51715 - DNA, 7 bp, Unknown
  misc_feature (1)..( 7): Matrix.002 file - promoters60/1532925
attgatc

SEQ ID NO: 51716 - DNA, 9 bp, Unknown
  misc_feature (1)..( 9): Matrix.002 file - promoters60/1532925
tttcttatt

SEQ ID NO: 51717 - DNA, 6 bp, Unknown
  misc_feature (1)..( 6): Matrix.002 file - promoters60/1532925
ttcgtg

SEQ ID NO: 51718 - DNA, 8 bp, Unknown
  misc_feature (1)..( 8): Matrix.002 file - promoters60/1532925
ttttttat

SEQ ID NO: 51719 - DNA, 7 bp, Unknown
  misc_feature (1)..( 7): Matrix.002 file - promoters60/1532925
ggaaaaa

SEQ ID NO: 51720 - DNA, 6 bp, Unknown
  misc_feature (1)..( 6): Matrix.002 file - promoters60/1532925
ttttag

SEQ ID NO: 51721 - DNA, 7 bp, Unknown
  misc_feature (1)..( 7): Matrix.002 file - promoters60/1532925
caaactt

SEQ ID NO: 51722 - DNA, 6 bp, Unknown
  misc_feature (1)..( 6): Matrix.002 file - promoters60/1532925
gtgaaa

SEQ ID NO: 51723 - DNA, 7 bp, Unknown
  misc_feature (1)..( 7): Matrix.002 file - promoters60/1532925
gaatgat

SEQ ID NO: 51724 - DNA, 7 bp, Unknown
  misc_feature (1)..( 7): Matrix.002 file - promoters60/1532925
tgatgtt

SEQ ID NO: 51725 - DNA, 6 bp, Unknown
  misc_feature (1)..( 6): Matrix.002 file - promoters60/1532925
aataaa

SEQ ID NO: 51726 - DNA, 8 bp, Unknown
  misc_feature (1)..( 8): Matrix.002 file - promoters60/1532925
tattttgt

SEQ ID NO: 51727 - DNA, 8 bp, Unknown
  misc_feature (1)..( 8): Matrix.002 file - promoters60/1532925
catgatgt

SEQ ID NO: 51728 - DNA, 11 bp, Unknown
  misc_feature (1)..( 11): Matrix.002 file - promoters60/1532925
ttagtatacaa

SEQ ID NO: 51729 - DNA, 6 bp, Unknown
  misc_feature (1)..( 6): Matrix.002 file - promoters60/1532925
attata

SEQ ID NO: 51730 - DNA, 6 bp, Unknown
  misc_feature (1)..( 6): Matrix.002 file - promoters60/1532925
attttt

SEQ ID NO: 51731 - DNA, 6 bp, Unknown
  misc_feature (1)..( 6): Matrix.002 file - promoters60/1532925
tcaact

SEQ ID NO: 51732 - DNA, 9 bp, Unknown
  misc_feature (1)..( 9): Matrix.002 file - promoters60/1532925
agaaaaaaa

SEQ ID NO: 51733 - DNA, 7 bp, Unknown
  misc_feature (1)..( 7): Matrix.002 file - promoters60/1532925
aaaacaa

SEQ ID NO: 51734 - DNA, 7 bp, Unknown
  misc_feature (1)..( 7): Matrix.002 file - promoters60/1532925
gagaaaa

SEQ ID NO: 51735 - DNA, 10 bp, Unknown
  misc_feature (1)..( 10): Matrix.002 file - promoters60/1532925
gtttaatata

SEQ ID NO: 51736 - DNA, 6 bp, Unknown
  misc_feature (1)..( 6): Matrix.002 file - promoters60/1532929
tatcct

SEQ ID NO: 51737 - DNA, 9 bp, Unknown
  misc_feature (1)..( 9): Matrix.002 file - promoters60/1532929
cctacattg

SEQ ID NO: 51738 - DNA, 9 bp, Unknown
  misc_feature (1)..( 9): Matrix.002 file - promoters60/1532929
ttagattat

SEQ ID NO: 51739 - DNA, 6 bp, Unknown
  misc_feature (1)..( 6): Matrix.002 file - promoters60/1532929
tgatct

SEQ ID NO: 51740 - DNA, 9 bp, Unknown
  misc_feature (1)..( 9): Matrix.002 file - promoters60/1532929
ttgtatcta

SEQ ID NO: 51741 - DNA, 7 bp, Unknown
  misc_feature (1)..( 7): Matrix.002 file - promoters60/1532929
tctattc

SEQ ID NO: 51742 - DNA, 7 bp, Unknown
  misc_feature (1)..( 7): Matrix.002 file - promoters60/1532929
tcaatat

SEQ ID NO: 51743 - DNA, 7 bp, Unknown
  misc_feature (1)..( 7): Matrix.002 file - promoters60/1532929
agctctc

SEQ ID NO: 51744 - DNA, 7 bp, Unknown
  misc_feature (1)..( 7): Matrix.002 file - promoters60/1532929
gctagtc

SEQ ID NO: 51745 - DNA, 6 bp, Unknown
  misc_feature (1)..( 6): Matrix.002 file - promoters60/1532929
ggaatc

SEQ ID NO: 51746 - DNA, 6 bp, Unknown
  misc_feature (1)..( 6): Matrix.002 file - promoters60/1532929
tgtttt

SEQ ID NO: 51747 - DNA, 6 bp, Unknown
  misc_feature (1)..( 6): Matrix.002 file - promoters60/1532929
tggtaa

SEQ ID NO: 51748 - DNA, 13 bp, Unknown
  misc_feature (1)..( 13): Matrix.002 file - promoters60/1532929
tctgggaaatcgg

SEQ ID NO: 51749 - DNA, 7 bp, Unknown
  misc_feature (1)..( 7): Matrix.002 file - promoters60/1532929
atgttat

SEQ ID NO: 51750 - DNA, 6 bp, Unknown
  misc_feature (1)..( 6): Matrix.002 file - promoters60/1532929
ttctct

SEQ ID NO: 51751 - DNA, 11 bp, Unknown
  misc_feature (1)..( 11): Matrix.002 file - promoters60/1532937
aaagaaaaaat

SEQ ID NO: 51752 - DNA, 8 bp, Unknown
  misc_feature (1)..( 8): Matrix.002 file - promoters60/1532948
attccatt

SEQ ID NO: 51753 - DNA, 8 bp, Unknown
  misc_feature (1)..( 8): Matrix.002 file - promoters60/1532948
tttgtaat

SEQ ID NO: 51754 - DNA, 12 bp, Unknown
  misc_feature (1)..( 12): Matrix.002 file - promoters60/1532948
aaaagaaattaa

SEQ ID NO: 51755 - DNA, 12 bp, Unknown
  misc_feature (1)..( 12): Matrix.002 file - promoters60/1532948
ttgagacaaaaa

SEQ ID NO: 51756 - DNA, 7 bp, Unknown
  misc_feature (1)..( 7): Matrix.002 file - promoters60/1532948
ggagaaa

SEQ ID NO: 51757 - DNA, 8 bp, Unknown
  misc_feature (1)..( 8): Matrix.002 file - promoters60/1532948
cccactaa

SEQ ID NO: 51758 - DNA, 9 bp, Unknown
  misc_feature (1)..( 9): Matrix.002 file - promoters60/1532948
taacaagta

SEQ ID NO: 51759 - DNA, 7 bp, Unknown
  misc_feature (1)..( 7): Matrix.002 file - promoters60/1532975
ttcatct

SEQ ID NO: 51760 - DNA, 6 bp, Unknown
  misc_feature (1)..( 6): Matrix.002 file - promoters60/1532975
ataaat

SEQ ID NO: 51761 - DNA, 7 bp, Unknown
  misc_feature (1)..( 7): Matrix.002 file - promoters60/1532975
aaaacaa

SEQ ID NO: 51762 - DNA, 10 bp, Unknown
  misc_feature (1)..( 10): Matrix.002 file - promoters60/1532975
aaaaagaaag

SEQ ID NO: 51763 - DNA, 6 bp, Unknown
  misc_feature (1)..( 6): Matrix.002 file - promoters60/1532975
taactt

SEQ ID NO: 51764 - DNA, 6 bp, Unknown
  misc_feature (1)..( 6): Matrix.002 file - promoters60/1532975
ttgcaa

SEQ ID NO: 51765 - DNA, 7 bp, Unknown
  misc_feature (1)..( 7): Matrix.002 file - promoters60/1532975
taaataa

SEQ ID NO: 51766 - DNA, 6 bp, Unknown
  misc_feature (1)..( 6): Matrix.002 file - promoters60/1532975
tctaaa

SEQ ID NO: 51767 - DNA, 6 bp, Unknown
  misc_feature (1)..( 6): Matrix.002 file - promoters60/1532975
agtaaa

SEQ ID NO: 51768 - DNA, 7 bp, Unknown
  misc_feature (1)..( 7): Matrix.002 file - promoters60/1532975
aatcggg

SEQ ID NO: 51769 - DNA, 8 bp, Unknown
  misc_feature (1)..( 8): Matrix.002 file - promoters60/1532975
gaaacaaa

SEQ ID NO: 51770 - DNA, 10 bp, Unknown
  misc_feature (1)..( 10): Matrix.002 file - promoters60/1532975
ggaaaagaaa

SEQ ID NO: 51771 - DNA, 7 bp, Unknown
  misc_feature (1)..( 7): Matrix.002 file - promoters60/1532975
cccacta

SEQ ID NO: 51772 - DNA, 9 bp, Unknown
  misc_feature (1)..( 9): Matrix.002 file - promoters60/1532975
aaagaaaag

SEQ ID NO: 51773 - DNA, 7 bp, Unknown
  misc_feature (1)..( 7): Matrix.002 file - promoters60/1532975
gtatata

SEQ ID NO: 51774 - DNA, 7 bp, Unknown
  misc_feature (1)..( 7): Matrix.002 file - promoters60/1533121
tttattt

SEQ ID NO: 51775 - DNA, 8 bp, Unknown
  misc_feature (1)..( 8): Matrix.002 file - promoters60/1533121
tttctaac

SEQ ID NO: 51776 - DNA, 6 bp, Unknown
  misc_feature (1)..( 6): Matrix.002 file - promoters60/1533121
agttaa

SEQ ID NO: 51777 - DNA, 6 bp, Unknown
  misc_feature (1)..( 6): Matrix.002 file - promoters60/1533121
ttttgg

SEQ ID NO: 51778 - DNA, 6 bp, Unknown
  misc_feature (1)..( 6): Matrix.002 file - promoters60/1533121
aataat

SEQ ID NO: 51779 - DNA, 7 bp, Unknown
  misc_feature (1)..( 7): Matrix.002 file - promoters60/1533121
taaatta

SEQ ID NO: 51780 - DNA, 11 bp, Unknown
  misc_feature (1)..( 11): Matrix.002 file - promoters60/1533121
caaaaacatat

SEQ ID NO: 51781 - DNA, 6 bp, Unknown
  misc_feature (1)..( 6): Matrix.002 file - promoters60/1533121
acagtt

SEQ ID NO: 51782 - DNA, 7 bp, Unknown
  misc_feature (1)..( 7): Matrix.002 file - promoters60/1533121
acaatta

SEQ ID NO: 51783 - DNA, 6 bp, Unknown
  misc_feature (1)..( 6): Matrix.002 file - promoters60/1533121
tatgca

SEQ ID NO: 51784 - DNA, 8 bp, Unknown
  misc_feature (1)..( 8): Matrix.002 file - promoters60/1533121
cttaataa

SEQ ID NO: 51785 - DNA, 6 bp, Unknown
  misc_feature (1)..( 6): Matrix.002 file - promoters60/1533121
aaaggg

SEQ ID NO: 51786 - DNA, 8 bp, Unknown
  misc_feature (1)..( 8): Matrix.002 file - promoters60/1533121
tggaagaa

SEQ ID NO: 51787 - DNA, 7 bp, Unknown
  misc_feature (1)..( 7): Matrix.002 file - promoters60/1533159
tcataaa

SEQ ID NO: 51788 - DNA, 15 bp, Unknown
  misc_feature (1)..( 15): Matrix.002 file - promoters60/1533159
aaattattttaaaaa

SEQ ID NO: 51789 - DNA, 13 bp, Unknown
  misc_feature (1)..( 13): Matrix.002 file - promoters60/1533159
aaatatttttaaa

SEQ ID NO: 51790 - DNA, 3 bp, Unknown
  misc_feature (1)..( 3): Matrix.002 file - promoters60/1533159
gaa

SEQ ID NO: 51791 - DNA, 11 bp, Unknown
  misc_feature (1)..( 11): Matrix.002 file - promoters60/1533159
cttctatttag

SEQ ID NO: 51792 - DNA, 9 bp, Unknown
  misc_feature (1)..( 9): Matrix.002 file - promoters60/1533420
taaagattg

SEQ ID NO: 51793 - DNA, 8 bp, Unknown
  misc_feature (1)..( 8): Matrix.002 file - promoters60/1533420
acattagg

SEQ ID NO: 51794 - DNA, 8 bp, Unknown
  misc_feature (1)..( 8): Matrix.002 file - promoters60/1533420
ttaaattt

SEQ ID NO: 51795 - DNA, 9 bp, Unknown
  misc_feature (1)..( 9): Matrix.002 file - promoters60/1533420
ttgttgtat

SEQ ID NO: 51796 - DNA, 9 bp, Unknown
  misc_feature (1)..( 9): Matrix.002 file - promoters60/1533533
aaaaacaaa

SEQ ID NO: 51797 - DNA, 14 bp, Unknown
  misc_feature (1)..( 14): Matrix.002 file - promoters60/1533533
atattaaaatttat

SEQ ID NO: 51798 - DNA, 10 bp, Unknown
  misc_feature (1)..( 10): Matrix.002 file - promoters60/1533533
aaataatcaa

SEQ ID NO: 51799 - DNA, 7 bp, Unknown
  misc_feature (1)..( 7): Matrix.002 file - promoters60/1533750
tttaagg

SEQ ID NO: 51800 - DNA, 8 bp, Unknown
  misc_feature (1)..( 8): Matrix.002 file - promoters60/1533750
taaatagt

SEQ ID NO: 51801 - DNA, 7 bp, Unknown
  misc_feature (1)..( 7): Matrix.002 file - promoters60/1533750
aatgcag

SEQ ID NO: 51802 - DNA, 8 bp, Unknown
  misc_feature (1)..( 8): Matrix.002 file - promoters60/1533750
gagacaag

SEQ ID NO: 51803 - DNA, 6 bp, Unknown
  misc_feature (1)..( 6): Matrix.002 file - promoters60/1533750
gagtaa

SEQ ID NO: 51804 - DNA, 9 bp, Unknown
  misc_feature (1)..( 9): Matrix.002 file - promoters60/1533750
ttagctata

SEQ ID NO: 51805 - DNA, 6 bp, Unknown
  misc_feature (1)..( 6): Matrix.002 file - promoters60/1533750
ttctct

SEQ ID NO: 51806 - DNA, 6 bp, Unknown
  misc_feature (1)..( 6): Matrix.002 file - promoters60/1533750
acattc

SEQ ID NO: 51807 - DNA, 7 bp, Unknown
  misc_feature (1)..( 7): Matrix.002 file - promoters60/1533750
cagaaga

SEQ ID NO: 51808 - DNA, 7 bp, Unknown
  misc_feature (1)..( 7): Matrix.002 file - promoters60/1533750
tataatc

SEQ ID NO: 51809 - DNA, 7 bp, Unknown
  misc_feature (1)..( 7): Matrix.002 file - promoters60/1533750
tttcaaa

SEQ ID NO: 51810 - DNA, 7 bp, Unknown
  misc_feature (1)..( 7): Matrix.002 file - promoters60/1533750
aagaaat

SEQ ID NO: 51811 - DNA, 7 bp, Unknown
  misc_feature (1)..( 7): Matrix.002 file - promoters60/1533750
ccaaaaa

SEQ ID NO: 51812 - DNA, 7 bp, Unknown
  misc_feature (1)..( 7): Matrix.002 file - promoters60/1533871
ccaactg

SEQ ID NO: 51813 - DNA, 8 bp, Unknown
  misc_feature (1)..( 8): Matrix.002 file - promoters60/1533871
aaaattta

SEQ ID NO: 51814 - DNA, 8 bp, Unknown
  misc_feature (1)..( 8): Matrix.002 file - promoters60/1533871
ctcagctg

SEQ ID NO: 51815 - DNA, 6 bp, Unknown
  misc_feature (1)..( 6): Matrix.002 file - promoters60/1533871
catttc

SEQ ID NO: 51816 - DNA, 7 bp, Unknown
  misc_feature (1)..( 7): Matrix.002 file - promoters60/1533871
ttggctt

SEQ ID NO: 51817 - DNA, 6 bp, Unknown
  misc_feature (1)..( 6): Matrix.002 file - promoters60/1533871
tctttt

SEQ ID NO: 51818 - DNA, 8 bp, Unknown
  misc_feature (1)..( 8): Matrix.002 file - promoters60/1533871
aagtgtga

SEQ ID NO: 51819 - DNA, 6 bp, Unknown
  misc_feature (1)..( 6): Matrix.002 file - promoters60/1533871
attatt

SEQ ID NO: 51820 - DNA, 7 bp, Unknown
  misc_feature (1)..( 7): Matrix.002 file - promoters60/1533871
tgaccaa

SEQ ID NO: 51821 - DNA, 7 bp, Unknown
  misc_feature (1)..( 7): Matrix.002 file - promoters60/1533871
ttaagga

SEQ ID NO: 51822 - DNA, 6 bp, Unknown
  misc_feature (1)..( 6): Matrix.002 file - promoters60/1533871
tgattt

SEQ ID NO: 51823 - DNA, 6 bp, Unknown
  misc_feature (1)..( 6): Matrix.002 file - promoters60/1533871
ttctgt

SEQ ID NO: 51824 - DNA, 6 bp, Unknown
  misc_feature (1)..( 6): Matrix.002 file - promoters60/1533871
tttcta

SEQ ID NO: 51825 - DNA, 6 bp, Unknown
  misc_feature (1)..( 6): Matrix.002 file - promoters60/1533871
agttga

SEQ ID NO: 51826 - DNA, 6 bp, Unknown
  misc_feature (1)..( 6): Matrix.002 file - promoters60/1533871
tggttt

SEQ ID NO: 51827 - DNA, 8 bp, Unknown
  misc_feature (1)..( 8): Matrix.002 file - promoters60/1533912
aaaataga

SEQ ID NO: 51828 - DNA, 11 bp, Unknown
  misc_feature (1)..( 11): Matrix.002 file - promoters60/1533912
ctatataaaca

SEQ ID NO: 51829 - DNA, 7 bp, Unknown
  misc_feature (1)..( 7): Matrix.002 file - promoters60/1534151
aaacgag

SEQ ID NO: 51830 - DNA, 7 bp, Unknown
  misc_feature (1)..( 7): Matrix.002 file - promoters60/1534151
tgattaa

SEQ ID NO: 51831 - DNA, 8 bp, Unknown
  misc_feature (1)..( 8): Matrix.002 file - promoters60/1534151
tttattta

SEQ ID NO: 51832 - DNA, 8 bp, Unknown
  misc_feature (1)..( 8): Matrix.002 file - promoters60/1534151
gaaacaaa

SEQ ID NO: 51833 - DNA, 6 bp, Unknown
  misc_feature (1)..( 6): Matrix.002 file - promoters60/1534228
attata

SEQ ID NO: 51834 - DNA, 9 bp, Unknown
  misc_feature (1)..( 9): Matrix.002 file - promoters60/1534228
aaaactatt

SEQ ID NO: 51835 - DNA, 11 bp, Unknown
  misc_feature (1)..( 11): Matrix.002 file - promoters60/1534228
aattaacattt

SEQ ID NO: 51836 - DNA, 7 bp, Unknown
  misc_feature (1)..( 7): Matrix.002 file - promoters60/1534228
aacaagg

SEQ ID NO: 51837 - DNA, 7 bp, Unknown
  misc_feature (1)..( 7): Matrix.002 file - promoters60/1534228
tacaaaa

SEQ ID NO: 51838 - DNA, 7 bp, Unknown
  misc_feature (1)..( 7): Matrix.002 file - promoters60/1534228
taattta

SEQ ID NO: 51839 - DNA, 7 bp, Unknown
  misc_feature (1)..( 7): Matrix.002 file - promoters60/1534228
ataaatt

SEQ ID NO: 51840 - DNA, 7 bp, Unknown
  misc_feature (1)..( 7): Matrix.002 file - promoters60/1534228
aaaccaa

SEQ ID NO: 51841 - DNA, 6 bp, Unknown
  misc_feature (1)..( 6): Matrix.002 file - promoters60/1534228
taattt

SEQ ID NO: 51842 - DNA, 7 bp, Unknown
  misc_feature (1)..( 7): Matrix.002 file - promoters60/1534228
tatcatt

SEQ ID NO: 51843 - DNA, 7 bp, Unknown
  misc_feature (1)..( 7): Matrix.002 file - promoters60/1534228
aaaatgt

SEQ ID NO: 51844 - DNA, 8 bp, Unknown
  misc_feature (1)..( 8): Matrix.002 file - promoters60/1534228
ttctgatt

SEQ ID NO: 51845 - DNA, 8 bp, Unknown
  misc_feature (1)..( 8): Matrix.002 file - promoters60/1534228
atagattc

SEQ ID NO: 51846 - DNA, 6 bp, Unknown
  misc_feature (1)..( 6): Matrix.002 file - promoters60/1534228
tttgta

SEQ ID NO: 51847 - DNA, 6 bp, Unknown
  misc_feature (1)..( 6): Matrix.002 file - promoters60/1534228
attatt

SEQ ID NO: 51848 - DNA, 6 bp, Unknown
  misc_feature (1)..( 6): Matrix.002 file - promoters60/1534228
gtcaaa

SEQ ID NO: 51849 - DNA, 8 bp, Unknown
  misc_feature (1)..( 8): Matrix.002 file - promoters60/1534228
ttgaactt

SEQ ID NO: 51850 - DNA, 8 bp, Unknown
  misc_feature (1)..( 8): Matrix.002 file - promoters60/1534228
ttagtaat

SEQ ID NO: 51851 - DNA, 7 bp, Unknown
  misc_feature (1)..( 7): Matrix.002 file - promoters60/1534228
tatataa

SEQ ID NO: 51852 - DNA, 6 bp, Unknown
  misc_feature (1)..( 6): Matrix.002 file - promoters60/1534269
tcaaat

SEQ ID NO: 51853 - DNA, 8 bp, Unknown
  misc_feature (1)..( 8): Matrix.002 file - promoters60/1534269
actaatta

SEQ ID NO: 51854 - DNA, 6 bp, Unknown
  misc_feature (1)..( 6): Matrix.002 file - promoters60/1534269
ttctct

SEQ ID NO: 51855 - DNA, 6 bp, Unknown
  misc_feature (1)..( 6): Matrix.002 file - promoters60/1534269
tttgtt

SEQ ID NO: 51856 - DNA, 6 bp, Unknown
  misc_feature (1)..( 6): Matrix.002 file - promoters60/1534269
gttgat

SEQ ID NO: 51857 - DNA, 6 bp, Unknown
  misc_feature (1)..( 6): Matrix.002 file - promoters60/1534269
ggttgt

SEQ ID NO: 51858 - DNA, 8 bp, Unknown
  misc_feature (1)..( 8): Matrix.002 file - promoters60/1534269
tatcttct

SEQ ID NO: 51859 - DNA, 6 bp, Unknown
  misc_feature (1)..( 6): Matrix.002 file - promoters60/1534269
atcttt

SEQ ID NO: 51860 - DNA, 6 bp, Unknown
  misc_feature (1)..( 6): Matrix.002 file - promoters60/1534269
aaagtt

SEQ ID NO: 51861 - DNA, 7 bp, Unknown
  misc_feature (1)..( 7): Matrix.002 file - promoters60/1534269
ttagtaa

SEQ ID NO: 51862 - DNA, 7 bp, Unknown
  misc_feature (1)..( 7): Matrix.002 file - promoters60/1534269
tttatcc

SEQ ID NO: 51863 - DNA, 6 bp, Unknown
  misc_feature (1)..( 6): Matrix.002 file - promoters60/1534269
ctcatt

SEQ ID NO: 51864 - DNA, 8 bp, Unknown
  misc_feature (1)..( 8): Matrix.002 file - promoters60/1534269
gattcttg

SEQ ID NO: 51865 - DNA, 6 bp, Unknown
  misc_feature (1)..( 6): Matrix.002 file - promoters60/1534269
gtttac

SEQ ID NO: 51866 - DNA, 7 bp, Unknown
  misc_feature (1)..( 7): Matrix.002 file - promoters60/1534269
agacatt

SEQ ID NO: 51867 - DNA, 8 bp, Unknown
  misc_feature (1)..( 8): Matrix.002 file - promoters60/1534269
tttagctt

SEQ ID NO: 51868 - DNA, 6 bp, Unknown
  misc_feature (1)..( 6): Matrix.002 file - promoters60/1534269
gaatta

SEQ ID NO: 51869 - DNA, 6 bp, Unknown
  misc_feature (1)..( 6): Matrix.002 file - promoters60/1534269
gcggaa

SEQ ID NO: 51870 - DNA, 6 bp, Unknown
  misc_feature (1)..( 6): Matrix.002 file - promoters60/1534269
aaagaa

SEQ ID NO: 51871 - DNA, 6 bp, Unknown
  misc_feature (1)..( 6): Matrix.002 file - promoters60/1534269
tccttg

SEQ ID NO: 51872 - DNA, 7 bp, Unknown
  misc_feature (1)..( 7): Matrix.002 file - promoters60/1534269
gatatat

SEQ ID NO: 51873 - DNA, 8 bp, Unknown
  misc_feature (1)..( 8): Matrix.002 file - promoters60/1534338
catcatat

SEQ ID NO: 51874 - DNA, 10 bp, Unknown
  misc_feature (1)..( 10): Matrix.002 file - promoters60/1534338
agttttctcc

SEQ ID NO: 51875 - DNA, 8 bp, Unknown
  misc_feature (1)..( 8): Matrix.002 file - promoters60/1534338
taacaaca

SEQ ID NO: 51876 - DNA, 9 bp, Unknown
  misc_feature (1)..( 9): Matrix.002 file - promoters60/1534378
aatggattt

SEQ ID NO: 51877 - DNA, 8 bp, Unknown
  misc_feature (1)..( 8): Matrix.002 file - promoters60/1534435
ttttttaa

SEQ ID NO: 51878 - DNA, 14 bp, Unknown
  misc_feature (1)..( 14): Matrix.002 file - promoters60/1534435
ttgtttaatgtttt

SEQ ID NO: 51879 - DNA, 9 bp, Unknown
  misc_feature (1)..( 9): Matrix.002 file - promoters60/1534435
atagagttt

SEQ ID NO: 51880 - DNA, 8 bp, Unknown
  misc_feature (1)..( 8): Matrix.002 file - promoters60/1534435
tttggtct

SEQ ID NO: 51881 - DNA, 6 bp, Unknown
  misc_feature (1)..( 6): Matrix.002 file - promoters60/1534435
agaaaa

SEQ ID NO: 51882 - DNA, 10 bp, Unknown
  misc_feature (1)..( 10): Matrix.002 file - promoters60/1534435
tattaaaata

SEQ ID NO: 51883 - DNA, 7 bp, Unknown
  misc_feature (1)..( 7): Matrix.002 file - promoters60/1534435
gttcaat

SEQ ID NO: 51884 - DNA, 9 bp, Unknown
  misc_feature (1)..( 9): Matrix.002 file - promoters60/1534435
cttaattac

SEQ ID NO: 51885 - DNA, 17 bp, Unknown
  misc_feature (1)..( 17): Matrix.002 file - promoters60/1534435
tagttgttcaatatttt

SEQ ID NO: 51886 - DNA, 7 bp, Unknown
  misc_feature (1)..( 7): Matrix.002 file - promoters60/1534435
tttggtg

SEQ ID NO: 51887 - DNA, 6 bp, Unknown
  misc_feature (1)..( 6): Matrix.002 file - promoters60/1534435
tcttta

SEQ ID NO: 51888 - DNA, 6 bp, Unknown
  misc_feature (1)..( 6): Matrix.002 file - promoters60/1534435
atcaag

SEQ ID NO: 51889 - DNA, 6 bp, Unknown
  misc_feature (1)..( 6): Matrix.002 file - promoters60/1534435
atattt

SEQ ID NO: 51890 - DNA, 6 bp, Unknown
  misc_feature (1)..( 6): Matrix.002 file - promoters60/1534435
ttctaa

SEQ ID NO: 51891 - DNA, 7 bp, Unknown
  misc_feature (1)..( 7): Matrix.002 file - promoters60/1534435
cagcaag

SEQ ID NO: 51892 - DNA, 12 bp, Unknown
  misc_feature (1)..( 12): Matrix.002 file - promoters60/1534455
tcttattaggat

SEQ ID NO: 51893 - DNA, 6 bp, Unknown
  misc_feature (1)..( 6): Matrix.002 file - promoters60/1534455
atttgt

SEQ ID NO: 51894 - DNA, 8 bp, Unknown
  misc_feature (1)..( 8): Matrix.002 file - promoters60/1534455
ttagccat

SEQ ID NO: 51895 - DNA, 8 bp, Unknown
  misc_feature (1)..( 8): Matrix.002 file - promoters60/1534455
aacattag

SEQ ID NO: 51896 - DNA, 6 bp, Unknown
  misc_feature (1)..( 6): Matrix.002 file - promoters60/1534455
catata

SEQ ID NO: 51897 - DNA, 7 bp, Unknown
  misc_feature (1)..( 7): Matrix.002 file - promoters60/1534455
acgattt

SEQ ID NO: 51898 - DNA, 9 bp, Unknown
  misc_feature (1)..( 9): Matrix.002 file - promoters60/1534455
gattttgag

SEQ ID NO: 51899 - DNA, 7 bp, Unknown
  misc_feature (1)..( 7): Matrix.002 file - promoters60/1534455
ttagttt

SEQ ID NO: 51900 - DNA, 9 bp, Unknown
  misc_feature (1)..( 9): Matrix.002 file - promoters60/1534455
aatatcaaa

SEQ ID NO: 51901 - DNA, 6 bp, Unknown
  misc_feature (1)..( 6): Matrix.002 file - promoters60/1534455
atcaaa

SEQ ID NO: 51902 - DNA, 8 bp, Unknown
  misc_feature (1)..( 8): Matrix.002 file - promoters60/1534455
ttttttat

SEQ ID NO: 51903 - DNA, 8 bp, Unknown
  misc_feature (1)..( 8): Matrix.002 file - promoters60/1534455
aaataata

SEQ ID NO: 51904 - DNA, 7 bp, Unknown
  misc_feature (1)..( 7): Matrix.002 file - promoters60/1534455
taacaaa

SEQ ID NO: 51905 - DNA, 7 bp, Unknown
  misc_feature (1)..( 7): Matrix.002 file - promoters60/1534455
agaatct

SEQ ID NO: 51906 - DNA, 6 bp, Unknown
  misc_feature (1)..( 6): Matrix.002 file - promoters60/1534455
aaacga

SEQ ID NO: 51907 - DNA, 8 bp, Unknown
  misc_feature (1)..( 8): Matrix.002 file - promoters60/1534455
ttaaaaat

SEQ ID NO: 51908 - DNA, 7 bp, Unknown
  misc_feature (1)..( 7): Matrix.002 file - promoters60/1534455
atgatga

SEQ ID NO: 51909 - DNA, 8 bp, Unknown
  misc_feature (1)..( 8): Matrix.002 file - promoters60/1534455
attgtttt

SEQ ID NO: 51910 - DNA, 8 bp, Unknown
  misc_feature (1)..( 8): Matrix.002 file - promoters60/1534455
tgagtatt

SEQ ID NO: 51911 - DNA, 8 bp, Unknown
  misc_feature (1)..( 8): Matrix.002 file - promoters60/1534455
aagaggat

SEQ ID NO: 51912 - DNA, 7 bp, Unknown
  misc_feature (1)..( 7): Matrix.002 file - promoters60/1534455
tctaaaa

SEQ ID NO: 51913 - DNA, 7 bp, Unknown
  misc_feature (1)..( 7): Matrix.002 file - promoters60/1534501
aaaaaaa

SEQ ID NO: 51914 - DNA, 11 bp, Unknown
  misc_feature (1)..( 11): Matrix.002 file - promoters60/1534501
aaaattaattg

SEQ ID NO: 51915 - DNA, 9 bp, Unknown
  misc_feature (1)..( 9): Matrix.002 file - promoters60/1534501
aatttattt

SEQ ID NO: 51916 - DNA, 7 bp, Unknown
  misc_feature (1)..( 7): Matrix.002 file - promoters60/1534501
agatcaa

SEQ ID NO: 51917 - DNA, 7 bp, Unknown
  misc_feature (1)..( 7): Matrix.002 file - promoters60/1534524
tttacta

SEQ ID NO: 51918 - DNA, 8 bp, Unknown
  misc_feature (1)..( 8): Matrix.002 file - promoters60/1534524
taaactct

SEQ ID NO: 51919 - DNA, 9 bp, Unknown
  misc_feature (1)..( 9): Matrix.002 file - promoters60/1534524
attgaacaa

SEQ ID NO: 51920 - DNA, 6 bp, Unknown
  misc_feature (1)..( 6): Matrix.002 file - promoters60/1534524
ataaga

SEQ ID NO: 51921 - DNA, 8 bp, Unknown
  misc_feature (1)..( 8): Matrix.002 file - promoters60/1534524
aaataatt

SEQ ID NO: 51922 - DNA, 7 bp, Unknown
  misc_feature (1)..( 7): Matrix.002 file - promoters60/1534524
tttactt

SEQ ID NO: 51923 - DNA, 8 bp, Unknown
  misc_feature (1)..( 8): Matrix.002 file - promoters60/1534524
gaaaattt

SEQ ID NO: 51924 - DNA, 7 bp, Unknown
  misc_feature (1)..( 7): Matrix.002 file - promoters60/1534524
accgaga

SEQ ID NO: 51925 - DNA, 13 bp, Unknown
  misc_feature (1)..( 13): Matrix.002 file - promoters60/1534524
ctcgtgtatatat

SEQ ID NO: 51926 - DNA, 6 bp, Unknown
  misc_feature (1)..( 6): Matrix.002 file - promoters60/1534524
taaatt

SEQ ID NO: 51927 - DNA, 6 bp, Unknown
  misc_feature (1)..( 6): Matrix.002 file - promoters60/1534524
aaatat

SEQ ID NO: 51928 - DNA, 8 bp, Unknown
  misc_feature (1)..( 8): Matrix.002 file - promoters60/1534524
tataacaa

SEQ ID NO: 51929 - DNA, 7 bp, Unknown
  misc_feature (1)..( 7): Matrix.002 file - promoters60/1534524
aagaaat

SEQ ID NO: 51930 - DNA, 9 bp, Unknown
  misc_feature (1)..( 9): Matrix.002 file - promoters60/1534524
ttgtagaaa

SEQ ID NO: 51931 - DNA, 7 bp, Unknown
  misc_feature (1)..( 7): Matrix.002 file - promoters60/1534524
gtcaatt

SEQ ID NO: 51932 - DNA, 6 bp, Unknown
  misc_feature (1)..( 6): Matrix.002 file - promoters60/1534524
aaccaa

SEQ ID NO: 51933 - DNA, 8 bp, Unknown
  misc_feature (1)..( 8): Matrix.002 file - promoters60/1534524
aaaatcat

SEQ ID NO: 51934 - DNA, 7 bp, Unknown
  misc_feature (1)..( 7): Matrix.002 file - promoters60/1534524
ggttatt

SEQ ID NO: 51935 - DNA, 9 bp, Unknown
  misc_feature (1)..( 9): Matrix.002 file - promoters60/1534528
aatgacaac

SEQ ID NO: 51936 - DNA, 9 bp, Unknown
  misc_feature (1)..( 9): Matrix.002 file - promoters60/1534528
tatttgtaa

SEQ ID NO: 51937 - DNA, 8 bp, Unknown
  misc_feature (1)..( 8): Matrix.002 file - promoters60/1534528
taataagc

SEQ ID NO: 51938 - DNA, 10 bp, Unknown
  misc_feature (1)..( 10): Matrix.002 file - promoters60/1534528
gtatatatac

SEQ ID NO: 51939 - DNA, 10 bp, Unknown
  misc_feature (1)..( 10): Matrix.002 file - promoters60/1534528
ggaaaagaaa

SEQ ID NO: 51940 - DNA, 11 bp, Unknown
  misc_feature (1)..( 11): Matrix.002 file - promoters60/1534528
aattgggtttt

SEQ ID NO: 51941 - DNA, 8 bp, Unknown
  misc_feature (1)..( 8): Matrix.002 file - promoters60/1534528
gtatataa

SEQ ID NO: 51942 - DNA, 7 bp, Unknown
  misc_feature (1)..( 7): Matrix.002 file - promoters60/1534591
ttcttat

SEQ ID NO: 51943 - DNA, 8 bp, Unknown
  misc_feature (1)..( 8): Matrix.002 file - promoters60/1534591
tatataat

SEQ ID NO: 51944 - DNA, 11 bp, Unknown
  misc_feature (1)..( 11): Matrix.002 file - promoters60/1534591
attattaaaca

SEQ ID NO: 51945 - DNA, 6 bp, Unknown
  misc_feature (1)..( 6): Matrix.002 file - promoters60/1534591
tatagt

SEQ ID NO: 51946 - DNA, 7 bp, Unknown
  misc_feature (1)..( 7): Matrix.002 file - promoters60/1534591
ttaaata

SEQ ID NO: 51947 - DNA, 6 bp, Unknown
  misc_feature (1)..( 6): Matrix.002 file - promoters60/1534591
atgaaa

SEQ ID NO: 51948 - DNA, 6 bp, Unknown
  misc_feature (1)..( 6): Matrix.002 file - promoters60/1534591
ttaata

SEQ ID NO: 51949 - DNA, 7 bp, Unknown
  misc_feature (1)..( 7): Matrix.002 file - promoters60/1534591
ttaatta

SEQ ID NO: 51950 - DNA, 8 bp, Unknown
  misc_feature (1)..( 8): Matrix.002 file - promoters60/1534591
ctctagta

SEQ ID NO: 51951 - DNA, 9 bp, Unknown
  misc_feature (1)..( 9): Matrix.002 file - promoters60/1534591
aagaaataa

SEQ ID NO: 51952 - DNA, 8 bp, Unknown
  misc_feature (1)..( 8): Matrix.002 file - promoters60/1534591
ataaatta

SEQ ID NO: 51953 - DNA, 8 bp, Unknown
  misc_feature (1)..( 8): Matrix.002 file - promoters60/1534591
aatagaaa

SEQ ID NO: 51954 - DNA, 6 bp, Unknown
  misc_feature (1)..( 6): Matrix.002 file - promoters60/1534591
agtttt

SEQ ID NO: 51955 - DNA, 6 bp, Unknown
  misc_feature (1)..( 6): Matrix.002 file - promoters60/1534591
tttctt

SEQ ID NO: 51956 - DNA, 6 bp, Unknown
  misc_feature (1)..( 6): Matrix.002 file - promoters60/1534591
aataaa

SEQ ID NO: 51957 - DNA, 6 bp, Unknown
  misc_feature (1)..( 6): Matrix.002 file - promoters60/1534591
attcga

SEQ ID NO: 51958 - DNA, 6 bp, Unknown
  misc_feature (1)..( 6): Matrix.002 file - promoters60/1534591
cacaaa

SEQ ID NO: 51959 - DNA, 7 bp, Unknown
  misc_feature (1)..( 7): Matrix.002 file - promoters60/1534591
acaattt

SEQ ID NO: 51960 - DNA, 11 bp, Unknown
  misc_feature (1)..( 11): Matrix.002 file - promoters60/1534615
aagttataaat

SEQ ID NO: 51961 - DNA, 10 bp, Unknown
  misc_feature (1)..( 10): Matrix.002 file - promoters60/1534615
tttagtttat

SEQ ID NO: 51962 - DNA, 12 bp, Unknown
  misc_feature (1)..( 12): Matrix.002 file - promoters60/1534615
aaaattcaatat

SEQ ID NO: 51963 - DNA, 6 bp, Unknown
  misc_feature (1)..( 6): Matrix.002 file - promoters60/1534615
caaatt

SEQ ID NO: 51964 - DNA, 8 bp, Unknown
  misc_feature (1)..( 8): Matrix.002 file - promoters60/1534615
tcaaagaa

SEQ ID NO: 51965 - DNA, 6 bp, Unknown
  misc_feature (1)..( 6): Matrix.002 file - promoters60/1534629
ttcgtt

SEQ ID NO: 51966 - DNA, 7 bp, Unknown
  misc_feature (1)..( 7): Matrix.002 file - promoters60/1534629
gatgctc

SEQ ID NO: 51967 - DNA, 10 bp, Unknown
  misc_feature (1)..( 10): Matrix.002 file - promoters60/1534629
ttttatcaac

SEQ ID NO: 51968 - DNA, 8 bp, Unknown
  misc_feature (1)..( 8): Matrix.002 file - promoters60/1534629
taaaaaaa

SEQ ID NO: 51969 - DNA, 6 bp, Unknown
  misc_feature (1)..( 6): Matrix.002 file - promoters60/1534629
aaacaa

SEQ ID NO: 51970 - DNA, 6 bp, Unknown
  misc_feature (1)..( 6): Matrix.002 file - promoters60/1534629
agtagt

SEQ ID NO: 51971 - DNA, 8 bp, Unknown
  misc_feature (1)..( 8): Matrix.002 file - promoters60/1534629
acaacatt

SEQ ID NO: 51972 - DNA, 7 bp, Unknown
  misc_feature (1)..( 7): Matrix.002 file - promoters60/1534629
tacgtga

SEQ ID NO: 51973 - DNA, 7 bp, Unknown
  misc_feature (1)..( 7): Matrix.002 file - promoters60/1534629
aacatgt

SEQ ID NO: 51974 - DNA, 7 bp, Unknown
  misc_feature (1)..( 7): Matrix.002 file - promoters60/1534629
tttcggt

SEQ ID NO: 51975 - DNA, 11 bp, Unknown
  misc_feature (1)..( 11): Matrix.002 file - promoters60/1534629
gtttaactacg

SEQ ID NO: 51976 - DNA, 6 bp, Unknown
  misc_feature (1)..( 6): Matrix.002 file - promoters60/1534629
gtttca

SEQ ID NO: 51977 - DNA, 9 bp, Unknown
  misc_feature (1)..( 9): Matrix.002 file - promoters60/1534629
atgatcttg

SEQ ID NO: 51978 - DNA, 8 bp, Unknown
  misc_feature (1)..( 8): Matrix.002 file - promoters60/1534629
gatgattt

SEQ ID NO: 51979 - DNA, 6 bp, Unknown
  misc_feature (1)..( 6): Matrix.002 file - promoters60/1534629
tctatg

SEQ ID NO: 51980 - DNA, 6 bp, Unknown
  misc_feature (1)..( 6): Matrix.002 file - promoters60/1534629
ggaagc

SEQ ID NO: 51981 - DNA, 8 bp, Unknown
  misc_feature (1)..( 8): Matrix.002 file - promoters60/1534629
ttagtagt

SEQ ID NO: 51982 - DNA, 10 bp, Unknown
  misc_feature (1)..( 10): Matrix.002 file - promoters60/1534629
gttagaagaa

SEQ ID NO: 51983 - DNA, 7 bp, Unknown
  misc_feature (1)..( 7): Matrix.002 file - promoters60/1534629
aataagg

SEQ ID NO: 51984 - DNA, 12 bp, Unknown
  misc_feature (1)..( 12): Matrix.002 file - promoters60/1534671
tctttagagctt

SEQ ID NO: 51985 - DNA, 8 bp, Unknown
  misc_feature (1)..( 8): Matrix.002 file - promoters60/1534671
gaagatga

SEQ ID NO: 51986 - DNA, 8 bp, Unknown
  misc_feature (1)..( 8): Matrix.002 file - promoters60/1534671
agaacttt

SEQ ID NO: 51987 - DNA, 8 bp, Unknown
  misc_feature (1)..( 8): Matrix.002 file - promoters60/1534671
aacatctc

SEQ ID NO: 51988 - DNA, 11 bp, Unknown
  misc_feature (1)..( 11): Matrix.002 file - promoters60/1534671
aatttaaagct

SEQ ID NO: 51989 - DNA, 9 bp, Unknown
  misc_feature (1)..( 9): Matrix.002 file - promoters60/1534671
caaaatgag

SEQ ID NO: 51990 - DNA, 6 bp, Unknown
  misc_feature (1)..( 6): Matrix.002 file - promoters60/1534671
tgttaa

SEQ ID NO: 51991 - DNA, 7 bp, Unknown
  misc_feature (1)..( 7): Matrix.002 file - promoters60/1535197
atggaga

SEQ ID NO: 51992 - DNA, 7 bp, Unknown
  misc_feature (1)..( 7): Matrix.002 file - promoters60/1535197
tttggat

SEQ ID NO: 51993 - DNA, 8 bp, Unknown
  misc_feature (1)..( 8): Matrix.002 file - promoters60/1535197
actaactt

SEQ ID NO: 51994 - DNA, 7 bp, Unknown
  misc_feature (1)..( 7): Matrix.002 file - promoters60/1535197
gaacatg

SEQ ID NO: 51995 - DNA, 7 bp, Unknown
  misc_feature (1)..( 7): Matrix.002 file - promoters60/1535197
gatgaat

SEQ ID NO: 51996 - DNA, 8 bp, Unknown
  misc_feature (1)..( 8): Matrix.002 file - promoters60/1535197
cacacaaa

SEQ ID NO: 51997 - DNA, 6 bp, Unknown
  misc_feature (1)..( 6): Matrix.002 file - promoters60/1535197
gaagtt

SEQ ID NO: 51998 - DNA, 7 bp, Unknown
  misc_feature (1)..( 7): Matrix.002 file - promoters60/1535197
cacaaag

SEQ ID NO: 51999 - DNA, 6 bp, Unknown
  misc_feature (1)..( 6): Matrix.002 file - promoters60/1535197
cttttt

SEQ ID NO: 52000 - DNA, 6 bp, Unknown
  misc_feature (1)..( 6): Matrix.002 file - promoters60/1535197
tttctt

SEQ ID NO: 52001 - DNA, 7 bp, Unknown
  misc_feature (1)..( 7): Matrix.002 file - promoters60/1535197
acaaact

SEQ ID NO: 52002 - DNA, 7 bp, Unknown
  misc_feature (1)..( 7): Matrix.002 file - promoters60/1535197
ataaatt

SEQ ID NO: 52003 - DNA, 7 bp, Unknown
  misc_feature (1)..( 7): Matrix.002 file - promoters60/1535197
tttagtt

SEQ ID NO: 52004 - DNA, 6 bp, Unknown
  misc_feature (1)..( 6): Matrix.002 file - promoters60/1535197
gaatca

SEQ ID NO: 52005 - DNA, 7 bp, Unknown
  misc_feature (1)..( 7): Matrix.002 file - promoters60/1535197
tccagtt

SEQ ID NO: 52006 - DNA, 6 bp, Unknown
  misc_feature (1)..( 6): Matrix.002 file - promoters60/1535197
tttccg

SEQ ID NO: 52007 - DNA, 6 bp, Unknown
  misc_feature (1)..( 6): Matrix.002 file - promoters60/1535197
aaccct

SEQ ID NO: 52008 - DNA, 12 bp, Unknown
  misc_feature (1)..( 12): Matrix.002 file - promoters60/1537314
ttgatttttgtt

SEQ ID NO: 52009 - DNA, 7 bp, Unknown
  misc_feature (1)..( 7): Matrix.002 file - promoters60/1537314
aaaatgg

SEQ ID NO: 52010 - DNA, 12 bp, Unknown
  misc_feature (1)..( 12): Matrix.002 file - promoters60/1537336
atttattcaaca

SEQ ID NO: 52011 - DNA, 8 bp, Unknown
  misc_feature (1)..( 8): Matrix.002 file - promoters60/1537336
ctatatat

SEQ ID NO: 52012 - DNA, 7 bp, Unknown
  misc_feature (1)..( 7): Matrix.002 file - promoters60/1537456
aaagttt

SEQ ID NO: 52013 - DNA, 7 bp, Unknown
  misc_feature (1)..( 7): Matrix.002 file - promoters60/1537456
aaaaata

SEQ ID NO: 52014 - DNA, 6 bp, Unknown
  misc_feature (1)..( 6): Matrix.002 file - promoters60/1537456
aaaaat

SEQ ID NO: 52015 - DNA, 9 bp, Unknown
  misc_feature (1)..( 9): Matrix.002 file - promoters60/1537456
ataaattta

SEQ ID NO: 52016 - DNA, 6 bp, Unknown
  misc_feature (1)..( 6): Matrix.002 file - promoters60/1537456
tattta

SEQ ID NO: 52017 - DNA, 7 bp, Unknown
  misc_feature (1)..( 7): Matrix.002 file - promoters60/1537456
attaatg

SEQ ID NO: 52018 - DNA, 8 bp, Unknown
  misc_feature (1)..( 8): Matrix.002 file - promoters60/1537456
ctttcttt

SEQ ID NO: 52019 - DNA, 10 bp, Unknown
  misc_feature (1)..( 10): Matrix.002 file - promoters60/1537456
gttccttctt

SEQ ID NO: 52020 - DNA, 7 bp, Unknown
  misc_feature (1)..( 7): Matrix.002 file - promoters60/1537456
gttgttc

SEQ ID NO: 52021 - DNA, 6 bp, Unknown
  misc_feature (1)..( 6): Matrix.002 file - promoters60/1537456
gattaa

SEQ ID NO: 52022 - DNA, 7 bp, Unknown
  misc_feature (1)..( 7): Matrix.002 file - promoters60/1537456
aaaaaca

SEQ ID NO: 52023 - DNA, 6 bp, Unknown
  misc_feature (1)..( 6): Matrix.002 file - promoters60/1537456
tccatt

SEQ ID NO: 52024 - DNA, 7 bp, Unknown
  misc_feature (1)..( 7): Matrix.002 file - promoters60/1537456
ttttatg

SEQ ID NO: 52025 - DNA, 7 bp, Unknown
  misc_feature (1)..( 7): Matrix.002 file - promoters60/1537456
tttcaaa

SEQ ID NO: 52026 - DNA, 7 bp, Unknown
  misc_feature (1)..( 7): Matrix.002 file - promoters60/1537456
aaaatgt

SEQ ID NO: 52027 - DNA, 6 bp, Unknown
  misc_feature (1)..( 6): Matrix.002 file - promoters60/1537456
tgaaaa

SEQ ID NO: 52028 - DNA, 7 bp, Unknown
  misc_feature (1)..( 7): Matrix.002 file - promoters60/1537456
ataagtt

SEQ ID NO: 52029 - DNA, 7 bp, Unknown
  misc_feature (1)..( 7): Matrix.002 file - promoters60/1537456
ctcatct

SEQ ID NO: 52030 - DNA, 9 bp, Unknown
  misc_feature (1)..( 9): Matrix.002 file - promoters60/1537617
tgtatgcat

SEQ ID NO: 52031 - DNA, 10 bp, Unknown
  misc_feature (1)..( 10): Matrix.002 file - promoters60/1537617
tcaattttat

SEQ ID NO: 52032 - DNA, 8 bp, Unknown
  misc_feature (1)..( 8): Matrix.002 file - promoters60/1537617
ttattaat

SEQ ID NO: 52033 - DNA, 10 bp, Unknown
  misc_feature (1)..( 10): Matrix.002 file - promoters60/1537617
tcaattttat

SEQ ID NO: 52034 - DNA, 7 bp, Unknown
  misc_feature (1)..( 7): Matrix.002 file - promoters60/1537617
attattt

SEQ ID NO: 52035 - DNA, 8 bp, Unknown
  misc_feature (1)..( 8): Matrix.002 file - promoters60/1537617
tatcttaa

SEQ ID NO: 52036 - DNA, 9 bp, Unknown
  misc_feature (1)..( 9): Matrix.002 file - promoters60/1537617
aataaatag

SEQ ID NO: 52037 - DNA, 7 bp, Unknown
  misc_feature (1)..( 7): Matrix.002 file - promoters60/1537617
taaaatt

SEQ ID NO: 52038 - DNA, 12 bp, Unknown
  misc_feature (1)..( 12): Matrix.002 file - promoters60/1538143
ttttcaaaaccg

SEQ ID NO: 52039 - DNA, 9 bp, Unknown
  misc_feature (1)..( 9): Matrix.002 file - promoters60/1538143
tttcttcat

SEQ ID NO: 52040 - DNA, 9 bp, Unknown
  misc_feature (1)..( 9): Matrix.002 file - promoters60/1538143
gaattacaa

SEQ ID NO: 52041 - DNA, 9 bp, Unknown
  misc_feature (1)..( 9): Matrix.002 file - promoters60/1538143
acgtcaaac

SEQ ID NO: 52042 - DNA, 8 bp, Unknown
  misc_feature (1)..( 8): Matrix.002 file - promoters60/1538143
aaggaaaa

SEQ ID NO: 52043 - DNA, 6 bp, Unknown
  misc_feature (1)..( 6): Matrix.002 file - promoters60/1538143
ttttat

SEQ ID NO: 52044 - DNA, 8 bp, Unknown
  misc_feature (1)..( 8): Matrix.002 file - promoters60/1538143
tcaaactt

SEQ ID NO: 52045 - DNA, 10 bp, Unknown
  misc_feature (1)..( 10): Matrix.002 file - promoters60/1538641
gaacaaataa

SEQ ID NO: 52046 - DNA, 11 bp, Unknown
  misc_feature (1)..( 11): Matrix.002 file - promoters60/1538641
actatcaacat

SEQ ID NO: 52047 - DNA, 6 bp, Unknown
  misc_feature (1)..( 6): Matrix.002 file - promoters60/1538641
caataa

SEQ ID NO: 52048 - DNA, 6 bp, Unknown
  misc_feature (1)..( 6): Matrix.002 file - promoters60/1538641
taaaat

SEQ ID NO: 52049 - DNA, 8 bp, Unknown
  misc_feature (1)..( 8): Matrix.002 file - promoters60/1538641
ggaaaaat

SEQ ID NO: 52050 - DNA, 7 bp, Unknown
  misc_feature (1)..( 7): Matrix.002 file - promoters60/1538641
aaaccaa

SEQ ID NO: 52051 - DNA, 6 bp, Unknown
  misc_feature (1)..( 6): Matrix.002 file - promoters60/1538641
aaaaag

SEQ ID NO: 52052 - DNA, 6 bp, Unknown
  misc_feature (1)..( 6): Matrix.002 file - promoters60/1538641
aagtga

SEQ ID NO: 52053 - DNA, 7 bp, Unknown
  misc_feature (1)..( 7): Matrix.002 file - promoters60/1538641
taaaccc

SEQ ID NO: 52054 - DNA, 7 bp, Unknown
  misc_feature (1)..( 7): Matrix.002 file - promoters60/1538641
tttactt

SEQ ID NO: 52055 - DNA, 10 bp, Unknown
  misc_feature (1)..( 10): Matrix.002 file - promoters60/1538641
cttttttttt

SEQ ID NO: 52056 - DNA, 8 bp, Unknown
  misc_feature (1)..( 8): Matrix.002 file - promoters60/1538641
tataatat

SEQ ID NO: 52057 - DNA, 7 bp, Unknown
  misc_feature (1)..( 7): Matrix.002 file - promoters60/1538641
aaaacaa

SEQ ID NO: 52058 - DNA, 9 bp, Unknown
  misc_feature (1)..( 9): Matrix.002 file - promoters60/1538641
atctatttt

SEQ ID NO: 52059 - DNA, 6 bp, Unknown
  misc_feature (1)..( 6): Matrix.002 file - promoters60/1538641
cacaca

SEQ ID NO: 52060 - DNA, 7 bp, Unknown
  misc_feature (1)..( 7): Matrix.002 file - promoters60/1538641
agaaaga

SEQ ID NO: 52061 - DNA, 7 bp, Unknown
  misc_feature (1)..( 7): Matrix.002 file - promoters60/1538641
gagagta

SEQ ID NO: 52062 - DNA, 8 bp, Unknown
  misc_feature (1)..( 8): Matrix.002 file - promoters60/1538641
aaaaggag

SEQ ID NO: 52063 - DNA, 6 bp, Unknown
  misc_feature (1)..( 6): Matrix.002 file - promoters60/1538641
ttgtat

SEQ ID NO: 52064 - DNA, 8 bp, Unknown
  misc_feature (1)..( 8): Matrix.002 file - promoters60/1538641
ttgcttac

SEQ ID NO: 52065 - DNA, 7 bp, Unknown
  misc_feature (1)..( 7): Matrix.002 file - promoters60/1538641
ataacta

SEQ ID NO: 52066 - DNA, 6 bp, Unknown
  misc_feature (1)..( 6): Matrix.002 file - promoters60/1538641
taaaac

SEQ ID NO: 52067 - DNA, 6 bp, Unknown
  misc_feature (1)..( 6): Matrix.002 file - promoters60/1538738
gttctg

SEQ ID NO: 52068 - DNA, 6 bp, Unknown
  misc_feature (1)..( 6): Matrix.002 file - promoters60/1538738
aaatga

SEQ ID NO: 52069 - DNA, 8 bp, Unknown
  misc_feature (1)..( 8): Matrix.002 file - promoters60/1538738
tccagata

SEQ ID NO: 52070 - DNA, 10 bp, Unknown
  misc_feature (1)..( 10): Matrix.002 file - promoters60/1538738
ttgcagatgt

SEQ ID NO: 52071 - DNA, 8 bp, Unknown
  misc_feature (1)..( 8): Matrix.002 file - promoters60/1538738
ctcaactt

SEQ ID NO: 52072 - DNA, 7 bp, Unknown
  misc_feature (1)..( 7): Matrix.002 file - promoters60/1538738
tagatat

SEQ ID NO: 52073 - DNA, 7 bp, Unknown
  misc_feature (1)..( 7): Matrix.002 file - promoters60/1538738
atcatat

SEQ ID NO: 52074 - DNA, 7 bp, Unknown
  misc_feature (1)..( 7): Matrix.002 file - promoters60/1538738
atacata

SEQ ID NO: 52075 - DNA, 6 bp, Unknown
  misc_feature (1)..( 6): Matrix.002 file - promoters60/1538738
cttcat

SEQ ID NO: 52076 - DNA, 7 bp, Unknown
  misc_feature (1)..( 7): Matrix.002 file - promoters60/1538738
tttctat

SEQ ID NO: 52077 - DNA, 6 bp, Unknown
  misc_feature (1)..( 6): Matrix.002 file - promoters60/1538738
aaaatc

SEQ ID NO: 52078 - DNA, 7 bp, Unknown
  misc_feature (1)..( 7): Matrix.002 file - promoters60/1538804
agcatta

SEQ ID NO: 52079 - DNA, 7 bp, Unknown
  misc_feature (1)..( 7): Matrix.002 file - promoters60/1538804
ttaaatt

SEQ ID NO: 52080 - DNA, 7 bp, Unknown
  misc_feature (1)..( 7): Matrix.002 file - promoters60/1538804
gttagag

SEQ ID NO: 52081 - DNA, 6 bp, Unknown
  misc_feature (1)..( 6): Matrix.002 file - promoters60/1538804
ccaatc

SEQ ID NO: 52082 - DNA, 6 bp, Unknown
  misc_feature (1)..( 6): Matrix.002 file - promoters60/1538804
atcatt

SEQ ID NO: 52083 - DNA, 7 bp, Unknown
  misc_feature (1)..( 7): Matrix.002 file - promoters60/1538804
cttgtgt

SEQ ID NO: 52084 - DNA, 12 bp, Unknown
  misc_feature (1)..( 12): Matrix.002 file - promoters60/1538804
tttatataaaca

SEQ ID NO: 52085 - DNA, 8 bp, Unknown
  misc_feature (1)..( 8): Matrix.002 file - promoters60/1538804
acggattt

SEQ ID NO: 52086 - DNA, 9 bp, Unknown
  misc_feature (1)..( 9): Matrix.002 file - promoters60/1538804
atatgattt

SEQ ID NO: 52087 - DNA, 8 bp, Unknown
  misc_feature (1)..( 8): Matrix.002 file - promoters60/1538804
ttctatct

SEQ ID NO: 52088 - DNA, 7 bp, Unknown
  misc_feature (1)..( 7): Matrix.002 file - promoters60/1538804
cttagaa

SEQ ID NO: 52089 - DNA, 6 bp, Unknown
  misc_feature (1)..( 6): Matrix.002 file - promoters60/1538804
cataaa

SEQ ID NO: 52090 - DNA, 7 bp, Unknown
  misc_feature (1)..( 7): Matrix.002 file - promoters60/1538804
gaaaaat

SEQ ID NO: 52091 - DNA, 6 bp, Unknown
  misc_feature (1)..( 6): Matrix.002 file - promoters60/1538804
attgga

SEQ ID NO: 52092 - DNA, 6 bp, Unknown
  misc_feature (1)..( 6): Matrix.002 file - promoters60/1538804
tttaat

SEQ ID NO: 52093 - DNA, 6 bp, Unknown
  misc_feature (1)..( 6): Matrix.002 file - promoters60/1538804
ttgatt

SEQ ID NO: 52094 - DNA, 7 bp, Unknown
  misc_feature (1)..( 7): Matrix.002 file - promoters60/1557475
ttacata

SEQ ID NO: 52095 - DNA, 10 bp, Unknown
  misc_feature (1)..( 10): Matrix.002 file - promoters60/1557475
caaatttttt

SEQ ID NO: 52096 - DNA, 8 bp, Unknown
  misc_feature (1)..( 8): Matrix.002 file - promoters60/1557475
aaaatcaa

SEQ ID NO: 52097 - DNA, 8 bp, Unknown
  misc_feature (1)..( 8): Matrix.002 file - promoters60/1557475
atataaat

SEQ ID NO: 52098 - DNA, 9 bp, Unknown
  misc_feature (1)..( 9): Matrix.002 file - promoters60/1557475
taaataatc

SEQ ID NO: 52099 - DNA, 8 bp, Unknown
  misc_feature (1)..( 8): Matrix.002 file - promoters60/1557475
atcaatca

SEQ ID NO: 52100 - DNA, 6 bp, Unknown
  misc_feature (1)..( 6): Matrix.002 file - promoters60/1557475
aaatac

SEQ ID NO: 52101 - DNA, 10 bp, Unknown
  misc_feature (1)..( 10): Matrix.002 file - promoters60/1557475
caaaagcggt

SEQ ID NO: 52102 - DNA, 8 bp, Unknown
  misc_feature (1)..( 8): Matrix.002 file - promoters60/1557475
gatctgaa

SEQ ID NO: 52103 - DNA, 7 bp, Unknown
  misc_feature (1)..( 7): Matrix.002 file - promoters60/1557475
tacaatt

SEQ ID NO: 52104 - DNA, 6 bp, Unknown
  misc_feature (1)..( 6): Matrix.002 file - promoters60/1557475
tctcta

SEQ ID NO: 52105 - DNA, 6 bp, Unknown
  misc_feature (1)..( 6): Matrix.002 file - promoters60/1557475
tataag

SEQ ID NO: 52106 - DNA, 6 bp, Unknown
  misc_feature (1)..( 6): Matrix.002 file - promoters60/1557475
atattt

SEQ ID NO: 52107 - DNA, 14 bp, Unknown
  misc_feature (1)..( 14): Matrix.002 file - promoters60/1557475
cgaaaaaacaaaaa

SEQ ID NO: 52108 - DNA, 7 bp, Unknown
  misc_feature (1)..( 7): Matrix.002 file - promoters60/1557475
aaaataa

SEQ ID NO: 52109 - DNA, 6 bp, Unknown
  misc_feature (1)..( 6): Matrix.002 file - promoters60/1557475
atttta

SEQ ID NO: 52110 - DNA, 6 bp, Unknown
  misc_feature (1)..( 6): Matrix.002 file - promoters60/1557475
taaaaa

SEQ ID NO: 52111 - DNA, 7 bp, Unknown
  misc_feature (1)..( 7): Matrix.002 file - promoters60/1557475
tttaaaa

SEQ ID NO: 52112 - DNA, 6 bp, Unknown
  misc_feature (1)..( 6): Matrix.002 file - promoters60/1557475
ttcttc

SEQ ID NO: 52113 - DNA, 6 bp, Unknown
  misc_feature (1)..( 6): Matrix.002 file - promoters60/1557475
aattac

SEQ ID NO: 52114 - DNA, 6 bp, Unknown
  misc_feature (1)..( 6): Matrix.002 file - promoters60/1557475
aatttg

SEQ ID NO: 52115 - DNA, 7 bp, Unknown
  misc_feature (1)..( 7): Matrix.002 file - promoters60/1557475
aaactaa

SEQ ID NO: 52116 - DNA, 9 bp, Unknown
  misc_feature (1)..( 9): Matrix.002 file - promoters60/1557475
atccatata

SEQ ID NO: 52117 - DNA, 6 bp, Unknown
  misc_feature (1)..( 6): Matrix.002 file - promoters60/1557475
tcaacg

SEQ ID NO: 52118 - DNA, 11 bp, Unknown
  misc_feature (1)..( 11): Matrix.002 file - promoters60/1557501
tgaatatcaaa

SEQ ID NO: 52119 - DNA, 11 bp, Unknown
  misc_feature (1)..( 11): Matrix.002 file - promoters60/1557501
atcttcatgtt

SEQ ID NO: 52120 - DNA, 8 bp, Unknown
  misc_feature (1)..( 8): Matrix.002 file - promoters60/1557501
tatcttca

SEQ ID NO: 52121 - DNA, 11 bp, Unknown
  misc_feature (1)..( 11): Matrix.002 file - promoters60/1557501
tatttatgaat

SEQ ID NO: 52122 - DNA, 9 bp, Unknown
  misc_feature (1)..( 9): Matrix.002 file - promoters60/1557501
aatcttcat

SEQ ID NO: 52123 - DNA, 10 bp, Unknown
  misc_feature (1)..( 10): Matrix.002 file - promoters60/1557501
gtttaacaaa

SEQ ID NO: 52124 - DNA, 12 bp, Unknown
  misc_feature (1)..( 12): Matrix.002 file - promoters60/1557565
aaattaattata

SEQ ID NO: 52125 - DNA, 7 bp, Unknown
  misc_feature (1)..( 7): Matrix.002 file - promoters60/1557573
tcagagc

SEQ ID NO: 52126 - DNA, 8 bp, Unknown
  misc_feature (1)..( 8): Matrix.002 file - promoters60/1557573
agtatatt

SEQ ID NO: 52127 - DNA, 7 bp, Unknown
  misc_feature (1)..( 7): Matrix.002 file - promoters60/1557573
ttaaaaa

SEQ ID NO: 52128 - DNA, 8 bp, Unknown
  misc_feature (1)..( 8): Matrix.002 file - promoters60/1557573
taacaaaa

SEQ ID NO: 52129 - DNA, 6 bp, Unknown
  misc_feature (1)..( 6): Matrix.002 file - promoters60/1557573
ttatca

SEQ ID NO: 52130 - DNA, 7 bp, Unknown
  misc_feature (1)..( 7): Matrix.002 file - promoters60/1557573
tttatta

SEQ ID NO: 52131 - DNA, 7 bp, Unknown
  misc_feature (1)..( 7): Matrix.002 file - promoters60/1557573
gtagatt

SEQ ID NO: 52132 - DNA, 7 bp, Unknown
  misc_feature (1)..( 7): Matrix.002 file - promoters60/1557573
ttccaaa

SEQ ID NO: 52133 - DNA, 7 bp, Unknown
  misc_feature (1)..( 7): Matrix.002 file - promoters60/1557573
tttgatt

SEQ ID NO: 52134 - DNA, 6 bp, Unknown
  misc_feature (1)..( 6): Matrix.002 file - promoters60/1557573
gtctcc

SEQ ID NO: 52135 - DNA, 11 bp, Unknown
  misc_feature (1)..( 11): Matrix.002 file - promoters60/1557573
accctagattt

SEQ ID NO: 52136 - DNA, 8 bp, Unknown
  misc_feature (1)..( 8): Matrix.002 file - promoters60/1557648
aaaaaaaa

SEQ ID NO: 52137 - DNA, 10 bp, Unknown
  misc_feature (1)..( 10): Matrix.002 file - promoters60/1557648
aaattggtag

SEQ ID NO: 52138 - DNA, 7 bp, Unknown
  misc_feature (1)..( 7): Matrix.002 file - promoters60/1557648
tacaaat

SEQ ID NO: 52139 - DNA, 9 bp, Unknown
  misc_feature (1)..( 9): Matrix.002 file - promoters60/1557648
aattttgaa

SEQ ID NO: 52140 - DNA, 6 bp, Unknown
  misc_feature (1)..( 6): Matrix.002 file - promoters60/1557648
tgttta

SEQ ID NO: 52141 - DNA, 6 bp, Unknown
  misc_feature (1)..( 6): Matrix.002 file - promoters60/1557648
ttttaa

SEQ ID NO: 52142 - DNA, 6 bp, Unknown
  misc_feature (1)..( 6): Matrix.002 file - promoters60/1557648
agaaaa

SEQ ID NO: 52143 - DNA, 8 bp, Unknown
  misc_feature (1)..( 8): Matrix.002 file - promoters60/1557648
aaaacatt

SEQ ID NO: 52144 - DNA, 6 bp, Unknown
  misc_feature (1)..( 6): Matrix.002 file - promoters60/1557648
atagaa

SEQ ID NO: 52145 - DNA, 7 bp, Unknown
  misc_feature (1)..( 7): Matrix.002 file - promoters60/1557648
cataatt

SEQ ID NO: 52146 - DNA, 8 bp, Unknown
  misc_feature (1)..( 8): Matrix.002 file - promoters60/1557648
aaatttga

SEQ ID NO: 52147 - DNA, 7 bp, Unknown
  misc_feature (1)..( 7): Matrix.002 file - promoters60/1557648
aaaaaaa

SEQ ID NO: 52148 - DNA, 6 bp, Unknown
  misc_feature (1)..( 6): Matrix.002 file - promoters60/1557648
acatct

SEQ ID NO: 52149 - DNA, 7 bp, Unknown
  misc_feature (1)..( 7): Matrix.002 file - promoters60/1557648
gtacaat

SEQ ID NO: 52150 - DNA, 7 bp, Unknown
  misc_feature (1)..( 7): Matrix.002 file - promoters60/1557648
aaaagtt

SEQ ID NO: 52151 - DNA, 6 bp, Unknown
  misc_feature (1)..( 6): Matrix.002 file - promoters60/1557648
caaatt

SEQ ID NO: 52152 - DNA, 7 bp, Unknown
  misc_feature (1)..( 7): Matrix.002 file - promoters60/1557648
cagcaaa

SEQ ID NO: 52153 - DNA, 8 bp, Unknown
  misc_feature (1)..( 8): Matrix.002 file - promoters60/1557648
aatctcac

SEQ ID NO: 52154 - DNA, 9 bp, Unknown
  misc_feature (1)..( 9): Matrix.002 file - promoters60/1557648
caacaaaat

SEQ ID NO: 52155 - DNA, 8 bp, Unknown
  misc_feature (1)..( 8): Matrix.002 file - promoters60/1557648
acacacac

SEQ ID NO: 52156 - DNA, 7 bp, Unknown
  misc_feature (1)..( 7): Matrix.002 file - promoters60/1557648
aatttga

SEQ ID NO: 52157 - DNA, 7 bp, Unknown
  misc_feature (1)..( 7): Matrix.002 file - promoters60/1557648
aaaatga

SEQ ID NO: 52158 - DNA, 7 bp, Unknown
  misc_feature (1)..( 7): Matrix.002 file - promoters60/1557648
tgaagga

SEQ ID NO: 52159 - DNA, 6 bp, Unknown
  misc_feature (1)..( 6): Matrix.002 file - promoters60/1557712
ttccga

SEQ ID NO: 52160 - DNA, 6 bp, Unknown
  misc_feature (1)..( 6): Matrix.002 file - promoters60/1557712
aagctc

SEQ ID NO: 52161 - DNA, 7 bp, Unknown
  misc_feature (1)..( 7): Matrix.002 file - promoters60/1557712
tttaaag

SEQ ID NO: 52162 - DNA, 8 bp, Unknown
  misc_feature (1)..( 8): Matrix.002 file - promoters60/1557712
taaaaaaa

SEQ ID NO: 52163 - DNA, 7 bp, Unknown
  misc_feature (1)..( 7): Matrix.002 file - promoters60/1557712
caacttc

SEQ ID NO: 52164 - DNA, 6 bp, Unknown
  misc_feature (1)..( 6): Matrix.002 file - promoters60/1557712
tgattc

SEQ ID NO: 52165 - DNA, 6 bp, Unknown
  misc_feature (1)..( 6): Matrix.002 file - promoters60/1557712
aaaaac

SEQ ID NO: 52166 - DNA, 6 bp, Unknown
  misc_feature (1)..( 6): Matrix.002 file - promoters60/1557712
tttatt

SEQ ID NO: 52167 - DNA, 8 bp, Unknown
  misc_feature (1)..( 8): Matrix.002 file - promoters60/1557712
tttccata

SEQ ID NO: 52168 - DNA, 7 bp, Unknown
  misc_feature (1)..( 7): Matrix.002 file - promoters60/1557712
tatcttg

SEQ ID NO: 52169 - DNA, 8 bp, Unknown
  misc_feature (1)..( 8): Matrix.002 file - promoters60/1557712
ttagtgtt

SEQ ID NO: 52170 - DNA, 7 bp, Unknown
  misc_feature (1)..( 7): Matrix.002 file - promoters60/1557730
gccaatt

SEQ ID NO: 52171 - DNA, 9 bp, Unknown
  misc_feature (1)..( 9): Matrix.002 file - promoters60/1557730
aatgtgtta

SEQ ID NO: 52172 - DNA, 8 bp, Unknown
  misc_feature (1)..( 8): Matrix.002 file - promoters60/1557730
ttaattat

SEQ ID NO: 52173 - DNA, 7 bp, Unknown
  misc_feature (1)..( 7): Matrix.002 file - promoters60/1557730
tatatta

SEQ ID NO: 52174 - DNA, 7 bp, Unknown
  misc_feature (1)..( 7): Matrix.002 file - promoters60/1557730
taagaaa

SEQ ID NO: 52175 - DNA, 6 bp, Unknown
  misc_feature (1)..( 6): Matrix.002 file - promoters60/1557730
ttgtct

SEQ ID NO: 52176 - DNA, 7 bp, Unknown
  misc_feature (1)..( 7): Matrix.002 file - promoters60/1557730
agatacg

SEQ ID NO: 52177 - DNA, 6 bp, Unknown
  misc_feature (1)..( 6): Matrix.002 file - promoters60/1557730
acaaga

SEQ ID NO: 52178 - DNA, 6 bp, Unknown
  misc_feature (1)..( 6): Matrix.002 file - promoters60/1557730
aattaa

SEQ ID NO: 52179 - DNA, 8 bp, Unknown
  misc_feature (1)..( 8): Matrix.002 file - promoters60/1557730
ttagttga

SEQ ID NO: 52180 - DNA, 7 bp, Unknown
  misc_feature (1)..( 7): Matrix.002 file - promoters60/1557730
tttcttt

SEQ ID NO: 52181 - DNA, 7 bp, Unknown
  misc_feature (1)..( 7): Matrix.002 file - promoters60/1557730
ttaattt

SEQ ID NO: 52182 - DNA, 7 bp, Unknown
  misc_feature (1)..( 7): Matrix.002 file - promoters60/1557730
atgaata

SEQ ID NO: 52183 - DNA, 9 bp, Unknown
  misc_feature (1)..( 9): Matrix.002 file - promoters60/1557730
atcaaatta

SEQ ID NO: 52184 - DNA, 8 bp, Unknown
  misc_feature (1)..( 8): Matrix.002 file - promoters60/1557730
taaaaaaa

SEQ ID NO: 52185 - DNA, 7 bp, Unknown
  misc_feature (1)..( 7): Matrix.002 file - promoters60/1557730
acaaaaa

SEQ ID NO: 52186 - DNA, 6 bp, Unknown
  misc_feature (1)..( 6): Matrix.002 file - promoters60/1557730
cacctt

SEQ ID NO: 52187 - DNA, 8 bp, Unknown
  misc_feature (1)..( 8): Matrix.002 file - promoters60/1557730
caccatca

SEQ ID NO: 52188 - DNA, 7 bp, Unknown
  misc_feature (1)..( 7): Matrix.002 file - promoters60/1557730
atgaaaa

SEQ ID NO: 52189 - DNA, 6 bp, Unknown
  misc_feature (1)..( 6): Matrix.002 file - promoters60/1557730
ccatcc

SEQ ID NO: 52190 - DNA, 7 bp, Unknown
  misc_feature (1)..( 7): Matrix.002 file - promoters60/1557775
tttgttc

SEQ ID NO: 52191 - DNA, 7 bp, Unknown
  misc_feature (1)..( 7): Matrix.002 file - promoters60/1557775
attatat

SEQ ID NO: 52192 - DNA, 6 bp, Unknown
  misc_feature (1)..( 6): Matrix.002 file - promoters60/1557775
aaaaga

SEQ ID NO: 52193 - DNA, 6 bp, Unknown
  misc_feature (1)..( 6): Matrix.002 file - promoters60/1557775
ttcggt

SEQ ID NO: 52194 - DNA, 8 bp, Unknown
  misc_feature (1)..( 8): Matrix.002 file - promoters60/1557775
cacacaaa

SEQ ID NO: 52195 - DNA, 7 bp, Unknown
  misc_feature (1)..( 7): Matrix.002 file - promoters60/1557775
ggattcg

SEQ ID NO: 52196 - DNA, 6 bp, Unknown
  misc_feature (1)..( 6): Matrix.002 file - promoters60/1557775
gaaacg

SEQ ID NO: 52197 - DNA, 7 bp, Unknown
  misc_feature (1)..( 7): Matrix.002 file - promoters60/1557775
agtttct

SEQ ID NO: 52198 - DNA, 10 bp, Unknown
  misc_feature (1)..( 10): Matrix.002 file - promoters60/1557775
aacaacaagt

SEQ ID NO: 52199 - DNA, 6 bp, Unknown
  misc_feature (1)..( 6): Matrix.002 file - promoters60/1557775
ttgact

SEQ ID NO: 52200 - DNA, 6 bp, Unknown
  misc_feature (1)..( 6): Matrix.002 file - promoters60/1557775
tataaa

SEQ ID NO: 52201 - DNA, 8 bp, Unknown
  misc_feature (1)..( 8): Matrix.002 file - promoters60/1557775
ggccaagt

SEQ ID NO: 52202 - DNA, 6 bp, Unknown
  misc_feature (1)..( 6): Matrix.002 file - promoters60/1557775
aagaaa

SEQ ID NO: 52203 - DNA, 6 bp, Unknown
  misc_feature (1)..( 6): Matrix.002 file - promoters60/1557775
gaatca

SEQ ID NO: 52204 - DNA, 7 bp, Unknown
  misc_feature (1)..( 7): Matrix.002 file - promoters60/1557775
tccagtt

SEQ ID NO: 52205 - DNA, 6 bp, Unknown
  misc_feature (1)..( 6): Matrix.002 file - promoters60/1557775
tttccg

SEQ ID NO: 52206 - DNA, 6 bp, Unknown
  misc_feature (1)..( 6): Matrix.002 file - promoters60/1557775
ataaat

SEQ ID NO: 52207 - DNA, 6 bp, Unknown
  misc_feature (1)..( 6): Matrix.002 file - promoters60/1557775
aaccct

SEQ ID NO: 52208 - DNA, 6 bp, Unknown
  misc_feature (1)..( 6): Matrix.002 file - promoters60/1557783
aagtgt

SEQ ID NO: 52209 - DNA, 11 bp, Unknown
  misc_feature (1)..( 11): Matrix.002 file - promoters60/1557783
aaaacaaatat

SEQ ID NO: 52210 - DNA, 11 bp, Unknown
  misc_feature (1)..( 11): Matrix.002 file - promoters60/1557783
atgtgtttcta

SEQ ID NO: 52211 - DNA, 7 bp, Unknown
  misc_feature (1)..( 7): Matrix.002 file - promoters60/1557783
gtgtatg

SEQ ID NO: 52212 - DNA, 12 bp, Unknown
  misc_feature (1)..( 12): Matrix.002 file - promoters60/1557783
acaagtagatga

SEQ ID NO: 52213 - DNA, 8 bp, Unknown
  misc_feature (1)..( 8): Matrix.002 file - promoters60/1557783
attgtaaa

SEQ ID NO: 52214 - DNA, 7 bp, Unknown
  misc_feature (1)..( 7): Matrix.002 file - promoters60/1557806
ggaagaa

SEQ ID NO: 52215 - DNA, 6 bp, Unknown
  misc_feature (1)..( 6): Matrix.002 file - promoters60/1557806
agaaga

SEQ ID NO: 52216 - DNA, 6 bp, Unknown
  misc_feature (1)..( 6): Matrix.002 file - promoters60/1557806
gaagaa

SEQ ID NO: 52217 - DNA, 9 bp, Unknown
  misc_feature (1)..( 9): Matrix.002 file - promoters60/1557806
tcttagcaa

SEQ ID NO: 52218 - DNA, 10 bp, Unknown
  misc_feature (1)..( 10): Matrix.002 file - promoters60/1557806
gataatttgt

SEQ ID NO: 52219 - DNA, 8 bp, Unknown
  misc_feature (1)..( 8): Matrix.002 file - promoters60/1557806
tataaatt

SEQ ID NO: 52220 - DNA, 8 bp, Unknown
  misc_feature (1)..( 8): Matrix.002 file - promoters60/1557806
tttaattt

SEQ ID NO: 52221 - DNA, 7 bp, Unknown
  misc_feature (1)..( 7): Matrix.002 file - promoters60/1557806
aaaccaa

SEQ ID NO: 52222 - DNA, 6 bp, Unknown
  misc_feature (1)..( 6): Matrix.002 file - promoters60/1557806
aaccga

SEQ ID NO: 52223 - DNA, 6 bp, Unknown
  misc_feature (1)..( 6): Matrix.002 file - promoters60/1557806
caagtt

SEQ ID NO: 52224 - DNA, 6 bp, Unknown
  misc_feature (1)..( 6): Matrix.002 file - promoters60/1557806
acagtg

SEQ ID NO: 52225 - DNA, 6 bp, Unknown
  misc_feature (1)..( 6): Matrix.002 file - promoters60/1557806
gaactt

SEQ ID NO: 52226 - DNA, 8 bp, Unknown
  misc_feature (1)..( 8): Matrix.002 file - promoters60/1557806
aattgatt

SEQ ID NO: 52227 - DNA, 6 bp, Unknown
  misc_feature (1)..( 6): Matrix.002 file - promoters60/1557806
aaaatt

SEQ ID NO: 52228 - DNA, 10 bp, Unknown
  misc_feature (1)..( 10): Matrix.002 file - promoters60/1557806
tatgctttgg

SEQ ID NO: 52229 - DNA, 8 bp, Unknown
  misc_feature (1)..( 8): Matrix.002 file - promoters60/1557806
ttcacaga

SEQ ID NO: 52230 - DNA, 6 bp, Unknown
  misc_feature (1)..( 6): Matrix.002 file - promoters60/1557806
tcttgt

SEQ ID NO: 52231 - DNA, 6 bp, Unknown
  misc_feature (1)..( 6): Matrix.002 file - promoters60/1557806
gtgtgc

SEQ ID NO: 52232 - DNA, 12 bp, Unknown
  misc_feature (1)..( 12): Matrix.002 file - promoters60/1565965
agaaaattggat

SEQ ID NO: 52233 - DNA, 9 bp, Unknown
  misc_feature (1)..( 9): Matrix.002 file - promoters60/1565965
ttttatagt

SEQ ID NO: 52234 - DNA, 8 bp, Unknown
  misc_feature (1)..( 8): Matrix.002 file - promoters60/1565965
attgttcg

SEQ ID NO: 52235 - DNA, 15 bp, Unknown
  misc_feature (1)..( 15): Matrix.002 file - promoters60/1565965
taaatagtaacggga

SEQ ID NO: 52236 - DNA, 8 bp, Unknown
  misc_feature (1)..( 8): Matrix.002 file - promoters60/1565965
ttgtactt

SEQ ID NO: 52237 - DNA, 7 bp, Unknown
  misc_feature (1)..( 7): Matrix.002 file - promoters60/1566253
tgggttt

SEQ ID NO: 52238 - DNA, 6 bp, Unknown
  misc_feature (1)..( 6): Matrix.002 file - promoters60/1566253
ttgttg

SEQ ID NO: 52239 - DNA, 6 bp, Unknown
  misc_feature (1)..( 6): Matrix.002 file - promoters60/1566253
agtaaa

SEQ ID NO: 52240 - DNA, 7 bp, Unknown
  misc_feature (1)..( 7): Matrix.002 file - promoters60/1566253
aagaaaa

SEQ ID NO: 52241 - DNA, 9 bp, Unknown
  misc_feature (1)..( 9): Matrix.002 file - promoters60/1566253
gagcctgat

SEQ ID NO: 52242 - DNA, 6 bp, Unknown
  misc_feature (1)..( 6): Matrix.002 file - promoters60/1566253
aattgc

SEQ ID NO: 52243 - DNA, 6 bp, Unknown
  misc_feature (1)..( 6): Matrix.002 file - promoters60/1566253
tccaaa

SEQ ID NO: 52244 - DNA, 6 bp, Unknown
  misc_feature (1)..( 6): Matrix.002 file - promoters60/1566253
aaacga

SEQ ID NO: 52245 - DNA, 6 bp, Unknown
  misc_feature (1)..( 6): Matrix.002 file - promoters60/1566253
tctaaa

SEQ ID NO: 52246 - DNA, 8 bp, Unknown
  misc_feature (1)..( 8): Matrix.002 file - promoters60/1566253
aacaaaaa

SEQ ID NO: 52247 - DNA, 6 bp, Unknown
  misc_feature (1)..( 6): Matrix.002 file - promoters60/1566253
ttgact

SEQ ID NO: 52248 - DNA, 8 bp, Unknown
  misc_feature (1)..( 8): Matrix.002 file - promoters60/1566253
ccaagacg

SEQ ID NO: 52249 - DNA, 7 bp, Unknown
  misc_feature (1)..( 7): Matrix.002 file - promoters60/1566253
aggccca

SEQ ID NO: 52250 - DNA, 6 bp, Unknown
  misc_feature (1)..( 6): Matrix.002 file - promoters60/1566423
tcaaaa

SEQ ID NO: 52251 - DNA, 8 bp, Unknown
  misc_feature (1)..( 8): Matrix.002 file - promoters60/1566423
aaataata

SEQ ID NO: 52252 - DNA, 7 bp, Unknown
  misc_feature (1)..( 7): Matrix.002 file - promoters60/1566423
tagataa

SEQ ID NO: 52253 - DNA, 12 bp, Unknown
  misc_feature (1)..( 12): Matrix.002 file - promoters60/1566423
ctgaaataaatt

SEQ ID NO: 52254 - DNA, 6 bp, Unknown
  misc_feature (1)..( 6): Matrix.002 file - promoters60/1566423
ttatgt

SEQ ID NO: 52255 - DNA, 11 bp, Unknown
  misc_feature (1)..( 11): Matrix.002 file - promoters60/1566423
tttgtaaacaa

SEQ ID NO: 52256 - DNA, 9 bp, Unknown
  misc_feature (1)..( 9): Matrix.002 file - promoters60/1566423
tatattatt

SEQ ID NO: 52257 - DNA, 9 bp, Unknown
  misc_feature (1)..( 9): Matrix.002 file - promoters60/1566423
attaaaatt

SEQ ID NO: 52258 - DNA, 7 bp, Unknown
  misc_feature (1)..( 7): Matrix.002 file - promoters60/1566423
gacaaaa

SEQ ID NO: 52259 - DNA, 7 bp, Unknown
  misc_feature (1)..( 7): Matrix.002 file - promoters60/1566423
ttcaata

SEQ ID NO: 52260 - DNA, 8 bp, Unknown
  misc_feature (1)..( 8): Matrix.002 file - promoters60/1566423
atttcaca

SEQ ID NO: 52261 - DNA, 6 bp, Unknown
  misc_feature (1)..( 6): Matrix.002 file - promoters60/1566423
tattta

SEQ ID NO: 52262 - DNA, 6 bp, Unknown
  misc_feature (1)..( 6): Matrix.002 file - promoters60/1566423
taaaac

SEQ ID NO: 52263 - DNA, 6 bp, Unknown
  misc_feature (1)..( 6): Matrix.002 file - promoters60/1566423
cccaat

SEQ ID NO: 52264 - DNA, 11 bp, Unknown
  misc_feature (1)..( 11): Matrix.002 file - promoters60/1566423
aagcaaacagg

SEQ ID NO: 52265 - DNA, 6 bp, Unknown
  misc_feature (1)..( 6): Matrix.002 file - promoters60/1566715
tcaaaa

SEQ ID NO: 52266 - DNA, 8 bp, Unknown
  misc_feature (1)..( 8): Matrix.002 file - promoters60/1566715
aaataata

SEQ ID NO: 52267 - DNA, 7 bp, Unknown
  misc_feature (1)..( 7): Matrix.002 file - promoters60/1566715
tagataa

SEQ ID NO: 52268 - DNA, 12 bp, Unknown
  misc_feature (1)..( 12): Matrix.002 file - promoters60/1566715
ctgaaataaatt

SEQ ID NO: 52269 - DNA, 6 bp, Unknown
  misc_feature (1)..( 6): Matrix.002 file - promoters60/1566715
ttatgt

SEQ ID NO: 52270 - DNA, 11 bp, Unknown
  misc_feature (1)..( 11): Matrix.002 file - promoters60/1566715
tttgtaaacaa

SEQ ID NO: 52271 - DNA, 9 bp, Unknown
  misc_feature (1)..( 9): Matrix.002 file - promoters60/1566715
tatattatt

SEQ ID NO: 52272 - DNA, 9 bp, Unknown
  misc_feature (1)..( 9): Matrix.002 file - promoters60/1566715
attaaaatt

SEQ ID NO: 52273 - DNA, 7 bp, Unknown
  misc_feature (1)..( 7): Matrix.002 file - promoters60/1566715
gacaaaa

SEQ ID NO: 52274 - DNA, 7 bp, Unknown
  misc_feature (1)..( 7): Matrix.002 file - promoters60/1566715
ttcaata

SEQ ID NO: 52275 - DNA, 8 bp, Unknown
  misc_feature (1)..( 8): Matrix.002 file - promoters60/1566715
atttcaca

SEQ ID NO: 52276 - DNA, 6 bp, Unknown
  misc_feature (1)..( 6): Matrix.002 file - promoters60/1566715
tattta

SEQ ID NO: 52277 - DNA, 6 bp, Unknown
  misc_feature (1)..( 6): Matrix.002 file - promoters60/1566715
taaaac

SEQ ID NO: 52278 - DNA, 6 bp, Unknown
  misc_feature (1)..( 6): Matrix.002 file - promoters60/1566715
cccaat

SEQ ID NO: 52279 - DNA, 11 bp, Unknown
  misc_feature (1)..( 11): Matrix.002 file - promoters60/1566715
aagcaaacagg

SEQ ID NO: 52280 - DNA, 6 bp, Unknown
  misc_feature (1)..( 6): Matrix.002 file - promoters60/1566797
aaaaac

SEQ ID NO: 52281 - DNA, 6 bp, Unknown
  misc_feature (1)..( 6): Matrix.002 file - promoters60/1566797
ttaaat

SEQ ID NO: 52282 - DNA, 6 bp, Unknown
  misc_feature (1)..( 6): Matrix.002 file - promoters60/1566797
taaaat

SEQ ID NO: 52283 - DNA, 10 bp, Unknown
  misc_feature (1)..( 10): Matrix.002 file - promoters60/1566797
ttcgtttctt

SEQ ID NO: 52284 - DNA, 6 bp, Unknown
  misc_feature (1)..( 6): Matrix.002 file - promoters60/1566797
aatgct

SEQ ID NO: 52285 - DNA, 8 bp, Unknown
  misc_feature (1)..( 8): Matrix.002 file - promoters60/1566797
tttggtta

SEQ ID NO: 52286 - DNA, 7 bp, Unknown
  misc_feature (1)..( 7): Matrix.002 file - promoters60/1566797
aaagata

SEQ ID NO: 52287 - DNA, 6 bp, Unknown
  misc_feature (1)..( 6): Matrix.002 file - promoters60/1566797
cacata

SEQ ID NO: 52288 - DNA, 7 bp, Unknown
  misc_feature (1)..( 7): Matrix.002 file - promoters60/1566797
aaccttt

SEQ ID NO: 52289 - DNA, 6 bp, Unknown
  misc_feature (1)..( 6): Matrix.002 file - promoters60/1566797
ttaaac

SEQ ID NO: 52290 - DNA, 7 bp, Unknown
  misc_feature (1)..( 7): Matrix.002 file - promoters60/1566797
aatgaat

SEQ ID NO: 52291 - DNA, 8 bp, Unknown
  misc_feature (1)..( 8): Matrix.002 file - promoters60/1566797
acataacg

SEQ ID NO: 52292 - DNA, 7 bp, Unknown
  misc_feature (1)..( 7): Matrix.002 file - promoters60/1566797
cattttt

SEQ ID NO: 52293 - DNA, 13 bp, Unknown
  misc_feature (1)..( 13): Matrix.002 file - promoters60/1566948
ttgaatcaaaatt

SEQ ID NO: 52294 - DNA, 6 bp, Unknown
  misc_feature (1)..( 6): Matrix.002 file - promoters60/1566948
tggatt

SEQ ID NO: 52295 - DNA, 13 bp, Unknown
  misc_feature (1)..( 13): Matrix.002 file - promoters60/1566948
ttgaatcaaaatt

SEQ ID NO: 52296 - DNA, 7 bp, Unknown
  misc_feature (1)..( 7): Matrix.002 file - promoters60/1567007
aaaagaa

SEQ ID NO: 52297 - DNA, 9 bp, Unknown
  misc_feature (1)..( 9): Matrix.002 file - promoters60/1567007
aaatattaa

SEQ ID NO: 52298 - DNA, 8 bp, Unknown
  misc_feature (1)..( 8): Matrix.002 file - promoters60/1567007
caaaatca

SEQ ID NO: 52299 - DNA, 8 bp, Unknown
  misc_feature (1)..( 8): Matrix.002 file - promoters60/1567007
ttaaaaaa

SEQ ID NO: 52300 - DNA, 8 bp, Unknown
  misc_feature (1)..( 8): Matrix.002 file - promoters60/1567007
ctaaaaaa

SEQ ID NO: 52301 - DNA, 8 bp, Unknown
  misc_feature (1)..( 8): Matrix.002 file - promoters60/1567007
taaaaaaa

SEQ ID NO: 52302 - DNA, 10 bp, Unknown
  misc_feature (1)..( 10): Matrix.002 file - promoters60/1567092
catgtttaaa

SEQ ID NO: 52303 - DNA, 12 bp, Unknown
  misc_feature (1)..( 12): Matrix.002 file - promoters60/1567092
aatcataatttt

SEQ ID NO: 52304 - DNA, 11 bp, Unknown
  misc_feature (1)..( 11): Matrix.002 file - promoters60/1567092
caataatttac

SEQ ID NO: 52305 - DNA, 11 bp, Unknown
  misc_feature (1)..( 11): Matrix.002 file - promoters60/1567949
aaaatcaattg

SEQ ID NO: 52306 - DNA, 6 bp, Unknown
  misc_feature (1)..( 6): Matrix.002 file - promoters60/1567957
ccataa

SEQ ID NO: 52307 - DNA, 10 bp, Unknown
  misc_feature (1)..( 10): Matrix.002 file - promoters60/1567957
atattttatt

SEQ ID NO: 52308 - DNA, 13 bp, Unknown
  misc_feature (1)..( 13): Matrix.002 file - promoters60/1567957
actattttaaaca

SEQ ID NO: 52309 - DNA, 9 bp, Unknown
  misc_feature (1)..( 9): Matrix.002 file - promoters60/1567957
acccaaata

SEQ ID NO: 52310 - DNA, 6 bp, Unknown
  misc_feature (1)..( 6): Matrix.002 file - promoters60/1568230
gattga

SEQ ID NO: 52311 - DNA, 8 bp, Unknown
  misc_feature (1)..( 8): Matrix.002 file - promoters60/1568230
tcgatttt

SEQ ID NO: 52312 - DNA, 6 bp, Unknown
  misc_feature (1)..( 6): Matrix.002 file - promoters60/1568230
atttta

SEQ ID NO: 52313 - DNA, 10 bp, Unknown
  misc_feature (1)..( 10): Matrix.002 file - promoters60/1568230
ttaatataaa

SEQ ID NO: 52314 - DNA, 6 bp, Unknown
  misc_feature (1)..( 6): Matrix.002 file - promoters60/1568230
aaccgt

SEQ ID NO: 52315 - DNA, 7 bp, Unknown
  misc_feature (1)..( 7): Matrix.002 file - promoters60/1568230
taaacta

SEQ ID NO: 52316 - DNA, 6 bp, Unknown
  misc_feature (1)..( 6): Matrix.002 file - promoters60/1568230
aatatt

SEQ ID NO: 52317 - DNA, 7 bp, Unknown
  misc_feature (1)..( 7): Matrix.002 file - promoters60/1568230
attataa

SEQ ID NO: 52318 - DNA, 8 bp, Unknown
  misc_feature (1)..( 8): Matrix.002 file - promoters60/1568230
tattataa

SEQ ID NO: 52319 - DNA, 8 bp, Unknown
  misc_feature (1)..( 8): Matrix.002 file - promoters60/1568230
tttatggt

SEQ ID NO: 52320 - DNA, 7 bp, Unknown
  misc_feature (1)..( 7): Matrix.002 file - promoters60/1568230
aataaaa

SEQ ID NO: 52321 - DNA, 7 bp, Unknown
  misc_feature (1)..( 7): Matrix.002 file - promoters60/1568230
acaaatt

SEQ ID NO: 52322 - DNA, 6 bp, Unknown
  misc_feature (1)..( 6): Matrix.002 file - promoters60/1568230
agaaaa

SEQ ID NO: 52323 - DNA, 6 bp, Unknown
  misc_feature (1)..( 6): Matrix.002 file - promoters60/1568230
taataa

SEQ ID NO: 52324 - DNA, 7 bp, Unknown
  misc_feature (1)..( 7): Matrix.002 file - promoters60/1568230
tgtgtga

SEQ ID NO: 52325 - DNA, 6 bp, Unknown
  misc_feature (1)..( 6): Matrix.002 file - promoters60/1568230
taaaca

SEQ ID NO: 52326 - DNA, 7 bp, Unknown
  misc_feature (1)..( 7): Matrix.002 file - promoters60/1568230
acaaaat

SEQ ID NO: 52327 - DNA, 8 bp, Unknown
  misc_feature (1)..( 8): Matrix.002 file - promoters60/1568230
gttaaata

SEQ ID NO: 52328 - DNA, 6 bp, Unknown
  misc_feature (1)..( 6): Matrix.002 file - promoters60/1568230
aaacct

SEQ ID NO: 52329 - DNA, 14 bp, Unknown
  misc_feature (1)..( 14): Matrix.002 file - promoters60/1568386
tttaaaatttttaa

SEQ ID NO: 52330 - DNA, 9 bp, Unknown
  misc_feature (1)..( 9): Matrix.002 file - promoters60/1568386
ttttaaata

SEQ ID NO: 52331 - DNA, 8 bp, Unknown
  misc_feature (1)..( 8): Matrix.002 file - promoters60/1568386
tttaattt

SEQ ID NO: 52332 - DNA, 11 bp, Unknown
  misc_feature (1)..( 11): Matrix.002 file - promoters60/1568386
aaaaatttaat

SEQ ID NO: 52333 - DNA, 13 bp, Unknown
  misc_feature (1)..( 13): Matrix.002 file - promoters60/1568386
taaattgtactta

SEQ ID NO: 52334 - DNA, 11 bp, Unknown
  misc_feature (1)..( 11): Matrix.002 file - promoters60/1568386
attaaaatttt

SEQ ID NO: 52335 - DNA, 7 bp, Unknown
  misc_feature (1)..( 7): Matrix.002 file - promoters60/1568386
tttattt

SEQ ID NO: 52336 - DNA, 11 bp, Unknown
  misc_feature (1)..( 11): Matrix.002 file - promoters60/1568386
caatttaatta

SEQ ID NO: 52337 - DNA, 8 bp, Unknown
  misc_feature (1)..( 8): Matrix.002 file - promoters60/1568405
tttaataa

SEQ ID NO: 52338 - DNA, 7 bp, Unknown
  misc_feature (1)..( 7): Matrix.002 file - promoters60/1568405
ataaaaa

SEQ ID NO: 52339 - DNA, 7 bp, Unknown
  misc_feature (1)..( 7): Matrix.002 file - promoters60/1568405
tttctga

SEQ ID NO: 52340 - DNA, 7 bp, Unknown
  misc_feature (1)..( 7): Matrix.002 file - promoters60/1568405
aacaaaa

SEQ ID NO: 52341 - DNA, 8 bp, Unknown
  misc_feature (1)..( 8): Matrix.002 file - promoters60/1568405
aaaattat

SEQ ID NO: 52342 - DNA, 6 bp, Unknown
  misc_feature (1)..( 6): Matrix.002 file - promoters60/1568405
aggaag

SEQ ID NO: 52343 - DNA, 10 bp, Unknown
  misc_feature (1)..( 10): Matrix.002 file - promoters60/1568405
acttttcctt

SEQ ID NO: 52344 - DNA, 8 bp, Unknown
  misc_feature (1)..( 8): Matrix.002 file - promoters60/1568405
tccaataa

SEQ ID NO: 52345 - DNA, 11 bp, Unknown
  misc_feature (1)..( 11): Matrix.002 file - promoters60/1568405
tttatcattgt

SEQ ID NO: 52346 - DNA, 7 bp, Unknown
  misc_feature (1)..( 7): Matrix.002 file - promoters60/1568405
aaaaaag

SEQ ID NO: 52347 - DNA, 6 bp, Unknown
  misc_feature (1)..( 6): Matrix.002 file - promoters60/1568405
gaaact

SEQ ID NO: 52348 - DNA, 6 bp, Unknown
  misc_feature (1)..( 6): Matrix.002 file - promoters60/1568405
tgagag

SEQ ID NO: 52349 - DNA, 7 bp, Unknown
  misc_feature (1)..( 7): Matrix.002 file - promoters60/1568405
tttgatt

SEQ ID NO: 52350 - DNA, 7 bp, Unknown
  misc_feature (1)..( 7): Matrix.002 file - promoters60/1568405
ttactct

SEQ ID NO: 52351 - DNA, 6 bp, Unknown
  misc_feature (1)..( 6): Matrix.002 file - promoters60/1568405
gaatct

SEQ ID NO: 52352 - DNA, 6 bp, Unknown
  misc_feature (1)..( 6): Matrix.002 file - promoters60/1568405
tttgta

SEQ ID NO: 52353 - DNA, 8 bp, Unknown
  misc_feature (1)..( 8): Matrix.002 file - promoters60/1568405
ccaatggg

SEQ ID NO: 52354 - DNA, 7 bp, Unknown
  misc_feature (1)..( 7): Matrix.002 file - promoters60/1568409
attatat

SEQ ID NO: 52355 - DNA, 9 bp, Unknown
  misc_feature (1)..( 9): Matrix.002 file - promoters60/1568409
tgtcaatct

SEQ ID NO: 52356 - DNA, 7 bp, Unknown
  misc_feature (1)..( 7): Matrix.002 file - promoters60/1568409
acgatta

SEQ ID NO: 52357 - DNA, 9 bp, Unknown
  misc_feature (1)..( 9): Matrix.002 file - promoters60/1568409
caatctttc

SEQ ID NO: 52358 - DNA, 8 bp, Unknown
  misc_feature (1)..( 8): Matrix.002 file - promoters60/1568409
aaagtctt

SEQ ID NO: 52359 - DNA, 6 bp, Unknown
  misc_feature (1)..( 6): Matrix.002 file - promoters60/1568409
catatt

SEQ ID NO: 52360 - DNA, 7 bp, Unknown
  misc_feature (1)..( 7): Matrix.002 file - promoters60/1568409
atttgat

SEQ ID NO: 52361 - DNA, 11 bp, Unknown
  misc_feature (1)..( 11): Matrix.002 file - promoters60/1568409
tgtattcgatt

SEQ ID NO: 52362 - DNA, 7 bp, Unknown
  misc_feature (1)..( 7): Matrix.002 file - promoters60/1568409
ttcgttt

SEQ ID NO: 52363 - DNA, 6 bp, Unknown
  misc_feature (1)..( 6): Matrix.002 file - promoters60/1568409
gtttgg

SEQ ID NO: 52364 - DNA, 6 bp, Unknown
  misc_feature (1)..( 6): Matrix.002 file - promoters60/1568409
cttttt

SEQ ID NO: 52365 - DNA, 7 bp, Unknown
  misc_feature (1)..( 7): Matrix.002 file - promoters60/1568409
cttgatt

SEQ ID NO: 52366 - DNA, 7 bp, Unknown
  misc_feature (1)..( 7): Matrix.002 file - promoters60/1568409
tacattt

SEQ ID NO: 52367 - DNA, 14 bp, Unknown
  misc_feature (1)..( 14): Matrix.002 file - promoters60/1568409
ttattaacttccta

SEQ ID NO: 52368 - DNA, 7 bp, Unknown
  misc_feature (1)..( 7): Matrix.002 file - promoters60/1568409
agagaag

SEQ ID NO: 52369 - DNA, 7 bp, Unknown
  misc_feature (1)..( 7): Matrix.002 file - promoters60/1568409
gagcaaa

SEQ ID NO: 52370 - DNA, 6 bp, Unknown
  misc_feature (1)..( 6): Matrix.002 file - promoters60/1568409
ttattg

SEQ ID NO: 52371 - DNA, 7 bp, Unknown
  misc_feature (1)..( 7): Matrix.002 file - promoters60/1568409
tgacaaa

SEQ ID NO: 52372 - DNA, 8 bp, Unknown
  misc_feature (1)..( 8): Matrix.002 file - promoters60/1568409
tgtcactc

SEQ ID NO: 52373 - DNA, 7 bp, Unknown
  misc_feature (1)..( 7): Matrix.002 file - promoters60/1568409
tataaaa

SEQ ID NO: 52374 - DNA, 9 bp, Unknown
  misc_feature (1)..( 9): Matrix.002 file - promoters60/1568508
tcttataat

SEQ ID NO: 52375 - DNA, 7 bp, Unknown
  misc_feature (1)..( 7): Matrix.002 file - promoters60/1568508
acaccaa

SEQ ID NO: 52376 - DNA, 8 bp, Unknown
  misc_feature (1)..( 8): Matrix.002 file - promoters60/1568508
tcttataa

SEQ ID NO: 52377 - DNA, 8 bp, Unknown
  misc_feature (1)..( 8): Matrix.002 file - promoters60/1568508
aaaacaca

SEQ ID NO: 52378 - DNA, 8 bp, Unknown
  misc_feature (1)..( 8): Matrix.002 file - promoters60/1568508
caaacttt

SEQ ID NO: 52379 - DNA, 6 bp, Unknown
  misc_feature (1)..( 6): Matrix.002 file - promoters60/1568508
aatatt

SEQ ID NO: 52380 - DNA, 6 bp, Unknown
  misc_feature (1)..( 6): Matrix.002 file - promoters60/1568508
atcaaa

SEQ ID NO: 52381 - DNA, 7 bp, Unknown
  misc_feature (1)..( 7): Matrix.002 file - promoters60/1568508
caaatcc

SEQ ID NO: 52382 - DNA, 7 bp, Unknown
  misc_feature (1)..( 7): Matrix.002 file - promoters60/1568508
cacaaga

SEQ ID NO: 52383 - DNA, 8 bp, Unknown
  misc_feature (1)..( 8): Matrix.002 file - promoters60/1568508
ctcgcttc

SEQ ID NO: 52384 - DNA, 8 bp, Unknown
  misc_feature (1)..( 8): Matrix.002 file - promoters60/1568508
cttctcga

SEQ ID NO: 52385 - DNA, 8 bp, Unknown
  misc_feature (1)..( 8): Matrix.002 file - promoters60/1569568
aaaataaa

SEQ ID NO: 52386 - DNA, 8 bp, Unknown
  misc_feature (1)..( 8): Matrix.002 file - promoters60/1569568
taaaataa

SEQ ID NO: 52387 - DNA, 7 bp, Unknown
  misc_feature (1)..( 7): Matrix.002 file - promoters60/1569568
aaataaa

SEQ ID NO: 52388 - DNA, 10 bp, Unknown
  misc_feature (1)..( 10): Matrix.002 file - promoters60/1569568
tttatttaat

SEQ ID NO: 52389 - DNA, 9 bp, Unknown
  misc_feature (1)..( 9): Matrix.002 file - promoters60/1569568
aaacttaat

SEQ ID NO: 52390 - DNA, 15 bp, Unknown
  misc_feature (1)..( 15): Matrix.002 file - promoters60/1569568
ttttactaaaaaaga

SEQ ID NO: 52391 - DNA, 11 bp, Unknown
  misc_feature (1)..( 11): Matrix.002 file - promoters60/1569568
taatgtctcat

SEQ ID NO: 52392 - DNA, 12 bp, Unknown
  misc_feature (1)..( 12): Matrix.002 file - promoters60/1569568
aattttatttat

SEQ ID NO: 52393 - DNA, 11 bp, Unknown
  misc_feature (1)..( 11): Matrix.002 file - promoters60/1569568
tataaccaaaa

SEQ ID NO: 52394 - DNA, 10 bp, Unknown
  misc_feature (1)..( 10): Matrix.002 file - promoters60/1569721
atataattaa

SEQ ID NO: 52395 - DNA, 9 bp, Unknown
  misc_feature (1)..( 9): Matrix.002 file - promoters60/1569721
tatttattt

SEQ ID NO: 52396 - DNA, 9 bp, Unknown
  misc_feature (1)..( 9): Matrix.002 file - promoters60/1569721
aataaaaaa

SEQ ID NO: 52397 - DNA, 9 bp, Unknown
  misc_feature (1)..( 9): Matrix.002 file - promoters60/1569721
taaaaataa

SEQ ID NO: 52398 - DNA, 8 bp, Unknown
  misc_feature (1)..( 8): Matrix.002 file - promoters60/1569721
ttataaat

SEQ ID NO: 52399 - DNA, 8 bp, Unknown
  misc_feature (1)..( 8): Matrix.002 file - promoters60/1569763
acaagaac

SEQ ID NO: 52400 - DNA, 6 bp, Unknown
  misc_feature (1)..( 6): Matrix.002 file - promoters60/1570085
tattat

SEQ ID NO: 52401 - DNA, 7 bp, Unknown
  misc_feature (1)..( 7): Matrix.002 file - promoters60/1570085
tttattt

SEQ ID NO: 52402 - DNA, 8 bp, Unknown
  misc_feature (1)..( 8): Matrix.002 file - promoters60/1570085
tttggaat

SEQ ID NO: 52403 - DNA, 8 bp, Unknown
  misc_feature (1)..( 8): Matrix.002 file - promoters60/1570085
taggccaa

SEQ ID NO: 52404 - DNA, 9 bp, Unknown
  misc_feature (1)..( 9): Matrix.002 file - promoters60/1570085
aaagctata

SEQ ID NO: 52405 - DNA, 7 bp, Unknown
  misc_feature (1)..( 7): Matrix.002 file - promoters60/1570085
tctcata

SEQ ID NO: 52406 - DNA, 8 bp, Unknown
  misc_feature (1)..( 8): Matrix.002 file - promoters60/1570085
ttgctaac

SEQ ID NO: 52407 - DNA, 6 bp, Unknown
  misc_feature (1)..( 6): Matrix.002 file - promoters60/1570085
tatcat

SEQ ID NO: 52408 - DNA, 10 bp, Unknown
  misc_feature (1)..( 10): Matrix.002 file - promoters60/1570085
tctatatata

SEQ ID NO: 52409 - DNA, 6 bp, Unknown
  misc_feature (1)..( 6): Matrix.002 file - promoters60/1570085
catttt

SEQ ID NO: 52410 - DNA, 6 bp, Unknown
  misc_feature (1)..( 6): Matrix.002 file - promoters60/1570085
ttttat

SEQ ID NO: 52411 - DNA, 6 bp, Unknown
  misc_feature (1)..( 6): Matrix.002 file - promoters60/1570085
ttattt

SEQ ID NO: 52412 - DNA, 6 bp, Unknown
  misc_feature (1)..( 6): Matrix.002 file - promoters60/1570085
cattta

SEQ ID NO: 52413 - DNA, 6 bp, Unknown
  misc_feature (1)..( 6): Matrix.002 file - promoters60/1570085
gttgca

SEQ ID NO: 52414 - DNA, 8 bp, Unknown
  misc_feature (1)..( 8): Matrix.002 file - promoters60/1570085
aataatta

SEQ ID NO: 52415 - DNA, 8 bp, Unknown
  misc_feature (1)..( 8): Matrix.002 file - promoters60/1570085
atatatac

SEQ ID NO: 52416 - DNA, 7 bp, Unknown
  misc_feature (1)..( 7): Matrix.002 file - promoters60/1570085
ttagaaa

SEQ ID NO: 52417 - DNA, 7 bp, Unknown
  misc_feature (1)..( 7): Matrix.002 file - promoters60/1570085
tcaaata

SEQ ID NO: 52418 - DNA, 7 bp, Unknown
  misc_feature (1)..( 7): Matrix.002 file - promoters60/1570085
aaaaaag

SEQ ID NO: 52419 - DNA, 7 bp, Unknown
  misc_feature (1)..( 7): Matrix.002 file - promoters60/1570085
agaatta

SEQ ID NO: 52420 - DNA, 7 bp, Unknown
  misc_feature (1)..( 7): Matrix.002 file - promoters60/1570085
ataattt

SEQ ID NO: 52421 - DNA, 7 bp, Unknown
  misc_feature (1)..( 7): Matrix.002 file - promoters60/1570085
aacaatt

SEQ ID NO: 52422 - DNA, 9 bp, Unknown
  misc_feature (1)..( 9): Matrix.002 file - promoters60/1570085
atcacatga

SEQ ID NO: 52423 - DNA, 8 bp, Unknown
  misc_feature (1)..( 8): Matrix.002 file - promoters60/1570085
aaccattc

SEQ ID NO: 52424 - DNA, 8 bp, Unknown
  misc_feature (1)..( 8): Matrix.002 file - promoters60/1570107
tcaacaac

SEQ ID NO: 52425 - DNA, 6 bp, Unknown
  misc_feature (1)..( 6): Matrix.002 file - promoters60/1570107
tttaaa

SEQ ID NO: 52426 - DNA, 7 bp, Unknown
  misc_feature (1)..( 7): Matrix.002 file - promoters60/1570107
aattaag

SEQ ID NO: 52427 - DNA, 8 bp, Unknown
  misc_feature (1)..( 8): Matrix.002 file - promoters60/1570107
atgtagtg

SEQ ID NO: 52428 - DNA, 8 bp, Unknown
  misc_feature (1)..( 8): Matrix.002 file - promoters60/1570107
agaaaaaa

SEQ ID NO: 52429 - DNA, 8 bp, Unknown
  misc_feature (1)..( 8): Matrix.002 file - promoters60/1570107
aaaaaatc

SEQ ID NO: 52430 - DNA, 15 bp, Unknown
  misc_feature (1)..( 15): Matrix.002 file - promoters60/1570107
caataaccataataa

SEQ ID NO: 52431 - DNA, 7 bp, Unknown
  misc_feature (1)..( 7): Matrix.002 file - promoters60/1570107
aaaaaga

SEQ ID NO: 52432 - DNA, 6 bp, Unknown
  misc_feature (1)..( 6): Matrix.002 file - promoters60/1570107
accaaa

SEQ ID NO: 52433 - DNA, 8 bp, Unknown
  misc_feature (1)..( 8): Matrix.002 file - promoters60/1570107
tataattt

SEQ ID NO: 52434 - DNA, 7 bp, Unknown
  misc_feature (1)..( 7): Matrix.002 file - promoters60/1570107
ttcaaac

SEQ ID NO: 52435 - DNA, 6 bp, Unknown
  misc_feature (1)..( 6): Matrix.002 file - promoters60/1570107
gaaatg

SEQ ID NO: 52436 - DNA, 6 bp, Unknown
  misc_feature (1)..( 6): Matrix.002 file - promoters60/1570107
aagcag

SEQ ID NO: 52437 - DNA, 6 bp, Unknown
  misc_feature (1)..( 6): Matrix.002 file - promoters60/1570107
gccgac

SEQ ID NO: 52438 - DNA, 9 bp, Unknown
  misc_feature (1)..( 9): Matrix.002 file - promoters60/1570107
caaaaaaaa

SEQ ID NO: 52439 - DNA, 6 bp, Unknown
  misc_feature (1)..( 6): Matrix.002 file - promoters60/1570107
tctctc

SEQ ID NO: 52440 - DNA, 11 bp, Unknown
  misc_feature (1)..( 11): Matrix.002 file - promoters60/1570107
agagattcgta

SEQ ID NO: 52441 - DNA, 6 bp, Unknown
  misc_feature (1)..( 6): Matrix.002 file - promoters60/1570107
tatttt

SEQ ID NO: 52442 - DNA, 6 bp, Unknown
  misc_feature (1)..( 6): Matrix.002 file - promoters60/1570107
tattat

SEQ ID NO: 52443 - DNA, 8 bp, Unknown
  misc_feature (1)..( 8): Matrix.002 file - promoters60/1570107
aattcttc

SEQ ID NO: 52444 - DNA, 8 bp, Unknown
  misc_feature (1)..( 8): Matrix.002 file - promoters60/1570107
tttacaaa

SEQ ID NO: 52445 - DNA, 8 bp, Unknown
  misc_feature (1)..( 8): Matrix.002 file - promoters60/1570107
taaaaaaa

SEQ ID NO: 52446 - DNA, 6 bp, Unknown
  misc_feature (1)..( 6): Matrix.002 file - promoters60/1570107
aaaaat

SEQ ID NO: 52447 - DNA, 7 bp, Unknown
  misc_feature (1)..( 7): Matrix.002 file - promoters60/1570107
ctttttt

SEQ ID NO: 52448 - DNA, 9 bp, Unknown
  misc_feature (1)..( 9): Matrix.002 file - promoters60/1570116
aataaatat

SEQ ID NO: 52449 - DNA, 6 bp, Unknown
  misc_feature (1)..( 6): Matrix.002 file - promoters60/1570293
cttttt

SEQ ID NO: 52450 - DNA, 6 bp, Unknown
  misc_feature (1)..( 6): Matrix.002 file - promoters60/1570293
ttttaa

SEQ ID NO: 52451 - DNA, 6 bp, Unknown
  misc_feature (1)..( 6): Matrix.002 file - promoters60/1570293
aacaga

SEQ ID NO: 52452 - DNA, 7 bp, Unknown
  misc_feature (1)..( 7): Matrix.002 file - promoters60/1570293
cacaaca

SEQ ID NO: 52453 - DNA, 6 bp, Unknown
  misc_feature (1)..( 6): Matrix.002 file - promoters60/1570293
acaaaa

SEQ ID NO: 52454 - DNA, 8 bp, Unknown
  misc_feature (1)..( 8): Matrix.002 file - promoters60/1570293
aaaatttt

SEQ ID NO: 52455 - DNA, 6 bp, Unknown
  misc_feature (1)..( 6): Matrix.002 file - promoters60/1570293
gaataa

SEQ ID NO: 52456 - DNA, 8 bp, Unknown
  misc_feature (1)..( 8): Matrix.002 file - promoters60/1570293
ttttattc

SEQ ID NO: 52457 - DNA, 8 bp, Unknown
  misc_feature (1)..( 8): Matrix.002 file - promoters60/1570293
gaaattgt

SEQ ID NO: 52458 - DNA, 8 bp, Unknown
  misc_feature (1)..( 8): Matrix.002 file - promoters60/1570293
ggaaagtg

SEQ ID NO: 52459 - DNA, 6 bp, Unknown
  misc_feature (1)..( 6): Matrix.002 file - promoters60/1570293
cacaca

SEQ ID NO: 52460 - DNA, 6 bp, Unknown
  misc_feature (1)..( 6): Matrix.002 file - promoters60/1570293
aaggta

SEQ ID NO: 52461 - DNA, 7 bp, Unknown
  misc_feature (1)..( 7): Matrix.002 file - promoters60/1570293
tataatt

SEQ ID NO: 52462 - DNA, 6 bp, Unknown
  misc_feature (1)..( 6): Matrix.002 file - promoters60/1570293
tcgtta

SEQ ID NO: 52463 - DNA, 7 bp, Unknown
  misc_feature (1)..( 7): Matrix.002 file - promoters60/1570293
aaaatga

SEQ ID NO: 52464 - DNA, 8 bp, Unknown
  misc_feature (1)..( 8): Matrix.002 file - promoters60/1570293
cgggaaaa

SEQ ID NO: 52465 - DNA, 7 bp, Unknown
  misc_feature (1)..( 7): Matrix.002 file - promoters60/1570293
ggaatat

SEQ ID NO: 52466 - DNA, 7 bp, Unknown
  misc_feature (1)..( 7): Matrix.002 file - promoters60/1570293
gaaaaaa

SEQ ID NO: 52467 - DNA, 7 bp, Unknown
  misc_feature (1)..( 7): Matrix.002 file - promoters60/1570293
aaaaaaa

SEQ ID NO: 52468 - DNA, 7 bp, Unknown
  misc_feature (1)..( 7): Matrix.002 file - promoters60/1570293
acaaaat

SEQ ID NO: 52469 - DNA, 7 bp, Unknown
  misc_feature (1)..( 7): Matrix.002 file - promoters60/1570293
ggtttgg

SEQ ID NO: 52470 - DNA, 9 bp, Unknown
  misc_feature (1)..( 9): Matrix.002 file - promoters60/1570474
tttttataa

SEQ ID NO: 52471 - DNA, 8 bp, Unknown
  misc_feature (1)..( 8): Matrix.002 file - promoters60/1570474
atattttt

SEQ ID NO: 52472 - DNA, 12 bp, Unknown
  misc_feature (1)..( 12): Matrix.002 file - promoters60/1570474
taataaattcat

SEQ ID NO: 52473 - DNA, 11 bp, Unknown
  misc_feature (1)..( 11): Matrix.002 file - promoters60/1570622
aaatctccaat

SEQ ID NO: 52474 - DNA, 3 bp, Unknown
  misc_feature (1)..( 3): Matrix.002 file - promoters60/1570860
aat

SEQ ID NO: 52475 - DNA, 10 bp, Unknown
  misc_feature (1)..( 10): Matrix.002 file - promoters60/1570860
ataaaaaatt

SEQ ID NO: 52476 - DNA, 13 bp, Unknown
  misc_feature (1)..( 13): Matrix.002 file - promoters60/1570860
aaactaaaaaaat

SEQ ID NO: 52477 - DNA, 14 bp, Unknown
  misc_feature (1)..( 14): Matrix.002 file - promoters60/1570869
taaatttgttaaaa

SEQ ID NO: 52478 - DNA, 14 bp, Unknown
  misc_feature (1)..( 14): Matrix.002 file - promoters60/1570869
attagaaattttaa

SEQ ID NO: 52479 - DNA, 8 bp, Unknown
  misc_feature (1)..( 8): Matrix.002 file - promoters60/1570869
ttttgaag

SEQ ID NO: 52480 - DNA, 13 bp, Unknown
  misc_feature (1)..( 13): Matrix.002 file - promoters60/1570869
atgttaaatttgt

SEQ ID NO: 52481 - DNA, 10 bp, Unknown
  misc_feature (1)..( 10): Matrix.002 file - promoters60/1570869
tatatataaa

SEQ ID NO: 52482 - DNA, 12 bp, Unknown
  misc_feature (1)..( 12): Matrix.002 file - promoters60/1570869
tatataaaataa

SEQ ID NO: 52483 - DNA, 10 bp, Unknown
  misc_feature (1)..( 10): Matrix.002 file - promoters60/1570869
caattagttt

SEQ ID NO: 52484 - DNA, 10 bp, Unknown
  misc_feature (1)..( 10): Matrix.002 file - promoters60/1570869
atattatttt

SEQ ID NO: 52485 - DNA, 9 bp, Unknown
  misc_feature (1)..( 9): Matrix.002 file - promoters60/1570966
taaaaatat

SEQ ID NO: 52486 - DNA, 9 bp, Unknown
  misc_feature (1)..( 9): Matrix.002 file - promoters60/1570966
aaacaaatt

SEQ ID NO: 52487 - DNA, 13 bp, Unknown
  misc_feature (1)..( 13): Matrix.002 file - promoters60/1570966
caactatataaaa

SEQ ID NO: 52488 - DNA, 9 bp, Unknown
  misc_feature (1)..( 9): Matrix.002 file - promoters60/1570966
tatttaatt

SEQ ID NO: 52489 - DNA, 15 bp, Unknown
  misc_feature (1)..( 15): Matrix.002 file - promoters60/1570966
atatttctttaaaaa

SEQ ID NO: 52490 - DNA, 11 bp, Unknown
  misc_feature (1)..( 11): Matrix.002 file - promoters60/1570966
gtttcaaatag

SEQ ID NO: 52491 - DNA, 11 bp, Unknown
  misc_feature (1)..( 11): Matrix.002 file - promoters60/1570966
ttgagtttaaa

SEQ ID NO: 52492 - DNA, 9 bp, Unknown
  misc_feature (1)..( 9): Matrix.002 file - promoters60/1570966
aaaaataaa

SEQ ID NO: 52493 - DNA, 10 bp, Unknown
  misc_feature (1)..( 10): Matrix.002 file - promoters60/1570966
atattattaa

SEQ ID NO: 52494 - DNA, 10 bp, Unknown
  misc_feature (1)..( 10): Matrix.002 file - promoters60/1571014
tccaatattt

SEQ ID NO: 52495 - DNA, 11 bp, Unknown
  misc_feature (1)..( 11): Matrix.002 file - promoters60/1571422
actaattagta

SEQ ID NO: 52496 - DNA, 11 bp, Unknown
  misc_feature (1)..( 11): Matrix.002 file - promoters60/1571422
ataaattaaat

SEQ ID NO: 52497 - DNA, 7 bp, Unknown
  misc_feature (1)..( 7): Matrix.002 file - promoters60/1571422
aaaaaaa

SEQ ID NO: 52498 - DNA, 9 bp, Unknown
  misc_feature (1)..( 9): Matrix.002 file - promoters60/1571422
ttattttat

SEQ ID NO: 52499 - DNA, 8 bp, Unknown
  misc_feature (1)..( 8): Matrix.002 file - promoters60/1571422
aaataaag

SEQ ID NO: 52500 - DNA, 9 bp, Unknown
  misc_feature (1)..( 9): Matrix.002 file - promoters60/1571422
actatcata

SEQ ID NO: 52501 - DNA, 8 bp, Unknown
  misc_feature (1)..( 8): Matrix.002 file - promoters60/1571422
aatttcat

SEQ ID NO: 52502 - DNA, 9 bp, Unknown
  misc_feature (1)..( 9): Matrix.002 file - promoters60/1571422
cataataaa

SEQ ID NO: 52503 - DNA, 8 bp, Unknown
  misc_feature (1)..( 8): Matrix.002 file - promoters60/1571422
gttttaaa

SEQ ID NO: 52504 - DNA, 8 bp, Unknown
  misc_feature (1)..( 8): Matrix.002 file - promoters60/1572151
attattaa

SEQ ID NO: 52505 - DNA, 11 bp, Unknown
  misc_feature (1)..( 11): Matrix.002 file - promoters60/1572151
taattttaaag

SEQ ID NO: 52506 - DNA, 12 bp, Unknown
  misc_feature (1)..( 12): Matrix.002 file - promoters60/1572151
catctatatata

SEQ ID NO: 52507 - DNA, 9 bp, Unknown
  misc_feature (1)..( 9): Matrix.002 file - promoters60/1572151
taatcaaat

SEQ ID NO: 52508 - DNA, 11 bp, Unknown
  misc_feature (1)..( 11): Matrix.002 file - promoters60/1572151
aaaaacattaa

SEQ ID NO: 52509 - DNA, 9 bp, Unknown
  misc_feature (1)..( 9): Matrix.002 file - promoters60/1572151
attactttt

SEQ ID NO: 52510 - DNA, 9 bp, Unknown
  misc_feature (1)..( 9): Matrix.002 file - promoters60/1572151
attttggtc

SEQ ID NO: 52511 - DNA, 8 bp, Unknown
  misc_feature (1)..( 8): Matrix.002 file - promoters60/1572151
tatttcaa

SEQ ID NO: 52512 - DNA, 8 bp, Unknown
  misc_feature (1)..( 8): Matrix.002 file - promoters60/1572151
ttcaaata

SEQ ID NO: 52513 - DNA, 8 bp, Unknown
  misc_feature (1)..( 8): Matrix.002 file - promoters60/1572151
ataaaaga

SEQ ID NO: 52514 - DNA, 8 bp, Unknown
  misc_feature (1)..( 8): Matrix.002 file - promoters60/1572151
ttagtttg

SEQ ID NO: 52515 - DNA, 8 bp, Unknown
  misc_feature (1)..( 8): Matrix.002 file - promoters60/1572151
atttcaaa

SEQ ID NO: 52516 - DNA, 8 bp, Unknown
  misc_feature (1)..( 8): Matrix.002 file - promoters60/1572151
tgtaaccc

SEQ ID NO: 52517 - DNA, 8 bp, Unknown
  misc_feature (1)..( 8): Matrix.002 file - promoters60/1572404
gttaagct

SEQ ID NO: 52518 - DNA, 8 bp, Unknown
  misc_feature (1)..( 8): Matrix.002 file - promoters60/1572404
gaaaaaaa

SEQ ID NO: 52519 - DNA, 7 bp, Unknown
  misc_feature (1)..( 7): Matrix.002 file - promoters60/1572404
gtcaaaa

SEQ ID NO: 52520 - DNA, 7 bp, Unknown
  misc_feature (1)..( 7): Matrix.002 file - promoters60/1572404
agaaaat

SEQ ID NO: 52521 - DNA, 8 bp, Unknown
  misc_feature (1)..( 8): Matrix.002 file - promoters60/1572404
aattgttt

SEQ ID NO: 52522 - DNA, 8 bp, Unknown
  misc_feature (1)..( 8): Matrix.002 file - promoters60/1572404
ttttttta

SEQ ID NO: 52523 - DNA, 6 bp, Unknown
  misc_feature (1)..( 6): Matrix.002 file - promoters60/1572404
attata

SEQ ID NO: 52524 - DNA, 7 bp, Unknown
  misc_feature (1)..( 7): Matrix.002 file - promoters60/1572404
aaacatc

SEQ ID NO: 52525 - DNA, 8 bp, Unknown
  misc_feature (1)..( 8): Matrix.002 file - promoters60/1572404
tagacctc

SEQ ID NO: 52526 - DNA, 6 bp, Unknown
  misc_feature (1)..( 6): Matrix.002 file - promoters60/1572404
acttat

SEQ ID NO: 52527 - DNA, 9 bp, Unknown
  misc_feature (1)..( 9): Matrix.002 file - promoters60/1572796
tccagaagg

SEQ ID NO: 52528 - DNA, 6 bp, Unknown
  misc_feature (1)..( 6): Matrix.002 file - promoters60/1572796
agtaca

SEQ ID NO: 52529 - DNA, 6 bp, Unknown
  misc_feature (1)..( 6): Matrix.002 file - promoters60/1572796
agctca

SEQ ID NO: 52530 - DNA, 8 bp, Unknown
  misc_feature (1)..( 8): Matrix.002 file - promoters60/1572796
aacacaaa

SEQ ID NO: 52531 - DNA, 8 bp, Unknown
  misc_feature (1)..( 8): Matrix.002 file - promoters60/1572796
acaaaacg

SEQ ID NO: 52532 - DNA, 6 bp, Unknown
  misc_feature (1)..( 6): Matrix.002 file - promoters60/1572796
gtagag

SEQ ID NO: 52533 - DNA, 6 bp, Unknown
  misc_feature (1)..( 6): Matrix.002 file - promoters60/1572796
aacctg

SEQ ID NO: 52534 - DNA, 7 bp, Unknown
  misc_feature (1)..( 7): Matrix.002 file - promoters60/1572796
aatttca

SEQ ID NO: 52535 - DNA, 8 bp, Unknown
  misc_feature (1)..( 8): Matrix.002 file - promoters60/1572796
ttaattaa

SEQ ID NO: 52536 - DNA, 6 bp, Unknown
  misc_feature (1)..( 6): Matrix.002 file - promoters60/1572796
attgta

SEQ ID NO: 52537 - DNA, 6 bp, Unknown
  misc_feature (1)..( 6): Matrix.002 file - promoters60/1572796
gtgaat

SEQ ID NO: 52538 - DNA, 7 bp, Unknown
  misc_feature (1)..( 7): Matrix.002 file - promoters60/1572796
tacagta

SEQ ID NO: 52539 - DNA, 6 bp, Unknown
  misc_feature (1)..( 6): Matrix.002 file - promoters60/1572796
caatat

SEQ ID NO: 52540 - DNA, 8 bp, Unknown
  misc_feature (1)..( 8): Matrix.002 file - promoters60/1572796
aaaaaaat

SEQ ID NO: 52541 - DNA, 13 bp, Unknown
  misc_feature (1)..( 13): Matrix.002 file - promoters60/1573594
caacaatttacaa

SEQ ID NO: 52542 - DNA, 6 bp, Unknown
  misc_feature (1)..( 6): Matrix.002 file - promoters60/1573651
aatcgt

SEQ ID NO: 52543 - DNA, 9 bp, Unknown
  misc_feature (1)..( 9): Matrix.002 file - promoters60/1573651
taagattgg

SEQ ID NO: 52544 - DNA, 7 bp, Unknown
  misc_feature (1)..( 7): Matrix.002 file - promoters60/1573651
ataaaaa

SEQ ID NO: 52545 - DNA, 7 bp, Unknown
  misc_feature (1)..( 7): Matrix.002 file - promoters60/1573651
agaagct

SEQ ID NO: 52546 - DNA, 15 bp, Unknown
  misc_feature (1)..( 15): Matrix.002 file - promoters60/1573651
ttaatatatattact

SEQ ID NO: 52547 - DNA, 6 bp, Unknown
  misc_feature (1)..( 6): Matrix.002 file - promoters60/1573651
ttttaa

SEQ ID NO: 52548 - DNA, 7 bp, Unknown
  misc_feature (1)..( 7): Matrix.002 file - promoters60/1573651
actcaaa

SEQ ID NO: 52549 - DNA, 7 bp, Unknown
  misc_feature (1)..( 7): Matrix.002 file - promoters60/1573651
tttagtt

SEQ ID NO: 52550 - DNA, 9 bp, Unknown
  misc_feature (1)..( 9): Matrix.002 file - promoters60/1573651
agcccaata

SEQ ID NO: 52551 - DNA, 6 bp, Unknown
  misc_feature (1)..( 6): Matrix.002 file - promoters60/1573651
agccca

SEQ ID NO: 52552 - DNA, 8 bp, Unknown
  misc_feature (1)..( 8): Matrix.002 file - promoters60/1573651
tcatcatc

SEQ ID NO: 52553 - DNA, 8 bp, Unknown
  misc_feature (1)..( 8): Matrix.002 file - promoters60/1573651
aagtggta

SEQ ID NO: 52554 - DNA, 7 bp, Unknown
  misc_feature (1)..( 7): Matrix.002 file - promoters60/1573651
gctcatt

SEQ ID NO: 52555 - DNA, 7 bp, Unknown
  misc_feature (1)..( 7): Matrix.002 file - promoters60/1573713
aaatata

SEQ ID NO: 52556 - DNA, 10 bp, Unknown
  misc_feature (1)..( 10): Matrix.002 file - promoters60/1573713
ataaacgaca

SEQ ID NO: 52557 - DNA, 7 bp, Unknown
  misc_feature (1)..( 7): Matrix.002 file - promoters60/1573713
aatcgaa

SEQ ID NO: 52558 - DNA, 10 bp, Unknown
  misc_feature (1)..( 10): Matrix.002 file - promoters60/1573713
atttatttga

SEQ ID NO: 52559 - DNA, 6 bp, Unknown
  misc_feature (1)..( 6): Matrix.002 file - promoters60/1573713
atttgt

SEQ ID NO: 52560 - DNA, 6 bp, Unknown
  misc_feature (1)..( 6): Matrix.002 file - promoters60/1573713
gctctg

SEQ ID NO: 52561 - DNA, 6 bp, Unknown
  misc_feature (1)..( 6): Matrix.002 file - promoters60/1573713
taataa

SEQ ID NO: 52562 - DNA, 7 bp, Unknown
  misc_feature (1)..( 7): Matrix.002 file - promoters60/1573713
taagtta

SEQ ID NO: 52563 - DNA, 7 bp, Unknown
  misc_feature (1)..( 7): Matrix.002 file - promoters60/1573713
attaatt

SEQ ID NO: 52564 - DNA, 10 bp, Unknown
  misc_feature (1)..( 10): Matrix.002 file - promoters60/1573713
attagtaatt

SEQ ID NO: 52565 - DNA, 7 bp, Unknown
  misc_feature (1)..( 7): Matrix.002 file - promoters60/1573713
tgaaaaa

SEQ ID NO: 52566 - DNA, 6 bp, Unknown
  misc_feature (1)..( 6): Matrix.002 file - promoters60/1573713
tatcaa

SEQ ID NO: 52567 - DNA, 7 bp, Unknown
  misc_feature (1)..( 7): Matrix.002 file - promoters60/1573713
taatttt

SEQ ID NO: 52568 - DNA, 6 bp, Unknown
  misc_feature (1)..( 6): Matrix.002 file - promoters60/1573713
ttagaa

SEQ ID NO: 52569 - DNA, 6 bp, Unknown
  misc_feature (1)..( 6): Matrix.002 file - promoters60/1573713
atattt

SEQ ID NO: 52570 - DNA, 8 bp, Unknown
  misc_feature (1)..( 8): Matrix.002 file - promoters60/1573713
tagaagta

SEQ ID NO: 52571 - DNA, 6 bp, Unknown
  misc_feature (1)..( 6): Matrix.002 file - promoters60/1573713
taatct

SEQ ID NO: 52572 - DNA, 10 bp, Unknown
  misc_feature (1)..( 10): Matrix.002 file - promoters60/1573713
gaaatatata

SEQ ID NO: 52573 - DNA, 6 bp, Unknown
  misc_feature (1)..( 6): Matrix.002 file - promoters60/1573713
aaacat

SEQ ID NO: 52574 - DNA, 7 bp, Unknown
  misc_feature (1)..( 7): Matrix.002 file - promoters60/1573713
ataattt

SEQ ID NO: 52575 - DNA, 10 bp, Unknown
  misc_feature (1)..( 10): Matrix.002 file - promoters60/1573713
agatatattt

SEQ ID NO: 52576 - DNA, 8 bp, Unknown
  misc_feature (1)..( 8): Matrix.002 file - promoters60/1573941
ctggcaat

SEQ ID NO: 52577 - DNA, 8 bp, Unknown
  misc_feature (1)..( 8): Matrix.002 file - promoters60/1573941
aaaaatag

SEQ ID NO: 52578 - DNA, 6 bp, Unknown
  misc_feature (1)..( 6): Matrix.002 file - promoters60/1573941
aaaaag

SEQ ID NO: 52579 - DNA, 6 bp, Unknown
  misc_feature (1)..( 6): Matrix.002 file - promoters60/1573941
tgcatt

SEQ ID NO: 52580 - DNA, 7 bp, Unknown
  misc_feature (1)..( 7): Matrix.002 file - promoters60/1573941
agcgttg

SEQ ID NO: 52581 - DNA, 6 bp, Unknown
  misc_feature (1)..( 6): Matrix.002 file - promoters60/1573941
gaggat

SEQ ID NO: 52582 - DNA, 8 bp, Unknown
  misc_feature (1)..( 8): Matrix.002 file - promoters60/1573941
aaaactgc

SEQ ID NO: 52583 - DNA, 6 bp, Unknown
  misc_feature (1)..( 6): Matrix.002 file - promoters60/1573941
aaacca

SEQ ID NO: 52584 - DNA, 7 bp, Unknown
  misc_feature (1)..( 7): Matrix.002 file - promoters60/1573945
cagaaga

SEQ ID NO: 52585 - DNA, 7 bp, Unknown
  misc_feature (1)..( 7): Matrix.002 file - promoters60/1573945
aatctct

SEQ ID NO: 52586 - DNA, 10 bp, Unknown
  misc_feature (1)..( 10): Matrix.002 file - promoters60/1573945
aaagatttct

SEQ ID NO: 52587 - DNA, 6 bp, Unknown
  misc_feature (1)..( 6): Matrix.002 file - promoters60/1573945
actttg

SEQ ID NO: 52588 - DNA, 6 bp, Unknown
  misc_feature (1)..( 6): Matrix.002 file - promoters60/1573945
tttatt

SEQ ID NO: 52589 - DNA, 8 bp, Unknown
  misc_feature (1)..( 8): Matrix.002 file - promoters60/1573945
tattgtaa

SEQ ID NO: 52590 - DNA, 10 bp, Unknown
  misc_feature (1)..( 10): Matrix.002 file - promoters60/1573945
tttaaaattt

SEQ ID NO: 52591 - DNA, 6 bp, Unknown
  misc_feature (1)..( 6): Matrix.002 file - promoters60/1573945
gtatca

SEQ ID NO: 52592 - DNA, 6 bp, Unknown
  misc_feature (1)..( 6): Matrix.002 file - promoters60/1573945
tgagag

SEQ ID NO: 52593 - DNA, 6 bp, Unknown
  misc_feature (1)..( 6): Matrix.002 file - promoters60/1573945
tttatt

SEQ ID NO: 52594 - DNA, 7 bp, Unknown
  misc_feature (1)..( 7): Matrix.002 file - promoters60/1573945
cgacgag

SEQ ID NO: 52595 - DNA, 6 bp, Unknown
  misc_feature (1)..( 6): Matrix.002 file - promoters60/1573945
tctagg

SEQ ID NO: 52596 - DNA, 7 bp, Unknown
  misc_feature (1)..( 7): Matrix.002 file - promoters60/1573945
aaaatta

SEQ ID NO: 52597 - DNA, 7 bp, Unknown
  misc_feature (1)..( 7): Matrix.002 file - promoters60/1573945
taaaccg

SEQ ID NO: 52598 - DNA, 7 bp, Unknown
  misc_feature (1)..( 7): Matrix.002 file - promoters60/1574029
ttaccct

SEQ ID NO: 52599 - DNA, 6 bp, Unknown
  misc_feature (1)..( 6): Matrix.002 file - promoters60/1574029
taaccg

SEQ ID NO: 52600 - DNA, 6 bp, Unknown
  misc_feature (1)..( 6): Matrix.002 file - promoters60/1574029
gttaaa

SEQ ID NO: 52601 - DNA, 7 bp, Unknown
  misc_feature (1)..( 7): Matrix.002 file - promoters60/1574029
caaagtc

SEQ ID NO: 52602 - DNA, 8 bp, Unknown
  misc_feature (1)..( 8): Matrix.002 file - promoters60/1574029
atatcttc

SEQ ID NO: 52603 - DNA, 6 bp, Unknown
  misc_feature (1)..( 6): Matrix.002 file - promoters60/1574029
gagata

SEQ ID NO: 52604 - DNA, 7 bp, Unknown
  misc_feature (1)..( 7): Matrix.002 file - promoters60/1574029
atgtgga

SEQ ID NO: 52605 - DNA, 7 bp, Unknown
  misc_feature (1)..( 7): Matrix.002 file - promoters60/1574029
agcaaat

SEQ ID NO: 52606 - DNA, 6 bp, Unknown
  misc_feature (1)..( 6): Matrix.002 file - promoters60/1574029
aatgct

SEQ ID NO: 52607 - DNA, 7 bp, Unknown
  misc_feature (1)..( 7): Matrix.002 file - promoters60/1574029
caatcta

SEQ ID NO: 52608 - DNA, 8 bp, Unknown
  misc_feature (1)..( 8): Matrix.002 file - promoters60/1574029
atttcaaa

SEQ ID NO: 52609 - DNA, 8 bp, Unknown
  misc_feature (1)..( 8): Matrix.002 file - promoters60/1574029
tttgcgaa

SEQ ID NO: 52610 - DNA, 10 bp, Unknown
  misc_feature (1)..( 10): Matrix.002 file - promoters60/1574029
ttcaagaaga

SEQ ID NO: 52611 - DNA, 6 bp, Unknown
  misc_feature (1)..( 6): Matrix.002 file - promoters60/1574029
cgttga

SEQ ID NO: 52612 - DNA, 9 bp, Unknown
  misc_feature (1)..( 9): Matrix.002 file - promoters60/1574029
aataaagat

SEQ ID NO: 52613 - DNA, 6 bp, Unknown
  misc_feature (1)..( 6): Matrix.002 file - promoters60/1574059
caagga

SEQ ID NO: 52614 - DNA, 6 bp, Unknown
  misc_feature (1)..( 6): Matrix.002 file - promoters60/1574059
gtttca

SEQ ID NO: 52615 - DNA, 7 bp, Unknown
  misc_feature (1)..( 7): Matrix.002 file - promoters60/1574059
ttcatca

SEQ ID NO: 52616 - DNA, 6 bp, Unknown
  misc_feature (1)..( 6): Matrix.002 file - promoters60/1574059
gtgtta

SEQ ID NO: 52617 - DNA, 8 bp, Unknown
  misc_feature (1)..( 8): Matrix.002 file - promoters60/1574059
ttgtaatc

SEQ ID NO: 52618 - DNA, 8 bp, Unknown
  misc_feature (1)..( 8): Matrix.002 file - promoters60/1574059
atgaagaa

SEQ ID NO: 52619 - DNA, 6 bp, Unknown
  misc_feature (1)..( 6): Matrix.002 file - promoters60/1574059
ttatgt

SEQ ID NO: 52620 - DNA, 8 bp, Unknown
  misc_feature (1)..( 8): Matrix.002 file - promoters60/1574059
tttagttt

SEQ ID NO: 52621 - DNA, 7 bp, Unknown
  misc_feature (1)..( 7): Matrix.002 file - promoters60/1574059
gtaaaac

SEQ ID NO: 52622 - DNA, 8 bp, Unknown
  misc_feature (1)..( 8): Matrix.002 file - promoters60/1574059
agacgaac

SEQ ID NO: 52623 - DNA, 6 bp, Unknown
  misc_feature (1)..( 6): Matrix.002 file - promoters60/1574059
gaagaa

SEQ ID NO: 52624 - DNA, 6 bp, Unknown
  misc_feature (1)..( 6): Matrix.002 file - promoters60/1574059
tggaga

SEQ ID NO: 52625 - DNA, 8 bp, Unknown
  misc_feature (1)..( 8): Matrix.002 file - promoters60/1574059
aatgcttt

SEQ ID NO: 52626 - DNA, 7 bp, Unknown
  misc_feature (1)..( 7): Matrix.002 file - promoters60/1574059
atatttt

SEQ ID NO: 52627 - DNA, 7 bp, Unknown
  misc_feature (1)..( 7): Matrix.002 file - promoters60/1574059
aaataaa

SEQ ID NO: 52628 - DNA, 6 bp, Unknown
  misc_feature (1)..( 6): Matrix.002 file - promoters60/1574059
caaagg

SEQ ID NO: 52629 - DNA, 7 bp, Unknown
  misc_feature (1)..( 7): Matrix.002 file - promoters60/1580171
aatcgta

SEQ ID NO: 52630 - DNA, 7 bp, Unknown
  misc_feature (1)..( 7): Matrix.002 file - promoters60/1580171
agaaaaa

SEQ ID NO: 52631 - DNA, 7 bp, Unknown
  misc_feature (1)..( 7): Matrix.002 file - promoters60/1580171
attatct

SEQ ID NO: 52632 - DNA, 6 bp, Unknown
  misc_feature (1)..( 6): Matrix.002 file - promoters60/1580171
atgaaa

SEQ ID NO: 52633 - DNA, 8 bp, Unknown
  misc_feature (1)..( 8): Matrix.002 file - promoters60/1580171
attggtaa

SEQ ID NO: 52634 - DNA, 8 bp, Unknown
  misc_feature (1)..( 8): Matrix.002 file - promoters60/1580171
ttgaattt

SEQ ID NO: 52635 - DNA, 8 bp, Unknown
  misc_feature (1)..( 8): Matrix.002 file - promoters60/1580171
aactaaaa

SEQ ID NO: 52636 - DNA, 7 bp, Unknown
  misc_feature (1)..( 7): Matrix.002 file - promoters60/1580171
cttcttc

SEQ ID NO: 52637 - DNA, 7 bp, Unknown
  misc_feature (1)..( 7): Matrix.002 file - promoters60/1580171
taaaaaa

SEQ ID NO: 52638 - DNA, 7 bp, Unknown
  misc_feature (1)..( 7): Matrix.002 file - promoters60/1580171
aaaattc

SEQ ID NO: 52639 - DNA, 9 bp, Unknown
  misc_feature (1)..( 9): Matrix.002 file - promoters60/1580171
tttataaac

SEQ ID NO: 52640 - DNA, 6 bp, Unknown
  misc_feature (1)..( 6): Matrix.002 file - promoters60/1580171
atgcat

SEQ ID NO: 52641 - DNA, 8 bp, Unknown
  misc_feature (1)..( 8): Matrix.002 file - promoters60/1580171
aaaatctt

SEQ ID NO: 52642 - DNA, 7 bp, Unknown
  misc_feature (1)..( 7): Matrix.002 file - promoters60/1580171
aagatgt

SEQ ID NO: 52643 - DNA, 7 bp, Unknown
  misc_feature (1)..( 7): Matrix.002 file - promoters60/1580171
ttgaaga

SEQ ID NO: 52644 - DNA, 6 bp, Unknown
  misc_feature (1)..( 6): Matrix.002 file - promoters60/1580171
attttt

SEQ ID NO: 52645 - DNA, 7 bp, Unknown
  misc_feature (1)..( 7): Matrix.002 file - promoters60/1580171
taaattt

SEQ ID NO: 52646 - DNA, 6 bp, Unknown
  misc_feature (1)..( 6): Matrix.002 file - promoters60/1580171
atgatt

SEQ ID NO: 52647 - DNA, 7 bp, Unknown
  misc_feature (1)..( 7): Matrix.002 file - promoters60/1580171
tttataa

SEQ ID NO: 52648 - DNA, 7 bp, Unknown
  misc_feature (1)..( 7): Matrix.002 file - promoters60/1580171
aaattta

SEQ ID NO: 52649 - DNA, 6 bp, Unknown
  misc_feature (1)..( 6): Matrix.002 file - promoters60/1580171
aaataa

SEQ ID NO: 52650 - DNA, 8 bp, Unknown
  misc_feature (1)..( 8): Matrix.002 file - promoters60/1580171
aaaaaaaa

SEQ ID NO: 52651 - DNA, 8 bp, Unknown
  misc_feature (1)..( 8): Matrix.002 file - promoters60/1580171
attatttt

SEQ ID NO: 52652 - DNA, 9 bp, Unknown
  misc_feature (1)..( 9): Matrix.002 file - promoters60/1580171
ttaatattt

SEQ ID NO: 52653 - DNA, 9 bp, Unknown
  misc_feature (1)..( 9): Matrix.002 file - promoters60/1580500
aattttgac

SEQ ID NO: 52654 - DNA, 11 bp, Unknown
  misc_feature (1)..( 11): Matrix.002 file - promoters60/1580500
atgttaaacat

SEQ ID NO: 52655 - DNA, 4 bp, Unknown
  misc_feature (1)..( 4): Matrix.002 file - promoters60/1580500
tatt

SEQ ID NO: 52656 - DNA, 12 bp, Unknown
  misc_feature (1)..( 12): Matrix.002 file - promoters60/1580870
taattttaattt

SEQ ID NO: 52657 - DNA, 8 bp, Unknown
  misc_feature (1)..( 8): Matrix.002 file - promoters60/1580870
atttaaaa

SEQ ID NO: 52658 - DNA, 8 bp, Unknown
  misc_feature (1)..( 8): Matrix.002 file - promoters60/1580870
atatttgt

SEQ ID NO: 52659 - DNA, 8 bp, Unknown
  misc_feature (1)..( 8): Matrix.002 file - promoters60/1580870
tttctaaa

SEQ ID NO: 52660 - DNA, 7 bp, Unknown
  misc_feature (1)..( 7): Matrix.002 file - promoters60/1580870
atttaat

SEQ ID NO: 52661 - DNA, 9 bp, Unknown
  misc_feature (1)..( 9): Matrix.002 file - promoters60/1580870
tatatttaa

SEQ ID NO: 52662 - DNA, 7 bp, Unknown
  misc_feature (1)..( 7): Matrix.002 file - promoters60/1580870
tgtatat

SEQ ID NO: 52663 - DNA, 14 bp, Unknown
  misc_feature (1)..( 14): Matrix.002 file - promoters60/1580932
cacaaaactaaaaa

SEQ ID NO: 52664 - DNA, 11 bp, Unknown
  misc_feature (1)..( 11): Matrix.002 file - promoters60/1580932
atactaaattg

SEQ ID NO: 52665 - DNA, 8 bp, Unknown
  misc_feature (1)..( 8): Matrix.002 file - promoters60/1580932
aaaaatca

SEQ ID NO: 52666 - DNA, 7 bp, Unknown
  misc_feature (1)..( 7): Matrix.002 file - promoters60/1580983
aattttt

SEQ ID NO: 52667 - DNA, 6 bp, Unknown
  misc_feature (1)..( 6): Matrix.002 file - promoters60/1580983
tttact

SEQ ID NO: 52668 - DNA, 7 bp, Unknown
  misc_feature (1)..( 7): Matrix.002 file - promoters60/1580983
cctcaga

SEQ ID NO: 52669 - DNA, 8 bp, Unknown
  misc_feature (1)..( 8): Matrix.002 file - promoters60/1580983
aaaaaatc

SEQ ID NO: 52670 - DNA, 11 bp, Unknown
  misc_feature (1)..( 11): Matrix.002 file - promoters60/1580983
taaatgagatt

SEQ ID NO: 52671 - DNA, 7 bp, Unknown
  misc_feature (1)..( 7): Matrix.002 file - promoters60/1580983
gaaaggg

SEQ ID NO: 52672 - DNA, 7 bp, Unknown
  misc_feature (1)..( 7): Matrix.002 file - promoters60/1580983
atacaaa

SEQ ID NO: 52673 - DNA, 6 bp, Unknown
  misc_feature (1)..( 6): Matrix.002 file - promoters60/1580983
agagaa

SEQ ID NO: 52674 - DNA, 6 bp, Unknown
  misc_feature (1)..( 6): Matrix.002 file - promoters60/1580983
taaaat

SEQ ID NO: 52675 - DNA, 7 bp, Unknown
  misc_feature (1)..( 7): Matrix.002 file - promoters60/1580983
attaatt

SEQ ID NO: 52676 - DNA, 6 bp, Unknown
  misc_feature (1)..( 6): Matrix.002 file - promoters60/1580983
aaaatc

SEQ ID NO: 52677 - DNA, 10 bp, Unknown
  misc_feature (1)..( 10): Matrix.002 file - promoters60/1581038
atttttttca

SEQ ID NO: 52678 - DNA, 8 bp, Unknown
  misc_feature (1)..( 8): Matrix.002 file - promoters60/1581038
attttaca

SEQ ID NO: 52679 - DNA, 10 bp, Unknown
  misc_feature (1)..( 10): Matrix.002 file - promoters60/1581038
atttattttg

SEQ ID NO: 52680 - DNA, 10 bp, Unknown
  misc_feature (1)..( 10): Matrix.002 file - promoters60/1581038
tttttatttt

SEQ ID NO: 52681 - DNA, 8 bp, Unknown
  misc_feature (1)..( 8): Matrix.002 file - promoters60/1581038
catttttc

SEQ ID NO: 52682 - DNA, 10 bp, Unknown
  misc_feature (1)..( 10): Matrix.002 file - promoters60/1581038
aaatattaga

SEQ ID NO: 52683 - DNA, 8 bp, Unknown
  misc_feature (1)..( 8): Matrix.002 file - promoters60/1581038
tatatata

SEQ ID NO: 52684 - DNA, 7 bp, Unknown
  misc_feature (1)..( 7): Matrix.002 file - promoters60/1581038
tataaat

SEQ ID NO: 52685 - DNA, 8 bp, Unknown
  misc_feature (1)..( 8): Matrix.002 file - promoters60/1581038
aaatttta

SEQ ID NO: 52686 - DNA, 8 bp, Unknown
  misc_feature (1)..( 8): Matrix.002 file - promoters60/1581038
tatttttt

SEQ ID NO: 52687 - DNA, 7 bp, Unknown
  misc_feature (1)..( 7): Matrix.002 file - promoters60/1581038
aaaaaat

SEQ ID NO: 52688 - DNA, 8 bp, Unknown
  misc_feature (1)..( 8): Matrix.002 file - promoters60/1581038
tctctctt

SEQ ID NO: 52689 - DNA, 7 bp, Unknown
  misc_feature (1)..( 7): Matrix.002 file - promoters60/1581038
ctctctt

SEQ ID NO: 52690 - DNA, 8 bp, Unknown
  misc_feature (1)..( 8): Matrix.002 file - promoters60/1581038
caatattg

SEQ ID NO: 52691 - DNA, 10 bp, Unknown
  misc_feature (1)..( 10): Matrix.002 file - promoters60/1581038
aattttattt

SEQ ID NO: 52692 - DNA, 9 bp, Unknown
  misc_feature (1)..( 9): Matrix.002 file - promoters60/1581987
gtggctttg

SEQ ID NO: 52693 - DNA, 10 bp, Unknown
  misc_feature (1)..( 10): Matrix.002 file - promoters60/1581987
tttatgaata

SEQ ID NO: 52694 - DNA, 6 bp, Unknown
  misc_feature (1)..( 6): Matrix.002 file - promoters60/1582293
taacca

SEQ ID NO: 52695 - DNA, 11 bp, Unknown
  misc_feature (1)..( 11): Matrix.002 file - promoters60/1582293
atattacaata

SEQ ID NO: 52696 - DNA, 9 bp, Unknown
  misc_feature (1)..( 9): Matrix.002 file - promoters60/1582293
aataatgat

SEQ ID NO: 52697 - DNA, 7 bp, Unknown
  misc_feature (1)..( 7): Matrix.002 file - promoters60/1582293
ggtttaa

SEQ ID NO: 52698 - DNA, 7 bp, Unknown
  misc_feature (1)..( 7): Matrix.002 file - promoters60/1582293
tttcttt

SEQ ID NO: 52699 - DNA, 7 bp, Unknown
  misc_feature (1)..( 7): Matrix.002 file - promoters60/1582293
ccatttt

SEQ ID NO: 52700 - DNA, 6 bp, Unknown
  misc_feature (1)..( 6): Matrix.002 file - promoters60/1582293
acataa

SEQ ID NO: 52701 - DNA, 10 bp, Unknown
  misc_feature (1)..( 10): Matrix.002 file - promoters60/1582293
atataaatta

SEQ ID NO: 52702 - DNA, 7 bp, Unknown
  misc_feature (1)..( 7): Matrix.002 file - promoters60/1582293
atattat

SEQ ID NO: 52703 - DNA, 11 bp, Unknown
  misc_feature (1)..( 11): Matrix.002 file - promoters60/1582293
tagattttttt

SEQ ID NO: 52704 - DNA, 6 bp, Unknown
  misc_feature (1)..( 6): Matrix.002 file - promoters60/1582293
taaaaa

SEQ ID NO: 52705 - DNA, 6 bp, Unknown
  misc_feature (1)..( 6): Matrix.002 file - promoters60/1582293
aaaaca

SEQ ID NO: 52706 - DNA, 11 bp, Unknown
  misc_feature (1)..( 11): Matrix.002 file - promoters60/1582293
aaaaggcccaa

SEQ ID NO: 52707 - DNA, 6 bp, Unknown
  misc_feature (1)..( 6): Matrix.002 file - promoters60/1582293
atcaaa

SEQ ID NO: 52708 - DNA, 6 bp, Unknown
  misc_feature (1)..( 6): Matrix.002 file - promoters60/1582293
tacaac

SEQ ID NO: 52709 - DNA, 7 bp, Unknown
  misc_feature (1)..( 7): Matrix.002 file - promoters60/1582293
taacatc

SEQ ID NO: 52710 - DNA, 8 bp, Unknown
  misc_feature (1)..( 8): Matrix.002 file - promoters60/1582293
atagcaca

SEQ ID NO: 52711 - DNA, 8 bp, Unknown
  misc_feature (1)..( 8): Matrix.002 file - promoters60/1582293
atcaaata

SEQ ID NO: 52712 - DNA, 6 bp, Unknown
  misc_feature (1)..( 6): Matrix.002 file - promoters60/1582293
taaaaa

SEQ ID NO: 52713 - DNA, 7 bp, Unknown
  misc_feature (1)..( 7): Matrix.002 file - promoters60/1582293
aaaatat

SEQ ID NO: 52714 - DNA, 7 bp, Unknown
  misc_feature (1)..( 7): Matrix.002 file - promoters60/1582293
aaaaaag

SEQ ID NO: 52715 - DNA, 8 bp, Unknown
  misc_feature (1)..( 8): Matrix.002 file - promoters60/1582293
aaacatag

SEQ ID NO: 52716 - DNA, 9 bp, Unknown
  misc_feature (1)..( 9): Matrix.002 file - promoters60/1582322
tctatttat

SEQ ID NO: 52717 - DNA, 6 bp, Unknown
  misc_feature (1)..( 6): Matrix.002 file - promoters60/1582322
gcacaa

SEQ ID NO: 52718 - DNA, 7 bp, Unknown
  misc_feature (1)..( 7): Matrix.002 file - promoters60/1582322
tcagaat

SEQ ID NO: 52719 - DNA, 7 bp, Unknown
  misc_feature (1)..( 7): Matrix.002 file - promoters60/1582322
gaactta

SEQ ID NO: 52720 - DNA, 6 bp, Unknown
  misc_feature (1)..( 6): Matrix.002 file - promoters60/1582322
gttttg

SEQ ID NO: 52721 - DNA, 6 bp, Unknown
  misc_feature (1)..( 6): Matrix.002 file - promoters60/1582322
atctta

SEQ ID NO: 52722 - DNA, 7 bp, Unknown
  misc_feature (1)..( 7): Matrix.002 file - promoters60/1582322
aatcaaa

SEQ ID NO: 52723 - DNA, 7 bp, Unknown
  misc_feature (1)..( 7): Matrix.002 file - promoters60/1582322
ttccctt

SEQ ID NO: 52724 - DNA, 7 bp, Unknown
  misc_feature (1)..( 7): Matrix.002 file - promoters60/1582322
tttatta

SEQ ID NO: 52725 - DNA, 8 bp, Unknown
  misc_feature (1)..( 8): Matrix.002 file - promoters60/1582322
tttatcta

SEQ ID NO: 52726 - DNA, 6 bp, Unknown
  misc_feature (1)..( 6): Matrix.002 file - promoters60/1582322
attttt

SEQ ID NO: 52727 - DNA, 8 bp, Unknown
  misc_feature (1)..( 8): Matrix.002 file - promoters60/1582322
aaagattt

SEQ ID NO: 52728 - DNA, 8 bp, Unknown
  misc_feature (1)..( 8): Matrix.002 file - promoters60/1582322
ggtatttg

SEQ ID NO: 52729 - DNA, 6 bp, Unknown
  misc_feature (1)..( 6): Matrix.002 file - promoters60/1582322
atgaat

SEQ ID NO: 52730 - DNA, 7 bp, Unknown
  misc_feature (1)..( 7): Matrix.002 file - promoters60/1582322
ttacaat

SEQ ID NO: 52731 - DNA, 8 bp, Unknown
  misc_feature (1)..( 8): Matrix.002 file - promoters60/1582322
aattataa

SEQ ID NO: 52732 - DNA, 14 bp, Unknown
  misc_feature (1)..( 14): Matrix.002 file - promoters60/1582322
aatttctcccaaaa

SEQ ID NO: 52733 - DNA, 8 bp, Unknown
  misc_feature (1)..( 8): Matrix.002 file - promoters60/1582322
aatcaata

SEQ ID NO: 52734 - DNA, 6 bp, Unknown
  misc_feature (1)..( 6): Matrix.002 file - promoters60/1582322
ttttct

SEQ ID NO: 52735 - DNA, 8 bp, Unknown
  misc_feature (1)..( 8): Matrix.002 file - promoters60/1582322
gaagaaat

SEQ ID NO: 52736 - DNA, 7 bp, Unknown
  misc_feature (1)..( 7): Matrix.002 file - promoters60/1582322
aagcttc

SEQ ID NO: 52737 - DNA, 7 bp, Unknown
  misc_feature (1)..( 7): Matrix.002 file - promoters60/1582576
tatttag

SEQ ID NO: 52738 - DNA, 11 bp, Unknown
  misc_feature (1)..( 11): Matrix.002 file - promoters60/1582576
aaaaaatatat

SEQ ID NO: 52739 - DNA, 8 bp, Unknown
  misc_feature (1)..( 8): Matrix.002 file - promoters60/1582576
taaaataa

SEQ ID NO: 52740 - DNA, 8 bp, Unknown
  misc_feature (1)..( 8): Matrix.002 file - promoters60/1582576
taattaat

SEQ ID NO: 52741 - DNA, 7 bp, Unknown
  misc_feature (1)..( 7): Matrix.002 file - promoters60/1582576
aaataat

SEQ ID NO: 52742 - DNA, 7 bp, Unknown
  misc_feature (1)..( 7): Matrix.002 file - promoters60/1582576
aataaaa

SEQ ID NO: 52743 - DNA, 7 bp, Unknown
  misc_feature (1)..( 7): Matrix.002 file - promoters60/1582576
ctaaaat

SEQ ID NO: 52744 - DNA, 7 bp, Unknown
  misc_feature (1)..( 7): Matrix.002 file - promoters60/1582576
aaaagac

SEQ ID NO: 52745 - DNA, 8 bp, Unknown
  misc_feature (1)..( 8): Matrix.002 file - promoters60/1582576
aaaataaa

SEQ ID NO: 52746 - DNA, 7 bp, Unknown
  misc_feature (1)..( 7): Matrix.002 file - promoters60/1582658
tttcttt

SEQ ID NO: 52747 - DNA, 7 bp, Unknown
  misc_feature (1)..( 7): Matrix.002 file - promoters60/1582658
ttttaat

SEQ ID NO: 52748 - DNA, 9 bp, Unknown
  misc_feature (1)..( 9): Matrix.002 file - promoters60/1582658
attttttag

SEQ ID NO: 52749 - DNA, 7 bp, Unknown
  misc_feature (1)..( 7): Matrix.002 file - promoters60/1582658
gaagttt

SEQ ID NO: 52750 - DNA, 8 bp, Unknown
  misc_feature (1)..( 8): Matrix.002 file - promoters60/1582658
aaatgttt

SEQ ID NO: 52751 - DNA, 7 bp, Unknown
  misc_feature (1)..( 7): Matrix.002 file - promoters60/1582658
atcattt

SEQ ID NO: 52752 - DNA, 8 bp, Unknown
  misc_feature (1)..( 8): Matrix.002 file - promoters60/1582658
atttcatc

SEQ ID NO: 52753 - DNA, 9 bp, Unknown
  misc_feature (1)..( 9): Matrix.002 file - promoters60/1583044
attcataat

SEQ ID NO: 52754 - DNA, 7 bp, Unknown
  misc_feature (1)..( 7): Matrix.002 file - promoters60/1595585
tagctct

SEQ ID NO: 52755 - DNA, 8 bp, Unknown
  misc_feature (1)..( 8): Matrix.002 file - promoters60/1595585
ttcttaac

SEQ ID NO: 52756 - DNA, 6 bp, Unknown
  misc_feature (1)..( 6): Matrix.002 file - promoters60/1595585
aatgaa

SEQ ID NO: 52757 - DNA, 6 bp, Unknown
  misc_feature (1)..( 6): Matrix.002 file - promoters60/1595585
aaactc

SEQ ID NO: 52758 - DNA, 6 bp, Unknown
  misc_feature (1)..( 6): Matrix.002 file - promoters60/1595585
aaaata

SEQ ID NO: 52759 - DNA, 7 bp, Unknown
  misc_feature (1)..( 7): Matrix.002 file - promoters60/1595585
ctaaatt

SEQ ID NO: 52760 - DNA, 7 bp, Unknown
  misc_feature (1)..( 7): Matrix.002 file - promoters60/1595585
aaaaaat

SEQ ID NO: 52761 - DNA, 6 bp, Unknown
  misc_feature (1)..( 6): Matrix.002 file - promoters60/1595585
gacccg

SEQ ID NO: 52762 - DNA, 9 bp, Unknown
  misc_feature (1)..( 9): Matrix.002 file - promoters60/1595585
attatatcc

SEQ ID NO: 52763 - DNA, 7 bp, Unknown
  misc_feature (1)..( 7): Matrix.002 file - promoters60/1595585
ctgatct

SEQ ID NO: 52764 - DNA, 6 bp, Unknown
  misc_feature (1)..( 6): Matrix.002 file - promoters60/1595585
accact

SEQ ID NO: 52765 - DNA, 10 bp, Unknown
  misc_feature (1)..( 10): Matrix.002 file - promoters60/1595585
cactcggttt

SEQ ID NO: 52766 - DNA, 7 bp, Unknown
  misc_feature (1)..( 7): Matrix.002 file - promoters60/1595585
ttttcat

SEQ ID NO: 52767 - DNA, 8 bp, Unknown
  misc_feature (1)..( 8): Matrix.002 file - promoters60/1595651
aaagaaat

SEQ ID NO: 52768 - DNA, 9 bp, Unknown
  misc_feature (1)..( 9): Matrix.002 file - promoters60/1595651
aatatccat

SEQ ID NO: 52769 - DNA, 7 bp, Unknown
  misc_feature (1)..( 7): Matrix.002 file - promoters60/1595651
taacttg

SEQ ID NO: 52770 - DNA, 7 bp, Unknown
  misc_feature (1)..( 7): Matrix.002 file - promoters60/1595651
tcaaatt

SEQ ID NO: 52771 - DNA, 8 bp, Unknown
  misc_feature (1)..( 8): Matrix.002 file - promoters60/1595651
aacaaaaa

SEQ ID NO: 52772 - DNA, 6 bp, Unknown
  misc_feature (1)..( 6): Matrix.002 file - promoters60/1595651
acattt

SEQ ID NO: 52773 - DNA, 10 bp, Unknown
  misc_feature (1)..( 10): Matrix.002 file - promoters60/1595651
aagaaaacaa

SEQ ID NO: 52774 - DNA, 6 bp, Unknown
  misc_feature (1)..( 6): Matrix.002 file - promoters60/1595651
caaaaa

SEQ ID NO: 52775 - DNA, 10 bp, Unknown
  misc_feature (1)..( 10): Matrix.002 file - promoters60/1595651
ctaaacgggc

SEQ ID NO: 52776 - DNA, 7 bp, Unknown
  misc_feature (1)..( 7): Matrix.002 file - promoters60/1595651
gtcatat

SEQ ID NO: 52777 - DNA, 7 bp, Unknown
  misc_feature (1)..( 7): Matrix.002 file - promoters60/1595651
tccattg

SEQ ID NO: 52778 - DNA, 7 bp, Unknown
  misc_feature (1)..( 7): Matrix.002 file - promoters60/1595651
taactaa

SEQ ID NO: 52779 - DNA, 6 bp, Unknown
  misc_feature (1)..( 6): Matrix.002 file - promoters60/1595651
ttcaga

SEQ ID NO: 52780 - DNA, 6 bp, Unknown
  misc_feature (1)..( 6): Matrix.002 file - promoters60/1595651
aaatgt

SEQ ID NO: 52781 - DNA, 7 bp, Unknown
  misc_feature (1)..( 7): Matrix.002 file - promoters60/1595651
ttttaaa

SEQ ID NO: 52782 - DNA, 9 bp, Unknown
  misc_feature (1)..( 9): Matrix.002 file - promoters60/1595651
attcattgt

SEQ ID NO: 52783 - DNA, 7 bp, Unknown
  misc_feature (1)..( 7): Matrix.002 file - promoters60/1595651
ttgagac

SEQ ID NO: 52784 - DNA, 9 bp, Unknown
  misc_feature (1)..( 9): Matrix.002 file - promoters60/1595707
attttattc

SEQ ID NO: 52785 - DNA, 10 bp, Unknown
  misc_feature (1)..( 10): Matrix.002 file - promoters60/1595707
gactggccct

SEQ ID NO: 52786 - DNA, 10 bp, Unknown
  misc_feature (1)..( 10): Matrix.002 file - promoters60/1595707
acttgttaat

SEQ ID NO: 52787 - DNA, 11 bp, Unknown
  misc_feature (1)..( 11): Matrix.002 file - promoters60/1595707
aatacaaatca

SEQ ID NO: 52788 - DNA, 12 bp, Unknown
  misc_feature (1)..( 12): Matrix.002 file - promoters60/1595741
aatttcaataag

SEQ ID NO: 52789 - DNA, 9 bp, Unknown
  misc_feature (1)..( 9): Matrix.002 file - promoters60/1595752
atcagaatc

SEQ ID NO: 52790 - DNA, 10 bp, Unknown
  misc_feature (1)..( 10): Matrix.002 file - promoters60/1595752
aaaatttctt

SEQ ID NO: 52791 - DNA, 9 bp, Unknown
  misc_feature (1)..( 9): Matrix.002 file - promoters60/1595752
ccaaacaat

SEQ ID NO: 52792 - DNA, 7 bp, Unknown
  misc_feature (1)..( 7): Matrix.002 file - promoters60/1595752
agaacaa

SEQ ID NO: 52793 - DNA, 7 bp, Unknown
  misc_feature (1)..( 7): Matrix.002 file - promoters60/1595752
aaccacc

SEQ ID NO: 52794 - DNA, 6 bp, Unknown
  misc_feature (1)..( 6): Matrix.002 file - promoters60/1595752
ataacc

SEQ ID NO: 52795 - DNA, 7 bp, Unknown
  misc_feature (1)..( 7): Matrix.002 file - promoters60/1595752
acctaat

SEQ ID NO: 52796 - DNA, 8 bp, Unknown
  misc_feature (1)..( 8): Matrix.002 file - promoters60/1595752
tatatata

SEQ ID NO: 52797 - DNA, 7 bp, Unknown
  misc_feature (1)..( 7): Matrix.002 file - promoters60/1595752
aaaatca

SEQ ID NO: 52798 - DNA, 8 bp, Unknown
  misc_feature (1)..( 8): Matrix.002 file - promoters60/1595752
attcacat

SEQ ID NO: 52799 - DNA, 5 bp, Unknown
  misc_feature (1)..( 5): Matrix.002 file - promoters60/1595752
atatt

SEQ ID NO: 52800 - DNA, 7 bp, Unknown
  misc_feature (1)..( 7): Matrix.002 file - promoters60/1595752
tcaaaaa

SEQ ID NO: 52801 - DNA, 6 bp, Unknown
  misc_feature (1)..( 6): Matrix.002 file - promoters60/1595752
attgct

SEQ ID NO: 52802 - DNA, 8 bp, Unknown
  misc_feature (1)..( 8): Matrix.002 file - promoters60/1595752
aaatctaa

SEQ ID NO: 52803 - DNA, 7 bp, Unknown
  misc_feature (1)..( 7): Matrix.002 file - promoters60/1595752
atggtca

SEQ ID NO: 52804 - DNA, 8 bp, Unknown
  misc_feature (1)..( 8): Matrix.002 file - promoters60/1595752
agaacaat

SEQ ID NO: 52805 - DNA, 6 bp, Unknown
  misc_feature (1)..( 6): Matrix.002 file - promoters60/1595752
tgcatt

SEQ ID NO: 52806 - DNA, 6 bp, Unknown
  misc_feature (1)..( 6): Matrix.002 file - promoters60/1595752
tttatt

SEQ ID NO: 52807 - DNA, 7 bp, Unknown
  misc_feature (1)..( 7): Matrix.002 file - promoters60/1595752
attcaaa

SEQ ID NO: 52808 - DNA, 6 bp, Unknown
  misc_feature (1)..( 6): Matrix.002 file - promoters60/1595752
caatca

SEQ ID NO: 52809 - DNA, 8 bp, Unknown
  misc_feature (1)..( 8): Matrix.002 file - promoters60/1595752
ttgagttt

SEQ ID NO: 52810 - DNA, 9 bp, Unknown
  misc_feature (1)..( 9): Matrix.002 file - promoters60/1595752
accctccaa

SEQ ID NO: 52811 - DNA, 11 bp, Unknown
  misc_feature (1)..( 11): Matrix.002 file - promoters60/1595752
aaagttagatg

SEQ ID NO: 52812 - DNA, 7 bp, Unknown
  misc_feature (1)..( 7): Matrix.002 file - promoters60/1595752
gacaaaa

SEQ ID NO: 52813 - DNA, 6 bp, Unknown
  misc_feature (1)..( 6): Matrix.002 file - promoters60/1595752
aacact

SEQ ID NO: 52814 - DNA, 11 bp, Unknown
  misc_feature (1)..( 11): Matrix.002 file - promoters60/1595772
attaatattta

SEQ ID NO: 52815 - DNA, 8 bp, Unknown
  misc_feature (1)..( 8): Matrix.002 file - promoters60/1595772
aaaatata

SEQ ID NO: 52816 - DNA, 12 bp, Unknown
  misc_feature (1)..( 12): Matrix.002 file - promoters60/1595772
aaataaaaaaaa

SEQ ID NO: 52817 - DNA, 8 bp, Unknown
  misc_feature (1)..( 8): Matrix.002 file - promoters60/1595772
tttttatt

SEQ ID NO: 52818 - DNA, 10 bp, Unknown
  misc_feature (1)..( 10): Matrix.002 file - promoters60/1595772
atatttaaaa

SEQ ID NO: 52819 - DNA, 11 bp, Unknown
  misc_feature (1)..( 11): Matrix.002 file - promoters60/1595772
gtttaaaaaat

SEQ ID NO: 52820 - DNA, 9 bp, Unknown
  misc_feature (1)..( 9): Matrix.002 file - promoters60/1595772
ataatttca

SEQ ID NO: 52821 - DNA, 9 bp, Unknown
  misc_feature (1)..( 9): Matrix.002 file - promoters60/1595772
aataaaaaa

SEQ ID NO: 52822 - DNA, 9 bp, Unknown
  misc_feature (1)..( 9): Matrix.002 file - promoters60/1595772
ctaaaaatg

SEQ ID NO: 52823 - DNA, 11 bp, Unknown
  misc_feature (1)..( 11): Matrix.002 file - promoters60/1595772
atttaaaaaaa

SEQ ID NO: 52824 - DNA, 10 bp, Unknown
  misc_feature (1)..( 10): Matrix.002 file - promoters60/1595772
aaaaacaaaa

SEQ ID NO: 52825 - DNA, 10 bp, Unknown
  misc_feature (1)..( 10): Matrix.002 file - promoters60/1595772
aaaacaaaaa

SEQ ID NO: 52826 - DNA, 11 bp, Unknown
  misc_feature (1)..( 11): Matrix.002 file - promoters60/1595772
ataaattcata

SEQ ID NO: 52827 - DNA, 10 bp, Unknown
  misc_feature (1)..( 10): Matrix.002 file - promoters60/1595772
aataaactaa

SEQ ID NO: 52828 - DNA, 7 bp, Unknown
  misc_feature (1)..( 7): Matrix.002 file - promoters60/1595772
aaaacaa

SEQ ID NO: 52829 - DNA, 6 bp, Unknown
  misc_feature (1)..( 6): Matrix.002 file - promoters60/1595772
atataa

SEQ ID NO: 52830 - DNA, 7 bp, Unknown
  misc_feature (1)..( 7): Matrix.002 file - promoters60/1595829
tatttta

SEQ ID NO: 52831 - DNA, 9 bp, Unknown
  misc_feature (1)..( 9): Matrix.002 file - promoters60/1595829
atataaatt

SEQ ID NO: 52832 - DNA, 9 bp, Unknown
  misc_feature (1)..( 9): Matrix.002 file - promoters60/1662827
tttatttgt

SEQ ID NO: 52833 - DNA, 11 bp, Unknown
  misc_feature (1)..( 11): Matrix.002 file - promoters60/1662827
tgactatttaa

SEQ ID NO: 52834 - DNA, 7 bp, Unknown
  misc_feature (1)..( 7): Matrix.002 file - promoters60/1662895
tgttggt

SEQ ID NO: 52835 - DNA, 6 bp, Unknown
  misc_feature (1)..( 6): Matrix.002 file - promoters60/1662895
tcatgt

SEQ ID NO: 52836 - DNA, 7 bp, Unknown
  misc_feature (1)..( 7): Matrix.002 file - promoters60/1662895
tttttca

SEQ ID NO: 52837 - DNA, 6 bp, Unknown
  misc_feature (1)..( 6): Matrix.002 file - promoters60/1662895
gttttt

SEQ ID NO: 52838 - DNA, 13 bp, Unknown
  misc_feature (1)..( 13): Matrix.002 file - promoters60/1662895
ctaaaaagtaatt

SEQ ID NO: 52839 - DNA, 6 bp, Unknown
  misc_feature (1)..( 6): Matrix.002 file - promoters60/1662895
agaaaa

SEQ ID NO: 52840 - DNA, 7 bp, Unknown
  misc_feature (1)..( 7): Matrix.002 file - promoters60/1662895
gttacat

SEQ ID NO: 52841 - DNA, 7 bp, Unknown
  misc_feature (1)..( 7): Matrix.002 file - promoters60/1662895
tttcaga

SEQ ID NO: 52842 - DNA, 6 bp, Unknown
  misc_feature (1)..( 6): Matrix.002 file - promoters60/1662895
gagaaa

SEQ ID NO: 52843 - DNA, 7 bp, Unknown
  misc_feature (1)..( 7): Matrix.002 file - promoters60/1662895
tatataa

SEQ ID NO: 52844 - DNA, 7 bp, Unknown
  misc_feature (1)..( 7): Matrix.002 file - promoters60/1662895
taagagg

SEQ ID NO: 52845 - DNA, 6 bp, Unknown
  misc_feature (1)..( 6): Matrix.002 file - promoters60/1662895
gagatt

SEQ ID NO: 52846 - DNA, 11 bp, Unknown
  misc_feature (1)..( 11): Matrix.002 file - promoters60/1662895
aattgaaattt

SEQ ID NO: 52847 - DNA, 14 bp, Unknown
  misc_feature (1)..( 14): Matrix.002 file - promoters60/1662917
tatatttgttaaac

SEQ ID NO: 52848 - DNA, 14 bp, Unknown
  misc_feature (1)..( 14): Matrix.002 file - promoters60/1662917
attagaatttttaa

SEQ ID NO: 52849 - DNA, 9 bp, Unknown
  misc_feature (1)..( 9): Matrix.002 file - promoters60/1662917
ttttgatga

SEQ ID NO: 52850 - DNA, 19 bp, Unknown
  misc_feature (1)..( 19): Matrix.002 file - promoters60/1662917
ttttaaattttaaaattat

SEQ ID NO: 52851 - DNA, 8 bp, Unknown
  misc_feature (1)..( 8): Matrix.002 file - promoters60/1662917
cattaaaa

SEQ ID NO: 52852 - DNA, 10 bp, Unknown
  misc_feature (1)..( 10): Matrix.002 file - promoters60/1662917
tatatataaa

SEQ ID NO: 52853 - DNA, 10 bp, Unknown
  misc_feature (1)..( 10): Matrix.002 file - promoters60/1662917
tataaataaa

SEQ ID NO: 52854 - DNA, 8 bp, Unknown
  misc_feature (1)..( 8): Matrix.002 file - promoters60/1662917
gaatatgt

SEQ ID NO: 52855 - DNA, 12 bp, Unknown
  misc_feature (1)..( 12): Matrix.002 file - promoters60/1662917
tttataagtata

SEQ ID NO: 52856 - DNA, 16 bp, Unknown
  misc_feature (1)..( 16): Matrix.002 file - promoters60/1662917
tgttaaataggaaaaa

SEQ ID NO: 52857 - DNA, 10 bp, Unknown
  misc_feature (1)..( 10): Matrix.002 file - promoters60/1662917
tgaatgtaaa

SEQ ID NO: 52858 - DNA, 14 bp, Unknown
  misc_feature (1)..( 14): Matrix.002 file - promoters60/1662917
ataactttataaaa

SEQ ID NO: 52859 - DNA, 6 bp, Unknown
  misc_feature (1)..( 6): Matrix.002 file - promoters60/1662917
aaatat

SEQ ID NO: 52860 - DNA, 12 bp, Unknown
  misc_feature (1)..( 12): Matrix.002 file - promoters60/1662917
tataatatatac

SEQ ID NO: 52861 - DNA, 9 bp, Unknown
  misc_feature (1)..( 9): Matrix.002 file - promoters60/1662917
taaaatatt

SEQ ID NO: 52862 - DNA, 7 bp, Unknown
  misc_feature (1)..( 7): Matrix.002 file - promoters60/1663024
tctctct

SEQ ID NO: 52863 - DNA, 9 bp, Unknown
  misc_feature (1)..( 9): Matrix.002 file - promoters60/1663024
gaaacccta

SEQ ID NO: 52864 - DNA, 6 bp, Unknown
  misc_feature (1)..( 6): Matrix.002 file - promoters60/1663024
atcgtc

SEQ ID NO: 52865 - DNA, 7 bp, Unknown
  misc_feature (1)..( 7): Matrix.002 file - promoters60/1663024
gctacca

SEQ ID NO: 52866 - DNA, 7 bp, Unknown
  misc_feature (1)..( 7): Matrix.002 file - promoters60/1663024
gttcatg

SEQ ID NO: 52867 - DNA, 7 bp, Unknown
  misc_feature (1)..( 7): Matrix.002 file - promoters60/1663024
aagcatg

SEQ ID NO: 52868 - DNA, 6 bp, Unknown
  misc_feature (1)..( 6): Matrix.002 file - promoters60/1663024
atgcgg

SEQ ID NO: 52869 - DNA, 7 bp, Unknown
  misc_feature (1)..( 7): Matrix.002 file - promoters60/1663024
ggtatca

SEQ ID NO: 52870 - DNA, 6 bp, Unknown
  misc_feature (1)..( 6): Matrix.002 file - promoters60/1663024
caagga

SEQ ID NO: 52871 - DNA, 6 bp, Unknown
  misc_feature (1)..( 6): Matrix.002 file - promoters60/1663024
gtttcc

SEQ ID NO: 52872 - DNA, 6 bp, Unknown
  misc_feature (1)..( 6): Matrix.002 file - promoters60/1663135
aacaaa

SEQ ID NO: 52873 - DNA, 8 bp, Unknown
  misc_feature (1)..( 8): Matrix.002 file - promoters60/1663135
acactttc

SEQ ID NO: 52874 - DNA, 7 bp, Unknown
  misc_feature (1)..( 7): Matrix.002 file - promoters60/1663135
tttttaa

SEQ ID NO: 52875 - DNA, 6 bp, Unknown
  misc_feature (1)..( 6): Matrix.002 file - promoters60/1663135
ttcttt

SEQ ID NO: 52876 - DNA, 9 bp, Unknown
  misc_feature (1)..( 9): Matrix.002 file - promoters60/1663135
aataaaatt

SEQ ID NO: 52877 - DNA, 6 bp, Unknown
  misc_feature (1)..( 6): Matrix.002 file - promoters60/1663135
taaata

SEQ ID NO: 52878 - DNA, 10 bp, Unknown
  misc_feature (1)..( 10): Matrix.002 file - promoters60/1663135
caaaacaaaa

SEQ ID NO: 52879 - DNA, 6 bp, Unknown
  misc_feature (1)..( 6): Matrix.002 file - promoters60/1663135
tgtttt

SEQ ID NO: 52880 - DNA, 7 bp, Unknown
  misc_feature (1)..( 7): Matrix.002 file - promoters60/1663135
aacatag

SEQ ID NO: 52881 - DNA, 6 bp, Unknown
  misc_feature (1)..( 6): Matrix.002 file - promoters60/1663135
ttgtaa

SEQ ID NO: 52882 - DNA, 6 bp, Unknown
  misc_feature (1)..( 6): Matrix.002 file - promoters60/1663135
tttgga

SEQ ID NO: 52883 - DNA, 8 bp, Unknown
  misc_feature (1)..( 8): Matrix.002 file - promoters60/1663135
aataaaat

SEQ ID NO: 52884 - DNA, 6 bp, Unknown
  misc_feature (1)..( 6): Matrix.002 file - promoters60/1663135
tctctc

SEQ ID NO: 52885 - DNA, 6 bp, Unknown
  misc_feature (1)..( 6): Matrix.002 file - promoters60/1663135
tcagat

SEQ ID NO: 52886 - DNA, 7 bp, Unknown
  misc_feature (1)..( 7): Matrix.002 file - promoters60/1663135
tttatgt

SEQ ID NO: 52887 - DNA, 7 bp, Unknown
  misc_feature (1)..( 7): Matrix.002 file - promoters60/1663135
tatgtat

SEQ ID NO: 52888 - DNA, 8 bp, Unknown
  misc_feature (1)..( 8): Matrix.002 file - promoters60/1663135
taaaaccg

SEQ ID NO: 52889 - DNA, 12 bp, Unknown
  misc_feature (1)..( 12): Matrix.002 file - promoters60/1663168
ttcttttcgtct

SEQ ID NO: 52890 - DNA, 8 bp, Unknown
  misc_feature (1)..( 8): Matrix.002 file - promoters60/1663217
atgatata

SEQ ID NO: 52891 - DNA, 7 bp, Unknown
  misc_feature (1)..( 7): Matrix.002 file - promoters60/1663217
tataaaa

SEQ ID NO: 52892 - DNA, 6 bp, Unknown
  misc_feature (1)..( 6): Matrix.002 file - promoters60/1663217
tatgat

SEQ ID NO: 52893 - DNA, 14 bp, Unknown
  misc_feature (1)..( 14): Matrix.002 file - promoters60/1663217
tgactttcgtcatt

SEQ ID NO: 52894 - DNA, 6 bp, Unknown
  misc_feature (1)..( 6): Matrix.002 file - promoters60/1663217
attgta

SEQ ID NO: 52895 - DNA, 7 bp, Unknown
  misc_feature (1)..( 7): Matrix.002 file - promoters60/1663217
aaagtga

SEQ ID NO: 52896 - DNA, 10 bp, Unknown
  misc_feature (1)..( 10): Matrix.002 file - promoters60/1663217
aaaccaatcc

SEQ ID NO: 52897 - DNA, 10 bp, Unknown
  misc_feature (1)..( 10): Matrix.002 file - promoters60/1663217
ataacaataa

SEQ ID NO: 52898 - DNA, 7 bp, Unknown
  misc_feature (1)..( 7): Matrix.002 file - promoters60/1663217
taaataa

SEQ ID NO: 52899 - DNA, 7 bp, Unknown
  misc_feature (1)..( 7): Matrix.002 file - promoters60/1663217
tagaaac

SEQ ID NO: 52900 - DNA, 6 bp, Unknown
  misc_feature (1)..( 6): Matrix.002 file - promoters60/1663217
ccaaat

SEQ ID NO: 52901 - DNA, 7 bp, Unknown
  misc_feature (1)..( 7): Matrix.002 file - promoters60/1663217
tcacaaa

SEQ ID NO: 52902 - DNA, 6 bp, Unknown
  misc_feature (1)..( 6): Matrix.002 file - promoters60/1663217
tcaaag

SEQ ID NO: 52903 - DNA, 7 bp, Unknown
  misc_feature (1)..( 7): Matrix.002 file - promoters60/1663217
acgtgcc

SEQ ID NO: 52904 - DNA, 6 bp, Unknown
  misc_feature (1)..( 6): Matrix.002 file - promoters60/1663217
tcttct

SEQ ID NO: 52905 - DNA, 12 bp, Unknown
  misc_feature (1)..( 12): Matrix.002 file - promoters60/1663278
tattgaaaaaga

SEQ ID NO: 52906 - DNA, 8 bp, Unknown
  misc_feature (1)..( 8): Matrix.002 file - promoters60/1663353
ttttgaaa

SEQ ID NO: 52907 - DNA, 8 bp, Unknown
  misc_feature (1)..( 8): Matrix.002 file - promoters60/1663353
catcgttt

SEQ ID NO: 52908 - DNA, 9 bp, Unknown
  misc_feature (1)..( 9): Matrix.002 file - promoters60/1663353
tctttcttc

SEQ ID NO: 52909 - DNA, 10 bp, Unknown
  misc_feature (1)..( 10): Matrix.002 file - promoters60/1663353
tatgttttga

SEQ ID NO: 52910 - DNA, 8 bp, Unknown
  misc_feature (1)..( 8): Matrix.002 file - promoters60/1664727
tattaaaa

SEQ ID NO: 52911 - DNA, 8 bp, Unknown
  misc_feature (1)..( 8): Matrix.002 file - promoters60/1664727
aaagttga

SEQ ID NO: 52912 - DNA, 8 bp, Unknown
  misc_feature (1)..( 8): Matrix.002 file - promoters60/1664727
aaagaaaa

SEQ ID NO: 52913 - DNA, 8 bp, Unknown
  misc_feature (1)..( 8): Matrix.002 file - promoters60/1664727
aaataaat

SEQ ID NO: 52914 - DNA, 7 bp, Unknown
  misc_feature (1)..( 7): Matrix.002 file - promoters60/1664727
ataacaa

SEQ ID NO: 52915 - DNA, 7 bp, Unknown
  misc_feature (1)..( 7): Matrix.002 file - promoters60/1664727
tgtattt

SEQ ID NO: 52916 - DNA, 8 bp, Unknown
  misc_feature (1)..( 8): Matrix.002 file - promoters60/1664727
tggaaagg

SEQ ID NO: 52917 - DNA, 6 bp, Unknown
  misc_feature (1)..( 6): Matrix.002 file - promoters60/1664727
aaagtt

SEQ ID NO: 52918 - DNA, 7 bp, Unknown
  misc_feature (1)..( 7): Matrix.002 file - promoters60/1664727
gtgaaaa

SEQ ID NO: 52919 - DNA, 8 bp, Unknown
  misc_feature (1)..( 8): Matrix.002 file - promoters60/1664727
caatgtaa

SEQ ID NO: 52920 - DNA, 8 bp, Unknown
  misc_feature (1)..( 8): Matrix.002 file - promoters60/1664727
tttagctt

SEQ ID NO: 52921 - DNA, 6 bp, Unknown
  misc_feature (1)..( 6): Matrix.002 file - promoters60/1664727
gaatta

SEQ ID NO: 52922 - DNA, 6 bp, Unknown
  misc_feature (1)..( 6): Matrix.002 file - promoters60/1664727
gcggaa

SEQ ID NO: 52923 - DNA, 7 bp, Unknown
  misc_feature (1)..( 7): Matrix.002 file - promoters60/1664727
tatcttc

SEQ ID NO: 52924 - DNA, 6 bp, Unknown
  misc_feature (1)..( 6): Matrix.002 file - promoters60/1664727
tccttg

SEQ ID NO: 52925 - DNA, 7 bp, Unknown
  misc_feature (1)..( 7): Matrix.002 file - promoters60/1664727
gatatat

SEQ ID NO: 52926 - DNA, 10 bp, Unknown
  misc_feature (1)..( 10): Matrix.002 file - promoters60/1664731
ggcttagatt

SEQ ID NO: 52927 - DNA, 6 bp, Unknown
  misc_feature (1)..( 6): Matrix.002 file - promoters60/1664731
tttttt

SEQ ID NO: 52928 - DNA, 6 bp, Unknown
  misc_feature (1)..( 6): Matrix.002 file - promoters60/1664731
aaatat

SEQ ID NO: 52929 - DNA, 8 bp, Unknown
  misc_feature (1)..( 8): Matrix.002 file - promoters60/1664731
aaatatca

SEQ ID NO: 52930 - DNA, 6 bp, Unknown
  misc_feature (1)..( 6): Matrix.002 file - promoters60/1664731
acacat

SEQ ID NO: 52931 - DNA, 7 bp, Unknown
  misc_feature (1)..( 7): Matrix.002 file - promoters60/1664731
atgatta

SEQ ID NO: 52932 - DNA, 8 bp, Unknown
  misc_feature (1)..( 8): Matrix.002 file - promoters60/1664731
aatgggcc

SEQ ID NO: 52933 - DNA, 7 bp, Unknown
  misc_feature (1)..( 7): Matrix.002 file - promoters60/1664731
atgatat

SEQ ID NO: 52934 - DNA, 6 bp, Unknown
  misc_feature (1)..( 6): Matrix.002 file - promoters60/1664731
ttttaa

SEQ ID NO: 52935 - DNA, 7 bp, Unknown
  misc_feature (1)..( 7): Matrix.002 file - promoters60/1664731
tttgaga

SEQ ID NO: 52936 - DNA, 7 bp, Unknown
  misc_feature (1)..( 7): Matrix.002 file - promoters60/1664731
gtaaaat

SEQ ID NO: 52937 - DNA, 8 bp, Unknown
  misc_feature (1)..( 8): Matrix.002 file - promoters60/1664870
tttgattc

SEQ ID NO: 52938 - DNA, 7 bp, Unknown
  misc_feature (1)..( 7): Matrix.002 file - promoters60/1664870
aacaaat

SEQ ID NO: 52939 - DNA, 9 bp, Unknown
  misc_feature (1)..( 9): Matrix.002 file - promoters60/1664870
taactaaaa

SEQ ID NO: 52940 - DNA, 8 bp, Unknown
  misc_feature (1)..( 8): Matrix.002 file - promoters60/1664870
taataact

SEQ ID NO: 52941 - DNA, 10 bp, Unknown
  misc_feature (1)..( 10): Matrix.002 file - promoters60/1664931
tccacaaaac

SEQ ID NO: 52942 - DNA, 8 bp, Unknown
  misc_feature (1)..( 8): Matrix.002 file - promoters60/1665056
aattttct

SEQ ID NO: 52943 - DNA, 10 bp, Unknown
  misc_feature (1)..( 10): Matrix.002 file - promoters60/1665056
tataaaattc

SEQ ID NO: 52944 - DNA, 13 bp, Unknown
  misc_feature (1)..( 13): Matrix.002 file - promoters60/1665056
tataaaaaaataa

SEQ ID NO: 52945 - DNA, 9 bp, Unknown
  misc_feature (1)..( 9): Matrix.002 file - promoters60/1665056
cttaattca

SEQ ID NO: 52946 - DNA, 8 bp, Unknown
  misc_feature (1)..( 8): Matrix.002 file - promoters60/1665056
tttgccag

SEQ ID NO: 52947 - DNA, 7 bp, Unknown
  misc_feature (1)..( 7): Matrix.002 file - promoters60/1665080
tttgtta

SEQ ID NO: 52948 - DNA, 9 bp, Unknown
  misc_feature (1)..( 9): Matrix.002 file - promoters60/1665080
cttgatttg

SEQ ID NO: 52949 - DNA, 10 bp, Unknown
  misc_feature (1)..( 10): Matrix.002 file - promoters60/1665080
tccctttttt

SEQ ID NO: 52950 - DNA, 7 bp, Unknown
  misc_feature (1)..( 7): Matrix.002 file - promoters60/1665080
aaggata

SEQ ID NO: 52951 - DNA, 9 bp, Unknown
  misc_feature (1)..( 9): Matrix.002 file - promoters60/1665080
agcaaaaaa

SEQ ID NO: 52952 - DNA, 9 bp, Unknown
  misc_feature (1)..( 9): Matrix.002 file - promoters60/1665080
atgttattt

SEQ ID NO: 52953 - DNA, 6 bp, Unknown
  misc_feature (1)..( 6): Matrix.002 file - promoters60/1665080
tataca

SEQ ID NO: 52954 - DNA, 9 bp, Unknown
  misc_feature (1)..( 9): Matrix.002 file - promoters60/1665080
attaaacta

SEQ ID NO: 52955 - DNA, 6 bp, Unknown
  misc_feature (1)..( 6): Matrix.002 file - promoters60/1665080
tttttc

SEQ ID NO: 52956 - DNA, 6 bp, Unknown
  misc_feature (1)..( 6): Matrix.002 file - promoters60/1665080
ggaaca

SEQ ID NO: 52957 - DNA, 10 bp, Unknown
  misc_feature (1)..( 10): Matrix.002 file - promoters60/1665080
gaacatgttc

SEQ ID NO: 52958 - DNA, 9 bp, Unknown
  misc_feature (1)..( 9): Matrix.002 file - promoters60/1665080
aatagttat

SEQ ID NO: 52959 - DNA, 9 bp, Unknown
  misc_feature (1)..( 9): Matrix.002 file - promoters60/1665080
tcttccaag

SEQ ID NO: 52960 - DNA, 7 bp, Unknown
  misc_feature (1)..( 7): Matrix.002 file - promoters60/1665080
tagataa

SEQ ID NO: 52961 - DNA, 6 bp, Unknown
  misc_feature (1)..( 6): Matrix.002 file - promoters60/1665080
cttttt

SEQ ID NO: 52962 - DNA, 7 bp, Unknown
  misc_feature (1)..( 7): Matrix.002 file - promoters60/1665080
tacaaaa

SEQ ID NO: 52963 - DNA, 7 bp, Unknown
  misc_feature (1)..( 7): Matrix.002 file - promoters60/1665080
gcaaaaa

SEQ ID NO: 52964 - DNA, 7 bp, Unknown
  misc_feature (1)..( 7): Matrix.002 file - promoters60/1665080
tttgttt

SEQ ID NO: 52965 - DNA, 6 bp, Unknown
  misc_feature (1)..( 6): Matrix.002 file - promoters60/1665080
ttcttt

SEQ ID NO: 52966 - DNA, 12 bp, Unknown
  misc_feature (1)..( 12): Matrix.002 file - promoters60/1665080
aaaaatatatat

SEQ ID NO: 52967 - DNA, 6 bp, Unknown
  misc_feature (1)..( 6): Matrix.002 file - promoters60/1665080
gggcct

SEQ ID NO: 52968 - DNA, 6 bp, Unknown
  misc_feature (1)..( 6): Matrix.002 file - promoters60/1665112
ttttat

SEQ ID NO: 52969 - DNA, 6 bp, Unknown
  misc_feature (1)..( 6): Matrix.002 file - promoters60/1665112
gtcatt

SEQ ID NO: 52970 - DNA, 9 bp, Unknown
  misc_feature (1)..( 9): Matrix.002 file - promoters60/1665112
ttaaaaaca

SEQ ID NO: 52971 - DNA, 7 bp, Unknown
  misc_feature (1)..( 7): Matrix.002 file - promoters60/1665112
aaagatt

SEQ ID NO: 52972 - DNA, 6 bp, Unknown
  misc_feature (1)..( 6): Matrix.002 file - promoters60/1665112
tttaaa

SEQ ID NO: 52973 - DNA, 6 bp, Unknown
  misc_feature (1)..( 6): Matrix.002 file - promoters60/1665112
ttttta

SEQ ID NO: 52974 - DNA, 7 bp, Unknown
  misc_feature (1)..( 7): Matrix.002 file - promoters60/1665112
aagattt

SEQ ID NO: 52975 - DNA, 7 bp, Unknown
  misc_feature (1)..( 7): Matrix.002 file - promoters60/1665112
ataattt

SEQ ID NO: 52976 - DNA, 8 bp, Unknown
  misc_feature (1)..( 8): Matrix.002 file - promoters60/1665112
aaggaaag

SEQ ID NO: 52977 - DNA, 6 bp, Unknown
  misc_feature (1)..( 6): Matrix.002 file - promoters60/1665112
atttat

SEQ ID NO: 52978 - DNA, 6 bp, Unknown
  misc_feature (1)..( 6): Matrix.002 file - promoters60/1665112
atgatc

SEQ ID NO: 52979 - DNA, 7 bp, Unknown
  misc_feature (1)..( 7): Matrix.002 file - promoters60/1665112
gttagag

SEQ ID NO: 52980 - DNA, 6 bp, Unknown
  misc_feature (1)..( 6): Matrix.002 file - promoters60/1665112
tcatat

SEQ ID NO: 52981 - DNA, 7 bp, Unknown
  misc_feature (1)..( 7): Matrix.002 file - promoters60/1665112
ttaggtg

SEQ ID NO: 52982 - DNA, 8 bp, Unknown
  misc_feature (1)..( 8): Matrix.002 file - promoters60/1665112
atacatac

SEQ ID NO: 52983 - DNA, 6 bp, Unknown
  misc_feature (1)..( 6): Matrix.002 file - promoters60/1665112
ttcaaa

SEQ ID NO: 52984 - DNA, 9 bp, Unknown
  misc_feature (1)..( 9): Matrix.002 file - promoters60/1673798
aaaataaaa

SEQ ID NO: 52985 - DNA, 7 bp, Unknown
  misc_feature (1)..( 7): Matrix.002 file - promoters60/1673806
ttcgtta

SEQ ID NO: 52986 - DNA, 8 bp, Unknown
  misc_feature (1)..( 8): Matrix.002 file - promoters60/1673806
taaaaaaa

SEQ ID NO: 52987 - DNA, 10 bp, Unknown
  misc_feature (1)..( 10): Matrix.002 file - promoters60/1673806
agacaatttt

SEQ ID NO: 52988 - DNA, 11 bp, Unknown
  misc_feature (1)..( 11): Matrix.002 file - promoters60/1673806
acataatttat

SEQ ID NO: 52989 - DNA, 8 bp, Unknown
  misc_feature (1)..( 8): Matrix.002 file - promoters60/1673826
ttctgatt

SEQ ID NO: 52990 - DNA, 8 bp, Unknown
  misc_feature (1)..( 8): Matrix.002 file - promoters60/1673826
atagattc

SEQ ID NO: 52991 - DNA, 6 bp, Unknown
  misc_feature (1)..( 6): Matrix.002 file - promoters60/1673826
tttgta

SEQ ID NO: 52992 - DNA, 6 bp, Unknown
  misc_feature (1)..( 6): Matrix.002 file - promoters60/1673826
attatt

SEQ ID NO: 52993 - DNA, 6 bp, Unknown
  misc_feature (1)..( 6): Matrix.002 file - promoters60/1673826
gtcaaa

SEQ ID NO: 52994 - DNA, 8 bp, Unknown
  misc_feature (1)..( 8): Matrix.002 file - promoters60/1673826
ttgaactt

SEQ ID NO: 52995 - DNA, 8 bp, Unknown
  misc_feature (1)..( 8): Matrix.002 file - promoters60/1673826
ttagtaat

SEQ ID NO: 52996 - DNA, 7 bp, Unknown
  misc_feature (1)..( 7): Matrix.002 file - promoters60/1673826
tatataa

SEQ ID NO: 52997 - DNA, 6 bp, Unknown
  misc_feature (1)..( 6): Matrix.002 file - promoters60/1673826
taaatt

SEQ ID NO: 52998 - DNA, 6 bp, Unknown
  misc_feature (1)..( 6): Matrix.002 file - promoters60/1673826
aaatat

SEQ ID NO: 52999 - DNA, 8 bp, Unknown
  misc_feature (1)..( 8): Matrix.002 file - promoters60/1673826
tataacaa

SEQ ID NO: 53000 - DNA, 7 bp, Unknown
  misc_feature (1)..( 7): Matrix.002 file - promoters60/1673826
aagaaat

SEQ ID NO: 53001 - DNA, 6 bp, Unknown
  misc_feature (1)..( 6): Matrix.002 file - promoters60/1673826
attttt

SEQ ID NO: 53002 - DNA, 7 bp, Unknown
  misc_feature (1)..( 7): Matrix.002 file - promoters60/1673826
aaaaata

SEQ ID NO: 53003 - DNA, 9 bp, Unknown
  misc_feature (1)..( 9): Matrix.002 file - promoters60/1673847
aaataaaat

SEQ ID NO: 53004 - DNA, 8 bp, Unknown
  misc_feature (1)..( 8): Matrix.002 file - promoters60/1673847
attaaaaa

SEQ ID NO: 53005 - DNA, 10 bp, Unknown
  misc_feature (1)..( 10): Matrix.002 file - promoters60/1673847
gtaataacac

SEQ ID NO: 53006 - DNA, 6 bp, Unknown
  misc_feature (1)..( 6): Matrix.002 file - promoters60/1673847
taaaaa

SEQ ID NO: 53007 - DNA, 6 bp, Unknown
  misc_feature (1)..( 6): Matrix.002 file - promoters60/1673847
gattaa

SEQ ID NO: 53008 - DNA, 7 bp, Unknown
  misc_feature (1)..( 7): Matrix.002 file - promoters60/1673847
aatataa

SEQ ID NO: 53009 - DNA, 11 bp, Unknown
  misc_feature (1)..( 11): Matrix.002 file - promoters60/1673847
ataaatcttat

SEQ ID NO: 53010 - DNA, 7 bp, Unknown
  misc_feature (1)..( 7): Matrix.002 file - promoters60/1673847
ttcaata

SEQ ID NO: 53011 - DNA, 8 bp, Unknown
  misc_feature (1)..( 8): Matrix.002 file - promoters60/1673847
atatgttt

SEQ ID NO: 53012 - DNA, 6 bp, Unknown
  misc_feature (1)..( 6): Matrix.002 file - promoters60/1673847
ctatct

SEQ ID NO: 53013 - DNA, 6 bp, Unknown
  misc_feature (1)..( 6): Matrix.002 file - promoters60/1673847
acttgt

SEQ ID NO: 53014 - DNA, 6 bp, Unknown
  misc_feature (1)..( 6): Matrix.002 file - promoters60/1673847
tataaa

SEQ ID NO: 53015 - DNA, 8 bp, Unknown
  misc_feature (1)..( 8): Matrix.002 file - promoters60/1673847
taaccttg

SEQ ID NO: 53016 - DNA, 7 bp, Unknown
  misc_feature (1)..( 7): Matrix.002 file - promoters60/1673847
tttgtat

SEQ ID NO: 53017 - DNA, 7 bp, Unknown
  misc_feature (1)..( 7): Matrix.002 file - promoters60/1673847
tctggtt

SEQ ID NO: 53018 - DNA, 6 bp, Unknown
  misc_feature (1)..( 6): Matrix.002 file - promoters60/1673847
tttgag

SEQ ID NO: 53019 - DNA, 7 bp, Unknown
  misc_feature (1)..( 7): Matrix.002 file - promoters60/1673849
atagttt

SEQ ID NO: 53020 - DNA, 9 bp, Unknown
  misc_feature (1)..( 9): Matrix.002 file - promoters60/1673849
tcataaaaa

SEQ ID NO: 53021 - DNA, 7 bp, Unknown
  misc_feature (1)..( 7): Matrix.002 file - promoters60/1673849
aaaaatt

SEQ ID NO: 53022 - DNA, 6 bp, Unknown
  misc_feature (1)..( 6): Matrix.002 file - promoters60/1673849
tatatt

SEQ ID NO: 53023 - DNA, 6 bp, Unknown
  misc_feature (1)..( 6): Matrix.002 file - promoters60/1673849
aaaatc

SEQ ID NO: 53024 - DNA, 7 bp, Unknown
  misc_feature (1)..( 7): Matrix.002 file - promoters60/1673849
tgtataa

SEQ ID NO: 53025 - DNA, 6 bp, Unknown
  misc_feature (1)..( 6): Matrix.002 file - promoters60/1673849
acatca

SEQ ID NO: 53026 - DNA, 9 bp, Unknown
  misc_feature (1)..( 9): Matrix.002 file - promoters60/1673849
tatataatt

SEQ ID NO: 53027 - DNA, 9 bp, Unknown
  misc_feature (1)..( 9): Matrix.002 file - promoters60/1673849
tattaaata

SEQ ID NO: 53028 - DNA, 7 bp, Unknown
  misc_feature (1)..( 7): Matrix.002 file - promoters60/1673849
aaaagtt

SEQ ID NO: 53029 - DNA, 6 bp, Unknown
  misc_feature (1)..( 6): Matrix.002 file - promoters60/1673849
ccacgt

SEQ ID NO: 53030 - DNA, 6 bp, Unknown
  misc_feature (1)..( 6): Matrix.002 file - promoters60/1673849
tatatg

SEQ ID NO: 53031 - DNA, 6 bp, Unknown
  misc_feature (1)..( 6): Matrix.002 file - promoters60/1673849
tatttt

SEQ ID NO: 53032 - DNA, 6 bp, Unknown
  misc_feature (1)..( 6): Matrix.002 file - promoters60/1673849
aatcca

SEQ ID NO: 53033 - DNA, 7 bp, Unknown
  misc_feature (1)..( 7): Matrix.002 file - promoters60/1673849
gagattt

SEQ ID NO: 53034 - DNA, 6 bp, Unknown
  misc_feature (1)..( 6): Matrix.002 file - promoters60/1673849
acaaaa

SEQ ID NO: 53035 - DNA, 7 bp, Unknown
  misc_feature (1)..( 7): Matrix.002 file - promoters60/1673849
tttacgt

SEQ ID NO: 53036 - DNA, 8 bp, Unknown
  misc_feature (1)..( 8): Matrix.002 file - promoters60/1673849
tctcgttc

SEQ ID NO: 53037 - DNA, 6 bp, Unknown
  misc_feature (1)..( 6): Matrix.002 file - promoters60/1673853
ttaaag

SEQ ID NO: 53038 - DNA, 9 bp, Unknown
  misc_feature (1)..( 9): Matrix.002 file - promoters60/1673853
taattgggt

SEQ ID NO: 53039 - DNA, 8 bp, Unknown
  misc_feature (1)..( 8): Matrix.002 file - promoters60/1673853
tattaatt

SEQ ID NO: 53040 - DNA, 10 bp, Unknown
  misc_feature (1)..( 10): Matrix.002 file - promoters60/1673853
actatatata

SEQ ID NO: 53041 - DNA, 8 bp, Unknown
  misc_feature (1)..( 8): Matrix.002 file - promoters60/1673853
gaacaaac

SEQ ID NO: 53042 - DNA, 7 bp, Unknown
  misc_feature (1)..( 7): Matrix.002 file - promoters60/1673853
gaagatt

SEQ ID NO: 53043 - DNA, 7 bp, Unknown
  misc_feature (1)..( 7): Matrix.002 file - promoters60/1673853
taacaag

SEQ ID NO: 53044 - DNA, 8 bp, Unknown
  misc_feature (1)..( 8): Matrix.002 file - promoters60/1673853
aataagac

SEQ ID NO: 53045 - DNA, 6 bp, Unknown
  misc_feature (1)..( 6): Matrix.002 file - promoters60/1673853
tttgaa

SEQ ID NO: 53046 - DNA, 6 bp, Unknown
  misc_feature (1)..( 6): Matrix.002 file - promoters60/1673853
ttcaaa

SEQ ID NO: 53047 - DNA, 6 bp, Unknown
  misc_feature (1)..( 6): Matrix.002 file - promoters60/1673853
aaaata

SEQ ID NO: 53048 - DNA, 7 bp, Unknown
  misc_feature (1)..( 7): Matrix.002 file - promoters60/1673853
aaacgaa

SEQ ID NO: 53049 - DNA, 7 bp, Unknown
  misc_feature (1)..( 7): Matrix.002 file - promoters60/1673853
ttaaata

SEQ ID NO: 53050 - DNA, 6 bp, Unknown
  misc_feature (1)..( 6): Matrix.002 file - promoters60/1673853
taaaaa

SEQ ID NO: 53051 - DNA, 7 bp, Unknown
  misc_feature (1)..( 7): Matrix.002 file - promoters60/1673853
ggtgaga

SEQ ID NO: 53052 - DNA, 6 bp, Unknown
  misc_feature (1)..( 6): Matrix.002 file - promoters60/1673853
gagaaa

SEQ ID NO: 53053 - DNA, 7 bp, Unknown
  misc_feature (1)..( 7): Matrix.002 file - promoters60/1710026
cggcttg

SEQ ID NO: 53054 - DNA, 7 bp, Unknown
  misc_feature (1)..( 7): Matrix.002 file - promoters60/1710026
aatcgga

SEQ ID NO: 53055 - DNA, 14 bp, Unknown
  misc_feature (1)..( 14): Matrix.002 file - promoters60/1710026
tctgggaaatcgga

SEQ ID NO: 53056 - DNA, 6 bp, Unknown
  misc_feature (1)..( 6): Matrix.002 file - promoters60/1710026
tttcaa

SEQ ID NO: 53057 - DNA, 6 bp, Unknown
  misc_feature (1)..( 6): Matrix.002 file - promoters60/1710026
ggaaat

SEQ ID NO: 53058 - DNA, 9 bp, Unknown
  misc_feature (1)..( 9): Matrix.002 file - promoters60/1710026
atttcaatc

SEQ ID NO: 53059 - DNA, 11 bp, Unknown
  misc_feature (1)..( 11): Matrix.002 file - promoters60/1711228
aacaaaaataa

SEQ ID NO: 53060 - DNA, 11 bp, Unknown
  misc_feature (1)..( 11): Matrix.002 file - promoters60/1711228
aaagaagaaaa

SEQ ID NO: 53061 - DNA, 12 bp, Unknown
  misc_feature (1)..( 12): Matrix.002 file - promoters60/1711318
tatattgaatat

SEQ ID NO: 53062 - DNA, 13 bp, Unknown
  misc_feature (1)..( 13): Matrix.002 file - promoters60/1711318
tagcatataaaaa

SEQ ID NO: 53063 - DNA, 9 bp, Unknown
  misc_feature (1)..( 9): Matrix.002 file - promoters60/1711318
tagaaaata

SEQ ID NO: 53064 - DNA, 10 bp, Unknown
  misc_feature (1)..( 10): Matrix.002 file - promoters60/1711318
aataatatag

SEQ ID NO: 53065 - DNA, 7 bp, Unknown
  misc_feature (1)..( 7): Matrix.002 file - promoters60/1711318
aaaataa

SEQ ID NO: 53066 - DNA, 15 bp, Unknown
  misc_feature (1)..( 15): Matrix.002 file - promoters60/1711586
aaaaaattataggaa

SEQ ID NO: 53067 - DNA, 7 bp, Unknown
  misc_feature (1)..( 7): Matrix.002 file - promoters60/1711586
ttacaat

SEQ ID NO: 53068 - DNA, 7 bp, Unknown
  misc_feature (1)..( 7): Matrix.002 file - promoters60/1711586
catgtat

SEQ ID NO: 53069 - DNA, 10 bp, Unknown
  misc_feature (1)..( 10): Matrix.002 file - promoters60/1711586
gatatagcaa

SEQ ID NO: 53070 - DNA, 9 bp, Unknown
  misc_feature (1)..( 9): Matrix.002 file - promoters60/1711586
aacataatc

SEQ ID NO: 53071 - DNA, 11 bp, Unknown
  misc_feature (1)..( 11): Matrix.002 file - promoters60/1711586
ttttgtagatt

SEQ ID NO: 53072 - DNA, 8 bp, Unknown
  misc_feature (1)..( 8): Matrix.002 file - promoters60/1711586
ttatatat

SEQ ID NO: 53073 - DNA, 9 bp, Unknown
  misc_feature (1)..( 9): Matrix.002 file - promoters60/1711586
ataaaaaca

SEQ ID NO: 53074 - DNA, 6 bp, Unknown
  misc_feature (1)..( 6): Matrix.002 file - promoters60/1711586
aaaaca

SEQ ID NO: 53075 - DNA, 6 bp, Unknown
  misc_feature (1)..( 6): Matrix.002 file - promoters60/1711630
ttttgt

SEQ ID NO: 53076 - DNA, 10 bp, Unknown
  misc_feature (1)..( 10): Matrix.002 file - promoters60/1711630
tttccaagta

SEQ ID NO: 53077 - DNA, 9 bp, Unknown
  misc_feature (1)..( 9): Matrix.002 file - promoters60/1711630
tccaatttc

SEQ ID NO: 53078 - DNA, 6 bp, Unknown
  misc_feature (1)..( 6): Matrix.002 file - promoters60/1711630
tgttta

SEQ ID NO: 53079 - DNA, 7 bp, Unknown
  misc_feature (1)..( 7): Matrix.002 file - promoters60/1711630
ctatctt

SEQ ID NO: 53080 - DNA, 9 bp, Unknown
  misc_feature (1)..( 9): Matrix.002 file - promoters60/1711630
tcttatttt

SEQ ID NO: 53081 - DNA, 7 bp, Unknown
  misc_feature (1)..( 7): Matrix.002 file - promoters60/1711630
actgatt

SEQ ID NO: 53082 - DNA, 6 bp, Unknown
  misc_feature (1)..( 6): Matrix.002 file - promoters60/1711630
cattga

SEQ ID NO: 53083 - DNA, 6 bp, Unknown
  misc_feature (1)..( 6): Matrix.002 file - promoters60/1711630
tattat

SEQ ID NO: 53084 - DNA, 6 bp, Unknown
  misc_feature (1)..( 6): Matrix.002 file - promoters60/1711630
ctttta

SEQ ID NO: 53085 - DNA, 6 bp, Unknown
  misc_feature (1)..( 6): Matrix.002 file - promoters60/1711630
tgtttt

SEQ ID NO: 53086 - DNA, 8 bp, Unknown
  misc_feature (1)..( 8): Matrix.002 file - promoters60/1711630
cttagaat

SEQ ID NO: 53087 - DNA, 6 bp, Unknown
  misc_feature (1)..( 6): Matrix.002 file - promoters60/1711630
cttgga

SEQ ID NO: 53088 - DNA, 6 bp, Unknown
  misc_feature (1)..( 6): Matrix.002 file - promoters60/1711630
cttttc

SEQ ID NO: 53089 - DNA, 6 bp, Unknown
  misc_feature (1)..( 6): Matrix.002 file - promoters60/1711630
ttttaa

SEQ ID NO: 53090 - DNA, 7 bp, Unknown
  misc_feature (1)..( 7): Matrix.002 file - promoters60/1711630
tttcttt

SEQ ID NO: 53091 - DNA, 7 bp, Unknown
  misc_feature (1)..( 7): Matrix.002 file - promoters60/1711630
cataatc

SEQ ID NO: 53092 - DNA, 7 bp, Unknown
  misc_feature (1)..( 7): Matrix.002 file - promoters60/1711630
ttaatct

SEQ ID NO: 53093 - DNA, 8 bp, Unknown
  misc_feature (1)..( 8): Matrix.002 file - promoters60/1711630
gaaactgt

SEQ ID NO: 53094 - DNA, 6 bp, Unknown
  misc_feature (1)..( 6): Matrix.002 file - promoters60/1711630
agtgat

SEQ ID NO: 53095 - DNA, 6 bp, Unknown
  misc_feature (1)..( 6): Matrix.002 file - promoters60/1711630
ctatag

SEQ ID NO: 53096 - DNA, 8 bp, Unknown
  misc_feature (1)..( 8): Matrix.002 file - promoters60/1712150
aaaaaata

SEQ ID NO: 53097 - DNA, 9 bp, Unknown
  misc_feature (1)..( 9): Matrix.002 file - promoters60/1712150
acacgcaag

SEQ ID NO: 53098 - DNA, 7 bp, Unknown
  misc_feature (1)..( 7): Matrix.002 file - promoters60/1712150
tcattca

SEQ ID NO: 53099 - DNA, 11 bp, Unknown
  misc_feature (1)..( 11): Matrix.002 file - promoters60/1712150
aaatttattct

SEQ ID NO: 53100 - DNA, 7 bp, Unknown
  misc_feature (1)..( 7): Matrix.002 file - promoters60/1712150
aaaaaca

SEQ ID NO: 53101 - DNA, 8 bp, Unknown
  misc_feature (1)..( 8): Matrix.002 file - promoters60/1712150
aagaaaat

SEQ ID NO: 53102 - DNA, 7 bp, Unknown
  misc_feature (1)..( 7): Matrix.002 file - promoters60/1712174
gaatcta

SEQ ID NO: 53103 - DNA, 7 bp, Unknown
  misc_feature (1)..( 7): Matrix.002 file - promoters60/1712174
ttttatc

SEQ ID NO: 53104 - DNA, 8 bp, Unknown
  misc_feature (1)..( 8): Matrix.002 file - promoters60/1712174
attatttg

SEQ ID NO: 53105 - DNA, 9 bp, Unknown
  misc_feature (1)..( 9): Matrix.002 file - promoters60/1712174
gtcaaaaaa

SEQ ID NO: 53106 - DNA, 6 bp, Unknown
  misc_feature (1)..( 6): Matrix.002 file - promoters60/1713765
aaaatt

SEQ ID NO: 53107 - DNA, 9 bp, Unknown
  misc_feature (1)..( 9): Matrix.002 file - promoters60/1713765
agagagaat

SEQ ID NO: 53108 - DNA, 7 bp, Unknown
  misc_feature (1)..( 7): Matrix.002 file - promoters60/1713765
ttgaata

SEQ ID NO: 53109 - DNA, 10 bp, Unknown
  misc_feature (1)..( 10): Matrix.002 file - promoters60/1713780
caaaacataa

SEQ ID NO: 53110 - DNA, 7 bp, Unknown
  misc_feature (1)..( 7): Matrix.002 file - promoters60/1713780
aaaatat

SEQ ID NO: 53111 - DNA, 7 bp, Unknown
  misc_feature (1)..( 7): Matrix.002 file - promoters60/1713780
tattcgt

SEQ ID NO: 53112 - DNA, 11 bp, Unknown
  misc_feature (1)..( 11): Matrix.002 file - promoters60/1713804
taaaagaatca

SEQ ID NO: 53113 - DNA, 10 bp, Unknown
  misc_feature (1)..( 10): Matrix.002 file - promoters60/1713804
aactgacttt

SEQ ID NO: 53114 - DNA, 7 bp, Unknown
  misc_feature (1)..( 7): Matrix.002 file - promoters60/1713804
ttatatc

SEQ ID NO: 53115 - DNA, 6 bp, Unknown
  misc_feature (1)..( 6): Matrix.002 file - promoters60/1713811
aaaaag

SEQ ID NO: 53116 - DNA, 8 bp, Unknown
  misc_feature (1)..( 8): Matrix.002 file - promoters60/1713811
gatgaaaa

SEQ ID NO: 53117 - DNA, 7 bp, Unknown
  misc_feature (1)..( 7): Matrix.002 file - promoters60/1713811
aatgtat

SEQ ID NO: 53118 - DNA, 6 bp, Unknown
  misc_feature (1)..( 6): Matrix.002 file - promoters60/1713811
tcgtgt

SEQ ID NO: 53119 - DNA, 6 bp, Unknown
  misc_feature (1)..( 6): Matrix.002 file - promoters60/1713811
ttttct

SEQ ID NO: 53120 - DNA, 7 bp, Unknown
  misc_feature (1)..( 7): Matrix.002 file - promoters60/1713811
gaatttg

SEQ ID NO: 53121 - DNA, 6 bp, Unknown
  misc_feature (1)..( 6): Matrix.002 file - promoters60/1713811
ttctct

SEQ ID NO: 53122 - DNA, 6 bp, Unknown
  misc_feature (1)..( 6): Matrix.002 file - promoters60/1713811
tatttt

SEQ ID NO: 53123 - DNA, 7 bp, Unknown
  misc_feature (1)..( 7): Matrix.002 file - promoters60/1713811
ttttaat

SEQ ID NO: 53124 - DNA, 7 bp, Unknown
  misc_feature (1)..( 7): Matrix.002 file - promoters60/1713811
taagtga

SEQ ID NO: 53125 - DNA, 6 bp, Unknown
  misc_feature (1)..( 6): Matrix.002 file - promoters60/1713811
catcat

SEQ ID NO: 53126 - DNA, 6 bp, Unknown
  misc_feature (1)..( 6): Matrix.002 file - promoters60/1713811
tcatat

SEQ ID NO: 53127 - DNA, 7 bp, Unknown
  misc_feature (1)..( 7): Matrix.002 file - promoters60/1713811
ttaggtg

SEQ ID NO: 53128 - DNA, 8 bp, Unknown
  misc_feature (1)..( 8): Matrix.002 file - promoters60/1713811
atacatac

SEQ ID NO: 53129 - DNA, 6 bp, Unknown
  misc_feature (1)..( 6): Matrix.002 file - promoters60/1713811
ttcaaa

SEQ ID NO: 53130 - DNA, 7 bp, Unknown
  misc_feature (1)..( 7): Matrix.002 file - promoters60/1713842
tatttat

SEQ ID NO: 53131 - DNA, 8 bp, Unknown
  misc_feature (1)..( 8): Matrix.002 file - promoters60/1713842
caaacctg

SEQ ID NO: 53132 - DNA, 8 bp, Unknown
  misc_feature (1)..( 8): Matrix.002 file - promoters60/1713842
agatacag

SEQ ID NO: 53133 - DNA, 9 bp, Unknown
  misc_feature (1)..( 9): Matrix.002 file - promoters60/1713842
tttcaagtt

SEQ ID NO: 53134 - DNA, 10 bp, Unknown
  misc_feature (1)..( 10): Matrix.002 file - promoters60/1713895
gacattatct

SEQ ID NO: 53135 - DNA, 9 bp, Unknown
  misc_feature (1)..( 9): Matrix.002 file - promoters60/1713895
aaagcccat

SEQ ID NO: 53136 - DNA, 11 bp, Unknown
  misc_feature (1)..( 11): Matrix.002 file - promoters60/1713895
atttatttgtg

SEQ ID NO: 53137 - DNA, 8 bp, Unknown
  misc_feature (1)..( 8): Matrix.002 file - promoters60/1713895
atgtacta

SEQ ID NO: 53138 - DNA, 6 bp, Unknown
  misc_feature (1)..( 6): Matrix.002 file - promoters60/1713895
tcaaaa

SEQ ID NO: 53139 - DNA, 8 bp, Unknown
  misc_feature (1)..( 8): Matrix.002 file - promoters60/1713895
atattttc

SEQ ID NO: 53140 - DNA, 11 bp, Unknown
  misc_feature (1)..( 11): Matrix.002 file - promoters60/1714694
tatcatttttt

SEQ ID NO: 53141 - DNA, 8 bp, Unknown
  misc_feature (1)..( 8): Matrix.002 file - promoters60/1714694
ttgtatat

SEQ ID NO: 53142 - DNA, 7 bp, Unknown
  misc_feature (1)..( 7): Matrix.002 file - promoters60/1714694
tttgctt

SEQ ID NO: 53143 - DNA, 7 bp, Unknown
  misc_feature (1)..( 7): Matrix.002 file - promoters60/1714772
aaacaaa

SEQ ID NO: 53144 - DNA, 11 bp, Unknown
  misc_feature (1)..( 11): Matrix.002 file - promoters60/1714772
taaaaaaaaag

SEQ ID NO: 53145 - DNA, 8 bp, Unknown
  misc_feature (1)..( 8): Matrix.002 file - promoters60/1714772
aaaaagaa

SEQ ID NO: 53146 - DNA, 8 bp, Unknown
  misc_feature (1)..( 8): Matrix.002 file - promoters60/1714772
aaacaaaa

SEQ ID NO: 53147 - DNA, 9 bp, Unknown
  misc_feature (1)..( 9): Matrix.002 file - promoters60/1714772
aaagtaaag

SEQ ID NO: 53148 - DNA, 8 bp, Unknown
  misc_feature (1)..( 8): Matrix.002 file - promoters60/1714772
ttttttaa

SEQ ID NO: 53149 - DNA, 10 bp, Unknown
  misc_feature (1)..( 10): Matrix.002 file - promoters60/1714772
atatttttta

SEQ ID NO: 53150 - DNA, 7 bp, Unknown
  misc_feature (1)..( 7): Matrix.002 file - promoters60/1714831
aaatgca

SEQ ID NO: 53151 - DNA, 12 bp, Unknown
  misc_feature (1)..( 12): Matrix.002 file - promoters60/1714865
gaaaaaaaaaaa

SEQ ID NO: 53152 - DNA, 11 bp, Unknown
  misc_feature (1)..( 11): Matrix.002 file - promoters60/1714865
atttattatgt

SEQ ID NO: 53153 - DNA, 9 bp, Unknown
  misc_feature (1)..( 9): Matrix.002 file - promoters60/1714865
tgaaaaaaa

SEQ ID NO: 53154 - DNA, 11 bp, Unknown
  misc_feature (1)..( 11): Matrix.002 file - promoters60/1714865
ataaaataaaa

SEQ ID NO: 53155 - DNA, 10 bp, Unknown
  misc_feature (1)..( 10): Matrix.002 file - promoters60/1714865
aaaaaagagt

SEQ ID NO: 53156 - DNA, 8 bp, Unknown
  misc_feature (1)..( 8): Matrix.002 file - promoters60/1714865
ataaataa

SEQ ID NO: 53157 - DNA, 9 bp, Unknown
  misc_feature (1)..( 9): Matrix.002 file - promoters60/1714865
gaaatacaa

SEQ ID NO: 53158 - DNA, 8 bp, Unknown
  misc_feature (1)..( 8): Matrix.002 file - promoters60/1714865
aaacaaat

SEQ ID NO: 53159 - DNA, 11 bp, Unknown
  misc_feature (1)..( 11): Matrix.002 file - promoters60/1714865
aaatattattt

SEQ ID NO: 53160 - DNA, 9 bp, Unknown
  misc_feature (1)..( 9): Matrix.002 file - promoters60/1714865
taaatacaa

SEQ ID NO: 53161 - DNA, 9 bp, Unknown
  misc_feature (1)..( 9): Matrix.002 file - promoters60/1714865
aaaaattta

SEQ ID NO: 53162 - DNA, 11 bp, Unknown
  misc_feature (1)..( 11): Matrix.002 file - promoters60/1714865
caaaaaaaaaa

SEQ ID NO: 53163 - DNA, 8 bp, Unknown
  misc_feature (1)..( 8): Matrix.002 file - promoters60/1714865
agaaaaat

SEQ ID NO: 53164 - DNA, 8 bp, Unknown
  misc_feature (1)..( 8): Matrix.002 file - promoters60/1714865
ttataatt

SEQ ID NO: 53165 - DNA, 8 bp, Unknown
  misc_feature (1)..( 8): Matrix.002 file - promoters60/1714912
aacaaaaa

SEQ ID NO: 53166 - DNA, 6 bp, Unknown
  misc_feature (1)..( 6): Matrix.002 file - promoters60/1714912
aaaaga

SEQ ID NO: 53167 - DNA, 6 bp, Unknown
  misc_feature (1)..( 6): Matrix.002 file - promoters60/1714912
gtatag

SEQ ID NO: 53168 - DNA, 11 bp, Unknown
  misc_feature (1)..( 11): Matrix.002 file - promoters60/1714912
aaaaagaaaaa

SEQ ID NO: 53169 - DNA, 7 bp, Unknown
  misc_feature (1)..( 7): Matrix.002 file - promoters60/1714912
agaaaaa

SEQ ID NO: 53170 - DNA, 8 bp, Unknown
  misc_feature (1)..( 8): Matrix.002 file - promoters60/1714912
ataaattc

SEQ ID NO: 53171 - DNA, 6 bp, Unknown
  misc_feature (1)..( 6): Matrix.002 file - promoters60/1714912
gtttga

SEQ ID NO: 53172 - DNA, 9 bp, Unknown
  misc_feature (1)..( 9): Matrix.002 file - promoters60/1714912
gaaacaaac

SEQ ID NO: 53173 - DNA, 6 bp, Unknown
  misc_feature (1)..( 6): Matrix.002 file - promoters60/1714912
ttgtgg

SEQ ID NO: 53174 - DNA, 10 bp, Unknown
  misc_feature (1)..( 10): Matrix.002 file - promoters60/1714912
ggtccatctt

SEQ ID NO: 53175 - DNA, 6 bp, Unknown
  misc_feature (1)..( 6): Matrix.002 file - promoters60/1714912
aaaaaa

SEQ ID NO: 53176 - DNA, 9 bp, Unknown
  misc_feature (1)..( 9): Matrix.002 file - promoters60/1714912
ttaaaaaaa

SEQ ID NO: 53177 - DNA, 6 bp, Unknown
  misc_feature (1)..( 6): Matrix.002 file - promoters60/1714912
caaaaa

SEQ ID NO: 53178 - DNA, 6 bp, Unknown
  misc_feature (1)..( 6): Matrix.002 file - promoters60/1714912
aaaaga

SEQ ID NO: 53179 - DNA, 7 bp, Unknown
  misc_feature (1)..( 7): Matrix.002 file - promoters60/1714912
tgataca

SEQ ID NO: 53180 - DNA, 15 bp, Unknown
  misc_feature (1)..( 15): Matrix.002 file - promoters60/1714912
accaatcagaattgt

SEQ ID NO: 53181 - DNA, 7 bp, Unknown
  misc_feature (1)..( 7): Matrix.002 file - promoters60/1714912
tctagtg

SEQ ID NO: 53182 - DNA, 6 bp, Unknown
  misc_feature (1)..( 6): Matrix.002 file - promoters60/1714912
ttaaag

SEQ ID NO: 53183 - DNA, 6 bp, Unknown
  misc_feature (1)..( 6): Matrix.002 file - promoters60/1714912
gtggta

SEQ ID NO: 53184 - DNA, 10 bp, Unknown
  misc_feature (1)..( 10): Matrix.002 file - promoters60/1714974
ttgaatttat

SEQ ID NO: 53185 - DNA, 7 bp, Unknown
  misc_feature (1)..( 7): Matrix.002 file - promoters60/1714974
caaacaa

SEQ ID NO: 53186 - DNA, 6 bp, Unknown
  misc_feature (1)..( 6): Matrix.002 file - promoters60/1714974
cttcac

SEQ ID NO: 53187 - DNA, 8 bp, Unknown
  misc_feature (1)..( 8): Matrix.002 file - promoters60/1714974
ataacgtt

SEQ ID NO: 53188 - DNA, 8 bp, Unknown
  misc_feature (1)..( 8): Matrix.002 file - promoters60/1714974
atatgtag

SEQ ID NO: 53189 - DNA, 8 bp, Unknown
  misc_feature (1)..( 8): Matrix.002 file - promoters60/1714974
cgacccaa

SEQ ID NO: 53190 - DNA, 6 bp, Unknown
  misc_feature (1)..( 6): Matrix.002 file - promoters60/1714974
ggtcta

SEQ ID NO: 53191 - DNA, 7 bp, Unknown
  misc_feature (1)..( 7): Matrix.002 file - promoters60/1714974
gaagaat

SEQ ID NO: 53192 - DNA, 9 bp, Unknown
  misc_feature (1)..( 9): Matrix.002 file - promoters60/1714974
ttcttcttc

SEQ ID NO: 53193 - DNA, 7 bp, Unknown
  misc_feature (1)..( 7): Matrix.002 file - promoters60/1714974
cttttgt

SEQ ID NO: 53194 - DNA, 6 bp, Unknown
  misc_feature (1)..( 6): Matrix.002 file - promoters60/1714974
tacttt

SEQ ID NO: 53195 - DNA, 9 bp, Unknown
  misc_feature (1)..( 9): Matrix.002 file - promoters60/1714974
aaaccaaat

SEQ ID NO: 53196 - DNA, 7 bp, Unknown
  misc_feature (1)..( 7): Matrix.002 file - promoters60/1714974
tataaaa

SEQ ID NO: 53197 - DNA, 6 bp, Unknown
  misc_feature (1)..( 6): Matrix.002 file - promoters60/1714974
tttgag

SEQ ID NO: 53198 - DNA, 6 bp, Unknown
  misc_feature (1)..( 6): Matrix.002 file - promoters60/1714974
aaaaac

SEQ ID NO: 53199 - DNA, 11 bp, Unknown
  misc_feature (1)..( 11): Matrix.002 file - promoters60/1714974
aaaaaatcatt

SEQ ID NO: 53200 - DNA, 8 bp, Unknown
  misc_feature (1)..( 8): Matrix.002 file - promoters60/1714989
aaaaaata

SEQ ID NO: 53201 - DNA, 10 bp, Unknown
  misc_feature (1)..( 10): Matrix.002 file - promoters60/1714989
aaaataaata

SEQ ID NO: 53202 - DNA, 9 bp, Unknown
  misc_feature (1)..( 9): Matrix.002 file - promoters60/1714989
ttaaaaaaa

SEQ ID NO: 53203 - DNA, 9 bp, Unknown
  misc_feature (1)..( 9): Matrix.002 file - promoters60/1714989
tacaaaaat

SEQ ID NO: 53204 - DNA, 10 bp, Unknown
  misc_feature (1)..( 10): Matrix.002 file - promoters60/1714989
aaacaataaa

SEQ ID NO: 53205 - DNA, 9 bp, Unknown
  misc_feature (1)..( 9): Matrix.002 file - promoters60/1714989
taaaattta

SEQ ID NO: 53206 - DNA, 6 bp, Unknown
  misc_feature (1)..( 6): Matrix.002 file - promoters60/1715220
tttttt

SEQ ID NO: 53207 - DNA, 6 bp, Unknown
  misc_feature (1)..( 6): Matrix.002 file - promoters60/1715220
caataa

SEQ ID NO: 53208 - DNA, 6 bp, Unknown
  misc_feature (1)..( 6): Matrix.002 file - promoters60/1715220
tttaat

SEQ ID NO: 53209 - DNA, 7 bp, Unknown
  misc_feature (1)..( 7): Matrix.002 file - promoters60/1715220
aaaaata

SEQ ID NO: 53210 - DNA, 7 bp, Unknown
  misc_feature (1)..( 7): Matrix.002 file - promoters60/1715220
cttaaga

SEQ ID NO: 53211 - DNA, 6 bp, Unknown
  misc_feature (1)..( 6): Matrix.002 file - promoters60/1715220
tcagag

SEQ ID NO: 53212 - DNA, 6 bp, Unknown
  misc_feature (1)..( 6): Matrix.002 file - promoters60/1715220
tcttgg

SEQ ID NO: 53213 - DNA, 7 bp, Unknown
  misc_feature (1)..( 7): Matrix.002 file - promoters60/1715220
gttattg

SEQ ID NO: 53214 - DNA, 7 bp, Unknown
  misc_feature (1)..( 7): Matrix.002 file - promoters60/1715220
cgtgttc

SEQ ID NO: 53215 - DNA, 6 bp, Unknown
  misc_feature (1)..( 6): Matrix.002 file - promoters60/1715220
tgttgt

SEQ ID NO: 53216 - DNA, 8 bp, Unknown
  misc_feature (1)..( 8): Matrix.002 file - promoters60/1715220
ttctgctg

SEQ ID NO: 53217 - DNA, 6 bp, Unknown
  misc_feature (1)..( 6): Matrix.002 file - promoters60/1715220
accaaa

SEQ ID NO: 53218 - DNA, 6 bp, Unknown
  misc_feature (1)..( 6): Matrix.002 file - promoters60/1715220
agttgt

SEQ ID NO: 53219 - DNA, 6 bp, Unknown
  misc_feature (1)..( 6): Matrix.002 file - promoters60/1715220
cttcct

SEQ ID NO: 53220 - DNA, 6 bp, Unknown
  misc_feature (1)..( 6): Matrix.002 file - promoters60/1715220
ctgtca

SEQ ID NO: 53221 - DNA, 6 bp, Unknown
  misc_feature (1)..( 6): Matrix.002 file - promoters60/1715220
atttta

SEQ ID NO: 53222 - DNA, 10 bp, Unknown
  misc_feature (1)..( 10): Matrix.002 file - promoters60/1715347
acattctgtt

SEQ ID NO: 53223 - DNA, 9 bp, Unknown
  misc_feature (1)..( 9): Matrix.002 file - promoters60/1715347
cattctttc

SEQ ID NO: 53224 - DNA, 8 bp, Unknown
  misc_feature (1)..( 8): Matrix.002 file - promoters60/1715347
acaatatc

SEQ ID NO: 53225 - DNA, 9 bp, Unknown
  misc_feature (1)..( 9): Matrix.002 file - promoters60/1715388
attgggcct

SEQ ID NO: 53226 - DNA, 8 bp, Unknown
  misc_feature (1)..( 8): Matrix.002 file - promoters60/1715388
aaatcaag

SEQ ID NO: 53227 - DNA, 10 bp, Unknown
  misc_feature (1)..( 10): Matrix.002 file - promoters60/1715388
ttgttattaa

SEQ ID NO: 53228 - DNA, 9 bp, Unknown
  misc_feature (1)..( 9): Matrix.002 file - promoters60/1715388
tttctgttc

SEQ ID NO: 53229 - DNA, 6 bp, Unknown
  misc_feature (1)..( 6): Matrix.002 file - promoters60/1715478
aagaaa

SEQ ID NO: 53230 - DNA, 7 bp, Unknown
  misc_feature (1)..( 7): Matrix.002 file - promoters60/1715478
agaaagt

SEQ ID NO: 53231 - DNA, 6 bp, Unknown
  misc_feature (1)..( 6): Matrix.002 file - promoters60/1715478
aaatgc

SEQ ID NO: 53232 - DNA, 10 bp, Unknown
  misc_feature (1)..( 10): Matrix.002 file - promoters60/1715478
actttataat

SEQ ID NO: 53233 - DNA, 9 bp, Unknown
  misc_feature (1)..( 9): Matrix.002 file - promoters60/1715478
tactcaatt

SEQ ID NO: 53234 - DNA, 8 bp, Unknown
  misc_feature (1)..( 8): Matrix.002 file - promoters60/1715478
ggtgggat

SEQ ID NO: 53235 - DNA, 6 bp, Unknown
  misc_feature (1)..( 6): Matrix.002 file - promoters60/1715478
tggaaa

SEQ ID NO: 53236 - DNA, 8 bp, Unknown
  misc_feature (1)..( 8): Matrix.002 file - promoters60/1715478
caacacca

SEQ ID NO: 53237 - DNA, 7 bp, Unknown
  misc_feature (1)..( 7): Matrix.002 file - promoters60/1715478
ttaattg

SEQ ID NO: 53238 - DNA, 7 bp, Unknown
  misc_feature (1)..( 7): Matrix.002 file - promoters60/1715478
catatcc

SEQ ID NO: 53239 - DNA, 7 bp, Unknown
  misc_feature (1)..( 7): Matrix.002 file - promoters60/1715478
ttatgtc

SEQ ID NO: 53240 - DNA, 10 bp, Unknown
  misc_feature (1)..( 10): Matrix.002 file - promoters60/1715478
ttttaataac

SEQ ID NO: 53241 - DNA, 7 bp, Unknown
  misc_feature (1)..( 7): Matrix.002 file - promoters60/1715478
attagta

SEQ ID NO: 53242 - DNA, 7 bp, Unknown
  misc_feature (1)..( 7): Matrix.002 file - promoters60/1715478
gattcag

SEQ ID NO: 53243 - DNA, 7 bp, Unknown
  misc_feature (1)..( 7): Matrix.002 file - promoters60/1715478
gatcgat

SEQ ID NO: 53244 - DNA, 9 bp, Unknown
  misc_feature (1)..( 9): Matrix.002 file - promoters60/1715482
taattcaaa

SEQ ID NO: 53245 - DNA, 9 bp, Unknown
  misc_feature (1)..( 9): Matrix.002 file - promoters60/1715482
aaaacaact

SEQ ID NO: 53246 - DNA, 6 bp, Unknown
  misc_feature (1)..( 6): Matrix.002 file - promoters60/1715510
atgatt

SEQ ID NO: 53247 - DNA, 6 bp, Unknown
  misc_feature (1)..( 6): Matrix.002 file - promoters60/1715510
aaaaga

SEQ ID NO: 53248 - DNA, 7 bp, Unknown
  misc_feature (1)..( 7): Matrix.002 file - promoters60/1715510
aaatatt

SEQ ID NO: 53249 - DNA, 8 bp, Unknown
  misc_feature (1)..( 8): Matrix.002 file - promoters60/1715510
attcaatt

SEQ ID NO: 53250 - DNA, 7 bp, Unknown
  misc_feature (1)..( 7): Matrix.002 file - promoters60/1715510
tcaattt

SEQ ID NO: 53251 - DNA, 7 bp, Unknown
  misc_feature (1)..( 7): Matrix.002 file - promoters60/1715510
tttattt

SEQ ID NO: 53252 - DNA, 6 bp, Unknown
  misc_feature (1)..( 6): Matrix.002 file - promoters60/1715510
agtaaa

SEQ ID NO: 53253 - DNA, 6 bp, Unknown
  misc_feature (1)..( 6): Matrix.002 file - promoters60/1715510
acaaaa

SEQ ID NO: 53254 - DNA, 9 bp, Unknown
  misc_feature (1)..( 9): Matrix.002 file - promoters60/1715510
aattacaca

SEQ ID NO: 53255 - DNA, 7 bp, Unknown
  misc_feature (1)..( 7): Matrix.002 file - promoters60/1715510
aaactaa

SEQ ID NO: 53256 - DNA, 7 bp, Unknown
  misc_feature (1)..( 7): Matrix.002 file - promoters60/1715510
attatga

SEQ ID NO: 53257 - DNA, 8 bp, Unknown
  misc_feature (1)..( 8): Matrix.002 file - promoters60/1715510
tttggatt

SEQ ID NO: 53258 - DNA, 8 bp, Unknown
  misc_feature (1)..( 8): Matrix.002 file - promoters60/1715510
gactacct

SEQ ID NO: 53259 - DNA, 6 bp, Unknown
  misc_feature (1)..( 6): Matrix.002 file - promoters60/1715510
atccaa

SEQ ID NO: 53260 - DNA, 7 bp, Unknown
  misc_feature (1)..( 7): Matrix.002 file - promoters60/1715510
ttcacgt

SEQ ID NO: 53261 - DNA, 6 bp, Unknown
  misc_feature (1)..( 6): Matrix.002 file - promoters60/1715510
atttga

SEQ ID NO: 53262 - DNA, 6 bp, Unknown
  misc_feature (1)..( 6): Matrix.002 file - promoters60/1715516
agaata

SEQ ID NO: 53263 - DNA, 7 bp, Unknown
  misc_feature (1)..( 7): Matrix.002 file - promoters60/1715516
ttatttt

SEQ ID NO: 53264 - DNA, 6 bp, Unknown
  misc_feature (1)..( 6): Matrix.002 file - promoters60/1715516
taacaa

SEQ ID NO: 53265 - DNA, 8 bp, Unknown
  misc_feature (1)..( 8): Matrix.002 file - promoters60/1715516
atttaaaa

SEQ ID NO: 53266 - DNA, 6 bp, Unknown
  misc_feature (1)..( 6): Matrix.002 file - promoters60/1715516
taatta

SEQ ID NO: 53267 - DNA, 6 bp, Unknown
  misc_feature (1)..( 6): Matrix.002 file - promoters60/1715516
ccatga

SEQ ID NO: 53268 - DNA, 7 bp, Unknown
  misc_feature (1)..( 7): Matrix.002 file - promoters60/1715516
gataata

SEQ ID NO: 53269 - DNA, 7 bp, Unknown
  misc_feature (1)..( 7): Matrix.002 file - promoters60/1715516
ttaaaaa

SEQ ID NO: 53270 - DNA, 8 bp, Unknown
  misc_feature (1)..( 8): Matrix.002 file - promoters60/1715516
taatgaaa

SEQ ID NO: 53271 - DNA, 6 bp, Unknown
  misc_feature (1)..( 6): Matrix.002 file - promoters60/1715516
aaacaa

SEQ ID NO: 53272 - DNA, 12 bp, Unknown
  misc_feature (1)..( 12): Matrix.002 file - promoters60/1715516
ctcctatatatt

SEQ ID NO: 53273 - DNA, 6 bp, Unknown
  misc_feature (1)..( 6): Matrix.002 file - promoters60/1715516
ttttta

SEQ ID NO: 53274 - DNA, 7 bp, Unknown
  misc_feature (1)..( 7): Matrix.002 file - promoters60/1715516
atagatt

SEQ ID NO: 53275 - DNA, 7 bp, Unknown
  misc_feature (1)..( 7): Matrix.002 file - promoters60/1715516
attacca

SEQ ID NO: 53276 - DNA, 10 bp, Unknown
  misc_feature (1)..( 10): Matrix.002 file - promoters60/1715516
aagaaatatg

SEQ ID NO: 53277 - DNA, 7 bp, Unknown
  misc_feature (1)..( 7): Matrix.002 file - promoters60/1715516
ataggaa

SEQ ID NO: 53278 - DNA, 7 bp, Unknown
  misc_feature (1)..( 7): Matrix.002 file - promoters60/1715516
aaaacaa

SEQ ID NO: 53279 - DNA, 12 bp, Unknown
  misc_feature (1)..( 12): Matrix.002 file - promoters60/1715516
aaaagaagaaag

SEQ ID NO: 53280 - DNA, 7 bp, Unknown
  misc_feature (1)..( 7): Matrix.002 file - promoters60/1715516
agcacat

SEQ ID NO: 53281 - DNA, 7 bp, Unknown
  misc_feature (1)..( 7): Matrix.002 file - promoters60/1715516
tatatct

SEQ ID NO: 53282 - DNA, 10 bp, Unknown
  misc_feature (1)..( 10): Matrix.002 file - promoters60/1715516
atagtttaac

SEQ ID NO: 53283 - DNA, 7 bp, Unknown
  misc_feature (1)..( 7): Matrix.002 file - promoters60/1715516
aaggaaa

SEQ ID NO: 53284 - DNA, 8 bp, Unknown
  misc_feature (1)..( 8): Matrix.002 file - promoters60/1715516
aactattt

SEQ ID NO: 53285 - DNA, 6 bp, Unknown
  misc_feature (1)..( 6): Matrix.002 file - promoters60/1715516
aatatg

SEQ ID NO: 53286 - DNA, 6 bp, Unknown
  misc_feature (1)..( 6): Matrix.002 file - promoters60/1715516
ttaggc

SEQ ID NO: 53287 - DNA, 11 bp, Unknown
  misc_feature (1)..( 11): Matrix.002 file - promoters60/1715535
gaaaattttca

SEQ ID NO: 53288 - DNA, 16 bp, Unknown
  misc_feature (1)..( 16): Matrix.002 file - promoters60/1715535
ataaactcttaaaaaa

SEQ ID NO: 53289 - DNA, 9 bp, Unknown
  misc_feature (1)..( 9): Matrix.002 file - promoters60/1715535
aacaattat

SEQ ID NO: 53290 - DNA, 11 bp, Unknown
  misc_feature (1)..( 11): Matrix.002 file - promoters60/1715595
ggtctcacata

SEQ ID NO: 53291 - DNA, 9 bp, Unknown
  misc_feature (1)..( 9): Matrix.002 file - promoters60/1715595
ctccggcga

SEQ ID NO: 53292 - DNA, 7 bp, Unknown
  misc_feature (1)..( 7): Matrix.002 file - promoters60/1715615
tataatg

SEQ ID NO: 53293 - DNA, 6 bp, Unknown
  misc_feature (1)..( 6): Matrix.002 file - promoters60/1715615
ttgttt

SEQ ID NO: 53294 - DNA, 6 bp, Unknown
  misc_feature (1)..( 6): Matrix.002 file - promoters60/1715615
aatcag

SEQ ID NO: 53295 - DNA, 6 bp, Unknown
  misc_feature (1)..( 6): Matrix.002 file - promoters60/1715615
taagga

SEQ ID NO: 53296 - DNA, 8 bp, Unknown
  misc_feature (1)..( 8): Matrix.002 file - promoters60/1715615
tctgttcc

SEQ ID NO: 53297 - DNA, 6 bp, Unknown
  misc_feature (1)..( 6): Matrix.002 file - promoters60/1715615
taaaga

SEQ ID NO: 53298 - DNA, 7 bp, Unknown
  misc_feature (1)..( 7): Matrix.002 file - promoters60/1715615
atcgaag

SEQ ID NO: 53299 - DNA, 7 bp, Unknown
  misc_feature (1)..( 7): Matrix.002 file - promoters60/1715615
aatgctc

SEQ ID NO: 53300 - DNA, 9 bp, Unknown
  misc_feature (1)..( 9): Matrix.002 file - promoters60/1715615
atgtccatt

SEQ ID NO: 53301 - DNA, 8 bp, Unknown
  misc_feature (1)..( 8): Matrix.002 file - promoters60/1715615
ttttcttt

SEQ ID NO: 53302 - DNA, 7 bp, Unknown
  misc_feature (1)..( 7): Matrix.002 file - promoters60/1715615
atctctt

SEQ ID NO: 53303 - DNA, 8 bp, Unknown
  misc_feature (1)..( 8): Matrix.002 file - promoters60/1715615
tcaacttt

SEQ ID NO: 53304 - DNA, 7 bp, Unknown
  misc_feature (1)..( 7): Matrix.002 file - promoters60/1715615
gaaacaa

SEQ ID NO: 53305 - DNA, 11 bp, Unknown
  misc_feature (1)..( 11): Matrix.002 file - promoters60/1715810
tgaaattaaaa

SEQ ID NO: 53306 - DNA, 7 bp, Unknown
  misc_feature (1)..( 7): Matrix.002 file - promoters60/1715810
gaatttt

SEQ ID NO: 53307 - DNA, 8 bp, Unknown
  misc_feature (1)..( 8): Matrix.002 file - promoters60/1715810
gtttcttt

SEQ ID NO: 53308 - DNA, 10 bp, Unknown
  misc_feature (1)..( 10): Matrix.002 file - promoters60/1715810
aaaaatcaag

SEQ ID NO: 53309 - DNA, 12 bp, Unknown
  misc_feature (1)..( 12): Matrix.002 file - promoters60/1715810
aaaagactaaaa

SEQ ID NO: 53310 - DNA, 11 bp, Unknown
  misc_feature (1)..( 11): Matrix.002 file - promoters60/1715810
aaaaagaaaag

SEQ ID NO: 53311 - DNA, 6 bp, Unknown
  misc_feature (1)..( 6): Matrix.002 file - promoters60/1715810
taaatt

SEQ ID NO: 53312 - DNA, 8 bp, Unknown
  misc_feature (1)..( 8): Matrix.002 file - promoters60/1715810
aactaaac

SEQ ID NO: 53313 - DNA, 9 bp, Unknown
  misc_feature (1)..( 9): Matrix.002 file - promoters60/1715810
ttaactaaa

SEQ ID NO: 53314 - DNA, 10 bp, Unknown
  misc_feature (1)..( 10): Matrix.002 file - promoters60/1716040
atttttaaaa

SEQ ID NO: 53315 - DNA, 10 bp, Unknown
  misc_feature (1)..( 10): Matrix.002 file - promoters60/1716040
ttgcaacttt

SEQ ID NO: 53316 - DNA, 8 bp, Unknown
  misc_feature (1)..( 8): Matrix.002 file - promoters60/1716040
tttctaat

SEQ ID NO: 53317 - DNA, 8 bp, Unknown
  misc_feature (1)..( 8): Matrix.002 file - promoters60/1716040
gattcttt

SEQ ID NO: 53318 - DNA, 8 bp, Unknown
  misc_feature (1)..( 8): Matrix.002 file - promoters60/1716040
atttcatg

SEQ ID NO: 53319 - DNA, 7 bp, Unknown
  misc_feature (1)..( 7): Matrix.002 file - promoters60/1716040
atggttc

SEQ ID NO: 53320 - DNA, 9 bp, Unknown
  misc_feature (1)..( 9): Matrix.002 file - promoters60/1806998
tataaagaa

SEQ ID NO: 53321 - DNA, 10 bp, Unknown
  misc_feature (1)..( 10): Matrix.002 file - promoters60/1806998
aacacaaagt

SEQ ID NO: 53322 - DNA, 8 bp, Unknown
  misc_feature (1)..( 8): Matrix.002 file - promoters60/1807067
ttttaaaa

SEQ ID NO: 53323 - DNA, 10 bp, Unknown
  misc_feature (1)..( 10): Matrix.002 file - promoters60/1807067
caacttattt

SEQ ID NO: 53324 - DNA, 8 bp, Unknown
  misc_feature (1)..( 8): Matrix.002 file - promoters60/1807067
aatatttt

SEQ ID NO: 53325 - DNA, 13 bp, Unknown
  misc_feature (1)..( 13): Matrix.002 file - promoters60/1807067
attatatcaacat

SEQ ID NO: 53326 - DNA, 9 bp, Unknown
  misc_feature (1)..( 9): Matrix.002 file - promoters60/1807067
atgatcaaa

SEQ ID NO: 53327 - DNA, 8 bp, Unknown
  misc_feature (1)..( 8): Matrix.002 file - promoters60/1807067
ttaaaaca

SEQ ID NO: 53328 - DNA, 10 bp, Unknown
  misc_feature (1)..( 10): Matrix.002 file - promoters60/1807067
ttgatcaaca

SEQ ID NO: 53329 - DNA, 9 bp, Unknown
  misc_feature (1)..( 9): Matrix.002 file - promoters60/1807067
atgtattat

SEQ ID NO: 53330 - DNA, 10 bp, Unknown
  misc_feature (1)..( 10): Matrix.002 file - promoters60/1807067
atataaataa

SEQ ID NO: 53331 - DNA, 7 bp, Unknown
  misc_feature (1)..( 7): Matrix.002 file - promoters60/1807067
aatattt

SEQ ID NO: 53332 - DNA, 8 bp, Unknown
  misc_feature (1)..( 8): Matrix.002 file - promoters60/1807067
tttatata

SEQ ID NO: 53333 - DNA, 8 bp, Unknown
  misc_feature (1)..( 8): Matrix.002 file - promoters60/1807067
tatttaaa

SEQ ID NO: 53334 - DNA, 8 bp, Unknown
  misc_feature (1)..( 8): Matrix.002 file - promoters60/1807067
acatgtta

SEQ ID NO: 53335 - DNA, 9 bp, Unknown
  misc_feature (1)..( 9): Matrix.002 file - promoters60/1807244
tgtcctaat

SEQ ID NO: 53336 - DNA, 6 bp, Unknown
  misc_feature (1)..( 6): Matrix.002 file - promoters60/1807244
gagaga

SEQ ID NO: 53337 - DNA, 8 bp, Unknown
  misc_feature (1)..( 8): Matrix.002 file - promoters60/1807244
gaagtagg

SEQ ID NO: 53338 - DNA, 6 bp, Unknown
  misc_feature (1)..( 6): Matrix.002 file - promoters60/1807244
aagcta

SEQ ID NO: 53339 - DNA, 7 bp, Unknown
  misc_feature (1)..( 7): Matrix.002 file - promoters60/1807244
catacta

SEQ ID NO: 53340 - DNA, 7 bp, Unknown
  misc_feature (1)..( 7): Matrix.002 file - promoters60/1807244
aaaacag

SEQ ID NO: 53341 - DNA, 6 bp, Unknown
  misc_feature (1)..( 6): Matrix.002 file - promoters60/1807244
gtggga

SEQ ID NO: 53342 - DNA, 6 bp, Unknown
  misc_feature (1)..( 6): Matrix.002 file - promoters60/1807244
ttcttg

SEQ ID NO: 53343 - DNA, 6 bp, Unknown
  misc_feature (1)..( 6): Matrix.002 file - promoters60/1807244
attaaa

SEQ ID NO: 53344 - DNA, 7 bp, Unknown
  misc_feature (1)..( 7): Matrix.002 file - promoters60/1807244
aacctcc

SEQ ID NO: 53345 - DNA, 9 bp, Unknown
  misc_feature (1)..( 9): Matrix.002 file - promoters60/1807244
aagatcgaa

SEQ ID NO: 53346 - DNA, 7 bp, Unknown
  misc_feature (1)..( 7): Matrix.002 file - promoters60/1807244
atgcagc

SEQ ID NO: 53347 - DNA, 6 bp, Unknown
  misc_feature (1)..( 6): Matrix.002 file - promoters60/1807244
tcacat

SEQ ID NO: 53348 - DNA, 6 bp, Unknown
  misc_feature (1)..( 6): Matrix.002 file - promoters60/1807244
aaacat

SEQ ID NO: 53349 - DNA, 8 bp, Unknown
  misc_feature (1)..( 8): Matrix.002 file - promoters60/1807415
ctttgtct

SEQ ID NO: 53350 - DNA, 8 bp, Unknown
  misc_feature (1)..( 8): Matrix.002 file - promoters60/1807415
tttctctc

SEQ ID NO: 53351 - DNA, 7 bp, Unknown
  misc_feature (1)..( 7): Matrix.002 file - promoters60/1807415
caaataa

SEQ ID NO: 53352 - DNA, 7 bp, Unknown
  misc_feature (1)..( 7): Matrix.002 file - promoters60/1807415
atcttta

SEQ ID NO: 53353 - DNA, 10 bp, Unknown
  misc_feature (1)..( 10): Matrix.002 file - promoters60/1807415
cattaaataa

SEQ ID NO: 53354 - DNA, 7 bp, Unknown
  misc_feature (1)..( 7): Matrix.002 file - promoters60/1807736
atttata

SEQ ID NO: 53355 - DNA, 15 bp, Unknown
  misc_feature (1)..( 15): Matrix.002 file - promoters60/1807771
atgtatgtcatttct

SEQ ID NO: 53356 - DNA, 12 bp, Unknown
  misc_feature (1)..( 12): Matrix.002 file - promoters60/1807771
agaataaataca

SEQ ID NO: 53357 - DNA, 7 bp, Unknown
  misc_feature (1)..( 7): Matrix.002 file - promoters60/1807774
aaatttt

SEQ ID NO: 53358 - DNA, 8 bp, Unknown
  misc_feature (1)..( 8): Matrix.002 file - promoters60/1807774
ataccaac

SEQ ID NO: 53359 - DNA, 10 bp, Unknown
  misc_feature (1)..( 10): Matrix.002 file - promoters60/1807774
ttttggaaat

SEQ ID NO: 53360 - DNA, 8 bp, Unknown
  misc_feature (1)..( 8): Matrix.002 file - promoters60/1807774
cactgttt

SEQ ID NO: 53361 - DNA, 10 bp, Unknown
  misc_feature (1)..( 10): Matrix.002 file - promoters60/1807774
taaaaatttt

SEQ ID NO: 53362 - DNA, 8 bp, Unknown
  misc_feature (1)..( 8): Matrix.002 file - promoters60/1807774
atttattt

SEQ ID NO: 53363 - DNA, 11 bp, Unknown
  misc_feature (1)..( 11): Matrix.002 file - promoters60/1807774
taacaattttt

SEQ ID NO: 53364 - DNA, 8 bp, Unknown
  misc_feature (1)..( 8): Matrix.002 file - promoters60/1807774
tataaata

SEQ ID NO: 53365 - DNA, 9 bp, Unknown
  misc_feature (1)..( 9): Matrix.002 file - promoters60/1808111
ttaaaaaaa

SEQ ID NO: 53366 - DNA, 10 bp, Unknown
  misc_feature (1)..( 10): Matrix.002 file - promoters60/1808111
acaaatggaa

SEQ ID NO: 53367 - DNA, 28 bp, Unknown
  misc_feature (1)..( 28): Matrix.002 file - promoters60/1808111
aagcctatataaaaggctacaagcatga

SEQ ID NO: 53368 - DNA, 8 bp, Unknown
  misc_feature (1)..( 8): Matrix.002 file - promoters60/1808137
tgtgtaaa

SEQ ID NO: 53369 - DNA, 8 bp, Unknown
  misc_feature (1)..( 8): Matrix.002 file - promoters60/1808137
acgtgatg

SEQ ID NO: 53370 - DNA, 6 bp, Unknown
  misc_feature (1)..( 6): Matrix.002 file - promoters60/1808137
atgggc

SEQ ID NO: 53371 - DNA, 6 bp, Unknown
  misc_feature (1)..( 6): Matrix.002 file - promoters60/1808137
ccaata

SEQ ID NO: 53372 - DNA, 10 bp, Unknown
  misc_feature (1)..( 10): Matrix.002 file - promoters60/1808137
ggtttatttt

SEQ ID NO: 53373 - DNA, 6 bp, Unknown
  misc_feature (1)..( 6): Matrix.002 file - promoters60/1808137
gatgtt

SEQ ID NO: 53374 - DNA, 7 bp, Unknown
  misc_feature (1)..( 7): Matrix.002 file - promoters60/1808137
tttaatt

SEQ ID NO: 53375 - DNA, 6 bp, Unknown
  misc_feature (1)..( 6): Matrix.002 file - promoters60/1808137
ttaaga

SEQ ID NO: 53376 - DNA, 6 bp, Unknown
  misc_feature (1)..( 6): Matrix.002 file - promoters60/1808137
gaaaag

SEQ ID NO: 53377 - DNA, 7 bp, Unknown
  misc_feature (1)..( 7): Matrix.002 file - promoters60/1808137
atgataa

SEQ ID NO: 53378 - DNA, 7 bp, Unknown
  misc_feature (1)..( 7): Matrix.002 file - promoters60/1808137
aacctgt

SEQ ID NO: 53379 - DNA, 8 bp, Unknown
  misc_feature (1)..( 8): Matrix.002 file - promoters60/1808137
ttgcatat

SEQ ID NO: 53380 - DNA, 8 bp, Unknown
  misc_feature (1)..( 8): Matrix.002 file - promoters60/1808137
tgttatgc

SEQ ID NO: 53381 - DNA, 7 bp, Unknown
  misc_feature (1)..( 7): Matrix.002 file - promoters60/1808137
ttgctaa

SEQ ID NO: 53382 - DNA, 6 bp, Unknown
  misc_feature (1)..( 6): Matrix.002 file - promoters60/1808137
ttcctt

SEQ ID NO: 53383 - DNA, 6 bp, Unknown
  misc_feature (1)..( 6): Matrix.002 file - promoters60/1808137
aagaga

SEQ ID NO: 53384 - DNA, 7 bp, Unknown
  misc_feature (1)..( 7): Matrix.002 file - promoters60/1808137
aagaaag

SEQ ID NO: 53385 - DNA, 12 bp, Unknown
  misc_feature (1)..( 12): Matrix.002 file - promoters60/1808156
cttgatctgttt

SEQ ID NO: 53386 - DNA, 10 bp, Unknown
  misc_feature (1)..( 10): Matrix.002 file - promoters60/1808156
aaaatttgaa

SEQ ID NO: 53387 - DNA, 10 bp, Unknown
  misc_feature (1)..( 10): Matrix.002 file - promoters60/1808172
tgttgacttt

SEQ ID NO: 53388 - DNA, 9 bp, Unknown
  misc_feature (1)..( 9): Matrix.002 file - promoters60/1808172
ttaaaaaaa

SEQ ID NO: 53389 - DNA, 13 bp, Unknown
  misc_feature (1)..( 13): Matrix.002 file - promoters60/1808172
aatgatatttatt

SEQ ID NO: 53390 - DNA, 12 bp, Unknown
  misc_feature (1)..( 12): Matrix.002 file - promoters60/1808172
tataattatttt

SEQ ID NO: 53391 - DNA, 13 bp, Unknown
  misc_feature (1)..( 13): Matrix.002 file - promoters60/1808172
agttaaattttta

SEQ ID NO: 53392 - DNA, 6 bp, Unknown
  misc_feature (1)..( 6): Matrix.002 file - promoters60/1808572
aattct

SEQ ID NO: 53393 - DNA, 11 bp, Unknown
  misc_feature (1)..( 11): Matrix.002 file - promoters60/1808572
actaattagta

SEQ ID NO: 53394 - DNA, 8 bp, Unknown
  misc_feature (1)..( 8): Matrix.002 file - promoters60/1808572
aaaaatac

SEQ ID NO: 53395 - DNA, 8 bp, Unknown
  misc_feature (1)..( 8): Matrix.002 file - promoters60/1808572
gtaaatta

SEQ ID NO: 53396 - DNA, 7 bp, Unknown
  misc_feature (1)..( 7): Matrix.002 file - promoters60/1808572
aaaaaaa

SEQ ID NO: 53397 - DNA, 7 bp, Unknown
  misc_feature (1)..( 7): Matrix.002 file - promoters60/1808572
tgaacca

SEQ ID NO: 53398 - DNA, 6 bp, Unknown
  misc_feature (1)..( 6): Matrix.002 file - promoters60/1808572
gatttg

SEQ ID NO: 53399 - DNA, 9 bp, Unknown
  misc_feature (1)..( 9): Matrix.002 file - promoters60/1808572
ttattttat

SEQ ID NO: 53400 - DNA, 9 bp, Unknown
  misc_feature (1)..( 9): Matrix.002 file - promoters60/1808572
aacatcttg

SEQ ID NO: 53401 - DNA, 8 bp, Unknown
  misc_feature (1)..( 8): Matrix.002 file - promoters60/1808572
atataaag

SEQ ID NO: 53402 - DNA, 7 bp, Unknown
  misc_feature (1)..( 7): Matrix.002 file - promoters60/1808572
tttaagt

SEQ ID NO: 53403 - DNA, 6 bp, Unknown
  misc_feature (1)..( 6): Matrix.002 file - promoters60/1808572
taatag

SEQ ID NO: 53404 - DNA, 7 bp, Unknown
  misc_feature (1)..( 7): Matrix.002 file - promoters60/1808572
actcaaa

SEQ ID NO: 53405 - DNA, 8 bp, Unknown
  misc_feature (1)..( 8): Matrix.002 file - promoters60/1808572
actatcat

SEQ ID NO: 53406 - DNA, 6 bp, Unknown
  misc_feature (1)..( 6): Matrix.002 file - promoters60/1808572
atttca

SEQ ID NO: 53407 - DNA, 6 bp, Unknown
  misc_feature (1)..( 6): Matrix.002 file - promoters60/1808572
ttttag

SEQ ID NO: 53408 - DNA, 6 bp, Unknown
  misc_feature (1)..( 6): Matrix.002 file - promoters60/1808572
cataat

SEQ ID NO: 53409 - DNA, 8 bp, Unknown
  misc_feature (1)..( 8): Matrix.002 file - promoters60/1808572
agcgcggg

SEQ ID NO: 53410 - DNA, 7 bp, Unknown
  misc_feature (1)..( 7): Matrix.002 file - promoters60/1808572
aaactaa

SEQ ID NO: 53411 - DNA, 7 bp, Unknown
  misc_feature (1)..( 7): Matrix.002 file - promoters60/1808572
aaagaat

SEQ ID NO: 53412 - DNA, 8 bp, Unknown
  misc_feature (1)..( 8): Matrix.002 file - promoters60/1808572
taatgcaa

SEQ ID NO: 53413 - DNA, 6 bp, Unknown
  misc_feature (1)..( 6): Matrix.002 file - promoters60/1808572
aattaa

SEQ ID NO: 53414 - DNA, 7 bp, Unknown
  misc_feature (1)..( 7): Matrix.002 file - promoters60/1808696
taaagtt

SEQ ID NO: 53415 - DNA, 15 bp, Unknown
  misc_feature (1)..( 15): Matrix.002 file - promoters60/1808696
aaaagcatacatata

SEQ ID NO: 53416 - DNA, 8 bp, Unknown
  misc_feature (1)..( 8): Matrix.002 file - promoters60/1808696
ctattatt

SEQ ID NO: 53417 - DNA, 9 bp, Unknown
  misc_feature (1)..( 9): Matrix.002 file - promoters60/1808696
aaatagtta

SEQ ID NO: 53418 - DNA, 8 bp, Unknown
  misc_feature (1)..( 8): Matrix.002 file - promoters60/1808696
tggttatt

SEQ ID NO: 53419 - DNA, 7 bp, Unknown
  misc_feature (1)..( 7): Matrix.002 file - promoters60/1808696
tacataa

SEQ ID NO: 53420 - DNA, 7 bp, Unknown
  misc_feature (1)..( 7): Matrix.002 file - promoters60/1808696
tgttcta

SEQ ID NO: 53421 - DNA, 10 bp, Unknown
  misc_feature (1)..( 10): Matrix.002 file - promoters60/1809157
aaaaaaataa

SEQ ID NO: 53422 - DNA, 10 bp, Unknown
  misc_feature (1)..( 10): Matrix.002 file - promoters60/1809222
gaaatagatt

SEQ ID NO: 53423 - DNA, 10 bp, Unknown
  misc_feature (1)..( 10): Matrix.002 file - promoters60/1809233
taaaattaag

SEQ ID NO: 53424 - DNA, 12 bp, Unknown
  misc_feature (1)..( 12): Matrix.002 file - promoters60/1809233
tactatataagt

SEQ ID NO: 53425 - DNA, 11 bp, Unknown
  misc_feature (1)..( 11): Matrix.002 file - promoters60/1809233
aaaaataaata

SEQ ID NO: 53426 - DNA, 9 bp, Unknown
  misc_feature (1)..( 9): Matrix.002 file - promoters60/1809233
aataaatat

SEQ ID NO: 53427 - DNA, 6 bp, Unknown
  misc_feature (1)..( 6): Matrix.002 file - promoters60/1809243
agtgtt

SEQ ID NO: 53428 - DNA, 6 bp, Unknown
  misc_feature (1)..( 6): Matrix.002 file - promoters60/1809243
aataaa

SEQ ID NO: 53429 - DNA, 10 bp, Unknown
  misc_feature (1)..( 10): Matrix.002 file - promoters60/1809243
aaattaattt

SEQ ID NO: 53430 - DNA, 6 bp, Unknown
  misc_feature (1)..( 6): Matrix.002 file - promoters60/1809243
caagtc

SEQ ID NO: 53431 - DNA, 7 bp, Unknown
  misc_feature (1)..( 7): Matrix.002 file - promoters60/1809243
taatctt

SEQ ID NO: 53432 - DNA, 6 bp, Unknown
  misc_feature (1)..( 6): Matrix.002 file - promoters60/1809243
acacgt

SEQ ID NO: 53433 - DNA, 6 bp, Unknown
  misc_feature (1)..( 6): Matrix.002 file - promoters60/1809243
ttaacc

SEQ ID NO: 53434 - DNA, 7 bp, Unknown
  misc_feature (1)..( 7): Matrix.002 file - promoters60/1809243
caaattt

SEQ ID NO: 53435 - DNA, 7 bp, Unknown
  misc_feature (1)..( 7): Matrix.002 file - promoters60/1809243
tttggaa

SEQ ID NO: 53436 - DNA, 7 bp, Unknown
  misc_feature (1)..( 7): Matrix.002 file - promoters60/1809243
attaatt

SEQ ID NO: 53437 - DNA, 6 bp, Unknown
  misc_feature (1)..( 6): Matrix.002 file - promoters60/1809243
ttaaaa

SEQ ID NO: 53438 - DNA, 8 bp, Unknown
  misc_feature (1)..( 8): Matrix.002 file - promoters60/1809243
attgttcc

SEQ ID NO: 53439 - DNA, 7 bp, Unknown
  misc_feature (1)..( 7): Matrix.002 file - promoters60/1809243
agaaaaa

SEQ ID NO: 53440 - DNA, 8 bp, Unknown
  misc_feature (1)..( 8): Matrix.002 file - promoters60/1809243
aaaaacaa

SEQ ID NO: 53441 - DNA, 6 bp, Unknown
  misc_feature (1)..( 6): Matrix.002 file - promoters60/1809243
agttgg

SEQ ID NO: 53442 - DNA, 6 bp, Unknown
  misc_feature (1)..( 6): Matrix.002 file - promoters60/1809243
tttccc

SEQ ID NO: 53443 - DNA, 10 bp, Unknown
  misc_feature (1)..( 10): Matrix.002 file - promoters60/1809253
aattacaaaa

SEQ ID NO: 53444 - DNA, 6 bp, Unknown
  misc_feature (1)..( 6): Matrix.002 file - promoters60/1809253
aaaaat

SEQ ID NO: 53445 - DNA, 11 bp, Unknown
  misc_feature (1)..( 11): Matrix.002 file - promoters60/1809253
aataaaaacaa

SEQ ID NO: 53446 - DNA, 7 bp, Unknown
  misc_feature (1)..( 7): Matrix.002 file - promoters60/1809253
acaaaaa

SEQ ID NO: 53447 - DNA, 7 bp, Unknown
  misc_feature (1)..( 7): Matrix.002 file - promoters60/1809253
aaccaac

SEQ ID NO: 53448 - DNA, 6 bp, Unknown
  misc_feature (1)..( 6): Matrix.002 file - promoters60/1809253
aaaata

SEQ ID NO: 53449 - DNA, 7 bp, Unknown
  misc_feature (1)..( 7): Matrix.002 file - promoters60/1809253
atatata

SEQ ID NO: 53450 - DNA, 8 bp, Unknown
  misc_feature (1)..( 8): Matrix.002 file - promoters60/1809253
caaaatct

SEQ ID NO: 53451 - DNA, 7 bp, Unknown
  misc_feature (1)..( 7): Matrix.002 file - promoters60/1809253
aaaagtc

SEQ ID NO: 53452 - DNA, 6 bp, Unknown
  misc_feature (1)..( 6): Matrix.002 file - promoters60/1809253
atgtca

SEQ ID NO: 53453 - DNA, 11 bp, Unknown
  misc_feature (1)..( 11): Matrix.002 file - promoters60/1809253
tatgtttacaa

SEQ ID NO: 53454 - DNA, 8 bp, Unknown
  misc_feature (1)..( 8): Matrix.002 file - promoters60/1809253
tgtctgta

SEQ ID NO: 53455 - DNA, 7 bp, Unknown
  misc_feature (1)..( 7): Matrix.002 file - promoters60/1809253
attattt

SEQ ID NO: 53456 - DNA, 6 bp, Unknown
  misc_feature (1)..( 6): Matrix.002 file - promoters60/1809253
tcgttt

SEQ ID NO: 53457 - DNA, 8 bp, Unknown
  misc_feature (1)..( 8): Matrix.002 file - promoters60/1809253
gttgactt

SEQ ID NO: 53458 - DNA, 6 bp, Unknown
  misc_feature (1)..( 6): Matrix.002 file - promoters60/1809253
tttcaa

SEQ ID NO: 53459 - DNA, 6 bp, Unknown
  misc_feature (1)..( 6): Matrix.002 file - promoters60/1809253
tctttc

SEQ ID NO: 53460 - DNA, 9 bp, Unknown
  misc_feature (1)..( 9): Matrix.002 file - promoters60/1809253
caaaaaaac

SEQ ID NO: 53461 - DNA, 6 bp, Unknown
  misc_feature (1)..( 6): Matrix.002 file - promoters60/1809253
aacaaa

SEQ ID NO: 53462 - DNA, 11 bp, Unknown
  misc_feature (1)..( 11): Matrix.002 file - promoters60/1830195
caaagaaaaat

SEQ ID NO: 53463 - DNA, 9 bp, Unknown
  misc_feature (1)..( 9): Matrix.002 file - promoters60/1923743
cggcggttc

SEQ ID NO: 53464 - DNA, 7 bp, Unknown
  misc_feature (1)..( 7): Matrix.002 file - promoters60/1923743
ttcaaaa

SEQ ID NO: 53465 - DNA, 9 bp, Unknown
  misc_feature (1)..( 9): Matrix.002 file - promoters60/1923743
acactaaaa

SEQ ID NO: 53466 - DNA, 6 bp, Unknown
  misc_feature (1)..( 6): Matrix.002 file - promoters60/1923743
tctaac

SEQ ID NO: 53467 - DNA, 7 bp, Unknown
  misc_feature (1)..( 7): Matrix.002 file - promoters60/1923743
gattttt

SEQ ID NO: 53468 - DNA, 6 bp, Unknown
  misc_feature (1)..( 6): Matrix.002 file - promoters60/1923743
taaaca

SEQ ID NO: 53469 - DNA, 7 bp, Unknown
  misc_feature (1)..( 7): Matrix.002 file - promoters60/1923743
gataacg

SEQ ID NO: 53470 - DNA, 9 bp, Unknown
  misc_feature (1)..( 9): Matrix.002 file - promoters60/1923743
atgtttgtt

SEQ ID NO: 53471 - DNA, 8 bp, Unknown
  misc_feature (1)..( 8): Matrix.002 file - promoters60/1923743
tgttcaaa

SEQ ID NO: 53472 - DNA, 7 bp, Unknown
  misc_feature (1)..( 7): Matrix.002 file - promoters60/1923743
aagaagt

SEQ ID NO: 53473 - DNA, 6 bp, Unknown
  misc_feature (1)..( 6): Matrix.002 file - promoters60/1923743
ctaaaa

SEQ ID NO: 53474 - DNA, 7 bp, Unknown
  misc_feature (1)..( 7): Matrix.002 file - promoters60/1923743
aggagtt

SEQ ID NO: 53475 - DNA, 6 bp, Unknown
  misc_feature (1)..( 6): Matrix.002 file - promoters60/1923743
aacaaa

SEQ ID NO: 53476 - DNA, 7 bp, Unknown
  misc_feature (1)..( 7): Matrix.002 file - promoters60/1923743
atccaat

SEQ ID NO: 53477 - DNA, 6 bp, Unknown
  misc_feature (1)..( 6): Matrix.002 file - promoters60/1923743
tattct

SEQ ID NO: 53478 - DNA, 8 bp, Unknown
  misc_feature (1)..( 8): Matrix.002 file - promoters60/1923743
taatgtaa

SEQ ID NO: 53479 - DNA, 9 bp, Unknown
  misc_feature (1)..( 9): Matrix.002 file - promoters60/1923743
taatgcact

SEQ ID NO: 53480 - DNA, 6 bp, Unknown
  misc_feature (1)..( 6): Matrix.002 file - promoters60/1923743
actatt

SEQ ID NO: 53481 - DNA, 7 bp, Unknown
  misc_feature (1)..( 7): Matrix.002 file - promoters60/1923743
cgactat

SEQ ID NO: 53482 - DNA, 7 bp, Unknown
  misc_feature (1)..( 7): Matrix.002 file - promoters60/1923750
attaaaa

SEQ ID NO: 53483 - DNA, 6 bp, Unknown
  misc_feature (1)..( 6): Matrix.002 file - promoters60/1923750
tattta

SEQ ID NO: 53484 - DNA, 7 bp, Unknown
  misc_feature (1)..( 7): Matrix.002 file - promoters60/1923750
gatattc

SEQ ID NO: 53485 - DNA, 6 bp, Unknown
  misc_feature (1)..( 6): Matrix.002 file - promoters60/1923750
aaaaca

SEQ ID NO: 53486 - DNA, 10 bp, Unknown
  misc_feature (1)..( 10): Matrix.002 file - promoters60/1923750
agaaaaaaaa

SEQ ID NO: 53487 - DNA, 6 bp, Unknown
  misc_feature (1)..( 6): Matrix.002 file - promoters60/1923750
ataata

SEQ ID NO: 53488 - DNA, 7 bp, Unknown
  misc_feature (1)..( 7): Matrix.002 file - promoters60/1923750
aaacaca

SEQ ID NO: 53489 - DNA, 7 bp, Unknown
  misc_feature (1)..( 7): Matrix.002 file - promoters60/1923750
actatag

SEQ ID NO: 53490 - DNA, 6 bp, Unknown
  misc_feature (1)..( 6): Matrix.002 file - promoters60/1923750
actata

SEQ ID NO: 53491 - DNA, 7 bp, Unknown
  misc_feature (1)..( 7): Matrix.002 file - promoters60/1923750
acagtta

SEQ ID NO: 53492 - DNA, 6 bp, Unknown
  misc_feature (1)..( 6): Matrix.002 file - promoters60/1923750
ttaatc

SEQ ID NO: 53493 - DNA, 8 bp, Unknown
  misc_feature (1)..( 8): Matrix.002 file - promoters60/1923750
tacaaaaa

SEQ ID NO: 53494 - DNA, 6 bp, Unknown
  misc_feature (1)..( 6): Matrix.002 file - promoters60/1923750
aattat

SEQ ID NO: 53495 - DNA, 7 bp, Unknown
  misc_feature (1)..( 7): Matrix.002 file - promoters60/1923750
taaacac

SEQ ID NO: 53496 - DNA, 6 bp, Unknown
  misc_feature (1)..( 6): Matrix.002 file - promoters60/1923750
caaaac

SEQ ID NO: 53497 - DNA, 8 bp, Unknown
  misc_feature (1)..( 8): Matrix.002 file - promoters60/1923750
tacaattt

SEQ ID NO: 53498 - DNA, 9 bp, Unknown
  misc_feature (1)..( 9): Matrix.002 file - promoters60/1923750
cagcttttt

SEQ ID NO: 53499 - DNA, 6 bp, Unknown
  misc_feature (1)..( 6): Matrix.002 file - promoters60/1923750
acaact

SEQ ID NO: 53500 - DNA, 7 bp, Unknown
  misc_feature (1)..( 7): Matrix.002 file - promoters60/1923750
tttctaa

SEQ ID NO: 53501 - DNA, 6 bp, Unknown
  misc_feature (1)..( 6): Matrix.002 file - promoters60/1923750
ctccaa

SEQ ID NO: 53502 - DNA, 7 bp, Unknown
  misc_feature (1)..( 7): Matrix.002 file - promoters60/1923750
tacaatt

SEQ ID NO: 53503 - DNA, 7 bp, Unknown
  misc_feature (1)..( 7): Matrix.002 file - promoters60/1923750
acataaa

SEQ ID NO: 53504 - DNA, 7 bp, Unknown
  misc_feature (1)..( 7): Matrix.002 file - promoters60/1923750
aaacttt

SEQ ID NO: 53505 - DNA, 6 bp, Unknown
  misc_feature (1)..( 6): Matrix.002 file - promoters60/1923750
taaata

SEQ ID NO: 53506 - DNA, 10 bp, Unknown
  misc_feature (1)..( 10): Matrix.002 file - promoters60/1957018
taatttggat

SEQ ID NO: 53507 - DNA, 15 bp, Unknown
  misc_feature (1)..( 15): Matrix.002 file - promoters60/1957018
ttttgaaaaaaaaaa

SEQ ID NO: 53508 - DNA, 8 bp, Unknown
  misc_feature (1)..( 8): Matrix.002 file - promoters60/1957018
attatcag

SEQ ID NO: 53509 - DNA, 9 bp, Unknown
  misc_feature (1)..( 9): Matrix.002 file - promoters60/1957018
agattctaa

SEQ ID NO: 53510 - DNA, 10 bp, Unknown
  misc_feature (1)..( 10): Matrix.002 file - promoters60/1957018
gattttttaa

SEQ ID NO: 53511 - DNA, 11 bp, Unknown
  misc_feature (1)..( 11): Matrix.002 file - promoters60/1957212
taaaaagacag

SEQ ID NO: 53512 - DNA, 9 bp, Unknown
  misc_feature (1)..( 9): Matrix.002 file - promoters60/1957296
aatgtagtt

SEQ ID NO: 53513 - DNA, 10 bp, Unknown
  misc_feature (1)..( 10): Matrix.002 file - promoters60/1957296
tctactactt

SEQ ID NO: 53514 - DNA, 6 bp, Unknown
  misc_feature (1)..( 6): Matrix.002 file - promoters60/1957296
aagaaa

SEQ ID NO: 53515 - DNA, 6 bp, Unknown
  misc_feature (1)..( 6): Matrix.002 file - promoters60/1957296
aattga

SEQ ID NO: 53516 - DNA, 7 bp, Unknown
  misc_feature (1)..( 7): Matrix.002 file - promoters60/1957296
gaaaatt

SEQ ID NO: 53517 - DNA, 6 bp, Unknown
  misc_feature (1)..( 6): Matrix.002 file - promoters60/1957296
tgtctt

SEQ ID NO: 53518 - DNA, 8 bp, Unknown
  misc_feature (1)..( 8): Matrix.002 file - promoters60/1957296
atcaatgt

SEQ ID NO: 53519 - DNA, 7 bp, Unknown
  misc_feature (1)..( 7): Matrix.002 file - promoters60/1957296
aatttat

SEQ ID NO: 53520 - DNA, 6 bp, Unknown
  misc_feature (1)..( 6): Matrix.002 file - promoters60/1957296
agaaca

SEQ ID NO: 53521 - DNA, 6 bp, Unknown
  misc_feature (1)..( 6): Matrix.002 file - promoters60/1957296
gatcaa

SEQ ID NO: 53522 - DNA, 6 bp, Unknown
  misc_feature (1)..( 6): Matrix.002 file - promoters60/1957296
ttaaaa

SEQ ID NO: 53523 - DNA, 6 bp, Unknown
  misc_feature (1)..( 6): Matrix.002 file - promoters60/1957296
aaaatt

SEQ ID NO: 53524 - DNA, 8 bp, Unknown
  misc_feature (1)..( 8): Matrix.002 file - promoters60/1957296
aatcaatt

SEQ ID NO: 53525 - DNA, 7 bp, Unknown
  misc_feature (1)..( 7): Matrix.002 file - promoters60/1957296
attaaat

SEQ ID NO: 53526 - DNA, 6 bp, Unknown
  misc_feature (1)..( 6): Matrix.002 file - promoters60/1957296
tataca

SEQ ID NO: 53527 - DNA, 7 bp, Unknown
  misc_feature (1)..( 7): Matrix.002 file - promoters60/1957303
aaaacga

SEQ ID NO: 53528 - DNA, 10 bp, Unknown
  misc_feature (1)..( 10): Matrix.002 file - promoters60/1957303
gaaaaaaaaa

SEQ ID NO: 53529 - DNA, 8 bp, Unknown
  misc_feature (1)..( 8): Matrix.002 file - promoters60/1957303
aaacgaaa

SEQ ID NO: 53530 - DNA, 8 bp, Unknown
  misc_feature (1)..( 8): Matrix.002 file - promoters60/1957303
gaagaaag

SEQ ID NO: 53531 - DNA, 12 bp, Unknown
  misc_feature (1)..( 12): Matrix.002 file - promoters60/1957303
agaagaaaatcg

SEQ ID NO: 53532 - DNA, 8 bp, Unknown
  misc_feature (1)..( 8): Matrix.002 file - promoters60/1957303
atttaaag

SEQ ID NO: 53533 - DNA, 8 bp, Unknown
  misc_feature (1)..( 8): Matrix.002 file - promoters60/1957303
ccaaatct

SEQ ID NO: 53534 - DNA, 8 bp, Unknown
  misc_feature (1)..( 8): Matrix.002 file - promoters60/1959878
tgtgtaaa

SEQ ID NO: 53535 - DNA, 8 bp, Unknown
  misc_feature (1)..( 8): Matrix.002 file - promoters60/1959878
acgtgatg

SEQ ID NO: 53536 - DNA, 6 bp, Unknown
  misc_feature (1)..( 6): Matrix.002 file - promoters60/1959878
atgggc

SEQ ID NO: 53537 - DNA, 6 bp, Unknown
  misc_feature (1)..( 6): Matrix.002 file - promoters60/1959878
ccaata

SEQ ID NO: 53538 - DNA, 10 bp, Unknown
  misc_feature (1)..( 10): Matrix.002 file - promoters60/1959878
ggtttatttt

SEQ ID NO: 53539 - DNA, 6 bp, Unknown
  misc_feature (1)..( 6): Matrix.002 file - promoters60/1959878
gatgtt

SEQ ID NO: 53540 - DNA, 7 bp, Unknown
  misc_feature (1)..( 7): Matrix.002 file - promoters60/1959878
tttaatt

SEQ ID NO: 53541 - DNA, 6 bp, Unknown
  misc_feature (1)..( 6): Matrix.002 file - promoters60/1959878
ttaaga

SEQ ID NO: 53542 - DNA, 6 bp, Unknown
  misc_feature (1)..( 6): Matrix.002 file - promoters60/1959878
gaaaag

SEQ ID NO: 53543 - DNA, 7 bp, Unknown
  misc_feature (1)..( 7): Matrix.002 file - promoters60/1959878
atgataa

SEQ ID NO: 53544 - DNA, 7 bp, Unknown
  misc_feature (1)..( 7): Matrix.002 file - promoters60/1959878
aacctgt

SEQ ID NO: 53545 - DNA, 8 bp, Unknown
  misc_feature (1)..( 8): Matrix.002 file - promoters60/1959878
ttgcatat

SEQ ID NO: 53546 - DNA, 8 bp, Unknown
  misc_feature (1)..( 8): Matrix.002 file - promoters60/1959878
tgttatgc

SEQ ID NO: 53547 - DNA, 7 bp, Unknown
  misc_feature (1)..( 7): Matrix.002 file - promoters60/1959878
ttgctaa

SEQ ID NO: 53548 - DNA, 6 bp, Unknown
  misc_feature (1)..( 6): Matrix.002 file - promoters60/1959878
ttcctt

SEQ ID NO: 53549 - DNA, 6 bp, Unknown
  misc_feature (1)..( 6): Matrix.002 file - promoters60/1959878
aagaga

SEQ ID NO: 53550 - DNA, 7 bp, Unknown
  misc_feature (1)..( 7): Matrix.002 file - promoters60/1959878
aagaaag

SEQ ID NO: 53551 - DNA, 7 bp, Unknown
  misc_feature (1)..( 7): Matrix.002 file - promoters60/1959904
tttgtgt

SEQ ID NO: 53552 - DNA, 10 bp, Unknown
  misc_feature (1)..( 10): Matrix.002 file - promoters60/1959904
tttacctttt

SEQ ID NO: 53553 - DNA, 6 bp, Unknown
  misc_feature (1)..( 6): Matrix.002 file - promoters60/1959904
caaatt

SEQ ID NO: 53554 - DNA, 7 bp, Unknown
  misc_feature (1)..( 7): Matrix.002 file - promoters60/1959904
ttagtca

SEQ ID NO: 53555 - DNA, 6 bp, Unknown
  misc_feature (1)..( 6): Matrix.002 file - promoters60/1959904
ttgatg

SEQ ID NO: 53556 - DNA, 8 bp, Unknown
  misc_feature (1)..( 8): Matrix.002 file - promoters60/1959904
ataaggcc

SEQ ID NO: 53557 - DNA, 8 bp, Unknown
  misc_feature (1)..( 8): Matrix.002 file - promoters60/1959904
atcatcaa

SEQ ID NO: 53558 - DNA, 7 bp, Unknown
  misc_feature (1)..( 7): Matrix.002 file - promoters60/1959904
tctgttt

SEQ ID NO: 53559 - DNA, 6 bp, Unknown
  misc_feature (1)..( 6): Matrix.002 file - promoters60/1959904
tttgtt

SEQ ID NO: 53560 - DNA, 6 bp, Unknown
  misc_feature (1)..( 6): Matrix.002 file - promoters60/1959904
attgtt

SEQ ID NO: 53561 - DNA, 7 bp, Unknown
  misc_feature (1)..( 7): Matrix.002 file - promoters60/1959904
ttttgtt

SEQ ID NO: 53562 - DNA, 8 bp, Unknown
  misc_feature (1)..( 8): Matrix.002 file - promoters60/1959904
ataatctt

SEQ ID NO: 53563 - DNA, 8 bp, Unknown
  misc_feature (1)..( 8): Matrix.002 file - promoters60/1959904
tgtgtaaa

SEQ ID NO: 53564 - DNA, 8 bp, Unknown
  misc_feature (1)..( 8): Matrix.002 file - promoters60/1959904
acgtgatg

SEQ ID NO: 53565 - DNA, 6 bp, Unknown
  misc_feature (1)..( 6): Matrix.002 file - promoters60/1959904
atgggc

SEQ ID NO: 53566 - DNA, 6 bp, Unknown
  misc_feature (1)..( 6): Matrix.002 file - promoters60/1959904
ccaata

SEQ ID NO: 53567 - DNA, 8 bp, Unknown
  misc_feature (1)..( 8): Matrix.002 file - promoters60/1959904
ggtttatt

SEQ ID NO: 53568 - DNA, 7 bp, Unknown
  misc_feature (1)..( 7): Matrix.002 file - promoters60/1959965
tatctta

SEQ ID NO: 53569 - DNA, 9 bp, Unknown
  misc_feature (1)..( 9): Matrix.002 file - promoters60/1959965
atataattt

SEQ ID NO: 53570 - DNA, 13 bp, Unknown
  misc_feature (1)..( 13): Matrix.002 file - promoters60/1959965
aaaattcatctaa

SEQ ID NO: 53571 - DNA, 6 bp, Unknown
  misc_feature (1)..( 6): Matrix.002 file - promoters60/1959965
tttcat

SEQ ID NO: 53572 - DNA, 7 bp, Unknown
  misc_feature (1)..( 7): Matrix.002 file - promoters60/1959965
agaaaaa

SEQ ID NO: 53573 - DNA, 7 bp, Unknown
  misc_feature (1)..( 7): Matrix.002 file - promoters60/1959965
ccatttt

SEQ ID NO: 53574 - DNA, 8 bp, Unknown
  misc_feature (1)..( 8): Matrix.002 file - promoters60/1959965
ttaaatat

SEQ ID NO: 53575 - DNA, 6 bp, Unknown
  misc_feature (1)..( 6): Matrix.002 file - promoters60/1959965
atgaat

SEQ ID NO: 53576 - DNA, 8 bp, Unknown
  misc_feature (1)..( 8): Matrix.002 file - promoters60/1959965
ttttcatt

SEQ ID NO: 53577 - DNA, 7 bp, Unknown
  misc_feature (1)..( 7): Matrix.002 file - promoters60/1959965
ttaggag

SEQ ID NO: 53578 - DNA, 7 bp, Unknown
  misc_feature (1)..( 7): Matrix.002 file - promoters60/1959965
tgaaacc

SEQ ID NO: 53579 - DNA, 7 bp, Unknown
  misc_feature (1)..( 7): Matrix.002 file - promoters60/1959965
tttactc

SEQ ID NO: 53580 - DNA, 7 bp, Unknown
  misc_feature (1)..( 7): Matrix.002 file - promoters60/1959965
tcctttt

SEQ ID NO: 53581 - DNA, 6 bp, Unknown
  misc_feature (1)..( 6): Matrix.002 file - promoters60/1959965
attttt

SEQ ID NO: 53582 - DNA, 6 bp, Unknown
  misc_feature (1)..( 6): Matrix.002 file - promoters60/1959965
agagat

SEQ ID NO: 53583 - DNA, 7 bp, Unknown
  misc_feature (1)..( 7): Matrix.002 file - promoters60/1959965
tatagtt

SEQ ID NO: 53584 - DNA, 7 bp, Unknown
  misc_feature (1)..( 7): Matrix.002 file - promoters60/1959965
tatatgt

SEQ ID NO: 53585 - DNA, 7 bp, Unknown
  misc_feature (1)..( 7): Matrix.002 file - promoters60/1959965
taagatt

SEQ ID NO: 53586 - DNA, 7 bp, Unknown
  misc_feature (1)..( 7): Matrix.002 file - promoters60/1959965
tggatat

SEQ ID NO: 53587 - DNA, 8 bp, Unknown
  misc_feature (1)..( 8): Matrix.002 file - promoters60/1959965
attgtttt

SEQ ID NO: 53588 - DNA, 8 bp, Unknown
  misc_feature (1)..( 8): Matrix.002 file - promoters60/1959977
gaagaaac

SEQ ID NO: 53589 - DNA, 11 bp, Unknown
  misc_feature (1)..( 11): Matrix.002 file - promoters60/1974282
atgacacaaat

SEQ ID NO: 53590 - DNA, 7 bp, Unknown
  misc_feature (1)..( 7): Matrix.002 file - promoters60/1974282
tttcaaa

SEQ ID NO: 53591 - DNA, 10 bp, Unknown
  misc_feature (1)..( 10): Matrix.002 file - promoters60/1974282
ttttatgttt

SEQ ID NO: 53592 - DNA, 10 bp, Unknown
  misc_feature (1)..( 10): Matrix.002 file - promoters60/1974282
attcaaaact

SEQ ID NO: 53593 - DNA, 10 bp, Unknown
  misc_feature (1)..( 10): Matrix.002 file - promoters60/1974282
aatttttgta

SEQ ID NO: 53594 - DNA, 9 bp, Unknown
  misc_feature (1)..( 9): Matrix.002 file - promoters60/1974501
aaataattt

SEQ ID NO: 53595 - DNA, 8 bp, Unknown
  misc_feature (1)..( 8): Matrix.002 file - promoters60/1974501
caaataat

SEQ ID NO: 53596 - DNA, 11 bp, Unknown
  misc_feature (1)..( 11): Matrix.002 file - promoters60/1974501
tcacaaataca

SEQ ID NO: 53597 - DNA, 7 bp, Unknown
  misc_feature (1)..( 7): Matrix.002 file - promoters60/1974501
actatag

SEQ ID NO: 53598 - DNA, 12 bp, Unknown
  misc_feature (1)..( 12): Matrix.002 file - promoters60/1974501
aatacaaattta

SEQ ID NO: 53599 - DNA, 10 bp, Unknown
  misc_feature (1)..( 10): Matrix.002 file - promoters60/1974501
atgtatttgt

SEQ ID NO: 53600 - DNA, 7 bp, Unknown
  misc_feature (1)..( 7): Matrix.002 file - promoters60/1975887
cttattg

SEQ ID NO: 53601 - DNA, 9 bp, Unknown
  misc_feature (1)..( 9): Matrix.002 file - promoters60/1975887
tttaattgc

SEQ ID NO: 53602 - DNA, 9 bp, Unknown
  misc_feature (1)..( 9): Matrix.002 file - promoters60/1975887
attgtaatt

SEQ ID NO: 53603 - DNA, 8 bp, Unknown
  misc_feature (1)..( 8): Matrix.002 file - promoters60/1975887
tatgtgtt

SEQ ID NO: 53604 - DNA, 8 bp, Unknown
  misc_feature (1)..( 8): Matrix.002 file - promoters60/1975887
ttattgta

SEQ ID NO: 53605 - DNA, 11 bp, Unknown
  misc_feature (1)..( 11): Matrix.002 file - promoters60/1975887
taaagttttga

SEQ ID NO: 53606 - DNA, 8 bp, Unknown
  misc_feature (1)..( 8): Matrix.002 file - promoters60/1975887
tatgaaaa

SEQ ID NO: 53607 - DNA, 7 bp, Unknown
  misc_feature (1)..( 7): Matrix.002 file - promoters60/1975887
gtatcaa

SEQ ID NO: 53608 - DNA, 9 bp, Unknown
  misc_feature (1)..( 9): Matrix.002 file - promoters60/1975887
agacagaag

SEQ ID NO: 53609 - DNA, 10 bp, Unknown
  misc_feature (1)..( 10): Matrix.002 file - promoters60/1975887
aaaggtttct

SEQ ID NO: 53610 - DNA, 6 bp, Unknown
  misc_feature (1)..( 6): Matrix.002 file - promoters60/1975895
atataa

SEQ ID NO: 53611 - DNA, 6 bp, Unknown
  misc_feature (1)..( 6): Matrix.002 file - promoters60/1975895
catgat

SEQ ID NO: 53612 - DNA, 6 bp, Unknown
  misc_feature (1)..( 6): Matrix.002 file - promoters60/1975895
actata

SEQ ID NO: 53613 - DNA, 7 bp, Unknown
  misc_feature (1)..( 7): Matrix.002 file - promoters60/1975895
attcacg

SEQ ID NO: 53614 - DNA, 9 bp, Unknown
  misc_feature (1)..( 9): Matrix.002 file - promoters60/1975895
aaaaataaa

SEQ ID NO: 53615 - DNA, 6 bp, Unknown
  misc_feature (1)..( 6): Matrix.002 file - promoters60/1975895
acgaat

SEQ ID NO: 53616 - DNA, 8 bp, Unknown
  misc_feature (1)..( 8): Matrix.002 file - promoters60/1975895
atgtacaa

SEQ ID NO: 53617 - DNA, 7 bp, Unknown
  misc_feature (1)..( 7): Matrix.002 file - promoters60/1975895
acaagaa

SEQ ID NO: 53618 - DNA, 6 bp, Unknown
  misc_feature (1)..( 6): Matrix.002 file - promoters60/1975895
taattt

SEQ ID NO: 53619 - DNA, 10 bp, Unknown
  misc_feature (1)..( 10): Matrix.002 file - promoters60/1975895
ataaaagctt

SEQ ID NO: 53620 - DNA, 8 bp, Unknown
  misc_feature (1)..( 8): Matrix.002 file - promoters60/1975895
catcgtct

SEQ ID NO: 53621 - DNA, 6 bp, Unknown
  misc_feature (1)..( 6): Matrix.002 file - promoters60/1975895
tctaac

SEQ ID NO: 53622 - DNA, 9 bp, Unknown
  misc_feature (1)..( 9): Matrix.002 file - promoters60/1975895
ttttcagct

SEQ ID NO: 53623 - DNA, 7 bp, Unknown
  misc_feature (1)..( 7): Matrix.002 file - promoters60/1975923
atacaaa

SEQ ID NO: 53624 - DNA, 11 bp, Unknown
  misc_feature (1)..( 11): Matrix.002 file - promoters60/1975923
gatttaaaatg

SEQ ID NO: 53625 - DNA, 10 bp, Unknown
  misc_feature (1)..( 10): Matrix.002 file - promoters60/1975923
ttaataaaat

SEQ ID NO: 53626 - DNA, 10 bp, Unknown
  misc_feature (1)..( 10): Matrix.002 file - promoters60/1975923
aaaattaatt

SEQ ID NO: 53627 - DNA, 10 bp, Unknown
  misc_feature (1)..( 10): Matrix.002 file - promoters60/1975923
aaatttataa

SEQ ID NO: 53628 - DNA, 17 bp, Unknown
  misc_feature (1)..( 17): Matrix.002 file - promoters60/1975940
aaaacaaaccaaaaaca

SEQ ID NO: 53629 - DNA, 14 bp, Unknown
  misc_feature (1)..( 14): Matrix.002 file - promoters60/1975940
agattttgtatata

SEQ ID NO: 53630 - DNA, 10 bp, Unknown
  misc_feature (1)..( 10): Matrix.002 file - promoters60/1975940
aattttattt

SEQ ID NO: 53631 - DNA, 12 bp, Unknown
  misc_feature (1)..( 12): Matrix.002 file - promoters60/1975956
tagaattactaa

SEQ ID NO: 53632 - DNA, 7 bp, Unknown
  misc_feature (1)..( 7): Matrix.002 file - promoters60/1975956
taataat

SEQ ID NO: 53633 - DNA, 6 bp, Unknown
  misc_feature (1)..( 6): Matrix.002 file - promoters60/1975956
aatttt

SEQ ID NO: 53634 - DNA, 14 bp, Unknown
  misc_feature (1)..( 14): Matrix.002 file - promoters60/1975956
ttgaatcaatattt

SEQ ID NO: 53635 - DNA, 7 bp, Unknown
  misc_feature (1)..( 7): Matrix.002 file - promoters60/1975956
tatacaa

SEQ ID NO: 53636 - DNA, 11 bp, Unknown
  misc_feature (1)..( 11): Matrix.002 file - promoters60/1975956
ttttctaaaat

SEQ ID NO: 53637 - DNA, 7 bp, Unknown
  misc_feature (1)..( 7): Matrix.002 file - promoters60/1975956
tataatt

SEQ ID NO: 53638 - DNA, 8 bp, Unknown
  misc_feature (1)..( 8): Matrix.002 file - promoters60/1975956
tgaaaaaa

SEQ ID NO: 53639 - DNA, 9 bp, Unknown
  misc_feature (1)..( 9): Matrix.002 file - promoters60/1975956
taaatttct

SEQ ID NO: 53640 - DNA, 7 bp, Unknown
  misc_feature (1)..( 7): Matrix.002 file - promoters60/1975956
aagagaa

SEQ ID NO: 53641 - DNA, 8 bp, Unknown
  misc_feature (1)..( 8): Matrix.002 file - promoters60/1975956
atggcttg

SEQ ID NO: 53642 - DNA, 7 bp, Unknown
  misc_feature (1)..( 7): Matrix.002 file - promoters60/1975956
tggattt

SEQ ID NO: 53643 - DNA, 6 bp, Unknown
  misc_feature (1)..( 6): Matrix.002 file - promoters60/1975956
aagatt

SEQ ID NO: 53644 - DNA, 6 bp, Unknown
  misc_feature (1)..( 6): Matrix.002 file - promoters60/1975956
ttggtt

SEQ ID NO: 53645 - DNA, 6 bp, Unknown
  misc_feature (1)..( 6): Matrix.002 file - promoters60/1975956
ttaacc

SEQ ID NO: 53646 - DNA, 7 bp, Unknown
  misc_feature (1)..( 7): Matrix.002 file - promoters60/1975956
ctcactc

SEQ ID NO: 53647 - DNA, 6 bp, Unknown
  misc_feature (1)..( 6): Matrix.002 file - promoters60/1975956
ataatt

SEQ ID NO: 53648 - DNA, 8 bp, Unknown
  misc_feature (1)..( 8): Matrix.002 file - promoters60/1975956
gaaatata

SEQ ID NO: 53649 - DNA, 6 bp, Unknown
  misc_feature (1)..( 6): Matrix.002 file - promoters60/1975956
ttatcc

SEQ ID NO: 53650 - DNA, 6 bp, Unknown
  misc_feature (1)..( 6): Matrix.002 file - promoters60/1975956
atttaa

SEQ ID NO: 53651 - DNA, 9 bp, Unknown
  misc_feature (1)..( 9): Matrix.002 file - promoters60/1976000
aaaacaatt

SEQ ID NO: 53652 - DNA, 7 bp, Unknown
  misc_feature (1)..( 7): Matrix.002 file - promoters60/1976000
aaaaata

SEQ ID NO: 53653 - DNA, 6 bp, Unknown
  misc_feature (1)..( 6): Matrix.002 file - promoters60/1976000
tgacaa

SEQ ID NO: 53654 - DNA, 7 bp, Unknown
  misc_feature (1)..( 7): Matrix.002 file - promoters60/1976000
attacaa

SEQ ID NO: 53655 - DNA, 6 bp, Unknown
  misc_feature (1)..( 6): Matrix.002 file - promoters60/1976000
taatta

SEQ ID NO: 53656 - DNA, 7 bp, Unknown
  misc_feature (1)..( 7): Matrix.002 file - promoters60/1976000
tctactg

SEQ ID NO: 53657 - DNA, 6 bp, Unknown
  misc_feature (1)..( 6): Matrix.002 file - promoters60/1976000
aaattg

SEQ ID NO: 53658 - DNA, 6 bp, Unknown
  misc_feature (1)..( 6): Matrix.002 file - promoters60/1976000
ccctat

SEQ ID NO: 53659 - DNA, 7 bp, Unknown
  misc_feature (1)..( 7): Matrix.002 file - promoters60/1976000
ctaaaat

SEQ ID NO: 53660 - DNA, 7 bp, Unknown
  misc_feature (1)..( 7): Matrix.002 file - promoters60/1976000
ttttgtt

SEQ ID NO: 53661 - DNA, 7 bp, Unknown
  misc_feature (1)..( 7): Matrix.002 file - promoters60/1976000
ttagtaa

SEQ ID NO: 53662 - DNA, 7 bp, Unknown
  misc_feature (1)..( 7): Matrix.002 file - promoters60/1976000
tctgttc

SEQ ID NO: 53663 - DNA, 6 bp, Unknown
  misc_feature (1)..( 6): Matrix.002 file - promoters60/1976000
aataat

SEQ ID NO: 53664 - DNA, 7 bp, Unknown
  misc_feature (1)..( 7): Matrix.002 file - promoters60/1976008
caaaaaa

SEQ ID NO: 53665 - DNA, 8 bp, Unknown
  misc_feature (1)..( 8): Matrix.002 file - promoters60/1976008
cggagaat

SEQ ID NO: 53666 - DNA, 8 bp, Unknown
  misc_feature (1)..( 8): Matrix.002 file - promoters60/1976008
aatcagaa

SEQ ID NO: 53667 - DNA, 11 bp, Unknown
  misc_feature (1)..( 11): Matrix.002 file - promoters60/1976008
ttcagatctca

SEQ ID NO: 53668 - DNA, 7 bp, Unknown
  misc_feature (1)..( 7): Matrix.002 file - promoters60/1976008
caaaaac

SEQ ID NO: 53669 - DNA, 9 bp, Unknown
  misc_feature (1)..( 9): Matrix.002 file - promoters60/1976008
atatcaaat

SEQ ID NO: 53670 - DNA, 9 bp, Unknown
  misc_feature (1)..( 9): Matrix.002 file - promoters60/1976008
tggaaaatt

SEQ ID NO: 53671 - DNA, 11 bp, Unknown
  misc_feature (1)..( 11): Matrix.002 file - promoters60/1976019
actaaaaaagt

SEQ ID NO: 53672 - DNA, 13 bp, Unknown
  misc_feature (1)..( 13): Matrix.002 file - promoters60/1976019
agaataaaaaaaa

SEQ ID NO: 53673 - DNA, 9 bp, Unknown
  misc_feature (1)..( 9): Matrix.002 file - promoters60/1976019
aattcagaa

SEQ ID NO: 53674 - DNA, 10 bp, Unknown
  misc_feature (1)..( 10): Matrix.002 file - promoters60/1976078
ataaaaaaag

SEQ ID NO: 53675 - DNA, 6 bp, Unknown
  misc_feature (1)..( 6): Matrix.002 file - promoters60/1976158
aataat

SEQ ID NO: 53676 - DNA, 7 bp, Unknown
  misc_feature (1)..( 7): Matrix.002 file - promoters60/1976158
tacatat

SEQ ID NO: 53677 - DNA, 12 bp, Unknown
  misc_feature (1)..( 12): Matrix.002 file - promoters60/1976158
aatttatttact

SEQ ID NO: 53678 - DNA, 6 bp, Unknown
  misc_feature (1)..( 6): Matrix.002 file - promoters60/1976158
atgatt

SEQ ID NO: 53679 - DNA, 7 bp, Unknown
  misc_feature (1)..( 7): Matrix.002 file - promoters60/1976158
tgtaatt

SEQ ID NO: 53680 - DNA, 6 bp, Unknown
  misc_feature (1)..( 6): Matrix.002 file - promoters60/1976158
gagata

SEQ ID NO: 53681 - DNA, 6 bp, Unknown
  misc_feature (1)..( 6): Matrix.002 file - promoters60/1976158
caacaa

SEQ ID NO: 53682 - DNA, 10 bp, Unknown
  misc_feature (1)..( 10): Matrix.002 file - promoters60/1976158
ttaatcaaaa

SEQ ID NO: 53683 - DNA, 6 bp, Unknown
  misc_feature (1)..( 6): Matrix.002 file - promoters60/1976158
tcaatt

SEQ ID NO: 53684 - DNA, 10 bp, Unknown
  misc_feature (1)..( 10): Matrix.002 file - promoters60/1976158
aatatacttt

SEQ ID NO: 53685 - DNA, 8 bp, Unknown
  misc_feature (1)..( 8): Matrix.002 file - promoters60/1976158
tcaagttt

SEQ ID NO: 53686 - DNA, 6 bp, Unknown
  misc_feature (1)..( 6): Matrix.002 file - promoters60/1976158
tttaca

SEQ ID NO: 53687 - DNA, 7 bp, Unknown
  misc_feature (1)..( 7): Matrix.002 file - promoters60/1976158
aacaaca

SEQ ID NO: 53688 - DNA, 8 bp, Unknown
  misc_feature (1)..( 8): Matrix.002 file - promoters60/1976158
aaaattat

SEQ ID NO: 53689 - DNA, 6 bp, Unknown
  misc_feature (1)..( 6): Matrix.002 file - promoters60/1976158
ttttgt

SEQ ID NO: 53690 - DNA, 7 bp, Unknown
  misc_feature (1)..( 7): Matrix.002 file - promoters60/1976158
ttagaat

SEQ ID NO: 53691 - DNA, 7 bp, Unknown
  misc_feature (1)..( 7): Matrix.002 file - promoters60/1976158
tttctta

SEQ ID NO: 53692 - DNA, 7 bp, Unknown
  misc_feature (1)..( 7): Matrix.002 file - promoters60/1976158
taatcaa

SEQ ID NO: 53693 - DNA, 8 bp, Unknown
  misc_feature (1)..( 8): Matrix.002 file - promoters60/1976158
agaaaaaa

SEQ ID NO: 53694 - DNA, 11 bp, Unknown
  misc_feature (1)..( 11): Matrix.002 file - promoters60/1976158
caattttctat

SEQ ID NO: 53695 - DNA, 6 bp, Unknown
  misc_feature (1)..( 6): Matrix.002 file - promoters60/1976158
gaaaca

SEQ ID NO: 53696 - DNA, 6 bp, Unknown
  misc_feature (1)..( 6): Matrix.002 file - promoters60/1976158
aataaa

SEQ ID NO: 53697 - DNA, 8 bp, Unknown
  misc_feature (1)..( 8): Matrix.002 file - promoters60/1976158
aaagaaaa

SEQ ID NO: 53698 - DNA, 7 bp, Unknown
  misc_feature (1)..( 7): Matrix.002 file - promoters60/1976158
aaaatca

SEQ ID NO: 53699 - DNA, 6 bp, Unknown
  misc_feature (1)..( 6): Matrix.002 file - promoters60/1976158
taaata

SEQ ID NO: 53700 - DNA, 10 bp, Unknown
  misc_feature (1)..( 10): Matrix.002 file - promoters60/1976170
agagatactt

SEQ ID NO: 53701 - DNA, 6 bp, Unknown
  misc_feature (1)..( 6): Matrix.002 file - promoters60/1976170
tttaac

SEQ ID NO: 53702 - DNA, 6 bp, Unknown
  misc_feature (1)..( 6): Matrix.002 file - promoters60/1976170
aatata

SEQ ID NO: 53703 - DNA, 6 bp, Unknown
  misc_feature (1)..( 6): Matrix.002 file - promoters60/1976170
ggaaaa

SEQ ID NO: 53704 - DNA, 7 bp, Unknown
  misc_feature (1)..( 7): Matrix.002 file - promoters60/1976170
gacaagg

SEQ ID NO: 53705 - DNA, 8 bp, Unknown
  misc_feature (1)..( 8): Matrix.002 file - promoters60/1976170
ttttactt

SEQ ID NO: 53706 - DNA, 9 bp, Unknown
  misc_feature (1)..( 9): Matrix.002 file - promoters60/1976170
aatatgtaa

SEQ ID NO: 53707 - DNA, 9 bp, Unknown
  misc_feature (1)..( 9): Matrix.002 file - promoters60/1976170
aaacaaaaa

SEQ ID NO: 53708 - DNA, 11 bp, Unknown
  misc_feature (1)..( 11): Matrix.002 file - promoters60/1976174
tgattaaataa

SEQ ID NO: 53709 - DNA, 10 bp, Unknown
  misc_feature (1)..( 10): Matrix.002 file - promoters60/1976226
gaaaattata

SEQ ID NO: 53710 - DNA, 13 bp, Unknown
  misc_feature (1)..( 13): Matrix.002 file - promoters60/1976333
taaaagtttgtta

SEQ ID NO: 53711 - DNA, 14 bp, Unknown
  misc_feature (1)..( 14): Matrix.002 file - promoters60/1976333
acaaaaattcaatt

SEQ ID NO: 53712 - DNA, 18 bp, Unknown
  misc_feature (1)..( 18): Matrix.002 file - promoters60/1976333
aataaagattcaataatt

SEQ ID NO: 53713 - DNA, 8 bp, Unknown
  misc_feature (1)..( 8): Matrix.002 file - promoters60/1976333
aaaatttc

SEQ ID NO: 53714 - DNA, 9 bp, Unknown
  misc_feature (1)..( 9): Matrix.002 file - promoters60/1976336
atactaaaa

SEQ ID NO: 53715 - DNA, 8 bp, Unknown
  misc_feature (1)..( 8): Matrix.002 file - promoters60/1976336
cacaaagt

SEQ ID NO: 53716 - DNA, 8 bp, Unknown
  misc_feature (1)..( 8): Matrix.002 file - promoters60/1976336
tacacaaa

SEQ ID NO: 53717 - DNA, 9 bp, Unknown
  misc_feature (1)..( 9): Matrix.002 file - promoters60/1976354
acaataaaa

SEQ ID NO: 53718 - DNA, 9 bp, Unknown
  misc_feature (1)..( 9): Matrix.002 file - promoters60/1976354
gtcacaaaa

SEQ ID NO: 53719 - DNA, 9 bp, Unknown
  misc_feature (1)..( 9): Matrix.002 file - promoters60/1976354
tcaaaaaaa

SEQ ID NO: 53720 - DNA, 9 bp, Unknown
  misc_feature (1)..( 9): Matrix.002 file - promoters60/1976354
ctaaaaata

SEQ ID NO: 53721 - DNA, 11 bp, Unknown
  misc_feature (1)..( 11): Matrix.002 file - promoters60/1976354
aatttttagca

SEQ ID NO: 53722 - DNA, 9 bp, Unknown
  misc_feature (1)..( 9): Matrix.002 file - promoters60/1976354
aacaaaatc

SEQ ID NO: 53723 - DNA, 13 bp, Unknown
  misc_feature (1)..( 13): Matrix.002 file - promoters60/1976354
tttgattagtatc

SEQ ID NO: 53724 - DNA, 13 bp, Unknown
  misc_feature (1)..( 13): Matrix.002 file - promoters60/1976381
attcaaaaaagct

SEQ ID NO: 53725 - DNA, 11 bp, Unknown
  misc_feature (1)..( 11): Matrix.002 file - promoters60/1976381
tgcataaaaga

SEQ ID NO: 53726 - DNA, 7 bp, Unknown
  misc_feature (1)..( 7): Matrix.002 file - promoters60/1976419
attagtt

SEQ ID NO: 53727 - DNA, 8 bp, Unknown
  misc_feature (1)..( 8): Matrix.002 file - promoters60/1976419
tataaaaa

SEQ ID NO: 53728 - DNA, 7 bp, Unknown
  misc_feature (1)..( 7): Matrix.002 file - promoters60/1976419
agacatt

SEQ ID NO: 53729 - DNA, 6 bp, Unknown
  misc_feature (1)..( 6): Matrix.002 file - promoters60/1976419
actttt

SEQ ID NO: 53730 - DNA, 7 bp, Unknown
  misc_feature (1)..( 7): Matrix.002 file - promoters60/1976419
acacgat

SEQ ID NO: 53731 - DNA, 6 bp, Unknown
  misc_feature (1)..( 6): Matrix.002 file - promoters60/1976419
cgaaaa

SEQ ID NO: 53732 - DNA, 9 bp, Unknown
  misc_feature (1)..( 9): Matrix.002 file - promoters60/1976419
ccaaaagta

SEQ ID NO: 53733 - DNA, 8 bp, Unknown
  misc_feature (1)..( 8): Matrix.002 file - promoters60/1976419
tcctacct

SEQ ID NO: 53734 - DNA, 8 bp, Unknown
  misc_feature (1)..( 8): Matrix.002 file - promoters60/1976419
atatatta

SEQ ID NO: 53735 - DNA, 6 bp, Unknown
  misc_feature (1)..( 6): Matrix.002 file - promoters60/1976419
tttata

SEQ ID NO: 53736 - DNA, 7 bp, Unknown
  misc_feature (1)..( 7): Matrix.002 file - promoters60/1976419
aatacac

SEQ ID NO: 53737 - DNA, 7 bp, Unknown
  misc_feature (1)..( 7): Matrix.002 file - promoters60/1976419
tacctaa

SEQ ID NO: 53738 - DNA, 8 bp, Unknown
  misc_feature (1)..( 8): Matrix.002 file - promoters60/1976419
tgaagtaa

SEQ ID NO: 53739 - DNA, 8 bp, Unknown
  misc_feature (1)..( 8): Matrix.002 file - promoters60/1976419
ggttcatt

SEQ ID NO: 53740 - DNA, 6 bp, Unknown
  misc_feature (1)..( 6): Matrix.002 file - promoters60/1976419
agaata

SEQ ID NO: 53741 - DNA, 6 bp, Unknown
  misc_feature (1)..( 6): Matrix.002 file - promoters60/1976419
gctatg

SEQ ID NO: 53742 - DNA, 6 bp, Unknown
  misc_feature (1)..( 6): Matrix.002 file - promoters60/1976419
tgatcc

SEQ ID NO: 53743 - DNA, 10 bp, Unknown
  misc_feature (1)..( 10): Matrix.002 file - promoters60/1976457
ataaataaaa

SEQ ID NO: 53744 - DNA, 8 bp, Unknown
  misc_feature (1)..( 8): Matrix.002 file - promoters60/1976457
aaaagttt

SEQ ID NO: 53745 - DNA, 11 bp, Unknown
  misc_feature (1)..( 11): Matrix.002 file - promoters60/1976457
taaaaaaatat

SEQ ID NO: 53746 - DNA, 11 bp, Unknown
  misc_feature (1)..( 11): Matrix.002 file - promoters60/1976457
ttatttgataa

SEQ ID NO: 53747 - DNA, 7 bp, Unknown
  misc_feature (1)..( 7): Matrix.002 file - promoters60/1976457
aataata

SEQ ID NO: 53748 - DNA, 9 bp, Unknown
  misc_feature (1)..( 9): Matrix.002 file - promoters60/1976457
aaatcatta

SEQ ID NO: 53749 - DNA, 9 bp, Unknown
  misc_feature (1)..( 9): Matrix.002 file - promoters60/1976504
aaataacaa

SEQ ID NO: 53750 - DNA, 8 bp, Unknown
  misc_feature (1)..( 8): Matrix.002 file - promoters60/1976511
tcttctct

SEQ ID NO: 53751 - DNA, 10 bp, Unknown
  misc_feature (1)..( 10): Matrix.002 file - promoters60/1976511
tttttgatta

SEQ ID NO: 53752 - DNA, 6 bp, Unknown
  misc_feature (1)..( 6): Matrix.002 file - promoters60/1976550
tagcct

SEQ ID NO: 53753 - DNA, 7 bp, Unknown
  misc_feature (1)..( 7): Matrix.002 file - promoters60/1976550
ttagttg

SEQ ID NO: 53754 - DNA, 8 bp, Unknown
  misc_feature (1)..( 8): Matrix.002 file - promoters60/1976550
aaataaaa

SEQ ID NO: 53755 - DNA, 7 bp, Unknown
  misc_feature (1)..( 7): Matrix.002 file - promoters60/1976550
tgtaaaa

SEQ ID NO: 53756 - DNA, 6 bp, Unknown
  misc_feature (1)..( 6): Matrix.002 file - promoters60/1976550
aaaatt

SEQ ID NO: 53757 - DNA, 7 bp, Unknown
  misc_feature (1)..( 7): Matrix.002 file - promoters60/1976550
tcccaat

SEQ ID NO: 53758 - DNA, 7 bp, Unknown
  misc_feature (1)..( 7): Matrix.002 file - promoters60/1976550
aaaatca

SEQ ID NO: 53759 - DNA, 8 bp, Unknown
  misc_feature (1)..( 8): Matrix.002 file - promoters60/1976550
ttgcttaa

SEQ ID NO: 53760 - DNA, 9 bp, Unknown
  misc_feature (1)..( 9): Matrix.002 file - promoters60/1976550
ttaaaattt

SEQ ID NO: 53761 - DNA, 6 bp, Unknown
  misc_feature (1)..( 6): Matrix.002 file - promoters60/1976550
aaagtc

SEQ ID NO: 53762 - DNA, 7 bp, Unknown
  misc_feature (1)..( 7): Matrix.002 file - promoters60/1976550
gataaaa

SEQ ID NO: 53763 - DNA, 7 bp, Unknown
  misc_feature (1)..( 7): Matrix.002 file - promoters60/1976550
tttttgt

SEQ ID NO: 53764 - DNA, 10 bp, Unknown
  misc_feature (1)..( 10): Matrix.002 file - promoters60/1976550
taatctgatc

SEQ ID NO: 53765 - DNA, 7 bp, Unknown
  misc_feature (1)..( 7): Matrix.002 file - promoters60/1976550
gtttgca

SEQ ID NO: 53766 - DNA, 9 bp, Unknown
  misc_feature (1)..( 9): Matrix.002 file - promoters60/1976550
taagcaaaa

SEQ ID NO: 53767 - DNA, 6 bp, Unknown
  misc_feature (1)..( 6): Matrix.002 file - promoters60/1976550
ctaaaa

SEQ ID NO: 53768 - DNA, 9 bp, Unknown
  misc_feature (1)..( 9): Matrix.002 file - promoters60/1976550
attgattta

SEQ ID NO: 53769 - DNA, 7 bp, Unknown
  misc_feature (1)..( 7): Matrix.002 file - promoters60/1976550
tgataaa

SEQ ID NO: 53770 - DNA, 7 bp, Unknown
  misc_feature (1)..( 7): Matrix.002 file - promoters60/1977519
taaaaat

SEQ ID NO: 53771 - DNA, 8 bp, Unknown
  misc_feature (1)..( 8): Matrix.002 file - promoters60/1977519
tattgttg

SEQ ID NO: 53772 - DNA, 10 bp, Unknown
  misc_feature (1)..( 10): Matrix.002 file - promoters60/1977519
ttgaatcaat

SEQ ID NO: 53773 - DNA, 9 bp, Unknown
  misc_feature (1)..( 9): Matrix.002 file - promoters60/1977519
gatttggtt

SEQ ID NO: 53774 - DNA, 6 bp, Unknown
  misc_feature (1)..( 6): Matrix.002 file - promoters60/1977519
agagaa

SEQ ID NO: 53775 - DNA, 6 bp, Unknown
  misc_feature (1)..( 6): Matrix.002 file - promoters60/1977519
aattat

SEQ ID NO: 53776 - DNA, 6 bp, Unknown
  misc_feature (1)..( 6): Matrix.002 file - promoters60/1977519
taaatt

SEQ ID NO: 53777 - DNA, 7 bp, Unknown
  misc_feature (1)..( 7): Matrix.002 file - promoters60/1977519
cctacaa

SEQ ID NO: 53778 - DNA, 6 bp, Unknown
  misc_feature (1)..( 6): Matrix.002 file - promoters60/1977519
aaccta

SEQ ID NO: 53779 - DNA, 6 bp, Unknown
  misc_feature (1)..( 6): Matrix.002 file - promoters60/1977519
attttg

SEQ ID NO: 53780 - DNA, 6 bp, Unknown
  misc_feature (1)..( 6): Matrix.002 file - promoters60/1977519
tgatat

SEQ ID NO: 53781 - DNA, 7 bp, Unknown
  misc_feature (1)..( 7): Matrix.002 file - promoters60/1977519
tggattt

SEQ ID NO: 53782 - DNA, 6 bp, Unknown
  misc_feature (1)..( 6): Matrix.002 file - promoters60/1977519
aagatt

SEQ ID NO: 53783 - DNA, 6 bp, Unknown
  misc_feature (1)..( 6): Matrix.002 file - promoters60/1977519
ttaacc

SEQ ID NO: 53784 - DNA, 7 bp, Unknown
  misc_feature (1)..( 7): Matrix.002 file - promoters60/1977519
ctcactc

SEQ ID NO: 53785 - DNA, 6 bp, Unknown
  misc_feature (1)..( 6): Matrix.002 file - promoters60/1977519
atttct

SEQ ID NO: 53786 - DNA, 10 bp, Unknown
  misc_feature (1)..( 10): Matrix.002 file - promoters60/1977533
aaaaatatac

SEQ ID NO: 53787 - DNA, 11 bp, Unknown
  misc_feature (1)..( 11): Matrix.002 file - promoters60/1977533
tttattctgaa

SEQ ID NO: 53788 - DNA, 8 bp, Unknown
  misc_feature (1)..( 8): Matrix.002 file - promoters60/1977533
ggattttg

SEQ ID NO: 53789 - DNA, 8 bp, Unknown
  misc_feature (1)..( 8): Matrix.002 file - promoters60/1977533
ttaacaaa

SEQ ID NO: 53790 - DNA, 10 bp, Unknown
  misc_feature (1)..( 10): Matrix.002 file - promoters60/1977537
tttctctctt

SEQ ID NO: 53791 - DNA, 7 bp, Unknown
  misc_feature (1)..( 7): Matrix.002 file - promoters60/1977537
aaatatt

SEQ ID NO: 53792 - DNA, 12 bp, Unknown
  misc_feature (1)..( 12): Matrix.002 file - promoters60/1977537
taaatattcggc

SEQ ID NO: 53793 - DNA, 7 bp, Unknown
  misc_feature (1)..( 7): Matrix.002 file - promoters60/1977537
tttccca

SEQ ID NO: 53794 - DNA, 7 bp, Unknown
  misc_feature (1)..( 7): Matrix.002 file - promoters60/1977537
gcaaatt

SEQ ID NO: 53795 - DNA, 6 bp, Unknown
  misc_feature (1)..( 6): Matrix.002 file - promoters60/1977537
tttgat

SEQ ID NO: 53796 - DNA, 8 bp, Unknown
  misc_feature (1)..( 8): Matrix.002 file - promoters60/1977537
ttttcatc

SEQ ID NO: 53797 - DNA, 9 bp, Unknown
  misc_feature (1)..( 9): Matrix.002 file - promoters60/1977537
gattttttt

SEQ ID NO: 53798 - DNA, 6 bp, Unknown
  misc_feature (1)..( 6): Matrix.002 file - promoters60/1977537
tgttat

SEQ ID NO: 53799 - DNA, 8 bp, Unknown
  misc_feature (1)..( 8): Matrix.002 file - promoters60/1977537
tgtatgtt

SEQ ID NO: 53800 - DNA, 6 bp, Unknown
  misc_feature (1)..( 6): Matrix.002 file - promoters60/1977537
ctctta

SEQ ID NO: 53801 - DNA, 6 bp, Unknown
  misc_feature (1)..( 6): Matrix.002 file - promoters60/1977537
atttaa

SEQ ID NO: 53802 - DNA, 6 bp, Unknown
  misc_feature (1)..( 6): Matrix.002 file - promoters60/1977537
aaattt

SEQ ID NO: 53803 - DNA, 7 bp, Unknown
  misc_feature (1)..( 7): Matrix.002 file - promoters60/1977537
attgggc

SEQ ID NO: 53804 - DNA, 6 bp, Unknown
  misc_feature (1)..( 6): Matrix.002 file - promoters60/1977537
gattga

SEQ ID NO: 53805 - DNA, 7 bp, Unknown
  misc_feature (1)..( 7): Matrix.002 file - promoters60/1977537
taactta

SEQ ID NO: 53806 - DNA, 7 bp, Unknown
  misc_feature (1)..( 7): Matrix.002 file - promoters60/1985373
aaagttc

SEQ ID NO: 53807 - DNA, 8 bp, Unknown
  misc_feature (1)..( 8): Matrix.002 file - promoters60/1985373
cttttttt

SEQ ID NO: 53808 - DNA, 11 bp, Unknown
  misc_feature (1)..( 11): Matrix.002 file - promoters60/1985373
ttataaagtat

SEQ ID NO: 53809 - DNA, 13 bp, Unknown
  misc_feature (1)..( 13): Matrix.002 file - promoters60/1985373
atgtttaatttac

SEQ ID NO: 53810 - DNA, 12 bp, Unknown
  misc_feature (1)..( 12): Matrix.002 file - promoters60/1985373
aatacaacttat

SEQ ID NO: 53811 - DNA, 6 bp, Unknown
  misc_feature (1)..( 6): Matrix.002 file - promoters60/1985373
ttatat

SEQ ID NO: 53812 - DNA, 7 bp, Unknown
  misc_feature (1)..( 7): Matrix.002 file - promoters60/1985373
gttcgtt

SEQ ID NO: 53813 - DNA, 9 bp, Unknown
  misc_feature (1)..( 9): Matrix.002 file - promoters60/1985373
ttgaaatac

SEQ ID NO: 53814 - DNA, 6 bp, Unknown
  misc_feature (1)..( 6): Matrix.002 file - promoters60/1985373
tatggc

SEQ ID NO: 53815 - DNA, 7 bp, Unknown
  misc_feature (1)..( 7): Matrix.002 file - promoters60/1985373
acccaaa

SEQ ID NO: 53816 - DNA, 6 bp, Unknown
  misc_feature (1)..( 6): Matrix.002 file - promoters60/1985373
tctaaa

SEQ ID NO: 53817 - DNA, 6 bp, Unknown
  misc_feature (1)..( 6): Matrix.002 file - promoters60/1985373
aaactt

SEQ ID NO: 53818 - DNA, 6 bp, Unknown
  misc_feature (1)..( 6): Matrix.002 file - promoters60/1985373
ttcaaa

SEQ ID NO: 53819 - DNA, 6 bp, Unknown
  misc_feature (1)..( 6): Matrix.002 file - promoters60/1985373
ttcatt

SEQ ID NO: 53820 - DNA, 6 bp, Unknown
  misc_feature (1)..( 6): Matrix.002 file - promoters60/1985373
aataat

SEQ ID NO: 53821 - DNA, 8 bp, Unknown
  misc_feature (1)..( 8): Matrix.002 file - promoters60/1985373
tgtcgaaa

SEQ ID NO: 53822 - DNA, 6 bp, Unknown
  misc_feature (1)..( 6): Matrix.002 file - promoters60/1985373
aaaagt

SEQ ID NO: 53823 - DNA, 8 bp, Unknown
  misc_feature (1)..( 8): Matrix.002 file - promoters60/1985373
aaaaaaat

SEQ ID NO: 53824 - DNA, 6 bp, Unknown
  misc_feature (1)..( 6): Matrix.002 file - promoters60/1985373
aattat

SEQ ID NO: 53825 - DNA, 6 bp, Unknown
  misc_feature (1)..( 6): Matrix.002 file - promoters60/1985373
aaaatt

SEQ ID NO: 53826 - DNA, 6 bp, Unknown
  misc_feature (1)..( 6): Matrix.002 file - promoters60/1985373
attata

SEQ ID NO: 53827 - DNA, 6 bp, Unknown
  misc_feature (1)..( 6): Matrix.002 file - promoters60/1985373
aaacaa

SEQ ID NO: 53828 - DNA, 6 bp, Unknown
  misc_feature (1)..( 6): Matrix.002 file - promoters60/1985373
aattga

SEQ ID NO: 53829 - DNA, 9 bp, Unknown
  misc_feature (1)..( 9): Matrix.002 file - promoters60/1985373
attcttttg

SEQ ID NO: 53830 - DNA, 7 bp, Unknown
  misc_feature (1)..( 7): Matrix.002 file - promoters60/1985373
tttgctt

SEQ ID NO: 53831 - DNA, 6 bp, Unknown
  misc_feature (1)..( 6): Matrix.002 file - promoters60/1985373
tattgg

SEQ ID NO: 53832 - DNA, 9 bp, Unknown
  misc_feature (1)..( 9): Matrix.002 file - promoters60/1985373
ataaaaaga

SEQ ID NO: 53833 - DNA, 8 bp, Unknown
  misc_feature (1)..( 8): Matrix.002 file - promoters60/1985590
gtttatat

SEQ ID NO: 53834 - DNA, 8 bp, Unknown
  misc_feature (1)..( 8): Matrix.002 file - promoters60/1985590
caattcaa

SEQ ID NO: 53835 - DNA, 7 bp, Unknown
  misc_feature (1)..( 7): Matrix.002 file - promoters60/1985590
gtaaata

SEQ ID NO: 53836 - DNA, 11 bp, Unknown
  misc_feature (1)..( 11): Matrix.002 file - promoters60/1985590
tttaaatacgt

SEQ ID NO: 53837 - DNA, 9 bp, Unknown
  misc_feature (1)..( 9): Matrix.002 file - promoters60/1985590
gaaaaataa

SEQ ID NO: 53838 - DNA, 8 bp, Unknown
  misc_feature (1)..( 8): Matrix.002 file - promoters60/1985590
aaacacaa

SEQ ID NO: 53839 - DNA, 11 bp, Unknown
  misc_feature (1)..( 11): Matrix.002 file - promoters60/1985590
tttttaattat

SEQ ID NO: 53840 - DNA, 7 bp, Unknown
  misc_feature (1)..( 7): Matrix.002 file - promoters60/1985590
ttcataa

SEQ ID NO: 53841 - DNA, 11 bp, Unknown
  misc_feature (1)..( 11): Matrix.002 file - promoters60/1985590
ttcatatgagt

SEQ ID NO: 53842 - DNA, 11 bp, Unknown
  misc_feature (1)..( 11): Matrix.002 file - promoters60/1985590
aaagaagaaaa

SEQ ID NO: 53843 - DNA, 7 bp, Unknown
  misc_feature (1)..( 7): Matrix.002 file - promoters60/1985590
ttatgtt

SEQ ID NO: 53844 - DNA, 6 bp, Unknown
  misc_feature (1)..( 6): Matrix.002 file - promoters60/1985621
ggattt

SEQ ID NO: 53845 - DNA, 7 bp, Unknown
  misc_feature (1)..( 7): Matrix.002 file - promoters60/1985621
gagagga

SEQ ID NO: 53846 - DNA, 6 bp, Unknown
  misc_feature (1)..( 6): Matrix.002 file - promoters60/1985621
ttttct

SEQ ID NO: 53847 - DNA, 10 bp, Unknown
  misc_feature (1)..( 10): Matrix.002 file - promoters60/1985621
tacataaatg

SEQ ID NO: 53848 - DNA, 7 bp, Unknown
  misc_feature (1)..( 7): Matrix.002 file - promoters60/1985621
aaaataa

SEQ ID NO: 53849 - DNA, 12 bp, Unknown
  misc_feature (1)..( 12): Matrix.002 file - promoters60/1985621
aataaaaccaaa

SEQ ID NO: 53850 - DNA, 8 bp, Unknown
  misc_feature (1)..( 8): Matrix.002 file - promoters60/1985621
ctacttct

SEQ ID NO: 53851 - DNA, 7 bp, Unknown
  misc_feature (1)..( 7): Matrix.002 file - promoters60/1985621
aacccgt

SEQ ID NO: 53852 - DNA, 6 bp, Unknown
  misc_feature (1)..( 6): Matrix.002 file - promoters60/1985621
cattta

SEQ ID NO: 53853 - DNA, 6 bp, Unknown
  misc_feature (1)..( 6): Matrix.002 file - promoters60/1985621
ctaata

SEQ ID NO: 53854 - DNA, 6 bp, Unknown
  misc_feature (1)..( 6): Matrix.002 file - promoters60/1985621
atttaa

SEQ ID NO: 53855 - DNA, 8 bp, Unknown
  misc_feature (1)..( 8): Matrix.002 file - promoters60/1985621
gaagaaac

SEQ ID NO: 53856 - DNA, 6 bp, Unknown
  misc_feature (1)..( 6): Matrix.002 file - promoters60/1985621
gaggtt

SEQ ID NO: 53857 - DNA, 6 bp, Unknown
  misc_feature (1)..( 6): Matrix.002 file - promoters60/1985621
tagtgt

SEQ ID NO: 53858 - DNA, 7 bp, Unknown
  misc_feature (1)..( 7): Matrix.002 file - promoters60/1985621
tttaaac

SEQ ID NO: 53859 - DNA, 7 bp, Unknown
  misc_feature (1)..( 7): Matrix.002 file - promoters60/1989445
caaaata

SEQ ID NO: 53860 - DNA, 14 bp, Unknown
  misc_feature (1)..( 14): Matrix.002 file - promoters60/1989445
catttattttaaat

SEQ ID NO: 53861 - DNA, 9 bp, Unknown
  misc_feature (1)..( 9): Matrix.002 file - promoters60/1989445
ataaatgaa

SEQ ID NO: 53862 - DNA, 13 bp, Unknown
  misc_feature (1)..( 13): Matrix.002 file - promoters60/1989445
attctcagaaatt

SEQ ID NO: 53863 - DNA, 12 bp, Unknown
  misc_feature (1)..( 12): Matrix.002 file - promoters60/2025006
aatttaaaaaaa

SEQ ID NO: 53864 - DNA, 9 bp, Unknown
  misc_feature (1)..( 9): Matrix.002 file - promoters60/2025006
ataaacaca

SEQ ID NO: 53865 - DNA, 7 bp, Unknown
  misc_feature (1)..( 7): Matrix.002 file - promoters60/2025006
aatcata

SEQ ID NO: 53866 - DNA, 7 bp, Unknown
  misc_feature (1)..( 7): Matrix.002 file - promoters60/2025006
gtttgaa

SEQ ID NO: 53867 - DNA, 13 bp, Unknown
  misc_feature (1)..( 13): Matrix.002 file - promoters60/2025006
aatagaaaaaacg

SEQ ID NO: 53868 - DNA, 9 bp, Unknown
  misc_feature (1)..( 9): Matrix.002 file - promoters60/2025006
taaataaaa

SEQ ID NO: 53869 - DNA, 9 bp, Unknown
  misc_feature (1)..( 9): Matrix.002 file - promoters60/2025006
taaataata

SEQ ID NO: 53870 - DNA, 7 bp, Unknown
  misc_feature (1)..( 7): Matrix.002 file - promoters60/2025006
gtaaatg

SEQ ID NO: 53871 - DNA, 16 bp, Unknown
  misc_feature (1)..( 16): Matrix.002 file - promoters60/2025006
tttgactattttaata

SEQ ID NO: 53872 - DNA, 8 bp, Unknown
  misc_feature (1)..( 8): Matrix.002 file - promoters60/2025006
accaaaat

SEQ ID NO: 53873 - DNA, 7 bp, Unknown
  misc_feature (1)..( 7): Matrix.002 file - promoters60/2025133
gggattt

SEQ ID NO: 53874 - DNA, 10 bp, Unknown
  misc_feature (1)..( 10): Matrix.002 file - promoters60/2025133
aaaaaaaaaa

SEQ ID NO: 53875 - DNA, 7 bp, Unknown
  misc_feature (1)..( 7): Matrix.002 file - promoters60/2025133
gttcaaa

SEQ ID NO: 53876 - DNA, 6 bp, Unknown
  misc_feature (1)..( 6): Matrix.002 file - promoters60/2025133
aaaaag

SEQ ID NO: 53877 - DNA, 6 bp, Unknown
  misc_feature (1)..( 6): Matrix.002 file - promoters60/2025133
gcagaa

SEQ ID NO: 53878 - DNA, 7 bp, Unknown
  misc_feature (1)..( 7): Matrix.002 file - promoters60/2025133
tgaatag

SEQ ID NO: 53879 - DNA, 7 bp, Unknown
  misc_feature (1)..( 7): Matrix.002 file - promoters60/2025133
aacaaat

SEQ ID NO: 53880 - DNA, 7 bp, Unknown
  misc_feature (1)..( 7): Matrix.002 file - promoters60/2025133
caaacgt

SEQ ID NO: 53881 - DNA, 8 bp, Unknown
  misc_feature (1)..( 8): Matrix.002 file - promoters60/2025133
ctggagag

SEQ ID NO: 53882 - DNA, 6 bp, Unknown
  misc_feature (1)..( 6): Matrix.002 file - promoters60/2025133
ttaata

SEQ ID NO: 53883 - DNA, 6 bp, Unknown
  misc_feature (1)..( 6): Matrix.002 file - promoters60/2025133
ttaata

SEQ ID NO: 53884 - DNA, 7 bp, Unknown
  misc_feature (1)..( 7): Matrix.002 file - promoters60/2025133
tttcaag

SEQ ID NO: 53885 - DNA, 8 bp, Unknown
  misc_feature (1)..( 8): Matrix.002 file - promoters60/2025133
gtttaata

SEQ ID NO: 53886 - DNA, 6 bp, Unknown
  misc_feature (1)..( 6): Matrix.002 file - promoters60/2025133
accaat

SEQ ID NO: 53887 - DNA, 7 bp, Unknown
  misc_feature (1)..( 7): Matrix.002 file - promoters60/2025133
tctgaac

SEQ ID NO: 53888 - DNA, 7 bp, Unknown
  misc_feature (1)..( 7): Matrix.002 file - promoters60/2025133
tatttta

SEQ ID NO: 53889 - DNA, 6 bp, Unknown
  misc_feature (1)..( 6): Matrix.002 file - promoters60/2025133
aaattt

SEQ ID NO: 53890 - DNA, 8 bp, Unknown
  misc_feature (1)..( 8): Matrix.002 file - promoters60/2025133
gtgtagaa

SEQ ID NO: 53891 - DNA, 6 bp, Unknown
  misc_feature (1)..( 6): Matrix.002 file - promoters60/2025133
aaaata

SEQ ID NO: 53892 - DNA, 8 bp, Unknown
  misc_feature (1)..( 8): Matrix.002 file - promoters60/2025133
ttattaac

SEQ ID NO: 53893 - DNA, 11 bp, Unknown
  misc_feature (1)..( 11): Matrix.002 file - promoters60/2025468
attttgtattt

SEQ ID NO: 53894 - DNA, 8 bp, Unknown
  misc_feature (1)..( 8): Matrix.002 file - promoters60/2025468
ttagtttt

SEQ ID NO: 53895 - DNA, 6 bp, Unknown
  misc_feature (1)..( 6): Matrix.002 file - promoters60/2025592
gaagtt

SEQ ID NO: 53896 - DNA, 6 bp, Unknown
  misc_feature (1)..( 6): Matrix.002 file - promoters60/2025592
atatta

SEQ ID NO: 53897 - DNA, 7 bp, Unknown
  misc_feature (1)..( 7): Matrix.002 file - promoters60/2025592
aatacat

SEQ ID NO: 53898 - DNA, 7 bp, Unknown
  misc_feature (1)..( 7): Matrix.002 file - promoters60/2025592
atgaata

SEQ ID NO: 53899 - DNA, 9 bp, Unknown
  misc_feature (1)..( 9): Matrix.002 file - promoters60/2025592
tgtctaaaa

SEQ ID NO: 53900 - DNA, 8 bp, Unknown
  misc_feature (1)..( 8): Matrix.002 file - promoters60/2025592
aaaataaa

SEQ ID NO: 53901 - DNA, 7 bp, Unknown
  misc_feature (1)..( 7): Matrix.002 file - promoters60/2025592
tttaaaa

SEQ ID NO: 53902 - DNA, 7 bp, Unknown
  misc_feature (1)..( 7): Matrix.002 file - promoters60/2025592
gttgtga

SEQ ID NO: 53903 - DNA, 7 bp, Unknown
  misc_feature (1)..( 7): Matrix.002 file - promoters60/2025592
atttttt

SEQ ID NO: 53904 - DNA, 6 bp, Unknown
  misc_feature (1)..( 6): Matrix.002 file - promoters60/2025592
tttgat

SEQ ID NO: 53905 - DNA, 12 bp, Unknown
  misc_feature (1)..( 12): Matrix.002 file - promoters60/2025592
caaataatattt

SEQ ID NO: 53906 - DNA, 8 bp, Unknown
  misc_feature (1)..( 8): Matrix.002 file - promoters60/2025592
attataat

SEQ ID NO: 53907 - DNA, 6 bp, Unknown
  misc_feature (1)..( 6): Matrix.002 file - promoters60/2025592
ttaatg

SEQ ID NO: 53908 - DNA, 6 bp, Unknown
  misc_feature (1)..( 6): Matrix.002 file - promoters60/2025592
catttc

SEQ ID NO: 53909 - DNA, 8 bp, Unknown
  misc_feature (1)..( 8): Matrix.002 file - promoters60/2025592
aaacacaa

SEQ ID NO: 53910 - DNA, 7 bp, Unknown
  misc_feature (1)..( 7): Matrix.002 file - promoters60/2025592
acaaagc

SEQ ID NO: 53911 - DNA, 7 bp, Unknown
  misc_feature (1)..( 7): Matrix.002 file - promoters60/2025592
tgtagtt

SEQ ID NO: 53912 - DNA, 6 bp, Unknown
  misc_feature (1)..( 6): Matrix.002 file - promoters60/2025592
cgtaaa

SEQ ID NO: 53913 - DNA, 8 bp, Unknown
  misc_feature (1)..( 8): Matrix.002 file - promoters60/2025592
taaaacaa

SEQ ID NO: 53914 - DNA, 6 bp, Unknown
  misc_feature (1)..( 6): Matrix.002 file - promoters60/2025592
atattt

SEQ ID NO: 53915 - DNA, 6 bp, Unknown
  misc_feature (1)..( 6): Matrix.002 file - promoters60/2025592
ttgtat

SEQ ID NO: 53916 - DNA, 9 bp, Unknown
  misc_feature (1)..( 9): Matrix.002 file - promoters60/2025627
atttttttc

SEQ ID NO: 53917 - DNA, 7 bp, Unknown
  misc_feature (1)..( 7): Matrix.002 file - promoters60/2025627
ttagaat

SEQ ID NO: 53918 - DNA, 8 bp, Unknown
  misc_feature (1)..( 8): Matrix.002 file - promoters60/2025627
tttattat

SEQ ID NO: 53919 - DNA, 9 bp, Unknown
  misc_feature (1)..( 9): Matrix.002 file - promoters60/2025627
attaaaaaa

SEQ ID NO: 53920 - DNA, 7 bp, Unknown
  misc_feature (1)..( 7): Matrix.002 file - promoters60/2025627
atcatgc

SEQ ID NO: 53921 - DNA, 6 bp, Unknown
  misc_feature (1)..( 6): Matrix.002 file - promoters60/2025627
tcacat

SEQ ID NO: 53922 - DNA, 7 bp, Unknown
  misc_feature (1)..( 7): Matrix.002 file - promoters60/2025627
aagtaaa

SEQ ID NO: 53923 - DNA, 8 bp, Unknown
  misc_feature (1)..( 8): Matrix.002 file - promoters60/2025627
atttattt

SEQ ID NO: 53924 - DNA, 6 bp, Unknown
  misc_feature (1)..( 6): Matrix.002 file - promoters60/2025627
ttttac

SEQ ID NO: 53925 - DNA, 10 bp, Unknown
  misc_feature (1)..( 10): Matrix.002 file - promoters60/2025627
taatattttt

SEQ ID NO: 53926 - DNA, 8 bp, Unknown
  misc_feature (1)..( 8): Matrix.002 file - promoters60/2025627
attcactt

SEQ ID NO: 53927 - DNA, 7 bp, Unknown
  misc_feature (1)..( 7): Matrix.002 file - promoters60/2025627
aaacaat

SEQ ID NO: 53928 - DNA, 9 bp, Unknown
  misc_feature (1)..( 9): Matrix.002 file - promoters60/2025627
tttatctaa

SEQ ID NO: 53929 - DNA, 8 bp, Unknown
  misc_feature (1)..( 8): Matrix.002 file - promoters60/2025627
taattcat

SEQ ID NO: 53930 - DNA, 7 bp, Unknown
  misc_feature (1)..( 7): Matrix.002 file - promoters60/2025627
aatctct

SEQ ID NO: 53931 - DNA, 8 bp, Unknown
  misc_feature (1)..( 8): Matrix.002 file - promoters60/2025627
tcttttca

SEQ ID NO: 53932 - DNA, 6 bp, Unknown
  misc_feature (1)..( 6): Matrix.002 file - promoters60/2025627
tttcag

SEQ ID NO: 53933 - DNA, 7 bp, Unknown
  misc_feature (1)..( 7): Matrix.002 file - promoters60/2025627
aaatatt

SEQ ID NO: 53934 - DNA, 11 bp, Unknown
  misc_feature (1)..( 11): Matrix.002 file - promoters60/2025627
tactgtattag

SEQ ID NO: 53935 - DNA, 6 bp, Unknown
  misc_feature (1)..( 6): Matrix.002 file - promoters60/2025627
tataat

SEQ ID NO: 53936 - DNA, 8 bp, Unknown
  misc_feature (1)..( 8): Matrix.002 file - promoters60/2025627
taatatta

SEQ ID NO: 53937 - DNA, 7 bp, Unknown
  misc_feature (1)..( 7): Matrix.002 file - promoters60/2026537
tttggta

SEQ ID NO: 53938 - DNA, 6 bp, Unknown
  misc_feature (1)..( 6): Matrix.002 file - promoters60/2026537
acaaat

SEQ ID NO: 53939 - DNA, 7 bp, Unknown
  misc_feature (1)..( 7): Matrix.002 file - promoters60/2026537
tggaatt

SEQ ID NO: 53940 - DNA, 6 bp, Unknown
  misc_feature (1)..( 6): Matrix.002 file - promoters60/2026537
ttcggt

SEQ ID NO: 53941 - DNA, 8 bp, Unknown
  misc_feature (1)..( 8): Matrix.002 file - promoters60/2026537
aggacgat

SEQ ID NO: 53942 - DNA, 11 bp, Unknown
  misc_feature (1)..( 11): Matrix.002 file - promoters60/2026771
aaattgtaaat

SEQ ID NO: 53943 - DNA, 12 bp, Unknown
  misc_feature (1)..( 12): Matrix.002 file - promoters60/2026771
tttaaaaaaaaa

SEQ ID NO: 53944 - DNA, 11 bp, Unknown
  misc_feature (1)..( 11): Matrix.002 file - promoters60/2026771
aaatcgtaaaa

SEQ ID NO: 53945 - DNA, 12 bp, Unknown
  misc_feature (1)..( 12): Matrix.002 file - promoters60/2026771
aattttgtaaat

SEQ ID NO: 53946 - DNA, 11 bp, Unknown
  misc_feature (1)..( 11): Matrix.002 file - promoters60/2026771
aaatttatttc

SEQ ID NO: 53947 - DNA, 8 bp, Unknown
  misc_feature (1)..( 8): Matrix.002 file - promoters60/2027233
atcaatcc

SEQ ID NO: 53948 - DNA, 8 bp, Unknown
  misc_feature (1)..( 8): Matrix.002 file - promoters60/2027233
ttcaatac

SEQ ID NO: 53949 - DNA, 13 bp, Unknown
  misc_feature (1)..( 13): Matrix.002 file - promoters60/2027233
tgagatttgattt

SEQ ID NO: 53950 - DNA, 16 bp, Unknown
  misc_feature (1)..( 16): Matrix.002 file - promoters60/2027233
gacaaacttcctatgt

SEQ ID NO: 53951 - DNA, 6 bp, Unknown
  misc_feature (1)..( 6): Matrix.002 file - promoters60/2027253
aataag

SEQ ID NO: 53952 - DNA, 9 bp, Unknown
  misc_feature (1)..( 9): Matrix.002 file - promoters60/2027253
aaaataaat

SEQ ID NO: 53953 - DNA, 6 bp, Unknown
  misc_feature (1)..( 6): Matrix.002 file - promoters60/2027253
taattg

SEQ ID NO: 53954 - DNA, 6 bp, Unknown
  misc_feature (1)..( 6): Matrix.002 file - promoters60/2027253
aaccgt

SEQ ID NO: 53955 - DNA, 8 bp, Unknown
  misc_feature (1)..( 8): Matrix.002 file - promoters60/2027253
tttaaaat

SEQ ID NO: 53956 - DNA, 8 bp, Unknown
  misc_feature (1)..( 8): Matrix.002 file - promoters60/2027253
tcaattaa

SEQ ID NO: 53957 - DNA, 6 bp, Unknown
  misc_feature (1)..( 6): Matrix.002 file - promoters60/2027253
tcatgt

SEQ ID NO: 53958 - DNA, 8 bp, Unknown
  misc_feature (1)..( 8): Matrix.002 file - promoters60/2027253
taaaagca

SEQ ID NO: 53959 - DNA, 7 bp, Unknown
  misc_feature (1)..( 7): Matrix.002 file - promoters60/2027253
catatta

SEQ ID NO: 53960 - DNA, 6 bp, Unknown
  misc_feature (1)..( 6): Matrix.002 file - promoters60/2027253
gataag

SEQ ID NO: 53961 - DNA, 6 bp, Unknown
  misc_feature (1)..( 6): Matrix.002 file - promoters60/2027253
actaaa

SEQ ID NO: 53962 - DNA, 8 bp, Unknown
  misc_feature (1)..( 8): Matrix.002 file - promoters60/2027253
tttctaac

SEQ ID NO: 53963 - DNA, 6 bp, Unknown
  misc_feature (1)..( 6): Matrix.002 file - promoters60/2027253
atacaa

SEQ ID NO: 53964 - DNA, 6 bp, Unknown
  misc_feature (1)..( 6): Matrix.002 file - promoters60/2027253
tatata

SEQ ID NO: 53965 - DNA, 6 bp, Unknown
  misc_feature (1)..( 6): Matrix.002 file - promoters60/2027268
ttaaca

SEQ ID NO: 53966 - DNA, 7 bp, Unknown
  misc_feature (1)..( 7): Matrix.002 file - promoters60/2027268
caatttt

SEQ ID NO: 53967 - DNA, 11 bp, Unknown
  misc_feature (1)..( 11): Matrix.002 file - promoters60/2027268
ttttgctaaaa

SEQ ID NO: 53968 - DNA, 8 bp, Unknown
  misc_feature (1)..( 8): Matrix.002 file - promoters60/2027268
agattact

SEQ ID NO: 53969 - DNA, 7 bp, Unknown
  misc_feature (1)..( 7): Matrix.002 file - promoters60/2027268
tttgatt

SEQ ID NO: 53970 - DNA, 7 bp, Unknown
  misc_feature (1)..( 7): Matrix.002 file - promoters60/2027268
taaaaga

SEQ ID NO: 53971 - DNA, 10 bp, Unknown
  misc_feature (1)..( 10): Matrix.002 file - promoters60/2027268
aacagaataa

SEQ ID NO: 53972 - DNA, 8 bp, Unknown
  misc_feature (1)..( 8): Matrix.002 file - promoters60/2027268
ccggatcg

SEQ ID NO: 53973 - DNA, 8 bp, Unknown
  misc_feature (1)..( 8): Matrix.002 file - promoters60/2027268
accctaga

SEQ ID NO: 53974 - DNA, 7 bp, Unknown
  misc_feature (1)..( 7): Matrix.002 file - promoters60/2027268
agagaca

SEQ ID NO: 53975 - DNA, 6 bp, Unknown
  misc_feature (1)..( 6): Matrix.002 file - promoters60/2027268
attata

SEQ ID NO: 53976 - DNA, 7 bp, Unknown
  misc_feature (1)..( 7): Matrix.002 file - promoters60/2027268
tttaaag

SEQ ID NO: 53977 - DNA, 13 bp, Unknown
  misc_feature (1)..( 13): Matrix.002 file - promoters60/2027268
ttgaatcaaaatt

SEQ ID NO: 53978 - DNA, 7 bp, Unknown
  misc_feature (1)..( 7): Matrix.002 file - promoters60/2027268
tggattt

SEQ ID NO: 53979 - DNA, 6 bp, Unknown
  misc_feature (1)..( 6): Matrix.002 file - promoters60/2027268
aagatt

SEQ ID NO: 53980 - DNA, 6 bp, Unknown
  misc_feature (1)..( 6): Matrix.002 file - promoters60/2027268
ttggtt

SEQ ID NO: 53981 - DNA, 6 bp, Unknown
  misc_feature (1)..( 6): Matrix.002 file - promoters60/2027268
ttaacc

SEQ ID NO: 53982 - DNA, 7 bp, Unknown
  misc_feature (1)..( 7): Matrix.002 file - promoters60/2027268
ctcactc

SEQ ID NO: 53983 - DNA, 6 bp, Unknown
  misc_feature (1)..( 6): Matrix.002 file - promoters60/2027268
atttct

SEQ ID NO: 53984 - DNA, 7 bp, Unknown
  misc_feature (1)..( 7): Matrix.002 file - promoters60/2028945
ttgaaat

SEQ ID NO: 53985 - DNA, 13 bp, Unknown
  misc_feature (1)..( 13): Matrix.002 file - promoters60/2028945
taaaaatttaaat

SEQ ID NO: 53986 - DNA, 5 bp, Unknown
  misc_feature (1)..( 5): Matrix.002 file - promoters60/2028945
cataa

SEQ ID NO: 53987 - DNA, 7 bp, Unknown
  misc_feature (1)..( 7): Matrix.002 file - promoters60/2028945
atgaata

SEQ ID NO: 53988 - DNA, 8 bp, Unknown
  misc_feature (1)..( 8): Matrix.002 file - promoters60/2028945
tatgaaaa

SEQ ID NO: 53989 - DNA, 7 bp, Unknown
  misc_feature (1)..( 7): Matrix.002 file - promoters60/2028945
atactat

SEQ ID NO: 53990 - DNA, 9 bp, Unknown
  misc_feature (1)..( 9): Matrix.002 file - promoters60/2028945
aacatttat

SEQ ID NO: 53991 - DNA, 8 bp, Unknown
  misc_feature (1)..( 8): Matrix.002 file - promoters60/2028945
tttaattt

SEQ ID NO: 53992 - DNA, 8 bp, Unknown
  misc_feature (1)..( 8): Matrix.002 file - promoters60/2028945
ttaaagca

SEQ ID NO: 53993 - DNA, 6 bp, Unknown
  misc_feature (1)..( 6): Matrix.002 file - promoters60/2028945
gttaaa

SEQ ID NO: 53994 - DNA, 8 bp, Unknown
  misc_feature (1)..( 8): Matrix.002 file - promoters60/2028945
ttttattt

SEQ ID NO: 53995 - DNA, 8 bp, Unknown
  misc_feature (1)..( 8): Matrix.002 file - promoters60/2028945
atcttaat

SEQ ID NO: 53996 - DNA, 6 bp, Unknown
  misc_feature (1)..( 6): Matrix.002 file - promoters60/2028945
tttttc

SEQ ID NO: 53997 - DNA, 6 bp, Unknown
  misc_feature (1)..( 6): Matrix.002 file - promoters60/2028945
ttaatt

SEQ ID NO: 53998 - DNA, 8 bp, Unknown
  misc_feature (1)..( 8): Matrix.002 file - promoters60/2028945
aaacatta

SEQ ID NO: 53999 - DNA, 6 bp, Unknown
  misc_feature (1)..( 6): Matrix.002 file - promoters60/2028945
atcact

SEQ ID NO: 54000 - DNA, 8 bp, Unknown
  misc_feature (1)..( 8): Matrix.002 file - promoters60/2028945
aaaacttt

SEQ ID NO: 54001 - DNA, 7 bp, Unknown
  misc_feature (1)..( 7): Matrix.002 file - promoters60/2028945
tttataa

SEQ ID NO: 54002 - DNA, 6 bp, Unknown
  misc_feature (1)..( 6): Matrix.002 file - promoters60/2028945
taacac

SEQ ID NO: 54003 - DNA, 6 bp, Unknown
  misc_feature (1)..( 6): Matrix.002 file - promoters60/2028945
accaat

SEQ ID NO: 54004 - DNA, 8 bp, Unknown
  misc_feature (1)..( 8): Matrix.002 file - promoters60/2028985
ttttagaa

SEQ ID NO: 54005 - DNA, 6 bp, Unknown
  misc_feature (1)..( 6): Matrix.002 file - promoters60/2028985
tttaat

SEQ ID NO: 54006 - DNA, 7 bp, Unknown
  misc_feature (1)..( 7): Matrix.002 file - promoters60/2028985
tgaattc

SEQ ID NO: 54007 - DNA, 10 bp, Unknown
  misc_feature (1)..( 10): Matrix.002 file - promoters60/2028985
gtttagtgaa

SEQ ID NO: 54008 - DNA, 6 bp, Unknown
  misc_feature (1)..( 6): Matrix.002 file - promoters60/2028985
aagtaa

SEQ ID NO: 54009 - DNA, 7 bp, Unknown
  misc_feature (1)..( 7): Matrix.002 file - promoters60/2028985
taaaaag

SEQ ID NO: 54010 - DNA, 11 bp, Unknown
  misc_feature (1)..( 11): Matrix.002 file - promoters60/2028985
tgatgaattga

SEQ ID NO: 54011 - DNA, 7 bp, Unknown
  misc_feature (1)..( 7): Matrix.002 file - promoters60/2028985
gtgaatg

SEQ ID NO: 54012 - DNA, 6 bp, Unknown
  misc_feature (1)..( 6): Matrix.002 file - promoters60/2028985
tctttg

SEQ ID NO: 54013 - DNA, 6 bp, Unknown
  misc_feature (1)..( 6): Matrix.002 file - promoters60/2028985
taatgt

SEQ ID NO: 54014 - DNA, 6 bp, Unknown
  misc_feature (1)..( 6): Matrix.002 file - promoters60/2028985
tataat

SEQ ID NO: 54015 - DNA, 8 bp, Unknown
  misc_feature (1)..( 8): Matrix.002 file - promoters60/2028985
caaaccgt

SEQ ID NO: 54016 - DNA, 8 bp, Unknown
  misc_feature (1)..( 8): Matrix.002 file - promoters60/2028985
aacatagt

SEQ ID NO: 54017 - DNA, 8 bp, Unknown
  misc_feature (1)..( 8): Matrix.002 file - promoters60/2028985
tcaaaaaa

SEQ ID NO: 54018 - DNA, 7 bp, Unknown
  misc_feature (1)..( 7): Matrix.002 file - promoters60/2028985
agtgcgg

SEQ ID NO: 54019 - DNA, 9 bp, Unknown
  misc_feature (1)..( 9): Matrix.002 file - promoters60/2028993
attactgca

SEQ ID NO: 54020 - DNA, 11 bp, Unknown
  misc_feature (1)..( 11): Matrix.002 file - promoters60/2028993
ttcttaaatgg

SEQ ID NO: 54021 - DNA, 8 bp, Unknown
  misc_feature (1)..( 8): Matrix.002 file - promoters60/2028993
gtcagaaa

SEQ ID NO: 54022 - DNA, 9 bp, Unknown
  misc_feature (1)..( 9): Matrix.002 file - promoters60/2028993
attaaccaa

SEQ ID NO: 54023 - DNA, 12 bp, Unknown
  misc_feature (1)..( 12): Matrix.002 file - promoters60/2028993
ttactaaaattt

SEQ ID NO: 54024 - DNA, 7 bp, Unknown
  misc_feature (1)..( 7): Matrix.002 file - promoters60/2028993
attataa

SEQ ID NO: 54025 - DNA, 6 bp, Unknown
  misc_feature (1)..( 6): Matrix.002 file - promoters60/2028993
cactat

SEQ ID NO: 54026 - DNA, 7 bp, Unknown
  misc_feature (1)..( 7): Matrix.002 file - promoters60/2028993
taaaaat

SEQ ID NO: 54027 - DNA, 7 bp, Unknown
  misc_feature (1)..( 7): Matrix.002 file - promoters60/2028993
taagttg

SEQ ID NO: 54028 - DNA, 8 bp, Unknown
  misc_feature (1)..( 8): Matrix.002 file - promoters60/2028993
ataaacca

SEQ ID NO: 54029 - DNA, 7 bp, Unknown
  misc_feature (1)..( 7): Matrix.002 file - promoters60/2028993
aaaatta

SEQ ID NO: 54030 - DNA, 6 bp, Unknown
  misc_feature (1)..( 6): Matrix.002 file - promoters60/2028993
aataag

SEQ ID NO: 54031 - DNA, 7 bp, Unknown
  misc_feature (1)..( 7): Matrix.002 file - promoters60/2028993
taaaaac

SEQ ID NO: 54032 - DNA, 8 bp, Unknown
  misc_feature (1)..( 8): Matrix.002 file - promoters60/2028993
tgaaaata

SEQ ID NO: 54033 - DNA, 6 bp, Unknown
  misc_feature (1)..( 6): Matrix.002 file - promoters60/2028993
aagcaa

SEQ ID NO: 54034 - DNA, 10 bp, Unknown
  misc_feature (1)..( 10): Matrix.002 file - promoters60/2028993
ccaaaaaaaa

SEQ ID NO: 54035 - DNA, 10 bp, Unknown
  misc_feature (1)..( 10): Matrix.002 file - promoters60/2028993
tgtaatgctt

SEQ ID NO: 54036 - DNA, 6 bp, Unknown
  misc_feature (1)..( 6): Matrix.002 file - promoters60/2028993
taatta

SEQ ID NO: 54037 - DNA, 7 bp, Unknown
  misc_feature (1)..( 7): Matrix.002 file - promoters60/2028997
attctgt

SEQ ID NO: 54038 - DNA, 7 bp, Unknown
  misc_feature (1)..( 7): Matrix.002 file - promoters60/2028997
cttctat

SEQ ID NO: 54039 - DNA, 7 bp, Unknown
  misc_feature (1)..( 7): Matrix.002 file - promoters60/2028997
tttcatt

SEQ ID NO: 54040 - DNA, 7 bp, Unknown
  misc_feature (1)..( 7): Matrix.002 file - promoters60/2028997
gtatctt

SEQ ID NO: 54041 - DNA, 6 bp, Unknown
  misc_feature (1)..( 6): Matrix.002 file - promoters60/2028997
catcat

SEQ ID NO: 54042 - DNA, 6 bp, Unknown
  misc_feature (1)..( 6): Matrix.002 file - promoters60/2028997
aagaaa

SEQ ID NO: 54043 - DNA, 7 bp, Unknown
  misc_feature (1)..( 7): Matrix.002 file - promoters60/2028997
aaagaaa

SEQ ID NO: 54044 - DNA, 9 bp, Unknown
  misc_feature (1)..( 9): Matrix.002 file - promoters60/2028997
ctcagtgat

SEQ ID NO: 54045 - DNA, 7 bp, Unknown
  misc_feature (1)..( 7): Matrix.002 file - promoters60/2028997
gttcttt

SEQ ID NO: 54046 - DNA, 7 bp, Unknown
  misc_feature (1)..( 7): Matrix.002 file - promoters60/2028997
attggaa

SEQ ID NO: 54047 - DNA, 6 bp, Unknown
  misc_feature (1)..( 6): Matrix.002 file - promoters60/2028997
aaggta

SEQ ID NO: 54048 - DNA, 8 bp, Unknown
  misc_feature (1)..( 8): Matrix.002 file - promoters60/2029009
acttaaaa

SEQ ID NO: 54049 - DNA, 9 bp, Unknown
  misc_feature (1)..( 9): Matrix.002 file - promoters60/2029009
tatactttt

SEQ ID NO: 54050 - DNA, 7 bp, Unknown
  misc_feature (1)..( 7): Matrix.002 file - promoters60/2029009
acattaa

SEQ ID NO: 54051 - DNA, 7 bp, Unknown
  misc_feature (1)..( 7): Matrix.002 file - promoters60/2029009
attttgg

SEQ ID NO: 54052 - DNA, 7 bp, Unknown
  misc_feature (1)..( 7): Matrix.002 file - promoters60/2029009
aagaaaa

SEQ ID NO: 54053 - DNA, 7 bp, Unknown
  misc_feature (1)..( 7): Matrix.002 file - promoters60/2029009
aataaaa

SEQ ID NO: 54054 - DNA, 6 bp, Unknown
  misc_feature (1)..( 6): Matrix.002 file - promoters60/2029009
aaaaat

SEQ ID NO: 54055 - DNA, 7 bp, Unknown
  misc_feature (1)..( 7): Matrix.002 file - promoters60/2029009
tttatcc

SEQ ID NO: 54056 - DNA, 6 bp, Unknown
  misc_feature (1)..( 6): Matrix.002 file - promoters60/2029009
ttagaa

SEQ ID NO: 54057 - DNA, 6 bp, Unknown
  misc_feature (1)..( 6): Matrix.002 file - promoters60/2029009
ttaaca

SEQ ID NO: 54058 - DNA, 6 bp, Unknown
  misc_feature (1)..( 6): Matrix.002 file - promoters60/2029009
taaaac

SEQ ID NO: 54059 - DNA, 6 bp, Unknown
  misc_feature (1)..( 6): Matrix.002 file - promoters60/2029009
tcaact

SEQ ID NO: 54060 - DNA, 6 bp, Unknown
  misc_feature (1)..( 6): Matrix.002 file - promoters60/2029009
aaaaaa

SEQ ID NO: 54061 - DNA, 6 bp, Unknown
  misc_feature (1)..( 6): Matrix.002 file - promoters60/2029009
aaaaat

SEQ ID NO: 54062 - DNA, 6 bp, Unknown
  misc_feature (1)..( 6): Matrix.002 file - promoters60/2029009
aatgaa

SEQ ID NO: 54063 - DNA, 8 bp, Unknown
  misc_feature (1)..( 8): Matrix.002 file - promoters60/2029009
gaatacga

SEQ ID NO: 54064 - DNA, 6 bp, Unknown
  misc_feature (1)..( 6): Matrix.002 file - promoters60/2029009
aacata

SEQ ID NO: 54065 - DNA, 6 bp, Unknown
  misc_feature (1)..( 6): Matrix.002 file - promoters60/2029009
cttgat

SEQ ID NO: 54066 - DNA, 7 bp, Unknown
  misc_feature (1)..( 7): Matrix.002 file - promoters60/2029009
aggatta

SEQ ID NO: 54067 - DNA, 9 bp, Unknown
  misc_feature (1)..( 9): Matrix.002 file - promoters60/2029016
aataaatta

SEQ ID NO: 54068 - DNA, 7 bp, Unknown
  misc_feature (1)..( 7): Matrix.002 file - promoters60/2029016
ttgtaaa

SEQ ID NO: 54069 - DNA, 10 bp, Unknown
  misc_feature (1)..( 10): Matrix.002 file - promoters60/2029016
tcaagttaaa

SEQ ID NO: 54070 - DNA, 8 bp, Unknown
  misc_feature (1)..( 8): Matrix.002 file - promoters60/2029016
ttagtttt

SEQ ID NO: 54071 - DNA, 11 bp, Unknown
  misc_feature (1)..( 11): Matrix.002 file - promoters60/2029016
caaataataaa

SEQ ID NO: 54072 - DNA, 8 bp, Unknown
  misc_feature (1)..( 8): Matrix.002 file - promoters60/2029016
aaagatca

SEQ ID NO: 54073 - DNA, 11 bp, Unknown
  misc_feature (1)..( 11): Matrix.002 file - promoters60/2029031
caaagttgttg

SEQ ID NO: 54074 - DNA, 10 bp, Unknown
  misc_feature (1)..( 10): Matrix.002 file - promoters60/2029033
gatttatttc

SEQ ID NO: 54075 - DNA, 13 bp, Unknown
  misc_feature (1)..( 13): Matrix.002 file - promoters60/2029033
gattattcattta

SEQ ID NO: 54076 - DNA, 7 bp, Unknown
  misc_feature (1)..( 7): Matrix.002 file - promoters60/2029033
tctctat

SEQ ID NO: 54077 - DNA, 6 bp, Unknown
  misc_feature (1)..( 6): Matrix.002 file - promoters60/2029049
tttagg

SEQ ID NO: 54078 - DNA, 6 bp, Unknown
  misc_feature (1)..( 6): Matrix.002 file - promoters60/2029049
taaaac

SEQ ID NO: 54079 - DNA, 7 bp, Unknown
  misc_feature (1)..( 7): Matrix.002 file - promoters60/2029049
aaaatta

SEQ ID NO: 54080 - DNA, 10 bp, Unknown
  misc_feature (1)..( 10): Matrix.002 file - promoters60/2029049
aaaaaaaaaa

SEQ ID NO: 54081 - DNA, 7 bp, Unknown
  misc_feature (1)..( 7): Matrix.002 file - promoters60/2029049
gggggac

SEQ ID NO: 54082 - DNA, 9 bp, Unknown
  misc_feature (1)..( 9): Matrix.002 file - promoters60/2029049
gagatattt

SEQ ID NO: 54083 - DNA, 6 bp, Unknown
  misc_feature (1)..( 6): Matrix.002 file - promoters60/2029049
attgtg

SEQ ID NO: 54084 - DNA, 6 bp, Unknown
  misc_feature (1)..( 6): Matrix.002 file - promoters60/2029049
ttgttt

SEQ ID NO: 54085 - DNA, 9 bp, Unknown
  misc_feature (1)..( 9): Matrix.002 file - promoters60/2029049
tatcgcttt

SEQ ID NO: 54086 - DNA, 9 bp, Unknown
  misc_feature (1)..( 9): Matrix.002 file - promoters60/2029049
tttcctata

SEQ ID NO: 54087 - DNA, 7 bp, Unknown
  misc_feature (1)..( 7): Matrix.002 file - promoters60/2029049
ctttcaa

SEQ ID NO: 54088 - DNA, 6 bp, Unknown
  misc_feature (1)..( 6): Matrix.002 file - promoters60/2029049
caattt

SEQ ID NO: 54089 - DNA, 13 bp, Unknown
  misc_feature (1)..( 13): Matrix.002 file - promoters60/2029075
caaaaaagaaata

SEQ ID NO: 54090 - DNA, 9 bp, Unknown
  misc_feature (1)..( 9): Matrix.002 file - promoters60/2029075
attttattc

SEQ ID NO: 54091 - DNA, 10 bp, Unknown
  misc_feature (1)..( 10): Matrix.002 file - promoters60/2029075
caaaaaacaa

SEQ ID NO: 54092 - DNA, 9 bp, Unknown
  misc_feature (1)..( 9): Matrix.002 file - promoters60/2029079
tataaaata

SEQ ID NO: 54093 - DNA, 10 bp, Unknown
  misc_feature (1)..( 10): Matrix.002 file - promoters60/2029079
tcgaagaaag

SEQ ID NO: 54094 - DNA, 15 bp, Unknown
  misc_feature (1)..( 15): Matrix.002 file - promoters60/2029087
aacaaaaaaagttta

SEQ ID NO: 54095 - DNA, 15 bp, Unknown
  misc_feature (1)..( 15): Matrix.002 file - promoters60/2029087
atcactgatccaaca

SEQ ID NO: 54096 - DNA, 7 bp, Unknown
  misc_feature (1)..( 7): Matrix.002 file - promoters60/2029087
aattatc

SEQ ID NO: 54097 - DNA, 6 bp, Unknown
  misc_feature (1)..( 6): Matrix.002 file - promoters60/2056926
tgggtt

SEQ ID NO: 54098 - DNA, 7 bp, Unknown
  misc_feature (1)..( 7): Matrix.002 file - promoters60/2056926
tcaaaaa

SEQ ID NO: 54099 - DNA, 8 bp, Unknown
  misc_feature (1)..( 8): Matrix.002 file - promoters60/2056926
agaacaat

SEQ ID NO: 54100 - DNA, 6 bp, Unknown
  misc_feature (1)..( 6): Matrix.002 file - promoters60/2056926
acgaaa

SEQ ID NO: 54101 - DNA, 8 bp, Unknown
  misc_feature (1)..( 8): Matrix.002 file - promoters60/2056926
aataaaag

SEQ ID NO: 54102 - DNA, 8 bp, Unknown
  misc_feature (1)..( 8): Matrix.002 file - promoters60/2056926
aaagatct

SEQ ID NO: 54103 - DNA, 7 bp, Unknown
  misc_feature (1)..( 7): Matrix.002 file - promoters60/2056926
agatttg

SEQ ID NO: 54104 - DNA, 7 bp, Unknown
  misc_feature (1)..( 7): Matrix.002 file - promoters60/2056926
gttctca

SEQ ID NO: 54105 - DNA, 7 bp, Unknown
  misc_feature (1)..( 7): Matrix.002 file - promoters60/2056926
ataagac

SEQ ID NO: 54106 - DNA, 7 bp, Unknown
  misc_feature (1)..( 7): Matrix.002 file - promoters60/2056926
aataata

SEQ ID NO: 54107 - DNA, 9 bp, Unknown
  misc_feature (1)..( 9): Matrix.002 file - promoters60/2056926
aaagaaaat

SEQ ID NO: 54108 - DNA, 11 bp, Unknown
  misc_feature (1)..( 11): Matrix.002 file - promoters60/2056926
attattcgctg

SEQ ID NO: 54109 - DNA, 7 bp, Unknown
  misc_feature (1)..( 7): Matrix.002 file - promoters60/2056926
gtcaaga

SEQ ID NO: 54110 - DNA, 7 bp, Unknown
  misc_feature (1)..( 7): Matrix.002 file - promoters60/2056926
cttatat

SEQ ID NO: 54111 - DNA, 12 bp, Unknown
  misc_feature (1)..( 12): Matrix.002 file - promoters60/2056926
taacttttgagt

SEQ ID NO: 54112 - DNA, 7 bp, Unknown
  misc_feature (1)..( 7): Matrix.002 file - promoters60/2056926
tctacac

SEQ ID NO: 54113 - DNA, 6 bp, Unknown
  misc_feature (1)..( 6): Matrix.002 file - promoters60/2056926
acttgt

SEQ ID NO: 54114 - DNA, 13 bp, Unknown
  misc_feature (1)..( 13): Matrix.002 file - promoters60/2104991
cttaaattataat

SEQ ID NO: 54115 - DNA, 11 bp, Unknown
  misc_feature (1)..( 11): Matrix.002 file - promoters60/2104991
atttcaaaaaa

SEQ ID NO: 54116 - DNA, 14 bp, Unknown
  misc_feature (1)..( 14): Matrix.002 file - promoters60/2104991
tacttttttattgt

SEQ ID NO: 54117 - DNA, 7 bp, Unknown
  misc_feature (1)..( 7): Matrix.002 file - promoters60/2105109
tttatat

SEQ ID NO: 54118 - DNA, 9 bp, Unknown
  misc_feature (1)..( 9): Matrix.002 file - promoters60/2105109
tattagtat

SEQ ID NO: 54119 - DNA, 26 bp, Unknown
  misc_feature (1)..( 26): Matrix.002 file - promoters60/2105109
attaaaacccaacaagtaacaataaa

SEQ ID NO: 54120 - DNA, 10 bp, Unknown
  misc_feature (1)..( 10): Matrix.002 file - promoters60/2105109
cataagccca

SEQ ID NO: 54121 - DNA, 17 bp, Unknown
  misc_feature (1)..( 17): Matrix.002 file - promoters60/2105109
gtttaccttattatctc

SEQ ID NO: 54122 - DNA, 8 bp, Unknown
  misc_feature (1)..( 8): Matrix.002 file - promoters60/2105109
aaataaaa

SEQ ID NO: 54123 - DNA, 8 bp, Unknown
  misc_feature (1)..( 8): Matrix.002 file - promoters60/2105109
aatataaa

SEQ ID NO: 54124 - DNA, 8 bp, Unknown
  misc_feature (1)..( 8): Matrix.002 file - promoters60/2105109
gatttggt

SEQ ID NO: 54125 - DNA, 6 bp, Unknown
  misc_feature (1)..( 6): Matrix.002 file - promoters60/2105141
aacaaa

SEQ ID NO: 54126 - DNA, 7 bp, Unknown
  misc_feature (1)..( 7): Matrix.002 file - promoters60/2105141
tttttat

SEQ ID NO: 54127 - DNA, 8 bp, Unknown
  misc_feature (1)..( 8): Matrix.002 file - promoters60/2105141
catatttt

SEQ ID NO: 54128 - DNA, 7 bp, Unknown
  misc_feature (1)..( 7): Matrix.002 file - promoters60/2105141
taaataa

SEQ ID NO: 54129 - DNA, 8 bp, Unknown
  misc_feature (1)..( 8): Matrix.002 file - promoters60/2105141
ttttcaat

SEQ ID NO: 54130 - DNA, 7 bp, Unknown
  misc_feature (1)..( 7): Matrix.002 file - promoters60/2105141
taaatta

SEQ ID NO: 54131 - DNA, 6 bp, Unknown
  misc_feature (1)..( 6): Matrix.002 file - promoters60/2105141
aacaca

SEQ ID NO: 54132 - DNA, 7 bp, Unknown
  misc_feature (1)..( 7): Matrix.002 file - promoters60/2105141
ataaaaa

SEQ ID NO: 54133 - DNA, 8 bp, Unknown
  misc_feature (1)..( 8): Matrix.002 file - promoters60/2105141
atgtttat

SEQ ID NO: 54134 - DNA, 9 bp, Unknown
  misc_feature (1)..( 9): Matrix.002 file - promoters60/2105141
cacaaatca

SEQ ID NO: 54135 - DNA, 7 bp, Unknown
  misc_feature (1)..( 7): Matrix.002 file - promoters60/2105141
aaaaccc

SEQ ID NO: 54136 - DNA, 7 bp, Unknown
  misc_feature (1)..( 7): Matrix.002 file - promoters60/2105141
acccttt

SEQ ID NO: 54137 - DNA, 8 bp, Unknown
  misc_feature (1)..( 8): Matrix.002 file - promoters60/2105141
gtgctaaa

SEQ ID NO: 54138 - DNA, 6 bp, Unknown
  misc_feature (1)..( 6): Matrix.002 file - promoters60/2105141
aagaat

SEQ ID NO: 54139 - DNA, 8 bp, Unknown
  misc_feature (1)..( 8): Matrix.002 file - promoters60/2105141
aaaacaaa

SEQ ID NO: 54140 - DNA, 6 bp, Unknown
  misc_feature (1)..( 6): Matrix.002 file - promoters60/2105141
gttttc

SEQ ID NO: 54141 - DNA, 7 bp, Unknown
  misc_feature (1)..( 7): Matrix.002 file - promoters60/2105141
ttattta

SEQ ID NO: 54142 - DNA, 6 bp, Unknown
  misc_feature (1)..( 6): Matrix.002 file - promoters60/2105141
cacaag

SEQ ID NO: 54143 - DNA, 6 bp, Unknown
  misc_feature (1)..( 6): Matrix.002 file - promoters60/2105141
tggcat

SEQ ID NO: 54144 - DNA, 8 bp, Unknown
  misc_feature (1)..( 8): Matrix.002 file - promoters60/2105398
aaaaaaaa

SEQ ID NO: 54145 - DNA, 14 bp, Unknown
  misc_feature (1)..( 14): Matrix.002 file - promoters60/2105398
atttcatattttca

SEQ ID NO: 54146 - DNA, 13 bp, Unknown
  misc_feature (1)..( 13): Matrix.002 file - promoters60/2105398
aattttgtaaaat

SEQ ID NO: 54147 - DNA, 10 bp, Unknown
  misc_feature (1)..( 10): Matrix.002 file - promoters60/2105398
tttagataga

SEQ ID NO: 54148 - DNA, 12 bp, Unknown
  misc_feature (1)..( 12): Matrix.002 file - promoters60/2105398
attttataaatt

SEQ ID NO: 54149 - DNA, 7 bp, Unknown
  misc_feature (1)..( 7): Matrix.002 file - promoters60/2105398
atttatt

SEQ ID NO: 54150 - DNA, 16 bp, Unknown
  misc_feature (1)..( 16): Matrix.002 file - promoters60/2105514
aaaaaggcccattata

SEQ ID NO: 54151 - DNA, 8 bp, Unknown
  misc_feature (1)..( 8): Matrix.002 file - promoters60/2105518
ggttatgt

SEQ ID NO: 54152 - DNA, 18 bp, Unknown
  misc_feature (1)..( 18): Matrix.002 file - promoters60/2105518
ctataccaaaaatgaaaa

SEQ ID NO: 54153 - DNA, 9 bp, Unknown
  misc_feature (1)..( 9): Matrix.002 file - promoters60/2105533
ctaaaaaga

SEQ ID NO: 54154 - DNA, 10 bp, Unknown
  misc_feature (1)..( 10): Matrix.002 file - promoters60/2105533
gtggactatt

SEQ ID NO: 54155 - DNA, 8 bp, Unknown
  misc_feature (1)..( 8): Matrix.002 file - promoters60/2105533
attgatag

SEQ ID NO: 54156 - DNA, 6 bp, Unknown
  misc_feature (1)..( 6): Matrix.002 file - promoters60/2105533
gttact

SEQ ID NO: 54157 - DNA, 6 bp, Unknown
  misc_feature (1)..( 6): Matrix.002 file - promoters60/2105533
tttaac

SEQ ID NO: 54158 - DNA, 6 bp, Unknown
  misc_feature (1)..( 6): Matrix.002 file - promoters60/2105533
agtaaa

SEQ ID NO: 54159 - DNA, 7 bp, Unknown
  misc_feature (1)..( 7): Matrix.002 file - promoters60/2105533
gattaaa

SEQ ID NO: 54160 - DNA, 9 bp, Unknown
  misc_feature (1)..( 9): Matrix.002 file - promoters60/2105533
aagaagtta

SEQ ID NO: 54161 - DNA, 8 bp, Unknown
  misc_feature (1)..( 8): Matrix.002 file - promoters60/2105533
aagctgtt

SEQ ID NO: 54162 - DNA, 8 bp, Unknown
  misc_feature (1)..( 8): Matrix.002 file - promoters60/2105533
tgttcaga

SEQ ID NO: 54163 - DNA, 6 bp, Unknown
  misc_feature (1)..( 6): Matrix.002 file - promoters60/2105533
ctcacc

SEQ ID NO: 54164 - DNA, 6 bp, Unknown
  misc_feature (1)..( 6): Matrix.002 file - promoters60/2105533
acacgt

SEQ ID NO: 54165 - DNA, 6 bp, Unknown
  misc_feature (1)..( 6): Matrix.002 file - promoters60/2105533
ttaacc

SEQ ID NO: 54166 - DNA, 7 bp, Unknown
  misc_feature (1)..( 7): Matrix.002 file - promoters60/2105533
caaattt

SEQ ID NO: 54167 - DNA, 8 bp, Unknown
  misc_feature (1)..( 8): Matrix.002 file - promoters60/2105533
tttggaaa

SEQ ID NO: 54168 - DNA, 7 bp, Unknown
  misc_feature (1)..( 7): Matrix.002 file - promoters60/2105533
attaatt

SEQ ID NO: 54169 - DNA, 7 bp, Unknown
  misc_feature (1)..( 7): Matrix.002 file - promoters60/2105533
cttatgt

SEQ ID NO: 54170 - DNA, 9 bp, Unknown
  misc_feature (1)..( 9): Matrix.002 file - promoters60/2105535
acaaagaaa

SEQ ID NO: 54171 - DNA, 10 bp, Unknown
  misc_feature (1)..( 10): Matrix.002 file - promoters60/2105912
gccagaaata

SEQ ID NO: 54172 - DNA, 7 bp, Unknown
  misc_feature (1)..( 7): Matrix.002 file - promoters60/2105912
acagata

SEQ ID NO: 54173 - DNA, 10 bp, Unknown
  misc_feature (1)..( 10): Matrix.002 file - promoters60/2105912
agatttgtta

SEQ ID NO: 54174 - DNA, 8 bp, Unknown
  misc_feature (1)..( 8): Matrix.002 file - promoters60/2105912
aaacagag

SEQ ID NO: 54175 - DNA, 11 bp, Unknown
  misc_feature (1)..( 11): Matrix.002 file - promoters60/2105912
aaggaatgata

SEQ ID NO: 54176 - DNA, 8 bp, Unknown
  misc_feature (1)..( 8): Matrix.002 file - promoters60/2105912
aaaaagag

SEQ ID NO: 54177 - DNA, 7 bp, Unknown
  misc_feature (1)..( 7): Matrix.002 file - promoters60/2105912
ttaattt

SEQ ID NO: 54178 - DNA, 8 bp, Unknown
  misc_feature (1)..( 8): Matrix.002 file - promoters60/2105912
ataaaaac

SEQ ID NO: 54179 - DNA, 8 bp, Unknown
  misc_feature (1)..( 8): Matrix.002 file - promoters60/2105912
aaacgaat

SEQ ID NO: 54180 - DNA, 9 bp, Unknown
  misc_feature (1)..( 9): Matrix.002 file - promoters60/2105912
gaaacagag

SEQ ID NO: 54181 - DNA, 8 bp, Unknown
  misc_feature (1)..( 8): Matrix.002 file - promoters60/2105912
aataataa

SEQ ID NO: 54182 - DNA, 6 bp, Unknown
  misc_feature (1)..( 6): Matrix.002 file - promoters60/2106027
gaaatt

SEQ ID NO: 54183 - DNA, 8 bp, Unknown
  misc_feature (1)..( 8): Matrix.002 file - promoters60/2106027
gaagagga

SEQ ID NO: 54184 - DNA, 6 bp, Unknown
  misc_feature (1)..( 6): Matrix.002 file - promoters60/2106027
ataatc

SEQ ID NO: 54185 - DNA, 9 bp, Unknown
  misc_feature (1)..( 9): Matrix.002 file - promoters60/2106027
aaagattgt

SEQ ID NO: 54186 - DNA, 8 bp, Unknown
  misc_feature (1)..( 8): Matrix.002 file - promoters60/2106027
atatcttc

SEQ ID NO: 54187 - DNA, 7 bp, Unknown
  misc_feature (1)..( 7): Matrix.002 file - promoters60/2106027
aggagat

SEQ ID NO: 54188 - DNA, 7 bp, Unknown
  misc_feature (1)..( 7): Matrix.002 file - promoters60/2106027
attctca

SEQ ID NO: 54189 - DNA, 8 bp, Unknown
  misc_feature (1)..( 8): Matrix.002 file - promoters60/2106027
tggaatcc

SEQ ID NO: 54190 - DNA, 7 bp, Unknown
  misc_feature (1)..( 7): Matrix.002 file - promoters60/2106027
atcatgc

SEQ ID NO: 54191 - DNA, 9 bp, Unknown
  misc_feature (1)..( 9): Matrix.002 file - promoters60/2106076
aagatcaaa

SEQ ID NO: 54192 - DNA, 6 bp, Unknown
  misc_feature (1)..( 6): Matrix.002 file - promoters60/2106109
tataat

SEQ ID NO: 54193 - DNA, 6 bp, Unknown
  misc_feature (1)..( 6): Matrix.002 file - promoters60/2106109
ccacca

SEQ ID NO: 54194 - DNA, 9 bp, Unknown
  misc_feature (1)..( 9): Matrix.002 file - promoters60/2106109
gtagatatt

SEQ ID NO: 54195 - DNA, 6 bp, Unknown
  misc_feature (1)..( 6): Matrix.002 file - promoters60/2106109
aacatt

SEQ ID NO: 54196 - DNA, 7 bp, Unknown
  misc_feature (1)..( 7): Matrix.002 file - promoters60/2106109
ttgatga

SEQ ID NO: 54197 - DNA, 8 bp, Unknown
  misc_feature (1)..( 8): Matrix.002 file - promoters60/2106109
ttaatcaa

SEQ ID NO: 54198 - DNA, 8 bp, Unknown
  misc_feature (1)..( 8): Matrix.002 file - promoters60/2106109
aaatggtt

SEQ ID NO: 54199 - DNA, 7 bp, Unknown
  misc_feature (1)..( 7): Matrix.002 file - promoters60/2106109
aatctct

SEQ ID NO: 54200 - DNA, 6 bp, Unknown
  misc_feature (1)..( 6): Matrix.002 file - promoters60/2106109
caaatt

SEQ ID NO: 54201 - DNA, 9 bp, Unknown
  misc_feature (1)..( 9): Matrix.002 file - promoters60/2106109
aatcaaaaa

SEQ ID NO: 54202 - DNA, 8 bp, Unknown
  misc_feature (1)..( 8): Matrix.002 file - promoters60/2106109
tatagtaa

SEQ ID NO: 54203 - DNA, 8 bp, Unknown
  misc_feature (1)..( 8): Matrix.002 file - promoters60/2106109
attttttt

SEQ ID NO: 54204 - DNA, 6 bp, Unknown
  misc_feature (1)..( 6): Matrix.002 file - promoters60/2106109
tttgtt

SEQ ID NO: 54205 - DNA, 6 bp, Unknown
  misc_feature (1)..( 6): Matrix.002 file - promoters60/2106109
tataac

SEQ ID NO: 54206 - DNA, 8 bp, Unknown
  misc_feature (1)..( 8): Matrix.002 file - promoters60/2106109
gaacaaag

SEQ ID NO: 54207 - DNA, 8 bp, Unknown
  misc_feature (1)..( 8): Matrix.002 file - promoters60/2106109
tttaaatg

SEQ ID NO: 54208 - DNA, 7 bp, Unknown
  misc_feature (1)..( 7): Matrix.002 file - promoters60/2106109
ccaaaca

SEQ ID NO: 54209 - DNA, 8 bp, Unknown
  misc_feature (1)..( 8): Matrix.002 file - promoters60/2106109
tacaaaaa

SEQ ID NO: 54210 - DNA, 8 bp, Unknown
  misc_feature (1)..( 8): Matrix.002 file - promoters60/2106109
aaaaaaag

SEQ ID NO: 54211 - DNA, 8 bp, Unknown
  misc_feature (1)..( 8): Matrix.002 file - promoters60/2106109
aacaacct

SEQ ID NO: 54212 - DNA, 7 bp, Unknown
  misc_feature (1)..( 7): Matrix.002 file - promoters60/2106659
tcttcat

SEQ ID NO: 54213 - DNA, 6 bp, Unknown
  misc_feature (1)..( 6): Matrix.002 file - promoters60/2106659
taaaac

SEQ ID NO: 54214 - DNA, 7 bp, Unknown
  misc_feature (1)..( 7): Matrix.002 file - promoters60/2106659
tatcctc

SEQ ID NO: 54215 - DNA, 6 bp, Unknown
  misc_feature (1)..( 6): Matrix.002 file - promoters60/2106659
atttat

SEQ ID NO: 54216 - DNA, 6 bp, Unknown
  misc_feature (1)..( 6): Matrix.002 file - promoters60/2106659
aaaacc

SEQ ID NO: 54217 - DNA, 7 bp, Unknown
  misc_feature (1)..( 7): Matrix.002 file - promoters60/2106659
tccgaaa

SEQ ID NO: 54218 - DNA, 9 bp, Unknown
  misc_feature (1)..( 9): Matrix.002 file - promoters60/2106659
gttagatcg

SEQ ID NO: 54219 - DNA, 6 bp, Unknown
  misc_feature (1)..( 6): Matrix.002 file - promoters60/2106659
aaatct

SEQ ID NO: 54220 - DNA, 7 bp, Unknown
  misc_feature (1)..( 7): Matrix.002 file - promoters60/2106659
atggttg

SEQ ID NO: 54221 - DNA, 6 bp, Unknown
  misc_feature (1)..( 6): Matrix.002 file - promoters60/2106659
tttgtt

SEQ ID NO: 54222 - DNA, 8 bp, Unknown
  misc_feature (1)..( 8): Matrix.002 file - promoters60/2106659
ttatcaag

SEQ ID NO: 54223 - DNA, 6 bp, Unknown
  misc_feature (1)..( 6): Matrix.002 file - promoters60/2106659
ttatct

SEQ ID NO: 54224 - DNA, 6 bp, Unknown
  misc_feature (1)..( 6): Matrix.002 file - promoters60/2106659
agtaaa

SEQ ID NO: 54225 - DNA, 7 bp, Unknown
  misc_feature (1)..( 7): Matrix.002 file - promoters60/2106659
aatcggg

SEQ ID NO: 54226 - DNA, 8 bp, Unknown
  misc_feature (1)..( 8): Matrix.002 file - promoters60/2106659
gaaacaaa

SEQ ID NO: 54227 - DNA, 10 bp, Unknown
  misc_feature (1)..( 10): Matrix.002 file - promoters60/2106659
ggaaaagaaa

SEQ ID NO: 54228 - DNA, 7 bp, Unknown
  misc_feature (1)..( 7): Matrix.002 file - promoters60/2106659
cccacta

SEQ ID NO: 54229 - DNA, 9 bp, Unknown
  misc_feature (1)..( 9): Matrix.002 file - promoters60/2106659
aaagaaaag

SEQ ID NO: 54230 - DNA, 7 bp, Unknown
  misc_feature (1)..( 7): Matrix.002 file - promoters60/2106659
gtatata

SEQ ID NO: 54231 - DNA, 9 bp, Unknown
  misc_feature (1)..( 9): Matrix.002 file - promoters60/2106682
tgagctgtt

SEQ ID NO: 54232 - DNA, 8 bp, Unknown
  misc_feature (1)..( 8): Matrix.002 file - promoters60/2106682
attacttc

SEQ ID NO: 54233 - DNA, 7 bp, Unknown
  misc_feature (1)..( 7): Matrix.002 file - promoters60/2106682
agcaaat

SEQ ID NO: 54234 - DNA, 9 bp, Unknown
  misc_feature (1)..( 9): Matrix.002 file - promoters60/2106682
aaaaaagct

SEQ ID NO: 54235 - DNA, 7 bp, Unknown
  misc_feature (1)..( 7): Matrix.002 file - promoters60/2106682
taaaggg

SEQ ID NO: 54236 - DNA, 6 bp, Unknown
  misc_feature (1)..( 6): Matrix.002 file - promoters60/2106682
tgtctc

SEQ ID NO: 54237 - DNA, 6 bp, Unknown
  misc_feature (1)..( 6): Matrix.002 file - promoters60/2106682
cctctg

SEQ ID NO: 54238 - DNA, 7 bp, Unknown
  misc_feature (1)..( 7): Matrix.002 file - promoters60/2106682
gtgacat

SEQ ID NO: 54239 - DNA, 7 bp, Unknown
  misc_feature (1)..( 7): Matrix.002 file - promoters60/2106682
taacaat

SEQ ID NO: 54240 - DNA, 6 bp, Unknown
  misc_feature (1)..( 6): Matrix.002 file - promoters60/2106682
tgtttc

SEQ ID NO: 54241 - DNA, 6 bp, Unknown
  misc_feature (1)..( 6): Matrix.002 file - promoters60/2106682
ggtccc

SEQ ID NO: 54242 - DNA, 6 bp, Unknown
  misc_feature (1)..( 6): Matrix.002 file - promoters60/2106682
tattat

SEQ ID NO: 54243 - DNA, 7 bp, Unknown
  misc_feature (1)..( 7): Matrix.002 file - promoters60/2106682
tacatat

SEQ ID NO: 54244 - DNA, 6 bp, Unknown
  misc_feature (1)..( 6): Matrix.002 file - promoters60/2106682
attctt

SEQ ID NO: 54245 - DNA, 10 bp, Unknown
  misc_feature (1)..( 10): Matrix.002 file - promoters60/2106682
taataaaaat

SEQ ID NO: 54246 - DNA, 8 bp, Unknown
  misc_feature (1)..( 8): Matrix.002 file - promoters60/2106682
caaaacta

SEQ ID NO: 54247 - DNA, 6 bp, Unknown
  misc_feature (1)..( 6): Matrix.002 file - promoters60/2106682
aacttc

SEQ ID NO: 54248 - DNA, 7 bp, Unknown
  misc_feature (1)..( 7): Matrix.002 file - promoters60/2106682
tcaaggt

SEQ ID NO: 54249 - DNA, 7 bp, Unknown
  misc_feature (1)..( 7): Matrix.002 file - promoters60/2106682
attatga

SEQ ID NO: 54250 - DNA, 9 bp, Unknown
  misc_feature (1)..( 9): Matrix.002 file - promoters60/2107016
ctttttatt

SEQ ID NO: 54251 - DNA, 9 bp, Unknown
  misc_feature (1)..( 9): Matrix.002 file - promoters60/2107016
gtcaaaaaa

SEQ ID NO: 54252 - DNA, 10 bp, Unknown
  misc_feature (1)..( 10): Matrix.002 file - promoters60/2107065
agaaaacaaa

SEQ ID NO: 54253 - DNA, 14 bp, Unknown
  misc_feature (1)..( 14): Matrix.002 file - promoters60/2107065
taattggggttaaa

SEQ ID NO: 54254 - DNA, 8 bp, Unknown
  misc_feature (1)..( 8): Matrix.002 file - promoters60/2107065
ccattata

SEQ ID NO: 54255 - DNA, 9 bp, Unknown
  misc_feature (1)..( 9): Matrix.002 file - promoters60/2107065
caaggaaag

SEQ ID NO: 54256 - DNA, 7 bp, Unknown
  misc_feature (1)..( 7): Matrix.002 file - promoters60/2107065
aaacaaa

SEQ ID NO: 54257 - DNA, 7 bp, Unknown
  misc_feature (1)..( 7): Matrix.002 file - promoters60/2107069
aagctgt

SEQ ID NO: 54258 - DNA, 7 bp, Unknown
  misc_feature (1)..( 7): Matrix.002 file - promoters60/2107069
gctaatg

SEQ ID NO: 54259 - DNA, 6 bp, Unknown
  misc_feature (1)..( 6): Matrix.002 file - promoters60/2107069
ttgatt

SEQ ID NO: 54260 - DNA, 6 bp, Unknown
  misc_feature (1)..( 6): Matrix.002 file - promoters60/2107069
gattct

SEQ ID NO: 54261 - DNA, 7 bp, Unknown
  misc_feature (1)..( 7): Matrix.002 file - promoters60/2107069
gaaatcc

SEQ ID NO: 54262 - DNA, 7 bp, Unknown
  misc_feature (1)..( 7): Matrix.002 file - promoters60/2107069
atgcaaa

SEQ ID NO: 54263 - DNA, 6 bp, Unknown
  misc_feature (1)..( 6): Matrix.002 file - promoters60/2107069
ccattg

SEQ ID NO: 54264 - DNA, 7 bp, Unknown
  misc_feature (1)..( 7): Matrix.002 file - promoters60/2107069
cttcgaa

SEQ ID NO: 54265 - DNA, 6 bp, Unknown
  misc_feature (1)..( 6): Matrix.002 file - promoters60/2107069
gttgga

SEQ ID NO: 54266 - DNA, 8 bp, Unknown
  misc_feature (1)..( 8): Matrix.002 file - promoters60/2107069
tgaaatct

SEQ ID NO: 54267 - DNA, 6 bp, Unknown
  misc_feature (1)..( 6): Matrix.002 file - promoters60/2107069
tacaac

SEQ ID NO: 54268 - DNA, 7 bp, Unknown
  misc_feature (1)..( 7): Matrix.002 file - promoters60/2107069
attcgac

SEQ ID NO: 54269 - DNA, 6 bp, Unknown
  misc_feature (1)..( 6): Matrix.002 file - promoters60/2107069
caaaac

SEQ ID NO: 54270 - DNA, 6 bp, Unknown
  misc_feature (1)..( 6): Matrix.002 file - promoters60/2107069
taccca

SEQ ID NO: 54271 - DNA, 6 bp, Unknown
  misc_feature (1)..( 6): Matrix.002 file - promoters60/2107069
ggaaaa

SEQ ID NO: 54272 - DNA, 6 bp, Unknown
  misc_feature (1)..( 6): Matrix.002 file - promoters60/2107069
gatggt

SEQ ID NO: 54273 - DNA, 7 bp, Unknown
  misc_feature (1)..( 7): Matrix.002 file - promoters60/2107069
tctcttg

SEQ ID NO: 54274 - DNA, 7 bp, Unknown
  misc_feature (1)..( 7): Matrix.002 file - promoters60/2107069
tttactc

SEQ ID NO: 54275 - DNA, 7 bp, Unknown
  misc_feature (1)..( 7): Matrix.002 file - promoters60/2107069
ctgaaac

SEQ ID NO: 54276 - DNA, 8 bp, Unknown
  misc_feature (1)..( 8): Matrix.002 file - promoters60/2113269
tttggttt

SEQ ID NO: 54277 - DNA, 10 bp, Unknown
  misc_feature (1)..( 10): Matrix.002 file - promoters60/2113269
aaacttttta

SEQ ID NO: 54278 - DNA, 8 bp, Unknown
  misc_feature (1)..( 8): Matrix.002 file - promoters60/2113269
ttataaaa

SEQ ID NO: 54279 - DNA, 8 bp, Unknown
  misc_feature (1)..( 8): Matrix.002 file - promoters60/2113269
gtaatttt

SEQ ID NO: 54280 - DNA, 14 bp, Unknown
  misc_feature (1)..( 14): Matrix.002 file - promoters60/2113269
tacctatctttata

SEQ ID NO: 54281 - DNA, 8 bp, Unknown
  misc_feature (1)..( 8): Matrix.002 file - promoters60/2113269
atataaat

SEQ ID NO: 54282 - DNA, 8 bp, Unknown
  misc_feature (1)..( 8): Matrix.002 file - promoters60/2113269
tgcataag

SEQ ID NO: 54283 - DNA, 10 bp, Unknown
  misc_feature (1)..( 10): Matrix.002 file - promoters60/2113269
tgaatctatg

SEQ ID NO: 54284 - DNA, 9 bp, Unknown
  misc_feature (1)..( 9): Matrix.002 file - promoters60/2113269
tatttaaaa

SEQ ID NO: 54285 - DNA, 12 bp, Unknown
  misc_feature (1)..( 12): Matrix.002 file - promoters60/2113269
accttttgatat

SEQ ID NO: 54286 - DNA, 10 bp, Unknown
  misc_feature (1)..( 10): Matrix.002 file - promoters60/2113269
attttcaaca

SEQ ID NO: 54287 - DNA, 8 bp, Unknown
  misc_feature (1)..( 8): Matrix.002 file - promoters60/2113269
ttttaaaa

SEQ ID NO: 54288 - DNA, 9 bp, Unknown
  misc_feature (1)..( 9): Matrix.002 file - promoters60/2113299
tgttgcata

SEQ ID NO: 54289 - DNA, 6 bp, Unknown
  misc_feature (1)..( 6): Matrix.002 file - promoters60/2113299
tatttc

SEQ ID NO: 54290 - DNA, 7 bp, Unknown
  misc_feature (1)..( 7): Matrix.002 file - promoters60/2113299
cggcggt

SEQ ID NO: 54291 - DNA, 8 bp, Unknown
  misc_feature (1)..( 8): Matrix.002 file - promoters60/2113299
taaaatca

SEQ ID NO: 54292 - DNA, 8 bp, Unknown
  misc_feature (1)..( 8): Matrix.002 file - promoters60/2113299
gtggttaa

SEQ ID NO: 54293 - DNA, 8 bp, Unknown
  misc_feature (1)..( 8): Matrix.002 file - promoters60/2113299
ataatttc

SEQ ID NO: 54294 - DNA, 7 bp, Unknown
  misc_feature (1)..( 7): Matrix.002 file - promoters60/2113299
aacactt

SEQ ID NO: 54295 - DNA, 7 bp, Unknown
  misc_feature (1)..( 7): Matrix.002 file - promoters60/2113299
tataaat

SEQ ID NO: 54296 - DNA, 9 bp, Unknown
  misc_feature (1)..( 9): Matrix.002 file - promoters60/2113299
caaaaataa

SEQ ID NO: 54297 - DNA, 8 bp, Unknown
  misc_feature (1)..( 8): Matrix.002 file - promoters60/2113299
aacaataa

SEQ ID NO: 54298 - DNA, 6 bp, Unknown
  misc_feature (1)..( 6): Matrix.002 file - promoters60/2113299
gtaaaa

SEQ ID NO: 54299 - DNA, 8 bp, Unknown
  misc_feature (1)..( 8): Matrix.002 file - promoters60/2113299
tttccatt

SEQ ID NO: 54300 - DNA, 7 bp, Unknown
  misc_feature (1)..( 7): Matrix.002 file - promoters60/2113299
tttattg

SEQ ID NO: 54301 - DNA, 7 bp, Unknown
  misc_feature (1)..( 7): Matrix.002 file - promoters60/2113315
atgcaat

SEQ ID NO: 54302 - DNA, 8 bp, Unknown
  misc_feature (1)..( 8): Matrix.002 file - promoters60/2113315
gtggaaat

SEQ ID NO: 54303 - DNA, 6 bp, Unknown
  misc_feature (1)..( 6): Matrix.002 file - promoters60/2113315
acatat

SEQ ID NO: 54304 - DNA, 6 bp, Unknown
  misc_feature (1)..( 6): Matrix.002 file - promoters60/2113315
atatgg

SEQ ID NO: 54305 - DNA, 6 bp, Unknown
  misc_feature (1)..( 6): Matrix.002 file - promoters60/2113315
ataata

SEQ ID NO: 54306 - DNA, 8 bp, Unknown
  misc_feature (1)..( 8): Matrix.002 file - promoters60/2113315
ttggcaaa

SEQ ID NO: 54307 - DNA, 7 bp, Unknown
  misc_feature (1)..( 7): Matrix.002 file - promoters60/2113315
ttacaaa

SEQ ID NO: 54308 - DNA, 6 bp, Unknown
  misc_feature (1)..( 6): Matrix.002 file - promoters60/2113315
ttaatt

SEQ ID NO: 54309 - DNA, 7 bp, Unknown
  misc_feature (1)..( 7): Matrix.002 file - promoters60/2113315
ataaaaa

SEQ ID NO: 54310 - DNA, 6 bp, Unknown
  misc_feature (1)..( 6): Matrix.002 file - promoters60/2113315
taaaat

SEQ ID NO: 54311 - DNA, 6 bp, Unknown
  misc_feature (1)..( 6): Matrix.002 file - promoters60/2113315
ctaaaa

SEQ ID NO: 54312 - DNA, 8 bp, Unknown
  misc_feature (1)..( 8): Matrix.002 file - promoters60/2113315
aaaatctc

SEQ ID NO: 54313 - DNA, 6 bp, Unknown
  misc_feature (1)..( 6): Matrix.002 file - promoters60/2113315
ttagtg

SEQ ID NO: 54314 - DNA, 7 bp, Unknown
  misc_feature (1)..( 7): Matrix.002 file - promoters60/2113315
taagaag

SEQ ID NO: 54315 - DNA, 6 bp, Unknown
  misc_feature (1)..( 6): Matrix.002 file - promoters60/2113315
aagtaa

SEQ ID NO: 54316 - DNA, 6 bp, Unknown
  misc_feature (1)..( 6): Matrix.002 file - promoters60/2113315
ttaaaa

SEQ ID NO: 54317 - DNA, 6 bp, Unknown
  misc_feature (1)..( 6): Matrix.002 file - promoters60/2113315
aactct

SEQ ID NO: 54318 - DNA, 7 bp, Unknown
  misc_feature (1)..( 7): Matrix.002 file - promoters60/2113315
attattt

SEQ ID NO: 54319 - DNA, 8 bp, Unknown
  misc_feature (1)..( 8): Matrix.002 file - promoters60/2113315
aataataa

SEQ ID NO: 54320 - DNA, 7 bp, Unknown
  misc_feature (1)..( 7): Matrix.002 file - promoters60/2113315
ttcctta

SEQ ID NO: 54321 - DNA, 7 bp, Unknown
  misc_feature (1)..( 7): Matrix.002 file - promoters60/2113315
actctat

SEQ ID NO: 54322 - DNA, 8 bp, Unknown
  misc_feature (1)..( 8): Matrix.002 file - promoters60/2113323
aaacaacc

SEQ ID NO: 54323 - DNA, 9 bp, Unknown
  misc_feature (1)..( 9): Matrix.002 file - promoters60/2113323
tgtcaagta

SEQ ID NO: 54324 - DNA, 9 bp, Unknown
  misc_feature (1)..( 9): Matrix.002 file - promoters60/2113323
caattattt

SEQ ID NO: 54325 - DNA, 8 bp, Unknown
  misc_feature (1)..( 8): Matrix.002 file - promoters60/2113323
gattgttt

SEQ ID NO: 54326 - DNA, 14 bp, Unknown
  misc_feature (1)..( 14): Matrix.002 file - promoters60/2113323
ttttctatagatta

SEQ ID NO: 54327 - DNA, 7 bp, Unknown
  misc_feature (1)..( 7): Matrix.002 file - promoters60/2113454
cttctta

SEQ ID NO: 54328 - DNA, 7 bp, Unknown
  misc_feature (1)..( 7): Matrix.002 file - promoters60/2113454
tctaatc

SEQ ID NO: 54329 - DNA, 6 bp, Unknown
  misc_feature (1)..( 6): Matrix.002 file - promoters60/2113454
aaataa

SEQ ID NO: 54330 - DNA, 6 bp, Unknown
  misc_feature (1)..( 6): Matrix.002 file - promoters60/2113454
aacaaa

SEQ ID NO: 54331 - DNA, 8 bp, Unknown
  misc_feature (1)..( 8): Matrix.002 file - promoters60/2113454
aaatgtat

SEQ ID NO: 54332 - DNA, 6 bp, Unknown
  misc_feature (1)..( 6): Matrix.002 file - promoters60/2113454
ttttgt

SEQ ID NO: 54333 - DNA, 7 bp, Unknown
  misc_feature (1)..( 7): Matrix.002 file - promoters60/2113454
tatacaa

SEQ ID NO: 54334 - DNA, 8 bp, Unknown
  misc_feature (1)..( 8): Matrix.002 file - promoters60/2113454
aaatatct

SEQ ID NO: 54335 - DNA, 6 bp, Unknown
  misc_feature (1)..( 6): Matrix.002 file - promoters60/2113454
tagtaa

SEQ ID NO: 54336 - DNA, 8 bp, Unknown
  misc_feature (1)..( 8): Matrix.002 file - promoters60/2113454
ttgaaatg

SEQ ID NO: 54337 - DNA, 8 bp, Unknown
  misc_feature (1)..( 8): Matrix.002 file - promoters60/2113454
tgattatt

SEQ ID NO: 54338 - DNA, 7 bp, Unknown
  misc_feature (1)..( 7): Matrix.002 file - promoters60/2113454
aaataaa

SEQ ID NO: 54339 - DNA, 7 bp, Unknown
  misc_feature (1)..( 7): Matrix.002 file - promoters60/2113454
atcatgt

SEQ ID NO: 54340 - DNA, 11 bp, Unknown
  misc_feature (1)..( 11): Matrix.002 file - promoters60/2113454
ttcctcaaaca

SEQ ID NO: 54341 - DNA, 7 bp, Unknown
  misc_feature (1)..( 7): Matrix.002 file - promoters60/2113454
gttacaa

SEQ ID NO: 54342 - DNA, 7 bp, Unknown
  misc_feature (1)..( 7): Matrix.002 file - promoters60/2113454
tccatca

SEQ ID NO: 54343 - DNA, 6 bp, Unknown
  misc_feature (1)..( 6): Matrix.002 file - promoters60/2113454
attcat

SEQ ID NO: 54344 - DNA, 7 bp, Unknown
  misc_feature (1)..( 7): Matrix.002 file - promoters60/2113454
acctaat

SEQ ID NO: 54345 - DNA, 8 bp, Unknown
  misc_feature (1)..( 8): Matrix.002 file - promoters60/2113454
taagttat

SEQ ID NO: 54346 - DNA, 8 bp, Unknown
  misc_feature (1)..( 8): Matrix.002 file - promoters60/2113454
ttctagtt

SEQ ID NO: 54347 - DNA, 8 bp, Unknown
  misc_feature (1)..( 8): Matrix.002 file - promoters60/2113454
tttaccaa

SEQ ID NO: 54348 - DNA, 6 bp, Unknown
  misc_feature (1)..( 6): Matrix.002 file - promoters60/2113454
caactt

SEQ ID NO: 54349 - DNA, 7 bp, Unknown
  misc_feature (1)..( 7): Matrix.002 file - promoters60/2113454
gtcaaaa

SEQ ID NO: 54350 - DNA, 7 bp, Unknown
  misc_feature (1)..( 7): Matrix.002 file - promoters60/2113454
aaattga

SEQ ID NO: 54351 - DNA, 7 bp, Unknown
  misc_feature (1)..( 7): Matrix.002 file - promoters60/2113454
catcagg

SEQ ID NO: 54352 - DNA, 10 bp, Unknown
  misc_feature (1)..( 10): Matrix.002 file - promoters60/2113462
atcttacata

SEQ ID NO: 54353 - DNA, 16 bp, Unknown
  misc_feature (1)..( 16): Matrix.002 file - promoters60/2113462
aaattaaaatataaaa

SEQ ID NO: 54354 - DNA, 8 bp, Unknown
  misc_feature (1)..( 8): Matrix.002 file - promoters60/2113462
cttatttc

SEQ ID NO: 54355 - DNA, 8 bp, Unknown
  misc_feature (1)..( 8): Matrix.002 file - promoters60/2113462
agatgaaa

SEQ ID NO: 54356 - DNA, 9 bp, Unknown
  misc_feature (1)..( 9): Matrix.002 file - promoters60/2113462
aacttaatc

SEQ ID NO: 54357 - DNA, 9 bp, Unknown
  misc_feature (1)..( 9): Matrix.002 file - promoters60/2113462
attgataat

SEQ ID NO: 54358 - DNA, 9 bp, Unknown
  misc_feature (1)..( 9): Matrix.002 file - promoters60/2113462
aaaatgaac

SEQ ID NO: 54359 - DNA, 7 bp, Unknown
  misc_feature (1)..( 7): Matrix.002 file - promoters60/2113462
aaaatta

SEQ ID NO: 54360 - DNA, 8 bp, Unknown
  misc_feature (1)..( 8): Matrix.002 file - promoters60/2113462
aaaattaa

SEQ ID NO: 54361 - DNA, 10 bp, Unknown
  misc_feature (1)..( 10): Matrix.002 file - promoters60/2113462
atctcataaa

SEQ ID NO: 54362 - DNA, 11 bp, Unknown
  misc_feature (1)..( 11): Matrix.002 file - promoters60/2113466
catataatttg

SEQ ID NO: 54363 - DNA, 6 bp, Unknown
  misc_feature (1)..( 6): Matrix.002 file - promoters60/2113466
attcat

SEQ ID NO: 54364 - DNA, 7 bp, Unknown
  misc_feature (1)..( 7): Matrix.002 file - promoters60/2113466
ttacaat

SEQ ID NO: 54365 - DNA, 9 bp, Unknown
  misc_feature (1)..( 9): Matrix.002 file - promoters60/2113466
ataatatat

SEQ ID NO: 54366 - DNA, 9 bp, Unknown
  misc_feature (1)..( 9): Matrix.002 file - promoters60/2113466
atttatgtt

SEQ ID NO: 54367 - DNA, 6 bp, Unknown
  misc_feature (1)..( 6): Matrix.002 file - promoters60/2113466
taagtt

SEQ ID NO: 54368 - DNA, 12 bp, Unknown
  misc_feature (1)..( 12): Matrix.002 file - promoters60/2113466
cttgtaaccaca

SEQ ID NO: 54369 - DNA, 8 bp, Unknown
  misc_feature (1)..( 8): Matrix.002 file - promoters60/2113466
ttaatatg

SEQ ID NO: 54370 - DNA, 7 bp, Unknown
  misc_feature (1)..( 7): Matrix.002 file - promoters60/2113466
tatatgt

SEQ ID NO: 54371 - DNA, 9 bp, Unknown
  misc_feature (1)..( 9): Matrix.002 file - promoters60/2113466
ctaaaaaac

SEQ ID NO: 54372 - DNA, 6 bp, Unknown
  misc_feature (1)..( 6): Matrix.002 file - promoters60/2113466
aaaaat

SEQ ID NO: 54373 - DNA, 7 bp, Unknown
  misc_feature (1)..( 7): Matrix.002 file - promoters60/2113466
ttttgct

SEQ ID NO: 54374 - DNA, 7 bp, Unknown
  misc_feature (1)..( 7): Matrix.002 file - promoters60/2113466
aagtttt

SEQ ID NO: 54375 - DNA, 9 bp, Unknown
  misc_feature (1)..( 9): Matrix.002 file - promoters60/2113466
ataacaata

SEQ ID NO: 54376 - DNA, 6 bp, Unknown
  misc_feature (1)..( 6): Matrix.002 file - promoters60/2113466
tttttg

SEQ ID NO: 54377 - DNA, 7 bp, Unknown
  misc_feature (1)..( 7): Matrix.002 file - promoters60/2113466
ttgattg

SEQ ID NO: 54378 - DNA, 9 bp, Unknown
  misc_feature (1)..( 9): Matrix.002 file - promoters60/2113466
acataaacc

SEQ ID NO: 54379 - DNA, 6 bp, Unknown
  misc_feature (1)..( 6): Matrix.002 file - promoters60/2113466
aacctt

SEQ ID NO: 54380 - DNA, 6 bp, Unknown
  misc_feature (1)..( 6): Matrix.002 file - promoters60/2113466
tttgta

SEQ ID NO: 54381 - DNA, 7 bp, Unknown
  misc_feature (1)..( 7): Matrix.002 file - promoters60/2113466
caaaata

SEQ ID NO: 54382 - DNA, 6 bp, Unknown
  misc_feature (1)..( 6): Matrix.002 file - promoters60/2113466
atatac

SEQ ID NO: 54383 - DNA, 10 bp, Unknown
  misc_feature (1)..( 10): Matrix.002 file - promoters60/2113466
atatatgcat

SEQ ID NO: 54384 - DNA, 6 bp, Unknown
  misc_feature (1)..( 6): Matrix.002 file - promoters60/2113466
tatttt

SEQ ID NO: 54385 - DNA, 7 bp, Unknown
  misc_feature (1)..( 7): Matrix.002 file - promoters60/2113466
tttgttt

SEQ ID NO: 54386 - DNA, 7 bp, Unknown
  misc_feature (1)..( 7): Matrix.002 file - promoters60/2113466
tttaatt

SEQ ID NO: 54387 - DNA, 10 bp, Unknown
  misc_feature (1)..( 10): Matrix.002 file - promoters60/2113466
aattaaacct

SEQ ID NO: 54388 - DNA, 6 bp, Unknown
  misc_feature (1)..( 6): Matrix.002 file - promoters60/2113466
aaaaca

SEQ ID NO: 54389 - DNA, 7 bp, Unknown
  misc_feature (1)..( 7): Matrix.002 file - promoters60/2113466
tttcaat

SEQ ID NO: 54390 - DNA, 14 bp, Unknown
  misc_feature (1)..( 14): Matrix.002 file - promoters60/2113481
caaatgatacattt

SEQ ID NO: 54391 - DNA, 11 bp, Unknown
  misc_feature (1)..( 11): Matrix.002 file - promoters60/2113481
ttaaataactt

SEQ ID NO: 54392 - DNA, 8 bp, Unknown
  misc_feature (1)..( 8): Matrix.002 file - promoters60/2113481
tataaata

SEQ ID NO: 54393 - DNA, 8 bp, Unknown
  misc_feature (1)..( 8): Matrix.002 file - promoters60/2113481
aagaaaat

SEQ ID NO: 54394 - DNA, 9 bp, Unknown
  misc_feature (1)..( 9): Matrix.002 file - promoters60/2113481
agaatctaa

SEQ ID NO: 54395 - DNA, 12 bp, Unknown
  misc_feature (1)..( 12): Matrix.002 file - promoters60/2113481
attagttaatat

SEQ ID NO: 54396 - DNA, 5 bp, Unknown
  misc_feature (1)..( 5): Matrix.002 file - promoters60/2113481
aacat

SEQ ID NO: 54397 - DNA, 8 bp, Unknown
  misc_feature (1)..( 8): Matrix.002 file - promoters60/2113481
atataata

SEQ ID NO: 54398 - DNA, 15 bp, Unknown
  misc_feature (1)..( 15): Matrix.002 file - promoters60/2113502
aaaaagggccaaaat

SEQ ID NO: 54399 - DNA, 6 bp, Unknown
  misc_feature (1)..( 6): Matrix.002 file - promoters60/2113592
taaaca

SEQ ID NO: 54400 - DNA, 10 bp, Unknown
  misc_feature (1)..( 10): Matrix.002 file - promoters60/2113592
tttttagatc

SEQ ID NO: 54401 - DNA, 9 bp, Unknown
  misc_feature (1)..( 9): Matrix.002 file - promoters60/2113592
aaatctttt

SEQ ID NO: 54402 - DNA, 7 bp, Unknown
  misc_feature (1)..( 7): Matrix.002 file - promoters60/2113592
gatatat

SEQ ID NO: 54403 - DNA, 6 bp, Unknown
  misc_feature (1)..( 6): Matrix.002 file - promoters60/2113592
ttttca

SEQ ID NO: 54404 - DNA, 7 bp, Unknown
  misc_feature (1)..( 7): Matrix.002 file - promoters60/2113592
cgaacaa

SEQ ID NO: 54405 - DNA, 7 bp, Unknown
  misc_feature (1)..( 7): Matrix.002 file - promoters60/2113592
atatcta

SEQ ID NO: 54406 - DNA, 9 bp, Unknown
  misc_feature (1)..( 9): Matrix.002 file - promoters60/2113592
ttactgttt

SEQ ID NO: 54407 - DNA, 10 bp, Unknown
  misc_feature (1)..( 10): Matrix.002 file - promoters60/2113592
attacttttt

SEQ ID NO: 54408 - DNA, 7 bp, Unknown
  misc_feature (1)..( 7): Matrix.002 file - promoters60/2113592
acaaaag

SEQ ID NO: 54409 - DNA, 7 bp, Unknown
  misc_feature (1)..( 7): Matrix.002 file - promoters60/2113592
ttgagtt

SEQ ID NO: 54410 - DNA, 10 bp, Unknown
  misc_feature (1)..( 10): Matrix.002 file - promoters60/2113592
actatatata

SEQ ID NO: 54411 - DNA, 8 bp, Unknown
  misc_feature (1)..( 8): Matrix.002 file - promoters60/2113592
acatagga

SEQ ID NO: 54412 - DNA, 6 bp, Unknown
  misc_feature (1)..( 6): Matrix.002 file - promoters60/2113592
tcaaat

SEQ ID NO: 54413 - DNA, 6 bp, Unknown
  misc_feature (1)..( 6): Matrix.002 file - promoters60/2113592
aaatta

SEQ ID NO: 54414 - DNA, 8 bp, Unknown
  misc_feature (1)..( 8): Matrix.002 file - promoters60/2113592
attactat

SEQ ID NO: 54415 - DNA, 6 bp, Unknown
  misc_feature (1)..( 6): Matrix.002 file - promoters60/2113592
atcgaa

SEQ ID NO: 54416 - DNA, 8 bp, Unknown
  misc_feature (1)..( 8): Matrix.002 file - promoters60/2113592
gaagtcac

SEQ ID NO: 54417 - DNA, 7 bp, Unknown
  misc_feature (1)..( 7): Matrix.002 file - promoters60/2113592
aaataat

SEQ ID NO: 54418 - DNA, 8 bp, Unknown
  misc_feature (1)..( 8): Matrix.002 file - promoters60/2113620
gaaggaag

SEQ ID NO: 54419 - DNA, 7 bp, Unknown
  misc_feature (1)..( 7): Matrix.002 file - promoters60/2113620
caaagaa

SEQ ID NO: 54420 - DNA, 7 bp, Unknown
  misc_feature (1)..( 7): Matrix.002 file - promoters60/2113620
atcacag

SEQ ID NO: 54421 - DNA, 6 bp, Unknown
  misc_feature (1)..( 6): Matrix.002 file - promoters60/2113620
tagtga

SEQ ID NO: 54422 - DNA, 8 bp, Unknown
  misc_feature (1)..( 8): Matrix.002 file - promoters60/2113620
tgtgactt

SEQ ID NO: 54423 - DNA, 6 bp, Unknown
  misc_feature (1)..( 6): Matrix.002 file - promoters60/2113620
ttgcaa

SEQ ID NO: 54424 - DNA, 6 bp, Unknown
  misc_feature (1)..( 6): Matrix.002 file - promoters60/2113620
attgtg

SEQ ID NO: 54425 - DNA, 7 bp, Unknown
  misc_feature (1)..( 7): Matrix.002 file - promoters60/2113620
tgcatgt

SEQ ID NO: 54426 - DNA, 8 bp, Unknown
  misc_feature (1)..( 8): Matrix.002 file - promoters60/2113620
caagttta

SEQ ID NO: 54427 - DNA, 9 bp, Unknown
  misc_feature (1)..( 9): Matrix.002 file - promoters60/2113620
accagccaa

SEQ ID NO: 54428 - DNA, 7 bp, Unknown
  misc_feature (1)..( 7): Matrix.002 file - promoters60/2113620
tgtattg

SEQ ID NO: 54429 - DNA, 6 bp, Unknown
  misc_feature (1)..( 6): Matrix.002 file - promoters60/2113620
atttgt

SEQ ID NO: 54430 - DNA, 7 bp, Unknown
  misc_feature (1)..( 7): Matrix.002 file - promoters60/2113620
tatgact

SEQ ID NO: 54431 - DNA, 8 bp, Unknown
  misc_feature (1)..( 8): Matrix.002 file - promoters60/2113620
ggtgggat

SEQ ID NO: 54432 - DNA, 6 bp, Unknown
  misc_feature (1)..( 6): Matrix.002 file - promoters60/2113620
tggaaa

SEQ ID NO: 54433 - DNA, 8 bp, Unknown
  misc_feature (1)..( 8): Matrix.002 file - promoters60/2113620
caacacca

SEQ ID NO: 54434 - DNA, 7 bp, Unknown
  misc_feature (1)..( 7): Matrix.002 file - promoters60/2113620
ttaattg

SEQ ID NO: 54435 - DNA, 8 bp, Unknown
  misc_feature (1)..( 8): Matrix.002 file - promoters60/2113620
acttcata

SEQ ID NO: 54436 - DNA, 7 bp, Unknown
  misc_feature (1)..( 7): Matrix.002 file - promoters60/2113620
catatcc

SEQ ID NO: 54437 - DNA, 11 bp, Unknown
  misc_feature (1)..( 11): Matrix.002 file - promoters60/2113624
tgtatttaaac

SEQ ID NO: 54438 - DNA, 8 bp, Unknown
  misc_feature (1)..( 8): Matrix.002 file - promoters60/2113624
tctttaat

SEQ ID NO: 54439 - DNA, 9 bp, Unknown
  misc_feature (1)..( 9): Matrix.002 file - promoters60/2113624
ttaaaaaaa

SEQ ID NO: 54440 - DNA, 9 bp, Unknown
  misc_feature (1)..( 9): Matrix.002 file - promoters60/2113624
gtataaaac

SEQ ID NO: 54441 - DNA, 7 bp, Unknown
  misc_feature (1)..( 7): Matrix.002 file - promoters60/2113624
ttacaat

SEQ ID NO: 54442 - DNA, 9 bp, Unknown
  misc_feature (1)..( 9): Matrix.002 file - promoters60/2113624
tcatttttt

SEQ ID NO: 54443 - DNA, 9 bp, Unknown
  misc_feature (1)..( 9): Matrix.002 file - promoters60/2113631
gcttcgttt

SEQ ID NO: 54444 - DNA, 6 bp, Unknown
  misc_feature (1)..( 6): Matrix.002 file - promoters60/2113631
gacatt

SEQ ID NO: 54445 - DNA, 6 bp, Unknown
  misc_feature (1)..( 6): Matrix.002 file - promoters60/2113631
ttctaa

SEQ ID NO: 54446 - DNA, 9 bp, Unknown
  misc_feature (1)..( 9): Matrix.002 file - promoters60/2113631
taacgtcaa

SEQ ID NO: 54447 - DNA, 7 bp, Unknown
  misc_feature (1)..( 7): Matrix.002 file - promoters60/2113631
acaaaat

SEQ ID NO: 54448 - DNA, 7 bp, Unknown
  misc_feature (1)..( 7): Matrix.002 file - promoters60/2113631
aatctcc

SEQ ID NO: 54449 - DNA, 8 bp, Unknown
  misc_feature (1)..( 8): Matrix.002 file - promoters60/2113631
aaaacctt

SEQ ID NO: 54450 - DNA, 8 bp, Unknown
  misc_feature (1)..( 8): Matrix.002 file - promoters60/2113631
atggataa

SEQ ID NO: 54451 - DNA, 9 bp, Unknown
  misc_feature (1)..( 9): Matrix.002 file - promoters60/2113631
caatgttgt

SEQ ID NO: 54452 - DNA, 6 bp, Unknown
  misc_feature (1)..( 6): Matrix.002 file - promoters60/2113631
tccttg

SEQ ID NO: 54453 - DNA, 6 bp, Unknown
  misc_feature (1)..( 6): Matrix.002 file - promoters60/2113631
gttatt

SEQ ID NO: 54454 - DNA, 7 bp, Unknown
  misc_feature (1)..( 7): Matrix.002 file - promoters60/2113631
aaaccaa

SEQ ID NO: 54455 - DNA, 6 bp, Unknown
  misc_feature (1)..( 6): Matrix.002 file - promoters60/2113631
agtaaa

SEQ ID NO: 54456 - DNA, 7 bp, Unknown
  misc_feature (1)..( 7): Matrix.002 file - promoters60/2113631
aatcggg

SEQ ID NO: 54457 - DNA, 8 bp, Unknown
  misc_feature (1)..( 8): Matrix.002 file - promoters60/2113631
gaaacaaa

SEQ ID NO: 54458 - DNA, 10 bp, Unknown
  misc_feature (1)..( 10): Matrix.002 file - promoters60/2113631
ggaaaagaaa

SEQ ID NO: 54459 - DNA, 7 bp, Unknown
  misc_feature (1)..( 7): Matrix.002 file - promoters60/2113631
cccacta

SEQ ID NO: 54460 - DNA, 9 bp, Unknown
  misc_feature (1)..( 9): Matrix.002 file - promoters60/2113631
aaagaaaag

SEQ ID NO: 54461 - DNA, 7 bp, Unknown
  misc_feature (1)..( 7): Matrix.002 file - promoters60/2113631
gtatata

SEQ ID NO: 54462 - DNA, 10 bp, Unknown
  misc_feature (1)..( 10): Matrix.002 file - promoters60/2113640
ctaaactaaa

SEQ ID NO: 54463 - DNA, 9 bp, Unknown
  misc_feature (1)..( 9): Matrix.002 file - promoters60/2113640
tagatttta

SEQ ID NO: 54464 - DNA, 8 bp, Unknown
  misc_feature (1)..( 8): Matrix.002 file - promoters60/2113640
aaaattaa

SEQ ID NO: 54465 - DNA, 7 bp, Unknown
  misc_feature (1)..( 7): Matrix.002 file - promoters60/2113640
aatatat

SEQ ID NO: 54466 - DNA, 7 bp, Unknown
  misc_feature (1)..( 7): Matrix.002 file - promoters60/2113640
ataaaca

SEQ ID NO: 54467 - DNA, 9 bp, Unknown
  misc_feature (1)..( 9): Matrix.002 file - promoters60/2113640
aatcgaata

SEQ ID NO: 54468 - DNA, 8 bp, Unknown
  misc_feature (1)..( 8): Matrix.002 file - promoters60/2113640
atttgtta

SEQ ID NO: 54469 - DNA, 9 bp, Unknown
  misc_feature (1)..( 9): Matrix.002 file - promoters60/2113640
aaaattaca

SEQ ID NO: 54470 - DNA, 9 bp, Unknown
  misc_feature (1)..( 9): Matrix.002 file - promoters60/2113660
ccaagaaaa

SEQ ID NO: 54471 - DNA, 7 bp, Unknown
  misc_feature (1)..( 7): Matrix.002 file - promoters60/2113660
aaataaa

SEQ ID NO: 54472 - DNA, 6 bp, Unknown
  misc_feature (1)..( 6): Matrix.002 file - promoters60/2113660
ataata

SEQ ID NO: 54473 - DNA, 6 bp, Unknown
  misc_feature (1)..( 6): Matrix.002 file - promoters60/2113660
atttgc

SEQ ID NO: 54474 - DNA, 7 bp, Unknown
  misc_feature (1)..( 7): Matrix.002 file - promoters60/2113660
aaataaa

SEQ ID NO: 54475 - DNA, 6 bp, Unknown
  misc_feature (1)..( 6): Matrix.002 file - promoters60/2113660
caagta

SEQ ID NO: 54476 - DNA, 7 bp, Unknown
  misc_feature (1)..( 7): Matrix.002 file - promoters60/2113660
gaaagaa

SEQ ID NO: 54477 - DNA, 7 bp, Unknown
  misc_feature (1)..( 7): Matrix.002 file - promoters60/2113660
cacaaag

SEQ ID NO: 54478 - DNA, 6 bp, Unknown
  misc_feature (1)..( 6): Matrix.002 file - promoters60/2113660
acataa

SEQ ID NO: 54479 - DNA, 6 bp, Unknown
  misc_feature (1)..( 6): Matrix.002 file - promoters60/2113660
tcagta

SEQ ID NO: 54480 - DNA, 8 bp, Unknown
  misc_feature (1)..( 8): Matrix.002 file - promoters60/2113660
atagtaaa

SEQ ID NO: 54481 - DNA, 6 bp, Unknown
  misc_feature (1)..( 6): Matrix.002 file - promoters60/2113660
aaattg

SEQ ID NO: 54482 - DNA, 8 bp, Unknown
  misc_feature (1)..( 8): Matrix.002 file - promoters60/2113660
agaaattt

SEQ ID NO: 54483 - DNA, 7 bp, Unknown
  misc_feature (1)..( 7): Matrix.002 file - promoters60/2113660
tttgaat

SEQ ID NO: 54484 - DNA, 7 bp, Unknown
  misc_feature (1)..( 7): Matrix.002 file - promoters60/2113660
acttcaa

SEQ ID NO: 54485 - DNA, 7 bp, Unknown
  misc_feature (1)..( 7): Matrix.002 file - promoters60/2113660
aatcttg

SEQ ID NO: 54486 - DNA, 6 bp, Unknown
  misc_feature (1)..( 6): Matrix.002 file - promoters60/2113660
gacaaa

SEQ ID NO: 54487 - DNA, 7 bp, Unknown
  misc_feature (1)..( 7): Matrix.002 file - promoters60/2113660
attcttt

SEQ ID NO: 54488 - DNA, 6 bp, Unknown
  misc_feature (1)..( 6): Matrix.002 file - promoters60/2113660
taaatc

SEQ ID NO: 54489 - DNA, 8 bp, Unknown
  misc_feature (1)..( 8): Matrix.002 file - promoters60/2113675
gtagagaa

SEQ ID NO: 54490 - DNA, 8 bp, Unknown
  misc_feature (1)..( 8): Matrix.002 file - promoters60/2113675
gaagaaat

SEQ ID NO: 54491 - DNA, 10 bp, Unknown
  misc_feature (1)..( 10): Matrix.002 file - promoters60/2113675
actttataat

SEQ ID NO: 54492 - DNA, 9 bp, Unknown
  misc_feature (1)..( 9): Matrix.002 file - promoters60/2113734
aattaaaga

SEQ ID NO: 54493 - DNA, 11 bp, Unknown
  misc_feature (1)..( 11): Matrix.002 file - promoters60/2113734
aattaaaataa

SEQ ID NO: 54494 - DNA, 9 bp, Unknown
  misc_feature (1)..( 9): Matrix.002 file - promoters60/2113734
aaagtttaa

SEQ ID NO: 54495 - DNA, 11 bp, Unknown
  misc_feature (1)..( 11): Matrix.002 file - promoters60/2113738
acagaattgaa

SEQ ID NO: 54496 - DNA, 9 bp, Unknown
  misc_feature (1)..( 9): Matrix.002 file - promoters60/2113738
gaaatattt

SEQ ID NO: 54497 - DNA, 13 bp, Unknown
  misc_feature (1)..( 13): Matrix.002 file - promoters60/2113738
taattttttttct

SEQ ID NO: 54498 - DNA, 13 bp, Unknown
  misc_feature (1)..( 13): Matrix.002 file - promoters60/2113839
attcataaaaaaa

SEQ ID NO: 54499 - DNA, 8 bp, Unknown
  misc_feature (1)..( 8): Matrix.002 file - promoters60/2113839
gaaaaaat

SEQ ID NO: 54500 - DNA, 12 bp, Unknown
  misc_feature (1)..( 12): Matrix.002 file - promoters60/2113839
aactaatgcaat

SEQ ID NO: 54501 - DNA, 11 bp, Unknown
  misc_feature (1)..( 11): Matrix.002 file - promoters60/2113839
atttctaaaaa

SEQ ID NO: 54502 - DNA, 10 bp, Unknown
  misc_feature (1)..( 10): Matrix.002 file - promoters60/2113839
aaagaaaaca

SEQ ID NO: 54503 - DNA, 9 bp, Unknown
  misc_feature (1)..( 9): Matrix.002 file - promoters60/2113839
caaaacaaa

SEQ ID NO: 54504 - DNA, 7 bp, Unknown
  misc_feature (1)..( 7): Matrix.002 file - promoters60/2113839
aattttg

SEQ ID NO: 54505 - DNA, 9 bp, Unknown
  misc_feature (1)..( 9): Matrix.002 file - promoters60/2113839
ttttgttta

SEQ ID NO: 54506 - DNA, 8 bp, Unknown
  misc_feature (1)..( 8): Matrix.002 file - promoters60/2113839
ttgagatc

SEQ ID NO: 54507 - DNA, 9 bp, Unknown
  misc_feature (1)..( 9): Matrix.002 file - promoters60/2113839
gaaatgaag

SEQ ID NO: 54508 - DNA, 8 bp, Unknown
  misc_feature (1)..( 8): Matrix.002 file - promoters60/2113839
aaaaatat

SEQ ID NO: 54509 - DNA, 12 bp, Unknown
  misc_feature (1)..( 12): Matrix.002 file - promoters60/2113839
ttttattaaaat

SEQ ID NO: 54510 - DNA, 9 bp, Unknown
  misc_feature (1)..( 9): Matrix.002 file - promoters60/2113839
ctttcacaa

SEQ ID NO: 54511 - DNA, 10 bp, Unknown
  misc_feature (1)..( 10): Matrix.002 file - promoters60/2113839
aaaataaatt

SEQ ID NO: 54512 - DNA, 7 bp, Unknown
  misc_feature (1)..( 7): Matrix.002 file - promoters60/2113839
ctataaa

SEQ ID NO: 54513 - DNA, 10 bp, Unknown
  misc_feature (1)..( 10): Matrix.002 file - promoters60/2113842
ttaatctttt

SEQ ID NO: 54514 - DNA, 8 bp, Unknown
  misc_feature (1)..( 8): Matrix.002 file - promoters60/2113842
ttttatat

SEQ ID NO: 54515 - DNA, 7 bp, Unknown
  misc_feature (1)..( 7): Matrix.002 file - promoters60/2113842
tttagat

SEQ ID NO: 54516 - DNA, 6 bp, Unknown
  misc_feature (1)..( 6): Matrix.002 file - promoters60/2113842
ttatat

SEQ ID NO: 54517 - DNA, 10 bp, Unknown
  misc_feature (1)..( 10): Matrix.002 file - promoters60/2113842
cgtaaaaata

SEQ ID NO: 54518 - DNA, 7 bp, Unknown
  misc_feature (1)..( 7): Matrix.002 file - promoters60/2113842
aaaataa

SEQ ID NO: 54519 - DNA, 7 bp, Unknown
  misc_feature (1)..( 7): Matrix.002 file - promoters60/2113842
aacgtta

SEQ ID NO: 54520 - DNA, 6 bp, Unknown
  misc_feature (1)..( 6): Matrix.002 file - promoters60/2113842
gtatca

SEQ ID NO: 54521 - DNA, 8 bp, Unknown
  misc_feature (1)..( 8): Matrix.002 file - promoters60/2113842
ctcaatat

SEQ ID NO: 54522 - DNA, 7 bp, Unknown
  misc_feature (1)..( 7): Matrix.002 file - promoters60/2113842
aaaatca

SEQ ID NO: 54523 - DNA, 8 bp, Unknown
  misc_feature (1)..( 8): Matrix.002 file - promoters60/2113842
attcacat

SEQ ID NO: 54524 - DNA, 7 bp, Unknown
  misc_feature (1)..( 7): Matrix.002 file - promoters60/2113842
taaattt

SEQ ID NO: 54525 - DNA, 6 bp, Unknown
  misc_feature (1)..( 6): Matrix.002 file - promoters60/2113842
atattt

SEQ ID NO: 54526 - DNA, 7 bp, Unknown
  misc_feature (1)..( 7): Matrix.002 file - promoters60/2113842
tcaaaaa

SEQ ID NO: 54527 - DNA, 6 bp, Unknown
  misc_feature (1)..( 6): Matrix.002 file - promoters60/2113842
attgct

SEQ ID NO: 54528 - DNA, 6 bp, Unknown
  misc_feature (1)..( 6): Matrix.002 file - promoters60/2113842
atctaa

SEQ ID NO: 54529 - DNA, 7 bp, Unknown
  misc_feature (1)..( 7): Matrix.002 file - promoters60/2113842
aaccacc

SEQ ID NO: 54530 - DNA, 7 bp, Unknown
  misc_feature (1)..( 7): Matrix.002 file - promoters60/2113842
atggtca

SEQ ID NO: 54531 - DNA, 8 bp, Unknown
  misc_feature (1)..( 8): Matrix.002 file - promoters60/2113842
agaacaat

SEQ ID NO: 54532 - DNA, 7 bp, Unknown
  misc_feature (1)..( 7): Matrix.002 file - promoters60/2113842
tatataa

SEQ ID NO: 54533 - DNA, 6 bp, Unknown
  misc_feature (1)..( 6): Matrix.002 file - promoters60/2113842
atttta

SEQ ID NO: 54534 - DNA, 8 bp, Unknown
  misc_feature (1)..( 8): Matrix.002 file - promoters60/2113842
ttatttga

SEQ ID NO: 54535 - DNA, 6 bp, Unknown
  misc_feature (1)..( 6): Matrix.002 file - promoters60/2113842
ttttca

SEQ ID NO: 54536 - DNA, 7 bp, Unknown
  misc_feature (1)..( 7): Matrix.002 file - promoters60/2113842
aaggggt

SEQ ID NO: 54537 - DNA, 10 bp, Unknown
  misc_feature (1)..( 10): Matrix.002 file - promoters60/2113842
aagtaaactt

SEQ ID NO: 54538 - DNA, 6 bp, Unknown
  misc_feature (1)..( 6): Matrix.002 file - promoters60/2113842
tcacaa

SEQ ID NO: 54539 - DNA, 11 bp, Unknown
  misc_feature (1)..( 11): Matrix.002 file - promoters60/2113846
attataattta

SEQ ID NO: 54540 - DNA, 9 bp, Unknown
  misc_feature (1)..( 9): Matrix.002 file - promoters60/2113846
aatttaacg

SEQ ID NO: 54541 - DNA, 11 bp, Unknown
  misc_feature (1)..( 11): Matrix.002 file - promoters60/2113846
taaaattattt

SEQ ID NO: 54542 - DNA, 7 bp, Unknown
  misc_feature (1)..( 7): Matrix.002 file - promoters60/2113846
ttatatc

SEQ ID NO: 54543 - DNA, 10 bp, Unknown
  misc_feature (1)..( 10): Matrix.002 file - promoters60/2113889
gttgactttt

SEQ ID NO: 54544 - DNA, 10 bp, Unknown
  misc_feature (1)..( 10): Matrix.002 file - promoters60/2113889
tataaaaaaa

SEQ ID NO: 54545 - DNA, 11 bp, Unknown
  misc_feature (1)..( 11): Matrix.002 file - promoters60/2113889
aatgataattc

SEQ ID NO: 54546 - DNA, 11 bp, Unknown
  misc_feature (1)..( 11): Matrix.002 file - promoters60/2113889
gttaaattttg

SEQ ID NO: 54547 - DNA, 12 bp, Unknown
  misc_feature (1)..( 12): Matrix.002 file - promoters60/2113889
gttaacttttta

SEQ ID NO: 54548 - DNA, 17 bp, Unknown
  misc_feature (1)..( 17): Matrix.002 file - promoters60/2113928
aaaaattattaaagtat

SEQ ID NO: 54549 - DNA, 7 bp, Unknown
  misc_feature (1)..( 7): Matrix.002 file - promoters60/2113928
ttactaa

SEQ ID NO: 54550 - DNA, 8 bp, Unknown
  misc_feature (1)..( 8): Matrix.002 file - promoters60/2113928
taatttta

SEQ ID NO: 54551 - DNA, 8 bp, Unknown
  misc_feature (1)..( 8): Matrix.002 file - promoters60/2113928
agtcggtc

SEQ ID NO: 54552 - DNA, 6 bp, Unknown
  misc_feature (1)..( 6): Matrix.002 file - promoters60/2113928
atttta

SEQ ID NO: 54553 - DNA, 9 bp, Unknown
  misc_feature (1)..( 9): Matrix.002 file - promoters60/2113928
gaattcaaa

SEQ ID NO: 54554 - DNA, 6 bp, Unknown
  misc_feature (1)..( 6): Matrix.002 file - promoters60/2113928
atattt

SEQ ID NO: 54555 - DNA, 9 bp, Unknown
  misc_feature (1)..( 9): Matrix.002 file - promoters60/2113928
aaataatat

SEQ ID NO: 54556 - DNA, 10 bp, Unknown
  misc_feature (1)..( 10): Matrix.002 file - promoters60/2113928
ctatatatat

SEQ ID NO: 54557 - DNA, 6 bp, Unknown
  misc_feature (1)..( 6): Matrix.002 file - promoters60/2113928
aaaaag

SEQ ID NO: 54558 - DNA, 6 bp, Unknown
  misc_feature (1)..( 6): Matrix.002 file - promoters60/2113928
aacaat

SEQ ID NO: 54559 - DNA, 6 bp, Unknown
  misc_feature (1)..( 6): Matrix.002 file - promoters60/2113928
atttct

SEQ ID NO: 54560 - DNA, 9 bp, Unknown
  misc_feature (1)..( 9): Matrix.002 file - promoters60/2113928
aatacaaat

SEQ ID NO: 54561 - DNA, 7 bp, Unknown
  misc_feature (1)..( 7): Matrix.002 file - promoters60/2113928
taaaaca

SEQ ID NO: 54562 - DNA, 7 bp, Unknown
  misc_feature (1)..( 7): Matrix.002 file - promoters60/2113928
tatatcc

SEQ ID NO: 54563 - DNA, 7 bp, Unknown
  misc_feature (1)..( 7): Matrix.002 file - promoters60/2113928
aaaatat

SEQ ID NO: 54564 - DNA, 6 bp, Unknown
  misc_feature (1)..( 6): Matrix.002 file - promoters60/2113928
caaaaa

SEQ ID NO: 54565 - DNA, 6 bp, Unknown
  misc_feature (1)..( 6): Matrix.002 file - promoters60/2113928
taatat

SEQ ID NO: 54566 - DNA, 6 bp, Unknown
  misc_feature (1)..( 6): Matrix.002 file - promoters60/2113928
aaaata

SEQ ID NO: 54567 - DNA, 7 bp, Unknown
  misc_feature (1)..( 7): Matrix.002 file - promoters60/2113928
aatcaaa

SEQ ID NO: 54568 - DNA, 10 bp, Unknown
  misc_feature (1)..( 10): Matrix.002 file - promoters60/2113928
ctaaaaaata

SEQ ID NO: 54569 - DNA, 8 bp, Unknown
  misc_feature (1)..( 8): Matrix.002 file - promoters60/2113967
caaatatt

SEQ ID NO: 54570 - DNA, 10 bp, Unknown
  misc_feature (1)..( 10): Matrix.002 file - promoters60/2113967
acttatttta

SEQ ID NO: 54571 - DNA, 11 bp, Unknown
  misc_feature (1)..( 11): Matrix.002 file - promoters60/2113967
ttaagtagatt

SEQ ID NO: 54572 - DNA, 8 bp, Unknown
  misc_feature (1)..( 8): Matrix.002 file - promoters60/2113967
tttcaatt

SEQ ID NO: 54573 - DNA, 12 bp, Unknown
  misc_feature (1)..( 12): Matrix.002 file - promoters60/2113967
aaaaaaacattg

SEQ ID NO: 54574 - DNA, 8 bp, Unknown
  misc_feature (1)..( 8): Matrix.002 file - promoters60/2113975
ttttattc

SEQ ID NO: 54575 - DNA, 7 bp, Unknown
  misc_feature (1)..( 7): Matrix.002 file - promoters60/2113975
attacaa

SEQ ID NO: 54576 - DNA, 7 bp, Unknown
  misc_feature (1)..( 7): Matrix.002 file - promoters60/2113975
aaacttc

SEQ ID NO: 54577 - DNA, 6 bp, Unknown
  misc_feature (1)..( 6): Matrix.002 file - promoters60/2113975
acttta

SEQ ID NO: 54578 - DNA, 8 bp, Unknown
  misc_feature (1)..( 8): Matrix.002 file - promoters60/2113975
aaaaaatc

SEQ ID NO: 54579 - DNA, 6 bp, Unknown
  misc_feature (1)..( 6): Matrix.002 file - promoters60/2113975
aaaaga

SEQ ID NO: 54580 - DNA, 8 bp, Unknown
  misc_feature (1)..( 8): Matrix.002 file - promoters60/2113975
tataatag

SEQ ID NO: 54581 - DNA, 7 bp, Unknown
  misc_feature (1)..( 7): Matrix.002 file - promoters60/2113975
attagtt

SEQ ID NO: 54582 - DNA, 8 bp, Unknown
  misc_feature (1)..( 8): Matrix.002 file - promoters60/2113975
caaactaa

SEQ ID NO: 54583 - DNA, 10 bp, Unknown
  misc_feature (1)..( 10): Matrix.002 file - promoters60/2113975
aatggataac

SEQ ID NO: 54584 - DNA, 6 bp, Unknown
  misc_feature (1)..( 6): Matrix.002 file - promoters60/2113975
taaaga

SEQ ID NO: 54585 - DNA, 7 bp, Unknown
  misc_feature (1)..( 7): Matrix.002 file - promoters60/2113975
aaaaagt

SEQ ID NO: 54586 - DNA, 8 bp, Unknown
  misc_feature (1)..( 8): Matrix.002 file - promoters60/2113975
aagaaaaa

SEQ ID NO: 54587 - DNA, 8 bp, Unknown
  misc_feature (1)..( 8): Matrix.002 file - promoters60/2113975
caataaaa

SEQ ID NO: 54588 - DNA, 6 bp, Unknown
  misc_feature (1)..( 6): Matrix.002 file - promoters60/2113975
agtttc

SEQ ID NO: 54589 - DNA, 9 bp, Unknown
  misc_feature (1)..( 9): Matrix.002 file - promoters60/2113975
tttgaccag

SEQ ID NO: 54590 - DNA, 6 bp, Unknown
  misc_feature (1)..( 6): Matrix.002 file - promoters60/2113975
ttcacc

SEQ ID NO: 54591 - DNA, 8 bp, Unknown
  misc_feature (1)..( 8): Matrix.002 file - promoters60/2113975
aaacaaaa

SEQ ID NO: 54592 - DNA, 7 bp, Unknown
  misc_feature (1)..( 7): Matrix.002 file - promoters60/2113975
caagtat

SEQ ID NO: 54593 - DNA, 6 bp, Unknown
  misc_feature (1)..( 6): Matrix.002 file - promoters60/2113975
ttattt

SEQ ID NO: 54594 - DNA, 6 bp, Unknown
  misc_feature (1)..( 6): Matrix.002 file - promoters60/2113975
aaaata

SEQ ID NO: 54595 - DNA, 7 bp, Unknown
  misc_feature (1)..( 7): Matrix.002 file - promoters60/2113975
ataaaat

SEQ ID NO: 54596 - DNA, 8 bp, Unknown
  misc_feature (1)..( 8): Matrix.002 file - promoters60/2114005
ttttctta

SEQ ID NO: 54597 - DNA, 8 bp, Unknown
  misc_feature (1)..( 8): Matrix.002 file - promoters60/2114005
aaaaacaa

SEQ ID NO: 54598 - DNA, 7 bp, Unknown
  misc_feature (1)..( 7): Matrix.002 file - promoters60/2114005
attcaaa

SEQ ID NO: 54599 - DNA, 7 bp, Unknown
  misc_feature (1)..( 7): Matrix.002 file - promoters60/2114005
aaaagat

SEQ ID NO: 54600 - DNA, 7 bp, Unknown
  misc_feature (1)..( 7): Matrix.002 file - promoters60/2114005
ttaatca

SEQ ID NO: 54601 - DNA, 7 bp, Unknown
  misc_feature (1)..( 7): Matrix.002 file - promoters60/2114005
ccaaagc

SEQ ID NO: 54602 - DNA, 6 bp, Unknown
  misc_feature (1)..( 6): Matrix.002 file - promoters60/2114005
aaaaca

SEQ ID NO: 54603 - DNA, 7 bp, Unknown
  misc_feature (1)..( 7): Matrix.002 file - promoters60/2114005
agtagga

SEQ ID NO: 54604 - DNA, 6 bp, Unknown
  misc_feature (1)..( 6): Matrix.002 file - promoters60/2114005
ttttta

SEQ ID NO: 54605 - DNA, 12 bp, Unknown
  misc_feature (1)..( 12): Matrix.002 file - promoters60/2114005
caaaaaataatt

SEQ ID NO: 54606 - DNA, 7 bp, Unknown
  misc_feature (1)..( 7): Matrix.002 file - promoters60/2114005
aaaagac

SEQ ID NO: 54607 - DNA, 6 bp, Unknown
  misc_feature (1)..( 6): Matrix.002 file - promoters60/2114005
aaactg

SEQ ID NO: 54608 - DNA, 15 bp, Unknown
  misc_feature (1)..( 15): Matrix.002 file - promoters60/2114005
aatacctcatttata

SEQ ID NO: 54609 - DNA, 7 bp, Unknown
  misc_feature (1)..( 7): Matrix.002 file - promoters60/2114005
ttaaaaa

SEQ ID NO: 54610 - DNA, 7 bp, Unknown
  misc_feature (1)..( 7): Matrix.002 file - promoters60/2114005
aaaattt

SEQ ID NO: 54611 - DNA, 8 bp, Unknown
  misc_feature (1)..( 8): Matrix.002 file - promoters60/2114005
ttatatat

SEQ ID NO: 54612 - DNA, 11 bp, Unknown
  misc_feature (1)..( 11): Matrix.002 file - promoters60/2114005
ttaagtgataa

SEQ ID NO: 54613 - DNA, 8 bp, Unknown
  misc_feature (1)..( 8): Matrix.002 file - promoters60/2114005
agagatta

SEQ ID NO: 54614 - DNA, 9 bp, Unknown
  misc_feature (1)..( 9): Matrix.002 file - promoters60/2114005
aaaaaaaca

SEQ ID NO: 54615 - DNA, 9 bp, Unknown
  misc_feature (1)..( 9): Matrix.002 file - promoters60/2114005
taaaaaaaa

SEQ ID NO: 54616 - DNA, 7 bp, Unknown
  misc_feature (1)..( 7): Matrix.002 file - promoters60/2114012
aaaatta

SEQ ID NO: 54617 - DNA, 8 bp, Unknown
  misc_feature (1)..( 8): Matrix.002 file - promoters60/2114012
aaaagttt

SEQ ID NO: 54618 - DNA, 10 bp, Unknown
  misc_feature (1)..( 10): Matrix.002 file - promoters60/2114012
acaaagacga

SEQ ID NO: 54619 - DNA, 8 bp, Unknown
  misc_feature (1)..( 8): Matrix.002 file - promoters60/2114012
tttattaa

SEQ ID NO: 54620 - DNA, 7 bp, Unknown
  misc_feature (1)..( 7): Matrix.002 file - promoters60/2114026
tatataa

SEQ ID NO: 54621 - DNA, 9 bp, Unknown
  misc_feature (1)..( 9): Matrix.002 file - promoters60/2114026
accctcata

SEQ ID NO: 54622 - DNA, 12 bp, Unknown
  misc_feature (1)..( 12): Matrix.002 file - promoters60/2114026
atagtttctcat

SEQ ID NO: 54623 - DNA, 12 bp, Unknown
  misc_feature (1)..( 12): Matrix.002 file - promoters60/2114026
caagtttttgaa

SEQ ID NO: 54624 - DNA, 8 bp, Unknown
  misc_feature (1)..( 8): Matrix.002 file - promoters60/2114026
caatcaaa

SEQ ID NO: 54625 - DNA, 9 bp, Unknown
  misc_feature (1)..( 9): Matrix.002 file - promoters60/2114026
catttttag

SEQ ID NO: 54626 - DNA, 9 bp, Unknown
  misc_feature (1)..( 9): Matrix.002 file - promoters60/2114026
aattttaaa

SEQ ID NO: 54627 - DNA, 7 bp, Unknown
  misc_feature (1)..( 7): Matrix.002 file - promoters60/2114026
tttaata

SEQ ID NO: 54628 - DNA, 16 bp, Unknown
  misc_feature (1)..( 16): Matrix.002 file - promoters60/2114030
tacattacaaaaaaaa

SEQ ID NO: 54629 - DNA, 6 bp, Unknown
  misc_feature (1)..( 6): Matrix.002 file - promoters60/2114030
aaaaaa

SEQ ID NO: 54630 - DNA, 8 bp, Unknown
  misc_feature (1)..( 8): Matrix.002 file - promoters60/2114030
tataaata

SEQ ID NO: 54631 - DNA, 8 bp, Unknown
  misc_feature (1)..( 8): Matrix.002 file - promoters60/2114095
aaaatctt

SEQ ID NO: 54632 - DNA, 10 bp, Unknown
  misc_feature (1)..( 10): Matrix.002 file - promoters60/2114115
aaaattttgt

SEQ ID NO: 54633 - DNA, 7 bp, Unknown
  misc_feature (1)..( 7): Matrix.002 file - promoters60/2114115
tattttt

SEQ ID NO: 54634 - DNA, 11 bp, Unknown
  misc_feature (1)..( 11): Matrix.002 file - promoters60/2114115
caaaaaaatat

SEQ ID NO: 54635 - DNA, 11 bp, Unknown
  misc_feature (1)..( 11): Matrix.002 file - promoters60/2114115
cgaacaaaagg

SEQ ID NO: 54636 - DNA, 11 bp, Unknown
  misc_feature (1)..( 11): Matrix.002 file - promoters60/2114138
aaatagatcta

SEQ ID NO: 54637 - DNA, 8 bp, Unknown
  misc_feature (1)..( 8): Matrix.002 file - promoters60/2114138
ttttgggt

SEQ ID NO: 54638 - DNA, 16 bp, Unknown
  misc_feature (1)..( 16): Matrix.002 file - promoters60/2114145
ctttcgaccaaaataa

SEQ ID NO: 54639 - DNA, 7 bp, Unknown
  misc_feature (1)..( 7): Matrix.002 file - promoters60/2114145
taccgga

SEQ ID NO: 54640 - DNA, 6 bp, Unknown
  misc_feature (1)..( 6): Matrix.002 file - promoters60/2114145
atacaa

SEQ ID NO: 54641 - DNA, 7 bp, Unknown
  misc_feature (1)..( 7): Matrix.002 file - promoters60/2114145
aaatgat

SEQ ID NO: 54642 - DNA, 9 bp, Unknown
  misc_feature (1)..( 9): Matrix.002 file - promoters60/2114145
atgattcta

SEQ ID NO: 54643 - DNA, 7 bp, Unknown
  misc_feature (1)..( 7): Matrix.002 file - promoters60/2114145
ataatat

SEQ ID NO: 54644 - DNA, 6 bp, Unknown
  misc_feature (1)..( 6): Matrix.002 file - promoters60/2114145
aaggca

SEQ ID NO: 54645 - DNA, 6 bp, Unknown
  misc_feature (1)..( 6): Matrix.002 file - promoters60/2114145
attata

SEQ ID NO: 54646 - DNA, 7 bp, Unknown
  misc_feature (1)..( 7): Matrix.002 file - promoters60/2114145
aaacttt

SEQ ID NO: 54647 - DNA, 7 bp, Unknown
  misc_feature (1)..( 7): Matrix.002 file - promoters60/2114145
tttatcc

SEQ ID NO: 54648 - DNA, 6 bp, Unknown
  misc_feature (1)..( 6): Matrix.002 file - promoters60/2114145
tttatt

SEQ ID NO: 54649 - DNA, 11 bp, Unknown
  misc_feature (1)..( 11): Matrix.002 file - promoters60/2114145
aaagaaacaaa

SEQ ID NO: 54650 - DNA, 8 bp, Unknown
  misc_feature (1)..( 8): Matrix.002 file - promoters60/2114145
aaaaaaaa

SEQ ID NO: 54651 - DNA, 6 bp, Unknown
  misc_feature (1)..( 6): Matrix.002 file - promoters60/2114145
tctctc

SEQ ID NO: 54652 - DNA, 6 bp, Unknown
  misc_feature (1)..( 6): Matrix.002 file - promoters60/2114145
taactt

SEQ ID NO: 54653 - DNA, 6 bp, Unknown
  misc_feature (1)..( 6): Matrix.002 file - promoters60/2114145
tcctcc

SEQ ID NO: 54654 - DNA, 6 bp, Unknown
  misc_feature (1)..( 6): Matrix.002 file - promoters60/2114145
atttta

SEQ ID NO: 54655 - DNA, 21 bp, Unknown
  misc_feature (1)..( 21): Matrix.002 file - promoters60/2114175
acacccatctcttctcgctca

SEQ ID NO: 54656 - DNA, 25 bp, Unknown
  misc_feature (1)..( 25): Matrix.002 file - promoters60/2114175
ggaacctgttgccaattactcgttt

SEQ ID NO: 54657 - DNA, 11 bp, Unknown
  misc_feature (1)..( 11): Matrix.002 file - promoters60/2114175
ttttattggtt

SEQ ID NO: 54658 - DNA, 19 bp, Unknown
  misc_feature (1)..( 19): Matrix.002 file - promoters60/2114175
caactactctatcaattat

SEQ ID NO: 54659 - DNA, 7 bp, Unknown
  misc_feature (1)..( 7): Matrix.002 file - promoters60/2114175
aaaaaaa

SEQ ID NO: 54660 - DNA, 9 bp, Unknown
  misc_feature (1)..( 9): Matrix.002 file - promoters60/2114175
aaaaaaaaa

SEQ ID NO: 54661 - DNA, 38 bp, Unknown
  misc_feature (1)..( 38): Matrix.002 file - promoters60/2114175
tttactctataaattatttccgcaaacacaaattatac

SEQ ID NO: 54662 - DNA, 10 bp, Unknown
  misc_feature (1)..( 10): Matrix.002 file - promoters60/2114175
acatcaacat

SEQ ID NO: 54663 - DNA, 23 bp, Unknown
  misc_feature (1)..( 23): Matrix.002 file - promoters60/2114175
tacatttttctactaatgtagaa

SEQ ID NO: 54664 - DNA, 12 bp, Unknown
  misc_feature (1)..( 12): Matrix.002 file - promoters60/2114175
aacttcacagta

SEQ ID NO: 54665 - DNA, 6 bp, Unknown
  misc_feature (1)..( 6): Matrix.002 file - promoters60/2114175
caaaat

SEQ ID NO: 54666 - DNA, 7 bp, Unknown
  misc_feature (1)..( 7): Matrix.002 file - promoters60/2114175
acaagca

SEQ ID NO: 54667 - DNA, 7 bp, Unknown
  misc_feature (1)..( 7): Matrix.002 file - promoters60/2114175
gataata

SEQ ID NO: 54668 - DNA, 6 bp, Unknown
  misc_feature (1)..( 6): Matrix.002 file - promoters60/2114175
aacaac

SEQ ID NO: 54669 - DNA, 13 bp, Unknown
  misc_feature (1)..( 13): Matrix.002 file - promoters60/2114175
acgccaaattcta

SEQ ID NO: 54670 - DNA, 6 bp, Unknown
  misc_feature (1)..( 6): Matrix.002 file - promoters60/2114175
agcaca

SEQ ID NO: 54671 - DNA, 32 bp, Unknown
  misc_feature (1)..( 32): Matrix.002 file - promoters60/2114175
cacaatctcaacgtgcactaaaaacgagtggt

SEQ ID NO: 54672 - DNA, 8 bp, Unknown
  misc_feature (1)..( 8): Matrix.002 file - promoters60/2114175
aaaatatc

SEQ ID NO: 54673 - DNA, 13 bp, Unknown
  misc_feature (1)..( 13): Matrix.002 file - promoters60/2114175
cataatgggacca

SEQ ID NO: 54674 - DNA, 8 bp, Unknown
  misc_feature (1)..( 8): Matrix.002 file - promoters60/2114175
agcatttg

SEQ ID NO: 54675 - DNA, 18 bp, Unknown
  misc_feature (1)..( 18): Matrix.002 file - promoters60/2114175
acacatatctccgcattt

SEQ ID NO: 54676 - DNA, 9 bp, Unknown
  misc_feature (1)..( 9): Matrix.002 file - promoters60/2114175
tttcccatc

SEQ ID NO: 54677 - DNA, 8 bp, Unknown
  misc_feature (1)..( 8): Matrix.002 file - promoters60/2114175
cttcataa

SEQ ID NO: 54678 - DNA, 6 bp, Unknown
  misc_feature (1)..( 6): Matrix.002 file - promoters60/2114175
taaccc

SEQ ID NO: 54679 - DNA, 14 bp, Unknown
  misc_feature (1)..( 14): Matrix.002 file - promoters60/2114175
cccacctcattata

SEQ ID NO: 54680 - DNA, 14 bp, Unknown
  misc_feature (1)..( 14): Matrix.002 file - promoters60/2114175
aataccaccctttg

SEQ ID NO: 54681 - DNA, 6 bp, Unknown
  misc_feature (1)..( 6): Matrix.002 file - promoters60/2114175
gtttat

SEQ ID NO: 54682 - DNA, 6 bp, Unknown
  misc_feature (1)..( 6): Matrix.002 file - promoters60/2114175
agcgaa

SEQ ID NO: 54683 - DNA, 6 bp, Unknown
  misc_feature (1)..( 6): Matrix.002 file - promoters60/2114175
gaaaca

SEQ ID NO: 54684 - DNA, 7 bp, Unknown
  misc_feature (1)..( 7): Matrix.002 file - promoters60/2114175
aaactct

SEQ ID NO: 54685 - DNA, 9 bp, Unknown
  misc_feature (1)..( 9): Matrix.002 file - promoters60/2114178
gtttcaaaa

SEQ ID NO: 54686 - DNA, 7 bp, Unknown
  misc_feature (1)..( 7): Matrix.002 file - promoters60/2114178
ttcaaaa

SEQ ID NO: 54687 - DNA, 13 bp, Unknown
  misc_feature (1)..( 13): Matrix.002 file - promoters60/2114178
ttgtaaaaaatga

SEQ ID NO: 54688 - DNA, 6 bp, Unknown
  misc_feature (1)..( 6): Matrix.002 file - promoters60/2114178
caataa

SEQ ID NO: 54689 - DNA, 6 bp, Unknown
  misc_feature (1)..( 6): Matrix.002 file - promoters60/2114178
aattat

SEQ ID NO: 54690 - DNA, 9 bp, Unknown
  misc_feature (1)..( 9): Matrix.002 file - promoters60/2114178
tgtattatt

SEQ ID NO: 54691 - DNA, 14 bp, Unknown
  misc_feature (1)..( 14): Matrix.002 file - promoters60/2114178
tatagcaaaactcc

SEQ ID NO: 54692 - DNA, 6 bp, Unknown
  misc_feature (1)..( 6): Matrix.002 file - promoters60/2114178
agaaaa

SEQ ID NO: 54693 - DNA, 7 bp, Unknown
  misc_feature (1)..( 7): Matrix.002 file - promoters60/2114178
cttcctc

SEQ ID NO: 54694 - DNA, 9 bp, Unknown
  misc_feature (1)..( 9): Matrix.002 file - promoters60/2114178
taggtcgta

SEQ ID NO: 54695 - DNA, 6 bp, Unknown
  misc_feature (1)..( 6): Matrix.002 file - promoters60/2114178
tttagt

SEQ ID NO: 54696 - DNA, 9 bp, Unknown
  misc_feature (1)..( 9): Matrix.002 file - promoters60/2114178
atctacttc

SEQ ID NO: 54697 - DNA, 8 bp, Unknown
  misc_feature (1)..( 8): Matrix.002 file - promoters60/2114178
aaaataac

SEQ ID NO: 54698 - DNA, 6 bp, Unknown
  misc_feature (1)..( 6): Matrix.002 file - promoters60/2114178
agcaaa

SEQ ID NO: 54699 - DNA, 7 bp, Unknown
  misc_feature (1)..( 7): Matrix.002 file - promoters60/2114178
ttcaaca

SEQ ID NO: 54700 - DNA, 7 bp, Unknown
  misc_feature (1)..( 7): Matrix.002 file - promoters60/2114178
aaaataa

SEQ ID NO: 54701 - DNA, 7 bp, Unknown
  misc_feature (1)..( 7): Matrix.002 file - promoters60/2114178
tttgtaa

SEQ ID NO: 54702 - DNA, 9 bp, Unknown
  misc_feature (1)..( 9): Matrix.002 file - promoters60/2114178
ttacctttt

SEQ ID NO: 54703 - DNA, 8 bp, Unknown
  misc_feature (1)..( 8): Matrix.002 file - promoters60/2114178
gttgtgtt

SEQ ID NO: 54704 - DNA, 8 bp, Unknown
  misc_feature (1)..( 8): Matrix.002 file - promoters60/2114200
aatcaatc

SEQ ID NO: 54705 - DNA, 8 bp, Unknown
  misc_feature (1)..( 8): Matrix.002 file - promoters60/2131829
tattgaaa

SEQ ID NO: 54706 - DNA, 9 bp, Unknown
  misc_feature (1)..( 9): Matrix.002 file - promoters60/2169576
tgttttcta

SEQ ID NO: 54707 - DNA, 12 bp, Unknown
  misc_feature (1)..( 12): Matrix.002 file - promoters60/2169576
ctcatatataac

SEQ ID NO: 54708 - DNA, 13 bp, Unknown
  misc_feature (1)..( 13): Matrix.002 file - promoters60/2169576
aactagattttta

SEQ ID NO: 54709 - DNA, 12 bp, Unknown
  misc_feature (1)..( 12): Matrix.002 file - promoters60/2169576
aaatttttttta

SEQ ID NO: 54710 - DNA, 8 bp, Unknown
  misc_feature (1)..( 8): Matrix.002 file - promoters60/2185389
tgaagaaa

SEQ ID NO: 54711 - DNA, 9 bp, Unknown
  misc_feature (1)..( 9): Matrix.002 file - promoters60/2185389
acaaaagaa

SEQ ID NO: 54712 - DNA, 8 bp, Unknown
  misc_feature (1)..( 8): Matrix.002 file - promoters60/2185389
ttttcttc

SEQ ID NO: 54713 - DNA, 11 bp, Unknown
  misc_feature (1)..( 11): Matrix.002 file - promoters60/2185389
gaaaaaaatga

SEQ ID NO: 54714 - DNA, 10 bp, Unknown
  misc_feature (1)..( 10): Matrix.002 file - promoters60/2185389
tttgaatcaa

SEQ ID NO: 54715 - DNA, 11 bp, Unknown
  misc_feature (1)..( 11): Matrix.002 file - promoters60/2187156
acataattaag

SEQ ID NO: 54716 - DNA, 9 bp, Unknown
  misc_feature (1)..( 9): Matrix.002 file - promoters60/2187156
tgtaaaaaa

SEQ ID NO: 54717 - DNA, 10 bp, Unknown
  misc_feature (1)..( 10): Matrix.002 file - promoters60/2217817
gaaatagatt

SEQ ID NO: 54718 - DNA, 8 bp, Unknown
  misc_feature (1)..( 8): Matrix.002 file - promoters60/2217996
cccagttt

SEQ ID NO: 54719 - DNA, 6 bp, Unknown
  misc_feature (1)..( 6): Matrix.002 file - promoters60/2218016
ttcaca

SEQ ID NO: 54720 - DNA, 6 bp, Unknown
  misc_feature (1)..( 6): Matrix.002 file - promoters60/2218016
agcttt

SEQ ID NO: 54721 - DNA, 6 bp, Unknown
  misc_feature (1)..( 6): Matrix.002 file - promoters60/2218016
ttttca

SEQ ID NO: 54722 - DNA, 7 bp, Unknown
  misc_feature (1)..( 7): Matrix.002 file - promoters60/2218016
atataag

SEQ ID NO: 54723 - DNA, 6 bp, Unknown
  misc_feature (1)..( 6): Matrix.002 file - promoters60/2218016
tcacta

SEQ ID NO: 54724 - DNA, 6 bp, Unknown
  misc_feature (1)..( 6): Matrix.002 file - promoters60/2218016
tcaatc

SEQ ID NO: 54725 - DNA, 6 bp, Unknown
  misc_feature (1)..( 6): Matrix.002 file - promoters60/2218016
agtaag

SEQ ID NO: 54726 - DNA, 7 bp, Unknown
  misc_feature (1)..( 7): Matrix.002 file - promoters60/2218016
accaaac

SEQ ID NO: 54727 - DNA, 7 bp, Unknown
  misc_feature (1)..( 7): Matrix.002 file - promoters60/2218016
ttgatgt

SEQ ID NO: 54728 - DNA, 10 bp, Unknown
  misc_feature (1)..( 10): Matrix.002 file - promoters60/2218207
atttcttttc

SEQ ID NO: 54729 - DNA, 8 bp, Unknown
  misc_feature (1)..( 8): Matrix.002 file - promoters60/2218260
caatagat

SEQ ID NO: 54730 - DNA, 10 bp, Unknown
  misc_feature (1)..( 10): Matrix.002 file - promoters60/2218260
atatatatag

SEQ ID NO: 54731 - DNA, 6 bp, Unknown
  misc_feature (1)..( 6): Matrix.002 file - promoters60/2685725
tcaatg

SEQ ID NO: 54732 - DNA, 8 bp, Unknown
  misc_feature (1)..( 8): Matrix.002 file - promoters60/2685725
gtcaaggt

SEQ ID NO: 54733 - DNA, 9 bp, Unknown
  misc_feature (1)..( 9): Matrix.002 file - promoters60/2685725
taatattgt

SEQ ID NO: 54734 - DNA, 7 bp, Unknown
  misc_feature (1)..( 7): Matrix.002 file - promoters60/2685725
aaggttc

SEQ ID NO: 54735 - DNA, 6 bp, Unknown
  misc_feature (1)..( 6): Matrix.002 file - promoters60/2685725
gatacg

SEQ ID NO: 54736 - DNA, 8 bp, Unknown
  misc_feature (1)..( 8): Matrix.002 file - promoters60/2685725
tcacacac

SEQ ID NO: 54737 - DNA, 7 bp, Unknown
  misc_feature (1)..( 7): Matrix.002 file - promoters60/2685725
ttaggta

SEQ ID NO: 54738 - DNA, 7 bp, Unknown
  misc_feature (1)..( 7): Matrix.002 file - promoters60/2685725
tataatg

SEQ ID NO: 54739 - DNA, 7 bp, Unknown
  misc_feature (1)..( 7): Matrix.002 file - promoters60/2685725
caaacga

SEQ ID NO: 54740 - DNA, 6 bp, Unknown
  misc_feature (1)..( 6): Matrix.002 file - promoters60/2685725
aataag

SEQ ID NO: 54741 - DNA, 7 bp, Unknown
  misc_feature (1)..( 7): Matrix.002 file - promoters60/2685873
acccaat

SEQ ID NO: 54742 - DNA, 8 bp, Unknown
  misc_feature (1)..( 8): Matrix.002 file - promoters60/2685873
tctatctt

SEQ ID NO: 54743 - DNA, 6 bp, Unknown
  misc_feature (1)..( 6): Matrix.002 file - promoters60/2685873
caacaa

SEQ ID NO: 54744 - DNA, 8 bp, Unknown
  misc_feature (1)..( 8): Matrix.002 file - promoters60/2685873
aaatatca

SEQ ID NO: 54745 - DNA, 6 bp, Unknown
  misc_feature (1)..( 6): Matrix.002 file - promoters60/2685873
aaagaa

SEQ ID NO: 54746 - DNA, 6 bp, Unknown
  misc_feature (1)..( 6): Matrix.002 file - promoters60/2685873
aaaaga

SEQ ID NO: 54747 - DNA, 8 bp, Unknown
  misc_feature (1)..( 8): Matrix.002 file - promoters60/2685873
ttctaaga

SEQ ID NO: 54748 - DNA, 8 bp, Unknown
  misc_feature (1)..( 8): Matrix.002 file - promoters60/2685873
tttttttt

SEQ ID NO: 54749 - DNA, 8 bp, Unknown
  misc_feature (1)..( 8): Matrix.002 file - promoters60/2685873
ttgcaatt

SEQ ID NO: 54750 - DNA, 7 bp, Unknown
  misc_feature (1)..( 7): Matrix.002 file - promoters60/2685873
aacaatt

SEQ ID NO: 54751 - DNA, 7 bp, Unknown
  misc_feature (1)..( 7): Matrix.002 file - promoters60/2685873
tctaaca

SEQ ID NO: 54752 - DNA, 6 bp, Unknown
  misc_feature (1)..( 6): Matrix.002 file - promoters60/2685873
attcaa

SEQ ID NO: 54753 - DNA, 6 bp, Unknown
  misc_feature (1)..( 6): Matrix.002 file - promoters60/2685873
aaaaaa

SEQ ID NO: 54754 - DNA, 8 bp, Unknown
  misc_feature (1)..( 8): Matrix.002 file - promoters60/2685873
aaaacctt

SEQ ID NO: 54755 - DNA, 7 bp, Unknown
  misc_feature (1)..( 7): Matrix.002 file - promoters60/2685873
gaaagaa

SEQ ID NO: 54756 - DNA, 6 bp, Unknown
  misc_feature (1)..( 6): Matrix.002 file - promoters60/2685873
ttgatg

SEQ ID NO: 54757 - DNA, 8 bp, Unknown
  misc_feature (1)..( 8): Matrix.002 file - promoters60/2685873
ttgagctt

SEQ ID NO: 54758 - DNA, 6 bp, Unknown
  misc_feature (1)..( 6): Matrix.002 file - promoters60/2685873
aatttg

SEQ ID NO: 54759 - DNA, 8 bp, Unknown
  misc_feature (1)..( 8): Matrix.002 file - promoters60/2685873
aaaccctt

SEQ ID NO: 54760 - DNA, 6 bp, Unknown
  misc_feature (1)..( 6): Matrix.002 file - promoters60/2685873
aatcaa

SEQ ID NO: 54761 - DNA, 8 bp, Unknown
  misc_feature (1)..( 8): Matrix.002 file - promoters60/2685873
caccactc

SEQ ID NO: 54762 - DNA, 13 bp, Unknown
  misc_feature (1)..( 13): Matrix.002 file - promoters60/2685951
ttggattaaataa

SEQ ID NO: 54763 - DNA, 8 bp, Unknown
  misc_feature (1)..( 8): Matrix.002 file - promoters60/2685951
tttatttt

SEQ ID NO: 54764 - DNA, 8 bp, Unknown
  misc_feature (1)..( 8): Matrix.002 file - promoters60/2685968
tgaaaata

SEQ ID NO: 54765 - DNA, 7 bp, Unknown
  misc_feature (1)..( 7): Matrix.002 file - promoters60/2685968
aagaaat

SEQ ID NO: 54766 - DNA, 6 bp, Unknown
  misc_feature (1)..( 6): Matrix.002 file - promoters60/2685968
aattaa

SEQ ID NO: 54767 - DNA, 8 bp, Unknown
  misc_feature (1)..( 8): Matrix.002 file - promoters60/2685968
atataaat

SEQ ID NO: 54768 - DNA, 8 bp, Unknown
  misc_feature (1)..( 8): Matrix.002 file - promoters60/2685968
aaaagaaa

SEQ ID NO: 54769 - DNA, 5 bp, Unknown
  misc_feature (1)..( 5): Matrix.002 file - promoters60/2685968
tattt

SEQ ID NO: 54770 - DNA, 12 bp, Unknown
  misc_feature (1)..( 12): Matrix.002 file - promoters60/2685968
gaaaaagaaaag

SEQ ID NO: 54771 - DNA, 6 bp, Unknown
  misc_feature (1)..( 6): Matrix.002 file - promoters60/2685968
cgtttt

SEQ ID NO: 54772 - DNA, 8 bp, Unknown
  misc_feature (1)..( 8): Matrix.002 file - promoters60/2685968
tttgttca

SEQ ID NO: 54773 - DNA, 7 bp, Unknown
  misc_feature (1)..( 7): Matrix.002 file - promoters60/2685968
agagaga

SEQ ID NO: 54774 - DNA, 6 bp, Unknown
  misc_feature (1)..( 6): Matrix.002 file - promoters60/2685968
ttttaa

SEQ ID NO: 54775 - DNA, 6 bp, Unknown
  misc_feature (1)..( 6): Matrix.002 file - promoters60/2685968
tttttt

SEQ ID NO: 54776 - DNA, 6 bp, Unknown
  misc_feature (1)..( 6): Matrix.002 file - promoters60/2685968
caaatt

SEQ ID NO: 54777 - DNA, 7 bp, Unknown
  misc_feature (1)..( 7): Matrix.002 file - promoters60/2685968
gaacaaa

SEQ ID NO: 54778 - DNA, 10 bp, Unknown
  misc_feature (1)..( 10): Matrix.002 file - promoters60/2685968
tattatttgt

SEQ ID NO: 54779 - DNA, 6 bp, Unknown
  misc_feature (1)..( 6): Matrix.002 file - promoters60/2685968
attatc

SEQ ID NO: 54780 - DNA, 9 bp, Unknown
  misc_feature (1)..( 9): Matrix.002 file - promoters60/2685968
ttttataaa

SEQ ID NO: 54781 - DNA, 7 bp, Unknown
  misc_feature (1)..( 7): Matrix.002 file - promoters60/2685968
ttcattt

SEQ ID NO: 54782 - DNA, 6 bp, Unknown
  misc_feature (1)..( 6): Matrix.002 file - promoters60/2685968
ttgcat

SEQ ID NO: 54783 - DNA, 8 bp, Unknown
  misc_feature (1)..( 8): Matrix.002 file - promoters60/2685968
aagataat

SEQ ID NO: 54784 - DNA, 7 bp, Unknown
  misc_feature (1)..( 7): Matrix.002 file - promoters60/2685968
tgtcaaa

SEQ ID NO: 54785 - DNA, 6 bp, Unknown
  misc_feature (1)..( 6): Matrix.002 file - promoters60/2685968
caaaga

SEQ ID NO: 54786 - DNA, 7 bp, Unknown
  misc_feature (1)..( 7): Matrix.002 file - promoters60/2685968
aaaaact

SEQ ID NO: 54787 - DNA, 6 bp, Unknown
  misc_feature (1)..( 6): Matrix.002 file - promoters60/2685968
acaaaa

SEQ ID NO: 54788 - DNA, 10 bp, Unknown
  misc_feature (1)..( 10): Matrix.002 file - promoters60/2685968
aaaacaaaac

SEQ ID NO: 54789 - DNA, 7 bp, Unknown
  misc_feature (1)..( 7): Matrix.002 file - promoters60/2685968
tttgatt

SEQ ID NO: 54790 - DNA, 8 bp, Unknown
  misc_feature (1)..( 8): Matrix.002 file - promoters60/2685968
aaaaacaa

SEQ ID NO: 54791 - DNA, 7 bp, Unknown
  misc_feature (1)..( 7): Matrix.002 file - promoters60/2685968
attaaaa

SEQ ID NO: 54792 - DNA, 8 bp, Unknown
  misc_feature (1)..( 8): Matrix.002 file - promoters60/2686138
ataactta

SEQ ID NO: 54793 - DNA, 8 bp, Unknown
  misc_feature (1)..( 8): Matrix.002 file - promoters60/2686138
tataatta

SEQ ID NO: 54794 - DNA, 10 bp, Unknown
  misc_feature (1)..( 10): Matrix.002 file - promoters60/2686138
aaacaattat

SEQ ID NO: 54795 - DNA, 8 bp, Unknown
  misc_feature (1)..( 8): Matrix.002 file - promoters60/2686138
ttgtattt

SEQ ID NO: 54796 - DNA, 7 bp, Unknown
  misc_feature (1)..( 7): Matrix.002 file - promoters60/2686138
ataattt

SEQ ID NO: 54797 - DNA, 7 bp, Unknown
  misc_feature (1)..( 7): Matrix.002 file - promoters60/2686138
attttgt

SEQ ID NO: 54798 - DNA, 6 bp, Unknown
  misc_feature (1)..( 6): Matrix.002 file - promoters60/2686138
attcat

SEQ ID NO: 54799 - DNA, 9 bp, Unknown
  misc_feature (1)..( 9): Matrix.002 file - promoters60/2686138
tataattaa

SEQ ID NO: 54800 - DNA, 6 bp, Unknown
  misc_feature (1)..( 6): Matrix.002 file - promoters60/2686138
aaaaat

SEQ ID NO: 54801 - DNA, 6 bp, Unknown
  misc_feature (1)..( 6): Matrix.002 file - promoters60/2686138
tgggtt

SEQ ID NO: 54802 - DNA, 7 bp, Unknown
  misc_feature (1)..( 7): Matrix.002 file - promoters60/2686138
aaataat

SEQ ID NO: 54803 - DNA, 6 bp, Unknown
  misc_feature (1)..( 6): Matrix.002 file - promoters60/2686138
acaaaa

SEQ ID NO: 54804 - DNA, 7 bp, Unknown
  misc_feature (1)..( 7): Matrix.002 file - promoters60/2686138
aaagtga

SEQ ID NO: 54805 - DNA, 8 bp, Unknown
  misc_feature (1)..( 8): Matrix.002 file - promoters60/2686138
taaagaaa

SEQ ID NO: 54806 - DNA, 6 bp, Unknown
  misc_feature (1)..( 6): Matrix.002 file - promoters60/2686138
aaaaac

SEQ ID NO: 54807 - DNA, 7 bp, Unknown
  misc_feature (1)..( 7): Matrix.002 file - promoters60/2686138
ctaaaat

SEQ ID NO: 54808 - DNA, 7 bp, Unknown
  misc_feature (1)..( 7): Matrix.002 file - promoters60/2686138
ttagtaa

SEQ ID NO: 54809 - DNA, 7 bp, Unknown
  misc_feature (1)..( 7): Matrix.002 file - promoters60/2686138
tctgttc

SEQ ID NO: 54810 - DNA, 6 bp, Unknown
  misc_feature (1)..( 6): Matrix.002 file - promoters60/2724638
tgaaaa

SEQ ID NO: 54811 - DNA, 6 bp, Unknown
  misc_feature (1)..( 6): Matrix.002 file - promoters60/2724638
ataata

SEQ ID NO: 54812 - DNA, 6 bp, Unknown
  misc_feature (1)..( 6): Matrix.002 file - promoters60/2724638
acagaa

SEQ ID NO: 54813 - DNA, 12 bp, Unknown
  misc_feature (1)..( 12): Matrix.002 file - promoters60/2724638
aaatattggggc

SEQ ID NO: 54814 - DNA, 7 bp, Unknown
  misc_feature (1)..( 7): Matrix.002 file - promoters60/2724638
gttaaaa

SEQ ID NO: 54815 - DNA, 9 bp, Unknown
  misc_feature (1)..( 9): Matrix.002 file - promoters60/2724638
agtgaaaca

SEQ ID NO: 54816 - DNA, 6 bp, Unknown
  misc_feature (1)..( 6): Matrix.002 file - promoters60/2724638
acaaaa

SEQ ID NO: 54817 - DNA, 9 bp, Unknown
  misc_feature (1)..( 9): Matrix.002 file - promoters60/2724638
atagtatat

SEQ ID NO: 54818 - DNA, 15 bp, Unknown
  misc_feature (1)..( 15): Matrix.002 file - promoters60/2724699
aacaaaaaaagttta

SEQ ID NO: 54819 - DNA, 15 bp, Unknown
  misc_feature (1)..( 15): Matrix.002 file - promoters60/2724699
atcactgatccaaca

SEQ ID NO: 54820 - DNA, 7 bp, Unknown
  misc_feature (1)..( 7): Matrix.002 file - promoters60/2724699
aattatc

SEQ ID NO: 54821 - DNA, 10 bp, Unknown
  misc_feature (1)..( 10): Matrix.002 file - promoters60/2724703
tgtgttttta

SEQ ID NO: 54822 - DNA, 7 bp, Unknown
  misc_feature (1)..( 7): Matrix.002 file - promoters60/2724703
ttttggt

SEQ ID NO: 54823 - DNA, 8 bp, Unknown
  misc_feature (1)..( 8): Matrix.002 file - promoters60/2724703
ttaaccca

SEQ ID NO: 54824 - DNA, 7 bp, Unknown
  misc_feature (1)..( 7): Matrix.002 file - promoters60/2724703
agagata

SEQ ID NO: 54825 - DNA, 9 bp, Unknown
  misc_feature (1)..( 9): Matrix.002 file - promoters60/2724703
tgataaccc

SEQ ID NO: 54826 - DNA, 8 bp, Unknown
  misc_feature (1)..( 8): Matrix.002 file - promoters60/2724703
tctcagag

SEQ ID NO: 54827 - DNA, 12 bp, Unknown
  misc_feature (1)..( 12): Matrix.002 file - promoters60/2724703
aaaaacaaaaca

SEQ ID NO: 54828 - DNA, 9 bp, Unknown
  misc_feature (1)..( 9): Matrix.002 file - promoters60/2724703
tatttaaaa

SEQ ID NO: 54829 - DNA, 8 bp, Unknown
  misc_feature (1)..( 8): Matrix.002 file - promoters60/2724703
aaaaactg

SEQ ID NO: 54830 - DNA, 10 bp, Unknown
  misc_feature (1)..( 10): Matrix.002 file - promoters60/2724724
tataacttga

SEQ ID NO: 54831 - DNA, 7 bp, Unknown
  misc_feature (1)..( 7): Matrix.002 file - promoters60/2724724
ttaaaca

SEQ ID NO: 54832 - DNA, 6 bp, Unknown
  misc_feature (1)..( 6): Matrix.002 file - promoters60/2724724
ctttat

SEQ ID NO: 54833 - DNA, 12 bp, Unknown
  misc_feature (1)..( 12): Matrix.002 file - promoters60/2724724
tcaaaaagaaat

SEQ ID NO: 54834 - DNA, 8 bp, Unknown
  misc_feature (1)..( 8): Matrix.002 file - promoters60/2724724
aaataaaa

SEQ ID NO: 54835 - DNA, 10 bp, Unknown
  misc_feature (1)..( 10): Matrix.002 file - promoters60/2724724
aaaaaaaata

SEQ ID NO: 54836 - DNA, 9 bp, Unknown
  misc_feature (1)..( 9): Matrix.002 file - promoters60/2724724
aatattttc

SEQ ID NO: 54837 - DNA, 8 bp, Unknown
  misc_feature (1)..( 8): Matrix.002 file - promoters60/2724724
tcacaaaa

SEQ ID NO: 54838 - DNA, 7 bp, Unknown
  misc_feature (1)..( 7): Matrix.002 file - promoters60/2724724
aaacgaa

SEQ ID NO: 54839 - DNA, 6 bp, Unknown
  misc_feature (1)..( 6): Matrix.002 file - promoters60/2724724
ctggtt

SEQ ID NO: 54840 - DNA, 7 bp, Unknown
  misc_feature (1)..( 7): Matrix.002 file - promoters60/2724724
tatctga

SEQ ID NO: 54841 - DNA, 7 bp, Unknown
  misc_feature (1)..( 7): Matrix.002 file - promoters60/2724724
caaagag

SEQ ID NO: 54842 - DNA, 8 bp, Unknown
  misc_feature (1)..( 8): Matrix.002 file - promoters60/2724724
tttgaatt

SEQ ID NO: 54843 - DNA, 8 bp, Unknown
  misc_feature (1)..( 8): Matrix.002 file - promoters60/2724724
ttttattt

SEQ ID NO: 54844 - DNA, 6 bp, Unknown
  misc_feature (1)..( 6): Matrix.002 file - promoters60/2724724
actaaa

SEQ ID NO: 54845 - DNA, 8 bp, Unknown
  misc_feature (1)..( 8): Matrix.002 file - promoters60/2724724
cccactaa

SEQ ID NO: 54846 - DNA, 9 bp, Unknown
  misc_feature (1)..( 9): Matrix.002 file - promoters60/2724724
taaaccaag

SEQ ID NO: 54847 - DNA, 6 bp, Unknown
  misc_feature (1)..( 6): Matrix.002 file - promoters60/2724724
actaaa

SEQ ID NO: 54848 - DNA, 6 bp, Unknown
  misc_feature (1)..( 6): Matrix.002 file - promoters60/2724724
agtaaa

SEQ ID NO: 54849 - DNA, 7 bp, Unknown
  misc_feature (1)..( 7): Matrix.002 file - promoters60/2724724
aatcggg

SEQ ID NO: 54850 - DNA, 10 bp, Unknown
  misc_feature (1)..( 10): Matrix.002 file - promoters60/2724724
ggaaaagaaa

SEQ ID NO: 54851 - DNA, 9 bp, Unknown
  misc_feature (1)..( 9): Matrix.002 file - promoters60/2724724
aaagaaaag

SEQ ID NO: 54852 - DNA, 7 bp, Unknown
  misc_feature (1)..( 7): Matrix.002 file - promoters60/2724724
gtatata

SEQ ID NO: 54853 - DNA, 6 bp, Unknown
  misc_feature (1)..( 6): Matrix.002 file - promoters60/2724736
aagatt

SEQ ID NO: 54854 - DNA, 7 bp, Unknown
  misc_feature (1)..( 7): Matrix.002 file - promoters60/2724736
aaaaatg

SEQ ID NO: 54855 - DNA, 7 bp, Unknown
  misc_feature (1)..( 7): Matrix.002 file - promoters60/2724736
caaattg

SEQ ID NO: 54856 - DNA, 8 bp, Unknown
  misc_feature (1)..( 8): Matrix.002 file - promoters60/2724736
tgactagg

SEQ ID NO: 54857 - DNA, 6 bp, Unknown
  misc_feature (1)..( 6): Matrix.002 file - promoters60/2724736
aatcct

SEQ ID NO: 54858 - DNA, 7 bp, Unknown
  misc_feature (1)..( 7): Matrix.002 file - promoters60/2724736
cacgtgt

SEQ ID NO: 54859 - DNA, 7 bp, Unknown
  misc_feature (1)..( 7): Matrix.002 file - promoters60/2724736
aaaaaga

SEQ ID NO: 54860 - DNA, 6 bp, Unknown
  misc_feature (1)..( 6): Matrix.002 file - promoters60/2724736
agattc

SEQ ID NO: 54861 - DNA, 7 bp, Unknown
  misc_feature (1)..( 7): Matrix.002 file - promoters60/2724736
aatacaa

SEQ ID NO: 54862 - DNA, 7 bp, Unknown
  misc_feature (1)..( 7): Matrix.002 file - promoters60/2724736
ccagatg

SEQ ID NO: 54863 - DNA, 7 bp, Unknown
  misc_feature (1)..( 7): Matrix.002 file - promoters60/2724736
gataata

SEQ ID NO: 54864 - DNA, 7 bp, Unknown
  misc_feature (1)..( 7): Matrix.002 file - promoters60/2724736
aaaattt

SEQ ID NO: 54865 - DNA, 12 bp, Unknown
  misc_feature (1)..( 12): Matrix.002 file - promoters60/2724736
tttaacaaaaag

SEQ ID NO: 54866 - DNA, 10 bp, Unknown
  misc_feature (1)..( 10): Matrix.002 file - promoters60/2724736
agatatcatc

SEQ ID NO: 54867 - DNA, 7 bp, Unknown
  misc_feature (1)..( 7): Matrix.002 file - promoters60/2724736
caattaa

SEQ ID NO: 54868 - DNA, 7 bp, Unknown
  misc_feature (1)..( 7): Matrix.002 file - promoters60/2724736
cagccac

SEQ ID NO: 54869 - DNA, 10 bp, Unknown
  misc_feature (1)..( 10): Matrix.002 file - promoters60/2781251
aaatcgaaat

SEQ ID NO: 54870 - DNA, 10 bp, Unknown
  misc_feature (1)..( 10): Matrix.002 file - promoters60/2781251
cttctttagc

SEQ ID NO: 54871 - DNA, 9 bp, Unknown
  misc_feature (1)..( 9): Matrix.002 file - promoters60/2781786
caattggat

SEQ ID NO: 54872 - DNA, 6 bp, Unknown
  misc_feature (1)..( 6): Matrix.002 file - promoters60/2781786
taagta

SEQ ID NO: 54873 - DNA, 6 bp, Unknown
  misc_feature (1)..( 6): Matrix.002 file - promoters60/2781786
ctttgc

SEQ ID NO: 54874 - DNA, 6 bp, Unknown
  misc_feature (1)..( 6): Matrix.002 file - promoters60/2781786
ggtgag

SEQ ID NO: 54875 - DNA, 11 bp, Unknown
  misc_feature (1)..( 11): Matrix.002 file - promoters60/2781786
ctgaaaattta

SEQ ID NO: 54876 - DNA, 12 bp, Unknown
  misc_feature (1)..( 12): Matrix.002 file - promoters60/2785798
tttttcaatgag

SEQ ID NO: 54877 - DNA, 10 bp, Unknown
  misc_feature (1)..( 10): Matrix.002 file - promoters60/2785798
gatgaaaatt

SEQ ID NO: 54878 - DNA, 9 bp, Unknown
  misc_feature (1)..( 9): Matrix.002 file - promoters60/2785798
attatttta

SEQ ID NO: 54879 - DNA, 5 bp, Unknown
  misc_feature (1)..( 5): Matrix.002 file - promoters60/2785798
aagtt

SEQ ID NO: 54880 - DNA, 8 bp, Unknown
  misc_feature (1)..( 8): Matrix.002 file - promoters60/2918658
aaaaataa

SEQ ID NO: 54881 - DNA, 11 bp, Unknown
  misc_feature (1)..( 11): Matrix.002 file - promoters60/2918658
aaaaaaaatat

SEQ ID NO: 54882 - DNA, 9 bp, Unknown
  misc_feature (1)..( 9): Matrix.002 file - promoters60/2918658
aaaaatatt

SEQ ID NO: 54883 - DNA, 12 bp, Unknown
  misc_feature (1)..( 12): Matrix.002 file - promoters60/2918658
ataatcaaaaac

SEQ ID NO: 54884 - DNA, 6 bp, Unknown
  misc_feature (1)..( 6): Matrix.002 file - promoters60/2918658
aaatgt

SEQ ID NO: 54885 - DNA, 8 bp, Unknown
  misc_feature (1)..( 8): Matrix.002 file - promoters60/2918658
atttattt

SEQ ID NO: 54886 - DNA, 8 bp, Unknown
  misc_feature (1)..( 8): Matrix.002 file - promoters60/2918674
tcatttca

SEQ ID NO: 54887 - DNA, 8 bp, Unknown
  misc_feature (1)..( 8): Matrix.002 file - promoters60/2918674
gtaaaaat

SEQ ID NO: 54888 - DNA, 9 bp, Unknown
  misc_feature (1)..( 9): Matrix.002 file - promoters60/2918680
aaaataggc

SEQ ID NO: 54889 - DNA, 15 bp, Unknown
  misc_feature (1)..( 15): Matrix.002 file - promoters60/2989991
aaatcatctcaatgc

SEQ ID NO: 54890 - DNA, 7 bp, Unknown
  misc_feature (1)..( 7): Matrix.002 file - promoters60/2989991
cataata

SEQ ID NO: 54891 - DNA, 8 bp, Unknown
  misc_feature (1)..( 8): Matrix.002 file - promoters60/2989991
caagaaca

SEQ ID NO: 54892 - DNA, 6 bp, Unknown
  misc_feature (1)..( 6): Matrix.002 file - promoters60/2989991
aattaa

SEQ ID NO: 54893 - DNA, 6 bp, Unknown
  misc_feature (1)..( 6): Matrix.002 file - promoters60/2989991
gatgaa

SEQ ID NO: 54894 - DNA, 6 bp, Unknown
  misc_feature (1)..( 6): Matrix.002 file - promoters60/2989991
ctctct

SEQ ID NO: 54895 - DNA, 7 bp, Unknown
  misc_feature (1)..( 7): Matrix.002 file - promoters60/2989991
tcgaatt

SEQ ID NO: 54896 - DNA, 9 bp, Unknown
  misc_feature (1)..( 9): Matrix.002 file - promoters60/2989991
aagctcgat

SEQ ID NO: 54897 - DNA, 6 bp, Unknown
  misc_feature (1)..( 6): Matrix.002 file - promoters60/2989991
gaaaaa

SEQ ID NO: 54898 - DNA, 7 bp, Unknown
  misc_feature (1)..( 7): Matrix.002 file - promoters60/2989991
aaaaaat

SEQ ID NO: 54899 - DNA, 7 bp, Unknown
  misc_feature (1)..( 7): Matrix.002 file - promoters60/2989991
attggtt

SEQ ID NO: 54900 - DNA, 6 bp, Unknown
  misc_feature (1)..( 6): Matrix.002 file - promoters60/2989991
aaactt

SEQ ID NO: 54901 - DNA, 8 bp, Unknown
  misc_feature (1)..( 8): Matrix.002 file - promoters60/2989991
aaaattaa

SEQ ID NO: 54902 - DNA, 7 bp, Unknown
  misc_feature (1)..( 7): Matrix.002 file - promoters60/2989991
tactata

SEQ ID NO: 54903 - DNA, 10 bp, Unknown
  misc_feature (1)..( 10): Matrix.002 file - promoters60/2990087
aaaactattt

SEQ ID NO: 54904 - DNA, 7 bp, Unknown
  misc_feature (1)..( 7): Matrix.002 file - promoters60/2990087
ttttctt

SEQ ID NO: 54905 - DNA, 7 bp, Unknown
  misc_feature (1)..( 7): Matrix.002 file - promoters60/2990087
tgtagtt

SEQ ID NO: 54906 - DNA, 6 bp, Unknown
  misc_feature (1)..( 6): Matrix.002 file - promoters60/2990087
tctaca

SEQ ID NO: 54907 - DNA, 6 bp, Unknown
  misc_feature (1)..( 6): Matrix.002 file - promoters60/2990087
ctaaaa

SEQ ID NO: 54908 - DNA, 8 bp, Unknown
  misc_feature (1)..( 8): Matrix.002 file - promoters60/2990087
attcatcc

SEQ ID NO: 54909 - DNA, 7 bp, Unknown
  misc_feature (1)..( 7): Matrix.002 file - promoters60/2990087
ttcatta

SEQ ID NO: 54910 - DNA, 7 bp, Unknown
  misc_feature (1)..( 7): Matrix.002 file - promoters60/2990087
aacaaag

SEQ ID NO: 54911 - DNA, 8 bp, Unknown
  misc_feature (1)..( 8): Matrix.002 file - promoters60/2990087
cttagaaa

SEQ ID NO: 54912 - DNA, 7 bp, Unknown
  misc_feature (1)..( 7): Matrix.002 file - promoters60/2990087
tatatat

SEQ ID NO: 54913 - DNA, 8 bp, Unknown
  misc_feature (1)..( 8): Matrix.002 file - promoters60/2990087
aataaaat

SEQ ID NO: 54914 - DNA, 10 bp, Unknown
  misc_feature (1)..( 10): Matrix.002 file - promoters60/2990087
ttaatatttt

SEQ ID NO: 54915 - DNA, 7 bp, Unknown
  misc_feature (1)..( 7): Matrix.002 file - promoters60/2990087
ttatttt

SEQ ID NO: 54916 - DNA, 6 bp, Unknown
  misc_feature (1)..( 6): Matrix.002 file - promoters60/2990087
taacat

SEQ ID NO: 54917 - DNA, 7 bp, Unknown
  misc_feature (1)..( 7): Matrix.002 file - promoters60/2990087
aatgtga

SEQ ID NO: 54918 - DNA, 8 bp, Unknown
  misc_feature (1)..( 8): Matrix.002 file - promoters60/2990087
aaaaaaaa

SEQ ID NO: 54919 - DNA, 8 bp, Unknown
  misc_feature (1)..( 8): Matrix.002 file - promoters60/2990087
atttgatt

SEQ ID NO: 54920 - DNA, 10 bp, Unknown
  misc_feature (1)..( 10): Matrix.002 file - promoters60/2990087
aaaaaaactt

SEQ ID NO: 54921 - DNA, 7 bp, Unknown
  misc_feature (1)..( 7): Matrix.002 file - promoters60/2990087
cttaaga

SEQ ID NO: 54922 - DNA, 6 bp, Unknown
  misc_feature (1)..( 6): Matrix.002 file - promoters60/2990087
aaacaa

SEQ ID NO: 54923 - DNA, 10 bp, Unknown
  misc_feature (1)..( 10): Matrix.002 file - promoters60/2990087
ttgaaagtac

SEQ ID NO: 54924 - DNA, 7 bp, Unknown
  misc_feature (1)..( 7): Matrix.002 file - promoters60/2990087
ataaagg

SEQ ID NO: 54925 - DNA, 7 bp, Unknown
  misc_feature (1)..( 7): Matrix.002 file - promoters60/2990087
ataaact

SEQ ID NO: 54926 - DNA, 7 bp, Unknown
  misc_feature (1)..( 7): Matrix.002 file - promoters60/2990087
ttgatta

SEQ ID NO: 54927 - DNA, 10 bp, Unknown
  misc_feature (1)..( 10): Matrix.002 file - promoters60/2990249
cgacaacttt

SEQ ID NO: 54928 - DNA, 6 bp, Unknown
  misc_feature (1)..( 6): Matrix.002 file - promoters60/2990249
ttttct

SEQ ID NO: 54929 - DNA, 6 bp, Unknown
  misc_feature (1)..( 6): Matrix.002 file - promoters60/2990249
tatata

SEQ ID NO: 54930 - DNA, 6 bp, Unknown
  misc_feature (1)..( 6): Matrix.002 file - promoters60/2990249
cactta

SEQ ID NO: 54931 - DNA, 7 bp, Unknown
  misc_feature (1)..( 7): Matrix.002 file - promoters60/2990249
agaaaca

SEQ ID NO: 54932 - DNA, 9 bp, Unknown
  misc_feature (1)..( 9): Matrix.002 file - promoters60/2990249
aaacaatat

SEQ ID NO: 54933 - DNA, 6 bp, Unknown
  misc_feature (1)..( 6): Matrix.002 file - promoters60/2990249
aacaat

SEQ ID NO: 54934 - DNA, 9 bp, Unknown
  misc_feature (1)..( 9): Matrix.002 file - promoters60/2990249
tgagtacac

SEQ ID NO: 54935 - DNA, 6 bp, Unknown
  misc_feature (1)..( 6): Matrix.002 file - promoters60/2990249
aagtgg

SEQ ID NO: 54936 - DNA, 6 bp, Unknown
  misc_feature (1)..( 6): Matrix.002 file - promoters60/2990249
gaataa

SEQ ID NO: 54937 - DNA, 6 bp, Unknown
  misc_feature (1)..( 6): Matrix.002 file - promoters60/2990249
tgtata

SEQ ID NO: 54938 - DNA, 9 bp, Unknown
  misc_feature (1)..( 9): Matrix.002 file - promoters60/2990249
caaaagcaa

SEQ ID NO: 54939 - DNA, 7 bp, Unknown
  misc_feature (1)..( 7): Matrix.002 file - promoters60/2990249
aaaatct

SEQ ID NO: 54940 - DNA, 7 bp, Unknown
  misc_feature (1)..( 7): Matrix.002 file - promoters60/2990249
ttctgtt

SEQ ID NO: 54941 - DNA, 7 bp, Unknown
  misc_feature (1)..( 7): Matrix.002 file - promoters60/2990249
gatgttc

SEQ ID NO: 54942 - DNA, 6 bp, Unknown
  misc_feature (1)..( 6): Matrix.002 file - promoters60/2990249
aaaaac

SEQ ID NO: 54943 - DNA, 8 bp, Unknown
  misc_feature (1)..( 8): Matrix.002 file - promoters60/2990249
acaaaacg

SEQ ID NO: 54944 - DNA, 9 bp, Unknown
  misc_feature (1)..( 9): Matrix.002 file - promoters60/2990249
tacacaaaa

SEQ ID NO: 54945 - DNA, 6 bp, Unknown
  misc_feature (1)..( 6): Matrix.002 file - promoters60/2990249
aattaa

SEQ ID NO: 54946 - DNA, 6 bp, Unknown
  misc_feature (1)..( 6): Matrix.002 file - promoters60/2990249
tctttt

SEQ ID NO: 54947 - DNA, 6 bp, Unknown
  misc_feature (1)..( 6): Matrix.002 file - promoters60/2990249
tatata

SEQ ID NO: 54948 - DNA, 8 bp, Unknown
  misc_feature (1)..( 8): Matrix.002 file - promoters60/2990263
aatttaac

SEQ ID NO: 54949 - DNA, 9 bp, Unknown
  misc_feature (1)..( 9): Matrix.002 file - promoters60/2990263
tataaaata

SEQ ID NO: 54950 - DNA, 9 bp, Unknown
  misc_feature (1)..( 9): Matrix.002 file - promoters60/2990263
atttttaca

SEQ ID NO: 54951 - DNA, 12 bp, Unknown
  misc_feature (1)..( 12): Matrix.002 file - promoters60/2990263
caaatcgaaaaa

SEQ ID NO: 54952 - DNA, 8 bp, Unknown
  misc_feature (1)..( 8): Matrix.002 file - promoters60/2990528
caaaacaa

SEQ ID NO: 54953 - DNA, 8 bp, Unknown
  misc_feature (1)..( 8): Matrix.002 file - promoters60/2990528
attcaatt

SEQ ID NO: 54954 - DNA, 7 bp, Unknown
  misc_feature (1)..( 7): Matrix.002 file - promoters60/2990528
cttatct

SEQ ID NO: 54955 - DNA, 15 bp, Unknown
  misc_feature (1)..( 15): Matrix.002 file - promoters60/2990528
acaaaaataaatcac

SEQ ID NO: 54956 - DNA, 9 bp, Unknown
  misc_feature (1)..( 9): Matrix.002 file - promoters60/2990544
ctttatttg

SEQ ID NO: 54957 - DNA, 8 bp, Unknown
  misc_feature (1)..( 8): Matrix.002 file - promoters60/2990548
tattcatt

SEQ ID NO: 54958 - DNA, 7 bp, Unknown
  misc_feature (1)..( 7): Matrix.002 file - promoters60/2990548
gtttgtc

SEQ ID NO: 54959 - DNA, 9 bp, Unknown
  misc_feature (1)..( 9): Matrix.002 file - promoters60/2990548
gaacgcaga

SEQ ID NO: 54960 - DNA, 8 bp, Unknown
  misc_feature (1)..( 8): Matrix.002 file - promoters60/2990548
cttcactg

SEQ ID NO: 54961 - DNA, 10 bp, Unknown
  misc_feature (1)..( 10): Matrix.002 file - promoters60/2990548
cttcactttg

SEQ ID NO: 54962 - DNA, 12 bp, Unknown
  misc_feature (1)..( 12): Matrix.002 file - promoters60/2990611
ctaaaaatatac

SEQ ID NO: 54963 - DNA, 10 bp, Unknown
  misc_feature (1)..( 10): Matrix.002 file - promoters60/2990611
aaattaacct

SEQ ID NO: 54964 - DNA, 9 bp, Unknown
  misc_feature (1)..( 9): Matrix.002 file - promoters60/2990611
aattaaaaa

SEQ ID NO: 54965 - DNA, 8 bp, Unknown
  misc_feature (1)..( 8): Matrix.002 file - promoters60/2990611
attgttta

SEQ ID NO: 54966 - DNA, 13 bp, Unknown
  misc_feature (1)..( 13): Matrix.002 file - promoters60/2990611
aaaaaggaaagaa

SEQ ID NO: 54967 - DNA, 7 bp, Unknown
  misc_feature (1)..( 7): Matrix.002 file - promoters60/2990616
ttaataa

SEQ ID NO: 54968 - DNA, 6 bp, Unknown
  misc_feature (1)..( 6): Matrix.002 file - promoters60/2990616
caaaac

SEQ ID NO: 54969 - DNA, 7 bp, Unknown
  misc_feature (1)..( 7): Matrix.002 file - promoters60/2990616
tgtgttg

SEQ ID NO: 54970 - DNA, 7 bp, Unknown
  misc_feature (1)..( 7): Matrix.002 file - promoters60/2990616
aaagtta

SEQ ID NO: 54971 - DNA, 7 bp, Unknown
  misc_feature (1)..( 7): Matrix.002 file - promoters60/2990616
agaaaaa

SEQ ID NO: 54972 - DNA, 7 bp, Unknown
  misc_feature (1)..( 7): Matrix.002 file - promoters60/2990616
attcaca

SEQ ID NO: 54973 - DNA, 7 bp, Unknown
  misc_feature (1)..( 7): Matrix.002 file - promoters60/2990616
aaataag

SEQ ID NO: 54974 - DNA, 6 bp, Unknown
  misc_feature (1)..( 6): Matrix.002 file - promoters60/2990616
tttatg

SEQ ID NO: 54975 - DNA, 7 bp, Unknown
  misc_feature (1)..( 7): Matrix.002 file - promoters60/2990616
taaacta

SEQ ID NO: 54976 - DNA, 7 bp, Unknown
  misc_feature (1)..( 7): Matrix.002 file - promoters60/2990616
ctggact

SEQ ID NO: 54977 - DNA, 6 bp, Unknown
  misc_feature (1)..( 6): Matrix.002 file - promoters60/2990616
aaggta

SEQ ID NO: 54978 - DNA, 10 bp, Unknown
  misc_feature (1)..( 10): Matrix.002 file - promoters60/2990616
taatctatga

SEQ ID NO: 54979 - DNA, 7 bp, Unknown
  misc_feature (1)..( 7): Matrix.002 file - promoters60/2990616
tatagtt

SEQ ID NO: 54980 - DNA, 11 bp, Unknown
  misc_feature (1)..( 11): Matrix.002 file - promoters60/2990616
aaacttcatct

SEQ ID NO: 54981 - DNA, 7 bp, Unknown
  misc_feature (1)..( 7): Matrix.002 file - promoters60/2990616
tatatgt

SEQ ID NO: 54982 - DNA, 7 bp, Unknown
  misc_feature (1)..( 7): Matrix.002 file - promoters60/2990616
taagatt

SEQ ID NO: 54983 - DNA, 7 bp, Unknown
  misc_feature (1)..( 7): Matrix.002 file - promoters60/2990616
tggatat

SEQ ID NO: 54984 - DNA, 8 bp, Unknown
  misc_feature (1)..( 8): Matrix.002 file - promoters60/2990616
attgtttt

SEQ ID NO: 54985 - DNA, 8 bp, Unknown
  misc_feature (1)..( 8): Matrix.002 file - promoters60/2990659
ttaaaaaa

SEQ ID NO: 54986 - DNA, 8 bp, Unknown
  misc_feature (1)..( 8): Matrix.002 file - promoters60/2990659
aaaatgaa

SEQ ID NO: 54987 - DNA, 7 bp, Unknown
  misc_feature (1)..( 7): Matrix.002 file - promoters60/2990659
atcattg

SEQ ID NO: 54988 - DNA, 8 bp, Unknown
  misc_feature (1)..( 8): Matrix.002 file - promoters60/2990659
aattcata

SEQ ID NO: 54989 - DNA, 10 bp, Unknown
  misc_feature (1)..( 10): Matrix.002 file - promoters60/2990659
tttttcacat

SEQ ID NO: 54990 - DNA, 7 bp, Unknown
  misc_feature (1)..( 7): Matrix.002 file - promoters60/2990659
acatttt

SEQ ID NO: 54991 - DNA, 8 bp, Unknown
  misc_feature (1)..( 8): Matrix.002 file - promoters60/2990659
aaagattt

SEQ ID NO: 54992 - DNA, 7 bp, Unknown
  misc_feature (1)..( 7): Matrix.002 file - promoters60/2990659
tttattt

SEQ ID NO: 54993 - DNA, 7 bp, Unknown
  misc_feature (1)..( 7): Matrix.002 file - promoters60/2990659
tttaatt

SEQ ID NO: 54994 - DNA, 7 bp, Unknown
  misc_feature (1)..( 7): Matrix.002 file - promoters60/2990659
taatgta

SEQ ID NO: 54995 - DNA, 6 bp, Unknown
  misc_feature (1)..( 6): Matrix.002 file - promoters60/2990659
acgatt

SEQ ID NO: 54996 - DNA, 7 bp, Unknown
  misc_feature (1)..( 7): Matrix.002 file - promoters60/2990659
tcaaaca

SEQ ID NO: 54997 - DNA, 8 bp, Unknown
  misc_feature (1)..( 8): Matrix.002 file - promoters60/2990659
atataact

SEQ ID NO: 54998 - DNA, 6 bp, Unknown
  misc_feature (1)..( 6): Matrix.002 file - promoters60/2990659
tgtttt

SEQ ID NO: 54999 - DNA, 8 bp, Unknown
  misc_feature (1)..( 8): Matrix.002 file - promoters60/2990659
taatctat

SEQ ID NO: 55000 - DNA, 9 bp, Unknown
  misc_feature (1)..( 9): Matrix.002 file - promoters60/2990659
tcaatgcat

SEQ ID NO: 55001 - DNA, 13 bp, Unknown
  misc_feature (1)..( 13): Matrix.002 file - promoters60/2990659
ataagattcacat

SEQ ID NO: 55002 - DNA, 7 bp, Unknown
  misc_feature (1)..( 7): Matrix.002 file - promoters60/2990659
tcactta

SEQ ID NO: 55003 - DNA, 7 bp, Unknown
  misc_feature (1)..( 7): Matrix.002 file - promoters60/2990659
ctaccaa

SEQ ID NO: 55004 - DNA, 8 bp, Unknown
  misc_feature (1)..( 8): Matrix.002 file - promoters60/2990659
aaaataag

SEQ ID NO: 55005 - DNA, 6 bp, Unknown
  misc_feature (1)..( 6): Matrix.002 file - promoters60/2990659
atagat

SEQ ID NO: 55006 - DNA, 7 bp, Unknown
  misc_feature (1)..( 7): Matrix.002 file - promoters60/2990659
agagata

SEQ ID NO: 55007 - DNA, 6 bp, Unknown
  misc_feature (1)..( 6): Matrix.002 file - promoters60/2990659
ttttgg

SEQ ID NO: 55008 - DNA, 6 bp, Unknown
  misc_feature (1)..( 6): Matrix.002 file - promoters60/2990659
taagat

SEQ ID NO: 55009 - DNA, 6 bp, Unknown
  misc_feature (1)..( 6): Matrix.002 file - promoters60/2990659
aaagaa

SEQ ID NO: 55010 - DNA, 12 bp, Unknown
  misc_feature (1)..( 12): Matrix.002 file - promoters60/2990659
aaaaacaaaaca

SEQ ID NO: 55011 - DNA, 6 bp, Unknown
  misc_feature (1)..( 6): Matrix.002 file - promoters60/2990659
aaaaat

SEQ ID NO: 55012 - DNA, 6 bp, Unknown
  misc_feature (1)..( 6): Matrix.002 file - promoters60/2990659
taaccc

SEQ ID NO: 55013 - DNA, 7 bp, Unknown
  misc_feature (1)..( 7): Matrix.002 file - promoters60/2990777
attcttc

SEQ ID NO: 55014 - DNA, 6 bp, Unknown
  misc_feature (1)..( 6): Matrix.002 file - promoters60/2990777
agagag

SEQ ID NO: 55015 - DNA, 8 bp, Unknown
  misc_feature (1)..( 8): Matrix.002 file - promoters60/2990777
attcaaaa

SEQ ID NO: 55016 - DNA, 8 bp, Unknown
  misc_feature (1)..( 8): Matrix.002 file - promoters60/2990777
tttatgtt

SEQ ID NO: 55017 - DNA, 6 bp, Unknown
  misc_feature (1)..( 6): Matrix.002 file - promoters60/2990777
aaaaag

SEQ ID NO: 55018 - DNA, 6 bp, Unknown
  misc_feature (1)..( 6): Matrix.002 file - promoters60/2990777
tataaa

SEQ ID NO: 55019 - DNA, 7 bp, Unknown
  misc_feature (1)..( 7): Matrix.002 file - promoters60/2990777
tcgcgaa

SEQ ID NO: 55020 - DNA, 7 bp, Unknown
  misc_feature (1)..( 7): Matrix.002 file - promoters60/2990777
agccggt

SEQ ID NO: 55021 - DNA, 8 bp, Unknown
  misc_feature (1)..( 8): Matrix.002 file - promoters60/2990777
aaaaatat

SEQ ID NO: 55022 - DNA, 6 bp, Unknown
  misc_feature (1)..( 6): Matrix.002 file - promoters60/2990777
atctga

SEQ ID NO: 55023 - DNA, 6 bp, Unknown
  misc_feature (1)..( 6): Matrix.002 file - promoters60/2990777
ccaaag

SEQ ID NO: 55024 - DNA, 10 bp, Unknown
  misc_feature (1)..( 10): Matrix.002 file - promoters60/2990777
ctcaatctaa

SEQ ID NO: 55025 - DNA, 6 bp, Unknown
  misc_feature (1)..( 6): Matrix.002 file - promoters60/2990777
gcgcag

SEQ ID NO: 55026 - DNA, 9 bp, Unknown
  misc_feature (1)..( 9): Matrix.002 file - promoters60/2990777
aaagtaaag

SEQ ID NO: 55027 - DNA, 6 bp, Unknown
  misc_feature (1)..( 6): Matrix.002 file - promoters60/2990777
agtaaa

SEQ ID NO: 55028 - DNA, 7 bp, Unknown
  misc_feature (1)..( 7): Matrix.002 file - promoters60/2990777
aatcggg

SEQ ID NO: 55029 - DNA, 8 bp, Unknown
  misc_feature (1)..( 8): Matrix.002 file - promoters60/2990777
gaaacaaa

SEQ ID NO: 55030 - DNA, 10 bp, Unknown
  misc_feature (1)..( 10): Matrix.002 file - promoters60/2990777
ggaaaagaaa

SEQ ID NO: 55031 - DNA, 7 bp, Unknown
  misc_feature (1)..( 7): Matrix.002 file - promoters60/2990777
cccacta

SEQ ID NO: 55032 - DNA, 7 bp, Unknown
  misc_feature (1)..( 7): Matrix.002 file - promoters60/2990777
gtatata

SEQ ID NO: 55033 - DNA, 7 bp, Unknown
  misc_feature (1)..( 7): Matrix.002 file - promoters60/2991101
tctattt

SEQ ID NO: 55034 - DNA, 12 bp, Unknown
  misc_feature (1)..( 12): Matrix.002 file - promoters60/2991101
ggtttatttata

SEQ ID NO: 55035 - DNA, 9 bp, Unknown
  misc_feature (1)..( 9): Matrix.002 file - promoters60/2991101
tctttttcc

SEQ ID NO: 55036 - DNA, 6 bp, Unknown
  misc_feature (1)..( 6): Matrix.002 file - promoters60/2991101
taaact

SEQ ID NO: 55037 - DNA, 6 bp, Unknown
  misc_feature (1)..( 6): Matrix.002 file - promoters60/2991101
tattcc

SEQ ID NO: 55038 - DNA, 6 bp, Unknown
  misc_feature (1)..( 6): Matrix.002 file - promoters60/2991101
agaaaa

SEQ ID NO: 55039 - DNA, 8 bp, Unknown
  misc_feature (1)..( 8): Matrix.002 file - promoters60/2991101
aaaaggta

SEQ ID NO: 55040 - DNA, 10 bp, Unknown
  misc_feature (1)..( 10): Matrix.002 file - promoters60/2991101
tttatttata

SEQ ID NO: 55041 - DNA, 7 bp, Unknown
  misc_feature (1)..( 7): Matrix.002 file - promoters60/2991101
aaatata

SEQ ID NO: 55042 - DNA, 7 bp, Unknown
  misc_feature (1)..( 7): Matrix.002 file - promoters60/2991101
atgatga

SEQ ID NO: 55043 - DNA, 8 bp, Unknown
  misc_feature (1)..( 8): Matrix.002 file - promoters60/2991101
attgtttt

SEQ ID NO: 55044 - DNA, 8 bp, Unknown
  misc_feature (1)..( 8): Matrix.002 file - promoters60/2991101
tgagtatt

SEQ ID NO: 55045 - DNA, 8 bp, Unknown
  misc_feature (1)..( 8): Matrix.002 file - promoters60/2991101
aagaggat

SEQ ID NO: 55046 - DNA, 7 bp, Unknown
  misc_feature (1)..( 7): Matrix.002 file - promoters60/2991101
tctaaaa

SEQ ID NO: 55047 - DNA, 6 bp, Unknown
  misc_feature (1)..( 6): Matrix.002 file - promoters60/2991122
aaccta

SEQ ID NO: 55048 - DNA, 6 bp, Unknown
  misc_feature (1)..( 6): Matrix.002 file - promoters60/2991122
ggagac

SEQ ID NO: 55049 - DNA, 8 bp, Unknown
  misc_feature (1)..( 8): Matrix.002 file - promoters60/2991122
ttggctgc

SEQ ID NO: 55050 - DNA, 7 bp, Unknown
  misc_feature (1)..( 7): Matrix.002 file - promoters60/2991122
ggtggta

SEQ ID NO: 55051 - DNA, 7 bp, Unknown
  misc_feature (1)..( 7): Matrix.002 file - promoters60/2991122
aggacag

SEQ ID NO: 55052 - DNA, 6 bp, Unknown
  misc_feature (1)..( 6): Matrix.002 file - promoters60/2991122
tgtgaa

SEQ ID NO: 55053 - DNA, 7 bp, Unknown
  misc_feature (1)..( 7): Matrix.002 file - promoters60/2991122
tagcaac

SEQ ID NO: 55054 - DNA, 8 bp, Unknown
  misc_feature (1)..( 8): Matrix.002 file - promoters60/2991122
caaatgaa

SEQ ID NO: 55055 - DNA, 6 bp, Unknown
  misc_feature (1)..( 6): Matrix.002 file - promoters60/2991122
ggctga

SEQ ID NO: 55056 - DNA, 11 bp, Unknown
  misc_feature (1)..( 11): Matrix.002 file - promoters60/2991122
agggtctcaga

SEQ ID NO: 55057 - DNA, 6 bp, Unknown
  misc_feature (1)..( 6): Matrix.002 file - promoters60/2991122
agattt

SEQ ID NO: 55058 - DNA, 9 bp, Unknown
  misc_feature (1)..( 9): Matrix.002 file - promoters60/2991235
catagagaa

SEQ ID NO: 55059 - DNA, 7 bp, Unknown
  misc_feature (1)..( 7): Matrix.002 file - promoters60/2991235
gataaca

SEQ ID NO: 55060 - DNA, 8 bp, Unknown
  misc_feature (1)..( 8): Matrix.002 file - promoters60/2991235
ttgattat

SEQ ID NO: 55061 - DNA, 7 bp, Unknown
  misc_feature (1)..( 7): Matrix.002 file - promoters60/2991235
tcaacaa

SEQ ID NO: 55062 - DNA, 8 bp, Unknown
  misc_feature (1)..( 8): Matrix.002 file - promoters60/2991235
caacacaa

SEQ ID NO: 55063 - DNA, 8 bp, Unknown
  misc_feature (1)..( 8): Matrix.002 file - promoters60/2991235
gaaaaaac

SEQ ID NO: 55064 - DNA, 6 bp, Unknown
  misc_feature (1)..( 6): Matrix.002 file - promoters60/2991235
gaagat

SEQ ID NO: 55065 - DNA, 10 bp, Unknown
  misc_feature (1)..( 10): Matrix.002 file - promoters60/2991235
gaagcattta

SEQ ID NO: 55066 - DNA, 7 bp, Unknown
  misc_feature (1)..( 7): Matrix.002 file - promoters60/2991235
cgtacat

SEQ ID NO: 55067 - DNA, 8 bp, Unknown
  misc_feature (1)..( 8): Matrix.002 file - promoters60/2991235
gtagagaa

SEQ ID NO: 55068 - DNA, 7 bp, Unknown
  misc_feature (1)..( 7): Matrix.002 file - promoters60/2991235
acaggta

SEQ ID NO: 55069 - DNA, 7 bp, Unknown
  misc_feature (1)..( 7): Matrix.002 file - promoters60/2991235
tttccag

SEQ ID NO: 55070 - DNA, 6 bp, Unknown
  misc_feature (1)..( 6): Matrix.002 file - promoters60/2991235
gattct

SEQ ID NO: 55071 - DNA, 8 bp, Unknown
  misc_feature (1)..( 8): Matrix.002 file - promoters60/2991235
attgcaga

SEQ ID NO: 55072 - DNA, 7 bp, Unknown
  misc_feature (1)..( 7): Matrix.002 file - promoters60/2991235
agaatgg

SEQ ID NO: 55073 - DNA, 9 bp, Unknown
  misc_feature (1)..( 9): Matrix.002 file - promoters60/2991235
gactctact

SEQ ID NO: 55074 - DNA, 6 bp, Unknown
  misc_feature (1)..( 6): Matrix.002 file - promoters60/2991235
aaagaa

SEQ ID NO: 55075 - DNA, 8 bp, Unknown
  misc_feature (1)..( 8): Matrix.002 file - promoters60/2991235
aagaagaa

SEQ ID NO: 55076 - DNA, 6 bp, Unknown
  misc_feature (1)..( 6): Matrix.002 file - promoters60/2991235
caaaag

SEQ ID NO: 55077 - DNA, 6 bp, Unknown
  misc_feature (1)..( 6): Matrix.002 file - promoters60/2991235
ttgaag

SEQ ID NO: 55078 - DNA, 7 bp, Unknown
  misc_feature (1)..( 7): Matrix.002 file - promoters60/2991235
ctccatt

SEQ ID NO: 55079 - DNA, 10 bp, Unknown
  misc_feature (1)..( 10): Matrix.002 file - promoters60/2991239
tcaaaaaaaa

SEQ ID NO: 55080 - DNA, 9 bp, Unknown
  misc_feature (1)..( 9): Matrix.002 file - promoters60/2991239
ctaatctaa

SEQ ID NO: 55081 - DNA, 10 bp, Unknown
  misc_feature (1)..( 10): Matrix.002 file - promoters60/2991239
aaaaatgcaa

SEQ ID NO: 55082 - DNA, 8 bp, Unknown
  misc_feature (1)..( 8): Matrix.002 file - promoters60/2991239
aaatatag

SEQ ID NO: 55083 - DNA, 28 bp, Unknown
  misc_feature (1)..( 28): Matrix.002 file - promoters60/2991239
aagcctatataaaaggctacaagcatga

SEQ ID NO: 55084 - DNA, 12 bp, Unknown
  misc_feature (1)..( 12): Matrix.002 file - promoters60/2991239
attaaaaatgga

SEQ ID NO: 55085 - DNA, 32 bp, Unknown; identical to SEQ ID NO: 37195
  misc_feature (1)..( 32): Matrix.002 file - promoters60/2991239

SEQ ID NO: 55086 - DNA, 9 bp, Unknown
  misc_feature (1)..( 9): Matrix.002 file - promoters60/2991239
taaatacaa

SEQ ID NO: 55087 - DNA, 8 bp, Unknown
  misc_feature (1)..( 8): Matrix.002 file - promoters60/2991239
taatacaa

SEQ ID NO: 55088 - DNA, 15 bp, Unknown
  misc_feature (1)..( 15): Matrix.002 file - promoters60/2991239
attgaagacttttca

SEQ ID NO: 55089 - DNA, 14 bp, Unknown
  misc_feature (1)..( 14): Matrix.002 file - promoters60/2991239
ctataagcatttaa

SEQ ID NO: 55090 - DNA, 25 bp, Unknown
  misc_feature (1)..( 25): Matrix.002 file - promoters60/2991239
agcatttaagtctatcgctagactg

SEQ ID NO: 55091 - DNA, 12 bp, Unknown
  misc_feature (1)..( 12): Matrix.002 file - promoters60/2991239
ctttcaaataaa

SEQ ID NO: 55092 - DNA, 9 bp, Unknown
  misc_feature (1)..( 9): Matrix.002 file - promoters60/2991281
atttgagag

SEQ ID NO: 55093 - DNA, 10 bp, Unknown
  misc_feature (1)..( 10): Matrix.002 file - promoters60/2991281
aaaaaatatt

SEQ ID NO: 55094 - DNA, 9 bp, Unknown
  misc_feature (1)..( 9): Matrix.002 file - promoters60/2991281
atgaaattt

SEQ ID NO: 55095 - DNA, 6 bp, Unknown
  misc_feature (1)..( 6): Matrix.002 file - promoters60/2991333
ctaaat

SEQ ID NO: 55096 - DNA, 7 bp, Unknown
  misc_feature (1)..( 7): Matrix.002 file - promoters60/2991333
aataaag

SEQ ID NO: 55097 - DNA, 6 bp, Unknown
  misc_feature (1)..( 6): Matrix.002 file - promoters60/2991333
tgaaaa

SEQ ID NO: 55098 - DNA, 6 bp, Unknown
  misc_feature (1)..( 6): Matrix.002 file - promoters60/2991333
attaag

SEQ ID NO: 55099 - DNA, 6 bp, Unknown
  misc_feature (1)..( 6): Matrix.002 file - promoters60/2991333
aaaatg

SEQ ID NO: 55100 - DNA, 7 bp, Unknown
  misc_feature (1)..( 7): Matrix.002 file - promoters60/2991333
ttcctct

SEQ ID NO: 55101 - DNA, 6 bp, Unknown
  misc_feature (1)..( 6): Matrix.002 file - promoters60/2991333
tcaaat

SEQ ID NO: 55102 - DNA, 7 bp, Unknown
  misc_feature (1)..( 7): Matrix.002 file - promoters60/2991333
aacgaat

SEQ ID NO: 55103 - DNA, 8 bp, Unknown
  misc_feature (1)..( 8): Matrix.002 file - promoters60/2991333
aaaataaa

SEQ ID NO: 55104 - DNA, 7 bp, Unknown
  misc_feature (1)..( 7): Matrix.002 file - promoters60/2991333
gaaaaaa

SEQ ID NO: 55105 - DNA, 7 bp, Unknown
  misc_feature (1)..( 7): Matrix.002 file - promoters60/2991333
accacac

SEQ ID NO: 55106 - DNA, 6 bp, Unknown
  misc_feature (1)..( 6): Matrix.002 file - promoters60/2991333
aaacac

SEQ ID NO: 55107 - DNA, 6 bp, Unknown
  misc_feature (1)..( 6): Matrix.002 file - promoters60/2991333
cttctc

SEQ ID NO: 55108 - DNA, 8 bp, Unknown
  misc_feature (1)..( 8): Matrix.002 file - promoters60/2991333
tctccaaa

SEQ ID NO: 55109 - DNA, 8 bp, Unknown
  misc_feature (1)..( 8): Matrix.002 file - promoters60/2991333
attaaaga

SEQ ID NO: 55110 - DNA, 6 bp, Unknown
  misc_feature (1)..( 6): Matrix.002 file - promoters60/2991333
aaattt

SEQ ID NO: 55111 - DNA, 6 bp, Unknown
  misc_feature (1)..( 6): Matrix.002 file - promoters60/2991333
aaggat

SEQ ID NO: 55112 - DNA, 10 bp, Unknown
  misc_feature (1)..( 10): Matrix.002 file - promoters60/2991466
atactaattg

SEQ ID NO: 55113 - DNA, 10 bp, Unknown
  misc_feature (1)..( 10): Matrix.002 file - promoters60/2991466
ttcaatttta

SEQ ID NO: 55114 - DNA, 7 bp, Unknown
  misc_feature (1)..( 7): Matrix.002 file - promoters60/2991466
caaagta

SEQ ID NO: 55115 - DNA, 7 bp, Unknown
  misc_feature (1)..( 7): Matrix.002 file - promoters60/2991466
ttgccac

SEQ ID NO: 55116 - DNA, 10 bp, Unknown
  misc_feature (1)..( 10): Matrix.002 file - promoters60/2991466
atttttcaaa

SEQ ID NO: 55117 - DNA, 6 bp, Unknown
  misc_feature (1)..( 6): Matrix.002 file - promoters60/2991466
caaaac

SEQ ID NO: 55118 - DNA, 7 bp, Unknown
  misc_feature (1)..( 7): Matrix.002 file - promoters60/2991466
aatgatc

SEQ ID NO: 55119 - DNA, 7 bp, Unknown
  misc_feature (1)..( 7): Matrix.002 file - promoters60/2991466
aatcttg

SEQ ID NO: 55120 - DNA, 8 bp, Unknown
  misc_feature (1)..( 8): Matrix.002 file - promoters60/2991466
acaaagaa

SEQ ID NO: 55121 - DNA, 6 bp, Unknown
  misc_feature (1)..( 6): Matrix.002 file - promoters60/2991466
aaaaaa

SEQ ID NO: 55122 - DNA, 7 bp, Unknown
  misc_feature (1)..( 7): Matrix.002 file - promoters60/2991466
tacaccc

SEQ ID NO: 55123 - DNA, 9 bp, Unknown
  misc_feature (1)..( 9): Matrix.002 file - promoters60/2991466
tcattttta

SEQ ID NO: 55124 - DNA, 6 bp, Unknown
  misc_feature (1)..( 6): Matrix.002 file - promoters60/2991466
agaaaa

SEQ ID NO: 55125 - DNA, 9 bp, Unknown
  misc_feature (1)..( 9): Matrix.002 file - promoters60/2991466
agaacaaat

SEQ ID NO: 55126 - DNA, 7 bp, Unknown
  misc_feature (1)..( 7): Matrix.002 file - promoters60/2991466
ttagatt

SEQ ID NO: 55127 - DNA, 6 bp, Unknown
  misc_feature (1)..( 6): Matrix.002 file - promoters60/2991466
aaccaa

SEQ ID NO: 55128 - DNA, 7 bp, Unknown
  misc_feature (1)..( 7): Matrix.002 file - promoters60/2991466
ataatac

SEQ ID NO: 55129 - DNA, 9 bp, Unknown
  misc_feature (1)..( 9): Matrix.002 file - promoters60/2991466
aaaataaat

SEQ ID NO: 55130 - DNA, 7 bp, Unknown
  misc_feature (1)..( 7): Matrix.002 file - promoters60/2991466
aaaaaga

SEQ ID NO: 55131 - DNA, 6 bp, Unknown
  misc_feature (1)..( 6): Matrix.002 file - promoters60/2991466
tgaatt

SEQ ID NO: 55132 - DNA, 6 bp, Unknown
  misc_feature (1)..( 6): Matrix.002 file - promoters60/2991466
aaaaat

SEQ ID NO: 55133 - DNA, 11 bp, Unknown
  misc_feature (1)..( 11): Matrix.002 file - promoters60/2991489
aaaaagggcca

SEQ ID NO: 55134 - DNA, 7 bp, Unknown
  misc_feature (1)..( 7): Matrix.002 file - promoters60/2991507
aaagtta

SEQ ID NO: 55135 - DNA, 7 bp, Unknown
  misc_feature (1)..( 7): Matrix.002 file - promoters60/2991507
tcaatat

SEQ ID NO: 55136 - DNA, 8 bp, Unknown
  misc_feature (1)..( 8): Matrix.002 file - promoters60/2991507
tcattttt

SEQ ID NO: 55137 - DNA, 9 bp, Unknown
  misc_feature (1)..( 9): Matrix.002 file - promoters60/2991507
tgtttttta

SEQ ID NO: 55138 - DNA, 14 bp, Unknown
  misc_feature (1)..( 14): Matrix.002 file - promoters60/2991507
ttttactaactttc

SEQ ID NO: 55139 - DNA, 7 bp, Unknown
  misc_feature (1)..( 7): Matrix.002 file - promoters60/2991507
taaaatc

SEQ ID NO: 55140 - DNA, 6 bp, Unknown
  misc_feature (1)..( 6): Matrix.002 file - promoters60/2991507
tagtta

SEQ ID NO: 55141 - DNA, 7 bp, Unknown
  misc_feature (1)..( 7): Matrix.002 file - promoters60/2991507
tttcaca

SEQ ID NO: 55142 - DNA, 7 bp, Unknown
  misc_feature (1)..( 7): Matrix.002 file - promoters60/2991507
attgtgg

SEQ ID NO: 55143 - DNA, 7 bp, Unknown
  misc_feature (1)..( 7): Matrix.002 file - promoters60/2991507
tttaatc

SEQ ID NO: 55144 - DNA, 8 bp, Unknown
  misc_feature (1)..( 8): Matrix.002 file - promoters60/2991507
acttcata

SEQ ID NO: 55145 - DNA, 7 bp, Unknown
  misc_feature (1)..( 7): Matrix.002 file - promoters60/2991507
gatcgat

SEQ ID NO: 55146 - DNA, 6 bp, Unknown
  misc_feature (1)..( 6): Matrix.002 file - promoters60/2991507
tgataa

SEQ ID NO: 55147 - DNA, 10 bp, Unknown
  misc_feature (1)..( 10): Matrix.002 file - promoters60/2991507
gcgatgaatg

SEQ ID NO: 55148 - DNA, 7 bp, Unknown
  misc_feature (1)..( 7): Matrix.002 file - promoters60/2991507
ttatgtc

SEQ ID NO: 55149 - DNA, 7 bp, Unknown
  misc_feature (1)..( 7): Matrix.002 file - promoters60/2991507
attagta

SEQ ID NO: 55150 - DNA, 7 bp, Unknown
  misc_feature (1)..( 7): Matrix.002 file - promoters60/2991507
gattcag

SEQ ID NO: 55151 - DNA, 11 bp, Unknown
  misc_feature (1)..( 11): Matrix.002 file - promoters60/2991515
ctttttttttg

SEQ ID NO: 55152 - DNA, 8 bp, Unknown
  misc_feature (1)..( 8): Matrix.002 file - promoters60/2991515
ttttttgc

SEQ ID NO: 55153 - DNA, 7 bp, Unknown
  misc_feature (1)..( 7): Matrix.002 file - promoters60/2991515
tttaata

SEQ ID NO: 55154 - DNA, 8 bp, Unknown
  misc_feature (1)..( 8): Matrix.002 file - promoters60/2991515
gaaacatt

SEQ ID NO: 55155 - DNA, 11 bp, Unknown
  misc_feature (1)..( 11): Matrix.002 file - promoters60/2991515
aattaaaaact

SEQ ID NO: 55156 - DNA, 9 bp, Unknown
  misc_feature (1)..( 9): Matrix.002 file - promoters60/2991515
tcatgttct

SEQ ID NO: 55157 - DNA, 8 bp, Unknown
  misc_feature (1)..( 8): Matrix.002 file - promoters60/2991515
tatggttt

SEQ ID NO: 55158 - DNA, 7 bp, Unknown
  misc_feature (1)..( 7): Matrix.002 file - promoters60/2991515
aaacagt

SEQ ID NO: 55159 - DNA, 9 bp, Unknown
  misc_feature (1)..( 9): Matrix.002 file - promoters60/2991515
aaattcatt

SEQ ID NO: 55160 - DNA, 4 bp, Unknown
  misc_feature (1)..( 4): Matrix.002 file - promoters60/2991774
aaat

SEQ ID NO: 55161 - DNA, 6 bp, Unknown
  misc_feature (1)..( 6): Matrix.002 file - promoters60/2992000
ttctaa

SEQ ID NO: 55162 - DNA, 9 bp, Unknown
  misc_feature (1)..( 9): Matrix.002 file - promoters60/2992000
attggaaag

SEQ ID NO: 55163 - DNA, 6 bp, Unknown
  misc_feature (1)..( 6): Matrix.002 file - promoters60/2992000
aataat

SEQ ID NO: 55164 - DNA, 7 bp, Unknown
  misc_feature (1)..( 7): Matrix.002 file - promoters60/2992000
cccaaaa

SEQ ID NO: 55165 - DNA, 6 bp, Unknown
  misc_feature (1)..( 6): Matrix.002 file - promoters60/2992000
aatcat

SEQ ID NO: 55166 - DNA, 10 bp, Unknown
  misc_feature (1)..( 10): Matrix.002 file - promoters60/2992000
tatgatatat

SEQ ID NO: 55167 - DNA, 6 bp, Unknown
  misc_feature (1)..( 6): Matrix.002 file - promoters60/2992000
aaatta

SEQ ID NO: 55168 - DNA, 7 bp, Unknown
  misc_feature (1)..( 7): Matrix.002 file - promoters60/2992000
attacaa

SEQ ID NO: 55169 - DNA, 7 bp, Unknown
  misc_feature (1)..( 7): Matrix.002 file - promoters60/2992000
tatcact

SEQ ID NO: 55170 - DNA, 6 bp, Unknown
  misc_feature (1)..( 6): Matrix.002 file - promoters60/2992101
ttccca

SEQ ID NO: 55171 - DNA, 8 bp, Unknown
  misc_feature (1)..( 8): Matrix.002 file - promoters60/2992101
ccgtatct

SEQ ID NO: 55172 - DNA, 8 bp, Unknown
  misc_feature (1)..( 8): Matrix.002 file - promoters60/2992101
tttcttat

SEQ ID NO: 55173 - DNA, 6 bp, Unknown
  misc_feature (1)..( 6): Matrix.002 file - promoters60/2992101
tcaaac

SEQ ID NO: 55174 - DNA, 9 bp, Unknown
  misc_feature (1)..( 9): Matrix.002 file - promoters60/2992101
ttaggattt

SEQ ID NO: 55175 - DNA, 7 bp, Unknown
  misc_feature (1)..( 7): Matrix.002 file - promoters60/2992101
tgaattg

SEQ ID NO: 55176 - DNA, 6 bp, Unknown
  misc_feature (1)..( 6): Matrix.002 file - promoters60/2992101
aaaaaa

SEQ ID NO: 55177 - DNA, 6 bp, Unknown
  misc_feature (1)..( 6): Matrix.002 file - promoters60/2992101
ttgact

SEQ ID NO: 55178 - DNA, 8 bp, Unknown
  misc_feature (1)..( 8): Matrix.002 file - promoters60/2992101
tcttttct

SEQ ID NO: 55179 - DNA, 7 bp, Unknown
  misc_feature (1)..( 7): Matrix.002 file - promoters60/2992101
tggattt

SEQ ID NO: 55180 - DNA, 7 bp, Unknown
  misc_feature (1)..( 7): Matrix.002 file - promoters60/2992101
ttgatta

SEQ ID NO: 55181 - DNA, 6 bp, Unknown
  misc_feature (1)..( 6): Matrix.002 file - promoters60/2992101
ttagtc

SEQ ID NO: 55182 - DNA, 6 bp, Unknown
  misc_feature (1)..( 6): Matrix.002 file - promoters60/2992101
gatgtg

SEQ ID NO: 55183 - DNA, 7 bp, Unknown
  misc_feature (1)..( 7): Matrix.002 file - promoters60/2992101
caaaaaa

SEQ ID NO: 55184 - DNA, 11 bp, Unknown
  misc_feature (1)..( 11): Matrix.002 file - promoters60/2992247
aacaaagatat

SEQ ID NO: 55185 - DNA, 6 bp, Unknown
  misc_feature (1)..( 6): Matrix.002 file - promoters60/2992247
aaaatc

SEQ ID NO: 55186 - DNA, 16 bp, Unknown
  misc_feature (1)..( 16): Matrix.002 file - promoters60/2992281
tataaatgggccgaat

SEQ ID NO: 55187 - DNA, 10 bp, Unknown
  misc_feature (1)..( 10): Matrix.002 file - promoters60/2992349
cttctgaaac

SEQ ID NO: 55188 - DNA, 11 bp, Unknown
  misc_feature (1)..( 11): Matrix.002 file - promoters60/2992349
cattaaatata

SEQ ID NO: 55189 - DNA, 9 bp, Unknown
  misc_feature (1)..( 9): Matrix.002 file - promoters60/2992349
aacaaaaaa

SEQ ID NO: 55190 - DNA, 6 bp, Unknown
  misc_feature (1)..( 6): Matrix.002 file - promoters60/2992373
ttcaaa

SEQ ID NO: 55191 - DNA, 6 bp, Unknown
  misc_feature (1)..( 6): Matrix.002 file - promoters60/2992373
ggtgtt

SEQ ID NO: 55192 - DNA, 8 bp, Unknown
  misc_feature (1)..( 8): Matrix.002 file - promoters60/2992373
acccccta

SEQ ID NO: 55193 - DNA, 6 bp, Unknown
  misc_feature (1)..( 6): Matrix.002 file - promoters60/2992373
atccga

SEQ ID NO: 55194 - DNA, 8 bp, Unknown
  misc_feature (1)..( 8): Matrix.002 file - promoters60/2992373
ttgggctg

SEQ ID NO: 55195 - DNA, 8 bp, Unknown
  misc_feature (1)..( 8): Matrix.002 file - promoters60/2992373
cattcgga

SEQ ID NO: 55196 - DNA, 7 bp, Unknown
  misc_feature (1)..( 7): Matrix.002 file - promoters60/2992373
accataa

SEQ ID NO: 55197 - DNA, 7 bp, Unknown
  misc_feature (1)..( 7): Matrix.002 file - promoters60/2992373
caacaaa

SEQ ID NO: 55198 - DNA, 6 bp, Unknown
  misc_feature (1)..( 6): Matrix.002 file - promoters60/2992373
gaatgg

SEQ ID NO: 55199 - DNA, 7 bp, Unknown
  misc_feature (1)..( 7): Matrix.002 file - promoters60/2992373
aaaggaa

SEQ ID NO: 55200 - DNA, 6 bp, Unknown
  misc_feature (1)..( 6): Matrix.002 file - promoters60/2992373
tgtttt

SEQ ID NO: 55201 - DNA, 6 bp, Unknown
  misc_feature (1)..( 6): Matrix.002 file - promoters60/2992373
ttttga

SEQ ID NO: 55202 - DNA, 10 bp, Unknown
  misc_feature (1)..( 10): Matrix.002 file - promoters60/2992373
tttaaggaag

SEQ ID NO: 55203 - DNA, 7 bp, Unknown
  misc_feature (1)..( 7): Matrix.002 file - promoters60/2992373
gatctat

SEQ ID NO: 55204 - DNA, 10 bp, Unknown
  misc_feature (1)..( 10): Matrix.002 file - promoters60/2992373
caaggtaaat

SEQ ID NO: 55205 - DNA, 6 bp, Unknown
  misc_feature (1)..( 6): Matrix.002 file - promoters60/2992373
tcttaa

SEQ ID NO: 55206 - DNA, 8 bp, Unknown
  misc_feature (1)..( 8): Matrix.002 file - promoters60/2992373
actctaaa

SEQ ID NO: 55207 - DNA, 10 bp, Unknown
  misc_feature (1)..( 10): Matrix.002 file - promoters60/2992722
gaaatagatt

SEQ ID NO: 55208 - DNA, 15 bp, Unknown
  misc_feature (1)..( 15): Matrix.002 file - promoters60/2993642
aaaaaaatatttaaa

SEQ ID NO: 55209 - DNA, 11 bp, Unknown
  misc_feature (1)..( 11): Matrix.002 file - promoters60/2993642
ttatagatttt

SEQ ID NO: 55210 - DNA, 9 bp, Unknown
  misc_feature (1)..( 9): Matrix.002 file - promoters60/2993705
ttacgaaag

SEQ ID NO: 55211 - DNA, 7 bp, Unknown
  misc_feature (1)..( 7): Matrix.002 file - promoters60/2993705
acaaaga

SEQ ID NO: 55212 - DNA, 7 bp, Unknown
  misc_feature (1)..( 7): Matrix.002 file - promoters60/2993705
tatatat

SEQ ID NO: 55213 - DNA, 6 bp, Unknown
  misc_feature (1)..( 6): Matrix.002 file - promoters60/2993705
tcataa

SEQ ID NO: 55214 - DNA, 6 bp, Unknown
  misc_feature (1)..( 6): Matrix.002 file - promoters60/2993705
catttc

SEQ ID NO: 55215 - DNA, 7 bp, Unknown
  misc_feature (1)..( 7): Matrix.002 file - promoters60/2993705
catatgt

SEQ ID NO: 55216 - DNA, 6 bp, Unknown
  misc_feature (1)..( 6): Matrix.002 file - promoters60/2993705
caagtc

SEQ ID NO: 55217 - DNA, 9 bp, Unknown
  misc_feature (1)..( 9): Matrix.002 file - promoters60/2993705
attaaatat

SEQ ID NO: 55218 - DNA, 7 bp, Unknown
  misc_feature (1)..( 7): Matrix.002 file - promoters60/2993705
gatacat

SEQ ID NO: 55219 - DNA, 8 bp, Unknown
  misc_feature (1)..( 8): Matrix.002 file - promoters60/2993705
gtcgatct

SEQ ID NO: 55220 - DNA, 6 bp, Unknown
  misc_feature (1)..( 6): Matrix.002 file - promoters60/2993705
taaact

SEQ ID NO: 55221 - DNA, 8 bp, Unknown
  misc_feature (1)..( 8): Matrix.002 file - promoters60/2993705
aatggtgt

SEQ ID NO: 55222 - DNA, 6 bp, Unknown
  misc_feature (1)..( 6): Matrix.002 file - promoters60/2993705
aatgtt

SEQ ID NO: 55223 - DNA, 7 bp, Unknown
  misc_feature (1)..( 7): Matrix.002 file - promoters60/2993705
tgtacat

SEQ ID NO: 55224 - DNA, 6 bp, Unknown
  misc_feature (1)..( 6): Matrix.002 file - promoters60/2993705
tatgag

SEQ ID NO: 55225 - DNA, 8 bp, Unknown
  misc_feature (1)..( 8): Matrix.002 file - promoters60/2993705
gatgtttc

SEQ ID NO: 55226 - DNA, 10 bp, Unknown
  misc_feature (1)..( 10): Matrix.002 file - promoters60/2994916
tttctctaat

SEQ ID NO: 55227 - DNA, 18 bp, Unknown
  misc_feature (1)..( 18): Matrix.002 file - promoters60/2994916
agatattttgtttaacaa

SEQ ID NO: 55228 - DNA, 6 bp, Unknown
  misc_feature (1)..( 6): Matrix.002 file - promoters60/2994916
tctttt

SEQ ID NO: 55229 - DNA, 6 bp, Unknown
  misc_feature (1)..( 6): Matrix.002 file - promoters60/2994916
ttaact

SEQ ID NO: 55230 - DNA, 7 bp, Unknown
  misc_feature (1)..( 7): Matrix.002 file - promoters60/2994916
tgaattc

SEQ ID NO: 55231 - DNA, 6 bp, Unknown
  misc_feature (1)..( 6): Matrix.002 file - promoters60/2994916
aaaaca

SEQ ID NO: 55232 - DNA, 6 bp, Unknown
  misc_feature (1)..( 6): Matrix.002 file - promoters60/2994916
tcatca

SEQ ID NO: 55233 - DNA, 9 bp, Unknown
  misc_feature (1)..( 9): Matrix.002 file - promoters60/2994916
aggttacta

SEQ ID NO: 55234 - DNA, 6 bp, Unknown
  misc_feature (1)..( 6): Matrix.002 file - promoters60/2994916
aacaaa

SEQ ID NO: 55235 - DNA, 8 bp, Unknown
  misc_feature (1)..( 8): Matrix.002 file - promoters60/2994916
cggtcaag

SEQ ID NO: 55236 - DNA, 6 bp, Unknown
  misc_feature (1)..( 6): Matrix.002 file - promoters60/2994916
aaacta

SEQ ID NO: 55237 - DNA, 6 bp, Unknown
  misc_feature (1)..( 6): Matrix.002 file - promoters60/2995898
tcgtcg

SEQ ID NO: 55238 - DNA, 7 bp, Unknown
  misc_feature (1)..( 7): Matrix.002 file - promoters60/2995898
agagaaa

SEQ ID NO: 55239 - DNA, 7 bp, Unknown
  misc_feature (1)..( 7): Matrix.002 file - promoters60/2995898
aaattcg

SEQ ID NO: 55240 - DNA, 11 bp, Unknown
  misc_feature (1)..( 11): Matrix.002 file - promoters60/2995898
cgccggagatt

SEQ ID NO: 55241 - DNA, 8 bp, Unknown
  misc_feature (1)..( 8): Matrix.002 file - promoters60/2995898
acgaagaa

SEQ ID NO: 55242 - DNA, 7 bp, Unknown
  misc_feature (1)..( 7): Matrix.002 file - promoters60/2995898
gttagtg

SEQ ID NO: 55243 - DNA, 8 bp, Unknown
  misc_feature (1)..( 8): Matrix.002 file - promoters60/2995898
gataattt

SEQ ID NO: 55244 - DNA, 8 bp, Unknown
  misc_feature (1)..( 8): Matrix.002 file - promoters60/2995898
ttaaaaaa

SEQ ID NO: 55245 - DNA, 6 bp, Unknown
  misc_feature (1)..( 6): Matrix.002 file - promoters60/2995898
gaaaat

SEQ ID NO: 55246 - DNA, 7 bp, Unknown
  misc_feature (1)..( 7): Matrix.002 file - promoters60/2995898
gtgaaat

SEQ ID NO: 55247 - DNA, 6 bp, Unknown
  misc_feature (1)..( 6): Matrix.002 file - promoters60/2995898
gagtga

SEQ ID NO: 55248 - DNA, 6 bp, Unknown
  misc_feature (1)..( 6): Matrix.002 file - promoters60/2995898
ttttta

SEQ ID NO: 55249 - DNA, 6 bp, Unknown
  misc_feature (1)..( 6): Matrix.002 file - promoters60/2995898
attttt

SEQ ID NO: 55250 - DNA, 8 bp, Unknown
  misc_feature (1)..( 8): Matrix.002 file - promoters60/2995898
aaagattt

SEQ ID NO: 55251 - DNA, 6 bp, Unknown
  misc_feature (1)..( 6): Matrix.002 file - promoters60/2995898
atttac

SEQ ID NO: 55252 - DNA, 7 bp, Unknown
  misc_feature (1)..( 7): Matrix.002 file - promoters60/2995898
caaagaa

SEQ ID NO: 55253 - DNA, 6 bp, Unknown
  misc_feature (1)..( 6): Matrix.002 file - promoters60/2995898
tttcaa

SEQ ID NO: 55254 - DNA, 7 bp, Unknown
  misc_feature (1)..( 7): Matrix.002 file - promoters60/2995898
taacgtt

SEQ ID NO: 55255 - DNA, 6 bp, Unknown
  misc_feature (1)..( 6): Matrix.002 file - promoters60/2995898
cttctt

SEQ ID NO: 55256 - DNA, 7 bp, Unknown
  misc_feature (1)..( 7): Matrix.002 file - promoters60/2995898
agattgt

SEQ ID NO: 55257 - DNA, 7 bp, Unknown
  misc_feature (1)..( 7): Matrix.002 file - promoters60/2995898
atataat

SEQ ID NO: 55258 - DNA, 7 bp, Unknown
  misc_feature (1)..( 7): Matrix.002 file - promoters60/2995898
tccaaaa

SEQ ID NO: 55259 - DNA, 6 bp, Unknown
  misc_feature (1)..( 6): Matrix.002 file - promoters60/2995898
aaaatt

SEQ ID NO: 55260 - DNA, 6 bp, Unknown
  misc_feature (1)..( 6): Matrix.002 file - promoters60/2995898
ggtatt

SEQ ID NO: 55261 - DNA, 11 bp, Unknown
  misc_feature (1)..( 11): Matrix.002 file - promoters60/2995898
tttaacttttt

SEQ ID NO: 55262 - DNA, 10 bp, Unknown
  misc_feature (1)..( 10): Matrix.002 file - promoters60/2995898
tttttaagtg

SEQ ID NO: 55263 - DNA, 6 bp, Unknown
  misc_feature (1)..( 6): Matrix.002 file - promoters60/2995898
agaata

SEQ ID NO: 55264 - DNA, 7 bp, Unknown
  misc_feature (1)..( 7): Matrix.002 file - promoters60/2996054
acaaaaa

SEQ ID NO: 55265 - DNA, 10 bp, Unknown
  misc_feature (1)..( 10): Matrix.002 file - promoters60/2996054
tgttttcact

SEQ ID NO: 55266 - DNA, 10 bp, Unknown
  misc_feature (1)..( 10): Matrix.002 file - promoters60/2996054
aactctttta

SEQ ID NO: 55267 - DNA, 7 bp, Unknown
  misc_feature (1)..( 7): Matrix.002 file - promoters60/2996054
tttatta

SEQ ID NO: 55268 - DNA, 9 bp, Unknown
  misc_feature (1)..( 9): Matrix.002 file - promoters60/2996054
ctgtcaaag

SEQ ID NO: 55269 - DNA, 6 bp, Unknown
  misc_feature (1)..( 6): Matrix.002 file - promoters60/2996080
gtgaga

SEQ ID NO: 55270 - DNA, 8 bp, Unknown
  misc_feature (1)..( 8): Matrix.002 file - promoters60/2996080
ctggctat

SEQ ID NO: 55271 - DNA, 7 bp, Unknown
  misc_feature (1)..( 7): Matrix.002 file - promoters60/2996080
tttcgag

SEQ ID NO: 55272 - DNA, 6 bp, Unknown
  misc_feature (1)..( 6): Matrix.002 file - promoters60/2996080
tgcttt

SEQ ID NO: 55273 - DNA, 6 bp, Unknown
  misc_feature (1)..( 6): Matrix.002 file - promoters60/2996080
tttatt

SEQ ID NO: 55274 - DNA, 6 bp, Unknown
  misc_feature (1)..( 6): Matrix.002 file - promoters60/2996080
caacaa

SEQ ID NO: 55275 - DNA, 6 bp, Unknown
  misc_feature (1)..( 6): Matrix.002 file - promoters60/2996080
gaaaca

SEQ ID NO: 55276 - DNA, 8 bp, Unknown
  misc_feature (1)..( 8): Matrix.002 file - promoters60/2996080
aaaataag

SEQ ID NO: 55277 - DNA, 6 bp, Unknown
  misc_feature (1)..( 6): Matrix.002 file - promoters60/2996080
tttgat

SEQ ID NO: 55278 - DNA, 6 bp, Unknown
  misc_feature (1)..( 6): Matrix.002 file - promoters60/2996080
ggtgga

SEQ ID NO: 55279 - DNA, 8 bp, Unknown
  misc_feature (1)..( 8): Matrix.002 file - promoters60/2996080
cttcaggt

SEQ ID NO: 55280 - DNA, 7 bp, Unknown
  misc_feature (1)..( 7): Matrix.002 file - promoters60/2996080
gacgacg

SEQ ID NO: 55281 - DNA, 7 bp, Unknown
  misc_feature (1)..( 7): Matrix.002 file - promoters60/2996080
tatcatc

SEQ ID NO: 55282 - DNA, 8 bp, Unknown
  misc_feature (1)..( 8): Matrix.002 file - promoters60/2996080
ctcaaaaa

SEQ ID NO: 55283 - DNA, 8 bp, Unknown
  misc_feature (1)..( 8): Matrix.002 file - promoters60/2996109
attatttt

SEQ ID NO: 55284 - DNA, 13 bp, Unknown
  misc_feature (1)..( 13): Matrix.002 file - promoters60/2996109
taattaaatataa

SEQ ID NO: 55285 - DNA, 13 bp, Unknown
  misc_feature (1)..( 13): Matrix.002 file - promoters60/2996109
taataaaacataa

SEQ ID NO: 55286 - DNA, 7 bp, Unknown
  misc_feature (1)..( 7): Matrix.002 file - promoters60/2996109
aaacatc

SEQ ID NO: 55287 - DNA, 8 bp, Unknown
  misc_feature (1)..( 8): Matrix.002 file - promoters60/2996109
ttttgtat

SEQ ID NO: 55288 - DNA, 13 bp, Unknown
  misc_feature (1)..( 13): Matrix.002 file - promoters60/2996109
aaaagtcaaaaaa

SEQ ID NO: 55289 - DNA, 8 bp, Unknown
  misc_feature (1)..( 8): Matrix.002 file - promoters60/2996109
aatatata

SEQ ID NO: 55290 - DNA, 7 bp, Unknown
  misc_feature (1)..( 7): Matrix.002 file - promoters60/2996109
tattata

SEQ ID NO: 55291 - DNA, 7 bp, Unknown
  misc_feature (1)..( 7): Matrix.002 file - promoters60/2996109
aaaaaag

SEQ ID NO: 55292 - DNA, 9 bp, Unknown
  misc_feature (1)..( 9): Matrix.002 file - promoters60/2996119
aaaaaacga

SEQ ID NO: 55293 - DNA, 8 bp, Unknown
  misc_feature (1)..( 8): Matrix.002 file - promoters60/2996119
aatatgtt

SEQ ID NO: 55294 - DNA, 9 bp, Unknown
  misc_feature (1)..( 9): Matrix.002 file - promoters60/2996119
ttggtgagt

SEQ ID NO: 55295 - DNA, 6 bp, Unknown
  misc_feature (1)..( 6): Matrix.002 file - promoters60/2996119
atactg

SEQ ID NO: 55296 - DNA, 6 bp, Unknown
  misc_feature (1)..( 6): Matrix.002 file - promoters60/2996119
aggaaa

SEQ ID NO: 55297 - DNA, 6 bp, Unknown
  misc_feature (1)..( 6): Matrix.002 file - promoters60/2996119
aaaaac

SEQ ID NO: 55298 - DNA, 6 bp, Unknown
  misc_feature (1)..( 6): Matrix.002 file - promoters60/2996119
gataaa

SEQ ID NO: 55299 - DNA, 8 bp, Unknown
  misc_feature (1)..( 8): Matrix.002 file - promoters60/2996119
aaaatcac

SEQ ID NO: 55300 - DNA, 7 bp, Unknown
  misc_feature (1)..( 7): Matrix.002 file - promoters60/2996119
gataaaa

SEQ ID NO: 55301 - DNA, 7 bp, Unknown
  misc_feature (1)..( 7): Matrix.002 file - promoters60/2996119
aatttat

SEQ ID NO: 55302 - DNA, 9 bp, Unknown
  misc_feature (1)..( 9): Matrix.002 file - promoters60/2996119
aagaaaaat

SEQ ID NO: 55303 - DNA, 7 bp, Unknown
  misc_feature (1)..( 7): Matrix.002 file - promoters60/2996119
tttcttg

SEQ ID NO: 55304 - DNA, 6 bp, Unknown
  misc_feature (1)..( 6): Matrix.002 file - promoters60/2996119
atttta

SEQ ID NO: 55305 - DNA, 6 bp, Unknown
  misc_feature (1)..( 6): Matrix.002 file - promoters60/2996119
tttttg

SEQ ID NO: 55306 - DNA, 7 bp, Unknown
  misc_feature (1)..( 7): Matrix.002 file - promoters60/2996119
tgtggtt

SEQ ID NO: 55307 - DNA, 13 bp, Unknown
  misc_feature (1)..( 13): Matrix.002 file - promoters60/2996222
aaagaatttctaa

SEQ ID NO: 55308 - DNA, 10 bp, Unknown
  misc_feature (1)..( 10): Matrix.002 file - promoters60/2996222
tttactaaaa

SEQ ID NO: 55309 - DNA, 9 bp, Unknown
  misc_feature (1)..( 9): Matrix.002 file - promoters60/2996222
aataatttt

SEQ ID NO: 55310 - DNA, 10 bp, Unknown
  misc_feature (1)..( 10): Matrix.002 file - promoters60/2996222
tattttacta

SEQ ID NO: 55311 - DNA, 10 bp, Unknown
  misc_feature (1)..( 10): Matrix.002 file - promoters60/2996222
ctatatataa

SEQ ID NO: 55312 - DNA, 11 bp, Unknown
  misc_feature (1)..( 11): Matrix.002 file - promoters60/2996222
aaaaaaataat

SEQ ID NO: 55313 - DNA, 9 bp, Unknown
  misc_feature (1)..( 9): Matrix.002 file - promoters60/2996222
aatttctta

SEQ ID NO: 55314 - DNA, 9 bp, Unknown
  misc_feature (1)..( 9): Matrix.002 file - promoters60/2996222
aaaacaatt

SEQ ID NO: 55315 - DNA, 9 bp, Unknown
  misc_feature (1)..( 9): Matrix.002 file - promoters60/2996222
ttaaagaag

SEQ ID NO: 55316 - DNA, 7 bp, Unknown
  misc_feature (1)..( 7): Matrix.002 file - promoters60/2996290
aaaacaa

SEQ ID NO: 55317 - DNA, 7 bp, Unknown
  misc_feature (1)..( 7): Matrix.002 file - promoters60/2996290
aactttg

SEQ ID NO: 55318 - DNA, 11 bp, Unknown
  misc_feature (1)..( 11): Matrix.002 file - promoters60/2996290
gtaaataataa

SEQ ID NO: 55319 - DNA, 6 bp, Unknown
  misc_feature (1)..( 6): Matrix.002 file - promoters60/2996290
ccaaaa

SEQ ID NO: 55320 - DNA, 7 bp, Unknown
  misc_feature (1)..( 7): Matrix.002 file - promoters60/2996290
aaaataa

SEQ ID NO: 55321 - DNA, 6 bp, Unknown
  misc_feature (1)..( 6): Matrix.002 file - promoters60/2996290
atagaa

SEQ ID NO: 55322 - DNA, 11 bp, Unknown
  misc_feature (1)..( 11): Matrix.002 file - promoters60/2996290
aaaaataataa

SEQ ID NO: 55323 - DNA, 7 bp, Unknown
  misc_feature (1)..( 7): Matrix.002 file - promoters60/2996290
aaataat

SEQ ID NO: 55324 - DNA, 7 bp, Unknown
  misc_feature (1)..( 7): Matrix.002 file - promoters60/2996290
attcata

SEQ ID NO: 55325 - DNA, 6 bp, Unknown
  misc_feature (1)..( 6): Matrix.002 file - promoters60/2996290
aaatct

SEQ ID NO: 55326 - DNA, 6 bp, Unknown
  misc_feature (1)..( 6): Matrix.002 file - promoters60/2996290
ttttaa

SEQ ID NO: 55327 - DNA, 8 bp, Unknown
  misc_feature (1)..( 8): Matrix.002 file - promoters60/2996290
aatggaac

SEQ ID NO: 55328 - DNA, 6 bp, Unknown
  misc_feature (1)..( 6): Matrix.002 file - promoters60/2996290
cttttt

SEQ ID NO: 55329 - DNA, 7 bp, Unknown
  misc_feature (1)..( 7): Matrix.002 file - promoters60/2996290
aagatct

SEQ ID NO: 55330 - DNA, 6 bp, Unknown
  misc_feature (1)..( 6): Matrix.002 file - promoters60/2996290
cactct

SEQ ID NO: 55331 - DNA, 9 bp, Unknown
  misc_feature (1)..( 9): Matrix.002 file - promoters60/2997951
ctaaaaata

SEQ ID NO: 55332 - DNA, 6 bp, Unknown
  misc_feature (1)..( 6): Matrix.002 file - promoters60/3003010
caaacc

SEQ ID NO: 55333 - DNA, 7 bp, Unknown
  misc_feature (1)..( 7): Matrix.002 file - promoters60/3003010
tttaggt

SEQ ID NO: 55334 - DNA, 6 bp, Unknown
  misc_feature (1)..( 6): Matrix.002 file - promoters60/3003010
ttcagt

SEQ ID NO: 55335 - DNA, 6 bp, Unknown
  misc_feature (1)..( 6): Matrix.002 file - promoters60/3003010
aatttt

SEQ ID NO: 55336 - DNA, 7 bp, Unknown
  misc_feature (1)..( 7): Matrix.002 file - promoters60/3003010
taaaaat

SEQ ID NO: 55337 - DNA, 7 bp, Unknown
  misc_feature (1)..( 7): Matrix.002 file - promoters60/3003010
caatatt

SEQ ID NO: 55338 - DNA, 8 bp, Unknown
  misc_feature (1)..( 8): Matrix.002 file - promoters60/3003010
aattatat

SEQ ID NO: 55339 - DNA, 6 bp, Unknown
  misc_feature (1)..( 6): Matrix.002 file - promoters60/3003010
aataaa

SEQ ID NO: 55340 - DNA, 7 bp, Unknown
  misc_feature (1)..( 7): Matrix.002 file - promoters60/3003010
tacagta

SEQ ID NO: 55341 - DNA, 8 bp, Unknown
  misc_feature (1)..( 8): Matrix.002 file - promoters60/3003010
aaaaaaat

SEQ ID NO: 55342 - DNA, 6 bp, Unknown
  misc_feature (1)..( 6): Matrix.002 file - promoters60/3011901
ataaaa

SEQ ID NO: 55343 - DNA, 6 bp, Unknown
  misc_feature (1)..( 6): Matrix.002 file - promoters60/3011901
aaaaca

SEQ ID NO: 55344 - DNA, 6 bp, Unknown
  misc_feature (1)..( 6): Matrix.002 file - promoters60/3011901
agtgca

SEQ ID NO: 55345 - DNA, 6 bp, Unknown
  misc_feature (1)..( 6): Matrix.002 file - promoters60/3011901
ttaaaa

SEQ ID NO: 55346 - DNA, 6 bp, Unknown
  misc_feature (1)..( 6): Matrix.002 file - promoters60/3011901
agaaaa

SEQ ID NO: 55347 - DNA, 6 bp, Unknown
  misc_feature (1)..( 6): Matrix.002 file - promoters60/3011901
gaagag

SEQ ID NO: 55348 - DNA, 7 bp, Unknown
  misc_feature (1)..( 7): Matrix.002 file - promoters60/3011901
aaaactt

SEQ ID NO: 55349 - DNA, 9 bp, Unknown
  misc_feature (1)..( 9): Matrix.002 file - promoters60/3011901
aattcataa

SEQ ID NO: 55350 - DNA, 6 bp, Unknown
  misc_feature (1)..( 6): Matrix.002 file - promoters60/3011901
gttaac

SEQ ID NO: 55351 - DNA, 9 bp, Unknown
  misc_feature (1)..( 9): Matrix.002 file - promoters60/3011901
agagaatat

SEQ ID NO: 55352 - DNA, 7 bp, Unknown
  misc_feature (1)..( 7): Matrix.002 file - promoters60/3011901
aaaccaa

SEQ ID NO: 55353 - DNA, 6 bp, Unknown
  misc_feature (1)..( 6): Matrix.002 file - promoters60/3011901
ccaatg

SEQ ID NO: 55354 - DNA, 7 bp, Unknown
  misc_feature (1)..( 7): Matrix.002 file - promoters60/3011901
cataaga

SEQ ID NO: 55355 - DNA, 7 bp, Unknown
  misc_feature (1)..( 7): Matrix.002 file - promoters60/3011901
ggcacat

SEQ ID NO: 55356 - DNA, 7 bp, Unknown
  misc_feature (1)..( 7): Matrix.002 file - promoters60/3011901
taaataa

SEQ ID NO: 55357 - DNA, 11 bp, Unknown
  misc_feature (1)..( 11): Matrix.002 file - promoters60/3014276
taatgataatc

SEQ ID NO: 55358 - DNA, 9 bp, Unknown
  misc_feature (1)..( 9): Matrix.002 file - promoters60/3014276
ctcgtcttc

SEQ ID NO: 55359 - DNA, 9 bp, Unknown
  misc_feature (1)..( 9): Matrix.002 file - promoters60/3014276
tgtttaaaa

SEQ ID NO: 55360 - DNA, 7 bp, Unknown
  misc_feature (1)..( 7): Matrix.002 file - promoters60/3014276
atctctc

SEQ ID NO: 55361 - DNA, 7 bp, Unknown
  misc_feature (1)..( 7): Matrix.002 file - promoters60/3043322
attatat

SEQ ID NO: 55362 - DNA, 5 bp, Unknown
  misc_feature (1)..( 5): Matrix.002 file - promoters60/3043322
tgtga

SEQ ID NO: 55363 - DNA, 7 bp, Unknown
  misc_feature (1)..( 7): Matrix.002 file - promoters60/3043322
acgatta

SEQ ID NO: 55364 - DNA, 7 bp, Unknown
  misc_feature (1)..( 7): Matrix.002 file - promoters60/3043322
atcattc

SEQ ID NO: 55365 - DNA, 6 bp, Unknown
  misc_feature (1)..( 6): Matrix.002 file - promoters60/3043322
aaagtc

SEQ ID NO: 55366 - DNA, 6 bp, Unknown
  misc_feature (1)..( 6): Matrix.002 file - promoters60/3043322
catatt

SEQ ID NO: 55367 - DNA, 8 bp, Unknown
  misc_feature (1)..( 8): Matrix.002 file - promoters60/3043322
atttgatt

SEQ ID NO: 55368 - DNA, 8 bp, Unknown
  misc_feature (1)..( 8): Matrix.002 file - promoters60/3043322
aaccattt

SEQ ID NO: 55369 - DNA, 9 bp, Unknown
  misc_feature (1)..( 9): Matrix.002 file - promoters60/3043322
aataaaatc

SEQ ID NO: 55370 - DNA, 10 bp, Unknown
  misc_feature (1)..( 10): Matrix.002 file - promoters60/3043322
ttaatatttt

SEQ ID NO: 55371 - DNA, 7 bp, Unknown
  misc_feature (1)..( 7): Matrix.002 file - promoters60/3043322
ttatttt

SEQ ID NO: 55372 - DNA, 6 bp, Unknown
  misc_feature (1)..( 6): Matrix.002 file - promoters60/3043322
taacat

SEQ ID NO: 55373 - DNA, 8 bp, Unknown
  misc_feature (1)..( 8): Matrix.002 file - promoters60/3043322
aaaaaaaa

SEQ ID NO: 55374 - DNA, 10 bp, Unknown
  misc_feature (1)..( 10): Matrix.002 file - promoters60/3043322
aaaaaaactt

SEQ ID NO: 55375 - DNA, 6 bp, Unknown
  misc_feature (1)..( 6): Matrix.002 file - promoters60/3043322
tatatt

SEQ ID NO: 55376 - DNA, 8 bp, Unknown
  misc_feature (1)..( 8): Matrix.002 file - promoters60/3043322
tctataga

SEQ ID NO: 55377 - DNA, 7 bp, Unknown
  misc_feature (1)..( 7): Matrix.002 file - promoters60/3043322
tttgtta

SEQ ID NO: 55378 - DNA, 7 bp, Unknown
  misc_feature (1)..( 7): Matrix.002 file - promoters60/3043322
aacaaaa

SEQ ID NO: 55379 - DNA, 6 bp, Unknown
  misc_feature (1)..( 6): Matrix.002 file - promoters60/3043322
ttctta

SEQ ID NO: 55380 - DNA, 8 bp, Unknown
  misc_feature (1)..( 8): Matrix.002 file - promoters60/3043322
tttgttta

SEQ ID NO: 55381 - DNA, 9 bp, Unknown
  misc_feature (1)..( 9): Matrix.002 file - promoters60/3043962
tttatttgt

SEQ ID NO: 55382 - DNA, 9 bp, Unknown
  misc_feature (1)..( 9): Matrix.002 file - promoters60/3043962
atttgattg

SEQ ID NO: 55383 - DNA, 11 bp, Unknown
  misc_feature (1)..( 11): Matrix.002 file - promoters60/3043962
aaactatttaa

SEQ ID NO: 55384 - DNA, 6 bp, Unknown
  misc_feature (1)..( 6): Matrix.002 file - promoters60/3100782
tttgta

SEQ ID NO: 55385 - DNA, 7 bp, Unknown
  misc_feature (1)..( 7): Matrix.002 file - promoters60/3100782
atcattt

SEQ ID NO: 55386 - DNA, 8 bp, Unknown
  misc_feature (1)..( 8): Matrix.002 file - promoters60/3100782
aacagaaa

SEQ ID NO: 55387 - DNA, 7 bp, Unknown
  misc_feature (1)..( 7): Matrix.002 file - promoters60/3100782
ataaaat

SEQ ID NO: 55388 - DNA, 8 bp, Unknown
  misc_feature (1)..( 8): Matrix.002 file - promoters60/3100782
aaaaagaa

SEQ ID NO: 55389 - DNA, 7 bp, Unknown
  misc_feature (1)..( 7): Matrix.002 file - promoters60/3100782
ccaacat

SEQ ID NO: 55390 - DNA, 7 bp, Unknown
  misc_feature (1)..( 7): Matrix.002 file - promoters60/3100782
caattct

SEQ ID NO: 55391 - DNA, 6 bp, Unknown
  misc_feature (1)..( 6): Matrix.002 file - promoters60/3100782
ttctgg

SEQ ID NO: 55392 - DNA, 7 bp, Unknown
  misc_feature (1)..( 7): Matrix.002 file - promoters60/3100782
cataact

SEQ ID NO: 55393 - DNA, 8 bp, Unknown
  misc_feature (1)..( 8): Matrix.002 file - promoters60/3100782
attcttac

SEQ ID NO: 55394 - DNA, 7 bp, Unknown
  misc_feature (1)..( 7): Matrix.002 file - promoters60/3100782
tttgaga

SEQ ID NO: 55395 - DNA, 6 bp, Unknown
  misc_feature (1)..( 6): Matrix.002 file - promoters60/3238306
tttatt

SEQ ID NO: 55396 - DNA, 8 bp, Unknown
  misc_feature (1)..( 8): Matrix.002 file - promoters60/3238306
caactcca

SEQ ID NO: 55397 - DNA, 8 bp, Unknown
  misc_feature (1)..( 8): Matrix.002 file - promoters60/3238306
aaaaatat

SEQ ID NO: 55398 - DNA, 8 bp, Unknown
  misc_feature (1)..( 8): Matrix.002 file - promoters60/3238306
caaatcaa

SEQ ID NO: 55399 - DNA, 6 bp, Unknown
  misc_feature (1)..( 6): Matrix.002 file - promoters60/3238306
ttatat

SEQ ID NO: 55400 - DNA, 7 bp, Unknown
  misc_feature (1)..( 7): Matrix.002 file - promoters60/3238306
gatcaat

SEQ ID NO: 55401 - DNA, 9 bp, Unknown
  misc_feature (1)..( 9): Matrix.002 file - promoters60/3238306
acaaacaca

SEQ ID NO: 55402 - DNA, 6 bp, Unknown
  misc_feature (1)..( 6): Matrix.002 file - promoters60/3238306
acaata

SEQ ID NO: 55403 - DNA, 9 bp, Unknown
  misc_feature (1)..( 9): Matrix.002 file - promoters60/3238306
gtttgggcg

SEQ ID NO: 55404 - DNA, 7 bp, Unknown
  misc_feature (1)..( 7): Matrix.002 file - promoters60/3238306
ataccaa

SEQ ID NO: 55405 - DNA, 6 bp, Unknown
  misc_feature (1)..( 6): Matrix.002 file - promoters60/3238306
gtctaa

SEQ ID NO: 55406 - DNA, 6 bp, Unknown
  misc_feature (1)..( 6): Matrix.002 file - promoters60/3238306
aatgtc

SEQ ID NO: 55407 - DNA, 6 bp, Unknown
  misc_feature (1)..( 6): Matrix.002 file - promoters60/3238306
acgtaa

SEQ ID NO: 55408 - DNA, 6 bp, Unknown
  misc_feature (1)..( 6): Matrix.002 file - promoters60/3238306
agattc

SEQ ID NO: 55409 - DNA, 8 bp, Unknown
  misc_feature (1)..( 8): Matrix.002 file - promoters60/3238306
gagaagga

SEQ ID NO: 55410 - DNA, 6 bp, Unknown
  misc_feature (1)..( 6): Matrix.002 file - promoters60/3239163
gccaat

SEQ ID NO: 55411 - DNA, 6 bp, Unknown
  misc_feature (1)..( 6): Matrix.002 file - promoters60/3239163
gcagag

SEQ ID NO: 55412 - DNA, 6 bp, Unknown
  misc_feature (1)..( 6): Matrix.002 file - promoters60/3239163
ttaaag

SEQ ID NO: 55413 - DNA, 8 bp, Unknown
  misc_feature (1)..( 8): Matrix.002 file - promoters60/3239163
aattctaa

SEQ ID NO: 55414 - DNA, 7 bp, Unknown
  misc_feature (1)..( 7): Matrix.002 file - promoters60/3239163
aatcgga

SEQ ID NO: 55415 - DNA, 11 bp, Unknown
  misc_feature (1)..( 11): Matrix.002 file - promoters60/3239163
agacagtgaag

SEQ ID NO: 55416 - DNA, 6 bp, Unknown
  misc_feature (1)..( 6): Matrix.002 file - promoters60/3239163
aagtgt

SEQ ID NO: 55417 - DNA, 6 bp, Unknown
  misc_feature (1)..( 6): Matrix.002 file - promoters60/3239163
atatat

SEQ ID NO: 55418 - DNA, 7 bp, Unknown
  misc_feature (1)..( 7): Matrix.002 file - promoters60/3239163
acaatac

SEQ ID NO: 55419 - DNA, 9 bp, Unknown
  misc_feature (1)..( 9): Matrix.002 file - promoters60/3239163
atacaaata

SEQ ID NO: 55420 - DNA, 6 bp, Unknown
  misc_feature (1)..( 6): Matrix.002 file - promoters60/3239163
tcaaat

SEQ ID NO: 55421 - DNA, 6 bp, Unknown
  misc_feature (1)..( 6): Matrix.002 file - promoters60/3239163
gagcag

SEQ ID NO: 55422 - DNA, 7 bp, Unknown
  misc_feature (1)..( 7): Matrix.002 file - promoters60/3239163
gaaataa

SEQ ID NO: 55423 - DNA, 6 bp, Unknown
  misc_feature (1)..( 6): Matrix.002 file - promoters60/3239175
aaggat

SEQ ID NO: 55424 - DNA, 8 bp, Unknown
  misc_feature (1)..( 8): Matrix.002 file - promoters60/3239175
aatgcttt

SEQ ID NO: 55425 - DNA, 8 bp, Unknown
  misc_feature (1)..( 8): Matrix.002 file - promoters60/3239175
gaaagaca

SEQ ID NO: 55426 - DNA, 7 bp, Unknown
  misc_feature (1)..( 7): Matrix.002 file - promoters60/3239175
atagttg

SEQ ID NO: 55427 - DNA, 6 bp, Unknown
  misc_feature (1)..( 6): Matrix.002 file - promoters60/3239175
taaaaa

SEQ ID NO: 55428 - DNA, 9 bp, Unknown
  misc_feature (1)..( 9): Matrix.002 file - promoters60/3239175
aaaggaaaa

SEQ ID NO: 55429 - DNA, 9 bp, Unknown
  misc_feature (1)..( 9): Matrix.002 file - promoters60/3239175
gagtatata

SEQ ID NO: 55430 - DNA, 7 bp, Unknown
  misc_feature (1)..( 7): Matrix.002 file - promoters60/3239175
tggctag

SEQ ID NO: 55431 - DNA, 6 bp, Unknown
  misc_feature (1)..( 6): Matrix.002 file - promoters60/3239175
agagta

SEQ ID NO: 55432 - DNA, 8 bp, Unknown
  misc_feature (1)..( 8): Matrix.002 file - promoters60/3239175
ttgaactc

SEQ ID NO: 55433 - DNA, 7 bp, Unknown
  misc_feature (1)..( 7): Matrix.002 file - promoters60/3239175
tggattt

SEQ ID NO: 55434 - DNA, 8 bp, Unknown
  misc_feature (1)..( 8): Matrix.002 file - promoters60/3239175
tctagtgt

SEQ ID NO: 55435 - DNA, 7 bp, Unknown
  misc_feature (1)..( 7): Matrix.002 file - promoters60/3239175
actttag

SEQ ID NO: 55436 - DNA, 6 bp, Unknown
  misc_feature (1)..( 6): Matrix.002 file - promoters60/3239175
ttaaag

SEQ ID NO: 55437 - DNA, 6 bp, Unknown
  misc_feature (1)..( 6): Matrix.002 file - promoters60/3239175
agtaaa

SEQ ID NO: 55438 - DNA, 7 bp, Unknown
  misc_feature (1)..( 7): Matrix.002 file - promoters60/3239175
aatcggg

SEQ ID NO: 55439 - DNA, 10 bp, Unknown
  misc_feature (1)..( 10): Matrix.002 file - promoters60/3239175
ggaaaagaaa

SEQ ID NO: 55440 - DNA, 7 bp, Unknown
  misc_feature (1)..( 7): Matrix.002 file - promoters60/3239175
cccacta

SEQ ID NO: 55441 - DNA, 7 bp, Unknown
  misc_feature (1)..( 7): Matrix.002 file - promoters60/3239193
aattgaa

SEQ ID NO: 55442 - DNA, 7 bp, Unknown
  misc_feature (1)..( 7): Matrix.002 file - promoters60/3239193
gaataga

SEQ ID NO: 55443 - DNA, 8 bp, Unknown
  misc_feature (1)..( 8): Matrix.002 file - promoters60/3239193
tatataaa

SEQ ID NO: 55444 - DNA, 7 bp, Unknown
  misc_feature (1)..( 7): Matrix.002 file - promoters60/3239193
attgaag

SEQ ID NO: 55445 - DNA, 9 bp, Unknown
  misc_feature (1)..( 9): Matrix.002 file - promoters60/3239193
aaaaataag

SEQ ID NO: 55446 - DNA, 7 bp, Unknown
  misc_feature (1)..( 7): Matrix.002 file - promoters60/3408983
tatatat

SEQ ID NO: 55447 - DNA, 6 bp, Unknown
  misc_feature (1)..( 6): Matrix.002 file - promoters60/3408983
agaatc

SEQ ID NO: 55448 - DNA, 7 bp, Unknown
  misc_feature (1)..( 7): Matrix.002 file - promoters60/3408983
tgtaata

SEQ ID NO: 55449 - DNA, 7 bp, Unknown
  misc_feature (1)..( 7): Matrix.002 file - promoters60/3408983
gatggaa

SEQ ID NO: 55450 - DNA, 8 bp, Unknown
  misc_feature (1)..( 8): Matrix.002 file - promoters60/3408983
aaatatga

SEQ ID NO: 55451 - DNA, 8 bp, Unknown
  misc_feature (1)..( 8): Matrix.002 file - promoters60/3408983
aagctata

SEQ ID NO: 55452 - DNA, 7 bp, Unknown
  misc_feature (1)..( 7): Matrix.002 file - promoters60/3408983
aaataaa

SEQ ID NO: 55453 - DNA, 6 bp, Unknown
  misc_feature (1)..( 6): Matrix.002 file - promoters60/3408983
cataat

SEQ ID NO: 55454 - DNA, 7 bp, Unknown
  misc_feature (1)..( 7): Matrix.002 file - promoters60/3408983
aaaaaaa

SEQ ID NO: 55455 - DNA, 6 bp, Unknown
  misc_feature (1)..( 6): Matrix.002 file - promoters60/3408983
aaaata

SEQ ID NO: 55456 - DNA, 8 bp, Unknown
  misc_feature (1)..( 8): Matrix.002 file - promoters60/3408983
tttaaatt

SEQ ID NO: 55457 - DNA, 7 bp, Unknown
  misc_feature (1)..( 7): Matrix.002 file - promoters60/3408983
ttaattt

SEQ ID NO: 55458 - DNA, 7 bp, Unknown
  misc_feature (1)..( 7): Matrix.002 file - promoters60/3408983
ttactaa

SEQ ID NO: 55459 - DNA, 6 bp, Unknown
  misc_feature (1)..( 6): Matrix.002 file - promoters60/3408983
aattta

SEQ ID NO: 55460 - DNA, 9 bp, Unknown
  misc_feature (1)..( 9): Matrix.002 file - promoters60/3408983
tctctctct

SEQ ID NO: 55461 - DNA, 6 bp, Unknown
  misc_feature (1)..( 6): Matrix.002 file - promoters60/3408983
cgagaa

SEQ ID NO: 55462 - DNA, 8 bp, Unknown
  misc_feature (1)..( 8): Matrix.002 file - promoters60/3408983
caacaaaa

SEQ ID NO: 55463 - DNA, 6 bp, Unknown
  misc_feature (1)..( 6): Matrix.002 file - promoters60/3408983
gagttt

SEQ ID NO: 55464 - DNA, 8 bp, Unknown
  misc_feature (1)..( 8): Matrix.002 file - promoters60/3409161
attttttt

SEQ ID NO: 55465 - DNA, 6 bp, Unknown
  misc_feature (1)..( 6): Matrix.002 file - promoters60/3409161
agtctt

SEQ ID NO: 55466 - DNA, 6 bp, Unknown
  misc_feature (1)..( 6): Matrix.002 file - promoters60/3409161
tctttt

SEQ ID NO: 55467 - DNA, 8 bp, Unknown
  misc_feature (1)..( 8): Matrix.002 file - promoters60/3409161
tttcgttt

SEQ ID NO: 55468 - DNA, 6 bp, Unknown
  misc_feature (1)..( 6): Matrix.002 file - promoters60/3409161
tttatt

SEQ ID NO: 55469 - DNA, 6 bp, Unknown
  misc_feature (1)..( 6): Matrix.002 file - promoters60/3409161
aaacag

SEQ ID NO: 55470 - DNA, 8 bp, Unknown
  misc_feature (1)..( 8): Matrix.002 file - promoters60/3409161
aaagaaca

SEQ ID NO: 55471 - DNA, 7 bp, Unknown
  misc_feature (1)..( 7): Matrix.002 file - promoters60/3409161
cagagga

SEQ ID NO: 55472 - DNA, 8 bp, Unknown
  misc_feature (1)..( 8): Matrix.002 file - promoters60/3409161
ctaacgaa

SEQ ID NO: 55473 - DNA, 7 bp, Unknown
  misc_feature (1)..( 7): Matrix.002 file - promoters60/3409161
ctcaaaa

SEQ ID NO: 55474 - DNA, 6 bp, Unknown
  misc_feature (1)..( 6): Matrix.002 file - promoters60/3409161
caatgc

SEQ ID NO: 55475 - DNA, 6 bp, Unknown
  misc_feature (1)..( 6): Matrix.002 file - promoters60/3409161
catttc

SEQ ID NO: 55476 - DNA, 6 bp, Unknown
  misc_feature (1)..( 6): Matrix.002 file - promoters60/3409161
ccccca

SEQ ID NO: 55477 - DNA, 6 bp, Unknown
  misc_feature (1)..( 6): Matrix.002 file - promoters60/3409161
gagata

SEQ ID NO: 55478 - DNA, 8 bp, Unknown
  misc_feature (1)..( 8): Matrix.002 file - promoters60/3409165
aaaacaaa

SEQ ID NO: 55479 - DNA, 8 bp, Unknown
  misc_feature (1)..( 8): Matrix.002 file - promoters60/3409165
cctctata

SEQ ID NO: 55480 - DNA, 6 bp, Unknown
  misc_feature (1)..( 6): Matrix.002 file - promoters60/3409165
aataaa

SEQ ID NO: 55481 - DNA, 12 bp, Unknown
  misc_feature (1)..( 12): Matrix.002 file - promoters60/3409165
attacaaaatat

SEQ ID NO: 55482 - DNA, 8 bp, Unknown
  misc_feature (1)..( 8): Matrix.002 file - promoters60/3409214
aacaaaga

SEQ ID NO: 55483 - DNA, 8 bp, Unknown
  misc_feature (1)..( 8): Matrix.002 file - promoters60/3409214
tttccttt

SEQ ID NO: 55484 - DNA, 9 bp, Unknown
  misc_feature (1)..( 9): Matrix.002 file - promoters60/3409214
ttctttgtt

SEQ ID NO: 55485 - DNA, 7 bp, Unknown
  misc_feature (1)..( 7): Matrix.002 file - promoters60/3409390
cacctca

SEQ ID NO: 55486 - DNA, 6 bp, Unknown
  misc_feature (1)..( 6): Matrix.002 file - promoters60/3409390
cttttc

SEQ ID NO: 55487 - DNA, 6 bp, Unknown
  misc_feature (1)..( 6): Matrix.002 file - promoters60/3409390
aaaatt

SEQ ID NO: 55488 - DNA, 9 bp, Unknown
  misc_feature (1)..( 9): Matrix.002 file - promoters60/3409390
acataaata

SEQ ID NO: 55489 - DNA, 9 bp, Unknown
  misc_feature (1)..( 9): Matrix.002 file - promoters60/3409390
ttatacaat

SEQ ID NO: 55490 - DNA, 7 bp, Unknown
  misc_feature (1)..( 7): Matrix.002 file - promoters60/3409390
ataaggt

SEQ ID NO: 55491 - DNA, 9 bp, Unknown
  misc_feature (1)..( 9): Matrix.002 file - promoters60/3409390
tttattttt

SEQ ID NO: 55492 - DNA, 6 bp, Unknown
  misc_feature (1)..( 6): Matrix.002 file - promoters60/3409390
tttttt

SEQ ID NO: 55493 - DNA, 7 bp, Unknown
  misc_feature (1)..( 7): Matrix.002 file - promoters60/3409390
aaaaaaa

SEQ ID NO: 55494 - DNA, 7 bp, Unknown
  misc_feature (1)..( 7): Matrix.002 file - promoters60/3409390
aaaaaca

SEQ ID NO: 55495 - DNA, 6 bp, Unknown
  misc_feature (1)..( 6): Matrix.002 file - promoters60/3409390
acaaaa

SEQ ID NO: 55496 - DNA, 6 bp, Unknown
  misc_feature (1)..( 6): Matrix.002 file - promoters60/3409390
aagaaa

SEQ ID NO: 55497 - DNA, 6 bp, Unknown
  misc_feature (1)..( 6): Matrix.002 file - promoters60/3409390
cgtggc

SEQ ID NO: 55498 - DNA, 7 bp, Unknown
  misc_feature (1)..( 7): Matrix.002 file - promoters60/3409390
agtattt

SEQ ID NO: 55499 - DNA, 7 bp, Unknown
  misc_feature (1)..( 7): Matrix.002 file - promoters60/3409390
tttgctg

SEQ ID NO: 55500 - DNA, 8 bp, Unknown
  misc_feature (1)..( 8): Matrix.002 file - promoters60/3409390
attttttt

SEQ ID NO: 55501 - DNA, 6 bp, Unknown
  misc_feature (1)..( 6): Matrix.002 file - promoters60/3409390
ggttag

SEQ ID NO: 55502 - DNA, 6 bp, Unknown
  misc_feature (1)..( 6): Matrix.002 file - promoters60/3409390
tcaatc

SEQ ID NO: 55503 - DNA, 6 bp, Unknown
  misc_feature (1)..( 6): Matrix.002 file - promoters60/3409390
aagcta

SEQ ID NO: 55504 - DNA, 7 bp, Unknown
  misc_feature (1)..( 7): Matrix.002 file - promoters60/3409637
tttgtta

SEQ ID NO: 55505 - DNA, 8 bp, Unknown
  misc_feature (1)..( 8): Matrix.002 file - promoters60/3409637
catgaatt

SEQ ID NO: 55506 - DNA, 9 bp, Unknown
  misc_feature (1)..( 9): Matrix.002 file - promoters60/3409637
caaatttct

SEQ ID NO: 55507 - DNA, 11 bp, Unknown
  misc_feature (1)..( 11): Matrix.002 file - promoters60/3409637
aattttttgaa

SEQ ID NO: 55508 - DNA, 8 bp, Unknown
  misc_feature (1)..( 8): Matrix.002 file - promoters60/3409637
tttggttt

SEQ ID NO: 55509 - DNA, 7 bp, Unknown
  misc_feature (1)..( 7): Matrix.002 file - promoters60/3409637
tttaacc

SEQ ID NO: 55510 - DNA, 13 bp, Unknown
  misc_feature (1)..( 13): Matrix.002 file - promoters60/3433703
aaagaatttctcc

SEQ ID NO: 55511 - DNA, 11 bp, Unknown
  misc_feature (1)..( 11): Matrix.002 file - promoters60/3433703
caaacaatcat

SEQ ID NO: 55512 - DNA, 9 bp, Unknown
  misc_feature (1)..( 9): Matrix.002 file - promoters60/3433703
aaaacaatt

SEQ ID NO: 55513 - DNA, 12 bp, Unknown
  misc_feature (1)..( 12): Matrix.002 file - promoters60/3433703
tatataaatata

SEQ ID NO: 55514 - DNA, 10 bp, Unknown
  misc_feature (1)..( 10): Matrix.002 file - promoters60/3433703
tatataaatc

SEQ ID NO: 55515 - DNA, 11 bp, Unknown
  misc_feature (1)..( 11): Matrix.002 file - promoters60/3433703
aatcatttctt

SEQ ID NO: 55516 - DNA, 12 bp, Unknown
  misc_feature (1)..( 12): Matrix.002 file - promoters60/3433799
gattgataacag

SEQ ID NO: 55517 - DNA, 7 bp, Unknown
  misc_feature (1)..( 7): Matrix.002 file - promoters60/3433799
tggaaaa

SEQ ID NO: 55518 - DNA, 9 bp, Unknown
  misc_feature (1)..( 9): Matrix.002 file - promoters60/3433799
aaaccattt

SEQ ID NO: 55519 - DNA, 10 bp, Unknown
  misc_feature (1)..( 10): Matrix.002 file - promoters60/3433799
actttataat

SEQ ID NO: 55520 - DNA, 8 bp, Unknown
  misc_feature (1)..( 8): Matrix.002 file - promoters60/3433831
ttgcattt

SEQ ID NO: 55521 - DNA, 8 bp, Unknown
  misc_feature (1)..( 8): Matrix.002 file - promoters60/3433831
ataaaaaa

SEQ ID NO: 55522 - DNA, 7 bp, Unknown
  misc_feature (1)..( 7): Matrix.002 file - promoters60/3433831
taacaaa

SEQ ID NO: 55523 - DNA, 7 bp, Unknown
  misc_feature (1)..( 7): Matrix.002 file - promoters60/3433831
agaatta

SEQ ID NO: 55524 - DNA, 9 bp, Unknown
  misc_feature (1)..( 9): Matrix.002 file - promoters60/3433831
attagataa

SEQ ID NO: 55525 - DNA, 7 bp, Unknown
  misc_feature (1)..( 7): Matrix.002 file - promoters60/3433831
ttaagaa

SEQ ID NO: 55526 - DNA, 6 bp, Unknown
  misc_feature (1)..( 6): Matrix.002 file - promoters60/3433831
ataatt

SEQ ID NO: 55527 - DNA, 6 bp, Unknown
  misc_feature (1)..( 6): Matrix.002 file - promoters60/3433831
tttaat

SEQ ID NO: 55528 - DNA, 7 bp, Unknown
  misc_feature (1)..( 7): Matrix.002 file - promoters60/3433831
gagagat

SEQ ID NO: 55529 - DNA, 8 bp, Unknown
  misc_feature (1)..( 8): Matrix.002 file - promoters60/3433831
cacaattg

SEQ ID NO: 55530 - DNA, 7 bp, Unknown
  misc_feature (1)..( 7): Matrix.002 file - promoters60/3433831
atgacaa

SEQ ID NO: 55531 - DNA, 6 bp, Unknown
  misc_feature (1)..( 6): Matrix.002 file - promoters60/3433831
tcatat

SEQ ID NO: 55532 - DNA, 7 bp, Unknown
  misc_feature (1)..( 7): Matrix.002 file - promoters60/3433831
ttaggtg

SEQ ID NO: 55533 - DNA, 8 bp, Unknown
  misc_feature (1)..( 8): Matrix.002 file - promoters60/3433831
atacatac

SEQ ID NO: 55534 - DNA, 6 bp, Unknown
  misc_feature (1)..( 6): Matrix.002 file - promoters60/3433831
ttcaaa

SEQ ID NO: 55535 - DNA, 7 bp, Unknown
  misc_feature (1)..( 7): Matrix.002 file - promoters60/3433904
agtaaac

SEQ ID NO: 55536 - DNA, 10 bp, Unknown
  misc_feature (1)..( 10): Matrix.002 file - promoters60/3433926
aatcttagca

SEQ ID NO: 55537 - DNA, 8 bp, Unknown
  misc_feature (1)..( 8): Matrix.002 file - promoters60/3433926
aattctta

SEQ ID NO: 55538 - DNA, 9 bp, Unknown
  misc_feature (1)..( 9): Matrix.002 file - promoters60/3433978
aaataaaat

SEQ ID NO: 55539 - DNA, 8 bp, Unknown
  misc_feature (1)..( 8): Matrix.002 file - promoters60/3433978
ttttgttc

SEQ ID NO: 55540 - DNA, 9 bp, Unknown
  misc_feature (1)..( 9): Matrix.002 file - promoters60/3433978
aaagttata

SEQ ID NO: 55541 - DNA, 9 bp, Unknown
  misc_feature (1)..( 9): Matrix.002 file - promoters60/3433978
ttattaaaa

SEQ ID NO: 55542 - DNA, 8 bp, Unknown
  misc_feature (1)..( 8): Matrix.002 file - promoters60/3433998
acatatct

SEQ ID NO: 55543 - DNA, 7 bp, Unknown
  misc_feature (1)..( 7): Matrix.002 file - promoters60/3433998
caaaaaa

SEQ ID NO: 55544 - DNA, 8 bp, Unknown
  misc_feature (1)..( 8): Matrix.002 file - promoters60/3433998
caaagttc

SEQ ID NO: 55545 - DNA, 7 bp, Unknown
  misc_feature (1)..( 7): Matrix.002 file - promoters60/3433998
ttttaaa

SEQ ID NO: 55546 - DNA, 8 bp, Unknown
  misc_feature (1)..( 8): Matrix.002 file - promoters60/3433998
tcttatct

SEQ ID NO: 55547 - DNA, 9 bp, Unknown
  misc_feature (1)..( 9): Matrix.002 file - promoters60/3433998
cacatatcc

SEQ ID NO: 55548 - DNA, 7 bp, Unknown
  misc_feature (1)..( 7): Matrix.002 file - promoters60/3433998
ataaaat

SEQ ID NO: 55549 - DNA, 7 bp, Unknown
  misc_feature (1)..( 7): Matrix.002 file - promoters60/3433998
aaaaaaa

SEQ ID NO: 55550 - DNA, 6 bp, Unknown
  misc_feature (1)..( 6): Matrix.002 file - promoters60/3433998
aaaaaa

SEQ ID NO: 55551 - DNA, 11 bp, Unknown
  misc_feature (1)..( 11): Matrix.002 file - promoters60/3434028
ttcgaatcaat

SEQ ID NO: 55552 - DNA, 9 bp, Unknown
  misc_feature (1)..( 9): Matrix.002 file - promoters60/3434028
taatgtttg

SEQ ID NO: 55553 - DNA, 8 bp, Unknown
  misc_feature (1)..( 8): Matrix.002 file - promoters60/3434036
ggtgggat

SEQ ID NO: 55554 - DNA, 7 bp, Unknown
  misc_feature (1)..( 7): Matrix.002 file - promoters60/3434036
cttgatt

SEQ ID NO: 55555 - DNA, 7 bp, Unknown
  misc_feature (1)..( 7): Matrix.002 file - promoters60/3434036
atctgtt

SEQ ID NO: 55556 - DNA, 7 bp, Unknown
  misc_feature (1)..( 7): Matrix.002 file - promoters60/3434036
aagatca

SEQ ID NO: 55557 - DNA, 6 bp, Unknown
  misc_feature (1)..( 6): Matrix.002 file - promoters60/3434036
ctttac

SEQ ID NO: 55558 - DNA, 9 bp, Unknown
  misc_feature (1)..( 9): Matrix.002 file - promoters60/3434036
ctttgtttt

SEQ ID NO: 55559 - DNA, 7 bp, Unknown
  misc_feature (1)..( 7): Matrix.002 file - promoters60/3434036
acgagag

SEQ ID NO: 55560 - DNA, 7 bp, Unknown
  misc_feature (1)..( 7): Matrix.002 file - promoters60/3434036
gttagga

SEQ ID NO: 55561 - DNA, 6 bp, Unknown
  misc_feature (1)..( 6): Matrix.002 file - promoters60/3434036
gatcgg

SEQ ID NO: 55562 - DNA, 7 bp, Unknown
  misc_feature (1)..( 7): Matrix.002 file - promoters60/3434036
gatcgga

SEQ ID NO: 55563 - DNA, 6 bp, Unknown
  misc_feature (1)..( 6): Matrix.002 file - promoters60/3434036
acgcga

SEQ ID NO: 55564 - DNA, 9 bp, Unknown
  misc_feature (1)..( 9): Matrix.002 file - promoters60/3434036
aatccaaga

SEQ ID NO: 55565 - DNA, 7 bp, Unknown
  misc_feature (1)..( 7): Matrix.002 file - promoters60/3434036
agacaaa

SEQ ID NO: 55566 - DNA, 7 bp, Unknown
  misc_feature (1)..( 7): Matrix.002 file - promoters60/3434036
ttaaaaa

SEQ ID NO: 55567 - DNA, 8 bp, Unknown
  misc_feature (1)..( 8): Matrix.002 file - promoters60/3434036
gtagagaa

SEQ ID NO: 55568 - DNA, 6 bp, Unknown
  misc_feature (1)..( 6): Matrix.002 file - promoters60/3434036
agaaga

SEQ ID NO: 55569 - DNA, 6 bp, Unknown
  misc_feature (1)..( 6): Matrix.002 file - promoters60/3434036
gtgatt

SEQ ID NO: 55570 - DNA, 11 bp, Unknown
  misc_feature (1)..( 11): Matrix.002 file - promoters60/3434044
aaaacaaaaat

SEQ ID NO: 55571 - DNA, 12 bp, Unknown
  misc_feature (1)..( 12): Matrix.002 file - promoters60/3434044
gatattgtttgc

SEQ ID NO: 55572 - DNA, 15 bp, Unknown
  misc_feature (1)..( 15): Matrix.002 file - promoters60/3434044
caagaaagaaaaaaa

SEQ ID NO: 55573 - DNA, 11 bp, Unknown
  misc_feature (1)..( 11): Matrix.002 file - promoters60/3434044
ataaaatgata

SEQ ID NO: 55574 - DNA, 11 bp, Unknown
  misc_feature (1)..( 11): Matrix.002 file - promoters60/3434044
aagaaaaaaaa

SEQ ID NO: 55575 - DNA, 8 bp, Unknown
  misc_feature (1)..( 8): Matrix.002 file - promoters60/3434044
aattaaaa

SEQ ID NO: 55576 - DNA, 10 bp, Unknown
  misc_feature (1)..( 10): Matrix.002 file - promoters60/3434044
agaaaatcat

SEQ ID NO: 55577 - DNA, 8 bp, Unknown
  misc_feature (1)..( 8): Matrix.002 file - promoters60/3434074
aaagtcat

SEQ ID NO: 55578 - DNA, 6 bp, Unknown
  misc_feature (1)..( 6): Matrix.002 file - promoters60/3434074
ttgaag

SEQ ID NO: 55579 - DNA, 10 bp, Unknown
  misc_feature (1)..( 10): Matrix.002 file - promoters60/3434074
gataacctta

SEQ ID NO: 55580 - DNA, 9 bp, Unknown
  misc_feature (1)..( 9): Matrix.002 file - promoters60/3434074
aacattttg

SEQ ID NO: 55581 - DNA, 6 bp, Unknown
  misc_feature (1)..( 6): Matrix.002 file - promoters60/3434074
ctgatt

SEQ ID NO: 55582 - DNA, 6 bp, Unknown
  misc_feature (1)..( 6): Matrix.002 file - promoters60/3434074
ggctga

SEQ ID NO: 55583 - DNA, 11 bp, Unknown
  misc_feature (1)..( 11): Matrix.002 file - promoters60/3434074
agggtctcaga

SEQ ID NO: 55584 - DNA, 6 bp, Unknown
  misc_feature (1)..( 6): Matrix.002 file - promoters60/3434074
agattt

SEQ ID NO: 55585 - DNA, 6 bp, Unknown
  misc_feature (1)..( 6): Matrix.002 file - promoters60/3434112
taaaaa

SEQ ID NO: 55586 - DNA, 9 bp, Unknown
  misc_feature (1)..( 9): Matrix.002 file - promoters60/3434112
tcatacaat

SEQ ID NO: 55587 - DNA, 7 bp, Unknown
  misc_feature (1)..( 7): Matrix.002 file - promoters60/3434112
tataccg

SEQ ID NO: 55588 - DNA, 6 bp, Unknown
  misc_feature (1)..( 6): Matrix.002 file - promoters60/3434112
tctcca

SEQ ID NO: 55589 - DNA, 7 bp, Unknown
  misc_feature (1)..( 7): Matrix.002 file - promoters60/3434112
atttctc

SEQ ID NO: 55590 - DNA, 7 bp, Unknown
  misc_feature (1)..( 7): Matrix.002 file - promoters60/3434112
tgtgata

SEQ ID NO: 55591 - DNA, 8 bp, Unknown
  misc_feature (1)..( 8): Matrix.002 file - promoters60/3434112
aaacagat

SEQ ID NO: 55592 - DNA, 8 bp, Unknown
  misc_feature (1)..( 8): Matrix.002 file - promoters60/3434112
ctcgtcgt

SEQ ID NO: 55593 - DNA, 11 bp, Unknown
  misc_feature (1)..( 11): Matrix.002 file - promoters60/3434112
ctgagaagaag

SEQ ID NO: 55594 - DNA, 7 bp, Unknown
  misc_feature (1)..( 7): Matrix.002 file - promoters60/3434112
ttgaatt

SEQ ID NO: 55595 - DNA, 6 bp, Unknown
  misc_feature (1)..( 6): Matrix.002 file - promoters60/3434112
atttga

SEQ ID NO: 55596 - DNA, 6 bp, Unknown
  misc_feature (1)..( 6): Matrix.002 file - promoters60/3434112
actatt

SEQ ID NO: 55597 - DNA, 6 bp, Unknown
  misc_feature (1)..( 6): Matrix.002 file - promoters60/3434147
tcaaaa

SEQ ID NO: 55598 - DNA, 8 bp, Unknown
  misc_feature (1)..( 8): Matrix.002 file - promoters60/3434147
aaataata

SEQ ID NO: 55599 - DNA, 7 bp, Unknown
  misc_feature (1)..( 7): Matrix.002 file - promoters60/3434147
tagataa

SEQ ID NO: 55600 - DNA, 12 bp, Unknown
  misc_feature (1)..( 12): Matrix.002 file - promoters60/3434147
ctgaaataaatt

SEQ ID NO: 55601 - DNA, 6 bp, Unknown
  misc_feature (1)..( 6): Matrix.002 file - promoters60/3434147
ttatgt

SEQ ID NO: 55602 - DNA, 11 bp, Unknown
  misc_feature (1)..( 11): Matrix.002 file - promoters60/3434147
tttgtaaacaa

SEQ ID NO: 55603 - DNA, 9 bp, Unknown
  misc_feature (1)..( 9): Matrix.002 file - promoters60/3434147
tatattatt

SEQ ID NO: 55604 - DNA, 9 bp, Unknown
  misc_feature (1)..( 9): Matrix.002 file - promoters60/3434147
attaaaatt

SEQ ID NO: 55605 - DNA, 7 bp, Unknown
  misc_feature (1)..( 7): Matrix.002 file - promoters60/3434147
gacaaaa

SEQ ID NO: 55606 - DNA, 7 bp, Unknown
  misc_feature (1)..( 7): Matrix.002 file - promoters60/3434147
ttcaata

SEQ ID NO: 55607 - DNA, 8 bp, Unknown
  misc_feature (1)..( 8): Matrix.002 file - promoters60/3434147
atttcaca

SEQ ID NO: 55608 - DNA, 6 bp, Unknown
  misc_feature (1)..( 6): Matrix.002 file - promoters60/3434147
tattta

SEQ ID NO: 55609 - DNA, 6 bp, Unknown
  misc_feature (1)..( 6): Matrix.002 file - promoters60/3434147
taaaac

SEQ ID NO: 55610 - DNA, 6 bp, Unknown
  misc_feature (1)..( 6): Matrix.002 file - promoters60/3434147
cccaat

SEQ ID NO: 55611 - DNA, 11 bp, Unknown
  misc_feature (1)..( 11): Matrix.002 file - promoters60/3434147
aagcaaacagg

SEQ ID NO: 55612 - DNA, 9 bp, Unknown
  misc_feature (1)..( 9): Matrix.002 file - promoters60/3434233
tattgaaaa

SEQ ID NO: 55613 - DNA, 9 bp, Unknown
  misc_feature (1)..( 9): Matrix.002 file - promoters60/3434256
ttttgcttc

SEQ ID NO: 55614 - DNA, 9 bp, Unknown
  misc_feature (1)..( 9): Matrix.002 file - promoters60/3434256
tttgttatt

SEQ ID NO: 55615 - DNA, 13 bp, Unknown
  misc_feature (1)..( 13): Matrix.002 file - promoters60/3434256
gtatatataaaac

SEQ ID NO: 55616 - DNA, 10 bp, Unknown
  misc_feature (1)..( 10): Matrix.002 file - promoters60/3434256
gttaataaaa

SEQ ID NO: 55617 - DNA, 11 bp, Unknown
  misc_feature (1)..( 11): Matrix.002 file - promoters60/3434256
actaatttgct

SEQ ID NO: 55618 - DNA, 12 bp, Unknown
  misc_feature (1)..( 12): Matrix.002 file - promoters60/3434256
attaatttgctt

SEQ ID NO: 55619 - DNA, 14 bp, Unknown
  misc_feature (1)..( 14): Matrix.002 file - promoters60/3434256
ttaatttattccta

SEQ ID NO: 55620 - DNA, 15 bp, Unknown
  misc_feature (1)..( 15): Matrix.002 file - promoters60/3434256
agagattaagtactt

SEQ ID NO: 55621 - DNA, 10 bp, Unknown
  misc_feature (1)..( 10): Matrix.002 file - promoters60/3434256
aaattaatgt

SEQ ID NO: 55622 - DNA, 12 bp, Unknown
  misc_feature (1)..( 12): Matrix.002 file - promoters60/3434256
taaaacattttt

SEQ ID NO: 55623 - DNA, 16 bp, Unknown
  misc_feature (1)..( 16): Matrix.002 file - promoters60/3434256
tttaataaattaataa

SEQ ID NO: 55624 - DNA, 7 bp, Unknown
  misc_feature (1)..( 7): Matrix.002 file - promoters60/3434279
tttgttt

SEQ ID NO: 55625 - DNA, 9 bp, Unknown
  misc_feature (1)..( 9): Matrix.002 file - promoters60/3434299
catataaaa

SEQ ID NO: 55626 - DNA, 9 bp, Unknown
  misc_feature (1)..( 9): Matrix.002 file - promoters60/3434311
atcaaaatg

SEQ ID NO: 55627 - DNA, 11 bp, Unknown
  misc_feature (1)..( 11): Matrix.002 file - promoters60/3434311
gttcaaaatgt

SEQ ID NO: 55628 - DNA, 7 bp, Unknown
  misc_feature (1)..( 7): Matrix.002 file - promoters60/3434381
aaaacac

SEQ ID NO: 55629 - DNA, 6 bp, Unknown
  misc_feature (1)..( 6): Matrix.002 file - promoters60/3434381
accact

SEQ ID NO: 55630 - DNA, 6 bp, Unknown
  misc_feature (1)..( 6): Matrix.002 file - promoters60/3434381
aaacta

SEQ ID NO: 55631 - DNA, 7 bp, Unknown
  misc_feature (1)..( 7): Matrix.002 file - promoters60/3434381
taatcca

SEQ ID NO: 55632 - DNA, 7 bp, Unknown
  misc_feature (1)..( 7): Matrix.002 file - promoters60/3434381
gatgaca

SEQ ID NO: 55633 - DNA, 7 bp, Unknown
  misc_feature (1)..( 7): Matrix.002 file - promoters60/3434381
ttggttt

SEQ ID NO: 55634 - DNA, 12 bp, Unknown
  misc_feature (1)..( 12): Matrix.002 file - promoters60/3434381
ttgaaatgaaaa

SEQ ID NO: 55635 - DNA, 6 bp, Unknown
  misc_feature (1)..( 6): Matrix.002 file - promoters60/3434381
aaaaga

SEQ ID NO: 55636 - DNA, 6 bp, Unknown
  misc_feature (1)..( 6): Matrix.002 file - promoters60/3434381
tgtgat

SEQ ID NO: 55637 - DNA, 8 bp, Unknown
  misc_feature (1)..( 8): Matrix.002 file - promoters60/3434381
acataaac

SEQ ID NO: 55638 - DNA, 6 bp, Unknown
  misc_feature (1)..( 6): Matrix.002 file - promoters60/3434381
cttctt

SEQ ID NO: 55639 - DNA, 7 bp, Unknown
  misc_feature (1)..( 7): Matrix.002 file - promoters60/3434381
atttgaa

SEQ ID NO: 55640 - DNA, 6 bp, Unknown
  misc_feature (1)..( 6): Matrix.002 file - promoters60/3434381
ttaaaa

SEQ ID NO: 55641 - DNA, 6 bp, Unknown
  misc_feature (1)..( 6): Matrix.002 file - promoters60/3434381
atattg

SEQ ID NO: 55642 - DNA, 8 bp, Unknown
  misc_feature (1)..( 8): Matrix.002 file - promoters60/3434381
attaaatt

SEQ ID NO: 55643 - DNA, 6 bp, Unknown
  misc_feature (1)..( 6): Matrix.002 file - promoters60/3434381
ggttga

SEQ ID NO: 55644 - DNA, 7 bp, Unknown
  misc_feature (1)..( 7): Matrix.002 file - promoters60/3434381
caaattg

SEQ ID NO: 55645 - DNA, 7 bp, Unknown
  misc_feature (1)..( 7): Matrix.002 file - promoters60/3434381
attcata

SEQ ID NO: 55646 - DNA, 7 bp, Unknown
  misc_feature (1)..( 7): Matrix.002 file - promoters60/3434381
ataaata

SEQ ID NO: 55647 - DNA, 7 bp, Unknown
  misc_feature (1)..( 7): Matrix.002 file - promoters60/3434381
taagtaa

SEQ ID NO: 55648 - DNA, 8 bp, Unknown
  misc_feature (1)..( 8): Matrix.002 file - promoters60/3434381
aaacaaaa

SEQ ID NO: 55649 - DNA, 7 bp, Unknown
  misc_feature (1)..( 7): Matrix.002 file - promoters60/3434381
aaaatag

SEQ ID NO: 55650 - DNA, 6 bp, Unknown
  misc_feature (1)..( 6): Matrix.002 file - promoters60/3434400
cagaaa

SEQ ID NO: 55651 - DNA, 11 bp, Unknown
  misc_feature (1)..( 11): Matrix.002 file - promoters60/3434400
actttataatg

SEQ ID NO: 55652 - DNA, 10 bp, Unknown
  misc_feature (1)..( 10): Matrix.002 file - promoters60/3434400
ctgcaaagaa

SEQ ID NO: 55653 - DNA, 8 bp, Unknown
  misc_feature (1)..( 8): Matrix.002 file - promoters60/3434471
aacaaaca

SEQ ID NO: 55654 - DNA, 6 bp, Unknown
  misc_feature (1)..( 6): Matrix.002 file - promoters60/3434496
actttt

SEQ ID NO: 55655 - DNA, 6 bp, Unknown
  misc_feature (1)..( 6): Matrix.002 file - promoters60/3434496
attctc

SEQ ID NO: 55656 - DNA, 7 bp, Unknown
  misc_feature (1)..( 7): Matrix.002 file - promoters60/3434496
aatttga

SEQ ID NO: 55657 - DNA, 9 bp, Unknown
  misc_feature (1)..( 9): Matrix.002 file - promoters60/3434496
gatggcaaa

SEQ ID NO: 55658 - DNA, 7 bp, Unknown
  misc_feature (1)..( 7): Matrix.002 file - promoters60/3434496
tgggctc

SEQ ID NO: 55659 - DNA, 6 bp, Unknown
  misc_feature (1)..( 6): Matrix.002 file - promoters60/3434496
gattca

SEQ ID NO: 55660 - DNA, 7 bp, Unknown
  misc_feature (1)..( 7): Matrix.002 file - promoters60/3434496
gcaacaa

SEQ ID NO: 55661 - DNA, 8 bp, Unknown
  misc_feature (1)..( 8): Matrix.002 file - promoters60/3434496
caaaaaac

SEQ ID NO: 55662 - DNA, 6 bp, Unknown
  misc_feature (1)..( 6): Matrix.002 file - promoters60/3434496
atagat

SEQ ID NO: 55663 - DNA, 9 bp, Unknown
  misc_feature (1)..( 9): Matrix.002 file - promoters60/3434496
tttccaatt

SEQ ID NO: 55664 - DNA, 6 bp, Unknown
  misc_feature (1)..( 6): Matrix.002 file - promoters60/3434496
aatttc

SEQ ID NO: 55665 - DNA, 6 bp, Unknown
  misc_feature (1)..( 6): Matrix.002 file - promoters60/3434496
aaactg

SEQ ID NO: 55666 - DNA, 10 bp, Unknown
  misc_feature (1)..( 10): Matrix.002 file - promoters60/3434496
aaaccaattt

SEQ ID NO: 55667 - DNA, 7 bp, Unknown
  misc_feature (1)..( 7): Matrix.002 file - promoters60/3434496
aaactat

SEQ ID NO: 55668 - DNA, 9 bp, Unknown
  misc_feature (1)..( 9): Matrix.002 file - promoters60/3434496
atcaaaccg

SEQ ID NO: 55669 - DNA, 7 bp, Unknown
  misc_feature (1)..( 7): Matrix.002 file - promoters60/3434496
cgagatt

SEQ ID NO: 55670 - DNA, 7 bp, Unknown
  misc_feature (1)..( 7): Matrix.002 file - promoters60/3434496
aagcttg

SEQ ID NO: 55671 - DNA, 6 bp, Unknown
  misc_feature (1)..( 6): Matrix.002 file - promoters60/3434496
gctgat

SEQ ID NO: 55672 - DNA, 6 bp, Unknown
  misc_feature (1)..( 6): Matrix.002 file - promoters60/3434496
tgtaat

SEQ ID NO: 55673 - DNA, 10 bp, Unknown
  misc_feature (1)..( 10): Matrix.002 file - promoters60/3434563
caaaacaaaa

SEQ ID NO: 55674 - DNA, 8 bp, Unknown
  misc_feature (1)..( 8): Matrix.002 file - promoters60/3434648
tctccatc

SEQ ID NO: 55675 - DNA, 9 bp, Unknown
  misc_feature (1)..( 9): Matrix.002 file - promoters60/3434648
cttgtcata

SEQ ID NO: 55676 - DNA, 8 bp, Unknown
  misc_feature (1)..( 8): Matrix.002 file - promoters60/3434648
gtatccat

SEQ ID NO: 55677 - DNA, 6 bp, Unknown
  misc_feature (1)..( 6): Matrix.002 file - promoters60/3434648
gatttg

SEQ ID NO: 55678 - DNA, 9 bp, Unknown
  misc_feature (1)..( 9): Matrix.002 file - promoters60/3434648
atgtatcag

SEQ ID NO: 55679 - DNA, 7 bp, Unknown
  misc_feature (1)..( 7): Matrix.002 file - promoters60/3434648
ctaaatc

SEQ ID NO: 55680 - DNA, 27 bp, Unknown
  misc_feature (1)..( 27): Matrix.002 file - promoters60/3434648
attcatacccacatgatcatgtcttct

SEQ ID NO: 55681 - DNA, 9 bp, Unknown
  misc_feature (1)..( 9): Matrix.002 file - promoters60/3434648
ttctaacca

SEQ ID NO: 55682 - DNA, 12 bp, Unknown
  misc_feature (1)..( 12): Matrix.002 file - promoters60/3434648
tccacaagttga

SEQ ID NO: 55683 - DNA, 7 bp, Unknown
  misc_feature (1)..( 7): Matrix.002 file - promoters60/3434648
attgatt

SEQ ID NO: 55684 - DNA, 11 bp, Unknown
  misc_feature (1)..( 11): Matrix.002 file - promoters60/3434648
aacttgggacc

SEQ ID NO: 55685 - DNA, 31 bp, Unknown
  misc_feature (1)..( 31): Matrix.002 file - promoters60/3434648
taatagtttctccttatatataatgaaacaa

SEQ ID NO: 55686 - DNA, 7 bp, Unknown
  misc_feature (1)..( 7): Matrix.002 file - promoters60/3434649
taaccac

SEQ ID NO: 55687 - DNA, 10 bp, Unknown
  misc_feature (1)..( 10): Matrix.002 file - promoters60/3434648
atatatgttt

SEQ ID NO: 55688 - DNA, 6 bp, Unknown
  misc_feature (1)..( 6): Matrix.002 file - promoters60/3434648
atagat

SEQ ID NO: 55689 - DNA, 6 bp, Unknown
  misc_feature (1)..( 6): Matrix.002 file - promoters60/3434648
ttttaa

SEQ ID NO: 55690 - DNA, 6 bp, Unknown
  misc_feature (1)..( 6): Matrix.002 file - promoters60/3434648
aaaaca

SEQ ID NO: 55691 - DNA, 7 bp, Unknown
  misc_feature (1)..( 7): Matrix.002 file - promoters60/3434652
gttcttt

SEQ ID NO: 55692 - DNA, 8 bp, Unknown
  misc_feature (1)..( 8): Matrix.002 file - promoters60/3434652
aaaattaa

SEQ ID NO: 55693 - DNA, 8 bp, Unknown
  misc_feature (1)..( 8): Matrix.002 file - promoters60/3434652
gataaaaa

SEQ ID NO: 55694 - DNA, 9 bp, Unknown
  misc_feature (1)..( 9): Matrix.002 file - promoters60/3434652
attttttaa

SEQ ID NO: 55695 - DNA, 9 bp, Unknown
  misc_feature (1)..( 9): Matrix.002 file - promoters60/3434652
taaagttgt

SEQ ID NO: 55696 - DNA, 7 bp, Unknown
  misc_feature (1)..( 7): Matrix.002 file - promoters60/3434652
atctaaa

SEQ ID NO: 55697 - DNA, 8 bp, Unknown
  misc_feature (1)..( 8): Matrix.002 file - promoters60/3434652
tgtattat

SEQ ID NO: 55698 - DNA, 10 bp, Unknown
  misc_feature (1)..( 10): Matrix.002 file - promoters60/3434652
tttaactata

SEQ ID NO: 55699 - DNA, 6 bp, Unknown
  misc_feature (1)..( 6): Matrix.002 file - promoters60/3434652
agtcaa

SEQ ID NO: 55700 - DNA, 6 bp, Unknown
  misc_feature (1)..( 6): Matrix.002 file - promoters60/3434652
taacca

SEQ ID NO: 55701 - DNA, 6 bp, Unknown
  misc_feature (1)..( 6): Matrix.002 file - promoters60/3434652
tataaa

SEQ ID NO: 55702 - DNA, 7 bp, Unknown
  misc_feature (1)..( 7): Matrix.002 file - promoters60/3434652
actatag

SEQ ID NO: 55703 - DNA, 6 bp, Unknown
  misc_feature (1)..( 6): Matrix.002 file - promoters60/3434652
ttttgt

SEQ ID NO: 55704 - DNA, 7 bp, Unknown
  misc_feature (1)..( 7): Matrix.002 file - promoters60/3434652
tttatta

SEQ ID NO: 55705 - DNA, 7 bp, Unknown
  misc_feature (1)..( 7): Matrix.002 file - promoters60/3434652
acaactt

SEQ ID NO: 55706 - DNA, 6 bp, Unknown
  misc_feature (1)..( 6): Matrix.002 file - promoters60/3434652
aacagc

SEQ ID NO: 55707 - DNA, 7 bp, Unknown
  misc_feature (1)..( 7): Matrix.002 file - promoters60/3434652
acttgta

SEQ ID NO: 55708 - DNA, 6 bp, Unknown
  misc_feature (1)..( 6): Matrix.002 file - promoters60/3434652
ccaatc

SEQ ID NO: 55709 - DNA, 8 bp, Unknown
  misc_feature (1)..( 8): Matrix.002 file - promoters60/3434652
aataagac

SEQ ID NO: 55710 - DNA, 7 bp, Unknown
  misc_feature (1)..( 7): Matrix.002 file - promoters60/3434652
aaacata

SEQ ID NO: 55711 - DNA, 8 bp, Unknown
  misc_feature (1)..( 8): Matrix.002 file - promoters60/3434652
ctaaaatt

SEQ ID NO: 55712 - DNA, 6 bp, Unknown
  misc_feature (1)..( 6): Matrix.002 file - promoters60/3434652
attaaa

SEQ ID NO: 55713 - DNA, 6 bp, Unknown
  misc_feature (1)..( 6): Matrix.002 file - promoters60/3434652
aaaaag

SEQ ID NO: 55714 - DNA, 7 bp, Unknown
  misc_feature (1)..( 7): Matrix.002 file - promoters60/3434652
tttataa

SEQ ID NO: 55715 - DNA, 6 bp, Unknown
  misc_feature (1)..( 6): Matrix.002 file - promoters60/3434652
tcagct

SEQ ID NO: 55716 - DNA, 6 bp, Unknown
  misc_feature (1)..( 6): Matrix.002 file - promoters60/3434652
ctattc

SEQ ID NO: 55717 - DNA, 6 bp, Unknown
  misc_feature (1)..( 6): Matrix.002 file - promoters60/3434652
attttt

SEQ ID NO: 55718 - DNA, 7 bp, Unknown
  misc_feature (1)..( 7): Matrix.002 file - promoters60/3434652
aaagttt

SEQ ID NO: 55719 - DNA, 6 bp, Unknown
  misc_feature (1)..( 6): Matrix.002 file - promoters60/3434836
ttcaaa

SEQ ID NO: 55720 - DNA, 7 bp, Unknown
  misc_feature (1)..( 7): Matrix.002 file - promoters60/3434836
caaaaaa

SEQ ID NO: 55721 - DNA, 7 bp, Unknown
  misc_feature (1)..( 7): Matrix.002 file - promoters60/3434836
ggtgttt

SEQ ID NO: 55722 - DNA, 7 bp, Unknown
  misc_feature (1)..( 7): Matrix.002 file - promoters60/3434836
aacaaaa

SEQ ID NO: 55723 - DNA, 7 bp, Unknown
  misc_feature (1)..( 7): Matrix.002 file - promoters60/3434836
ttagtat

SEQ ID NO: 55724 - DNA, 8 bp, Unknown
  misc_feature (1)..( 8): Matrix.002 file - promoters60/3434836
tattagtc

SEQ ID NO: 55725 - DNA, 8 bp, Unknown
  misc_feature (1)..( 8): Matrix.002 file - promoters60/3434836
aaaagtgt

SEQ ID NO: 55726 - DNA, 7 bp, Unknown
  misc_feature (1)..( 7): Matrix.002 file - promoters60/3434836
tttattg

SEQ ID NO: 55727 - DNA, 7 bp, Unknown
  misc_feature (1)..( 7): Matrix.002 file - promoters60/3434836
tttggtt

SEQ ID NO: 55728 - DNA, 8 bp, Unknown
  misc_feature (1)..( 8): Matrix.002 file - promoters60/3434836
caaatcag

SEQ ID NO: 55729 - DNA, 6 bp, Unknown
  misc_feature (1)..( 6): Matrix.002 file - promoters60/3434836
atcaga

SEQ ID NO: 55730 - DNA, 6 bp, Unknown
  misc_feature (1)..( 6): Matrix.002 file - promoters60/3434836
gataga

SEQ ID NO: 55731 - DNA, 6 bp, Unknown
  misc_feature (1)..( 6): Matrix.002 file - promoters60/3434836
agatct

SEQ ID NO: 55732 - DNA, 9 bp, Unknown
  misc_feature (1)..( 9): Matrix.002 file - promoters60/3434836
attaaaaga

SEQ ID NO: 55733 - DNA, 10 bp, Unknown
  misc_feature (1)..( 10): Matrix.002 file - promoters60/3434836
tctctgatca

SEQ ID NO: 55734 - DNA, 8 bp, Unknown
  misc_feature (1)..( 8): Matrix.002 file - promoters60/3434909
tatatctt

SEQ ID NO: 55735 - DNA, 9 bp, Unknown
  misc_feature (1)..( 9): Matrix.002 file - promoters60/3434909
aaggagata

SEQ ID NO: 55736 - DNA, 7 bp, Unknown
  misc_feature (1)..( 7): Matrix.002 file - promoters60/3434909
atcagaa

SEQ ID NO: 55737 - DNA, 6 bp, Unknown
  misc_feature (1)..( 6): Matrix.002 file - promoters60/3434909
taaaaa

SEQ ID NO: 55738 - DNA, 11 bp, Unknown
  misc_feature (1)..( 11): Matrix.002 file - promoters60/3434909
caacatgaaat

SEQ ID NO: 55739 - DNA, 8 bp, Unknown
  misc_feature (1)..( 8): Matrix.002 file - promoters60/3434909
taatgtta

SEQ ID NO: 55740 - DNA, 10 bp, Unknown
  misc_feature (1)..( 10): Matrix.002 file - promoters60/3434909
cccataaaaa

SEQ ID NO: 55741 - DNA, 6 bp, Unknown
  misc_feature (1)..( 6): Matrix.002 file - promoters60/3434909
tccatt

SEQ ID NO: 55742 - DNA, 6 bp, Unknown
  misc_feature (1)..( 6): Matrix.002 file - promoters60/3434909
tcaaca

SEQ ID NO: 55743 - DNA, 8 bp, Unknown
  misc_feature (1)..( 8): Matrix.002 file - promoters60/3434909
atgtaata

SEQ ID NO: 55744 - DNA, 9 bp, Unknown
  misc_feature (1)..( 9): Matrix.002 file - promoters60/3434909
atcaaatct

SEQ ID NO: 55745 - DNA, 6 bp, Unknown
  misc_feature (1)..( 6): Matrix.002 file - promoters60/3434909
ttccgc

SEQ ID NO: 55746 - DNA, 9 bp, Unknown
  misc_feature (1)..( 9): Matrix.002 file - promoters60/3435057
aaatatata

SEQ ID NO: 55747 - DNA, 9 bp, Unknown
  misc_feature (1)..( 9): Matrix.002 file - promoters60/3435057
aaaatatat

SEQ ID NO: 55748 - DNA, 5 bp, Unknown
  misc_feature (1)..( 5): Matrix.002 file - promoters60/3435057
cataa

SEQ ID NO: 55749 - DNA, 9 bp, Unknown
  misc_feature (1)..( 9): Matrix.002 file - promoters60/3435057
ccataaaaa

SEQ ID NO: 55750 - DNA, 12 bp, Unknown
  misc_feature (1)..( 12): Matrix.002 file - promoters60/3435057
atactgtctttt

SEQ ID NO: 55751 - DNA, 8 bp, Unknown
  misc_feature (1)..( 8): Matrix.002 file - promoters60/3435057
aaaaatta

SEQ ID NO: 55752 - DNA, 10 bp, Unknown
  misc_feature (1)..( 10): Matrix.002 file - promoters60/3435057
ctttttattt

SEQ ID NO: 55753 - DNA, 9 bp, Unknown
  misc_feature (1)..( 9): Matrix.002 file - promoters60/3435057
gtttaattt

SEQ ID NO: 55754 - DNA, 7 bp, Unknown
  misc_feature (1)..( 7): Matrix.002 file - promoters60/3435057
atatatt

SEQ ID NO: 55755 - DNA, 9 bp, Unknown
  misc_feature (1)..( 9): Matrix.002 file - promoters60/3435057
gttatcata

SEQ ID NO: 55756 - DNA, 9 bp, Unknown
  misc_feature (1)..( 9): Matrix.002 file - promoters60/3435057
ctatatata

SEQ ID NO: 55757 - DNA, 8 bp, Unknown
  misc_feature (1)..( 8): Matrix.002 file - promoters60/3435091
tcttcttt

SEQ ID NO: 55758 - DNA, 13 bp, Unknown
  misc_feature (1)..( 13): Matrix.002 file - promoters60/3435091
tttcataactatt

SEQ ID NO: 55759 - DNA, 10 bp, Unknown
  misc_feature (1)..( 10): Matrix.002 file - promoters60/3435091
gtatataaat

SEQ ID NO: 55760 - DNA, 11 bp, Unknown
  misc_feature (1)..( 11): Matrix.002 file - promoters60/3435091
caactttgaaa

SEQ ID NO: 55761 - DNA, 8 bp, Unknown
  misc_feature (1)..( 8): Matrix.002 file - promoters60/3435091
attaatga

SEQ ID NO: 55762 - DNA, 10 bp, Unknown
  misc_feature (1)..( 10): Matrix.002 file - promoters60/3435091
aactttgaaa

SEQ ID NO: 55763 - DNA, 9 bp, Unknown
  misc_feature (1)..( 9): Matrix.002 file - promoters60/3435091
aattataaa

SEQ ID NO: 55764 - DNA, 12 bp, Unknown
  misc_feature (1)..( 12): Matrix.002 file - promoters60/3435133
aaataattgtat

SEQ ID NO: 55765 - DNA, 10 bp, Unknown
  misc_feature (1)..( 10): Matrix.002 file - promoters60/3435133
gaaatagatt

SEQ ID NO: 55766 - DNA, 11 bp, Unknown
  misc_feature (1)..( 11): Matrix.002 file - promoters60/3435133
ttacttaaatt

SEQ ID NO: 55767 - DNA, 6 bp, Unknown
  misc_feature (1)..( 6): Matrix.002 file - promoters60/3435213
agtcgt

SEQ ID NO: 55768 - DNA, 7 bp, Unknown
  misc_feature (1)..( 7): Matrix.002 file - promoters60/3435213
tctagct

SEQ ID NO: 55769 - DNA, 6 bp, Unknown
  misc_feature (1)..( 6): Matrix.002 file - promoters60/3435213
cttgta

SEQ ID NO: 55770 - DNA, 7 bp, Unknown
  misc_feature (1)..( 7): Matrix.002 file - promoters60/3435213
tttctgt

SEQ ID NO: 55771 - DNA, 7 bp, Unknown
  misc_feature (1)..( 7): Matrix.002 file - promoters60/3435213
ttcttca

SEQ ID NO: 55772 - DNA, 8 bp, Unknown
  misc_feature (1)..( 8): Matrix.002 file - promoters60/3435213
tgtagtca

SEQ ID NO: 55773 - DNA, 7 bp, Unknown
  misc_feature (1)..( 7): Matrix.002 file - promoters60/3435213
aaccaaa

SEQ ID NO: 55774 - DNA, 6 bp, Unknown
  misc_feature (1)..( 6): Matrix.002 file - promoters60/3435213
aaacag

SEQ ID NO: 55775 - DNA, 8 bp, Unknown
  misc_feature (1)..( 8): Matrix.002 file - promoters60/3435213
tcctcttt

SEQ ID NO: 55776 - DNA, 8 bp, Unknown
  misc_feature (1)..( 8): Matrix.002 file - promoters60/3435213
tctcctgc

SEQ ID NO: 55777 - DNA, 6 bp, Unknown
  misc_feature (1)..( 6): Matrix.002 file - promoters60/3435213
tagagt

SEQ ID NO: 55778 - DNA, 11 bp, Unknown
  misc_feature (1)..( 11): Matrix.002 file - promoters60/3435239
gacgattttgt

SEQ ID NO: 55779 - DNA, 8 bp, Unknown
  misc_feature (1)..( 8): Matrix.002 file - promoters60/3435239
attcgtat

SEQ ID NO: 55780 - DNA, 15 bp, Unknown
  misc_feature (1)..( 15): Matrix.002 file - promoters60/3435239
ctcgttttttattgg

SEQ ID NO: 55781 - DNA, 8 bp, Unknown
  misc_feature (1)..( 8): Matrix.002 file - promoters60/3435239
tcttgttt

SEQ ID NO: 55782 - DNA, 8 bp, Unknown
  misc_feature (1)..( 8): Matrix.002 file - promoters60/3435239
atttgttt

SEQ ID NO: 55783 - DNA, 9 bp, Unknown
  misc_feature (1)..( 9): Matrix.002 file - promoters60/3435239
ttttatttt

SEQ ID NO: 55784 - DNA, 9 bp, Unknown
  misc_feature (1)..( 9): Matrix.002 file - promoters60/3435239
aaaagtaga

SEQ ID NO: 55785 - DNA, 10 bp, Unknown
  misc_feature (1)..( 10): Matrix.002 file - promoters60/3435274
atgaaaatag

SEQ ID NO: 55786 - DNA, 7 bp, Unknown
  misc_feature (1)..( 7): Matrix.002 file - promoters60/3435274
aataaca

SEQ ID NO: 55787 - DNA, 6 bp, Unknown
  misc_feature (1)..( 6): Matrix.002 file - promoters60/3435274
agtcaa

SEQ ID NO: 55788 - DNA, 7 bp, Unknown
  misc_feature (1)..( 7): Matrix.002 file - promoters60/3435274
agaagga

SEQ ID NO: 55789 - DNA, 6 bp, Unknown
  misc_feature (1)..( 6): Matrix.002 file - promoters60/3435274
aaacaa

SEQ ID NO: 55790 - DNA, 6 bp, Unknown
  misc_feature (1)..( 6): Matrix.002 file - promoters60/3435274
aatcaa

SEQ ID NO: 55791 - DNA, 12 bp, Unknown
  misc_feature (1)..( 12): Matrix.002 file - promoters60/3435274
caggattgattt

SEQ ID NO: 55792 - DNA, 7 bp, Unknown
  misc_feature (1)..( 7): Matrix.002 file - promoters60/3435274
acttgtg

SEQ ID NO: 55793 - DNA, 7 bp, Unknown
  misc_feature (1)..( 7): Matrix.002 file - promoters60/3435274
ttatgtc

SEQ ID NO: 55794 - DNA, 10 bp, Unknown
  misc_feature (1)..( 10): Matrix.002 file - promoters60/3435274
ttttaataac

SEQ ID NO: 55795 - DNA, 7 bp, Unknown
  misc_feature (1)..( 7): Matrix.002 file - promoters60/3435274
attagta

SEQ ID NO: 55796 - DNA, 6 bp, Unknown
  misc_feature (1)..( 6): Matrix.002 file - promoters60/3435274
aaaatc

SEQ ID NO: 55797 - DNA, 7 bp, Unknown
  misc_feature (1)..( 7): Matrix.002 file - promoters60/3435274
gattcag

SEQ ID NO: 55798 - DNA, 7 bp, Unknown
  misc_feature (1)..( 7): Matrix.002 file - promoters60/3435274
gatcgat

SEQ ID NO: 55799 - DNA, 7 bp, Unknown
  misc_feature (1)..( 7): Matrix.002 file - promoters60/3435282
agaaata

SEQ ID NO: 55800 - DNA, 7 bp, Unknown
  misc_feature (1)..( 7): Matrix.002 file - promoters60/3435282
tgaatta

SEQ ID NO: 55801 - DNA, 7 bp, Unknown
  misc_feature (1)..( 7): Matrix.002 file - promoters60/3435282
gttgatt

SEQ ID NO: 55802 - DNA, 7 bp, Unknown
  misc_feature (1)..( 7): Matrix.002 file - promoters60/3435282
tgtcggc

SEQ ID NO: 55803 - DNA, 6 bp, Unknown
  misc_feature (1)..( 6): Matrix.002 file - promoters60/3435282
ttataa

SEQ ID NO: 55804 - DNA, 6 bp, Unknown
  misc_feature (1)..( 6): Matrix.002 file - promoters60/3435282
ttatgt

SEQ ID NO: 55805 - DNA, 9 bp, Unknown
  misc_feature (1)..( 9): Matrix.002 file - promoters60/3435282
ttgtatctc

SEQ ID NO: 55806 - DNA, 7 bp, Unknown
  misc_feature (1)..( 7): Matrix.002 file - promoters60/3435282
tatcttt

SEQ ID NO: 55807 - DNA, 6 bp, Unknown
  misc_feature (1)..( 6): Matrix.002 file - promoters60/3435282
agcatc

SEQ ID NO: 55808 - DNA, 6 bp, Unknown
  misc_feature (1)..( 6): Matrix.002 file - promoters60/3435282
cttttc

SEQ ID NO: 55809 - DNA, 6 bp, Unknown
  misc_feature (1)..( 6): Matrix.002 file - promoters60/3435282
tttgga

SEQ ID NO: 55810 - DNA, 6 bp, Unknown
  misc_feature (1)..( 6): Matrix.002 file - promoters60/3435282
aaccaa

SEQ ID NO: 55811 - DNA, 7 bp, Unknown
  misc_feature (1)..( 7): Matrix.002 file - promoters60/3435282
aaagatt

SEQ ID NO: 55812 - DNA, 7 bp, Unknown
  misc_feature (1)..( 7): Matrix.002 file - promoters60/3435282
aaaaaag

SEQ ID NO: 55813 - DNA, 7 bp, Unknown
  misc_feature (1)..( 7): Matrix.002 file - promoters60/3435282
ataatat

SEQ ID NO: 55814 - DNA, 8 bp, Unknown
  misc_feature (1)..( 8): Matrix.002 file - promoters60/3435282
tttacaag

SEQ ID NO: 55815 - DNA, 9 bp, Unknown
  misc_feature (1)..( 9): Matrix.002 file - promoters60/3435282
aatacaaaa

SEQ ID NO: 55816 - DNA, 6 bp, Unknown
  misc_feature (1)..( 6): Matrix.002 file - promoters60/3435282
taaaaa

SEQ ID NO: 55817 - DNA, 6 bp, Unknown
  misc_feature (1)..( 6): Matrix.002 file - promoters60/3435282
attttg

SEQ ID NO: 55818 - DNA, 8 bp, Unknown
  misc_feature (1)..( 8): Matrix.002 file - promoters60/3435341
attggttt

SEQ ID NO: 55819 - DNA, 7 bp, Unknown
  misc_feature (1)..( 7): Matrix.002 file - promoters60/3435341
gaactta

SEQ ID NO: 55820 - DNA, 7 bp, Unknown
  misc_feature (1)..( 7): Matrix.002 file - promoters60/3435341
tgacaag

SEQ ID NO: 55821 - DNA, 6 bp, Unknown
  misc_feature (1)..( 6): Matrix.002 file - promoters60/3435341
aatttt

SEQ ID NO: 55822 - DNA, 6 bp, Unknown
  misc_feature (1)..( 6): Matrix.002 file - promoters60/3435341
ttttga

SEQ ID NO: 55823 - DNA, 7 bp, Unknown
  misc_feature (1)..( 7): Matrix.002 file - promoters60/3435341
agtaata

SEQ ID NO: 55824 - DNA, 7 bp, Unknown
  misc_feature (1)..( 7): Matrix.002 file - promoters60/3435341
aatgtgt

SEQ ID NO: 55825 - DNA, 6 bp, Unknown
  misc_feature (1)..( 6): Matrix.002 file - promoters60/3435341
ggtttg

SEQ ID NO: 55826 - DNA, 6 bp, Unknown
  misc_feature (1)..( 6): Matrix.002 file - promoters60/3435341
ttcaat

SEQ ID NO: 55827 - DNA, 6 bp, Unknown
  misc_feature (1)..( 6): Matrix.002 file - promoters60/3435341
aagtta

SEQ ID NO: 55828 - DNA, 7 bp, Unknown
  misc_feature (1)..( 7): Matrix.002 file - promoters60/3435341
gagcaat

SEQ ID NO: 55829 - DNA, 8 bp, Unknown
  misc_feature (1)..( 8): Matrix.002 file - promoters60/3435341
ttgcaatt

SEQ ID NO: 55830 - DNA, 6 bp, Unknown
  misc_feature (1)..( 6): Matrix.002 file - promoters60/3435341
tttctt

SEQ ID NO: 55831 - DNA, 10 bp, Unknown
  misc_feature (1)..( 10): Matrix.002 file - promoters60/3435341
ttactgatag

SEQ ID NO: 55832 - DNA, 7 bp, Unknown
  misc_feature (1)..( 7): Matrix.002 file - promoters60/3435341
tttaatc

SEQ ID NO: 55833 - DNA, 6 bp, Unknown
  misc_feature (1)..( 6): Matrix.002 file - promoters60/3435341
gggacc

SEQ ID NO: 55834 - DNA, 8 bp, Unknown
  misc_feature (1)..( 8): Matrix.002 file - promoters60/3435341
cctaactt

SEQ ID NO: 55835 - DNA, 8 bp, Unknown
  misc_feature (1)..( 8): Matrix.002 file - promoters60/3435341
cttgattg

SEQ ID NO: 55836 - DNA, 6 bp, Unknown
  misc_feature (1)..( 6): Matrix.002 file - promoters60/3435341
tctttg

SEQ ID NO: 55837 - DNA, 6 bp, Unknown
  misc_feature (1)..( 6): Matrix.002 file - promoters60/3435341
gaggaa

SEQ ID NO: 55838 - DNA, 6 bp, Unknown
  misc_feature (1)..( 6): Matrix.002 file - promoters60/3435341
tttttg

SEQ ID NO: 55839 - DNA, 10 bp, Unknown
  misc_feature (1)..( 10): Matrix.002 file - promoters60/3435411
ctcatcttct

SEQ ID NO: 55840 - DNA, 9 bp, Unknown
  misc_feature (1)..( 9): Matrix.002 file - promoters60/3435411
tctaaaatc

SEQ ID NO: 55841 - DNA, 8 bp, Unknown
  misc_feature (1)..( 8): Matrix.002 file - promoters60/3435411
gaagaaaa

SEQ ID NO: 55842 - DNA, 7 bp, Unknown
  misc_feature (1)..( 7): Matrix.002 file - promoters60/3435411
aaaaatt

SEQ ID NO: 55843 - DNA, 10 bp, Unknown
  misc_feature (1)..( 10): Matrix.002 file - promoters60/3435411
agagagaaca

SEQ ID NO: 55844 - DNA, 7 bp, Unknown
  misc_feature (1)..( 7): Matrix.002 file - promoters60/3435411
aacaaag

SEQ ID NO: 55845 - DNA, 6 bp, Unknown
  misc_feature (1)..( 6): Matrix.002 file - promoters60/3435411
gttttc

SEQ ID NO: 55846 - DNA, 6 bp, Unknown
  misc_feature (1)..( 6): Matrix.002 file - promoters60/3435411
agcttc

SEQ ID NO: 55847 - DNA, 9 bp, Unknown
  misc_feature (1)..( 9): Matrix.002 file - promoters60/3435411
atcttaact

SEQ ID NO: 55848 - DNA, 6 bp, Unknown
  misc_feature (1)..( 6): Matrix.002 file - promoters60/3435411
ataatt

SEQ ID NO: 55849 - DNA, 6 bp, Unknown
  misc_feature (1)..( 6): Matrix.002 file - promoters60/3435411
tttagg

SEQ ID NO: 55850 - DNA, 9 bp, Unknown
  misc_feature (1)..( 9): Matrix.002 file - promoters60/3435411
gagcctgat

SEQ ID NO: 55851 - DNA, 6 bp, Unknown
  misc_feature (1)..( 6): Matrix.002 file - promoters60/3435411
aattgc

SEQ ID NO: 55852 - DNA, 6 bp, Unknown
  misc_feature (1)..( 6): Matrix.002 file - promoters60/3435411
tccaaa

SEQ ID NO: 55853 - DNA, 6 bp, Unknown
  misc_feature (1)..( 6): Matrix.002 file - promoters60/3435411
aaacga

SEQ ID NO: 55854 - DNA, 6 bp, Unknown
  misc_feature (1)..( 6): Matrix.002 file - promoters60/3435411
ttgact

SEQ ID NO: 55855 - DNA, 8 bp, Unknown
  misc_feature (1)..( 8): Matrix.002 file - promoters60/3435411
ccaagacg

SEQ ID NO: 55856 - DNA, 7 bp, Unknown
  misc_feature (1)..( 7): Matrix.002 file - promoters60/3435411
aggccca

SEQ ID NO: 55857 - DNA, 8 bp, Unknown
  misc_feature (1)..( 8): Matrix.002 file - promoters60/3435452
attttctt

SEQ ID NO: 55858 - DNA, 9 bp, Unknown
  misc_feature (1)..( 9): Matrix.002 file - promoters60/3435469
tgttttcta

SEQ ID NO: 55859 - DNA, 13 bp, Unknown
  misc_feature (1)..( 13): Matrix.002 file - promoters60/3435469
ctcatatataaca

SEQ ID NO: 55860 - DNA, 10 bp, Unknown
  misc_feature (1)..( 10): Matrix.002 file - promoters60/3435469
ctagattttt

SEQ ID NO: 55861 - DNA, 12 bp, Unknown
  misc_feature (1)..( 12): Matrix.002 file - promoters60/3435469
aaatttttttta

SEQ ID NO: 55862 - DNA, 8 bp, Unknown
  misc_feature (1)..( 8): Matrix.002 file - promoters60/3435469
cttttttt

SEQ ID NO: 55863 - DNA, 9 bp, Unknown
  misc_feature (1)..( 9): Matrix.002 file - promoters60/3435534
acaaaaaat

SEQ ID NO: 55864 - DNA, 8 bp, Unknown
  misc_feature (1)..( 8): Matrix.002 file - promoters60/3435534
agacaaaa

SEQ ID NO: 55865 - DNA, 10 bp, Unknown
  misc_feature (1)..( 10): Matrix.002 file - promoters60/3435534
acacaaaaaa

SEQ ID NO: 55866 - DNA, 6 bp, Unknown
  misc_feature (1)..( 6): Matrix.002 file - promoters60/3435578
tatcaa

SEQ ID NO: 55867 - DNA, 11 bp, Unknown
  misc_feature (1)..( 11): Matrix.002 file - promoters60/3435578
ttgacattaca

SEQ ID NO: 55868 - DNA, 7 bp, Unknown
  misc_feature (1)..( 7): Matrix.002 file - promoters60/3435578
tgtgttt

SEQ ID NO: 55869 - DNA, 8 bp, Unknown
  misc_feature (1)..( 8): Matrix.002 file - promoters60/3435578
ttagcaag

SEQ ID NO: 55870 - DNA, 7 bp, Unknown
  misc_feature (1)..( 7): Matrix.002 file - promoters60/3435578
aggagaa

SEQ ID NO: 55871 - DNA, 7 bp, Unknown
  misc_feature (1)..( 7): Matrix.002 file - promoters60/3435578
attaggt

SEQ ID NO: 55872 - DNA, 8 bp, Unknown
  misc_feature (1)..( 8): Matrix.002 file - promoters60/3435578
ttcacaaa

SEQ ID NO: 55873 - DNA, 10 bp, Unknown
  misc_feature (1)..( 10): Matrix.002 file - promoters60/3435578
ttcacaaact

SEQ ID NO: 55874 - DNA, 7 bp, Unknown
  misc_feature (1)..( 7): Matrix.002 file - promoters60/3435578
tcttctt

SEQ ID NO: 55875 - DNA, 6 bp, Unknown
  misc_feature (1)..( 6): Matrix.002 file - promoters60/3435578
taacca

SEQ ID NO: 55876 - DNA, 6 bp, Unknown
  misc_feature (1)..( 6): Matrix.002 file - promoters60/3435578
aacttt

SEQ ID NO: 55877 - DNA, 7 bp, Unknown
  misc_feature (1)..( 7): Matrix.002 file - promoters60/3435578
tatacaa

SEQ ID NO: 55878 - DNA, 8 bp, Unknown
  misc_feature (1)..( 8): Matrix.002 file - promoters60/3435578
aacaaaca

SEQ ID NO: 55879 - DNA, 6 bp, Unknown
  misc_feature (1)..( 6): Matrix.002 file - promoters60/3435578
atttca

SEQ ID NO: 55880 - DNA, 8 bp, Unknown
  misc_feature (1)..( 8): Matrix.002 file - promoters60/3435578
cagctatt

SEQ ID NO: 55881 - DNA, 7 bp, Unknown
  misc_feature (1)..( 7): Matrix.002 file - promoters60/3435578
attgttg

SEQ ID NO: 55882 - DNA, 8 bp, Unknown
  misc_feature (1)..( 8): Matrix.002 file - promoters60/3435578
cataaaaa

SEQ ID NO: 55883 - DNA, 7 bp, Unknown
  misc_feature (1)..( 7): Matrix.002 file - promoters60/3435578
acagatt

SEQ ID NO: 55884 - DNA, 7 bp, Unknown
  misc_feature (1)..( 7): Matrix.002 file - promoters60/3435578
tttagtt

SEQ ID NO: 55885 - DNA, 11 bp, Unknown
  misc_feature (1)..( 11): Matrix.002 file - promoters60/3435605
tctaatttaat

SEQ ID NO: 55886 - DNA, 13 bp, Unknown
  misc_feature (1)..( 13): Matrix.002 file - promoters60/3435605
aaattataaaatc

SEQ ID NO: 55887 - DNA, 10 bp, Unknown
  misc_feature (1)..( 10): Matrix.002 file - promoters60/3435605
tttaatgtca

SEQ ID NO: 55888 - DNA, 12 bp, Unknown
  misc_feature (1)..( 12): Matrix.002 file - promoters60/3435605
cacaaatatgtt

SEQ ID NO: 55889 - DNA, 8 bp, Unknown
  misc_feature (1)..( 8): Matrix.002 file - promoters60/3435605
attaaatc

SEQ ID NO: 55890 - DNA, 11 bp, Unknown
  misc_feature (1)..( 11): Matrix.002 file - promoters60/3435605
cataaattgta

SEQ ID NO: 55891 - DNA, 8 bp, Unknown
  misc_feature (1)..( 8): Matrix.002 file - promoters60/3435605
ttaaatta

SEQ ID NO: 55892 - DNA, 9 bp, Unknown
  misc_feature (1)..( 9): Matrix.002 file - promoters60/3435620
tcataaagc

SEQ ID NO: 55893 - DNA, 10 bp, Unknown
  misc_feature (1)..( 10): Matrix.002 file - promoters60/3435620
ttagttctaa

SEQ ID NO: 55894 - DNA, 7 bp, Unknown
  misc_feature (1)..( 7): Matrix.002 file - promoters60/3435620
gaaaaaa

SEQ ID NO: 55895 - DNA, 7 bp, Unknown
  misc_feature (1)..( 7): Matrix.002 file - promoters60/3435620
caaaaac

SEQ ID NO: 55896 - DNA, 10 bp, Unknown
  misc_feature (1)..( 10): Matrix.002 file - promoters60/3435620
tcatttgtat

SEQ ID NO: 55897 - DNA, 9 bp, Unknown
  misc_feature (1)..( 9): Matrix.002 file - promoters60/3435620
ataacatac

SEQ ID NO: 55898 - DNA, 11 bp, Unknown
  misc_feature (1)..( 11): Matrix.002 file - promoters60/3435632
gaaacaaaaaa

SEQ ID NO: 55899 - DNA, 9 bp, Unknown
  misc_feature (1)..( 9): Matrix.002 file - promoters60/3435632
tttgattgt

SEQ ID NO: 55900 - DNA, 8 bp, Unknown
  misc_feature (1)..( 8): Matrix.002 file - promoters60/3435646
tttaggga

SEQ ID NO: 55901 - DNA, 7 bp, Unknown
  misc_feature (1)..( 7): Matrix.002 file - promoters60/3435683
cttatca

SEQ ID NO: 55902 - DNA, 7 bp, Unknown
  misc_feature (1)..( 7): Matrix.002 file - promoters60/3435683
caaatac

SEQ ID NO: 55903 - DNA, 8 bp, Unknown
  misc_feature (1)..( 8): Matrix.002 file - promoters60/3435683
ccaaaaac

SEQ ID NO: 55904 - DNA, 8 bp, Unknown
  misc_feature (1)..( 8): Matrix.002 file - promoters60/3435683
acaaagtg

SEQ ID NO: 55905 - DNA, 9 bp, Unknown
  misc_feature (1)..( 9): Matrix.002 file - promoters60/3435683
aatttcaaa

SEQ ID NO: 55906 - DNA, 6 bp, Unknown
  misc_feature (1)..( 6): Matrix.002 file - promoters60/3435683
tgtaat

SEQ ID NO: 55907 - DNA, 6 bp, Unknown
  misc_feature (1)..( 6): Matrix.002 file - promoters60/3435683
aattta

SEQ ID NO: 55908 - DNA, 9 bp, Unknown
  misc_feature (1)..( 9): Matrix.002 file - promoters60/3435683
tgttaaaat

SEQ ID NO: 55909 - DNA, 7 bp, Unknown
  misc_feature (1)..( 7): Matrix.002 file - promoters60/3435683
tatatat

SEQ ID NO: 55910 - DNA, 6 bp, Unknown
  misc_feature (1)..( 6): Matrix.002 file - promoters60/3435683
ggctga

SEQ ID NO: 55911 - DNA, 11 bp, Unknown
  misc_feature (1)..( 11): Matrix.002 file - promoters60/3435683
agggtctcaga

SEQ ID NO: 55912 - DNA, 6 bp, Unknown
  misc_feature (1)..( 6): Matrix.002 file - promoters60/3435683
agattt

SEQ ID NO: 55913 - DNA, 12 bp, Unknown
  misc_feature (1)..( 12): Matrix.002 file - promoters60/3435761
aaatgggcctat

SEQ ID NO: 55914 - DNA, 6 bp, Unknown
  misc_feature (1)..( 6): Matrix.002 file - promoters60/3435765
ttaaac

SEQ ID NO: 55915 - DNA, 7 bp, Unknown
  misc_feature (1)..( 7): Matrix.002 file - promoters60/3435765
tgttttt

SEQ ID NO: 55916 - DNA, 9 bp, Unknown
  misc_feature (1)..( 9): Matrix.002 file - promoters60/3435765
gttttttaa

SEQ ID NO: 55917 - DNA, 9 bp, Unknown
  misc_feature (1)..( 9): Matrix.002 file - promoters60/3435765
ataaaataa

SEQ ID NO: 55918 - DNA, 7 bp, Unknown
  misc_feature (1)..( 7): Matrix.002 file - promoters60/3435765
ataagga

SEQ ID NO: 55919 - DNA, 7 bp, Unknown
  misc_feature (1)..( 7): Matrix.002 file - promoters60/3435765
ataaatg

SEQ ID NO: 55920 - DNA, 6 bp, Unknown
  misc_feature (1)..( 6): Matrix.002 file - promoters60/3435765
tatatg

SEQ ID NO: 55921 - DNA, 6 bp, Unknown
  misc_feature (1)..( 6): Matrix.002 file - promoters60/3435765
aaacat

SEQ ID NO: 55922 - DNA, 7 bp, Unknown
  misc_feature (1)..( 7): Matrix.002 file - promoters60/3435765
ttatgat

SEQ ID NO: 55923 - DNA, 6 bp, Unknown
  misc_feature (1)..( 6): Matrix.002 file - promoters60/3435765
acatgt

SEQ ID NO: 55924 - DNA, 9 bp, Unknown
  misc_feature (1)..( 9): Matrix.002 file - promoters60/3435765
agaagatta

SEQ ID NO: 55925 - DNA, 6 bp, Unknown
  misc_feature (1)..( 6): Matrix.002 file - promoters60/3435765
aatgct

SEQ ID NO: 55926 - DNA, 6 bp, Unknown
  misc_feature (1)..( 6): Matrix.002 file - promoters60/3435765
aatatg

SEQ ID NO: 55927 - DNA, 6 bp, Unknown
  misc_feature (1)..( 6): Matrix.002 file - promoters60/3435765
gagttc

SEQ ID NO: 55928 - DNA, 6 bp, Unknown
  misc_feature (1)..( 6): Matrix.002 file - promoters60/3435765
ccattt

SEQ ID NO: 55929 - DNA, 6 bp, Unknown
  misc_feature (1)..( 6): Matrix.002 file - promoters60/3435765
tgaaaa

SEQ ID NO: 55930 - DNA, 8 bp, Unknown
  misc_feature (1)..( 8): Matrix.002 file - promoters60/3435765
atgaacat

SEQ ID NO: 55931 - DNA, 7 bp, Unknown
  misc_feature (1)..( 7): Matrix.002 file - promoters60/3435765
tatgttg

SEQ ID NO: 55932 - DNA, 7 bp, Unknown
  misc_feature (1)..( 7): Matrix.002 file - promoters60/3435765
attaaga

SEQ ID NO: 55933 - DNA, 7 bp, Unknown
  misc_feature (1)..( 7): Matrix.002 file - promoters60/3435765
tctcttt

SEQ ID NO: 55934 - DNA, 7 bp, Unknown
  misc_feature (1)..( 7): Matrix.002 file - promoters60/3435765
aaacaaa

SEQ ID NO: 55935 - DNA, 6 bp, Unknown
  misc_feature (1)..( 6): Matrix.002 file - promoters60/3435765
tcttaa

SEQ ID NO: 55936 - DNA, 14 bp, Unknown
  misc_feature (1)..( 14): Matrix.002 file - promoters60/3435819
atcggagatttgtt

SEQ ID NO: 55937 - DNA, 9 bp, Unknown
  misc_feature (1)..( 9): Matrix.002 file - promoters60/3435819
cgaaagaaa

SEQ ID NO: 55938 - DNA, 10 bp, Unknown
  misc_feature (1)..( 10): Matrix.002 file - promoters60/3435819
acgatttaag

SEQ ID NO: 55939 - DNA, 7 bp, Unknown
  misc_feature (1)..( 7): Matrix.002 file - promoters60/3435819
atttttt

SEQ ID NO: 55940 - DNA, 11 bp, Unknown
  misc_feature (1)..( 11): Matrix.002 file - promoters60/3435819
ttaatgggttc

SEQ ID NO: 55941 - DNA, 9 bp, Unknown
  misc_feature (1)..( 9): Matrix.002 file - promoters60/3435829
gaatacata

SEQ ID NO: 55942 - DNA, 8 bp, Unknown
  misc_feature (1)..( 8): Matrix.002 file - promoters60/3435829
aattatat

SEQ ID NO: 55943 - DNA, 8 bp, Unknown
  misc_feature (1)..( 8): Matrix.002 file - promoters60/3435829
tcaaaatt

SEQ ID NO: 55944 - DNA, 8 bp, Unknown
  misc_feature (1)..( 8): Matrix.002 file - promoters60/3435829
ctaaaata

SEQ ID NO: 55945 - DNA, 8 bp, Unknown
  misc_feature (1)..( 8): Matrix.002 file - promoters60/3435829
attaacta

SEQ ID NO: 55946 - DNA, 9 bp, Unknown
  misc_feature (1)..( 9): Matrix.002 file - promoters60/3435833
atgaaaaaa

SEQ ID NO: 55947 - DNA, 12 bp, Unknown
  misc_feature (1)..( 12): Matrix.002 file - promoters60/3435833
tcaaaagattaa

SEQ ID NO: 55948 - DNA, 13 bp, Unknown
  misc_feature (1)..( 13): Matrix.002 file - promoters60/3435833
atatgacaaaaat

SEQ ID NO: 55949 - DNA, 11 bp, Unknown
  misc_feature (1)..( 11): Matrix.002 file - promoters60/3435833
aatgattaaat

SEQ ID NO: 55950 - DNA, 10 bp, Unknown
  misc_feature (1)..( 10): Matrix.002 file - promoters60/3435833
aaatttttca

SEQ ID NO: 55951 - DNA, 8 bp, Unknown
  misc_feature (1)..( 8): Matrix.002 file - promoters60/3435891
aatgcaac

SEQ ID NO: 55952 - DNA, 6 bp, Unknown
  misc_feature (1)..( 6): Matrix.002 file - promoters60/3435891
aaattt

SEQ ID NO: 55953 - DNA, 10 bp, Unknown
  misc_feature (1)..( 10): Matrix.002 file - promoters60/3435891
tgttttcact

SEQ ID NO: 55954 - DNA, 7 bp, Unknown
  misc_feature (1)..( 7): Matrix.002 file - promoters60/3435891
gttaata

SEQ ID NO: 55955 - DNA, 10 bp, Unknown
  misc_feature (1)..( 10): Matrix.002 file - promoters60/3435891
aactctttta

SEQ ID NO: 55956 - DNA, 6 bp, Unknown
  misc_feature (1)..( 6): Matrix.002 file - promoters60/3435891
caaaaa

SEQ ID NO: 55957 - DNA, 7 bp, Unknown
  misc_feature (1)..( 7): Matrix.002 file - promoters60/3435891
tttatta

SEQ ID NO: 55958 - DNA, 7 bp, Unknown
  misc_feature (1)..( 7): Matrix.002 file - promoters60/3435891
tgaaatt

SEQ ID NO: 55959 - DNA, 6 bp, Unknown
  misc_feature (1)..( 6): Matrix.002 file - promoters60/3435891
aagttg

SEQ ID NO: 55960 - DNA, 8 bp, Unknown
  misc_feature (1)..( 8): Matrix.002 file - promoters60/3435891
attactat

SEQ ID NO: 55961 - DNA, 6 bp, Unknown
  misc_feature (1)..( 6): Matrix.002 file - promoters60/3435891
taattc

SEQ ID NO: 55962 - DNA, 8 bp, Unknown
  misc_feature (1)..( 8): Matrix.002 file - promoters60/3435891
tgtcaaag

SEQ ID NO: 55963 - DNA, 7 bp, Unknown
  misc_feature (1)..( 7): Matrix.002 file - promoters60/3435891
aaaaaaa

SEQ ID NO: 55964 - DNA, 6 bp, Unknown
  misc_feature (1)..( 6): Matrix.002 file - promoters60/3435891
tgtcga

SEQ ID NO: 55965 - DNA, 7 bp, Unknown
  misc_feature (1)..( 7): Matrix.002 file - promoters60/3435891
tttactt

SEQ ID NO: 55966 - DNA, 6 bp, Unknown
  misc_feature (1)..( 6): Matrix.002 file - promoters60/3435891
ttgtac

SEQ ID NO: 55967 - DNA, 10 bp, Unknown
  misc_feature (1)..( 10): Matrix.002 file - promoters60/3435902
attgcaaata

SEQ ID NO: 55968 - DNA, 6 bp, Unknown
  misc_feature (1)..( 6): Matrix.002 file - promoters60/3435902
tcttcc

SEQ ID NO: 55969 - DNA, 6 bp, Unknown
  misc_feature (1)..( 6): Matrix.002 file - promoters60/3435902
aagaaa

SEQ ID NO: 55970 - DNA, 6 bp, Unknown
  misc_feature (1)..( 6): Matrix.002 file - promoters60/3435902
ttgcta

SEQ ID NO: 55971 - DNA, 6 bp, Unknown
  misc_feature (1)..( 6): Matrix.002 file - promoters60/3435902
tctgta

SEQ ID NO: 55972 - DNA, 8 bp, Unknown
  misc_feature (1)..( 8): Matrix.002 file - promoters60/3435902
acatcttt

SEQ ID NO: 55973 - DNA, 6 bp, Unknown
  misc_feature (1)..( 6): Matrix.002 file - promoters60/3435902
atagta

SEQ ID NO: 55974 - DNA, 9 bp, Unknown
  misc_feature (1)..( 9): Matrix.002 file - promoters60/3435902
tattcccat

SEQ ID NO: 55975 - DNA, 6 bp, Unknown
  misc_feature (1)..( 6): Matrix.002 file - promoters60/3435902
tgcaat

SEQ ID NO: 55976 - DNA, 8 bp, Unknown
  misc_feature (1)..( 8): Matrix.002 file - promoters60/3435902
taaattac

SEQ ID NO: 55977 - DNA, 6 bp, Unknown
  misc_feature (1)..( 6): Matrix.002 file - promoters60/3435902
aaatat

SEQ ID NO: 55978 - DNA, 9 bp, Unknown
  misc_feature (1)..( 9): Matrix.002 file - promoters60/3435902
ataatgttt

SEQ ID NO: 55979 - DNA, 7 bp, Unknown
  misc_feature (1)..( 7): Matrix.002 file - promoters60/3435902
atagata

SEQ ID NO: 55980 - DNA, 7 bp, Unknown
  misc_feature (1)..( 7): Matrix.002 file - promoters60/3435902
atggaat

SEQ ID NO: 55981 - DNA, 7 bp, Unknown
  misc_feature (1)..( 7): Matrix.002 file - promoters60/3435902
accaaat

SEQ ID NO: 55982 - DNA, 6 bp, Unknown
  misc_feature (1)..( 6): Matrix.002 file - promoters60/3435902
tattat

SEQ ID NO: 55983 - DNA, 6 bp, Unknown
  misc_feature (1)..( 6): Matrix.002 file - promoters60/3435902
aaaaaa

SEQ ID NO: 55984 - DNA, 6 bp, Unknown
  misc_feature (1)..( 6): Matrix.002 file - promoters60/3435902
gtcaaa

SEQ ID NO: 55985 - DNA, 6 bp, Unknown
  misc_feature (1)..( 6): Matrix.002 file - promoters60/3435902
ggcgag

SEQ ID NO: 55986 - DNA, 6 bp, Unknown
  misc_feature (1)..( 6): Matrix.002 file - promoters60/3436121
tttaag

SEQ ID NO: 55987 - DNA, 6 bp, Unknown
  misc_feature (1)..( 6): Matrix.002 file - promoters60/3436121
ttcttt

SEQ ID NO: 55988 - DNA, 7 bp, Unknown
  misc_feature (1)..( 7): Matrix.002 file - promoters60/3436121
tctctat

SEQ ID NO: 55989 - DNA, 6 bp, Unknown
  misc_feature (1)..( 6): Matrix.002 file - promoters60/3436121
ctgtgt

SEQ ID NO: 55990 - DNA, 6 bp, Unknown
  misc_feature (1)..( 6): Matrix.002 file - promoters60/3436121
gagaag

SEQ ID NO: 55991 - DNA, 6 bp, Unknown
  misc_feature (1)..( 6): Matrix.002 file - promoters60/3436121
aagaaa

SEQ ID NO: 55992 - DNA, 8 bp, Unknown
  misc_feature (1)..( 8): Matrix.002 file - promoters60/3436121
cacataaa

SEQ ID NO: 55993 - DNA, 7 bp, Unknown
  misc_feature (1)..( 7): Matrix.002 file - promoters60/3436121
tctgttt

SEQ ID NO: 55994 - DNA, 6 bp, Unknown
  misc_feature (1)..( 6): Matrix.002 file - promoters60/3436121
atgtct

SEQ ID NO: 55995 - DNA, 7 bp, Unknown
  misc_feature (1)..( 7): Matrix.002 file - promoters60/3436121
ttggaga

SEQ ID NO: 55996 - DNA, 6 bp, Unknown
  misc_feature (1)..( 6): Matrix.002 file - promoters60/3436121
gaagat

SEQ ID NO: 55997 - DNA, 6 bp, Unknown
  misc_feature (1)..( 6): Matrix.002 file - promoters60/3436121
gatcga

SEQ ID NO: 55998 - DNA, 6 bp, Unknown
  misc_feature (1)..( 6): Matrix.002 file - promoters60/3436121
aaatgc

SEQ ID NO: 55999 - DNA, 8 bp, Unknown
  misc_feature (1)..( 8): Matrix.002 file - promoters60/3436121
ggacttgt

SEQ ID NO: 56000 - DNA, 9 bp, Unknown
  misc_feature (1)..( 9): Matrix.002 file - promoters60/3436196
ccaaaaaaa

SEQ ID NO: 56001 - DNA, 9 bp, Unknown
  misc_feature (1)..( 9): Matrix.002 file - promoters60/3436196
taaaattct

SEQ ID NO: 56002 - DNA, 8 bp, Unknown
  misc_feature (1)..( 8): Matrix.002 file - promoters60/3436196
aatttatt

SEQ ID NO: 56003 - DNA, 8 bp, Unknown
  misc_feature (1)..( 8): Matrix.002 file - promoters60/3436265
taaacttt

SEQ ID NO: 56004 - DNA, 10 bp, Unknown
  misc_feature (1)..( 10): Matrix.002 file - promoters60/3436265
tcaattattt

SEQ ID NO: 56005 - DNA, 9 bp, Unknown
  misc_feature (1)..( 9): Matrix.002 file - promoters60/3436265
attaataat

SEQ ID NO: 56006 - DNA, 9 bp, Unknown
  misc_feature (1)..( 9): Matrix.002 file - promoters60/3436265
cttctttgt

SEQ ID NO: 56007 - DNA, 12 bp, Unknown
  misc_feature (1)..( 12): Matrix.002 file - promoters60/3436265
taaaaaatatta

SEQ ID NO: 56008 - DNA, 8 bp, Unknown
  misc_feature (1)..( 8): Matrix.002 file - promoters60/3436265
aataatat

SEQ ID NO: 56009 - DNA, 13 bp, Unknown
  misc_feature (1)..( 13): Matrix.002 file - promoters60/3436267
attcttaatttca

SEQ ID NO: 56010 - DNA, 6 bp, Unknown
  misc_feature (1)..( 6): Matrix.002 file - promoters60/3436412
ttgtat

SEQ ID NO: 56011 - DNA, 7 bp, Unknown
  misc_feature (1)..( 7): Matrix.002 file - promoters60/3436412
cacggtc

SEQ ID NO: 56012 - DNA, 6 bp, Unknown
  misc_feature (1)..( 6): Matrix.002 file - promoters60/3436412
tctgaa

SEQ ID NO: 56013 - DNA, 6 bp, Unknown
  misc_feature (1)..( 6): Matrix.002 file - promoters60/3436412
ggttta

SEQ ID NO: 56014 - DNA, 6 bp, Unknown
  misc_feature (1)..( 6): Matrix.002 file - promoters60/3436412
ttgact

SEQ ID NO: 56015 - DNA, 6 bp, Unknown
  misc_feature (1)..( 6): Matrix.002 file - promoters60/3436412
ggctgt

SEQ ID NO: 56016 - DNA, 7 bp, Unknown
  misc_feature (1)..( 7): Matrix.002 file - promoters60/3436412
attaaaa

SEQ ID NO: 56017 - DNA, 6 bp, Unknown
  misc_feature (1)..( 6): Matrix.002 file - promoters60/3436412
tgaatt

SEQ ID NO: 56018 - DNA, 7 bp, Unknown
  misc_feature (1)..( 7): Matrix.002 file - promoters60/3436412
aaagcta

SEQ ID NO: 56019 - DNA, 7 bp, Unknown
  misc_feature (1)..( 7): Matrix.002 file - promoters60/3436412
gatcaac

SEQ ID NO: 56020 - DNA, 7 bp, Unknown
  misc_feature (1)..( 7): Matrix.002 file - promoters60/3436412
atacaat

SEQ ID NO: 56021 - DNA, 16 bp, Unknown
  misc_feature (1)..( 16): Matrix.002 file - promoters60/3436412
agaaaacgaattaaat

SEQ ID NO: 56022 - DNA, 7 bp, Unknown
  misc_feature (1)..( 7): Matrix.002 file - promoters60/3436412
attgtat

SEQ ID NO: 56023 - DNA, 6 bp, Unknown
  misc_feature (1)..( 6): Matrix.002 file - promoters60/3436412
aaccac

SEQ ID NO: 56024 - DNA, 8 bp, Unknown
  misc_feature (1)..( 8): Matrix.002 file - promoters60/3436412
cctggatt

SEQ ID NO: 56025 - DNA, 7 bp, Unknown
  misc_feature (1)..( 7): Matrix.002 file - promoters60/3436412
aaaagat

SEQ ID NO: 56026 - DNA, 11 bp, Unknown
  misc_feature (1)..( 11): Matrix.002 file - promoters60/3436481
tacataaaaat

SEQ ID NO: 56027 - DNA, 11 bp, Unknown
  misc_feature (1)..( 11): Matrix.002 file - promoters60/3436481
tatataaaaaa

SEQ ID NO: 56028 - DNA, 9 bp, Unknown
  misc_feature (1)..( 9): Matrix.002 file - promoters60/3436481
aacaaaaaa

SEQ ID NO: 56029 - DNA, 8 bp, Unknown
  misc_feature (1)..( 8): Matrix.002 file - promoters60/3436529
cttccaaa

SEQ ID NO: 56030 - DNA, 10 bp, Unknown
  misc_feature (1)..( 10): Matrix.002 file - promoters60/3436529
aaactacaac

SEQ ID NO: 56031 - DNA, 10 bp, Unknown
  misc_feature (1)..( 10): Matrix.002 file - promoters60/3436529
aaacgtgaaa

SEQ ID NO: 56032 - DNA, 11 bp, Unknown
  misc_feature (1)..( 11): Matrix.002 file - promoters60/3436529
tatatataaag

SEQ ID NO: 56033 - DNA, 12 bp, Unknown
  misc_feature (1)..( 12): Matrix.002 file - promoters60/3436529
actaattagaaa

SEQ ID NO: 56034 - DNA, 9 bp, Unknown
  misc_feature (1)..( 9): Matrix.002 file - promoters60/3436529
tgaatatta

SEQ ID NO: 56035 - DNA, 7 bp, Unknown
  misc_feature (1)..( 7): Matrix.002 file - promoters60/3436655
tccaatg

SEQ ID NO: 56036 - DNA, 6 bp, Unknown
  misc_feature (1)..( 6): Matrix.002 file - promoters60/3436655
atggtt

SEQ ID NO: 56037 - DNA, 10 bp, Unknown
  misc_feature (1)..( 10): Matrix.002 file - promoters60/3436655
ttttgtttct

SEQ ID NO: 56038 - DNA, 6 bp, Unknown
  misc_feature (1)..( 6): Matrix.002 file - promoters60/3436655
tgcaaa

SEQ ID NO: 56039 - DNA, 6 bp, Unknown
  misc_feature (1)..( 6): Matrix.002 file - promoters60/3436655
atcaga

SEQ ID NO: 56040 - DNA, 9 bp, Unknown
  misc_feature (1)..( 9): Matrix.002 file - promoters60/3436655
aaatggaat

SEQ ID NO: 56041 - DNA, 6 bp, Unknown
  misc_feature (1)..( 6): Matrix.002 file - promoters60/3436655
agagtc

SEQ ID NO: 56042 - DNA, 6 bp, Unknown
  misc_feature (1)..( 6): Matrix.002 file - promoters60/3436655
taaaaa

SEQ ID NO: 56043 - DNA, 9 bp, Unknown
  misc_feature (1)..( 9): Matrix.002 file - promoters60/3436655
ataatgttt

SEQ ID NO: 56044 - DNA, 7 bp, Unknown
  misc_feature (1)..( 7): Matrix.002 file - promoters60/3436655
atagata

SEQ ID NO: 56045 - DNA, 7 bp, Unknown
  misc_feature (1)..( 7): Matrix.002 file - promoters60/3436655
accaaat

SEQ ID NO: 56046 - DNA, 6 bp, Unknown
  misc_feature (1)..( 6): Matrix.002 file - promoters60/3436655
tattat

SEQ ID NO: 56047 - DNA, 6 bp, Unknown
  misc_feature (1)..( 6): Matrix.002 file - promoters60/3436655
aaaaaa

SEQ ID NO: 56048 - DNA, 6 bp, Unknown
  misc_feature (1)..( 6): Matrix.002 file - promoters60/3436655
gtcaaa

SEQ ID NO: 56049 - DNA, 6 bp, Unknown
  misc_feature (1)..( 6): Matrix.002 file - promoters60/3436655
ggcgag

SEQ ID NO: 56050 - DNA, 8 bp, Unknown
  misc_feature (1)..( 8): Matrix.002 file - promoters60/3436701
gtccttct

SEQ ID NO: 56051 - DNA, 6 bp, Unknown
  misc_feature (1)..( 6): Matrix.002 file - promoters60/3436701
acatta

SEQ ID NO: 56052 - DNA, 7 bp, Unknown
  misc_feature (1)..( 7): Matrix.002 file - promoters60/3436701
tcagcat

SEQ ID NO: 56053 - DNA, 7 bp, Unknown
  misc_feature (1)..( 7): Matrix.002 file - promoters60/3436701
tctaatt

SEQ ID NO: 56054 - DNA, 6 bp, Unknown
  misc_feature (1)..( 6): Matrix.002 file - promoters60/3436701
agatca

SEQ ID NO: 56055 - DNA, 9 bp, Unknown
  misc_feature (1)..( 9): Matrix.002 file - promoters60/3436701
cacaactat

SEQ ID NO: 56056 - DNA, 8 bp, Unknown
  misc_feature (1)..( 8): Matrix.002 file - promoters60/3436701
ggacgttg

SEQ ID NO: 56057 - DNA, 7 bp, Unknown
  misc_feature (1)..( 7): Matrix.002 file - promoters60/3436701
ttcattt

SEQ ID NO: 56058 - DNA, 6 bp, Unknown
  misc_feature (1)..( 6): Matrix.002 file - promoters60/3436701
aaattg

SEQ ID NO: 56059 - DNA, 7 bp, Unknown
  misc_feature (1)..( 7): Matrix.002 file - promoters60/3436701
tgaggaa

SEQ ID NO: 56060 - DNA, 6 bp, Unknown
  misc_feature (1)..( 6): Matrix.002 file - promoters60/3436701
gaagag

SEQ ID NO: 56061 - DNA, 7 bp, Unknown
  misc_feature (1)..( 7): Matrix.002 file - promoters60/3436701
aaaagag

SEQ ID NO: 56062 - DNA, 10 bp, Unknown
  misc_feature (1)..( 10): Matrix.002 file - promoters60/3437072
tttgtttttc

SEQ ID NO: 56063 - DNA, 7 bp, Unknown
  misc_feature (1)..( 7): Matrix.002 file - promoters60/3437072
tttatta

SEQ ID NO: 56064 - DNA, 6 bp, Unknown
  misc_feature (1)..( 6): Matrix.002 file - promoters60/3437072
taaacc

SEQ ID NO: 56065 - DNA, 6 bp, Unknown
  misc_feature (1)..( 6): Matrix.002 file - promoters60/3437072
tttccc

SEQ ID NO: 56066 - DNA, 6 bp, Unknown
  misc_feature (1)..( 6): Matrix.002 file - promoters60/3437072
taaatt

SEQ ID NO: 56067 - DNA, 8 bp, Unknown
  misc_feature (1)..( 8): Matrix.002 file - promoters60/3437072
caaacaag

SEQ ID NO: 56068 - DNA, 6 bp, Unknown
  misc_feature (1)..( 6): Matrix.002 file - promoters60/3437072
actttt

SEQ ID NO: 56069 - DNA, 8 bp, Unknown
  misc_feature (1)..( 8): Matrix.002 file - promoters60/3437072
ttaaatta

SEQ ID NO: 56070 - DNA, 6 bp, Unknown
  misc_feature (1)..( 6): Matrix.002 file - promoters60/3437072
atttgt

SEQ ID NO: 56071 - DNA, 6 bp, Unknown
  misc_feature (1)..( 6): Matrix.002 file - promoters60/3437072
tctttt

SEQ ID NO: 56072 - DNA, 7 bp, Unknown
  misc_feature (1)..( 7): Matrix.002 file - promoters60/3437072
ttccttt

SEQ ID NO: 56073 - DNA, 8 bp, Unknown
  misc_feature (1)..( 8): Matrix.002 file - promoters60/3437072
agagaaat

SEQ ID NO: 56074 - DNA, 9 bp, Unknown
  misc_feature (1)..( 9): Matrix.002 file - promoters60/3437072
aataaattt

SEQ ID NO: 56075 - DNA, 10 bp, Unknown
  misc_feature (1)..( 10): Matrix.002 file - promoters60/3437072
cgaatttaac

SEQ ID NO: 56076 - DNA, 8 bp, Unknown
  misc_feature (1)..( 8): Matrix.002 file - promoters60/3437072
ttgatgtt

SEQ ID NO: 56077 - DNA, 9 bp, Unknown
  misc_feature (1)..( 9): Matrix.002 file - promoters60/3437087
tgaaagtga

SEQ ID NO: 56078 - DNA, 9 bp, Unknown
  misc_feature (1)..( 9): Matrix.002 file - promoters60/3437087
atggttgaa

SEQ ID NO: 56079 - DNA, 8 bp, Unknown
  misc_feature (1)..( 8): Matrix.002 file - promoters60/3437150
ggaataga

SEQ ID NO: 56080 - DNA, 9 bp, Unknown
  misc_feature (1)..( 9): Matrix.002 file - promoters60/3437150
aaagaagag

SEQ ID NO: 56081 - DNA, 8 bp, Unknown
  misc_feature (1)..( 8): Matrix.002 file - promoters60/3437150
aaaaaaga

SEQ ID NO: 56082 - DNA, 7 bp, Unknown
  misc_feature (1)..( 7): Matrix.002 file - promoters60/3437150
ttataaa

SEQ ID NO: 56083 - DNA, 15 bp, Unknown
  misc_feature (1)..( 15): Matrix.002 file - promoters60/3437150
gtgaatttgaattaa

SEQ ID NO: 56084 - DNA, 9 bp, Unknown
  misc_feature (1)..( 9): Matrix.002 file - promoters60/3437193
ttatagttt

SEQ ID NO: 56085 - DNA, 8 bp, Unknown
  misc_feature (1)..( 8): Matrix.002 file - promoters60/3437193
aaaaaaaa

SEQ ID NO: 56086 - DNA, 9 bp, Unknown
  misc_feature (1)..( 9): Matrix.002 file - promoters60/3437193
aaaaatata

SEQ ID NO: 56087 - DNA, 10 bp, Unknown
  misc_feature (1)..( 10): Matrix.002 file - promoters60/3437193
aaataaaata

SEQ ID NO: 56088 - DNA, 9 bp, Unknown
  misc_feature (1)..( 9): Matrix.002 file - promoters60/3437193
gaaaaaaca

SEQ ID NO: 56089 - DNA, 7 bp, Unknown
  misc_feature (1)..( 7): Matrix.002 file - promoters60/3437193
acatata

SEQ ID NO: 56090 - DNA, 15 bp, Unknown
  misc_feature (1)..( 15): Matrix.002 file - promoters60/3437244
taaaaattcataatc

SEQ ID NO: 56091 - DNA, 9 bp, Unknown
  misc_feature (1)..( 9): Matrix.002 file - promoters60/3437244
aaaaataaa

SEQ ID NO: 56092 - DNA, 12 bp, Unknown
  misc_feature (1)..( 12): Matrix.002 file - promoters60/3437244
aaaaaataaaat

SEQ ID NO: 56093 - DNA, 8 bp, Unknown
  misc_feature (1)..( 8): Matrix.002 file - promoters60/3437244
aaaacaaa

SEQ ID NO: 56094 - DNA, 6 bp, Unknown
  misc_feature (1)..( 6): Matrix.002 file - promoters60/3437244
atatta

SEQ ID NO: 56095 - DNA, 8 bp, Unknown
  misc_feature (1)..( 8): Matrix.002 file - promoters60/3437244
atttttgt

SEQ ID NO: 56096 - DNA, 13 bp, Unknown
  misc_feature (1)..( 13): Matrix.002 file - promoters60/3437244
aaatcaattattt

SEQ ID NO: 56097 - DNA, 5 bp, Unknown
  misc_feature (1)..( 5): Matrix.002 file - promoters60/3437244
cgttt

SEQ ID NO: 56098 - DNA, 15 bp, Unknown
  misc_feature (1)..( 15): Matrix.002 file - promoters60/3437244
tatccaaaatgaaat

SEQ ID NO: 56099 - DNA, 10 bp, Unknown
  misc_feature (1)..( 10): Matrix.002 file - promoters60/3437244
agtttaaaat

SEQ ID NO: 56100 - DNA, 9 bp, Unknown
  misc_feature (1)..( 9): Matrix.002 file - promoters60/3437331
ttatttgtg

SEQ ID NO: 56101 - DNA, 13 bp, Unknown
  misc_feature (1)..( 13): Matrix.002 file - promoters60/3437331
cagaatttgtgcc

SEQ ID NO: 56102 - DNA, 10 bp, Unknown
  misc_feature (1)..( 10): Matrix.002 file - promoters60/3437331
aaacagatta

SEQ ID NO: 56103 - DNA, 9 bp, Unknown
  misc_feature (1)..( 9): Matrix.002 file - promoters60/3437367
ttttcactg

SEQ ID NO: 56104 - DNA, 9 bp, Unknown
  misc_feature (1)..( 9): Matrix.002 file - promoters60/3437367
agttttata

SEQ ID NO: 56105 - DNA, 8 bp, Unknown
  misc_feature (1)..( 8): Matrix.002 file - promoters60/3437367
acaaacaa

SEQ ID NO: 56106 - DNA, 13 bp, Unknown
  misc_feature (1)..( 13): Matrix.002 file - promoters60/3437367
aaaattactaaaa

SEQ ID NO: 56107 - DNA, 8 bp, Unknown
  misc_feature (1)..( 8): Matrix.002 file - promoters60/3437367
attttgaa

SEQ ID NO: 56108 - DNA, 7 bp, Unknown
  misc_feature (1)..( 7): Matrix.002 file - promoters60/3437367
attttaa

SEQ ID NO: 56109 - DNA, 6 bp, Unknown
  misc_feature (1)..( 6): Matrix.002 file - promoters60/3437367
aaaaaa

SEQ ID NO: 56110 - DNA, 14 bp, Unknown
  misc_feature (1)..( 14): Matrix.002 file - promoters60/3437375
catctacttccata

SEQ ID NO: 56111 - DNA, 13 bp, Unknown
  misc_feature (1)..( 13): Matrix.002 file - promoters60/3437375
aaagttttctcta

SEQ ID NO: 56112 - DNA, 11 bp, Unknown
  misc_feature (1)..( 11): Matrix.002 file - promoters60/3437660
gaaatagatta

SEQ ID NO: 56113 - DNA, 8 bp, Unknown
  misc_feature (1)..( 8): Matrix.002 file - promoters60/3437671
atataata

SEQ ID NO: 56114 - DNA, 6 bp, Unknown
  misc_feature (1)..( 6): Matrix.002 file - promoters60/3437671
atttga

SEQ ID NO: 56115 - DNA, 7 bp, Unknown
  misc_feature (1)..( 7): Matrix.002 file - promoters60/3437671
ttaggtg

SEQ ID NO: 56116 - DNA, 6 bp, Unknown
  misc_feature (1)..( 6): Matrix.002 file - promoters60/3437671
aaatgg

SEQ ID NO: 56117 - DNA, 7 bp, Unknown
  misc_feature (1)..( 7): Matrix.002 file - promoters60/3437671
cacctaa

SEQ ID NO: 56118 - DNA, 7 bp, Unknown
  misc_feature (1)..( 7): Matrix.002 file - promoters60/3437671
aaaacga

SEQ ID NO: 56119 - DNA, 10 bp, Unknown
  misc_feature (1)..( 10): Matrix.002 file - promoters60/3437671
ttagataatt

SEQ ID NO: 56120 - DNA, 6 bp, Unknown
  misc_feature (1)..( 6): Matrix.002 file - promoters60/3437671
aaatta

SEQ ID NO: 56121 - DNA, 7 bp, Unknown
  misc_feature (1)..( 7): Matrix.002 file - promoters60/3437671
catctga

SEQ ID NO: 56122 - DNA, 6 bp, Unknown
  misc_feature (1)..( 6): Matrix.002 file - promoters60/3437671
atttat

SEQ ID NO: 56123 - DNA, 6 bp, Unknown
  misc_feature (1)..( 6): Matrix.002 file - promoters60/3437671
tcatat

SEQ ID NO: 56124 - DNA, 8 bp, Unknown
  misc_feature (1)..( 8): Matrix.002 file - promoters60/3437671
atacatac

SEQ ID NO: 56125 - DNA, 6 bp, Unknown
  misc_feature (1)..( 6): Matrix.002 file - promoters60/3437671
ttcaaa

SEQ ID NO: 56126 - DNA, 7 bp, Unknown
  misc_feature (1)..( 7): Matrix.002 file - promoters60/3437776
ctacatt

SEQ ID NO: 56127 - DNA, 8 bp, Unknown
  misc_feature (1)..( 8): Matrix.002 file - promoters60/3437776
ttataaat

SEQ ID NO: 56128 - DNA, 6 bp, Unknown
  misc_feature (1)..( 6): Matrix.002 file - promoters60/3437776
agattt

SEQ ID NO: 56129 - DNA, 7 bp, Unknown
  misc_feature (1)..( 7): Matrix.002 file - promoters60/3437776
atttacc

SEQ ID NO: 56130 - DNA, 8 bp, Unknown
  misc_feature (1)..( 8): Matrix.002 file - promoters60/3437776
atatatga

SEQ ID NO: 56131 - DNA, 7 bp, Unknown
  misc_feature (1)..( 7): Matrix.002 file - promoters60/3437776
tttaata

SEQ ID NO: 56132 - DNA, 6 bp, Unknown
  misc_feature (1)..( 6): Matrix.002 file - promoters60/3437776
gtgtgt

SEQ ID NO: 56133 - DNA, 6 bp, Unknown
  misc_feature (1)..( 6): Matrix.002 file - promoters60/3437776
acagct

SEQ ID NO: 56134 - DNA, 6 bp, Unknown
  misc_feature (1)..( 6): Matrix.002 file - promoters60/3437776
ccatat

SEQ ID NO: 56135 - DNA, 8 bp, Unknown
  misc_feature (1)..( 8): Matrix.002 file - promoters60/3437776
tgcctcag

SEQ ID NO: 56136 - DNA, 7 bp, Unknown
  misc_feature (1)..( 7): Matrix.002 file - promoters60/3437776
ttcggtt

SEQ ID NO: 56137 - DNA, 8 bp, Unknown
  misc_feature (1)..( 8): Matrix.002 file - promoters60/3437776
gtgggtat

SEQ ID NO: 56138 - DNA, 12 bp, Unknown
  misc_feature (1)..( 12): Matrix.002 file - promoters60/3437779
ctaattttagag

SEQ ID NO: 56139 - DNA, 9 bp, Unknown
  misc_feature (1)..( 9): Matrix.002 file - promoters60/3437779
tatgacaaa

SEQ ID NO: 56140 - DNA, 13 bp, Unknown
  misc_feature (1)..( 13): Matrix.002 file - promoters60/3437779
gaaaaatatttac

SEQ ID NO: 56141 - DNA, 10 bp, Unknown
  misc_feature (1)..( 10): Matrix.002 file - promoters60/3437803
gtccaaaaat

SEQ ID NO: 56142 - DNA, 7 bp, Unknown
  misc_feature (1)..( 7): Matrix.002 file - promoters60/3437803
cattttc

SEQ ID NO: 56143 - DNA, 11 bp, Unknown
  misc_feature (1)..( 11): Matrix.002 file - promoters60/3437803
tcacaacttta

SEQ ID NO: 56144 - DNA, 9 bp, Unknown
  misc_feature (1)..( 9): Matrix.002 file - promoters60/3437803
gttgtatat

SEQ ID NO: 56145 - DNA, 12 bp, Unknown
  misc_feature (1)..( 12): Matrix.002 file - promoters60/3437803
tcctatttaaag

SEQ ID NO: 56146 - DNA, 9 bp, Unknown
  misc_feature (1)..( 9): Matrix.002 file - promoters60/3437803
tttacaaga

SEQ ID NO: 56147 - DNA, 9 bp, Unknown
  misc_feature (1)..( 9): Matrix.002 file - promoters60/3437808
aagatttaa

SEQ ID NO: 56148 - DNA, 13 bp, Unknown
  misc_feature (1)..( 13): Matrix.002 file - promoters60/3437871
cataaaagaaaaa

SEQ ID NO: 56149 - DNA, 12 bp, Unknown
  misc_feature (1)..( 12): Matrix.002 file - promoters60/3437871
gaacaaaaaaac

SEQ ID NO: 56150 - DNA, 6 bp, Unknown
  misc_feature (1)..( 6): Matrix.002 file - promoters60/3437875
tataat

SEQ ID NO: 56151 - DNA, 10 bp, Unknown
  misc_feature (1)..( 10): Matrix.002 file - promoters60/3437875
aataaaatta

SEQ ID NO: 56152 - DNA, 7 bp, Unknown
  misc_feature (1)..( 7): Matrix.002 file - promoters60/3437875
ttaatgt

SEQ ID NO: 56153 - DNA, 7 bp, Unknown
  misc_feature (1)..( 7): Matrix.002 file - promoters60/3437875
gtgatgt

SEQ ID NO: 56154 - DNA, 7 bp, Unknown
  misc_feature (1)..( 7): Matrix.002 file - promoters60/3437875
agaccaa

SEQ ID NO: 56155 - DNA, 9 bp, Unknown
  misc_feature (1)..( 9): Matrix.002 file - promoters60/3437875
tcagacttt

SEQ ID NO: 56156 - DNA, 6 bp, Unknown
  misc_feature (1)..( 6): Matrix.002 file - promoters60/3437875
ttctca

SEQ ID NO: 56157 - DNA, 6 bp, Unknown
  misc_feature (1)..( 6): Matrix.002 file - promoters60/3437875
tgtttc

SEQ ID NO: 56158 - DNA, 7 bp, Unknown
  misc_feature (1)..( 7): Matrix.002 file - promoters60/3437991
gatgaca

SEQ ID NO: 56159 - DNA, 8 bp, Unknown
  misc_feature (1)..( 8): Matrix.002 file - promoters60/3437991
aaatcaaa

SEQ ID NO: 56160 - DNA, 8 bp, Unknown
  misc_feature (1)..( 8): Matrix.002 file - promoters60/3437991
aaataatt

SEQ ID NO: 56161 - DNA, 6 bp, Unknown
  misc_feature (1)..( 6): Matrix.002 file - promoters60/3437991
gagaga

SEQ ID NO: 56162 - DNA, 9 bp, Unknown
  misc_feature (1)..( 9): Matrix.002 file - promoters60/3437991
ttttcattt

SEQ ID NO: 56163 - DNA, 6 bp, Unknown
  misc_feature (1)..( 6): Matrix.002 file - promoters60/3437991
taaaaa

SEQ ID NO: 56164 - DNA, 7 bp, Unknown
  misc_feature (1)..( 7): Matrix.002 file - promoters60/3437991
agaaaat

SEQ ID NO: 56165 - DNA, 6 bp, Unknown
  misc_feature (1)..( 6): Matrix.002 file - promoters60/3437991
ttataa

SEQ ID NO: 56166 - DNA, 10 bp, Unknown
  misc_feature (1)..( 10): Matrix.002 file - promoters60/3437991
tgtaataaat

SEQ ID NO: 56167 - DNA, 11 bp, Unknown
  misc_feature (1)..( 11): Matrix.002 file - promoters60/3437991
aataaacaatt

SEQ ID NO: 56168 - DNA, 8 bp, Unknown
  misc_feature (1)..( 8): Matrix.002 file - promoters60/3437991
tcaaaccc

SEQ ID NO: 56169 - DNA, 6 bp, Unknown
  misc_feature (1)..( 6): Matrix.002 file - promoters60/3437991
actaat

SEQ ID NO: 56170 - DNA, 6 bp, Unknown
  misc_feature (1)..( 6): Matrix.002 file - promoters60/3437991
ctattc

SEQ ID NO: 56171 - DNA, 7 bp, Unknown
  misc_feature (1)..( 7): Matrix.002 file - promoters60/3437991
taaatgt

SEQ ID NO: 56172 - DNA, 6 bp, Unknown
  misc_feature (1)..( 6): Matrix.002 file - promoters60/3437991
aatatt

SEQ ID NO: 56173 - DNA, 7 bp, Unknown
  misc_feature (1)..( 7): Matrix.002 file - promoters60/3437991
agaaata

SEQ ID NO: 56174 - DNA, 6 bp, Unknown
  misc_feature (1)..( 6): Matrix.002 file - promoters60/3437991
tgattt

SEQ ID NO: 56175 - DNA, 6 bp, Unknown
  misc_feature (1)..( 6): Matrix.002 file - promoters60/3437991
ctaaac

SEQ ID NO: 56176 - DNA, 6 bp, Unknown
  misc_feature (1)..( 6): Matrix.002 file - promoters60/3437991
attcaa

SEQ ID NO: 56177 - DNA, 8 bp, Unknown
  misc_feature (1)..( 8): Matrix.002 file - promoters60/3437991
attattca

SEQ ID NO: 56178 - DNA, 8 bp, Unknown
  misc_feature (1)..( 8): Matrix.002 file - promoters60/3437991
gtccaaaa

SEQ ID NO: 56179 - DNA, 7 bp, Unknown
  misc_feature (1)..( 7): Matrix.002 file - promoters60/3437991
tagaatt

SEQ ID NO: 56180 - DNA, 6 bp, Unknown
  misc_feature (1)..( 6): Matrix.002 file - promoters60/3437991
gtgatt

SEQ ID NO: 56181 - DNA, 8 bp, Unknown
  misc_feature (1)..( 8): Matrix.002 file - promoters60/3437991
atatattt

SEQ ID NO: 56182 - DNA, 6 bp, Unknown
  misc_feature (1)..( 6): Matrix.002 file - promoters60/3437991
atttaa

SEQ ID NO: 56183 - DNA, 6 bp, Unknown
  misc_feature (1)..( 6): Matrix.002 file - promoters60/3437991
atttat

SEQ ID NO: 56184 - DNA, 9 bp, Unknown
  misc_feature (1)..( 9): Matrix.002 file - promoters60/3437991
aatatatat

SEQ ID NO: 56185 - DNA, 9 bp, Unknown
  misc_feature (1)..( 9): Matrix.002 file - promoters60/3437991
taaaataat

SEQ ID NO: 56186 - DNA, 7 bp, Unknown
  misc_feature (1)..( 7): Matrix.002 file - promoters60/3437991
ttacaca

SEQ ID NO: 56187 - DNA, 6 bp, Unknown
  misc_feature (1)..( 6): Matrix.002 file - promoters60/3437991
aataaa

SEQ ID NO: 56188 - DNA, 7 bp, Unknown
  misc_feature (1)..( 7): Matrix.002 file - promoters60/3437991
tatcaaa

SEQ ID NO: 56189 - DNA, 6 bp, Unknown
  misc_feature (1)..( 6): Matrix.002 file - promoters60/3438046
tttttg

SEQ ID NO: 56190 - DNA, 10 bp, Unknown
  misc_feature (1)..( 10): Matrix.002 file - promoters60/3438046
atgtaagaaa

SEQ ID NO: 56191 - DNA, 11 bp, Unknown
  misc_feature (1)..( 11): Matrix.002 file - promoters60/3438046
cctaaatttat

SEQ ID NO: 56192 - DNA, 6 bp, Unknown
  misc_feature (1)..( 6): Matrix.002 file - promoters60/3438046
atactt

SEQ ID NO: 56193 - DNA, 6 bp, Unknown
  misc_feature (1)..( 6): Matrix.002 file - promoters60/3438046
ctatct

SEQ ID NO: 56194 - DNA, 9 bp, Unknown
  misc_feature (1)..( 9): Matrix.002 file - promoters60/3438046
gaaactaaa

SEQ ID NO: 56195 - DNA, 8 bp, Unknown
  misc_feature (1)..( 8): Matrix.002 file - promoters60/3438046
gaatgcat

SEQ ID NO: 56196 - DNA, 7 bp, Unknown
  misc_feature (1)..( 7): Matrix.002 file - promoters60/3438046
aaacaat

SEQ ID NO: 56197 - DNA, 9 bp, Unknown
  misc_feature (1)..( 9): Matrix.002 file - promoters60/3438046
tgtaaacac

SEQ ID NO: 56198 - DNA, 8 bp, Unknown
  misc_feature (1)..( 8): Matrix.002 file - promoters60/3438046
ttgtcgtg

SEQ ID NO: 56199 - DNA, 7 bp, Unknown
  misc_feature (1)..( 7): Matrix.002 file - promoters60/3438046
tcaaaaa

SEQ ID NO: 56200 - DNA, 7 bp, Unknown
  misc_feature (1)..( 7): Matrix.002 file - promoters60/3438046
caaaaat

SEQ ID NO: 56201 - DNA, 7 bp, Unknown
  misc_feature (1)..( 7): Matrix.002 file - promoters60/3438046
gggaaaa

SEQ ID NO: 56202 - DNA, 8 bp, Unknown
  misc_feature (1)..( 8): Matrix.002 file - promoters60/3438046
ttcgtttc

SEQ ID NO: 56203 - DNA, 7 bp, Unknown
  misc_feature (1)..( 7): Matrix.002 file - promoters60/3438069
agaaagt

SEQ ID NO: 56204 - DNA, 8 bp, Unknown
  misc_feature (1)..( 8): Matrix.002 file - promoters60/3438069
tcaaaatc

SEQ ID NO: 56205 - DNA, 8 bp, Unknown
  misc_feature (1)..( 8): Matrix.002 file - promoters60/3438069
gttaattg

SEQ ID NO: 56206 - DNA, 12 bp, Unknown
  misc_feature (1)..( 12): Matrix.002 file - promoters60/3438171
gtaaaaaaattt

SEQ ID NO: 56207 - DNA, 13 bp, Unknown
  misc_feature (1)..( 13): Matrix.002 file - promoters60/3438171
aaataaaattaaa

SEQ ID NO: 56208 - DNA, 14 bp, Unknown
  misc_feature (1)..( 14): Matrix.002 file - promoters60/3438171
taaataaaaatttt

SEQ ID NO: 56209 - DNA, 9 bp, Unknown
  misc_feature (1)..( 9): Matrix.002 file - promoters60/3438171
atttaaata

SEQ ID NO: 56210 - DNA, 19 bp, Unknown
  misc_feature (1)..( 19): Matrix.002 file - promoters60/3438171
caaaaatattcaaaacaat

SEQ ID NO: 56211 - DNA, 11 bp, Unknown
  misc_feature (1)..( 11): Matrix.002 file - promoters60/3438171
ttaatatatat

SEQ ID NO: 56212 - DNA, 11 bp, Unknown
  misc_feature (1)..( 11): Matrix.002 file - promoters60/3438171
ttaatattaaa

SEQ ID NO: 56213 - DNA, 10 bp, Unknown
  misc_feature (1)..( 10): Matrix.002 file - promoters60/3438171
ctttttatta

SEQ ID NO: 56214 - DNA, 9 bp, Unknown
  misc_feature (1)..( 9): Matrix.002 file - promoters60/3438171
taaattttc

SEQ ID NO: 56215 - DNA, 10 bp, Unknown
  misc_feature (1)..( 10): Matrix.002 file - promoters60/3438171
aaaataaaaa

SEQ ID NO: 56216 - DNA, 10 bp, Unknown
  misc_feature (1)..( 10): Matrix.002 file - promoters60/3438171
gagaaatttt

SEQ ID NO: 56217 - DNA, 9 bp, Unknown
  misc_feature (1)..( 9): Matrix.002 file - promoters60/3438171
aacaaaaaa

SEQ ID NO: 56218 - DNA, 13 bp, Unknown
  misc_feature (1)..( 13): Matrix.002 file - promoters60/3438171
cacttatatataa

SEQ ID NO: 56219 - DNA, 8 bp, Unknown
  misc_feature (1)..( 8): Matrix.002 file - promoters60/3438222
aataatta

SEQ ID NO: 56220 - DNA, 8 bp, Unknown
  misc_feature (1)..( 8): Matrix.002 file - promoters60/3438222
ctacacaa

SEQ ID NO: 56221 - DNA, 7 bp, Unknown
  misc_feature (1)..( 7): Matrix.002 file - promoters60/3438222
aagaaac

SEQ ID NO: 56222 - DNA, 7 bp, Unknown
  misc_feature (1)..( 7): Matrix.002 file - promoters60/3438222
ggtggta

SEQ ID NO: 56223 - DNA, 8 bp, Unknown
  misc_feature (1)..( 8): Matrix.002 file - promoters60/3438222
attgatgt

SEQ ID NO: 56224 - DNA, 6 bp, Unknown
  misc_feature (1)..( 6): Matrix.002 file - promoters60/3438222
attact

SEQ ID NO: 56225 - DNA, 7 bp, Unknown
  misc_feature (1)..( 7): Matrix.002 file - promoters60/3438222
gatcttt

SEQ ID NO: 56226 - DNA, 6 bp, Unknown
  misc_feature (1)..( 6): Matrix.002 file - promoters60/3438222
caactg

SEQ ID NO: 56227 - DNA, 6 bp, Unknown
  misc_feature (1)..( 6): Matrix.002 file - promoters60/3438222
tgaaaa

SEQ ID NO: 56228 - DNA, 8 bp, Unknown
  misc_feature (1)..( 8): Matrix.002 file - promoters60/3438222
tatcaaat

SEQ ID NO: 56229 - DNA, 6 bp, Unknown
  misc_feature (1)..( 6): Matrix.002 file - promoters60/3438222
taagag

SEQ ID NO: 56230 - DNA, 6 bp, Unknown
  misc_feature (1)..( 6): Matrix.002 file - promoters60/3438222
taaaaa

SEQ ID NO: 56231 - DNA, 6 bp, Unknown
  misc_feature (1)..( 6): Matrix.002 file - promoters60/3438222
caagtg

SEQ ID NO: 56232 - DNA, 8 bp, Unknown
  misc_feature (1)..( 8): Matrix.002 file - promoters60/3438222
aaaacatc

SEQ ID NO: 56233 - DNA, 7 bp, Unknown
  misc_feature (1)..( 7): Matrix.002 file - promoters60/3438222
aaaaaat

SEQ ID NO: 56234 - DNA, 6 bp, Unknown
  misc_feature (1)..( 6): Matrix.002 file - promoters60/3438222
aacaat

SEQ ID NO: 56235 - DNA, 6 bp, Unknown
  misc_feature (1)..( 6): Matrix.002 file - promoters60/3438222
catgtt

SEQ ID NO: 56236 - DNA, 7 bp, Unknown
  misc_feature (1)..( 7): Matrix.002 file - promoters60/3438222
aaaataa

SEQ ID NO: 56237 - DNA, 6 bp, Unknown
  misc_feature (1)..( 6): Matrix.002 file - promoters60/3438222
ccacgt

SEQ ID NO: 56238 - DNA, 6 bp, Unknown
  misc_feature (1)..( 6): Matrix.002 file - promoters60/3438222
tttctt

SEQ ID NO: 56239 - DNA, 8 bp, Unknown
  misc_feature (1)..( 8): Matrix.002 file - promoters60/3438236
attctaat

SEQ ID NO: 56240 - DNA, 9 bp, Unknown
  misc_feature (1)..( 9): Matrix.002 file - promoters60/3438351
ttcaatagt

SEQ ID NO: 56241 - DNA, 6 bp, Unknown
  misc_feature (1)..( 6): Matrix.002 file - promoters60/3438351
attttt

SEQ ID NO: 56242 - DNA, 5 bp, Unknown
  misc_feature (1)..( 5): Matrix.002 file - promoters60/3438351
caaaa

SEQ ID NO: 56243 - DNA, 7 bp, Unknown
  misc_feature (1)..( 7): Matrix.002 file - promoters60/3438351
agaatca

SEQ ID NO: 56244 - DNA, 7 bp, Unknown
  misc_feature (1)..( 7): Matrix.002 file - promoters60/3438351
attacaa

SEQ ID NO: 56245 - DNA, 6 bp, Unknown
  misc_feature (1)..( 6): Matrix.002 file - promoters60/3438351
attatt

SEQ ID NO: 56246 - DNA, 9 bp, Unknown
  misc_feature (1)..( 9): Matrix.002 file - promoters60/3438351
atcaaacta

SEQ ID NO: 56247 - DNA, 9 bp, Unknown
  misc_feature (1)..( 9): Matrix.002 file - promoters60/3438351
tttgatcct

SEQ ID NO: 56248 - DNA, 6 bp, Unknown
  misc_feature (1)..( 6): Matrix.002 file - promoters60/3438351
ttttaa

SEQ ID NO: 56249 - DNA, 7 bp, Unknown
  misc_feature (1)..( 7): Matrix.002 file - promoters60/3438351
taaaaat

SEQ ID NO: 56250 - DNA, 6 bp, Unknown
  misc_feature (1)..( 6): Matrix.002 file - promoters60/3438351
aaatca

SEQ ID NO: 56251 - DNA, 7 bp, Unknown
  misc_feature (1)..( 7): Matrix.002 file - promoters60/3438351
aaaagtc

SEQ ID NO: 56252 - DNA, 9 bp, Unknown
  misc_feature (1)..( 9): Matrix.002 file - promoters60/3438351
taaaaattt

SEQ ID NO: 56253 - DNA, 7 bp, Unknown
  misc_feature (1)..( 7): Matrix.002 file - promoters60/3438351
tcttctt

SEQ ID NO: 56254 - DNA, 7 bp, Unknown
  misc_feature (1)..( 7): Matrix.002 file - promoters60/3438351
tcagatt

SEQ ID NO: 56255 - DNA, 6 bp, Unknown
  misc_feature (1)..( 6): Matrix.002 file - promoters60/3438351
ttgttt

SEQ ID NO: 56256 - DNA, 7 bp, Unknown
  misc_feature (1)..( 7): Matrix.002 file - promoters60/3438351
tttcttt

SEQ ID NO: 56257 - DNA, 6 bp, Unknown
  misc_feature (1)..( 6): Matrix.002 file - promoters60/3438351
cttata

SEQ ID NO: 56258 - DNA, 8 bp, Unknown
  misc_feature (1)..( 8): Matrix.002 file - promoters60/3438351
gtttgctt

SEQ ID NO: 56259 - DNA, 7 bp, Unknown
  misc_feature (1)..( 7): Matrix.002 file - promoters60/3438351
tgacaaa

SEQ ID NO: 56260 - DNA, 8 bp, Unknown
  misc_feature (1)..( 8): Matrix.002 file - promoters60/3438369
aaataaaa

SEQ ID NO: 56261 - DNA, 7 bp, Unknown
  misc_feature (1)..( 7): Matrix.002 file - promoters60/3438373
ttgcttc

SEQ ID NO: 56262 - DNA, 7 bp, Unknown
  misc_feature (1)..( 7): Matrix.002 file - promoters60/3438373
ggaacaa

SEQ ID NO: 56263 - DNA, 7 bp, Unknown
  misc_feature (1)..( 7): Matrix.002 file - promoters60/3438373
acaagat

SEQ ID NO: 56264 - DNA, 7 bp, Unknown
  misc_feature (1)..( 7): Matrix.002 file - promoters60/3438373
attacat

SEQ ID NO: 56265 - DNA, 6 bp, Unknown
  misc_feature (1)..( 6): Matrix.002 file - promoters60/3438373
ttgtaa

SEQ ID NO: 56266 - DNA, 6 bp, Unknown
  misc_feature (1)..( 6): Matrix.002 file - promoters60/3438373
gaaaat

SEQ ID NO: 56267 - DNA, 8 bp, Unknown
  misc_feature (1)..( 8): Matrix.002 file - promoters60/3438373
gttcctaa

SEQ ID NO: 56268 - DNA, 7 bp, Unknown
  misc_feature (1)..( 7): Matrix.002 file - promoters60/3438373
aatcaat

SEQ ID NO: 56269 - DNA, 8 bp, Unknown
  misc_feature (1)..( 8): Matrix.002 file - promoters60/3438373
atatctta

SEQ ID NO: 56270 - DNA, 6 bp, Unknown
  misc_feature (1)..( 6): Matrix.002 file - promoters60/3438373
gttcgt

SEQ ID NO: 56271 - DNA, 9 bp, Unknown
  misc_feature (1)..( 9): Matrix.002 file - promoters60/3438373
tgaatcgaa

SEQ ID NO: 56272 - DNA, 7 bp, Unknown
  misc_feature (1)..( 7): Matrix.002 file - promoters60/3438373
agaaaaa

SEQ ID NO: 56273 - DNA, 6 bp, Unknown
  misc_feature (1)..( 6): Matrix.002 file - promoters60/3438373
agtaaa

SEQ ID NO: 56274 - DNA, 7 bp, Unknown
  misc_feature (1)..( 7): Matrix.002 file - promoters60/3438373
aatcggg

SEQ ID NO: 56275 - DNA, 8 bp, Unknown
  misc_feature (1)..( 8): Matrix.002 file - promoters60/3438373
gaaacaaa

SEQ ID NO: 56276 - DNA, 10 bp, Unknown
  misc_feature (1)..( 10): Matrix.002 file - promoters60/3438373
ggaaaagaaa

SEQ ID NO: 56277 - DNA, 7 bp, Unknown
  misc_feature (1)..( 7): Matrix.002 file - promoters60/3438373
cccacta

SEQ ID NO: 56278 - DNA, 9 bp, Unknown
  misc_feature (1)..( 9): Matrix.002 file - promoters60/3438373
aaagaaaag

SEQ ID NO: 56279 - DNA, 7 bp, Unknown
  misc_feature (1)..( 7): Matrix.002 file - promoters60/3438373
gtatata

SEQ ID NO: 56280 - DNA, 7 bp, Unknown
  misc_feature (1)..( 7): Matrix.002 file - promoters60/3438420
ttccttt

SEQ ID NO: 56281 - DNA, 8 bp, Unknown
  misc_feature (1)..( 8): Matrix.002 file - promoters60/3438420
tttatctc

SEQ ID NO: 56282 - DNA, 6 bp, Unknown
  misc_feature (1)..( 6): Matrix.002 file - promoters60/3438420
tctcaa

SEQ ID NO: 56283 - DNA, 7 bp, Unknown
  misc_feature (1)..( 7): Matrix.002 file - promoters60/3438420
ttttaga

SEQ ID NO: 56284 - DNA, 11 bp, Unknown
  misc_feature (1)..( 11): Matrix.002 file - promoters60/3438420
atcaaaatcat

SEQ ID NO: 56285 - DNA, 9 bp, Unknown
  misc_feature (1)..( 9): Matrix.002 file - promoters60/3438420
ccagtattc

SEQ ID NO: 56286 - DNA, 8 bp, Unknown
  misc_feature (1)..( 8): Matrix.002 file - promoters60/3438420
gattttac

SEQ ID NO: 56287 - DNA, 6 bp, Unknown
  misc_feature (1)..( 6): Matrix.002 file - promoters60/3438420
ttttgg

SEQ ID NO: 56288 - DNA, 7 bp, Unknown
  misc_feature (1)..( 7): Matrix.002 file - promoters60/3438420
ttttttt

SEQ ID NO: 56289 - DNA, 6 bp, Unknown
  misc_feature (1)..( 6): Matrix.002 file - promoters60/3438420
tcactt

SEQ ID NO: 56290 - DNA, 6 bp, Unknown
  misc_feature (1)..( 6): Matrix.002 file - promoters60/3438420
ggtaaa

SEQ ID NO: 56291 - DNA, 6 bp, Unknown
  misc_feature (1)..( 6): Matrix.002 file - promoters60/3438420
tgtgtt

SEQ ID NO: 56292 - DNA, 6 bp, Unknown
  misc_feature (1)..( 6): Matrix.002 file - promoters60/3438420
tttttt

SEQ ID NO: 56293 - DNA, 6 bp, Unknown
  misc_feature (1)..( 6): Matrix.002 file - promoters60/3438420
cttttt

SEQ ID NO: 56294 - DNA, 8 bp, Unknown
  misc_feature (1)..( 8): Matrix.002 file - promoters60/3438420
aaatgtaa

SEQ ID NO: 56295 - DNA, 6 bp, Unknown
  misc_feature (1)..( 6): Matrix.002 file - promoters60/3438420
ttatat

SEQ ID NO: 56296 - DNA, 7 bp, Unknown
  misc_feature (1)..( 7): Matrix.002 file - promoters60/3438420
ttttaga

SEQ ID NO: 56297 - DNA, 6 bp, Unknown
  misc_feature (1)..( 6): Matrix.002 file - promoters60/3438420
aaaata

SEQ ID NO: 56298 - DNA, 7 bp, Unknown
  misc_feature (1)..( 7): Matrix.002 file - promoters60/3438420
aaccaac

SEQ ID NO: 56299 - DNA, 8 bp, Unknown
  misc_feature (1)..( 8): Matrix.002 file - promoters60/3438429
aacagaga

SEQ ID NO: 56300 - DNA, 6 bp, Unknown
  misc_feature (1)..( 6): Matrix.002 file - promoters60/3438429
taaaaa

SEQ ID NO: 56301 - DNA, 7 bp, Unknown
  misc_feature (1)..( 7): Matrix.002 file - promoters60/3438429
ttcatct

SEQ ID NO: 56302 - DNA, 6 bp, Unknown
  misc_feature (1)..( 6): Matrix.002 file - promoters60/3438429
aaaatt

SEQ ID NO: 56303 - DNA, 8 bp, Unknown
  misc_feature (1)..( 8): Matrix.002 file - promoters60/3438429
aaaacaat

SEQ ID NO: 56304 - DNA, 8 bp, Unknown
  misc_feature (1)..( 8): Matrix.002 file - promoters60/3438429
aaaatgag

SEQ ID NO: 56305 - DNA, 7 bp, Unknown
  misc_feature (1)..( 7): Matrix.002 file - promoters60/3438429
tgagttt

SEQ ID NO: 56306 - DNA, 8 bp, Unknown
  misc_feature (1)..( 8): Matrix.002 file - promoters60/3438429
agaaattg

SEQ ID NO: 56307 - DNA, 10 bp, Unknown
  misc_feature (1)..( 10): Matrix.002 file - promoters60/3438429
ttgccactct

SEQ ID NO: 56308 - DNA, 6 bp, Unknown
  misc_feature (1)..( 6): Matrix.002 file - promoters60/3438429
tcttct

SEQ ID NO: 56309 - DNA, 7 bp, Unknown
  misc_feature (1)..( 7): Matrix.002 file - promoters60/3438429
ttccaaa

SEQ ID NO: 56310 - DNA, 6 bp, Unknown
  misc_feature (1)..( 6): Matrix.002 file - promoters60/3438429
agaaaa

SEQ ID NO: 56311 - DNA, 6 bp, Unknown
  misc_feature (1)..( 6): Matrix.002 file - promoters60/3438429
aaaagt

SEQ ID NO: 56312 - DNA, 8 bp, Unknown
  misc_feature (1)..( 8): Matrix.002 file - promoters60/3438429
tttaattt

SEQ ID NO: 56313 - DNA, 8 bp, Unknown
  misc_feature (1)..( 8): Matrix.002 file - promoters60/3438429
tttagttt

SEQ ID NO: 56314 - DNA, 7 bp, Unknown
  misc_feature (1)..( 7): Matrix.002 file - promoters60/3438429
tttattt

SEQ ID NO: 56315 - DNA, 6 bp, Unknown
  misc_feature (1)..( 6): Matrix.002 file - promoters60/3438429
caaacc

SEQ ID NO: 56316 - DNA, 7 bp, Unknown
  misc_feature (1)..( 7): Matrix.002 file - promoters60/3438429
tttaggt

SEQ ID NO: 56317 - DNA, 6 bp, Unknown
  misc_feature (1)..( 6): Matrix.002 file - promoters60/3438429
ttcagt

SEQ ID NO: 56318 - DNA, 6 bp, Unknown
  misc_feature (1)..( 6): Matrix.002 file - promoters60/3438494
ggagga

SEQ ID NO: 56319 - DNA, 6 bp, Unknown
  misc_feature (1)..( 6): Matrix.002 file - promoters60/3438494
ttaatt

SEQ ID NO: 56320 - DNA, 7 bp, Unknown
  misc_feature (1)..( 7): Matrix.002 file - promoters60/3438494
caaagag

SEQ ID NO: 56321 - DNA, 7 bp, Unknown
  misc_feature (1)..( 7): Matrix.002 file - promoters60/3438494
tataaaa

SEQ ID NO: 56322 - DNA, 7 bp, Unknown
  misc_feature (1)..( 7): Matrix.002 file - promoters60/3438494
acaaaat

SEQ ID NO: 56323 - DNA, 7 bp, Unknown
  misc_feature (1)..( 7): Matrix.002 file - promoters60/3438494
atgaaat

SEQ ID NO: 56324 - DNA, 6 bp, Unknown
  misc_feature (1)..( 6): Matrix.002 file - promoters60/3438494
aagttg

SEQ ID NO: 56325 - DNA, 7 bp, Unknown
  misc_feature (1)..( 7): Matrix.002 file - promoters60/3438494
gttgaac

SEQ ID NO: 56326 - DNA, 12 bp, Unknown
  misc_feature (1)..( 12): Matrix.002 file - promoters60/3438494
atatatataaag

SEQ ID NO: 56327 - DNA, 8 bp, Unknown
  misc_feature (1)..( 8): Matrix.002 file - promoters60/3438494
tttaagtt

SEQ ID NO: 56328 - DNA, 9 bp, Unknown
  misc_feature (1)..( 9): Matrix.002 file - promoters60/3438494
acatggttt

SEQ ID NO: 56329 - DNA, 7 bp, Unknown
  misc_feature (1)..( 7): Matrix.002 file - promoters60/3438494
aaacata

SEQ ID NO: 56330 - DNA, 7 bp, Unknown
  misc_feature (1)..( 7): Matrix.002 file - promoters60/3438494
atataca

SEQ ID NO: 56331 - DNA, 7 bp, Unknown
  misc_feature (1)..( 7): Matrix.002 file - promoters60/3438494
ttaagtt

SEQ ID NO: 56332 - DNA, 7 bp, Unknown
  misc_feature (1)..( 7): Matrix.002 file - promoters60/3438494
taaaact

SEQ ID NO: 56333 - DNA, 6 bp, Unknown
  misc_feature (1)..( 6): Matrix.002 file - promoters60/3438494
gaaaaa

SEQ ID NO: 56334 - DNA, 6 bp, Unknown
  misc_feature (1)..( 6): Matrix.002 file - promoters60/3438494
aattca

SEQ ID NO: 56335 - DNA, 8 bp, Unknown
  misc_feature (1)..( 8): Matrix.002 file - promoters60/3438494
agtatttt

SEQ ID NO: 56336 - DNA, 7 bp, Unknown
  misc_feature (1)..( 7): Matrix.002 file - promoters60/3438494
attaaaa

SEQ ID NO: 56337 - DNA, 7 bp, Unknown
  misc_feature (1)..( 7): Matrix.002 file - promoters60/3438505
gttcctt

SEQ ID NO: 56338 - DNA, 8 bp, Unknown
  misc_feature (1)..( 8): Matrix.002 file - promoters60/3438505
gttgattc

SEQ ID NO: 56339 - DNA, 8 bp, Unknown
  misc_feature (1)..( 8): Matrix.002 file - promoters60/3438505
cgacatgt

SEQ ID NO: 56340 - DNA, 8 bp, Unknown
  misc_feature (1)..( 8): Matrix.002 file - promoters60/3438505
tacacata

SEQ ID NO: 56341 - DNA, 6 bp, Unknown
  misc_feature (1)..( 6): Matrix.002 file - promoters60/3438512
caaatc

SEQ ID NO: 56342 - DNA, 12 bp, Unknown
  misc_feature (1)..( 12): Matrix.002 file - promoters60/3438512
caacaatgtaca

SEQ ID NO: 56343 - DNA, 14 bp, Unknown
  misc_feature (1)..( 14): Matrix.002 file - promoters60/3438512
aacttttacttatt

SEQ ID NO: 56344 - DNA, 7 bp, Unknown
  misc_feature (1)..( 7): Matrix.002 file - promoters60/3438512
attataa

SEQ ID NO: 56345 - DNA, 6 bp, Unknown
  misc_feature (1)..( 6): Matrix.002 file - promoters60/3438518
aaaata

SEQ ID NO: 56346 - DNA, 6 bp, Unknown
  misc_feature (1)..( 6): Matrix.002 file - promoters60/3438518
ttaaaa

SEQ ID NO: 56347 - DNA, 7 bp, Unknown
  misc_feature (1)..( 7): Matrix.002 file - promoters60/3438518
aaaatta

SEQ ID NO: 56348 - DNA, 9 bp, Unknown
  misc_feature (1)..( 9): Matrix.002 file - promoters60/3438518
aatacattt

SEQ ID NO: 56349 - DNA, 6 bp, Unknown
  misc_feature (1)..( 6): Matrix.002 file - promoters60/3438518
tcctct

SEQ ID NO: 56350 - DNA, 8 bp, Unknown
  misc_feature (1)..( 8): Matrix.002 file - promoters60/3438518
tatatata

SEQ ID NO: 56351 - DNA, 6 bp, Unknown
  misc_feature (1)..( 6): Matrix.002 file - promoters60/3438518
aataaa

SEQ ID NO: 56352 - DNA, 6 bp, Unknown
  misc_feature (1)..( 6): Matrix.002 file - promoters60/3438518
ctaacc

SEQ ID NO: 56353 - DNA, 6 bp, Unknown
  misc_feature (1)..( 6): Matrix.002 file - promoters60/3438518
attagt

SEQ ID NO: 56354 - DNA, 6 bp, Unknown
  misc_feature (1)..( 6): Matrix.002 file - promoters60/3438518
ttaaca

SEQ ID NO: 56355 - DNA, 6 bp, Unknown
  misc_feature (1)..( 6): Matrix.002 file - promoters60/3438518
taagaa

SEQ ID NO: 56356 - DNA, 6 bp, Unknown
  misc_feature (1)..( 6): Matrix.002 file - promoters60/3438518
gataga

SEQ ID NO: 56357 - DNA, 9 bp, Unknown
  misc_feature (1)..( 9): Matrix.002 file - promoters60/3438518
gagtggagt

SEQ ID NO: 56358 - DNA, 8 bp, Unknown
  misc_feature (1)..( 8): Matrix.002 file - promoters60/3438518
gacgaaaa

SEQ ID NO: 56359 - DNA, 6 bp, Unknown
  misc_feature (1)..( 6): Matrix.002 file - promoters60/3438518
cgattt

SEQ ID NO: 56360 - DNA, 7 bp, Unknown
  misc_feature (1)..( 7): Matrix.002 file - promoters60/3438518
tcaattt

SEQ ID NO: 56361 - DNA, 7 bp, Unknown
  misc_feature (1)..( 7): Matrix.002 file - promoters60/3438518
tttgaat

SEQ ID NO: 56362 - DNA, 6 bp, Unknown
  misc_feature (1)..( 6): Matrix.002 file - promoters60/3438518
aataaa

SEQ ID NO: 56363 - DNA, 8 bp, Unknown
  misc_feature (1)..( 8): Matrix.002 file - promoters60/3438518
aaatagaa

SEQ ID NO: 56364 - DNA, 7 bp, Unknown
  misc_feature (1)..( 7): Matrix.002 file - promoters60/3438518
aatattt

SEQ ID NO: 56365 - DNA, 6 bp, Unknown
  misc_feature (1)..( 6): Matrix.002 file - promoters60/3438518
agcttc

SEQ ID NO: 56366 - DNA, 7 bp, Unknown
  misc_feature (1)..( 7): Matrix.002 file - promoters60/3438518
acacaaa

SEQ ID NO: 56367 - DNA, 11 bp, Unknown
  misc_feature (1)..( 11): Matrix.002 file - promoters60/3438594
gaaaaacttct

SEQ ID NO: 56368 - DNA, 9 bp, Unknown
  misc_feature (1)..( 9): Matrix.002 file - promoters60/3438594
aaataaaaa

SEQ ID NO: 56369 - DNA, 11 bp, Unknown
  misc_feature (1)..( 11): Matrix.002 file - promoters60/3438594
aaaataaaaat

SEQ ID NO: 56370 - DNA, 9 bp, Unknown
  misc_feature (1)..( 9): Matrix.002 file - promoters60/3438594
aattaatta

SEQ ID NO: 56371 - DNA, 9 bp, Unknown
  misc_feature (1)..( 9): Matrix.002 file - promoters60/3438594
aaagaaaag

SEQ ID NO: 56372 - DNA, 12 bp, Unknown
  misc_feature (1)..( 12): Matrix.002 file - promoters60/3438594
aaaataaaaata

SEQ ID NO: 56373 - DNA, 9 bp, Unknown
  misc_feature (1)..( 9): Matrix.002 file - promoters60/3438594
agaaaaata

SEQ ID NO: 56374 - DNA, 12 bp, Unknown
  misc_feature (1)..( 12): Matrix.002 file - promoters60/3438594
agtaaacaaaat

SEQ ID NO: 56375 - DNA, 11 bp, Unknown
  misc_feature (1)..( 11): Matrix.002 file - promoters60/3438594
aaaaaaagatc

SEQ ID NO: 56376 - DNA, 9 bp, Unknown
  misc_feature (1)..( 9): Matrix.002 file - promoters60/3438594
ttatttatg

SEQ ID NO: 56377 - DNA, 9 bp, Unknown
  misc_feature (1)..( 9): Matrix.002 file - promoters60/3438648
agaaaaaaa

SEQ ID NO: 56378 - DNA, 7 bp, Unknown
  misc_feature (1)..( 7): Matrix.002 file - promoters60/3438919
ggtctat

SEQ ID NO: 56379 - DNA, 9 bp, Unknown
  misc_feature (1)..( 9): Matrix.002 file - promoters60/3438919
tttaatcaa

SEQ ID NO: 56380 - DNA, 6 bp, Unknown
  misc_feature (1)..( 6): Matrix.002 file - promoters60/3438919
taatta

SEQ ID NO: 56381 - DNA, 6 bp, Unknown
  misc_feature (1)..( 6): Matrix.002 file - promoters60/3438919
ttaaaa

SEQ ID NO: 56382 - DNA, 6 bp, Unknown
  misc_feature (1)..( 6): Matrix.002 file - promoters60/3438919
aaaaaa

SEQ ID NO: 56383 - DNA, 9 bp, Unknown
  misc_feature (1)..( 9): Matrix.002 file - promoters60/3438919
tttaatcaa

SEQ ID NO: 56384 - DNA, 6 bp, Unknown
  misc_feature (1)..( 6): Matrix.002 file - promoters60/3438919
gacgtg

SEQ ID NO: 56385 - DNA, 7 bp, Unknown
  misc_feature (1)..( 7): Matrix.002 file - promoters60/3438919
tttatta

SEQ ID NO: 56386 - DNA, 7 bp, Unknown
  misc_feature (1)..( 7): Matrix.002 file - promoters60/3438919
attaggc

SEQ ID NO: 56387 - DNA, 7 bp, Unknown
  misc_feature (1)..( 7): Matrix.002 file - promoters60/3438919
ttaaaaa

SEQ ID NO: 56388 - DNA, 7 bp, Unknown
  misc_feature (1)..( 7): Matrix.002 file - promoters60/3438919
aatacat

SEQ ID NO: 56389 - DNA, 8 bp, Unknown
  misc_feature (1)..( 8): Matrix.002 file - promoters60/3438919
ctgacaaa

SEQ ID NO: 56390 - DNA, 8 bp, Unknown
  misc_feature (1)..( 8): Matrix.002 file - promoters60/3438927
tgttgtgc

SEQ ID NO: 56391 - DNA, 12 bp, Unknown
  misc_feature (1)..( 12): Matrix.002 file - promoters60/3438927
tttcaaggattc

SEQ ID NO: 56392 - DNA, 6 bp, Unknown
  misc_feature (1)..( 6): Matrix.002 file - promoters60/3438927
ttcata

SEQ ID NO: 56393 - DNA, 7 bp, Unknown
  misc_feature (1)..( 7): Matrix.002 file - promoters60/3438927
aaagaca

SEQ ID NO: 56394 - DNA, 9 bp, Unknown
  misc_feature (1)..( 9): Matrix.002 file - promoters60/3438927
ataagtaaa

SEQ ID NO: 56395 - DNA, 8 bp, Unknown
  misc_feature (1)..( 8): Matrix.002 file - promoters60/3438927
tcacttta

SEQ ID NO: 56396 - DNA, 9 bp, Unknown
  misc_feature (1)..( 9): Matrix.002 file - promoters60/3438927
aaaaaaaat

SEQ ID NO: 56397 - DNA, 6 bp, Unknown
  misc_feature (1)..( 6): Matrix.002 file - promoters60/3438927
gaagaa

SEQ ID NO: 56398 - DNA, 8 bp, Unknown
  misc_feature (1)..( 8): Matrix.002 file - promoters60/3438927
attagttt

SEQ ID NO: 56399 - DNA, 7 bp, Unknown
  misc_feature (1)..( 7): Matrix.002 file - promoters60/3438927
tattttt

SEQ ID NO: 56400 - DNA, 9 bp, Unknown
  misc_feature (1)..( 9): Matrix.002 file - promoters60/3438927
aaaaaaaaa

SEQ ID NO: 56401 - DNA, 6 bp, Unknown
  misc_feature (1)..( 6): Matrix.002 file - promoters60/3438927
taaaac

SEQ ID NO: 56402 - DNA, 8 bp, Unknown
  misc_feature (1)..( 8): Matrix.002 file - promoters60/3438927
agtaaaaa

SEQ ID NO: 56403 - DNA, 8 bp, Unknown
  misc_feature (1)..( 8): Matrix.002 file - promoters60/3438927
attatgtt

SEQ ID NO: 56404 - DNA, 13 bp, Unknown
  misc_feature (1)..( 13): Matrix.002 file - promoters60/3438927
gaaatatcttaac

SEQ ID NO: 56405 - DNA, 7 bp, Unknown
  misc_feature (1)..( 7): Matrix.002 file - promoters60/3438927
aacaaat

SEQ ID NO: 56406 - DNA, 6 bp, Unknown
  misc_feature (1)..( 6): Matrix.002 file - promoters60/3438927
aagaaa

SEQ ID NO: 56407 - DNA, 7 bp, Unknown
  misc_feature (1)..( 7): Matrix.002 file - promoters60/3438927
ttaatgt

SEQ ID NO: 56408 - DNA, 7 bp, Unknown
  misc_feature (1)..( 7): Matrix.002 file - promoters60/3438927
aatcggg

SEQ ID NO: 56409 - DNA, 8 bp, Unknown
  misc_feature (1)..( 8): Matrix.002 file - promoters60/3438927
gaaacaaa

SEQ ID NO: 56410 - DNA, 10 bp, Unknown
  misc_feature (1)..( 10): Matrix.002 file - promoters60/3438927
ggaaaagaaa

SEQ ID NO: 56411 - DNA, 7 bp, Unknown
  misc_feature (1)..( 7): Matrix.002 file - promoters60/3438927
cccacta

SEQ ID NO: 56412 - DNA, 9 bp, Unknown
  misc_feature (1)..( 9): Matrix.002 file - promoters60/3438927
aaagaaaag

SEQ ID NO: 56413 - DNA, 7 bp, Unknown
  misc_feature (1)..( 7): Matrix.002 file - promoters60/3438927
gtatata

SEQ ID NO: 56414 - DNA, 7 bp, Unknown
  misc_feature (1)..( 7): Matrix.002 file - promoters60/3438946
agaaagt

SEQ ID NO: 56415 - DNA, 8 bp, Unknown
  misc_feature (1)..( 8): Matrix.002 file - promoters60/3438946
tcaaaatc

SEQ ID NO: 56416 - DNA, 8 bp, Unknown
  misc_feature (1)..( 8): Matrix.002 file - promoters60/3438946
gttaattg

SEQ ID NO: 56417 - DNA, 8 bp, Unknown
  misc_feature (1)..( 8): Matrix.002 file - promoters60/3438990
aaaattac

SEQ ID NO: 56418 - DNA, 6 bp, Unknown
  misc_feature (1)..( 6): Matrix.002 file - promoters60/3438990
aacact

SEQ ID NO: 56419 - DNA, 9 bp, Unknown
  misc_feature (1)..( 9): Matrix.002 file - promoters60/3438990
gcatatttt

SEQ ID NO: 56420 - DNA, 8 bp, Unknown
  misc_feature (1)..( 8): Matrix.002 file - promoters60/3438990
tattttat

SEQ ID NO: 56421 - DNA, 8 bp, Unknown
  misc_feature (1)..( 8): Matrix.002 file - promoters60/3438990
aaaaaaaa

SEQ ID NO: 56422 - DNA, 6 bp, Unknown
  misc_feature (1)..( 6): Matrix.002 file - promoters60/3438990
aataaa

SEQ ID NO: 56423 - DNA, 6 bp, Unknown
  misc_feature (1)..( 6): Matrix.002 file - promoters60/3438990
ttaagt

SEQ ID NO: 56424 - DNA, 6 bp, Unknown
  misc_feature (1)..( 6): Matrix.002 file - promoters60/3438990
tatatt

SEQ ID NO: 56425 - DNA, 7 bp, Unknown
  misc_feature (1)..( 7): Matrix.002 file - promoters60/3438990
aaaatct

SEQ ID NO: 56426 - DNA, 7 bp, Unknown
  misc_feature (1)..( 7): Matrix.002 file - promoters60/3438990
caagtaa

SEQ ID NO: 56427 - DNA, 7 bp, Unknown
  misc_feature (1)..( 7): Matrix.002 file - promoters60/3438990
tgttgaa

SEQ ID NO: 56428 - DNA, 6 bp, Unknown
  misc_feature (1)..( 6): Matrix.002 file - promoters60/3438990
ctaaaa

SEQ ID NO: 56429 - DNA, 10 bp, Unknown
  misc_feature (1)..( 10): Matrix.002 file - promoters60/3438990
aaaaccaaac

SEQ ID NO: 56430 - DNA, 7 bp, Unknown
  misc_feature (1)..( 7): Matrix.002 file - promoters60/3438990
gcccaat

SEQ ID NO: 56431 - DNA, 10 bp, Unknown
  misc_feature (1)..( 10): Matrix.002 file - promoters60/3439043
aaagaaaaaa

SEQ ID NO: 56432 - DNA, 8 bp, Unknown
  misc_feature (1)..( 8): Matrix.002 file - promoters60/3439044
ttaagtct

SEQ ID NO: 56433 - DNA, 7 bp, Unknown
  misc_feature (1)..( 7): Matrix.002 file - promoters60/3439056
ttagctt

SEQ ID NO: 56434 - DNA, 6 bp, Unknown
  misc_feature (1)..( 6): Matrix.002 file - promoters60/3439056
ctttat

SEQ ID NO: 56435 - DNA, 9 bp, Unknown
  misc_feature (1)..( 9): Matrix.002 file - promoters60/3439056
aaaaccaaa

SEQ ID NO: 56436 - DNA, 7 bp, Unknown
  misc_feature (1)..( 7): Matrix.002 file - promoters60/3439056
atcattt

SEQ ID NO: 56437 - DNA, 6 bp, Unknown
  misc_feature (1)..( 6): Matrix.002 file - promoters60/3439056
gcatgg

SEQ ID NO: 56438 - DNA, 6 bp, Unknown
  misc_feature (1)..( 6): Matrix.002 file - promoters60/3439056
ttgata

SEQ ID NO: 56439 - DNA, 8 bp, Unknown
  misc_feature (1)..( 8): Matrix.002 file - promoters60/3439056
taaaatta

SEQ ID NO: 56440 - DNA, 6 bp, Unknown
  misc_feature (1)..( 6): Matrix.002 file - promoters60/3439056
ttggtc

SEQ ID NO: 56441 - DNA, 8 bp, Unknown
  misc_feature (1)..( 8): Matrix.002 file - promoters60/3439056
ttttagat

SEQ ID NO: 56442 - DNA, 8 bp, Unknown
  misc_feature (1)..( 8): Matrix.002 file - promoters60/3439056
caatattt

SEQ ID NO: 56443 - DNA, 6 bp, Unknown
  misc_feature (1)..( 6): Matrix.002 file - promoters60/3439056
aaattt

SEQ ID NO: 56444 - DNA, 6 bp, Unknown
  misc_feature (1)..( 6): Matrix.002 file - promoters60/3439056
catgtc

SEQ ID NO: 56445 - DNA, 7 bp, Unknown
  misc_feature (1)..( 7): Matrix.002 file - promoters60/3439056
ataattt

SEQ ID NO: 56446 - DNA, 7 bp, Unknown
  misc_feature (1)..( 7): Matrix.002 file - promoters60/3439056
agcccta

SEQ ID NO: 56447 - DNA, 9 bp, Unknown
  misc_feature (1)..( 9): Matrix.002 file - promoters60/3439056
tttagcatg

SEQ ID NO: 56448 - DNA, 7 bp, Unknown
  misc_feature (1)..( 7): Matrix.002 file - promoters60/3439056
ataaata

SEQ ID NO: 56449 - DNA, 9 bp, Unknown
  misc_feature (1)..( 9): Matrix.002 file - promoters60/3439059
tataaaaat

SEQ ID NO: 56450 - DNA, 8 bp, Unknown
  misc_feature (1)..( 8): Matrix.002 file - promoters60/3439059
tcatatag

SEQ ID NO: 56451 - DNA, 6 bp, Unknown
  misc_feature (1)..( 6): Matrix.002 file - promoters60/3439063
tttcta

SEQ ID NO: 56452 - DNA, 12 bp, Unknown
  misc_feature (1)..( 12): Matrix.002 file - promoters60/3439063
taaaaaaaaaaa

SEQ ID NO: 56453 - DNA, 7 bp, Unknown
  misc_feature (1)..( 7): Matrix.002 file - promoters60/3439063
tatatat

SEQ ID NO: 56454 - DNA, 8 bp, Unknown
  misc_feature (1)..( 8): Matrix.002 file - promoters60/3439063
tatatata

SEQ ID NO: 56455 - DNA, 6 bp, Unknown
  misc_feature (1)..( 6): Matrix.002 file - promoters60/3439063
atgaat

SEQ ID NO: 56456 - DNA, 6 bp, Unknown
  misc_feature (1)..( 6): Matrix.002 file - promoters60/3439063
attgag

SEQ ID NO: 56457 - DNA, 8 bp, Unknown
  misc_feature (1)..( 8): Matrix.002 file - promoters60/3439063
aagtcaaa

SEQ ID NO: 56458 - DNA, 9 bp, Unknown
  misc_feature (1)..( 9): Matrix.002 file - promoters60/3439063
tcaacatta

SEQ ID NO: 56459 - DNA, 7 bp, Unknown
  misc_feature (1)..( 7): Matrix.002 file - promoters60/3439063
aagttta

SEQ ID NO: 56460 - DNA, 6 bp, Unknown
  misc_feature (1)..( 6): Matrix.002 file - promoters60/3439063
tttatt

SEQ ID NO: 56461 - DNA, 8 bp, Unknown
  misc_feature (1)..( 8): Matrix.002 file - promoters60/3439063
aaatcctc

SEQ ID NO: 56462 - DNA, 7 bp, Unknown
  misc_feature (1)..( 7): Matrix.002 file - promoters60/3439063
tataaat

SEQ ID NO: 56463 - DNA, 12 bp, Unknown
  misc_feature (1)..( 12): Matrix.002 file - promoters60/3439063
aacatgtcttag

SEQ ID NO: 56464 - DNA, 7 bp, Unknown
  misc_feature (1)..( 7): Matrix.002 file - promoters60/3439063
tttaatt

SEQ ID NO: 56465 - DNA, 7 bp, Unknown
  misc_feature (1)..( 7): Matrix.002 file - promoters60/3439063
aacatat

SEQ ID NO: 56466 - DNA, 8 bp, Unknown
  misc_feature (1)..( 8): Matrix.002 file - promoters60/3439063
ttttctat

SEQ ID NO: 56467 - DNA, 6 bp, Unknown
  misc_feature (1)..( 6): Matrix.002 file - promoters60/3439063
attaat

SEQ ID NO: 56468 - DNA, 9 bp, Unknown
  misc_feature (1)..( 9): Matrix.002 file - promoters60/3439063
tcatcattt

SEQ ID NO: 56469 - DNA, 6 bp, Unknown
  misc_feature (1)..( 6): Matrix.002 file - promoters60/3439063
gataat

SEQ ID NO: 56470 - DNA, 7 bp, Unknown
  misc_feature (1)..( 7): Matrix.002 file - promoters60/3439063
taacata

SEQ ID NO: 56471 - DNA, 7 bp, Unknown
  misc_feature (1)..( 7): Matrix.002 file - promoters60/3439063
taaatat

SEQ ID NO: 56472 - DNA, 10 bp, Unknown
  misc_feature (1)..( 10): Matrix.002 file - promoters60/3439063
tatattttta

SEQ ID NO: 56473 - DNA, 8 bp, Unknown
  misc_feature (1)..( 8): Matrix.002 file - promoters60/3439063
tttacact

SEQ ID NO: 56474 - DNA, 7 bp, Unknown
  misc_feature (1)..( 7): Matrix.002 file - promoters60/3439063
taaacat

SEQ ID NO: 56475 - DNA, 7 bp, Unknown
  misc_feature (1)..( 7): Matrix.002 file - promoters60/3439063
ataacaa

SEQ ID NO: 56476 - DNA, 10 bp, Unknown
  misc_feature (1)..( 10): Matrix.002 file - promoters60/3439184
ttctctactt

SEQ ID NO: 56477 - DNA, 6 bp, Unknown
  misc_feature (1)..( 6): Matrix.002 file - promoters60/3439184
aattta

SEQ ID NO: 56478 - DNA, 9 bp, Unknown
  misc_feature (1)..( 9): Matrix.002 file - promoters60/3439184
tataattta

SEQ ID NO: 56479 - DNA, 7 bp, Unknown
  misc_feature (1)..( 7): Matrix.002 file - promoters60/3439184
ctaagat

SEQ ID NO: 56480 - DNA, 7 bp, Unknown
  misc_feature (1)..( 7): Matrix.002 file - promoters60/3439184
taatgtt

SEQ ID NO: 56481 - DNA, 7 bp, Unknown
  misc_feature (1)..( 7): Matrix.002 file - promoters60/3439184
tgtattg

SEQ ID NO: 56482 - DNA, 7 bp, Unknown
  misc_feature (1)..( 7): Matrix.002 file - promoters60/3439184
ttcacta

SEQ ID NO: 56483 - DNA, 7 bp, Unknown
  misc_feature (1)..( 7): Matrix.002 file - promoters60/3439184
tctgttc

SEQ ID NO: 56484 - DNA, 7 bp, Unknown
  misc_feature (1)..( 7): Matrix.002 file - promoters60/3439184
ttgaagc

SEQ ID NO: 56485 - DNA, 7 bp, Unknown
  misc_feature (1)..( 7): Matrix.002 file - promoters60/3439184
tttttac

SEQ ID NO: 56486 - DNA, 6 bp, Unknown
  misc_feature (1)..( 6): Matrix.002 file - promoters60/3439184
tgaatt

SEQ ID NO: 56487 - DNA, 8 bp, Unknown
  misc_feature (1)..( 8): Matrix.002 file - promoters60/3439184
ttgtacat

SEQ ID NO: 56488 - DNA, 6 bp, Unknown
  misc_feature (1)..( 6): Matrix.002 file - promoters60/3439184
tttaac

SEQ ID NO: 56489 - DNA, 7 bp, Unknown
  misc_feature (1)..( 7): Matrix.002 file - promoters60/3439184
ggaccat

SEQ ID NO: 56490 - DNA, 12 bp, Unknown
  misc_feature (1)..( 12): Matrix.002 file - promoters60/3439184
attaaagaccaa

SEQ ID NO: 56491 - DNA, 7 bp, Unknown
  misc_feature (1)..( 7): Matrix.002 file - promoters60/3439184
ctgcaac

SEQ ID NO: 56492 - DNA, 6 bp, Unknown
  misc_feature (1)..( 6): Matrix.002 file - promoters60/3439184
ttatat

SEQ ID NO: 56493 - DNA, 6 bp, Unknown
  misc_feature (1)..( 6): Matrix.002 file - promoters60/3439184
tcaatg

SEQ ID NO: 56494 - DNA, 6 bp, Unknown
  misc_feature (1)..( 6): Matrix.002 file - promoters60/3439184
taacca

SEQ ID NO: 56495 - DNA, 13 bp, Unknown
  misc_feature (1)..( 13): Matrix.002 file - promoters60/3439206
aagaaaattcttt

SEQ ID NO: 56496 - DNA, 8 bp, Unknown
  misc_feature (1)..( 8): Matrix.002 file - promoters60/3439206
tttattat

SEQ ID NO: 56497 - DNA, 8 bp, Unknown
  misc_feature (1)..( 8): Matrix.002 file - promoters60/3439206
gttttgat

SEQ ID NO: 56498 - DNA, 9 bp, Unknown
  misc_feature (1)..( 9): Matrix.002 file - promoters60/3439213
cttgtttat

SEQ ID NO: 56499 - DNA, 8 bp, Unknown
  misc_feature (1)..( 8): Matrix.002 file - promoters60/3439224
tttgttgt

SEQ ID NO: 56500 - DNA, 13 bp, Unknown
  misc_feature (1)..( 13): Matrix.002 file - promoters60/3439224
attatatgggcct

SEQ ID NO: 56501 - DNA, 7 bp, Unknown
  misc_feature (1)..( 7): Matrix.002 file - promoters60/3439242
taaacca

SEQ ID NO: 56502 - DNA, 8 bp, Unknown
  misc_feature (1)..( 8): Matrix.002 file - promoters60/3439242
tatcgtgt

SEQ ID NO: 56503 - DNA, 7 bp, Unknown
  misc_feature (1)..( 7): Matrix.002 file - promoters60/3439242
tgtgttg

SEQ ID NO: 56504 - DNA, 6 bp, Unknown
  misc_feature (1)..( 6): Matrix.002 file - promoters60/3439242
ttattt

SEQ ID NO: 56505 - DNA, 7 bp, Unknown
  misc_feature (1)..( 7): Matrix.002 file - promoters60/3439242
tgattat

SEQ ID NO: 56506 - DNA, 6 bp, Unknown
  misc_feature (1)..( 6): Matrix.002 file - promoters60/3439242
tgttaa

SEQ ID NO: 56507 - DNA, 6 bp, Unknown
  misc_feature (1)..( 6): Matrix.002 file - promoters60/3439242
tttata

SEQ ID NO: 56508 - DNA, 6 bp, Unknown
  misc_feature (1)..( 6): Matrix.002 file - promoters60/3439242
tcacat

SEQ ID NO: 56509 - DNA, 8 bp, Unknown
  misc_feature (1)..( 8): Matrix.002 file - promoters60/3439242
atcaaacc

SEQ ID NO: 56510 - DNA, 6 bp, Unknown
  misc_feature (1)..( 6): Matrix.002 file - promoters60/3439242
aactat

SEQ ID NO: 56511 - DNA, 7 bp, Unknown
  misc_feature (1)..( 7): Matrix.002 file - promoters60/3439242
tcaattt

SEQ ID NO: 56512 - DNA, 6 bp, Unknown
  misc_feature (1)..( 6): Matrix.002 file - promoters60/3439242
tttgct

SEQ ID NO: 56513 - DNA, 6 bp, Unknown
  misc_feature (1)..( 6): Matrix.002 file - promoters60/3439242
gttttc

SEQ ID NO: 56514 - DNA, 9 bp, Unknown
  misc_feature (1)..( 9): Matrix.002 file - promoters60/3439242
tttgacttt

SEQ ID NO: 56515 - DNA, 9 bp, Unknown
  misc_feature (1)..( 9): Matrix.002 file - promoters60/3439242
ggggtagaa

SEQ ID NO: 56516 - DNA, 9 bp, Unknown
  misc_feature (1)..( 9): Matrix.002 file - promoters60/3439242
gtataaata

SEQ ID NO: 56517 - DNA, 6 bp, Unknown
  misc_feature (1)..( 6): Matrix.002 file - promoters60/3439242
aaattg

SEQ ID NO: 56518 - DNA, 7 bp, Unknown
  misc_feature (1)..( 7): Matrix.002 file - promoters60/3439242
tgaggaa

SEQ ID NO: 56519 - DNA, 6 bp, Unknown
  misc_feature (1)..( 6): Matrix.002 file - promoters60/3439242
gaagag

SEQ ID NO: 56520 - DNA, 7 bp, Unknown
  misc_feature (1)..( 7): Matrix.002 file - promoters60/3439242
aaaagag

SEQ ID NO: 56521 - DNA, 9 bp, Unknown
  misc_feature (1)..( 9): Matrix.002 file - promoters60/3439289
ttattttca

SEQ ID NO: 56522 - DNA, 8 bp, Unknown
  misc_feature (1)..( 8): Matrix.002 file - promoters60/3439289
atttaaaa

SEQ ID NO: 56523 - DNA, 8 bp, Unknown
  misc_feature (1)..( 8): Matrix.002 file - promoters60/3439289
ttaaaaaa

SEQ ID NO: 56524 - DNA, 8 bp, Unknown
  misc_feature (1)..( 8): Matrix.002 file - promoters60/3439289
caaaatta

SEQ ID NO: 56525 - DNA, 10 bp, Unknown
  misc_feature (1)..( 10): Matrix.002 file - promoters60/3439289
caatataaaa

SEQ ID NO: 56526 - DNA, 13 bp, Unknown
  misc_feature (1)..( 13): Matrix.002 file - promoters60/3439289
ccataaaggaaaa

SEQ ID NO: 56527 - DNA, 13 bp, Unknown
  misc_feature (1)..( 13): Matrix.002 file - promoters60/3439289
aaaggaaaacaat

SEQ ID NO: 56528 - DNA, 7 bp, Unknown
  misc_feature (1)..( 7): Matrix.002 file - promoters60/3439289
tttttac

SEQ ID NO: 56529 - DNA, 13 bp, Unknown
  misc_feature (1)..( 13): Matrix.002 file - promoters60/3439289
ctcgtataaattg

SEQ ID NO: 56530 - DNA, 11 bp, Unknown
  misc_feature (1)..( 11): Matrix.002 file - promoters60/3439289
aaataggaata

SEQ ID NO: 56531 - DNA, 7 bp, Unknown
  misc_feature (1)..( 7): Matrix.002 file - promoters60/3439330
attttaa

SEQ ID NO: 56532 - DNA, 9 bp, Unknown
  misc_feature (1)..( 9): Matrix.002 file - promoters60/3439330
ttttaaaaa

SEQ ID NO: 56533 - DNA, 6 bp, Unknown
  misc_feature (1)..( 6): Matrix.002 file - promoters60/3439330
aatcaa

SEQ ID NO: 56534 - DNA, 6 bp, Unknown
  misc_feature (1)..( 6): Matrix.002 file - promoters60/3439330
aatttt

SEQ ID NO: 56535 - DNA, 6 bp, Unknown
  misc_feature (1)..( 6): Matrix.002 file - promoters60/3439330
catata

SEQ ID NO: 56536 - DNA, 8 bp, Unknown
  misc_feature (1)..( 8): Matrix.002 file - promoters60/3439330
atttctaa

SEQ ID NO: 56537 - DNA, 7 bp, Unknown
  misc_feature (1)..( 7): Matrix.002 file - promoters60/3439330
tttattt

SEQ ID NO: 56538 - DNA, 11 bp, Unknown
  misc_feature (1)..( 11): Matrix.002 file - promoters60/3439330
aaaaaaaattt

SEQ ID NO: 56539 - DNA, 7 bp, Unknown
  misc_feature (1)..( 7): Matrix.002 file - promoters60/3439330
aataaaa

SEQ ID NO: 56540 - DNA, 6 bp, Unknown
  misc_feature (1)..( 6): Matrix.002 file - promoters60/3439330
aatttt

SEQ ID NO: 56541 - DNA, 9 bp, Unknown
  misc_feature (1)..( 9): Matrix.002 file - promoters60/3439330
tttacaaaa

SEQ ID NO: 56542 - DNA, 6 bp, Unknown
  misc_feature (1)..( 6): Matrix.002 file - promoters60/3439330
ttctaa

SEQ ID NO: 56543 - DNA, 7 bp, Unknown
  misc_feature (1)..( 7): Matrix.002 file - promoters60/3439330
ataaaaa

SEQ ID NO: 56544 - DNA, 8 bp, Unknown
  misc_feature (1)..( 8): Matrix.002 file - promoters60/3439330
aaaagaga

SEQ ID NO: 56545 - DNA, 6 bp, Unknown
  misc_feature (1)..( 6): Matrix.002 file - promoters60/3439330
ttttgt

SEQ ID NO: 56546 - DNA, 6 bp, Unknown
  misc_feature (1)..( 6): Matrix.002 file - promoters60/3439330
tgtttt

SEQ ID NO: 56547 - DNA, 7 bp, Unknown
  misc_feature (1)..( 7): Matrix.002 file - promoters60/3439330
gtaatgt

SEQ ID NO: 56548 - DNA, 6 bp, Unknown
  misc_feature (1)..( 6): Matrix.002 file - promoters60/3439330
ccccca

SEQ ID NO: 56549 - DNA, 6 bp, Unknown
  misc_feature (1)..( 6): Matrix.002 file - promoters60/3439353
aaccgt

SEQ ID NO: 56550 - DNA, 8 bp, Unknown
  misc_feature (1)..( 8): Matrix.002 file - promoters60/3439353
tttaaaat

SEQ ID NO: 56551 - DNA, 8 bp, Unknown
  misc_feature (1)..( 8): Matrix.002 file - promoters60/3439353
tcaattaa

SEQ ID NO: 56552 - DNA, 6 bp, Unknown
  misc_feature (1)..( 6): Matrix.002 file - promoters60/3439353
tcatgt

SEQ ID NO: 56553 - DNA, 8 bp, Unknown
  misc_feature (1)..( 8): Matrix.002 file - promoters60/3439353
taaaagca

SEQ ID NO: 56554 - DNA, 9 bp, Unknown
  misc_feature (1)..( 9): Matrix.002 file - promoters60/3439353
gaaaaaaaa

SEQ ID NO: 56555 - DNA, 7 bp, Unknown
  misc_feature (1)..( 7): Matrix.002 file - promoters60/3439353
catatta

SEQ ID NO: 56556 - DNA, 6 bp, Unknown
  misc_feature (1)..( 6): Matrix.002 file - promoters60/3439353
gataag

SEQ ID NO: 56557 - DNA, 8 bp, Unknown
  misc_feature (1)..( 8): Matrix.002 file - promoters60/3439353
ttccaccg

SEQ ID NO: 56558 - DNA, 6 bp, Unknown
  misc_feature (1)..( 6): Matrix.002 file - promoters60/3439353
ttttgt

SEQ ID NO: 56559 - DNA, 7 bp, Unknown
  misc_feature (1)..( 7): Matrix.002 file - promoters60/3439353
tacattt

SEQ ID NO: 56560 - DNA, 7 bp, Unknown
  misc_feature (1)..( 7): Matrix.002 file - promoters60/3439353
aaatcta

SEQ ID NO: 56561 - DNA, 11 bp, Unknown
  misc_feature (1)..( 11): Matrix.002 file - promoters60/3439353
gtaaaagttta

SEQ ID NO: 56562 - DNA, 7 bp, Unknown
  misc_feature (1)..( 7): Matrix.002 file - promoters60/3439353
ttaaatt

SEQ ID NO: 56563 - DNA, 6 bp, Unknown
  misc_feature (1)..( 6): Matrix.002 file - promoters60/3439353
attttc

SEQ ID NO: 56564 - DNA, 6 bp, Unknown
  misc_feature (1)..( 6): Matrix.002 file - promoters60/3439353
caaaat

SEQ ID NO: 56565 - DNA, 10 bp, Unknown
  misc_feature (1)..( 10): Matrix.002 file - promoters60/3439353
acaacaatct

SEQ ID NO: 56566 - DNA, 6 bp, Unknown
  misc_feature (1)..( 6): Matrix.002 file - promoters60/3439353
cacaca

SEQ ID NO: 56567 - DNA, 10 bp, Unknown
  misc_feature (1)..( 10): Matrix.002 file - promoters60/3439364
ttgtaaaaaa

SEQ ID NO: 56568 - DNA, 14 bp, Unknown
  misc_feature (1)..( 14): Matrix.002 file - promoters60/3439364
atatttttaaaaaa

SEQ ID NO: 56569 - DNA, 9 bp, Unknown
  misc_feature (1)..( 9): Matrix.002 file - promoters60/3439364
aacagtttc

SEQ ID NO: 56570 - DNA, 9 bp, Unknown
  misc_feature (1)..( 9): Matrix.002 file - promoters60/3439364
atatttaaa

SEQ ID NO: 56571 - DNA, 9 bp, Unknown
  misc_feature (1)..( 9): Matrix.002 file - promoters60/3439364
aaaataaaa

SEQ ID NO: 56572 - DNA, 7 bp, Unknown
  misc_feature (1)..( 7): Matrix.002 file - promoters60/3439374
ttacatg

SEQ ID NO: 56573 - DNA, 11 bp, Unknown
  misc_feature (1)..( 11): Matrix.002 file - promoters60/3439374
aaaagctatca

SEQ ID NO: 56574 - DNA, 7 bp, Unknown
  misc_feature (1)..( 7): Matrix.002 file - promoters60/3439374
aaaatta

SEQ ID NO: 56575 - DNA, 8 bp, Unknown
  misc_feature (1)..( 8): Matrix.002 file - promoters60/3439374
aaaaagca

SEQ ID NO: 56576 - DNA, 9 bp, Unknown
  misc_feature (1)..( 9): Matrix.002 file - promoters60/3439374
aattcaata

SEQ ID NO: 56577 - DNA, 7 bp, Unknown
  misc_feature (1)..( 7): Matrix.002 file - promoters60/3439374
ataagac

SEQ ID NO: 56578 - DNA, 8 bp, Unknown
  misc_feature (1)..( 8): Matrix.002 file - promoters60/3439374
tctaattt

SEQ ID NO: 56579 - DNA, 7 bp, Unknown
  misc_feature (1)..( 7): Matrix.002 file - promoters60/3439374
gatattt

SEQ ID NO: 56580 - DNA, 7 bp, Unknown
  misc_feature (1)..( 7): Matrix.002 file - promoters60/3439374
aaaaagc

SEQ ID NO: 56581 - DNA, 9 bp, Unknown
  misc_feature (1)..( 9): Matrix.002 file - promoters60/3439374
taattagaa

SEQ ID NO: 56582 - DNA, 8 bp, Unknown
  misc_feature (1)..( 8): Matrix.002 file - promoters60/3439374
atccaacg

SEQ ID NO: 56583 - DNA, 6 bp, Unknown
  misc_feature (1)..( 6): Matrix.002 file - promoters60/3439374
aataaa

SEQ ID NO: 56584 - DNA, 7 bp, Unknown
  misc_feature (1)..( 7): Matrix.002 file - promoters60/3439374
ataaaat

SEQ ID NO: 56585 - DNA, 9 bp, Unknown
  misc_feature (1)..( 9): Matrix.002 file - promoters60/3439374
aataaaaat

SEQ ID NO: 56586 - DNA, 6 bp, Unknown
  misc_feature (1)..( 6): Matrix.002 file - promoters60/3439374
tttcta

SEQ ID NO: 56587 - DNA, 8 bp, Unknown
  misc_feature (1)..( 8): Matrix.002 file - promoters60/3439374
ctataaat

SEQ ID NO: 56588 - DNA, 6 bp, Unknown
  misc_feature (1)..( 6): Matrix.002 file - promoters60/3439374
acctaa

SEQ ID NO: 56589 - DNA, 11 bp, Unknown
  misc_feature (1)..( 11): Matrix.002 file - promoters60/3439472
acaaagaaaga

SEQ ID NO: 56590 - DNA, 10 bp, Unknown
  misc_feature (1)..( 10): Matrix.002 file - promoters60/3439472
atttttgtaa

SEQ ID NO: 56591 - DNA, 14 bp, Unknown
  misc_feature (1)..( 14): Matrix.002 file - promoters60/3439472
caaaagggccgaat

SEQ ID NO: 56592 - DNA, 10 bp, Unknown
  misc_feature (1)..( 10): Matrix.002 file - promoters60/3439472
caagtaaaaa

SEQ ID NO: 56593 - DNA, 8 bp, Unknown
  misc_feature (1)..( 8): Matrix.002 file - promoters60/3439482
aatcgtta

SEQ ID NO: 56594 - DNA, 6 bp, Unknown
  misc_feature (1)..( 6): Matrix.002 file - promoters60/3439506
tgtttt

SEQ ID NO: 56595 - DNA, 8 bp, Unknown
  misc_feature (1)..( 8): Matrix.002 file - promoters60/3439506
tgaagatg

SEQ ID NO: 56596 - DNA, 6 bp, Unknown
  misc_feature (1)..( 6): Matrix.002 file - promoters60/3439506
atgtta

SEQ ID NO: 56597 - DNA, 6 bp, Unknown
  misc_feature (1)..( 6): Matrix.002 file - promoters60/3439506
aaggtt

SEQ ID NO: 56598 - DNA, 6 bp, Unknown
  misc_feature (1)..( 6): Matrix.002 file - promoters60/3439506
ttcata

SEQ ID NO: 56599 - DNA, 7 bp, Unknown
  misc_feature (1)..( 7): Matrix.002 file - promoters60/3439506
tgggttg

SEQ ID NO: 56600 - DNA, 8 bp, Unknown
  misc_feature (1)..( 8): Matrix.002 file - promoters60/3439506
aaattgaa

SEQ ID NO: 56601 - DNA, 7 bp, Unknown
  misc_feature (1)..( 7): Matrix.002 file - promoters60/3439506
tgtaaaa

SEQ ID NO: 56602 - DNA, 7 bp, Unknown
  misc_feature (1)..( 7): Matrix.002 file - promoters60/3439506
agagaaa

SEQ ID NO: 56603 - DNA, 10 bp, Unknown
  misc_feature (1)..( 10): Matrix.002 file - promoters60/3439506
atgcttttgt

SEQ ID NO: 56604 - DNA, 8 bp, Unknown
  misc_feature (1)..( 8): Matrix.002 file - promoters60/3439506
aaaaaaga

SEQ ID NO: 56605 - DNA, 8 bp, Unknown
  misc_feature (1)..( 8): Matrix.002 file - promoters60/3439506
ttaatatt

SEQ ID NO: 56606 - DNA, 7 bp, Unknown
  misc_feature (1)..( 7): Matrix.002 file - promoters60/3439506
tgaggaa

SEQ ID NO: 56607 - DNA, 6 bp, Unknown
  misc_feature (1)..( 6): Matrix.002 file - promoters60/3439506
gaagag

SEQ ID NO: 56608 - DNA, 8 bp, Unknown
  misc_feature (1)..( 8): Matrix.002 file - promoters60/3439593
aggaattt

SEQ ID NO: 56609 - DNA, 7 bp, Unknown
  misc_feature (1)..( 7): Matrix.002 file - promoters60/3439595
aacgaaa

SEQ ID NO: 56610 - DNA, 7 bp, Unknown
  misc_feature (1)..( 7): Matrix.002 file - promoters60/3439595
taattca

SEQ ID NO: 56611 - DNA, 11 bp, Unknown
  misc_feature (1)..( 11): Matrix.002 file - promoters60/3439595
tgacatgattt

SEQ ID NO: 56612 - DNA, 7 bp, Unknown
  misc_feature (1)..( 7): Matrix.002 file - promoters60/3439595
caaattt

SEQ ID NO: 56613 - DNA, 11 bp, Unknown
  misc_feature (1)..( 11): Matrix.002 file - promoters60/3439595
cccttataaaa

SEQ ID NO: 56614 - DNA, 12 bp, Unknown
  misc_feature (1)..( 12): Matrix.002 file - promoters60/3439605
ttcgattttgcg

SEQ ID NO: 56615 - DNA, 10 bp, Unknown
  misc_feature (1)..( 10): Matrix.002 file - promoters60/3439605
ctgaaaacaa

SEQ ID NO: 56616 - DNA, 12 bp, Unknown
  misc_feature (1)..( 12): Matrix.002 file - promoters60/3439605
actatttaaatg

SEQ ID NO: 56617 - DNA, 7 bp, Unknown
  misc_feature (1)..( 7): Matrix.002 file - promoters60/3439605
taatttc

SEQ ID NO: 56618 - DNA, 9 bp, Unknown
  misc_feature (1)..( 9): Matrix.002 file - promoters60/3439605
cgattaaat

SEQ ID NO: 56619 - DNA, 14 bp, Unknown
  misc_feature (1)..( 14): Matrix.002 file - promoters60/3439605
acatgaaataatta

SEQ ID NO: 56620 - DNA, 8 bp, Unknown
  misc_feature (1)..( 8): Matrix.002 file - promoters60/3439605
tcacaaag

SEQ ID NO: 56621 - DNA, 11 bp, Unknown
  misc_feature (1)..( 11): Matrix.002 file - promoters60/3439605
taaattctggg

SEQ ID NO: 56622 - DNA, 8 bp, Unknown
  misc_feature (1)..( 8): Matrix.002 file - promoters60/3439605
attttaat

SEQ ID NO: 56623 - DNA, 7 bp, Unknown
  misc_feature (1)..( 7): Matrix.002 file - promoters60/3439605
catttat

SEQ ID NO: 56624 - DNA, 8 bp, Unknown
  misc_feature (1)..( 8): Matrix.002 file - promoters60/3439605
gaaaacaa

SEQ ID NO: 56625 - DNA, 10 bp, Unknown
  misc_feature (1)..( 10): Matrix.002 file - promoters60/3439614
tctgtcaaaa

SEQ ID NO: 56626 - DNA, 9 bp, Unknown
  misc_feature (1)..( 9): Matrix.002 file - promoters60/3439614
aaagataga

SEQ ID NO: 56627 - DNA, 15 bp, Unknown
  misc_feature (1)..( 15): Matrix.002 file - promoters60/3439614
cacaaataaaaacaa

SEQ ID NO: 56628 - DNA, 14 bp, Unknown
  misc_feature (1)..( 14): Matrix.002 file - promoters60/3439614
aaaaaaaataaata

SEQ ID NO: 56629 - DNA, 12 bp, Unknown
  misc_feature (1)..( 12): Matrix.002 file - promoters60/3439614
caaaatttataa

SEQ ID NO: 56630 - DNA, 13 bp, Unknown
  misc_feature (1)..( 13): Matrix.002 file - promoters60/3439614
gtaaaataaatca

SEQ ID NO: 56631 - DNA, 12 bp, Unknown
  misc_feature (1)..( 12): Matrix.002 file - promoters60/3439641
tataaaaagaaa

SEQ ID NO: 56632 - DNA, 9 bp, Unknown
  misc_feature (1)..( 9): Matrix.002 file - promoters60/3439641
ttatatttt

SEQ ID NO: 56633 - DNA, 12 bp, Unknown
  misc_feature (1)..( 12): Matrix.002 file - promoters60/3439641
aaaatatgtttt

SEQ ID NO: 56634 - DNA, 11 bp, Unknown
  misc_feature (1)..( 11): Matrix.002 file - promoters60/3439641
gtttgattcgt

SEQ ID NO: 56635 - DNA, 7 bp, Unknown
  misc_feature (1)..( 7): Matrix.002 file - promoters60/3439641
taatata

SEQ ID NO: 56636 - DNA, 9 bp, Unknown
  misc_feature (1)..( 9): Matrix.002 file - promoters60/3439641
ttatattag

SEQ ID NO: 56637 - DNA, 11 bp, Unknown
  misc_feature (1)..( 11): Matrix.002 file - promoters60/3439641
aagaaatatat

SEQ ID NO: 56638 - DNA, 10 bp, Unknown
  misc_feature (1)..( 10): Matrix.002 file - promoters60/3439662
taattttgaa

SEQ ID NO: 56639 - DNA, 7 bp, Unknown
  misc_feature (1)..( 7): Matrix.002 file - promoters60/3439905
aaataat

SEQ ID NO: 56640 - DNA, 8 bp, Unknown
  misc_feature (1)..( 8): Matrix.002 file - promoters60/3439905
tgaaatca

SEQ ID NO: 56641 - DNA, 7 bp, Unknown
  misc_feature (1)..( 7): Matrix.002 file - promoters60/3439905
taaaaaa

SEQ ID NO: 56642 - DNA, 6 bp, Unknown
  misc_feature (1)..( 6): Matrix.002 file - promoters60/3439905
aatgaa

SEQ ID NO: 56643 - DNA, 6 bp, Unknown
  misc_feature (1)..( 6): Matrix.002 file - promoters60/3439905
ggaaat

SEQ ID NO: 56644 - DNA, 6 bp, Unknown
  misc_feature (1)..( 6): Matrix.002 file - promoters60/3439905
aagaaa

SEQ ID NO: 56645 - DNA, 7 bp, Unknown
  misc_feature (1)..( 7): Matrix.002 file - promoters60/3439905
aaaaaat

SEQ ID NO: 56646 - DNA, 9 bp, Unknown
  misc_feature (1)..( 9): Matrix.002 file - promoters60/3439905
ttctctctc

SEQ ID NO: 56647 - DNA, 7 bp, Unknown
  misc_feature (1)..( 7): Matrix.002 file - promoters60/3439905
attcttc

SEQ ID NO: 56648 - DNA, 6 bp, Unknown
  misc_feature (1)..( 6): Matrix.002 file - promoters60/3439905
tataaa

SEQ ID NO: 56649 - DNA, 10 bp, Unknown
  misc_feature (1)..( 10): Matrix.002 file - promoters60/3442171
ttttattcaa

SEQ ID NO: 56650 - DNA, 10 bp, Unknown
  misc_feature (1)..( 10): Matrix.002 file - promoters60/3442171
aaataaagtt

SEQ ID NO: 56651 - DNA, 14 bp, Unknown
  misc_feature (1)..( 14): Matrix.002 file - promoters60/3445482
aaaaagggcctata

SEQ ID NO: 56652 - DNA, 9 bp, Unknown
  misc_feature (1)..( 9): Matrix.002 file - promoters60/3445482
acaaaacca

SEQ ID NO: 56653 - DNA, 10 bp, Unknown
  misc_feature (1)..( 10): Matrix.002 file - promoters60/3593205
aaaaataaac

SEQ ID NO: 56654 - DNA, 13 bp, Unknown
  misc_feature (1)..( 13): Matrix.002 file - promoters60/3593205
aattggatcttat

SEQ ID NO: 56655 - DNA, 8 bp, Unknown
  misc_feature (1)..( 8): Matrix.002 file - promoters60/3593205
aactaaaa

SEQ ID NO: 56656 - DNA, 10 bp, Unknown
  misc_feature (1)..( 10): Matrix.002 file - promoters60/3593205
acaataatat

SEQ ID NO: 56657 - DNA, 9 bp, Unknown
  misc_feature (1)..( 9): Matrix.002 file - promoters60/3593205
ctattttat

SEQ ID NO: 56658 - DNA, 13 bp, Unknown
  misc_feature (1)..( 13): Matrix.002 file - promoters60/3593205
aattagatcttat

SEQ ID NO: 56659 - DNA, 7 bp, Unknown
  misc_feature (1)..( 7): Matrix.002 file - promoters60/3593230
gttaata

SEQ ID NO: 56660 - DNA, 6 bp, Unknown
  misc_feature (1)..( 6): Matrix.002 file - promoters60/3593243
attaaa

SEQ ID NO: 56661 - DNA, 10 bp, Unknown
  misc_feature (1)..( 10): Matrix.002 file - promoters60/3593243
aaacataatg

SEQ ID NO: 56662 - DNA, 8 bp, Unknown
  misc_feature (1)..( 8): Matrix.002 file - promoters60/3593243
atatcttt

SEQ ID NO: 56663 - DNA, 8 bp, Unknown
  misc_feature (1)..( 8): Matrix.002 file - promoters60/3593243
ttgttttc

SEQ ID NO: 56664 - DNA, 6 bp, Unknown
  misc_feature (1)..( 6): Matrix.002 file - promoters60/3593243
cttcaa

SEQ ID NO: 56665 - DNA, 6 bp, Unknown
  misc_feature (1)..( 6): Matrix.002 file - promoters60/3593243
cattta

SEQ ID NO: 56666 - DNA, 6 bp, Unknown
  misc_feature (1)..( 6): Matrix.002 file - promoters60/3593243
caaaaa

SEQ ID NO: 56667 - DNA, 6 bp, Unknown
  misc_feature (1)..( 6): Matrix.002 file - promoters60/3593243
aaatgc

SEQ ID NO: 56668 - DNA, 9 bp, Unknown
  misc_feature (1)..( 9): Matrix.002 file - promoters60/3593243
taacacata

SEQ ID NO: 56669 - DNA, 7 bp, Unknown
  misc_feature (1)..( 7): Matrix.002 file - promoters60/3593243
ataataa

SEQ ID NO: 56670 - DNA, 6 bp, Unknown
  misc_feature (1)..( 6): Matrix.002 file - promoters60/3593243
tttaag

SEQ ID NO: 56671 - DNA, 9 bp, Unknown
  misc_feature (1)..( 9): Matrix.002 file - promoters60/3593243
agtattaat

SEQ ID NO: 56672 - DNA, 9 bp, Unknown
  misc_feature (1)..( 9): Matrix.002 file - promoters60/3593243
agacaagtt

SEQ ID NO: 56673 - DNA, 7 bp, Unknown
  misc_feature (1)..( 7): Matrix.002 file - promoters60/3593243
ttacatg

SEQ ID NO: 56674 - DNA, 7 bp, Unknown
  misc_feature (1)..( 7): Matrix.002 file - promoters60/3593243
tctctga

SEQ ID NO: 56675 - DNA, 9 bp, Unknown
  misc_feature (1)..( 9): Matrix.002 file - promoters60/3593243
aacacacat

SEQ ID NO: 56676 - DNA, 6 bp, Unknown
  misc_feature (1)..( 6): Matrix.002 file - promoters60/3593243
atgtca

SEQ ID NO: 56677 - DNA, 9 bp, Unknown
  misc_feature (1)..( 9): Matrix.002 file - promoters60/3593243
gttaatctt

SEQ ID NO: 56678 - DNA, 7 bp, Unknown
  misc_feature (1)..( 7): Matrix.002 file - promoters60/3593243
aacatta

SEQ ID NO: 56679 - DNA, 6 bp, Unknown
  misc_feature (1)..( 6): Matrix.002 file - promoters60/3593243
aagaaa

SEQ ID NO: 56680 - DNA, 6 bp, Unknown
  misc_feature (1)..( 6): Matrix.002 file - promoters60/3593243
cttctt

SEQ ID NO: 56681 - DNA, 6 bp, Unknown
  misc_feature (1)..( 6): Matrix.002 file - promoters60/3593243
tataaa

SEQ ID NO: 56682 - DNA, 7 bp, Unknown
  misc_feature (1)..( 7): Matrix.002 file - promoters60/3593264
gtttttg

SEQ ID NO: 56683 - DNA, 10 bp, Unknown
  misc_feature (1)..( 10): Matrix.002 file - promoters60/3593264
ttaaattaat

SEQ ID NO: 56684 - DNA, 10 bp, Unknown
  misc_feature (1)..( 10): Matrix.002 file - promoters60/3593264
aaaaaaattc

SEQ ID NO: 56685 - DNA, 8 bp, Unknown
  misc_feature (1)..( 8): Matrix.002 file - promoters60/3593264
cattttac

SEQ ID NO: 56686 - DNA, 13 bp, Unknown
  misc_feature (1)..( 13): Matrix.002 file - promoters60/3593264
aaacaaaaaaaaa

SEQ ID NO: 56687 - DNA, 10 bp, Unknown
  misc_feature (1)..( 10): Matrix.002 file - promoters60/3593264
tctcaaaaaa

SEQ ID NO: 56688 - DNA, 12 bp, Unknown
  misc_feature (1)..( 12): Matrix.002 file - promoters60/3593264
caaaatttctca

SEQ ID NO: 56689 - DNA, 12 bp, Unknown
  misc_feature (1)..( 12): Matrix.002 file - promoters60/3593264
tctcaaaaataa

SEQ ID NO: 56690 - DNA, 10 bp, Unknown
  misc_feature (1)..( 10): Matrix.002 file - promoters60/3593264
aaaataaaat

SEQ ID NO: 56691 - DNA, 8 bp, Unknown
  misc_feature (1)..( 8): Matrix.002 file - promoters60/3593264
ctctattt

SEQ ID NO: 56692 - DNA, 8 bp, Unknown
  misc_feature (1)..( 8): Matrix.002 file - promoters60/3593264
tatataaa

SEQ ID NO: 56693 - DNA, 8 bp, Unknown
  misc_feature (1)..( 8): Matrix.002 file - promoters60/3593264
gttttgtt

SEQ ID NO: 56694 - DNA, 8 bp, Unknown
  misc_feature (1)..( 8): Matrix.002 file - promoters60/3593290
tatcagtt

SEQ ID NO: 56695 - DNA, 6 bp, Unknown
  misc_feature (1)..( 6): Matrix.002 file - promoters60/3593290
tttaga

SEQ ID NO: 56696 - DNA, 6 bp, Unknown
  misc_feature (1)..( 6): Matrix.002 file - promoters60/3593290
taactt

SEQ ID NO: 56697 - DNA, 10 bp, Unknown
  misc_feature (1)..( 10): Matrix.002 file - promoters60/3593290
atatgtgaga

SEQ ID NO: 56698 - DNA, 8 bp, Unknown
  misc_feature (1)..( 8): Matrix.002 file - promoters60/3593290
tttttgtc

SEQ ID NO: 56699 - DNA, 6 bp, Unknown
  misc_feature (1)..( 6): Matrix.002 file - promoters60/3593290
tctttt

SEQ ID NO: 56700 - DNA, 6 bp, Unknown
  misc_feature (1)..( 6): Matrix.002 file - promoters60/3593290
tttctt

SEQ ID NO: 56701 - DNA, 7 bp, Unknown
  misc_feature (1)..( 7): Matrix.002 file - promoters60/3593290
tttattt

SEQ ID NO: 56702 - DNA, 7 bp, Unknown
  misc_feature (1)..( 7): Matrix.002 file - promoters60/3593290
ctcagaa

SEQ ID NO: 56703 - DNA, 10 bp, Unknown
  misc_feature (1)..( 10): Matrix.002 file - promoters60/3593290
gattgttgtg

SEQ ID NO: 56704 - DNA, 9 bp, Unknown
  misc_feature (1)..( 9): Matrix.002 file - promoters60/3593290
gatcaggaa

SEQ ID NO: 56705 - DNA, 8 bp, Unknown
  misc_feature (1)..( 8): Matrix.002 file - promoters60/3593290
atttggac

SEQ ID NO: 56706 - DNA, 8 bp, Unknown
  misc_feature (1)..( 8): Matrix.002 file - promoters60/3593290
ctttagac

SEQ ID NO: 56707 - DNA, 7 bp, Unknown
  misc_feature (1)..( 7): Matrix.002 file - promoters60/3593290
gaaactt

SEQ ID NO: 56708 - DNA, 7 bp, Unknown
  misc_feature (1)..( 7): Matrix.002 file - promoters60/3593290
tcatctg

SEQ ID NO: 56709 - DNA, 7 bp, Unknown
  misc_feature (1)..( 7): Matrix.002 file - promoters60/3593290
ctttttg

SEQ ID NO: 56710 - DNA, 9 bp, Unknown
  misc_feature (1)..( 9): Matrix.002 file - promoters60/3593340
tttaaagaa

SEQ ID NO: 56711 - DNA, 12 bp, Unknown
  misc_feature (1)..( 12): Matrix.002 file - promoters60/3593340
aaaaatggtaaa

SEQ ID NO: 56712 - DNA, 11 bp, Unknown
  misc_feature (1)..( 11): Matrix.002 file - promoters60/3593340
aaggcaaaaga

SEQ ID NO: 56713 - DNA, 7 bp, Unknown
  misc_feature (1)..( 7): Matrix.002 file - promoters60/3593340
ttaattt

SEQ ID NO: 56714 - DNA, 7 bp, Unknown
  misc_feature (1)..( 7): Matrix.002 file - promoters60/3593340
tttatta

SEQ ID NO: 56715 - DNA, 9 bp, Unknown
  misc_feature (1)..( 9): Matrix.002 file - promoters60/3593340
ttttaataa

SEQ ID NO: 56716 - DNA, 11 bp, Unknown
  misc_feature (1)..( 11): Matrix.002 file - promoters60/3593340
gtaaaaaatat

SEQ ID NO: 56717 - DNA, 8 bp, Unknown
  misc_feature (1)..( 8): Matrix.002 file - promoters60/3593346
aaaataat

SEQ ID NO: 56718 - DNA, 7 bp, Unknown
  misc_feature (1)..( 7): Matrix.002 file - promoters60/3593346
aaacaaa

SEQ ID NO: 56719 - DNA, 8 bp, Unknown
  misc_feature (1)..( 8): Matrix.002 file - promoters60/3593346
aaatcttt

SEQ ID NO: 56720 - DNA, 8 bp, Unknown
  misc_feature (1)..( 8): Matrix.002 file - promoters60/3594312
cttttaaa

SEQ ID NO: 56721 - DNA, 10 bp, Unknown
  misc_feature (1)..( 10): Matrix.002 file - promoters60/3594312
tacataaata

SEQ ID NO: 56722 - DNA, 16 bp, Unknown
  misc_feature (1)..( 16): Matrix.002 file - promoters60/3594312
aaaaaggcccaaaaaa

SEQ ID NO: 56723 - DNA, 9 bp, Unknown
  misc_feature (1)..( 9): Matrix.002 file - promoters60/3594312
attcttaaa

SEQ ID NO: 56724 - DNA, 16 bp, Unknown
  misc_feature (1)..( 16): Matrix.002 file - promoters60/3597145
acaaatctttaaatat

SEQ ID NO: 56725 - DNA, 6 bp, Unknown
  misc_feature (1)..( 6): Matrix.002 file - promoters60/3597158
aatact

SEQ ID NO: 56726 - DNA, 7 bp, Unknown
  misc_feature (1)..( 7): Matrix.002 file - promoters60/3597158
tttgtaa

SEQ ID NO: 56727 - DNA, 7 bp, Unknown
  misc_feature (1)..( 7): Matrix.002 file - promoters60/3597158
aaagttg

SEQ ID NO: 56728 - DNA, 6 bp, Unknown
  misc_feature (1)..( 6): Matrix.002 file - promoters60/3597158
attaaa

SEQ ID NO: 56729 - DNA, 8 bp, Unknown
  misc_feature (1)..( 8): Matrix.002 file - promoters60/3597158
gtttcctc

SEQ ID NO: 56730 - DNA, 9 bp, Unknown
  misc_feature (1)..( 9): Matrix.002 file - promoters60/3597158
tcttcttct

SEQ ID NO: 56731 - DNA, 8 bp, Unknown
  misc_feature (1)..( 8): Matrix.002 file - promoters60/3597158
tcacatag

SEQ ID NO: 56732 - DNA, 9 bp, Unknown
  misc_feature (1)..( 9): Matrix.002 file - promoters60/3597158
aaagaaaaa

SEQ ID NO: 56733 - DNA, 7 bp, Unknown
  misc_feature (1)..( 7): Matrix.002 file - promoters60/3597158
aaaaatt

SEQ ID NO: 56734 - DNA, 7 bp, Unknown
  misc_feature (1)..( 7): Matrix.002 file - promoters60/3597158
aaacaac

SEQ ID NO: 56735 - DNA, 6 bp, Unknown
  misc_feature (1)..( 6): Matrix.002 file - promoters60/3597158
actctc

SEQ ID NO: 56736 - DNA, 8 bp, Unknown
  misc_feature (1)..( 8): Matrix.002 file - promoters60/3597158
tgtcattt

SEQ ID NO: 56737 - DNA, 7 bp, Unknown
  misc_feature (1)..( 7): Matrix.002 file - promoters60/3597158
aatcttc

SEQ ID NO: 56738 - DNA, 6 bp, Unknown
  misc_feature (1)..( 6): Matrix.002 file - promoters60/3597158
ttggta

SEQ ID NO: 56739 - DNA, 6 bp, Unknown
  misc_feature (1)..( 6): Matrix.002 file - promoters60/3597158
aaccaa

SEQ ID NO: 56740 - DNA, 9 bp, Unknown
  misc_feature (1)..( 9): Matrix.002 file - promoters60/3597158
tttcaaaag

SEQ ID NO: 56741 - DNA, 6 bp, Unknown
  misc_feature (1)..( 6): Matrix.002 file - promoters60/3597158
aagaaa

SEQ ID NO: 56742 - DNA, 6 bp, Unknown
  misc_feature (1)..( 6): Matrix.002 file - promoters60/3597158
tagtta

SEQ ID NO: 56743 - DNA, 8 bp, Unknown
  misc_feature (1)..( 8): Matrix.002 file - promoters60/3597158
agttccac

SEQ ID NO: 56744 - DNA, 7 bp, Unknown
  misc_feature (1)..( 7): Matrix.002 file - promoters60/3597158
atcacat

SEQ ID NO: 56745 - DNA, 6 bp, Unknown
  misc_feature (1)..( 6): Matrix.002 file - promoters60/3597158
aaacat

SEQ ID NO: 56746 - DNA, 7 bp, Unknown
  misc_feature (1)..( 7): Matrix.002 file - promoters60/3597158
ttctctc

SEQ ID NO: 56747 - DNA, 9 bp, Unknown
  misc_feature (1)..( 9): Matrix.002 file - promoters60/3597162
ttcaattta

SEQ ID NO: 56748 - DNA, 6 bp, Unknown
  misc_feature (1)..( 6): Matrix.002 file - promoters60/3597162
atcaac

SEQ ID NO: 56749 - DNA, 7 bp, Unknown
  misc_feature (1)..( 7): Matrix.002 file - promoters60/3597162
tgacttg

SEQ ID NO: 56750 - DNA, 8 bp, Unknown
  misc_feature (1)..( 8): Matrix.002 file - promoters60/3597162
agataaaa

SEQ ID NO: 56751 - DNA, 7 bp, Unknown
  misc_feature (1)..( 7): Matrix.002 file - promoters60/3597162
acaattt

SEQ ID NO: 56752 - DNA, 8 bp, Unknown
  misc_feature (1)..( 8): Matrix.002 file - promoters60/3597162
agaaaatt

SEQ ID NO: 56753 - DNA, 6 bp, Unknown
  misc_feature (1)..( 6): Matrix.002 file - promoters60/3597162
ttggtt

SEQ ID NO: 56754 - DNA, 6 bp, Unknown
  misc_feature (1)..( 6): Matrix.002 file - promoters60/3597162
aacttt

SEQ ID NO: 56755 - DNA, 6 bp, Unknown
  misc_feature (1)..( 6): Matrix.002 file - promoters60/3597162
aattga

SEQ ID NO: 56756 - DNA, 7 bp, Unknown
  misc_feature (1)..( 7): Matrix.002 file - promoters60/3597162
aatagat

SEQ ID NO: 56757 - DNA, 6 bp, Unknown
  misc_feature (1)..( 6): Matrix.002 file - promoters60/3597162
taccat

SEQ ID NO: 56758 - DNA, 7 bp, Unknown
  misc_feature (1)..( 7): Matrix.002 file - promoters60/3597162
ataatat

SEQ ID NO: 56759 - DNA, 13 bp, Unknown
  misc_feature (1)..( 13): Matrix.002 file - promoters60/3597162
tctatataaatcc

SEQ ID NO: 56760 - DNA, 7 bp, Unknown
  misc_feature (1)..( 7): Matrix.002 file - promoters60/3597162
ttaaaat

SEQ ID NO: 56761 - DNA, 6 bp, Unknown
  misc_feature (1)..( 6): Matrix.002 file - promoters60/3597162
attcaa

SEQ ID NO: 56762 - DNA, 9 bp, Unknown
  misc_feature (1)..( 9): Matrix.002 file - promoters60/3597162
ttttatttt

SEQ ID NO: 56763 - DNA, 7 bp, Unknown
  misc_feature (1)..( 7): Matrix.002 file - promoters60/3597162
tctcata

SEQ ID NO: 56764 - DNA, 6 bp, Unknown
  misc_feature (1)..( 6): Matrix.002 file - promoters60/3597162
aattta

SEQ ID NO: 56765 - DNA, 9 bp, Unknown
  misc_feature (1)..( 9): Matrix.002 file - promoters60/3597162
taaacttaa

SEQ ID NO: 56766 - DNA, 7 bp, Unknown
  misc_feature (1)..( 7): Matrix.002 file - promoters60/3597162
actctca

SEQ ID NO: 56767 - DNA, 8 bp, Unknown
  misc_feature (1)..( 8): Matrix.003 file - promoters60/3597175
tttattca

SEQ ID NO: 56768 - DNA, 12 bp, Unknown
  misc_feature (1)..( 12): Matrix.003 file - promoters60/3597175
tttattttaaaa

SEQ ID NO: 56769 - DNA, 10 bp, Unknown
  misc_feature (1)..( 10): Matrix.003 file - promoters60/3597175
ctaattaaaa

SEQ ID NO: 56770 - DNA, 16 bp, Unknown
  misc_feature (1)..( 16): Matrix.003 file - promoters60/3597175
aaaaactttattcttc

SEQ ID NO: 56771 - DNA, 14 bp, Unknown
  misc_feature (1)..( 14): Matrix.003 file - promoters60/3597175
gtagcctataaata

SEQ ID NO: 56772 - DNA, 12 bp, Unknown
  misc_feature (1)..( 12): Matrix.003 file - promoters60/3597175
aaaaagtttttt

SEQ ID NO: 56773 - DNA, 15 bp, Unknown
  misc_feature (1)..( 15): Matrix.003 file - promoters60/3597175
tataacaaaaaattt

SEQ ID NO: 56774 - DNA, 10 bp, Unknown
  misc_feature (1)..( 10): Matrix.003 file - promoters60/3597175
aaataaattt

SEQ ID NO: 56775 - DNA, 8 bp, Unknown
  misc_feature (1)..( 8): Matrix.003 file - promoters60/3600084
atttttat

SEQ ID NO: 56776 - DNA, 7 bp, Unknown
  misc_feature (1)..( 7): Matrix.003 file - promoters60/3600084
tccaaaa

SEQ ID NO: 56777 - DNA, 7 bp, Unknown
  misc_feature (1)..( 7): Matrix.003 file - promoters60/3600084
ttaaaaa

SEQ ID NO: 56778 - DNA, 6 bp, Unknown
  misc_feature (1)..( 6): Matrix.003 file - promoters60/3600084
aaaaca

SEQ ID NO: 56779 - DNA, 6 bp, Unknown
  misc_feature (1)..( 6): Matrix.003 file - promoters60/3600084
aattac

SEQ ID NO: 56780 - DNA, 7 bp, Unknown
  misc_feature (1)..( 7): Matrix.003 file - promoters60/3600084
aagaagt

SEQ ID NO: 56781 - DNA, 8 bp, Unknown
  misc_feature (1)..( 8): Matrix.003 file - promoters60/3600084
tttttttt

SEQ ID NO: 56782 - DNA, 10 bp, Unknown
  misc_feature (1)..( 10): Matrix.003 file - promoters60/3600084
attaatgttc

SEQ ID NO: 56783 - DNA, 6 bp, Unknown
  misc_feature (1)..( 6): Matrix.003 file - promoters60/3600084
taaaat

SEQ ID NO: 56784 - DNA, 7 bp, Unknown
  misc_feature (1)..( 7): Matrix.003 file - promoters60/3600084
tccaaaa

SEQ ID NO: 56785 - DNA, 9 bp, Unknown
  misc_feature (1)..( 9): Matrix.003 file - promoters60/3600084
ttcatctca

SEQ ID NO: 56786 - DNA, 6 bp, Unknown
  misc_feature (1)..( 6): Matrix.003 file - promoters60/3600084
catcct

SEQ ID NO: 56787 - DNA, 7 bp, Unknown
  misc_feature (1)..( 7): Matrix.003 file - promoters60/3600084
actgaaa

SEQ ID NO: 56788 - DNA, 8 bp, Unknown
  misc_feature (1)..( 8): Matrix.003 file - promoters60/3600084
aaaacaaa

SEQ ID NO: 56789 - DNA, 7 bp, Unknown
  misc_feature (1)..( 7): Matrix.003 file - promoters60/3600084
gtcaaaa

SEQ ID NO: 56790 - DNA, 7 bp, Unknown
  misc_feature (1)..( 7): Matrix.003 file - promoters60/3611292
ataaaat

SEQ ID NO: 56791 - DNA, 9 bp, Unknown
  misc_feature (1)..( 9): Matrix.003 file - promoters60/3611292
taactaaaa

SEQ ID NO: 56792 - DNA, 8 bp, Unknown
  misc_feature (1)..( 8): Matrix.003 file - promoters60/3611292
tctttttt

SEQ ID NO: 56793 - DNA, 11 bp, Unknown
  misc_feature (1)..( 11): Matrix.003 file - promoters60/3611292
caaaaaaatca

SEQ ID NO: 56794 - DNA, 8 bp, Unknown
  misc_feature (1)..( 8): Matrix.003 file - promoters60/3646410
aaaaaaaa

SEQ ID NO: 56795 - DNA, 9 bp, Unknown
  misc_feature (1)..( 9): Matrix.003 file - promoters60/3646410
aaaagattt

SEQ ID NO: 56796 - DNA, 9 bp, Unknown
  misc_feature (1)..( 9): Matrix.003 file - promoters60/3646410
gaaagtctt

SEQ ID NO: 56797 - DNA, 7 bp, Unknown
  misc_feature (1)..( 7): Matrix.003 file - promoters60/3659211
aatgtag

SEQ ID NO: 56798 - DNA, 8 bp, Unknown
  misc_feature (1)..( 8): Matrix.003 file - promoters60/3659211
aatatttt

SEQ ID NO: 56799 - DNA, 7 bp, Unknown
  misc_feature (1)..( 7): Matrix.003 file - promoters60/3659211
actggtg

SEQ ID NO: 56800 - DNA, 6 bp, Unknown
  misc_feature (1)..( 6): Matrix.003 file - promoters60/3659211
aaaaga

SEQ ID NO: 56801 - DNA, 8 bp, Unknown
  misc_feature (1)..( 8): Matrix.003 file - promoters60/3659211
atttagtt

SEQ ID NO: 56802 - DNA, 7 bp, Unknown
  misc_feature (1)..( 7): Matrix.003 file - promoters60/3659211
tacaatt

SEQ ID NO: 56803 - DNA, 6 bp, Unknown
  misc_feature (1)..( 6): Matrix.003 file - promoters60/3659211
gaatca

SEQ ID NO: 56804 - DNA, 8 bp, Unknown
  misc_feature (1)..( 8): Matrix.003 file - promoters60/3659211
ataaatta

SEQ ID NO: 56805 - DNA, 7 bp, Unknown
  misc_feature (1)..( 7): Matrix.003 file - promoters60/3659211
aaaaaag

SEQ ID NO: 56806 - DNA, 10 bp, Unknown
  misc_feature (1)..( 10): Matrix.003 file - promoters60/3659211
gcaaaaacaa

SEQ ID NO: 56807 - DNA, 7 bp, Unknown
  misc_feature (1)..( 7): Matrix.003 file - promoters60/3659211
gaaaatt

SEQ ID NO: 56808 - DNA, 6 bp, Unknown
  misc_feature (1)..( 6): Matrix.003 file - promoters60/3659211
cgtttt

SEQ ID NO: 56809 - DNA, 7 bp, Unknown
  misc_feature (1)..( 7): Matrix.003 file - promoters60/3659211
cgagaat

SEQ ID NO: 56810 - DNA, 6 bp, Unknown
  misc_feature (1)..( 6): Matrix.003 file - promoters60/3659211
gaatca

SEQ ID NO: 56811 - DNA, 7 bp, Unknown
  misc_feature (1)..( 7): Matrix.003 file - promoters60/3659211
tccagtt

SEQ ID NO: 56812 - DNA, 6 bp, Unknown
  misc_feature (1)..( 6): Matrix.003 file - promoters60/3659211
tttccg

SEQ ID NO: 56813 - DNA, 6 bp, Unknown
  misc_feature (1)..( 6): Matrix.003 file - promoters60/3659211
aaccct

SEQ ID NO: 56814 - DNA, 11 bp, Unknown
  misc_feature (1)..( 11): Matrix.003 file - promoters60/3659426
aaaggaacaag

SEQ ID NO: 56815 - DNA, 8 bp, Unknown
  misc_feature (1)..( 8): Matrix.003 file - promoters60/4254292
tagaaaaa

SEQ ID NO: 56816 - DNA, 9 bp, Unknown
  misc_feature (1)..( 9): Matrix.003 file - promoters60/4254292
tcccaaaat

SEQ ID NO: 56817 - DNA, 12 bp, Unknown
  misc_feature (1)..( 12): Matrix.003 file - promoters60/4254292
ttcttaaatttt

SEQ ID NO: 56818 - DNA, 11 bp, Unknown
  misc_feature (1)..( 11): Matrix.003 file - promoters60/4254292
actgattaaag

SEQ ID NO: 56819 - DNA, 9 bp, Unknown
  misc_feature (1)..( 9): Matrix.003 file - promoters60/4254426
tccttataa

SEQ ID NO: 56820 - DNA, 11 bp, Unknown
  misc_feature (1)..( 11): Matrix.003 file - promoters60/4254807
tagaatttgaa

SEQ ID NO: 56821 - DNA, 7 bp, Unknown
  misc_feature (1)..( 7): Matrix.003 file - promoters60/4256562
tttatta

SEQ ID NO: 56822 - DNA, 7 bp, Unknown
  misc_feature (1)..( 7): Matrix.003 file - promoters60/4256562
attatta

SEQ ID NO: 56823 - DNA, 12 bp, Unknown
  misc_feature (1)..( 12): Matrix.003 file - promoters60/4256562
tagaaaaaacag

SEQ ID NO: 56824 - DNA, 12 bp, Unknown
  misc_feature (1)..( 12): Matrix.003 file - promoters60/4256562
acaaacattaca

SEQ ID NO: 56825 - DNA, 9 bp, Unknown
  misc_feature (1)..( 9): Matrix.003 file - promoters60/4256562
tcgataaaa

SEQ ID NO: 56826 - DNA, 11 bp, Unknown
  misc_feature (1)..( 11): Matrix.003 file - promoters60/4262222
aatttataaat

SEQ ID NO: 56827 - DNA, 9 bp, Unknown
  misc_feature (1)..( 9): Matrix.003 file - promoters60/4262222
atattaaat

SEQ ID NO: 56828 - DNA, 10 bp, Unknown
  misc_feature (1)..( 10): Matrix.003 file - promoters60/4262222
acatgttaga

SEQ ID NO: 56829 - DNA, 6 bp, Unknown
  misc_feature (1)..( 6): Matrix.003 file - promoters60/4262416
aatata

SEQ ID NO: 56830 - DNA, 7 bp, Unknown
  misc_feature (1)..( 7): Matrix.003 file - promoters60/4262416
ttaatat

SEQ ID NO: 56831 - DNA, 6 bp, Unknown
  misc_feature (1)..( 6): Matrix.003 file - promoters60/4262416
tattaa

SEQ ID NO: 56832 - DNA, 6 bp, Unknown
  misc_feature (1)..( 6): Matrix.003 file - promoters60/4262416
tatatt

SEQ ID NO: 56833 - DNA, 7 bp, Unknown
  misc_feature (1)..( 7): Matrix.003 file - promoters60/4262416
attatca

SEQ ID NO: 56834 - DNA, 6 bp, Unknown
  misc_feature (1)..( 6): Matrix.003 file - promoters60/4262416
aataaa

SEQ ID NO: 56835 - DNA, 11 bp, Unknown
  misc_feature (1)..( 11): Matrix.003 file - promoters60/4262416
ataaacgcaaa

SEQ ID NO: 56836 - DNA, 8 bp, Unknown
  misc_feature (1)..( 8): Matrix.003 file - promoters60/4262416
ctgaaata

SEQ ID NO: 56837 - DNA, 6 bp, Unknown
  misc_feature (1)..( 6): Matrix.003 file - promoters60/4262416
aaacct

SEQ ID NO: 56838 - DNA, 6 bp, Unknown
  misc_feature (1)..( 6): Matrix.003 file - promoters60/4262416
aaatag

SEQ ID NO: 56839 - DNA, 6 bp, Unknown
  misc_feature (1)..( 6): Matrix.003 file - promoters60/4262416
aacacg

SEQ ID NO: 56840 - DNA, 9 bp, Unknown
  misc_feature (1)..( 9): Matrix.003 file - promoters60/4262416
aatactttg

SEQ ID NO: 56841 - DNA, 7 bp, Unknown
  misc_feature (1)..( 7): Matrix.003 file - promoters60/4262416
acaaaaa

SEQ ID NO: 56842 - DNA, 7 bp, Unknown
  misc_feature (1)..( 7): Matrix.003 file - promoters60/4262416
gtccaat

SEQ ID NO: 56843 - DNA, 7 bp, Unknown
  misc_feature (1)..( 7): Matrix.003 file - promoters60/4262416
aattcat

SEQ ID NO: 56844 - DNA, 6 bp, Unknown
  misc_feature (1)..( 6): Matrix.003 file - promoters60/4262416
acagaa

SEQ ID NO: 56845 - DNA, 9 bp, Unknown
  misc_feature (1)..( 9): Matrix.003 file - promoters60/4262420
atattttta

SEQ ID NO: 56846 - DNA, 10 bp, Unknown
  misc_feature (1)..( 10): Matrix.003 file - promoters60/4262422
tagtgttaat

SEQ ID NO: 56847 - DNA, 9 bp, Unknown
  misc_feature (1)..( 9): Matrix.003 file - promoters60/4262422
tggataaga

SEQ ID NO: 56848 - DNA, 12 bp, Unknown
  misc_feature (1)..( 12): Matrix.003 file - promoters60/4262422
taatttaattag

SEQ ID NO: 56849 - DNA, 9 bp, Unknown
  misc_feature (1)..( 9): Matrix.003 file - promoters60/4262428
aatataaat

SEQ ID NO: 56850 - DNA, 9 bp, Unknown
  misc_feature (1)..( 9): Matrix.003 file - promoters60/4262428
taatataaa

SEQ ID NO: 56851 - DNA, 14 bp, Unknown
  misc_feature (1)..( 14): Matrix.003 file - promoters60/4262446
agaaattttttaaa

SEQ ID NO: 56852 - DNA, 11 bp, Unknown
  misc_feature (1)..( 11): Matrix.003 file - promoters60/4262446
taatttctatt

SEQ ID NO: 56853 - DNA, 11 bp, Unknown
  misc_feature (1)..( 11): Matrix.003 file - promoters60/4262446
ttattaaacaa

SEQ ID NO: 56854 - DNA, 11 bp, Unknown
  misc_feature (1)..( 11): Matrix.003 file - promoters60/4262446
attttgaaata

SEQ ID NO: 56855 - DNA, 12 bp, Unknown
  misc_feature (1)..( 12): Matrix.003 file - promoters60/4262446
attttcaaatca

SEQ ID NO: 56856 - DNA, 8 bp, Unknown
  misc_feature (1)..( 8): Matrix.003 file - promoters60/4262446
aaaaattt

SEQ ID NO: 56857 - DNA, 10 bp, Unknown
  misc_feature (1)..( 10): Matrix.003 file - promoters60/4262446
tattaaaaaa

SEQ ID NO: 56858 - DNA, 12 bp, Unknown
  misc_feature (1)..( 12): Matrix.003 file - promoters60/4262446
tttataaaaaga

SEQ ID NO: 56859 - DNA, 9 bp, Unknown
  misc_feature (1)..( 9): Matrix.003 file - promoters60/4262446
caataaatt

SEQ ID NO: 56860 - DNA, 8 bp, Unknown
  misc_feature (1)..( 8): Matrix.003 file - promoters60/4262562
gagattct

SEQ ID NO: 56861 - DNA, 13 bp, Unknown
  misc_feature (1)..( 13): Matrix.003 file - promoters60/4262562
taattaaactttt

SEQ ID NO: 56862 - DNA, 9 bp, Unknown
  misc_feature (1)..( 9): Matrix.003 file - promoters60/4262562
gagtgacaa

SEQ ID NO: 56863 - DNA, 8 bp, Unknown
  misc_feature (1)..( 8): Matrix.003 file - promoters60/4262562
atatcgaa

SEQ ID NO: 56864 - DNA, 8 bp, Unknown
  misc_feature (1)..( 8): Matrix.003 file - promoters60/4262562
tacgaaat

SEQ ID NO: 56865 - DNA, 8 bp, Unknown
  misc_feature (1)..( 8): Matrix.003 file - promoters60/4262562
atacttat

SEQ ID NO: 56866 - DNA, 7 bp, Unknown
  misc_feature (1)..( 7): Matrix.003 file - promoters60/4262562
atagatt

SEQ ID NO: 56867 - DNA, 11 bp, Unknown
  misc_feature (1)..( 11): Matrix.003 file - promoters60/4265699
tttagtcaaaa

SEQ ID NO: 56868 - DNA, 9 bp, Unknown
  misc_feature (1)..( 9): Matrix.003 file - promoters60/4265699
aaaagaaat

SEQ ID NO: 56869 - DNA, 12 bp, Unknown
  misc_feature (1)..( 12): Matrix.003 file - promoters60/4267125
cttttcccaaca

SEQ ID NO: 56870 - DNA, 8 bp, Unknown
  misc_feature (1)..( 8): Matrix.003 file - promoters60/4270131
ttaataac

SEQ ID NO: 56871 - DNA, 7 bp, Unknown
  misc_feature (1)..( 7): Matrix.003 file - promoters60/4270131
gctgaga

SEQ ID NO: 56872 - DNA, 6 bp, Unknown
  misc_feature (1)..( 6): Matrix.003 file - promoters60/4270131
tttttt

SEQ ID NO: 56873 - DNA, 7 bp, Unknown
  misc_feature (1)..( 7): Matrix.003 file - promoters60/4270131
tttgttt

SEQ ID NO: 56874 - DNA, 7 bp, Unknown
  misc_feature (1)..( 7): Matrix.003 file - promoters60/4270131
tttattt

SEQ ID NO: 56875 - DNA, 7 bp, Unknown
  misc_feature (1)..( 7): Matrix.003 file - promoters60/4270131
ctaattt

SEQ ID NO: 56876 - DNA, 9 bp, Unknown
  misc_feature (1)..( 9): Matrix.003 file - promoters60/4270131
ccgaatttt

SEQ ID NO: 56877 - DNA, 6 bp, Unknown
  misc_feature (1)..( 6): Matrix.003 file - promoters60/4270131
tttatc

SEQ ID NO: 56878 - DNA, 6 bp, Unknown
  misc_feature (1)..( 6): Matrix.003 file - promoters60/4270131
agcaaa

SEQ ID NO: 56879 - DNA, 7 bp, Unknown
  misc_feature (1)..( 7): Matrix.003 file - promoters60/4270131
atgaaca

SEQ ID NO: 56880 - DNA, 6 bp, Unknown
  misc_feature (1)..( 6): Matrix.003 file - promoters60/4270131
tgtttc

SEQ ID NO: 56881 - DNA, 6 bp, Unknown
  misc_feature (1)..( 6): Matrix.003 file - promoters60/4270131
tataaa

SEQ ID NO: 56882 - DNA, 6 bp, Unknown
  misc_feature (1)..( 6): Matrix.003 file - promoters60/4270131
tataaa

SEQ ID NO: 56883 - DNA, 9 bp, Unknown
  misc_feature (1)..( 9): Matrix.003 file - promoters60/4281576
caaaaaaaa

SEQ ID NO: 56884 - DNA, 11 bp, Unknown
  misc_feature (1)..( 11): Matrix.003 file - promoters60/4281576
taattttttgt

SEQ ID NO: 56885 - DNA, 7 bp, Unknown
  misc_feature (1)..( 7): Matrix.003 file - promoters60/4281576
tcatatt

SEQ ID NO: 56886 - DNA, 9 bp, Unknown
  misc_feature (1)..( 9): Matrix.003 file - promoters60/4281576
taacaaaac

SEQ ID NO: 56887 - DNA, 8 bp, Unknown
  misc_feature (1)..( 8): Matrix.003 file - promoters60/4281576
gtctttct

SEQ ID NO: 56888 - DNA, 6 bp, Unknown
  misc_feature (1)..( 6): Matrix.003 file - promoters60/4281645
tatttt

SEQ ID NO: 56889 - DNA, 7 bp, Unknown
  misc_feature (1)..( 7): Matrix.003 file - promoters60/4281645
aaaacat

SEQ ID NO: 56890 - DNA, 8 bp, Unknown
  misc_feature (1)..( 8): Matrix.003 file - promoters60/4281645
aatatgat

SEQ ID NO: 56891 - DNA, 7 bp, Unknown
  misc_feature (1)..( 7): Matrix.003 file - promoters60/4281645
gatcaat

SEQ ID NO: 56892 - DNA, 6 bp, Unknown
  misc_feature (1)..( 6): Matrix.003 file - promoters60/4281645
aaattt

SEQ ID NO: 56893 - DNA, 6 bp, Unknown
  misc_feature (1)..( 6): Matrix.003 file - promoters60/4281645
agaaaa

SEQ ID NO: 56894 - DNA, 8 bp, Unknown
  misc_feature (1)..( 8): Matrix.003 file - promoters60/4281645
agaaaatt

SEQ ID NO: 56895 - DNA, 10 bp, Unknown
  misc_feature (1)..( 10): Matrix.003 file - promoters60/4281645
aacaaaaaaa

SEQ ID NO: 56896 - DNA, 6 bp, Unknown
  misc_feature (1)..( 6): Matrix.003 file - promoters60/4281645
tgaaaa

SEQ ID NO: 56897 - DNA, 7 bp, Unknown
  misc_feature (1)..( 7): Matrix.003 file - promoters60/4281645
tgtgata

SEQ ID NO: 56898 - DNA, 7 bp, Unknown
  misc_feature (1)..( 7): Matrix.003 file - promoters60/4281645
aaacaac

SEQ ID NO: 56899 - DNA, 8 bp, Unknown
  misc_feature (1)..( 8): Matrix.003 file - promoters60/4281645
ccggagaa

SEQ ID NO: 56900 - DNA, 7 bp, Unknown
  misc_feature (1)..( 7): Matrix.003 file - promoters60/4281645
gtaactc

SEQ ID NO: 56901 - DNA, 7 bp, Unknown
  misc_feature (1)..( 7): Matrix.003 file - promoters60/4281645
gtttatg

SEQ ID NO: 56902 - DNA, 8 bp, Unknown
  misc_feature (1)..( 8): Matrix.003 file - promoters60/4281645
aactgaaa

SEQ ID NO: 56903 - DNA, 6 bp, Unknown
  misc_feature (1)..( 6): Matrix.003 file - promoters60/4281645
caaaaa

SEQ ID NO: 56904 - DNA, 7 bp, Unknown
  misc_feature (1)..( 7): Matrix.003 file - promoters60/4281645
aaaatat

SEQ ID NO: 56905 - DNA, 7 bp, Unknown
  misc_feature (1)..( 7): Matrix.003 file - promoters60/4281645
gtctctc

SEQ ID NO: 56906 - DNA, 10 bp, Unknown
  misc_feature (1)..( 10): Matrix.003 file - promoters60/4281662
actttataaa

SEQ ID NO: 56907 - DNA, 8 bp, Unknown
  misc_feature (1)..( 8): Matrix.003 file - promoters60/4281662
aagatagt

SEQ ID NO: 56908 - DNA, 8 bp, Unknown
  misc_feature (1)..( 8): Matrix.003 file - promoters60/4281662
attatgtc

SEQ ID NO: 56909 - DNA, 9 bp, Unknown
  misc_feature (1)..( 9): Matrix.003 file - promoters60/4281662
ctttaaaat

SEQ ID NO: 56910 - DNA, 7 bp, Unknown
  misc_feature (1)..( 7): Matrix.003 file - promoters60/4281662
tccattt

SEQ ID NO: 56911 - DNA, 7 bp, Unknown
  misc_feature (1)..( 7): Matrix.003 file - promoters60/4281683
aacctat

SEQ ID NO: 56912 - DNA, 6 bp, Unknown
  misc_feature (1)..( 6): Matrix.003 file - promoters60/4281683
cttttc

SEQ ID NO: 56913 - DNA, 6 bp, Unknown
  misc_feature (1)..( 6): Matrix.003 file - promoters60/4281683
cttgaa

SEQ ID NO: 56914 - DNA, 9 bp, Unknown
  misc_feature (1)..( 9): Matrix.003 file - promoters60/4281683
cacaatccc

SEQ ID NO: 56915 - DNA, 6 bp, Unknown
  misc_feature (1)..( 6): Matrix.003 file - promoters60/4281683
agaaaa

SEQ ID NO: 56916 - DNA, 12 bp, Unknown
  misc_feature (1)..( 12): Matrix.003 file - promoters60/4281683
cttttcaatttc

SEQ ID NO: 56917 - DNA, 7 bp, Unknown
  misc_feature (1)..( 7): Matrix.003 file - promoters60/4281683
ctacatt

SEQ ID NO: 56918 - DNA, 7 bp, Unknown
  misc_feature (1)..( 7): Matrix.003 file - promoters60/4281683
tttgtat

SEQ ID NO: 56919 - DNA, 6 bp, Unknown
  misc_feature (1)..( 6): Matrix.003 file - promoters60/4281683
atttaa

SEQ ID NO: 56920 - DNA, 6 bp, Unknown
  misc_feature (1)..( 6): Matrix.003 file - promoters60/4281683
aactat

SEQ ID NO: 56921 - DNA, 7 bp, Unknown
  misc_feature (1)..( 7): Matrix.003 file - promoters60/4281683
attcggt

SEQ ID NO: 56922 - DNA, 6 bp, Unknown
  misc_feature (1)..( 6): Matrix.003 file - promoters60/4281683
caacca

SEQ ID NO: 56923 - DNA, 6 bp, Unknown
  misc_feature (1)..( 6): Matrix.003 file - promoters60/4281683
ggctga

SEQ ID NO: 56924 - DNA, 11 bp, Unknown
  misc_feature (1)..( 11): Matrix.003 file - promoters60/4281683
agggtctcaga

SEQ ID NO: 56925 - DNA, 6 bp, Unknown
  misc_feature (1)..( 6): Matrix.003 file - promoters60/4281683
agattt

SEQ ID NO: 56926 - DNA, 8 bp, Unknown
  misc_feature (1)..( 8): Matrix.003 file - promoters60/4281690
aaaacaaa

SEQ ID NO: 56927 - DNA, 8 bp, Unknown
  misc_feature (1)..( 8): Matrix.003 file - promoters60/4281690
cctctata

SEQ ID NO: 56928 - DNA, 6 bp, Unknown
  misc_feature (1)..( 6): Matrix.003 file - promoters60/4281690
aataaa

SEQ ID NO: 56929 - DNA, 12 bp, Unknown
  misc_feature (1)..( 12): Matrix.003 file - promoters60/4281690
attacaaaatat

SEQ ID NO: 56930 - DNA, 8 bp, Unknown
  misc_feature (1)..( 8): Matrix.003 file - promoters60/4281711
gaataaaa

SEQ ID NO: 56931 - DNA, 9 bp, Unknown
  misc_feature (1)..( 9): Matrix.003 file - promoters60/4281737
aacaaaaaa

SEQ ID NO: 56932 - DNA, 9 bp, Unknown
  misc_feature (1)..( 9): Matrix.003 file - promoters60/4281737
aaatgtatt

SEQ ID NO: 56933 - DNA, 9 bp, Unknown
  misc_feature (1)..( 9): Matrix.003 file - promoters60/4281737
aagtttttg

SEQ ID NO: 56934 - DNA, 14 bp, Unknown
  misc_feature (1)..( 14): Matrix.003 file - promoters60/4281737
aatataaatggaat

SEQ ID NO: 56935 - DNA, 14 bp, Unknown
  misc_feature (1)..( 14): Matrix.003 file - promoters60/4281737
atatataaaaatat

SEQ ID NO: 56936 - DNA, 9 bp, Unknown
  misc_feature (1)..( 9): Matrix.003 file - promoters60/4281737
ttactccaa

SEQ ID NO: 56937 - DNA, 14 bp, Unknown
  misc_feature (1)..( 14): Matrix.003 file - promoters60/4281737
caaacctcatttaa

SEQ ID NO: 56938 - DNA, 12 bp, Unknown
  misc_feature (1)..( 12): Matrix.003 file - promoters60/4281737
agaatttaattt

SEQ ID NO: 56939 - DNA, 10 bp, Unknown
  misc_feature (1)..( 10): Matrix.003 file - promoters60/4281744
gaaatagatt

SEQ ID NO: 56940 - DNA, 9 bp, Unknown
  misc_feature (1)..( 9): Matrix.003 file - promoters60/4281773
tatataaac

SEQ ID NO: 56941 - DNA, 11 bp, Unknown
  misc_feature (1)..( 11): Matrix.003 file - promoters60/4281773
taaaataaatt

SEQ ID NO: 56942 - DNA, 7 bp, Unknown
  misc_feature (1)..( 7): Matrix.003 file - promoters60/4281799
gcaaaag

SEQ ID NO: 56943 - DNA, 8 bp, Unknown
  misc_feature (1)..( 8): Matrix.003 file - promoters60/4281799
taaacccg

SEQ ID NO: 56944 - DNA, 8 bp, Unknown
  misc_feature (1)..( 8): Matrix.003 file - promoters60/4281799
acaaattt

SEQ ID NO: 56945 - DNA, 6 bp, Unknown
  misc_feature (1)..( 6): Matrix.003 file - promoters60/4281799
ccatta

SEQ ID NO: 56946 - DNA, 7 bp, Unknown
  misc_feature (1)..( 7): Matrix.003 file - promoters60/4281799
attatta

SEQ ID NO: 56947 - DNA, 8 bp, Unknown
  misc_feature (1)..( 8): Matrix.003 file - promoters60/4281799
actaaaaa

SEQ ID NO: 56948 - DNA, 7 bp, Unknown
  misc_feature (1)..( 7): Matrix.003 file - promoters60/4281799
atagatt

SEQ ID NO: 56949 - DNA, 6 bp, Unknown
  misc_feature (1)..( 6): Matrix.003 file - promoters60/4281799
agcaaa

SEQ ID NO: 56950 - DNA, 7 bp, Unknown
  misc_feature (1)..( 7): Matrix.003 file - promoters60/4281799
aaaactt

SEQ ID NO: 56951 - DNA, 7 bp, Unknown
  misc_feature (1)..( 7): Matrix.003 file - promoters60/4281799
aatgtgg

SEQ ID NO: 56952 - DNA, 10 bp, Unknown
  misc_feature (1)..( 10): Matrix.003 file - promoters60/4281799
ttgaaattca

SEQ ID NO: 56953 - DNA, 11 bp, Unknown
  misc_feature (1)..( 11): Matrix.003 file - promoters60/4281799
gttttaataaa

SEQ ID NO: 56954 - DNA, 9 bp, Unknown
  misc_feature (1)..( 9): Matrix.003 file - promoters60/4281799
aaatcattt

SEQ ID NO: 56955 - DNA, 7 bp, Unknown
  misc_feature (1)..( 7): Matrix.003 file - promoters60/4281799
ttttgta

SEQ ID NO: 56956 - DNA, 7 bp, Unknown
  misc_feature (1)..( 7): Matrix.003 file - promoters60/4281799
tgtaaat

SEQ ID NO: 56957 - DNA, 7 bp, Unknown
  misc_feature (1)..( 7): Matrix.003 file - promoters60/4281799
tttggta

SEQ ID NO: 56958 - DNA, 7 bp, Unknown
  misc_feature (1)..( 7): Matrix.003 file - promoters60/4281799
aaataga

SEQ ID NO: 56959 - DNA, 7 bp, Unknown
  misc_feature (1)..( 7): Matrix.003 file - promoters60/4281799
tttccaa

SEQ ID NO: 56960 - DNA, 6 bp, Unknown
  misc_feature (1)..( 6): Matrix.003 file - promoters60/4281799
aaaaat

SEQ ID NO: 56961 - DNA, 9 bp, Unknown
  misc_feature (1)..( 9): Matrix.003 file - promoters60/4281799
aaaagccct

SEQ ID NO: 56962 - DNA, 9 bp, Unknown
  misc_feature (1)..( 9): Matrix.003 file - promoters60/4281799
tattgaaac

SEQ ID NO: 56963 - DNA, 10 bp, Unknown
  misc_feature (1)..( 10): Matrix.003 file - promoters60/4281837
cttgtaatct

SEQ ID NO: 56964 - DNA, 8 bp, Unknown
  misc_feature (1)..( 8): Matrix.003 file - promoters60/4281837
tatattac

SEQ ID NO: 56965 - DNA, 9 bp, Unknown
  misc_feature (1)..( 9): Matrix.003 file - promoters60/4281837
ttgtctgtg

SEQ ID NO: 56966 - DNA, 10 bp, Unknown
  misc_feature (1)..( 10): Matrix.003 file - promoters60/4281837
taaaaaaata

SEQ ID NO: 56967 - DNA, 12 bp, Unknown
  misc_feature (1)..( 12): Matrix.003 file - promoters60/4281837
tactatattact

SEQ ID NO: 56968 - DNA, 9 bp, Unknown
  misc_feature (1)..( 9): Matrix.003 file - promoters60/4281837
gaaacaaaa

SEQ ID NO: 56969 - DNA, 9 bp, Unknown
  misc_feature (1)..( 9): Matrix.003 file - promoters60/4281837
ttattttta

SEQ ID NO: 56970 - DNA, 9 bp, Unknown
  misc_feature (1)..( 9): Matrix.003 file - promoters60/4281876
aataaataa

SEQ ID NO: 56971 - DNA, 11 bp, Unknown
  misc_feature (1)..( 11): Matrix.003 file - promoters60/4281925
aaaataaaaca

SEQ ID NO: 56972 - DNA, 10 bp, Unknown
  misc_feature (1)..( 10): Matrix.003 file - promoters60/4281925
taaatttttt

SEQ ID NO: 56973 - DNA, 10 bp, Unknown
  misc_feature (1)..( 10): Matrix.003 file - promoters60/4281925
tacatgatat

SEQ ID NO: 56974 - DNA, 11 bp, Unknown
  misc_feature (1)..( 11): Matrix.003 file - promoters60/4281925
ttataaaaata

SEQ ID NO: 56975 - DNA, 12 bp, Unknown
  misc_feature (1)..( 12): Matrix.003 file - promoters60/4281925
taatttacaaat

SEQ ID NO: 56976 - DNA, 15 bp, Unknown
  misc_feature (1)..( 15): Matrix.003 file - promoters60/4281925
atcaaaatttgtttt

SEQ ID NO: 56977 - DNA, 11 bp, Unknown
  misc_feature (1)..( 11): Matrix.003 file - promoters60/4281925
aaaaatttttt

SEQ ID NO: 56978 - DNA, 12 bp, Unknown
  misc_feature (1)..( 12): Matrix.003 file - promoters60/4281961
tagaaaaaacag

SEQ ID NO: 56979 - DNA, 12 bp, Unknown
  misc_feature (1)..( 12): Matrix.003 file - promoters60/4281961
acaaacattaca

SEQ ID NO: 56980 - DNA, 10 bp, Unknown
  misc_feature (1)..( 10): Matrix.003 file - promoters60/4281961
tcgttaaaag

SEQ ID NO: 56981 - DNA, 6 bp, Unknown
  misc_feature (1)..( 6): Matrix.003 file - promoters60/4281994
aatttt

SEQ ID NO: 56982 - DNA, 6 bp, Unknown
  misc_feature (1)..( 6): Matrix.003 file - promoters60/4281994
ttcaaa

SEQ ID NO: 56983 - DNA, 7 bp, Unknown
  misc_feature (1)..( 7): Matrix.003 file - promoters60/4281994
attcaaa

SEQ ID NO: 56984 - DNA, 7 bp, Unknown
  misc_feature (1)..( 7): Matrix.003 file - promoters60/4281994
aaacaaa

SEQ ID NO: 56985 - DNA, 7 bp, Unknown
  misc_feature (1)..( 7): Matrix.003 file - promoters60/4281994
aatattt

SEQ ID NO: 56986 - DNA, 8 bp, Unknown
  misc_feature (1)..( 8): Matrix.003 file - promoters60/4281994
agtagaat

SEQ ID NO: 56987 - DNA, 6 bp, Unknown
  misc_feature (1)..( 6): Matrix.003 file - promoters60/4281994
tttaaa

SEQ ID NO: 56988 - DNA, 9 bp, Unknown
  misc_feature (1)..( 9): Matrix.003 file - promoters60/4281994
ataaaatta

SEQ ID NO: 56989 - DNA, 9 bp, Unknown
  misc_feature (1)..( 9): Matrix.003 file - promoters60/4281994
ataaaatta

SEQ ID NO: 56990 - DNA, 9 bp, Unknown
  misc_feature (1)..( 9): Matrix.003 file - promoters60/4281994
attttaaag

SEQ ID NO: 56991 - DNA, 7 bp, Unknown
  misc_feature (1)..( 7): Matrix.003 file - promoters60/4281994
ataatta

SEQ ID NO: 56992 - DNA, 9 bp, Unknown
  misc_feature (1)..( 9): Matrix.003 file - promoters60/4281994
tataaatta

SEQ ID NO: 56993 - DNA, 6 bp, Unknown
  misc_feature (1)..( 6): Matrix.003 file - promoters60/4281994
aaatta

SEQ ID NO: 56994 - DNA, 8 bp, Unknown
  misc_feature (1)..( 8): Matrix.003 file - promoters60/4281994
tattaata

SEQ ID NO: 56995 - DNA, 9 bp, Unknown
  misc_feature (1)..( 9): Matrix.003 file - promoters60/4281994
ataacttat

SEQ ID NO: 56996 - DNA, 8 bp, Unknown
  misc_feature (1)..( 8): Matrix.003 file - promoters60/4281994
aaaaagaa

SEQ ID NO: 56997 - DNA, 6 bp, Unknown
  misc_feature (1)..( 6): Matrix.003 file - promoters60/4281994
agtaaa

SEQ ID NO: 56998 - DNA, 6 bp, Unknown
  misc_feature (1)..( 6): Matrix.003 file - promoters60/4281994
aaaaat

SEQ ID NO: 56999 - DNA, 6 bp, Unknown
  misc_feature (1)..( 6): Matrix.003 file - promoters60/4281994
aataaa

SEQ ID NO: 57000 - DNA, 6 bp, Unknown
  misc_feature (1)..( 6): Matrix.003 file - promoters60/4281994
taattt

SEQ ID NO: 57001 - DNA, 7 bp, Unknown
  misc_feature (1)..( 7): Matrix.003 file - promoters60/4281994
attcata

SEQ ID NO: 57002 - DNA, 6 bp, Unknown
  misc_feature (1)..( 6): Matrix.003 file - promoters60/4281994
ctatat

SEQ ID NO: 57003 - DNA, 6 bp, Unknown
  misc_feature (1)..( 6): Matrix.003 file - promoters60/4281994
tatata

SEQ ID NO: 57004 - DNA, 6 bp, Unknown
  misc_feature (1)..( 6): Matrix.003 file - promoters60/4281994
ttagaa

SEQ ID NO: 57005 - DNA, 15 bp, Unknown
  misc_feature (1)..( 15): Matrix.003 file - promoters60/4281997
aacaaaaaaagttta

SEQ ID NO: 57006 - DNA, 15 bp, Unknown
  misc_feature (1)..( 15): Matrix.003 file - promoters60/4281997
atcactgatccaaca

SEQ ID NO: 57007 - DNA, 7 bp, Unknown
  misc_feature (1)..( 7): Matrix.003 file - promoters60/4281997
aattatc

SEQ ID NO: 57008 - DNA, 10 bp, Unknown
  misc_feature (1)..( 10): Matrix.003 file - promoters60/4282072
ctataatgaa

SEQ ID NO: 57009 - DNA, 6 bp, Unknown
  misc_feature (1)..( 6): Matrix.003 file - promoters60/4282072
atttgt

SEQ ID NO: 57010 - DNA, 8 bp, Unknown
  misc_feature (1)..( 8): Matrix.003 file - promoters60/4282072
tatgtttg

SEQ ID NO: 57011 - DNA, 6 bp, Unknown
  misc_feature (1)..( 6): Matrix.003 file - promoters60/4282072
actata

SEQ ID NO: 57012 - DNA, 7 bp, Unknown
  misc_feature (1)..( 7): Matrix.003 file - promoters60/4282072
caaaaac

SEQ ID NO: 57013 - DNA, 7 bp, Unknown
  misc_feature (1)..( 7): Matrix.003 file - promoters60/4282072
caaaatc

SEQ ID NO: 57014 - DNA, 9 bp, Unknown
  misc_feature (1)..( 9): Matrix.003 file - promoters60/4282072
actacaaac

SEQ ID NO: 57015 - DNA, 6 bp, Unknown
  misc_feature (1)..( 6): Matrix.003 file - promoters60/4282072
aaaact

SEQ ID NO: 57016 - DNA, 8 bp, Unknown
  misc_feature (1)..( 8): Matrix.003 file - promoters60/4282072
aacaatat

SEQ ID NO: 57017 - DNA, 8 bp, Unknown
  misc_feature (1)..( 8): Matrix.003 file - promoters60/4282072
aggcaaat

SEQ ID NO: 57018 - DNA, 10 bp, Unknown
  misc_feature (1)..( 10): Matrix.003 file - promoters60/4282072
cagtgtcgga

SEQ ID NO: 57019 - DNA, 9 bp, Unknown
  misc_feature (1)..( 9): Matrix.003 file - promoters60/4282072
ttttgatta

SEQ ID NO: 57020 - DNA, 6 bp, Unknown
  misc_feature (1)..( 6): Matrix.003 file - promoters60/4282072
taaaca

SEQ ID NO: 57021 - DNA, 7 bp, Unknown
  misc_feature (1)..( 7): Matrix.003 file - promoters60/4282072
taaatct

SEQ ID NO: 57022 - DNA, 8 bp, Unknown
  misc_feature (1)..( 8): Matrix.003 file - promoters60/4282072
tactaact

SEQ ID NO: 57023 - DNA, 10 bp, Unknown
  misc_feature (1)..( 10): Matrix.003 file - promoters60/4282072
aaaaataaag

SEQ ID NO: 57024 - DNA, 7 bp, Unknown
  misc_feature (1)..( 7): Matrix.003 file - promoters60/4282072
agaaaag

SEQ ID NO: 57025 - DNA, 9 bp, Unknown
  misc_feature (1)..( 9): Matrix.003 file - promoters60/4282072
caaaaaaga

SEQ ID NO: 57026 - DNA, 10 bp, Unknown
  misc_feature (1)..( 10): Matrix.003 file - promoters60/4282072
attaaaaaaa

SEQ ID NO: 57027 - DNA, 7 bp, Unknown
  misc_feature (1)..( 7): Matrix.003 file - promoters60/4282126
tctgcaa

SEQ ID NO: 57028 - DNA, 8 bp, Unknown
  misc_feature (1)..( 8): Matrix.003 file - promoters60/4282126
cataaaca

SEQ ID NO: 57029 - DNA, 8 bp, Unknown
  misc_feature (1)..( 8): Matrix.003 file - promoters60/4282126
tacaattt

SEQ ID NO: 57030 - DNA, 6 bp, Unknown
  misc_feature (1)..( 6): Matrix.003 file - promoters60/4282126
aaacat

SEQ ID NO: 57031 - DNA, 6 bp, Unknown
  misc_feature (1)..( 6): Matrix.003 file - promoters60/4282126
taattg

SEQ ID NO: 57032 - DNA, 7 bp, Unknown
  misc_feature (1)..( 7): Matrix.003 file - promoters60/4282126
ttagcat

SEQ ID NO: 57033 - DNA, 11 bp, Unknown
  misc_feature (1)..( 11): Matrix.003 file - promoters60/4282126
aatttattgtt

SEQ ID NO: 57034 - DNA, 8 bp, Unknown
  misc_feature (1)..( 8): Matrix.003 file - promoters60/4282126
tttgtaat

SEQ ID NO: 57035 - DNA, 9 bp, Unknown
  misc_feature (1)..( 9): Matrix.003 file - promoters60/4282126
aagcaaatc

SEQ ID NO: 57036 - DNA, 7 bp, Unknown
  misc_feature (1)..( 7): Matrix.003 file - promoters60/4282126
tttgttt

SEQ ID NO: 57037 - DNA, 7 bp, Unknown
  misc_feature (1)..( 7): Matrix.003 file - promoters60/4282126
tttagat

SEQ ID NO: 57038 - DNA, 8 bp, Unknown
  misc_feature (1)..( 8): Matrix.003 file - promoters60/4282126
aagtcaga

SEQ ID NO: 57039 - DNA, 7 bp, Unknown
  misc_feature (1)..( 7): Matrix.003 file - promoters60/4282126
aaagtta

SEQ ID NO: 57040 - DNA, 7 bp, Unknown
  misc_feature (1)..( 7): Matrix.003 file - promoters60/4282126
ctcagac

SEQ ID NO: 57041 - DNA, 6 bp, Unknown
  misc_feature (1)..( 6): Matrix.003 file - promoters60/4282126
cgagag

SEQ ID NO: 57042 - DNA, 8 bp, Unknown
  misc_feature (1)..( 8): Matrix.003 file - promoters60/4282126
ttgggaga

SEQ ID NO: 57043 - DNA, 6 bp, Unknown
  misc_feature (1)..( 6): Matrix.003 file - promoters60/4282126
gtgaca

SEQ ID NO: 57044 - DNA, 7 bp, Unknown
  misc_feature (1)..( 7): Matrix.003 file - promoters60/4282126
agaccaa

SEQ ID NO: 57045 - DNA, 9 bp, Unknown
  misc_feature (1)..( 9): Matrix.003 file - promoters60/4282126
aaactaaac

SEQ ID NO: 57046 - DNA, 7 bp, Unknown
  misc_feature (1)..( 7): Matrix.003 file - promoters60/4282126
agaagaa

SEQ ID NO: 57047 - DNA, 7 bp, Unknown
  misc_feature (1)..( 7): Matrix.003 file - promoters60/4282145
tcaaatg

SEQ ID NO: 57048 - DNA, 6 bp, Unknown
  misc_feature (1)..( 6): Matrix.003 file - promoters60/4282145
cataat

SEQ ID NO: 57049 - DNA, 10 bp, Unknown
  misc_feature (1)..( 10): Matrix.003 file - promoters60/4282145
gaaaatgatt

SEQ ID NO: 57050 - DNA, 8 bp, Unknown
  misc_feature (1)..( 8): Matrix.003 file - promoters60/4282145
attagacg

SEQ ID NO: 57051 - DNA, 6 bp, Unknown
  misc_feature (1)..( 6): Matrix.003 file - promoters60/4282145
caaaaa

SEQ ID NO: 57052 - DNA, 8 bp, Unknown
  misc_feature (1)..( 8): Matrix.003 file - promoters60/4282145
aaactaat

SEQ ID NO: 57053 - DNA, 7 bp, Unknown
  misc_feature (1)..( 7): Matrix.003 file - promoters60/4282145
gttaaac

SEQ ID NO: 57054 - DNA, 7 bp, Unknown
  misc_feature (1)..( 7): Matrix.003 file - promoters60/4282145
attttat

SEQ ID NO: 57055 - DNA, 7 bp, Unknown
  misc_feature (1)..( 7): Matrix.003 file - promoters60/4282145
tttaaaa

SEQ ID NO: 57056 - DNA, 6 bp, Unknown
  misc_feature (1)..( 6): Matrix.003 file - promoters60/4282145
aatttg

SEQ ID NO: 57057 - DNA, 7 bp, Unknown
  misc_feature (1)..( 7): Matrix.003 file - promoters60/4282145
ttaataa

SEQ ID NO: 57058 - DNA, 7 bp, Unknown
  misc_feature (1)..( 7): Matrix.003 file - promoters60/4282145
tacaata

SEQ ID NO: 57059 - DNA, 8 bp, Unknown
  misc_feature (1)..( 8): Matrix.003 file - promoters60/4282145
acaaaaca

SEQ ID NO: 57060 - DNA, 6 bp, Unknown
  misc_feature (1)..( 6): Matrix.003 file - promoters60/4282145
gacaaa

SEQ ID NO: 57061 - DNA, 7 bp, Unknown
  misc_feature (1)..( 7): Matrix.003 file - promoters60/4282145
ataataa

SEQ ID NO: 57062 - DNA, 6 bp, Unknown
  misc_feature (1)..( 6): Matrix.003 file - promoters60/4282145
cttata

SEQ ID NO: 57063 - DNA, 9 bp, Unknown
  misc_feature (1)..( 9): Matrix.003 file - promoters60/4282145
attttaaaa

SEQ ID NO: 57064 - DNA, 8 bp, Unknown
  misc_feature (1)..( 8): Matrix.003 file - promoters60/4282145
aaattaaa

SEQ ID NO: 57065 - DNA, 6 bp, Unknown
  misc_feature (1)..( 6): Matrix.003 file - promoters60/4282145
ctacat

SEQ ID NO: 57066 - DNA, 6 bp, Unknown
  misc_feature (1)..( 6): Matrix.003 file - promoters60/4282145
aaatta

SEQ ID NO: 57067 - DNA, 9 bp, Unknown
  misc_feature (1)..( 9): Matrix.003 file - promoters60/4282145
atccatata

SEQ ID NO: 57068 - DNA, 7 bp, Unknown
  misc_feature (1)..( 7): Matrix.003 file - promoters60/4282145
tataaaa

SEQ ID NO: 57069 - DNA, 12 bp, Unknown
  misc_feature (1)..( 12): Matrix.003 file - promoters60/4282186
ccgatcttgtgc

SEQ ID NO: 57070 - DNA, 6 bp, Unknown
  misc_feature (1)..( 6): Matrix.003 file - promoters60/4282186
gcgtca

SEQ ID NO: 57071 - DNA, 7 bp, Unknown
  misc_feature (1)..( 7): Matrix.003 file - promoters60/4282186
caaactt

SEQ ID NO: 57072 - DNA, 8 bp, Unknown
  misc_feature (1)..( 8): Matrix.003 file - promoters60/4282186
caaaatct

SEQ ID NO: 57073 - DNA, 6 bp, Unknown
  misc_feature (1)..( 6): Matrix.003 file - promoters60/4282186
tacaca

SEQ ID NO: 57074 - DNA, 7 bp, Unknown
  misc_feature (1)..( 7): Matrix.003 file - promoters60/4282186
ttggttt

SEQ ID NO: 57075 - DNA, 6 bp, Unknown
  misc_feature (1)..( 6): Matrix.003 file - promoters60/4282186
ttggtt

SEQ ID NO: 57076 - DNA, 9 bp, Unknown
  misc_feature (1)..( 9): Matrix.003 file - promoters60/4282186
agccaatca

SEQ ID NO: 57077 - DNA, 6 bp, Unknown
  misc_feature (1)..( 6): Matrix.003 file - promoters60/4282186
tgttta

SEQ ID NO: 57078 - DNA, 6 bp, Unknown
  misc_feature (1)..( 6): Matrix.003 file - promoters60/4282186
tgaatt

SEQ ID NO: 57079 - DNA, 8 bp, Unknown
  misc_feature (1)..( 8): Matrix.003 file - promoters60/4282186
ttaaaaga

SEQ ID NO: 57080 - DNA, 8 bp, Unknown
  misc_feature (1)..( 8): Matrix.003 file - promoters60/4282186
tgtcgttc

SEQ ID NO: 57081 - DNA, 8 bp, Unknown
  misc_feature (1)..( 8): Matrix.003 file - promoters60/4282186
caaagaaa

SEQ ID NO: 57082 - DNA, 6 bp, Unknown
  misc_feature (1)..( 6): Matrix.003 file - promoters60/4282186
gaaagt

SEQ ID NO: 57083 - DNA, 15 bp, Unknown
  misc_feature (1)..( 15): Matrix.003 file - promoters60/4282186
atcaaaatagaaaat

SEQ ID NO: 57084 - DNA, 7 bp, Unknown
  misc_feature (1)..( 7): Matrix.003 file - promoters60/4282186
gaaacaa

SEQ ID NO: 57085 - DNA, 8 bp, Unknown
  misc_feature (1)..( 8): Matrix.003 file - promoters60/4282186
tataaaaa

SEQ ID NO: 57086 - DNA, 8 bp, Unknown
  misc_feature (1)..( 8): Matrix.003 file - promoters60/4282186
tctaatct

SEQ ID NO: 57087 - DNA, 7 bp, Unknown
  misc_feature (1)..( 7): Matrix.003 file - promoters60/4282186
aataaaa

SEQ ID NO: 57088 - DNA, 9 bp, Unknown
  misc_feature (1)..( 9): Matrix.003 file - promoters60/4282202
aaagtgttg

SEQ ID NO: 57089 - DNA, 6 bp, Unknown
  misc_feature (1)..( 6): Matrix.003 file - promoters60/4282202
gagaat

SEQ ID NO: 57090 - DNA, 8 bp, Unknown
  misc_feature (1)..( 8): Matrix.003 file - promoters60/4282202
tctaatgg

SEQ ID NO: 57091 - DNA, 8 bp, Unknown
  misc_feature (1)..( 8): Matrix.003 file - promoters60/4282202
caatttgt

SEQ ID NO: 57092 - DNA, 15 bp, Unknown
  misc_feature (1)..( 15): Matrix.003 file - promoters60/4282202
aaataaaaaacatac

SEQ ID NO: 57093 - DNA, 6 bp, Unknown
  misc_feature (1)..( 6): Matrix.003 file - promoters60/4282202
cctcca

SEQ ID NO: 57094 - DNA, 6 bp, Unknown
  misc_feature (1)..( 6): Matrix.003 file - promoters60/4282202
gttttc

SEQ ID NO: 57095 - DNA, 10 bp, Unknown
  misc_feature (1)..( 10): Matrix.003 file - promoters60/4282202
agaaaacttt

SEQ ID NO: 57096 - DNA, 8 bp, Unknown
  misc_feature (1)..( 8): Matrix.003 file - promoters60/4282202
ttaacgta

SEQ ID NO: 57097 - DNA, 6 bp, Unknown
  misc_feature (1)..( 6): Matrix.003 file - promoters60/4282202
ttgatt

SEQ ID NO: 57098 - DNA, 7 bp, Unknown
  misc_feature (1)..( 7): Matrix.003 file - promoters60/4282202
gttgttg

SEQ ID NO: 57099 - DNA, 6 bp, Unknown
  misc_feature (1)..( 6): Matrix.003 file - promoters60/4282202
aaatta

SEQ ID NO: 57100 - DNA, 8 bp, Unknown
  misc_feature (1)..( 8): Matrix.003 file - promoters60/4282202
tttaatta

SEQ ID NO: 57101 - DNA, 6 bp, Unknown
  misc_feature (1)..( 6): Matrix.003 file - promoters60/4282202
caaaac

SEQ ID NO: 57102 - DNA, 6 bp, Unknown
  misc_feature (1)..( 6): Matrix.003 file - promoters60/4282202
ttctta

SEQ ID NO: 57103 - DNA, 6 bp, Unknown
  misc_feature (1)..( 6): Matrix.003 file - promoters60/4282202
aacctc

SEQ ID NO: 57104 - DNA, 6 bp, Unknown
  misc_feature (1)..( 6): Matrix.003 file - promoters60/4282202
ttggat

SEQ ID NO: 57105 - DNA, 6 bp, Unknown
  misc_feature (1)..( 6): Matrix.003 file - promoters60/4282202
tcaaca

SEQ ID NO: 57106 - DNA, 6 bp, Unknown
  misc_feature (1)..( 6): Matrix.003 file - promoters60/4282202
gtttgt

SEQ ID NO: 57107 - DNA, 6 bp, Unknown
  misc_feature (1)..( 6): Matrix.003 file - promoters60/4282202
cttcac

SEQ ID NO: 57108 - DNA, 9 bp, Unknown
  misc_feature (1)..( 9): Matrix.003 file - promoters60/4282308
taatattat

SEQ ID NO: 57109 - DNA, 8 bp, Unknown
  misc_feature (1)..( 8): Matrix.003 file - promoters60/4282308
gttacaat

SEQ ID NO: 57110 - DNA, 7 bp, Unknown
  misc_feature (1)..( 7): Matrix.003 file - promoters60/4282308
ggaaatt

SEQ ID NO: 57111 - DNA, 10 bp, Unknown
  misc_feature (1)..( 10): Matrix.003 file - promoters60/4282308
tgattattac

SEQ ID NO: 57112 - DNA, 13 bp, Unknown
  misc_feature (1)..( 13): Matrix.003 file - promoters60/4282308
aataagttatata

SEQ ID NO: 57113 - DNA, 8 bp, Unknown
  misc_feature (1)..( 8): Matrix.003 file - promoters60/4282308
acaacaca

SEQ ID NO: 57114 - DNA, 6 bp, Unknown
  misc_feature (1)..( 6): Matrix.003 file - promoters60/4282308
tttttt

SEQ ID NO: 57115 - DNA, 6 bp, Unknown
  misc_feature (1)..( 6): Matrix.003 file - promoters60/4282308
tcaaaa

SEQ ID NO: 57116 - DNA, 6 bp, Unknown
  misc_feature (1)..( 6): Matrix.003 file - promoters60/4282308
aagact

SEQ ID NO: 57117 - DNA, 8 bp, Unknown
  misc_feature (1)..( 8): Matrix.003 file - promoters60/4282308
aatctctc

SEQ ID NO: 57118 - DNA, 8 bp, Unknown
  misc_feature (1)..( 8): Matrix.003 file - promoters60/4282308
ttgaaatg

SEQ ID NO: 57119 - DNA, 7 bp, Unknown
  misc_feature (1)..( 7): Matrix.003 file - promoters60/4282308
aaataaa

SEQ ID NO: 57120 - DNA, 7 bp, Unknown
  misc_feature (1)..( 7): Matrix.003 file - promoters60/4282308
atcatgt

SEQ ID NO: 57121 - DNA, 11 bp, Unknown
  misc_feature (1)..( 11): Matrix.003 file - promoters60/4282308
ttcctcaaaca

SEQ ID NO: 57122 - DNA, 7 bp, Unknown
  misc_feature (1)..( 7): Matrix.003 file - promoters60/4282308
tccatca

SEQ ID NO: 57123 - DNA, 6 bp, Unknown
  misc_feature (1)..( 6): Matrix.003 file - promoters60/4282308
attcat

SEQ ID NO: 57124 - DNA, 7 bp, Unknown
  misc_feature (1)..( 7): Matrix.003 file - promoters60/4282308
acctaat

SEQ ID NO: 57125 - DNA, 8 bp, Unknown
  misc_feature (1)..( 8): Matrix.003 file - promoters60/4282308
ttctagtt

SEQ ID NO: 57126 - DNA, 8 bp, Unknown
  misc_feature (1)..( 8): Matrix.003 file - promoters60/4282308
tttaccaa

SEQ ID NO: 57127 - DNA, 6 bp, Unknown
  misc_feature (1)..( 6): Matrix.003 file - promoters60/4282308
caactt

SEQ ID NO: 57128 - DNA, 7 bp, Unknown
  misc_feature (1)..( 7): Matrix.003 file - promoters60/4282308
gtcaaaa

SEQ ID NO: 57129 - DNA, 7 bp, Unknown
  misc_feature (1)..( 7): Matrix.003 file - promoters60/4282308
aaattga

SEQ ID NO: 57130 - DNA, 7 bp, Unknown
  misc_feature (1)..( 7): Matrix.003 file - promoters60/4282308
catcagg

SEQ ID NO: 57131 - DNA, 15 bp, Unknown
  misc_feature (1)..( 15): Matrix.003 file - promoters60/4282316
aacaaaaaaagttta

SEQ ID NO: 57132 - DNA, 15 bp, Unknown
  misc_feature (1)..( 15): Matrix.003 file - promoters60/4282316
atcactgatccaaca

SEQ ID NO: 57133 - DNA, 7 bp, Unknown
  misc_feature (1)..( 7): Matrix.003 file - promoters60/4282316
aattatc

SEQ ID NO: 57134 - DNA, 6 bp, Unknown
  misc_feature (1)..( 6): Matrix.003 file - promoters60/4282320
tgtggc

SEQ ID NO: 57135 - DNA, 7 bp, Unknown
  misc_feature (1)..( 7): Matrix.003 file - promoters60/4282320
gagaaaa

SEQ ID NO: 57136 - DNA, 7 bp, Unknown
  misc_feature (1)..( 7): Matrix.003 file - promoters60/4282320
aagaaga

SEQ ID NO: 57137 - DNA, 9 bp, Unknown
  misc_feature (1)..( 9): Matrix.003 file - promoters60/4282320
cagagaaag

SEQ ID NO: 57138 - DNA, 6 bp, Unknown
  misc_feature (1)..( 6): Matrix.003 file - promoters60/4282320
aatgga

SEQ ID NO: 57139 - DNA, 7 bp, Unknown
  misc_feature (1)..( 7): Matrix.003 file - promoters60/4282320
atatcat

SEQ ID NO: 57140 - DNA, 7 bp, Unknown
  misc_feature (1)..( 7): Matrix.003 file - promoters60/4282320
aagattt

SEQ ID NO: 57141 - DNA, 7 bp, Unknown
  misc_feature (1)..( 7): Matrix.003 file - promoters60/4282320
ttaacag

SEQ ID NO: 57142 - DNA, 7 bp, Unknown
  misc_feature (1)..( 7): Matrix.003 file - promoters60/4282320
actggaa

SEQ ID NO: 57143 - DNA, 6 bp, Unknown
  misc_feature (1)..( 6): Matrix.003 file - promoters60/4282320
ttctca

SEQ ID NO: 57144 - DNA, 7 bp, Unknown
  misc_feature (1)..( 7): Matrix.003 file - promoters60/4282320
ttgaagt

SEQ ID NO: 57145 - DNA, 6 bp, Unknown
  misc_feature (1)..( 6): Matrix.003 file - promoters60/4282320
atggaa

SEQ ID NO: 57146 - DNA, 6 bp, Unknown
  misc_feature (1)..( 6): Matrix.003 file - promoters60/4282320
aaagaa

SEQ ID NO: 57147 - DNA, 7 bp, Unknown
  misc_feature (1)..( 7): Matrix.003 file - promoters60/4282320
tagagaa

SEQ ID NO: 57148 - DNA, 7 bp, Unknown
  misc_feature (1)..( 7): Matrix.003 file - promoters60/4282320
aaggaga

SEQ ID NO: 57149 - DNA, 7 bp, Unknown
  misc_feature (1)..( 7): Matrix.003 file - promoters60/4282320
aaagaag

SEQ ID NO: 57150 - DNA, 6 bp, Unknown
  misc_feature (1)..( 6): Matrix.003 file - promoters60/4282320
caaaag

SEQ ID NO: 57151 - DNA, 6 bp, Unknown
  misc_feature (1)..( 6): Matrix.003 file - promoters60/4282320
caacac

SEQ ID NO: 57152 - DNA, 7 bp, Unknown
  misc_feature (1)..( 7): Matrix.003 file - promoters60/4282320
ctccatt

SEQ ID NO: 57153 - DNA, 7 bp, Unknown
  misc_feature (1)..( 7): Matrix.003 file - promoters60/4282324
taataat

SEQ ID NO: 57154 - DNA, 10 bp, Unknown
  misc_feature (1)..( 10): Matrix.003 file - promoters60/4282324
aacactaaaa

SEQ ID NO: 57155 - DNA, 12 bp, Unknown
  misc_feature (1)..( 12): Matrix.003 file - promoters60/4282324
taaaattcattt

SEQ ID NO: 57156 - DNA, 16 bp, Unknown
  misc_feature (1)..( 16): Matrix.003 file - promoters60/4282324
agatttgttaactaaa

SEQ ID NO: 57157 - DNA, 7 bp, Unknown
  misc_feature (1)..( 7): Matrix.003 file - promoters60/4282324
aaaacaa

SEQ ID NO: 57158 - DNA, 11 bp, Unknown
  misc_feature (1)..( 11): Matrix.003 file - promoters60/4282324
ctataaaaccc

SEQ ID NO: 57159 - DNA, 7 bp, Unknown
  misc_feature (1)..( 7): Matrix.003 file - promoters60/4282327
aaagtaa

SEQ ID NO: 57160 - DNA, 7 bp, Unknown
  misc_feature (1)..( 7): Matrix.003 file - promoters60/4282327
aataagt

SEQ ID NO: 57161 - DNA, 6 bp, Unknown
  misc_feature (1)..( 6): Matrix.003 file - promoters60/4282327
gaaaag

SEQ ID NO: 57162 - DNA, 6 bp, Unknown
  misc_feature (1)..( 6): Matrix.003 file - promoters60/4282327
aaaaat

SEQ ID NO: 57163 - DNA, 6 bp, Unknown
  misc_feature (1)..( 6): Matrix.003 file - promoters60/4282327
gtttaa

SEQ ID NO: 57164 - DNA, 8 bp, Unknown
  misc_feature (1)..( 8): Matrix.003 file - promoters60/4282327
gcaacatt

SEQ ID NO: 57165 - DNA, 7 bp, Unknown
  misc_feature (1)..( 7): Matrix.003 file - promoters60/4282327
attcgtc

SEQ ID NO: 57166 - DNA, 7 bp, Unknown
  misc_feature (1)..( 7): Matrix.003 file - promoters60/4282327
aataatt

SEQ ID NO: 57167 - DNA, 8 bp, Unknown
  misc_feature (1)..( 8): Matrix.003 file - promoters60/4282327
tatataaa

SEQ ID NO: 57168 - DNA, 7 bp, Unknown
  misc_feature (1)..( 7): Matrix.003 file - promoters60/4282327
tatggaa

SEQ ID NO: 57169 - DNA, 8 bp, Unknown
  misc_feature (1)..( 8): Matrix.003 file - promoters60/4282327
attggtta

SEQ ID NO: 57170 - DNA, 7 bp, Unknown
  misc_feature (1)..( 7): Matrix.003 file - promoters60/4282327
tttatgc

SEQ ID NO: 57171 - DNA, 7 bp, Unknown
  misc_feature (1)..( 7): Matrix.003 file - promoters60/4282327
gacgtat

SEQ ID NO: 57172 - DNA, 11 bp, Unknown
  misc_feature (1)..( 11): Matrix.003 file - promoters60/4282327
tttcagtataa

SEQ ID NO: 57173 - DNA, 7 bp, Unknown
  misc_feature (1)..( 7): Matrix.003 file - promoters60/4282327
aagaaga

SEQ ID NO: 57174 - DNA, 10 bp, Unknown
  misc_feature (1)..( 10): Matrix.003 file - promoters60/4282395
tttcttagta

SEQ ID NO: 57175 - DNA, 9 bp, Unknown
  misc_feature (1)..( 9): Matrix.003 file - promoters60/4282395
cacaaaaac

SEQ ID NO: 57176 - DNA, 11 bp, Unknown
  misc_feature (1)..( 11): Matrix.003 file - promoters60/4282395
gggagttattt

SEQ ID NO: 57177 - DNA, 11 bp, Unknown
  misc_feature (1)..( 11): Matrix.003 file - promoters60/4282395
gaaattatttt

SEQ ID NO: 57178 - DNA, 9 bp, Unknown
  misc_feature (1)..( 9): Matrix.003 file - promoters60/4282414
cagaaatac

SEQ ID NO: 57179 - DNA, 11 bp, Unknown
  misc_feature (1)..( 11): Matrix.003 file - promoters60/4282414
caagcattaac

SEQ ID NO: 57180 - DNA, 9 bp, Unknown
  misc_feature (1)..( 9): Matrix.003 file - promoters60/4282418
aaactaaaa

SEQ ID NO: 57181 - DNA, 10 bp, Unknown
  misc_feature (1)..( 10): Matrix.003 file - promoters60/4282418
taaaataaaa

SEQ ID NO: 57182 - DNA, 13 bp, Unknown
  misc_feature (1)..( 13): Matrix.003 file - promoters60/4282418
aaaataatatcat

SEQ ID NO: 57183 - DNA, 9 bp, Unknown
  misc_feature (1)..( 9): Matrix.003 file - promoters60/4282418
taagtaaac

SEQ ID NO: 57184 - DNA, 7 bp, Unknown
  misc_feature (1)..( 7): Matrix.003 file - promoters60/4282418
ataaaaa

SEQ ID NO: 57185 - DNA, 6 bp, Unknown
  misc_feature (1)..( 6): Matrix.003 file - promoters60/4282421
tttaat

SEQ ID NO: 57186 - DNA, 7 bp, Unknown
  misc_feature (1)..( 7): Matrix.003 file - promoters60/4282421
gctttct

SEQ ID NO: 57187 - DNA, 8 bp, Unknown
  misc_feature (1)..( 8): Matrix.003 file - promoters60/4282421
tctaatct

SEQ ID NO: 57188 - DNA, 6 bp, Unknown
  misc_feature (1)..( 6): Matrix.003 file - promoters60/4282421
aaaaat

SEQ ID NO: 57189 - DNA, 7 bp, Unknown
  misc_feature (1)..( 7): Matrix.003 file - promoters60/4282421
attagta

SEQ ID NO: 57190 - DNA, 7 bp, Unknown
  misc_feature (1)..( 7): Matrix.003 file - promoters60/4282421
ttttcat

SEQ ID NO: 57191 - DNA, 6 bp, Unknown
  misc_feature (1)..( 6): Matrix.003 file - promoters60/4282421
atttgt

SEQ ID NO: 57192 - DNA, 7 bp, Unknown
  misc_feature (1)..( 7): Matrix.003 file - promoters60/4282421
taccaaa

SEQ ID NO: 57193 - DNA, 7 bp, Unknown
  misc_feature (1)..( 7): Matrix.003 file - promoters60/4282421
cttctta

SEQ ID NO: 57194 - DNA, 6 bp, Unknown
  misc_feature (1)..( 6): Matrix.003 file - promoters60/4282421
tgtatt

SEQ ID NO: 57195 - DNA, 7 bp, Unknown
  misc_feature (1)..( 7): Matrix.003 file - promoters60/4282421
tgtatat

SEQ ID NO: 57196 - DNA, 8 bp, Unknown
  misc_feature (1)..( 8): Matrix.003 file - promoters60/4282421
tctggttt

SEQ ID NO: 57197 - DNA, 7 bp, Unknown
  misc_feature (1)..( 7): Matrix.003 file - promoters60/4282421
tttactt

SEQ ID NO: 57198 - DNA, 8 bp, Unknown
  misc_feature (1)..( 8): Matrix.003 file - promoters60/4282421
cttgtctc

SEQ ID NO: 57199 - DNA, 7 bp, Unknown
  misc_feature (1)..( 7): Matrix.003 file - promoters60/4282421
ttgaagc

SEQ ID NO: 57200 - DNA, 6 bp, Unknown
  misc_feature (1)..( 6): Matrix.003 file - promoters60/4282421
cctttt

SEQ ID NO: 57201 - DNA, 7 bp, Unknown
  misc_feature (1)..( 7): Matrix.003 file - promoters60/4282421
ttttttt

SEQ ID NO: 57202 - DNA, 7 bp, Unknown
  misc_feature (1)..( 7): Matrix.003 file - promoters60/4282421
ggcctat

SEQ ID NO: 57203 - DNA, 8 bp, Unknown
  misc_feature (1)..( 8): Matrix.003 file - promoters60/4282436
caaaaaaa

SEQ ID NO: 57204 - DNA, 6 bp, Unknown
  misc_feature (1)..( 6): Matrix.003 file - promoters60/4282436
aaaaca

SEQ ID NO: 57205 - DNA, 8 bp, Unknown
  misc_feature (1)..( 8): Matrix.003 file - promoters60/4282436
gaaataaa

SEQ ID NO: 57206 - DNA, 7 bp, Unknown
  misc_feature (1)..( 7): Matrix.003 file - promoters60/4282436
caaattt

SEQ ID NO: 57207 - DNA, 6 bp, Unknown
  misc_feature (1)..( 6): Matrix.003 file - promoters60/4282436
ttaaaa

SEQ ID NO: 57208 - DNA, 6 bp, Unknown
  misc_feature (1)..( 6): Matrix.003 file - promoters60/4282436
gtaacg

SEQ ID NO: 57209 - DNA, 7 bp, Unknown
  misc_feature (1)..( 7): Matrix.003 file - promoters60/4282436
gtggtta

SEQ ID NO: 57210 - DNA, 10 bp, Unknown
  misc_feature (1)..( 10): Matrix.003 file - promoters60/4282436
tacgtgtcaa

SEQ ID NO: 57211 - DNA, 20 bp, Unknown
  misc_feature (1)..( 20): Matrix.003 file - promoters60/4282436
ttggctattgcttcaccgcc

SEQ ID NO: 57212 - DNA, 16 bp, Unknown
  misc_feature (1)..( 16): Matrix.003 file - promoters60/4282436
gaccgagtcgtcctcg

SEQ ID NO: 57213 - DNA, 19 bp, Unknown
  misc_feature (1)..( 19): Matrix.003 file - promoters60/4282436
ttcttcttctataaatcaa

SEQ ID NO: 57214 - DNA, 6 bp, Unknown
  misc_feature (1)..( 6): Matrix.003 file - promoters60/4282436
gcttct

SEQ ID NO: 57215 - DNA, 8 bp, Unknown
  misc_feature (1)..( 8): Matrix.003 file - promoters60/4282436
ttctggcc

SEQ ID NO: 57216 - DNA, 7 bp, Unknown
  misc_feature (1)..( 7): Matrix.003 file - promoters60/4282436
tacatat

SEQ ID NO: 57217 - DNA, 15 bp, Unknown
  misc_feature (1)..( 15): Matrix.003 file - promoters60/4282436
cgccttagctttctc

SEQ ID NO: 57218 - DNA, 6 bp, Unknown
  misc_feature (1)..( 6): Matrix.003 file - promoters60/4282436
tttttt

SEQ ID NO: 57219 - DNA, 9 bp, Unknown
  misc_feature (1)..( 9): Matrix.003 file - promoters60/4282436
acaaaaagg

SEQ ID NO: 57220 - DNA, 7 bp, Unknown
  misc_feature (1)..( 7): Matrix.003 file - promoters60/4282436
acgaaga

SEQ ID NO: 57221 - DNA, 6 bp, Unknown
  misc_feature (1)..( 6): Matrix.003 file - promoters60/4282436
gttcaa

SEQ ID NO: 57222 - DNA, 6 bp, Unknown
  misc_feature (1)..( 6): Matrix.003 file - promoters60/4282436
gtatat

SEQ ID NO: 57223 - DNA, 9 bp, Unknown
  misc_feature (1)..( 9): Matrix.003 file - promoters60/4282436
atctaatga

SEQ ID NO: 57224 - DNA, 6 bp, Unknown
  misc_feature (1)..( 6): Matrix.003 file - promoters60/4282436
tcagta

SEQ ID NO: 57225 - DNA, 6 bp, Unknown
  misc_feature (1)..( 6): Matrix.003 file - promoters60/4282436
aacaac

SEQ ID NO: 57226 - DNA, 15 bp, Unknown
  misc_feature (1)..( 15): Matrix.003 file - promoters60/4282436
aatacccaaagagct

SEQ ID NO: 57227 - DNA, 7 bp, Unknown
  misc_feature (1)..( 7): Matrix.003 file - promoters60/4282450
aataata

SEQ ID NO: 57228 - DNA, 8 bp, Unknown
  misc_feature (1)..( 8): Matrix.003 file - promoters60/4282450
aataataa

SEQ ID NO: 57229 - DNA, 7 bp, Unknown
  misc_feature (1)..( 7): Matrix.003 file - promoters60/4282450
tataaaa

SEQ ID NO: 57230 - DNA, 7 bp, Unknown
  misc_feature (1)..( 7): Matrix.003 file - promoters60/4282450
cggagct

SEQ ID NO: 57231 - DNA, 6 bp, Unknown
  misc_feature (1)..( 6): Matrix.003 file - promoters60/4282450
cattga

SEQ ID NO: 57232 - DNA, 8 bp, Unknown
  misc_feature (1)..( 8): Matrix.003 file - promoters60/4282450
tatctaaa

SEQ ID NO: 57233 - DNA, 6 bp, Unknown
  misc_feature (1)..( 6): Matrix.003 file - promoters60/4282450
tgtttc

SEQ ID NO: 57234 - DNA, 6 bp, Unknown
  misc_feature (1)..( 6): Matrix.003 file - promoters60/4282487
aaattg

SEQ ID NO: 57235 - DNA, 7 bp, Unknown
  misc_feature (1)..( 7): Matrix.003 file - promoters60/4282487
taagcgt

SEQ ID NO: 57236 - DNA, 6 bp, Unknown
  misc_feature (1)..( 6): Matrix.003 file - promoters60/4282487
tttagt

SEQ ID NO: 57237 - DNA, 7 bp, Unknown
  misc_feature (1)..( 7): Matrix.003 file - promoters60/4282487
tttcatg

SEQ ID NO: 57238 - DNA, 7 bp, Unknown
  misc_feature (1)..( 7): Matrix.003 file - promoters60/4282487
taagcgt

SEQ ID NO: 57239 - DNA, 11 bp, Unknown
  misc_feature (1)..( 11): Matrix.003 file - promoters60/4282487
tagttgattcg

SEQ ID NO: 57240 - DNA, 7 bp, Unknown
  misc_feature (1)..( 7): Matrix.003 file - promoters60/4282487
gttaatg

SEQ ID NO: 57241 - DNA, 9 bp, Unknown
  misc_feature (1)..( 9): Matrix.003 file - promoters60/4282487
tgaaaccaa

SEQ ID NO: 57242 - DNA, 7 bp, Unknown
  misc_feature (1)..( 7): Matrix.003 file - promoters60/4282487
caaaaga

SEQ ID NO: 57243 - DNA, 6 bp, Unknown
  misc_feature (1)..( 6): Matrix.003 file - promoters60/4282487
taataa

SEQ ID NO: 57244 - DNA, 6 bp, Unknown
  misc_feature (1)..( 6): Matrix.003 file - promoters60/4282487
cggttt

SEQ ID NO: 57245 - DNA, 9 bp, Unknown
  misc_feature (1)..( 9): Matrix.003 file - promoters60/4282487
cttttaatt

SEQ ID NO: 57246 - DNA, 6 bp, Unknown
  misc_feature (1)..( 6): Matrix.003 file - promoters60/4282487
aattgt

SEQ ID NO: 57247 - DNA, 6 bp, Unknown
  misc_feature (1)..( 6): Matrix.003 file - promoters60/4282487
tatgaa

SEQ ID NO: 57248 - DNA, 7 bp, Unknown
  misc_feature (1)..( 7): Matrix.003 file - promoters60/4282487
aatgttt

SEQ ID NO: 57249 - DNA, 6 bp, Unknown
  misc_feature (1)..( 6): Matrix.003 file - promoters60/4282487
taatat

SEQ ID NO: 57250 - DNA, 7 bp, Unknown
  misc_feature (1)..( 7): Matrix.003 file - promoters60/4282487
aaaatga

SEQ ID NO: 57251 - DNA, 7 bp, Unknown
  misc_feature (1)..( 7): Matrix.003 file - promoters60/4282487
tttaaga

SEQ ID NO: 57252 - DNA, 8 bp, Unknown
  misc_feature (1)..( 8): Matrix.003 file - promoters60/4282487
gaaaacgc

SEQ ID NO: 57253 - DNA, 6 bp, Unknown
  misc_feature (1)..( 6): Matrix.003 file - promoters60/4282503
agaaat

SEQ ID NO: 57254 - DNA, 7 bp, Unknown
  misc_feature (1)..( 7): Matrix.003 file - promoters60/4282503
aagatta

SEQ ID NO: 57255 - DNA, 7 bp, Unknown
  misc_feature (1)..( 7): Matrix.003 file - promoters60/4282503
tttgcaa

SEQ ID NO: 57256 - DNA, 7 bp, Unknown
  misc_feature (1)..( 7): Matrix.003 file - promoters60/4282503
taaaatc

SEQ ID NO: 57257 - DNA, 6 bp, Unknown
  misc_feature (1)..( 6): Matrix.003 file - promoters60/4282503
tataaa

SEQ ID NO: 57258 - DNA, 6 bp, Unknown
  misc_feature (1)..( 6): Matrix.003 file - promoters60/4282503
tcaaag

SEQ ID NO: 57259 - DNA, 7 bp, Unknown
  misc_feature (1)..( 7): Matrix.003 file - promoters60/4282503
aaaattt

SEQ ID NO: 57260 - DNA, 10 bp, Unknown
  misc_feature (1)..( 10): Matrix.003 file - promoters60/4282503
ttttaataac

SEQ ID NO: 57261 - DNA, 11 bp, Unknown
  misc_feature (1)..( 11): Matrix.003 file - promoters60/4282503
tttattaaatg

SEQ ID NO: 57262 - DNA, 6 bp, Unknown
  misc_feature (1)..( 6): Matrix.003 file - promoters60/4282503
tatata

SEQ ID NO: 57263 - DNA, 6 bp, Unknown
  misc_feature (1)..( 6): Matrix.003 file - promoters60/4282503
ttatat

SEQ ID NO: 57264 - DNA, 6 bp, Unknown
  misc_feature (1)..( 6): Matrix.003 file - promoters60/4282503
tcatat

SEQ ID NO: 57265 - DNA, 7 bp, Unknown
  misc_feature (1)..( 7): Matrix.003 file - promoters60/4282503
ttatgtc

SEQ ID NO: 57266 - DNA, 7 bp, Unknown
  misc_feature (1)..( 7): Matrix.003 file - promoters60/4282503
attagta

SEQ ID NO: 57267 - DNA, 7 bp, Unknown
  misc_feature (1)..( 7): Matrix.003 file - promoters60/4282503
gattcag

SEQ ID NO: 57268 - DNA, 7 bp, Unknown
  misc_feature (1)..( 7): Matrix.003 file - promoters60/4282503
gatcgat

SEQ ID NO: 57269 - DNA, 7 bp, Unknown
  misc_feature (1)..( 7): Matrix.003 file - promoters60/4282506
gtgattg

SEQ ID NO: 57270 - DNA, 7 bp, Unknown
  misc_feature (1)..( 7): Matrix.003 file - promoters60/4282506
agaggag

SEQ ID NO: 57271 - DNA, 6 bp, Unknown
  misc_feature (1)..( 6): Matrix.003 file - promoters60/4282506
tctttc

SEQ ID NO: 57272 - DNA, 8 bp, Unknown
  misc_feature (1)..( 8): Matrix.003 file - promoters60/4282506
cttcttct

SEQ ID NO: 57273 - DNA, 6 bp, Unknown
  misc_feature (1)..( 6): Matrix.003 file - promoters60/4282506
ttctct

SEQ ID NO: 57274 - DNA, 10 bp, Unknown
  misc_feature (1)..( 10): Matrix.003 file - promoters60/4282506
caataaccaa

SEQ ID NO: 57275 - DNA, 7 bp, Unknown
  misc_feature (1)..( 7): Matrix.003 file - promoters60/4282506
tttataa

SEQ ID NO: 57276 - DNA, 6 bp, Unknown
  misc_feature (1)..( 6): Matrix.003 file - promoters60/4282506
tattct

SEQ ID NO: 57277 - DNA, 7 bp, Unknown
  misc_feature (1)..( 7): Matrix.003 file - promoters60/4282506
ttcatct

SEQ ID NO: 57278 - DNA, 7 bp, Unknown
  misc_feature (1)..( 7): Matrix.003 file - promoters60/4282506
gtatcaa

SEQ ID NO: 57279 - DNA, 8 bp, Unknown
  misc_feature (1)..( 8): Matrix.003 file - promoters60/4282506
cagctatt

SEQ ID NO: 57280 - DNA, 7 bp, Unknown
  misc_feature (1)..( 7): Matrix.003 file - promoters60/4282506
attgttg

SEQ ID NO: 57281 - DNA, 8 bp, Unknown
  misc_feature (1)..( 8): Matrix.003 file - promoters60/4282506
cataaaaa

SEQ ID NO: 57282 - DNA, 7 bp, Unknown
  misc_feature (1)..( 7): Matrix.003 file - promoters60/4282506
acagatt

SEQ ID NO: 57283 - DNA, 7 bp, Unknown
  misc_feature (1)..( 7): Matrix.003 file - promoters60/4282506
tttagtt

SEQ ID NO: 57284 - DNA, 8 bp, Unknown
  misc_feature (1)..( 8): Matrix.003 file - promoters60/4282506
ttcaaaaa

SEQ ID NO: 57285 - DNA, 7 bp, Unknown
  misc_feature (1)..( 7): Matrix.003 file - promoters60/4282564
attacaa

SEQ ID NO: 57286 - DNA, 9 bp, Unknown
  misc_feature (1)..( 9): Matrix.003 file - promoters60/4282564
ttcaatcat

SEQ ID NO: 57287 - DNA, 10 bp, Unknown
  misc_feature (1)..( 10): Matrix.003 file - promoters60/4282564
aatcaacaaa

SEQ ID NO: 57288 - DNA, 8 bp, Unknown
  misc_feature (1)..( 8): Matrix.003 file - promoters60/4282564
ataaaacc

SEQ ID NO: 57289 - DNA, 6 bp, Unknown
  misc_feature (1)..( 6): Matrix.003 file - promoters60/4282564
attgga

SEQ ID NO: 57290 - DNA, 6 bp, Unknown
  misc_feature (1)..( 6): Matrix.003 file - promoters60/4282564
aactaa

SEQ ID NO: 57291 - DNA, 6 bp, Unknown
  misc_feature (1)..( 6): Matrix.003 file - promoters60/4282564
tgtttc

SEQ ID NO: 57292 - DNA, 12 bp, Unknown
  misc_feature (1)..( 12): Matrix.003 file - promoters60/4282580
atgattgattga

SEQ ID NO: 57293 - DNA, 8 bp, Unknown
  misc_feature (1)..( 8): Matrix.003 file - promoters60/4282580
ttttttag

SEQ ID NO: 57294 - DNA, 10 bp, Unknown
  misc_feature (1)..( 10): Matrix.003 file - promoters60/4282580
tattttcatt

SEQ ID NO: 57295 - DNA, 8 bp, Unknown
  misc_feature (1)..( 8): Matrix.003 file - promoters60/4282580
taattttg

SEQ ID NO: 57296 - DNA, 6 bp, Unknown
  misc_feature (1)..( 6): Matrix.003 file - promoters60/4282580
atttga

SEQ ID NO: 57297 - DNA, 9 bp, Unknown
  misc_feature (1)..( 9): Matrix.003 file - promoters60/4282580
atttagatc

SEQ ID NO: 57298 - DNA, 8 bp, Unknown
  misc_feature (1)..( 8): Matrix.003 file - promoters60/4282588
aacaaaat

SEQ ID NO: 57299 - DNA, 6 bp, Unknown
  misc_feature (1)..( 6): Matrix.003 file - promoters60/4282588
aatgtg

SEQ ID NO: 57300 - DNA, 6 bp, Unknown
  misc_feature (1)..( 6): Matrix.003 file - promoters60/4282588
acacat

SEQ ID NO: 57301 - DNA, 7 bp, Unknown
  misc_feature (1)..( 7): Matrix.003 file - promoters60/4282588
caataaa

SEQ ID NO: 57302 - DNA, 8 bp, Unknown
  misc_feature (1)..( 8): Matrix.003 file - promoters60/4282588
agaaaaat

SEQ ID NO: 57303 - DNA, 9 bp, Unknown
  misc_feature (1)..( 9): Matrix.003 file - promoters60/4282588
aatgaagta

SEQ ID NO: 57304 - DNA, 10 bp, Unknown
  misc_feature (1)..( 10): Matrix.003 file - promoters60/4282588
gaaaaatcta

SEQ ID NO: 57305 - DNA, 9 bp, Unknown
  misc_feature (1)..( 9): Matrix.003 file - promoters60/4282588
ctataaata

SEQ ID NO: 57306 - DNA, 7 bp, Unknown
  misc_feature (1)..( 7): Matrix.003 file - promoters60/4282588
tttgtaa

SEQ ID NO: 57307 - DNA, 7 bp, Unknown
  misc_feature (1)..( 7): Matrix.003 file - promoters60/4282588
aataata

SEQ ID NO: 57308 - DNA, 9 bp, Unknown
  misc_feature (1)..( 9): Matrix.003 file - promoters60/4282588
ataataact

SEQ ID NO: 57309 - DNA, 6 bp, Unknown
  misc_feature (1)..( 6): Matrix.003 file - promoters60/4282588
aataaa

SEQ ID NO: 57310 - DNA, 6 bp, Unknown
  misc_feature (1)..( 6): Matrix.003 file - promoters60/4282588
aaaaac

SEQ ID NO: 57311 - DNA, 7 bp, Unknown
  misc_feature (1)..( 7): Matrix.003 file - promoters60/4282588
aaaaaaa

SEQ ID NO: 57312 - DNA, 10 bp, Unknown
  misc_feature (1)..( 10): Matrix.003 file - promoters60/4282588
ttgatttttt

SEQ ID NO: 57313 - DNA, 7 bp, Unknown
  misc_feature (1)..( 7): Matrix.003 file - promoters60/4282588
tttaaaa

SEQ ID NO: 57314 - DNA, 7 bp, Unknown
  misc_feature (1)..( 7): Matrix.003 file - promoters60/4282588
tttaaac

SEQ ID NO: 57315 - DNA, 7 bp, Unknown
  misc_feature (1)..( 7): Matrix.003 file - promoters60/4282588
actaata

SEQ ID NO: 57316 - DNA, 8 bp, Unknown
  misc_feature (1)..( 8): Matrix.003 file - promoters60/4282588
tttaaact

SEQ ID NO: 57317 - DNA, 6 bp, Unknown
  misc_feature (1)..( 6): Matrix.003 file - promoters60/4282588
gcataa

SEQ ID NO: 57318 - DNA, 11 bp, Unknown
  misc_feature (1)..( 11): Matrix.003 file - promoters60/4282588
aatatttttct

SEQ ID NO: 57319 - DNA, 7 bp, Unknown
  misc_feature (1)..( 7): Matrix.003 file - promoters60/4282588
aaaatta

SEQ ID NO: 57320 - DNA, 7 bp, Unknown
  misc_feature (1)..( 7): Matrix.003 file - promoters60/4282588
aaaaata

SEQ ID NO: 57321 - DNA, 6 bp, Unknown
  misc_feature (1)..( 6): Matrix.003 file - promoters60/4282588
tttgac

SEQ ID NO: 57322 - DNA, 7 bp, Unknown
  misc_feature (1)..( 7): Matrix.003 file - promoters60/4282588
aaaaaag

SEQ ID NO: 57323 - DNA, 9 bp, Unknown
  misc_feature (1)..( 9): Matrix.003 file - promoters60/4282588
aaaagactc

SEQ ID NO: 57324 - DNA, 6 bp, Unknown
  misc_feature (1)..( 6): Matrix.003 file - promoters60/4282588
cagccg

SEQ ID NO: 57325 - DNA, 6 bp, Unknown
  misc_feature (1)..( 6): Matrix.003 file - promoters60/4282588
tctcct

SEQ ID NO: 57326 - DNA, 8 bp, Unknown
  misc_feature (1)..( 8): Matrix.003 file - promoters60/4282611
tttgattc

SEQ ID NO: 57327 - DNA, 7 bp, Unknown
  misc_feature (1)..( 7): Matrix.003 file - promoters60/4282611
aacaaat

SEQ ID NO: 57328 - DNA, 9 bp, Unknown
  misc_feature (1)..( 9): Matrix.003 file - promoters60/4282611
taactaaaa

SEQ ID NO: 57329 - DNA, 8 bp, Unknown
  misc_feature (1)..( 8): Matrix.003 file - promoters60/4282611
taataact

SEQ ID NO: 57330 - DNA, 9 bp, Unknown
  misc_feature (1)..( 9): Matrix.003 file - promoters60/4282614
tttattcac

SEQ ID NO: 57331 - DNA, 9 bp, Unknown
  misc_feature (1)..( 9): Matrix.003 file - promoters60/4282614
gatttgttt

SEQ ID NO: 57332 - DNA, 10 bp, Unknown
  misc_feature (1)..( 10): Matrix.003 file - promoters60/4282614
aaaatatttt

SEQ ID NO: 57333 - DNA, 9 bp, Unknown
  misc_feature (1)..( 9): Matrix.003 file - promoters60/4282614
acaatcata

SEQ ID NO: 57334 - DNA, 9 bp, Unknown
  misc_feature (1)..( 9): Matrix.003 file - promoters60/4282614
taatttcat

SEQ ID NO: 57335 - DNA, 7 bp, Unknown
  misc_feature (1)..( 7): Matrix.003 file - promoters60/4282614
aaaagaa

SEQ ID NO: 57336 - DNA, 12 bp, Unknown
  misc_feature (1)..( 12): Matrix.003 file - promoters60/4282614
aaaatatgtatt

SEQ ID NO: 57337 - DNA, 10 bp, Unknown
  misc_feature (1)..( 10): Matrix.003 file - promoters60/4282614
aaacaaaaag

SEQ ID NO: 57338 - DNA, 7 bp, Unknown
  misc_feature (1)..( 7): Matrix.003 file - promoters60/4282626
ataaaaa

SEQ ID NO: 57339 - DNA, 13 bp, Unknown
  misc_feature (1)..( 13): Matrix.003 file - promoters60/4282626
aaaaattaaaaga

SEQ ID NO: 57340 - DNA, 7 bp, Unknown
  misc_feature (1)..( 7): Matrix.003 file - promoters60/4282626
tagaaag

SEQ ID NO: 57341 - DNA, 8 bp, Unknown
  misc_feature (1)..( 8): Matrix.003 file - promoters60/4282626
gtgtattt

SEQ ID NO: 57342 - DNA, 7 bp, Unknown
  misc_feature (1)..( 7): Matrix.003 file - promoters60/4282626
aaaatca

SEQ ID NO: 57343 - DNA, 8 bp, Unknown
  misc_feature (1)..( 8): Matrix.003 file - promoters60/4282626
cttagttg

SEQ ID NO: 57344 - DNA, 9 bp, Unknown
  misc_feature (1)..( 9): Matrix.003 file - promoters60/4282626
aagtaaaaa

SEQ ID NO: 57345 - DNA, 9 bp, Unknown
  misc_feature (1)..( 9): Matrix.003 file - promoters60/4282626
aaaaaataa

SEQ ID NO: 57346 - DNA, 10 bp, Unknown
  misc_feature (1)..( 10): Matrix.003 file - promoters60/4282626
aaaaattatt

SEQ ID NO: 57347 - DNA, 6 bp, Unknown
  misc_feature (1)..( 6): Matrix.003 file - promoters60/4282626
tattta

SEQ ID NO: 57348 - DNA, 6 bp, Unknown
  misc_feature (1)..( 6): Matrix.003 file - promoters60/4282626
aaaagt

SEQ ID NO: 57349 - DNA, 6 bp, Unknown
  misc_feature (1)..( 6): Matrix.003 file - promoters60/4282626
gaataa

SEQ ID NO: 57350 - DNA, 7 bp, Unknown
  misc_feature (1)..( 7): Matrix.003 file - promoters60/4282626
atatttt

SEQ ID NO: 57351 - DNA, 8 bp, Unknown
  misc_feature (1)..( 8): Matrix.003 file - promoters60/4282626
ttaacttg

SEQ ID NO: 57352 - DNA, 6 bp, Unknown
  misc_feature (1)..( 6): Matrix.003 file - promoters60/4282626
tgtttc

SEQ ID NO: 57353 - DNA, 7 bp, Unknown
  misc_feature (1)..( 7): Matrix.003 file - promoters60/4282626
cgtcttc

SEQ ID NO: 57354 - DNA, 7 bp, Unknown
  misc_feature (1)..( 7): Matrix.003 file - promoters60/4282626
gtattat

SEQ ID NO: 57355 - DNA, 6 bp, Unknown
  misc_feature (1)..( 6): Matrix.003 file - promoters60/4282626
aatttg

SEQ ID NO: 57356 - DNA, 8 bp, Unknown
  misc_feature (1)..( 8): Matrix.003 file - promoters60/4282641
ttaagaaa

SEQ ID NO: 57357 - DNA, 7 bp, Unknown
  misc_feature (1)..( 7): Matrix.003 file - promoters60/4282641
agatttt

SEQ ID NO: 57358 - DNA, 9 bp, Unknown
  misc_feature (1)..( 9): Matrix.003 file - promoters60/4282641
attttatga

SEQ ID NO: 57359 - DNA, 8 bp, Unknown
  misc_feature (1)..( 8): Matrix.003 file - promoters60/4282641
cttttctc

SEQ ID NO: 57360 - DNA, 7 bp, Unknown
  misc_feature (1)..( 7): Matrix.003 file - promoters60/4282641
tcatttg

SEQ ID NO: 57361 - DNA, 9 bp, Unknown
  misc_feature (1)..( 9): Matrix.003 file - promoters60/4282647
atcctatat

SEQ ID NO: 57362 - DNA, 6 bp, Unknown
  misc_feature (1)..( 6): Matrix.003 file - promoters60/4282647
ttgaat

SEQ ID NO: 57363 - DNA, 13 bp, Unknown
  misc_feature (1)..( 13): Matrix.003 file - promoters60/4282647
ttaatcaaaattt

SEQ ID NO: 57364 - DNA, 9 bp, Unknown
  misc_feature (1)..( 9): Matrix.003 file - promoters60/4282647
ttttgattt

SEQ ID NO: 57365 - DNA, 6 bp, Unknown
  misc_feature (1)..( 6): Matrix.003 file - promoters60/4282647
ttgatt

SEQ ID NO: 57366 - DNA, 7 bp, Unknown
  misc_feature (1)..( 7): Matrix.003 file - promoters60/4282647
cttcttt

SEQ ID NO: 57367 - DNA, 8 bp, Unknown
  misc_feature (1)..( 8): Matrix.003 file - promoters60/4282647
tatcattt

SEQ ID NO: 57368 - DNA, 7 bp, Unknown
  misc_feature (1)..( 7): Matrix.003 file - promoters60/4282647
ttgaaat

SEQ ID NO: 57369 - DNA, 6 bp, Unknown
  misc_feature (1)..( 6): Matrix.003 file - promoters60/4282647
aaatat

SEQ ID NO: 57370 - DNA, 12 bp, Unknown
  misc_feature (1)..( 12): Matrix.003 file - promoters60/4282647
aacaaacacaac

SEQ ID NO: 57371 - DNA, 8 bp, Unknown
  misc_feature (1)..( 8): Matrix.003 file - promoters60/4282647
ctaaattt

SEQ ID NO: 57372 - DNA, 9 bp, Unknown
  misc_feature (1)..( 9): Matrix.003 file - promoters60/4282647
taaaaaact

SEQ ID NO: 57373 - DNA, 8 bp, Unknown
  misc_feature (1)..( 8): Matrix.003 file - promoters60/4282647
gacaactt

SEQ ID NO: 57374 - DNA, 7 bp, Unknown
  misc_feature (1)..( 7): Matrix.003 file - promoters60/4282647
atttttt

SEQ ID NO: 57375 - DNA, 8 bp, Unknown
  misc_feature (1)..( 8): Matrix.003 file - promoters60/4282647
tcagtaat

SEQ ID NO: 57376 - DNA, 6 bp, Unknown
  misc_feature (1)..( 6): Matrix.003 file - promoters60/4282647
tctatt

SEQ ID NO: 57377 - DNA, 7 bp, Unknown
  misc_feature (1)..( 7): Matrix.003 file - promoters60/4282647
caaaatt

SEQ ID NO: 57378 - DNA, 7 bp, Unknown
  misc_feature (1)..( 7): Matrix.003 file - promoters60/4282647
tacaaaa

SEQ ID NO: 57379 - DNA, 7 bp, Unknown
  misc_feature (1)..( 7): Matrix.003 file - promoters60/4282647
aataaaa

SEQ ID NO: 57380 - DNA, 7 bp, Unknown
  misc_feature (1)..( 7): Matrix.003 file - promoters60/4282647
atataat

SEQ ID NO: 57381 - DNA, 8 bp, Unknown
  misc_feature (1)..( 8): Matrix.003 file - promoters60/4282647
gttaatac

SEQ ID NO: 57382 - DNA, 8 bp, Unknown
  misc_feature (1)..( 8): Matrix.003 file - promoters60/4282647
tattcttt

SEQ ID NO: 57383 - DNA, 8 bp, Unknown
  misc_feature (1)..( 8): Matrix.003 file - promoters60/4282647
ctttattc

SEQ ID NO: 57384 - DNA, 8 bp, Unknown
  misc_feature (1)..( 8): Matrix.003 file - promoters60/4282647
ttgtcgta

SEQ ID NO: 57385 - DNA, 8 bp, Unknown
  misc_feature (1)..( 8): Matrix.003 file - promoters60/4282647
cattaatg

SEQ ID NO: 57386 - DNA, 6 bp, Unknown
  misc_feature (1)..( 6): Matrix.003 file - promoters60/4282647
actctc

SEQ ID NO: 57387 - DNA, 9 bp, Unknown
  misc_feature (1)..( 9): Matrix.003 file - promoters60/4282667
taatttttg

SEQ ID NO: 57388 - DNA, 10 bp, Unknown
  misc_feature (1)..( 10): Matrix.003 file - promoters60/4282695
acttcaaaaa

SEQ ID NO: 57389 - DNA, 9 bp, Unknown
  misc_feature (1)..( 9): Matrix.003 file - promoters60/4282695
tctcaaact

SEQ ID NO: 57390 - DNA, 7 bp, Unknown
  misc_feature (1)..( 7): Matrix.003 file - promoters60/4282695
ttgcaga

SEQ ID NO: 57391 - DNA, 8 bp, Unknown
  misc_feature (1)..( 8): Matrix.003 file - promoters60/4282695
gagaaaaa

SEQ ID NO: 57392 - DNA, 8 bp, Unknown
  misc_feature (1)..( 8): Matrix.003 file - promoters60/4282695
aaaaaatt

SEQ ID NO: 57393 - DNA, 7 bp, Unknown
  misc_feature (1)..( 7): Matrix.003 file - promoters60/4282695
aataatt

SEQ ID NO: 57394 - DNA, 7 bp, Unknown
  misc_feature (1)..( 7): Matrix.003 file - promoters60/4282695
atggtgg

SEQ ID NO: 57395 - DNA, 7 bp, Unknown
  misc_feature (1)..( 7): Matrix.003 file - promoters60/4282695
ctcatca

SEQ ID NO: 57396 - DNA, 8 bp, Unknown
  misc_feature (1)..( 8): Matrix.003 file - promoters60/4282695
ccaatcag

SEQ ID NO: 57397 - DNA, 9 bp, Unknown
  misc_feature (1)..( 9): Matrix.003 file - promoters60/4282695
aatcaatgt

SEQ ID NO: 57398 - DNA, 8 bp, Unknown
  misc_feature (1)..( 8): Matrix.003 file - promoters60/4282695
cataatca

SEQ ID NO: 57399 - DNA, 9 bp, Unknown
  misc_feature (1)..( 9): Matrix.003 file - promoters60/4282695
aaaaaaatg

SEQ ID NO: 57400 - DNA, 8 bp, Unknown
  misc_feature (1)..( 8): Matrix.003 file - promoters60/4282695
aaaaggaa

SEQ ID NO: 57401 - DNA, 10 bp, Unknown
  misc_feature (1)..( 10): Matrix.003 file - promoters60/4282695
aaaaaaagga

SEQ ID NO: 57402 - DNA, 13 bp, Unknown
  misc_feature (1)..( 13): Matrix.003 file - promoters60/4282744
tttatgaaatcta

SEQ ID NO: 57403 - DNA, 10 bp, Unknown
  misc_feature (1)..( 10): Matrix.003 file - promoters60/4282744
aaaactgtaa

SEQ ID NO: 57404 - DNA, 9 bp, Unknown
  misc_feature (1)..( 9): Matrix.003 file - promoters60/4282744
aacaaaaac

SEQ ID NO: 57405 - DNA, 8 bp, Unknown
  misc_feature (1)..( 8): Matrix.003 file - promoters60/4282744
taataata

SEQ ID NO: 57406 - DNA, 8 bp, Unknown
  misc_feature (1)..( 8): Matrix.003 file - promoters60/4282744
aaaaatcc

SEQ ID NO: 57407 - DNA, 10 bp, Unknown
  misc_feature (1)..( 10): Matrix.003 file - promoters60/4282748
ttcgtagaca

SEQ ID NO: 57408 - DNA, 7 bp, Unknown
  misc_feature (1)..( 7): Matrix.003 file - promoters60/4282748
tgactat

SEQ ID NO: 57409 - DNA, 6 bp, Unknown
  misc_feature (1)..( 6): Matrix.003 file - promoters60/4282748
gtcaat

SEQ ID NO: 57410 - DNA, 9 bp, Unknown
  misc_feature (1)..( 9): Matrix.003 file - promoters60/4282748
tttattgtt

SEQ ID NO: 57411 - DNA, 6 bp, Unknown
  misc_feature (1)..( 6): Matrix.003 file - promoters60/4282748
attgta

SEQ ID NO: 57412 - DNA, 8 bp, Unknown
  misc_feature (1)..( 8): Matrix.003 file - promoters60/4282748
caaataat

SEQ ID NO: 57413 - DNA, 6 bp, Unknown
  misc_feature (1)..( 6): Matrix.003 file - promoters60/4282748
tacaaa

SEQ ID NO: 57414 - DNA, 9 bp, Unknown
  misc_feature (1)..( 9): Matrix.003 file - promoters60/4282748
cataaattt

SEQ ID NO: 57415 - DNA, 6 bp, Unknown
  misc_feature (1)..( 6): Matrix.003 file - promoters60/4282748
ttatat

SEQ ID NO: 57416 - DNA, 6 bp, Unknown
  misc_feature (1)..( 6): Matrix.003 file - promoters60/4282748
ggtttg

SEQ ID NO: 57417 - DNA, 6 bp, Unknown
  misc_feature (1)..( 6): Matrix.003 file - promoters60/4282748
ggttga

SEQ ID NO: 57418 - DNA, 6 bp, Unknown
  misc_feature (1)..( 6): Matrix.003 file - promoters60/4282748
ttattg

SEQ ID NO: 57419 - DNA, 7 bp, Unknown
  misc_feature (1)..( 7): Matrix.003 file - promoters60/4282748
ttgtatg

SEQ ID NO: 57420 - DNA, 6 bp, Unknown
  misc_feature (1)..( 6): Matrix.003 file - promoters60/4282748
cgtgtc

SEQ ID NO: 57421 - DNA, 7 bp, Unknown
  misc_feature (1)..( 7): Matrix.003 file - promoters60/4282748
aatatat

SEQ ID NO: 57422 - DNA, 6 bp, Unknown
  misc_feature (1)..( 6): Matrix.003 file - promoters60/4282788
aaaaaa

SEQ ID NO: 57423 - DNA, 8 bp, Unknown
  misc_feature (1)..( 8): Matrix.003 file - promoters60/4282788
tgtaaaat

SEQ ID NO: 57424 - DNA, 6 bp, Unknown
  misc_feature (1)..( 6): Matrix.003 file - promoters60/4282788
gtaaac

SEQ ID NO: 57425 - DNA, 8 bp, Unknown
  misc_feature (1)..( 8): Matrix.003 file - promoters60/4282788
gataagag

SEQ ID NO: 57426 - DNA, 6 bp, Unknown
  misc_feature (1)..( 6): Matrix.003 file - promoters60/4282788
agagtt

SEQ ID NO: 57427 - DNA, 6 bp, Unknown
  misc_feature (1)..( 6): Matrix.003 file - promoters60/4282788
tgtctc

SEQ ID NO: 57428 - DNA, 8 bp, Unknown
  misc_feature (1)..( 8): Matrix.003 file - promoters60/4282788
tttgattt

SEQ ID NO: 57429 - DNA, 7 bp, Unknown
  misc_feature (1)..( 7): Matrix.003 file - promoters60/4282788
tctctaa

SEQ ID NO: 57430 - DNA, 6 bp, Unknown
  misc_feature (1)..( 6): Matrix.003 file - promoters60/4282788
tgtttc

SEQ ID NO: 57431 - DNA, 7 bp, Unknown
  misc_feature (1)..( 7): Matrix.003 file - promoters60/4282788
gttgtct

SEQ ID NO: 57432 - DNA, 7 bp, Unknown
  misc_feature (1)..( 7): Matrix.003 file - promoters60/4282788
tatcatt

SEQ ID NO: 57433 - DNA, 7 bp, Unknown
  misc_feature (1)..( 7): Matrix.003 file - promoters60/4282788
gaatttg

SEQ ID NO: 57434 - DNA, 7 bp, Unknown
  misc_feature (1)..( 7): Matrix.003 file - promoters60/4282788
ttagatc

SEQ ID NO: 57435 - DNA, 6 bp, Unknown
  misc_feature (1)..( 6): Matrix.003 file - promoters60/4282788
catttg

SEQ ID NO: 57436 - DNA, 9 bp, Unknown
  misc_feature (1)..( 9): Matrix.003 file - promoters60/4282795
taatcgttt

SEQ ID NO: 57437 - DNA, 7 bp, Unknown
  misc_feature (1)..( 7): Matrix.003 file - promoters60/4282795
ttttagt

SEQ ID NO: 57438 - DNA, 7 bp, Unknown
  misc_feature (1)..( 7): Matrix.003 file - promoters60/4282795
gttaatg

SEQ ID NO: 57439 - DNA, 11 bp, Unknown
  misc_feature (1)..( 11): Matrix.003 file - promoters60/4282795
atgaaaaccaa

SEQ ID NO: 57440 - DNA, 12 bp, Unknown
  misc_feature (1)..( 12): Matrix.003 file - promoters60/4282795
aacctttatgta

SEQ ID NO: 57441 - DNA, 8 bp, Unknown
  misc_feature (1)..( 8): Matrix.003 file - promoters60/4282795
cggtttgg

SEQ ID NO: 57442 - DNA, 11 bp, Unknown
  misc_feature (1)..( 11): Matrix.003 file - promoters60/4282795
tcttttgattt

SEQ ID NO: 57443 - DNA, 9 bp, Unknown
  misc_feature (1)..( 9): Matrix.003 file - promoters60/4282795
tattaatat

SEQ ID NO: 57444 - DNA, 9 bp, Unknown
  misc_feature (1)..( 9): Matrix.003 file - promoters60/4282795
ttttagaaa

SEQ ID NO: 57445 - DNA, 6 bp, Unknown
  misc_feature (1)..( 6): Matrix.003 file - promoters60/4282795
tttctt

SEQ ID NO: 57446 - DNA, 12 bp, Unknown
  misc_feature (1)..( 12): Matrix.003 file - promoters60/4282795
ttttaactaaca

SEQ ID NO: 57447 - DNA, 7 bp, Unknown
  misc_feature (1)..( 7): Matrix.003 file - promoters60/4282832
aaattta

SEQ ID NO: 57448 - DNA, 7 bp, Unknown
  misc_feature (1)..( 7): Matrix.003 file - promoters60/4282832
aaagaaa

SEQ ID NO: 57449 - DNA, 7 bp, Unknown
  misc_feature (1)..( 7): Matrix.003 file - promoters60/4282832
aagaaaa

SEQ ID NO: 57450 - DNA, 7 bp, Unknown
  misc_feature (1)..( 7): Matrix.003 file - promoters60/4282832
ttaaatc

SEQ ID NO: 57451 - DNA, 7 bp, Unknown
  misc_feature (1)..( 7): Matrix.003 file - promoters60/4282832
aaaatcc

SEQ ID NO: 57452 - DNA, 6 bp, Unknown
  misc_feature (1)..( 6): Matrix.003 file - promoters60/4282832
agagaa

SEQ ID NO: 57453 - DNA, 8 bp, Unknown
  misc_feature (1)..( 8): Matrix.003 file - promoters60/4282832
gttctgaa

SEQ ID NO: 57454 - DNA, 7 bp, Unknown
  misc_feature (1)..( 7): Matrix.003 file - promoters60/4282832
ccctgtg

SEQ ID NO: 57455 - DNA, 7 bp, Unknown
  misc_feature (1)..( 7): Matrix.003 file - promoters60/4282832
ttctcat

SEQ ID NO: 57456 - DNA, 8 bp, Unknown
  misc_feature (1)..( 8): Matrix.003 file - promoters60/4282832
tttagctt

SEQ ID NO: 57457 - DNA, 6 bp, Unknown
  misc_feature (1)..( 6): Matrix.003 file - promoters60/4282832
gaatta

SEQ ID NO: 57458 - DNA, 6 bp, Unknown
  misc_feature (1)..( 6): Matrix.003 file - promoters60/4282832
gcggaa

SEQ ID NO: 57459 - DNA, 6 bp, Unknown
  misc_feature (1)..( 6): Matrix.003 file - promoters60/4282832
aaagaa

SEQ ID NO: 57460 - DNA, 7 bp, Unknown
  misc_feature (1)..( 7): Matrix.003 file - promoters60/4282832
tatcttc

SEQ ID NO: 57461 - DNA, 6 bp, Unknown
  misc_feature (1)..( 6): Matrix.003 file - promoters60/4282832
tccttg

SEQ ID NO: 57462 - DNA, 7 bp, Unknown
  misc_feature (1)..( 7): Matrix.003 file - promoters60/4282832
gatatat

SEQ ID NO: 57463 - DNA, 9 bp, Unknown
  misc_feature (1)..( 9): Matrix.003 file - promoters60/4282859
tctatctga

SEQ ID NO: 57464 - DNA, 6 bp, Unknown
  misc_feature (1)..( 6): Matrix.003 file - promoters60/4282859
gaaaat

SEQ ID NO: 57465 - DNA, 7 bp, Unknown
  misc_feature (1)..( 7): Matrix.003 file - promoters60/4282859
tgaaaaa

SEQ ID NO: 57466 - DNA, 7 bp, Unknown
  misc_feature (1)..( 7): Matrix.003 file - promoters60/4282859
atgactc

SEQ ID NO: 57467 - DNA, 7 bp, Unknown
  misc_feature (1)..( 7): Matrix.003 file - promoters60/4282859
attctta

SEQ ID NO: 57468 - DNA, 6 bp, Unknown
  misc_feature (1)..( 6): Matrix.003 file - promoters60/4282859
atttaa

SEQ ID NO: 57469 - DNA, 6 bp, Unknown
  misc_feature (1)..( 6): Matrix.003 file - promoters60/4282859
aaaatt

SEQ ID NO: 57470 - DNA, 6 bp, Unknown
  misc_feature (1)..( 6): Matrix.003 file - promoters60/4282859
aaggaa

SEQ ID NO: 57471 - DNA, 14 bp, Unknown
  misc_feature (1)..( 14): Matrix.003 file - promoters60/4282877
acaattgggcctaa

SEQ ID NO: 57472 - DNA, 6 bp, Unknown
  misc_feature (1)..( 6): Matrix.003 file - promoters60/4282877
tcaaat

SEQ ID NO: 57473 - DNA, 12 bp, Unknown
  misc_feature (1)..( 12): Matrix.003 file - promoters60/4282877
acaagaagaaga

SEQ ID NO: 57474 - DNA, 10 bp, Unknown
  misc_feature (1)..( 10): Matrix.003 file - promoters60/4282915
gatttttgtg

SEQ ID NO: 57475 - DNA, 9 bp, Unknown
  misc_feature (1)..( 9): Matrix.003 file - promoters60/4282915
ttttacaaa

SEQ ID NO: 57476 - DNA, 6 bp, Unknown
  misc_feature (1)..( 6): Matrix.003 file - promoters60/4282915
ccaaaa

SEQ ID NO: 57477 - DNA, 8 bp, Unknown
  misc_feature (1)..( 8): Matrix.003 file - promoters60/4282915
atttgttt

SEQ ID NO: 57478 - DNA, 10 bp, Unknown
  misc_feature (1)..( 10): Matrix.003 file - promoters60/4282915
tataattgaa

SEQ ID NO: 57479 - DNA, 10 bp, Unknown
  misc_feature (1)..( 10): Matrix.003 file - promoters60/4282915
aaataataaa

SEQ ID NO: 57480 - DNA, 6 bp, Unknown
  misc_feature (1)..( 6): Matrix.003 file - promoters60/4282939
aagaga

SEQ ID NO: 57481 - DNA, 6 bp, Unknown
  misc_feature (1)..( 6): Matrix.003 file - promoters60/4282939
gatcat

SEQ ID NO: 57482 - DNA, 7 bp, Unknown
  misc_feature (1)..( 7): Matrix.003 file - promoters60/4282939
tctacat

SEQ ID NO: 57483 - DNA, 8 bp, Unknown
  misc_feature (1)..( 8): Matrix.003 file - promoters60/4282939
tttagaaa

SEQ ID NO: 57484 - DNA, 8 bp, Unknown
  misc_feature (1)..( 8): Matrix.003 file - promoters60/4282939
taaaatta

SEQ ID NO: 57485 - DNA, 8 bp, Unknown
  misc_feature (1)..( 8): Matrix.003 file - promoters60/4282939
aataaata

SEQ ID NO: 57486 - DNA, 10 bp, Unknown
  misc_feature (1)..( 10): Matrix.003 file - promoters60/4282939
ctataataat

SEQ ID NO: 57487 - DNA, 7 bp, Unknown
  misc_feature (1)..( 7): Matrix.003 file - promoters60/4282939
ttgcctc

SEQ ID NO: 57488 - DNA, 8 bp, Unknown
  misc_feature (1)..( 8): Matrix.003 file - promoters60/4282939
agaaaaga

SEQ ID NO: 57489 - DNA, 7 bp, Unknown
  misc_feature (1)..( 7): Matrix.003 file - promoters60/4282939
cataccc

SEQ ID NO: 57490 - DNA, 7 bp, Unknown
  misc_feature (1)..( 7): Matrix.003 file - promoters60/4282939
ctgggaa

SEQ ID NO: 57491 - DNA, 8 bp, Unknown
  misc_feature (1)..( 8): Matrix.003 file - promoters60/4282939
gttaactc

SEQ ID NO: 57492 - DNA, 8 bp, Unknown
  misc_feature (1)..( 8): Matrix.003 file - promoters60/4282941
atttaaag

SEQ ID NO: 57493 - DNA, 8 bp, Unknown
  misc_feature (1)..( 8): Matrix.003 file - promoters60/4282941
tataattt

SEQ ID NO: 57494 - DNA, 8 bp, Unknown
  misc_feature (1)..( 8): Matrix.003 file - promoters60/4282941
tgagttcg

SEQ ID NO: 57495 - DNA, 9 bp, Unknown
  misc_feature (1)..( 9): Matrix.003 file - promoters60/4282941
taaaaattg

SEQ ID NO: 57496 - DNA, 6 bp, Unknown
  misc_feature (1)..( 6): Matrix.003 file - promoters60/4282941
attggg

SEQ ID NO: 57497 - DNA, 6 bp, Unknown
  misc_feature (1)..( 6): Matrix.003 file - promoters60/4282941
tgagat

SEQ ID NO: 57498 - DNA, 12 bp, Unknown
  misc_feature (1)..( 12): Matrix.003 file - promoters60/4282941
tatttaattttt

SEQ ID NO: 57499 - DNA, 9 bp, Unknown
  misc_feature (1)..( 9): Matrix.003 file - promoters60/4282941
aatataaat

SEQ ID NO: 57500 - DNA, 9 bp, Unknown
  misc_feature (1)..( 9): Matrix.003 file - promoters60/4282941
taaatattc

SEQ ID NO: 57501 - DNA, 7 bp, Unknown
  misc_feature (1)..( 7): Matrix.003 file - promoters60/4282941
ttaaaat

SEQ ID NO: 57502 - DNA, 6 bp, Unknown
  misc_feature (1)..( 6): Matrix.003 file - promoters60/4282941
aaataa

SEQ ID NO: 57503 - DNA, 7 bp, Unknown
  misc_feature (1)..( 7): Matrix.003 file - promoters60/4282941
cataaaa

SEQ ID NO: 57504 - DNA, 6 bp, Unknown
  misc_feature (1)..( 6): Matrix.003 file - promoters60/4282941
aaaatt

SEQ ID NO: 57505 - DNA, 9 bp, Unknown
  misc_feature (1)..( 9): Matrix.003 file - promoters60/4282941
tttatatta

SEQ ID NO: 57506 - DNA, 14 bp, Unknown
  misc_feature (1)..( 14): Matrix.003 file - promoters60/4282941
aatacaaattatat

SEQ ID NO: 57507 - DNA, 6 bp, Unknown
  misc_feature (1)..( 6): Matrix.003 file - promoters60/4282941
atatta

SEQ ID NO: 57508 - DNA, 8 bp, Unknown
  misc_feature (1)..( 8): Matrix.003 file - promoters60/4282941
tatgaaac

SEQ ID NO: 57509 - DNA, 8 bp, Unknown
  misc_feature (1)..( 8): Matrix.003 file - promoters60/4282941
tttaaaag

SEQ ID NO: 57510 - DNA, 7 bp, Unknown
  misc_feature (1)..( 7): Matrix.003 file - promoters60/4282941
aatctaa

SEQ ID NO: 57511 - DNA, 9 bp, Unknown
  misc_feature (1)..( 9): Matrix.003 file - promoters60/4282941
atatatttt

SEQ ID NO: 57512 - DNA, 6 bp, Unknown
  misc_feature (1)..( 6): Matrix.003 file - promoters60/4282941
taaaaa

SEQ ID NO: 57513 - DNA, 7 bp, Unknown
  misc_feature (1)..( 7): Matrix.003 file - promoters60/4282941
atatttt

SEQ ID NO: 57514 - DNA, 7 bp, Unknown
  misc_feature (1)..( 7): Matrix.003 file - promoters60/4282941
aatacaa

SEQ ID NO: 57515 - DNA, 11 bp, Unknown
  misc_feature (1)..( 11): Matrix.003 file - promoters60/4283003
aataatttgta

SEQ ID NO: 57516 - DNA, 7 bp, Unknown
  misc_feature (1)..( 7): Matrix.003 file - promoters60/4283003
ttgtaac

SEQ ID NO: 57517 - DNA, 7 bp, Unknown
  misc_feature (1)..( 7): Matrix.003 file - promoters60/4283003
atacaaa

SEQ ID NO: 57518 - DNA, 6 bp, Unknown
  misc_feature (1)..( 6): Matrix.003 file - promoters60/4283003
aaaaaa

SEQ ID NO: 57519 - DNA, 9 bp, Unknown
  misc_feature (1)..( 9): Matrix.003 file - promoters60/4283003
atcaatcat

SEQ ID NO: 57520 - DNA, 8 bp, Unknown
  misc_feature (1)..( 8): Matrix.003 file - promoters60/4283003
ttagttta

SEQ ID NO: 57521 - DNA, 7 bp, Unknown
  misc_feature (1)..( 7): Matrix.003 file - promoters60/4283003
aacagaa

SEQ ID NO: 57522 - DNA, 6 bp, Unknown
  misc_feature (1)..( 6): Matrix.003 file - promoters60/4283003
ctctta

SEQ ID NO: 57523 - DNA, 6 bp, Unknown
  misc_feature (1)..( 6): Matrix.003 file - promoters60/4283003
atcatt

SEQ ID NO: 57524 - DNA, 6 bp, Unknown
  misc_feature (1)..( 6): Matrix.003 file - promoters60/4283003
cattat

SEQ ID NO: 57525 - DNA, 7 bp, Unknown
  misc_feature (1)..( 7): Matrix.003 file - promoters60/4283003
gaaaaaa

SEQ ID NO: 57526 - DNA, 8 bp, Unknown
  misc_feature (1)..( 8): Matrix.003 file - promoters60/4283003
aacagtta

SEQ ID NO: 57527 - DNA, 11 bp, Unknown
  misc_feature (1)..( 11): Matrix.003 file - promoters60/4283003
actaaccaaat

SEQ ID NO: 57528 - DNA, 7 bp, Unknown
  misc_feature (1)..( 7): Matrix.003 file - promoters60/4283003
ttagtaa

SEQ ID NO: 57529 - DNA, 6 bp, Unknown
  misc_feature (1)..( 6): Matrix.003 file - promoters60/4283003
tttatt

SEQ ID NO: 57530 - DNA, 7 bp, Unknown
  misc_feature (1)..( 7): Matrix.003 file - promoters60/4283003
aaacaaa

SEQ ID NO: 57531 - DNA, 6 bp, Unknown
  misc_feature (1)..( 6): Matrix.003 file - promoters60/4283003
catgaa

SEQ ID NO: 57532 - DNA, 6 bp, Unknown
  misc_feature (1)..( 6): Matrix.003 file - promoters60/4283003
tcccaa

SEQ ID NO: 57533 - DNA, 6 bp, Unknown
  misc_feature (1)..( 6): Matrix.003 file - promoters60/4283003
agaaaa

SEQ ID NO: 57534 - DNA, 8 bp, Unknown
  misc_feature (1)..( 8): Matrix.003 file - promoters60/4283003
gcatccaa

SEQ ID NO: 57535 - DNA, 13 bp, Unknown
  misc_feature (1)..( 13): Matrix.003 file - promoters60/4283005
ttaagtttaagca

SEQ ID NO: 57536 - DNA, 13 bp, Unknown
  misc_feature (1)..( 13): Matrix.003 file - promoters60/4283005
aaaaaaaataata

SEQ ID NO: 57537 - DNA, 6 bp, Unknown
  misc_feature (1)..( 6): Matrix.003 file - promoters60/4283005
aaaaat

SEQ ID NO: 57538 - DNA, 12 bp, Unknown
  misc_feature (1)..( 12): Matrix.003 file - promoters60/4283005
ccaaaaaaaaaa

SEQ ID NO: 57539 - DNA, 31 bp, Unknown
  misc_feature (1)..( 31): Matrix.003 file - promoters60/4283005
attcatttttctgagtctcttaagtcttacg

SEQ ID NO: 57540 - DNA, 9 bp, Unknown
  misc_feature (1)..( 9): Matrix.003 file - promoters60/4283005
tatatatat

SEQ ID NO: 57541 - DNA, 9 bp, Unknown
  misc_feature (1)..( 9): Matrix.003 file - promoters60/4283005
gagaaaaaa

SEQ ID NO: 57542 - DNA, 11 bp, Unknown
  misc_feature (1)..( 11): Matrix.003 file - promoters60/4283005
tttaataactt

SEQ ID NO: 57543 - DNA, 12 bp, Unknown
  misc_feature (1)..( 12): Matrix.003 file - promoters60/4283005
aaaaatttaata

SEQ ID NO: 57544 - DNA, 7 bp, Unknown
  misc_feature (1)..( 7): Matrix.003 file - promoters60/4283013
cgcagca

SEQ ID NO: 57545 - DNA, 7 bp, Unknown
  misc_feature (1)..( 7): Matrix.003 file - promoters60/4283013
atagata

SEQ ID NO: 57546 - DNA, 7 bp, Unknown
  misc_feature (1)..( 7): Matrix.003 file - promoters60/4283013
caaagtt

SEQ ID NO: 57547 - DNA, 6 bp, Unknown
  misc_feature (1)..( 6): Matrix.003 file - promoters60/4283013
atatta

SEQ ID NO: 57548 - DNA, 9 bp, Unknown
  misc_feature (1)..( 9): Matrix.003 file - promoters60/4283013
gttatgtca

SEQ ID NO: 57549 - DNA, 7 bp, Unknown
  misc_feature (1)..( 7): Matrix.003 file - promoters60/4283013
tacaata

SEQ ID NO: 57550 - DNA, 7 bp, Unknown
  misc_feature (1)..( 7): Matrix.003 file - promoters60/4283013
atgaaga

SEQ ID NO: 57551 - DNA, 7 bp, Unknown
  misc_feature (1)..( 7): Matrix.003 file - promoters60/4283013
tcgtcat

SEQ ID NO: 57552 - DNA, 7 bp, Unknown
  misc_feature (1)..( 7): Matrix.003 file - promoters60/4283013
caacttg

SEQ ID NO: 57553 - DNA, 7 bp, Unknown
  misc_feature (1)..( 7): Matrix.003 file - promoters60/4283013
ataaaca

SEQ ID NO: 57554 - DNA, 7 bp, Unknown
  misc_feature (1)..( 7): Matrix.003 file - promoters60/4283013
ctttcct

SEQ ID NO: 57555 - DNA, 7 bp, Unknown
  misc_feature (1)..( 7): Matrix.003 file - promoters60/4283013
tcacaat

SEQ ID NO: 57556 - DNA, 8 bp, Unknown
  misc_feature (1)..( 8): Matrix.003 file - promoters60/4283013
tcaattat

SEQ ID NO: 57557 - DNA, 9 bp, Unknown
  misc_feature (1)..( 9): Matrix.003 file - promoters60/4283017
ttattcaat

SEQ ID NO: 57558 - DNA, 6 bp, Unknown
  misc_feature (1)..( 6): Matrix.003 file - promoters60/4283017
tcccac

SEQ ID NO: 57559 - DNA, 7 bp, Unknown
  misc_feature (1)..( 7): Matrix.003 file - promoters60/4283017
taaccat

SEQ ID NO: 57560 - DNA, 6 bp, Unknown
  misc_feature (1)..( 6): Matrix.003 file - promoters60/4283017
attttc

SEQ ID NO: 57561 - DNA, 6 bp, Unknown
  misc_feature (1)..( 6): Matrix.003 file - promoters60/4283017
tgaatt

SEQ ID NO: 57562 - DNA, 6 bp, Unknown
  misc_feature (1)..( 6): Matrix.003 file - promoters60/4283017
gattat

SEQ ID NO: 57563 - DNA, 6 bp, Unknown
  misc_feature (1)..( 6): Matrix.003 file - promoters60/4283017
tgtatt

SEQ ID NO: 57564 - DNA, 7 bp, Unknown
  misc_feature (1)..( 7): Matrix.003 file - promoters60/4283017
tataaac

SEQ ID NO: 57565 - DNA, 9 bp, Unknown
  misc_feature (1)..( 9): Matrix.003 file - promoters60/4283017
aaaagatct

SEQ ID NO: 57566 - DNA, 6 bp, Unknown
  misc_feature (1)..( 6): Matrix.003 file - promoters60/4283017
atcttc

SEQ ID NO: 57567 - DNA, 6 bp, Unknown
  misc_feature (1)..( 6): Matrix.003 file - promoters60/4283041
cattca

SEQ ID NO: 57568 - DNA, 6 bp, Unknown
  misc_feature (1)..( 6): Matrix.003 file - promoters60/4283041
tcacaa

SEQ ID NO: 57569 - DNA, 7 bp, Unknown
  misc_feature (1)..( 7): Matrix.003 file - promoters60/4283041
ttattta

SEQ ID NO: 57570 - DNA, 11 bp, Unknown
  misc_feature (1)..( 11): Matrix.003 file - promoters60/4283041
aaaaaaagaaa

SEQ ID NO: 57571 - DNA, 7 bp, Unknown
  misc_feature (1)..( 7): Matrix.003 file - promoters60/4283041
aagggaa

SEQ ID NO: 57572 - DNA, 6 bp, Unknown
  misc_feature (1)..( 6): Matrix.003 file - promoters60/4283041
tcgaaa

SEQ ID NO: 57573 - DNA, 11 bp, Unknown
  misc_feature (1)..( 11): Matrix.003 file - promoters60/4283041
aacacaccaaa

SEQ ID NO: 57574 - DNA, 7 bp, Unknown
  misc_feature (1)..( 7): Matrix.003 file - promoters60/4283041
aaaaaaa

SEQ ID NO: 57575 - DNA, 7 bp, Unknown
  misc_feature (1)..( 7): Matrix.003 file - promoters60/4283041
aataaaa

SEQ ID NO: 57576 - DNA, 6 bp, Unknown
  misc_feature (1)..( 6): Matrix.003 file - promoters60/4283041
agtaaa

SEQ ID NO: 57577 - DNA, 7 bp, Unknown
  misc_feature (1)..( 7): Matrix.003 file - promoters60/4283041
aatcggg

SEQ ID NO: 57578 - DNA, 8 bp, Unknown
  misc_feature (1)..( 8): Matrix.003 file - promoters60/4283041
gaaacaaa

SEQ ID NO: 57579 - DNA, 10 bp, Unknown
  misc_feature (1)..( 10): Matrix.003 file - promoters60/4283041
ggaaaagaaa

SEQ ID NO: 57580 - DNA, 7 bp, Unknown
  misc_feature (1)..( 7): Matrix.003 file - promoters60/4283041
cccacta

SEQ ID NO: 57581 - DNA, 9 bp, Unknown
  misc_feature (1)..( 9): Matrix.003 file - promoters60/4283041
aaagaaaag

SEQ ID NO: 57582 - DNA, 7 bp, Unknown
  misc_feature (1)..( 7): Matrix.003 file - promoters60/4283041
gtatata

SEQ ID NO: 57583 - DNA, 9 bp, Unknown
  misc_feature (1)..( 9): Matrix.003 file - promoters60/4283105
atacgatag

SEQ ID NO: 57584 - DNA, 7 bp, Unknown
  misc_feature (1)..( 7): Matrix.003 file - promoters60/4283105
actattt

SEQ ID NO: 57585 - DNA, 9 bp, Unknown
  misc_feature (1)..( 9): Matrix.003 file - promoters60/4283105
ttaatctaa

SEQ ID NO: 57586 - DNA, 10 bp, Unknown
  misc_feature (1)..( 10): Matrix.003 file - promoters60/4283105
attcgttttc

SEQ ID NO: 57587 - DNA, 7 bp, Unknown
  misc_feature (1)..( 7): Matrix.003 file - promoters60/4283105
tttaaca

SEQ ID NO: 57588 - DNA, 7 bp, Unknown
  misc_feature (1)..( 7): Matrix.003 file - promoters60/4283105
acaaatt

SEQ ID NO: 57589 - DNA, 7 bp, Unknown
  misc_feature (1)..( 7): Matrix.003 file - promoters60/4283105
cataaaa

SEQ ID NO: 57590 - DNA, 7 bp, Unknown
  misc_feature (1)..( 7): Matrix.003 file - promoters60/4283105
tcaaaac

SEQ ID NO: 57591 - DNA, 8 bp, Unknown
  misc_feature (1)..( 8): Matrix.003 file - promoters60/4283105
accaatca

SEQ ID NO: 57592 - DNA, 6 bp, Unknown
  misc_feature (1)..( 6): Matrix.003 file - promoters60/4283105
agaaag

SEQ ID NO: 57593 - DNA, 6 bp, Unknown
  misc_feature (1)..( 6): Matrix.003 file - promoters60/4283105
aataat

SEQ ID NO: 57594 - DNA, 8 bp, Unknown
  misc_feature (1)..( 8): Matrix.003 file - promoters60/4283105
tctactaa

SEQ ID NO: 57595 - DNA, 7 bp, Unknown
  misc_feature (1)..( 7): Matrix.003 file - promoters60/4283105
tgaaaca

SEQ ID NO: 57596 - DNA, 7 bp, Unknown
  misc_feature (1)..( 7): Matrix.003 file - promoters60/4283105
tagagaa

SEQ ID NO: 57597 - DNA, 6 bp, Unknown
  misc_feature (1)..( 6): Matrix.003 file - promoters60/4283105
aacact

SEQ ID NO: 57598 - DNA, 6 bp, Unknown
  misc_feature (1)..( 6): Matrix.003 file - promoters60/4283105
ttctta

SEQ ID NO: 57599 - DNA, 6 bp, Unknown
  misc_feature (1)..( 6): Matrix.003 file - promoters60/4283105
gtcata

SEQ ID NO: 57600 - DNA, 8 bp, Unknown
  misc_feature (1)..( 8): Matrix.003 file - promoters60/4283105
caaaacaa

SEQ ID NO: 57601 - DNA, 7 bp, Unknown
  misc_feature (1)..( 7): Matrix.003 file - promoters60/4283105
ttaaaca

SEQ ID NO: 57602 - DNA, 6 bp, Unknown
  misc_feature (1)..( 6): Matrix.003 file - promoters60/4283105
attctt

SEQ ID NO: 57603 - DNA, 9 bp, Unknown
  misc_feature (1)..( 9): Matrix.003 file - promoters60/4283218
tatataaac

SEQ ID NO: 57604 - DNA, 7 bp, Unknown
  misc_feature (1)..( 7): Matrix.003 file - promoters60/4283218
tttttac

SEQ ID NO: 57605 - DNA, 7 bp, Unknown
  misc_feature (1)..( 7): Matrix.003 file - promoters60/4283222
tttactt

SEQ ID NO: 57606 - DNA, 7 bp, Unknown
  misc_feature (1)..( 7): Matrix.003 file - promoters60/4283222
aaataca

SEQ ID NO: 57607 - DNA, 9 bp, Unknown
  misc_feature (1)..( 9): Matrix.003 file - promoters60/4283222
aaatatttt

SEQ ID NO: 57608 - DNA, 6 bp, Unknown
  misc_feature (1)..( 6): Matrix.003 file - promoters60/4283222
ttttat

SEQ ID NO: 57609 - DNA, 6 bp, Unknown
  misc_feature (1)..( 6): Matrix.003 file - promoters60/4283222
aataat

SEQ ID NO: 57610 - DNA, 9 bp, Unknown
  misc_feature (1)..( 9): Matrix.003 file - promoters60/4283222
taaaaattt

SEQ ID NO: 57611 - DNA, 7 bp, Unknown
  misc_feature (1)..( 7): Matrix.003 file - promoters60/4283222
atttatt

SEQ ID NO: 57612 - DNA, 6 bp, Unknown
  misc_feature (1)..( 6): Matrix.003 file - promoters60/4283222
acaaaa

SEQ ID NO: 57613 - DNA, 6 bp, Unknown
  misc_feature (1)..( 6): Matrix.003 file - promoters60/4283222
atacaa

SEQ ID NO: 57614 - DNA, 9 bp, Unknown
  misc_feature (1)..( 9): Matrix.003 file - promoters60/4283222
taaacattg

SEQ ID NO: 57615 - DNA, 6 bp, Unknown
  misc_feature (1)..( 6): Matrix.003 file - promoters60/4283222
ccaaat

SEQ ID NO: 57616 - DNA, 8 bp, Unknown
  misc_feature (1)..( 8): Matrix.003 file - promoters60/4283222
aaattgaa

SEQ ID NO: 57617 - DNA, 6 bp, Unknown
  misc_feature (1)..( 6): Matrix.003 file - promoters60/4283222
attttt

SEQ ID NO: 57618 - DNA, 6 bp, Unknown
  misc_feature (1)..( 6): Matrix.003 file - promoters60/4283222
ttacta

SEQ ID NO: 57619 - DNA, 6 bp, Unknown
  misc_feature (1)..( 6): Matrix.003 file - promoters60/4283222
atttgc

SEQ ID NO: 57620 - DNA, 7 bp, Unknown
  misc_feature (1)..( 7): Matrix.003 file - promoters60/4283222
tttatcg

SEQ ID NO: 57621 - DNA, 6 bp, Unknown
  misc_feature (1)..( 6): Matrix.003 file - promoters60/4283222
attttt

SEQ ID NO: 57622 - DNA, 6 bp, Unknown
  misc_feature (1)..( 6): Matrix.003 file - promoters60/4283222
tccatt

SEQ ID NO: 57623 - DNA, 6 bp, Unknown
  misc_feature (1)..( 6): Matrix.003 file - promoters60/4283222
aattat

SEQ ID NO: 57624 - DNA, 8 bp, Unknown
  misc_feature (1)..( 8): Matrix.003 file - promoters60/4283222
tgtggaga

SEQ ID NO: 57625 - DNA, 6 bp, Unknown
  misc_feature (1)..( 6): Matrix.003 file - promoters60/4283222
agacta

SEQ ID NO: 57626 - DNA, 7 bp, Unknown
  misc_feature (1)..( 7): Matrix.003 file - promoters60/4283222
aaagatc

SEQ ID NO: 57627 - DNA, 6 bp, Unknown
  misc_feature (1)..( 6): Matrix.003 file - promoters60/4283222
agtgat

SEQ ID NO: 57628 - DNA, 7 bp, Unknown
  misc_feature (1)..( 7): Matrix.003 file - promoters60/4283222
ttcgtta

SEQ ID NO: 57629 - DNA, 6 bp, Unknown
  misc_feature (1)..( 6): Matrix.003 file - promoters60/4283222
ttgcca

SEQ ID NO: 57630 - DNA, 6 bp, Unknown
  misc_feature (1)..( 6): Matrix.003 file - promoters60/4283222
aatatt

SEQ ID NO: 57631 - DNA, 9 bp, Unknown
  misc_feature (1)..( 9): Matrix.003 file - promoters60/4283222
aaaacaatt

SEQ ID NO: 57632 - DNA, 7 bp, Unknown
  misc_feature (1)..( 7): Matrix.003 file - promoters60/4283222
aagatat

SEQ ID NO: 57633 - DNA, 9 bp, Unknown
  misc_feature (1)..( 9): Matrix.003 file - promoters60/4283222
attcttgct

SEQ ID NO: 57634 - DNA, 8 bp, Unknown
  misc_feature (1)..( 8): Matrix.003 file - promoters60/4283240
aaatttag

SEQ ID NO: 57635 - DNA, 8 bp, Unknown
  misc_feature (1)..( 8): Matrix.003 file - promoters60/4283240
aaattata

SEQ ID NO: 57636 - DNA, 8 bp, Unknown
  misc_feature (1)..( 8): Matrix.003 file - promoters60/4283240
gatatttt

SEQ ID NO: 57637 - DNA, 8 bp, Unknown
  misc_feature (1)..( 8): Matrix.003 file - promoters60/4283293
tttatttc

SEQ ID NO: 57638 - DNA, 7 bp, Unknown
  misc_feature (1)..( 7): Matrix.003 file - promoters60/4283293
tatttaa

SEQ ID NO: 57639 - DNA, 8 bp, Unknown
  misc_feature (1)..( 8): Matrix.003 file - promoters60/4283297
caaagaaa

SEQ ID NO: 57640 - DNA, 9 bp, Unknown
  misc_feature (1)..( 9): Matrix.003 file - promoters60/4283297
taaaatcat

SEQ ID NO: 57641 - DNA, 11 bp, Unknown
  misc_feature (1)..( 11): Matrix.003 file - promoters60/4283297
aaatattggaa

SEQ ID NO: 57642 - DNA, 12 bp, Unknown
  misc_feature (1)..( 12): Matrix.003 file - promoters60/4283338
taaccgattaaa

SEQ ID NO: 57643 - DNA, 11 bp, Unknown
  misc_feature (1)..( 11): Matrix.003 file - promoters60/4283338
gaaaaaataaa

SEQ ID NO: 57644 - DNA, 14 bp, Unknown
  misc_feature (1)..( 14): Matrix.003 file - promoters60/4283378
taaatttgttaacc

SEQ ID NO: 57645 - DNA, 14 bp, Unknown
  misc_feature (1)..( 14): Matrix.003 file - promoters60/4283378
attagaaaatttca

SEQ ID NO: 57646 - DNA, 8 bp, Unknown
  misc_feature (1)..( 8): Matrix.003 file - promoters60/4283378
ttttgaag

SEQ ID NO: 57647 - DNA, 19 bp, Unknown
  misc_feature (1)..( 19): Matrix.003 file - promoters60/4283378
tgaaataaattttaaaaat

SEQ ID NO: 57648 - DNA, 11 bp, Unknown
  misc_feature (1)..( 11): Matrix.003 file - promoters60/4283378
tatatataaac

SEQ ID NO: 57649 - DNA, 12 bp, Unknown
  misc_feature (1)..( 12): Matrix.003 file - promoters60/4283378
tataaaaaacaa

SEQ ID NO: 57650 - DNA, 10 bp, Unknown
  misc_feature (1)..( 10): Matrix.003 file - promoters60/4283378
aattagttta

SEQ ID NO: 57651 - DNA, 6 bp, Unknown
  misc_feature (1)..( 6): Matrix.003 file - promoters60/4283390
tctcga

SEQ ID NO: 57652 - DNA, 9 bp, Unknown
  misc_feature (1)..( 9): Matrix.003 file - promoters60/4283390
gccatggct

SEQ ID NO: 57653 - DNA, 6 bp, Unknown
  misc_feature (1)..( 6): Matrix.003 file - promoters60/4283390
aaaagc

SEQ ID NO: 57654 - DNA, 8 bp, Unknown
  misc_feature (1)..( 8): Matrix.003 file - promoters60/4283390
aataaatt

SEQ ID NO: 57655 - DNA, 9 bp, Unknown
  misc_feature (1)..( 9): Matrix.003 file - promoters60/4283390
attatgtat

SEQ ID NO: 57656 - DNA, 6 bp, Unknown
  misc_feature (1)..( 6): Matrix.003 file - promoters60/4283390
aaactt

SEQ ID NO: 57657 - DNA, 11 bp, Unknown
  misc_feature (1)..( 11): Matrix.003 file - promoters60/4283390
aagcgaacaac

SEQ ID NO: 57658 - DNA, 6 bp, Unknown
  misc_feature (1)..( 6): Matrix.003 file - promoters60/4283390
aaatta

SEQ ID NO: 57659 - DNA, 7 bp, Unknown
  misc_feature (1)..( 7): Matrix.003 file - promoters60/4283390
attacaa

SEQ ID NO: 57660 - DNA, 6 bp, Unknown
  misc_feature (1)..( 6): Matrix.003 file - promoters60/4283390
acattc

SEQ ID NO: 57661 - DNA, 8 bp, Unknown
  misc_feature (1)..( 8): Matrix.003 file - promoters60/4283390
aaagagtt

SEQ ID NO: 57662 - DNA, 7 bp, Unknown
  misc_feature (1)..( 7): Matrix.003 file - promoters60/4283397
attttaa

SEQ ID NO: 57663 - DNA, 9 bp, Unknown
  misc_feature (1)..( 9): Matrix.003 file - promoters60/4283397
ttttaaaaa

SEQ ID NO: 57664 - DNA, 6 bp, Unknown
  misc_feature (1)..( 6): Matrix.003 file - promoters60/4283397
aatcaa

SEQ ID NO: 57665 - DNA, 6 bp, Unknown
  misc_feature (1)..( 6): Matrix.003 file - promoters60/4283397
aatttt

SEQ ID NO: 57666 - DNA, 6 bp, Unknown
  misc_feature (1)..( 6): Matrix.003 file - promoters60/4283397
catata

SEQ ID NO: 57667 - DNA, 8 bp, Unknown
  misc_feature (1)..( 8): Matrix.003 file - promoters60/4283397
atttctaa

SEQ ID NO: 57668 - DNA, 7 bp, Unknown
  misc_feature (1)..( 7): Matrix.003 file - promoters60/4283397
tttattt

SEQ ID NO: 57669 - DNA, 11 bp, Unknown
  misc_feature (1)..( 11): Matrix.003 file - promoters60/4283397
aaaaaaaattt

SEQ ID NO: 57670 - DNA, 7 bp, Unknown
  misc_feature (1)..( 7): Matrix.003 file - promoters60/4283397
aataaaa

SEQ ID NO: 57671 - DNA, 6 bp, Unknown
  misc_feature (1)..( 6): Matrix.003 file - promoters60/4283397
aatttt

SEQ ID NO: 57672 - DNA, 9 bp, Unknown
  misc_feature (1)..( 9): Matrix.003 file - promoters60/4283397
tttacaaaa

SEQ ID NO: 57673 - DNA, 6 bp, Unknown
  misc_feature (1)..( 6): Matrix.003 file - promoters60/4283397
ttctaa

SEQ ID NO: 57674 - DNA, 7 bp, Unknown
  misc_feature (1)..( 7): Matrix.003 file - promoters60/4283397
ataaaaa

SEQ ID NO: 57675 - DNA, 8 bp, Unknown
  misc_feature (1)..( 8): Matrix.003 file - promoters60/4283397
aaaagaga

SEQ ID NO: 57676 - DNA, 6 bp, Unknown
  misc_feature (1)..( 6): Matrix.003 file - promoters60/4283397
ttttgt

SEQ ID NO: 57677 - DNA, 6 bp, Unknown
  misc_feature (1)..( 6): Matrix.003 file - promoters60/4283397
tgtttt

SEQ ID NO: 57678 - DNA, 7 bp, Unknown
  misc_feature (1)..( 7): Matrix.003 file - promoters60/4283397
gtaatgt

SEQ ID NO: 57679 - DNA, 6 bp, Unknown
  misc_feature (1)..( 6): Matrix.003 file - promoters60/4283397
ccccca

SEQ ID NO: 57680 - DNA, 6 bp, Unknown
  misc_feature (1)..( 6): Matrix.003 file - promoters60/4283425
tcttct

SEQ ID NO: 57681 - DNA, 9 bp, Unknown
  misc_feature (1)..( 9): Matrix.003 file - promoters60/4283425
ccaaaaaaa

SEQ ID NO: 57682 - DNA, 6 bp, Unknown
  misc_feature (1)..( 6): Matrix.003 file - promoters60/4283425
cataga

SEQ ID NO: 57683 - DNA, 6 bp, Unknown
  misc_feature (1)..( 6): Matrix.003 file - promoters60/4283425
gaaaaa

SEQ ID NO: 57684 - DNA, 9 bp, Unknown
  misc_feature (1)..( 9): Matrix.003 file - promoters60/4283425
ggtctaaag

SEQ ID NO: 57685 - DNA, 8 bp, Unknown
  misc_feature (1)..( 8): Matrix.003 file - promoters60/4283425
tataatat

SEQ ID NO: 57686 - DNA, 10 bp, Unknown
  misc_feature (1)..( 10): Matrix.003 file - promoters60/4283425
agttagattt

SEQ ID NO: 57687 - DNA, 9 bp, Unknown
  misc_feature (1)..( 9): Matrix.003 file - promoters60/4283425
tatacatgt

SEQ ID NO: 57688 - DNA, 11 bp, Unknown
  misc_feature (1)..( 11): Matrix.003 file - promoters60/4283425
aaaccatatta

SEQ ID NO: 57689 - DNA, 6 bp, Unknown
  misc_feature (1)..( 6): Matrix.003 file - promoters60/4283425
gacaaa

SEQ ID NO: 57690 - DNA, 6 bp, Unknown
  misc_feature (1)..( 6): Matrix.003 file - promoters60/4283425
aaaaaa

SEQ ID NO: 57691 - DNA, 6 bp, Unknown
  misc_feature (1)..( 6): Matrix.003 file - promoters60/4283425
agacaa

SEQ ID NO: 57692 - DNA, 6 bp, Unknown
  misc_feature (1)..( 6): Matrix.003 file - promoters60/4283425
agagac

SEQ ID NO: 57693 - DNA, 7 bp, Unknown
  misc_feature (1)..( 7): Matrix.003 file - promoters60/4283425
tcttatt

SEQ ID NO: 57694 - DNA, 6 bp, Unknown
  misc_feature (1)..( 6): Matrix.003 file - promoters60/4283425
catatt

SEQ ID NO: 57695 - DNA, 6 bp, Unknown
  misc_feature (1)..( 6): Matrix.003 file - promoters60/4283425
tatttt

SEQ ID NO: 57696 - DNA, 7 bp, Unknown
  misc_feature (1)..( 7): Matrix.003 file - promoters60/4283425
ttttttt

SEQ ID NO: 57697 - DNA, 9 bp, Unknown
  misc_feature (1)..( 9): Matrix.003 file - promoters60/4283425
caatatttt

SEQ ID NO: 57698 - DNA, 8 bp, Unknown
  misc_feature (1)..( 8): Matrix.003 file - promoters60/4283425
caacaaaa

SEQ ID NO: 57699 - DNA, 6 bp, Unknown
  misc_feature (1)..( 6): Matrix.003 file - promoters60/4283425
aaaaaa

SEQ ID NO: 57700 - DNA, 11 bp, Unknown
  misc_feature (1)..( 11): Matrix.003 file - promoters60/4283425
ttcatatcttt

SEQ ID NO: 57701 - DNA, 7 bp, Unknown
  misc_feature (1)..( 7): Matrix.003 file - promoters60/4283425
cacagtt

SEQ ID NO: 57702 - DNA, 8 bp, Unknown
  misc_feature (1)..( 8): Matrix.003 file - promoters60/4283425
gcgaaaat

SEQ ID NO: 57703 - DNA, 7 bp, Unknown
  misc_feature (1)..( 7): Matrix.003 file - promoters60/4283425
ataaata

SEQ ID NO: 57704 - DNA, 10 bp, Unknown
  misc_feature (1)..( 10): Matrix.003 file - promoters60/4283425
tataaatata

SEQ ID NO: 57705 - DNA, 6 bp, Unknown
  misc_feature (1)..( 6): Matrix.003 file - promoters60/4283510
tagctc

SEQ ID NO: 57706 - DNA, 9 bp, Unknown
  misc_feature (1)..( 9): Matrix.003 file - promoters60/4283510
tttctcttc

SEQ ID NO: 57707 - DNA, 7 bp, Unknown
  misc_feature (1)..( 7): Matrix.003 file - promoters60/4283510
atttttc

SEQ ID NO: 57708 - DNA, 8 bp, Unknown
  misc_feature (1)..( 8): Matrix.003 file - promoters60/4283614
tatattat

SEQ ID NO: 57709 - DNA, 6 bp, Unknown
  misc_feature (1)..( 6): Matrix.003 file - promoters60/4283614
acatgg

SEQ ID NO: 57710 - DNA, 7 bp, Unknown
  misc_feature (1)..( 7): Matrix.003 file - promoters60/4283614
ttgatga

SEQ ID NO: 57711 - DNA, 9 bp, Unknown
  misc_feature (1)..( 9): Matrix.003 file - promoters60/4283614
aaccctaaa

SEQ ID NO: 57712 - DNA, 8 bp, Unknown
  misc_feature (1)..( 8): Matrix.003 file - promoters60/4283614
tacaaacg

SEQ ID NO: 57713 - DNA, 6 bp, Unknown
  misc_feature (1)..( 6): Matrix.003 file - promoters60/4283614
tgaaaa

SEQ ID NO: 57714 - DNA, 7 bp, Unknown
  misc_feature (1)..( 7): Matrix.003 file - promoters60/4283614
aacctga

SEQ ID NO: 57715 - DNA, 8 bp, Unknown
  misc_feature (1)..( 8): Matrix.003 file - promoters60/4283614
atgaaaat

SEQ ID NO: 57716 - DNA, 7 bp, Unknown
  misc_feature (1)..( 7): Matrix.003 file - promoters60/4283614
tctatcc

SEQ ID NO: 57717 - DNA, 7 bp, Unknown
  misc_feature (1)..( 7): Matrix.003 file - promoters60/4283614
caaacta

SEQ ID NO: 57718 - DNA, 6 bp, Unknown
  misc_feature (1)..( 6): Matrix.003 file - promoters60/4283614
aaaaat

SEQ ID NO: 57719 - DNA, 6 bp, Unknown
  misc_feature (1)..( 6): Matrix.003 file - promoters60/4283614
aaatta

SEQ ID NO: 57720 - DNA, 7 bp, Unknown
  misc_feature (1)..( 7): Matrix.003 file - promoters60/4283614
cttcttt

SEQ ID NO: 57721 - DNA, 6 bp, Unknown
  misc_feature (1)..( 6): Matrix.003 file - promoters60/4283614
gaatca

SEQ ID NO: 57722 - DNA, 7 bp, Unknown
  misc_feature (1)..( 7): Matrix.003 file - promoters60/4283614
tccagtt

SEQ ID NO: 57723 - DNA, 6 bp, Unknown
  misc_feature (1)..( 6): Matrix.003 file - promoters60/4283614
tttccg

SEQ ID NO: 57724 - DNA, 6 bp, Unknown
  misc_feature (1)..( 6): Matrix.003 file - promoters60/4283614
ataaat

SEQ ID NO: 57725 - DNA, 9 bp, Unknown
  misc_feature (1)..( 9): Matrix.003 file - promoters60/4283616
tatcgtttg

SEQ ID NO: 57726 - DNA, 10 bp, Unknown
  misc_feature (1)..( 10): Matrix.003 file - promoters60/4283616
tactctccgt

SEQ ID NO: 57727 - DNA, 16 bp, Unknown
  misc_feature (1)..( 16): Matrix.003 file - promoters60/4283616
aaaaattaaaacaagt

SEQ ID NO: 57728 - DNA, 8 bp, Unknown
  misc_feature (1)..( 8): Matrix.003 file - promoters60/4283616
tagggttt

SEQ ID NO: 57729 - DNA, 9 bp, Unknown
  misc_feature (1)..( 9): Matrix.003 file - promoters60/4283616
gactaaaga

SEQ ID NO: 57730 - DNA, 8 bp, Unknown
  misc_feature (1)..( 8): Matrix.003 file - promoters60/4283624
tttgcatt

SEQ ID NO: 57731 - DNA, 11 bp, Unknown
  misc_feature (1)..( 11): Matrix.003 file - promoters60/4283624
tatttttaaaa

SEQ ID NO: 57732 - DNA, 11 bp, Unknown
  misc_feature (1)..( 11): Matrix.003 file - promoters60/4283624
aaactttaata

SEQ ID NO: 57733 - DNA, 7 bp, Unknown
  misc_feature (1)..( 7): Matrix.003 file - promoters60/4283624
tcactta

SEQ ID NO: 57734 - DNA, 14 bp, Unknown
  misc_feature (1)..( 14): Matrix.003 file - promoters60/4304982
ataaagtaatttaa

SEQ ID NO: 57735 - DNA, 11 bp, Unknown
  misc_feature (1)..( 11): Matrix.003 file - promoters60/4378608
tttttaaattt

SEQ ID NO: 57736 - DNA, 11 bp, Unknown
  misc_feature (1)..( 11): Matrix.003 file - promoters60/4378608
gataagtaaag

SEQ ID NO: 57737 - DNA, 9 bp, Unknown
  misc_feature (1)..( 9): Matrix.003 file - promoters60/4378608
ctctccaat

SEQ ID NO: 57738 - DNA, 9 bp, Unknown
  misc_feature (1)..( 9): Matrix.003 file - promoters60/4378608
aatttacaa

SEQ ID NO: 57739 - DNA, 11 bp, Unknown
  misc_feature (1)..( 11): Matrix.003 file - promoters60/4577400
acataattaag

SEQ ID NO: 57740 - DNA, 8 bp, Unknown
  misc_feature (1)..( 8): Matrix.003 file - promoters60/4577400
gtaaaaat

SEQ ID NO: 57741 - DNA, 11 bp, Unknown
  misc_feature (1)..( 11): Matrix.003 file - promoters60/4607678
tttatattata

SEQ ID NO: 57742 - DNA, 10 bp, Unknown
  misc_feature (1)..( 10): Matrix.003 file - promoters60/4607678
ttctatttca

SEQ ID NO: 57743 - DNA, 8 bp, Unknown
  misc_feature (1)..( 8): Matrix.003 file - promoters60/4607678
ttcaattg

SEQ ID NO: 57744 - DNA, 13 bp, Unknown
  misc_feature (1)..( 13): Matrix.003 file - promoters60/4607678
tcattttcaaaag

SEQ ID NO: 57745 - DNA, 14 bp, Unknown
  misc_feature (1)..( 14): Matrix.003 file - promoters60/4607678
aatattttcaaaag

SEQ ID NO: 57746 - DNA, 12 bp, Unknown
  misc_feature (1)..( 12): Matrix.003 file - promoters60/4607678
caataatgatat

SEQ ID NO: 57747 - DNA, 10 bp, Unknown
  misc_feature (1)..( 10): Matrix.003 file - promoters60/4607678
attttaaaaa

SEQ ID NO: 57748 - DNA, 14 bp, Unknown
  misc_feature (1)..( 14): Matrix.003 file - promoters60/4607678
tttggttacaagta

SEQ ID NO: 57749 - DNA, 9 bp, Unknown
  misc_feature (1)..( 9): Matrix.003 file - promoters60/4607678
tttacaaga

SEQ ID NO: 57750 - DNA, 8 bp, Unknown
  misc_feature (1)..( 8): Matrix.003 file - promoters60/4607692
taaaattt

SEQ ID NO: 57751 - DNA, 9 bp, Unknown
  misc_feature (1)..( 9): Matrix.003 file - promoters60/4607692
ttaaatatc

SEQ ID NO: 57752 - DNA, 10 bp, Unknown
  misc_feature (1)..( 10): Matrix.003 file - promoters60/4607692
tttacttcta

SEQ ID NO: 57753 - DNA, 11 bp, Unknown
  misc_feature (1)..( 11): Matrix.003 file - promoters60/4607692
taaaaaaacta

SEQ ID NO: 57754 - DNA, 9 bp, Unknown
  misc_feature (1)..( 9): Matrix.003 file - promoters60/4607692
aataaaatt

SEQ ID NO: 57755 - DNA, 9 bp, Unknown
  misc_feature (1)..( 9): Matrix.003 file - promoters60/4607692
aaataaaaa

SEQ ID NO: 57756 - DNA, 11 bp, Unknown
  misc_feature (1)..( 11): Matrix.003 file - promoters60/4607692
acaaatttatt

SEQ ID NO: 57757 - DNA, 9 bp, Unknown
  misc_feature (1)..( 9): Matrix.003 file - promoters60/4607692
aaaaaagaa

SEQ ID NO: 57758 - DNA, 9 bp, Unknown
  misc_feature (1)..( 9): Matrix.003 file - promoters60/4608096
catataaaa

SEQ ID NO: 57759 - DNA, 10 bp, Unknown
  misc_feature (1)..( 10): Matrix.003 file - promoters60/4608104
tataagaaaa

SEQ ID NO: 57760 - DNA, 12 bp, Unknown
  misc_feature (1)..( 12): Matrix.003 file - promoters60/4608104
aaactaatagac

SEQ ID NO: 57761 - DNA, 9 bp, Unknown
  misc_feature (1)..( 9): Matrix.003 file - promoters60/4608104
taagaaaaa

SEQ ID NO: 57762 - DNA, 9 bp, Unknown
  misc_feature (1)..( 9): Matrix.003 file - promoters60/4608104
aaaaattac

SEQ ID NO: 57763 - DNA, 10 bp, Unknown
  misc_feature (1)..( 10): Matrix.003 file - promoters60/4608104
caagaaaaaa

SEQ ID NO: 57764 - DNA, 11 bp, Unknown
  misc_feature (1)..( 11): Matrix.003 file - promoters60/4608104
aaaagaaaaaa

SEQ ID NO: 57765 - DNA, 8 bp, Unknown
  misc_feature (1)..( 8): Matrix.003 file - promoters60/4608140
catttttg

SEQ ID NO: 57766 - DNA, 7 bp, Unknown
  misc_feature (1)..( 7): Matrix.003 file - promoters60/4608140
ttgctaa

SEQ ID NO: 57767 - DNA, 10 bp, Unknown
  misc_feature (1)..( 10): Matrix.003 file - promoters60/4608140
tgtaaaaatt

SEQ ID NO: 57768 - DNA, 7 bp, Unknown
  misc_feature (1)..( 7): Matrix.003 file - promoters60/4608140
aaaatta

SEQ ID NO: 57769 - DNA, 8 bp, Unknown
  misc_feature (1)..( 8): Matrix.003 file - promoters60/4608140
aaaacaat

SEQ ID NO: 57770 - DNA, 10 bp, Unknown
  misc_feature (1)..( 10): Matrix.003 file - promoters60/4608140
agagacaaat

SEQ ID NO: 57771 - DNA, 9 bp, Unknown
  misc_feature (1)..( 9): Matrix.003 file - promoters60/4608140
tctttggat

SEQ ID NO: 57772 - DNA, 8 bp, Unknown
  misc_feature (1)..( 8): Matrix.003 file - promoters60/4608140
catatttg

SEQ ID NO: 57773 - DNA, 8 bp, Unknown
  misc_feature (1)..( 8): Matrix.003 file - promoters60/4608140
attttttt

SEQ ID NO: 57774 - DNA, 9 bp, Unknown
  misc_feature (1)..( 9): Matrix.003 file - promoters60/4608961
gcatatttt

SEQ ID NO: 57775 - DNA, 10 bp, Unknown
  misc_feature (1)..( 10): Matrix.003 file - promoters60/4608961
catgtttaaa

SEQ ID NO: 57776 - DNA, 9 bp, Unknown
  misc_feature (1)..( 9): Matrix.003 file - promoters60/4608961
tgagtatat

SEQ ID NO: 57777 - DNA, 10 bp, Unknown
  misc_feature (1)..( 10): Matrix.003 file - promoters60/4608961
atatgcataa

SEQ ID NO: 57778 - DNA, 10 bp, Unknown
  misc_feature (1)..( 10): Matrix.003 file - promoters60/4608961
tgttttttat

SEQ ID NO: 57779 - DNA, 11 bp, Unknown
  misc_feature (1)..( 11): Matrix.003 file - promoters60/4608965
taaaaattaac

SEQ ID NO: 57780 - DNA, 7 bp, Unknown
  misc_feature (1)..( 7): Matrix.003 file - promoters60/4608985
aaaaatt

SEQ ID NO: 57781 - DNA, 12 bp, Unknown
  misc_feature (1)..( 12): Matrix.003 file - promoters60/4608985
aaaattaaataa

SEQ ID NO: 57782 - DNA, 9 bp, Unknown
  misc_feature (1)..( 9): Matrix.003 file - promoters60/4608985
aaaaaaaat

SEQ ID NO: 57783 - DNA, 11 bp, Unknown
  misc_feature (1)..( 11): Matrix.003 file - promoters60/4608985
ttcaaaaataa

SEQ ID NO: 57784 - DNA, 11 bp, Unknown
  misc_feature (1)..( 11): Matrix.003 file - promoters60/4608985
ataagtttaat

SEQ ID NO: 57785 - DNA, 10 bp, Unknown
  misc_feature (1)..( 10): Matrix.003 file - promoters60/4608985
aaaaaataaa

SEQ ID NO: 57786 - DNA, 8 bp, Unknown
  misc_feature (1)..( 8): Matrix.003 file - promoters60/4608985
ttttattt

SEQ ID NO: 57787 - DNA, 11 bp, Unknown
  misc_feature (1)..( 11): Matrix.003 file - promoters60/4608985
atttccaaata

SEQ ID NO: 57788 - DNA, 9 bp, Unknown
  misc_feature (1)..( 9): Matrix.003 file - promoters60/4608985
ttaaaaaat

SEQ ID NO: 57789 - DNA, 9 bp, Unknown
  misc_feature (1)..( 9): Matrix.003 file - promoters60/4608985
tgaaaaaat

SEQ ID NO: 57790 - DNA, 9 bp, Unknown
  misc_feature (1)..( 9): Matrix.003 file - promoters60/4610292
caattaaat

SEQ ID NO: 57791 - DNA, 13 bp, Unknown
  misc_feature (1)..( 13): Matrix.003 file - promoters60/4610551
aatgggcctaata

SEQ ID NO: 57792 - DNA, 6 bp, Unknown
  misc_feature (1)..( 6): Matrix.003 file - promoters60/4610628
aaaaca

SEQ ID NO: 57793 - DNA, 7 bp, Unknown
  misc_feature (1)..( 7): Matrix.003 file - promoters60/4610628
atcatga

SEQ ID NO: 57794 - DNA, 6 bp, Unknown
  misc_feature (1)..( 6): Matrix.003 file - promoters60/4610628
gtttta

SEQ ID NO: 57795 - DNA, 7 bp, Unknown
  misc_feature (1)..( 7): Matrix.003 file - promoters60/4610628
tttatgt

SEQ ID NO: 57796 - DNA, 7 bp, Unknown
  misc_feature (1)..( 7): Matrix.003 file - promoters60/4610628
ttaaaac

SEQ ID NO: 57797 - DNA, 8 bp, Unknown
  misc_feature (1)..( 8): Matrix.003 file - promoters60/4610628
tctgtttg

SEQ ID NO: 57798 - DNA, 8 bp, Unknown
  misc_feature (1)..( 8): Matrix.003 file - promoters60/4610628
aaaaacat

SEQ ID NO: 57799 - DNA, 7 bp, Unknown
  misc_feature (1)..( 7): Matrix.003 file - promoters60/4610628
aaccaat

SEQ ID NO: 57800 - DNA, 6 bp, Unknown
  misc_feature (1)..( 6): Matrix.003 file - promoters60/4610628
cctata

SEQ ID NO: 57801 - DNA, 15 bp, Unknown
  misc_feature (1)..( 15): Matrix.003 file - promoters60/4610628
aaggcaggctgtcac

SEQ ID NO: 57802 - DNA, 27 bp, Unknown
  misc_feature (1)..( 27): Matrix.003 file - promoters60/4610628
tggcggaccccaacaaattatcaaatc

SEQ ID NO: 57803 - DNA, 8 bp, Unknown
  misc_feature (1)..( 8): Matrix.003 file - promoters60/4610628
aataaatt

SEQ ID NO: 57804 - DNA, 8 bp, Unknown
  misc_feature (1)..( 8): Matrix.003 file - promoters60/4610628
ccatccat

SEQ ID NO: 57805 - DNA, 8 bp, Unknown
  misc_feature (1)..( 8): Matrix.003 file - promoters60/4610628
tatagtat

SEQ ID NO: 57806 - DNA, 7 bp, Unknown
  misc_feature (1)..( 7): Matrix.003 file - promoters60/4610628
aaacgtg

SEQ ID NO: 57807 - DNA, 6 bp, Unknown
  misc_feature (1)..( 6): Matrix.003 file - promoters60/4610628
caaaaa

SEQ ID NO: 57808 - DNA, 8 bp, Unknown
  misc_feature (1)..( 8): Matrix.003 file - promoters60/4610628
caataagt

SEQ ID NO: 57809 - DNA, 7 bp, Unknown
  misc_feature (1)..( 7): Matrix.003 file - promoters60/4610628
tccaatt

SEQ ID NO: 57810 - DNA, 6 bp, Unknown
  misc_feature (1)..( 6): Matrix.003 file - promoters60/4610628
ttttta

SEQ ID NO: 57811 - DNA, 8 bp, Unknown
  misc_feature (1)..( 8): Matrix.003 file - promoters60/4610628
gtaagtta

SEQ ID NO: 57812 - DNA, 7 bp, Unknown
  misc_feature (1)..( 7): Matrix.003 file - promoters60/4610628
aatcaaa

SEQ ID NO: 57813 - DNA, 8 bp, Unknown
  misc_feature (1)..( 8): Matrix.003 file - promoters60/4611225
tgtctgta

SEQ ID NO: 57814 - DNA, 7 bp, Unknown
  misc_feature (1)..( 7): Matrix.003 file - promoters60/4611225
attattt

SEQ ID NO: 57815 - DNA, 6 bp, Unknown
  misc_feature (1)..( 6): Matrix.003 file - promoters60/4611225
tcgttt

SEQ ID NO: 57816 - DNA, 8 bp, Unknown
  misc_feature (1)..( 8): Matrix.003 file - promoters60/4611225
gttgactt

SEQ ID NO: 57817 - DNA, 6 bp, Unknown
  misc_feature (1)..( 6): Matrix.003 file - promoters60/4611225
tttcaa

SEQ ID NO: 57818 - DNA, 6 bp, Unknown
  misc_feature (1)..( 6): Matrix.003 file - promoters60/4611225
tctttc

SEQ ID NO: 57819 - DNA, 9 bp, Unknown
  misc_feature (1)..( 9): Matrix.003 file - promoters60/4611225
caaaaaaac

SEQ ID NO: 57820 - DNA, 6 bp, Unknown
  misc_feature (1)..( 6): Matrix.003 file - promoters60/4611225
aacaaa

SEQ ID NO: 57821 - DNA, 12 bp, Unknown
  misc_feature (1)..( 12): Matrix.003 file - promoters60/4611225
tcatcaatcttt

SEQ ID NO: 57822 - DNA, 7 bp, Unknown
  misc_feature (1)..( 7): Matrix.003 file - promoters60/4611225
aacaaaa

SEQ ID NO: 57823 - DNA, 7 bp, Unknown
  misc_feature (1)..( 7): Matrix.003 file - promoters60/4611225
tatgcat

SEQ ID NO: 57824 - DNA, 7 bp, Unknown
  misc_feature (1)..( 7): Matrix.003 file - promoters60/4611225
acagatc

SEQ ID NO: 57825 - DNA, 6 bp, Unknown
  misc_feature (1)..( 6): Matrix.003 file - promoters60/4611225
tattta

SEQ ID NO: 57826 - DNA, 7 bp, Unknown
  misc_feature (1)..( 7): Matrix.003 file - promoters60/4611225
cttattc

SEQ ID NO: 57827 - DNA, 6 bp, Unknown
  misc_feature (1)..( 6): Matrix.003 file - promoters60/4611225
aatatc

SEQ ID NO: 57828 - DNA, 7 bp, Unknown
  misc_feature (1)..( 7): Matrix.003 file - promoters60/4611225
cagaaaa

SEQ ID NO: 57829 - DNA, 6 bp, Unknown
  misc_feature (1)..( 6): Matrix.003 file - promoters60/4611225
aataaa

SEQ ID NO: 57830 - DNA, 6 bp, Unknown
  misc_feature (1)..( 6): Matrix.003 file - promoters60/4701809
tcaatc

SEQ ID NO: 57831 - DNA, 9 bp, Unknown
  misc_feature (1)..( 9): Matrix.003 file - promoters60/4701809
aaaatcaat

SEQ ID NO: 57832 - DNA, 11 bp, Unknown
  misc_feature (1)..( 11): Matrix.003 file - promoters60/4766314
aaacgaagtaa

SEQ ID NO: 57833 - DNA, 8 bp, Unknown
  misc_feature (1)..( 8): Matrix.003 file - promoters60/4766314
aaaacgac

SEQ ID NO: 57834 - DNA, 10 bp, Unknown
  misc_feature (1)..( 10): Matrix.003 file - promoters60/4766314
aatgagattt

SEQ ID NO: 57835 - DNA, 8 bp, Unknown
  misc_feature (1)..( 8): Matrix.003 file - promoters60/4766314
tatgttat

SEQ ID NO: 57836 - DNA, 8 bp, Unknown
  misc_feature (1)..( 8): Matrix.003 file - promoters60/4766314
aaaaatat

SEQ ID NO: 57837 - DNA, 14 bp, Unknown
  misc_feature (1)..( 14): Matrix.003 file - promoters60/4766320
ctaatttccaatca

SEQ ID NO: 57838 - DNA, 10 bp, Unknown
  misc_feature (1)..( 10): Matrix.003 file - promoters60/4766320
cattttgata

SEQ ID NO: 57839 - DNA, 10 bp, Unknown
  misc_feature (1)..( 10): Matrix.003 file - promoters60/4766320
aaatcttatc

SEQ ID NO: 57840 - DNA, 7 bp, Unknown
  misc_feature (1)..( 7): Matrix.003 file - promoters60/4766320
ttaaaaa

SEQ ID NO: 57841 - DNA, 7 bp, Unknown
  misc_feature (1)..( 7): Matrix.003 file - promoters60/4766324
actcgag

SEQ ID NO: 57842 - DNA, 8 bp, Unknown
  misc_feature (1)..( 8): Matrix.003 file - promoters60/4766324
caatcaaa

SEQ ID NO: 57843 - DNA, 8 bp, Unknown
  misc_feature (1)..( 8): Matrix.003 file - promoters60/4766324
actatata

SEQ ID NO: 57844 - DNA, 8 bp, Unknown
  misc_feature (1)..( 8): Matrix.003 file - promoters60/4766324
catttttt

SEQ ID NO: 57845 - DNA, 8 bp, Unknown
  misc_feature (1)..( 8): Matrix.003 file - promoters60/4766324
attttaaa

SEQ ID NO: 57846 - DNA, 7 bp, Unknown
  misc_feature (1)..( 7): Matrix.003 file - promoters60/4766324
tttaata

SEQ ID NO: 57847 - DNA, 7 bp, Unknown
  misc_feature (1)..( 7): Matrix.003 file - promoters60/4766335
taactaa

SEQ ID NO: 57848 - DNA, 6 bp, Unknown
  misc_feature (1)..( 6): Matrix.003 file - promoters60/4766335
aatgta

SEQ ID NO: 57849 - DNA, 9 bp, Unknown
  misc_feature (1)..( 9): Matrix.003 file - promoters60/4766335
accttaaac

SEQ ID NO: 57850 - DNA, 7 bp, Unknown
  misc_feature (1)..( 7): Matrix.003 file - promoters60/4766335
atcaagt

SEQ ID NO: 57851 - DNA, 12 bp, Unknown
  misc_feature (1)..( 12): Matrix.003 file - promoters60/4766335
tagttaaatgaa

SEQ ID NO: 57852 - DNA, 9 bp, Unknown
  misc_feature (1)..( 9): Matrix.003 file - promoters60/4766335
ttaaatgaa

SEQ ID NO: 57853 - DNA, 7 bp, Unknown
  misc_feature (1)..( 7): Matrix.003 file - promoters60/4766335
aataatt

SEQ ID NO: 57854 - DNA, 9 bp, Unknown
  misc_feature (1)..( 9): Matrix.003 file - promoters60/4766335
ttggagcct

SEQ ID NO: 57855 - DNA, 7 bp, Unknown
  misc_feature (1)..( 7): Matrix.003 file - promoters60/4766335
aaaacat

SEQ ID NO: 57856 - DNA, 9 bp, Unknown
  misc_feature (1)..( 9): Matrix.003 file - promoters60/4766335
tctataaat

SEQ ID NO: 57857 - DNA, 7 bp, Unknown
  misc_feature (1)..( 7): Matrix.003 file - promoters60/4766335
tttccct

SEQ ID NO: 57858 - DNA, 9 bp, Unknown
  misc_feature (1)..( 9): Matrix.003 file - promoters60/4766335
ttatgtgga

SEQ ID NO: 57859 - DNA, 11 bp, Unknown
  misc_feature (1)..( 11): Matrix.003 file - promoters60/4766335
cgaaactggtc

SEQ ID NO: 57860 - DNA, 8 bp, Unknown
  misc_feature (1)..( 8): Matrix.003 file - promoters60/4766335
gaactcat

SEQ ID NO: 57861 - DNA, 7 bp, Unknown
  misc_feature (1)..( 7): Matrix.003 file - promoters60/4766335
agaagaa

SEQ ID NO: 57862 - DNA, 6 bp, Unknown
  misc_feature (1)..( 6): Matrix.003 file - promoters60/4766335
gtgtaa

SEQ ID NO: 57863 - DNA, 9 bp, Unknown
  misc_feature (1)..( 9): Matrix.003 file - promoters60/4766335
aaacaaaaa

SEQ ID NO: 57864 - DNA, 8 bp, Unknown
  misc_feature (1)..( 8): Matrix.003 file - promoters60/4766335
aaaatttg

SEQ ID NO: 57865 - DNA, 6 bp, Unknown
  misc_feature (1)..( 6): Matrix.003 file - promoters60/4766335
taagat

SEQ ID NO: 57866 - DNA, 7 bp, Unknown
  misc_feature (1)..( 7): Matrix.003 file - promoters60/4766335
ctaatct

SEQ ID NO: 57867 - DNA, 6 bp, Unknown
  misc_feature (1)..( 6): Matrix.003 file - promoters60/4766335
agaaat

SEQ ID NO: 57868 - DNA, 6 bp, Unknown
  misc_feature (1)..( 6): Matrix.003 file - promoters60/4766335
ttcgtg

SEQ ID NO: 57869 - DNA, 6 bp, Unknown
  misc_feature (1)..( 6): Matrix.003 file - promoters60/4766335
catcac

SEQ ID NO: 57870 - DNA, 6 bp, Unknown
  misc_feature (1)..( 6): Matrix.003 file - promoters60/4766357
ggtact

SEQ ID NO: 57871 - DNA, 7 bp, Unknown
  misc_feature (1)..( 7): Matrix.003 file - promoters60/4766357
atacaaa

SEQ ID NO: 57872 - DNA, 8 bp, Unknown
  misc_feature (1)..( 8): Matrix.003 file - promoters60/4766357
ccatatac

SEQ ID NO: 57873 - DNA, 7 bp, Unknown
  misc_feature (1)..( 7): Matrix.003 file - promoters60/4766357
tataatc

SEQ ID NO: 57874 - DNA, 7 bp, Unknown
  misc_feature (1)..( 7): Matrix.003 file - promoters60/4766357
tttcaaa

SEQ ID NO: 57875 - DNA, 6 bp, Unknown
  misc_feature (1)..( 6): Matrix.003 file - promoters60/4766357
cagaag

SEQ ID NO: 57876 - DNA, 7 bp, Unknown
  misc_feature (1)..( 7): Matrix.003 file - promoters60/4766357
aagaaat

SEQ ID NO: 57877 - DNA, 7 bp, Unknown
  misc_feature (1)..( 7): Matrix.003 file - promoters60/4766357
ccaaaaa

SEQ ID NO: 57878 - DNA, 7 bp, Unknown
  misc_feature (1)..( 7): Matrix.003 file - promoters60/4766365
tcctttt

SEQ ID NO: 57879 - DNA, 8 bp, Unknown
  misc_feature (1)..( 8): Matrix.003 file - promoters60/4766365
aaataaaa

SEQ ID NO: 57880 - DNA, 8 bp, Unknown
  misc_feature (1)..( 8): Matrix.003 file - promoters60/4766365
gaatctat

SEQ ID NO: 57881 - DNA, 9 bp, Unknown
  misc_feature (1)..( 9): Matrix.003 file - promoters60/4766365
tgtcttgat

SEQ ID NO: 57882 - DNA, 7 bp, Unknown
  misc_feature (1)..( 7): Matrix.003 file - promoters60/4766376
gacaaaa

SEQ ID NO: 57883 - DNA, 9 bp, Unknown
  misc_feature (1)..( 9): Matrix.003 file - promoters60/4766395
atttatttt

SEQ ID NO: 57884 - DNA, 7 bp, Unknown
  misc_feature (1)..( 7): Matrix.003 file - promoters60/4766395
gttgttt

SEQ ID NO: 57885 - DNA, 8 bp, Unknown
  misc_feature (1)..( 8): Matrix.003 file - promoters60/4766395
aaaatata

SEQ ID NO: 57886 - DNA, 6 bp, Unknown
  misc_feature (1)..( 6): Matrix.003 file - promoters60/4766395
aaagaa

SEQ ID NO: 57887 - DNA, 6 bp, Unknown
  misc_feature (1)..( 6): Matrix.003 file - promoters60/4766395
ttatca

SEQ ID NO: 57888 - DNA, 6 bp, Unknown
  misc_feature (1)..( 6): Matrix.003 file - promoters60/4766395
ataaac

SEQ ID NO: 57889 - DNA, 6 bp, Unknown
  misc_feature (1)..( 6): Matrix.003 file - promoters60/4766395
cacatg

SEQ ID NO: 57890 - DNA, 6 bp, Unknown
  misc_feature (1)..( 6): Matrix.003 file - promoters60/4766395
tctcca

SEQ ID NO: 57891 - DNA, 8 bp, Unknown
  misc_feature (1)..( 8): Matrix.003 file - promoters60/4766395
tataaata

SEQ ID NO: 57892 - DNA, 7 bp, Unknown
  misc_feature (1)..( 7): Matrix.003 file - promoters60/4766395
ttaaatt

SEQ ID NO: 57893 - DNA, 8 bp, Unknown
  misc_feature (1)..( 8): Matrix.003 file - promoters60/4766395
aaaataat

SEQ ID NO: 57894 - DNA, 6 bp, Unknown
  misc_feature (1)..( 6): Matrix.003 file - promoters60/4766395
atattt

SEQ ID NO: 57895 - DNA, 6 bp, Unknown
  misc_feature (1)..( 6): Matrix.003 file - promoters60/4766395
atatat

SEQ ID NO: 57896 - DNA, 6 bp, Unknown
  misc_feature (1)..( 6): Matrix.003 file - promoters60/4766395
aaatct

SEQ ID NO: 57897 - DNA, 7 bp, Unknown
  misc_feature (1)..( 7): Matrix.003 file - promoters60/4766395
aaaaatt

SEQ ID NO: 57898 - DNA, 6 bp, Unknown
  misc_feature (1)..( 6): Matrix.003 file - promoters60/4766395
aaaaaa

SEQ ID NO: 57899 - DNA, 7 bp, Unknown
  misc_feature (1)..( 7): Matrix.003 file - promoters60/4766395
aaagtta

SEQ ID NO: 57900 - DNA, 8 bp, Unknown
  misc_feature (1)..( 8): Matrix.003 file - promoters60/4766395
aaatgtaa

SEQ ID NO: 57901 - DNA, 6 bp, Unknown
  misc_feature (1)..( 6): Matrix.003 file - promoters60/4766421
ttaact

SEQ ID NO: 57902 - DNA, 8 bp, Unknown
  misc_feature (1)..( 8): Matrix.003 file - promoters60/4766421
ttaaaatt

SEQ ID NO: 57903 - DNA, 7 bp, Unknown
  misc_feature (1)..( 7): Matrix.003 file - promoters60/4766421
atgtttt

SEQ ID NO: 57904 - DNA, 8 bp, Unknown
  misc_feature (1)..( 8): Matrix.003 file - promoters60/4766421
aatcagat

SEQ ID NO: 57905 - DNA, 7 bp, Unknown
  misc_feature (1)..( 7): Matrix.003 file - promoters60/4766421
tggagcc

SEQ ID NO: 57906 - DNA, 6 bp, Unknown
  misc_feature (1)..( 6): Matrix.003 file - promoters60/4766421
tatctg

SEQ ID NO: 57907 - DNA, 6 bp, Unknown
  misc_feature (1)..( 6): Matrix.003 file - promoters60/4766421
tagata

SEQ ID NO: 57908 - DNA, 8 bp, Unknown
  misc_feature (1)..( 8): Matrix.003 file - promoters60/4766421
aattgatt

SEQ ID NO: 57909 - DNA, 7 bp, Unknown
  misc_feature (1)..( 7): Matrix.003 file - promoters60/4766421
caaaatt

SEQ ID NO: 57910 - DNA, 10 bp, Unknown
  misc_feature (1)..( 10): Matrix.003 file - promoters60/4766421
attatccatt

SEQ ID NO: 57911 - DNA, 6 bp, Unknown
  misc_feature (1)..( 6): Matrix.003 file - promoters60/4766421
acagtg

SEQ ID NO: 57912 - DNA, 6 bp, Unknown
  misc_feature (1)..( 6): Matrix.003 file - promoters60/4766421
gaactt

SEQ ID NO: 57913 - DNA, 9 bp, Unknown
  misc_feature (1)..( 9): Matrix.003 file - promoters60/4766421
gataatttg

SEQ ID NO: 57914 - DNA, 8 bp, Unknown
  misc_feature (1)..( 8): Matrix.003 file - promoters60/4766421
ttcacaga

SEQ ID NO: 57915 - DNA, 6 bp, Unknown
  misc_feature (1)..( 6): Matrix.003 file - promoters60/4766421
tcttgt

SEQ ID NO: 57916 - DNA, 6 bp, Unknown
  misc_feature (1)..( 6): Matrix.003 file - promoters60/4766421
gtgtgc

SEQ ID NO: 57917 - DNA, 6 bp, Unknown
  misc_feature (1)..( 6): Matrix.003 file - promoters60/4766429
ttcaca

SEQ ID NO: 57918 - DNA, 6 bp, Unknown
  misc_feature (1)..( 6): Matrix.003 file - promoters60/4766429
agcttt

SEQ ID NO: 57919 - DNA, 6 bp, Unknown
  misc_feature (1)..( 6): Matrix.003 file - promoters60/4766429
ttttca

SEQ ID NO: 57920 - DNA, 6 bp, Unknown
  misc_feature (1)..( 6): Matrix.003 file - promoters60/4766429
ttccaa

SEQ ID NO: 57921 - DNA, 6 bp, Unknown
  misc_feature (1)..( 6): Matrix.003 file - promoters60/4766429
aatcat

SEQ ID NO: 57922 - DNA, 6 bp, Unknown
  misc_feature (1)..( 6): Matrix.003 file - promoters60/4766429
catttt

SEQ ID NO: 57923 - DNA, 8 bp, Unknown
  misc_feature (1)..( 8): Matrix.003 file - promoters60/4766429
tttattaa

SEQ ID NO: 57924 - DNA, 7 bp, Unknown
  misc_feature (1)..( 7): Matrix.003 file - promoters60/4766429
aagaaac

SEQ ID NO: 57925 - DNA, 7 bp, Unknown
  misc_feature (1)..( 7): Matrix.003 file - promoters60/4766429
ctctata

SEQ ID NO: 57926 - DNA, 9 bp, Unknown
  misc_feature (1)..( 9): Matrix.003 file - promoters60/4766429
aagaaaaaa

SEQ ID NO: 57927 - DNA, 7 bp, Unknown
  misc_feature (1)..( 7): Matrix.003 file - promoters60/4766429
caaactt

SEQ ID NO: 57928 - DNA, 7 bp, Unknown
  misc_feature (1)..( 7): Matrix.003 file - promoters60/4766447
aatcatt

SEQ ID NO: 57929 - DNA, 9 bp, Unknown
  misc_feature (1)..( 9): Matrix.003 file - promoters60/4766447
atcttattc

SEQ ID NO: 57930 - DNA, 11 bp, Unknown
  misc_feature (1)..( 11): Matrix.003 file - promoters60/4766447
tttatggtttc

SEQ ID NO: 57931 - DNA, 8 bp, Unknown
  misc_feature (1)..( 8): Matrix.003 file - promoters60/4766447
ttgtataa

SEQ ID NO: 57932 - DNA, 8 bp, Unknown
  misc_feature (1)..( 8): Matrix.003 file - promoters60/4766447
tcaaacaa

SEQ ID NO: 57933 - DNA, 7 bp, Unknown
  misc_feature (1)..( 7): Matrix.003 file - promoters60/4766447
tttattt

SEQ ID NO: 57934 - DNA, 11 bp, Unknown
  misc_feature (1)..( 11): Matrix.003 file - promoters60/4766447
aatccaatttt

SEQ ID NO: 57935 - DNA, 11 bp, Unknown
  misc_feature (1)..( 11): Matrix.003 file - promoters60/4766477
aaaaacaaaat

SEQ ID NO: 57936 - DNA, 10 bp, Unknown
  misc_feature (1)..( 10): Matrix.003 file - promoters60/4766477
actgcttctc

SEQ ID NO: 57937 - DNA, 13 bp, Unknown
  misc_feature (1)..( 13): Matrix.003 file - promoters60/4766477
taacaatttacaa

SEQ ID NO: 57938 - DNA, 15 bp, Unknown
  misc_feature (1)..( 15): Matrix.003 file - promoters60/4766487
tgtcaaatttcaaca

SEQ ID NO: 57939 - DNA, 9 bp, Unknown
  misc_feature (1)..( 9): Matrix.003 file - promoters60/4766487
aaaataaaa

SEQ ID NO: 57940 - DNA, 13 bp, Unknown
  misc_feature (1)..( 13): Matrix.003 file - promoters60/4766487
caagaagaaaaaa

SEQ ID NO: 57941 - DNA, 7 bp, Unknown
  misc_feature (1)..( 7): Matrix.003 file - promoters60/4766490
tttgttg

SEQ ID NO: 57942 - DNA, 6 bp, Unknown
  misc_feature (1)..( 6): Matrix.003 file - promoters60/4766490
caaaaa

SEQ ID NO: 57943 - DNA, 8 bp, Unknown
  misc_feature (1)..( 8): Matrix.003 file - promoters60/4766490
gaaaaaaa

SEQ ID NO: 57944 - DNA, 8 bp, Unknown
  misc_feature (1)..( 8): Matrix.003 file - promoters60/4766490
caactatt

SEQ ID NO: 57945 - DNA, 7 bp, Unknown
  misc_feature (1)..( 7): Matrix.003 file - promoters60/4766490
tttcatg

SEQ ID NO: 57946 - DNA, 6 bp, Unknown
  misc_feature (1)..( 6): Matrix.003 file - promoters60/4766490
taaaaa

SEQ ID NO: 57947 - DNA, 8 bp, Unknown
  misc_feature (1)..( 8): Matrix.003 file - promoters60/4766490
tcgacatg

SEQ ID NO: 57948 - DNA, 7 bp, Unknown
  misc_feature (1)..( 7): Matrix.003 file - promoters60/4766490
acgtggt

SEQ ID NO: 57949 - DNA, 6 bp, Unknown
  misc_feature (1)..( 6): Matrix.003 file - promoters60/4766490
ggtgga

SEQ ID NO: 57950 - DNA, 6 bp, Unknown
  misc_feature (1)..( 6): Matrix.003 file - promoters60/4766490
aaagaa

SEQ ID NO: 57951 - DNA, 6 bp, Unknown
  misc_feature (1)..( 6): Matrix.003 file - promoters60/4766490
acaaca

SEQ ID NO: 57952 - DNA, 12 bp, Unknown
  misc_feature (1)..( 12): Matrix.003 file - promoters60/4766490
aaaaaagaagaa

SEQ ID NO: 57953 - DNA, 9 bp, Unknown
  misc_feature (1)..( 9): Matrix.003 file - promoters60/4766490
atgataaga

SEQ ID NO: 57954 - DNA, 6 bp, Unknown
  misc_feature (1)..( 6): Matrix.003 file - promoters60/4766490
aataaa

SEQ ID NO: 57955 - DNA, 6 bp, Unknown
  misc_feature (1)..( 6): Matrix.003 file - promoters60/4766490
aactag

SEQ ID NO: 57956 - DNA, 7 bp, Unknown
  misc_feature (1)..( 7): Matrix.003 file - promoters60/4766490
aatgttg

SEQ ID NO: 57957 - DNA, 8 bp, Unknown
  misc_feature (1)..( 8): Matrix.003 file - promoters60/4766490
tggcaaag

SEQ ID NO: 57958 - DNA, 7 bp, Unknown
  misc_feature (1)..( 7): Matrix.003 file - promoters60/4766490
cgtcttc

SEQ ID NO: 57959 - DNA, 7 bp, Unknown
  misc_feature (1)..( 7): Matrix.003 file - promoters60/4766553
catatat

SEQ ID NO: 57960 - DNA, 6 bp, Unknown
  misc_feature (1)..( 6): Matrix.003 file - promoters60/4766553
tttact

SEQ ID NO: 57961 - DNA, 6 bp, Unknown
  misc_feature (1)..( 6): Matrix.003 file - promoters60/4766553
tgtttt

SEQ ID NO: 57962 - DNA, 8 bp, Unknown
  misc_feature (1)..( 8): Matrix.003 file - promoters60/4766553
tctgataa

SEQ ID NO: 57963 - DNA, 7 bp, Unknown
  misc_feature (1)..( 7): Matrix.003 file - promoters60/4766553
ttaattt

SEQ ID NO: 57964 - DNA, 7 bp, Unknown
  misc_feature (1)..( 7): Matrix.003 file - promoters60/4766553
gcaggat

SEQ ID NO: 57965 - DNA, 8 bp, Unknown
  misc_feature (1)..( 8): Matrix.003 file - promoters60/4766553
gtagagaa

SEQ ID NO: 57966 - DNA, 6 bp, Unknown
  misc_feature (1)..( 6): Matrix.003 file - promoters60/4766553
agaaga

SEQ ID NO: 57967 - DNA, 6 bp, Unknown
  misc_feature (1)..( 6): Matrix.003 file - promoters60/4766553
gtgatt

SEQ ID NO: 57968 - DNA, 13 bp, Unknown
  misc_feature (1)..( 13): Matrix.003 file - promoters60/4766578
tttttgaataatg

SEQ ID NO: 57969 - DNA, 7 bp, Unknown
  misc_feature (1)..( 7): Matrix.003 file - promoters60/4766578
ataatta

SEQ ID NO: 57970 - DNA, 11 bp, Unknown
  misc_feature (1)..( 11): Matrix.003 file - promoters60/4766578
acattttatag

SEQ ID NO: 57971 - DNA, 10 bp, Unknown
  misc_feature (1)..( 10): Matrix.003 file - promoters60/4766578
taaaataaaa

SEQ ID NO: 57972 - DNA, 6 bp, Unknown
  misc_feature (1)..( 6): Matrix.003 file - promoters60/4766578
gaaaaa

SEQ ID NO: 57973 - DNA, 7 bp, Unknown
  misc_feature (1)..( 7): Matrix.003 file - promoters60/4766602
ccctaac

SEQ ID NO: 57974 - DNA, 8 bp, Unknown
  misc_feature (1)..( 8): Matrix.003 file - promoters60/4766602
actatata

SEQ ID NO: 57975 - DNA, 9 bp, Unknown
  misc_feature (1)..( 9): Matrix.003 file - promoters60/4766602
aggaaaaaa

SEQ ID NO: 57976 - DNA, 8 bp, Unknown
  misc_feature (1)..( 8): Matrix.003 file - promoters60/4766602
tgtaaaac

SEQ ID NO: 57977 - DNA, 6 bp, Unknown
  misc_feature (1)..( 6): Matrix.003 file - promoters60/4766602
attgat

SEQ ID NO: 57978 - DNA, 6 bp, Unknown
  misc_feature (1)..( 6): Matrix.003 file - promoters60/4766602
attcat

SEQ ID NO: 57979 - DNA, 6 bp, Unknown
  misc_feature (1)..( 6): Matrix.003 file - promoters60/4766602
atataa

SEQ ID NO: 57980 - DNA, 8 bp, Unknown
  misc_feature (1)..( 8): Matrix.003 file - promoters60/4766602
tggaaata

SEQ ID NO: 57981 - DNA, 7 bp, Unknown
  misc_feature (1)..( 7): Matrix.003 file - promoters60/4766602
taatttg

SEQ ID NO: 57982 - DNA, 6 bp, Unknown
  misc_feature (1)..( 6): Matrix.003 file - promoters60/4766602
aatcaa

SEQ ID NO: 57983 - DNA, 8 bp, Unknown
  misc_feature (1)..( 8): Matrix.003 file - promoters60/4766602
catttttt

SEQ ID NO: 57984 - DNA, 8 bp, Unknown
  misc_feature (1)..( 8): Matrix.003 file - promoters60/4766602
attttaaa

SEQ ID NO: 57985 - DNA, 8 bp, Unknown
  misc_feature (1)..( 8): Matrix.003 file - promoters60/4766602
gtagttaa

SEQ ID NO: 57986 - DNA, 6 bp, Unknown
  misc_feature (1)..( 6): Matrix.003 file - promoters60/4766602
ttttta

SEQ ID NO: 57987 - DNA, 6 bp, Unknown
  misc_feature (1)..( 6): Matrix.003 file - promoters60/4766602
aacgta

SEQ ID NO: 57988 - DNA, 6 bp, Unknown
  misc_feature (1)..( 6): Matrix.003 file - promoters60/4766602
atttag

SEQ ID NO: 57989 - DNA, 7 bp, Unknown
  misc_feature (1)..( 7): Matrix.003 file - promoters60/4766602
atccaaa

SEQ ID NO: 57990 - DNA, 11 bp, Unknown
  misc_feature (1)..( 11): Matrix.003 file - promoters60/4766620
tttgaatcaaa

SEQ ID NO: 57991 - DNA, 6 bp, Unknown
  misc_feature (1)..( 6): Matrix.003 file - promoters60/4766620
attttg

SEQ ID NO: 57992 - DNA, 7 bp, Unknown
  misc_feature (1)..( 7): Matrix.003 file - promoters60/4766620
taaaaat

SEQ ID NO: 57993 - DNA, 8 bp, Unknown
  misc_feature (1)..( 8): Matrix.003 file - promoters60/4766620
atttcggc

SEQ ID NO: 57994 - DNA, 7 bp, Unknown
  misc_feature (1)..( 7): Matrix.003 file - promoters60/4766620
aactgaa

SEQ ID NO: 57995 - DNA, 7 bp, Unknown
  misc_feature (1)..( 7): Matrix.003 file - promoters60/4766620
tttggtg

SEQ ID NO: 57996 - DNA, 7 bp, Unknown
  misc_feature (1)..( 7): Matrix.003 file - promoters60/4766620
gtttatc

SEQ ID NO: 57997 - DNA, 7 bp, Unknown
  misc_feature (1)..( 7): Matrix.003 file - promoters60/4766620
atcgtac

SEQ ID NO: 57998 - DNA, 6 bp, Unknown
  misc_feature (1)..( 6): Matrix.003 file - promoters60/4766620
ataaat

SEQ ID NO: 57999 - DNA, 7 bp, Unknown
  misc_feature (1)..( 7): Matrix.003 file - promoters60/4766620
ggtacaa

SEQ ID NO: 58000 - DNA, 8 bp, Unknown
  misc_feature (1)..( 8): Matrix.003 file - promoters60/4766620
cagtggat

SEQ ID NO: 58001 - DNA, 6 bp, Unknown
  misc_feature (1)..( 6): Matrix.003 file - promoters60/4766620
aaattc

SEQ ID NO: 58002 - DNA, 7 bp, Unknown
  misc_feature (1)..( 7): Matrix.003 file - promoters60/4766620
aaaggac

SEQ ID NO: 58003 - DNA, 6 bp, Unknown
  misc_feature (1)..( 6): Matrix.003 file - promoters60/4766620
taattt

SEQ ID NO: 58004 - DNA, 10 bp, Unknown
  misc_feature (1)..( 10): Matrix.003 file - promoters60/4766624
ggagatagag

SEQ ID NO: 58005 - DNA, 10 bp, Unknown
  misc_feature (1)..( 10): Matrix.003 file - promoters60/4766624
acctgagata

SEQ ID NO: 58006 - DNA, 10 bp, Unknown
  misc_feature (1)..( 10): Matrix.003 file - promoters60/4766624
tcaactctat

SEQ ID NO: 58007 - DNA, 8 bp, Unknown
  misc_feature (1)..( 8): Matrix.003 file - promoters60/4766624
gaacattt

SEQ ID NO: 58008 - DNA, 7 bp, Unknown
  misc_feature (1)..( 7): Matrix.003 file - promoters60/4766628
ctcatca

SEQ ID NO: 58009 - DNA, 7 bp, Unknown
  misc_feature (1)..( 7): Matrix.003 file - promoters60/4766628
tatcgaa

SEQ ID NO: 58010 - DNA, 6 bp, Unknown
  misc_feature (1)..( 6): Matrix.003 file - promoters60/4766628
agttga

SEQ ID NO: 58011 - DNA, 8 bp, Unknown
  misc_feature (1)..( 8): Matrix.003 file - promoters60/4766628
caaaaaaa

SEQ ID NO: 58012 - DNA, 8 bp, Unknown
  misc_feature (1)..( 8): Matrix.003 file - promoters60/4766628
gtttcgtt

SEQ ID NO: 58013 - DNA, 6 bp, Unknown
  misc_feature (1)..( 6): Matrix.003 file - promoters60/4766628
ccgact

SEQ ID NO: 58014 - DNA, 7 bp, Unknown
  misc_feature (1)..( 7): Matrix.003 file - promoters60/4766628
tatcttg

SEQ ID NO: 58015 - DNA, 7 bp, Unknown
  misc_feature (1)..( 7): Matrix.003 file - promoters60/4766628
aaccaac

SEQ ID NO: 58016 - DNA, 7 bp, Unknown
  misc_feature (1)..( 7): Matrix.003 file - promoters60/4766628
ttttcaa

SEQ ID NO: 58017 - DNA, 7 bp, Unknown
  misc_feature (1)..( 7): Matrix.003 file - promoters60/4766628
tttatta

SEQ ID NO: 58018 - DNA, 7 bp, Unknown
  misc_feature (1)..( 7): Matrix.003 file - promoters60/4766628
tccccaa

SEQ ID NO: 58019 - DNA, 6 bp, Unknown
  misc_feature (1)..( 6): Matrix.003 file - promoters60/4766628
cggaag

SEQ ID NO: 58020 - DNA, 9 bp, Unknown
  misc_feature (1)..( 9): Matrix.003 file - promoters60/4766628
tcatatttt

SEQ ID NO: 58021 - DNA, 6 bp, Unknown
  misc_feature (1)..( 6): Matrix.003 file - promoters60/4766654
tcttat

SEQ ID NO: 58022 - DNA, 7 bp, Unknown
  misc_feature (1)..( 7): Matrix.003 file - promoters60/4766654
gataaaa

SEQ ID NO: 58023 - DNA, 7 bp, Unknown
  misc_feature (1)..( 7): Matrix.003 file - promoters60/4766654
ttacttt

SEQ ID NO: 58024 - DNA, 7 bp, Unknown
  misc_feature (1)..( 7): Matrix.003 file - promoters60/4766654
tttatat

SEQ ID NO: 58025 - DNA, 7 bp, Unknown
  misc_feature (1)..( 7): Matrix.003 file - promoters60/4766654
ataatta

SEQ ID NO: 58026 - DNA, 8 bp, Unknown
  misc_feature (1)..( 8): Matrix.003 file - promoters60/4766654
gtttataa

SEQ ID NO: 58027 - DNA, 8 bp, Unknown
  misc_feature (1)..( 8): Matrix.003 file - promoters60/4766654
aacacttt

SEQ ID NO: 58028 - DNA, 6 bp, Unknown
  misc_feature (1)..( 6): Matrix.003 file - promoters60/4766654
aatcta

SEQ ID NO: 58029 - DNA, 6 bp, Unknown
  misc_feature (1)..( 6): Matrix.003 file - promoters60/4766654
tatata

SEQ ID NO: 58030 - DNA, 6 bp, Unknown
  misc_feature (1)..( 6): Matrix.003 file - promoters60/4766654
ataaat

SEQ ID NO: 58031 - DNA, 6 bp, Unknown
  misc_feature (1)..( 6): Matrix.003 file - promoters60/4766654
ttgaat

SEQ ID NO: 58032 - DNA, 6 bp, Unknown
  misc_feature (1)..( 6): Matrix.003 file - promoters60/4766654
aatcac

SEQ ID NO: 58033 - DNA, 7 bp, Unknown
  misc_feature (1)..( 7): Matrix.003 file - promoters60/4766654
tatactc

SEQ ID NO: 58034 - DNA, 8 bp, Unknown
  misc_feature (1)..( 8): Matrix.003 file - promoters60/4766654
agcattgc

SEQ ID NO: 58035 - DNA, 6 bp, Unknown
  misc_feature (1)..( 6): Matrix.003 file - promoters60/4766654
acttgt

SEQ ID NO: 58036 - DNA, 9 bp, Unknown
  misc_feature (1)..( 9): Matrix.003 file - promoters60/4766654
aataaacac

SEQ ID NO: 58037 - DNA, 6 bp, Unknown
  misc_feature (1)..( 6): Matrix.003 file - promoters60/4766654
attcga

SEQ ID NO: 58038 - DNA, 7 bp, Unknown
  misc_feature (1)..( 7): Matrix.003 file - promoters60/4766654
atacaat

SEQ ID NO: 58039 - DNA, 7 bp, Unknown
  misc_feature (1)..( 7): Matrix.003 file - promoters60/4766654
acaaaaa

SEQ ID NO: 58040 - DNA, 8 bp, Unknown
  misc_feature (1)..( 8): Matrix.003 file - promoters60/4766712
ttttcttc

SEQ ID NO: 58041 - DNA, 6 bp, Unknown
  misc_feature (1)..( 6): Matrix.003 file - promoters60/4766727
taacca

SEQ ID NO: 58042 - DNA, 11 bp, Unknown
  misc_feature (1)..( 11): Matrix.003 file - promoters60/4766727
atattacaata

SEQ ID NO: 58043 - DNA, 9 bp, Unknown
  misc_feature (1)..( 9): Matrix.003 file - promoters60/4766727
aataatgat

SEQ ID NO: 58044 - DNA, 7 bp, Unknown
  misc_feature (1)..( 7): Matrix.003 file - promoters60/4766727
ggtttaa

SEQ ID NO: 58045 - DNA, 7 bp, Unknown
  misc_feature (1)..( 7): Matrix.003 file - promoters60/4766727
tttcttt

SEQ ID NO: 58046 - DNA, 7 bp, Unknown
  misc_feature (1)..( 7): Matrix.003 file - promoters60/4766727
ccatttt

SEQ ID NO: 58047 - DNA, 6 bp, Unknown
  misc_feature (1)..( 6): Matrix.003 file - promoters60/4766727
acataa

SEQ ID NO: 58048 - DNA, 10 bp, Unknown
  misc_feature (1)..( 10): Matrix.003 file - promoters60/4766727
atataaatta

SEQ ID NO: 58049 - DNA, 7 bp, Unknown
  misc_feature (1)..( 7): Matrix.003 file - promoters60/4766727
atattat

SEQ ID NO: 58050 - DNA, 11 bp, Unknown
  misc_feature (1)..( 11): Matrix.003 file - promoters60/4766727
tagattttttt

SEQ ID NO: 58051 - DNA, 6 bp, Unknown
  misc_feature (1)..( 6): Matrix.003 file - promoters60/4766727
taaaaa

SEQ ID NO: 58052 - DNA, 6 bp, Unknown
  misc_feature (1)..( 6): Matrix.003 file - promoters60/4766727
aaaaca

SEQ ID NO: 58053 - DNA, 11 bp, Unknown
  misc_feature (1)..( 11): Matrix.003 file - promoters60/4766727
aaaaggcccaa

SEQ ID NO: 58054 - DNA, 6 bp, Unknown
  misc_feature (1)..( 6): Matrix.003 file - promoters60/4766727
atcaaa

SEQ ID NO: 58055 - DNA, 6 bp, Unknown
  misc_feature (1)..( 6): Matrix.003 file - promoters60/4766727
tacaac

SEQ ID NO: 58056 - DNA, 7 bp, Unknown
  misc_feature (1)..( 7): Matrix.003 file - promoters60/4766727
taacatc

SEQ ID NO: 58057 - DNA, 8 bp, Unknown
  misc_feature (1)..( 8): Matrix.003 file - promoters60/4766727
atagcaca

SEQ ID NO: 58058 - DNA, 8 bp, Unknown
  misc_feature (1)..( 8): Matrix.003 file - promoters60/4766727
atcaaata

SEQ ID NO: 58059 - DNA, 6 bp, Unknown
  misc_feature (1)..( 6): Matrix.003 file - promoters60/4766727
taaaaa

SEQ ID NO: 58060 - DNA, 7 bp, Unknown
  misc_feature (1)..( 7): Matrix.003 file - promoters60/4766727
aaaatat

SEQ ID NO: 58061 - DNA, 7 bp, Unknown
  misc_feature (1)..( 7): Matrix.003 file - promoters60/4766727
aaaaaag

SEQ ID NO: 58062 - DNA, 8 bp, Unknown
  misc_feature (1)..( 8): Matrix.003 file - promoters60/4766727
aaacatag

SEQ ID NO: 58063 - DNA, 10 bp, Unknown
  misc_feature (1)..( 10): Matrix.003 file - promoters60/4766738
aatactaaaa

SEQ ID NO: 58064 - DNA, 6 bp, Unknown
  misc_feature (1)..( 6): Matrix.003 file - promoters60/4766738
aagaat

SEQ ID NO: 58065 - DNA, 6 bp, Unknown
  misc_feature (1)..( 6): Matrix.003 file - promoters60/4766738
cttttt

SEQ ID NO: 58066 - DNA, 6 bp, Unknown
  misc_feature (1)..( 6): Matrix.003 file - promoters60/4766738
ttagta

SEQ ID NO: 58067 - DNA, 6 bp, Unknown
  misc_feature (1)..( 6): Matrix.003 file - promoters60/4766738
ggttga

SEQ ID NO: 58068 - DNA, 7 bp, Unknown
  misc_feature (1)..( 7): Matrix.003 file - promoters60/4766738
aaaagaa

SEQ ID NO: 58069 - DNA, 10 bp, Unknown
  misc_feature (1)..( 10): Matrix.003 file - promoters60/4766738
agaaaaaaag

SEQ ID NO: 58070 - DNA, 8 bp, Unknown
  misc_feature (1)..( 8): Matrix.003 file - promoters60/4766738
ttaatgtc

SEQ ID NO: 58071 - DNA, 6 bp, Unknown
  misc_feature (1)..( 6): Matrix.003 file - promoters60/4766738
gtttcc

SEQ ID NO: 58072 - DNA, 7 bp, Unknown
  misc_feature (1)..( 7): Matrix.003 file - promoters60/4766738
catcact

SEQ ID NO: 58073 - DNA, 6 bp, Unknown
  misc_feature (1)..( 6): Matrix.003 file - promoters60/4766738
tattct

SEQ ID NO: 58074 - DNA, 7 bp, Unknown
  misc_feature (1)..( 7): Matrix.003 file - promoters60/4766738
cttatct

SEQ ID NO: 58075 - DNA, 6 bp, Unknown
  misc_feature (1)..( 6): Matrix.003 file - promoters60/4766738
tctgaa

SEQ ID NO: 58076 - DNA, 7 bp, Unknown
  misc_feature (1)..( 7): Matrix.003 file - promoters60/4766738
tatcatt

SEQ ID NO: 58077 - DNA, 7 bp, Unknown
  misc_feature (1)..( 7): Matrix.003 file - promoters60/4766738
gaatttg

SEQ ID NO: 58078 - DNA, 7 bp, Unknown
  misc_feature (1)..( 7): Matrix.003 file - promoters60/4766738
tttgatt

SEQ ID NO: 58079 - DNA, 7 bp, Unknown
  misc_feature (1)..( 7): Matrix.003 file - promoters60/4766738
ttagatc

SEQ ID NO: 58080 - DNA, 6 bp, Unknown
  misc_feature (1)..( 6): Matrix.003 file - promoters60/4766738
catttg

SEQ ID NO: 58081 - DNA, 8 bp, Unknown
  misc_feature (1)..( 8): Matrix.003 file - promoters60/4766754
attacatg

SEQ ID NO: 58082 - DNA, 6 bp, Unknown
  misc_feature (1)..( 6): Matrix.003 file - promoters60/4766754
gacatt

SEQ ID NO: 58083 - DNA, 7 bp, Unknown
  misc_feature (1)..( 7): Matrix.003 file - promoters60/4766754
atatttt

SEQ ID NO: 58084 - DNA, 6 bp, Unknown
  misc_feature (1)..( 6): Matrix.003 file - promoters60/4766754
ataaat

SEQ ID NO: 58085 - DNA, 16 bp, Unknown
  misc_feature (1)..( 16): Matrix.003 file - promoters60/4766754
tgttaatttatttttg

SEQ ID NO: 58086 - DNA, 6 bp, Unknown
  misc_feature (1)..( 6): Matrix.003 file - promoters60/4766754
ccaaaa

SEQ ID NO: 58087 - DNA, 8 bp, Unknown
  misc_feature (1)..( 8): Matrix.003 file - promoters60/4766754
agtatata

SEQ ID NO: 58088 - DNA, 6 bp, Unknown
  misc_feature (1)..( 6): Matrix.003 file - promoters60/4766754
tataaa

SEQ ID NO: 58089 - DNA, 7 bp, Unknown
  misc_feature (1)..( 7): Matrix.003 file - promoters60/4766754
tggataa

SEQ ID NO: 58090 - DNA, 7 bp, Unknown
  misc_feature (1)..( 7): Matrix.003 file - promoters60/4766754
ggtgttg

SEQ ID NO: 58091 - DNA, 7 bp, Unknown
  misc_feature (1)..( 7): Matrix.003 file - promoters60/4766754
aattaat

SEQ ID NO: 58092 - DNA, 8 bp, Unknown
  misc_feature (1)..( 8): Matrix.003 file - promoters60/4766754
tttgttgg

SEQ ID NO: 58093 - DNA, 7 bp, Unknown
  misc_feature (1)..( 7): Matrix.003 file - promoters60/4766754
tcgaatt

SEQ ID NO: 58094 - DNA, 6 bp, Unknown
  misc_feature (1)..( 6): Matrix.003 file - promoters60/4766754
agtaaa

SEQ ID NO: 58095 - DNA, 7 bp, Unknown
  misc_feature (1)..( 7): Matrix.003 file - promoters60/4766754
aatcggg

SEQ ID NO: 58096 - DNA, 8 bp, Unknown
  misc_feature (1)..( 8): Matrix.003 file - promoters60/4766754
gaaacaaa

SEQ ID NO: 58097 - DNA, 10 bp, Unknown
  misc_feature (1)..( 10): Matrix.003 file - promoters60/4766754
ggaaaagaaa

SEQ ID NO: 58098 - DNA, 7 bp, Unknown
  misc_feature (1)..( 7): Matrix.003 file - promoters60/4766754
cccacta

SEQ ID NO: 58099 - DNA, 9 bp, Unknown
  misc_feature (1)..( 9): Matrix.003 file - promoters60/4766754
aaagaaaag

SEQ ID NO: 58100 - DNA, 9 bp, Unknown
  misc_feature (1)..( 9): Matrix.003 file - promoters60/4766776
aaaaaagaa

SEQ ID NO: 58101 - DNA, 6 bp, Unknown
  misc_feature (1)..( 6): Matrix.003 file - promoters60/4766776
gtgtaa

SEQ ID NO: 58102 - DNA, 7 bp, Unknown
  misc_feature (1)..( 7): Matrix.003 file - promoters60/4766776
gaagaaa

SEQ ID NO: 58103 - DNA, 8 bp, Unknown
  misc_feature (1)..( 8): Matrix.003 file - promoters60/4766776
ttttatca

SEQ ID NO: 58104 - DNA, 9 bp, Unknown
  misc_feature (1)..( 9): Matrix.003 file - promoters60/4766776
atatatatc

SEQ ID NO: 58105 - DNA, 6 bp, Unknown
  misc_feature (1)..( 6): Matrix.003 file - promoters60/4766776
aaatat

SEQ ID NO: 58106 - DNA, 8 bp, Unknown
  misc_feature (1)..( 8): Matrix.003 file - promoters60/4766776
atatatac

SEQ ID NO: 58107 - DNA, 8 bp, Unknown
  misc_feature (1)..( 8): Matrix.003 file - promoters60/4766776
aaatcaat

SEQ ID NO: 58108 - DNA, 7 bp, Unknown
  misc_feature (1)..( 7): Matrix.003 file - promoters60/4766776
aatcaaa

SEQ ID NO: 58109 - DNA, 7 bp, Unknown
  misc_feature (1)..( 7): Matrix.003 file - promoters60/4766776
attaaat

SEQ ID NO: 58110 - DNA, 7 bp, Unknown
  misc_feature (1)..( 7): Matrix.003 file - promoters60/4766776
acacgta

SEQ ID NO: 58111 - DNA, 7 bp, Unknown
  misc_feature (1)..( 7): Matrix.003 file - promoters60/4766776
tttatat

SEQ ID NO: 58112 - DNA, 12 bp, Unknown
  misc_feature (1)..( 12): Matrix.003 file - promoters60/4766776
atcttaaaatat

SEQ ID NO: 58113 - DNA, 7 bp, Unknown
  misc_feature (1)..( 7): Matrix.003 file - promoters60/4766776
ataataa

SEQ ID NO: 58114 - DNA, 7 bp, Unknown
  misc_feature (1)..( 7): Matrix.003 file - promoters60/4766776
aaaaata

SEQ ID NO: 58115 - DNA, 6 bp, Unknown
  misc_feature (1)..( 6): Matrix.003 file - promoters60/4766776
agacac

SEQ ID NO: 58116 - DNA, 7 bp, Unknown
  misc_feature (1)..( 7): Matrix.003 file - promoters60/4766776
tccatct

SEQ ID NO: 58117 - DNA, 7 bp, Unknown
  misc_feature (1)..( 7): Matrix.003 file - promoters60/4766776
tctaacc

SEQ ID NO: 58118 - DNA, 6 bp, Unknown
  misc_feature (1)..( 6): Matrix.003 file - promoters60/4766776
aaataa

SEQ ID NO: 58119 - DNA, 6 bp, Unknown
  misc_feature (1)..( 6): Matrix.003 file - promoters60/4766776
aattca

SEQ ID NO: 58120 - DNA, 10 bp, Unknown
  misc_feature (1)..( 10): Matrix.003 file - promoters60/4766776
aaaatcttta

SEQ ID NO: 58121 - DNA, 10 bp, Unknown
  misc_feature (1)..( 10): Matrix.003 file - promoters60/4766784
acaagatttg

SEQ ID NO: 58122 - DNA, 6 bp, Unknown
  misc_feature (1)..( 6): Matrix.003 file - promoters60/4766784
tccata

SEQ ID NO: 58123 - DNA, 7 bp, Unknown
  misc_feature (1)..( 7): Matrix.003 file - promoters60/4766784
atcaaga

SEQ ID NO: 58124 - DNA, 6 bp, Unknown
  misc_feature (1)..( 6): Matrix.003 file - promoters60/4766784
ctgaaa

SEQ ID NO: 58125 - DNA, 7 bp, Unknown
  misc_feature (1)..( 7): Matrix.003 file - promoters60/4766784
ccacatt

SEQ ID NO: 58126 - DNA, 6 bp, Unknown
  misc_feature (1)..( 6): Matrix.003 file - promoters60/4766784
attaat

SEQ ID NO: 58127 - DNA, 6 bp, Unknown
  misc_feature (1)..( 6): Matrix.003 file - promoters60/4766784
ttaatt

SEQ ID NO: 58128 - DNA, 6 bp, Unknown
  misc_feature (1)..( 6): Matrix.003 file - promoters60/4766784
tttgac

SEQ ID NO: 58129 - DNA, 6 bp, Unknown
  misc_feature (1)..( 6): Matrix.003 file - promoters60/4766784
caaaaa

SEQ ID NO: 58130 - DNA, 6 bp, Unknown
  misc_feature (1)..( 6): Matrix.003 file - promoters60/4766784
ttttta

SEQ ID NO: 58131 - DNA, 10 bp, Unknown
  misc_feature (1)..( 10): Matrix.003 file - promoters60/4766784
tatattatta

SEQ ID NO: 58132 - DNA, 7 bp, Unknown
  misc_feature (1)..( 7): Matrix.003 file - promoters60/4766784
aaaataa

SEQ ID NO: 58133 - DNA, 7 bp, Unknown
  misc_feature (1)..( 7): Matrix.003 file - promoters60/4766784
tgttaaa

SEQ ID NO: 58134 - DNA, 7 bp, Unknown
  misc_feature (1)..( 7): Matrix.003 file - promoters60/4766784
aatataa

SEQ ID NO: 58135 - DNA, 6 bp, Unknown
  misc_feature (1)..( 6): Matrix.003 file - promoters60/4766784
ataaaa

SEQ ID NO: 58136 - DNA, 6 bp, Unknown
  misc_feature (1)..( 6): Matrix.003 file - promoters60/4766816
gattta

SEQ ID NO: 58137 - DNA, 7 bp, Unknown
  misc_feature (1)..( 7): Matrix.003 file - promoters60/4766816
aaaatat

SEQ ID NO: 58138 - DNA, 7 bp, Unknown
  misc_feature (1)..( 7): Matrix.003 file - promoters60/4766816
tatacaa

SEQ ID NO: 58139 - DNA, 7 bp, Unknown
  misc_feature (1)..( 7): Matrix.003 file - promoters60/4766816
tatattt

SEQ ID NO: 58140 - DNA, 6 bp, Unknown
  misc_feature (1)..( 6): Matrix.003 file - promoters60/4766816
tatact

SEQ ID NO: 58141 - DNA, 7 bp, Unknown
  misc_feature (1)..( 7): Matrix.003 file - promoters60/4766816
tttttaa

SEQ ID NO: 58142 - DNA, 7 bp, Unknown
  misc_feature (1)..( 7): Matrix.003 file - promoters60/4766816
taatttt

SEQ ID NO: 58143 - DNA, 9 bp, Unknown
  misc_feature (1)..( 9): Matrix.003 file - promoters60/4766816
ttttaataa

SEQ ID NO: 58144 - DNA, 6 bp, Unknown
  misc_feature (1)..( 6): Matrix.003 file - promoters60/4766816
aaaact

SEQ ID NO: 58145 - DNA, 6 bp, Unknown
  misc_feature (1)..( 6): Matrix.003 file - promoters60/4766816
aataaa

SEQ ID NO: 58146 - DNA, 6 bp, Unknown
  misc_feature (1)..( 6): Matrix.003 file - promoters60/4766816
tctctc

SEQ ID NO: 58147 - DNA, 9 bp, Unknown
  misc_feature (1)..( 9): Matrix.003 file - promoters60/4766816
caaatatgg

SEQ ID NO: 58148 - DNA, 7 bp, Unknown
  misc_feature (1)..( 7): Matrix.003 file - promoters60/4766816
tatattt

SEQ ID NO: 58149 - DNA, 7 bp, Unknown
  misc_feature (1)..( 7): Matrix.003 file - promoters60/4766816
agtactt

SEQ ID NO: 58150 - DNA, 11 bp, Unknown
  misc_feature (1)..( 11): Matrix.003 file - promoters60/4766826
aaacaaatttt

SEQ ID NO: 58151 - DNA, 8 bp, Unknown
  misc_feature (1)..( 8): Matrix.003 file - promoters60/4766835
aagttcaa

SEQ ID NO: 58152 - DNA, 7 bp, Unknown
  misc_feature (1)..( 7): Matrix.003 file - promoters60/4766835
atcaaaa

SEQ ID NO: 58153 - DNA, 8 bp, Unknown
  misc_feature (1)..( 8): Matrix.003 file - promoters60/4766835
aaacaaaa

SEQ ID NO: 58154 - DNA, 8 bp, Unknown
  misc_feature (1)..( 8): Matrix.003 file - promoters60/4766835
ataaaata

SEQ ID NO: 58155 - DNA, 8 bp, Unknown
  misc_feature (1)..( 8): Matrix.003 file - promoters60/4766835
aaaaagta

SEQ ID NO: 58156 - DNA, 10 bp, Unknown
  misc_feature (1)..( 10): Matrix.003 file - promoters60/4766835
aaataattga

SEQ ID NO: 58157 - DNA, 7 bp, Unknown
  misc_feature (1)..( 7): Matrix.003 file - promoters60/4766835
ttaattt

SEQ ID NO: 58158 - DNA, 8 bp, Unknown
  misc_feature (1)..( 8): Matrix.003 file - promoters60/4766835
cataaaaa

SEQ ID NO: 58159 - DNA, 8 bp, Unknown
  misc_feature (1)..( 8): Matrix.003 file - promoters60/4766835
acacataa

SEQ ID NO: 58160 - DNA, 7 bp, Unknown
  misc_feature (1)..( 7): Matrix.003 file - promoters60/4766835
ttttcag

SEQ ID NO: 58161 - DNA, 9 bp, Unknown
  misc_feature (1)..( 9): Matrix.003 file - promoters60/4766862
tttgggtga

SEQ ID NO: 58162 - DNA, 8 bp, Unknown
  misc_feature (1)..( 8): Matrix.003 file - promoters60/4766866
aacatttg

SEQ ID NO: 58163 - DNA, 11 bp, Unknown
  misc_feature (1)..( 11): Matrix.003 file - promoters60/4766866
ttaaaattaaa

SEQ ID NO: 58164 - DNA, 13 bp, Unknown
  misc_feature (1)..( 13): Matrix.003 file - promoters60/4766866
aaagaaattaaaa

SEQ ID NO: 58165 - DNA, 12 bp, Unknown
  misc_feature (1)..( 12): Matrix.003 file - promoters60/4766866
ttttgagacaaa

SEQ ID NO: 58166 - DNA, 6 bp, Unknown
  misc_feature (1)..( 6): Matrix.003 file - promoters60/4766870
atgaag

SEQ ID NO: 58167 - DNA, 7 bp, Unknown
  misc_feature (1)..( 7): Matrix.003 file - promoters60/4766870
tgaagtt

SEQ ID NO: 58168 - DNA, 6 bp, Unknown
  misc_feature (1)..( 6): Matrix.003 file - promoters60/4766870
gatgaa

SEQ ID NO: 58169 - DNA, 7 bp, Unknown
  misc_feature (1)..( 7): Matrix.003 file - promoters60/4766870
gattttg

SEQ ID NO: 58170 - DNA, 6 bp, Unknown
  misc_feature (1)..( 6): Matrix.003 file - promoters60/4766870
tctttg

SEQ ID NO: 58171 - DNA, 7 bp, Unknown
  misc_feature (1)..( 7): Matrix.003 file - promoters60/4766870
gtttgag

SEQ ID NO: 58172 - DNA, 7 bp, Unknown
  misc_feature (1)..( 7): Matrix.003 file - promoters60/4766870
atgatga

SEQ ID NO: 58173 - DNA, 8 bp, Unknown
  misc_feature (1)..( 8): Matrix.003 file - promoters60/4766870
attgtttt

SEQ ID NO: 58174 - DNA, 8 bp, Unknown
  misc_feature (1)..( 8): Matrix.003 file - promoters60/4766870
tgagtatt

SEQ ID NO: 58175 - DNA, 8 bp, Unknown
  misc_feature (1)..( 8): Matrix.003 file - promoters60/4766870
aagaggat

SEQ ID NO: 58176 - DNA, 10 bp, Unknown
  misc_feature (1)..( 10): Matrix.003 file - promoters60/4766870
tttatttata

SEQ ID NO: 58177 - DNA, 7 bp, Unknown
  misc_feature (1)..( 7): Matrix.003 file - promoters60/4766870
tctaaaa

SEQ ID NO: 58178 - DNA, 6 bp, Unknown
  misc_feature (1)..( 6): Matrix.003 file - promoters60/4766924
gttggt

SEQ ID NO: 58179 - DNA, 6 bp, Unknown
  misc_feature (1)..( 6): Matrix.003 file - promoters60/4766924
tagatc

SEQ ID NO: 58180 - DNA, 6 bp, Unknown
  misc_feature (1)..( 6): Matrix.003 file - promoters60/4766924
ttttat

SEQ ID NO: 58181 - DNA, 6 bp, Unknown
  misc_feature (1)..( 6): Matrix.003 file - promoters60/4766924
tatata

SEQ ID NO: 58182 - DNA, 8 bp, Unknown
  misc_feature (1)..( 8): Matrix.003 file - promoters60/4766924
accaacca

SEQ ID NO: 58183 - DNA, 7 bp, Unknown
  misc_feature (1)..( 7): Matrix.003 file - promoters60/4766924
tgggatc

SEQ ID NO: 58184 - DNA, 7 bp, Unknown
  misc_feature (1)..( 7): Matrix.003 file - promoters60/4766924
gtcaaaa

SEQ ID NO: 58185 - DNA, 10 bp, Unknown
  misc_feature (1)..( 10): Matrix.003 file - promoters60/4766977
caacaataat

SEQ ID NO: 58186 - DNA, 10 bp, Unknown
  misc_feature (1)..( 10): Matrix.003 file - promoters60/4766977
aatagaaaat

SEQ ID NO: 58187 - DNA, 10 bp, Unknown
  misc_feature (1)..( 10): Matrix.003 file - promoters60/4766977
actaatttta

SEQ ID NO: 58188 - DNA, 9 bp, Unknown
  misc_feature (1)..( 9): Matrix.003 file - promoters60/4766977
aactaaaat

SEQ ID NO: 58189 - DNA, 10 bp, Unknown
  misc_feature (1)..( 10): Matrix.003 file - promoters60/4766977
aaaatatatg

SEQ ID NO: 58190 - DNA, 10 bp, Unknown
  misc_feature (1)..( 10): Matrix.003 file - promoters60/4766977
attcttttta

SEQ ID NO: 58191 - DNA, 12 bp, Unknown
  misc_feature (1)..( 12): Matrix.003 file - promoters60/4766977
aatataaataaa

SEQ ID NO: 58192 - DNA, 9 bp, Unknown
  misc_feature (1)..( 9): Matrix.003 file - promoters60/4766977
ataaactta

SEQ ID NO: 58193 - DNA, 9 bp, Unknown
  misc_feature (1)..( 9): Matrix.003 file - promoters60/4766977
ataaaatta

SEQ ID NO: 58194 - DNA, 11 bp, Unknown
  misc_feature (1)..( 11): Matrix.003 file - promoters60/4767038
ctttttttttt

SEQ ID NO: 58195 - DNA, 9 bp, Unknown
  misc_feature (1)..( 9): Matrix.003 file - promoters60/4767038
atctatttt

SEQ ID NO: 58196 - DNA, 8 bp, Unknown
  misc_feature (1)..( 8): Matrix.003 file - promoters60/4767050
ttagaatt

SEQ ID NO: 58197 - DNA, 8 bp, Unknown
  misc_feature (1)..( 8): Matrix.003 file - promoters60/4767050
atataaat

SEQ ID NO: 58198 - DNA, 6 bp, Unknown
  misc_feature (1)..( 6): Matrix.003 file - promoters60/4767050
aagaag

SEQ ID NO: 58199 - DNA, 7 bp, Unknown
  misc_feature (1)..( 7): Matrix.003 file - promoters60/4767050
tctgcaa

SEQ ID NO: 58200 - DNA, 9 bp, Unknown
  misc_feature (1)..( 9): Matrix.003 file - promoters60/4767050
agatggttc

SEQ ID NO: 58201 - DNA, 8 bp, Unknown
  misc_feature (1)..( 8): Matrix.003 file - promoters60/4767050
gatcagag

SEQ ID NO: 58202 - DNA, 6 bp, Unknown
  misc_feature (1)..( 6): Matrix.003 file - promoters60/4767050
agagaa

SEQ ID NO: 58203 - DNA, 6 bp, Unknown
  misc_feature (1)..( 6): Matrix.003 file - promoters60/4767050
gatgaa

SEQ ID NO: 58204 - DNA, 6 bp, Unknown
  misc_feature (1)..( 6): Matrix.003 file - promoters60/4767050
atttag

SEQ ID NO: 58205 - DNA, 8 bp, Unknown
  misc_feature (1)..( 8): Matrix.003 file - promoters60/4767050
aaactaaa

SEQ ID NO: 58206 - DNA, 6 bp, Unknown
  misc_feature (1)..( 6): Matrix.003 file - promoters60/4767050
gaatca

SEQ ID NO: 58207 - DNA, 7 bp, Unknown
  misc_feature (1)..( 7): Matrix.003 file - promoters60/4767050
tccagtt

SEQ ID NO: 58208 - DNA, 6 bp, Unknown
  misc_feature (1)..( 6): Matrix.003 file - promoters60/4767050
tttccg

SEQ ID NO: 58209 - DNA, 6 bp, Unknown
  misc_feature (1)..( 6): Matrix.003 file - promoters60/4767050
aaccct

SEQ ID NO: 58210 - DNA, 6 bp, Unknown
  misc_feature (1)..( 6): Matrix.003 file - promoters60/4767059
tagatc

SEQ ID NO: 58211 - DNA, 6 bp, Unknown
  misc_feature (1)..( 6): Matrix.003 file - promoters60/4767059
acttct

SEQ ID NO: 58212 - DNA, 7 bp, Unknown
  misc_feature (1)..( 7): Matrix.003 file - promoters60/4767059
taaattt

SEQ ID NO: 58213 - DNA, 6 bp, Unknown
  misc_feature (1)..( 6): Matrix.003 file - promoters60/4767059
aaagac

SEQ ID NO: 58214 - DNA, 8 bp, Unknown
  misc_feature (1)..( 8): Matrix.003 file - promoters60/4767059
ttggaaga

SEQ ID NO: 58215 - DNA, 8 bp, Unknown
  misc_feature (1)..( 8): Matrix.003 file - promoters60/4767059
gaactttg

SEQ ID NO: 58216 - DNA, 8 bp, Unknown
  misc_feature (1)..( 8): Matrix.003 file - promoters60/4767059
ttaaatgc

SEQ ID NO: 58217 - DNA, 8 bp, Unknown
  misc_feature (1)..( 8): Matrix.003 file - promoters60/4767059
taacaaat

SEQ ID NO: 58218 - DNA, 6 bp, Unknown
  misc_feature (1)..( 6): Matrix.003 file - promoters60/4767059
gatatg

SEQ ID NO: 58219 - DNA, 6 bp, Unknown
  misc_feature (1)..( 6): Matrix.003 file - promoters60/4767059
taattt

SEQ ID NO: 58220 - DNA, 7 bp, Unknown
  misc_feature (1)..( 7): Matrix.003 file - promoters60/4767059
tataatt

SEQ ID NO: 58221 - DNA, 8 bp, Unknown
  misc_feature (1)..( 8): Matrix.003 file - promoters60/4767059
ataaaatt

SEQ ID NO: 58222 - DNA, 8 bp, Unknown
  misc_feature (1)..( 8): Matrix.003 file - promoters60/4767059
aaaatcaa

SEQ ID NO: 58223 - DNA, 8 bp, Unknown
  misc_feature (1)..( 8): Matrix.003 file - promoters60/4767059
attcagtt

SEQ ID NO: 58224 - DNA, 10 bp, Unknown
  misc_feature (1)..( 10): Matrix.003 file - promoters60/4767059
gtcgttttca

SEQ ID NO: 58225 - DNA, 6 bp, Unknown
  misc_feature (1)..( 6): Matrix.003 file - promoters60/4767059
aaaaaa

SEQ ID NO: 58226 - DNA, 7 bp, Unknown
  misc_feature (1)..( 7): Matrix.003 file - promoters60/4767059
gatcaaa

SEQ ID NO: 58227 - DNA, 6 bp, Unknown
  misc_feature (1)..( 6): Matrix.003 file - promoters60/4767059
attaat

SEQ ID NO: 58228 - DNA, 6 bp, Unknown
  misc_feature (1)..( 6): Matrix.003 file - promoters60/4767059
atttca

SEQ ID NO: 58229 - DNA, 10 bp, Unknown
  misc_feature (1)..( 10): Matrix.003 file - promoters60/4767059
cataaattta

SEQ ID NO: 58230 - DNA, 7 bp, Unknown
  misc_feature (1)..( 7): Matrix.003 file - promoters60/4767059
aggccca

SEQ ID NO: 58231 - DNA, 7 bp, Unknown
  misc_feature (1)..( 7): Matrix.003 file - promoters60/4767063
aaaatga

SEQ ID NO: 58232 - DNA, 7 bp, Unknown
  misc_feature (1)..( 7): Matrix.003 file - promoters60/4767063
tttcttt

SEQ ID NO: 58233 - DNA, 6 bp, Unknown
  misc_feature (1)..( 6): Matrix.003 file - promoters60/4767063
cgcttt

SEQ ID NO: 58234 - DNA, 7 bp, Unknown
  misc_feature (1)..( 7): Matrix.003 file - promoters60/4767063
tttagta

SEQ ID NO: 58235 - DNA, 10 bp, Unknown
  misc_feature (1)..( 10): Matrix.003 file - promoters60/4767063
ttgctgtttt

SEQ ID NO: 58236 - DNA, 8 bp, Unknown
  misc_feature (1)..( 8): Matrix.003 file - promoters60/4767063
ttttgtct

SEQ ID NO: 58237 - DNA, 11 bp, Unknown
  misc_feature (1)..( 11): Matrix.003 file - promoters60/4767063
tttagtaattt

SEQ ID NO: 58238 - DNA, 7 bp, Unknown
  misc_feature (1)..( 7): Matrix.003 file - promoters60/4767063
tttataa

SEQ ID NO: 58239 - DNA, 8 bp, Unknown
  misc_feature (1)..( 8): Matrix.003 file - promoters60/4767063
atttaatg

SEQ ID NO: 58240 - DNA, 11 bp, Unknown
  misc_feature (1)..( 11): Matrix.003 file - promoters60/4767063
attaattataa

SEQ ID NO: 58241 - DNA, 8 bp, Unknown
  misc_feature (1)..( 8): Matrix.003 file - promoters60/4767063
attgtaaa

SEQ ID NO: 58242 - DNA, 7 bp, Unknown
  misc_feature (1)..( 7): Matrix.003 file - promoters60/4767063
tctccaa

SEQ ID NO: 58243 - DNA, 6 bp, Unknown
  misc_feature (1)..( 6): Matrix.003 file - promoters60/4767063
tagagg

SEQ ID NO: 58244 - DNA, 6 bp, Unknown
  misc_feature (1)..( 6): Matrix.003 file - promoters60/4767063
atgaga

SEQ ID NO: 58245 - DNA, 6 bp, Unknown
  misc_feature (1)..( 6): Matrix.003 file - promoters60/4767063
tgtgaa

SEQ ID NO: 58246 - DNA, 6 bp, Unknown
  misc_feature (1)..( 6): Matrix.003 file - promoters60/4767063
ttttgt

SEQ ID NO: 58247 - DNA, 6 bp, Unknown
  misc_feature (1)..( 6): Matrix.003 file - promoters60/4767063
aataag

SEQ ID NO: 58248 - DNA, 7 bp, Unknown
  misc_feature (1)..( 7): Matrix.003 file - promoters60/4767063
aaaaaaa

SEQ ID NO: 58249 - DNA, 11 bp, Unknown
  misc_feature (1)..( 11): Matrix.003 file - promoters60/4767063
attaattaatt

SEQ ID NO: 58250 - DNA, 6 bp, Unknown
  misc_feature (1)..( 6): Matrix.003 file - promoters60/4767063
agtagt

SEQ ID NO: 58251 - DNA, 6 bp, Unknown
  misc_feature (1)..( 6): Matrix.003 file - promoters60/4767063
accaaa

SEQ ID NO: 58252 - DNA, 7 bp, Unknown
  misc_feature (1)..( 7): Matrix.003 file - promoters60/4767063
gttaacc

SEQ ID NO: 58253 - DNA, 8 bp, Unknown
  misc_feature (1)..( 8): Matrix.003 file - promoters60/4767063
aaatgata

SEQ ID NO: 58254 - DNA, 10 bp, Unknown
  misc_feature (1)..( 10): Matrix.003 file - promoters60/4767063
caaattagac

SEQ ID NO: 58255 - DNA, 9 bp, Unknown
  misc_feature (1)..( 9): Matrix.003 file - promoters60/4767063
ttcatcttt

SEQ ID NO: 58256 - DNA, 8 bp, Unknown
  misc_feature (1)..( 8): Matrix.003 file - promoters60/4767066
cttagtca

SEQ ID NO: 58257 - DNA, 9 bp, Unknown
  misc_feature (1)..( 9): Matrix.003 file - promoters60/4767066
tattattca

SEQ ID NO: 58258 - DNA, 8 bp, Unknown
  misc_feature (1)..( 8): Matrix.003 file - promoters60/4767066
cattgatg

SEQ ID NO: 58259 - DNA, 8 bp, Unknown
  misc_feature (1)..( 8): Matrix.003 file - promoters60/4767066
aattcttt

SEQ ID NO: 58260 - DNA, 6 bp, Unknown
  misc_feature (1)..( 6): Matrix.003 file - promoters60/4767066
ttcttt

SEQ ID NO: 58261 - DNA, 14 bp, Unknown
  misc_feature (1)..( 14): Matrix.003 file - promoters60/4767066
gtttccaaattctc

SEQ ID NO: 58262 - DNA, 7 bp, Unknown
  misc_feature (1)..( 7): Matrix.003 file - promoters60/4767066
caaaaac

SEQ ID NO: 58263 - DNA, 9 bp, Unknown
  misc_feature (1)..( 9): Matrix.003 file - promoters60/4767066
aaaaacaaa

SEQ ID NO: 58264 - DNA, 6 bp, Unknown
  misc_feature (1)..( 6): Matrix.003 file - promoters60/4767066
aagaaa

SEQ ID NO: 58265 - DNA, 11 bp, Unknown
  misc_feature (1)..( 11): Matrix.003 file - promoters60/4767144
aaaaaattaaa

SEQ ID NO: 58266 - DNA, 13 bp, Unknown
  misc_feature (1)..( 13): Matrix.003 file - promoters60/4767144
aaaaattaaacaa

SEQ ID NO: 58267 - DNA, 12 bp, Unknown
  misc_feature (1)..( 12): Matrix.003 file - promoters60/4767144
atttttgagata

SEQ ID NO: 58268 - DNA, 9 bp, Unknown
  misc_feature (1)..( 9): Matrix.003 file - promoters60/4767144
atattgctt

SEQ ID NO: 58269 - DNA, 6 bp, Unknown
  misc_feature (1)..( 6): Matrix.003 file - promoters60/4767148
acaatt

SEQ ID NO: 58270 - DNA, 6 bp, Unknown
  misc_feature (1)..( 6): Matrix.003 file - promoters60/4767148
atctgt

SEQ ID NO: 58271 - DNA, 8 bp, Unknown
  misc_feature (1)..( 8): Matrix.003 file - promoters60/4767148
attcatat

SEQ ID NO: 58272 - DNA, 6 bp, Unknown
  misc_feature (1)..( 6): Matrix.003 file - promoters60/4767148
acaaat

SEQ ID NO: 58273 - DNA, 7 bp, Unknown
  misc_feature (1)..( 7): Matrix.003 file - promoters60/4767148
atttctt

SEQ ID NO: 58274 - DNA, 7 bp, Unknown
  misc_feature (1)..( 7): Matrix.003 file - promoters60/4767148
tacaaaa

SEQ ID NO: 58275 - DNA, 6 bp, Unknown
  misc_feature (1)..( 6): Matrix.003 file - promoters60/4767148
ttctaa

SEQ ID NO: 58276 - DNA, 8 bp, Unknown
  misc_feature (1)..( 8): Matrix.003 file - promoters60/4767148
tattgatt

SEQ ID NO: 58277 - DNA, 12 bp, Unknown
  misc_feature (1)..( 12): Matrix.003 file - promoters60/4767148
agtaaatttgac

SEQ ID NO: 58278 - DNA, 6 bp, Unknown
  misc_feature (1)..( 6): Matrix.003 file - promoters60/4767148
tatgct

SEQ ID NO: 58279 - DNA, 6 bp, Unknown
  misc_feature (1)..( 6): Matrix.003 file - promoters60/4767148
tatgaa

SEQ ID NO: 58280 - DNA, 6 bp, Unknown
  misc_feature (1)..( 6): Matrix.003 file - promoters60/4767148
taaata

SEQ ID NO: 58281 - DNA, 6 bp, Unknown
  misc_feature (1)..( 6): Matrix.003 file - promoters60/4767148
ttatta

SEQ ID NO: 58282 - DNA, 6 bp, Unknown
  misc_feature (1)..( 6): Matrix.003 file - promoters60/4767148
attata

SEQ ID NO: 58283 - DNA, 7 bp, Unknown
  misc_feature (1)..( 7): Matrix.003 file - promoters60/4767148
ataactt

SEQ ID NO: 58284 - DNA, 6 bp, Unknown
  misc_feature (1)..( 6): Matrix.003 file - promoters60/4767148
aaattt

SEQ ID NO: 58285 - DNA, 7 bp, Unknown
  misc_feature (1)..( 7): Matrix.003 file - promoters60/4767148
aaaaagt

SEQ ID NO: 58286 - DNA, 8 bp, Unknown
  misc_feature (1)..( 8): Matrix.003 file - promoters60/4767148
gttttaaa

SEQ ID NO: 58287 - DNA, 7 bp, Unknown
  misc_feature (1)..( 7): Matrix.003 file - promoters60/4767195
aaaataa

SEQ ID NO: 58288 - DNA, 7 bp, Unknown
  misc_feature (1)..( 7): Matrix.003 file - promoters60/4767195
atactaa

SEQ ID NO: 58289 - DNA, 10 bp, Unknown
  misc_feature (1)..( 10): Matrix.003 file - promoters60/4767195
ttctaaaatt

SEQ ID NO: 58290 - DNA, 7 bp, Unknown
  misc_feature (1)..( 7): Matrix.003 file - promoters60/4767195
ttaattt

SEQ ID NO: 58291 - DNA, 8 bp, Unknown
  misc_feature (1)..( 8): Matrix.003 file - promoters60/4767195
tctataag

SEQ ID NO: 58292 - DNA, 7 bp, Unknown
  misc_feature (1)..( 7): Matrix.003 file - promoters60/4767195
tgaagat

SEQ ID NO: 58293 - DNA, 6 bp, Unknown
  misc_feature (1)..( 6): Matrix.003 file - promoters60/4767195
aatttt

SEQ ID NO: 58294 - DNA, 8 bp, Unknown
  misc_feature (1)..( 8): Matrix.003 file - promoters60/4767195
tgggccta

SEQ ID NO: 58295 - DNA, 6 bp, Unknown
  misc_feature (1)..( 6): Matrix.003 file - promoters60/4767195
gcattt

SEQ ID NO: 58296 - DNA, 6 bp, Unknown
  misc_feature (1)..( 6): Matrix.003 file - promoters60/4767195
gaattt

SEQ ID NO: 58297 - DNA, 7 bp, Unknown
  misc_feature (1)..( 7): Matrix.003 file - promoters60/4767195
tttctaa

SEQ ID NO: 58298 - DNA, 7 bp, Unknown
  misc_feature (1)..( 7): Matrix.003 file - promoters60/4767195
tttattt

SEQ ID NO: 58299 - DNA, 6 bp, Unknown
  misc_feature (1)..( 6): Matrix.003 file - promoters60/4767195
acattt

SEQ ID NO: 58300 - DNA, 6 bp, Unknown
  misc_feature (1)..( 6): Matrix.003 file - promoters60/4767195
cacatg

SEQ ID NO: 58301 - DNA, 6 bp, Unknown
  misc_feature (1)..( 6): Matrix.003 file - promoters60/4767195
gagatt

SEQ ID NO: 58302 - DNA, 6 bp, Unknown
  misc_feature (1)..( 6): Matrix.003 file - promoters60/4767195
ttgggt

SEQ ID NO: 58303 - DNA, 6 bp, Unknown
  misc_feature (1)..( 6): Matrix.003 file - promoters60/4767195
agatga

SEQ ID NO: 58304 - DNA, 9 bp, Unknown
  misc_feature (1)..( 9): Matrix.003 file - promoters60/4767195
ggttaatgg

SEQ ID NO: 58305 - DNA, 10 bp, Unknown
  misc_feature (1)..( 10): Matrix.003 file - promoters60/4767298
tatatcaata

SEQ ID NO: 58306 - DNA, 11 bp, Unknown
  misc_feature (1)..( 11): Matrix.003 file - promoters60/4767298
ttctaaaatat

SEQ ID NO: 58307 - DNA, 12 bp, Unknown
  misc_feature (1)..( 12): Matrix.003 file - promoters60/4767298
tacattttaaaa

SEQ ID NO: 58308 - DNA, 7 bp, Unknown
  misc_feature (1)..( 7): Matrix.003 file - promoters60/4767318
aaaatat

SEQ ID NO: 58309 - DNA, 7 bp, Unknown
  misc_feature (1)..( 7): Matrix.003 file - promoters60/4767318
agagtaa

SEQ ID NO: 58310 - DNA, 7 bp, Unknown
  misc_feature (1)..( 7): Matrix.003 file - promoters60/4767318
aaagact

SEQ ID NO: 58311 - DNA, 13 bp, Unknown
  misc_feature (1)..( 13): Matrix.003 file - promoters60/4767318
tttagttttcctt

SEQ ID NO: 58312 - DNA, 10 bp, Unknown
  misc_feature (1)..( 10): Matrix.003 file - promoters60/4767318
aaaaacacaa

SEQ ID NO: 58313 - DNA, 8 bp, Unknown
  misc_feature (1)..( 8): Matrix.003 file - promoters60/4767318
tgtaattt

SEQ ID NO: 58314 - DNA, 7 bp, Unknown
  misc_feature (1)..( 7): Matrix.003 file - promoters60/4767318
cttaaac

SEQ ID NO: 58315 - DNA, 6 bp, Unknown
  misc_feature (1)..( 6): Matrix.003 file - promoters60/4767318
cattaa

SEQ ID NO: 58316 - DNA, 6 bp, Unknown
  misc_feature (1)..( 6): Matrix.003 file - promoters60/4767318
ctaaaa

SEQ ID NO: 58317 - DNA, 6 bp, Unknown
  misc_feature (1)..( 6): Matrix.003 file - promoters60/4767318
gtattt

SEQ ID NO: 58318 - DNA, 7 bp, Unknown
  misc_feature (1)..( 7): Matrix.003 file - promoters60/4767318
ttataaa

SEQ ID NO: 58319 - DNA, 8 bp, Unknown
  misc_feature (1)..( 8): Matrix.003 file - promoters60/4767318
cttctctt

SEQ ID NO: 58320 - DNA, 9 bp, Unknown
  misc_feature (1)..( 9): Matrix.003 file - promoters60/4767318
tttacttaa

SEQ ID NO: 58321 - DNA, 6 bp, Unknown
  misc_feature (1)..( 6): Matrix.003 file - promoters60/4767318
cttgtt

SEQ ID NO: 58322 - DNA, 8 bp, Unknown
  misc_feature (1)..( 8): Matrix.003 file - promoters60/4767318
acaagatt

SEQ ID NO: 58323 - DNA, 7 bp, Unknown
  misc_feature (1)..( 7): Matrix.003 file - promoters60/4767318
tacgttt

SEQ ID NO: 58324 - DNA, 7 bp, Unknown
  misc_feature (1)..( 7): Matrix.003 file - promoters60/4767318
taaatta

SEQ ID NO: 58325 - DNA, 8 bp, Unknown
  misc_feature (1)..( 8): Matrix.003 file - promoters60/4767318
gaaactaa

SEQ ID NO: 58326 - DNA, 8 bp, Unknown
  misc_feature (1)..( 8): Matrix.003 file - promoters60/4767318
gtcttcat

SEQ ID NO: 58327 - DNA, 6 bp, Unknown
  misc_feature (1)..( 6): Matrix.003 file - promoters60/4767318
ttatta

SEQ ID NO: 58328 - DNA, 7 bp, Unknown
  misc_feature (1)..( 7): Matrix.003 file - promoters60/4767318
ttaatat

SEQ ID NO: 58329 - DNA, 7 bp, Unknown
  misc_feature (1)..( 7): Matrix.003 file - promoters60/4767318
acaaaat

SEQ ID NO: 58330 - DNA, 11 bp, Unknown
  misc_feature (1)..( 11): Matrix.003 file - promoters60/4767330
aacatttcttt

SEQ ID NO: 58331 - DNA, 6 bp, Unknown
  misc_feature (1)..( 6): Matrix.003 file - promoters60/4767330
tttgtt

SEQ ID NO: 58332 - DNA, 11 bp, Unknown
  misc_feature (1)..( 11): Matrix.003 file - promoters60/4767330
atttctgtttg

SEQ ID NO: 58333 - DNA, 7 bp, Unknown
  misc_feature (1)..( 7): Matrix.003 file - promoters60/4767330
aaagaac

SEQ ID NO: 58334 - DNA, 6 bp, Unknown
  misc_feature (1)..( 6): Matrix.003 file - promoters60/4767330
ttaatt

SEQ ID NO: 58335 - DNA, 6 bp, Unknown
  misc_feature (1)..( 6): Matrix.003 file - promoters60/4767330
acaaat

SEQ ID NO: 58336 - DNA, 7 bp, Unknown
  misc_feature (1)..( 7): Matrix.003 file - promoters60/4767330
agtatat

SEQ ID NO: 58337 - DNA, 7 bp, Unknown
  misc_feature (1)..( 7): Matrix.003 file - promoters60/4767330
tatattt

SEQ ID NO: 58338 - DNA, 6 bp, Unknown
  misc_feature (1)..( 6): Matrix.003 file - promoters60/4767330
ttttct

SEQ ID NO: 58339 - DNA, 8 bp, Unknown
  misc_feature (1)..( 8): Matrix.003 file - promoters60/4767330
caattatt

SEQ ID NO: 58340 - DNA, 8 bp, Unknown
  misc_feature (1)..( 8): Matrix.003 file - promoters60/4767330
caatattt

SEQ ID NO: 58341 - DNA, 6 bp, Unknown
  misc_feature (1)..( 6): Matrix.003 file - promoters60/4767330
taatta

SEQ ID NO: 58342 - DNA, 8 bp, Unknown
  misc_feature (1)..( 8): Matrix.003 file - promoters60/4767330
tttagatt

SEQ ID NO: 58343 - DNA, 6 bp, Unknown
  misc_feature (1)..( 6): Matrix.003 file - promoters60/4767330
ataata

SEQ ID NO: 58344 - DNA, 6 bp, Unknown
  misc_feature (1)..( 6): Matrix.003 file - promoters60/4767330
attttt

SEQ ID NO: 58345 - DNA, 6 bp, Unknown
  misc_feature (1)..( 6): Matrix.003 file - promoters60/4767330
aataaa

SEQ ID NO: 58346 - DNA, 6 bp, Unknown
  misc_feature (1)..( 6): Matrix.003 file - promoters60/4767330
aaattt

SEQ ID NO: 58347 - DNA, 10 bp, Unknown
  misc_feature (1)..( 10): Matrix.003 file - promoters60/4767330
ccccaaaacc

SEQ ID NO: 58348 - DNA, 7 bp, Unknown
  misc_feature (1)..( 7): Matrix.003 file - promoters60/4767330
aaacgta

SEQ ID NO: 58349 - DNA, 9 bp, Unknown
  misc_feature (1)..( 9): Matrix.003 file - promoters60/4767330
aatatattt

SEQ ID NO: 58350 - DNA, 8 bp, Unknown
  misc_feature (1)..( 8): Matrix.003 file - promoters60/4767330
taaaataa

SEQ ID NO: 58351 - DNA, 7 bp, Unknown
  misc_feature (1)..( 7): Matrix.003 file - promoters60/4767330
aaaaaat

SEQ ID NO: 58352 - DNA, 8 bp, Unknown
  misc_feature (1)..( 8): Matrix.003 file - promoters60/4767330
tttcaata

SEQ ID NO: 58353 - DNA, 6 bp, Unknown
  misc_feature (1)..( 6): Matrix.003 file - promoters60/4767333
gacaaa

SEQ ID NO: 58354 - DNA, 7 bp, Unknown
  misc_feature (1)..( 7): Matrix.003 file - promoters60/4767333
tttcttt

SEQ ID NO: 58355 - DNA, 10 bp, Unknown
  misc_feature (1)..( 10): Matrix.003 file - promoters60/4767333
atcgaaaaaa

SEQ ID NO: 58356 - DNA, 8 bp, Unknown
  misc_feature (1)..( 8): Matrix.003 file - promoters60/4767333
aaacataa

SEQ ID NO: 58357 - DNA, 6 bp, Unknown
  misc_feature (1)..( 6): Matrix.003 file - promoters60/4767333
gaaaat

SEQ ID NO: 58358 - DNA, 6 bp, Unknown
  misc_feature (1)..( 6): Matrix.003 file - promoters60/4767333
aggtct

SEQ ID NO: 58359 - DNA, 7 bp, Unknown
  misc_feature (1)..( 7): Matrix.003 file - promoters60/4767333
ggtttct

SEQ ID NO: 58360 - DNA, 6 bp, Unknown
  misc_feature (1)..( 6): Matrix.003 file - promoters60/4767333
agtttt

SEQ ID NO: 58361 - DNA, 7 bp, Unknown
  misc_feature (1)..( 7): Matrix.003 file - promoters60/4767333
taaaatc

SEQ ID NO: 58362 - DNA, 7 bp, Unknown
  misc_feature (1)..( 7): Matrix.003 file - promoters60/4767333
aaaacct

SEQ ID NO: 58363 - DNA, 6 bp, Unknown
  misc_feature (1)..( 6): Matrix.003 file - promoters60/4767333
accatt

SEQ ID NO: 58364 - DNA, 9 bp, Unknown
  misc_feature (1)..( 9): Matrix.003 file - promoters60/4767379
aaaaatata

SEQ ID NO: 58365 - DNA, 9 bp, Unknown
  misc_feature (1)..( 9): Matrix.003 file - promoters60/4767379
aataaaatt

SEQ ID NO: 58366 - DNA, 11 bp, Unknown
  misc_feature (1)..( 11): Matrix.003 file - promoters60/4767379
tgtaaaaaaaa

SEQ ID NO: 58367 - DNA, 10 bp, Unknown
  misc_feature (1)..( 10): Matrix.003 file - promoters60/4767379
atttgtttaa

SEQ ID NO: 58368 - DNA, 10 bp, Unknown
  misc_feature (1)..( 10): Matrix.003 file - promoters60/4767379
ccttataaat

SEQ ID NO: 58369 - DNA, 11 bp, Unknown
  misc_feature (1)..( 11): Matrix.003 file - promoters60/4767379
ttgacaaaaaa

SEQ ID NO: 58370 - DNA, 10 bp, Unknown
  misc_feature (1)..( 10): Matrix.003 file - promoters60/4767379
atattattaa

SEQ ID NO: 58371 - DNA, 10 bp, Unknown
  misc_feature (1)..( 10): Matrix.003 file - promoters60/4767379
aataaaaaat

SEQ ID NO: 58372 - DNA, 13 bp, Unknown
  misc_feature (1)..( 13): Matrix.003 file - promoters60/4767379
ttgagtccaaaat

SEQ ID NO: 58373 - DNA, 8 bp, Unknown
  misc_feature (1)..( 8): Matrix.003 file - promoters60/4767379
aaaaaaaa

SEQ ID NO: 58374 - DNA, 10 bp, Unknown
  misc_feature (1)..( 10): Matrix.003 file - promoters60/4767379
ttaatttttg

SEQ ID NO: 58375 - DNA, 13 bp, Unknown
  misc_feature (1)..( 13): Matrix.003 file - promoters60/4767379
cattaaaagctaa

SEQ ID NO: 58376 - DNA, 11 bp, Unknown
  misc_feature (1)..( 11): Matrix.003 file - promoters60/4767379
atttaaaaaga

SEQ ID NO: 58377 - DNA, 8 bp, Unknown
  misc_feature (1)..( 8): Matrix.003 file - promoters60/4767402
acataata

SEQ ID NO: 58378 - DNA, 9 bp, Unknown
  misc_feature (1)..( 9): Matrix.003 file - promoters60/4767402
tattttatt

SEQ ID NO: 58379 - DNA, 9 bp, Unknown
  misc_feature (1)..( 9): Matrix.003 file - promoters60/4767402
ctttttttt

SEQ ID NO: 58380 - DNA, 8 bp, Unknown
  misc_feature (1)..( 8): Matrix.003 file - promoters60/4767402
tctttcaa

SEQ ID NO: 58381 - DNA, 9 bp, Unknown
  misc_feature (1)..( 9): Matrix.003 file - promoters60/4767402
attttgtta

SEQ ID NO: 58382 - DNA, 6 bp, Unknown
  misc_feature (1)..( 6): Matrix.003 file - promoters60/4767410
ttttta

SEQ ID NO: 58383 - DNA, 8 bp, Unknown
  misc_feature (1)..( 8): Matrix.003 file - promoters60/4767410
taaattga

SEQ ID NO: 58384 - DNA, 7 bp, Unknown
  misc_feature (1)..( 7): Matrix.003 file - promoters60/4767410
tatgaaa

SEQ ID NO: 58385 - DNA, 8 bp, Unknown
  misc_feature (1)..( 8): Matrix.003 file - promoters60/4767410
agttaaag

SEQ ID NO: 58386 - DNA, 9 bp, Unknown
  misc_feature (1)..( 9): Matrix.003 file - promoters60/4767410
tcttaatct

SEQ ID NO: 58387 - DNA, 9 bp, Unknown
  misc_feature (1)..( 9): Matrix.003 file - promoters60/4767410
ggatttgtt

SEQ ID NO: 58388 - DNA, 7 bp, Unknown
  misc_feature (1)..( 7): Matrix.003 file - promoters60/4767410
tccattt

SEQ ID NO: 58389 - DNA, 6 bp, Unknown
  misc_feature (1)..( 6): Matrix.003 file - promoters60/4767410
tttctt

SEQ ID NO: 58390 - DNA, 7 bp, Unknown
  misc_feature (1)..( 7): Matrix.003 file - promoters60/4767410
aaaatat

SEQ ID NO: 58391 - DNA, 7 bp, Unknown
  misc_feature (1)..( 7): Matrix.003 file - promoters60/4767410
actgcat

SEQ ID NO: 58392 - DNA, 7 bp, Unknown
  misc_feature (1)..( 7): Matrix.003 file - promoters60/4767410
ccagcca

SEQ ID NO: 58393 - DNA, 6 bp, Unknown
  misc_feature (1)..( 6): Matrix.003 file - promoters60/4767410
atacaa

SEQ ID NO: 58394 - DNA, 6 bp, Unknown
  misc_feature (1)..( 6): Matrix.003 file - promoters60/4767410
atgtct

SEQ ID NO: 58395 - DNA, 7 bp, Unknown
  misc_feature (1)..( 7): Matrix.003 file - promoters60/4767410
ttggaga

SEQ ID NO: 58396 - DNA, 6 bp, Unknown
  misc_feature (1)..( 6): Matrix.003 file - promoters60/4767410
gaagat

SEQ ID NO: 58397 - DNA, 6 bp, Unknown
  misc_feature (1)..( 6): Matrix.003 file - promoters60/4767410
gatcga

SEQ ID NO: 58398 - DNA, 6 bp, Unknown
  misc_feature (1)..( 6): Matrix.003 file - promoters60/4767410
aaatgc

SEQ ID NO: 58399 - DNA, 9 bp, Unknown
  misc_feature (1)..( 9): Matrix.003 file - promoters60/4767442
tttgtttta

SEQ ID NO: 58400 - DNA, 12 bp, Unknown
  misc_feature (1)..( 12): Matrix.003 file - promoters60/4767452
caaaaagatatg

SEQ ID NO: 58401 - DNA, 8 bp, Unknown
  misc_feature (1)..( 8): Matrix.003 file - promoters60/4767452
aatattta

SEQ ID NO: 58402 - DNA, 10 bp, Unknown
  misc_feature (1)..( 10): Matrix.003 file - promoters60/4767452
ttatataagc

SEQ ID NO: 58403 - DNA, 11 bp, Unknown
  misc_feature (1)..( 11): Matrix.003 file - promoters60/4767452
tctcaaaatca

SEQ ID NO: 58404 - DNA, 11 bp, Unknown
  misc_feature (1)..( 11): Matrix.003 file - promoters60/4767452
aaaaacagaaa

SEQ ID NO: 58405 - DNA, 11 bp, Unknown
  misc_feature (1)..( 11): Matrix.003 file - promoters60/4767487
tttaattaaaa

SEQ ID NO: 58406 - DNA, 12 bp, Unknown
  misc_feature (1)..( 12): Matrix.003 file - promoters60/4767487
gtaaaattttta

SEQ ID NO: 58407 - DNA, 11 bp, Unknown
  misc_feature (1)..( 11): Matrix.003 file - promoters60/4767490
tcatatttatt

SEQ ID NO: 58408 - DNA, 13 bp, Unknown
  misc_feature (1)..( 13): Matrix.003 file - promoters60/4767490
tttataaattttt

SEQ ID NO: 58409 - DNA, 10 bp, Unknown
  misc_feature (1)..( 10): Matrix.003 file - promoters60/4767490
atgtccatat

SEQ ID NO: 58410 - DNA, 13 bp, Unknown
  misc_feature (1)..( 13): Matrix.003 file - promoters60/4767490
aaaaattacttta

SEQ ID NO: 58411 - DNA, 12 bp, Unknown
  misc_feature (1)..( 12): Matrix.003 file - promoters60/4767490
aattaaccctca

SEQ ID NO: 58412 - DNA, 9 bp, Unknown
  misc_feature (1)..( 9): Matrix.003 file - promoters60/4767490
taaatgatc

SEQ ID NO: 58413 - DNA, 6 bp, Unknown
  misc_feature (1)..( 6): Matrix.003 file - promoters60/4767505
cgagtc

SEQ ID NO: 58414 - DNA, 6 bp, Unknown
  misc_feature (1)..( 6): Matrix.003 file - promoters60/4767505
gaaatt

SEQ ID NO: 58415 - DNA, 7 bp, Unknown
  misc_feature (1)..( 7): Matrix.003 file - promoters60/4767505
gacagaa

SEQ ID NO: 58416 - DNA, 8 bp, Unknown
  misc_feature (1)..( 8): Matrix.003 file - promoters60/4767505
aaagatca

SEQ ID NO: 58417 - DNA, 6 bp, Unknown
  misc_feature (1)..( 6): Matrix.003 file - promoters60/4767505
tagtag

SEQ ID NO: 58418 - DNA, 6 bp, Unknown
  misc_feature (1)..( 6): Matrix.003 file - promoters60/4767505
cctttt

SEQ ID NO: 58419 - DNA, 6 bp, Unknown
  misc_feature (1)..( 6): Matrix.003 file - promoters60/4767505
tttgat

SEQ ID NO: 58420 - DNA, 8 bp, Unknown
  misc_feature (1)..( 8): Matrix.003 file - promoters60/4767505
tttaacta

SEQ ID NO: 58421 - DNA, 8 bp, Unknown
  misc_feature (1)..( 8): Matrix.003 file - promoters60/4767505
ctatcttt

SEQ ID NO: 58422 - DNA, 8 bp, Unknown
  misc_feature (1)..( 8): Matrix.003 file - promoters60/4767505
cactaacc

SEQ ID NO: 58423 - DNA, 7 bp, Unknown
  misc_feature (1)..( 7): Matrix.003 file - promoters60/4767505
aatcggt

SEQ ID NO: 58424 - DNA, 6 bp, Unknown
  misc_feature (1)..( 6): Matrix.003 file - promoters60/4767505
gacctc

SEQ ID NO: 58425 - DNA, 8 bp, Unknown
  misc_feature (1)..( 8): Matrix.003 file - promoters60/4767505
ttttaata

SEQ ID NO: 58426 - DNA, 9 bp, Unknown
  misc_feature (1)..( 9): Matrix.003 file - promoters60/4767505
tcttgttta

SEQ ID NO: 58427 - DNA, 7 bp, Unknown
  misc_feature (1)..( 7): Matrix.003 file - promoters60/4767505
aaacata

SEQ ID NO: 58428 - DNA, 7 bp, Unknown
  misc_feature (1)..( 7): Matrix.003 file - promoters60/4767505
caacata

SEQ ID NO: 58429 - DNA, 7 bp, Unknown
  misc_feature (1)..( 7): Matrix.003 file - promoters60/4767505
ttaaaaa

SEQ ID NO: 58430 - DNA, 8 bp, Unknown
  misc_feature (1)..( 8): Matrix.003 file - promoters60/4767505
gtgaaaaa

SEQ ID NO: 58431 - DNA, 8 bp, Unknown
  misc_feature (1)..( 8): Matrix.003 file - promoters60/4767505
tataaata

SEQ ID NO: 58432 - DNA, 8 bp, Unknown
  misc_feature (1)..( 8): Matrix.003 file - promoters60/4767515
aaagaaaa

SEQ ID NO: 58433 - DNA, 12 bp, Unknown
  misc_feature (1)..( 12): Matrix.003 file - promoters60/4767515
tacgaaaacaat

SEQ ID NO: 58434 - DNA, 9 bp, Unknown
  misc_feature (1)..( 9): Matrix.003 file - promoters60/4767515
taattaact

SEQ ID NO: 58435 - DNA, 6 bp, Unknown
  misc_feature (1)..( 6): Matrix.003 file - promoters60/4767515
caagaa

SEQ ID NO: 58436 - DNA, 8 bp, Unknown
  misc_feature (1)..( 8): Matrix.003 file - promoters60/4767519
attgattt

SEQ ID NO: 58437 - DNA, 8 bp, Unknown
  misc_feature (1)..( 8): Matrix.003 file - promoters60/4767519
aaaacata

SEQ ID NO: 58438 - DNA, 7 bp, Unknown
  misc_feature (1)..( 7): Matrix.003 file - promoters60/4767519
tttataa

SEQ ID NO: 58439 - DNA, 7 bp, Unknown
  misc_feature (1)..( 7): Matrix.003 file - promoters60/4767519
aaataaa

SEQ ID NO: 58440 - DNA, 7 bp, Unknown
  misc_feature (1)..( 7): Matrix.003 file - promoters60/4767519
ttatata

SEQ ID NO: 58441 - DNA, 7 bp, Unknown
  misc_feature (1)..( 7): Matrix.003 file - promoters60/4767519
gatttat

SEQ ID NO: 58442 - DNA, 10 bp, Unknown
  misc_feature (1)..( 10): Matrix.003 file - promoters60/4767519
aacactatat

SEQ ID NO: 58443 - DNA, 6 bp, Unknown
  misc_feature (1)..( 6): Matrix.003 file - promoters60/4767519
tcttta

SEQ ID NO: 58444 - DNA, 6 bp, Unknown
  misc_feature (1)..( 6): Matrix.003 file - promoters60/4767519
atcttt

SEQ ID NO: 58445 - DNA, 8 bp, Unknown
  misc_feature (1)..( 8): Matrix.003 file - promoters60/4767519
atttaaat

SEQ ID NO: 58446 - DNA, 7 bp, Unknown
  misc_feature (1)..( 7): Matrix.003 file - promoters60/4767519
atttaag

SEQ ID NO: 58447 - DNA, 11 bp, Unknown
  misc_feature (1)..( 11): Matrix.003 file - promoters60/4767519
ataattatatg

SEQ ID NO: 58448 - DNA, 7 bp, Unknown
  misc_feature (1)..( 7): Matrix.003 file - promoters60/4767519
taaatac

SEQ ID NO: 58449 - DNA, 8 bp, Unknown
  misc_feature (1)..( 8): Matrix.003 file - promoters60/4767519
tgaaaaaa

SEQ ID NO: 58450 - DNA, 7 bp, Unknown
  misc_feature (1)..( 7): Matrix.003 file - promoters60/4767519
taacatt

SEQ ID NO: 58451 - DNA, 6 bp, Unknown
  misc_feature (1)..( 6): Matrix.003 file - promoters60/4767519
tgataa

SEQ ID NO: 58452 - DNA, 9 bp, Unknown
  misc_feature (1)..( 9): Matrix.003 file - promoters60/4767519
aataaaaat

SEQ ID NO: 58453 - DNA, 7 bp, Unknown
  misc_feature (1)..( 7): Matrix.003 file - promoters60/4767519
tagaaac

SEQ ID NO: 58454 - DNA, 6 bp, Unknown
  misc_feature (1)..( 6): Matrix.003 file - promoters60/4767519
aacgta

SEQ ID NO: 58455 - DNA, 10 bp, Unknown
  misc_feature (1)..( 10): Matrix.003 file - promoters60/4767519
gtatcaaaat

SEQ ID NO: 58456 - DNA, 10 bp, Unknown
  misc_feature (1)..( 10): Matrix.003 file - promoters60/4767539
atctctgcag

SEQ ID NO: 58457 - DNA, 7 bp, Unknown
  misc_feature (1)..( 7): Matrix.003 file - promoters60/4767539
tttatct

SEQ ID NO: 58458 - DNA, 7 bp, Unknown
  misc_feature (1)..( 7): Matrix.003 file - promoters60/4767539
agatatt

SEQ ID NO: 58459 - DNA, 7 bp, Unknown
  misc_feature (1)..( 7): Matrix.003 file - promoters60/4767539
tttacaa

SEQ ID NO: 58460 - DNA, 7 bp, Unknown
  misc_feature (1)..( 7): Matrix.003 file - promoters60/4767539
agtttat

SEQ ID NO: 58461 - DNA, 6 bp, Unknown
  misc_feature (1)..( 6): Matrix.003 file - promoters60/4767539
ttatcc

SEQ ID NO: 58462 - DNA, 8 bp, Unknown
  misc_feature (1)..( 8): Matrix.003 file - promoters60/4767539
gttgtatg

SEQ ID NO: 58463 - DNA, 6 bp, Unknown
  misc_feature (1)..( 6): Matrix.003 file - promoters60/4767539
tatttt

SEQ ID NO: 58464 - DNA, 6 bp, Unknown
  misc_feature (1)..( 6): Matrix.003 file - promoters60/4767539
acattc

SEQ ID NO: 58465 - DNA, 6 bp, Unknown
  misc_feature (1)..( 6): Matrix.003 file - promoters60/4767539
ttttga

SEQ ID NO: 58466 - DNA, 7 bp, Unknown
  misc_feature (1)..( 7): Matrix.003 file - promoters60/4767539
taaaact

SEQ ID NO: 58467 - DNA, 7 bp, Unknown
  misc_feature (1)..( 7): Matrix.003 file - promoters60/4767539
aaactgt

SEQ ID NO: 58468 - DNA, 7 bp, Unknown
  misc_feature (1)..( 7): Matrix.003 file - promoters60/4767539
aaaaata

SEQ ID NO: 58469 - DNA, 7 bp, Unknown
  misc_feature (1)..( 7): Matrix.003 file - promoters60/4767539
gaagaaa

SEQ ID NO: 58470 - DNA, 9 bp, Unknown
  misc_feature (1)..( 9): Matrix.003 file - promoters60/4767539
cacaatcta

SEQ ID NO: 58471 - DNA, 6 bp, Unknown
  misc_feature (1)..( 6): Matrix.003 file - promoters60/4767545
tccatt

SEQ ID NO: 58472 - DNA, 7 bp, Unknown
  misc_feature (1)..( 7): Matrix.003 file - promoters60/4767545
ttttatg

SEQ ID NO: 58473 - DNA, 7 bp, Unknown
  misc_feature (1)..( 7): Matrix.003 file - promoters60/4767545
tttcaaa

SEQ ID NO: 58474 - DNA, 7 bp, Unknown
  misc_feature (1)..( 7): Matrix.003 file - promoters60/4767545
aaaatgt

SEQ ID NO: 58475 - DNA, 8 bp, Unknown
  misc_feature (1)..( 8): Matrix.003 file - promoters60/4767545
atgaaaag

SEQ ID NO: 58476 - DNA, 7 bp, Unknown
  misc_feature (1)..( 7): Matrix.003 file - promoters60/4767545
ataagtt

SEQ ID NO: 58477 - DNA, 7 bp, Unknown
  misc_feature (1)..( 7): Matrix.003 file - promoters60/4767545
ctttctt

SEQ ID NO: 58478 - DNA, 7 bp, Unknown
  misc_feature (1)..( 7): Matrix.003 file - promoters60/4767545
ctcatct

SEQ ID NO: 58479 - DNA, 8 bp, Unknown
  misc_feature (1)..( 8): Matrix.003 file - promoters60/4767545
attaaaaa

SEQ ID NO: 58480 - DNA, 6 bp, Unknown
  misc_feature (1)..( 6): Matrix.003 file - promoters60/4767545
tgatta

SEQ ID NO: 58481 - DNA, 7 bp, Unknown
  misc_feature (1)..( 7): Matrix.003 file - promoters60/4767545
atgcgga

SEQ ID NO: 58482 - DNA, 8 bp, Unknown
  misc_feature (1)..( 8): Matrix.003 file - promoters60/4767545
aaaataaa

SEQ ID NO: 58483 - DNA, 8 bp, Unknown
  misc_feature (1)..( 8): Matrix.003 file - promoters60/4767545
atgaaaag

SEQ ID NO: 58484 - DNA, 7 bp, Unknown
  misc_feature (1)..( 7): Matrix.003 file - promoters60/4767545
aaacaaa

SEQ ID NO: 58485 - DNA, 7 bp, Unknown
  misc_feature (1)..( 7): Matrix.003 file - promoters60/4767545
aatccaa

SEQ ID NO: 58486 - DNA, 6 bp, Unknown
  misc_feature (1)..( 6): Matrix.003 file - promoters60/4767545
aaataa

SEQ ID NO: 58487 - DNA, 7 bp, Unknown
  misc_feature (1)..( 7): Matrix.003 file - promoters60/4767545
aaaaaat

SEQ ID NO: 58488 - DNA, 7 bp, Unknown
  misc_feature (1)..( 7): Matrix.003 file - promoters60/4767545
caaaatc

SEQ ID NO: 58489 - DNA, 6 bp, Unknown
  misc_feature (1)..( 6): Matrix.003 file - promoters60/4767545
cttctc

SEQ ID NO: 58490 - DNA, 6 bp, Unknown
  misc_feature (1)..( 6): Matrix.003 file - promoters60/4767545
gagttt

SEQ ID NO: 58491 - DNA, 6 bp, Unknown
  misc_feature (1)..( 6): Matrix.003 file - promoters60/4767545
tttcga

SEQ ID NO: 58492 - DNA, 8 bp, Unknown
  misc_feature (1)..( 8): Matrix.003 file - promoters60/4767552
aacaaaaa

SEQ ID NO: 58493 - DNA, 7 bp, Unknown
  misc_feature (1)..( 7): Matrix.003 file - promoters60/4767552
taacaaa

SEQ ID NO: 58494 - DNA, 7 bp, Unknown
  misc_feature (1)..( 7): Matrix.003 file - promoters60/4767552
aaaagtg

SEQ ID NO: 58495 - DNA, 13 bp, Unknown
  misc_feature (1)..( 13): Matrix.003 file - promoters60/4767552
ataatactaaaat

SEQ ID NO: 58496 - DNA, 7 bp, Unknown
  misc_feature (1)..( 7): Matrix.003 file - promoters60/4767552
caaacta

SEQ ID NO: 58497 - DNA, 10 bp, Unknown
  misc_feature (1)..( 10): Matrix.003 file - promoters60/4767552
atatcataaa

SEQ ID NO: 58498 - DNA, 6 bp, Unknown
  misc_feature (1)..( 6): Matrix.003 file - promoters60/4767552
tcagag

SEQ ID NO: 58499 - DNA, 6 bp, Unknown
  misc_feature (1)..( 6): Matrix.003 file - promoters60/4767552
tcattt

SEQ ID NO: 58500 - DNA, 9 bp, Unknown
  misc_feature (1)..( 9): Matrix.003 file - promoters60/4767552
ttgtaagtg

SEQ ID NO: 58501 - DNA, 6 bp, Unknown
  misc_feature (1)..( 6): Matrix.003 file - promoters60/4767552
cataga

SEQ ID NO: 58502 - DNA, 6 bp, Unknown
  misc_feature (1)..( 6): Matrix.003 file - promoters60/4767552
ataaaa

SEQ ID NO: 58503 - DNA, 6 bp, Unknown
  misc_feature (1)..( 6): Matrix.003 file - promoters60/4767552
taggtt

SEQ ID NO: 58504 - DNA, 7 bp, Unknown
  misc_feature (1)..( 7): Matrix.003 file - promoters60/4767552
agaaata

SEQ ID NO: 58505 - DNA, 7 bp, Unknown
  misc_feature (1)..( 7): Matrix.003 file - promoters60/4767552
tcaaaat

SEQ ID NO: 58506 - DNA, 6 bp, Unknown
  misc_feature (1)..( 6): Matrix.003 file - promoters60/4767552
atttct

SEQ ID NO: 58507 - DNA, 8 bp, Unknown
  misc_feature (1)..( 8): Matrix.003 file - promoters60/4767552
tgtcaact

SEQ ID NO: 58508 - DNA, 7 bp, Unknown
  misc_feature (1)..( 7): Matrix.003 file - promoters60/4767552
tcaagag

SEQ ID NO: 58509 - DNA, 10 bp, Unknown
  misc_feature (1)..( 10): Matrix.003 file - promoters60/4767578
taatttatct

SEQ ID NO: 58510 - DNA, 11 bp, Unknown
  misc_feature (1)..( 11): Matrix.003 file - promoters60/4767578
aacaaaatgta

SEQ ID NO: 58511 - DNA, 9 bp, Unknown
  misc_feature (1)..( 9): Matrix.003 file - promoters60/4767578
tgtattcat

SEQ ID NO: 58512 - DNA, 6 bp, Unknown
  misc_feature (1)..( 6): Matrix.003 file - promoters60/4767578
aaattt

SEQ ID NO: 58513 - DNA, 6 bp, Unknown
  misc_feature (1)..( 6): Matrix.003 file - promoters60/4767578
aaatca

SEQ ID NO: 58514 - DNA, 7 bp, Unknown
  misc_feature (1)..( 7): Matrix.003 file - promoters60/4767578
aatgtat

SEQ ID NO: 58515 - DNA, 7 bp, Unknown
  misc_feature (1)..( 7): Matrix.003 file - promoters60/4767578
aatgaca

SEQ ID NO: 58516 - DNA, 8 bp, Unknown
  misc_feature (1)..( 8): Matrix.003 file - promoters60/4767578
tactatat

SEQ ID NO: 58517 - DNA, 6 bp, Unknown
  misc_feature (1)..( 6): Matrix.003 file - promoters60/4767578
ttatat

SEQ ID NO: 58518 - DNA, 7 bp, Unknown
  misc_feature (1)..( 7): Matrix.003 file - promoters60/4767578
aaaaaaa

SEQ ID NO: 58519 - DNA, 8 bp, Unknown
  misc_feature (1)..( 8): Matrix.003 file - promoters60/4767578
aagaaaaa

SEQ ID NO: 58520 - DNA, 6 bp, Unknown
  misc_feature (1)..( 6): Matrix.003 file - promoters60/4767578
tcttct

SEQ ID NO: 58521 - DNA, 6 bp, Unknown
  misc_feature (1)..( 6): Matrix.003 file - promoters60/4767578
ttctct

SEQ ID NO: 58522 - DNA, 7 bp, Unknown
  misc_feature (1)..( 7): Matrix.003 file - promoters60/4767578
aattttg

SEQ ID NO: 58523 - DNA, 7 bp, Unknown
  misc_feature (1)..( 7): Matrix.003 file - promoters60/4767578
atatcat

SEQ ID NO: 58524 - DNA, 8 bp, Unknown
  misc_feature (1)..( 8): Matrix.003 file - promoters60/4767578
gtcactta

SEQ ID NO: 58525 - DNA, 7 bp, Unknown
  misc_feature (1)..( 7): Matrix.003 file - promoters60/4767578
tcgaaat

SEQ ID NO: 58526 - DNA, 6 bp, Unknown
  misc_feature (1)..( 6): Matrix.003 file - promoters60/4767610
aatatt

SEQ ID NO: 58527 - DNA, 7 bp, Unknown
  misc_feature (1)..( 7): Matrix.003 file - promoters60/4767610
atggagt

SEQ ID NO: 58528 - DNA, 7 bp, Unknown
  misc_feature (1)..( 7): Matrix.003 file - promoters60/4767610
acgtgta

SEQ ID NO: 58529 - DNA, 10 bp, Unknown
  misc_feature (1)..( 10): Matrix.003 file - promoters60/4767610
aactatacaa

SEQ ID NO: 58530 - DNA, 7 bp, Unknown
  misc_feature (1)..( 7): Matrix.003 file - promoters60/4767610
tgtatac

SEQ ID NO: 58531 - DNA, 8 bp, Unknown
  misc_feature (1)..( 8): Matrix.003 file - promoters60/4767610
tattttaa

SEQ ID NO: 58532 - DNA, 6 bp, Unknown
  misc_feature (1)..( 6): Matrix.003 file - promoters60/4767610
aagaca

SEQ ID NO: 58533 - DNA, 9 bp, Unknown
  misc_feature (1)..( 9): Matrix.003 file - promoters60/4767610
cttaattat

SEQ ID NO: 58534 - DNA, 13 bp, Unknown
  misc_feature (1)..( 13): Matrix.003 file - promoters60/4767610
tatacagtataca

SEQ ID NO: 58535 - DNA, 6 bp, Unknown
  misc_feature (1)..( 6): Matrix.003 file - promoters60/4767610
taataa

SEQ ID NO: 58536 - DNA, 6 bp, Unknown
  misc_feature (1)..( 6): Matrix.003 file - promoters60/4767610
ttttat

SEQ ID NO: 58537 - DNA, 6 bp, Unknown
  misc_feature (1)..( 6): Matrix.003 file - promoters60/4767610
tatata

SEQ ID NO: 58538 - DNA, 8 bp, Unknown
  misc_feature (1)..( 8): Matrix.003 file - promoters60/4767610
accaacca

SEQ ID NO: 58539 - DNA, 7 bp, Unknown
  misc_feature (1)..( 7): Matrix.003 file - promoters60/4767610
atataat

SEQ ID NO: 58540 - DNA, 6 bp, Unknown
  misc_feature (1)..( 6): Matrix.003 file - promoters60/4767610
aatcca

SEQ ID NO: 58541 - DNA, 8 bp, Unknown
  misc_feature (1)..( 8): Matrix.003 file - promoters60/4767610
aaaaaatg

SEQ ID NO: 58542 - DNA, 10 bp, Unknown
  misc_feature (1)..( 10): Matrix.003 file - promoters60/4767638
ttataattaa

SEQ ID NO: 58543 - DNA, 9 bp, Unknown
  misc_feature (1)..( 9): Matrix.003 file - promoters60/4767638
acaataaaa

SEQ ID NO: 58544 - DNA, 6 bp, Unknown
  misc_feature (1)..( 6): Matrix.003 file - promoters60/4767659
gaaaaa

SEQ ID NO: 58545 - DNA, 6 bp, Unknown
  misc_feature (1)..( 6): Matrix.003 file - promoters60/4767659
aaaata

SEQ ID NO: 58546 - DNA, 7 bp, Unknown
  misc_feature (1)..( 7): Matrix.003 file - promoters60/4767659
tcaaata

SEQ ID NO: 58547 - DNA, 7 bp, Unknown
  misc_feature (1)..( 7): Matrix.003 file - promoters60/4767659
ttgtaag

SEQ ID NO: 58548 - DNA, 7 bp, Unknown
  misc_feature (1)..( 7): Matrix.003 file - promoters60/4767659
attttag

SEQ ID NO: 58549 - DNA, 8 bp, Unknown
  misc_feature (1)..( 8): Matrix.003 file - promoters60/4767659
aaaaggaa

SEQ ID NO: 58550 - DNA, 7 bp, Unknown
  misc_feature (1)..( 7): Matrix.003 file - promoters60/4767659
ttagttg

SEQ ID NO: 58551 - DNA, 8 bp, Unknown
  misc_feature (1)..( 8): Matrix.003 file - promoters60/4767659
aaagcctt

SEQ ID NO: 58552 - DNA, 6 bp, Unknown
  misc_feature (1)..( 6): Matrix.003 file - promoters60/4767659
aaaatt

SEQ ID NO: 58553 - DNA, 7 bp, Unknown
  misc_feature (1)..( 7): Matrix.003 file - promoters60/4767659
cttatca

SEQ ID NO: 58554 - DNA, 6 bp, Unknown
  misc_feature (1)..( 6): Matrix.003 file - promoters60/4767659
gagaag

SEQ ID NO: 58555 - DNA, 7 bp, Unknown
  misc_feature (1)..( 7): Matrix.003 file - promoters60/4767659
acatgaa

SEQ ID NO: 58556 - DNA, 6 bp, Unknown
  misc_feature (1)..( 6): Matrix.003 file - promoters60/4767659
cctaat

SEQ ID NO: 58557 - DNA, 6 bp, Unknown
  misc_feature (1)..( 6): Matrix.003 file - promoters60/4767659
acaagt

SEQ ID NO: 58558 - DNA, 6 bp, Unknown
  misc_feature (1)..( 6): Matrix.003 file - promoters60/4767659
ttctgt

SEQ ID NO: 58559 - DNA, 9 bp, Unknown
  misc_feature (1)..( 9): Matrix.003 file - promoters60/4767659
ggcaagaaa

SEQ ID NO: 58560 - DNA, 8 bp, Unknown
  misc_feature (1)..( 8): Matrix.003 file - promoters60/4767659
agtgacta

SEQ ID NO: 58561 - DNA, 7 bp, Unknown
  misc_feature (1)..( 7): Matrix.003 file - promoters60/4767659
ttcatat

SEQ ID NO: 58562 - DNA, 8 bp, Unknown
  misc_feature (1)..( 8): Matrix.003 file - promoters60/4767663
aatgaaaa

SEQ ID NO: 58563 - DNA, 9 bp, Unknown
  misc_feature (1)..( 9): Matrix.003 file - promoters60/4767663
atatatata

SEQ ID NO: 58564 - DNA, 11 bp, Unknown
  misc_feature (1)..( 11): Matrix.003 file - promoters60/4767663
tatacaaaaac

SEQ ID NO: 58565 - DNA, 12 bp, Unknown
  misc_feature (1)..( 12): Matrix.003 file - promoters60/4767663
aaaaattttgag

SEQ ID NO: 58566 - DNA, 14 bp, Unknown
  misc_feature (1)..( 14): Matrix.003 file - promoters60/4767663
taagataagtttaa

SEQ ID NO: 58567 - DNA, 6 bp, Unknown
  misc_feature (1)..( 6): Matrix.003 file - promoters60/4767679
agacaa

SEQ ID NO: 58568 - DNA, 7 bp, Unknown
  misc_feature (1)..( 7): Matrix.003 file - promoters60/4767679
taaaagt

SEQ ID NO: 58569 - DNA, 8 bp, Unknown
  misc_feature (1)..( 8): Matrix.003 file - promoters60/4767679
ggactatt

SEQ ID NO: 58570 - DNA, 8 bp, Unknown
  misc_feature (1)..( 8): Matrix.003 file - promoters60/4767679
aacaatca

SEQ ID NO: 58571 - DNA, 8 bp, Unknown
  misc_feature (1)..( 8): Matrix.003 file - promoters60/4767679
tataaata

SEQ ID NO: 58572 - DNA, 6 bp, Unknown
  misc_feature (1)..( 6): Matrix.003 file - promoters60/4767679
atatca

SEQ ID NO: 58573 - DNA, 6 bp, Unknown
  misc_feature (1)..( 6): Matrix.003 file - promoters60/4767679
ttttct

SEQ ID NO: 58574 - DNA, 6 bp, Unknown
  misc_feature (1)..( 6): Matrix.003 file - promoters60/4767679
aaaaaa

SEQ ID NO: 58575 - DNA, 10 bp, Unknown
  misc_feature (1)..( 10): Matrix.003 file - promoters60/4767679
caaaaaatta

SEQ ID NO: 58576 - DNA, 14 bp, Unknown
  misc_feature (1)..( 14): Matrix.003 file - promoters60/4767679
aaaaagaaaaaaaa

SEQ ID NO: 58577 - DNA, 9 bp, Unknown
  misc_feature (1)..( 9): Matrix.003 file - promoters60/4767679
ggttaaaat

SEQ ID NO: 58578 - DNA, 7 bp, Unknown
  misc_feature (1)..( 7): Matrix.003 file - promoters60/4767679
caataat

SEQ ID NO: 58579 - DNA, 6 bp, Unknown
  misc_feature (1)..( 6): Matrix.003 file - promoters60/4767679
agaaat

SEQ ID NO: 58580 - DNA, 6 bp, Unknown
  misc_feature (1)..( 6): Matrix.003 file - promoters60/4767679
aataga

SEQ ID NO: 58581 - DNA, 7 bp, Unknown
  misc_feature (1)..( 7): Matrix.003 file - promoters60/4767679
tatgtca

SEQ ID NO: 58582 - DNA, 7 bp, Unknown
  misc_feature (1)..( 7): Matrix.003 file - promoters60/4767679
acaagga

SEQ ID NO: 58583 - DNA, 6 bp, Unknown
  misc_feature (1)..( 6): Matrix.003 file - promoters60/4767679
taattt

SEQ ID NO: 58584 - DNA, 7 bp, Unknown
  misc_feature (1)..( 7): Matrix.003 file - promoters60/4767679
tttatga

SEQ ID NO: 58585 - DNA, 6 bp, Unknown
  misc_feature (1)..( 6): Matrix.003 file - promoters60/4767679
atgaaa

SEQ ID NO: 58586 - DNA, 8 bp, Unknown
  misc_feature (1)..( 8): Matrix.003 file - promoters60/4767679
aaaaacaa

SEQ ID NO: 58587 - DNA, 6 bp, Unknown
  misc_feature (1)..( 6): Matrix.003 file - promoters60/4767679
ttaatg

SEQ ID NO: 58588 - DNA, 12 bp, Unknown
  misc_feature (1)..( 12): Matrix.003 file - promoters60/4767683
tatataaaaaga

SEQ ID NO: 58589 - DNA, 11 bp, Unknown
  misc_feature (1)..( 11): Matrix.003 file - promoters60/4767683
aaaaagaaatg

SEQ ID NO: 58590 - DNA, 9 bp, Unknown
  misc_feature (1)..( 9): Matrix.003 file - promoters60/4767683
aaagaagag

SEQ ID NO: 58591 - DNA, 16 bp, Unknown
  misc_feature (1)..( 16): Matrix.003 file - promoters60/4767683
tgagtagtgtaaaata

SEQ ID NO: 58592 - DNA, 8 bp, Unknown
  misc_feature (1)..( 8): Matrix.003 file - promoters60/4767683
attagact

SEQ ID NO: 58593 - DNA, 9 bp, Unknown
  misc_feature (1)..( 9): Matrix.003 file - promoters60/4767701
aattgttac

SEQ ID NO: 58594 - DNA, 9 bp, Unknown
  misc_feature (1)..( 9): Matrix.003 file - promoters60/4767705
ataataatt

SEQ ID NO: 58595 - DNA, 13 bp, Unknown
  misc_feature (1)..( 13): Matrix.003 file - promoters60/4767705
ttatatttttaaa

SEQ ID NO: 58596 - DNA, 7 bp, Unknown
  misc_feature (1)..( 7): Matrix.003 file - promoters60/4767705
ttaaaaa

SEQ ID NO: 58597 - DNA, 9 bp, Unknown
  misc_feature (1)..( 9): Matrix.003 file - promoters60/4767705
aaaaattga

SEQ ID NO: 58598 - DNA, 10 bp, Unknown
  misc_feature (1)..( 10): Matrix.003 file - promoters60/4767705
aaatgaaaaa

SEQ ID NO: 58599 - DNA, 10 bp, Unknown
  misc_feature (1)..( 10): Matrix.003 file - promoters60/4767705
aatttatctg

SEQ ID NO: 58600 - DNA, 7 bp, Unknown
  misc_feature (1)..( 7): Matrix.003 file - promoters60/4767705
attggat

SEQ ID NO: 58601 - DNA, 8 bp, Unknown
  misc_feature (1)..( 8): Matrix.003 file - promoters60/4767705
gataaaaa

SEQ ID NO: 58602 - DNA, 7 bp, Unknown
  misc_feature (1)..( 7): Matrix.003 file - promoters60/4767705
attattt

SEQ ID NO: 58603 - DNA, 8 bp, Unknown
  misc_feature (1)..( 8): Matrix.003 file - promoters60/4767705
taaaaaat

SEQ ID NO: 58604 - DNA, 6 bp, Unknown
  misc_feature (1)..( 6): Matrix.003 file - promoters60/4767705
aagaaa

SEQ ID NO: 58605 - DNA, 8 bp, Unknown
  misc_feature (1)..( 8): Matrix.003 file - promoters60/4767705
aaatgtaa

SEQ ID NO: 58606 - DNA, 9 bp, Unknown
  misc_feature (1)..( 9): Matrix.003 file - promoters60/4767715
tttggtaaa

SEQ ID NO: 58607 - DNA, 8 bp, Unknown
  misc_feature (1)..( 8): Matrix.003 file - promoters60/4767715
aaagttaa

SEQ ID NO: 58608 - DNA, 7 bp, Unknown
  misc_feature (1)..( 7): Matrix.003 file - promoters60/4767715
tttttaa

SEQ ID NO: 58609 - DNA, 11 bp, Unknown
  misc_feature (1)..( 11): Matrix.003 file - promoters60/4767715
aaaaaaaacaa

SEQ ID NO: 58610 - DNA, 9 bp, Unknown
  misc_feature (1)..( 9): Matrix.003 file - promoters60/4767715
aaacaaaaa

SEQ ID NO: 58611 - DNA, 6 bp, Unknown
  misc_feature (1)..( 6): Matrix.003 file - promoters60/4767715
actttt

SEQ ID NO: 58612 - DNA, 6 bp, Unknown
  misc_feature (1)..( 6): Matrix.003 file - promoters60/4767715
gaaaat

SEQ ID NO: 58613 - DNA, 6 bp, Unknown
  misc_feature (1)..( 6): Matrix.003 file - promoters60/4767715
gtttga

SEQ ID NO: 58614 - DNA, 9 bp, Unknown
  misc_feature (1)..( 9): Matrix.003 file - promoters60/4767715
attttgttg

SEQ ID NO: 58615 - DNA, 6 bp, Unknown
  misc_feature (1)..( 6): Matrix.003 file - promoters60/4767715
gttgtg

SEQ ID NO: 58616 - DNA, 7 bp, Unknown
  misc_feature (1)..( 7): Matrix.003 file - promoters60/4767715
aaaagtt

SEQ ID NO: 58617 - DNA, 7 bp, Unknown
  misc_feature (1)..( 7): Matrix.003 file - promoters60/4767715
gtattat

SEQ ID NO: 58618 - DNA, 10 bp, Unknown
  misc_feature (1)..( 10): Matrix.003 file - promoters60/4767715
acctgctcat

SEQ ID NO: 58619 - DNA, 7 bp, Unknown
  misc_feature (1)..( 7): Matrix.003 file - promoters60/4767715
ttcttct

SEQ ID NO: 58620 - DNA, 8 bp, Unknown
  misc_feature (1)..( 8): Matrix.003 file - promoters60/4767748
caaaacaa

SEQ ID NO: 58621 - DNA, 7 bp, Unknown
  misc_feature (1)..( 7): Matrix.003 file - promoters60/4767764
gcaaaag

SEQ ID NO: 58622 - DNA, 7 bp, Unknown
  misc_feature (1)..( 7): Matrix.003 file - promoters60/4767764
tttaaaa

SEQ ID NO: 58623 - DNA, 7 bp, Unknown
  misc_feature (1)..( 7): Matrix.003 file - promoters60/4767764
aaacatt

SEQ ID NO: 58624 - DNA, 7 bp, Unknown
  misc_feature (1)..( 7): Matrix.003 file - promoters60/4767764
tcaaatt

SEQ ID NO: 58625 - DNA, 6 bp, Unknown
  misc_feature (1)..( 6): Matrix.003 file - promoters60/4767764
aaaata

SEQ ID NO: 58626 - DNA, 7 bp, Unknown
  misc_feature (1)..( 7): Matrix.003 file - promoters60/4767764
tgagacg

SEQ ID NO: 58627 - DNA, 8 bp, Unknown
  misc_feature (1)..( 8): Matrix.003 file - promoters60/4767764
gaaaaagg

SEQ ID NO: 58628 - DNA, 6 bp, Unknown
  misc_feature (1)..( 6): Matrix.003 file - promoters60/4767764
aagcaa

SEQ ID NO: 58629 - DNA, 15 bp, Unknown
  misc_feature (1)..( 15): Matrix.003 file - promoters60/4767764
aaattggatacatat

SEQ ID NO: 58630 - DNA, 9 bp, Unknown
  misc_feature (1)..( 9): Matrix.003 file - promoters60/4767764
ttaatattt

SEQ ID NO: 58631 - DNA, 6 bp, Unknown
  misc_feature (1)..( 6): Matrix.003 file - promoters60/4767764
acaaaa

SEQ ID NO: 58632 - DNA, 8 bp, Unknown
  misc_feature (1)..( 8): Matrix.003 file - promoters60/4767764
aagtcaaa

SEQ ID NO: 58633 - DNA, 9 bp, Unknown
  misc_feature (1)..( 9): Matrix.003 file - promoters60/4767764
taatgctac

SEQ ID NO: 58634 - DNA, 8 bp, Unknown
  misc_feature (1)..( 8): Matrix.003 file - promoters60/4767764
tatattac

SEQ ID NO: 58635 - DNA, 6 bp, Unknown
  misc_feature (1)..( 6): Matrix.003 file - promoters60/4767764
tatttt

SEQ ID NO: 58636 - DNA, 6 bp, Unknown
  misc_feature (1)..( 6): Matrix.003 file - promoters60/4767764
gaacat

SEQ ID NO: 58637 - DNA, 6 bp, Unknown
  misc_feature (1)..( 6): Matrix.003 file - promoters60/4767764
tttata

SEQ ID NO: 58638 - DNA, 8 bp, Unknown
  misc_feature (1)..( 8): Matrix.003 file - promoters60/4767764
aatcttta

SEQ ID NO: 58639 - DNA, 6 bp, Unknown
  misc_feature (1)..( 6): Matrix.003 file - promoters60/4767764
aacaac

SEQ ID NO: 58640 - DNA, 8 bp, Unknown
  misc_feature (1)..( 8): Matrix.003 file - promoters60/4767764
gtaataat

SEQ ID NO: 58641 - DNA, 8 bp, Unknown
  misc_feature (1)..( 8): Matrix.003 file - promoters60/4767767
aacattat

SEQ ID NO: 58642 - DNA, 9 bp, Unknown
  misc_feature (1)..( 9): Matrix.003 file - promoters60/4767767
actaaaata

SEQ ID NO: 58643 - DNA, 8 bp, Unknown
  misc_feature (1)..( 8): Matrix.003 file - promoters60/4767767
aatctata

SEQ ID NO: 58644 - DNA, 7 bp, Unknown
  misc_feature (1)..( 7): Matrix.003 file - promoters60/4767767
aatgcaa

SEQ ID NO: 58645 - DNA, 6 bp, Unknown
  misc_feature (1)..( 6): Matrix.003 file - promoters60/4767767
atcaca

SEQ ID NO: 58646 - DNA, 7 bp, Unknown
  misc_feature (1)..( 7): Matrix.003 file - promoters60/4767767
ttgaaaa

SEQ ID NO: 58647 - DNA, 7 bp, Unknown
  misc_feature (1)..( 7): Matrix.003 file - promoters60/4767767
aacctta

SEQ ID NO: 58648 - DNA, 9 bp, Unknown
  misc_feature (1)..( 9): Matrix.003 file - promoters60/4767767
catgaatat

SEQ ID NO: 58649 - DNA, 7 bp, Unknown
  misc_feature (1)..( 7): Matrix.003 file - promoters60/4767767
ttagaat

SEQ ID NO: 58650 - DNA, 8 bp, Unknown
  misc_feature (1)..( 8): Matrix.003 file - promoters60/4767767
tttgaagt

SEQ ID NO: 58651 - DNA, 7 bp, Unknown
  misc_feature (1)..( 7): Matrix.003 file - promoters60/4767767
acaaaaa

SEQ ID NO: 58652 - DNA, 6 bp, Unknown
  misc_feature (1)..( 6): Matrix.003 file - promoters60/4767767
aagcat

SEQ ID NO: 58653 - DNA, 7 bp, Unknown
  misc_feature (1)..( 7): Matrix.003 file - promoters60/4767767
ctaaatt

SEQ ID NO: 58654 - DNA, 6 bp, Unknown
  misc_feature (1)..( 6): Matrix.003 file - promoters60/4767767
aataaa

SEQ ID NO: 58655 - DNA, 10 bp, Unknown
  misc_feature (1)..( 10): Matrix.003 file - promoters60/4767767
aaacaaaaaa

SEQ ID NO: 58656 - DNA, 6 bp, Unknown
  misc_feature (1)..( 6): Matrix.003 file - promoters60/4767767
tttcaa

SEQ ID NO: 58657 - DNA, 6 bp, Unknown
  misc_feature (1)..( 6): Matrix.003 file - promoters60/4767767
aaaatg

SEQ ID NO: 58658 - DNA, 6 bp, Unknown
  misc_feature (1)..( 6): Matrix.003 file - promoters60/4767767
gaaatt

SEQ ID NO: 58659 - DNA, 8 bp, Unknown
  misc_feature (1)..( 8): Matrix.003 file - promoters60/4767767
aattaagc

SEQ ID NO: 58660 - DNA, 7 bp, Unknown
  misc_feature (1)..( 7): Matrix.003 file - promoters60/4767767
aatattt

SEQ ID NO: 58661 - DNA, 8 bp, Unknown
  misc_feature (1)..( 8): Matrix.003 file - promoters60/4767767
aaccctag

SEQ ID NO: 58662 - DNA, 9 bp, Unknown
  misc_feature (1)..( 9): Matrix.003 file - promoters60/4767767
ttatggata

SEQ ID NO: 58663 - DNA, 11 bp, Unknown
  misc_feature (1)..( 11): Matrix.003 file - promoters60/4767795
aaaatcataat

SEQ ID NO: 58664 - DNA, 10 bp, Unknown
  misc_feature (1)..( 10): Matrix.003 file - promoters60/4767795
tgattagtta

SEQ ID NO: 58665 - DNA, 8 bp, Unknown
  misc_feature (1)..( 8): Matrix.003 file - promoters60/4767795
ttagaaat

SEQ ID NO: 58666 - DNA, 6 bp, Unknown
  misc_feature (1)..( 6): Matrix.003 file - promoters60/4767795
atattt

SEQ ID NO: 58667 - DNA, 6 bp, Unknown
  misc_feature (1)..( 6): Matrix.003 file - promoters60/4767795
ttccaa

SEQ ID NO: 58668 - DNA, 6 bp, Unknown
  misc_feature (1)..( 6): Matrix.003 file - promoters60/4767795
catttt

SEQ ID NO: 58669 - DNA, 8 bp, Unknown
  misc_feature (1)..( 8): Matrix.003 file - promoters60/4767795
tttcttaa

SEQ ID NO: 58670 - DNA, 7 bp, Unknown
  misc_feature (1)..( 7): Matrix.003 file - promoters60/4767795
aagaaac

SEQ ID NO: 58671 - DNA, 7 bp, Unknown
  misc_feature (1)..( 7): Matrix.003 file - promoters60/4767795
ctctata

SEQ ID NO: 58672 - DNA, 8 bp, Unknown
  misc_feature (1)..( 8): Matrix.003 file - promoters60/4767795
gttaaatt

SEQ ID NO: 58673 - DNA, 10 bp, Unknown
  misc_feature (1)..( 10): Matrix.003 file - promoters60/4767795
tttccaattt

SEQ ID NO: 58674 - DNA, 7 bp, Unknown
  misc_feature (1)..( 7): Matrix.003 file - promoters60/4767795
ttgattc

SEQ ID NO: 58675 - DNA, 7 bp, Unknown
  misc_feature (1)..( 7): Matrix.003 file - promoters60/4767795
aaaaaaa

SEQ ID NO: 58676 - DNA, 6 bp, Unknown
  misc_feature (1)..( 6): Matrix.003 file - promoters60/4767795
aaaata

SEQ ID NO: 58677 - DNA, 8 bp, Unknown
  misc_feature (1)..( 8): Matrix.003 file - promoters60/4767795
ttacagtt

SEQ ID NO: 58678 - DNA, 12 bp, Unknown
  misc_feature (1)..( 12): Matrix.003 file - promoters60/4767837
acaaaaaacaat

SEQ ID NO: 58679 - DNA, 9 bp, Unknown
  misc_feature (1)..( 9): Matrix.003 file - promoters60/4767837
ttcttcaat

SEQ ID NO: 58680 - DNA, 13 bp, Unknown
  misc_feature (1)..( 13): Matrix.003 file - promoters60/4767884
aagtctaaaatat

SEQ ID NO: 58681 - DNA, 10 bp, Unknown
  misc_feature (1)..( 10): Matrix.003 file - promoters60/4767884
ataaaaaaat

SEQ ID NO: 58682 - DNA, 12 bp, Unknown
  misc_feature (1)..( 12): Matrix.003 file - promoters60/4767884
aatatttgatac

SEQ ID NO: 58683 - DNA, 13 bp, Unknown
  misc_feature (1)..( 13): Matrix.003 file - promoters60/4767892
ttaaacgtgttta

SEQ ID NO: 58684 - DNA, 14 bp, Unknown
  misc_feature (1)..( 14): Matrix.003 file - promoters60/4767892
acattattacaaaa

SEQ ID NO: 58685 - DNA, 8 bp, Unknown
  misc_feature (1)..( 8): Matrix.003 file - promoters60/4767892
acaaacaa

SEQ ID NO: 58686 - DNA, 8 bp, Unknown
  misc_feature (1)..( 8): Matrix.003 file - promoters60/4767892
agaaaaaa

SEQ ID NO: 58687 - DNA, 8 bp, Unknown
  misc_feature (1)..( 8): Matrix.003 file - promoters60/4767892
tgtaaact

SEQ ID NO: 58688 - DNA, 14 bp, Unknown
  misc_feature (1)..( 14): Matrix.003 file - promoters60/4767892
attattacaaaaac

SEQ ID NO: 58689 - DNA, 6 bp, Unknown
  misc_feature (1)..( 6): Matrix.003 file - promoters60/4767933
aaccct

SEQ ID NO: 58690 - DNA, 6 bp, Unknown
  misc_feature (1)..( 6): Matrix.003 file - promoters60/4767933
gcccaa

SEQ ID NO: 58691 - DNA, 7 bp, Unknown
  misc_feature (1)..( 7): Matrix.003 file - promoters60/4767933
caaaaaa

SEQ ID NO: 58692 - DNA, 6 bp, Unknown
  misc_feature (1)..( 6): Matrix.003 file - promoters60/4767933
ttttca

SEQ ID NO: 58693 - DNA, 8 bp, Unknown
  misc_feature (1)..( 8): Matrix.003 file - promoters60/4767933
atccaaaa

SEQ ID NO: 58694 - DNA, 6 bp, Unknown
  misc_feature (1)..( 6): Matrix.003 file - promoters60/4767933
aatttc

SEQ ID NO: 58695 - DNA, 7 bp, Unknown
  misc_feature (1)..( 7): Matrix.003 file - promoters60/4767933
tatggac

SEQ ID NO: 58696 - DNA, 10 bp, Unknown
  misc_feature (1)..( 10): Matrix.003 file - promoters60/4767933
aaatggaaac

SEQ ID NO: 58697 - DNA, 7 bp, Unknown
  misc_feature (1)..( 7): Matrix.003 file - promoters60/4767933
agtgaaa

SEQ ID NO: 58698 - DNA, 8 bp, Unknown
  misc_feature (1)..( 8): Matrix.003 file - promoters60/4767933
agtcggta

SEQ ID NO: 58699 - DNA, 11 bp, Unknown
  misc_feature (1)..( 11): Matrix.003 file - promoters60/4767933
caatatggaaa

SEQ ID NO: 58700 - DNA, 8 bp, Unknown
  misc_feature (1)..( 8): Matrix.003 file - promoters60/4767933
attttgtc

SEQ ID NO: 58701 - DNA, 6 bp, Unknown
  misc_feature (1)..( 6): Matrix.003 file - promoters60/4767933
tttttg

SEQ ID NO: 58702 - DNA, 8 bp, Unknown
  misc_feature (1)..( 8): Matrix.003 file - promoters60/4767933
aagaaaat

SEQ ID NO: 58703 - DNA, 10 bp, Unknown
  misc_feature (1)..( 10): Matrix.003 file - promoters60/4767933
aaataaaaat

SEQ ID NO: 58704 - DNA, 6 bp, Unknown
  misc_feature (1)..( 6): Matrix.003 file - promoters60/4767933
aacaat

SEQ ID NO: 58705 - DNA, 9 bp, Unknown
  misc_feature (1)..( 9): Matrix.003 file - promoters60/4767944
agatacgaa

SEQ ID NO: 58706 - DNA, 9 bp, Unknown
  misc_feature (1)..( 9): Matrix.003 file - promoters60/4767944
tttgatttg

SEQ ID NO: 58707 - DNA, 6 bp, Unknown
  misc_feature (1)..( 6): Matrix.003 file - promoters60/4767944
ttacga

SEQ ID NO: 58708 - DNA, 7 bp, Unknown
  misc_feature (1)..( 7): Matrix.003 file - promoters60/4767944
ccaaaac

SEQ ID NO: 58709 - DNA, 8 bp, Unknown
  misc_feature (1)..( 8): Matrix.003 file - promoters60/4767944
caaaacct

SEQ ID NO: 58710 - DNA, 7 bp, Unknown
  misc_feature (1)..( 7): Matrix.003 file - promoters60/4767944
actgtag

SEQ ID NO: 58711 - DNA, 8 bp, Unknown
  misc_feature (1)..( 8): Matrix.003 file - promoters60/4767944
gatagatg

SEQ ID NO: 58712 - DNA, 8 bp, Unknown
  misc_feature (1)..( 8): Matrix.003 file - promoters60/4767944
aaaacatg

SEQ ID NO: 58713 - DNA, 7 bp, Unknown
  misc_feature (1)..( 7): Matrix.003 file - promoters60/4767944
aataaat

SEQ ID NO: 58714 - DNA, 7 bp, Unknown
  misc_feature (1)..( 7): Matrix.003 file - promoters60/4767944
tccaata

SEQ ID NO: 58715 - DNA, 9 bp, Unknown
  misc_feature (1)..( 9): Matrix.003 file - promoters60/4767944
tataaatca

SEQ ID NO: 58716 - DNA, 6 bp, Unknown
  misc_feature (1)..( 6): Matrix.003 file - promoters60/4767944
gaaaaa

SEQ ID NO: 58717 - DNA, 7 bp, Unknown
  misc_feature (1)..( 7): Matrix.003 file - promoters60/4767944
aatatat

SEQ ID NO: 58718 - DNA, 7 bp, Unknown
  misc_feature (1)..( 7): Matrix.003 file - promoters60/4767944
ccaaaac

SEQ ID NO: 58719 - DNA, 7 bp, Unknown
  misc_feature (1)..( 7): Matrix.003 file - promoters60/4767944
accaaat

SEQ ID NO: 58720 - DNA, 5 bp, Unknown
  misc_feature (1)..( 5): Matrix.003 file - promoters60/4767952
agaaa

SEQ ID NO: 58721 - DNA, 8 bp, Unknown
  misc_feature (1)..( 8): Matrix.003 file - promoters60/4767952
aaatgttg

SEQ ID NO: 58722 - DNA, 10 bp, Unknown
  misc_feature (1)..( 10): Matrix.003 file - promoters60/4767952
ataaataaaa

SEQ ID NO: 58723 - DNA, 9 bp, Unknown
  misc_feature (1)..( 9): Matrix.003 file - promoters60/4767952
tattaaatg

SEQ ID NO: 58724 - DNA, 9 bp, Unknown
  misc_feature (1)..( 9): Matrix.003 file - promoters60/4767952
ataaataaa

SEQ ID NO: 58725 - DNA, 11 bp, Unknown
  misc_feature (1)..( 11): Matrix.003 file - promoters60/4767952
aaaaaagaaag

SEQ ID NO: 58726 - DNA, 8 bp, Unknown
  misc_feature (1)..( 8): Matrix.003 file - promoters60/4767952
agaccaaa

SEQ ID NO: 58727 - DNA, 11 bp, Unknown
  misc_feature (1)..( 11): Matrix.003 file - promoters60/4767952
aaaatgttaac

SEQ ID NO: 58728 - DNA, 9 bp, Unknown
  misc_feature (1)..( 9): Matrix.003 file - promoters60/4767952
agatcaaat

SEQ ID NO: 58729 - DNA, 8 bp, Unknown
  misc_feature (1)..( 8): Matrix.003 file - promoters60/4767956
caaacata

SEQ ID NO: 58730 - DNA, 10 bp, Unknown
  misc_feature (1)..( 10): Matrix.003 file - promoters60/4767972
gaaaatgaaa

SEQ ID NO: 58731 - DNA, 11 bp, Unknown
  misc_feature (1)..( 11): Matrix.003 file - promoters60/4767972
gaaaatataca

SEQ ID NO: 58732 - DNA, 7 bp, Unknown
  misc_feature (1)..( 7): Matrix.003 file - promoters60/4767972
attaacc

SEQ ID NO: 58733 - DNA, 9 bp, Unknown
  misc_feature (1)..( 9): Matrix.003 file - promoters60/4767972
actttcata

SEQ ID NO: 58734 - DNA, 6 bp, Unknown
  misc_feature (1)..( 6): Matrix.003 file - promoters60/4767976
aacatt

SEQ ID NO: 58735 - DNA, 8 bp, Unknown
  misc_feature (1)..( 8): Matrix.003 file - promoters60/4767976
tgtattaa

SEQ ID NO: 58736 - DNA, 7 bp, Unknown
  misc_feature (1)..( 7): Matrix.003 file - promoters60/4767976
tttgtaa

SEQ ID NO: 58737 - DNA, 7 bp, Unknown
  misc_feature (1)..( 7): Matrix.003 file - promoters60/4767976
gaaaatt

SEQ ID NO: 58738 - DNA, 9 bp, Unknown
  misc_feature (1)..( 9): Matrix.003 file - promoters60/4767976
ttatcttcc

SEQ ID NO: 58739 - DNA, 8 bp, Unknown
  misc_feature (1)..( 8): Matrix.003 file - promoters60/4767976
attattgc

SEQ ID NO: 58740 - DNA, 7 bp, Unknown
  misc_feature (1)..( 7): Matrix.003 file - promoters60/4767976
aataagc

SEQ ID NO: 58741 - DNA, 6 bp, Unknown
  misc_feature (1)..( 6): Matrix.003 file - promoters60/4767976
taaagg

SEQ ID NO: 58742 - DNA, 7 bp, Unknown
  misc_feature (1)..( 7): Matrix.003 file - promoters60/4767976
aaagata

SEQ ID NO: 58743 - DNA, 7 bp, Unknown
  misc_feature (1)..( 7): Matrix.003 file - promoters60/4767976
tttcaat

SEQ ID NO: 58744 - DNA, 8 bp, Unknown
  misc_feature (1)..( 8): Matrix.003 file - promoters60/4767976
gttgggtc

SEQ ID NO: 58745 - DNA, 6 bp, Unknown
  misc_feature (1)..( 6): Matrix.003 file - promoters60/4767976
aacatt

SEQ ID NO: 58746 - DNA, 7 bp, Unknown
  misc_feature (1)..( 7): Matrix.003 file - promoters60/4767976
cactaaa

SEQ ID NO: 58747 - DNA, 6 bp, Unknown
  misc_feature (1)..( 6): Matrix.003 file - promoters60/4767976
ccatta

SEQ ID NO: 58748 - DNA, 7 bp, Unknown
  misc_feature (1)..( 7): Matrix.003 file - promoters60/4767976
gtatata

SEQ ID NO: 58749 - DNA, 6 bp, Unknown
  misc_feature (1)..( 6): Matrix.003 file - promoters60/4767976
agtaaa

SEQ ID NO: 58750 - DNA, 7 bp, Unknown
  misc_feature (1)..( 7): Matrix.003 file - promoters60/4767976
aatcggg

SEQ ID NO: 58751 - DNA, 8 bp, Unknown
  misc_feature (1)..( 8): Matrix.003 file - promoters60/4767976
gaaacaaa

SEQ ID NO: 58752 - DNA, 10 bp, Unknown
  misc_feature (1)..( 10): Matrix.003 file - promoters60/4767976
ggaaaagaaa

SEQ ID NO: 58753 - DNA, 7 bp, Unknown
  misc_feature (1)..( 7): Matrix.003 file - promoters60/4767976
cccacta

SEQ ID NO: 58754 - DNA, 9 bp, Unknown
  misc_feature (1)..( 9): Matrix.003 file - promoters60/4767976
aaagaaaag

SEQ ID NO: 58755 - DNA, 7 bp, Unknown
  misc_feature (1)..( 7): Matrix.003 file - promoters60/4767982
taaaaat

SEQ ID NO: 58756 - DNA, 9 bp, Unknown
  misc_feature (1)..( 9): Matrix.003 file - promoters60/4767982
atgtgttag

SEQ ID NO: 58757 - DNA, 6 bp, Unknown
  misc_feature (1)..( 6): Matrix.003 file - promoters60/4767986
aataat

SEQ ID NO: 58758 - DNA, 6 bp, Unknown
  misc_feature (1)..( 6): Matrix.003 file - promoters60/4767986
aataat

SEQ ID NO: 58759 - DNA, 6 bp, Unknown
  misc_feature (1)..( 6): Matrix.003 file - promoters60/4767986
aataat

SEQ ID NO: 58760 - DNA, 8 bp, Unknown
  misc_feature (1)..( 8): Matrix.003 file - promoters60/4767986
taaacaaa

SEQ ID NO: 58761 - DNA, 6 bp, Unknown
  misc_feature (1)..( 6): Matrix.003 file - promoters60/4767986
aatcaa

SEQ ID NO: 58762 - DNA, 6 bp, Unknown
  misc_feature (1)..( 6): Matrix.003 file - promoters60/4767986
tcttta

SEQ ID NO: 58763 - DNA, 6 bp, Unknown
  misc_feature (1)..( 6): Matrix.003 file - promoters60/4767986
tgtttc

SEQ ID NO: 58764 - DNA, 9 bp, Unknown
  misc_feature (1)..( 9): Matrix.003 file - promoters60/4767994
attttttca

SEQ ID NO: 58765 - DNA, 7 bp, Unknown
  misc_feature (1)..( 7): Matrix.003 file - promoters60/4767994
cttttta

SEQ ID NO: 58766 - DNA, 9 bp, Unknown
  misc_feature (1)..( 9): Matrix.003 file - promoters60/4767994
aaaaaaaaa

SEQ ID NO: 58767 - DNA, 11 bp, Unknown
  misc_feature (1)..( 11): Matrix.003 file - promoters60/4767994
aaagaaacaaa

SEQ ID NO: 58768 - DNA, 9 bp, Unknown
  misc_feature (1)..( 9): Matrix.003 file - promoters60/4768007
aaagataaa

SEQ ID NO: 58769 - DNA, 11 bp, Unknown
  misc_feature (1)..( 11): Matrix.003 file - promoters60/4768007
gaaataaaaaa

SEQ ID NO: 58770 - DNA, 10 bp, Unknown
  misc_feature (1)..( 10): Matrix.003 file - promoters60/4768007
tgtaaaacaa

SEQ ID NO: 58771 - DNA, 12 bp, Unknown
  misc_feature (1)..( 12): Matrix.003 file - promoters60/4768007
aaaatttcttta

SEQ ID NO: 58772 - DNA, 11 bp, Unknown
  misc_feature (1)..( 11): Matrix.003 file - promoters60/4768007
tcctttatata

SEQ ID NO: 58773 - DNA, 13 bp, Unknown
  misc_feature (1)..( 13): Matrix.003 file - promoters60/4768007
aaaaattaaaatt

SEQ ID NO: 58774 - DNA, 10 bp, Unknown
  misc_feature (1)..( 10): Matrix.003 file - promoters60/4768007
ttcataaaat

SEQ ID NO: 58775 - DNA, 7 bp, Unknown
  misc_feature (1)..( 7): Matrix.003 file - promoters60/4768007
aaacaaa

SEQ ID NO: 58776 - DNA, 9 bp, Unknown
  misc_feature (1)..( 9): Matrix.003 file - promoters60/4768007
aatatttaa

SEQ ID NO: 58777 - DNA, 11 bp, Unknown
  misc_feature (1)..( 11): Matrix.003 file - promoters60/4768007
gaaacaaaaaa

SEQ ID NO: 58778 - DNA, 9 bp, Unknown
  misc_feature (1)..( 9): Matrix.003 file - promoters60/4768039
atttctaaa

SEQ ID NO: 58779 - DNA, 10 bp, Unknown
  misc_feature (1)..( 10): Matrix.003 file - promoters60/4768039
tataatagat

SEQ ID NO: 58780 - DNA, 11 bp, Unknown
  misc_feature (1)..( 11): Matrix.003 file - promoters60/4768039
caaaaaaaaag

SEQ ID NO: 58781 - DNA, 10 bp, Unknown
  misc_feature (1)..( 10): Matrix.003 file - promoters60/4768039
tgcaactttg

SEQ ID NO: 58782 - DNA, 11 bp, Unknown
  misc_feature (1)..( 11): Matrix.003 file - promoters60/4768039
ttattatagat

SEQ ID NO: 58783 - DNA, 6 bp, Unknown
  misc_feature (1)..( 6): Matrix.003 file - promoters60/4768066
gataaa

SEQ ID NO: 58784 - DNA, 6 bp, Unknown
  misc_feature (1)..( 6): Matrix.003 file - promoters60/4768066
tttatt

SEQ ID NO: 58785 - DNA, 7 bp, Unknown
  misc_feature (1)..( 7): Matrix.003 file - promoters60/4768066
gttgtaa

SEQ ID NO: 58786 - DNA, 6 bp, Unknown
  misc_feature (1)..( 6): Matrix.003 file - promoters60/4768066
taacgt

SEQ ID NO: 58787 - DNA, 7 bp, Unknown
  misc_feature (1)..( 7): Matrix.003 file - promoters60/4768066
aaaataa

SEQ ID NO: 58788 - DNA, 10 bp, Unknown
  misc_feature (1)..( 10): Matrix.003 file - promoters60/4768066
taaaaaaaaa

SEQ ID NO: 58789 - DNA, 6 bp, Unknown
  misc_feature (1)..( 6): Matrix.003 file - promoters60/4768066
gtatat

SEQ ID NO: 58790 - DNA, 6 bp, Unknown
  misc_feature (1)..( 6): Matrix.003 file - promoters60/4768066
taaaca

SEQ ID NO: 58791 - DNA, 8 bp, Unknown
  misc_feature (1)..( 8): Matrix.003 file - promoters60/4768066
ggattagg

SEQ ID NO: 58792 - DNA, 6 bp, Unknown
  misc_feature (1)..( 6): Matrix.003 file - promoters60/4768066
ttttgt

SEQ ID NO: 58793 - DNA, 7 bp, Unknown
  misc_feature (1)..( 7): Matrix.003 file - promoters60/4768066
taattaa

SEQ ID NO: 58794 - DNA, 11 bp, Unknown
  misc_feature (1)..( 11): Matrix.003 file - promoters60/4768066
ttaactaaacc

SEQ ID NO: 58795 - DNA, 7 bp, Unknown
  misc_feature (1)..( 7): Matrix.003 file - promoters60/4768066
actaaac

SEQ ID NO: 58796 - DNA, 8 bp, Unknown
  misc_feature (1)..( 8): Matrix.003 file - promoters60/4768066
tctaaatt

SEQ ID NO: 58797 - DNA, 7 bp, Unknown
  misc_feature (1)..( 7): Matrix.003 file - promoters60/4768066
tagataa

SEQ ID NO: 58798 - DNA, 6 bp, Unknown
  misc_feature (1)..( 6): Matrix.003 file - promoters60/4768066
attaat

SEQ ID NO: 58799 - DNA, 6 bp, Unknown
  misc_feature (1)..( 6): Matrix.003 file - promoters60/4768066
agtaaa

SEQ ID NO: 58800 - DNA, 7 bp, Unknown
  misc_feature (1)..( 7): Matrix.003 file - promoters60/4768066
aatcggg

SEQ ID NO: 58801 - DNA, 8 bp, Unknown
  misc_feature (1)..( 8): Matrix.003 file - promoters60/4768066
gaaacaaa

SEQ ID NO: 58802 - DNA, 10 bp, Unknown
  misc_feature (1)..( 10): Matrix.003 file - promoters60/4768066
ggaaaagaaa

SEQ ID NO: 58803 - DNA, 7 bp, Unknown
  misc_feature (1)..( 7): Matrix.003 file - promoters60/4768066
cccacta

SEQ ID NO: 58804 - DNA, 9 bp, Unknown
  misc_feature (1)..( 9): Matrix.003 file - promoters60/4768066
aaagaaaag

SEQ ID NO: 58805 - DNA, 7 bp, Unknown
  misc_feature (1)..( 7): Matrix.003 file - promoters60/4768147
tcttttt

SEQ ID NO: 58806 - DNA, 13 bp, Unknown
  misc_feature (1)..( 13): Matrix.003 file - promoters60/4768147
caataatttttcc

SEQ ID NO: 58807 - DNA, 6 bp, Unknown
  misc_feature (1)..( 6): Matrix.003 file - promoters60/4768147
acattg

SEQ ID NO: 58808 - DNA, 7 bp, Unknown
  misc_feature (1)..( 7): Matrix.003 file - promoters60/4768147
tattata

SEQ ID NO: 58809 - DNA, 10 bp, Unknown
  misc_feature (1)..( 10): Matrix.003 file - promoters60/4768147
aaaacaataa

SEQ ID NO: 58810 - DNA, 6 bp, Unknown
  misc_feature (1)..( 6): Matrix.003 file - promoters60/4768147
acttga

SEQ ID NO: 58811 - DNA, 7 bp, Unknown
  misc_feature (1)..( 7): Matrix.003 file - promoters60/4768147
taggttg

SEQ ID NO: 58812 - DNA, 6 bp, Unknown
  misc_feature (1)..( 6): Matrix.003 file - promoters60/4768147
attttt

SEQ ID NO: 58813 - DNA, 7 bp, Unknown
  misc_feature (1)..( 7): Matrix.003 file - promoters60/4768147
caaaaaa

SEQ ID NO: 58814 - DNA, 8 bp, Unknown
  misc_feature (1)..( 8): Matrix.003 file - promoters60/4768147
tctaaaaa

SEQ ID NO: 58815 - DNA, 7 bp, Unknown
  misc_feature (1)..( 7): Matrix.003 file - promoters60/4768147
atagata

SEQ ID NO: 58816 - DNA, 7 bp, Unknown
  misc_feature (1)..( 7): Matrix.003 file - promoters60/4768147
atggaat

SEQ ID NO: 58817 - DNA, 7 bp, Unknown
  misc_feature (1)..( 7): Matrix.003 file - promoters60/4768147
accaaat

SEQ ID NO: 58818 - DNA, 6 bp, Unknown
  misc_feature (1)..( 6): Matrix.003 file - promoters60/4768147
aaaaaa

SEQ ID NO: 58819 - DNA, 6 bp, Unknown
  misc_feature (1)..( 6): Matrix.003 file - promoters60/4768147
gtcaaa

SEQ ID NO: 58820 - DNA, 6 bp, Unknown
  misc_feature (1)..( 6): Matrix.003 file - promoters60/4768147
ggcgag

SEQ ID NO: 58821 - DNA, 8 bp, Unknown
  misc_feature (1)..( 8): Matrix.003 file - promoters60/4768169
gtttgaaa

SEQ ID NO: 58822 - DNA, 6 bp, Unknown
  misc_feature (1)..( 6): Matrix.003 file - promoters60/4768169
aattca

SEQ ID NO: 58823 - DNA, 7 bp, Unknown
  misc_feature (1)..( 7): Matrix.003 file - promoters60/4768169
tttctaa

SEQ ID NO: 58824 - DNA, 9 bp, Unknown
  misc_feature (1)..( 9): Matrix.003 file - promoters60/4768169
ttaactttg

SEQ ID NO: 58825 - DNA, 8 bp, Unknown
  misc_feature (1)..( 8): Matrix.003 file - promoters60/4768169
tcaaataa

SEQ ID NO: 58826 - DNA, 6 bp, Unknown
  misc_feature (1)..( 6): Matrix.003 file - promoters60/4768169
ttcttt

SEQ ID NO: 58827 - DNA, 7 bp, Unknown
  misc_feature (1)..( 7): Matrix.003 file - promoters60/4768169
aacaaag

SEQ ID NO: 58828 - DNA, 7 bp, Unknown
  misc_feature (1)..( 7): Matrix.003 file - promoters60/4768169
tatatat

SEQ ID NO: 58829 - DNA, 7 bp, Unknown
  misc_feature (1)..( 7): Matrix.003 file - promoters60/4768169
aaaccag

SEQ ID NO: 58830 - DNA, 7 bp, Unknown
  misc_feature (1)..( 7): Matrix.003 file - promoters60/4768169
gaaaaaa

SEQ ID NO: 58831 - DNA, 7 bp, Unknown
  misc_feature (1)..( 7): Matrix.003 file - promoters60/4768169
accacat

SEQ ID NO: 58832 - DNA, 7 bp, Unknown
  misc_feature (1)..( 7): Matrix.003 file - promoters60/4768169
aaaagat

SEQ ID NO: 58833 - DNA, 6 bp, Unknown
  misc_feature (1)..( 6): Matrix.003 file - promoters60/4768169
tgtgga

SEQ ID NO: 58834 - DNA, 7 bp, Unknown
  misc_feature (1)..( 7): Matrix.003 file - promoters60/4768169
gaaattg

SEQ ID NO: 58835 - DNA, 9 bp, Unknown
  misc_feature (1)..( 9): Matrix.003 file - promoters60/4768169
aaactatat

SEQ ID NO: 58836 - DNA, 8 bp, Unknown
  misc_feature (1)..( 8): Matrix.003 file - promoters60/4768169
ttgacaaa

SEQ ID NO: 58837 - DNA, 6 bp, Unknown
  misc_feature (1)..( 6): Matrix.003 file - promoters60/4768169
aaagtt

SEQ ID NO: 58838 - DNA, 7 bp, Unknown
  misc_feature (1)..( 7): Matrix.003 file - promoters60/4768169
tatggac

SEQ ID NO: 58839 - DNA, 8 bp, Unknown
  misc_feature (1)..( 8): Matrix.003 file - promoters60/4768169
aaatatct

SEQ ID NO: 58840 - DNA, 6 bp, Unknown
  misc_feature (1)..( 6): Matrix.003 file - promoters60/4768169
tttaaa

SEQ ID NO: 58841 - DNA, 9 bp, Unknown
  misc_feature (1)..( 9): Matrix.003 file - promoters60/4768169
attttctga

SEQ ID NO: 58842 - DNA, 7 bp, Unknown
  misc_feature (1)..( 7): Matrix.003 file - promoters60/4768169
gttttca

SEQ ID NO: 58843 - DNA, 8 bp, Unknown
  misc_feature (1)..( 8): Matrix.003 file - promoters60/4768198
ttttagct

SEQ ID NO: 58844 - DNA, 10 bp, Unknown
  misc_feature (1)..( 10): Matrix.003 file - promoters60/4768198
ttaaaattta

SEQ ID NO: 58845 - DNA, 7 bp, Unknown
  misc_feature (1)..( 7): Matrix.003 file - promoters60/4768198
tagtgat

SEQ ID NO: 58846 - DNA, 6 bp, Unknown
  misc_feature (1)..( 6): Matrix.003 file - promoters60/4768198
caaaaa

SEQ ID NO: 58847 - DNA, 7 bp, Unknown
  misc_feature (1)..( 7): Matrix.003 file - promoters60/4768198
gaaaact

SEQ ID NO: 58848 - DNA, 6 bp, Unknown
  misc_feature (1)..( 6): Matrix.003 file - promoters60/4768198
atgaaa

SEQ ID NO: 58849 - DNA, 11 bp, Unknown
  misc_feature (1)..( 11): Matrix.003 file - promoters60/4768198
aatcaatggtt

SEQ ID NO: 58850 - DNA, 9 bp, Unknown
  misc_feature (1)..( 9): Matrix.003 file - promoters60/4768198
tgtcaaatt

SEQ ID NO: 58851 - DNA, 9 bp, Unknown
  misc_feature (1)..( 9): Matrix.003 file - promoters60/4768198
tttatagtt

SEQ ID NO: 58852 - DNA, 8 bp, Unknown
  misc_feature (1)..( 8): Matrix.003 file - promoters60/4768198
actcaaat

SEQ ID NO: 58853 - DNA, 6 bp, Unknown
  misc_feature (1)..( 6): Matrix.003 file - promoters60/4768198
attaaa

SEQ ID NO: 58854 - DNA, 6 bp, Unknown
  misc_feature (1)..( 6): Matrix.003 file - promoters60/4768198
aaatta

SEQ ID NO: 58855 - DNA, 7 bp, Unknown
  misc_feature (1)..( 7): Matrix.003 file - promoters60/4768198
aaagaag

SEQ ID NO: 58856 - DNA, 9 bp, Unknown
  misc_feature (1)..( 9): Matrix.003 file - promoters60/4768198
tcttctatt

SEQ ID NO: 58857 - DNA, 7 bp, Unknown
  misc_feature (1)..( 7): Matrix.003 file - promoters60/4768198
cttgaga

SEQ ID NO: 58858 - DNA, 6 bp, Unknown
  misc_feature (1)..( 6): Matrix.003 file - promoters60/4768198
ggtttt

SEQ ID NO: 58859 - DNA, 7 bp, Unknown
  misc_feature (1)..( 7): Matrix.003 file - promoters60/4768198
attgttt

SEQ ID NO: 58860 - DNA, 7 bp, Unknown
  misc_feature (1)..( 7): Matrix.003 file - promoters60/4768198
aatatta

SEQ ID NO: 58861 - DNA, 7 bp, Unknown
  misc_feature (1)..( 7): Matrix.003 file - promoters60/4768198
gcaatgt

SEQ ID NO: 58862 - DNA, 11 bp, Unknown
  misc_feature (1)..( 11): Matrix.003 file - promoters60/4768209
gatttagttta

SEQ ID NO: 58863 - DNA, 11 bp, Unknown
  misc_feature (1)..( 11): Matrix.003 file - promoters60/4768217
taaccattgaa

SEQ ID NO: 58864 - DNA, 11 bp, Unknown
  misc_feature (1)..( 11): Matrix.003 file - promoters60/4768236
accaaaaaaga

SEQ ID NO: 58865 - DNA, 9 bp, Unknown
  misc_feature (1)..( 9): Matrix.003 file - promoters60/4768236
aaaaaaatc

SEQ ID NO: 58866 - DNA, 7 bp, Unknown
  misc_feature (1)..( 7): Matrix.003 file - promoters60/4768236
taaattc

SEQ ID NO: 58867 - DNA, 12 bp, Unknown
  misc_feature (1)..( 12): Matrix.003 file - promoters60/4768236
aataaatatcaa

SEQ ID NO: 58868 - DNA, 9 bp, Unknown
  misc_feature (1)..( 9): Matrix.003 file - promoters60/4768236
caaaaaata

SEQ ID NO: 58869 - DNA, 9 bp, Unknown
  misc_feature (1)..( 9): Matrix.003 file - promoters60/4768236
aagacaaaa

SEQ ID NO: 58870 - DNA, 10 bp, Unknown
  misc_feature (1)..( 10): Matrix.003 file - promoters60/4768236
cataaaaata

SEQ ID NO: 58871 - DNA, 10 bp, Unknown
  misc_feature (1)..( 10): Matrix.003 file - promoters60/4768236
caattttata

SEQ ID NO: 58872 - DNA, 6 bp, Unknown
  misc_feature (1)..( 6): Matrix.003 file - promoters60/4768239
ctttta

SEQ ID NO: 58873 - DNA, 10 bp, Unknown
  misc_feature (1)..( 10): Matrix.003 file - promoters60/4768239
aaatattata

SEQ ID NO: 58874 - DNA, 7 bp, Unknown
  misc_feature (1)..( 7): Matrix.003 file - promoters60/4768239
acaaata

SEQ ID NO: 58875 - DNA, 8 bp, Unknown
  misc_feature (1)..( 8): Matrix.003 file - promoters60/4768239
atcctttg

SEQ ID NO: 58876 - DNA, 6 bp, Unknown
  misc_feature (1)..( 6): Matrix.003 file - promoters60/4768239
atttga

SEQ ID NO: 58877 - DNA, 9 bp, Unknown
  misc_feature (1)..( 9): Matrix.003 file - promoters60/4768239
gattctttg

SEQ ID NO: 58878 - DNA, 7 bp, Unknown
  misc_feature (1)..( 7): Matrix.003 file - promoters60/4768239
tatgata

SEQ ID NO: 58879 - DNA, 10 bp, Unknown
  misc_feature (1)..( 10): Matrix.003 file - promoters60/4768239
agattagcta

SEQ ID NO: 58880 - DNA, 6 bp, Unknown
  misc_feature (1)..( 6): Matrix.003 file - promoters60/4768239
tgtttt

SEQ ID NO: 58881 - DNA, 6 bp, Unknown
  misc_feature (1)..( 6): Matrix.003 file - promoters60/4768239
ttttat

SEQ ID NO: 58882 - DNA, 7 bp, Unknown
  misc_feature (1)..( 7): Matrix.003 file - promoters60/4768239
taacaat

SEQ ID NO: 58883 - DNA, 8 bp, Unknown
  misc_feature (1)..( 8): Matrix.003 file - promoters60/4768239
gtccgatt

SEQ ID NO: 58884 - DNA, 7 bp, Unknown
  misc_feature (1)..( 7): Matrix.003 file - promoters60/4768239
tatatat

SEQ ID NO: 58885 - DNA, 9 bp, Unknown
  misc_feature (1)..( 9): Matrix.003 file - promoters60/4768250
tatttaatt

SEQ ID NO: 58886 - DNA, 10 bp, Unknown
  misc_feature (1)..( 10): Matrix.003 file - promoters60/4768250
ataaaaaaat

SEQ ID NO: 58887 - DNA, 12 bp, Unknown
  misc_feature (1)..( 12): Matrix.003 file - promoters60/4768250
caaaacaatata

SEQ ID NO: 58888 - DNA, 9 bp, Unknown
  misc_feature (1)..( 9): Matrix.003 file - promoters60/4768250
caaaattta

SEQ ID NO: 58889 - DNA, 11 bp, Unknown
  misc_feature (1)..( 11): Matrix.003 file - promoters60/4768250
gataaaaaaaa

SEQ ID NO: 58890 - DNA, 11 bp, Unknown
  misc_feature (1)..( 11): Matrix.003 file - promoters60/4768250
taaaataatac

SEQ ID NO: 58891 - DNA, 6 bp, Unknown
  misc_feature (1)..( 6): Matrix.003 file - promoters60/4768253
agattc

SEQ ID NO: 58892 - DNA, 8 bp, Unknown
  misc_feature (1)..( 8): Matrix.003 file - promoters60/4768253
tcccatga

SEQ ID NO: 58893 - DNA, 6 bp, Unknown
  misc_feature (1)..( 6): Matrix.003 file - promoters60/4768253
tcttct

SEQ ID NO: 58894 - DNA, 6 bp, Unknown
  misc_feature (1)..( 6): Matrix.003 file - promoters60/4768253
gaaaaa

SEQ ID NO: 58895 - DNA, 6 bp, Unknown
  misc_feature (1)..( 6): Matrix.003 file - promoters60/4768253
ataaat

SEQ ID NO: 58896 - DNA, 7 bp, Unknown
  misc_feature (1)..( 7): Matrix.003 file - promoters60/4768253
taaaaat

SEQ ID NO: 58897 - DNA, 8 bp, Unknown
  misc_feature (1)..( 8): Matrix.003 file - promoters60/4768253
aagaaaaa

SEQ ID NO: 58898 - DNA, 7 bp, Unknown
  misc_feature (1)..( 7): Matrix.003 file - promoters60/4768253
gaactca

SEQ ID NO: 58899 - DNA, 7 bp, Unknown
  misc_feature (1)..( 7): Matrix.003 file - promoters60/4768253
attgtct

SEQ ID NO: 58900 - DNA, 6 bp, Unknown
  misc_feature (1)..( 6): Matrix.003 file - promoters60/4768253
aagaaa

SEQ ID NO: 58901 - DNA, 8 bp, Unknown
  misc_feature (1)..( 8): Matrix.003 file - promoters60/4768253
ggcccatt

SEQ ID NO: 58902 - DNA, 7 bp, Unknown
  misc_feature (1)..( 7): Matrix.003 file - promoters60/4768253
agtctcc

SEQ ID NO: 58903 - DNA, 10 bp, Unknown
  misc_feature (1)..( 10): Matrix.003 file - promoters60/4768265
atgaatttgt

SEQ ID NO: 58904 - DNA, 11 bp, Unknown
  misc_feature (1)..( 11): Matrix.003 file - promoters60/4768265
atcaagtttga

SEQ ID NO: 58905 - DNA, 6 bp, Unknown
  misc_feature (1)..( 6): Matrix.003 file - promoters60/4768269
attcac

SEQ ID NO: 58906 - DNA, 7 bp, Unknown
  misc_feature (1)..( 7): Matrix.003 file - promoters60/4768269
acaaata

SEQ ID NO: 58907 - DNA, 8 bp, Unknown
  misc_feature (1)..( 8): Matrix.003 file - promoters60/4768269
ataacaat

SEQ ID NO: 58908 - DNA, 6 bp, Unknown
  misc_feature (1)..( 6): Matrix.003 file - promoters60/4768269
ctttca

SEQ ID NO: 58909 - DNA, 6 bp, Unknown
  misc_feature (1)..( 6): Matrix.003 file - promoters60/4768269
aataac

SEQ ID NO: 58910 - DNA, 7 bp, Unknown
  misc_feature (1)..( 7): Matrix.003 file - promoters60/4768269
aaacaat

SEQ ID NO: 58911 - DNA, 11 bp, Unknown
  misc_feature (1)..( 11): Matrix.003 file - promoters60/4768269
agttattttgc

SEQ ID NO: 58912 - DNA, 7 bp, Unknown
  misc_feature (1)..( 7): Matrix.003 file - promoters60/4768269
tctgtga

SEQ ID NO: 58913 - DNA, 7 bp, Unknown
  misc_feature (1)..( 7): Matrix.003 file - promoters60/4768269
tttggta

SEQ ID NO: 58914 - DNA, 7 bp, Unknown
  misc_feature (1)..( 7): Matrix.003 file - promoters60/4768269
tggaatt

SEQ ID NO: 58915 - DNA, 6 bp, Unknown
  misc_feature (1)..( 6): Matrix.003 file - promoters60/4768269
ttcggt

SEQ ID NO: 58916 - DNA, 8 bp, Unknown
  misc_feature (1)..( 8): Matrix.003 file - promoters60/4768269
catcagaa

SEQ ID NO: 58917 - DNA, 7 bp, Unknown
  misc_feature (1)..( 7): Matrix.003 file - promoters60/4768269
tgcaagg

SEQ ID NO: 58918 - DNA, 10 bp, Unknown
  misc_feature (1)..( 10): Matrix.003 file - promoters60/4768285
taaattaaaa

SEQ ID NO: 58919 - DNA, 12 bp, Unknown
  misc_feature (1)..( 12): Matrix.003 file - promoters60/4768285
ttttttccaata

SEQ ID NO: 58920 - DNA, 10 bp, Unknown
  misc_feature (1)..( 10): Matrix.003 file - promoters60/4768285
ttttatcaat

SEQ ID NO: 58921 - DNA, 12 bp, Unknown
  misc_feature (1)..( 12): Matrix.003 file - promoters60/4768285
caatttttatat

SEQ ID NO: 58922 - DNA, 6 bp, Unknown
  misc_feature (1)..( 6): Matrix.003 file - promoters60/4768289
taacaa

SEQ ID NO: 58923 - DNA, 9 bp, Unknown
  misc_feature (1)..( 9): Matrix.003 file - promoters60/4768289
gtttattaa

SEQ ID NO: 58924 - DNA, 6 bp, Unknown
  misc_feature (1)..( 6): Matrix.003 file - promoters60/4768289
gaacat

SEQ ID NO: 58925 - DNA, 8 bp, Unknown
  misc_feature (1)..( 8): Matrix.003 file - promoters60/4768289
ttaaaaga

SEQ ID NO: 58926 - DNA, 8 bp, Unknown
  misc_feature (1)..( 8): Matrix.003 file - promoters60/4768289
tgaactta

SEQ ID NO: 58927 - DNA, 6 bp, Unknown
  misc_feature (1)..( 6): Matrix.003 file - promoters60/4768289
gagatt

SEQ ID NO: 58928 - DNA, 7 bp, Unknown
  misc_feature (1)..( 7): Matrix.003 file - promoters60/4768289
atgctta

SEQ ID NO: 58929 - DNA, 8 bp, Unknown
  misc_feature (1)..( 8): Matrix.003 file - promoters60/4768289
tcaagttg

SEQ ID NO: 58930 - DNA, 13 bp, Unknown
  misc_feature (1)..( 13): Matrix.003 file - promoters60/4768289
ttgaatcaaaatt

SEQ ID NO: 58931 - DNA, 7 bp, Unknown
  misc_feature (1)..( 7): Matrix.003 file - promoters60/4768289
tggattt

SEQ ID NO: 58932 - DNA, 6 bp, Unknown
  misc_feature (1)..( 6): Matrix.003 file - promoters60/4768289
aagatt

SEQ ID NO: 58933 - DNA, 6 bp, Unknown
  misc_feature (1)..( 6): Matrix.003 file - promoters60/4768289
ttggtt

SEQ ID NO: 58934 - DNA, 6 bp, Unknown
  misc_feature (1)..( 6): Matrix.003 file - promoters60/4768289
ttaacc

SEQ ID NO: 58935 - DNA, 7 bp, Unknown
  misc_feature (1)..( 7): Matrix.003 file - promoters60/4768289
ctcactc

SEQ ID NO: 58936 - DNA, 6 bp, Unknown
  misc_feature (1)..( 6): Matrix.003 file - promoters60/4768289
atttct

SEQ ID NO: 58937 - DNA, 7 bp, Unknown
  misc_feature (1)..( 7): Matrix.003 file - promoters60/4768293
tcttctg

SEQ ID NO: 58938 - DNA, 8 bp, Unknown
  misc_feature (1)..( 8): Matrix.003 file - promoters60/4768293
cattttca

SEQ ID NO: 58939 - DNA, 10 bp, Unknown
  misc_feature (1)..( 10): Matrix.003 file - promoters60/4768293
attttcacac

SEQ ID NO: 58940 - DNA, 7 bp, Unknown
  misc_feature (1)..( 7): Matrix.003 file - promoters60/4768293
cagggaa

SEQ ID NO: 58941 - DNA, 10 bp, Unknown
  misc_feature (1)..( 10): Matrix.003 file - promoters60/4768293
tgatatgctt

SEQ ID NO: 58942 - DNA, 7 bp, Unknown
  misc_feature (1)..( 7): Matrix.003 file - promoters60/4768293
gatcata

SEQ ID NO: 58943 - DNA, 7 bp, Unknown
  misc_feature (1)..( 7): Matrix.003 file - promoters60/4768293
aaactac

SEQ ID NO: 58944 - DNA, 6 bp, Unknown
  misc_feature (1)..( 6): Matrix.003 file - promoters60/4768293
aaactt

SEQ ID NO: 58945 - DNA, 8 bp, Unknown
  misc_feature (1)..( 8): Matrix.003 file - promoters60/4768293
tgcaggta

SEQ ID NO: 58946 - DNA, 8 bp, Unknown
  misc_feature (1)..( 8): Matrix.003 file - promoters60/4768293
tggaatcc

SEQ ID NO: 58947 - DNA, 7 bp, Unknown
  misc_feature (1)..( 7): Matrix.003 file - promoters60/4768293
atcatgc

SEQ ID NO: 58948 - DNA, 13 bp, Unknown
  misc_feature (1)..( 13): Matrix.003 file - promoters60/4768319
aatcttcgtttgt

SEQ ID NO: 58949 - DNA, 11 bp, Unknown
  misc_feature (1)..( 11): Matrix.003 file - promoters60/4768319
tagataattgt

SEQ ID NO: 58950 - DNA, 7 bp, Unknown
  misc_feature (1)..( 7): Matrix.003 file - promoters60/4768319
actcttc

SEQ ID NO: 58951 - DNA, 6 bp, Unknown
  misc_feature (1)..( 6): Matrix.003 file - promoters60/4768319
aaaaaa

SEQ ID NO: 58952 - DNA, 8 bp, Unknown
  misc_feature (1)..( 8): Matrix.003 file - promoters60/4768319
taaacaaa

SEQ ID NO: 58953 - DNA, 9 bp, Unknown
  misc_feature (1)..( 9): Matrix.003 file - promoters60/4768319
ctcattttt

SEQ ID NO: 58954 - DNA, 7 bp, Unknown
  misc_feature (1)..( 7): Matrix.003 file - promoters60/4768323
ttggtca

SEQ ID NO: 58955 - DNA, 7 bp, Unknown
  misc_feature (1)..( 7): Matrix.003 file - promoters60/4768323
tttactg

SEQ ID NO: 58956 - DNA, 7 bp, Unknown
  misc_feature (1)..( 7): Matrix.003 file - promoters60/4768323
atgaaat

SEQ ID NO: 58957 - DNA, 9 bp, Unknown
  misc_feature (1)..( 9): Matrix.003 file - promoters60/4768323
gaaaagtat

SEQ ID NO: 58958 - DNA, 7 bp, Unknown
  misc_feature (1)..( 7): Matrix.003 file - promoters60/4768323
tcaaatc

SEQ ID NO: 58959 - DNA, 7 bp, Unknown
  misc_feature (1)..( 7): Matrix.003 file - promoters60/4768323
ctttttc

SEQ ID NO: 58960 - DNA, 6 bp, Unknown
  misc_feature (1)..( 6): Matrix.003 file - promoters60/4768323
tgattt

SEQ ID NO: 58961 - DNA, 8 bp, Unknown
  misc_feature (1)..( 8): Matrix.003 file - promoters60/4768323
tttcttat

SEQ ID NO: 58962 - DNA, 7 bp, Unknown
  misc_feature (1)..( 7): Matrix.003 file - promoters60/4768323
ggaacca

SEQ ID NO: 58963 - DNA, 6 bp, Unknown
  misc_feature (1)..( 6): Matrix.003 file - promoters60/4768323
tagggt

SEQ ID NO: 58964 - DNA, 6 bp, Unknown
  misc_feature (1)..( 6): Matrix.003 file - promoters60/4768323
aaaaaa

SEQ ID NO: 58965 - DNA, 7 bp, Unknown
  misc_feature (1)..( 7): Matrix.003 file - promoters60/4768323
tcttttt

SEQ ID NO: 58966 - DNA, 6 bp, Unknown
  misc_feature (1)..( 6): Matrix.003 file - promoters60/4768323
atattt

SEQ ID NO: 58967 - DNA, 6 bp, Unknown
  misc_feature (1)..( 6): Matrix.003 file - promoters60/4768323
aaaaga

SEQ ID NO: 58968 - DNA, 7 bp, Unknown
  misc_feature (1)..( 7): Matrix.003 file - promoters60/4768346
atatgat

SEQ ID NO: 58969 - DNA, 7 bp, Unknown
  misc_feature (1)..( 7): Matrix.003 file - promoters60/4768346
taaaata

SEQ ID NO: 58970 - DNA, 10 bp, Unknown
  misc_feature (1)..( 10): Matrix.003 file - promoters60/4768346
atatatgaaa

SEQ ID NO: 58971 - DNA, 9 bp, Unknown
  misc_feature (1)..( 9): Matrix.003 file - promoters60/4768346
aaataaaat

SEQ ID NO: 58972 - DNA, 7 bp, Unknown
  misc_feature (1)..( 7): Matrix.003 file - promoters60/4768346
accaaaa

SEQ ID NO: 58973 - DNA, 8 bp, Unknown
  misc_feature (1)..( 8): Matrix.003 file - promoters60/4768346
aaaaaatc

SEQ ID NO: 58974 - DNA, 9 bp, Unknown
  misc_feature (1)..( 9): Matrix.003 file - promoters60/4768346
aatcatatt

SEQ ID NO: 58975 - DNA, 7 bp, Unknown
  misc_feature (1)..( 7): Matrix.003 file - promoters60/4768346
tcaaaat

SEQ ID NO: 58976 - DNA, 7 bp, Unknown
  misc_feature (1)..( 7): Matrix.003 file - promoters60/4768346
aatacaa

SEQ ID NO: 58977 - DNA, 7 bp, Unknown
  misc_feature (1)..( 7): Matrix.003 file - promoters60/4768346
accaaaa

SEQ ID NO: 58978 - DNA, 9 bp, Unknown
  misc_feature (1)..( 9): Matrix.003 file - promoters60/4768346
actcgaaaa

SEQ ID NO: 58979 - DNA, 9 bp, Unknown
  misc_feature (1)..( 9): Matrix.003 file - promoters60/4768346
accaaaatc

SEQ ID NO: 58980 - DNA, 7 bp, Unknown
  misc_feature (1)..( 7): Matrix.003 file - promoters60/4768346
tcaaaac

SEQ ID NO: 58981 - DNA, 7 bp, Unknown
  misc_feature (1)..( 7): Matrix.003 file - promoters60/4768346
aattgaa

SEQ ID NO: 58982 - DNA, 8 bp, Unknown
  misc_feature (1)..( 8): Matrix.003 file - promoters60/4768346
catatatg

SEQ ID NO: 58983 - DNA, 6 bp, Unknown
  misc_feature (1)..( 6): Matrix.003 file - promoters60/4768346
tttacg

SEQ ID NO: 58984 - DNA, 7 bp, Unknown
  misc_feature (1)..( 7): Matrix.003 file - promoters60/4768346
aatcatt

SEQ ID NO: 58985 - DNA, 7 bp, Unknown
  misc_feature (1)..( 7): Matrix.003 file - promoters60/4768346
ttacaat

SEQ ID NO: 58986 - DNA, 7 bp, Unknown
  misc_feature (1)..( 7): Matrix.003 file - promoters60/4768346
aatctgt

SEQ ID NO: 58987 - DNA, 11 bp, Unknown
  misc_feature (1)..( 11): Matrix.003 file - promoters60/4768354
taaaatttttt

SEQ ID NO: 58988 - DNA, 9 bp, Unknown
  misc_feature (1)..( 9): Matrix.003 file - promoters60/4768354
tttattcag

SEQ ID NO: 58989 - DNA, 6 bp, Unknown
  misc_feature (1)..( 6): Matrix.003 file - promoters60/4768354
tgcaat

SEQ ID NO: 58990 - DNA, 8 bp, Unknown
  misc_feature (1)..( 8): Matrix.003 file - promoters60/4768354
ttcattta

SEQ ID NO: 58991 - DNA, 6 bp, Unknown
  misc_feature (1)..( 6): Matrix.003 file - promoters60/4768354
tatttt

SEQ ID NO: 58992 - DNA, 6 bp, Unknown
  misc_feature (1)..( 6): Matrix.003 file - promoters60/4768354
taattt

SEQ ID NO: 58993 - DNA, 6 bp, Unknown
  misc_feature (1)..( 6): Matrix.003 file - promoters60/4768354
tttcac

SEQ ID NO: 58994 - DNA, 7 bp, Unknown
  misc_feature (1)..( 7): Matrix.003 file - promoters60/4768354
attctca

SEQ ID NO: 58995 - DNA, 7 bp, Unknown
  misc_feature (1)..( 7): Matrix.003 file - promoters60/4768354
atggtat

SEQ ID NO: 58996 - DNA, 6 bp, Unknown
  misc_feature (1)..( 6): Matrix.003 file - promoters60/4768354
aatatt

SEQ ID NO: 58997 - DNA, 6 bp, Unknown
  misc_feature (1)..( 6): Matrix.003 file - promoters60/4768354
gaaaat

SEQ ID NO: 58998 - DNA, 7 bp, Unknown
  misc_feature (1)..( 7): Matrix.003 file - promoters60/4768354
taaatct

SEQ ID NO: 58999 - DNA, 12 bp, Unknown
  misc_feature (1)..( 12): Matrix.003 file - promoters60/4768354
aaaaaatctctg

SEQ ID NO: 59000 - DNA, 7 bp, Unknown
  misc_feature (1)..( 7): Matrix.003 file - promoters60/4768354
aattttt

SEQ ID NO: 59001 - DNA, 7 bp, Unknown
  misc_feature (1)..( 7): Matrix.003 file - promoters60/4768354
ttaatgt

SEQ ID NO: 59002 - DNA, 6 bp, Unknown
  misc_feature (1)..( 6): Matrix.003 file - promoters60/4768354
aatttt

SEQ ID NO: 59003 - DNA, 6 bp, Unknown
  misc_feature (1)..( 6): Matrix.003 file - promoters60/4768354
tattcg

SEQ ID NO: 59004 - DNA, 6 bp, Unknown
  misc_feature (1)..( 6): Matrix.003 file - promoters60/4768354
acctat

SEQ ID NO: 59005 - DNA, 8 bp, Unknown
  misc_feature (1)..( 8): Matrix.003 file - promoters60/4768354
caaaactt

SEQ ID NO: 59006 - DNA, 7 bp, Unknown
  misc_feature (1)..( 7): Matrix.003 file - promoters60/4768354
gaaaaaa

SEQ ID NO: 59007 - DNA, 6 bp, Unknown
  misc_feature (1)..( 6): Matrix.003 file - promoters60/4768354
atttaa

SEQ ID NO: 59008 - DNA, 6 bp, Unknown
  misc_feature (1)..( 6): Matrix.003 file - promoters60/4768354
taaaat

SEQ ID NO: 59009 - DNA, 7 bp, Unknown
  misc_feature (1)..( 7): Matrix.003 file - promoters60/4768354
aaaatca

SEQ ID NO: 59010 - DNA, 6 bp, Unknown
  misc_feature (1)..( 6): Matrix.003 file - promoters60/4768354
tcacat

SEQ ID NO: 59011 - DNA, 6 bp, Unknown
  misc_feature (1)..( 6): Matrix.003 file - promoters60/4768354
aatcat

SEQ ID NO: 59012 - DNA, 6 bp, Unknown
  misc_feature (1)..( 6): Matrix.003 file - promoters60/4768354
tttgta

SEQ ID NO: 59013 - DNA, 6 bp, Unknown
  misc_feature (1)..( 6): Matrix.003 file - promoters60/4768358
gttttt

SEQ ID NO: 59014 - DNA, 7 bp, Unknown
  misc_feature (1)..( 7): Matrix.003 file - promoters60/4768358
aatttta

SEQ ID NO: 59015 - DNA, 7 bp, Unknown
  misc_feature (1)..( 7): Matrix.003 file - promoters60/4768358
ataacaa

SEQ ID NO: 59016 - DNA, 8 bp, Unknown
  misc_feature (1)..( 8): Matrix.003 file - promoters60/4768358
atactttt

SEQ ID NO: 59017 - DNA, 6 bp, Unknown
  misc_feature (1)..( 6): Matrix.003 file - promoters60/4768358
ttttag

SEQ ID NO: 59018 - DNA, 6 bp, Unknown
  misc_feature (1)..( 6): Matrix.003 file - promoters60/4768358
aacgaa

SEQ ID NO: 59019 - DNA, 6 bp, Unknown
  misc_feature (1)..( 6): Matrix.003 file - promoters60/4768358
aactaa

SEQ ID NO: 59020 - DNA, 9 bp, Unknown
  misc_feature (1)..( 9): Matrix.003 file - promoters60/4768358
caatatgtt

SEQ ID NO: 59021 - DNA, 8 bp, Unknown
  misc_feature (1)..( 8): Matrix.003 file - promoters60/4768358
atatgttt

SEQ ID NO: 59022 - DNA, 7 bp, Unknown
  misc_feature (1)..( 7): Matrix.003 file - promoters60/4768358
tttcatt

SEQ ID NO: 59023 - DNA, 8 bp, Unknown
  misc_feature (1)..( 8): Matrix.003 file - promoters60/4768358
tgtgttta

SEQ ID NO: 59024 - DNA, 7 bp, Unknown
  misc_feature (1)..( 7): Matrix.003 file - promoters60/4768358
aaaaatc

SEQ ID NO: 59025 - DNA, 6 bp, Unknown
  misc_feature (1)..( 6): Matrix.003 file - promoters60/4768358
gttata

SEQ ID NO: 59026 - DNA, 6 bp, Unknown
  misc_feature (1)..( 6): Matrix.003 file - promoters60/4768358
ttttaa

SEQ ID NO: 59027 - DNA, 7 bp, Unknown
  misc_feature (1)..( 7): Matrix.003 file - promoters60/4768358
ttaaatt

SEQ ID NO: 59028 - DNA, 6 bp, Unknown
  misc_feature (1)..( 6): Matrix.003 file - promoters60/4768358
acttaa

SEQ ID NO: 59029 - DNA, 6 bp, Unknown
  misc_feature (1)..( 6): Matrix.003 file - promoters60/4768358
tattta

SEQ ID NO: 59030 - DNA, 6 bp, Unknown
  misc_feature (1)..( 6): Matrix.003 file - promoters60/4768358
aaataa

SEQ ID NO: 59031 - DNA, 6 bp, Unknown
  misc_feature (1)..( 6): Matrix.003 file - promoters60/4768444
ctattg

SEQ ID NO: 59032 - DNA, 6 bp, Unknown
  misc_feature (1)..( 6): Matrix.003 file - promoters60/4768444
cttcaa

SEQ ID NO: 59033 - DNA, 7 bp, Unknown
  misc_feature (1)..( 7): Matrix.003 file - promoters60/4768444
gagagta

SEQ ID NO: 59034 - DNA, 6 bp, Unknown
  misc_feature (1)..( 6): Matrix.003 file - promoters60/4768444
atttaa

SEQ ID NO: 59035 - DNA, 6 bp, Unknown
  misc_feature (1)..( 6): Matrix.003 file - promoters60/4768444
caaaaa

SEQ ID NO: 59036 - DNA, 7 bp, Unknown
  misc_feature (1)..( 7): Matrix.003 file - promoters60/4768444
tatctta

SEQ ID NO: 59037 - DNA, 8 bp, Unknown
  misc_feature (1)..( 8): Matrix.003 file - promoters60/4768444
aagactct

SEQ ID NO: 59038 - DNA, 7 bp, Unknown
  misc_feature (1)..( 7): Matrix.003 file - promoters60/4768444
caagagt

SEQ ID NO: 59039 - DNA, 9 bp, Unknown
  misc_feature (1)..( 9): Matrix.003 file - promoters60/4768528
aaaatttct

SEQ ID NO: 59040 - DNA, 8 bp, Unknown
  misc_feature (1)..( 8): Matrix.003 file - promoters60/4768528
tgtgaaac

SEQ ID NO: 59041 - DNA, 9 bp, Unknown
  misc_feature (1)..( 9): Matrix.003 file - promoters60/4768528
aaaatttct

SEQ ID NO: 59042 - DNA, 9 bp, Unknown
  misc_feature (1)..( 9): Matrix.003 file - promoters60/4768528
tttcaaaat

SEQ ID NO: 59043 - DNA, 6 bp, Unknown
  misc_feature (1)..( 6): Matrix.003 file - promoters60/4768528
taacat

SEQ ID NO: 59044 - DNA, 7 bp, Unknown
  misc_feature (1)..( 7): Matrix.003 file - promoters60/4768528
aaaatat

SEQ ID NO: 59045 - DNA, 8 bp, Unknown
  misc_feature (1)..( 8): Matrix.003 file - promoters60/4768528
taactaaa

SEQ ID NO: 59046 - DNA, 6 bp, Unknown
  misc_feature (1)..( 6): Matrix.003 file - promoters60/4768528
aatcaa

SEQ ID NO: 59047 - DNA, 14 bp, Unknown
  misc_feature (1)..( 14): Matrix.003 file - promoters60/4768528
tcaataaatacaca

SEQ ID NO: 59048 - DNA, 7 bp, Unknown
  misc_feature (1)..( 7): Matrix.003 file - promoters60/4768528
aaaaaaa

SEQ ID NO: 59049 - DNA, 9 bp, Unknown
  misc_feature (1)..( 9): Matrix.003 file - promoters60/4768528
ctgctttca

SEQ ID NO: 59050 - DNA, 7 bp, Unknown
  misc_feature (1)..( 7): Matrix.003 file - promoters60/4768528
attttgg

SEQ ID NO: 59051 - DNA, 8 bp, Unknown
  misc_feature (1)..( 8): Matrix.003 file - promoters60/4768528
tcaaattt

SEQ ID NO: 59052 - DNA, 7 bp, Unknown
  misc_feature (1)..( 7): Matrix.003 file - promoters60/4768528
gtaatgg

SEQ ID NO: 59053 - DNA, 6 bp, Unknown
  misc_feature (1)..( 6): Matrix.003 file - promoters60/4768528
aaaatg

SEQ ID NO: 59054 - DNA, 6 bp, Unknown
  misc_feature (1)..( 6): Matrix.003 file - promoters60/4768528
aagatt

SEQ ID NO: 59055 - DNA, 8 bp, Unknown
  misc_feature (1)..( 8): Matrix.003 file - promoters60/4768528
atgtaaac

SEQ ID NO: 59056 - DNA, 7 bp, Unknown
  misc_feature (1)..( 7): Matrix.003 file - promoters60/4768528
gaaaaat

SEQ ID NO: 59057 - DNA, 7 bp, Unknown
  misc_feature (1)..( 7): Matrix.003 file - promoters60/4768528
caaaatt

SEQ ID NO: 59058 - DNA, 7 bp, Unknown
  misc_feature (1)..( 7): Matrix.003 file - promoters60/4768528
acaactt

SEQ ID NO: 59059 - DNA, 7 bp, Unknown
  misc_feature (1)..( 7): Matrix.003 file - promoters60/4768528
tttattt

SEQ ID NO: 59060 - DNA, 6 bp, Unknown
  misc_feature (1)..( 6): Matrix.003 file - promoters60/4768528
ttggtt

SEQ ID NO: 59061 - DNA, 6 bp, Unknown
  misc_feature (1)..( 6): Matrix.003 file - promoters60/4768528
aaaagt

SEQ ID NO: 59062 - DNA, 8 bp, Unknown
  misc_feature (1)..( 8): Matrix.003 file - promoters60/4768547
tcaaaatt

SEQ ID NO: 59063 - DNA, 14 bp, Unknown
  misc_feature (1)..( 14): Matrix.003 file - promoters60/4768547
ccaaacttaaataa

SEQ ID NO: 59064 - DNA, 9 bp, Unknown
  misc_feature (1)..( 9): Matrix.003 file - promoters60/4768547
tgatcttga

SEQ ID NO: 59065 - DNA, 10 bp, Unknown
  misc_feature (1)..( 10): Matrix.003 file - promoters60/4768547
ttacaagaag

SEQ ID NO: 59066 - DNA, 12 bp, Unknown
  misc_feature (1)..( 12): Matrix.003 file - promoters60/4768568
ttttacacaaat

SEQ ID NO: 59067 - DNA, 12 bp, Unknown
  misc_feature (1)..( 12): Matrix.003 file - promoters60/4768568
aattttataaac

SEQ ID NO: 59068 - DNA, 15 bp, Unknown
  misc_feature (1)..( 15): Matrix.003 file - promoters60/4768568
acataaactaatata

SEQ ID NO: 59069 - DNA, 12 bp, Unknown
  misc_feature (1)..( 12): Matrix.003 file - promoters60/4768568
aatacaactaat

SEQ ID NO: 59070 - DNA, 17 bp, Unknown
  misc_feature (1)..( 17): Matrix.003 file - promoters60/4768568
ttaaaaaatagaaatag

SEQ ID NO: 59071 - DNA, 8 bp, Unknown
  misc_feature (1)..( 8): Matrix.003 file - promoters60/4768568
tatatata

SEQ ID NO: 59072 - DNA, 8 bp, Unknown
  misc_feature (1)..( 8): Matrix.003 file - promoters60/4768568
atatttat

SEQ ID NO: 59073 - DNA, 12 bp, Unknown
  misc_feature (1)..( 12): Matrix.003 file - promoters60/4768568
aacataattttg

SEQ ID NO: 59074 - DNA, 10 bp, Unknown
  misc_feature (1)..( 10): Matrix.003 file - promoters60/4768568
tttttagttt

SEQ ID NO: 59075 - DNA, 10 bp, Unknown
  misc_feature (1)..( 10): Matrix.003 file - promoters60/4768568
tattttaatt

SEQ ID NO: 59076 - DNA, 12 bp, Unknown
  misc_feature (1)..( 12): Matrix.003 file - promoters60/4768599
gttatatatatt

SEQ ID NO: 59077 - DNA, 6 bp, Unknown
  misc_feature (1)..( 6): Matrix.003 file - promoters60/4768599
ttaata

SEQ ID NO: 59078 - DNA, 10 bp, Unknown
  misc_feature (1)..( 10): Matrix.003 file - promoters60/4768599
atttggtttt

SEQ ID NO: 59079 - DNA, 8 bp, Unknown
  misc_feature (1)..( 8): Matrix.003 file - promoters60/4768599
tttgccgt

SEQ ID NO: 59080 - DNA, 9 bp, Unknown
  misc_feature (1)..( 9): Matrix.003 file - promoters60/4768599
tatttagga

SEQ ID NO: 59081 - DNA, 9 bp, Unknown
  misc_feature (1)..( 9): Matrix.003 file - promoters60/4768599
tgagtttct

SEQ ID NO: 59082 - DNA, 6 bp, Unknown
  misc_feature (1)..( 6): Matrix.003 file - promoters60/4768599
tttttc

SEQ ID NO: 59083 - DNA, 6 bp, Unknown
  misc_feature (1)..( 6): Matrix.003 file - promoters60/4768599
gggaaa

SEQ ID NO: 59084 - DNA, 6 bp, Unknown
  misc_feature (1)..( 6): Matrix.003 file - promoters60/4768599
tccatg

SEQ ID NO: 59085 - DNA, 8 bp, Unknown
  misc_feature (1)..( 8): Matrix.003 file - promoters60/4768599
tttcttct

SEQ ID NO: 59086 - DNA, 12 bp, Unknown
  misc_feature (1)..( 12): Matrix.003 file - promoters60/4768599
atgctattaaat

SEQ ID NO: 59087 - DNA, 6 bp, Unknown
  misc_feature (1)..( 6): Matrix.003 file - promoters60/4768599
aatatt

SEQ ID NO: 59088 - DNA, 6 bp, Unknown
  misc_feature (1)..( 6): Matrix.003 file - promoters60/4768599
atagta

SEQ ID NO: 59089 - DNA, 6 bp, Unknown
  misc_feature (1)..( 6): Matrix.003 file - promoters60/4768599
atacca

SEQ ID NO: 59090 - DNA, 7 bp, Unknown
  misc_feature (1)..( 7): Matrix.003 file - promoters60/4768599
tcttata

SEQ ID NO: 59091 - DNA, 6 bp, Unknown
  misc_feature (1)..( 6): Matrix.003 file - promoters60/4768599
tgttca

SEQ ID NO: 59092 - DNA, 7 bp, Unknown
  misc_feature (1)..( 7): Matrix.003 file - promoters60/4768599
attaaat

SEQ ID NO: 59093 - DNA, 6 bp, Unknown
  misc_feature (1)..( 6): Matrix.003 file - promoters60/4768599
aaattt

SEQ ID NO: 59094 - DNA, 7 bp, Unknown
  misc_feature (1)..( 7): Matrix.003 file - promoters60/4768599
aacatga

SEQ ID NO: 59095 - DNA, 7 bp, Unknown
  misc_feature (1)..( 7): Matrix.003 file - promoters60/4768599
tatcttt

SEQ ID NO: 59096 - DNA, 7 bp, Unknown
  misc_feature (1)..( 7): Matrix.003 file - promoters60/4768599
gagagtt

SEQ ID NO: 59097 - DNA, 7 bp, Unknown
  misc_feature (1)..( 7): Matrix.003 file - promoters60/4768599
tgtcttc

SEQ ID NO: 59098 - DNA, 7 bp, Unknown
  misc_feature (1)..( 7): Matrix.003 file - promoters60/4768615
aaaatat

SEQ ID NO: 59099 - DNA, 10 bp, Unknown
  misc_feature (1)..( 10): Matrix.003 file - promoters60/4768615
ataattaaac

SEQ ID NO: 59100 - DNA, 6 bp, Unknown
  misc_feature (1)..( 6): Matrix.003 file - promoters60/4768615
aaaaaa

SEQ ID NO: 59101 - DNA, 11 bp, Unknown
  misc_feature (1)..( 11): Matrix.003 file - promoters60/4768615
ataagtttagt

SEQ ID NO: 59102 - DNA, 10 bp, Unknown
  misc_feature (1)..( 10): Matrix.003 file - promoters60/4768615
taaaaataaa

SEQ ID NO: 59103 - DNA, 12 bp, Unknown
  misc_feature (1)..( 12): Matrix.003 file - promoters60/4768615
aaacaataaaaa

SEQ ID NO: 59104 - DNA, 10 bp, Unknown
  misc_feature (1)..( 10): Matrix.003 file - promoters60/4768615
atattattaa

SEQ ID NO: 59105 - DNA, 13 bp, Unknown
  misc_feature (1)..( 13): Matrix.003 file - promoters60/4768615
aattacaaaaata

SEQ ID NO: 59106 - DNA, 9 bp, Unknown
  misc_feature (1)..( 9): Matrix.003 file - promoters60/4768615
aatgaatta

SEQ ID NO: 59107 - DNA, 8 bp, Unknown
  misc_feature (1)..( 8): Matrix.003 file - promoters60/4768615
tatatata

SEQ ID NO: 59108 - DNA, 12 bp, Unknown
  misc_feature (1)..( 12): Matrix.003 file - promoters60/4768615
ataaaaattaaa

SEQ ID NO: 59109 - DNA, 9 bp, Unknown
  misc_feature (1)..( 9): Matrix.003 file - promoters60/4768631
aaaatctca

SEQ ID NO: 59110 - DNA, 8 bp, Unknown
  misc_feature (1)..( 8): Matrix.003 file - promoters60/4768631
ggcccaaa

SEQ ID NO: 59111 - DNA, 7 bp, Unknown
  misc_feature (1)..( 7): Matrix.003 file - promoters60/4768690
tgtccaa

SEQ ID NO: 59112 - DNA, 9 bp, Unknown
  misc_feature (1)..( 9): Matrix.003 file - promoters60/4768690
taagaatct

SEQ ID NO: 59113 - DNA, 7 bp, Unknown
  misc_feature (1)..( 7): Matrix.003 file - promoters60/4768690
ttgattt

SEQ ID NO: 59114 - DNA, 8 bp, Unknown
  misc_feature (1)..( 8): Matrix.003 file - promoters60/4768690
gatagtag

SEQ ID NO: 59115 - DNA, 9 bp, Unknown
  misc_feature (1)..( 9): Matrix.003 file - promoters60/4768690
aacggttct

SEQ ID NO: 59116 - DNA, 6 bp, Unknown
  misc_feature (1)..( 6): Matrix.003 file - promoters60/4768690
ataaac

SEQ ID NO: 59117 - DNA, 8 bp, Unknown
  misc_feature (1)..( 8): Matrix.003 file - promoters60/4768690
ctaaatat

SEQ ID NO: 59118 - DNA, 8 bp, Unknown
  misc_feature (1)..( 8): Matrix.003 file - promoters60/4768690
tatataaa

SEQ ID NO: 59119 - DNA, 8 bp, Unknown
  misc_feature (1)..( 8): Matrix.003 file - promoters60/4768690
gtttcaaa

SEQ ID NO: 59120 - DNA, 6 bp, Unknown
  misc_feature (1)..( 6): Matrix.003 file - promoters60/4768690
caaaat

SEQ ID NO: 59121 - DNA, 6 bp, Unknown
  misc_feature (1)..( 6): Matrix.003 file - promoters60/4768690
agaatc

SEQ ID NO: 59122 - DNA, 8 bp, Unknown
  misc_feature (1)..( 8): Matrix.003 file - promoters60/4768690
aatccaat

SEQ ID NO: 59123 - DNA, 7 bp, Unknown
  misc_feature (1)..( 7): Matrix.003 file - promoters60/4768690
ataacca

SEQ ID NO: 59124 - DNA, 6 bp, Unknown
  misc_feature (1)..( 6): Matrix.003 file - promoters60/4768690
aaagaa

SEQ ID NO: 59125 - DNA, 6 bp, Unknown
  misc_feature (1)..( 6): Matrix.003 file - promoters60/4768690
agaaaa

SEQ ID NO: 59126 - DNA, 8 bp, Unknown
  misc_feature (1)..( 8): Matrix.003 file - promoters60/4768690
ctcaatac

SEQ ID NO: 59127 - DNA, 8 bp, Unknown
  misc_feature (1)..( 8): Matrix.003 file - promoters60/4768698
attagtta

SEQ ID NO: 59128 - DNA, 14 bp, Unknown
  misc_feature (1)..( 14): Matrix.003 file - promoters60/4768698
gatttgaatttttc

SEQ ID NO: 59129 - DNA, 14 bp, Unknown
  misc_feature (1)..( 14): Matrix.003 file - promoters60/4768698
attagaatttttca

SEQ ID NO: 59130 - DNA, 9 bp, Unknown
  misc_feature (1)..( 9): Matrix.003 file - promoters60/4768698
ttttgatga

SEQ ID NO: 59131 - DNA, 20 bp, Unknown
  misc_feature (1)..( 20): Matrix.003 file - promoters60/4768698
ttataaattttaaaataatt

SEQ ID NO: 59132 - DNA, 10 bp, Unknown
  misc_feature (1)..( 10): Matrix.003 file - promoters60/4768698
tatataaata

SEQ ID NO: 59133 - DNA, 12 bp, Unknown
  misc_feature (1)..( 12): Matrix.003 file - promoters60/4768698
tatataaataac

SEQ ID NO: 59134 - DNA, 10 bp, Unknown
  misc_feature (1)..( 10): Matrix.003 file - promoters60/4768698
tagaaaattt

SEQ ID NO: 59135 - DNA, 12 bp, Unknown
  misc_feature (1)..( 12): Matrix.003 file - promoters60/4768698
atatttataagt

SEQ ID NO: 59136 - DNA, 6 bp, Unknown
  misc_feature (1)..( 6): Matrix.003 file - promoters60/4768698
tgaatg

SEQ ID NO: 59137 - DNA, 10 bp, Unknown
  misc_feature (1)..( 10): Matrix.003 file - promoters60/4768698
ttatgtaaat

SEQ ID NO: 59138 - DNA, 13 bp, Unknown
  misc_feature (1)..( 13): Matrix.003 file - promoters60/4768698
atatctttatacg

SEQ ID NO: 59139 - DNA, 7 bp, Unknown
  misc_feature (1)..( 7): Matrix.003 file - promoters60/4768748
gtaaagt

SEQ ID NO: 59140 - DNA, 6 bp, Unknown
  misc_feature (1)..( 6): Matrix.003 file - promoters60/4768748
ttttga

SEQ ID NO: 59141 - DNA, 8 bp, Unknown
  misc_feature (1)..( 8): Matrix.003 file - promoters60/4768748
atttgtag

SEQ ID NO: 59142 - DNA, 7 bp, Unknown
  misc_feature (1)..( 7): Matrix.003 file - promoters60/4768748
ttaattt

SEQ ID NO: 59143 - DNA, 7 bp, Unknown
  misc_feature (1)..( 7): Matrix.003 file - promoters60/4768748
gacctct

SEQ ID NO: 59144 - DNA, 6 bp, Unknown
  misc_feature (1)..( 6): Matrix.003 file - promoters60/4768748
tgagct

SEQ ID NO: 59145 - DNA, 8 bp, Unknown
  misc_feature (1)..( 8): Matrix.003 file - promoters60/4768748
gcttactc

SEQ ID NO: 59146 - DNA, 8 bp, Unknown
  misc_feature (1)..( 8): Matrix.003 file - promoters60/4768748
ttagctca

SEQ ID NO: 59147 - DNA, 7 bp, Unknown
  misc_feature (1)..( 7): Matrix.003 file - promoters60/4768748
actcgta

SEQ ID NO: 59148 - DNA, 9 bp, Unknown
  misc_feature (1)..( 9): Matrix.003 file - promoters60/4768748
tgaaaaact

SEQ ID NO: 59149 - DNA, 8 bp, Unknown
  misc_feature (1)..( 8): Matrix.003 file - promoters60/4768748
aatcaagt

SEQ ID NO: 59150 - DNA, 7 bp, Unknown
  misc_feature (1)..( 7): Matrix.003 file - promoters60/4768748
caaaaaa

SEQ ID NO: 59151 - DNA, 8 bp, Unknown
  misc_feature (1)..( 8): Matrix.003 file - promoters60/4768778
gtttttgt

SEQ ID NO: 59152 - DNA, 10 bp, Unknown
  misc_feature (1)..( 10): Matrix.003 file - promoters60/4768778
ttgtattttt

SEQ ID NO: 59153 - DNA, 7 bp, Unknown
  misc_feature (1)..( 7): Matrix.003 file - promoters60/4768782
attgtgt

SEQ ID NO: 59154 - DNA, 11 bp, Unknown
  misc_feature (1)..( 11): Matrix.003 file - promoters60/4768782
ttggaaaatgt

SEQ ID NO: 59155 - DNA, 8 bp, Unknown
  misc_feature (1)..( 8): Matrix.003 file - promoters60/4768782
attattct

SEQ ID NO: 59156 - DNA, 10 bp, Unknown
  misc_feature (1)..( 10): Matrix.003 file - promoters60/4768782
aagtaaatga

SEQ ID NO: 59157 - DNA, 11 bp, Unknown
  misc_feature (1)..( 11): Matrix.003 file - promoters60/4768782
ttcttattgtt

SEQ ID NO: 59158 - DNA, 7 bp, Unknown
  misc_feature (1)..( 7): Matrix.003 file - promoters60/4768804
aattttg

SEQ ID NO: 59159 - DNA, 6 bp, Unknown
  misc_feature (1)..( 6): Matrix.003 file - promoters60/4768804
ctaaca

SEQ ID NO: 59160 - DNA, 8 bp, Unknown
  misc_feature (1)..( 8): Matrix.003 file - promoters60/4768804
ataagata

SEQ ID NO: 59161 - DNA, 7 bp, Unknown
  misc_feature (1)..( 7): Matrix.003 file - promoters60/4768804
aataaaa

SEQ ID NO: 59162 - DNA, 10 bp, Unknown
  misc_feature (1)..( 10): Matrix.003 file - promoters60/4768804
aatagataaa

SEQ ID NO: 59163 - DNA, 8 bp, Unknown
  misc_feature (1)..( 8): Matrix.003 file - promoters60/4768804
ttgagaaa

SEQ ID NO: 59164 - DNA, 6 bp, Unknown
  misc_feature (1)..( 6): Matrix.003 file - promoters60/4768804
gttaag

SEQ ID NO: 59165 - DNA, 7 bp, Unknown
  misc_feature (1)..( 7): Matrix.003 file - promoters60/4768804
agagaca

SEQ ID NO: 59166 - DNA, 6 bp, Unknown
  misc_feature (1)..( 6): Matrix.003 file - promoters60/4768804
tgctaa

SEQ ID NO: 59167 - DNA, 6 bp, Unknown
  misc_feature (1)..( 6): Matrix.003 file - promoters60/4768804
attata

SEQ ID NO: 59168 - DNA, 7 bp, Unknown
  misc_feature (1)..( 7): Matrix.003 file - promoters60/4768804
tttaaag

SEQ ID NO: 59169 - DNA, 6 bp, Unknown
  misc_feature (1)..( 6): Matrix.003 file - promoters60/4768811
aaagta

SEQ ID NO: 59170 - DNA, 7 bp, Unknown
  misc_feature (1)..( 7): Matrix.003 file - promoters60/4768811
tcccact

SEQ ID NO: 59171 - DNA, 6 bp, Unknown
  misc_feature (1)..( 6): Matrix.003 file - promoters60/4768811
tacgcg

SEQ ID NO: 59172 - DNA, 7 bp, Unknown
  misc_feature (1)..( 7): Matrix.003 file - promoters60/4768811
ctaattt

SEQ ID NO: 59173 - DNA, 6 bp, Unknown
  misc_feature (1)..( 6): Matrix.003 file - promoters60/4768811
tttgga

SEQ ID NO: 59174 - DNA, 6 bp, Unknown
  misc_feature (1)..( 6): Matrix.003 file - promoters60/4768811
gatttg

SEQ ID NO: 59175 - DNA, 8 bp, Unknown
  misc_feature (1)..( 8): Matrix.003 file - promoters60/4768811
aaaacttt

SEQ ID NO: 59176 - DNA, 8 bp, Unknown
  misc_feature (1)..( 8): Matrix.003 file - promoters60/4768811
gaggtgct

SEQ ID NO: 59177 - DNA, 7 bp, Unknown
  misc_feature (1)..( 7): Matrix.003 file - promoters60/4768811
gagcttc

SEQ ID NO: 59178 - DNA, 6 bp, Unknown
  misc_feature (1)..( 6): Matrix.003 file - promoters60/4768811
ttagat

SEQ ID NO: 59179 - DNA, 7 bp, Unknown
  misc_feature (1)..( 7): Matrix.003 file - promoters60/4768811
tgtaaaa

SEQ ID NO: 59180 - DNA, 7 bp, Unknown
  misc_feature (1)..( 7): Matrix.003 file - promoters60/4768811
aagtttg

SEQ ID NO: 59181 - DNA, 7 bp, Unknown
  misc_feature (1)..( 7): Matrix.003 file - promoters60/4768811
taaataa

SEQ ID NO: 59182 - DNA, 9 bp, Unknown
  misc_feature (1)..( 9): Matrix.003 file - promoters60/4768829
ctaaaaatt

SEQ ID NO: 59183 - DNA, 11 bp, Unknown
  misc_feature (1)..( 11): Matrix.003 file - promoters60/4768829
caaacaaatgt

SEQ ID NO: 59184 - DNA, 6 bp, Unknown
  misc_feature (1)..( 6): Matrix.003 file - promoters60/4768829
taatta

SEQ ID NO: 59185 - DNA, 12 bp, Unknown
  misc_feature (1)..( 12): Matrix.003 file - promoters60/4768829
aaaaattctaaa

SEQ ID NO: 59186 - DNA, 8 bp, Unknown
  misc_feature (1)..( 8): Matrix.003 file - promoters60/4768848
tggaaaat

SEQ ID NO: 59187 - DNA, 8 bp, Unknown
  misc_feature (1)..( 8): Matrix.003 file - promoters60/4768848
ttctgact

SEQ ID NO: 59188 - DNA, 6 bp, Unknown
  misc_feature (1)..( 6): Matrix.003 file - promoters60/4768848
aatgat

SEQ ID NO: 59189 - DNA, 9 bp, Unknown
  misc_feature (1)..( 9): Matrix.003 file - promoters60/4768848
tactccatt

SEQ ID NO: 59190 - DNA, 10 bp, Unknown
  misc_feature (1)..( 10): Matrix.003 file - promoters60/4768848
ttttaaggtt

SEQ ID NO: 59191 - DNA, 7 bp, Unknown
  misc_feature (1)..( 7): Matrix.003 file - promoters60/4768848
gttatat

SEQ ID NO: 59192 - DNA, 6 bp, Unknown
  misc_feature (1)..( 6): Matrix.003 file - promoters60/4768848
attttt

SEQ ID NO: 59193 - DNA, 6 bp, Unknown
  misc_feature (1)..( 6): Matrix.003 file - promoters60/4768848
tccaaa

SEQ ID NO: 59194 - DNA, 8 bp, Unknown
  misc_feature (1)..( 8): Matrix.003 file - promoters60/4768848
attaaaat

SEQ ID NO: 59195 - DNA, 7 bp, Unknown
  misc_feature (1)..( 7): Matrix.003 file - promoters60/4768848
tttctca

SEQ ID NO: 59196 - DNA, 8 bp, Unknown
  misc_feature (1)..( 8): Matrix.003 file - promoters60/4768848
cattctct

SEQ ID NO: 59197 - DNA, 6 bp, Unknown
  misc_feature (1)..( 6): Matrix.003 file - promoters60/4768848
aagaaa

SEQ ID NO: 59198 - DNA, 7 bp, Unknown
  misc_feature (1)..( 7): Matrix.003 file - promoters60/4768848
agaaagt

SEQ ID NO: 59199 - DNA, 6 bp, Unknown
  misc_feature (1)..( 6): Matrix.003 file - promoters60/4768848
aaatgc

SEQ ID NO: 59200 - DNA, 15 bp, Unknown
  misc_feature (1)..( 15): Matrix.003 file - promoters60/4768856
gtaacaattctattt

SEQ ID NO: 59201 - DNA, 11 bp, Unknown
  misc_feature (1)..( 11): Matrix.003 file - promoters60/4768856
atttgattata

SEQ ID NO: 59202 - DNA, 11 bp, Unknown
  misc_feature (1)..( 11): Matrix.003 file - promoters60/4768856
tgattaaataa

SEQ ID NO: 59203 - DNA, 10 bp, Unknown
  misc_feature (1)..( 10): Matrix.003 file - promoters60/4768856
gattaaataa

SEQ ID NO: 59204 - DNA, 10 bp, Unknown
  misc_feature (1)..( 10): Matrix.003 file - promoters60/4768856
tttattgttt

SEQ ID NO: 59205 - DNA, 10 bp, Unknown
  misc_feature (1)..( 10): Matrix.003 file - promoters60/4768856
atactttatt

SEQ ID NO: 59206 - DNA, 9 bp, Unknown
  misc_feature (1)..( 9): Matrix.003 file - promoters60/4768856
agtaataaa

SEQ ID NO: 59207 - DNA, 6 bp, Unknown
  misc_feature (1)..( 6): Matrix.003 file - promoters60/4768928
gtttca

SEQ ID NO: 59208 - DNA, 8 bp, Unknown
  misc_feature (1)..( 8): Matrix.003 file - promoters60/4768928
ttcagatc

SEQ ID NO: 59209 - DNA, 10 bp, Unknown
  misc_feature (1)..( 10): Matrix.003 file - promoters60/4768928
tagatgtgtt

SEQ ID NO: 59210 - DNA, 6 bp, Unknown
  misc_feature (1)..( 6): Matrix.003 file - promoters60/4768928
gcaata

SEQ ID NO: 59211 - DNA, 8 bp, Unknown
  misc_feature (1)..( 8): Matrix.003 file - promoters60/4768928
aaagaaaa

SEQ ID NO: 59212 - DNA, 10 bp, Unknown
  misc_feature (1)..( 10): Matrix.003 file - promoters60/4768928
aaagaaaaga

SEQ ID NO: 59213 - DNA, 8 bp, Unknown
  misc_feature (1)..( 8): Matrix.003 file - promoters60/4768928
agaattta

SEQ ID NO: 59214 - DNA, 9 bp, Unknown
  misc_feature (1)..( 9): Matrix.003 file - promoters60/4768928
agaaatttg

SEQ ID NO: 59215 - DNA, 8 bp, Unknown
  misc_feature (1)..( 8): Matrix.003 file - promoters60/4768928
tgttggaa

SEQ ID NO: 59216 - DNA, 11 bp, Unknown
  misc_feature (1)..( 11): Matrix.003 file - promoters60/4768928
agtgaaagata

SEQ ID NO: 59217 - DNA, 7 bp, Unknown
  misc_feature (1)..( 7): Matrix.003 file - promoters60/4768928
aaactta

SEQ ID NO: 59218 - DNA, 6 bp, Unknown
  misc_feature (1)..( 6): Matrix.003 file - promoters60/4768928
taataa

SEQ ID NO: 59219 - DNA, 6 bp, Unknown
  misc_feature (1)..( 6): Matrix.003 file - promoters60/4768928
agtaaa

SEQ ID NO: 59220 - DNA, 7 bp, Unknown
  misc_feature (1)..( 7): Matrix.003 file - promoters60/4768928
aatcggg

SEQ ID NO: 59221 - DNA, 10 bp, Unknown
  misc_feature (1)..( 10): Matrix.003 file - promoters60/4768928
aaataaaata

SEQ ID NO: 59222 - DNA, 7 bp, Unknown
  misc_feature (1)..( 7): Matrix.003 file - promoters60/4768928
cccacta

SEQ ID NO: 59223 - DNA, 9 bp, Unknown
  misc_feature (1)..( 9): Matrix.003 file - promoters60/4768928
aaagaaaag

SEQ ID NO: 59224 - DNA, 7 bp, Unknown
  misc_feature (1)..( 7): Matrix.003 file - promoters60/4768928
gtatata

SEQ ID NO: 59225 - DNA, 8 bp, Unknown
  misc_feature (1)..( 8): Matrix.003 file - promoters60/4769048
aaatttgg

SEQ ID NO: 59226 - DNA, 6 bp, Unknown
  misc_feature (1)..( 6): Matrix.003 file - promoters60/4769052
ttgtaa

SEQ ID NO: 59227 - DNA, 6 bp, Unknown
  misc_feature (1)..( 6): Matrix.003 file - promoters60/4769052
cctttt

SEQ ID NO: 59228 - DNA, 8 bp, Unknown
  misc_feature (1)..( 8): Matrix.003 file - promoters60/4769052
aatagatc

SEQ ID NO: 59229 - DNA, 8 bp, Unknown
  misc_feature (1)..( 8): Matrix.003 file - promoters60/4769052
aaaaatta

SEQ ID NO: 59230 - DNA, 9 bp, Unknown
  misc_feature (1)..( 9): Matrix.003 file - promoters60/4769052
ggataaaat

SEQ ID NO: 59231 - DNA, 6 bp, Unknown
  misc_feature (1)..( 6): Matrix.003 file - promoters60/4769052
taggtt

SEQ ID NO: 59232 - DNA, 6 bp, Unknown
  misc_feature (1)..( 6): Matrix.003 file - promoters60/4769052
aaaaaa

SEQ ID NO: 59233 - DNA, 7 bp, Unknown
  misc_feature (1)..( 7): Matrix.003 file - promoters60/4769052
attaaca

SEQ ID NO: 59234 - DNA, 6 bp, Unknown
  misc_feature (1)..( 6): Matrix.003 file - promoters60/4769052
gaaatt

SEQ ID NO: 59235 - DNA, 7 bp, Unknown
  misc_feature (1)..( 7): Matrix.003 file - promoters60/4769052
atctcag

SEQ ID NO: 59236 - DNA, 7 bp, Unknown
  misc_feature (1)..( 7): Matrix.003 file - promoters60/4769052
caaaaca

SEQ ID NO: 59237 - DNA, 7 bp, Unknown
  misc_feature (1)..( 7): Matrix.003 file - promoters60/4769052
aacactc

SEQ ID NO: 59238 - DNA, 7 bp, Unknown
  misc_feature (1)..( 7): Matrix.003 file - promoters60/4769052
tatctcg

SEQ ID NO: 59239 - DNA, 6 bp, Unknown
  misc_feature (1)..( 6): Matrix.003 file - promoters60/4769052
catcca

SEQ ID NO: 59240 - DNA, 6 bp, Unknown
  misc_feature (1)..( 6): Matrix.003 file - promoters60/4769052
aatcca

SEQ ID NO: 59241 - DNA, 7 bp, Unknown
  misc_feature (1)..( 7): Matrix.003 file - promoters60/4769052
tattatc

SEQ ID NO: 59242 - DNA, 7 bp, Unknown
  misc_feature (1)..( 7): Matrix.003 file - promoters60/4769055
aatagga

SEQ ID NO: 59243 - DNA, 9 bp, Unknown
  misc_feature (1)..( 9): Matrix.003 file - promoters60/4769055
tagaaatac

SEQ ID NO: 59244 - DNA, 9 bp, Unknown
  misc_feature (1)..( 9): Matrix.003 file - promoters60/4769055
gaaagttaa

SEQ ID NO: 59245 - DNA, 6 bp, Unknown
  misc_feature (1)..( 6): Matrix.003 file - promoters60/4769055
aatttt

SEQ ID NO: 59246 - DNA, 8 bp, Unknown
  misc_feature (1)..( 8): Matrix.003 file - promoters60/4769055
tttaaatt

SEQ ID NO: 59247 - DNA, 6 bp, Unknown
  misc_feature (1)..( 6): Matrix.003 file - promoters60/4769055
cctaaa

SEQ ID NO: 59248 - DNA, 11 bp, Unknown
  misc_feature (1)..( 11): Matrix.003 file - promoters60/4769055
taaaatattga

SEQ ID NO: 59249 - DNA, 12 bp, Unknown
  misc_feature (1)..( 12): Matrix.003 file - promoters60/4769055
gaaaagcaaaac

SEQ ID NO: 59250 - DNA, 9 bp, Unknown
  misc_feature (1)..( 9): Matrix.003 file - promoters60/4769055
ttaaatttt

SEQ ID NO: 59251 - DNA, 7 bp, Unknown
  misc_feature (1)..( 7): Matrix.003 file - promoters60/4769055
caagtgt

SEQ ID NO: 59252 - DNA, 7 bp, Unknown
  misc_feature (1)..( 7): Matrix.003 file - promoters60/4769055
ctgattt

SEQ ID NO: 59253 - DNA, 6 bp, Unknown
  misc_feature (1)..( 6): Matrix.003 file - promoters60/4769055
tcttcc

SEQ ID NO: 59254 - DNA, 8 bp, Unknown
  misc_feature (1)..( 8): Matrix.003 file - promoters60/4769055
ctctctcg

SEQ ID NO: 59255 - DNA, 6 bp, Unknown
  misc_feature (1)..( 6): Matrix.003 file - promoters60/4769059
aaagaa

SEQ ID NO: 59256 - DNA, 7 bp, Unknown
  misc_feature (1)..( 7): Matrix.003 file - promoters60/4769059
tccacca

SEQ ID NO: 59257 - DNA, 7 bp, Unknown
  misc_feature (1)..( 7): Matrix.003 file - promoters60/4769059
taccgca

SEQ ID NO: 59258 - DNA, 6 bp, Unknown
  misc_feature (1)..( 6): Matrix.003 file - promoters60/4769059
tgacgg

SEQ ID NO: 59259 - DNA, 8 bp, Unknown
  misc_feature (1)..( 8): Matrix.003 file - promoters60/4769059
aagcgaat

SEQ ID NO: 59260 - DNA, 12 bp, Unknown
  misc_feature (1)..( 12): Matrix.003 file - promoters60/4769059
ttatatctttat

SEQ ID NO: 59261 - DNA, 9 bp, Unknown
  misc_feature (1)..( 9): Matrix.003 file - promoters60/4769059
gtgttcatt

SEQ ID NO: 59262 - DNA, 8 bp, Unknown
  misc_feature (1)..( 8): Matrix.003 file - promoters60/4769059
tggtcagt

SEQ ID NO: 59263 - DNA, 6 bp, Unknown
  misc_feature (1)..( 6): Matrix.003 file - promoters60/4769059
gttctc

SEQ ID NO: 59264 - DNA, 6 bp, Unknown
  misc_feature (1)..( 6): Matrix.003 file - promoters60/4769059
cctttt

SEQ ID NO: 59265 - DNA, 6 bp, Unknown
  misc_feature (1)..( 6): Matrix.003 file - promoters60/4769059
tcttta

SEQ ID NO: 59266 - DNA, 7 bp, Unknown
  misc_feature (1)..( 7): Matrix.003 file - promoters60/4769059
tggagtc

SEQ ID NO: 59267 - DNA, 7 bp, Unknown
  misc_feature (1)..( 7): Matrix.003 file - promoters60/4769059
tatcatt

SEQ ID NO: 59268 - DNA, 7 bp, Unknown
  misc_feature (1)..( 7): Matrix.003 file - promoters60/4769059
gaatttg

SEQ ID NO: 59269 - DNA, 7 bp, Unknown
  misc_feature (1)..( 7): Matrix.003 file - promoters60/4769059
tttgatt

SEQ ID NO: 59270 - DNA, 6 bp, Unknown
  misc_feature (1)..( 6): Matrix.003 file - promoters60/4769059
catttg

SEQ ID NO: 59271 - DNA, 6 bp, Unknown
  misc_feature (1)..( 6): Matrix.003 file - promoters60/4769075
ataaat

SEQ ID NO: 59272 - DNA, 6 bp, Unknown
  misc_feature (1)..( 6): Matrix.003 file - promoters60/4769075
aaacca

SEQ ID NO: 59273 - DNA, 11 bp, Unknown
  misc_feature (1)..( 11): Matrix.003 file - promoters60/4769075
acactatactg

SEQ ID NO: 59274 - DNA, 6 bp, Unknown
  misc_feature (1)..( 6): Matrix.003 file - promoters60/4769075
tttgat

SEQ ID NO: 59275 - DNA, 7 bp, Unknown
  misc_feature (1)..( 7): Matrix.003 file - promoters60/4769075
atgcgct

SEQ ID NO: 59276 - DNA, 6 bp, Unknown
  misc_feature (1)..( 6): Matrix.003 file - promoters60/4769075
caatta

SEQ ID NO: 59277 - DNA, 6 bp, Unknown
  misc_feature (1)..( 6): Matrix.003 file - promoters60/4769075
caattt

SEQ ID NO: 59278 - DNA, 7 bp, Unknown
  misc_feature (1)..( 7): Matrix.003 file - promoters60/4769075
tttcact

SEQ ID NO: 59279 - DNA, 6 bp, Unknown
  misc_feature (1)..( 6): Matrix.003 file - promoters60/4769075
tctaaa

SEQ ID NO: 59280 - DNA, 8 bp, Unknown
  misc_feature (1)..( 8): Matrix.003 file - promoters60/4769075
attttcta

SEQ ID NO: 59281 - DNA, 9 bp, Unknown
  misc_feature (1)..( 9): Matrix.003 file - promoters60/4769075
taaaagccg

SEQ ID NO: 59282 - DNA, 9 bp, Unknown
  misc_feature (1)..( 9): Matrix.003 file - promoters60/4769075
gaaggattt

SEQ ID NO: 59283 - DNA, 6 bp, Unknown
  misc_feature (1)..( 6): Matrix.003 file - promoters60/4769075
aaacca

SEQ ID NO: 59284 - DNA, 7 bp, Unknown
  misc_feature (1)..( 7): Matrix.003 file - promoters60/4769075
aaagaaa

SEQ ID NO: 59285 - DNA, 6 bp, Unknown
  misc_feature (1)..( 6): Matrix.003 file - promoters60/4769075
tgattt

SEQ ID NO: 59286 - DNA, 7 bp, Unknown
  misc_feature (1)..( 7): Matrix.003 file - promoters60/4769075
tgaccaa

SEQ ID NO: 59287 - DNA, 7 bp, Unknown
  misc_feature (1)..( 7): Matrix.003 file - promoters60/4769083
gagccac

SEQ ID NO: 59288 - DNA, 9 bp, Unknown
  misc_feature (1)..( 9): Matrix.003 file - promoters60/4769083
ttaatttat

SEQ ID NO: 59289 - DNA, 7 bp, Unknown
  misc_feature (1)..( 7): Matrix.003 file - promoters60/4769083
aatttat

SEQ ID NO: 59290 - DNA, 6 bp, Unknown
  misc_feature (1)..( 6): Matrix.003 file - promoters60/4769083
aagctc

SEQ ID NO: 59291 - DNA, 7 bp, Unknown
  misc_feature (1)..( 7): Matrix.003 file - promoters60/4769083
ctcacat

SEQ ID NO: 59292 - DNA, 7 bp, Unknown
  misc_feature (1)..( 7): Matrix.003 file - promoters60/4769083
taaaata

SEQ ID NO: 59293 - DNA, 12 bp, Unknown
  misc_feature (1)..( 12): Matrix.003 file - promoters60/4769083
gttaggttgata

SEQ ID NO: 59294 - DNA, 9 bp, Unknown
  misc_feature (1)..( 9): Matrix.003 file - promoters60/4769083
taaagaaaa

SEQ ID NO: 59295 - DNA, 8 bp, Unknown
  misc_feature (1)..( 8): Matrix.003 file - promoters60/4769083
aaaataaa

SEQ ID NO: 59296 - DNA, 6 bp, Unknown
  misc_feature (1)..( 6): Matrix.003 file - promoters60/4769083
aaaata

SEQ ID NO: 59297 - DNA, 9 bp, Unknown
  misc_feature (1)..( 9): Matrix.003 file - promoters60/4769083
ttctcaacc

SEQ ID NO: 59298 - DNA, 8 bp, Unknown
  misc_feature (1)..( 8): Matrix.003 file - promoters60/4769083
tatatata

SEQ ID NO: 59299 - DNA, 7 bp, Unknown
  misc_feature (1)..( 7): Matrix.003 file - promoters60/4769083
ccaaaaa

SEQ ID NO: 59300 - DNA, 11 bp, Unknown
  misc_feature (1)..( 11): Matrix.003 file - promoters60/4769083
attaaaagcaa

SEQ ID NO: 59301 - DNA, 8 bp, Unknown
  misc_feature (1)..( 8): Matrix.003 file - promoters60/4769083
ctaaaaat

SEQ ID NO: 59302 - DNA, 6 bp, Unknown
  misc_feature (1)..( 6): Matrix.003 file - promoters60/4769083
aaatgt

SEQ ID NO: 59303 - DNA, 9 bp, Unknown
  misc_feature (1)..( 9): Matrix.003 file - promoters60/4769083
aaaaacaaa

SEQ ID NO: 59304 - DNA, 7 bp, Unknown
  misc_feature (1)..( 7): Matrix.003 file - promoters60/4769083
atcacaa

SEQ ID NO: 59305 - DNA, 8 bp, Unknown
  misc_feature (1)..( 8): Matrix.003 file - promoters60/4769083
aagaatcc

SEQ ID NO: 59306 - DNA, 8 bp, Unknown
  misc_feature (1)..( 8): Matrix.003 file - promoters60/4769083
tataaaac

SEQ ID NO: 59307 - DNA, 6 bp, Unknown
  misc_feature (1)..( 6): Matrix.003 file - promoters60/4769083
atgttt

SEQ ID NO: 59308 - DNA, 7 bp, Unknown
  misc_feature (1)..( 7): Matrix.003 file - promoters60/4769083
taaaaat

SEQ ID NO: 59309 - DNA, 7 bp, Unknown
  misc_feature (1)..( 7): Matrix.003 file - promoters60/4769083
atcatca

SEQ ID NO: 59310 - DNA, 6 bp, Unknown
  misc_feature (1)..( 6): Matrix.003 file - promoters60/4769107
ttgttt

SEQ ID NO: 59311 - DNA, 6 bp, Unknown
  misc_feature (1)..( 6): Matrix.003 file - promoters60/4769107
atatat

SEQ ID NO: 59312 - DNA, 6 bp, Unknown
  misc_feature (1)..( 6): Matrix.003 file - promoters60/4769107
attttt

SEQ ID NO: 59313 - DNA, 8 bp, Unknown
  misc_feature (1)..( 8): Matrix.003 file - promoters60/4769107
aaacaaaa

SEQ ID NO: 59314 - DNA, 7 bp, Unknown
  misc_feature (1)..( 7): Matrix.003 file - promoters60/4769107
aataaac

SEQ ID NO: 59315 - DNA, 6 bp, Unknown
  misc_feature (1)..( 6): Matrix.003 file - promoters60/4769107
tttatt

SEQ ID NO: 59316 - DNA, 6 bp, Unknown
  misc_feature (1)..( 6): Matrix.003 file - promoters60/4769107
attaaa

SEQ ID NO: 59317 - DNA, 6 bp, Unknown
  misc_feature (1)..( 6): Matrix.003 file - promoters60/4769107
attaca

SEQ ID NO: 59318 - DNA, 6 bp, Unknown
  misc_feature (1)..( 6): Matrix.003 file - promoters60/4769107
tatatt

SEQ ID NO: 59319 - DNA, 12 bp, Unknown
  misc_feature (1)..( 12): Matrix.003 file - promoters60/4769107
tatatataatgc

SEQ ID NO: 59320 - DNA, 9 bp, Unknown
  misc_feature (1)..( 9): Matrix.003 file - promoters60/4769107
tttttatat

SEQ ID NO: 59321 - DNA, 7 bp, Unknown
  misc_feature (1)..( 7): Matrix.003 file - promoters60/4769107
aacatta

SEQ ID NO: 59322 - DNA, 10 bp, Unknown
  misc_feature (1)..( 10): Matrix.003 file - promoters60/4769107
aaaaacaaat

SEQ ID NO: 59323 - DNA, 8 bp, Unknown
  misc_feature (1)..( 8): Matrix.003 file - promoters60/4769107
aaaaaaac

SEQ ID NO: 59324 - DNA, 7 bp, Unknown
  misc_feature (1)..( 7): Matrix.003 file - promoters60/4769107
accacag

SEQ ID NO: 59325 - DNA, 8 bp, Unknown
  misc_feature (1)..( 8): Matrix.003 file - promoters60/4769107
aaaaaaaa

SEQ ID NO: 59326 - DNA, 6 bp, Unknown
  misc_feature (1)..( 6): Matrix.003 file - promoters60/4769107
aaaaaa

SEQ ID NO: 59327 - DNA, 7 bp, Unknown
  misc_feature (1)..( 7): Matrix.003 file - promoters60/4769107
aaaaaag

SEQ ID NO: 59328 - DNA, 7 bp, Unknown
  misc_feature (1)..( 7): Matrix.003 file - promoters60/4769107
ttctttt

SEQ ID NO: 59329 - DNA, 6 bp, Unknown
  misc_feature (1)..( 6): Matrix.003 file - promoters60/4769107
ataaag

SEQ ID NO: 59330 - DNA, 8 bp, Unknown
  misc_feature (1)..( 8): Matrix.003 file - promoters60/4769107
cttcgcaa

SEQ ID NO: 59331 - DNA, 8 bp, Unknown
  misc_feature (1)..( 8): Matrix.003 file - promoters60/4769107
tttaaaaa

SEQ ID NO: 59332 - DNA, 6 bp, Unknown
  misc_feature (1)..( 6): Matrix.003 file - promoters60/4769107
tcattt

SEQ ID NO: 59333 - DNA, 8 bp, Unknown
  misc_feature (1)..( 8): Matrix.003 file - promoters60/4769107
ttgtttca

SEQ ID NO: 59334 - DNA, 8 bp, Unknown
  misc_feature (1)..( 8): Matrix.003 file - promoters60/4769107
tctatata

SEQ ID NO: 59335 - DNA, 6 bp, Unknown
  misc_feature (1)..( 6): Matrix.003 file - promoters60/4769107
aagata

SEQ ID NO: 59336 - DNA, 11 bp, Unknown
  misc_feature (1)..( 11): Matrix.003 file - promoters60/4769107
atccaccaccg

SEQ ID NO: 59337 - DNA, 13 bp, Unknown
  misc_feature (1)..( 13): Matrix.003 file - promoters60/4769137
aacgtcgtctaat

SEQ ID NO: 59338 - DNA, 8 bp, Unknown
  misc_feature (1)..( 8): Matrix.003 file - promoters60/4769137
catataaa

SEQ ID NO: 59339 - DNA, 8 bp, Unknown
  misc_feature (1)..( 8): Matrix.003 file - promoters60/4769141
atttaaat

SEQ ID NO: 59340 - DNA, 9 bp, Unknown
  misc_feature (1)..( 9): Matrix.003 file - promoters60/4769141
aaaaactaa

SEQ ID NO: 59341 - DNA, 11 bp, Unknown
  misc_feature (1)..( 11): Matrix.003 file - promoters60/4769141
aaaataattat

SEQ ID NO: 59342 - DNA, 8 bp, Unknown
  misc_feature (1)..( 8): Matrix.003 file - promoters60/4769141
atttctaa

SEQ ID NO: 59343 - DNA, 11 bp, Unknown
  misc_feature (1)..( 11): Matrix.003 file - promoters60/4769141
aagaaaaaagt

SEQ ID NO: 59344 - DNA, 11 bp, Unknown
  misc_feature (1)..( 11): Matrix.003 file - promoters60/4769141
tatataaaagc

SEQ ID NO: 59345 - DNA, 10 bp, Unknown
  misc_feature (1)..( 10): Matrix.003 file - promoters60/4769141
ttaataaaac

SEQ ID NO: 59346 - DNA, 8 bp, Unknown
  misc_feature (1)..( 8): Matrix.003 file - promoters60/4769153
aaaaataa

SEQ ID NO: 59347 - DNA, 11 bp, Unknown
  misc_feature (1)..( 11): Matrix.003 file - promoters60/4769153
aacaaaaacaa

SEQ ID NO: 59348 - DNA, 7 bp, Unknown
  misc_feature (1)..( 7): Matrix.003 file - promoters60/4769153
aaacata

SEQ ID NO: 59349 - DNA, 12 bp, Unknown
  misc_feature (1)..( 12): Matrix.003 file - promoters60/4769153
atattaaaaaaa

SEQ ID NO: 59350 - DNA, 11 bp, Unknown
  misc_feature (1)..( 11): Matrix.003 file - promoters60/4769153
atattaaaaaa

SEQ ID NO: 59351 - DNA, 7 bp, Unknown
  misc_feature (1)..( 7): Matrix.003 file - promoters60/4769169
tccaaaa

SEQ ID NO: 59352 - DNA, 9 bp, Unknown
  misc_feature (1)..( 9): Matrix.003 file - promoters60/4769169
aaaaacaaa

SEQ ID NO: 59353 - DNA, 7 bp, Unknown
  misc_feature (1)..( 7): Matrix.003 file - promoters60/4769169
cccacga

SEQ ID NO: 59354 - DNA, 8 bp, Unknown
  misc_feature (1)..( 8): Matrix.003 file - promoters60/4769169
aaattata

SEQ ID NO: 59355 - DNA, 8 bp, Unknown
  misc_feature (1)..( 8): Matrix.003 file - promoters60/4769169
aaaaataa

SEQ ID NO: 59356 - DNA, 10 bp, Unknown
  misc_feature (1)..( 10): Matrix.003 file - promoters60/4769169
aaatatttaa

SEQ ID NO: 59357 - DNA, 9 bp, Unknown
  misc_feature (1)..( 9): Matrix.003 file - promoters60/4769169
ttaaacata

SEQ ID NO: 59358 - DNA, 9 bp, Unknown
  misc_feature (1)..( 9): Matrix.003 file - promoters60/4769169
attttgtaa

SEQ ID NO: 59359 - DNA, 7 bp, Unknown
  misc_feature (1)..( 7): Matrix.003 file - promoters60/4769169
aaaatta

SEQ ID NO: 59360 - DNA, 7 bp, Unknown
  misc_feature (1)..( 7): Matrix.003 file - promoters60/4769169
gtaaaat

SEQ ID NO: 59361 - DNA, 9 bp, Unknown
  misc_feature (1)..( 9): Matrix.003 file - promoters60/4769169
ataatattt

SEQ ID NO: 59362 - DNA, 6 bp, Unknown
  misc_feature (1)..( 6): Matrix.003 file - promoters60/4769169
ttcaaa

SEQ ID NO: 59363 - DNA, 9 bp, Unknown
  misc_feature (1)..( 9): Matrix.003 file - promoters60/4769169
tttttttta

SEQ ID NO: 59364 - DNA, 10 bp, Unknown
  misc_feature (1)..( 10): Matrix.003 file - promoters60/4769169
attaatgttc

SEQ ID NO: 59365 - DNA, 9 bp, Unknown
  misc_feature (1)..( 9): Matrix.003 file - promoters60/4769169
ttaaaaata

SEQ ID NO: 59366 - DNA, 9 bp, Unknown
  misc_feature (1)..( 9): Matrix.003 file - promoters60/4769169
ttaaaaata

SEQ ID NO: 59367 - DNA, 9 bp, Unknown
  misc_feature (1)..( 9): Matrix.003 file - promoters60/4769180
acattaata

SEQ ID NO: 59368 - DNA, 8 bp, Unknown
  misc_feature (1)..( 8): Matrix.003 file - promoters60/4769180
aaaacatt

SEQ ID NO: 59369 - DNA, 9 bp, Unknown
  misc_feature (1)..( 9): Matrix.003 file - promoters60/4769180
agatttatc

SEQ ID NO: 59370 - DNA, 9 bp, Unknown
  misc_feature (1)..( 9): Matrix.003 file - promoters60/4769180
atttatctt

SEQ ID NO: 59371 - DNA, 11 bp, Unknown
  misc_feature (1)..( 11): Matrix.003 file - promoters60/4769180
aaataaacaaa

SEQ ID NO: 59372 - DNA, 10 bp, Unknown
  misc_feature (1)..( 10): Matrix.003 file - promoters60/4769180
aaataaacaa

SEQ ID NO: 59373 - DNA, 8 bp, Unknown
  misc_feature (1)..( 8): Matrix.003 file - promoters60/4769180
tcataaaa

SEQ ID NO: 59374 - DNA, 9 bp, Unknown
  misc_feature (1)..( 9): Matrix.003 file - promoters60/4769180
ataacaaat

SEQ ID NO: 59375 - DNA, 8 bp, Unknown
  misc_feature (1)..( 8): Matrix.003 file - promoters60/4769180
aaaaaaaa

SEQ ID NO: 59376 - DNA, 11 bp, Unknown
  misc_feature (1)..( 11): Matrix.003 file - promoters60/4769180
gaataacaaaa

SEQ ID NO: 59377 - DNA, 12 bp, Unknown
  misc_feature (1)..( 12): Matrix.003 file - promoters60/4769180
gaataaccaaaa

SEQ ID NO: 59378 - DNA, 9 bp, Unknown
  misc_feature (1)..( 9): Matrix.003 file - promoters60/4769180
aaattaatc

SEQ ID NO: 59379 - DNA, 16 bp, Unknown
  misc_feature (1)..( 16): Matrix.003 file - promoters60/4769184
tgctaaaagtacaagt

SEQ ID NO: 59380 - DNA, 9 bp, Unknown
  misc_feature (1)..( 9): Matrix.003 file - promoters60/4769184
tctaaaatt

SEQ ID NO: 59381 - DNA, 15 bp, Unknown
  misc_feature (1)..( 15): Matrix.003 file - promoters60/4769184
taaaagtacaattta

SEQ ID NO: 59382 - DNA, 9 bp, Unknown
  misc_feature (1)..( 9): Matrix.003 file - promoters60/4769184
aaaaattct

SEQ ID NO: 59383 - DNA, 9 bp, Unknown
  misc_feature (1)..( 9): Matrix.003 file - promoters60/4769184
atttaatta

SEQ ID NO: 59384 - DNA, 8 bp, Unknown
  misc_feature (1)..( 8): Matrix.003 file - promoters60/4769184
aattatat

SEQ ID NO: 59385 - DNA, 11 bp, Unknown
  misc_feature (1)..( 11): Matrix.003 file - promoters60/4769184
ttcctagatac

SEQ ID NO: 59386 - DNA, 10 bp, Unknown
  misc_feature (1)..( 10): Matrix.003 file - promoters60/4769186
cgaaaagaaa

SEQ ID NO: 59387 - DNA, 7 bp, Unknown
  misc_feature (1)..( 7): Matrix.003 file - promoters60/4769186
aaaatat

SEQ ID NO: 59388 - DNA, 6 bp, Unknown
  misc_feature (1)..( 6): Matrix.003 file - promoters60/4769186
aatatt

SEQ ID NO: 59389 - DNA, 8 bp, Unknown
  misc_feature (1)..( 8): Matrix.003 file - promoters60/4769186
atgaagaa

SEQ ID NO: 59390 - DNA, 7 bp, Unknown
  misc_feature (1)..( 7): Matrix.003 file - promoters60/4769186
tataaac

SEQ ID NO: 59391 - DNA, 8 bp, Unknown
  misc_feature (1)..( 8): Matrix.003 file - promoters60/4769186
ggttgtgt

SEQ ID NO: 59392 - DNA, 10 bp, Unknown
  misc_feature (1)..( 10): Matrix.003 file - promoters60/4769186
gaacccacta

SEQ ID NO: 59393 - DNA, 6 bp, Unknown
  misc_feature (1)..( 6): Matrix.003 file - promoters60/4769186
tttatt

SEQ ID NO: 59394 - DNA, 6 bp, Unknown
  misc_feature (1)..( 6): Matrix.003 file - promoters60/4769186
agtaaa

SEQ ID NO: 59395 - DNA, 7 bp, Unknown
  misc_feature (1)..( 7): Matrix.003 file - promoters60/4769186
aatcggg

SEQ ID NO: 59396 - DNA, 8 bp, Unknown
  misc_feature (1)..( 8): Matrix.003 file - promoters60/4769186
gaaacaaa

SEQ ID NO: 59397 - DNA, 7 bp, Unknown
  misc_feature (1)..( 7): Matrix.003 file - promoters60/4769186
cccacta

SEQ ID NO: 59398 - DNA, 9 bp, Unknown
  misc_feature (1)..( 9): Matrix.003 file - promoters60/4769186
aaagaaaag

SEQ ID NO: 59399 - DNA, 7 bp, Unknown
  misc_feature (1)..( 7): Matrix.003 file - promoters60/4769186
gtatata

SEQ ID NO: 59400 - DNA, 7 bp, Unknown
  misc_feature (1)..( 7): Matrix.003 file - promoters60/4769229
tacgaaa

SEQ ID NO: 59401 - DNA, 9 bp, Unknown
  misc_feature (1)..( 9): Matrix.003 file - promoters60/4769229
gttgaaaaa

SEQ ID NO: 59402 - DNA, 6 bp, Unknown
  misc_feature (1)..( 6): Matrix.003 file - promoters60/4769229
ctatta

SEQ ID NO: 59403 - DNA, 7 bp, Unknown
  misc_feature (1)..( 7): Matrix.003 file - promoters60/4769229
tttttga

SEQ ID NO: 59404 - DNA, 9 bp, Unknown
  misc_feature (1)..( 9): Matrix.003 file - promoters60/4769229
aagaagaaa

SEQ ID NO: 59405 - DNA, 6 bp, Unknown
  misc_feature (1)..( 6): Matrix.003 file - promoters60/4769229
aattta

SEQ ID NO: 59406 - DNA, 9 bp, Unknown
  misc_feature (1)..( 9): Matrix.003 file - promoters60/4769229
ttataataa

SEQ ID NO: 59407 - DNA, 7 bp, Unknown
  misc_feature (1)..( 7): Matrix.003 file - promoters60/4769229
agagttt

SEQ ID NO: 59408 - DNA, 9 bp, Unknown
  misc_feature (1)..( 9): Matrix.003 file - promoters60/4769229
gactctctt

SEQ ID NO: 59409 - DNA, 7 bp, Unknown
  misc_feature (1)..( 7): Matrix.003 file - promoters60/4769229
aatacat

SEQ ID NO: 59410 - DNA, 7 bp, Unknown
  misc_feature (1)..( 7): Matrix.003 file - promoters60/4769229
aaggatt

SEQ ID NO: 59411 - DNA, 10 bp, Unknown
  misc_feature (1)..( 10): Matrix.003 file - promoters60/4769229
tatcttaccg

SEQ ID NO: 59412 - DNA, 8 bp, Unknown
  misc_feature (1)..( 8): Matrix.003 file - promoters60/4769229
aaaatccc

SEQ ID NO: 59413 - DNA, 8 bp, Unknown
  misc_feature (1)..( 8): Matrix.003 file - promoters60/4769257
aatacaaa

SEQ ID NO: 59414 - DNA, 10 bp, Unknown
  misc_feature (1)..( 10): Matrix.003 file - promoters60/4769257
taaaatctat

SEQ ID NO: 59415 - DNA, 9 bp, Unknown
  misc_feature (1)..( 9): Matrix.003 file - promoters60/4769257
ataaaaaaa

SEQ ID NO: 59416 - DNA, 12 bp, Unknown
  misc_feature (1)..( 12): Matrix.003 file - promoters60/4769257
taaaaaaaacga

SEQ ID NO: 59417 - DNA, 6 bp, Unknown
  misc_feature (1)..( 6): Matrix.003 file - promoters60/4769260
gattca

SEQ ID NO: 59418 - DNA, 7 bp, Unknown
  misc_feature (1)..( 7): Matrix.003 file - promoters60/4769260
tatgttc

SEQ ID NO: 59419 - DNA, 9 bp, Unknown
  misc_feature (1)..( 9): Matrix.003 file - promoters60/4769260
caaaaacaa

SEQ ID NO: 59420 - DNA, 7 bp, Unknown
  misc_feature (1)..( 7): Matrix.003 file - promoters60/4769260
taaaaag

SEQ ID NO: 59421 - DNA, 6 bp, Unknown
  misc_feature (1)..( 6): Matrix.003 file - promoters60/4769260
ttgatt

SEQ ID NO: 59422 - DNA, 7 bp, Unknown
  misc_feature (1)..( 7): Matrix.003 file - promoters60/4769260
caaaatt

SEQ ID NO: 59423 - DNA, 7 bp, Unknown
  misc_feature (1)..( 7): Matrix.003 file - promoters60/4769260
ataaaaa

SEQ ID NO: 59424 - DNA, 6 bp, Unknown
  misc_feature (1)..( 6): Matrix.003 file - promoters60/4769260
aaaaaa

SEQ ID NO: 59425 - DNA, 11 bp, Unknown
  misc_feature (1)..( 11): Matrix.003 file - promoters60/4769260
atgatttatgt

SEQ ID NO: 59426 - DNA, 6 bp, Unknown
  misc_feature (1)..( 6): Matrix.003 file - promoters60/4769260
atatgt

SEQ ID NO: 59427 - DNA, 7 bp, Unknown
  misc_feature (1)..( 7): Matrix.003 file - promoters60/4769260
ctagact

SEQ ID NO: 59428 - DNA, 10 bp, Unknown
  misc_feature (1)..( 10): Matrix.003 file - promoters60/4769260
tgatttgttt

SEQ ID NO: 59429 - DNA, 7 bp, Unknown
  misc_feature (1)..( 7): Matrix.003 file - promoters60/4769260
ttggatc

SEQ ID NO: 59430 - DNA, 7 bp, Unknown
  misc_feature (1)..( 7): Matrix.003 file - promoters60/4769260
tacttga

SEQ ID NO: 59431 - DNA, 12 bp, Unknown
  misc_feature (1)..( 12): Matrix.003 file - promoters60/4769260
aatgggcctaag

SEQ ID NO: 59432 - DNA, 6 bp, Unknown
  misc_feature (1)..( 6): Matrix.003 file - promoters60/4769260
ctaaaa

SEQ ID NO: 59433 - DNA, 6 bp, Unknown
  misc_feature (1)..( 6): Matrix.003 file - promoters60/4769276
gaacat

SEQ ID NO: 59434 - DNA, 6 bp, Unknown
  misc_feature (1)..( 6): Matrix.003 file - promoters60/4769298
cactgt

SEQ ID NO: 59435 - DNA, 8 bp, Unknown
  misc_feature (1)..( 8): Matrix.003 file - promoters60/4769298
ataagtcg

SEQ ID NO: 59436 - DNA, 7 bp, Unknown
  misc_feature (1)..( 7): Matrix.003 file - promoters60/4769298
ctcacta

SEQ ID NO: 59437 - DNA, 11 bp, Unknown
  misc_feature (1)..( 11): Matrix.003 file - promoters60/4769298
caataataata

SEQ ID NO: 59438 - DNA, 8 bp, Unknown
  misc_feature (1)..( 8): Matrix.003 file - promoters60/4769298
cgtcaggg

SEQ ID NO: 59439 - DNA, 8 bp, Unknown
  misc_feature (1)..( 8): Matrix.003 file - promoters60/4769298
cattcact

SEQ ID NO: 59440 - DNA, 7 bp, Unknown
  misc_feature (1)..( 7): Matrix.003 file - promoters60/4769298
ttaagct

SEQ ID NO: 59441 - DNA, 6 bp, Unknown
  misc_feature (1)..( 6): Matrix.003 file - promoters60/4769298
catttc

SEQ ID NO: 59442 - DNA, 6 bp, Unknown
  misc_feature (1)..( 6): Matrix.003 file - promoters60/4769298
taaaca

SEQ ID NO: 59443 - DNA, 7 bp, Unknown
  misc_feature (1)..( 7): Matrix.003 file - promoters60/4769298
cattttt

SEQ ID NO: 59444 - DNA, 6 bp, Unknown
  misc_feature (1)..( 6): Matrix.003 file - promoters60/4769298
tcttat

SEQ ID NO: 59445 - DNA, 7 bp, Unknown
  misc_feature (1)..( 7): Matrix.003 file - promoters60/4769298
gatatta

SEQ ID NO: 59446 - DNA, 7 bp, Unknown
  misc_feature (1)..( 7): Matrix.003 file - promoters60/4769298
aaacaca

SEQ ID NO: 59447 - DNA, 7 bp, Unknown
  misc_feature (1)..( 7): Matrix.003 file - promoters60/4769298
aataaaa

SEQ ID NO: 59448 - DNA, 7 bp, Unknown
  misc_feature (1)..( 7): Matrix.003 file - promoters60/4769301
cttattt

SEQ ID NO: 59449 - DNA, 9 bp, Unknown
  misc_feature (1)..( 9): Matrix.003 file - promoters60/4769301
tttggtctt

SEQ ID NO: 59450 - DNA, 6 bp, Unknown
  misc_feature (1)..( 6): Matrix.003 file - promoters60/4769301
tttttt

SEQ ID NO: 59451 - DNA, 7 bp, Unknown
  misc_feature (1)..( 7): Matrix.003 file - promoters60/4769301
tgtgctc

SEQ ID NO: 59452 - DNA, 7 bp, Unknown
  misc_feature (1)..( 7): Matrix.003 file - promoters60/4769301
ataatca

SEQ ID NO: 59453 - DNA, 7 bp, Unknown
  misc_feature (1)..( 7): Matrix.003 file - promoters60/4769301
tgtacat

SEQ ID NO: 59454 - DNA, 8 bp, Unknown
  misc_feature (1)..( 8): Matrix.003 file - promoters60/4769301
ttataata

SEQ ID NO: 59455 - DNA, 6 bp, Unknown
  misc_feature (1)..( 6): Matrix.003 file - promoters60/4769301
attttt

SEQ ID NO: 59456 - DNA, 6 bp, Unknown
  misc_feature (1)..( 6): Matrix.003 file - promoters60/4769301
aaaaaa

SEQ ID NO: 59457 - DNA, 14 bp, Unknown
  misc_feature (1)..( 14): Matrix.003 file - promoters60/4769301
agaaatacaatttt

SEQ ID NO: 59458 - DNA, 6 bp, Unknown
  misc_feature (1)..( 6): Matrix.003 file - promoters60/4769301
caaaaa

SEQ ID NO: 59459 - DNA, 8 bp, Unknown
  misc_feature (1)..( 8): Matrix.003 file - promoters60/4769301
ctaaaaaa

SEQ ID NO: 59460 - DNA, 7 bp, Unknown
  misc_feature (1)..( 7): Matrix.003 file - promoters60/4769301
tttttgg

SEQ ID NO: 59461 - DNA, 8 bp, Unknown
  misc_feature (1)..( 8): Matrix.003 file - promoters60/4769301
tttgcttt

SEQ ID NO: 59462 - DNA, 11 bp, Unknown
  misc_feature (1)..( 11): Matrix.003 file - promoters60/4769301
aaaagaagaaa

SEQ ID NO: 59463 - DNA, 10 bp, Unknown
  misc_feature (1)..( 10): Matrix.003 file - promoters60/4769301
tttcaaaaaa

SEQ ID NO: 59464 - DNA, 7 bp, Unknown
  misc_feature (1)..( 7): Matrix.003 file - promoters60/4769301
aaagaaa

SEQ ID NO: 59465 - DNA, 7 bp, Unknown
  misc_feature (1)..( 7): Matrix.003 file - promoters60/4769301
aaacaaa

SEQ ID NO: 59466 - DNA, 10 bp, Unknown
  misc_feature (1)..( 10): Matrix.003 file - promoters60/4769301
tatacatcaa

SEQ ID NO: 59467 - DNA, 6 bp, Unknown
  misc_feature (1)..( 6): Matrix.003 file - promoters60/4769301
ataaat

SEQ ID NO: 59468 - DNA, 7 bp, Unknown
  misc_feature (1)..( 7): Matrix.003 file - promoters60/4769301
tttatta

SEQ ID NO: 59469 - DNA, 6 bp, Unknown
  misc_feature (1)..( 6): Matrix.003 file - promoters60/4769301
ttacaa

SEQ ID NO: 59470 - DNA, 6 bp, Unknown
  misc_feature (1)..( 6): Matrix.003 file - promoters60/4769301
aactaa

SEQ ID NO: 59471 - DNA, 7 bp, Unknown
  misc_feature (1)..( 7): Matrix.003 file - promoters60/4769301
ttgtaca

SEQ ID NO: 59472 - DNA, 6 bp, Unknown
  misc_feature (1)..( 6): Matrix.003 file - promoters60/4769301
ataaat

SEQ ID NO: 59473 - DNA, 11 bp, Unknown
  misc_feature (1)..( 11): Matrix.003 file - promoters60/4769312
aaataaaattg

SEQ ID NO: 59474 - DNA, 11 bp, Unknown
  misc_feature (1)..( 11): Matrix.003 file - promoters60/4769312
aaaaaaagaat

SEQ ID NO: 59475 - DNA, 11 bp, Unknown
  misc_feature (1)..( 11): Matrix.003 file - promoters60/4769312
aaacaaagaaa

SEQ ID NO: 59476 - DNA, 7 bp, Unknown
  misc_feature (1)..( 7): Matrix.003 file - promoters60/4769312
aaattaa

SEQ ID NO: 59477 - DNA, 8 bp, Unknown
  misc_feature (1)..( 8): Matrix.003 file - promoters60/4769312
tgaacaaa

SEQ ID NO: 59478 - DNA, 11 bp, Unknown
  misc_feature (1)..( 11): Matrix.003 file - promoters60/4769312
caatcactctc

SEQ ID NO: 59479 - DNA, 10 bp, Unknown
  misc_feature (1)..( 10): Matrix.003 file - promoters60/4769312
tatataaaac

SEQ ID NO: 59480 - DNA, 9 bp, Unknown
  misc_feature (1)..( 9): Matrix.003 file - promoters60/4769312
ttgaccaaa

SEQ ID NO: 59481 - DNA, 6 bp, Unknown
  misc_feature (1)..( 6): Matrix.003 file - promoters60/4769320
aaatac

SEQ ID NO: 59482 - DNA, 6 bp, Unknown
  misc_feature (1)..( 6): Matrix.003 file - promoters60/4769320
cattaa

SEQ ID NO: 59483 - DNA, 6 bp, Unknown
  misc_feature (1)..( 6): Matrix.003 file - promoters60/4769320
caaaca

SEQ ID NO: 59484 - DNA, 6 bp, Unknown
  misc_feature (1)..( 6): Matrix.003 file - promoters60/4769320
aacaaa

SEQ ID NO: 59485 - DNA, 6 bp, Unknown
  misc_feature (1)..( 6): Matrix.003 file - promoters60/4769320
aaaata

SEQ ID NO: 59486 - DNA, 8 bp, Unknown
  misc_feature (1)..( 8): Matrix.003 file - promoters60/4769320
attacaca

SEQ ID NO: 59487 - DNA, 14 bp, Unknown
  misc_feature (1)..( 14): Matrix.003 file - promoters60/4769320
atttaatagtcatt

SEQ ID NO: 59488 - DNA, 7 bp, Unknown
  misc_feature (1)..( 7): Matrix.003 file - promoters60/4769320
aatatca

SEQ ID NO: 59489 - DNA, 8 bp, Unknown
  misc_feature (1)..( 8): Matrix.003 file - promoters60/4769320
tattgttt

SEQ ID NO: 59490 - DNA, 9 bp, Unknown
  misc_feature (1)..( 9): Matrix.003 file - promoters60/4769320
tatttgatt

SEQ ID NO: 59491 - DNA, 6 bp, Unknown
  misc_feature (1)..( 6): Matrix.003 file - promoters60/4769320
tgtaat

SEQ ID NO: 59492 - DNA, 7 bp, Unknown
  misc_feature (1)..( 7): Matrix.003 file - promoters60/4769320
aaaaata

SEQ ID NO: 59493 - DNA, 6 bp, Unknown
  misc_feature (1)..( 6): Matrix.003 file - promoters60/4769320
aaaata

SEQ ID NO: 59494 - DNA, 7 bp, Unknown
  misc_feature (1)..( 7): Matrix.003 file - promoters60/4769320
aatattg

SEQ ID NO: 59495 - DNA, 6 bp, Unknown
  misc_feature (1)..( 6): Matrix.003 file - promoters60/4769320
acactt

SEQ ID NO: 59496 - DNA, 6 bp, Unknown
  misc_feature (1)..( 6): Matrix.003 file - promoters60/4769320
ttgtat

SEQ ID NO: 59497 - DNA, 6 bp, Unknown
  misc_feature (1)..( 6): Matrix.003 file - promoters60/4769320
taactt

SEQ ID NO: 59498 - DNA, 6 bp, Unknown
  misc_feature (1)..( 6): Matrix.003 file - promoters60/4769320
attcat

SEQ ID NO: 59499 - DNA, 6 bp, Unknown
  misc_feature (1)..( 6): Matrix.003 file - promoters60/4769320
gtcatt

SEQ ID NO: 59500 - DNA, 12 bp, Unknown
  misc_feature (1)..( 12): Matrix.003 file - promoters60/4769328
atagttttcttc

SEQ ID NO: 59501 - DNA, 11 bp, Unknown
  misc_feature (1)..( 11): Matrix.003 file - promoters60/4769328
atcatatacat

SEQ ID NO: 59502 - DNA, 6 bp, Unknown
  misc_feature (1)..( 6): Matrix.003 file - promoters60/4769344
cttcgt

SEQ ID NO: 59503 - DNA, 7 bp, Unknown
  misc_feature (1)..( 7): Matrix.003 file - promoters60/4769344
tggattt

SEQ ID NO: 59504 - DNA, 6 bp, Unknown
  misc_feature (1)..( 6): Matrix.003 file - promoters60/4769344
ttgctt

SEQ ID NO: 59505 - DNA, 6 bp, Unknown
  misc_feature (1)..( 6): Matrix.003 file - promoters60/4769344
atgtgt

SEQ ID NO: 59506 - DNA, 6 bp, Unknown
  misc_feature (1)..( 6): Matrix.003 file - promoters60/4769344
gtactg

SEQ ID NO: 59507 - DNA, 7 bp, Unknown
  misc_feature (1)..( 7): Matrix.003 file - promoters60/4769344
catcgtt

SEQ ID NO: 59508 - DNA, 7 bp, Unknown
  misc_feature (1)..( 7): Matrix.003 file - promoters60/4769344
tcttaaa

SEQ ID NO: 59509 - DNA, 7 bp, Unknown
  misc_feature (1)..( 7): Matrix.003 file - promoters60/4769344
attattg

SEQ ID NO: 59510 - DNA, 7 bp, Unknown
  misc_feature (1)..( 7): Matrix.003 file - promoters60/4769344
gctgagt

SEQ ID NO: 59511 - DNA, 6 bp, Unknown
  misc_feature (1)..( 6): Matrix.003 file - promoters60/4769344
taaaac

SEQ ID NO: 59512 - DNA, 8 bp, Unknown
  misc_feature (1)..( 8): Matrix.003 file - promoters60/4769344
ttgaagaa

SEQ ID NO: 59513 - DNA, 7 bp, Unknown
  misc_feature (1)..( 7): Matrix.003 file - promoters60/4769344
aaacttt

SEQ ID NO: 59514 - DNA, 6 bp, Unknown
  misc_feature (1)..( 6): Matrix.003 file - promoters60/4769344
gtttga

SEQ ID NO: 59515 - DNA, 7 bp, Unknown
  misc_feature (1)..( 7): Matrix.003 file - promoters60/4769344
tatattt

SEQ ID NO: 59516 - DNA, 9 bp, Unknown
  misc_feature (1)..( 9): Matrix.003 file - promoters60/4769366
acaactaag

SEQ ID NO: 59517 - DNA, 6 bp, Unknown
  misc_feature (1)..( 6): Matrix.003 file - promoters60/4769366
ccaaac

SEQ ID NO: 59518 - DNA, 8 bp, Unknown
  misc_feature (1)..( 8): Matrix.003 file - promoters60/4769366
caccaacc

SEQ ID NO: 59519 - DNA, 6 bp, Unknown
  misc_feature (1)..( 6): Matrix.003 file - promoters60/4769366
ttctca

SEQ ID NO: 59520 - DNA, 16 bp, Unknown
  misc_feature (1)..( 16): Matrix.003 file - promoters60/4769366
cacaaatttaaccaaa

SEQ ID NO: 59521 - DNA, 13 bp, Unknown
  misc_feature (1)..( 13): Matrix.003 file - promoters60/4769366
ttcttattaaaac

SEQ ID NO: 59522 - DNA, 9 bp, Unknown
  misc_feature (1)..( 9): Matrix.003 file - promoters60/4769366
ataataaat

SEQ ID NO: 59523 - DNA, 12 bp, Unknown
  misc_feature (1)..( 12): Matrix.003 file - promoters60/4769366
actaaaaatttt

SEQ ID NO: 59524 - DNA, 7 bp, Unknown
  misc_feature (1)..( 7): Matrix.003 file - promoters60/4769366
aaaagtc

SEQ ID NO: 59525 - DNA, 6 bp, Unknown
  misc_feature (1)..( 6): Matrix.003 file - promoters60/4769366
atattt

SEQ ID NO: 59526 - DNA, 7 bp, Unknown
  misc_feature (1)..( 7): Matrix.003 file - promoters60/4769366
aaaatca

SEQ ID NO: 59527 - DNA, 6 bp, Unknown
  misc_feature (1)..( 6): Matrix.003 file - promoters60/4769366
ccttct

SEQ ID NO: 59528 - DNA, 10 bp, Unknown
  misc_feature (1)..( 10): Matrix.003 file - promoters60/4769366
tttagcaaaa

SEQ ID NO: 59529 - DNA, 6 bp, Unknown
  misc_feature (1)..( 6): Matrix.003 file - promoters60/4769366
acacaa

SEQ ID NO: 59530 - DNA, 7 bp, Unknown
  misc_feature (1)..( 7): Matrix.003 file - promoters60/4769366
gatattg

SEQ ID NO: 59531 - DNA, 7 bp, Unknown
  misc_feature (1)..( 7): Matrix.003 file - promoters60/4769366
aatccaa

SEQ ID NO: 59532 - DNA, 6 bp, Unknown
  misc_feature (1)..( 6): Matrix.003 file - promoters60/4769366
ccacta

SEQ ID NO: 59533 - DNA, 8 bp, Unknown
  misc_feature (1)..( 8): Matrix.003 file - promoters60/4769384
atttgatt

SEQ ID NO: 59534 - DNA, 7 bp, Unknown
  misc_feature (1)..( 7): Matrix.003 file - promoters60/4769384
ttctccc

SEQ ID NO: 59535 - DNA, 7 bp, Unknown
  misc_feature (1)..( 7): Matrix.003 file - promoters60/4769384
acaatct

SEQ ID NO: 59536 - DNA, 7 bp, Unknown
  misc_feature (1)..( 7): Matrix.003 file - promoters60/4769384
tctatat

SEQ ID NO: 59537 - DNA, 8 bp, Unknown
  misc_feature (1)..( 8): Matrix.003 file - promoters60/4769384
tatcgttg

SEQ ID NO: 59538 - DNA, 6 bp, Unknown
  misc_feature (1)..( 6): Matrix.003 file - promoters60/4769384
ctccaa

SEQ ID NO: 59539 - DNA, 6 bp, Unknown
  misc_feature (1)..( 6): Matrix.003 file - promoters60/4769384
ttaaca

SEQ ID NO: 59540 - DNA, 6 bp, Unknown
  misc_feature (1)..( 6): Matrix.003 file - promoters60/4769384
gtggac

SEQ ID NO: 59541 - DNA, 6 bp, Unknown
  misc_feature (1)..( 6): Matrix.003 file - promoters60/4769384
attata

SEQ ID NO: 59542 - DNA, 6 bp, Unknown
  misc_feature (1)..( 6): Matrix.003 file - promoters60/4769384
tatttt

SEQ ID NO: 59543 - DNA, 11 bp, Unknown
  misc_feature (1)..( 11): Matrix.003 file - promoters60/4769384
ccaaatattaa

SEQ ID NO: 59544 - DNA, 6 bp, Unknown
  misc_feature (1)..( 6): Matrix.003 file - promoters60/4769384
ataaaa

SEQ ID NO: 59545 - DNA, 8 bp, Unknown
  misc_feature (1)..( 8): Matrix.003 file - promoters60/4769384
aaaagaag

SEQ ID NO: 59546 - DNA, 7 bp, Unknown
  misc_feature (1)..( 7): Matrix.003 file - promoters60/4769384
aaaaaga

SEQ ID NO: 59547 - DNA, 7 bp, Unknown
  misc_feature (1)..( 7): Matrix.003 file - promoters60/4769384
aaaacaa

SEQ ID NO: 59548 - DNA, 6 bp, Unknown
  misc_feature (1)..( 6): Matrix.003 file - promoters60/4769384
ggtctc

SEQ ID NO: 59549 - DNA, 7 bp, Unknown
  misc_feature (1)..( 7): Matrix.003 file - promoters60/4769384
ctaattt

SEQ ID NO: 59550 - DNA, 6 bp, Unknown
  misc_feature (1)..( 6): Matrix.003 file - promoters60/4769384
tttgga

SEQ ID NO: 59551 - DNA, 6 bp, Unknown
  misc_feature (1)..( 6): Matrix.003 file - promoters60/4769384
gatttg

SEQ ID NO: 59552 - DNA, 8 bp, Unknown
  misc_feature (1)..( 8): Matrix.003 file - promoters60/4769384
aaaacttt

SEQ ID NO: 59553 - DNA, 6 bp, Unknown
  misc_feature (1)..( 6): Matrix.003 file - promoters60/4769388
ccatat

SEQ ID NO: 59554 - DNA, 6 bp, Unknown
  misc_feature (1)..( 6): Matrix.003 file - promoters60/4769388
tataaa

SEQ ID NO: 59555 - DNA, 6 bp, Unknown
  misc_feature (1)..( 6): Matrix.003 file - promoters60/4769388
gttttg

SEQ ID NO: 59556 - DNA, 8 bp, Unknown
  misc_feature (1)..( 8): Matrix.003 file - promoters60/4769388
ctttaaaa

SEQ ID NO: 59557 - DNA, 6 bp, Unknown
  misc_feature (1)..( 6): Matrix.003 file - promoters60/4769388
agaaat

SEQ ID NO: 59558 - DNA, 7 bp, Unknown
  misc_feature (1)..( 7): Matrix.003 file - promoters60/4769388
tcgtaag

SEQ ID NO: 59559 - DNA, 6 bp, Unknown
  misc_feature (1)..( 6): Matrix.003 file - promoters60/4769388
aagaaa

SEQ ID NO: 59560 - DNA, 6 bp, Unknown
  misc_feature (1)..( 6): Matrix.003 file - promoters60/4769388
gtcatc

SEQ ID NO: 59561 - DNA, 7 bp, Unknown
  misc_feature (1)..( 7): Matrix.003 file - promoters60/4769388
aaacaca

SEQ ID NO: 59562 - DNA, 7 bp, Unknown
  misc_feature (1)..( 7): Matrix.003 file - promoters60/4769388
ccattgt

SEQ ID NO: 59563 - DNA, 10 bp, Unknown
  misc_feature (1)..( 10): Matrix.003 file - promoters60/4769392
tgtaaaattg

SEQ ID NO: 59564 - DNA, 10 bp, Unknown
  misc_feature (1)..( 10): Matrix.003 file - promoters60/4769392
taagttttat

SEQ ID NO: 59565 - DNA, 10 bp, Unknown
  misc_feature (1)..( 10): Matrix.003 file - promoters60/4769392
cctttaatta

SEQ ID NO: 59566 - DNA, 10 bp, Unknown
  misc_feature (1)..( 10): Matrix.003 file - promoters60/4769392
taaatcttta

SEQ ID NO: 59567 - DNA, 10 bp, Unknown
  misc_feature (1)..( 10): Matrix.003 file - promoters60/4769392
ccaaaaaaat

SEQ ID NO: 59568 - DNA, 8 bp, Unknown
  misc_feature (1)..( 8): Matrix.003 file - promoters60/4769392
tttatgtc

SEQ ID NO: 59569 - DNA, 12 bp, Unknown
  misc_feature (1)..( 12): Matrix.003 file - promoters60/4769392
aatcaaaaaaaa

SEQ ID NO: 59570 - DNA, 9 bp, Unknown
  misc_feature (1)..( 9): Matrix.003 file - promoters60/4769392
ttatttgta

SEQ ID NO: 59571 - DNA, 9 bp, Unknown
  misc_feature (1)..( 9): Matrix.003 file - promoters60/4769392
taataattt

SEQ ID NO: 59572 - DNA, 10 bp, Unknown
  misc_feature (1)..( 10): Matrix.003 file - promoters60/4769392
agaaaaatcg

SEQ ID NO: 59573 - DNA, 17 bp, Unknown
  misc_feature (1)..( 17): Matrix.003 file - promoters60/4769411
taaggtttaattttaca

SEQ ID NO: 59574 - DNA, 11 bp, Unknown
  misc_feature (1)..( 11): Matrix.003 file - promoters60/4769411
agacaatcatt

SEQ ID NO: 59575 - DNA, 11 bp, Unknown
  misc_feature (1)..( 11): Matrix.003 file - promoters60/4769411
attgtaaaaaa

SEQ ID NO: 59576 - DNA, 8 bp, Unknown
  misc_feature (1)..( 8): Matrix.003 file - promoters60/4769411
ggataagc

SEQ ID NO: 59577 - DNA, 9 bp, Unknown
  misc_feature (1)..( 9): Matrix.003 file - promoters60/4769411
gaaataatt

SEQ ID NO: 59578 - DNA, 9 bp, Unknown
  misc_feature (1)..( 9): Matrix.003 file - promoters60/4769411
aaattaaat

SEQ ID NO: 59579 - DNA, 10 bp, Unknown
  misc_feature (1)..( 10): Matrix.003 file - promoters60/4769411
gaagataagg

SEQ ID NO: 59580 - DNA, 7 bp, Unknown
  misc_feature (1)..( 7): Matrix.003 file - promoters60/4769420
taatttc

SEQ ID NO: 59581 - DNA, 12 bp, Unknown
  misc_feature (1)..( 12): Matrix.003 file - promoters60/4769420
aaaaagtatttt

SEQ ID NO: 59582 - DNA, 6 bp, Unknown
  misc_feature (1)..( 6): Matrix.003 file - promoters60/4769420
agctaa

SEQ ID NO: 59583 - DNA, 7 bp, Unknown
  misc_feature (1)..( 7): Matrix.003 file - promoters60/4769420
aaattat

SEQ ID NO: 59584 - DNA, 7 bp, Unknown
  misc_feature (1)..( 7): Matrix.003 file - promoters60/4769420
aactaag

SEQ ID NO: 59585 - DNA, 10 bp, Unknown
  misc_feature (1)..( 10): Matrix.003 file - promoters60/4769420
actaaaaatt

SEQ ID NO: 59586 - DNA, 10 bp, Unknown
  misc_feature (1)..( 10): Matrix.003 file - promoters60/4769420
tttagcaaaa

SEQ ID NO: 59587 - DNA, 6 bp, Unknown
  misc_feature (1)..( 6): Matrix.003 file - promoters60/4769420
acacaa

SEQ ID NO: 59588 - DNA, 7 bp, Unknown
  misc_feature (1)..( 7): Matrix.003 file - promoters60/4769420
gatattg

SEQ ID NO: 59589 - DNA, 7 bp, Unknown
  misc_feature (1)..( 7): Matrix.003 file - promoters60/4769420
aatccaa

SEQ ID NO: 59590 - DNA, 6 bp, Unknown
  misc_feature (1)..( 6): Matrix.003 file - promoters60/4769420
ccacta

SEQ ID NO: 59591 - DNA, 7 bp, Unknown
  misc_feature (1)..( 7): Matrix.003 file - promoters60/4769420
taaaacc

SEQ ID NO: 59592 - DNA, 6 bp, Unknown
  misc_feature (1)..( 6): Matrix.003 file - promoters60/4769420
gttttg

SEQ ID NO: 59593 - DNA, 6 bp, Unknown
  misc_feature (1)..( 6): Matrix.003 file - promoters60/4769420
aattgt

SEQ ID NO: 59594 - DNA, 8 bp, Unknown
  misc_feature (1)..( 8): Matrix.003 file - promoters60/4769420
ccaagtaa

SEQ ID NO: 59595 - DNA, 9 bp, Unknown
  misc_feature (1)..( 9): Matrix.003 file - promoters60/4769420
tcagagata

SEQ ID NO: 59596 - DNA, 6 bp, Unknown
  misc_feature (1)..( 6): Matrix.003 file - promoters60/4769420
ttatat

SEQ ID NO: 59597 - DNA, 7 bp, Unknown
  misc_feature (1)..( 7): Matrix.003 file - promoters60/4769420
atcatca

SEQ ID NO: 59598 - DNA, 7 bp, Unknown
  misc_feature (1)..( 7): Matrix.003 file - promoters60/4769420
caaagaa

SEQ ID NO: 59599 - DNA, 11 bp, Unknown
  misc_feature (1)..( 11): Matrix.003 file - promoters60/4770260
ccatttatata

SEQ ID NO: 59600 - DNA, 9 bp, Unknown
  misc_feature (1)..( 9): Matrix.003 file - promoters60/4770260
tatttgaaa

SEQ ID NO: 59601 - DNA, 13 bp, Unknown
  misc_feature (1)..( 13): Matrix.003 file - promoters60/4770264
tttattaaaaaaa

SEQ ID NO: 59602 - DNA, 8 bp, Unknown
  misc_feature (1)..( 8): Matrix.003 file - promoters60/4770264
taaaagaa

SEQ ID NO: 59603 - DNA, 8 bp, Unknown
  misc_feature (1)..( 8): Matrix.003 file - promoters60/4770264
aaaattga

SEQ ID NO: 59604 - DNA, 6 bp, Unknown
  misc_feature (1)..( 6): Matrix.003 file - promoters60/4770264
aaaata

SEQ ID NO: 59605 - DNA, 8 bp, Unknown
  misc_feature (1)..( 8): Matrix.003 file - promoters60/4770264
caaaagat

SEQ ID NO: 59606 - DNA, 6 bp, Unknown
  misc_feature (1)..( 6): Matrix.003 file - promoters60/4770264
gtgaga

SEQ ID NO: 59607 - DNA, 10 bp, Unknown
  misc_feature (1)..( 10): Matrix.003 file - promoters60/4770264
cattaattct

SEQ ID NO: 59608 - DNA, 10 bp, Unknown
  misc_feature (1)..( 10): Matrix.003 file - promoters60/4770264
ttaaatattt

SEQ ID NO: 59609 - DNA, 9 bp, Unknown
  misc_feature (1)..( 9): Matrix.003 file - promoters60/4770264
gaatatatt

SEQ ID NO: 59610 - DNA, 7 bp, Unknown
  misc_feature (1)..( 7): Matrix.003 file - promoters60/4770264
aaagtta

SEQ ID NO: 59611 - DNA, 6 bp, Unknown
  misc_feature (1)..( 6): Matrix.003 file - promoters60/4770264
tttgaa

SEQ ID NO: 59612 - DNA, 7 bp, Unknown
  misc_feature (1)..( 7): Matrix.003 file - promoters60/4770264
gaagaaa

SEQ ID NO: 59613 - DNA, 7 bp, Unknown
  misc_feature (1)..( 7): Matrix.003 file - promoters60/4770264
gatcttc

SEQ ID NO: 59614 - DNA, 8 bp, Unknown
  misc_feature (1)..( 8): Matrix.003 file - promoters60/4770264
tttagctt

SEQ ID NO: 59615 - DNA, 6 bp, Unknown
  misc_feature (1)..( 6): Matrix.003 file - promoters60/4770264
gaatta

SEQ ID NO: 59616 - DNA, 6 bp, Unknown
  misc_feature (1)..( 6): Matrix.003 file - promoters60/4770264
gcggaa

SEQ ID NO: 59617 - DNA, 6 bp, Unknown
  misc_feature (1)..( 6): Matrix.003 file - promoters60/4770264
aaagaa

SEQ ID NO: 59618 - DNA, 7 bp, Unknown
  misc_feature (1)..( 7): Matrix.003 file - promoters60/4770264
tatcttc

SEQ ID NO: 59619 - DNA, 6 bp, Unknown
  misc_feature (1)..( 6): Matrix.003 file - promoters60/4770264
tccttg

SEQ ID NO: 59620 - DNA, 7 bp, Unknown
  misc_feature (1)..( 7): Matrix.003 file - promoters60/4770264
gatatat

SEQ ID NO: 59621 - DNA, 10 bp, Unknown
  misc_feature (1)..( 10): Matrix.003 file - promoters60/4770268
gattttgaaa

SEQ ID NO: 59622 - DNA, 10 bp, Unknown
  misc_feature (1)..( 10): Matrix.003 file - promoters60/4770268
tctatgaata

SEQ ID NO: 59623 - DNA, 8 bp, Unknown
  misc_feature (1)..( 8): Matrix.003 file - promoters60/4770268
ttttgtat

SEQ ID NO: 59624 - DNA, 8 bp, Unknown
  misc_feature (1)..( 8): Matrix.003 file - promoters60/4770268
ttgttgac

SEQ ID NO: 59625 - DNA, 7 bp, Unknown
  misc_feature (1)..( 7): Matrix.003 file - promoters60/4770268
gaaattg

SEQ ID NO: 59626 - DNA, 8 bp, Unknown
  misc_feature (1)..( 8): Matrix.003 file - promoters60/4770274
gaaaaaac

SEQ ID NO: 59627 - DNA, 8 bp, Unknown
  misc_feature (1)..( 8): Matrix.003 file - promoters60/4770274
ctagatat

SEQ ID NO: 59628 - DNA, 7 bp, Unknown
  misc_feature (1)..( 7): Matrix.003 file - promoters60/4770274
aataaaa

SEQ ID NO: 59629 - DNA, 8 bp, Unknown
  misc_feature (1)..( 8): Matrix.003 file - promoters60/4770274
ttttcttt

SEQ ID NO: 59630 - DNA, 10 bp, Unknown
  misc_feature (1)..( 10): Matrix.003 file - promoters60/4770274
tttaatataa

SEQ ID NO: 59631 - DNA, 8 bp, Unknown
  misc_feature (1)..( 8): Matrix.003 file - promoters60/4770274
aataatat

SEQ ID NO: 59632 - DNA, 7 bp, Unknown
  misc_feature (1)..( 7): Matrix.003 file - promoters60/4770274
tacttgt

SEQ ID NO: 59633 - DNA, 10 bp, Unknown
  misc_feature (1)..( 10): Matrix.003 file - promoters60/4770274
cctaaacctt

SEQ ID NO: 59634 - DNA, 8 bp, Unknown
  misc_feature (1)..( 8): Matrix.003 file - promoters60/4770274
ataattac

SEQ ID NO: 59635 - DNA, 11 bp, Unknown
  misc_feature (1)..( 11): Matrix.003 file - promoters60/4770274
attcactacat

SEQ ID NO: 59636 - DNA, 9 bp, Unknown
  misc_feature (1)..( 9): Matrix.003 file - promoters60/4770274
tccattaat

SEQ ID NO: 59637 - DNA, 8 bp, Unknown
  misc_feature (1)..( 8): Matrix.003 file - promoters60/4770274
tcctttac

SEQ ID NO: 59638 - DNA, 9 bp, Unknown
  misc_feature (1)..( 9): Matrix.003 file - promoters60/4770278
taaaaaaat

SEQ ID NO: 59639 - DNA, 10 bp, Unknown
  misc_feature (1)..( 10): Matrix.003 file - promoters60/4770278
ctcaaacaaa

SEQ ID NO: 59640 - DNA, 16 bp, Unknown
  misc_feature (1)..( 16): Matrix.003 file - promoters60/4770278
aaaatgaaaataattt

SEQ ID NO: 59641 - DNA, 7 bp, Unknown
  misc_feature (1)..( 7): Matrix.003 file - promoters60/4770280
taaaatt

SEQ ID NO: 59642 - DNA, 7 bp, Unknown
  misc_feature (1)..( 7): Matrix.003 file - promoters60/4770280
catatac

SEQ ID NO: 59643 - DNA, 7 bp, Unknown
  misc_feature (1)..( 7): Matrix.003 file - promoters60/4770280
ctgaatc

SEQ ID NO: 59644 - DNA, 6 bp, Unknown
  misc_feature (1)..( 6): Matrix.003 file - promoters60/4770280
ttgatt

SEQ ID NO: 59645 - DNA, 6 bp, Unknown
  misc_feature (1)..( 6): Matrix.003 file - promoters60/4770280
caaagg

SEQ ID NO: 59646 - DNA, 7 bp, Unknown
  misc_feature (1)..( 7): Matrix.003 file - promoters60/4770280
tatcatt

SEQ ID NO: 59647 - DNA, 7 bp, Unknown
  misc_feature (1)..( 7): Matrix.003 file - promoters60/4770280
gaatttg

SEQ ID NO: 59648 - DNA, 7 bp, Unknown
  misc_feature (1)..( 7): Matrix.003 file - promoters60/4770280
tttgatt

SEQ ID NO: 59649 - DNA, 7 bp, Unknown
  misc_feature (1)..( 7): Matrix.003 file - promoters60/4770280
ttagatc

SEQ ID NO: 59650 - DNA, 6 bp, Unknown
  misc_feature (1)..( 6): Matrix.003 file - promoters60/4770280
catttg

SEQ ID NO: 59651 - DNA, 6 bp, Unknown
  misc_feature (1)..( 6): Matrix.003 file - promoters60/4770288
aaaaaa

SEQ ID NO: 59652 - DNA, 16 bp, Unknown
  misc_feature (1)..( 16): Matrix.003 file - promoters60/4770288
taaaagcaaataaata

SEQ ID NO: 59653 - DNA, 8 bp, Unknown
  misc_feature (1)..( 8): Matrix.003 file - promoters60/4770288
ttttcatt

SEQ ID NO: 59654 - DNA, 9 bp, Unknown
  misc_feature (1)..( 9): Matrix.003 file - promoters60/4770288
tgttatctc

SEQ ID NO: 59655 - DNA, 7 bp, Unknown
  misc_feature (1)..( 7): Matrix.003 file - promoters60/4770288
ttatctc

SEQ ID NO: 59656 - DNA, 13 bp, Unknown
  misc_feature (1)..( 13): Matrix.003 file - promoters60/4770288
agttcttagattc

SEQ ID NO: 59657 - DNA, 10 bp, Unknown
  misc_feature (1)..( 10): Matrix.003 file - promoters60/4770305
ttttgaatac

SEQ ID NO: 59658 - DNA, 11 bp, Unknown
  misc_feature (1)..( 11): Matrix.003 file - promoters60/4770305
aaaatcttaaa

SEQ ID NO: 59659 - DNA, 9 bp, Unknown
  misc_feature (1)..( 9): Matrix.003 file - promoters60/4770305
agcccaaag

SEQ ID NO: 59660 - DNA, 11 bp, Unknown
  misc_feature (1)..( 11): Matrix.003 file - promoters60/4770305
tttcttaaatt

SEQ ID NO: 59661 - DNA, 8 bp, Unknown
  misc_feature (1)..( 8): Matrix.003 file - promoters60/4770305
caaatttt

SEQ ID NO: 59662 - DNA, 10 bp, Unknown
  misc_feature (1)..( 10): Matrix.003 file - promoters60/4770305
tcttaaattt

SEQ ID NO: 59663 - DNA, 7 bp, Unknown
  misc_feature (1)..( 7): Matrix.003 file - promoters60/4770305
agaacta

SEQ ID NO: 59664 - DNA, 7 bp, Unknown
  misc_feature (1)..( 7): Matrix.003 file - promoters60/4770317
gaacaaa

SEQ ID NO: 59665 - DNA, 6 bp, Unknown
  misc_feature (1)..( 6): Matrix.003 file - promoters60/4770317
aagaag

SEQ ID NO: 59666 - DNA, 6 bp, Unknown
  misc_feature (1)..( 6): Matrix.003 file - promoters60/4770317
gggaat

SEQ ID NO: 59667 - DNA, 8 bp, Unknown
  misc_feature (1)..( 8): Matrix.003 file - promoters60/4770317
agctccga

SEQ ID NO: 59668 - DNA, 6 bp, Unknown
  misc_feature (1)..( 6): Matrix.003 file - promoters60/4770317
tttcca

SEQ ID NO: 59669 - DNA, 6 bp, Unknown
  misc_feature (1)..( 6): Matrix.003 file - promoters60/4770317
cgaatg

SEQ ID NO: 59670 - DNA, 6 bp, Unknown
  misc_feature (1)..( 6): Matrix.003 file - promoters60/4770317
gaagaa

SEQ ID NO: 59671 - DNA, 6 bp, Unknown
  misc_feature (1)..( 6): Matrix.003 file - promoters60/4770317
ttccga

SEQ ID NO: 59672 - DNA, 6 bp, Unknown
  misc_feature (1)..( 6): Matrix.003 file - promoters60/4770317
accttt

SEQ ID NO: 59673 - DNA, 8 bp, Unknown
  misc_feature (1)..( 8): Matrix.003 file - promoters60/4770317
tttctctc

SEQ ID NO: 59674 - DNA, 6 bp, Unknown
  misc_feature (1)..( 6): Matrix.003 file - promoters60/4770317
tcaaaa

SEQ ID NO: 59675 - DNA, 7 bp, Unknown
  misc_feature (1)..( 7): Matrix.003 file - promoters60/4770317
aaaagaa

SEQ ID NO: 59676 - DNA, 8 bp, Unknown
  misc_feature (1)..( 8): Matrix.003 file - promoters60/4770317
caaaaaaa

SEQ ID NO: 59677 - DNA, 7 bp, Unknown
  misc_feature (1)..( 7): Matrix.003 file - promoters60/4770330
gatacac

SEQ ID NO: 59678 - DNA, 6 bp, Unknown
  misc_feature (1)..( 6): Matrix.003 file - promoters60/4770330
aagaag

SEQ ID NO: 59679 - DNA, 6 bp, Unknown
  misc_feature (1)..( 6): Matrix.003 file - promoters60/4770330
tagtgt

SEQ ID NO: 59680 - DNA, 8 bp, Unknown
  misc_feature (1)..( 8): Matrix.003 file - promoters60/4770330
aacaactt

SEQ ID NO: 59681 - DNA, 7 bp, Unknown
  misc_feature (1)..( 7): Matrix.003 file - promoters60/4770330
tttaact

SEQ ID NO: 59682 - DNA, 6 bp, Unknown
  misc_feature (1)..( 6): Matrix.003 file - promoters60/4770330
gattaa

SEQ ID NO: 59683 - DNA, 6 bp, Unknown
  misc_feature (1)..( 6): Matrix.003 file - promoters60/4770330
tttgat

SEQ ID NO: 59684 - DNA, 8 bp, Unknown
  misc_feature (1)..( 8): Matrix.003 file - promoters60/4770330
cttcatat

SEQ ID NO: 59685 - DNA, 8 bp, Unknown
  misc_feature (1)..( 8): Matrix.003 file - promoters60/4770330
attgttca

SEQ ID NO: 59686 - DNA, 8 bp, Unknown
  misc_feature (1)..( 8): Matrix.003 file - promoters60/4770330
tttaacaa

SEQ ID NO: 59687 - DNA, 8 bp, Unknown
  misc_feature (1)..( 8): Matrix.003 file - promoters60/4770330
tgttatta

SEQ ID NO: 59688 - DNA, 6 bp, Unknown
  misc_feature (1)..( 6): Matrix.003 file - promoters60/4770330
attttt

SEQ ID NO: 59689 - DNA, 7 bp, Unknown
  misc_feature (1)..( 7): Matrix.003 file - promoters60/4770365
tatatag

SEQ ID NO: 59690 - DNA, 7 bp, Unknown
  misc_feature (1)..( 7): Matrix.003 file - promoters60/4770365
aagttaa

SEQ ID NO: 59691 - DNA, 8 bp, Unknown
  misc_feature (1)..( 8): Matrix.003 file - promoters60/4770365
ttaaaaaa

SEQ ID NO: 59692 - DNA, 8 bp, Unknown
  misc_feature (1)..( 8): Matrix.003 file - promoters60/4770365
aaaaaatg

SEQ ID NO: 59693 - DNA, 6 bp, Unknown
  misc_feature (1)..( 6): Matrix.003 file - promoters60/4770365
gattat

SEQ ID NO: 59694 - DNA, 7 bp, Unknown
  misc_feature (1)..( 7): Matrix.003 file - promoters60/4770365
tattatt

SEQ ID NO: 59695 - DNA, 8 bp, Unknown
  misc_feature (1)..( 8): Matrix.003 file - promoters60/4770365
caagatta

SEQ ID NO: 59696 - DNA, 8 bp, Unknown
  misc_feature (1)..( 8): Matrix.003 file - promoters60/4770365
ttttattt

SEQ ID NO: 59697 - DNA, 7 bp, Unknown
  misc_feature (1)..( 7): Matrix.003 file - promoters60/4770365
aaaaaat

SEQ ID NO: 59698 - DNA, 11 bp, Unknown
  misc_feature (1)..( 11): Matrix.003 file - promoters60/4770379
cattcttattt

SEQ ID NO: 59699 - DNA, 11 bp, Unknown
  misc_feature (1)..( 11): Matrix.003 file - promoters60/4770379
atacttacaaa

SEQ ID NO: 59700 - DNA, 11 bp, Unknown
  misc_feature (1)..( 11): Matrix.003 file - promoters60/4770379
tcatatatata

SEQ ID NO: 59701 - DNA, 12 bp, Unknown
  misc_feature (1)..( 12): Matrix.003 file - promoters60/4770379
aattttttttca

SEQ ID NO: 59702 - DNA, 14 bp, Unknown
  misc_feature (1)..( 14): Matrix.003 file - promoters60/4770379
ttagctataaatta

SEQ ID NO: 59703 - DNA, 7 bp, Unknown
  misc_feature (1)..( 7): Matrix.003 file - promoters60/4770379
aactaaa

SEQ ID NO: 59704 - DNA, 14 bp, Unknown
  misc_feature (1)..( 14): Matrix.003 file - promoters60/4770379
ttttatatagataa

SEQ ID NO: 59705 - DNA, 9 bp, Unknown
  misc_feature (1)..( 9): Matrix.003 file - promoters60/4770379
aactaaaca

SEQ ID NO: 59706 - DNA, 11 bp, Unknown
  misc_feature (1)..( 11): Matrix.003 file - promoters60/4770390
gttataaatct

SEQ ID NO: 59707 - DNA, 16 bp, Unknown
  misc_feature (1)..( 16): Matrix.003 file - promoters60/4770390
ttttgaaataaaactt

SEQ ID NO: 59708 - DNA, 7 bp, Unknown
  misc_feature (1)..( 7): Matrix.003 file - promoters60/4770390
ataaaaa

SEQ ID NO: 59709 - DNA, 9 bp, Unknown
  misc_feature (1)..( 9): Matrix.003 file - promoters60/4770406
taataaaca

SEQ ID NO: 59710 - DNA, 8 bp, Unknown
  misc_feature (1)..( 8): Matrix.003 file - promoters60/4770406
aacataaa

SEQ ID NO: 59711 - DNA, 6 bp, Unknown
  misc_feature (1)..( 6): Matrix.003 file - promoters60/4770406
tgtttt

SEQ ID NO: 59712 - DNA, 6 bp, Unknown
  misc_feature (1)..( 6): Matrix.003 file - promoters60/4770414
gtttaa

SEQ ID NO: 59713 - DNA, 8 bp, Unknown
  misc_feature (1)..( 8): Matrix.003 file - promoters60/4770414
atagttga

SEQ ID NO: 59714 - DNA, 7 bp, Unknown
  misc_feature (1)..( 7): Matrix.003 file - promoters60/4770414
attcttg

SEQ ID NO: 59715 - DNA, 8 bp, Unknown
  misc_feature (1)..( 8): Matrix.003 file - promoters60/4770414
aaaattta

SEQ ID NO: 59716 - DNA, 12 bp, Unknown
  misc_feature (1)..( 12): Matrix.003 file - promoters60/4770414
aatttataacca

SEQ ID NO: 59717 - DNA, 7 bp, Unknown
  misc_feature (1)..( 7): Matrix.003 file - promoters60/4770414
ttagtaa

SEQ ID NO: 59718 - DNA, 6 bp, Unknown
  misc_feature (1)..( 6): Matrix.003 file - promoters60/4770414
attttt

SEQ ID NO: 59719 - DNA, 8 bp, Unknown
  misc_feature (1)..( 8): Matrix.003 file - promoters60/4770414
ctataaaa

SEQ ID NO: 59720 - DNA, 11 bp, Unknown
  misc_feature (1)..( 11): Matrix.003 file - promoters60/4770414
tcaacacaaaa

SEQ ID NO: 59721 - DNA, 6 bp, Unknown
  misc_feature (1)..( 6): Matrix.003 file - promoters60/4770414
tagttt

SEQ ID NO: 59722 - DNA, 6 bp, Unknown
  misc_feature (1)..( 6): Matrix.003 file - promoters60/4770414
tgacta

SEQ ID NO: 59723 - DNA, 8 bp, Unknown
  misc_feature (1)..( 8): Matrix.003 file - promoters60/4770414
cttgttac

SEQ ID NO: 59724 - DNA, 7 bp, Unknown
  misc_feature (1)..( 7): Matrix.003 file - promoters60/4770414
aaagtaa

SEQ ID NO: 59725 - DNA, 9 bp, Unknown
  misc_feature (1)..( 9): Matrix.003 file - promoters60/4770414
gtaacataa

SEQ ID NO: 59726 - DNA, 8 bp, Unknown
  misc_feature (1)..( 8): Matrix.003 file - promoters60/4770428
ttttgtgt

SEQ ID NO: 59727 - DNA, 9 bp, Unknown
  misc_feature (1)..( 9): Matrix.003 file - promoters60/4770428
aatgggcca

SEQ ID NO: 59728 - DNA, 12 bp, Unknown
  misc_feature (1)..( 12): Matrix.003 file - promoters60/4770463
tattttgtattt

SEQ ID NO: 59729 - DNA, 17 bp, Unknown
  misc_feature (1)..( 17): Matrix.003 file - promoters60/4770463
ttcatttataaaaacaa

SEQ ID NO: 59730 - DNA, 7 bp, Unknown
  misc_feature (1)..( 7): Matrix.003 file - promoters60/4770463
aaacaaa

SEQ ID NO: 59731 - DNA, 9 bp, Unknown
  misc_feature (1)..( 9): Matrix.003 file - promoters60/4770463
aaaattatt

SEQ ID NO: 59732 - DNA, 11 bp, Unknown
  misc_feature (1)..( 11): Matrix.003 file - promoters60/4770463
ttgaaatcaca

SEQ ID NO: 59733 - DNA, 8 bp, Unknown
  misc_feature (1)..( 8): Matrix.003 file - promoters60/4770463
taaacaaa

SEQ ID NO: 59734 - DNA, 6 bp, Unknown
  misc_feature (1)..( 6): Matrix.003 file - promoters60/4770466
tttttc

SEQ ID NO: 59735 - DNA, 6 bp, Unknown
  misc_feature (1)..( 6): Matrix.003 file - promoters60/4770466
ataaac

SEQ ID NO: 59736 - DNA, 6 bp, Unknown
  misc_feature (1)..( 6): Matrix.003 file - promoters60/4770466
atatat

SEQ ID NO: 59737 - DNA, 14 bp, Unknown
  misc_feature (1)..( 14): Matrix.003 file - promoters60/4770466
attttatgttctgc

SEQ ID NO: 59738 - DNA, 9 bp, Unknown
  misc_feature (1)..( 9): Matrix.003 file - promoters60/4770466
aaatcaaaa

SEQ ID NO: 59739 - DNA, 6 bp, Unknown
  misc_feature (1)..( 6): Matrix.003 file - promoters60/4770466
tttctt

SEQ ID NO: 59740 - DNA, 8 bp, Unknown
  misc_feature (1)..( 8): Matrix.003 file - promoters60/4770466
tatctcga

SEQ ID NO: 59741 - DNA, 11 bp, Unknown
  misc_feature (1)..( 11): Matrix.003 file - promoters60/4770477
tatagttcagt

SEQ ID NO: 59742 - DNA, 7 bp, Unknown
  misc_feature (1)..( 7): Matrix.003 file - promoters60/4770499
ttcagat

SEQ ID NO: 59743 - DNA, 9 bp, Unknown
  misc_feature (1)..( 9): Matrix.003 file - promoters60/4770499
ctttttaat

SEQ ID NO: 59744 - DNA, 6 bp, Unknown
  misc_feature (1)..( 6): Matrix.003 file - promoters60/4770499
gagaaa

SEQ ID NO: 59745 - DNA, 7 bp, Unknown
  misc_feature (1)..( 7): Matrix.003 file - promoters60/4770499
tttcgaa

SEQ ID NO: 59746 - DNA, 10 bp, Unknown
  misc_feature (1)..( 10): Matrix.003 file - promoters60/4770499
aaataaaata

SEQ ID NO: 59747 - DNA, 7 bp, Unknown
  misc_feature (1)..( 7): Matrix.003 file - promoters60/4770499
aacttga

SEQ ID NO: 59748 - DNA, 6 bp, Unknown
  misc_feature (1)..( 6): Matrix.003 file - promoters60/4770499
agaact

SEQ ID NO: 59749 - DNA, 6 bp, Unknown
  misc_feature (1)..( 6): Matrix.003 file - promoters60/4770499
aacgat

SEQ ID NO: 59750 - DNA, 8 bp, Unknown
  misc_feature (1)..( 8): Matrix.003 file - promoters60/4770499
gttcggtt

SEQ ID NO: 59751 - DNA, 7 bp, Unknown
  misc_feature (1)..( 7): Matrix.003 file - promoters60/4770499
tcagtgt

SEQ ID NO: 59752 - DNA, 6 bp, Unknown
  misc_feature (1)..( 6): Matrix.003 file - promoters60/4770499
agtaaa

SEQ ID NO: 59753 - DNA, 7 bp, Unknown
  misc_feature (1)..( 7): Matrix.003 file - promoters60/4770499
aatcggg

SEQ ID NO: 59754 - DNA, 8 bp, Unknown
  misc_feature (1)..( 8): Matrix.003 file - promoters60/4770499
gaaacaaa

SEQ ID NO: 59755 - DNA, 10 bp, Unknown
  misc_feature (1)..( 10): Matrix.003 file - promoters60/4770499
ggaaaagaaa

SEQ ID NO: 59756 - DNA, 7 bp, Unknown
  misc_feature (1)..( 7): Matrix.003 file - promoters60/4770499
cccacta

SEQ ID NO: 59757 - DNA, 9 bp, Unknown
  misc_feature (1)..( 9): Matrix.003 file - promoters60/4770499
aaagaaaag

SEQ ID NO: 59758 - DNA, 7 bp, Unknown
  misc_feature (1)..( 7): Matrix.003 file - promoters60/4770499
gtatata

SEQ ID NO: 59759 - DNA, 14 bp, Unknown
  misc_feature (1)..( 14): Matrix.003 file - promoters60/4770594
aaaacattacaata

SEQ ID NO: 59760 - DNA, 9 bp, Unknown
  misc_feature (1)..( 9): Matrix.003 file - promoters60/4770604
tatattcta

SEQ ID NO: 59761 - DNA, 8 bp, Unknown
  misc_feature (1)..( 8): Matrix.003 file - promoters60/4770604
caaaaaag

SEQ ID NO: 59762 - DNA, 8 bp, Unknown
  misc_feature (1)..( 8): Matrix.003 file - promoters60/4770604
aatcaata

SEQ ID NO: 59763 - DNA, 9 bp, Unknown
  misc_feature (1)..( 9): Matrix.003 file - promoters60/4770604
aaatattct

SEQ ID NO: 59764 - DNA, 7 bp, Unknown
  misc_feature (1)..( 7): Matrix.003 file - promoters60/4770604
tatatat

SEQ ID NO: 59765 - DNA, 8 bp, Unknown
  misc_feature (1)..( 8): Matrix.003 file - promoters60/4770620
aaaagatc

SEQ ID NO: 59766 - DNA, 12 bp, Unknown
  misc_feature (1)..( 12): Matrix.003 file - promoters60/4770620
tatcaaaattaa

SEQ ID NO: 59767 - DNA, 7 bp, Unknown
  misc_feature (1)..( 7): Matrix.003 file - promoters60/4770624
aaactaa

SEQ ID NO: 59768 - DNA, 6 bp, Unknown
  misc_feature (1)..( 6): Matrix.003 file - promoters60/4770624
ttatta

SEQ ID NO: 59769 - DNA, 8 bp, Unknown
  misc_feature (1)..( 8): Matrix.003 file - promoters60/4770624
aatgtata

SEQ ID NO: 59770 - DNA, 6 bp, Unknown
  misc_feature (1)..( 6): Matrix.003 file - promoters60/4770624
ctaaac

SEQ ID NO: 59771 - DNA, 6 bp, Unknown
  misc_feature (1)..( 6): Matrix.003 file - promoters60/4770624
ttaaac

SEQ ID NO: 59772 - DNA, 8 bp, Unknown
  misc_feature (1)..( 8): Matrix.003 file - promoters60/4770624
aaaaatag

SEQ ID NO: 59773 - DNA, 6 bp, Unknown
  misc_feature (1)..( 6): Matrix.003 file - promoters60/4770624
agaaaa

SEQ ID NO: 59774 - DNA, 6 bp, Unknown
  misc_feature (1)..( 6): Matrix.003 file - promoters60/4770624
aaacac

SEQ ID NO: 59775 - DNA, 10 bp, Unknown
  misc_feature (1)..( 10): Matrix.003 file - promoters60/4770624
ttgtacataa

SEQ ID NO: 59776 - DNA, 6 bp, Unknown
  misc_feature (1)..( 6): Matrix.003 file - promoters60/4770624
aattaa

SEQ ID NO: 59777 - DNA, 6 bp, Unknown
  misc_feature (1)..( 6): Matrix.003 file - promoters60/4770624
ttgaca

SEQ ID NO: 59778 - DNA, 6 bp, Unknown
  misc_feature (1)..( 6): Matrix.003 file - promoters60/4770624
atcatg

SEQ ID NO: 59779 - DNA, 6 bp, Unknown
  misc_feature (1)..( 6): Matrix.003 file - promoters60/4770624
aaacct

SEQ ID NO: 59780 - DNA, 7 bp, Unknown
  misc_feature (1)..( 7): Matrix.003 file - promoters60/4770624
aattcaa

SEQ ID NO: 59781 - DNA, 6 bp, Unknown
  misc_feature (1)..( 6): Matrix.003 file - promoters60/4770624
aaaatt

SEQ ID NO: 59782 - DNA, 6 bp, Unknown
  misc_feature (1)..( 6): Matrix.003 file - promoters60/4770624
caatca

SEQ ID NO: 59783 - DNA, 7 bp, Unknown
  misc_feature (1)..( 7): Matrix.003 file - promoters60/4770624
aatcttt

SEQ ID NO: 59784 - DNA, 8 bp, Unknown
  misc_feature (1)..( 8): Matrix.003 file - promoters60/4770624
aaaaaaca

SEQ ID NO: 59785 - DNA, 6 bp, Unknown
  misc_feature (1)..( 6): Matrix.003 file - promoters60/4770624
tcaaaa

SEQ ID NO: 59786 - DNA, 7 bp, Unknown
  misc_feature (1)..( 7): Matrix.003 file - promoters60/4770624
agtataa

SEQ ID NO: 59787 - DNA, 7 bp, Unknown
  misc_feature (1)..( 7): Matrix.003 file - promoters60/4770659
aactctg

SEQ ID NO: 59788 - DNA, 7 bp, Unknown
  misc_feature (1)..( 7): Matrix.003 file - promoters60/4770659
agtatat

SEQ ID NO: 59789 - DNA, 6 bp, Unknown
  misc_feature (1)..( 6): Matrix.003 file - promoters60/4770659
aaactt

SEQ ID NO: 59790 - DNA, 10 bp, Unknown
  misc_feature (1)..( 10): Matrix.003 file - promoters60/4770659
aaaataaata

SEQ ID NO: 59791 - DNA, 8 bp, Unknown
  misc_feature (1)..( 8): Matrix.003 file - promoters60/4770659
atattttt

SEQ ID NO: 59792 - DNA, 6 bp, Unknown
  misc_feature (1)..( 6): Matrix.003 file - promoters60/4770659
ataata

SEQ ID NO: 59793 - DNA, 6 bp, Unknown
  misc_feature (1)..( 6): Matrix.003 file - promoters60/4770659
tgattt

SEQ ID NO: 59794 - DNA, 7 bp, Unknown
  misc_feature (1)..( 7): Matrix.003 file - promoters60/4770659
attagtt

SEQ ID NO: 59795 - DNA, 6 bp, Unknown
  misc_feature (1)..( 6): Matrix.003 file - promoters60/4770659
attcaa

SEQ ID NO: 59796 - DNA, 8 bp, Unknown
  misc_feature (1)..( 8): Matrix.003 file - promoters60/4770659
tattcatg

SEQ ID NO: 59797 - DNA, 6 bp, Unknown
  misc_feature (1)..( 6): Matrix.003 file - promoters60/4770659
aacaaa

SEQ ID NO: 59798 - DNA, 8 bp, Unknown
  misc_feature (1)..( 8): Matrix.003 file - promoters60/4770659
aatagata

SEQ ID NO: 59799 - DNA, 6 bp, Unknown
  misc_feature (1)..( 6): Matrix.003 file - promoters60/4770659
ttttta

SEQ ID NO: 59800 - DNA, 6 bp, Unknown
  misc_feature (1)..( 6): Matrix.003 file - promoters60/4770659
ttaatt

SEQ ID NO: 59801 - DNA, 6 bp, Unknown
  misc_feature (1)..( 6): Matrix.003 file - promoters60/4770659
ttctaa

SEQ ID NO: 59802 - DNA, 7 bp, Unknown
  misc_feature (1)..( 7): Matrix.003 file - promoters60/4770666
ttggatt

SEQ ID NO: 59803 - DNA, 7 bp, Unknown
  misc_feature (1)..( 7): Matrix.003 file - promoters60/4770666
aattata

SEQ ID NO: 59804 - DNA, 7 bp, Unknown
  misc_feature (1)..( 7): Matrix.003 file - promoters60/4770666
aaaacct

SEQ ID NO: 59805 - DNA, 7 bp, Unknown
  misc_feature (1)..( 7): Matrix.003 file - promoters60/4770666
tctcacg

SEQ ID NO: 59806 - DNA, 6 bp, Unknown
  misc_feature (1)..( 6): Matrix.003 file - promoters60/4770666
tttcaa

SEQ ID NO: 59807 - DNA, 7 bp, Unknown
  misc_feature (1)..( 7): Matrix.003 file - promoters60/4770666
ataattg

SEQ ID NO: 59808 - DNA, 6 bp, Unknown
  misc_feature (1)..( 6): Matrix.003 file - promoters60/4770666
agatat

SEQ ID NO: 59809 - DNA, 7 bp, Unknown
  misc_feature (1)..( 7): Matrix.003 file - promoters60/4770666
gaaaaaa

SEQ ID NO: 59810 - DNA, 7 bp, Unknown
  misc_feature (1)..( 7): Matrix.003 file - promoters60/4770666
caccata

SEQ ID NO: 59811 - DNA, 8 bp, Unknown
  misc_feature (1)..( 8): Matrix.003 file - promoters60/4770666
ttaattca

SEQ ID NO: 59812 - DNA, 6 bp, Unknown
  misc_feature (1)..( 6): Matrix.003 file - promoters60/4770666
atatgt

SEQ ID NO: 59813 - DNA, 6 bp, Unknown
  misc_feature (1)..( 6): Matrix.003 file - promoters60/4770666
aaccta

SEQ ID NO: 59814 - DNA, 6 bp, Unknown
  misc_feature (1)..( 6): Matrix.003 file - promoters60/4770666
tatcat

SEQ ID NO: 59815 - DNA, 6 bp, Unknown
  misc_feature (1)..( 6): Matrix.003 file - promoters60/4770666
ttaaaa

SEQ ID NO: 59816 - DNA, 7 bp, Unknown
  misc_feature (1)..( 7): Matrix.003 file - promoters60/4770666
tcaaata

SEQ ID NO: 59817 - DNA, 8 bp, Unknown
  misc_feature (1)..( 8): Matrix.003 file - promoters60/4770666
tttaatct

SEQ ID NO: 59818 - DNA, 8 bp, Unknown
  misc_feature (1)..( 8): Matrix.003 file - promoters60/4770666
aatggtaa

SEQ ID NO: 59819 - DNA, 8 bp, Unknown
  misc_feature (1)..( 8): Matrix.003 file - promoters60/4770666
aagcagag

SEQ ID NO: 59820 - DNA, 6 bp, Unknown
  misc_feature (1)..( 6): Matrix.003 file - promoters60/4770666
aataat

SEQ ID NO: 59821 - DNA, 10 bp, Unknown
  misc_feature (1)..( 10): Matrix.003 file - promoters60/4770666
aactaatcat

SEQ ID NO: 59822 - DNA, 10 bp, Unknown
  misc_feature (1)..( 10): Matrix.003 file - promoters60/4770666
attagtttaa

SEQ ID NO: 59823 - DNA, 14 bp, Unknown
  misc_feature (1)..( 14): Matrix.003 file - promoters60/4770666
ctacaaatagaggc

SEQ ID NO: 59824 - DNA, 8 bp, Unknown
  misc_feature (1)..( 8): Matrix.003 file - promoters60/4770865
acatattg

SEQ ID NO: 59825 - DNA, 9 bp, Unknown
  misc_feature (1)..( 9): Matrix.003 file - promoters60/4770865
ttataaaaa

SEQ ID NO: 59826 - DNA, 5 bp, Unknown
  misc_feature (1)..( 5): Matrix.003 file - promoters60/4771271
gaaag

SEQ ID NO: 59827 - DNA, 7 bp, Unknown
  misc_feature (1)..( 7): Matrix.003 file - promoters60/4771286
aacatat

SEQ ID NO: 59828 - DNA, 12 bp, Unknown
  misc_feature (1)..( 12): Matrix.003 file - promoters60/4771286
tttgtattttag

SEQ ID NO: 59829 - DNA, 7 bp, Unknown
  misc_feature (1)..( 7): Matrix.003 file - promoters60/4771286
attcaaa

SEQ ID NO: 59830 - DNA, 7 bp, Unknown
  misc_feature (1)..( 7): Matrix.003 file - promoters60/4771286
aatatgt

SEQ ID NO: 59831 - DNA, 9 bp, Unknown
  misc_feature (1)..( 9): Matrix.003 file - promoters60/4771286
gttattttt

SEQ ID NO: 59832 - DNA, 9 bp, Unknown
  misc_feature (1)..( 9): Matrix.003 file - promoters60/4771286
ataataatg

SEQ ID NO: 59833 - DNA, 11 bp, Unknown
  misc_feature (1)..( 11): Matrix.003 file - promoters60/4771286
gataggaaaaa

SEQ ID NO: 59834 - DNA, 6 bp, Unknown
  misc_feature (1)..( 6): Matrix.003 file - promoters60/4771286
tatcca

SEQ ID NO: 59835 - DNA, 6 bp, Unknown
  misc_feature (1)..( 6): Matrix.003 file - promoters60/4771286
cattaa

SEQ ID NO: 59836 - DNA, 11 bp, Unknown
  misc_feature (1)..( 11): Matrix.003 file - promoters60/4771286
ataaacccttc

SEQ ID NO: 59837 - DNA, 10 bp, Unknown
  misc_feature (1)..( 10): Matrix.003 file - promoters60/4771286
tataaaaaaa

SEQ ID NO: 59838 - DNA, 6 bp, Unknown
  misc_feature (1)..( 6): Matrix.003 file - promoters60/4771286
aaattc

SEQ ID NO: 59839 - DNA, 7 bp, Unknown
  misc_feature (1)..( 7): Matrix.003 file - promoters60/4771286
tttgaaa

SEQ ID NO: 59840 - DNA, 10 bp, Unknown
  misc_feature (1)..( 10): Matrix.003 file - promoters60/4771286
aaaatgttag

SEQ ID NO: 59841 - DNA, 7 bp, Unknown
  misc_feature (1)..( 7): Matrix.003 file - promoters60/4771286
actctgt

SEQ ID NO: 59842 - DNA, 6 bp, Unknown
  misc_feature (1)..( 6): Matrix.003 file - promoters60/4771286
atctcc

SEQ ID NO: 59843 - DNA, 8 bp, Unknown
  misc_feature (1)..( 8): Matrix.003 file - promoters60/4771286
atccgcgt

SEQ ID NO: 59844 - DNA, 14 bp, Unknown
  misc_feature (1)..( 14): Matrix.003 file - promoters60/4771286
taaccaatcagatc

SEQ ID NO: 59845 - DNA, 6 bp, Unknown
  misc_feature (1)..( 6): Matrix.003 file - promoters60/4771286
tattct

SEQ ID NO: 59846 - DNA, 8 bp, Unknown
  misc_feature (1)..( 8): Matrix.003 file - promoters60/4771286
atacaaca

SEQ ID NO: 59847 - DNA, 9 bp, Unknown
  misc_feature (1)..( 9): Matrix.003 file - promoters60/4771286
tcaacttgt

SEQ ID NO: 59848 - DNA, 7 bp, Unknown
  misc_feature (1)..( 7): Matrix.003 file - promoters60/4771286
tttcgat

SEQ ID NO: 59849 - DNA, 7 bp, Unknown
  misc_feature (1)..( 7): Matrix.003 file - promoters60/4771286
aacataa

SEQ ID NO: 59850 - DNA, 10 bp, Unknown
  misc_feature (1)..( 10): Matrix.003 file - promoters60/4771286
ataaaccaat

SEQ ID NO: 59851 - DNA, 7 bp, Unknown
  misc_feature (1)..( 7): Matrix.003 file - promoters60/4771286
tcccatc

SEQ ID NO: 59852 - DNA, 8 bp, Unknown
  misc_feature (1)..( 8): Matrix.003 file - promoters60/4771321
tttataaa

SEQ ID NO: 59853 - DNA, 7 bp, Unknown
  misc_feature (1)..( 7): Matrix.003 file - promoters60/4771348
atgaaga

SEQ ID NO: 59854 - DNA, 8 bp, Unknown
  misc_feature (1)..( 8): Matrix.003 file - promoters60/4771348
tgtcttta

SEQ ID NO: 59855 - DNA, 6 bp, Unknown
  misc_feature (1)..( 6): Matrix.003 file - promoters60/4771348
ttgttt

SEQ ID NO: 59856 - DNA, 8 bp, Unknown
  misc_feature (1)..( 8): Matrix.003 file - promoters60/4771348
cattagta

SEQ ID NO: 59857 - DNA, 7 bp, Unknown
  misc_feature (1)..( 7): Matrix.003 file - promoters60/4771348
caacatt

SEQ ID NO: 59858 - DNA, 6 bp, Unknown
  misc_feature (1)..( 6): Matrix.003 file - promoters60/4771348
tgacag

SEQ ID NO: 59859 - DNA, 8 bp, Unknown
  misc_feature (1)..( 8): Matrix.003 file - promoters60/4771348
ctctccac

SEQ ID NO: 59860 - DNA, 7 bp, Unknown
  misc_feature (1)..( 7): Matrix.003 file - promoters60/4771348
tttagtt

SEQ ID NO: 59861 - DNA, 7 bp, Unknown
  misc_feature (1)..( 7): Matrix.003 file - promoters60/4771348
atagaaa

SEQ ID NO: 59862 - DNA, 7 bp, Unknown
  misc_feature (1)..( 7): Matrix.003 file - promoters60/4771348
ttaattt

SEQ ID NO: 59863 - DNA, 7 bp, Unknown
  misc_feature (1)..( 7): Matrix.003 file - promoters60/4771348
acactgt

SEQ ID NO: 59864 - DNA, 6 bp, Unknown
  misc_feature (1)..( 6): Matrix.003 file - promoters60/4771348
catttt

SEQ ID NO: 59865 - DNA, 6 bp, Unknown
  misc_feature (1)..( 6): Matrix.003 file - promoters60/4771348
agatta

SEQ ID NO: 59866 - DNA, 9 bp, Unknown
  misc_feature (1)..( 9): Matrix.003 file - promoters60/4771348
aagacaaag

SEQ ID NO: 59867 - DNA, 7 bp, Unknown
  misc_feature (1)..( 7): Matrix.003 file - promoters60/4771348
tagaaaa

SEQ ID NO: 59868 - DNA, 7 bp, Unknown
  misc_feature (1)..( 7): Matrix.003 file - promoters60/4771348
gagagaa

SEQ ID NO: 59869 - DNA, 7 bp, Unknown
  misc_feature (1)..( 7): Matrix.003 file - promoters60/4771348
ttatgtc

SEQ ID NO: 59870 - DNA, 10 bp, Unknown
  misc_feature (1)..( 10): Matrix.003 file - promoters60/4771348
ttttaataac

SEQ ID NO: 59871 - DNA, 6 bp, Unknown
  misc_feature (1)..( 6): Matrix.003 file - promoters60/4771348
aaaatc

SEQ ID NO: 59872 - DNA, 7 bp, Unknown
  misc_feature (1)..( 7): Matrix.003 file - promoters60/4771348
gattcag

SEQ ID NO: 59873 - DNA, 7 bp, Unknown
  misc_feature (1)..( 7): Matrix.003 file - promoters60/4771348
gatcgat

SEQ ID NO: 59874 - DNA, 10 bp, Unknown
  misc_feature (1)..( 10): Matrix.003 file - promoters60/4771360
acaaacaaaa

SEQ ID NO: 59875 - DNA, 7 bp, Unknown
  misc_feature (1)..( 7): Matrix.003 file - promoters60/4771360
tttattt

SEQ ID NO: 59876 - DNA, 13 bp, Unknown
  misc_feature (1)..( 13): Matrix.003 file - promoters60/4771360
acaatataagtta

SEQ ID NO: 59877 - DNA, 7 bp, Unknown
  misc_feature (1)..( 7): Matrix.003 file - promoters60/4771360
tttaatt

SEQ ID NO: 59878 - DNA, 12 bp, Unknown
  misc_feature (1)..( 12): Matrix.003 file - promoters60/4771360
caataaaagtta

SEQ ID NO: 59879 - DNA, 7 bp, Unknown
  misc_feature (1)..( 7): Matrix.003 file - promoters60/4771385
tgggaaa

SEQ ID NO: 59880 - DNA, 7 bp, Unknown
  misc_feature (1)..( 7): Matrix.003 file - promoters60/4771385
ttcattt

SEQ ID NO: 59881 - DNA, 9 bp, Unknown
  misc_feature (1)..( 9): Matrix.003 file - promoters60/4771385
atgtttctc

SEQ ID NO: 59882 - DNA, 9 bp, Unknown
  misc_feature (1)..( 9): Matrix.003 file - promoters60/4771385
tttctgttt

SEQ ID NO: 59883 - DNA, 7 bp, Unknown
  misc_feature (1)..( 7): Matrix.003 file - promoters60/4771385
gttcctt

SEQ ID NO: 59884 - DNA, 9 bp, Unknown
  misc_feature (1)..( 9): Matrix.003 file - promoters60/4771385
aacaagaaa

SEQ ID NO: 59885 - DNA, 11 bp, Unknown
  misc_feature (1)..( 11): Matrix.003 file - promoters60/4771385
tttttaagaac

SEQ ID NO: 59886 - DNA, 8 bp, Unknown
  misc_feature (1)..( 8): Matrix.003 file - promoters60/4771385
gtcaccga

SEQ ID NO: 59887 - DNA, 7 bp, Unknown
  misc_feature (1)..( 7): Matrix.003 file - promoters60/4771385
tccagtg

SEQ ID NO: 59888 - DNA, 7 bp, Unknown
  misc_feature (1)..( 7): Matrix.003 file - promoters60/4771385
ataccct

SEQ ID NO: 59889 - DNA, 8 bp, Unknown
  misc_feature (1)..( 8): Matrix.003 file - promoters60/4771385
cttcaaag

SEQ ID NO: 59890 - DNA, 6 bp, Unknown
  misc_feature (1)..( 6): Matrix.003 file - promoters60/4771385
caccaa

SEQ ID NO: 59891 - DNA, 12 bp, Unknown
  misc_feature (1)..( 12): Matrix.003 file - promoters60/4771385
atagagaaacaa

SEQ ID NO: 59892 - DNA, 8 bp, Unknown
  misc_feature (1)..( 8): Matrix.003 file - promoters60/4771385
gatcgatg

SEQ ID NO: 59893 - DNA, 7 bp, Unknown
  misc_feature (1)..( 7): Matrix.003 file - promoters60/4771385
tggagtt

SEQ ID NO: 59894 - DNA, 10 bp, Unknown
  misc_feature (1)..( 10): Matrix.003 file - promoters60/4771385
atatagtata

SEQ ID NO: 59895 - DNA, 7 bp, Unknown
  misc_feature (1)..( 7): Matrix.003 file - promoters60/4771385
gatcaaa

SEQ ID NO: 59896 - DNA, 8 bp, Unknown
  misc_feature (1)..( 8): Matrix.003 file - promoters60/4771385
agtcagaa

SEQ ID NO: 59897 - DNA, 7 bp, Unknown
  misc_feature (1)..( 7): Matrix.003 file - promoters60/4771385
tttcggt

SEQ ID NO: 59898 - DNA, 8 bp, Unknown
  misc_feature (1)..( 8): Matrix.003 file - promoters60/4771407
cagattat

SEQ ID NO: 59899 - DNA, 12 bp, Unknown
  misc_feature (1)..( 12): Matrix.003 file - promoters60/4771407
aaatgtcatttt

SEQ ID NO: 59900 - DNA, 7 bp, Unknown
  misc_feature (1)..( 7): Matrix.003 file - promoters60/4771407
attttgt

SEQ ID NO: 59901 - DNA, 9 bp, Unknown
  misc_feature (1)..( 9): Matrix.003 file - promoters60/4771407
aatggaaga

SEQ ID NO: 59902 - DNA, 11 bp, Unknown
  misc_feature (1)..( 11): Matrix.003 file - promoters60/4771407
gatttttgtta

SEQ ID NO: 59903 - DNA, 8 bp, Unknown
  misc_feature (1)..( 8): Matrix.003 file - promoters60/4771410
ttatctat

SEQ ID NO: 59904 - DNA, 6 bp, Unknown
  misc_feature (1)..( 6): Matrix.003 file - promoters60/4771426
atattg

SEQ ID NO: 59905 - DNA, 10 bp, Unknown
  misc_feature (1)..( 10): Matrix.003 file - promoters60/4771426
attacaatat

SEQ ID NO: 59906 - DNA, 20 bp, Unknown
  misc_feature (1)..( 20): Matrix.003 file - promoters60/4771426
aaagttgctacaaattatag

SEQ ID NO: 59907 - DNA, 22 bp, Unknown
  misc_feature (1)..( 22): Matrix.003 file - promoters60/4771426
tcttttctgattttgtttctca

SEQ ID NO: 59908 - DNA, 7 bp, Unknown
  misc_feature (1)..( 7): Matrix.003 file - promoters60/4771426
taccaaa

SEQ ID NO: 59909 - DNA, 8 bp, Unknown
  misc_feature (1)..( 8): Matrix.003 file - promoters60/4771426
caatatga

SEQ ID NO: 59910 - DNA, 7 bp, Unknown
  misc_feature (1)..( 7): Matrix.003 file - promoters60/4771426
ctcaaat

SEQ ID NO: 59911 - DNA, 7 bp, Unknown
  misc_feature (1)..( 7): Matrix.003 file - promoters60/4771426
aaatata

SEQ ID NO: 59912 - DNA, 7 bp, Unknown
  misc_feature (1)..( 7): Matrix.003 file - promoters60/4771426
ttcaatg

SEQ ID NO: 59913 - DNA, 7 bp, Unknown
  misc_feature (1)..( 7): Matrix.003 file - promoters60/4771426
caaatct

SEQ ID NO: 59914 - DNA, 7 bp, Unknown
  misc_feature (1)..( 7): Matrix.003 file - promoters60/4771426
aattctt

SEQ ID NO: 59915 - DNA, 8 bp, Unknown
  misc_feature (1)..( 8): Matrix.003 file - promoters60/4771426
tcttttct

SEQ ID NO: 59916 - DNA, 8 bp, Unknown
  misc_feature (1)..( 8): Matrix.003 file - promoters60/4771426
gataaaat

SEQ ID NO: 59917 - DNA, 6 bp, Unknown
  misc_feature (1)..( 6): Matrix.003 file - promoters60/4771426
atagga

SEQ ID NO: 59918 - DNA, 6 bp, Unknown
  misc_feature (1)..( 6): Matrix.003 file - promoters60/4771426
atagga

SEQ ID NO: 59919 - DNA, 8 bp, Unknown
  misc_feature (1)..( 8): Matrix.003 file - promoters60/4771426
ataaaatt

SEQ ID NO: 59920 - DNA, 6 bp, Unknown
  misc_feature (1)..( 6): Matrix.003 file - promoters60/4771426
aaaaaa

SEQ ID NO: 59921 - DNA, 12 bp, Unknown
  misc_feature (1)..( 12): Matrix.003 file - promoters60/4771426
aaaaaataaaaa

SEQ ID NO: 59922 - DNA, 7 bp, Unknown
  misc_feature (1)..( 7): Matrix.003 file - promoters60/4771426
gcacaaa

SEQ ID NO: 59923 - DNA, 6 bp, Unknown
  misc_feature (1)..( 6): Matrix.003 file - promoters60/4771426
ttgata

SEQ ID NO: 59924 - DNA, 7 bp, Unknown
  misc_feature (1)..( 7): Matrix.003 file - promoters60/4771426
tttccta

SEQ ID NO: 59925 - DNA, 9 bp, Unknown
  misc_feature (1)..( 9): Matrix.003 file - promoters60/4771426
aaaaataaa

SEQ ID NO: 59926 - DNA, 9 bp, Unknown
  misc_feature (1)..( 9): Matrix.003 file - promoters60/4771426
aaacaaaaa

SEQ ID NO: 59927 - DNA, 8 bp, Unknown
  misc_feature (1)..( 8): Matrix.003 file - promoters60/4771426
ctaaatat

SEQ ID NO: 59928 - DNA, 6 bp, Unknown
  misc_feature (1)..( 6): Matrix.003 file - promoters60/4771426
aaatta

SEQ ID NO: 59929 - DNA, 8 bp, Unknown
  misc_feature (1)..( 8): Matrix.003 file - promoters60/4771441
gttttttt

SEQ ID NO: 59930 - DNA, 9 bp, Unknown
  misc_feature (1)..( 9): Matrix.003 file - promoters60/4771441
gtttttcat

SEQ ID NO: 59931 - DNA, 10 bp, Unknown
  misc_feature (1)..( 10): Matrix.003 file - promoters60/4771441
tctattcttt

SEQ ID NO: 59932 - DNA, 7 bp, Unknown
  misc_feature (1)..( 7): Matrix.003 file - promoters60/4771441
tttaata

SEQ ID NO: 59933 - DNA, 8 bp, Unknown
  misc_feature (1)..( 8): Matrix.003 file - promoters60/4771441
catatact

SEQ ID NO: 59934 - DNA, 15 bp, Unknown
  misc_feature (1)..( 15): Matrix.003 file - promoters60/4771441
ctatataatagtagc

SEQ ID NO: 59935 - DNA, 6 bp, Unknown
  misc_feature (1)..( 6): Matrix.003 file - promoters60/4771441
catttt

SEQ ID NO: 59936 - DNA, 7 bp, Unknown
  misc_feature (1)..( 7): Matrix.003 file - promoters60/4771441
ataacca

SEQ ID NO: 59937 - DNA, 6 bp, Unknown
  misc_feature (1)..( 6): Matrix.003 file - promoters60/4771441
ttatat

SEQ ID NO: 59938 - DNA, 7 bp, Unknown
  misc_feature (1)..( 7): Matrix.003 file - promoters60/4771441
tcaatat

SEQ ID NO: 59939 - DNA, 6 bp, Unknown
  misc_feature (1)..( 6): Matrix.003 file - promoters60/4771441
ttgctt

SEQ ID NO: 59940 - DNA, 8 bp, Unknown
  misc_feature (1)..( 8): Matrix.003 file - promoters60/4771441
tataatgt

SEQ ID NO: 59941 - DNA, 7 bp, Unknown
  misc_feature (1)..( 7): Matrix.003 file - promoters60/4771441
ctatttt

SEQ ID NO: 59942 - DNA, 6 bp, Unknown
  misc_feature (1)..( 6): Matrix.003 file - promoters60/4771441
cagaaa

SEQ ID NO: 59943 - DNA, 6 bp, Unknown
  misc_feature (1)..( 6): Matrix.003 file - promoters60/4771441
aaagag

SEQ ID NO: 59944 - DNA, 6 bp, Unknown
  misc_feature (1)..( 6): Matrix.003 file - promoters60/4771441
ctgaaa

SEQ ID NO: 59945 - DNA, 12 bp, Unknown
  misc_feature (1)..( 12): Matrix.003 file - promoters60/4771457
ataaaacctaaa

SEQ ID NO: 59946 - DNA, 7 bp, Unknown
  misc_feature (1)..( 7): Matrix.003 file - promoters60/4771457
attcctt

SEQ ID NO: 59947 - DNA, 10 bp, Unknown
  misc_feature (1)..( 10): Matrix.003 file - promoters60/4771457
ggtttatttt

SEQ ID NO: 59948 - DNA, 10 bp, Unknown
  misc_feature (1)..( 10): Matrix.003 file - promoters60/4771464
attttgttat

SEQ ID NO: 59949 - DNA, 8 bp, Unknown
  misc_feature (1)..( 8): Matrix.003 file - promoters60/4771467
aaaaatgt

SEQ ID NO: 59950 - DNA, 7 bp, Unknown
  misc_feature (1)..( 7): Matrix.003 file - promoters60/4771467
ttcaatt

SEQ ID NO: 59951 - DNA, 9 bp, Unknown
  misc_feature (1)..( 9): Matrix.003 file - promoters60/4771467
tataatttg

SEQ ID NO: 59952 - DNA, 7 bp, Unknown
  misc_feature (1)..( 7): Matrix.003 file - promoters60/4771467
tataaaa

SEQ ID NO: 59953 - DNA, 7 bp, Unknown
  misc_feature (1)..( 7): Matrix.003 file - promoters60/4771467
tgaatat

SEQ ID NO: 59954 - DNA, 7 bp, Unknown
  misc_feature (1)..( 7): Matrix.003 file - promoters60/4771467
aaaacaa

SEQ ID NO: 59955 - DNA, 7 bp, Unknown
  misc_feature (1)..( 7): Matrix.003 file - promoters60/4771467
ataccaa

SEQ ID NO: 59956 - DNA, 6 bp, Unknown
  misc_feature (1)..( 6): Matrix.003 file - promoters60/4771467
aaaaat

SEQ ID NO: 59957 - DNA, 7 bp, Unknown
  misc_feature (1)..( 7): Matrix.003 file - promoters60/4771467
aagaaag

SEQ ID NO: 59958 - DNA, 7 bp, Unknown
  misc_feature (1)..( 7): Matrix.003 file - promoters60/4771467
tcataat

SEQ ID NO: 59959 - DNA, 6 bp, Unknown
  misc_feature (1)..( 6): Matrix.003 file - promoters60/4771467
attgtt

SEQ ID NO: 59960 - DNA, 8 bp, Unknown
  misc_feature (1)..( 8): Matrix.003 file - promoters60/4771472
caaatgtg

SEQ ID NO: 59961 - DNA, 9 bp, Unknown
  misc_feature (1)..( 9): Matrix.003 file - promoters60/4771472
tcttcttta

SEQ ID NO: 59962 - DNA, 8 bp, Unknown
  misc_feature (1)..( 8): Matrix.003 file - promoters60/4771472
ataaatct

SEQ ID NO: 59963 - DNA, 10 bp, Unknown
  misc_feature (1)..( 10): Matrix.003 file - promoters60/4771472
tgtatcgtaa

SEQ ID NO: 59964 - DNA, 8 bp, Unknown
  misc_feature (1)..( 8): Matrix.003 file - promoters60/4771472
aaggtttt

SEQ ID NO: 59965 - DNA, 21 bp, Unknown
  misc_feature (1)..( 21): Matrix.003 file - promoters60/4771472
aacggctaatttctcttcttc

SEQ ID NO: 59966 - DNA, 10 bp, Unknown
  misc_feature (1)..( 10): Matrix.003 file - promoters60/4771472
tttctcttct

SEQ ID NO: 59967 - DNA, 6 bp, Unknown
  misc_feature (1)..( 6): Matrix.003 file - promoters60/4771472
aaattt

SEQ ID NO: 59968 - DNA, 12 bp, Unknown
  misc_feature (1)..( 12): Matrix.003 file - promoters60/4771472
tttattttctgt

SEQ ID NO: 59969 - DNA, 9 bp, Unknown
  misc_feature (1)..( 9): Matrix.003 file - promoters60/4771478
ttttttgtt

SEQ ID NO: 59970 - DNA, 13 bp, Unknown
  misc_feature (1)..( 13): Matrix.003 file - promoters60/4771478
tatataaatcctt

SEQ ID NO: 59971 - DNA, 9 bp, Unknown
  misc_feature (1)..( 9): Matrix.003 file - promoters60/4771478
tctttttaa

SEQ ID NO: 59972 - DNA, 9 bp, Unknown
  misc_feature (1)..( 9): Matrix.003 file - promoters60/4771478
catttttct

SEQ ID NO: 59973 - DNA, 9 bp, Unknown
  misc_feature (1)..( 9): Matrix.003 file - promoters60/4771495
ttcataaat

SEQ ID NO: 59974 - DNA, 11 bp, Unknown
  misc_feature (1)..( 11): Matrix.003 file - promoters60/4771495
tttaaagatat

SEQ ID NO: 59975 - DNA, 14 bp, Unknown
  misc_feature (1)..( 14): Matrix.003 file - promoters60/4771495
gatattttttataa

SEQ ID NO: 59976 - DNA, 7 bp, Unknown
  misc_feature (1)..( 7): Matrix.003 file - promoters60/4771502
attattt

SEQ ID NO: 59977 - DNA, 7 bp, Unknown
  misc_feature (1)..( 7): Matrix.003 file - promoters60/4771502
caatttt

SEQ ID NO: 59978 - DNA, 13 bp, Unknown
  misc_feature (1)..( 13): Matrix.003 file - promoters60/4771502
atatatttcattt

SEQ ID NO: 59979 - DNA, 8 bp, Unknown
  misc_feature (1)..( 8): Matrix.003 file - promoters60/4771502
taatcgat

SEQ ID NO: 59980 - DNA, 6 bp, Unknown
  misc_feature (1)..( 6): Matrix.003 file - promoters60/4771502
gtaatt

SEQ ID NO: 59981 - DNA, 7 bp, Unknown
  misc_feature (1)..( 7): Matrix.003 file - promoters60/4771502
tttaata

SEQ ID NO: 59982 - DNA, 8 bp, Unknown
  misc_feature (1)..( 8): Matrix.003 file - promoters60/4771502
tttggttt

SEQ ID NO: 59983 - DNA, 6 bp, Unknown
  misc_feature (1)..( 6): Matrix.003 file - promoters60/4771502
attgga

SEQ ID NO: 59984 - DNA, 7 bp, Unknown
  misc_feature (1)..( 7): Matrix.003 file - promoters60/4771502
aggccca

SEQ ID NO: 59985 - DNA, 6 bp, Unknown
  misc_feature (1)..( 6): Matrix.003 file - promoters60/4771502
cccaat

SEQ ID NO: 59986 - DNA, 6 bp, Unknown
  misc_feature (1)..( 6): Matrix.003 file - promoters60/4771502
caatta

SEQ ID NO: 59987 - DNA, 7 bp, Unknown
  misc_feature (1)..( 7): Matrix.003 file - promoters60/4771502
tttcact

SEQ ID NO: 59988 - DNA, 13 bp, Unknown
  misc_feature (1)..( 13): Matrix.003 file - promoters60/4771502
caacactatactg

SEQ ID NO: 59989 - DNA, 6 bp, Unknown
  misc_feature (1)..( 6): Matrix.003 file - promoters60/4771502
tctaaa

SEQ ID NO: 59990 - DNA, 8 bp, Unknown
  misc_feature (1)..( 8): Matrix.003 file - promoters60/4771502
attttcta

SEQ ID NO: 59991 - DNA, 9 bp, Unknown
  misc_feature (1)..( 9): Matrix.003 file - promoters60/4771502
taaaagccg

SEQ ID NO: 59992 - DNA, 6 bp, Unknown
  misc_feature (1)..( 6): Matrix.003 file - promoters60/4771502
gataaa

SEQ ID NO: 59993 - DNA, 6 bp, Unknown
  misc_feature (1)..( 6): Matrix.003 file - promoters60/4771502
tcacag

SEQ ID NO: 59994 - DNA, 7 bp, Unknown
  misc_feature (1)..( 7): Matrix.003 file - promoters60/4771502
tcaaagg

SEQ ID NO: 59995 - DNA, 6 bp, Unknown
  misc_feature (1)..( 6): Matrix.003 file - promoters60/4771502
ccactt

SEQ ID NO: 59996 - DNA, 13 bp, Unknown
  misc_feature (1)..( 13): Matrix.003 file - promoters60/4771519
aaatctctcacaa

SEQ ID NO: 59997 - DNA, 7 bp, Unknown
  misc_feature (1)..( 7): Matrix.003 file - promoters60/4771523
aagaaag

SEQ ID NO: 59998 - DNA, 10 bp, Unknown
  misc_feature (1)..( 10): Matrix.003 file - promoters60/4771586
actatttaaa

SEQ ID NO: 59999 - DNA, 8 bp, Unknown
  misc_feature (1)..( 8): Matrix.003 file - promoters60/4771638
aaaaaaaa

SEQ ID NO: 60000 - DNA, 7 bp, Unknown
  misc_feature (1)..( 7): Matrix.003 file - promoters60/4771638
tatcaaa

SEQ ID NO: 60001 - DNA, 6 bp, Unknown
  misc_feature (1)..( 6): Matrix.003 file - promoters60/4771638
tataat

SEQ ID NO: 60002 - DNA, 6 bp, Unknown
  misc_feature (1)..( 6): Matrix.003 file - promoters60/4771638
ttttgt

SEQ ID NO: 60003 - DNA, 11 bp, Unknown
  misc_feature (1)..( 11): Matrix.003 file - promoters60/4771638
agtgattaatc

SEQ ID NO: 60004 - DNA, 10 bp, Unknown
  misc_feature (1)..( 10): Matrix.003 file - promoters60/4771638
tttattaaag

SEQ ID NO: 60005 - DNA, 6 bp, Unknown
  misc_feature (1)..( 6): Matrix.003 file - promoters60/4771638
agctct

SEQ ID NO: 60006 - DNA, 9 bp, Unknown
  misc_feature (1)..( 9): Matrix.003 file - promoters60/4771638
aacaacttt

SEQ ID NO: 60007 - DNA, 9 bp, Unknown
  misc_feature (1)..( 9): Matrix.003 file - promoters60/4771638
ttttataca

SEQ ID NO: 60008 - DNA, 6 bp, Unknown
  misc_feature (1)..( 6): Matrix.003 file - promoters60/4771638
cactat

SEQ ID NO: 60009 - DNA, 8 bp, Unknown
  misc_feature (1)..( 8): Matrix.003 file - promoters60/4771638
acagctaa

SEQ ID NO: 60010 - DNA, 9 bp, Unknown
  misc_feature (1)..( 9): Matrix.003 file - promoters60/4771638
acataaaaa

SEQ ID NO: 60011 - DNA, 7 bp, Unknown
  misc_feature (1)..( 7): Matrix.003 file - promoters60/4771638
ttgaaac

SEQ ID NO: 60012 - DNA, 7 bp, Unknown
  misc_feature (1)..( 7): Matrix.003 file - promoters60/4771638
atgtttt

SEQ ID NO: 60013 - DNA, 7 bp, Unknown
  misc_feature (1)..( 7): Matrix.003 file - promoters60/4771638
ctacctc

SEQ ID NO: 60014 - DNA, 7 bp, Unknown
  misc_feature (1)..( 7): Matrix.003 file - promoters60/4771638
ctctgga

SEQ ID NO: 60015 - DNA, 7 bp, Unknown
  misc_feature (1)..( 7): Matrix.003 file - promoters60/4771638
agacaaa

SEQ ID NO: 60016 - DNA, 6 bp, Unknown
  misc_feature (1)..( 6): Matrix.003 file - promoters60/4771638
taactc

SEQ ID NO: 60017 - DNA, 6 bp, Unknown
  misc_feature (1)..( 6): Matrix.003 file - promoters60/4771638
acaaaa

SEQ ID NO: 60018 - DNA, 7 bp, Unknown
  misc_feature (1)..( 7): Matrix.003 file - promoters60/4771638
aaaagtt

SEQ ID NO: 60019 - DNA, 7 bp, Unknown
  misc_feature (1)..( 7): Matrix.003 file - promoters60/4771638
tttctta

SEQ ID NO: 60020 - DNA, 11 bp, Unknown
  misc_feature (1)..( 11): Matrix.003 file - promoters60/4771646
tttttctctgc

SEQ ID NO: 60021 - DNA, 14 bp, Unknown
  misc_feature (1)..( 14): Matrix.003 file - promoters60/4771677
gtttaattatattg

SEQ ID NO: 60022 - DNA, 13 bp, Unknown
  misc_feature (1)..( 13): Matrix.003 file - promoters60/4771677
aaaaatgttaatt

SEQ ID NO: 60023 - DNA, 11 bp, Unknown
  misc_feature (1)..( 11): Matrix.003 file - promoters60/4771677
agttgactttt

SEQ ID NO: 60024 - DNA, 10 bp, Unknown
  misc_feature (1)..( 10): Matrix.003 file - promoters60/4771677
aaaatgttta

SEQ ID NO: 60025 - DNA, 10 bp, Unknown
  misc_feature (1)..( 10): Matrix.003 file - promoters60/4771677
aaattatttc

SEQ ID NO: 60026 - DNA, 10 bp, Unknown
  misc_feature (1)..( 10): Matrix.003 file - promoters60/4771677
gtaaaatttt

SEQ ID NO: 60027 - DNA, 11 bp, Unknown
  misc_feature (1)..( 11): Matrix.003 file - promoters60/4771713
aaacaattatt

SEQ ID NO: 60028 - DNA, 7 bp, Unknown
  misc_feature (1)..( 7): Matrix.003 file - promoters60/4771713
attaatt

SEQ ID NO: 60029 - DNA, 6 bp, Unknown
  misc_feature (1)..( 6): Matrix.003 file - promoters60/4771713
ttattt

SEQ ID NO: 60030 - DNA, 7 bp, Unknown
  misc_feature (1)..( 7): Matrix.003 file - promoters60/4771713
aaaattg

SEQ ID NO: 60031 - DNA, 7 bp, Unknown
  misc_feature (1)..( 7): Matrix.003 file - promoters60/4771713
ccaaata

SEQ ID NO: 60032 - DNA, 7 bp, Unknown
  misc_feature (1)..( 7): Matrix.003 file - promoters60/4771713
ctcagca

SEQ ID NO: 60033 - DNA, 7 bp, Unknown
  misc_feature (1)..( 7): Matrix.003 file - promoters60/4771713
atctgag

SEQ ID NO: 60034 - DNA, 6 bp, Unknown
  misc_feature (1)..( 6): Matrix.003 file - promoters60/4771713
aaattg

SEQ ID NO: 60035 - DNA, 8 bp, Unknown
  misc_feature (1)..( 8): Matrix.003 file - promoters60/4771713
ttattaag

SEQ ID NO: 60036 - DNA, 8 bp, Unknown
  misc_feature (1)..( 8): Matrix.003 file - promoters60/4771713
aacaaatt

SEQ ID NO: 60037 - DNA, 8 bp, Unknown
  misc_feature (1)..( 8): Matrix.003 file - promoters60/4771713
cgaaccca

SEQ ID NO: 60038 - DNA, 7 bp, Unknown
  misc_feature (1)..( 7): Matrix.003 file - promoters60/4771713
aaagaaa

SEQ ID NO: 60039 - DNA, 7 bp, Unknown
  misc_feature (1)..( 7): Matrix.003 file - promoters60/4771713
aataaaa

SEQ ID NO: 60040 - DNA, 7 bp, Unknown
  misc_feature (1)..( 7): Matrix.003 file - promoters60/4771713
aaacttt

SEQ ID NO: 60041 - DNA, 7 bp, Unknown
  misc_feature (1)..( 7): Matrix.003 file - promoters60/4771713
ctaaaat

SEQ ID NO: 60042 - DNA, 7 bp, Unknown
  misc_feature (1)..( 7): Matrix.003 file - promoters60/4771713
ttttgtt

SEQ ID NO: 60043 - DNA, 7 bp, Unknown
  misc_feature (1)..( 7): Matrix.003 file - promoters60/4771713
tctgttc

SEQ ID NO: 60044 - DNA, 6 bp, Unknown
  misc_feature (1)..( 6): Matrix.003 file - promoters60/4771713
aataat

SEQ ID NO: 60045 - DNA, 6 bp, Unknown
  misc_feature (1)..( 6): Matrix.003 file - promoters60/4771725
atcaat

SEQ ID NO: 60046 - DNA, 6 bp, Unknown
  misc_feature (1)..( 6): Matrix.003 file - promoters60/4771725
acactt

SEQ ID NO: 60047 - DNA, 11 bp, Unknown
  misc_feature (1)..( 11): Matrix.003 file - promoters60/4771725
taacagaataa

SEQ ID NO: 60048 - DNA, 6 bp, Unknown
  misc_feature (1)..( 6): Matrix.003 file - promoters60/4771725
gtgatc

SEQ ID NO: 60049 - DNA, 6 bp, Unknown
  misc_feature (1)..( 6): Matrix.003 file - promoters60/4771725
gatcgt

SEQ ID NO: 60050 - DNA, 5 bp, Unknown
  misc_feature (1)..( 5): Matrix.003 file - promoters60/4771725
aaata

SEQ ID NO: 60051 - DNA, 6 bp, Unknown
  misc_feature (1)..( 6): Matrix.003 file - promoters60/4771725
agaatc

SEQ ID NO: 60052 - DNA, 8 bp, Unknown
  misc_feature (1)..( 8): Matrix.003 file - promoters60/4771725
agagaaga

SEQ ID NO: 60053 - DNA, 8 bp, Unknown
  misc_feature (1)..( 8): Matrix.003 file - promoters60/4771725
aataaaat

SEQ ID NO: 60054 - DNA, 7 bp, Unknown
  misc_feature (1)..( 7): Matrix.003 file - promoters60/4771725
aaaagaa

SEQ ID NO: 60055 - DNA, 9 bp, Unknown
  misc_feature (1)..( 9): Matrix.003 file - promoters60/4771725
cttaaatat

SEQ ID NO: 60056 - DNA, 8 bp, Unknown
  misc_feature (1)..( 8): Matrix.003 file - promoters60/4771725
cttcaaaa

SEQ ID NO: 60057 - DNA, 6 bp, Unknown
  misc_feature (1)..( 6): Matrix.003 file - promoters60/4771725
atcaaa

SEQ ID NO: 60058 - DNA, 7 bp, Unknown
  misc_feature (1)..( 7): Matrix.003 file - promoters60/4771725
aatagtt

SEQ ID NO: 60059 - DNA, 7 bp, Unknown
  misc_feature (1)..( 7): Matrix.003 file - promoters60/4771733
aaattaa

SEQ ID NO: 60060 - DNA, 6 bp, Unknown
  misc_feature (1)..( 6): Matrix.003 file - promoters60/4771733
atacaa

SEQ ID NO: 60061 - DNA, 7 bp, Unknown
  misc_feature (1)..( 7): Matrix.003 file - promoters60/4771733
aaaagtt

SEQ ID NO: 60062 - DNA, 9 bp, Unknown
  misc_feature (1)..( 9): Matrix.003 file - promoters60/4771733
caaaaaaaa

SEQ ID NO: 60063 - DNA, 7 bp, Unknown
  misc_feature (1)..( 7): Matrix.003 file - promoters60/4771733
aaaaaaa

SEQ ID NO: 60064 - DNA, 8 bp, Unknown
  misc_feature (1)..( 8): Matrix.003 file - promoters60/4771733
ccttatta

SEQ ID NO: 60065 - DNA, 10 bp, Unknown
  misc_feature (1)..( 10): Matrix.003 file - promoters60/4771733
gtgacataac

SEQ ID NO: 60066 - DNA, 7 bp, Unknown
  misc_feature (1)..( 7): Matrix.003 file - promoters60/4771733
taccatt

SEQ ID NO: 60067 - DNA, 6 bp, Unknown
  misc_feature (1)..( 6): Matrix.003 file - promoters60/4771733
caagag

SEQ ID NO: 60068 - DNA, 7 bp, Unknown
  misc_feature (1)..( 7): Matrix.003 file - promoters60/4771733
agagtga

SEQ ID NO: 60069 - DNA, 8 bp, Unknown
  misc_feature (1)..( 8): Matrix.003 file - promoters60/4771733
gccgacaa

SEQ ID NO: 60070 - DNA, 9 bp, Unknown
  misc_feature (1)..( 9): Matrix.003 file - promoters60/4771733
gtcattgaa

SEQ ID NO: 60071 - DNA, 7 bp, Unknown
  misc_feature (1)..( 7): Matrix.003 file - promoters60/4771733
aaacaaa

SEQ ID NO: 60072 - DNA, 7 bp, Unknown
  misc_feature (1)..( 7): Matrix.003 file - promoters60/4771733
acgagcc

SEQ ID NO: 60073 - DNA, 8 bp, Unknown
  misc_feature (1)..( 8): Matrix.003 file - promoters60/4771733
taaagtaa

SEQ ID NO: 60074 - DNA, 7 bp, Unknown
  misc_feature (1)..( 7): Matrix.003 file - promoters60/4771733
ttccaaa

SEQ ID NO: 60075 - DNA, 6 bp, Unknown
  misc_feature (1)..( 6): Matrix.003 file - promoters60/4771733
ccaaac

SEQ ID NO: 60076 - DNA, 6 bp, Unknown
  misc_feature (1)..( 6): Matrix.003 file - promoters60/4771733
ggtttt

SEQ ID NO: 60077 - DNA, 6 bp, Unknown
  misc_feature (1)..( 6): Matrix.003 file - promoters60/4771733
ttaatt

SEQ ID NO: 60078 - DNA, 8 bp, Unknown
  misc_feature (1)..( 8): Matrix.003 file - promoters60/4771733
gttagtat

SEQ ID NO: 60079 - DNA, 6 bp, Unknown
  misc_feature (1)..( 6): Matrix.003 file - promoters60/4771733
ttggcg

SEQ ID NO: 60080 - DNA, 7 bp, Unknown
  misc_feature (1)..( 7): Matrix.003 file - promoters60/4771733
atattta

SEQ ID NO: 60081 - DNA, 11 bp, Unknown
  misc_feature (1)..( 11): Matrix.003 file - promoters60/4771745
ttaaattttaa

SEQ ID NO: 60082 - DNA, 7 bp, Unknown
  misc_feature (1)..( 7): Matrix.003 file - promoters60/4771745
attttgt

SEQ ID NO: 60083 - DNA, 6 bp, Unknown
  misc_feature (1)..( 6): Matrix.003 file - promoters60/4771745
ttaaaa

SEQ ID NO: 60084 - DNA, 10 bp, Unknown
  misc_feature (1)..( 10): Matrix.003 file - promoters60/4771745
gatcagaaat

SEQ ID NO: 60085 - DNA, 6 bp, Unknown
  misc_feature (1)..( 6): Matrix.003 file - promoters60/4771745
gataat

SEQ ID NO: 60086 - DNA, 8 bp, Unknown
  misc_feature (1)..( 8): Matrix.003 file - promoters60/4771745
tgaaaaaa

SEQ ID NO: 60087 - DNA, 7 bp, Unknown
  misc_feature (1)..( 7): Matrix.003 file - promoters60/4771745
aaaatga

SEQ ID NO: 60088 - DNA, 7 bp, Unknown
  misc_feature (1)..( 7): Matrix.003 file - promoters60/4771745
agactgt

SEQ ID NO: 60089 - DNA, 9 bp, Unknown
  misc_feature (1)..( 9): Matrix.003 file - promoters60/4771745
ataatatat

SEQ ID NO: 60090 - DNA, 7 bp, Unknown
  misc_feature (1)..( 7): Matrix.003 file - promoters60/4771745
ttgggct

SEQ ID NO: 60091 - DNA, 7 bp, Unknown
  misc_feature (1)..( 7): Matrix.003 file - promoters60/4771745
tactcaa

SEQ ID NO: 60092 - DNA, 7 bp, Unknown
  misc_feature (1)..( 7): Matrix.003 file - promoters60/4771745
attgttt

SEQ ID NO: 60093 - DNA, 7 bp, Unknown
  misc_feature (1)..( 7): Matrix.003 file - promoters60/4771745
tagaaaa

SEQ ID NO: 60094 - DNA, 8 bp, Unknown
  misc_feature (1)..( 8): Matrix.003 file - promoters60/4771745
aaattaga

SEQ ID NO: 60095 - DNA, 8 bp, Unknown
  misc_feature (1)..( 8): Matrix.003 file - promoters60/4771745
caaagtaa

SEQ ID NO: 60096 - DNA, 7 bp, Unknown
  misc_feature (1)..( 7): Matrix.003 file - promoters60/4771793
aagaata

SEQ ID NO: 60097 - DNA, 9 bp, Unknown
  misc_feature (1)..( 9): Matrix.003 file - promoters60/4771793
atacttttt

SEQ ID NO: 60098 - DNA, 9 bp, Unknown
  misc_feature (1)..( 9): Matrix.003 file - promoters60/4771793
ttttttctt

SEQ ID NO: 60099 - DNA, 9 bp, Unknown
  misc_feature (1)..( 9): Matrix.003 file - promoters60/4771793
tatatattt

SEQ ID NO: 60100 - DNA, 8 bp, Unknown
  misc_feature (1)..( 8): Matrix.003 file - promoters60/4771793
aagaaatt

SEQ ID NO: 60101 - DNA, 8 bp, Unknown
  misc_feature (1)..( 8): Matrix.003 file - promoters60/4771808
tagggttt

SEQ ID NO: 60102 - DNA, 7 bp, Unknown
  misc_feature (1)..( 7): Matrix.003 file - promoters60/4771808
tttggat

SEQ ID NO: 60103 - DNA, 10 bp, Unknown
  misc_feature (1)..( 10): Matrix.003 file - promoters60/4771808
ttgtgaatgt

SEQ ID NO: 60104 - DNA, 7 bp, Unknown
  misc_feature (1)..( 7): Matrix.003 file - promoters60/4771808
caaaaaa

SEQ ID NO: 60105 - DNA, 7 bp, Unknown
  misc_feature (1)..( 7): Matrix.003 file - promoters60/4771808
caaaaag

SEQ ID NO: 60106 - DNA, 8 bp, Unknown
  misc_feature (1)..( 8): Matrix.003 file - promoters60/4771808
ctgattct

SEQ ID NO: 60107 - DNA, 8 bp, Unknown
  misc_feature (1)..( 8): Matrix.003 file - promoters60/4771808
tttcctgt

SEQ ID NO: 60108 - DNA, 7 bp, Unknown
  misc_feature (1)..( 7): Matrix.003 file - promoters60/4771808
tctgtat

SEQ ID NO: 60109 - DNA, 7 bp, Unknown
  misc_feature (1)..( 7): Matrix.003 file - promoters60/4771808
aatatta

SEQ ID NO: 60110 - DNA, 7 bp, Unknown
  misc_feature (1)..( 7): Matrix.003 file - promoters60/4771808
gccatta

SEQ ID NO: 60111 - DNA, 6 bp, Unknown
  misc_feature (1)..( 6): Matrix.003 file - promoters60/4771808
gtacaa

SEQ ID NO: 60112 - DNA, 9 bp, Unknown
  misc_feature (1)..( 9): Matrix.003 file - promoters60/4771808
tttccaatt

SEQ ID NO: 60113 - DNA, 7 bp, Unknown
  misc_feature (1)..( 7): Matrix.003 file - promoters60/4771808
ttcaaag

SEQ ID NO: 60114 - DNA, 7 bp, Unknown
  misc_feature (1)..( 7): Matrix.003 file - promoters60/4771808
aacattt

SEQ ID NO: 60115 - DNA, 6 bp, Unknown
  misc_feature (1)..( 6): Matrix.003 file - promoters60/4771808
ataatt

SEQ ID NO: 60116 - DNA, 8 bp, Unknown
  misc_feature (1)..( 8): Matrix.003 file - promoters60/4771808
attagtgt

SEQ ID NO: 60117 - DNA, 9 bp, Unknown
  misc_feature (1)..( 9): Matrix.003 file - promoters60/4771808
ataaaccaa

SEQ ID NO: 60118 - DNA, 6 bp, Unknown
  misc_feature (1)..( 6): Matrix.003 file - promoters60/4771808
acctct

SEQ ID NO: 60119 - DNA, 7 bp, Unknown
  misc_feature (1)..( 7): Matrix.003 file - promoters60/4771808
tttattt

SEQ ID NO: 60120 - DNA, 9 bp, Unknown
  misc_feature (1)..( 9): Matrix.003 file - promoters60/4771853
gtttccttt

SEQ ID NO: 60121 - DNA, 8 bp, Unknown
  misc_feature (1)..( 8): Matrix.003 file - promoters60/4771853
aaccaata

SEQ ID NO: 60122 - DNA, 9 bp, Unknown
  misc_feature (1)..( 9): Matrix.003 file - promoters60/4771853
tttccttat

SEQ ID NO: 60123 - DNA, 4 bp, Unknown
  misc_feature (1)..( 4): Matrix.003 file - promoters60/4771872
caat

SEQ ID NO: 60124 - DNA, 10 bp, Unknown
  misc_feature (1)..( 10): Matrix.003 file - promoters60/4771872
aatgaaaatt

SEQ ID NO: 60125 - DNA, 10 bp, Unknown
  misc_feature (1)..( 10): Matrix.003 file - promoters60/4771872
gaagataagg

SEQ ID NO: 60126 - DNA, 13 bp, Unknown
  misc_feature (1)..( 13): Matrix.003 file - promoters60/4771879
tcgtcgtatctaa

SEQ ID NO: 60127 - DNA, 8 bp, Unknown
  misc_feature (1)..( 8): Matrix.003 file - promoters60/4771879
tatctaat

SEQ ID NO: 60128 - DNA, 7 bp, Unknown
  misc_feature (1)..( 7): Matrix.003 file - promoters60/4771879
aatagta

SEQ ID NO: 60129 - DNA, 6 bp, Unknown
  misc_feature (1)..( 6): Matrix.003 file - promoters60/4771879
aagaaa

SEQ ID NO: 60130 - DNA, 7 bp, Unknown
  misc_feature (1)..( 7): Matrix.003 file - promoters60/4771879
tatatgt

SEQ ID NO: 60131 - DNA, 8 bp, Unknown
  misc_feature (1)..( 8): Matrix.003 file - promoters60/4771879
gtaatttg

SEQ ID NO: 60132 - DNA, 6 bp, Unknown
  misc_feature (1)..( 6): Matrix.003 file - promoters60/4771879
caaata

SEQ ID NO: 60133 - DNA, 6 bp, Unknown
  misc_feature (1)..( 6): Matrix.003 file - promoters60/4771879
aataaa

SEQ ID NO: 60134 - DNA, 6 bp, Unknown
  misc_feature (1)..( 6): Matrix.003 file - promoters60/4771879
taatat

SEQ ID NO: 60135 - DNA, 8 bp, Unknown
  misc_feature (1)..( 8): Matrix.003 file - promoters60/4771879
cctgaatt

SEQ ID NO: 60136 - DNA, 8 bp, Unknown
  misc_feature (1)..( 8): Matrix.003 file - promoters60/4771879
taaaatat

SEQ ID NO: 60137 - DNA, 8 bp, Unknown
  misc_feature (1)..( 8): Matrix.003 file - promoters60/4771879
ttctaatt

SEQ ID NO: 60138 - DNA, 7 bp, Unknown
  misc_feature (1)..( 7): Matrix.003 file - promoters60/4771879
aaaaaat

SEQ ID NO: 60139 - DNA, 7 bp, Unknown
  misc_feature (1)..( 7): Matrix.003 file - promoters60/4771879
accctat

SEQ ID NO: 60140 - DNA, 6 bp, Unknown
  misc_feature (1)..( 6): Matrix.003 file - promoters60/4771879
aaattc

SEQ ID NO: 60141 - DNA, 8 bp, Unknown
  misc_feature (1)..( 8): Matrix.003 file - promoters60/4771879
catacaga

SEQ ID NO: 60142 - DNA, 11 bp, Unknown
  misc_feature (1)..( 11): Matrix.003 file - promoters60/4771895
ttcattaatta

SEQ ID NO: 60143 - DNA, 8 bp, Unknown
  misc_feature (1)..( 8): Matrix.003 file - promoters60/4771895
ttcatatc

SEQ ID NO: 60144 - DNA, 7 bp, Unknown
  misc_feature (1)..( 7): Matrix.003 file - promoters60/4771895
tttacaa

SEQ ID NO: 60145 - DNA, 8 bp, Unknown
  misc_feature (1)..( 8): Matrix.003 file - promoters60/4771895
gaaaattc

SEQ ID NO: 60146 - DNA, 11 bp, Unknown
  misc_feature (1)..( 11): Matrix.003 file - promoters60/4771895
ttcagaatcat

SEQ ID NO: 60147 - DNA, 7 bp, Unknown
  misc_feature (1)..( 7): Matrix.003 file - promoters60/4771895
aataaaa

SEQ ID NO: 60148 - DNA, 8 bp, Unknown
  misc_feature (1)..( 8): Matrix.003 file - promoters60/4771895
aaaattta

SEQ ID NO: 60149 - DNA, 6 bp, Unknown
  misc_feature (1)..( 6): Matrix.003 file - promoters60/4771895
tttaaa

SEQ ID NO: 60150 - DNA, 9 bp, Unknown
  misc_feature (1)..( 9): Matrix.003 file - promoters60/4771895
atcttcttc

SEQ ID NO: 60151 - DNA, 6 bp, Unknown
  misc_feature (1)..( 6): Matrix.003 file - promoters60/4771895
tagaat

SEQ ID NO: 60152 - DNA, 9 bp, Unknown
  misc_feature (1)..( 9): Matrix.003 file - promoters60/4771895
attagtttg

SEQ ID NO: 60153 - DNA, 6 bp, Unknown
  misc_feature (1)..( 6): Matrix.003 file - promoters60/4771895
aaacta

SEQ ID NO: 60154 - DNA, 6 bp, Unknown
  misc_feature (1)..( 6): Matrix.003 file - promoters60/4771895
tatttt

SEQ ID NO: 60155 - DNA, 6 bp, Unknown
  misc_feature (1)..( 6): Matrix.003 file - promoters60/4771895
cgtgat

SEQ ID NO: 60156 - DNA, 10 bp, Unknown
  misc_feature (1)..( 10): Matrix.003 file - promoters60/4771895
aaattaaata

SEQ ID NO: 60157 - DNA, 7 bp, Unknown
  misc_feature (1)..( 7): Matrix.003 file - promoters60/4771895
tttgtta

SEQ ID NO: 60158 - DNA, 6 bp, Unknown
  misc_feature (1)..( 6): Matrix.003 file - promoters60/4771895
aaaaca

SEQ ID NO: 60159 - DNA, 7 bp, Unknown
  misc_feature (1)..( 7): Matrix.003 file - promoters60/4771895
aaagaaa

SEQ ID NO: 60160 - DNA, 6 bp, Unknown
  misc_feature (1)..( 6): Matrix.003 file - promoters60/4771895
gagaaa

SEQ ID NO: 60161 - DNA, 8 bp, Unknown
  misc_feature (1)..( 8): Matrix.003 file - promoters60/4771911
ttatttat

SEQ ID NO: 60162 - DNA, 11 bp, Unknown
  misc_feature (1)..( 11): Matrix.003 file - promoters60/4771911
aaaaaaagaaa

SEQ ID NO: 60163 - DNA, 13 bp, Unknown
  misc_feature (1)..( 13): Matrix.003 file - promoters60/4771911
tttggaaaagaaa

SEQ ID NO: 60164 - DNA, 9 bp, Unknown
  misc_feature (1)..( 9): Matrix.003 file - promoters60/4771911
aaaataaaa

SEQ ID NO: 60165 - DNA, 8 bp, Unknown
  misc_feature (1)..( 8): Matrix.003 file - promoters60/4771911
aaaatatc

SEQ ID NO: 60166 - DNA, 8 bp, Unknown
  misc_feature (1)..( 8): Matrix.003 file - promoters60/4771911
aacaaaat

SEQ ID NO: 60167 - DNA, 13 bp, Unknown
  misc_feature (1)..( 13): Matrix.003 file - promoters60/4771911
gaaacaaaaacat

SEQ ID NO: 60168 - DNA, 8 bp, Unknown
  misc_feature (1)..( 8): Matrix.003 file - promoters60/4771913
tttttaaa

SEQ ID NO: 60169 - DNA, 10 bp, Unknown
  misc_feature (1)..( 10): Matrix.003 file - promoters60/4771913
acaaaaaaaa

SEQ ID NO: 60170 - DNA, 8 bp, Unknown
  misc_feature (1)..( 8): Matrix.003 file - promoters60/4771913
caaagaaa

SEQ ID NO: 60171 - DNA, 9 bp, Unknown
  misc_feature (1)..( 9): Matrix.003 file - promoters60/4771913
aaaatatat

SEQ ID NO: 60172 - DNA, 12 bp, Unknown
  misc_feature (1)..( 12): Matrix.003 file - promoters60/4771913
taaattttattt

SEQ ID NO: 60173 - DNA, 7 bp, Unknown
  misc_feature (1)..( 7): Matrix.003 file - promoters60/4771913
aaaaaaa

SEQ ID NO: 60174 - DNA, 10 bp, Unknown
  misc_feature (1)..( 10): Matrix.003 file - promoters60/4771913
tcaaaattaa

SEQ ID NO: 60175 - DNA, 9 bp, Unknown
  misc_feature (1)..( 9): Matrix.003 file - promoters60/4771928
atttatata

SEQ ID NO: 60176 - DNA, 14 bp, Unknown
  misc_feature (1)..( 14): Matrix.003 file - promoters60/4771928
agaaatacaatttt

SEQ ID NO: 60177 - DNA, 8 bp, Unknown
  misc_feature (1)..( 8): Matrix.003 file - promoters60/4771928
ctaaaaaa

SEQ ID NO: 60178 - DNA, 8 bp, Unknown
  misc_feature (1)..( 8): Matrix.003 file - promoters60/4771928
atttttgg

SEQ ID NO: 60179 - DNA, 10 bp, Unknown
  misc_feature (1)..( 10): Matrix.003 file - promoters60/4771928
tttcaaaaaa

SEQ ID NO: 60180 - DNA, 16 bp, Unknown
  misc_feature (1)..( 16): Matrix.003 file - promoters60/4771928
agaaataaactattcg

SEQ ID NO: 60181 - DNA, 6 bp, Unknown
  misc_feature (1)..( 6): Matrix.003 file - promoters60/4771952
attctc

SEQ ID NO: 60182 - DNA, 8 bp, Unknown
  misc_feature (1)..( 8): Matrix.003 file - promoters60/4771952
ctcaaatt

SEQ ID NO: 60183 - DNA, 7 bp, Unknown
  misc_feature (1)..( 7): Matrix.003 file - promoters60/4771952
tacaaaa

SEQ ID NO: 60184 - DNA, 7 bp, Unknown
  misc_feature (1)..( 7): Matrix.003 file - promoters60/4771952
aaaaagg

SEQ ID NO: 60185 - DNA, 6 bp, Unknown
  misc_feature (1)..( 6): Matrix.003 file - promoters60/4771952
tattta

SEQ ID NO: 60186 - DNA, 6 bp, Unknown
  misc_feature (1)..( 6): Matrix.003 file - promoters60/4771952
cttcaa

SEQ ID NO: 60187 - DNA, 6 bp, Unknown
  misc_feature (1)..( 6): Matrix.003 file - promoters60/4771952
tcttac

SEQ ID NO: 60188 - DNA, 6 bp, Unknown
  misc_feature (1)..( 6): Matrix.003 file - promoters60/4771952
tgataa

SEQ ID NO: 60189 - DNA, 7 bp, Unknown
  misc_feature (1)..( 7): Matrix.003 file - promoters60/4771952
ttaagtt

SEQ ID NO: 60190 - DNA, 8 bp, Unknown
  misc_feature (1)..( 8): Matrix.003 file - promoters60/4771952
tatagttg

SEQ ID NO: 60191 - DNA, 6 bp, Unknown
  misc_feature (1)..( 6): Matrix.003 file - promoters60/4771952
gaaaaa

SEQ ID NO: 60192 - DNA, 8 bp, Unknown
  misc_feature (1)..( 8): Matrix.003 file - promoters60/4771952
tgtataga

SEQ ID NO: 60193 - DNA, 7 bp, Unknown
  misc_feature (1)..( 7): Matrix.003 file - promoters60/4771952
aaaaata

SEQ ID NO: 60194 - DNA, 7 bp, Unknown
  misc_feature (1)..( 7): Matrix.003 file - promoters60/4771952
ataatat

SEQ ID NO: 60195 - DNA, 7 bp, Unknown
  misc_feature (1)..( 7): Matrix.003 file - promoters60/4771952
aaacgct

SEQ ID NO: 60196 - DNA, 9 bp, Unknown
  misc_feature (1)..( 9): Matrix.003 file - promoters60/4771952
aaaagaaaa

SEQ ID NO: 60197 - DNA, 7 bp, Unknown
  misc_feature (1)..( 7): Matrix.003 file - promoters60/4771952
ctggaat

SEQ ID NO: 60198 - DNA, 7 bp, Unknown
  misc_feature (1)..( 7): Matrix.003 file - promoters60/4771952
aaaactt

SEQ ID NO: 60199 - DNA, 8 bp, Unknown
  misc_feature (1)..( 8): Matrix.003 file - promoters60/4771952
cttaatta

SEQ ID NO: 60200 - DNA, 7 bp, Unknown
  misc_feature (1)..( 7): Matrix.003 file - promoters60/4771952
cacatat

SEQ ID NO: 60201 - DNA, 6 bp, Unknown
  misc_feature (1)..( 6): Matrix.003 file - promoters60/4771956
acactg

SEQ ID NO: 60202 - DNA, 6 bp, Unknown
  misc_feature (1)..( 6): Matrix.003 file - promoters60/4771956
ccgttg

SEQ ID NO: 60203 - DNA, 7 bp, Unknown
  misc_feature (1)..( 7): Matrix.003 file - promoters60/4771956
gtttatt

SEQ ID NO: 60204 - DNA, 6 bp, Unknown
  misc_feature (1)..( 6): Matrix.003 file - promoters60/4771956
cataat

SEQ ID NO: 60205 - DNA, 6 bp, Unknown
  misc_feature (1)..( 6): Matrix.003 file - promoters60/4771956
ataagt

SEQ ID NO: 60206 - DNA, 6 bp, Unknown
  misc_feature (1)..( 6): Matrix.003 file - promoters60/4771956
aacaaa

SEQ ID NO: 60207 - DNA, 7 bp, Unknown
  misc_feature (1)..( 7): Matrix.003 file - promoters60/4771956
tctcaac

SEQ ID NO: 60208 - DNA, 6 bp, Unknown
  misc_feature (1)..( 6): Matrix.003 file - promoters60/4771956
tagaaa

SEQ ID NO: 60209 - DNA, 7 bp, Unknown
  misc_feature (1)..( 7): Matrix.003 file - promoters60/4771956
aaaatag

SEQ ID NO: 60210 - DNA, 6 bp, Unknown
  misc_feature (1)..( 6): Matrix.003 file - promoters60/4771956
aaaaaa

SEQ ID NO: 60211 - DNA, 8 bp, Unknown
  misc_feature (1)..( 8): Matrix.003 file - promoters60/4771956
atttgtca

SEQ ID NO: 60212 - DNA, 7 bp, Unknown
  misc_feature (1)..( 7): Matrix.003 file - promoters60/4771956
ttaatta

SEQ ID NO: 60213 - DNA, 8 bp, Unknown
  misc_feature (1)..( 8): Matrix.003 file - promoters60/4771956
ccagcaac

SEQ ID NO: 60214 - DNA, 6 bp, Unknown
  misc_feature (1)..( 6): Matrix.003 file - promoters60/4771956
ataatt

SEQ ID NO: 60215 - DNA, 7 bp, Unknown
  misc_feature (1)..( 7): Matrix.003 file - promoters60/4771956
ctagttt

SEQ ID NO: 60216 - DNA, 7 bp, Unknown
  misc_feature (1)..( 7): Matrix.003 file - promoters60/4771956
cacacaa

SEQ ID NO: 60217 - DNA, 6 bp, Unknown
  misc_feature (1)..( 6): Matrix.003 file - promoters60/4771956
cctttt

SEQ ID NO: 60218 - DNA, 6 bp, Unknown
  misc_feature (1)..( 6): Matrix.003 file - promoters60/4771956
cataaa

SEQ ID NO: 60219 - DNA, 7 bp, Unknown
  misc_feature (1)..( 7): Matrix.003 file - promoters60/4771956
aaaactc

SEQ ID NO: 60220 - DNA, 8 bp, Unknown
  misc_feature (1)..( 8): Matrix.003 file - promoters60/4771960
ttagttgc

SEQ ID NO: 60221 - DNA, 8 bp, Unknown
  misc_feature (1)..( 8): Matrix.003 file - promoters60/4771960
attaaatc

SEQ ID NO: 60222 - DNA, 9 bp, Unknown
  misc_feature (1)..( 9): Matrix.003 file - promoters60/4771960
gaaaattat

SEQ ID NO: 60223 - DNA, 8 bp, Unknown
  misc_feature (1)..( 8): Matrix.003 file - promoters60/4771960
tagaattc

SEQ ID NO: 60224 - DNA, 8 bp, Unknown
  misc_feature (1)..( 8): Matrix.003 file - promoters60/4771960
ctttgaaa

SEQ ID NO: 60225 - DNA, 9 bp, Unknown
  misc_feature (1)..( 9): Matrix.003 file - promoters60/4771960
ctataaata

SEQ ID NO: 60226 - DNA, 6 bp, Unknown
  misc_feature (1)..( 6): Matrix.003 file - promoters60/4771960
aagatt

SEQ ID NO: 60227 - DNA, 8 bp, Unknown
  misc_feature (1)..( 8): Matrix.003 file - promoters60/4771960
gttgcttt

SEQ ID NO: 60228 - DNA, 6 bp, Unknown
  misc_feature (1)..( 6): Matrix.003 file - promoters60/4771960
agaaga

SEQ ID NO: 60229 - DNA, 11 bp, Unknown
  misc_feature (1)..( 11): Matrix.003 file - promoters60/4771960
aaagtgacata

SEQ ID NO: 60230 - DNA, 8 bp, Unknown
  misc_feature (1)..( 8): Matrix.003 file - promoters60/4771960
caaaaaga

SEQ ID NO: 60231 - DNA, 8 bp, Unknown
  misc_feature (1)..( 8): Matrix.003 file - promoters60/4771960
ccgaaaat

SEQ ID NO: 60232 - DNA, 6 bp, Unknown
  misc_feature (1)..( 6): Matrix.003 file - promoters60/4771960
tgaaca

SEQ ID NO: 60233 - DNA, 7 bp, Unknown
  misc_feature (1)..( 7): Matrix.003 file - promoters60/4771960
aaaaaca

SEQ ID NO: 60234 - DNA, 8 bp, Unknown
  misc_feature (1)..( 8): Matrix.003 file - promoters60/4771960
aatacttg

SEQ ID NO: 60235 - DNA, 8 bp, Unknown
  misc_feature (1)..( 8): Matrix.003 file - promoters60/4771960
aaaattac

SEQ ID NO: 60236 - DNA, 6 bp, Unknown
  misc_feature (1)..( 6): Matrix.003 file - promoters60/4771960
atcaat

SEQ ID NO: 60237 - DNA, 11 bp, Unknown
  misc_feature (1)..( 11): Matrix.003 file - promoters60/4771960
caaaaacaaaa

SEQ ID NO: 60238 - DNA, 10 bp, Unknown
  misc_feature (1)..( 10): Matrix.003 file - promoters60/4771968
gaaaaaaatg

SEQ ID NO: 60239 - DNA, 8 bp, Unknown
  misc_feature (1)..( 8): Matrix.003 file - promoters60/4771968
aaaaatgt

SEQ ID NO: 60240 - DNA, 10 bp, Unknown
  misc_feature (1)..( 10): Matrix.003 file - promoters60/4771968
taaaaaaagg

SEQ ID NO: 60241 - DNA, 9 bp, Unknown
  misc_feature (1)..( 9): Matrix.003 file - promoters60/4771972
ttttctttg

SEQ ID NO: 60242 - DNA, 7 bp, Unknown
  misc_feature (1)..( 7): Matrix.003 file - promoters60/4771972
taaaaat

SEQ ID NO: 60243 - DNA, 8 bp, Unknown
  misc_feature (1)..( 8): Matrix.003 file - promoters60/4771972
aagatatg

SEQ ID NO: 60244 - DNA, 8 bp, Unknown
  misc_feature (1)..( 8): Matrix.003 file - promoters60/4771972
ttttattt

SEQ ID NO: 60245 - DNA, 7 bp, Unknown
  misc_feature (1)..( 7): Matrix.003 file - promoters60/4771972
tttaatt

SEQ ID NO: 60246 - DNA, 9 bp, Unknown
  misc_feature (1)..( 9): Matrix.003 file - promoters60/4771972
gaaacaaaa

SEQ ID NO: 60247 - DNA, 6 bp, Unknown
  misc_feature (1)..( 6): Matrix.003 file - promoters60/4771972
tttgtt

SEQ ID NO: 60248 - DNA, 6 bp, Unknown
  misc_feature (1)..( 6): Matrix.003 file - promoters60/4771972
aaaact

SEQ ID NO: 60249 - DNA, 7 bp, Unknown
  misc_feature (1)..( 7): Matrix.003 file - promoters60/4771972
ataaaaa

SEQ ID NO: 60250 - DNA, 10 bp, Unknown
  misc_feature (1)..( 10): Matrix.003 file - promoters60/4771972
taaaataaaa

SEQ ID NO: 60251 - DNA, 6 bp, Unknown
  misc_feature (1)..( 6): Matrix.003 file - promoters60/4771972
aaagct

SEQ ID NO: 60252 - DNA, 6 bp, Unknown
  misc_feature (1)..( 6): Matrix.003 file - promoters60/4771972
agtaaa

SEQ ID NO: 60253 - DNA, 7 bp, Unknown
  misc_feature (1)..( 7): Matrix.003 file - promoters60/4771972
aatcggg

SEQ ID NO: 60254 - DNA, 10 bp, Unknown
  misc_feature (1)..( 10): Matrix.003 file - promoters60/4771972
ggaaaagaaa

SEQ ID NO: 60255 - DNA, 7 bp, Unknown
  misc_feature (1)..( 7): Matrix.003 file - promoters60/4771972
cccacta

SEQ ID NO: 60256 - DNA, 7 bp, Unknown
  misc_feature (1)..( 7): Matrix.003 file - promoters60/4771972
gtatata

SEQ ID NO: 60257 - DNA, 7 bp, Unknown
  misc_feature (1)..( 7): Matrix.003 file - promoters60/4771983
aattttt

SEQ ID NO: 60258 - DNA, 8 bp, Unknown
  misc_feature (1)..( 8): Matrix.003 file - promoters60/4771983
tttttgtt

SEQ ID NO: 60259 - DNA, 7 bp, Unknown
  misc_feature (1)..( 7): Matrix.003 file - promoters60/4771983
ataaaat

SEQ ID NO: 60260 - DNA, 11 bp, Unknown
  misc_feature (1)..( 11): Matrix.003 file - promoters60/4771983
ttaatttaata

SEQ ID NO: 60261 - DNA, 7 bp, Unknown
  misc_feature (1)..( 7): Matrix.003 file - promoters60/4771983
tagtttt

SEQ ID NO: 60262 - DNA, 7 bp, Unknown
  misc_feature (1)..( 7): Matrix.003 file - promoters60/4771983
ttctctt

SEQ ID NO: 60263 - DNA, 8 bp, Unknown
  misc_feature (1)..( 8): Matrix.003 file - promoters60/4771983
gttttttt

SEQ ID NO: 60264 - DNA, 8 bp, Unknown
  misc_feature (1)..( 8): Matrix.003 file - promoters60/4771983
aatattcg

SEQ ID NO: 60265 - DNA, 7 bp, Unknown
  misc_feature (1)..( 7): Matrix.003 file - promoters60/4771983
tttattt

SEQ ID NO: 60266 - DNA, 7 bp, Unknown
  misc_feature (1)..( 7): Matrix.003 file - promoters60/4771983
taaacaa

SEQ ID NO: 60267 - DNA, 6 bp, Unknown
  misc_feature (1)..( 6): Matrix.003 file - promoters60/4771983
taagaa

SEQ ID NO: 60268 - DNA, 6 bp, Unknown
  misc_feature (1)..( 6): Matrix.003 file - promoters60/4771983
tttggt

SEQ ID NO: 60269 - DNA, 7 bp, Unknown
  misc_feature (1)..( 7): Matrix.003 file - promoters60/4771983
ttaaatt

SEQ ID NO: 60270 - DNA, 6 bp, Unknown
  misc_feature (1)..( 6): Matrix.003 file - promoters60/4771983
atggaa

SEQ ID NO: 60271 - DNA, 8 bp, Unknown
  misc_feature (1)..( 8): Matrix.003 file - promoters60/4771983
aacatttt

SEQ ID NO: 60272 - DNA, 7 bp, Unknown
  misc_feature (1)..( 7): Matrix.003 file - promoters60/4771983
tataact

SEQ ID NO: 60273 - DNA, 6 bp, Unknown
  misc_feature (1)..( 6): Matrix.003 file - promoters60/4771983
ttttta

SEQ ID NO: 60274 - DNA, 6 bp, Unknown
  misc_feature (1)..( 6): Matrix.003 file - promoters60/4771990
tttatt

SEQ ID NO: 60275 - DNA, 8 bp, Unknown
  misc_feature (1)..( 8): Matrix.003 file - promoters60/4771990
aataaaat

SEQ ID NO: 60276 - DNA, 7 bp, Unknown
  misc_feature (1)..( 7): Matrix.003 file - promoters60/4771990
aaaaaaa

SEQ ID NO: 60277 - DNA, 6 bp, Unknown
  misc_feature (1)..( 6): Matrix.003 file - promoters60/4771990
aaataa

SEQ ID NO: 60278 - DNA, 6 bp, Unknown
  misc_feature (1)..( 6): Matrix.003 file - promoters60/4771990
aacatt

SEQ ID NO: 60279 - DNA, 7 bp, Unknown
  misc_feature (1)..( 7): Matrix.003 file - promoters60/4771990
aaaacaa

SEQ ID NO: 60280 - DNA, 10 bp, Unknown
  misc_feature (1)..( 10): Matrix.003 file - promoters60/4771990
taaacaaaaa

SEQ ID NO: 60281 - DNA, 8 bp, Unknown
  misc_feature (1)..( 8): Matrix.003 file - promoters60/4771990
aaaagaaa

SEQ ID NO: 60282 - DNA, 6 bp, Unknown
  misc_feature (1)..( 6): Matrix.003 file - promoters60/4771990
ttattt

SEQ ID NO: 60283 - DNA, 6 bp, Unknown
  misc_feature (1)..( 6): Matrix.003 file - promoters60/4771990
agtaaa

SEQ ID NO: 60284 - DNA, 7 bp, Unknown
  misc_feature (1)..( 7): Matrix.003 file - promoters60/4771990
aatcggg

SEQ ID NO: 60285 - DNA, 8 bp, Unknown
  misc_feature (1)..( 8): Matrix.003 file - promoters60/4771990
gaaacaaa

SEQ ID NO: 60286 - DNA, 7 bp, Unknown
  misc_feature (1)..( 7): Matrix.003 file - promoters60/4771990
cccacta

SEQ ID NO: 60287 - DNA, 9 bp, Unknown
  misc_feature (1)..( 9): Matrix.003 file - promoters60/4771990
aaagaaaag

SEQ ID NO: 60288 - DNA, 7 bp, Unknown
  misc_feature (1)..( 7): Matrix.003 file - promoters60/4771990
gtatata

SEQ ID NO: 60289 - DNA, 9 bp, Unknown
  misc_feature (1)..( 9): Matrix.003 file - promoters60/4772062
tataattaa

SEQ ID NO: 60290 - DNA, 8 bp, Unknown
  misc_feature (1)..( 8): Matrix.003 file - promoters60/4772062
attattta

SEQ ID NO: 60291 - DNA, 9 bp, Unknown
  misc_feature (1)..( 9): Matrix.003 file - promoters60/4772062
agaacaaaa

SEQ ID NO: 60292 - DNA, 8 bp, Unknown
  misc_feature (1)..( 8): Matrix.003 file - promoters60/4772062
ctatataa

SEQ ID NO: 60293 - DNA, 13 bp, Unknown
  misc_feature (1)..( 13): Matrix.003 file - promoters60/4772062
aaaactaaaaaaa

SEQ ID NO: 60294 - DNA, 9 bp, Unknown
  misc_feature (1)..( 9): Matrix.003 file - promoters60/4772062
aaatgataa

SEQ ID NO: 60295 - DNA, 8 bp, Unknown
  misc_feature (1)..( 8): Matrix.003 file - promoters60/4772062
gaaaaatt

SEQ ID NO: 60296 - DNA, 11 bp, Unknown
  misc_feature (1)..( 11): Matrix.003 file - promoters60/4772062
aacttttgtca

SEQ ID NO: 60297 - DNA, 10 bp, Unknown
  misc_feature (1)..( 10): Matrix.003 file - promoters60/4772062
tgttaaatat

SEQ ID NO: 60298 - DNA, 9 bp, Unknown
  misc_feature (1)..( 9): Matrix.003 file - promoters60/4772062
aaaagaaaa

SEQ ID NO: 60299 - DNA, 9 bp, Unknown
  misc_feature (1)..( 9): Matrix.003 file - promoters60/4772062
agaaaaaga

SEQ ID NO: 60300 - DNA, 7 bp, Unknown
  misc_feature (1)..( 7): Matrix.003 file - promoters60/4772062
agaaaaa

SEQ ID NO: 60301 - DNA, 12 bp, Unknown
  misc_feature (1)..( 12): Matrix.003 file - promoters60/4772070
ttcatcatttat

SEQ ID NO: 60302 - DNA, 10 bp, Unknown
  misc_feature (1)..( 10): Matrix.003 file - promoters60/4772070
aataacttta

SEQ ID NO: 60303 - DNA, 9 bp, Unknown
  misc_feature (1)..( 9): Matrix.003 file - promoters60/4772070
tgatgatac

SEQ ID NO: 60304 - DNA, 5 bp, Unknown
  misc_feature (1)..( 5): Matrix.003 file - promoters60/4772070
caaac

SEQ ID NO: 60305 - DNA, 7 bp, Unknown
  misc_feature (1)..( 7): Matrix.003 file - promoters60/4772070
tttgtta

SEQ ID NO: 60306 - DNA, 7 bp, Unknown
  misc_feature (1)..( 7): Matrix.003 file - promoters60/4772084
aaaatct

SEQ ID NO: 60307 - DNA, 7 bp, Unknown
  misc_feature (1)..( 7): Matrix.003 file - promoters60/4772084
ggtactt

SEQ ID NO: 60308 - DNA, 9 bp, Unknown
  misc_feature (1)..( 9): Matrix.003 file - promoters60/4772084
tcactaact

SEQ ID NO: 60309 - DNA, 6 bp, Unknown
  misc_feature (1)..( 6): Matrix.003 file - promoters60/4772084
aactta

SEQ ID NO: 60310 - DNA, 6 bp, Unknown
  misc_feature (1)..( 6): Matrix.003 file - promoters60/4772084
tttctt

SEQ ID NO: 60311 - DNA, 8 bp, Unknown
  misc_feature (1)..( 8): Matrix.003 file - promoters60/4772084
attcaatt

SEQ ID NO: 60312 - DNA, 6 bp, Unknown
  misc_feature (1)..( 6): Matrix.003 file - promoters60/4772084
aaatct

SEQ ID NO: 60313 - DNA, 8 bp, Unknown
  misc_feature (1)..( 8): Matrix.003 file - promoters60/4772084
actccaaa

SEQ ID NO: 60314 - DNA, 6 bp, Unknown
  misc_feature (1)..( 6): Matrix.003 file - promoters60/4772084
gaagat

SEQ ID NO: 60315 - DNA, 17 bp, Unknown
  misc_feature (1)..( 17): Matrix.003 file - promoters60/4772103
aaaaacaaaaaagttaa

SEQ ID NO: 60316 - DNA, 8 bp, Unknown
  misc_feature (1)..( 8): Matrix.003 file - promoters60/4772103
gaaaagtc

SEQ ID NO: 60317 - DNA, 9 bp, Unknown
  misc_feature (1)..( 9): Matrix.003 file - promoters60/4772103
cgcaaattt

SEQ ID NO: 60318 - DNA, 7 bp, Unknown
  misc_feature (1)..( 7): Matrix.003 file - promoters60/4772103
tgataca

SEQ ID NO: 60319 - DNA, 15 bp, Unknown
  misc_feature (1)..( 15): Matrix.003 file - promoters60/4772103
accaatcagaattgt

SEQ ID NO: 60320 - DNA, 7 bp, Unknown
  misc_feature (1)..( 7): Matrix.003 file - promoters60/4772103
tctagtg

SEQ ID NO: 60321 - DNA, 6 bp, Unknown
  misc_feature (1)..( 6): Matrix.003 file - promoters60/4772103
ttaaag

SEQ ID NO: 60322 - DNA, 6 bp, Unknown
  misc_feature (1)..( 6): Matrix.003 file - promoters60/4772103
gtggta

SEQ ID NO: 60323 - DNA, 6 bp, Unknown
  misc_feature (1)..( 6): Matrix.003 file - promoters60/4772103
tttctt

SEQ ID NO: 60324 - DNA, 9 bp, Unknown
  misc_feature (1)..( 9): Matrix.003 file - promoters60/4772103
ttatcatat

SEQ ID NO: 60325 - DNA, 7 bp, Unknown
  misc_feature (1)..( 7): Matrix.003 file - promoters60/4772103
gacaaaa

SEQ ID NO: 60326 - DNA, 8 bp, Unknown
  misc_feature (1)..( 8): Matrix.003 file - promoters60/4772122
ggataaaa

SEQ ID NO: 60327 - DNA, 7 bp, Unknown
  misc_feature (1)..( 7): Matrix.003 file - promoters60/4772122
ttactac

SEQ ID NO: 60328 - DNA, 7 bp, Unknown
  misc_feature (1)..( 7): Matrix.003 file - promoters60/4772122
aacaaat

SEQ ID NO: 60329 - DNA, 10 bp, Unknown
  misc_feature (1)..( 10): Matrix.003 file - promoters60/4772130
caattgcaca

SEQ ID NO: 60330 - DNA, 9 bp, Unknown
  misc_feature (1)..( 9): Matrix.003 file - promoters60/4772137
ctgatttta

SEQ ID NO: 60331 - DNA, 7 bp, Unknown
  misc_feature (1)..( 7): Matrix.003 file - promoters60/4772137
agacttg

SEQ ID NO: 60332 - DNA, 8 bp, Unknown
  misc_feature (1)..( 8): Matrix.003 file - promoters60/4772137
aaaagtaa

SEQ ID NO: 60333 - DNA, 9 bp, Unknown
  misc_feature (1)..( 9): Matrix.003 file - promoters60/4772137
tatttaaaa

SEQ ID NO: 60334 - DNA, 7 bp, Unknown
  misc_feature (1)..( 7): Matrix.003 file - promoters60/4772137
tttttat

SEQ ID NO: 60335 - DNA, 8 bp, Unknown
  misc_feature (1)..( 8): Matrix.003 file - promoters60/4772137
agacttga

SEQ ID NO: 60336 - DNA, 8 bp, Unknown
  misc_feature (1)..( 8): Matrix.003 file - promoters60/4772155
aatttttt

SEQ ID NO: 60337 - DNA, 10 bp, Unknown
  misc_feature (1)..( 10): Matrix.003 file - promoters60/4772155
aaaatcttgt

SEQ ID NO: 60338 - DNA, 7 bp, Unknown
  misc_feature (1)..( 7): Matrix.003 file - promoters60/4772155
taccatt

SEQ ID NO: 60339 - DNA, 6 bp, Unknown
  misc_feature (1)..( 6): Matrix.003 file - promoters60/4772155
tcaaat

SEQ ID NO: 60340 - DNA, 10 bp, Unknown
  misc_feature (1)..( 10): Matrix.003 file - promoters60/4772155
gatcataaca

SEQ ID NO: 60341 - DNA, 7 bp, Unknown
  misc_feature (1)..( 7): Matrix.003 file - promoters60/4772155
ttccact

SEQ ID NO: 60342 - DNA, 7 bp, Unknown
  misc_feature (1)..( 7): Matrix.003 file - promoters60/4772155
atggtca

SEQ ID NO: 60343 - DNA, 8 bp, Unknown
  misc_feature (1)..( 8): Matrix.003 file - promoters60/4772155
caaaaaaa

SEQ ID NO: 60344 - DNA, 6 bp, Unknown
  misc_feature (1)..( 6): Matrix.003 file - promoters60/4772155
tttttt

SEQ ID NO: 60345 - DNA, 7 bp, Unknown
  misc_feature (1)..( 7): Matrix.003 file - promoters60/4772155
atttttc

SEQ ID NO: 60346 - DNA, 8 bp, Unknown
  misc_feature (1)..( 8): Matrix.003 file - promoters60/4772155
ttttttct

SEQ ID NO: 60347 - DNA, 7 bp, Unknown
  misc_feature (1)..( 7): Matrix.003 file - promoters60/4772155
aggaaaa

SEQ ID NO: 60348 - DNA, 11 bp, Unknown
  misc_feature (1)..( 11): Matrix.003 file - promoters60/4772155
aaaaacaaaaa

SEQ ID NO: 60349 - DNA, 7 bp, Unknown
  misc_feature (1)..( 7): Matrix.003 file - promoters60/4772155
tttgcat

SEQ ID NO: 60350 - DNA, 8 bp, Unknown
  misc_feature (1)..( 8): Matrix.003 file - promoters60/4772155
tctataga

SEQ ID NO: 60351 - DNA, 6 bp, Unknown
  misc_feature (1)..( 6): Matrix.003 file - promoters60/4772155
taacat

SEQ ID NO: 60352 - DNA, 7 bp, Unknown
  misc_feature (1)..( 7): Matrix.003 file - promoters60/4772155
aacaaaa

SEQ ID NO: 60353 - DNA, 6 bp, Unknown
  misc_feature (1)..( 6): Matrix.003 file - promoters60/4772155
ttctta

SEQ ID NO: 60354 - DNA, 8 bp, Unknown
  misc_feature (1)..( 8): Matrix.003 file - promoters60/4772155
tttgttta

SEQ ID NO: 60355 - DNA, 10 bp, Unknown
  misc_feature (1)..( 10): Matrix.003 file - promoters60/4772195
gaacatgaca

SEQ ID NO: 60356 - DNA, 8 bp, Unknown
  misc_feature (1)..( 8): Matrix.003 file - promoters60/4772195
cgaaatta

SEQ ID NO: 60357 - DNA, 8 bp, Unknown
  misc_feature (1)..( 8): Matrix.003 file - promoters60/4772195
ctgtttaa

SEQ ID NO: 60358 - DNA, 12 bp, Unknown
  misc_feature (1)..( 12): Matrix.003 file - promoters60/4772195
ttcattttattt

SEQ ID NO: 60359 - DNA, 13 bp, Unknown
  misc_feature (1)..( 13): Matrix.003 file - promoters60/4772195
ttcattttcttta

SEQ ID NO: 60360 - DNA, 7 bp, Unknown
  misc_feature (1)..( 7): Matrix.003 file - promoters60/4772195
aggattt

SEQ ID NO: 60361 - DNA, 8 bp, Unknown
  misc_feature (1)..( 8): Matrix.003 file - promoters60/4772208
ataaatga

SEQ ID NO: 60362 - DNA, 10 bp, Unknown
  misc_feature (1)..( 10): Matrix.003 file - promoters60/4772208
actttcaaaa

SEQ ID NO: 60363 - DNA, 8 bp, Unknown
  misc_feature (1)..( 8): Matrix.003 file - promoters60/4772208
taaatgtt

SEQ ID NO: 60364 - DNA, 9 bp, Unknown
  misc_feature (1)..( 9): Matrix.003 file - promoters60/4772223
acttatata

SEQ ID NO: 60365 - DNA, 8 bp, Unknown
  misc_feature (1)..( 8): Matrix.003 file - promoters60/4772223
atttcaaa

SEQ ID NO: 60366 - DNA, 10 bp, Unknown
  misc_feature (1)..( 10): Matrix.003 file - promoters60/4772223
tcaaaaaaaa

SEQ ID NO: 60367 - DNA, 9 bp, Unknown
  misc_feature (1)..( 9): Matrix.003 file - promoters60/4772223
caaacacta

SEQ ID NO: 60368 - DNA, 8 bp, Unknown
  misc_feature (1)..( 8): Matrix.003 file - promoters60/4772223
ataatttt

SEQ ID NO: 60369 - DNA, 9 bp, Unknown
  misc_feature (1)..( 9): Matrix.003 file - promoters60/4772223
acaagaaaa

SEQ ID NO: 60370 - DNA, 10 bp, Unknown
  misc_feature (1)..( 10): Matrix.003 file - promoters60/4772223
ttttgacaat

SEQ ID NO: 60371 - DNA, 12 bp, Unknown
  misc_feature (1)..( 12): Matrix.003 file - promoters60/4772223
ttatcaaattga

SEQ ID NO: 60372 - DNA, 8 bp, Unknown
  misc_feature (1)..( 8): Matrix.003 file - promoters60/4772223
acatgaaa

SEQ ID NO: 60373 - DNA, 7 bp, Unknown
  misc_feature (1)..( 7): Matrix.003 file - promoters60/4772230
atttatt

SEQ ID NO: 60374 - DNA, 6 bp, Unknown
  misc_feature (1)..( 6): Matrix.003 file - promoters60/4772230
ttaaaa

SEQ ID NO: 60375 - DNA, 7 bp, Unknown
  misc_feature (1)..( 7): Matrix.003 file - promoters60/4772230
actaatt

SEQ ID NO: 60376 - DNA, 6 bp, Unknown
  misc_feature (1)..( 6): Matrix.003 file - promoters60/4772230
tttttc

SEQ ID NO: 60377 - DNA, 9 bp, Unknown
  misc_feature (1)..( 9): Matrix.003 file - promoters60/4772230
aatagattt

SEQ ID NO: 60378 - DNA, 7 bp, Unknown
  misc_feature (1)..( 7): Matrix.003 file - promoters60/4772230
taaattt

SEQ ID NO: 60379 - DNA, 6 bp, Unknown
  misc_feature (1)..( 6): Matrix.003 file - promoters60/4772230
tcaaga

SEQ ID NO: 60380 - DNA, 10 bp, Unknown
  misc_feature (1)..( 10): Matrix.003 file - promoters60/4772230
aaatattcac

SEQ ID NO: 60381 - DNA, 6 bp, Unknown
  misc_feature (1)..( 6): Matrix.003 file - promoters60/4772230
caaaca

SEQ ID NO: 60382 - DNA, 8 bp, Unknown
  misc_feature (1)..( 8): Matrix.003 file - promoters60/4772230
tatcttca

SEQ ID NO: 60383 - DNA, 7 bp, Unknown
  misc_feature (1)..( 7): Matrix.003 file - promoters60/4772230
atagatt

SEQ ID NO: 60384 - DNA, 8 bp, Unknown
  misc_feature (1)..( 8): Matrix.003 file - promoters60/4772230
tttcaatt

SEQ ID NO: 60385 - DNA, 6 bp, Unknown
  misc_feature (1)..( 6): Matrix.003 file - promoters60/4772230
ttttct

SEQ ID NO: 60386 - DNA, 7 bp, Unknown
  misc_feature (1)..( 7): Matrix.003 file - promoters60/4772230
ataaaat

SEQ ID NO: 60387 - DNA, 7 bp, Unknown
  misc_feature (1)..( 7): Matrix.003 file - promoters60/4772230
aacccaa

SEQ ID NO: 60388 - DNA, 8 bp, Unknown
  misc_feature (1)..( 8): Matrix.003 file - promoters60/4772230
cacatgtc

SEQ ID NO: 60389 - DNA, 8 bp, Unknown
  misc_feature (1)..( 8): Matrix.003 file - promoters60/4772230
tttattaa

SEQ ID NO: 60390 - DNA, 8 bp, Unknown
  misc_feature (1)..( 8): Matrix.003 file - promoters60/4772230
aatttatc

SEQ ID NO: 60391 - DNA, 8 bp, Unknown
  misc_feature (1)..( 8): Matrix.003 file - promoters60/4772230
atagatat

SEQ ID NO: 60392 - DNA, 7 bp, Unknown
  misc_feature (1)..( 7): Matrix.003 file - promoters60/4772230
tcataca

SEQ ID NO: 60393 - DNA, 7 bp, Unknown
  misc_feature (1)..( 7): Matrix.003 file - promoters60/4772230
catctat

SEQ ID NO: 60394 - DNA, 7 bp, Unknown
  misc_feature (1)..( 7): Matrix.003 file - promoters60/4772230
tatatac

SEQ ID NO: 60395 - DNA, 8 bp, Unknown
  misc_feature (1)..( 8): Matrix.003 file - promoters60/4772230
aaacaaaa

SEQ ID NO: 60396 - DNA, 7 bp, Unknown
  misc_feature (1)..( 7): Matrix.003 file - promoters60/4772230
aaaccaa

SEQ ID NO: 60397 - DNA, 8 bp, Unknown
  misc_feature (1)..( 8): Matrix.003 file - promoters60/4772240
tagattct

SEQ ID NO: 60398 - DNA, 7 bp, Unknown
  misc_feature (1)..( 7): Matrix.003 file - promoters60/4772240
taaaaaa

SEQ ID NO: 60399 - DNA, 11 bp, Unknown
  misc_feature (1)..( 11): Matrix.003 file - promoters60/4772240
taagaaaaaga

SEQ ID NO: 60400 - DNA, 7 bp, Unknown
  misc_feature (1)..( 7): Matrix.003 file - promoters60/4772240
gagaaaa

SEQ ID NO: 60401 - DNA, 9 bp, Unknown
  misc_feature (1)..( 9): Matrix.003 file - promoters60/4772248
caaaactta

SEQ ID NO: 60402 - DNA, 12 bp, Unknown
  misc_feature (1)..( 12): Matrix.003 file - promoters60/4772248
atatttttcata

SEQ ID NO: 60403 - DNA, 13 bp, Unknown
  misc_feature (1)..( 13): Matrix.003 file - promoters60/4772248
atttttaaagcat

SEQ ID NO: 60404 - DNA, 11 bp, Unknown
  misc_feature (1)..( 11): Matrix.003 file - promoters60/4772248
aaattaaaaaa

SEQ ID NO: 60405 - DNA, 10 bp, Unknown
  misc_feature (1)..( 10): Matrix.003 file - promoters60/4772248
atttattttt

SEQ ID NO: 60406 - DNA, 12 bp, Unknown
  misc_feature (1)..( 12): Matrix.003 file - promoters60/4772248
tatcaaacatat

SEQ ID NO: 60407 - DNA, 8 bp, Unknown
  misc_feature (1)..( 8): Matrix.003 file - promoters60/4772258
ttttgtta

SEQ ID NO: 60408 - DNA, 8 bp, Unknown
  misc_feature (1)..( 8): Matrix.003 file - promoters60/4772258
tcttcttt

SEQ ID NO: 60409 - DNA, 9 bp, Unknown
  misc_feature (1)..( 9): Matrix.003 file - promoters60/4772258
attttttat

SEQ ID NO: 60410 - DNA, 8 bp, Unknown
  misc_feature (1)..( 8): Matrix.003 file - promoters60/4772258
ttaatata

SEQ ID NO: 60411 - DNA, 7 bp, Unknown
  misc_feature (1)..( 7): Matrix.003 file - promoters60/4772258
attttgg

SEQ ID NO: 60412 - DNA, 9 bp, Unknown
  misc_feature (1)..( 9): Matrix.003 file - promoters60/4772258
agattcata

SEQ ID NO: 60413 - DNA, 8 bp, Unknown
  misc_feature (1)..( 8): Matrix.003 file - promoters60/4772258
tttcattg

SEQ ID NO: 60414 - DNA, 8 bp, Unknown
  misc_feature (1)..( 8): Matrix.003 file - promoters60/4772258
tgttgttt

SEQ ID NO: 60415 - DNA, 9 bp, Unknown
  misc_feature (1)..( 9): Matrix.003 file - promoters60/4772258
tttgaccaa

SEQ ID NO: 60416 - DNA, 6 bp, Unknown
  misc_feature (1)..( 6): Matrix.003 file - promoters60/4772270
agagca

SEQ ID NO: 60417 - DNA, 6 bp, Unknown
  misc_feature (1)..( 6): Matrix.003 file - promoters60/4772270
atagag

SEQ ID NO: 60418 - DNA, 7 bp, Unknown
  misc_feature (1)..( 7): Matrix.003 file - promoters60/4772270
tatattg

SEQ ID NO: 60419 - DNA, 6 bp, Unknown
  misc_feature (1)..( 6): Matrix.003 file - promoters60/4772270
aaagac

SEQ ID NO: 60420 - DNA, 7 bp, Unknown
  misc_feature (1)..( 7): Matrix.003 file - promoters60/4772270
taaaaaa

SEQ ID NO: 60421 - DNA, 6 bp, Unknown
  misc_feature (1)..( 6): Matrix.003 file - promoters60/4772270
taaaaa

SEQ ID NO: 60422 - DNA, 6 bp, Unknown
  misc_feature (1)..( 6): Matrix.003 file - promoters60/4772270
cttcta

SEQ ID NO: 60423 - DNA, 7 bp, Unknown
  misc_feature (1)..( 7): Matrix.003 file - promoters60/4772270
tttctat

SEQ ID NO: 60424 - DNA, 7 bp, Unknown
  misc_feature (1)..( 7): Matrix.003 file - promoters60/4772270
tatattg

SEQ ID NO: 60425 - DNA, 8 bp, Unknown
  misc_feature (1)..( 8): Matrix.003 file - promoters60/4772270
tgttaaaa

SEQ ID NO: 60426 - DNA, 8 bp, Unknown
  misc_feature (1)..( 8): Matrix.003 file - promoters60/4772270
cattaaac

SEQ ID NO: 60427 - DNA, 6 bp, Unknown
  misc_feature (1)..( 6): Matrix.003 file - promoters60/4772270
tctcca

SEQ ID NO: 60428 - DNA, 7 bp, Unknown
  misc_feature (1)..( 7): Matrix.003 file - promoters60/4772270
ccatttt

SEQ ID NO: 60429 - DNA, 6 bp, Unknown
  misc_feature (1)..( 6): Matrix.003 file - promoters60/4772270
ttttca

SEQ ID NO: 60430 - DNA, 6 bp, Unknown
  misc_feature (1)..( 6): Matrix.003 file - promoters60/4772270
tgtctt

SEQ ID NO: 60431 - DNA, 6 bp, Unknown
  misc_feature (1)..( 6): Matrix.003 file - promoters60/4772270
caagct

SEQ ID NO: 60432 - DNA, 7 bp, Unknown
  misc_feature (1)..( 7): Matrix.003 file - promoters60/4772270
ataaata

SEQ ID NO: 60433 - DNA, 6 bp, Unknown
  misc_feature (1)..( 6): Matrix.003 file - promoters60/4772274
ttcaga

SEQ ID NO: 60434 - DNA, 6 bp, Unknown
  misc_feature (1)..( 6): Matrix.003 file - promoters60/4772274
tctgtt

SEQ ID NO: 60435 - DNA, 6 bp, Unknown
  misc_feature (1)..( 6): Matrix.003 file - promoters60/4772274
ttcttt

SEQ ID NO: 60436 - DNA, 12 bp, Unknown
  misc_feature (1)..( 12): Matrix.003 file - promoters60/4772274
aaaggttatcat

SEQ ID NO: 60437 - DNA, 8 bp, Unknown
  misc_feature (1)..( 8): Matrix.003 file - promoters60/4772274
gttaggga

SEQ ID NO: 60438 - DNA, 6 bp, Unknown
  misc_feature (1)..( 6): Matrix.003 file - promoters60/4772274
gggcct

SEQ ID NO: 60439 - DNA, 9 bp, Unknown
  misc_feature (1)..( 9): Matrix.003 file - promoters60/4772274
taaaaccac

SEQ ID NO: 60440 - DNA, 6 bp, Unknown
  misc_feature (1)..( 6): Matrix.003 file - promoters60/4772274
acaaaa

SEQ ID NO: 60441 - DNA, 7 bp, Unknown
  misc_feature (1)..( 7): Matrix.003 file - promoters60/4772274
tatctct

SEQ ID NO: 60442 - DNA, 6 bp, Unknown
  misc_feature (1)..( 6): Matrix.003 file - promoters60/4772274
ttaatc

SEQ ID NO: 60443 - DNA, 10 bp, Unknown
  misc_feature (1)..( 10): Matrix.003 file - promoters60/4772274
atcaaaatgt

SEQ ID NO: 60444 - DNA, 8 bp, Unknown
  misc_feature (1)..( 8): Matrix.003 file - promoters60/4772274
caaaatgt

SEQ ID NO: 60445 - DNA, 6 bp, Unknown
  misc_feature (1)..( 6): Matrix.003 file - promoters60/4772274
ttatta

SEQ ID NO: 60446 - DNA, 8 bp, Unknown
  misc_feature (1)..( 8): Matrix.003 file - promoters60/4772274
attgtaag

SEQ ID NO: 60447 - DNA, 6 bp, Unknown
  misc_feature (1)..( 6): Matrix.003 file - promoters60/4772274
tttcca

SEQ ID NO: 60448 - DNA, 7 bp, Unknown
  misc_feature (1)..( 7): Matrix.003 file - promoters60/4772274
ttgaatt

SEQ ID NO: 60449 - DNA, 7 bp, Unknown
  misc_feature (1)..( 7): Matrix.003 file - promoters60/4772274
tctcaga

SEQ ID NO: 60450 - DNA, 9 bp, Unknown
  misc_feature (1)..( 9): Matrix.003 file - promoters60/4772274
aatagatca

SEQ ID NO: 60451 - DNA, 7 bp, Unknown
  misc_feature (1)..( 7): Matrix.003 file - promoters60/4772274
caaaatt

SEQ ID NO: 60452 - DNA, 7 bp, Unknown
  misc_feature (1)..( 7): Matrix.003 file - promoters60/4772277
gattata

SEQ ID NO: 60453 - DNA, 7 bp, Unknown
  misc_feature (1)..( 7): Matrix.003 file - promoters60/4772277
taaatga

SEQ ID NO: 60454 - DNA, 6 bp, Unknown
  misc_feature (1)..( 6): Matrix.003 file - promoters60/4772277
gtgaca

SEQ ID NO: 60455 - DNA, 10 bp, Unknown
  misc_feature (1)..( 10): Matrix.003 file - promoters60/4772277
aaaacaaaaa

SEQ ID NO: 60456 - DNA, 7 bp, Unknown
  misc_feature (1)..( 7): Matrix.003 file - promoters60/4772277
gcagcat

SEQ ID NO: 60457 - DNA, 6 bp, Unknown
  misc_feature (1)..( 6): Matrix.003 file - promoters60/4772277
ttttat

SEQ ID NO: 60458 - DNA, 7 bp, Unknown
  misc_feature (1)..( 7): Matrix.003 file - promoters60/4772277
tctatgt

SEQ ID NO: 60459 - DNA, 6 bp, Unknown
  misc_feature (1)..( 6): Matrix.003 file - promoters60/4772277
aaatgt

SEQ ID NO: 60460 - DNA, 10 bp, Unknown
  misc_feature (1)..( 10): Matrix.003 file - promoters60/4772277
gaaaaggtga

SEQ ID NO: 60461 - DNA, 7 bp, Unknown
  misc_feature (1)..( 7): Matrix.003 file - promoters60/4772277
caagtta

SEQ ID NO: 60462 - DNA, 6 bp, Unknown
  misc_feature (1)..( 6): Matrix.003 file - promoters60/4772277
aacaaa

SEQ ID NO: 60463 - DNA, 7 bp, Unknown
  misc_feature (1)..( 7): Matrix.003 file - promoters60/4772277
tgaagaa

SEQ ID NO: 60464 - DNA, 8 bp, Unknown
  misc_feature (1)..( 8): Matrix.003 file - promoters60/4772277
tatataat

SEQ ID NO: 60465 - DNA, 7 bp, Unknown
  misc_feature (1)..( 7): Matrix.003 file - promoters60/4772277
taagttg

SEQ ID NO: 60466 - DNA, 6 bp, Unknown
  misc_feature (1)..( 6): Matrix.003 file - promoters60/4772277
gttgac

SEQ ID NO: 60467 - DNA, 6 bp, Unknown
  misc_feature (1)..( 6): Matrix.003 file - promoters60/4772277
aagaaa

SEQ ID NO: 60468 - DNA, 7 bp, Unknown
  misc_feature (1)..( 7): Matrix.003 file - promoters60/4772277
atgctct

SEQ ID NO: 60469 - DNA, 7 bp, Unknown
  misc_feature (1)..( 7): Matrix.003 file - promoters60/4772289
caacgat

SEQ ID NO: 60470 - DNA, 6 bp, Unknown
  misc_feature (1)..( 6): Matrix.003 file - promoters60/4772289
agatgt

SEQ ID NO: 60471 - DNA, 8 bp, Unknown
  misc_feature (1)..( 8): Matrix.003 file - promoters60/4772289
atgcgttg

SEQ ID NO: 60472 - DNA, 7 bp, Unknown
  misc_feature (1)..( 7): Matrix.003 file - promoters60/4772289
tcaagtt

SEQ ID NO: 60473 - DNA, 6 bp, Unknown
  misc_feature (1)..( 6): Matrix.003 file - promoters60/4772289
aataaa

SEQ ID NO: 60474 - DNA, 6 bp, Unknown
  misc_feature (1)..( 6): Matrix.003 file - promoters60/4772289
agagct

SEQ ID NO: 60475 - DNA, 8 bp, Unknown
  misc_feature (1)..( 8): Matrix.003 file - promoters60/4772289
gaaacaaa

SEQ ID NO: 60476 - DNA, 6 bp, Unknown
  misc_feature (1)..( 6): Matrix.003 file - promoters60/4772289
ttgtta

SEQ ID NO: 60477 - DNA, 6 bp, Unknown
  misc_feature (1)..( 6): Matrix.003 file - promoters60/4772289
agtaaa

SEQ ID NO: 60478 - DNA, 7 bp, Unknown
  misc_feature (1)..( 7): Matrix.003 file - promoters60/4772289
aatcggg

SEQ ID NO: 60479 - DNA, 10 bp, Unknown
  misc_feature (1)..( 10): Matrix.003 file - promoters60/4772289
ggaaaagaaa

SEQ ID NO: 60480 - DNA, 7 bp, Unknown
  misc_feature (1)..( 7): Matrix.003 file - promoters60/4772289
cccacta

SEQ ID NO: 60481 - DNA, 9 bp, Unknown
  misc_feature (1)..( 9): Matrix.003 file - promoters60/4772289
aaagaaaag

SEQ ID NO: 60482 - DNA, 7 bp, Unknown
  misc_feature (1)..( 7): Matrix.003 file - promoters60/4772289
gtatata

SEQ ID NO: 60483 - DNA, 7 bp, Unknown
  misc_feature (1)..( 7): Matrix.003 file - promoters60/4772311
cctaaaa

SEQ ID NO: 60484 - DNA, 8 bp, Unknown
  misc_feature (1)..( 8): Matrix.003 file - promoters60/4772311
aaaatcaa

SEQ ID NO: 60485 - DNA, 9 bp, Unknown
  misc_feature (1)..( 9): Matrix.003 file - promoters60/4772311
gtaaaattc

SEQ ID NO: 60486 - DNA, 6 bp, Unknown
  misc_feature (1)..( 6): Matrix.003 file - promoters60/4772311
tttcta

SEQ ID NO: 60487 - DNA, 6 bp, Unknown
  misc_feature (1)..( 6): Matrix.003 file - promoters60/4772311
ggtttg

SEQ ID NO: 60488 - DNA, 8 bp, Unknown
  misc_feature (1)..( 8): Matrix.003 file - promoters60/4772311
catccaat

SEQ ID NO: 60489 - DNA, 8 bp, Unknown
  misc_feature (1)..( 8): Matrix.003 file - promoters60/4772311
tatcaaaa

SEQ ID NO: 60490 - DNA, 6 bp, Unknown
  misc_feature (1)..( 6): Matrix.003 file - promoters60/4772311
aaacga

SEQ ID NO: 60491 - DNA, 6 bp, Unknown
  misc_feature (1)..( 6): Matrix.003 file - promoters60/4772311
aagatg

SEQ ID NO: 60492 - DNA, 10 bp, Unknown
  misc_feature (1)..( 10): Matrix.003 file - promoters60/4772311
atgtttctct

SEQ ID NO: 60493 - DNA, 7 bp, Unknown
  misc_feature (1)..( 7): Matrix.003 file - promoters60/4772311
gaaacaa

SEQ ID NO: 60494 - DNA, 6 bp, Unknown
  misc_feature (1)..( 6): Matrix.003 file - promoters60/4772311
tccata

SEQ ID NO: 60495 - DNA, 8 bp, Unknown
  misc_feature (1)..( 8): Matrix.003 file - promoters60/4772329
atagataa

SEQ ID NO: 60496 - DNA, 7 bp, Unknown
  misc_feature (1)..( 7): Matrix.003 file - promoters60/4772329
ttatata

SEQ ID NO: 60497 - DNA, 6 bp, Unknown
  misc_feature (1)..( 6): Matrix.003 file - promoters60/4772329
tatact

SEQ ID NO: 60498 - DNA, 7 bp, Unknown
  misc_feature (1)..( 7): Matrix.003 file - promoters60/4772329
cgtatga

SEQ ID NO: 60499 - DNA, 6 bp, Unknown
  misc_feature (1)..( 6): Matrix.003 file - promoters60/4772329
ttttct

SEQ ID NO: 60500 - DNA, 7 bp, Unknown
  misc_feature (1)..( 7): Matrix.003 file - promoters60/4772329
ttgtcta

SEQ ID NO: 60501 - DNA, 12 bp, Unknown
  misc_feature (1)..( 12): Matrix.003 file - promoters60/4772329
tatataaaaccc

SEQ ID NO: 60502 - DNA, 6 bp, Unknown
  misc_feature (1)..( 6): Matrix.003 file - promoters60/4772329
aaaaca

SEQ ID NO: 60503 - DNA, 7 bp, Unknown
  misc_feature (1)..( 7): Matrix.003 file - promoters60/4772329
ttgttta

SEQ ID NO: 60504 - DNA, 9 bp, Unknown
  misc_feature (1)..( 9): Matrix.003 file - promoters60/4772329
taacttaat

SEQ ID NO: 60505 - DNA, 7 bp, Unknown
  misc_feature (1)..( 7): Matrix.003 file - promoters60/4772329
ataatgc

SEQ ID NO: 60506 - DNA, 9 bp, Unknown
  misc_feature (1)..( 9): Matrix.003 file - promoters60/4772329
atattcatt

SEQ ID NO: 60507 - DNA, 7 bp, Unknown
  misc_feature (1)..( 7): Matrix.003 file - promoters60/4772329
aatataa

SEQ ID NO: 60508 - DNA, 6 bp, Unknown
  misc_feature (1)..( 6): Matrix.003 file - promoters60/4772329
aaataa

SEQ ID NO: 60509 - DNA, 8 bp, Unknown
  misc_feature (1)..( 8): Matrix.003 file - promoters60/4772329
caacctga

SEQ ID NO: 60510 - DNA, 6 bp, Unknown
  misc_feature (1)..( 6): Matrix.003 file - promoters60/4772329
attatt

SEQ ID NO: 60511 - DNA, 7 bp, Unknown
  misc_feature (1)..( 7): Matrix.003 file - promoters60/4772329
tcagatt

SEQ ID NO: 60512 - DNA, 9 bp, Unknown
  misc_feature (1)..( 9): Matrix.003 file - promoters60/4772329
gtacttctc

SEQ ID NO: 60513 - DNA, 9 bp, Unknown
  misc_feature (1)..( 9): Matrix.003 file - promoters60/4772329
aaaaggaac

SEQ ID NO: 60514 - DNA, 10 bp, Unknown
  misc_feature (1)..( 10): Matrix.003 file - promoters60/4772329
atagtataca

SEQ ID NO: 60515 - DNA, 7 bp, Unknown
  misc_feature (1)..( 7): Matrix.003 file - promoters60/4772329
tgaaaaa

SEQ ID NO: 60516 - DNA, 6 bp, Unknown
  misc_feature (1)..( 6): Matrix.003 file - promoters60/4772329
tattta

SEQ ID NO: 60517 - DNA, 8 bp, Unknown
  misc_feature (1)..( 8): Matrix.003 file - promoters60/4772329
aaacatta

SEQ ID NO: 60518 - DNA, 6 bp, Unknown
  misc_feature (1)..( 6): Matrix.003 file - promoters60/4772329
tattat

SEQ ID NO: 60519 - DNA, 8 bp, Unknown
  misc_feature (1)..( 8): Matrix.003 file - promoters60/4772329
caatatga

SEQ ID NO: 60520 - DNA, 7 bp, Unknown
  misc_feature (1)..( 7): Matrix.003 file - promoters60/4772332
aatctgt

SEQ ID NO: 60521 - DNA, 7 bp, Unknown
  misc_feature (1)..( 7): Matrix.003 file - promoters60/4772332
cctacaa

SEQ ID NO: 60522 - DNA, 6 bp, Unknown
  misc_feature (1)..( 6): Matrix.003 file - promoters60/4772332
aagaga

SEQ ID NO: 60523 - DNA, 8 bp, Unknown
  misc_feature (1)..( 8): Matrix.003 file - promoters60/4772332
ttattttt

SEQ ID NO: 60524 - DNA, 6 bp, Unknown
  misc_feature (1)..( 6): Matrix.003 file - promoters60/4772332
aaaaaa

SEQ ID NO: 60525 - DNA, 9 bp, Unknown
  misc_feature (1)..( 9): Matrix.003 file - promoters60/4772332
ttttggtat

SEQ ID NO: 60526 - DNA, 7 bp, Unknown
  misc_feature (1)..( 7): Matrix.003 file - promoters60/4772332
tttaatg

SEQ ID NO: 60527 - DNA, 9 bp, Unknown
  misc_feature (1)..( 9): Matrix.003 file - promoters60/4772332
gtgtattgg

SEQ ID NO: 60528 - DNA, 7 bp, Unknown
  misc_feature (1)..( 7): Matrix.003 file - promoters60/4772332
tgttgta

SEQ ID NO: 60529 - DNA, 6 bp, Unknown
  misc_feature (1)..( 6): Matrix.003 file - promoters60/4772332
caagag

SEQ ID NO: 60530 - DNA, 7 bp, Unknown
  misc_feature (1)..( 7): Matrix.003 file - promoters60/4772332
gaccata

SEQ ID NO: 60531 - DNA, 12 bp, Unknown
  misc_feature (1)..( 12): Matrix.003 file - promoters60/4772336
atatatataaca

SEQ ID NO: 60532 - DNA, 15 bp, Unknown
  misc_feature (1)..( 15): Matrix.003 file - promoters60/4772336
tttttacattgcgtg

SEQ ID NO: 60533 - DNA, 7 bp, Unknown
  misc_feature (1)..( 7): Matrix.003 file - promoters60/4772336
ataagaa

SEQ ID NO: 60534 - DNA, 8 bp, Unknown
  misc_feature (1)..( 8): Matrix.003 file - promoters60/4772346
agatacag

SEQ ID NO: 60535 - DNA, 8 bp, Unknown
  misc_feature (1)..( 8): Matrix.003 file - promoters60/4772370
attaaaaa

SEQ ID NO: 60536 - DNA, 12 bp, Unknown
  misc_feature (1)..( 12): Matrix.003 file - promoters60/4772370
atgtaataacac

SEQ ID NO: 60537 - DNA, 8 bp, Unknown
  misc_feature (1)..( 8): Matrix.003 file - promoters60/4772370
tataaaaa

SEQ ID NO: 60538 - DNA, 12 bp, Unknown
  misc_feature (1)..( 12): Matrix.003 file - promoters60/4772370
aaaagaaaaaaa

SEQ ID NO: 60539 - DNA, 8 bp, Unknown
  misc_feature (1)..( 8): Matrix.003 file - promoters60/4772378
tgtttaga

SEQ ID NO: 60540 - DNA, 8 bp, Unknown
  misc_feature (1)..( 8): Matrix.003 file - promoters60/4772382
atgcagga

SEQ ID NO: 60541 - DNA, 8 bp, Unknown
  misc_feature (1)..( 8): Matrix.003 file - promoters60/4772382
aagtattt

SEQ ID NO: 60542 - DNA, 6 bp, Unknown
  misc_feature (1)..( 6): Matrix.003 file - promoters60/4772382
gtaaag

SEQ ID NO: 60543 - DNA, 8 bp, Unknown
  misc_feature (1)..( 8): Matrix.003 file - promoters60/4772382
gttacaac

SEQ ID NO: 60544 - DNA, 9 bp, Unknown
  misc_feature (1)..( 9): Matrix.003 file - promoters60/4772382
ccttataaa

SEQ ID NO: 60545 - DNA, 10 bp, Unknown
  misc_feature (1)..( 10): Matrix.003 file - promoters60/4772382
acataagatt

SEQ ID NO: 60546 - DNA, 8 bp, Unknown
  misc_feature (1)..( 8): Matrix.003 file - promoters60/4772382
attcacat

SEQ ID NO: 60547 - DNA, 6 bp, Unknown
  misc_feature (1)..( 6): Matrix.003 file - promoters60/4772382
tttcaa

SEQ ID NO: 60548 - DNA, 7 bp, Unknown
  misc_feature (1)..( 7): Matrix.003 file - promoters60/4772382
attttag

SEQ ID NO: 60549 - DNA, 7 bp, Unknown
  misc_feature (1)..( 7): Matrix.003 file - promoters60/4772382
tttaagt

SEQ ID NO: 60550 - DNA, 8 bp, Unknown
  misc_feature (1)..( 8): Matrix.003 file - promoters60/4772382
tttattta

SEQ ID NO: 60551 - DNA, 6 bp, Unknown
  misc_feature (1)..( 6): Matrix.003 file - promoters60/4772382
taaacg

SEQ ID NO: 60552 - DNA, 9 bp, Unknown
  misc_feature (1)..( 9): Matrix.003 file - promoters60/4772382
atattacca

SEQ ID NO: 60553 - DNA, 11 bp, Unknown
  misc_feature (1)..( 11): Matrix.003 file - promoters60/4772382
caaaatgtcaa

SEQ ID NO: 60554 - DNA, 6 bp, Unknown
  misc_feature (1)..( 6): Matrix.003 file - promoters60/4772382
aaacat

SEQ ID NO: 60555 - DNA, 10 bp, Unknown
  misc_feature (1)..( 10): Matrix.003 file - promoters60/4772382
aaaaaaaaaa

SEQ ID NO: 60556 - DNA, 9 bp, Unknown
  misc_feature (1)..( 9): Matrix.003 file - promoters60/4772382
caaaaccta

SEQ ID NO: 60557 - DNA, 6 bp, Unknown
  misc_feature (1)..( 6): Matrix.003 file - promoters60/4772382
gaaaaa

SEQ ID NO: 60558 - DNA, 6 bp, Unknown
  misc_feature (1)..( 6): Matrix.003 file - promoters60/4772382
aattca

SEQ ID NO: 60559 - DNA, 7 bp, Unknown
  misc_feature (1)..( 7): Matrix.003 file - promoters60/4772382
attaaaa

SEQ ID NO: 60560 - DNA, 17 bp, Unknown
  misc_feature (1)..( 17): Matrix.003 file - promoters60/4772389
agaggtaaaaaaaaaca

SEQ ID NO: 60561 - DNA, 10 bp, Unknown
  misc_feature (1)..( 10): Matrix.003 file - promoters60/4772389
ataaaaaata

SEQ ID NO: 60562 - DNA, 10 bp, Unknown
  misc_feature (1)..( 10): Matrix.003 file - promoters60/4772389
atttatttcg

SEQ ID NO: 60563 - DNA, 16 bp, Unknown
  misc_feature (1)..( 16): Matrix.003 file - promoters60/4772389
aaacaaacgaactaaa

SEQ ID NO: 60564 - DNA, 11 bp, Unknown
  misc_feature (1)..( 11): Matrix.003 file - promoters60/4772389
gaaaaaaaata

SEQ ID NO: 60565 - DNA, 10 bp, Unknown
  misc_feature (1)..( 10): Matrix.003 file - promoters60/4772389
tacaaataaa

SEQ ID NO: 60566 - DNA, 8 bp, Unknown
  misc_feature (1)..( 8): Matrix.003 file - promoters60/4772389
atataatt

SEQ ID NO: 60567 - DNA, 10 bp, Unknown
  misc_feature (1)..( 10): Matrix.003 file - promoters60/4772393
caaatttaaa

SEQ ID NO: 60568 - DNA, 8 bp, Unknown
  misc_feature (1)..( 8): Matrix.003 file - promoters60/4772393
atttctaa

SEQ ID NO: 60569 - DNA, 13 bp, Unknown
  misc_feature (1)..( 13): Matrix.003 file - promoters60/4772398
aatgggcttatta

SEQ ID NO: 60570 - DNA, 8 bp, Unknown
  misc_feature (1)..( 8): Matrix.003 file - promoters60/4772700
tatatatt

SEQ ID NO: 60571 - DNA, 6 bp, Unknown
  misc_feature (1)..( 6): Matrix.003 file - promoters60/4772706
tgatgt

SEQ ID NO: 60572 - DNA, 7 bp, Unknown
  misc_feature (1)..( 7): Matrix.003 file - promoters60/4772706
catgaga

SEQ ID NO: 60573 - DNA, 6 bp, Unknown
  misc_feature (1)..( 6): Matrix.003 file - promoters60/4772706
taatag

SEQ ID NO: 60574 - DNA, 7 bp, Unknown
  misc_feature (1)..( 7): Matrix.003 file - promoters60/4772706
tcaaaat

SEQ ID NO: 60575 - DNA, 6 bp, Unknown
  misc_feature (1)..( 6): Matrix.003 file - promoters60/4772706
tgtctt

SEQ ID NO: 60576 - DNA, 8 bp, Unknown
  misc_feature (1)..( 8): Matrix.003 file - promoters60/4772706
aacaaaag

SEQ ID NO: 60577 - DNA, 7 bp, Unknown
  misc_feature (1)..( 7): Matrix.003 file - promoters60/4772706
gtttgtt

SEQ ID NO: 60578 - DNA, 6 bp, Unknown
  misc_feature (1)..( 6): Matrix.003 file - promoters60/4772706
attttt

SEQ ID NO: 60579 - DNA, 6 bp, Unknown
  misc_feature (1)..( 6): Matrix.003 file - promoters60/4772706
ttttgt

SEQ ID NO: 60580 - DNA, 6 bp, Unknown
  misc_feature (1)..( 6): Matrix.003 file - promoters60/4772706
tgggtc

SEQ ID NO: 60581 - DNA, 6 bp, Unknown
  misc_feature (1)..( 6): Matrix.003 file - promoters60/4772706
cttctt

SEQ ID NO: 60582 - DNA, 6 bp, Unknown
  misc_feature (1)..( 6): Matrix.003 file - promoters60/4772706
tgataa

SEQ ID NO: 60583 - DNA, 6 bp, Unknown
  misc_feature (1)..( 6): Matrix.003 file - promoters60/4772710
tttctt

SEQ ID NO: 60584 - DNA, 8 bp, Unknown
  misc_feature (1)..( 8): Matrix.003 file - promoters60/4772710
gaatcaaa

SEQ ID NO: 60585 - DNA, 10 bp, Unknown
  misc_feature (1)..( 10): Matrix.003 file - promoters60/4772710
tttcttttgt

SEQ ID NO: 60586 - DNA, 7 bp, Unknown
  misc_feature (1)..( 7): Matrix.003 file - promoters60/4772710
tttgctt

SEQ ID NO: 60587 - DNA, 7 bp, Unknown
  misc_feature (1)..( 7): Matrix.003 file - promoters60/4772710
ctttaat

SEQ ID NO: 60588 - DNA, 7 bp, Unknown
  misc_feature (1)..( 7): Matrix.003 file - promoters60/4772710
aaaattg

SEQ ID NO: 60589 - DNA, 10 bp, Unknown
  misc_feature (1)..( 10): Matrix.003 file - promoters60/4772710
attgaaattt

SEQ ID NO: 60590 - DNA, 9 bp, Unknown
  misc_feature (1)..( 9): Matrix.003 file - promoters60/4772710
aattcagaa

SEQ ID NO: 60591 - DNA, 8 bp, Unknown
  misc_feature (1)..( 8): Matrix.003 file - promoters60/4772710
ttattttg

SEQ ID NO: 60592 - DNA, 7 bp, Unknown
  misc_feature (1)..( 7): Matrix.003 file - promoters60/4772724
ttaccct

SEQ ID NO: 60593 - DNA, 6 bp, Unknown
  misc_feature (1)..( 6): Matrix.003 file - promoters60/4772724
taaccg

SEQ ID NO: 60594 - DNA, 6 bp, Unknown
  misc_feature (1)..( 6): Matrix.003 file - promoters60/4772724
gttaaa

SEQ ID NO: 60595 - DNA, 7 bp, Unknown
  misc_feature (1)..( 7): Matrix.003 file - promoters60/4772724
caaagtc

SEQ ID NO: 60596 - DNA, 8 bp, Unknown
  misc_feature (1)..( 8): Matrix.003 file - promoters60/4772724
atatcttc

SEQ ID NO: 60597 - DNA, 6 bp, Unknown
  misc_feature (1)..( 6): Matrix.003 file - promoters60/4772724
gagata

SEQ ID NO: 60598 - DNA, 7 bp, Unknown
  misc_feature (1)..( 7): Matrix.003 file - promoters60/4772724
atgtgga

SEQ ID NO: 60599 - DNA, 7 bp, Unknown
  misc_feature (1)..( 7): Matrix.003 file - promoters60/4772724
agcaaat

SEQ ID NO: 60600 - DNA, 6 bp, Unknown
  misc_feature (1)..( 6): Matrix.003 file - promoters60/4772724
aatgct

SEQ ID NO: 60601 - DNA, 7 bp, Unknown
  misc_feature (1)..( 7): Matrix.003 file - promoters60/4772724
caatcta

SEQ ID NO: 60602 - DNA, 8 bp, Unknown
  misc_feature (1)..( 8): Matrix.003 file - promoters60/4772724
atttcaaa

SEQ ID NO: 60603 - DNA, 8 bp, Unknown
  misc_feature (1)..( 8): Matrix.003 file - promoters60/4772724
tttgcgaa

SEQ ID NO: 60604 - DNA, 10 bp, Unknown
  misc_feature (1)..( 10): Matrix.003 file - promoters60/4772724
ttcaagaaga

SEQ ID NO: 60605 - DNA, 6 bp, Unknown
  misc_feature (1)..( 6): Matrix.003 file - promoters60/4772724
cgttga

SEQ ID NO: 60606 - DNA, 9 bp, Unknown
  misc_feature (1)..( 9): Matrix.003 file - promoters60/4772724
aataaagat

SEQ ID NO: 60607 - DNA, 6 bp, Unknown
  misc_feature (1)..( 6): Matrix.003 file - promoters60/4772743
attttt

SEQ ID NO: 60608 - DNA, 6 bp, Unknown
  misc_feature (1)..( 6): Matrix.003 file - promoters60/4772743
tttact

SEQ ID NO: 60609 - DNA, 8 bp, Unknown
  misc_feature (1)..( 8): Matrix.003 file - promoters60/4772743
tactagct

SEQ ID NO: 60610 - DNA, 6 bp, Unknown
  misc_feature (1)..( 6): Matrix.003 file - promoters60/4772743
agaatg

SEQ ID NO: 60611 - DNA, 13 bp, Unknown
  misc_feature (1)..( 13): Matrix.003 file - promoters60/4772772
ttaaaaatattaa

SEQ ID NO: 60612 - DNA, 8 bp, Unknown
  misc_feature (1)..( 8): Matrix.003 file - promoters60/4772772
aaaacaaa

SEQ ID NO: 60613 - DNA, 5 bp, Unknown
  misc_feature (1)..( 5): Matrix.003 file - promoters60/4772772
tcaat

SEQ ID NO: 60614 - DNA, 12 bp, Unknown
  misc_feature (1)..( 12): Matrix.003 file - promoters60/4772772
cctctatatata

SEQ ID NO: 60615 - DNA, 9 bp, Unknown
  misc_feature (1)..( 9): Matrix.003 file - promoters60/4772772
tatttaaat

SEQ ID NO: 60616 - DNA, 11 bp, Unknown
  misc_feature (1)..( 11): Matrix.003 file - promoters60/4772772
gtttaaaaaga

SEQ ID NO: 60617 - DNA, 6 bp, Unknown
  misc_feature (1)..( 6): Matrix.003 file - promoters60/4772772
aaaata

SEQ ID NO: 60618 - DNA, 12 bp, Unknown
  misc_feature (1)..( 12): Matrix.003 file - promoters60/4772772
taaagtttcaaa

SEQ ID NO: 60619 - DNA, 12 bp, Unknown
  misc_feature (1)..( 12): Matrix.003 file - promoters60/4772772
ataagtttaaaa

SEQ ID NO: 60620 - DNA, 9 bp, Unknown
  misc_feature (1)..( 9): Matrix.003 file - promoters60/4772772
aaaaatata

SEQ ID NO: 60621 - DNA, 10 bp, Unknown
  misc_feature (1)..( 10): Matrix.003 file - promoters60/4772772
atattattaa

SEQ ID NO: 60622 - DNA, 9 bp, Unknown
  misc_feature (1)..( 9): Matrix.003 file - promoters60/4772772
ttttatttc

SEQ ID NO: 60623 - DNA, 10 bp, Unknown
  misc_feature (1)..( 10): Matrix.003 file - promoters60/4772776
aaattagtga

SEQ ID NO: 60624 - DNA, 14 bp, Unknown
  misc_feature (1)..( 14): Matrix.003 file - promoters60/4772776
ttcttaaaataaaa

SEQ ID NO: 60625 - DNA, 9 bp, Unknown
  misc_feature (1)..( 9): Matrix.003 file - promoters60/4772813
taaattttc

SEQ ID NO: 60626 - DNA, 8 bp, Unknown
  misc_feature (1)..( 8): Matrix.003 file - promoters60/4772813
attcgata

SEQ ID NO: 60627 - DNA, 15 bp, Unknown
  misc_feature (1)..( 15): Matrix.003 file - promoters60/4772813
aaagttttctgtttc

SEQ ID NO: 60628 - DNA, 7 bp, Unknown
  misc_feature (1)..( 7): Matrix.003 file - promoters60/4772813
cttcttt

SEQ ID NO: 60629 - DNA, 12 bp, Unknown
  misc_feature (1)..( 12): Matrix.003 file - promoters60/4772820
ttgatttaagac

SEQ ID NO: 60630 - DNA, 8 bp, Unknown
  misc_feature (1)..( 8): Matrix.003 file - promoters60/4772820
aataaaaa

SEQ ID NO: 60631 - DNA, 8 bp, Unknown
  misc_feature (1)..( 8): Matrix.003 file - promoters60/4772846
aatattct

SEQ ID NO: 60632 - DNA, 10 bp, Unknown
  misc_feature (1)..( 10): Matrix.003 file - promoters60/4772846
ggaaggagag

SEQ ID NO: 60633 - DNA, 9 bp, Unknown
  misc_feature (1)..( 9): Matrix.003 file - promoters60/4772855
caatatgtt

SEQ ID NO: 60634 - DNA, 7 bp, Unknown
  misc_feature (1)..( 7): Matrix.003 file - promoters60/4772855
aaattta

SEQ ID NO: 60635 - DNA, 7 bp, Unknown
  misc_feature (1)..( 7): Matrix.003 file - promoters60/4772855
aaataaa

SEQ ID NO: 60636 - DNA, 6 bp, Unknown
  misc_feature (1)..( 6): Matrix.003 file - promoters60/4772855
atatgt

SEQ ID NO: 60637 - DNA, 6 bp, Unknown
  misc_feature (1)..( 6): Matrix.003 file - promoters60/4772855
ttatta

SEQ ID NO: 60638 - DNA, 6 bp, Unknown
  misc_feature (1)..( 6): Matrix.003 file - promoters60/4772855
actaaa

SEQ ID NO: 60639 - DNA, 8 bp, Unknown
  misc_feature (1)..( 8): Matrix.003 file - promoters60/4772855
aaaataag

SEQ ID NO: 60640 - DNA, 8 bp, Unknown
  misc_feature (1)..( 8): Matrix.003 file - promoters60/4772855
taaattgt

SEQ ID NO: 60641 - DNA, 6 bp, Unknown
  misc_feature (1)..( 6): Matrix.003 file - promoters60/4772855
atagat

SEQ ID NO: 60642 - DNA, 7 bp, Unknown
  misc_feature (1)..( 7): Matrix.003 file - promoters60/4772855
agagata

SEQ ID NO: 60643 - DNA, 6 bp, Unknown
  misc_feature (1)..( 6): Matrix.003 file - promoters60/4772855
ttttgg

SEQ ID NO: 60644 - DNA, 6 bp, Unknown
  misc_feature (1)..( 6): Matrix.003 file - promoters60/4772855
taagat

SEQ ID NO: 60645 - DNA, 6 bp, Unknown
  misc_feature (1)..( 6): Matrix.003 file - promoters60/4772855
aaagaa

SEQ ID NO: 60646 - DNA, 12 bp, Unknown
  misc_feature (1)..( 12): Matrix.003 file - promoters60/4772855
aaaaacaaaaca

SEQ ID NO: 60647 - DNA, 6 bp, Unknown
  misc_feature (1)..( 6): Matrix.003 file - promoters60/4772855
aaaaat

SEQ ID NO: 60648 - DNA, 6 bp, Unknown
  misc_feature (1)..( 6): Matrix.003 file - promoters60/4772855
taaccc

SEQ ID NO: 60649 - DNA, 10 bp, Unknown
  misc_feature (1)..( 10): Matrix.003 file - promoters60/4772879
taaaaaggat

SEQ ID NO: 60650 - DNA, 14 bp, Unknown
  misc_feature (1)..( 14): Matrix.003 file - promoters60/4772879
acttataatataat

SEQ ID NO: 60651 - DNA, 9 bp, Unknown
  misc_feature (1)..( 9): Matrix.003 file - promoters60/4772879
atatataat

SEQ ID NO: 60652 - DNA, 9 bp, Unknown
  misc_feature (1)..( 9): Matrix.003 file - promoters60/4772879
aaaatatat

SEQ ID NO: 60653 - DNA, 11 bp, Unknown
  misc_feature (1)..( 11): Matrix.003 file - promoters60/4772879
agaaaatcaat

SEQ ID NO: 60654 - DNA, 11 bp, Unknown
  misc_feature (1)..( 11): Matrix.003 file - promoters60/4772879
tcctattatat

SEQ ID NO: 60655 - DNA, 8 bp, Unknown
  misc_feature (1)..( 8): Matrix.003 file - promoters60/4772879
ttgtatca

SEQ ID NO: 60656 - DNA, 11 bp, Unknown
  misc_feature (1)..( 11): Matrix.003 file - promoters60/4772879
tcaattcaaac

SEQ ID NO: 60657 - DNA, 8 bp, Unknown
  misc_feature (1)..( 8): Matrix.003 file - promoters60/4772879
atttgttt

SEQ ID NO: 60658 - DNA, 12 bp, Unknown
  misc_feature (1)..( 12): Matrix.003 file - promoters60/4772883
gaaaaaaaaaaa

SEQ ID NO: 60659 - DNA, 11 bp, Unknown
  misc_feature (1)..( 11): Matrix.003 file - promoters60/4772883
atttattaaga

SEQ ID NO: 60660 - DNA, 7 bp, Unknown
  misc_feature (1)..( 7): Matrix.003 file - promoters60/4772883
agaataa

SEQ ID NO: 60661 - DNA, 13 bp, Unknown
  misc_feature (1)..( 13): Matrix.003 file - promoters60/4772883
ctcataaaataaa

SEQ ID NO: 60662 - DNA, 8 bp, Unknown
  misc_feature (1)..( 8): Matrix.003 file - promoters60/4772883
ataaataa

SEQ ID NO: 60663 - DNA, 8 bp, Unknown
  misc_feature (1)..( 8): Matrix.003 file - promoters60/4772883
aaacaaat

SEQ ID NO: 60664 - DNA, 9 bp, Unknown
  misc_feature (1)..( 9): Matrix.003 file - promoters60/4772883
taaatacaa

SEQ ID NO: 60665 - DNA, 9 bp, Unknown
  misc_feature (1)..( 9): Matrix.003 file - promoters60/4772883
aaaaattta

SEQ ID NO: 60666 - DNA, 7 bp, Unknown
  misc_feature (1)..( 7): Matrix.003 file - promoters60/4772883
aaaactt

SEQ ID NO: 60667 - DNA, 8 bp, Unknown
  misc_feature (1)..( 8): Matrix.003 file - promoters60/4772883
caatttta

SEQ ID NO: 60668 - DNA, 8 bp, Unknown
  misc_feature (1)..( 8): Matrix.003 file - promoters60/4772883
aaaaacaa

SEQ ID NO: 60669 - DNA, 10 bp, Unknown
  misc_feature (1)..( 10): Matrix.003 file - promoters60/4772883
aatattaaaa

SEQ ID NO: 60670 - DNA, 8 bp, Unknown
  misc_feature (1)..( 8): Matrix.003 file - promoters60/4772883
tcttataa

SEQ ID NO: 60671 - DNA, 7 bp, Unknown
  misc_feature (1)..( 7): Matrix.003 file - promoters60/4772991
gttggat

SEQ ID NO: 60672 - DNA, 6 bp, Unknown
  misc_feature (1)..( 6): Matrix.003 file - promoters60/4772991
tcattt

SEQ ID NO: 60673 - DNA, 7 bp, Unknown
  misc_feature (1)..( 7): Matrix.003 file - promoters60/4772991
ataaatg

SEQ ID NO: 60674 - DNA, 7 bp, Unknown
  misc_feature (1)..( 7): Matrix.003 file - promoters60/4772991
caaattt

SEQ ID NO: 60675 - DNA, 8 bp, Unknown
  misc_feature (1)..( 8): Matrix.003 file - promoters60/4772991
aagtcaaa

SEQ ID NO: 60676 - DNA, 6 bp, Unknown
  misc_feature (1)..( 6): Matrix.003 file - promoters60/4772991
tctata

SEQ ID NO: 60677 - DNA, 8 bp, Unknown
  misc_feature (1)..( 8): Matrix.003 file - promoters60/4772991
aaactgtt

SEQ ID NO: 60678 - DNA, 6 bp, Unknown
  misc_feature (1)..( 6): Matrix.003 file - promoters60/4772991
tcaaca

SEQ ID NO: 60679 - DNA, 6 bp, Unknown
  misc_feature (1)..( 6): Matrix.003 file - promoters60/4772991
gtttgt

SEQ ID NO: 60680 - DNA, 6 bp, Unknown
  misc_feature (1)..( 6): Matrix.003 file - promoters60/4772991
cttcac

SEQ ID NO: 60681 - DNA, 9 bp, Unknown
  misc_feature (1)..( 9): Matrix.003 file - promoters60/4772991
aaaacatac

SEQ ID NO: 60682 - DNA, 6 bp, Unknown
  misc_feature (1)..( 6): Matrix.003 file - promoters60/4772991
tagaaa

SEQ ID NO: 60683 - DNA, 8 bp, Unknown
  misc_feature (1)..( 8): Matrix.003 file - promoters60/4772991
aaactaac

SEQ ID NO: 60684 - DNA, 7 bp, Unknown
  misc_feature (1)..( 7): Matrix.003 file - promoters60/4772991
taaccat

SEQ ID NO: 60685 - DNA, 6 bp, Unknown
  misc_feature (1)..( 6): Matrix.003 file - promoters60/4772991
ttcaca

SEQ ID NO: 60686 - DNA, 8 bp, Unknown
  misc_feature (1)..( 8): Matrix.003 file - promoters60/4772991
tgtcgatt

SEQ ID NO: 60687 - DNA, 8 bp, Unknown
  misc_feature (1)..( 8): Matrix.003 file - promoters60/4772991
aacaaaat

SEQ ID NO: 60688 - DNA, 8 bp, Unknown
  misc_feature (1)..( 8): Matrix.003 file - promoters60/4772991
tttaaagt

SEQ ID NO: 60689 - DNA, 7 bp, Unknown
  misc_feature (1)..( 7): Matrix.003 file - promoters60/4772991
tgaaaaa

SEQ ID NO: 60690 - DNA, 7 bp, Unknown
  misc_feature (1)..( 7): Matrix.003 file - promoters60/4772991
ttcaaag

SEQ ID NO: 60691 - DNA, 8 bp, Unknown
  misc_feature (1)..( 8): Matrix.003 file - promoters60/4772991
aaaaccat

SEQ ID NO: 60692 - DNA, 10 bp, Unknown
  misc_feature (1)..( 10): Matrix.003 file - promoters60/4773011
atttgttgat

SEQ ID NO: 60693 - DNA, 11 bp, Unknown
  misc_feature (1)..( 11): Matrix.003 file - promoters60/4773011
tgattcttttg

SEQ ID NO: 60694 - DNA, 9 bp, Unknown
  misc_feature (1)..( 9): Matrix.003 file - promoters60/4773011
ctttttatt

SEQ ID NO: 60695 - DNA, 6 bp, Unknown
  misc_feature (1)..( 6): Matrix.003 file - promoters60/4773015
ttttct

SEQ ID NO: 60696 - DNA, 9 bp, Unknown
  misc_feature (1)..( 9): Matrix.003 file - promoters60/4773015
tttcgtttc

SEQ ID NO: 60697 - DNA, 10 bp, Unknown
  misc_feature (1)..( 10): Matrix.003 file - promoters60/4773015
accaaaaaaa

SEQ ID NO: 60698 - DNA, 9 bp, Unknown
  misc_feature (1)..( 9): Matrix.003 file - promoters60/4773015
gtattatct

SEQ ID NO: 60699 - DNA, 7 bp, Unknown
  misc_feature (1)..( 7): Matrix.003 file - promoters60/4773015
tttagaa

SEQ ID NO: 60700 - DNA, 7 bp, Unknown
  misc_feature (1)..( 7): Matrix.003 file - promoters60/4773015
ttttttc

SEQ ID NO: 60701 - DNA, 7 bp, Unknown
  misc_feature (1)..( 7): Matrix.003 file - promoters60/4773015
ttgattc

SEQ ID NO: 60702 - DNA, 6 bp, Unknown
  misc_feature (1)..( 6): Matrix.003 file - promoters60/4773015
aaagaa

SEQ ID NO: 60703 - DNA, 7 bp, Unknown
  misc_feature (1)..( 7): Matrix.003 file - promoters60/4773015
ttcattt

SEQ ID NO: 60704 - DNA, 9 bp, Unknown
  misc_feature (1)..( 9): Matrix.003 file - promoters60/4773015
ctttctttt

SEQ ID NO: 60705 - DNA, 7 bp, Unknown
  misc_feature (1)..( 7): Matrix.003 file - promoters60/4773015
attacag

SEQ ID NO: 60706 - DNA, 7 bp, Unknown
  misc_feature (1)..( 7): Matrix.003 file - promoters60/4773027
tatattt

SEQ ID NO: 60707 - DNA, 8 bp, Unknown
  misc_feature (1)..( 8): Matrix.003 file - promoters60/4773027
tatgttct

SEQ ID NO: 60708 - DNA, 6 bp, Unknown
  misc_feature (1)..( 6): Matrix.003 file - promoters60/4773027
atattt

SEQ ID NO: 60709 - DNA, 6 bp, Unknown
  misc_feature (1)..( 6): Matrix.003 file - promoters60/4773027
atttat

SEQ ID NO: 60710 - DNA, 6 bp, Unknown
  misc_feature (1)..( 6): Matrix.003 file - promoters60/4773027
cctttt

SEQ ID NO: 60711 - DNA, 6 bp, Unknown
  misc_feature (1)..( 6): Matrix.003 file - promoters60/4773027
cttata

SEQ ID NO: 60712 - DNA, 6 bp, Unknown
  misc_feature (1)..( 6): Matrix.003 file - promoters60/4773027
gttgga

SEQ ID NO: 60713 - DNA, 6 bp, Unknown
  misc_feature (1)..( 6): Matrix.003 file - promoters60/4773027
ttcgag

SEQ ID NO: 60714 - DNA, 7 bp, Unknown
  misc_feature (1)..( 7): Matrix.003 file - promoters60/4773027
gacaata

SEQ ID NO: 60715 - DNA, 6 bp, Unknown
  misc_feature (1)..( 6): Matrix.003 file - promoters60/4773027
tatctg

SEQ ID NO: 60716 - DNA, 7 bp, Unknown
  misc_feature (1)..( 7): Matrix.003 file - promoters60/4773027
gaaatca

SEQ ID NO: 60717 - DNA, 7 bp, Unknown
  misc_feature (1)..( 7): Matrix.003 file - promoters60/4773027
ggtcctt

SEQ ID NO: 60718 - DNA, 6 bp, Unknown
  misc_feature (1)..( 6): Matrix.003 file - promoters60/4773027
atatct

SEQ ID NO: 60719 - DNA, 6 bp, Unknown
  misc_feature (1)..( 6): Matrix.003 file - promoters60/4773027
aactaa

SEQ ID NO: 60720 - DNA, 7 bp, Unknown
  misc_feature (1)..( 7): Matrix.003 file - promoters60/4773027
ctaatgt

SEQ ID NO: 60721 - DNA, 6 bp, Unknown
  misc_feature (1)..( 6): Matrix.003 file - promoters60/4773027
tgtgct

SEQ ID NO: 60722 - DNA, 8 bp, Unknown
  misc_feature (1)..( 8): Matrix.003 file - promoters60/4773027
aaacaatt

SEQ ID NO: 60723 - DNA, 7 bp, Unknown
  misc_feature (1)..( 7): Matrix.003 file - promoters60/4773027
ctaaaat

SEQ ID NO: 60724 - DNA, 7 bp, Unknown
  misc_feature (1)..( 7): Matrix.003 file - promoters60/4773027
ttttgtt

SEQ ID NO: 60725 - DNA, 7 bp, Unknown
  misc_feature (1)..( 7): Matrix.003 file - promoters60/4773027
ttagtaa

SEQ ID NO: 60726 - DNA, 7 bp, Unknown
  misc_feature (1)..( 7): Matrix.003 file - promoters60/4773027
tctgttc

SEQ ID NO: 60727 - DNA, 6 bp, Unknown
  misc_feature (1)..( 6): Matrix.003 file - promoters60/4773027
aataat

SEQ ID NO: 60728 - DNA, 8 bp, Unknown
  misc_feature (1)..( 8): Matrix.003 file - promoters60/4773035
aaataaat

SEQ ID NO: 60729 - DNA, 9 bp, Unknown
  misc_feature (1)..( 9): Matrix.003 file - promoters60/4773035
taccaatta

SEQ ID NO: 60730 - DNA, 9 bp, Unknown
  misc_feature (1)..( 9): Matrix.003 file - promoters60/4773035
ctatataaa

SEQ ID NO: 60731 - DNA, 8 bp, Unknown
  misc_feature (1)..( 8): Matrix.003 file - promoters60/4773068
caaaaaaa

SEQ ID NO: 60732 - DNA, 6 bp, Unknown
  misc_feature (1)..( 6): Matrix.003 file - promoters60/4773068
aaaaca

SEQ ID NO: 60733 - DNA, 8 bp, Unknown
  misc_feature (1)..( 8): Matrix.003 file - promoters60/4773068
gaaataaa

SEQ ID NO: 60734 - DNA, 7 bp, Unknown
  misc_feature (1)..( 7): Matrix.003 file - promoters60/4773068
caaattt

SEQ ID NO: 60735 - DNA, 6 bp, Unknown
  misc_feature (1)..( 6): Matrix.003 file - promoters60/4773068
ttaaaa

SEQ ID NO: 60736 - DNA, 6 bp, Unknown
  misc_feature (1)..( 6): Matrix.003 file - promoters60/4773068
gtaacg

SEQ ID NO: 60737 - DNA, 7 bp, Unknown
  misc_feature (1)..( 7): Matrix.003 file - promoters60/4773068
gtggtta

SEQ ID NO: 60738 - DNA, 10 bp, Unknown
  misc_feature (1)..( 10): Matrix.003 file - promoters60/4773068
tacgtgtcaa

SEQ ID NO: 60739 - DNA, 20 bp, Unknown
  misc_feature (1)..( 20): Matrix.003 file - promoters60/4773068
ttggctattgcttcaccgcc

SEQ ID NO: 60740 - DNA, 16 bp, Unknown
  misc_feature (1)..( 16): Matrix.003 file - promoters60/4773068
gaccgagtcgtcctcg

SEQ ID NO: 60741 - DNA, 19 bp, Unknown
  misc_feature (1)..( 19): Matrix.003 file - promoters60/4773068
ttcttcttctataaatcaa

SEQ ID NO: 60742 - DNA, 6 bp, Unknown
  misc_feature (1)..( 6): Matrix.003 file - promoters60/4773068
gcttct

SEQ ID NO: 60743 - DNA, 8 bp, Unknown
  misc_feature (1)..( 8): Matrix.003 file - promoters60/4773068
ttctggcc

SEQ ID NO: 60744 - DNA, 7 bp, Unknown
  misc_feature (1)..( 7): Matrix.003 file - promoters60/4773068
tacatat

SEQ ID NO: 60745 - DNA, 15 bp, Unknown
  misc_feature (1)..( 15): Matrix.003 file - promoters60/4773068
cgccttagctttctc

SEQ ID NO: 60746 - DNA, 6 bp, Unknown
  misc_feature (1)..( 6): Matrix.003 file - promoters60/4773068
tttttt

SEQ ID NO: 60747 - DNA, 9 bp, Unknown
  misc_feature (1)..( 9): Matrix.003 file - promoters60/4773068
acaaaaagg

SEQ ID NO: 60748 - DNA, 7 bp, Unknown
  misc_feature (1)..( 7): Matrix.003 file - promoters60/4773068
acgaaga

SEQ ID NO: 60749 - DNA, 6 bp, Unknown
  misc_feature (1)..( 6): Matrix.003 file - promoters60/4773068
gttcaa

SEQ ID NO: 60750 - DNA, 6 bp, Unknown
  misc_feature (1)..( 6): Matrix.003 file - promoters60/4773068
gtatat

SEQ ID NO: 60751 - DNA, 9 bp, Unknown
  misc_feature (1)..( 9): Matrix.003 file - promoters60/4773068
atctaatga

SEQ ID NO: 60752 - DNA, 6 bp, Unknown
  misc_feature (1)..( 6): Matrix.003 file - promoters60/4773068
tcagta

SEQ ID NO: 60753 - DNA, 6 bp, Unknown
  misc_feature (1)..( 6): Matrix.003 file - promoters60/4773068
aacaac

SEQ ID NO: 60754 - DNA, 15 bp, Unknown
  misc_feature (1)..( 15): Matrix.003 file - promoters60/4773068
aatacccaaagagct

SEQ ID NO: 60755 - DNA, 10 bp, Unknown
  misc_feature (1)..( 10): Matrix.003 file - promoters60/4773074
aaagcttttt

SEQ ID NO: 60756 - DNA, 6 bp, Unknown
  misc_feature (1)..( 6): Matrix.003 file - promoters60/4773077
atccaa

SEQ ID NO: 60757 - DNA, 6 bp, Unknown
  misc_feature (1)..( 6): Matrix.003 file - promoters60/4773077
ctcctc

SEQ ID NO: 60758 - DNA, 7 bp, Unknown
  misc_feature (1)..( 7): Matrix.003 file - promoters60/4773077
accactc

SEQ ID NO: 60759 - DNA, 8 bp, Unknown
  misc_feature (1)..( 8): Matrix.003 file - promoters60/4773077
ctctctca

SEQ ID NO: 60760 - DNA, 6 bp, Unknown
  misc_feature (1)..( 6): Matrix.003 file - promoters60/4773077
tctttc

SEQ ID NO: 60761 - DNA, 8 bp, Unknown
  misc_feature (1)..( 8): Matrix.003 file - promoters60/4773077
tatcttct

SEQ ID NO: 60762 - DNA, 9 bp, Unknown
  misc_feature (1)..( 9): Matrix.003 file - promoters60/4773077
tctcgctaa

SEQ ID NO: 60763 - DNA, 8 bp, Unknown
  misc_feature (1)..( 8): Matrix.003 file - promoters60/4773077
tttagctt

SEQ ID NO: 60764 - DNA, 6 bp, Unknown
  misc_feature (1)..( 6): Matrix.003 file - promoters60/4773077
gaatta

SEQ ID NO: 60765 - DNA, 6 bp, Unknown
  misc_feature (1)..( 6): Matrix.003 file - promoters60/4773077
gcggaa

SEQ ID NO: 60766 - DNA, 6 bp, Unknown
  misc_feature (1)..( 6): Matrix.003 file - promoters60/4773077
aaagaa

SEQ ID NO: 60767 - DNA, 6 bp, Unknown
  misc_feature (1)..( 6): Matrix.003 file - promoters60/4773077
tccttg

SEQ ID NO: 60768 - DNA, 7 bp, Unknown
  misc_feature (1)..( 7): Matrix.003 file - promoters60/4773077
gatatat

SEQ ID NO: 60769 - DNA, 9 bp, Unknown
  misc_feature (1)..( 9): Matrix.003 file - promoters60/4773089
caaaaaaat

SEQ ID NO: 60770 - DNA, 9 bp, Unknown
  misc_feature (1)..( 9): Matrix.003 file - promoters60/4773089
ataaaattt

SEQ ID NO: 60771 - DNA, 12 bp, Unknown
  misc_feature (1)..( 12): Matrix.003 file - promoters60/4773089
aaaaaatacaac

SEQ ID NO: 60772 - DNA, 10 bp, Unknown
  misc_feature (1)..( 10): Matrix.003 file - promoters60/4773089
aaaatttatt

SEQ ID NO: 60773 - DNA, 12 bp, Unknown
  misc_feature (1)..( 12): Matrix.003 file - promoters60/4773089
aaaataaactta

SEQ ID NO: 60774 - DNA, 7 bp, Unknown
  misc_feature (1)..( 7): Matrix.003 file - promoters60/4773093
tttccca

SEQ ID NO: 60775 - DNA, 7 bp, Unknown
  misc_feature (1)..( 7): Matrix.003 file - promoters60/4773093
gcaaatt

SEQ ID NO: 60776 - DNA, 6 bp, Unknown
  misc_feature (1)..( 6): Matrix.003 file - promoters60/4773093
tttgat

SEQ ID NO: 60777 - DNA, 7 bp, Unknown
  misc_feature (1)..( 7): Matrix.003 file - promoters60/4773093
tttttat

SEQ ID NO: 60778 - DNA, 8 bp, Unknown
  misc_feature (1)..( 8): Matrix.003 file - promoters60/4773093
attttttt

SEQ ID NO: 60779 - DNA, 6 bp, Unknown
  misc_feature (1)..( 6): Matrix.003 file - promoters60/4773093
tgttat

SEQ ID NO: 60780 - DNA, 8 bp, Unknown
  misc_feature (1)..( 8): Matrix.003 file - promoters60/4773093
tgtatgtt

SEQ ID NO: 60781 - DNA, 6 bp, Unknown
  misc_feature (1)..( 6): Matrix.003 file - promoters60/4773093
ctctta

SEQ ID NO: 60782 - DNA, 6 bp, Unknown
  misc_feature (1)..( 6): Matrix.003 file - promoters60/4773093
atttaa

SEQ ID NO: 60783 - DNA, 6 bp, Unknown
  misc_feature (1)..( 6): Matrix.003 file - promoters60/4773093
aaattt

SEQ ID NO: 60784 - DNA, 10 bp, Unknown
  misc_feature (1)..( 10): Matrix.003 file - promoters60/4773093
aatattgggc

SEQ ID NO: 60785 - DNA, 7 bp, Unknown
  misc_feature (1)..( 7): Matrix.003 file - promoters60/4773093
attgggc

SEQ ID NO: 60786 - DNA, 7 bp, Unknown
  misc_feature (1)..( 7): Matrix.003 file - promoters60/4773093
tatatga

SEQ ID NO: 60787 - DNA, 7 bp, Unknown
  misc_feature (1)..( 7): Matrix.003 file - promoters60/4773093
ctagaaa

SEQ ID NO: 60788 - DNA, 7 bp, Unknown
  misc_feature (1)..( 7): Matrix.003 file - promoters60/4773093
tttctct

SEQ ID NO: 60789 - DNA, 7 bp, Unknown
  misc_feature (1)..( 7): Matrix.003 file - promoters60/4773093
gttatct

SEQ ID NO: 60790 - DNA, 8 bp, Unknown
  misc_feature (1)..( 8): Matrix.003 file - promoters60/4773093
caatagtc

SEQ ID NO: 60791 - DNA, 7 bp, Unknown
  misc_feature (1)..( 7): Matrix.003 file - promoters60/4773093
aaagcag

SEQ ID NO: 60792 - DNA, 10 bp, Unknown
  misc_feature (1)..( 10): Matrix.003 file - promoters60/4773093
aacttgaaat

SEQ ID NO: 60793 - DNA, 8 bp, Unknown
  misc_feature (1)..( 8): Matrix.003 file - promoters60/4773093
aaccctaa

SEQ ID NO: 60794 - DNA, 8 bp, Unknown
  misc_feature (1)..( 8): Matrix.003 file - promoters60/4773093
ttaccaat

SEQ ID NO: 60795 - DNA, 6 bp, Unknown
  misc_feature (1)..( 6): Matrix.003 file - promoters60/4773093
tgttcc

SEQ ID NO: 60796 - DNA, 6 bp, Unknown
  misc_feature (1)..( 6): Matrix.003 file - promoters60/4773093
tgtttt

SEQ ID NO: 60797 - DNA, 6 bp, Unknown
  misc_feature (1)..( 6): Matrix.003 file - promoters60/4773093
tgattt

SEQ ID NO: 60798 - DNA, 7 bp, Unknown
  misc_feature (1)..( 7): Matrix.003 file - promoters60/4773093
tatcgtc

SEQ ID NO: 60799 - DNA, 8 bp, Unknown
  misc_feature (1)..( 8): Matrix.003 file - promoters60/4773093
ccttcttg

SEQ ID NO: 60800 - DNA, 6 bp, Unknown
  misc_feature (1)..( 6): Matrix.003 file - promoters60/4773093
aaccaa

SEQ ID NO: 60801 - DNA, 7 bp, Unknown
  misc_feature (1)..( 7): Matrix.003 file - promoters60/4773093
tatcaaa

SEQ ID NO: 60802 - DNA, 8 bp, Unknown
  misc_feature (1)..( 8): Matrix.003 file - promoters60/4773093
aaacaaga

SEQ ID NO: 60803 - DNA, 7 bp, Unknown
  misc_feature (1)..( 7): Matrix.003 file - promoters60/4773112
tgtattt

SEQ ID NO: 60804 - DNA, 8 bp, Unknown
  misc_feature (1)..( 8): Matrix.003 file - promoters60/4773112
cattcgga

SEQ ID NO: 60805 - DNA, 9 bp, Unknown
  misc_feature (1)..( 9): Matrix.003 file - promoters60/4773112
tgttaattt

SEQ ID NO: 60806 - DNA, 7 bp, Unknown
  misc_feature (1)..( 7): Matrix.003 file - promoters60/4773112
acaaatg

SEQ ID NO: 60807 - DNA, 6 bp, Unknown
  misc_feature (1)..( 6): Matrix.003 file - promoters60/4773112
ttcata

SEQ ID NO: 60808 - DNA, 7 bp, Unknown
  misc_feature (1)..( 7): Matrix.003 file - promoters60/4773112
tatatta

SEQ ID NO: 60809 - DNA, 6 bp, Unknown
  misc_feature (1)..( 6): Matrix.003 file - promoters60/4773112
tagtat

SEQ ID NO: 60810 - DNA, 11 bp, Unknown
  misc_feature (1)..( 11): Matrix.003 file - promoters60/4773112
aaactttattt

SEQ ID NO: 60811 - DNA, 8 bp, Unknown
  misc_feature (1)..( 8): Matrix.003 file - promoters60/4773112
ttaaattt

SEQ ID NO: 60812 - DNA, 7 bp, Unknown
  misc_feature (1)..( 7): Matrix.003 file - promoters60/4773112
tttagat

SEQ ID NO: 60813 - DNA, 6 bp, Unknown
  misc_feature (1)..( 6): Matrix.003 file - promoters60/4773112
tttttt

SEQ ID NO: 60814 - DNA, 7 bp, Unknown
  misc_feature (1)..( 7): Matrix.003 file - promoters60/4773112
atattat

SEQ ID NO: 60815 - DNA, 7 bp, Unknown
  misc_feature (1)..( 7): Matrix.003 file - promoters60/4773112
ttaattt

SEQ ID NO: 60816 - DNA, 6 bp, Unknown
  misc_feature (1)..( 6): Matrix.003 file - promoters60/4773112
tttaaa

SEQ ID NO: 60817 - DNA, 9 bp, Unknown
  misc_feature (1)..( 9): Matrix.003 file - promoters60/4773112
aatattttt

SEQ ID NO: 60818 - DNA, 6 bp, Unknown
  misc_feature (1)..( 6): Matrix.003 file - promoters60/4773112
atatcc

SEQ ID NO: 60819 - DNA, 7 bp, Unknown
  misc_feature (1)..( 7): Matrix.003 file - promoters60/4773112
cggatat

SEQ ID NO: 60820 - DNA, 6 bp, Unknown
  misc_feature (1)..( 6): Matrix.003 file - promoters60/4773112
gtttca

SEQ ID NO: 60821 - DNA, 6 bp, Unknown
  misc_feature (1)..( 6): Matrix.003 file - promoters60/4773112
cattcg

SEQ ID NO: 60822 - DNA, 6 bp, Unknown
  misc_feature (1)..( 6): Matrix.003 file - promoters60/4773112
ttttat

SEQ ID NO: 60823 - DNA, 6 bp, Unknown
  misc_feature (1)..( 6): Matrix.003 file - promoters60/4773112
tatata

SEQ ID NO: 60824 - DNA, 7 bp, Unknown
  misc_feature (1)..( 7): Matrix.003 file - promoters60/4773112
tatccat

SEQ ID NO: 60825 - DNA, 6 bp, Unknown
  misc_feature (1)..( 6): Matrix.003 file - promoters60/4773112
tggtta

SEQ ID NO: 60826 - DNA, 6 bp, Unknown
  misc_feature (1)..( 6): Matrix.003 file - promoters60/4773112
ttcggt

SEQ ID NO: 60827 - DNA, 7 bp, Unknown
  misc_feature (1)..( 7): Matrix.003 file - promoters60/4773112
ggtttag

SEQ ID NO: 60828 - DNA, 7 bp, Unknown
  misc_feature (1)..( 7): Matrix.003 file - promoters60/4773124
atatatt

SEQ ID NO: 60829 - DNA, 6 bp, Unknown
  misc_feature (1)..( 6): Matrix.003 file - promoters60/4773124
acaaat

SEQ ID NO: 60830 - DNA, 6 bp, Unknown
  misc_feature (1)..( 6): Matrix.003 file - promoters60/4773124
ttctaa

SEQ ID NO: 60831 - DNA, 9 bp, Unknown
  misc_feature (1)..( 9): Matrix.003 file - promoters60/4773124
taactaaaa

SEQ ID NO: 60832 - DNA, 7 bp, Unknown
  misc_feature (1)..( 7): Matrix.003 file - promoters60/4773124
taaaaac

SEQ ID NO: 60833 - DNA, 6 bp, Unknown
  misc_feature (1)..( 6): Matrix.003 file - promoters60/4773124
aagaaa

SEQ ID NO: 60834 - DNA, 7 bp, Unknown
  misc_feature (1)..( 7): Matrix.003 file - promoters60/4773124
taattag

SEQ ID NO: 60835 - DNA, 8 bp, Unknown
  misc_feature (1)..( 8): Matrix.003 file - promoters60/4773124
tgttgttg

SEQ ID NO: 60836 - DNA, 6 bp, Unknown
  misc_feature (1)..( 6): Matrix.003 file - promoters60/4773124
ttttct

SEQ ID NO: 60837 - DNA, 8 bp, Unknown
  misc_feature (1)..( 8): Matrix.003 file - promoters60/4773124
tttgattc

SEQ ID NO: 60838 - DNA, 7 bp, Unknown
  misc_feature (1)..( 7): Matrix.003 file - promoters60/4773124
gaattct

SEQ ID NO: 60839 - DNA, 6 bp, Unknown
  misc_feature (1)..( 6): Matrix.003 file - promoters60/4773124
tctctt

SEQ ID NO: 60840 - DNA, 8 bp, Unknown
  misc_feature (1)..( 8): Matrix.003 file - promoters60/4773124
tgatcttt

SEQ ID NO: 60841 - DNA, 6 bp, Unknown
  misc_feature (1)..( 6): Matrix.003 file - promoters60/4773124
aatctc

SEQ ID NO: 60842 - DNA, 7 bp, Unknown
  misc_feature (1)..( 7): Matrix.003 file - promoters60/4773124
ttaactc

SEQ ID NO: 60843 - DNA, 6 bp, Unknown
  misc_feature (1)..( 6): Matrix.003 file - promoters60/4773124
ttcata

SEQ ID NO: 60844 - DNA, 8 bp, Unknown
  misc_feature (1)..( 8): Matrix.003 file - promoters60/4773127
caatgtgt

SEQ ID NO: 60845 - DNA, 10 bp, Unknown
  misc_feature (1)..( 10): Matrix.003 file - promoters60/4773127
atataatttt

SEQ ID NO: 60846 - DNA, 8 bp, Unknown
  misc_feature (1)..( 8): Matrix.003 file - promoters60/4773127
aaaccaaa

SEQ ID NO: 60847 - DNA, 7 bp, Unknown
  misc_feature (1)..( 7): Matrix.003 file - promoters60/4773127
tcgtcaa

SEQ ID NO: 60848 - DNA, 7 bp, Unknown
  misc_feature (1)..( 7): Matrix.003 file - promoters60/4773127
aaacaaa

SEQ ID NO: 60849 - DNA, 8 bp, Unknown
  misc_feature (1)..( 8): Matrix.003 file - promoters60/4773127
taaatata

SEQ ID NO: 60850 - DNA, 8 bp, Unknown
  misc_feature (1)..( 8): Matrix.003 file - promoters60/4773127
taatatta

SEQ ID NO: 60851 - DNA, 6 bp, Unknown
  misc_feature (1)..( 6): Matrix.003 file - promoters60/4773127
tttaaa

SEQ ID NO: 60852 - DNA, 10 bp, Unknown
  misc_feature (1)..( 10): Matrix.003 file - promoters60/4773127
ttaaaaattc

SEQ ID NO: 60853 - DNA, 7 bp, Unknown
  misc_feature (1)..( 7): Matrix.003 file - promoters60/4773127
gttggtt

SEQ ID NO: 60854 - DNA, 7 bp, Unknown
  misc_feature (1)..( 7): Matrix.003 file - promoters60/4773127
aaccgaa

SEQ ID NO: 60855 - DNA, 11 bp, Unknown
  misc_feature (1)..( 11): Matrix.003 file - promoters60/4773127
aatccaaacac

SEQ ID NO: 60856 - DNA, 9 bp, Unknown
  misc_feature (1)..( 9): Matrix.003 file - promoters60/4773127
tgtcgcata

SEQ ID NO: 60857 - DNA, 7 bp, Unknown
  misc_feature (1)..( 7): Matrix.003 file - promoters60/4773127
tttattg

SEQ ID NO: 60858 - DNA, 5 bp, Unknown
  misc_feature (1)..( 5): Matrix.003 file - promoters60/4773134
tattt

SEQ ID NO: 60859 - DNA, 8 bp, Unknown
  misc_feature (1)..( 8): Matrix.003 file - promoters60/4773134
aattttgg

SEQ ID NO: 60860 - DNA, 8 bp, Unknown
  misc_feature (1)..( 8): Matrix.003 file - promoters60/4773134
attacaca

SEQ ID NO: 60861 - DNA, 14 bp, Unknown
  misc_feature (1)..( 14): Matrix.003 file - promoters60/4773134
atttaatagtcatt

SEQ ID NO: 60862 - DNA, 9 bp, Unknown
  misc_feature (1)..( 9): Matrix.003 file - promoters60/4773134
tatttgatt

SEQ ID NO: 60863 - DNA, 10 bp, Unknown
  misc_feature (1)..( 10): Matrix.003 file - promoters60/4773182
aacttcatta

SEQ ID NO: 60864 - DNA, 10 bp, Unknown
  misc_feature (1)..( 10): Matrix.003 file - promoters60/4773185
aaataataaa

SEQ ID NO: 60865 - DNA, 12 bp, Unknown
  misc_feature (1)..( 12): Matrix.003 file - promoters60/4773185
aaatagaataaa

SEQ ID NO: 60866 - DNA, 11 bp, Unknown
  misc_feature (1)..( 11): Matrix.003 file - promoters60/4773185
atataaaatag

SEQ ID NO: 60867 - DNA, 8 bp, Unknown
  misc_feature (1)..( 8): Matrix.003 file - promoters60/4773185
aaaacaat

SEQ ID NO: 60868 - DNA, 9 bp, Unknown
  misc_feature (1)..( 9): Matrix.003 file - promoters60/4773185
aaatattac

SEQ ID NO: 60869 - DNA, 6 bp, Unknown
  misc_feature (1)..( 6): Matrix.003 file - promoters60/4773187
ttttta

SEQ ID NO: 60870 - DNA, 8 bp, Unknown
  misc_feature (1)..( 8): Matrix.003 file - promoters60/4773187
cttatgtt

SEQ ID NO: 60871 - DNA, 13 bp, Unknown
  misc_feature (1)..( 13): Matrix.003 file - promoters60/4773187
atatattttattt

SEQ ID NO: 60872 - DNA, 8 bp, Unknown
  misc_feature (1)..( 8): Matrix.003 file - promoters60/4773187
gtatataa

SEQ ID NO: 60873 - DNA, 6 bp, Unknown
  misc_feature (1)..( 6): Matrix.003 file - promoters60/4773187
aattta

SEQ ID NO: 60874 - DNA, 7 bp, Unknown
  misc_feature (1)..( 7): Matrix.003 file - promoters60/4773187
taaaata

SEQ ID NO: 60875 - DNA, 6 bp, Unknown
  misc_feature (1)..( 6): Matrix.003 file - promoters60/4773187
aaaaaa

SEQ ID NO: 60876 - DNA, 7 bp, Unknown
  misc_feature (1)..( 7): Matrix.003 file - promoters60/4773187
atacaaa

SEQ ID NO: 60877 - DNA, 6 bp, Unknown
  misc_feature (1)..( 6): Matrix.003 file - promoters60/4773187
atgtct

SEQ ID NO: 60878 - DNA, 7 bp, Unknown
  misc_feature (1)..( 7): Matrix.003 file - promoters60/4773187
ttggaga

SEQ ID NO: 60879 - DNA, 6 bp, Unknown
  misc_feature (1)..( 6): Matrix.003 file - promoters60/4773187
gaagat

SEQ ID NO: 60880 - DNA, 6 bp, Unknown
  misc_feature (1)..( 6): Matrix.003 file - promoters60/4773187
gatcga

SEQ ID NO: 60881 - DNA, 6 bp, Unknown
  misc_feature (1)..( 6): Matrix.003 file - promoters60/4773187
aaatgc

SEQ ID NO: 60882 - DNA, 8 bp, Unknown
  misc_feature (1)..( 8): Matrix.003 file - promoters60/4773187
ggacttgt

SEQ ID NO: 60883 - DNA, 7 bp, Unknown
  misc_feature (1)..( 7): Matrix.003 file - promoters60/4773205
tcataaa

SEQ ID NO: 60884 - DNA, 7 bp, Unknown
  misc_feature (1)..( 7): Matrix.003 file - promoters60/4773205
ataatta

SEQ ID NO: 60885 - DNA, 7 bp, Unknown
  misc_feature (1)..( 7): Matrix.003 file - promoters60/4773205
tttaaaa

SEQ ID NO: 60886 - DNA, 6 bp, Unknown
  misc_feature (1)..( 6): Matrix.003 file - promoters60/4773205
atttac

SEQ ID NO: 60887 - DNA, 6 bp, Unknown
  misc_feature (1)..( 6): Matrix.003 file - promoters60/4773205
ataaaa

SEQ ID NO: 60888 - DNA, 10 bp, Unknown
  misc_feature (1)..( 10): Matrix.003 file - promoters60/4773205
aaaacaattt

SEQ ID NO: 60889 - DNA, 7 bp, Unknown
  misc_feature (1)..( 7): Matrix.003 file - promoters60/4773205
aaaagaa

SEQ ID NO: 60890 - DNA, 8 bp, Unknown
  misc_feature (1)..( 8): Matrix.003 file - promoters60/4773205
tgaaacag

SEQ ID NO: 60891 - DNA, 7 bp, Unknown
  misc_feature (1)..( 7): Matrix.003 file - promoters60/4773205
gatcact

SEQ ID NO: 60892 - DNA, 6 bp, Unknown
  misc_feature (1)..( 6): Matrix.003 file - promoters60/4773205
ttttat

SEQ ID NO: 60893 - DNA, 7 bp, Unknown
  misc_feature (1)..( 7): Matrix.003 file - promoters60/4773205
tatgata

SEQ ID NO: 60894 - DNA, 6 bp, Unknown
  misc_feature (1)..( 6): Matrix.003 file - promoters60/4773205
atggtt

SEQ ID NO: 60895 - DNA, 6 bp, Unknown
  misc_feature (1)..( 6): Matrix.003 file - promoters60/4773205
gagttc

SEQ ID NO: 60896 - DNA, 6 bp, Unknown
  misc_feature (1)..( 6): Matrix.003 file - promoters60/4773205
taaaaa

SEQ ID NO: 60897 - DNA, 6 bp, Unknown
  misc_feature (1)..( 6): Matrix.003 file - promoters60/4773205
cccaaa

SEQ ID NO: 60898 - DNA, 6 bp, Unknown
  misc_feature (1)..( 6): Matrix.003 file - promoters60/4773205
tttatt

SEQ ID NO: 60899 - DNA, 12 bp, Unknown
  misc_feature (1)..( 12): Matrix.003 file - promoters60/4773205
aataatgatgat

SEQ ID NO: 60900 - DNA, 6 bp, Unknown
  misc_feature (1)..( 6): Matrix.003 file - promoters60/4773205
ttgttg

SEQ ID NO: 60901 - DNA, 6 bp, Unknown
  misc_feature (1)..( 6): Matrix.003 file - promoters60/4773223
tgcaag

SEQ ID NO: 60902 - DNA, 8 bp, Unknown
  misc_feature (1)..( 8): Matrix.003 file - promoters60/4773223
ttggcact

SEQ ID NO: 60903 - DNA, 9 bp, Unknown
  misc_feature (1)..( 9): Matrix.003 file - promoters60/4773223
tttgatttt

SEQ ID NO: 60904 - DNA, 9 bp, Unknown
  misc_feature (1)..( 9): Matrix.003 file - promoters60/4773223
atttaattt

SEQ ID NO: 60905 - DNA, 7 bp, Unknown
  misc_feature (1)..( 7): Matrix.003 file - promoters60/4773223
tcagttt

SEQ ID NO: 60906 - DNA, 8 bp, Unknown
  misc_feature (1)..( 8): Matrix.003 file - promoters60/4773223
taaagtga

SEQ ID NO: 60907 - DNA, 7 bp, Unknown
  misc_feature (1)..( 7): Matrix.003 file - promoters60/4773223
ataattg

SEQ ID NO: 60908 - DNA, 6 bp, Unknown
  misc_feature (1)..( 6): Matrix.003 file - promoters60/4773223
tatagg

SEQ ID NO: 60909 - DNA, 8 bp, Unknown
  misc_feature (1)..( 8): Matrix.003 file - promoters60/4773223
gccatgaa

SEQ ID NO: 60910 - DNA, 8 bp, Unknown
  misc_feature (1)..( 8): Matrix.003 file - promoters60/4773223
ctgcgatt

SEQ ID NO: 60911 - DNA, 7 bp, Unknown
  misc_feature (1)..( 7): Matrix.003 file - promoters60/4773223
gatacag

SEQ ID NO: 60912 - DNA, 6 bp, Unknown
  misc_feature (1)..( 6): Matrix.003 file - promoters60/4773223
attcca

SEQ ID NO: 60913 - DNA, 7 bp, Unknown
  misc_feature (1)..( 7): Matrix.003 file - promoters60/4773223
aaacctg

SEQ ID NO: 60914 - DNA, 6 bp, Unknown
  misc_feature (1)..( 6): Matrix.003 file - promoters60/4773223
tttgac

SEQ ID NO: 60915 - DNA, 6 bp, Unknown
  misc_feature (1)..( 6): Matrix.003 file - promoters60/4773223
acggta

SEQ ID NO: 60916 - DNA, 7 bp, Unknown
  misc_feature (1)..( 7): Matrix.003 file - promoters60/4773223
tcaagtt

SEQ ID NO: 60917 - DNA, 9 bp, Unknown
  misc_feature (1)..( 9): Matrix.003 file - promoters60/4773225
atttagctt

SEQ ID NO: 60918 - DNA, 6 bp, Unknown
  misc_feature (1)..( 6): Matrix.003 file - promoters60/4773225
ttaaaa

SEQ ID NO: 60919 - DNA, 7 bp, Unknown
  misc_feature (1)..( 7): Matrix.003 file - promoters60/4773225
taaaata

SEQ ID NO: 60920 - DNA, 7 bp, Unknown
  misc_feature (1)..( 7): Matrix.003 file - promoters60/4773225
ctgaaaa

SEQ ID NO: 60921 - DNA, 6 bp, Unknown
  misc_feature (1)..( 6): Matrix.003 file - promoters60/4773225
tccaaa

SEQ ID NO: 60922 - DNA, 9 bp, Unknown
  misc_feature (1)..( 9): Matrix.003 file - promoters60/4773225
aaaaaataa

SEQ ID NO: 60923 - DNA, 7 bp, Unknown
  misc_feature (1)..( 7): Matrix.003 file - promoters60/4773225
cgaaaaa

SEQ ID NO: 60924 - DNA, 8 bp, Unknown
  misc_feature (1)..( 8): Matrix.003 file - promoters60/4773225
cgaggtca

SEQ ID NO: 60925 - DNA, 7 bp, Unknown
  misc_feature (1)..( 7): Matrix.003 file - promoters60/4773225
attagca

SEQ ID NO: 60926 - DNA, 8 bp, Unknown
  misc_feature (1)..( 8): Matrix.003 file - promoters60/4773225
ataattat

SEQ ID NO: 60927 - DNA, 6 bp, Unknown
  misc_feature (1)..( 6): Matrix.003 file - promoters60/4773225
gaatta

SEQ ID NO: 60928 - DNA, 6 bp, Unknown
  misc_feature (1)..( 6): Matrix.003 file - promoters60/4773225
gcggaa

SEQ ID NO: 60929 - DNA, 7 bp, Unknown
  misc_feature (1)..( 7): Matrix.003 file - promoters60/4773225
tatcttc

SEQ ID NO: 60930 - DNA, 6 bp, Unknown
  misc_feature (1)..( 6): Matrix.003 file - promoters60/4773225
tccttg

SEQ ID NO: 60931 - DNA, 7 bp, Unknown
  misc_feature (1)..( 7): Matrix.003 file - promoters60/4773225
gatatat

SEQ ID NO: 60932 - DNA, 6 bp, Unknown
  misc_feature (1)..( 6): Matrix.003 file - promoters60/4773229
caagac

SEQ ID NO: 60933 - DNA, 8 bp, Unknown
  misc_feature (1)..( 8): Matrix.003 file - promoters60/4773229
tggaaaga

SEQ ID NO: 60934 - DNA, 6 bp, Unknown
  misc_feature (1)..( 6): Matrix.003 file - promoters60/4773229
tattga

SEQ ID NO: 60935 - DNA, 8 bp, Unknown
  misc_feature (1)..( 8): Matrix.003 file - promoters60/4773229
aggaaaag

SEQ ID NO: 60936 - DNA, 6 bp, Unknown
  misc_feature (1)..( 6): Matrix.003 file - promoters60/4773229
aagcag

SEQ ID NO: 60937 - DNA, 6 bp, Unknown
  misc_feature (1)..( 6): Matrix.003 file - promoters60/4773229
gagtcg

SEQ ID NO: 60938 - DNA, 8 bp, Unknown
  misc_feature (1)..( 8): Matrix.003 file - promoters60/4773229
ttgtcaag

SEQ ID NO: 60939 - DNA, 7 bp, Unknown
  misc_feature (1)..( 7): Matrix.003 file - promoters60/4773229
tgacact

SEQ ID NO: 60940 - DNA, 6 bp, Unknown
  misc_feature (1)..( 6): Matrix.003 file - promoters60/4773229
gatcca

SEQ ID NO: 60941 - DNA, 9 bp, Unknown
  misc_feature (1)..( 9): Matrix.003 file - promoters60/4773229
cttatcttt

SEQ ID NO: 60942 - DNA, 6 bp, Unknown
  misc_feature (1)..( 6): Matrix.003 file - promoters60/4773229
aagaag

SEQ ID NO: 60943 - DNA, 9 bp, Unknown
  misc_feature (1)..( 9): Matrix.003 file - promoters60/4773229
agaaaaatc

SEQ ID NO: 60944 - DNA, 9 bp, Unknown
  misc_feature (1)..( 9): Matrix.003 file - promoters60/4773229
atatgatga

SEQ ID NO: 60945 - DNA, 7 bp, Unknown
  misc_feature (1)..( 7): Matrix.003 file - promoters60/4773229
atcattt

SEQ ID NO: 60946 - DNA, 7 bp, Unknown
  misc_feature (1)..( 7): Matrix.003 file - promoters60/4773229
tttactt

SEQ ID NO: 60947 - DNA, 7 bp, Unknown
  misc_feature (1)..( 7): Matrix.003 file - promoters60/4773229
aataatt

SEQ ID NO: 60948 - DNA, 8 bp, Unknown
  misc_feature (1)..( 8): Matrix.003 file - promoters60/4773229
aatagaaa

SEQ ID NO: 60949 - DNA, 7 bp, Unknown
  misc_feature (1)..( 7): Matrix.003 file - promoters60/4773229
aaaatgt

SEQ ID NO: 60950 - DNA, 6 bp, Unknown
  misc_feature (1)..( 6): Matrix.003 file - promoters60/4773229
tctttt

SEQ ID NO: 60951 - DNA, 6 bp, Unknown
  misc_feature (1)..( 6): Matrix.003 file - promoters60/4773229
ggaaaa

SEQ ID NO: 60952 - DNA, 7 bp, Unknown
  misc_feature (1)..( 7): Matrix.003 file - promoters60/4773245
attccat

SEQ ID NO: 60953 - DNA, 7 bp, Unknown
  misc_feature (1)..( 7): Matrix.003 file - promoters60/4773245
cacacaa

SEQ ID NO: 60954 - DNA, 5 bp, Unknown
  misc_feature (1)..( 5): Matrix.003 file - promoters60/4773245
ctctt

SEQ ID NO: 60955 - DNA, 6 bp, Unknown
  misc_feature (1)..( 6): Matrix.003 file - promoters60/4773245
ccaatg

SEQ ID NO: 60956 - DNA, 7 bp, Unknown
  misc_feature (1)..( 7): Matrix.003 file - promoters60/4773245
aaaactc

SEQ ID NO: 60957 - DNA, 6 bp, Unknown
  misc_feature (1)..( 6): Matrix.003 file - promoters60/4773245
attgtt

SEQ ID NO: 60958 - DNA, 6 bp, Unknown
  misc_feature (1)..( 6): Matrix.003 file - promoters60/4773245
actgaa

SEQ ID NO: 60959 - DNA, 7 bp, Unknown
  misc_feature (1)..( 7): Matrix.003 file - promoters60/4773245
gaaggtg

SEQ ID NO: 60960 - DNA, 7 bp, Unknown
  misc_feature (1)..( 7): Matrix.003 file - promoters60/4773245
acaagta

SEQ ID NO: 60961 - DNA, 6 bp, Unknown
  misc_feature (1)..( 6): Matrix.003 file - promoters60/4773245
ccaaaa

SEQ ID NO: 60962 - DNA, 7 bp, Unknown
  misc_feature (1)..( 7): Matrix.003 file - promoters60/4773245
ttgcaga

SEQ ID NO: 60963 - DNA, 6 bp, Unknown
  misc_feature (1)..( 6): Matrix.003 file - promoters60/4773245
ggagat

SEQ ID NO: 60964 - DNA, 8 bp, Unknown
  misc_feature (1)..( 8): Matrix.003 file - promoters60/4773245
tgcaaaga

SEQ ID NO: 60965 - DNA, 7 bp, Unknown
  misc_feature (1)..( 7): Matrix.003 file - promoters60/4773245
aacacca

SEQ ID NO: 60966 - DNA, 7 bp, Unknown
  misc_feature (1)..( 7): Matrix.003 file - promoters60/4773245
ttcaatt

SEQ ID NO: 60967 - DNA, 8 bp, Unknown
  misc_feature (1)..( 8): Matrix.003 file - promoters60/4773264
attggaga

SEQ ID NO: 60968 - DNA, 8 bp, Unknown
  misc_feature (1)..( 8): Matrix.003 file - promoters60/4773264
tagtaatt

SEQ ID NO: 60969 - DNA, 8 bp, Unknown
  misc_feature (1)..( 8): Matrix.003 file - promoters60/4773264
tttgcgtg

SEQ ID NO: 60970 - DNA, 6 bp, Unknown
  misc_feature (1)..( 6): Matrix.003 file - promoters60/4773264
gagatc

SEQ ID NO: 60971 - DNA, 7 bp, Unknown
  misc_feature (1)..( 7): Matrix.003 file - promoters60/4773264
taacgaa

SEQ ID NO: 60972 - DNA, 7 bp, Unknown
  misc_feature (1)..( 7): Matrix.003 file - promoters60/4773264
agtatta

SEQ ID NO: 60973 - DNA, 6 bp, Unknown
  misc_feature (1)..( 6): Matrix.003 file - promoters60/4773264
tttgag

SEQ ID NO: 60974 - DNA, 8 bp, Unknown
  misc_feature (1)..( 8): Matrix.003 file - promoters60/4773264
tatgtctc

SEQ ID NO: 60975 - DNA, 8 bp, Unknown
  misc_feature (1)..( 8): Matrix.003 file - promoters60/4773264
ttgttttt

SEQ ID NO: 60976 - DNA, 8 bp, Unknown
  misc_feature (1)..( 8): Matrix.003 file - promoters60/4773264
ttttaact

SEQ ID NO: 60977 - DNA, 8 bp, Unknown
  misc_feature (1)..( 8): Matrix.003 file - promoters60/4773264
aaagcaaa

SEQ ID NO: 60978 - DNA, 6 bp, Unknown
  misc_feature (1)..( 6): Matrix.003 file - promoters60/4773264
atacaa

SEQ ID NO: 60979 - DNA, 7 bp, Unknown
  misc_feature (1)..( 7): Matrix.003 file - promoters60/4773264
agaaaat

SEQ ID NO: 60980 - DNA, 7 bp, Unknown
  misc_feature (1)..( 7): Matrix.003 file - promoters60/4773264
tctctga

SEQ ID NO: 60981 - DNA, 6 bp, Unknown
  misc_feature (1)..( 6): Matrix.003 file - promoters60/4773264
ttaaaa

SEQ ID NO: 60982 - DNA, 9 bp, Unknown
  misc_feature (1)..( 9): Matrix.003 file - promoters60/4773355
ttaatgttt

SEQ ID NO: 60983 - DNA, 7 bp, Unknown
  misc_feature (1)..( 7): Matrix.003 file - promoters60/4773355
gattaaa

SEQ ID NO: 60984 - DNA, 8 bp, Unknown
  misc_feature (1)..( 8): Matrix.003 file - promoters60/4773355
taatgtct

SEQ ID NO: 60985 - DNA, 9 bp, Unknown
  misc_feature (1)..( 9): Matrix.003 file - promoters60/4773355
aacattata

SEQ ID NO: 60986 - DNA, 11 bp, Unknown
  misc_feature (1)..( 11): Matrix.003 file - promoters60/4773355
ttacttttaac

SEQ ID NO: 60987 - DNA, 9 bp, Unknown
  misc_feature (1)..( 9): Matrix.003 file - promoters60/4773355
ttaacaaaa

SEQ ID NO: 60988 - DNA, 8 bp, Unknown
  misc_feature (1)..( 8): Matrix.003 file - promoters60/4773355
aaacaatt

SEQ ID NO: 60989 - DNA, 7 bp, Unknown
  misc_feature (1)..( 7): Matrix.003 file - promoters60/4773355
taaatta

SEQ ID NO: 60990 - DNA, 6 bp, Unknown
  misc_feature (1)..( 6): Matrix.003 file - promoters60/4773355
ttttct

SEQ ID NO: 60991 - DNA, 12 bp, Unknown
  misc_feature (1)..( 12): Matrix.003 file - promoters60/4773392
ataatatccaat

SEQ ID NO: 60992 - DNA, 6 bp, Unknown
  misc_feature (1)..( 6): Matrix.003 file - promoters60/4773392
aaaaac

SEQ ID NO: 60993 - DNA, 6 bp, Unknown
  misc_feature (1)..( 6): Matrix.003 file - promoters60/4773392
aagttt

SEQ ID NO: 60994 - DNA, 7 bp, Unknown
  misc_feature (1)..( 7): Matrix.003 file - promoters60/4773392
aaatcat

SEQ ID NO: 60995 - DNA, 8 bp, Unknown
  misc_feature (1)..( 8): Matrix.003 file - promoters60/4773392
atatttaa

SEQ ID NO: 60996 - DNA, 6 bp, Unknown
  misc_feature (1)..( 6): Matrix.003 file - promoters60/4773392
agaaag

SEQ ID NO: 60997 - DNA, 7 bp, Unknown
  misc_feature (1)..( 7): Matrix.003 file - promoters60/4773392
aatatgc

SEQ ID NO: 60998 - DNA, 9 bp, Unknown
  misc_feature (1)..( 9): Matrix.003 file - promoters60/4773392
tcagagaaa

SEQ ID NO: 60999 - DNA, 6 bp, Unknown
  misc_feature (1)..( 6): Matrix.003 file - promoters60/4773392
aaagat

SEQ ID NO: 61000 - DNA, 7 bp, Unknown
  misc_feature (1)..( 7): Matrix.003 file - promoters60/4773392
gcacggc

SEQ ID NO: 61001 - DNA, 9 bp, Unknown
  misc_feature (1)..( 9): Matrix.003 file - promoters60/4773392
aaaacaaaa

SEQ ID NO: 61002 - DNA, 6 bp, Unknown
  misc_feature (1)..( 6): Matrix.003 file - promoters60/4773392
tcaaaa

SEQ ID NO: 61003 - DNA, 7 bp, Unknown
  misc_feature (1)..( 7): Matrix.003 file - promoters60/4773392
aaaatta

SEQ ID NO: 61004 - DNA, 7 bp, Unknown
  misc_feature (1)..( 7): Matrix.003 file - promoters60/4773392
atagtat

SEQ ID NO: 61005 - DNA, 6 bp, Unknown
  misc_feature (1)..( 6): Matrix.003 file - promoters60/4773392
tttttt

SEQ ID NO: 61006 - DNA, 7 bp, Unknown
  misc_feature (1)..( 7): Matrix.003 file - promoters60/4773392
tttcttt

SEQ ID NO: 61007 - DNA, 6 bp, Unknown
  misc_feature (1)..( 6): Matrix.003 file - promoters60/4773392
cgttta

SEQ ID NO: 61008 - DNA, 6 bp, Unknown
  misc_feature (1)..( 6): Matrix.003 file - promoters60/4773795
gctttc

SEQ ID NO: 61009 - DNA, 6 bp, Unknown
  misc_feature (1)..( 6): Matrix.003 file - promoters60/4773795
tctctc

SEQ ID NO: 61010 - DNA, 7 bp, Unknown
  misc_feature (1)..( 7): Matrix.003 file - promoters60/4773795
tctcctc

SEQ ID NO: 61011 - DNA, 9 bp, Unknown
  misc_feature (1)..( 9): Matrix.003 file - promoters60/4773795
taaatacaa

SEQ ID NO: 61012 - DNA, 7 bp, Unknown
  misc_feature (1)..( 7): Matrix.003 file - promoters60/4773795
agtggga

SEQ ID NO: 61013 - DNA, 9 bp, Unknown
  misc_feature (1)..( 9): Matrix.003 file - promoters60/4773795
tttaatttt

SEQ ID NO: 61014 - DNA, 6 bp, Unknown
  misc_feature (1)..( 6): Matrix.003 file - promoters60/4773795
ctctgt

SEQ ID NO: 61015 - DNA, 6 bp, Unknown
  misc_feature (1)..( 6): Matrix.003 file - promoters60/4773795
tctatc

SEQ ID NO: 61016 - DNA, 12 bp, Unknown
  misc_feature (1)..( 12): Matrix.003 file - promoters60/4773795
tcaatgatattt

SEQ ID NO: 61017 - DNA, 7 bp, Unknown
  misc_feature (1)..( 7): Matrix.003 file - promoters60/4773795
attaaag

SEQ ID NO: 61018 - DNA, 7 bp, Unknown
  misc_feature (1)..( 7): Matrix.003 file - promoters60/4773795
tgtatat

SEQ ID NO: 61019 - DNA, 8 bp, Unknown
  misc_feature (1)..( 8): Matrix.003 file - promoters60/4773795
tctggttt

SEQ ID NO: 61020 - DNA, 7 bp, Unknown
  misc_feature (1)..( 7): Matrix.003 file - promoters60/4773795
tttactt

SEQ ID NO: 61021 - DNA, 8 bp, Unknown
  misc_feature (1)..( 8): Matrix.003 file - promoters60/4773795
cttgtctc

SEQ ID NO: 61022 - DNA, 7 bp, Unknown
  misc_feature (1)..( 7): Matrix.003 file - promoters60/4773795
ttgaagc

SEQ ID NO: 61023 - DNA, 6 bp, Unknown
  misc_feature (1)..( 6): Matrix.003 file - promoters60/4773795
cctttt

SEQ ID NO: 61024 - DNA, 7 bp, Unknown
  misc_feature (1)..( 7): Matrix.003 file - promoters60/4773795
ttttttt

SEQ ID NO: 61025 - DNA, 7 bp, Unknown
  misc_feature (1)..( 7): Matrix.003 file - promoters60/4773795
ggcctat

SEQ ID NO: 61026 - DNA, 10 bp, Unknown
  misc_feature (1)..( 10): Matrix.003 file - promoters60/4773819
gtataaaaag

SEQ ID NO: 61027 - DNA, 12 bp, Unknown
  misc_feature (1)..( 12): Matrix.003 file - promoters60/4773819
gattcttttcaa

SEQ ID NO: 61028 - DNA, 8 bp, Unknown
  misc_feature (1)..( 8): Matrix.003 file - promoters60/4773819
atttcaaa

SEQ ID NO: 61029 - DNA, 8 bp, Unknown
  misc_feature (1)..( 8): Matrix.003 file - promoters60/4773823
actttctt

SEQ ID NO: 61030 - DNA, 11 bp, Unknown
  misc_feature (1)..( 11): Matrix.003 file - promoters60/4773823
atgttattcta

SEQ ID NO: 61031 - DNA, 13 bp, Unknown
  misc_feature (1)..( 13): Matrix.003 file - promoters60/4773823
aatttgttatttt

SEQ ID NO: 61032 - DNA, 9 bp, Unknown
  misc_feature (1)..( 9): Matrix.003 file - promoters60/4773836
atttatcat

SEQ ID NO: 61033 - DNA, 9 bp, Unknown
  misc_feature (1)..( 9): Matrix.003 file - promoters60/4773836
gtcaaaaaa

SEQ ID NO: 61034 - DNA, 10 bp, Unknown
  misc_feature (1)..( 10): Matrix.003 file - promoters60/4773846
tattaaaaaa

SEQ ID NO: 61035 - DNA, 6 bp, Unknown
  misc_feature (1)..( 6): Matrix.003 file - promoters60/4773846
aataca

SEQ ID NO: 61036 - DNA, 8 bp, Unknown
  misc_feature (1)..( 8): Matrix.003 file - promoters60/4773846
aatttata

SEQ ID NO: 61037 - DNA, 7 bp, Unknown
  misc_feature (1)..( 7): Matrix.003 file - promoters60/4773846
tatggta

SEQ ID NO: 61038 - DNA, 8 bp, Unknown
  misc_feature (1)..( 8): Matrix.003 file - promoters60/4773846
tatccaca

SEQ ID NO: 61039 - DNA, 6 bp, Unknown
  misc_feature (1)..( 6): Matrix.003 file - promoters60/4773846
aataat

SEQ ID NO: 61040 - DNA, 6 bp, Unknown
  misc_feature (1)..( 6): Matrix.003 file - promoters60/4773846
tacttg

SEQ ID NO: 61041 - DNA, 6 bp, Unknown
  misc_feature (1)..( 6): Matrix.003 file - promoters60/4773846
agacaa

SEQ ID NO: 61042 - DNA, 8 bp, Unknown
  misc_feature (1)..( 8): Matrix.003 file - promoters60/4773846
aatacaac

SEQ ID NO: 61043 - DNA, 7 bp, Unknown
  misc_feature (1)..( 7): Matrix.003 file - promoters60/4773846
aaaaata

SEQ ID NO: 61044 - DNA, 9 bp, Unknown
  misc_feature (1)..( 9): Matrix.003 file - promoters60/4773846
attttatct

SEQ ID NO: 61045 - DNA, 9 bp, Unknown
  misc_feature (1)..( 9): Matrix.003 file - promoters60/4773846
ttttcttat

SEQ ID NO: 61046 - DNA, 7 bp, Unknown
  misc_feature (1)..( 7): Matrix.003 file - promoters60/4773846
gataaaa

SEQ ID NO: 61047 - DNA, 6 bp, Unknown
  misc_feature (1)..( 6): Matrix.003 file - promoters60/4773846
catata

SEQ ID NO: 61048 - DNA, 10 bp, Unknown
  misc_feature (1)..( 10): Matrix.003 file - promoters60/4773846
aattcaaata

SEQ ID NO: 61049 - DNA, 8 bp, Unknown
  misc_feature (1)..( 8): Matrix.003 file - promoters60/4773846
attcaaat

SEQ ID NO: 61050 - DNA, 7 bp, Unknown
  misc_feature (1)..( 7): Matrix.003 file - promoters60/4773846
aagaaaa

SEQ ID NO: 61051 - DNA, 6 bp, Unknown
  misc_feature (1)..( 6): Matrix.003 file - promoters60/4773846
cagcaa

SEQ ID NO: 61052 - DNA, 6 bp, Unknown
  misc_feature (1)..( 6): Matrix.003 file - promoters60/4773846
acgtac

SEQ ID NO: 61053 - DNA, 7 bp, Unknown
  misc_feature (1)..( 7): Matrix.003 file - promoters60/4773846
aatcaaa

SEQ ID NO: 61054 - DNA, 12 bp, Unknown
  misc_feature (1)..( 12): Matrix.003 file - promoters60/4773846
attagataattt

SEQ ID NO: 61055 - DNA, 9 bp, Unknown
  misc_feature (1)..( 9): Matrix.003 file - promoters60/4802537
aaattaaat

SEQ ID NO: 61056 - DNA, 14 bp, Unknown
  misc_feature (1)..( 14): Matrix.003 file - promoters60/4802537
aaataaacaaaagt

SEQ ID NO: 61057 - DNA, 10 bp, Unknown
  misc_feature (1)..( 10): Matrix.003 file - promoters60/4802537
tatataaaat

SEQ ID NO: 61058 - DNA, 12 bp, Unknown
  misc_feature (1)..( 12): Matrix.003 file - promoters60/4802537
atatgaaaaaga

SEQ ID NO: 61059 - DNA, 8 bp, Unknown
  misc_feature (1)..( 8): Matrix.003 file - promoters60/4803329
atttttac

SEQ ID NO: 61060 - DNA, 8 bp, Unknown
  misc_feature (1)..( 8): Matrix.003 file - promoters60/4803329
tttatttt

SEQ ID NO: 61061 - DNA, 9 bp, Unknown
  misc_feature (1)..( 9): Matrix.003 file - promoters60/4803329
gaagacaaa

SEQ ID NO: 61062 - DNA, 13 bp, Unknown
  misc_feature (1)..( 13): Matrix.003 file - promoters60/4803329
aaaattgaatttg

SEQ ID NO: 61063 - DNA, 7 bp, Unknown
  misc_feature (1)..( 7): Matrix.003 file - promoters60/4806023
cagcttt

SEQ ID NO: 61064 - DNA, 8 bp, Unknown
  misc_feature (1)..( 8): Matrix.003 file - promoters60/4806023
aaacttat

SEQ ID NO: 61065 - DNA, 6 bp, Unknown
  misc_feature (1)..( 6): Matrix.003 file - promoters60/4806023
caactt

SEQ ID NO: 61066 - DNA, 6 bp, Unknown
  misc_feature (1)..( 6): Matrix.003 file - promoters60/4806023
ggccca

SEQ ID NO: 61067 - DNA, 6 bp, Unknown
  misc_feature (1)..( 6): Matrix.003 file - promoters60/4806023
aacaaa

SEQ ID NO: 61068 - DNA, 6 bp, Unknown
  misc_feature (1)..( 6): Matrix.003 file - promoters60/4806023
caaaaa

SEQ ID NO: 61069 - DNA, 6 bp, Unknown
  misc_feature (1)..( 6): Matrix.003 file - promoters60/4806023
tcactt

SEQ ID NO: 61070 - DNA, 7 bp, Unknown
  misc_feature (1)..( 7): Matrix.003 file - promoters60/4806023
gaccgtt

SEQ ID NO: 61071 - DNA, 10 bp, Unknown
  misc_feature (1)..( 10): Matrix.003 file - promoters60/4806023
atcttgattt

SEQ ID NO: 61072 - DNA, 7 bp, Unknown
  misc_feature (1)..( 7): Matrix.003 file - promoters60/4806023
ggtctca

SEQ ID NO: 61073 - DNA, 6 bp, Unknown
  misc_feature (1)..( 6): Matrix.003 file - promoters60/4806023
tcaaga

SEQ ID NO: 61074 - DNA, 6 bp, Unknown
  misc_feature (1)..( 6): Matrix.003 file - promoters60/4806023
ctgttt

SEQ ID NO: 61075 - DNA, 9 bp, Unknown
  misc_feature (1)..( 9): Matrix.003 file - promoters60/4806023
tcacaattc

SEQ ID NO: 61076 - DNA, 7 bp, Unknown
  misc_feature (1)..( 7): Matrix.003 file - promoters60/4806023
tcaaata

SEQ ID NO: 61077 - DNA, 6 bp, Unknown
  misc_feature (1)..( 6): Matrix.003 file - promoters60/4806023
ccattg

SEQ ID NO: 61078 - DNA, 7 bp, Unknown
  misc_feature (1)..( 7): Matrix.003 file - promoters60/4806023
ttccgga

SEQ ID NO: 61079 - DNA, 8 bp, Unknown
  misc_feature (1)..( 8): Matrix.003 file - promoters60/4806023
gtttaaat

SEQ ID NO: 61080 - DNA, 11 bp, Unknown
  misc_feature (1)..( 11): Matrix.003 file - promoters60/4807018
actttttactg

SEQ ID NO: 61081 - DNA, 10 bp, Unknown
  misc_feature (1)..( 10): Matrix.003 file - promoters60/4807018
aaaaaccaaa

SEQ ID NO: 61082 - DNA, 14 bp, Unknown
  misc_feature (1)..( 14): Matrix.003 file - promoters60/4807018
ttctattagttccg

SEQ ID NO: 61083 - DNA, 16 bp, Unknown
  misc_feature (1)..( 16): Matrix.003 file - promoters60/4807026
aacaaaaaagaataaa

SEQ ID NO: 61084 - DNA, 8 bp, Unknown
  misc_feature (1)..( 8): Matrix.003 file - promoters60/4807026
cttatata

SEQ ID NO: 61085 - DNA, 9 bp, Unknown
  misc_feature (1)..( 9): Matrix.003 file - promoters60/4807026
atataaata

SEQ ID NO: 61086 - DNA, 11 bp, Unknown
  misc_feature (1)..( 11): Matrix.003 file - promoters60/4807026
atttgaataaa

SEQ ID NO: 61087 - DNA, 13 bp, Unknown
  misc_feature (1)..( 13): Matrix.003 file - promoters60/4807236
ttttaacaaaaag

SEQ ID NO: 61088 - DNA, 9 bp, Unknown
  misc_feature (1)..( 9): Matrix.003 file - promoters60/4807258
cttgttttt

SEQ ID NO: 61089 - DNA, 7 bp, Unknown
  misc_feature (1)..( 7): Matrix.003 file - promoters60/4808052
aaaccat

SEQ ID NO: 61090 - DNA, 10 bp, Unknown
  misc_feature (1)..( 10): Matrix.003 file - promoters60/4808052
ggacaaaaac

SEQ ID NO: 61091 - DNA, 7 bp, Unknown
  misc_feature (1)..( 7): Matrix.003 file - promoters60/4808052
ttaaaaa

SEQ ID NO: 61092 - DNA, 7 bp, Unknown
  misc_feature (1)..( 7): Matrix.003 file - promoters60/4808052
aaaatta

SEQ ID NO: 61093 - DNA, 7 bp, Unknown
  misc_feature (1)..( 7): Matrix.003 file - promoters60/4808052
agatcaa

SEQ ID NO: 61094 - DNA, 6 bp, Unknown
  misc_feature (1)..( 6): Matrix.003 file - promoters60/4809801
ttttgc

SEQ ID NO: 61095 - DNA, 9 bp, Unknown
  misc_feature (1)..( 9): Matrix.003 file - promoters60/4809801
atttccatg

SEQ ID NO: 61096 - DNA, 7 bp, Unknown
  misc_feature (1)..( 7): Matrix.003 file - promoters60/4809801
atgcatg

SEQ ID NO: 61097 - DNA, 7 bp, Unknown
  misc_feature (1)..( 7): Matrix.003 file - promoters60/4809801
ctaagga

SEQ ID NO: 61098 - DNA, 7 bp, Unknown
  misc_feature (1)..( 7): Matrix.003 file - promoters60/4809801
ttgtgtt

SEQ ID NO: 61099 - DNA, 7 bp, Unknown
  misc_feature (1)..( 7): Matrix.003 file - promoters60/4809801
cagaaga

SEQ ID NO: 61100 - DNA, 6 bp, Unknown
  misc_feature (1)..( 6): Matrix.003 file - promoters60/4809801
agatct

SEQ ID NO: 61101 - DNA, 6 bp, Unknown
  misc_feature (1)..( 6): Matrix.003 file - promoters60/4809801
gaagaa

SEQ ID NO: 61102 - DNA, 6 bp, Unknown
  misc_feature (1)..( 6): Matrix.003 file - promoters60/4809801
tttctt

SEQ ID NO: 61103 - DNA, 6 bp, Unknown
  misc_feature (1)..( 6): Matrix.003 file - promoters60/4809801
tttcaa

SEQ ID NO: 61104 - DNA, 6 bp, Unknown
  misc_feature (1)..( 6): Matrix.003 file - promoters60/4809801
ctcatt

SEQ ID NO: 61105 - DNA, 7 bp, Unknown
  misc_feature (1)..( 7): Matrix.003 file - promoters60/4809801
ctcctcc

SEQ ID NO: 61106 - DNA, 6 bp, Unknown
  misc_feature (1)..( 6): Matrix.003 file - promoters60/4811854
atctct

SEQ ID NO: 61107 - DNA, 6 bp, Unknown
  misc_feature (1)..( 6): Matrix.003 file - promoters60/4811854
atatgt

SEQ ID NO: 61108 - DNA, 8 bp, Unknown
  misc_feature (1)..( 8): Matrix.003 file - promoters60/4811854
tttaattt

SEQ ID NO: 61109 - DNA, 6 bp, Unknown
  misc_feature (1)..( 6): Matrix.003 file - promoters60/4811854
tttcat

SEQ ID NO: 61110 - DNA, 8 bp, Unknown
  misc_feature (1)..( 8): Matrix.003 file - promoters60/4811854
aagtataa

SEQ ID NO: 61111 - DNA, 10 bp, Unknown
  misc_feature (1)..( 10): Matrix.003 file - promoters60/4811854
aaattatttt

SEQ ID NO: 61112 - DNA, 7 bp, Unknown
  misc_feature (1)..( 7): Matrix.003 file - promoters60/4811854
aaaaatg

SEQ ID NO: 61113 - DNA, 12 bp, Unknown
  misc_feature (1)..( 12): Matrix.003 file - promoters60/4811854
tcctcacgatta

SEQ ID NO: 61114 - DNA, 6 bp, Unknown
  misc_feature (1)..( 6): Matrix.003 file - promoters60/4811854
gctctt

SEQ ID NO: 61115 - DNA, 6 bp, Unknown
  misc_feature (1)..( 6): Matrix.003 file - promoters60/4811854
cctcaa

SEQ ID NO: 61116 - DNA, 8 bp, Unknown
  misc_feature (1)..( 8): Matrix.003 file - promoters60/4811854
tctatatt

SEQ ID NO: 61117 - DNA, 6 bp, Unknown
  misc_feature (1)..( 6): Matrix.003 file - promoters60/4811854
gatttt

SEQ ID NO: 61118 - DNA, 6 bp, Unknown
  misc_feature (1)..( 6): Matrix.003 file - promoters60/4811854
tacata

SEQ ID NO: 61119 - DNA, 10 bp, Unknown
  misc_feature (1)..( 10): Matrix.003 file - promoters60/4811854
attaattttt

SEQ ID NO: 61120 - DNA, 7 bp, Unknown
  misc_feature (1)..( 7): Matrix.003 file - promoters60/4811854
catcaca

SEQ ID NO: 61121 - DNA, 8 bp, Unknown
  misc_feature (1)..( 8): Matrix.003 file - promoters60/4811854
aaaaaaca

SEQ ID NO: 61122 - DNA, 6 bp, Unknown
  misc_feature (1)..( 6): Matrix.003 file - promoters60/4811854
tttaaa

SEQ ID NO: 61123 - DNA, 9 bp, Unknown
  misc_feature (1)..( 9): Matrix.003 file - promoters60/4811854
atctaattt

SEQ ID NO: 61124 - DNA, 7 bp, Unknown
  misc_feature (1)..( 7): Matrix.003 file - promoters60/4811854
ttaaaat

SEQ ID NO: 61125 - DNA, 6 bp, Unknown
  misc_feature (1)..( 6): Matrix.003 file - promoters60/4811854
aaatta

SEQ ID NO: 61126 - DNA, 9 bp, Unknown
  misc_feature (1)..( 9): Matrix.003 file - promoters60/4811854
gtatatttc

SEQ ID NO: 61127 - DNA, 7 bp, Unknown
  misc_feature (1)..( 7): Matrix.003 file - promoters60/4811854
ggacgct

SEQ ID NO: 61128 - DNA, 6 bp, Unknown
  misc_feature (1)..( 6): Matrix.003 file - promoters60/4811854
aaataa

SEQ ID NO: 61129 - DNA, 6 bp, Unknown
  misc_feature (1)..( 6): Matrix.003 file - promoters60/4811854
taaata

SEQ ID NO: 61130 - DNA, 6 bp, Unknown
  misc_feature (1)..( 6): Matrix.003 file - promoters60/4811854
attaaa

SEQ ID NO: 61131 - DNA, 8 bp, Unknown
  misc_feature (1)..( 8): Matrix.003 file - promoters60/4811854
aaaagtta

SEQ ID NO: 61132 - DNA, 7 bp, Unknown
  misc_feature (1)..( 7): Matrix.003 file - promoters60/4811854
catctat

SEQ ID NO: 61133 - DNA, 8 bp, Unknown
  misc_feature (1)..( 8): Matrix.003 file - promoters60/4811975
atactact

SEQ ID NO: 61134 - DNA, 7 bp, Unknown
  misc_feature (1)..( 7): Matrix.003 file - promoters60/4811975
caaatac

SEQ ID NO: 61135 - DNA, 11 bp, Unknown
  misc_feature (1)..( 11): Matrix.003 file - promoters60/4811975
tatattttttt

SEQ ID NO: 61136 - DNA, 6 bp, Unknown
  misc_feature (1)..( 6): Matrix.003 file - promoters60/4811975
tatatg

SEQ ID NO: 61137 - DNA, 6 bp, Unknown
  misc_feature (1)..( 6): Matrix.003 file - promoters60/4811975
ttcaaa

SEQ ID NO: 61138 - DNA, 9 bp, Unknown
  misc_feature (1)..( 9): Matrix.003 file - promoters60/4811975
atactctca

SEQ ID NO: 61139 - DNA, 6 bp, Unknown
  misc_feature (1)..( 6): Matrix.003 file - promoters60/4811975
tcaaac

SEQ ID NO: 61140 - DNA, 6 bp, Unknown
  misc_feature (1)..( 6): Matrix.003 file - promoters60/4811975
ttttct

SEQ ID NO: 61141 - DNA, 7 bp, Unknown
  misc_feature (1)..( 7): Matrix.003 file - promoters60/4811975
gaaatca

SEQ ID NO: 61142 - DNA, 6 bp, Unknown
  misc_feature (1)..( 6): Matrix.003 file - promoters60/4811975
atcttg

SEQ ID NO: 61143 - DNA, 6 bp, Unknown
  misc_feature (1)..( 6): Matrix.003 file - promoters60/4811975
acacaa

SEQ ID NO: 61144 - DNA, 10 bp, Unknown
  misc_feature (1)..( 10): Matrix.003 file - promoters60/4811975
atttttttaa

SEQ ID NO: 61145 - DNA, 7 bp, Unknown
  misc_feature (1)..( 7): Matrix.003 file - promoters60/4811975
actattc

SEQ ID NO: 61146 - DNA, 11 bp, Unknown
  misc_feature (1)..( 11): Matrix.003 file - promoters60/4811975
accggatatta

SEQ ID NO: 61147 - DNA, 6 bp, Unknown
  misc_feature (1)..( 6): Matrix.003 file - promoters60/4811975
tactgt

SEQ ID NO: 61148 - DNA, 9 bp, Unknown
  misc_feature (1)..( 9): Matrix.003 file - promoters60/4811975
tcaaaattt

SEQ ID NO: 61149 - DNA, 6 bp, Unknown
  misc_feature (1)..( 6): Matrix.003 file - promoters60/4811975
ttgaaa

SEQ ID NO: 61150 - DNA, 7 bp, Unknown
  misc_feature (1)..( 7): Matrix.003 file - promoters60/4811975
cttctcc

SEQ ID NO: 61151 - DNA, 7 bp, Unknown
  misc_feature (1)..( 7): Matrix.003 file - promoters60/4811975
ttcatgt

SEQ ID NO: 61152 - DNA, 7 bp, Unknown
  misc_feature (1)..( 7): Matrix.003 file - promoters60/4811975
aagattt

SEQ ID NO: 61153 - DNA, 7 bp, Unknown
  misc_feature (1)..( 7): Matrix.003 file - promoters60/4811975
tacctca

SEQ ID NO: 61154 - DNA, 7 bp, Unknown
  misc_feature (1)..( 7): Matrix.003 file - promoters60/4811975
tttgata

SEQ ID NO: 61155 - DNA, 9 bp, Unknown
  misc_feature (1)..( 9): Matrix.003 file - promoters60/4811975
catcattat

SEQ ID NO: 61156 - DNA, 7 bp, Unknown
  misc_feature (1)..( 7): Matrix.003 file - promoters60/4854186
cacagaa

SEQ ID NO: 61157 - DNA, 8 bp, Unknown
  misc_feature (1)..( 8): Matrix.003 file - promoters60/4854186
aatcgata

SEQ ID NO: 61158 - DNA, 7 bp, Unknown
  misc_feature (1)..( 7): Matrix.003 file - promoters60/4854186
agaacgg

SEQ ID NO: 61159 - DNA, 6 bp, Unknown
  misc_feature (1)..( 6): Matrix.003 file - promoters60/4854186
tgggct

SEQ ID NO: 61160 - DNA, 8 bp, Unknown
  misc_feature (1)..( 8): Matrix.003 file - promoters60/4854186
tttgatta

SEQ ID NO: 61161 - DNA, 8 bp, Unknown
  misc_feature (1)..( 8): Matrix.003 file - promoters60/4854186
tatgcata

SEQ ID NO: 61162 - DNA, 6 bp, Unknown
  misc_feature (1)..( 6): Matrix.003 file - promoters60/4854186
ttagtg

SEQ ID NO: 61163 - DNA, 7 bp, Unknown
  misc_feature (1)..( 7): Matrix.003 file - promoters60/4854186
cccaaat

SEQ ID NO: 61164 - DNA, 7 bp, Unknown
  misc_feature (1)..( 7): Matrix.003 file - promoters60/4854186
aacaaat

SEQ ID NO: 61165 - DNA, 6 bp, Unknown
  misc_feature (1)..( 6): Matrix.003 file - promoters60/4854186
aaaatt

SEQ ID NO: 61166 - DNA, 7 bp, Unknown
  misc_feature (1)..( 7): Matrix.003 file - promoters60/4854186
ataaaaa

SEQ ID NO: 61167 - DNA, 6 bp, Unknown
  misc_feature (1)..( 6): Matrix.003 file - promoters60/4854186
ggccca

SEQ ID NO: 61168 - DNA, 8 bp, Unknown
  misc_feature (1)..( 8): Matrix.003 file - promoters60/4899822
aaagaaaa

SEQ ID NO: 61169 - DNA, 11 bp, Unknown
  misc_feature (1)..( 11): Matrix.003 file - promoters60/4899822
agtaaagaaaa

SEQ ID NO: 61170 - DNA, 9 bp, Unknown
  misc_feature (1)..( 9): Matrix.003 file - promoters60/4899822
aaaagaaaa

SEQ ID NO: 61171 - DNA, 8 bp, Unknown
  misc_feature (1)..( 8): Matrix.003 file - promoters60/4899880
atttttag

SEQ ID NO: 61172 - DNA, 8 bp, Unknown
  misc_feature (1)..( 8): Matrix.003 file - promoters60/4899880
tcaccatg

SEQ ID NO: 61173 - DNA, 6 bp, Unknown
  misc_feature (1)..( 6): Matrix.003 file - promoters60/4899880
catgag

SEQ ID NO: 61174 - DNA, 6 bp, Unknown
  misc_feature (1)..( 6): Matrix.003 file - promoters60/4899880
tatcat

SEQ ID NO: 61175 - DNA, 7 bp, Unknown
  misc_feature (1)..( 7): Matrix.003 file - promoters60/4899880
gacaagt

SEQ ID NO: 61176 - DNA, 8 bp, Unknown
  misc_feature (1)..( 8): Matrix.003 file - promoters60/4899880
ccaacaaa

SEQ ID NO: 61177 - DNA, 7 bp, Unknown
  misc_feature (1)..( 7): Matrix.003 file - promoters60/4899880
gaaaagt

SEQ ID NO: 61178 - DNA, 6 bp, Unknown
  misc_feature (1)..( 6): Matrix.003 file - promoters60/4899880
ttaaat

SEQ ID NO: 61179 - DNA, 6 bp, Unknown
  misc_feature (1)..( 6): Matrix.003 file - promoters60/4899880
tttgta

SEQ ID NO: 61180 - DNA, 8 bp, Unknown
  misc_feature (1)..( 8): Matrix.003 file - promoters60/4899880
taaacaag

SEQ ID NO: 61181 - DNA, 6 bp, Unknown
  misc_feature (1)..( 6): Matrix.003 file - promoters60/4899880
gaaaaa

SEQ ID NO: 61182 - DNA, 10 bp, Unknown
  misc_feature (1)..( 10): Matrix.003 file - promoters60/4899880
aaaacaattc

SEQ ID NO: 61183 - DNA, 9 bp, Unknown
  misc_feature (1)..( 9): Matrix.003 file - promoters60/4899880
ctataattt

SEQ ID NO: 61184 - DNA, 11 bp, Unknown
  misc_feature (1)..( 11): Matrix.003 file - promoters60/4899880
aaaataaaaat

SEQ ID NO: 61185 - DNA, 10 bp, Unknown
  misc_feature (1)..( 10): Matrix.003 file - promoters60/4899880
taaaatcagt

SEQ ID NO: 61186 - DNA, 6 bp, Unknown
  misc_feature (1)..( 6): Matrix.003 file - promoters60/4899880
caaaga

SEQ ID NO: 61187 - DNA, 7 bp, Unknown
  misc_feature (1)..( 7): Matrix.003 file - promoters60/4899880
gtacgag

SEQ ID NO: 61188 - DNA, 8 bp, Unknown
  misc_feature (1)..( 8): Matrix.003 file - promoters60/4899880
ctttggaa

SEQ ID NO: 61189 - DNA, 6 bp, Unknown
  misc_feature (1)..( 6): Matrix.003 file - promoters60/4899880
gtggtt

SEQ ID NO: 61190 - DNA, 6 bp, Unknown
  misc_feature (1)..( 6): Matrix.003 file - promoters60/4899880
aggaaa

SEQ ID NO: 61191 - DNA, 6 bp, Unknown
  misc_feature (1)..( 6): Matrix.003 file - promoters60/4899880
atctac

SEQ ID NO: 61192 - DNA, 6 bp, Unknown
  misc_feature (1)..( 6): Matrix.003 file - promoters60/4899880
tctttt

SEQ ID NO: 61193 - DNA, 7 bp, Unknown
  misc_feature (1)..( 7): Matrix.003 file - promoters60/4899880
ttttgta

SEQ ID NO: 61194 - DNA, 8 bp, Unknown
  misc_feature (1)..( 8): Matrix.003 file - promoters60/4899880
tttaagtg

SEQ ID NO: 61195 - DNA, 8 bp, Unknown
  misc_feature (1)..( 8): Matrix.003 file - promoters60/4899880
ttgagata

SEQ ID NO: 61196 - DNA, 11 bp, Unknown
  misc_feature (1)..( 11): Matrix.003 file - promoters60/4900035
aaataattaat

SEQ ID NO: 61197 - DNA, 10 bp, Unknown
  misc_feature (1)..( 10): Matrix.003 file - promoters60/4900035
aaaacatatt

SEQ ID NO: 61198 - DNA, 9 bp, Unknown
  misc_feature (1)..( 9): Matrix.003 file - promoters60/4900035
gattaaaac

SEQ ID NO: 61199 - DNA, 11 bp, Unknown
  misc_feature (1)..( 11): Matrix.003 file - promoters60/4900035
tttatctatca

SEQ ID NO: 61200 - DNA, 11 bp, Unknown
  misc_feature (1)..( 11): Matrix.003 file - promoters60/4900353
ctataaaaaat

SEQ ID NO: 61201 - DNA, 7 bp, Unknown
  misc_feature (1)..( 7): Matrix.003 file - promoters60/4900589
gtagatc

SEQ ID NO: 61202 - DNA, 11 bp, Unknown
  misc_feature (1)..( 11): Matrix.003 file - promoters60/4900589
gtataaattga

SEQ ID NO: 61203 - DNA, 8 bp, Unknown
  misc_feature (1)..( 8): Matrix.003 file - promoters60/4900589
tttgtttt

SEQ ID NO: 61204 - DNA, 11 bp, Unknown
  misc_feature (1)..( 11): Matrix.003 file - promoters60/4900589
atctaaatttt

SEQ ID NO: 61205 - DNA, 8 bp, Unknown
  misc_feature (1)..( 8): Matrix.003 file - promoters60/4900589
ctataatt

SEQ ID NO: 61206 - DNA, 7 bp, Unknown
  misc_feature (1)..( 7): Matrix.003 file - promoters60/4900589
tctaaat

SEQ ID NO: 61207 - DNA, 7 bp, Unknown
  misc_feature (1)..( 7): Matrix.003 file - promoters60/4900589
tggattt

SEQ ID NO: 61208 - DNA, 8 bp, Unknown
  misc_feature (1)..( 8): Matrix.003 file - promoters60/4900589
ttttaatt

SEQ ID NO: 61209 - DNA, 6 bp, Unknown
  misc_feature (1)..( 6): Matrix.003 file - promoters60/4900589
aatttt

SEQ ID NO: 61210 - DNA, 11 bp, Unknown
  misc_feature (1)..( 11): Matrix.003 file - promoters60/4900589
tgaaacaaaaa

SEQ ID NO: 61211 - DNA, 7 bp, Unknown
  misc_feature (1)..( 7): Matrix.003 file - promoters60/4900589
tctactg

SEQ ID NO: 61212 - DNA, 6 bp, Unknown
  misc_feature (1)..( 6): Matrix.003 file - promoters60/4900589
taaaga

SEQ ID NO: 61213 - DNA, 9 bp, Unknown
  misc_feature (1)..( 9): Matrix.003 file - promoters60/4900589
caaaaagag

SEQ ID NO: 61214 - DNA, 6 bp, Unknown
  misc_feature (1)..( 6): Matrix.003 file - promoters60/4900589
aaattg

SEQ ID NO: 61215 - DNA, 7 bp, Unknown
  misc_feature (1)..( 7): Matrix.003 file - promoters60/4900589
tattgtg

SEQ ID NO: 61216 - DNA, 9 bp, Unknown
  misc_feature (1)..( 9): Matrix.003 file - promoters60/4900589
tatttattt

SEQ ID NO: 61217 - DNA, 11 bp, Unknown
  misc_feature (1)..( 11): Matrix.003 file - promoters60/4900643
atacaaaatca

SEQ ID NO: 61218 - DNA, 9 bp, Unknown
  misc_feature (1)..( 9): Matrix.003 file - promoters60/4900643
aaaaaccaa

SEQ ID NO: 61219 - DNA, 9 bp, Unknown
  misc_feature (1)..( 9): Matrix.003 file - promoters60/4900643
aagatctcc

SEQ ID NO: 61220 - DNA, 8 bp, Unknown
  misc_feature (1)..( 8): Matrix.003 file - promoters60/4900643
tgtgggtt

SEQ ID NO: 61221 - DNA, 6 bp, Unknown
  misc_feature (1)..( 6): Matrix.003 file - promoters60/4900643
ctttga

SEQ ID NO: 61222 - DNA, 7 bp, Unknown
  misc_feature (1)..( 7): Matrix.003 file - promoters60/4900643
tgtaata

SEQ ID NO: 61223 - DNA, 16 bp, Unknown
  misc_feature (1)..( 16): Matrix.003 file - promoters60/4900643
ggaaaacgtgagaact

SEQ ID NO: 61224 - DNA, 6 bp, Unknown
  misc_feature (1)..( 6): Matrix.003 file - promoters60/4900643
tgtttt

SEQ ID NO: 61225 - DNA, 8 bp, Unknown
  misc_feature (1)..( 8): Matrix.003 file - promoters60/4900643
tgtcatta

SEQ ID NO: 61226 - DNA, 7 bp, Unknown
  misc_feature (1)..( 7): Matrix.003 file - promoters60/4900643
ctctact

SEQ ID NO: 61227 - DNA, 8 bp, Unknown
  misc_feature (1)..( 8): Matrix.003 file - promoters60/4900643
tgtgctct

SEQ ID NO: 61228 - DNA, 9 bp, Unknown
  misc_feature (1)..( 9): Matrix.003 file - promoters60/4900643
agaaaaaaa

SEQ ID NO: 61229 - DNA, 7 bp, Unknown
  misc_feature (1)..( 7): Matrix.003 file - promoters60/4900643
aaaactt

SEQ ID NO: 61230 - DNA, 9 bp, Unknown
  misc_feature (1)..( 9): Matrix.003 file - promoters60/4900643
tttatttac

SEQ ID NO: 61231 - DNA, 7 bp, Unknown
  misc_feature (1)..( 7): Matrix.003 file - promoters60/4900643
ttccaaa

SEQ ID NO: 61232 - DNA, 6 bp, Unknown
  misc_feature (1)..( 6): Matrix.003 file - promoters60/4900643
ccaaac

SEQ ID NO: 61233 - DNA, 6 bp, Unknown
  misc_feature (1)..( 6): Matrix.003 file - promoters60/4900643
ggtttt

SEQ ID NO: 61234 - DNA, 6 bp, Unknown
  misc_feature (1)..( 6): Matrix.003 file - promoters60/4900643
ttaatt

SEQ ID NO: 61235 - DNA, 8 bp, Unknown
  misc_feature (1)..( 8): Matrix.003 file - promoters60/4900643
gttagtat

SEQ ID NO: 61236 - DNA, 6 bp, Unknown
  misc_feature (1)..( 6): Matrix.003 file - promoters60/4900643
ttggcg

SEQ ID NO: 61237 - DNA, 7 bp, Unknown
  misc_feature (1)..( 7): Matrix.003 file - promoters60/4900643
atattta

SEQ ID NO: 61238 - DNA, 7 bp, Unknown
  misc_feature (1)..( 7): Matrix.003 file - promoters60/4900722
ctacatt

SEQ ID NO: 61239 - DNA, 8 bp, Unknown
  misc_feature (1)..( 8): Matrix.003 file - promoters60/4900722
ttataaat

SEQ ID NO: 61240 - DNA, 6 bp, Unknown
  misc_feature (1)..( 6): Matrix.003 file - promoters60/4900722
agattt

SEQ ID NO: 61241 - DNA, 7 bp, Unknown
  misc_feature (1)..( 7): Matrix.003 file - promoters60/4900722
atttacc

SEQ ID NO: 61242 - DNA, 8 bp, Unknown
  misc_feature (1)..( 8): Matrix.003 file - promoters60/4900722
atatatga

SEQ ID NO: 61243 - DNA, 7 bp, Unknown
  misc_feature (1)..( 7): Matrix.003 file - promoters60/4900722
tttaata

SEQ ID NO: 61244 - DNA, 6 bp, Unknown
  misc_feature (1)..( 6): Matrix.003 file - promoters60/4900722
gtgtgt

SEQ ID NO: 61245 - DNA, 6 bp, Unknown
  misc_feature (1)..( 6): Matrix.003 file - promoters60/4900722
acagct

SEQ ID NO: 61246 - DNA, 6 bp, Unknown
  misc_feature (1)..( 6): Matrix.003 file - promoters60/4900722
ccatat

SEQ ID NO: 61247 - DNA, 8 bp, Unknown
  misc_feature (1)..( 8): Matrix.003 file - promoters60/4900722
tgcctcag

SEQ ID NO: 61248 - DNA, 7 bp, Unknown
  misc_feature (1)..( 7): Matrix.003 file - promoters60/4900722
ttcggtt

SEQ ID NO: 61249 - DNA, 8 bp, Unknown
  misc_feature (1)..( 8): Matrix.003 file - promoters60/4900722
gtgggtat

SEQ ID NO: 61250 - DNA, 12 bp, Unknown
  misc_feature (1)..( 12): Matrix.003 file - promoters60/4900939
aaaataaaaagt

SEQ ID NO: 61251 - DNA, 7 bp, Unknown
  misc_feature (1)..( 7): Matrix.003 file - promoters60/4900939
aaaattc

SEQ ID NO: 61252 - DNA, 9 bp, Unknown
  misc_feature (1)..( 9): Matrix.003 file - promoters60/4900939
ttaaacgaa

SEQ ID NO: 61253 - DNA, 7 bp, Unknown
  misc_feature (1)..( 7): Matrix.003 file - promoters60/4900939
ttttgtt

SEQ ID NO: 61254 - DNA, 11 bp, Unknown
  misc_feature (1)..( 11): Matrix.003 file - promoters60/4901133
aaatgggccca

SEQ ID NO: 61255 - DNA, 9 bp, Unknown
  misc_feature (1)..( 9): Matrix.003 file - promoters60/4901133
tatataaat

SEQ ID NO: 61256 - DNA, 11 bp, Unknown
  misc_feature (1)..( 11): Matrix.003 file - promoters60/4901133
aaaaaattata

SEQ ID NO: 61257 - DNA, 6 bp, Unknown
  misc_feature (1)..( 6): Matrix.003 file - promoters60/4901225
tgattg

SEQ ID NO: 61258 - DNA, 13 bp, Unknown
  misc_feature (1)..( 13): Matrix.003 file - promoters60/4901225
acacaaaaaaaaa

SEQ ID NO: 61259 - DNA, 7 bp, Unknown
  misc_feature (1)..( 7): Matrix.003 file - promoters60/4901225
aaaactg

SEQ ID NO: 61260 - DNA, 7 bp, Unknown
  misc_feature (1)..( 7): Matrix.003 file - promoters60/4901225
aagaaga

SEQ ID NO: 61261 - DNA, 11 bp, Unknown
  misc_feature (1)..( 11): Matrix.003 file - promoters60/4901225
agaagaaaaag

SEQ ID NO: 61262 - DNA, 8 bp, Unknown
  misc_feature (1)..( 8): Matrix.003 file - promoters60/4901225
acaaaaca

SEQ ID NO: 61263 - DNA, 10 bp, Unknown
  misc_feature (1)..( 10): Matrix.003 file - promoters60/4901225
acatttatcc

SEQ ID NO: 61264 - DNA, 6 bp, Unknown
  misc_feature (1)..( 6): Matrix.003 file - promoters60/4901225
aatttt

SEQ ID NO: 61265 - DNA, 7 bp, Unknown
  misc_feature (1)..( 7): Matrix.003 file - promoters60/4901225
aaaaagg

SEQ ID NO: 61266 - DNA, 7 bp, Unknown
  misc_feature (1)..( 7): Matrix.003 file - promoters60/4901225
tttcgac

SEQ ID NO: 61267 - DNA, 8 bp, Unknown
  misc_feature (1)..( 8): Matrix.003 file - promoters60/4901225
ttaacaat

SEQ ID NO: 61268 - DNA, 8 bp, Unknown
  misc_feature (1)..( 8): Matrix.003 file - promoters60/4901225
atcacatc

SEQ ID NO: 61269 - DNA, 7 bp, Unknown
  misc_feature (1)..( 7): Matrix.003 file - promoters60/4901225
tggatcg

SEQ ID NO: 61270 - DNA, 9 bp, Unknown
  misc_feature (1)..( 9): Matrix.003 file - promoters60/4901241
ttaaaatat

SEQ ID NO: 61271 - DNA, 15 bp, Unknown
  misc_feature (1)..( 15): Matrix.003 file - promoters60/4901241
ttaaaatatatttaa

SEQ ID NO: 61272 - DNA, 10 bp, Unknown
  misc_feature (1)..( 10): Matrix.003 file - promoters60/4901241
ataaagaatt

SEQ ID NO: 61273 - DNA, 12 bp, Unknown
  misc_feature (1)..( 12): Matrix.003 file - promoters60/4901241
catgcaactaat

SEQ ID NO: 61274 - DNA, 11 bp, Unknown
  misc_feature (1)..( 11): Matrix.003 file - promoters60/4901241
agactaaataa

SEQ ID NO: 61275 - DNA, 9 bp, Unknown
  misc_feature (1)..( 9): Matrix.003 file - promoters60/4901241
tataaaaac

SEQ ID NO: 61276 - DNA, 11 bp, Unknown
  misc_feature (1)..( 11): Matrix.003 file - promoters60/4901241
attaaaatata

SEQ ID NO: 61277 - DNA, 13 bp, Unknown
  misc_feature (1)..( 13): Matrix.003 file - promoters60/4901241
ttaaacatcgtat

SEQ ID NO: 61278 - DNA, 8 bp, Unknown
  misc_feature (1)..( 8): Matrix.003 file - promoters60/4901241
cctaattt

SEQ ID NO: 61279 - DNA, 9 bp, Unknown
  misc_feature (1)..( 9): Matrix.003 file - promoters60/4901241
taaccttac

SEQ ID NO: 61280 - DNA, 10 bp, Unknown
  misc_feature (1)..( 10): Matrix.003 file - promoters60/4901241
actatataaa

SEQ ID NO: 61281 - DNA, 6 bp, Unknown
  misc_feature (1)..( 6): Matrix.003 file - promoters60/4901333
ttcatc

SEQ ID NO: 61282 - DNA, 7 bp, Unknown
  misc_feature (1)..( 7): Matrix.003 file - promoters60/4901333
atttgtt

SEQ ID NO: 61283 - DNA, 6 bp, Unknown
  misc_feature (1)..( 6): Matrix.003 file - promoters60/4901333
tctcgc

SEQ ID NO: 61284 - DNA, 11 bp, Unknown
  misc_feature (1)..( 11): Matrix.003 file - promoters60/4901333
ctttattcgat

SEQ ID NO: 61285 - DNA, 6 bp, Unknown
  misc_feature (1)..( 6): Matrix.003 file - promoters60/4901333
gaacat

SEQ ID NO: 61286 - DNA, 6 bp, Unknown
  misc_feature (1)..( 6): Matrix.003 file - promoters60/4901333
aagaaa

SEQ ID NO: 61287 - DNA, 6 bp, Unknown
  misc_feature (1)..( 6): Matrix.003 file - promoters60/4901333
ttttaa

SEQ ID NO: 61288 - DNA, 6 bp, Unknown
  misc_feature (1)..( 6): Matrix.003 file - promoters60/4901333
aacttc

SEQ ID NO: 61289 - DNA, 7 bp, Unknown
  misc_feature (1)..( 7): Matrix.003 file - promoters60/4901333
attcatc

SEQ ID NO: 61290 - DNA, 7 bp, Unknown
  misc_feature (1)..( 7): Matrix.003 file - promoters60/4901333
atttttg

SEQ ID NO: 61291 - DNA, 7 bp, Unknown
  misc_feature (1)..( 7): Matrix.003 file - promoters60/4901333
agtcttt

SEQ ID NO: 61292 - DNA, 8 bp, Unknown
  misc_feature (1)..( 8): Matrix.003 file - promoters60/4901333
cgacttct

SEQ ID NO: 61293 - DNA, 6 bp, Unknown
  misc_feature (1)..( 6): Matrix.003 file - promoters60/4901333
tttaat

SEQ ID NO: 61294 - DNA, 7 bp, Unknown
  misc_feature (1)..( 7): Matrix.003 file - promoters60/4901333
tagataa

SEQ ID NO: 61295 - DNA, 7 bp, Unknown
  misc_feature (1)..( 7): Matrix.003 file - promoters60/4901333
aaaaaca

SEQ ID NO: 61296 - DNA, 9 bp, Unknown
  misc_feature (1)..( 9): Matrix.003 file - promoters60/4901333
acgttatag

SEQ ID NO: 61297 - DNA, 7 bp, Unknown
  misc_feature (1)..( 7): Matrix.003 file - promoters60/4901333
ttataat

SEQ ID NO: 61298 - DNA, 10 bp, Unknown
  misc_feature (1)..( 10): Matrix.003 file - promoters60/4901333
taatgggttc

SEQ ID NO: 61299 - DNA, 6 bp, Unknown
  misc_feature (1)..( 6): Matrix.003 file - promoters60/4901516
gttttg

SEQ ID NO: 61300 - DNA, 6 bp, Unknown
  misc_feature (1)..( 6): Matrix.003 file - promoters60/4901516
acattc

SEQ ID NO: 61301 - DNA, 8 bp, Unknown
  misc_feature (1)..( 8): Matrix.003 file - promoters60/4901516
aatgattt

SEQ ID NO: 61302 - DNA, 9 bp, Unknown
  misc_feature (1)..( 9): Matrix.003 file - promoters60/4901516
taaagtcaa

SEQ ID NO: 61303 - DNA, 10 bp, Unknown
  misc_feature (1)..( 10): Matrix.003 file - promoters60/4901516
aaataaaata

SEQ ID NO: 61304 - DNA, 8 bp, Unknown
  misc_feature (1)..( 8): Matrix.003 file - promoters60/4901516
tatatatt

SEQ ID NO: 61305 - DNA, 6 bp, Unknown
  misc_feature (1)..( 6): Matrix.003 file - promoters60/4901516
tcgaaa

SEQ ID NO: 61306 - DNA, 7 bp, Unknown
  misc_feature (1)..( 7): Matrix.003 file - promoters60/4901516
aagatat

SEQ ID NO: 61307 - DNA, 6 bp, Unknown
  misc_feature (1)..( 6): Matrix.003 file - promoters60/4901516
ttttgt

SEQ ID NO: 61308 - DNA, 14 bp, Unknown
  misc_feature (1)..( 14): Matrix.003 file - promoters60/4901516
gaaacaaaaacatt

SEQ ID NO: 61309 - DNA, 6 bp, Unknown
  misc_feature (1)..( 6): Matrix.003 file - promoters60/4901516
actgtt

SEQ ID NO: 61310 - DNA, 9 bp, Unknown
  misc_feature (1)..( 9): Matrix.003 file - promoters60/4901516
cccactaaa

SEQ ID NO: 61311 - DNA, 7 bp, Unknown
  misc_feature (1)..( 7): Matrix.003 file - promoters60/4901516
aaacaaa

SEQ ID NO: 61312 - DNA, 6 bp, Unknown
  misc_feature (1)..( 6): Matrix.003 file - promoters60/4901516
ctcctt

SEQ ID NO: 61313 - DNA, 6 bp, Unknown
  misc_feature (1)..( 6): Matrix.003 file - promoters60/4901516
agtaaa

SEQ ID NO: 61314 - DNA, 7 bp, Unknown
  misc_feature (1)..( 7): Matrix.003 file - promoters60/4901516
aatcggg

SEQ ID NO: 61315 - DNA, 10 bp, Unknown
  misc_feature (1)..( 10): Matrix.003 file - promoters60/4901516
ggaaaagaaa

SEQ ID NO: 61316 - DNA, 9 bp, Unknown
  misc_feature (1)..( 9): Matrix.003 file - promoters60/4901516
aaagaaaag

SEQ ID NO: 61317 - DNA, 7 bp, Unknown
  misc_feature (1)..( 7): Matrix.003 file - promoters60/4901528
tcagagc

SEQ ID NO: 61318 - DNA, 8 bp, Unknown
  misc_feature (1)..( 8): Matrix.003 file - promoters60/4901528
agtatatt

SEQ ID NO: 61319 - DNA, 7 bp, Unknown
  misc_feature (1)..( 7): Matrix.003 file - promoters60/4901528
ttaaaaa

SEQ ID NO: 61320 - DNA, 8 bp, Unknown
  misc_feature (1)..( 8): Matrix.003 file - promoters60/4901528
taacaaaa

SEQ ID NO: 61321 - DNA, 6 bp, Unknown
  misc_feature (1)..( 6): Matrix.003 file - promoters60/4901528
ttatca

SEQ ID NO: 61322 - DNA, 7 bp, Unknown
  misc_feature (1)..( 7): Matrix.003 file - promoters60/4901528
tttatta

SEQ ID NO: 61323 - DNA, 7 bp, Unknown
  misc_feature (1)..( 7): Matrix.003 file - promoters60/4901528
gtagatt

SEQ ID NO: 61324 - DNA, 7 bp, Unknown
  misc_feature (1)..( 7): Matrix.003 file - promoters60/4901528
ttccaaa

SEQ ID NO: 61325 - DNA, 7 bp, Unknown
  misc_feature (1)..( 7): Matrix.003 file - promoters60/4901528
tttgatt

SEQ ID NO: 61326 - DNA, 6 bp, Unknown
  misc_feature (1)..( 6): Matrix.003 file - promoters60/4901528
gtctcc

SEQ ID NO: 61327 - DNA, 11 bp, Unknown
  misc_feature (1)..( 11): Matrix.003 file - promoters60/4901528
accctagattt

SEQ ID NO: 61328 - DNA, 10 bp, Unknown
  misc_feature (1)..( 10): Matrix.003 file - promoters60/4901564
gtttctaaaa

SEQ ID NO: 61329 - DNA, 12 bp, Unknown
  misc_feature (1)..( 12): Matrix.003 file - promoters60/4901564
ggtatgggctgt

SEQ ID NO: 61330 - DNA, 9 bp, Unknown
  misc_feature (1)..( 9): Matrix.003 file - promoters60/4901673
tatttaagc

SEQ ID NO: 61331 - DNA, 7 bp, Unknown
  misc_feature (1)..( 7): Matrix.003 file - promoters60/4901673
aattcaa

SEQ ID NO: 61332 - DNA, 8 bp, Unknown
  misc_feature (1)..( 8): Matrix.003 file - promoters60/4901673
attccata

SEQ ID NO: 61333 - DNA, 11 bp, Unknown
  misc_feature (1)..( 11): Matrix.003 file - promoters60/4901673
ttcctagatac

SEQ ID NO: 61334 - DNA, 9 bp, Unknown
  misc_feature (1)..( 9): Matrix.003 file - promoters60/4901783
aaaaaattt

SEQ ID NO: 61335 - DNA, 8 bp, Unknown
  misc_feature (1)..( 8): Matrix.003 file - promoters60/4901783
caaacaaa

SEQ ID NO: 61336 - DNA, 9 bp, Unknown
  misc_feature (1)..( 9): Matrix.003 file - promoters60/4901783
taaatatca

SEQ ID NO: 61337 - DNA, 9 bp, Unknown
  misc_feature (1)..( 9): Matrix.003 file - promoters60/4901783
taaaaaaca

SEQ ID NO: 61338 - DNA, 8 bp, Unknown
  misc_feature (1)..( 8): Matrix.003 file - promoters60/4901783
caaaaatc

SEQ ID NO: 61339 - DNA, 7 bp, Unknown
  misc_feature (1)..( 7): Matrix.003 file - promoters60/4901822
catgtga

SEQ ID NO: 61340 - DNA, 11 bp, Unknown
  misc_feature (1)..( 11): Matrix.003 file - promoters60/4901822
aacatcaagag

SEQ ID NO: 61341 - DNA, 7 bp, Unknown
  misc_feature (1)..( 7): Matrix.003 file - promoters60/4901822
tctgcag

SEQ ID NO: 61342 - DNA, 7 bp, Unknown
  misc_feature (1)..( 7): Matrix.003 file - promoters60/4901822
aagcagt

SEQ ID NO: 61343 - DNA, 8 bp, Unknown
  misc_feature (1)..( 8): Matrix.003 file - promoters60/4901822
ggtactaa

SEQ ID NO: 61344 - DNA, 9 bp, Unknown
  misc_feature (1)..( 9): Matrix.003 file - promoters60/4901822
tttctacaa

SEQ ID NO: 61345 - DNA, 6 bp, Unknown
  misc_feature (1)..( 6): Matrix.003 file - promoters60/4901822
aaaaca

SEQ ID NO: 61346 - DNA, 6 bp, Unknown
  misc_feature (1)..( 6): Matrix.003 file - promoters60/4901822
taatta

SEQ ID NO: 61347 - DNA, 10 bp, Unknown
  misc_feature (1)..( 10): Matrix.003 file - promoters60/4901822
agaattccgg

SEQ ID NO: 61348 - DNA, 8 bp, Unknown
  misc_feature (1)..( 8): Matrix.003 file - promoters60/4901822
aacctaca

SEQ ID NO: 61349 - DNA, 7 bp, Unknown
  misc_feature (1)..( 7): Matrix.003 file - promoters60/4901822
tggaaat

SEQ ID NO: 61350 - DNA, 7 bp, Unknown
  misc_feature (1)..( 7): Matrix.003 file - promoters60/4901822
tttgtct

SEQ ID NO: 61351 - DNA, 10 bp, Unknown
  misc_feature (1)..( 10): Matrix.003 file - promoters60/4901822
tgaatcaata

SEQ ID NO: 61352 - DNA, 8 bp, Unknown
  misc_feature (1)..( 8): Matrix.003 file - promoters60/4901822
ggtgtttg

SEQ ID NO: 61353 - DNA, 6 bp, Unknown
  misc_feature (1)..( 6): Matrix.003 file - promoters60/4901822
acaaac

SEQ ID NO: 61354 - DNA, 7 bp, Unknown
  misc_feature (1)..( 7): Matrix.003 file - promoters60/4901884
aaacaaa

SEQ ID NO: 61355 - DNA, 6 bp, Unknown
  misc_feature (1)..( 6): Matrix.003 file - promoters60/4901884
acaaaa

SEQ ID NO: 61356 - DNA, 6 bp, Unknown
  misc_feature (1)..( 6): Matrix.003 file - promoters60/4901884
acaata

SEQ ID NO: 61357 - DNA, 8 bp, Unknown
  misc_feature (1)..( 8): Matrix.003 file - promoters60/4901884
ggccatga

SEQ ID NO: 61358 - DNA, 7 bp, Unknown
  misc_feature (1)..( 7): Matrix.003 file - promoters60/4901884
ataaaac

SEQ ID NO: 61359 - DNA, 6 bp, Unknown
  misc_feature (1)..( 6): Matrix.003 file - promoters60/4901884
gcaaac

SEQ ID NO: 61360 - DNA, 10 bp, Unknown
  misc_feature (1)..( 10): Matrix.003 file - promoters60/4901884
aaaaaactta

SEQ ID NO: 61361 - DNA, 9 bp, Unknown
  misc_feature (1)..( 9): Matrix.003 file - promoters60/4901884
tgagacact

SEQ ID NO: 61362 - DNA, 6 bp, Unknown
  misc_feature (1)..( 6): Matrix.003 file - promoters60/4901884
tcattt

SEQ ID NO: 61363 - DNA, 6 bp, Unknown
  misc_feature (1)..( 6): Matrix.003 file - promoters60/4901884
tataca

SEQ ID NO: 61364 - DNA, 6 bp, Unknown
  misc_feature (1)..( 6): Matrix.003 file - promoters60/4901884
aattta

SEQ ID NO: 61365 - DNA, 6 bp, Unknown
  misc_feature (1)..( 6): Matrix.003 file - promoters60/4901884
ataatt

SEQ ID NO: 61366 - DNA, 6 bp, Unknown
  misc_feature (1)..( 6): Matrix.003 file - promoters60/4901884
ttttaa

SEQ ID NO: 61367 - DNA, 6 bp, Unknown
  misc_feature (1)..( 6): Matrix.003 file - promoters60/4901884
aataat

SEQ ID NO: 61368 - DNA, 6 bp, Unknown
  misc_feature (1)..( 6): Matrix.003 file - promoters60/4902082
ctttta

SEQ ID NO: 61369 - DNA, 7 bp, Unknown
  misc_feature (1)..( 7): Matrix.003 file - promoters60/4902082
tttatta

SEQ ID NO: 61370 - DNA, 6 bp, Unknown
  misc_feature (1)..( 6): Matrix.003 file - promoters60/4902082
ataatt

SEQ ID NO: 61371 - DNA, 6 bp, Unknown
  misc_feature (1)..( 6): Matrix.003 file - promoters60/4902082
attgaa

SEQ ID NO: 61372 - DNA, 8 bp, Unknown
  misc_feature (1)..( 8): Matrix.003 file - promoters60/4902082
ttccatca

SEQ ID NO: 61373 - DNA, 8 bp, Unknown
  misc_feature (1)..( 8): Matrix.003 file - promoters60/4902082
ttaaatcc

SEQ ID NO: 61374 - DNA, 9 bp, Unknown
  misc_feature (1)..( 9): Matrix.003 file - promoters60/4902082
acaatgatg

SEQ ID NO: 61375 - DNA, 6 bp, Unknown
  misc_feature (1)..( 6): Matrix.003 file - promoters60/4902082
caaatg

SEQ ID NO: 61376 - DNA, 6 bp, Unknown
  misc_feature (1)..( 6): Matrix.003 file - promoters60/4902082
agtata

SEQ ID NO: 61377 - DNA, 8 bp, Unknown
  misc_feature (1)..( 8): Matrix.003 file - promoters60/4902082
caaatggt

SEQ ID NO: 61378 - DNA, 7 bp, Unknown
  misc_feature (1)..( 7): Matrix.003 file - promoters60/4902082
attattt

SEQ ID NO: 61379 - DNA, 7 bp, Unknown
  misc_feature (1)..( 7): Matrix.003 file - promoters60/4902082
atagata

SEQ ID NO: 61380 - DNA, 7 bp, Unknown
  misc_feature (1)..( 7): Matrix.003 file - promoters60/4902082
atggaat

SEQ ID NO: 61381 - DNA, 7 bp, Unknown
  misc_feature (1)..( 7): Matrix.003 file - promoters60/4902082
accaaat

SEQ ID NO: 61382 - DNA, 6 bp, Unknown
  misc_feature (1)..( 6): Matrix.003 file - promoters60/4902082
tattat

SEQ ID NO: 61383 - DNA, 6 bp, Unknown
  misc_feature (1)..( 6): Matrix.003 file - promoters60/4902082
aaaaaa

SEQ ID NO: 61384 - DNA, 6 bp, Unknown
  misc_feature (1)..( 6): Matrix.003 file - promoters60/4902082
gtcaaa

SEQ ID NO: 61385 - DNA, 6 bp, Unknown
  misc_feature (1)..( 6): Matrix.003 file - promoters60/4902082
ggcgag

SEQ ID NO: 61386 - DNA, 7 bp, Unknown
  misc_feature (1)..( 7): Matrix.003 file - promoters60/4902143
accagaa

SEQ ID NO: 61387 - DNA, 7 bp, Unknown
  misc_feature (1)..( 7): Matrix.003 file - promoters60/4902143
aaacacc

SEQ ID NO: 61388 - DNA, 7 bp, Unknown
  misc_feature (1)..( 7): Matrix.003 file - promoters60/4902143
aaaatca

SEQ ID NO: 61389 - DNA, 7 bp, Unknown
  misc_feature (1)..( 7): Matrix.003 file - promoters60/4902143
atggttt

SEQ ID NO: 61390 - DNA, 8 bp, Unknown
  misc_feature (1)..( 8): Matrix.003 file - promoters60/4902143
taaaatat

SEQ ID NO: 61391 - DNA, 12 bp, Unknown
  misc_feature (1)..( 12): Matrix.003 file - promoters60/4902143
taaacaataaat

SEQ ID NO: 61392 - DNA, 9 bp, Unknown
  misc_feature (1)..( 9): Matrix.003 file - promoters60/4902288
aaaatctac

SEQ ID NO: 61393 - DNA, 10 bp, Unknown
  misc_feature (1)..( 10): Matrix.003 file - promoters60/4902288
gaaatagatt

SEQ ID NO: 61394 - DNA, 13 bp, Unknown
  misc_feature (1)..( 13): Matrix.003 file - promoters60/4902387
taaatatcatatt

SEQ ID NO: 61395 - DNA, 7 bp, Unknown
  misc_feature (1)..( 7): Matrix.003 file - promoters60/4902387
ttagaaa

SEQ ID NO: 61396 - DNA, 6 bp, Unknown
  misc_feature (1)..( 6): Matrix.003 file - promoters60/4902387
acatgt

SEQ ID NO: 61397 - DNA, 11 bp, Unknown
  misc_feature (1)..( 11): Matrix.003 file - promoters60/4902387
aaaaatgttta

SEQ ID NO: 61398 - DNA, 9 bp, Unknown
  misc_feature (1)..( 9): Matrix.003 file - promoters60/4902387
acatgttta

SEQ ID NO: 61399 - DNA, 10 bp, Unknown
  misc_feature (1)..( 10): Matrix.003 file - promoters60/4902387
atctaaataa

SEQ ID NO: 61400 - DNA, 10 bp, Unknown
  misc_feature (1)..( 10): Matrix.003 file - promoters60/4902387
aaataaataa

SEQ ID NO: 61401 - DNA, 7 bp, Unknown
  misc_feature (1)..( 7): Matrix.003 file - promoters60/4902791
caaacca

SEQ ID NO: 61402 - DNA, 10 bp, Unknown
  misc_feature (1)..( 10): Matrix.003 file - promoters60/4902791
aaataataaa

SEQ ID NO: 61403 - DNA, 9 bp, Unknown
  misc_feature (1)..( 9): Matrix.003 file - promoters60/4903407
taaataaaa

SEQ ID NO: 61404 - DNA, 8 bp, Unknown
  misc_feature (1)..( 8): Matrix.003 file - promoters60/4903407
aaaaacta

SEQ ID NO: 61405 - DNA, 10 bp, Unknown
  misc_feature (1)..( 10): Matrix.003 file - promoters60/4903407
acaaaaaaaa

SEQ ID NO: 61406 - DNA, 10 bp, Unknown
  misc_feature (1)..( 10): Matrix.003 file - promoters60/4903407
gtttttcttt

SEQ ID NO: 61407 - DNA, 11 bp, Unknown
  misc_feature (1)..( 11): Matrix.003 file - promoters60/4903407
aaaaatatatt

SEQ ID NO: 61408 - DNA, 6 bp, Unknown
  misc_feature (1)..( 6): Matrix.003 file - promoters60/4903614
gattga

SEQ ID NO: 61409 - DNA, 8 bp, Unknown
  misc_feature (1)..( 8): Matrix.003 file - promoters60/4903614
tcgatttt

SEQ ID NO: 61410 - DNA, 6 bp, Unknown
  misc_feature (1)..( 6): Matrix.003 file - promoters60/4903614
atttta

SEQ ID NO: 61411 - DNA, 10 bp, Unknown
  misc_feature (1)..( 10): Matrix.003 file - promoters60/4903614
ttaatataaa

SEQ ID NO: 61412 - DNA, 6 bp, Unknown
  misc_feature (1)..( 6): Matrix.003 file - promoters60/4903614
aaccgt

SEQ ID NO: 61413 - DNA, 7 bp, Unknown
  misc_feature (1)..( 7): Matrix.003 file - promoters60/4903614
taaacta

SEQ ID NO: 61414 - DNA, 6 bp, Unknown
  misc_feature (1)..( 6): Matrix.003 file - promoters60/4903614
aatatt

SEQ ID NO: 61415 - DNA, 7 bp, Unknown
  misc_feature (1)..( 7): Matrix.003 file - promoters60/4903614
attataa

SEQ ID NO: 61416 - DNA, 8 bp, Unknown
  misc_feature (1)..( 8): Matrix.003 file - promoters60/4903614
tattataa

SEQ ID NO: 61417 - DNA, 8 bp, Unknown
  misc_feature (1)..( 8): Matrix.003 file - promoters60/4903614
tttatggt

SEQ ID NO: 61418 - DNA, 7 bp, Unknown
  misc_feature (1)..( 7): Matrix.003 file - promoters60/4903614
aataaaa

SEQ ID NO: 61419 - DNA, 7 bp, Unknown
  misc_feature (1)..( 7): Matrix.003 file - promoters60/4903614
acaaatt

SEQ ID NO: 61420 - DNA, 6 bp, Unknown
  misc_feature (1)..( 6): Matrix.003 file - promoters60/4903614
agaaaa

SEQ ID NO: 61421 - DNA, 6 bp, Unknown
  misc_feature (1)..( 6): Matrix.003 file - promoters60/4903614
taataa

SEQ ID NO: 61422 - DNA, 7 bp, Unknown
  misc_feature (1)..( 7): Matrix.003 file - promoters60/4903614
tgtgtga

SEQ ID NO: 61423 - DNA, 6 bp, Unknown
  misc_feature (1)..( 6): Matrix.003 file - promoters60/4903614
taaaca

SEQ ID NO: 61424 - DNA, 7 bp, Unknown
  misc_feature (1)..( 7): Matrix.003 file - promoters60/4903614
acaaaat

SEQ ID NO: 61425 - DNA, 8 bp, Unknown
  misc_feature (1)..( 8): Matrix.003 file - promoters60/4903614
gttaaata

SEQ ID NO: 61426 - DNA, 6 bp, Unknown
  misc_feature (1)..( 6): Matrix.003 file - promoters60/4903614
aaacct

SEQ ID NO: 61427 - DNA, 8 bp, Unknown
  misc_feature (1)..( 8): Matrix.003 file - promoters60/4903653
aaaaatag

SEQ ID NO: 61428 - DNA, 9 bp, Unknown
  misc_feature (1)..( 9): Matrix.003 file - promoters60/4903653
ataaaaaca

SEQ ID NO: 61429 - DNA, 7 bp, Unknown
  misc_feature (1)..( 7): Matrix.003 file - promoters60/4903653
aaagtag

SEQ ID NO: 61430 - DNA, 11 bp, Unknown
  misc_feature (1)..( 11): Matrix.003 file - promoters60/4904511
tatatcttttt

SEQ ID NO: 61431 - DNA, 13 bp, Unknown
  misc_feature (1)..( 13): Matrix.003 file - promoters60/4904511
taacaattactac

SEQ ID NO: 61432 - DNA, 9 bp, Unknown
  misc_feature (1)..( 9): Matrix.003 file - promoters60/4904511
ttataaata

SEQ ID NO: 61433 - DNA, 10 bp, Unknown
  misc_feature (1)..( 10): Matrix.003 file - promoters60/4904511
tcgactctta

SEQ ID NO: 61434 - DNA, 7 bp, Unknown
  misc_feature (1)..( 7): Matrix.003 file - promoters60/4906198
atctaaa

SEQ ID NO: 61435 - DNA, 9 bp, Unknown
  misc_feature (1)..( 9): Matrix.003 file - promoters60/4906198
caacaattt

SEQ ID NO: 61436 - DNA, 8 bp, Unknown
  misc_feature (1)..( 8): Matrix.003 file - promoters60/4906198
tttacaat

SEQ ID NO: 61437 - DNA, 8 bp, Unknown
  misc_feature (1)..( 8): Matrix.003 file - promoters60/4906198
atattcac

SEQ ID NO: 61438 - DNA, 8 bp, Unknown
  misc_feature (1)..( 8): Matrix.003 file - promoters60/4906198
aataaaaa

SEQ ID NO: 61439 - DNA, 9 bp, Unknown
  misc_feature (1)..( 9): Matrix.003 file - promoters60/4909449
tatataaag

SEQ ID NO: 61440 - DNA, 10 bp, Unknown
  misc_feature (1)..( 10): Matrix.003 file - promoters60/4909449
aaaattagat

SEQ ID NO: 61441 - DNA, 7 bp, Unknown
  misc_feature (1)..( 7): Matrix.003 file - promoters60/4910362
acaaatg

SEQ ID NO: 61442 - DNA, 8 bp, Unknown
  misc_feature (1)..( 8): Matrix.003 file - promoters60/4910362
atttgtct

SEQ ID NO: 61443 - DNA, 7 bp, Unknown
  misc_feature (1)..( 7): Matrix.003 file - promoters60/4910362
ttctttg

SEQ ID NO: 61444 - DNA, 7 bp, Unknown
  misc_feature (1)..( 7): Matrix.003 file - promoters60/4910362
aacaaaa

SEQ ID NO: 61445 - DNA, 7 bp, Unknown
  misc_feature (1)..( 7): Matrix.003 file - promoters60/4910362
taaattc

SEQ ID NO: 61446 - DNA, 9 bp, Unknown
  misc_feature (1)..( 9): Matrix.003 file - promoters60/4910362
aatttactt

SEQ ID NO: 61447 - DNA, 7 bp, Unknown
  misc_feature (1)..( 7): Matrix.003 file - promoters60/4910362
ttatttt

SEQ ID NO: 61448 - DNA, 8 bp, Unknown
  misc_feature (1)..( 8): Matrix.003 file - promoters60/4910362
tatatatt

SEQ ID NO: 61449 - DNA, 9 bp, Unknown
  misc_feature (1)..( 9): Matrix.003 file - promoters60/4910362
tttttattt

SEQ ID NO: 61450 - DNA, 10 bp, Unknown
  misc_feature (1)..( 10): Matrix.003 file - promoters60/4910362
ttgaccttat

SEQ ID NO: 61451 - DNA, 8 bp, Unknown
  misc_feature (1)..( 8): Matrix.003 file - promoters60/4910362
atttaaca

SEQ ID NO: 61452 - DNA, 7 bp, Unknown
  misc_feature (1)..( 7): Matrix.003 file - promoters60/4910362
ttactaa

SEQ ID NO: 61453 - DNA, 8 bp, Unknown
  misc_feature (1)..( 8): Matrix.003 file - promoters60/4910362
attctaat

SEQ ID NO: 61454 - DNA, 9 bp, Unknown
  misc_feature (1)..( 9): Matrix.003 file - promoters60/4910362
taatctatt

SEQ ID NO: 61455 - DNA, 6 bp, Unknown
  misc_feature (1)..( 6): Matrix.003 file - promoters60/4910362
actgta

SEQ ID NO: 61456 - DNA, 6 bp, Unknown
  misc_feature (1)..( 6): Matrix.003 file - promoters60/4910362
tttgta

SEQ ID NO: 61457 - DNA, 7 bp, Unknown
  misc_feature (1)..( 7): Matrix.003 file - promoters60/4910362
tttcctt

SEQ ID NO: 61458 - DNA, 6 bp, Unknown
  misc_feature (1)..( 6): Matrix.003 file - promoters60/4910362
tatttt

SEQ ID NO: 61459 - DNA, 7 bp, Unknown
  misc_feature (1)..( 7): Matrix.003 file - promoters60/4910362
gaaaaaa

SEQ ID NO: 61460 - DNA, 7 bp, Unknown
  misc_feature (1)..( 7): Matrix.003 file - promoters60/4910362
aaaatct

SEQ ID NO: 61461 - DNA, 7 bp, Unknown
  misc_feature (1)..( 7): Matrix.003 file - promoters60/4910362
aaccaaa

SEQ ID NO: 61462 - DNA, 9 bp, Unknown
  misc_feature (1)..( 9): Matrix.003 file - promoters60/4910426
cttaattat

SEQ ID NO: 61463 - DNA, 8 bp, Unknown
  misc_feature (1)..( 8): Matrix.003 file - promoters60/4910426
ataattat

SEQ ID NO: 61464 - DNA, 11 bp, Unknown
  misc_feature (1)..( 11): Matrix.003 file - promoters60/4910426
ctatatatata

SEQ ID NO: 61465 - DNA, 11 bp, Unknown
  misc_feature (1)..( 11): Matrix.003 file - promoters60/4910426
atataaatata

SEQ ID NO: 61466 - DNA, 6 bp, Unknown
  misc_feature (1)..( 6): Matrix.003 file - promoters60/4911303
tttaag

SEQ ID NO: 61467 - DNA, 7 bp, Unknown
  misc_feature (1)..( 7): Matrix.003 file - promoters60/4911303
taattta

SEQ ID NO: 61468 - DNA, 5 bp, Unknown
  misc_feature (1)..( 5): Matrix.003 file - promoters60/4911303
agaga

SEQ ID NO: 61469 - DNA, 9 bp, Unknown
  misc_feature (1)..( 9): Matrix.003 file - promoters60/4911303
tctatttaa

SEQ ID NO: 61470 - DNA, 9 bp, Unknown
  misc_feature (1)..( 9): Matrix.003 file - promoters60/4911303
ttttcttta

SEQ ID NO: 61471 - DNA, 6 bp, Unknown
  misc_feature (1)..( 6): Matrix.003 file - promoters60/4911303
atcatt

SEQ ID NO: 61472 - DNA, 8 bp, Unknown
  misc_feature (1)..( 8): Matrix.003 file - promoters60/4911303
aagtatta

SEQ ID NO: 61473 - DNA, 7 bp, Unknown
  misc_feature (1)..( 7): Matrix.003 file - promoters60/4911303
taagtta

SEQ ID NO: 61474 - DNA, 8 bp, Unknown
  misc_feature (1)..( 8): Matrix.003 file - promoters60/4911303
aaaagaaa

SEQ ID NO: 61475 - DNA, 11 bp, Unknown
  misc_feature (1)..( 11): Matrix.003 file - promoters60/4911303
aaaagaaacta

SEQ ID NO: 61476 - DNA, 8 bp, Unknown
  misc_feature (1)..( 8): Matrix.003 file - promoters60/4911303
atttcttt

SEQ ID NO: 61477 - DNA, 6 bp, Unknown
  misc_feature (1)..( 6): Matrix.003 file - promoters60/4911303
ttattt

SEQ ID NO: 61478 - DNA, 7 bp, Unknown
  misc_feature (1)..( 7): Matrix.003 file - promoters60/4911303
gacatga

SEQ ID NO: 61479 - DNA, 7 bp, Unknown
  misc_feature (1)..( 7): Matrix.003 file - promoters60/4911303
ccgcgta

SEQ ID NO: 61480 - DNA, 8 bp, Unknown
  misc_feature (1)..( 8): Matrix.003 file - promoters60/4911303
cgcgggaa

SEQ ID NO: 61481 - DNA, 6 bp, Unknown
  misc_feature (1)..( 6): Matrix.003 file - promoters60/4911303
tttata

SEQ ID NO: 61482 - DNA, 10 bp, Unknown
  misc_feature (1)..( 10): Matrix.003 file - promoters60/4911303
taacagagat

SEQ ID NO: 61483 - DNA, 6 bp, Unknown
  misc_feature (1)..( 6): Matrix.003 file - promoters60/4911303
tttata

SEQ ID NO: 61484 - DNA, 6 bp, Unknown
  misc_feature (1)..( 6): Matrix.003 file - promoters60/4911303
aaacag

SEQ ID NO: 61485 - DNA, 7 bp, Unknown
  misc_feature (1)..( 7): Matrix.003 file - promoters60/4911303
tttaatt

SEQ ID NO: 61486 - DNA, 6 bp, Unknown
  misc_feature (1)..( 6): Matrix.003 file - promoters60/4911303
tccact

SEQ ID NO: 61487 - DNA, 8 bp, Unknown
  misc_feature (1)..( 8): Matrix.003 file - promoters60/4911303
attaatga

SEQ ID NO: 61488 - DNA, 6 bp, Unknown
  misc_feature (1)..( 6): Matrix.003 file - promoters60/4911303
cgggtc

SEQ ID NO: 61489 - DNA, 11 bp, Unknown
  misc_feature (1)..( 11): Matrix.003 file - promoters60/4911309
caaaatttctt

SEQ ID NO: 61490 - DNA, 6 bp, Unknown
  misc_feature (1)..( 6): Matrix.003 file - promoters60/4911309
ttttct

SEQ ID NO: 61491 - DNA, 9 bp, Unknown
  misc_feature (1)..( 9): Matrix.003 file - promoters60/4911309
tatgcttat

SEQ ID NO: 61492 - DNA, 9 bp, Unknown
  misc_feature (1)..( 9): Matrix.003 file - promoters60/4911309
tcttattat

SEQ ID NO: 61493 - DNA, 10 bp, Unknown
  misc_feature (1)..( 10): Matrix.003 file - promoters60/4911309
ttcttttgaa

SEQ ID NO: 61494 - DNA, 12 bp, Unknown
  misc_feature (1)..( 12): Matrix.003 file - promoters60/4911312
aattttaaaatc

SEQ ID NO: 61495 - DNA, 7 bp, Unknown
  misc_feature (1)..( 7): Matrix.003 file - promoters60/4911314
gagttgt

SEQ ID NO: 61496 - DNA, 9 bp, Unknown
  misc_feature (1)..( 9): Matrix.003 file - promoters60/4911314
ctgatgaaa

SEQ ID NO: 61497 - DNA, 6 bp, Unknown
  misc_feature (1)..( 6): Matrix.003 file - promoters60/4911314
aatctt

SEQ ID NO: 61498 - DNA, 8 bp, Unknown
  misc_feature (1)..( 8): Matrix.003 file - promoters60/4911314
aacttaaa

SEQ ID NO: 61499 - DNA, 6 bp, Unknown
  misc_feature (1)..( 6): Matrix.003 file - promoters60/4911314
tagtct

SEQ ID NO: 61500 - DNA, 6 bp, Unknown
  misc_feature (1)..( 6): Matrix.003 file - promoters60/4911314
ctaaac

SEQ ID NO: 61501 - DNA, 6 bp, Unknown
  misc_feature (1)..( 6): Matrix.003 file - promoters60/4911314
agttgt

SEQ ID NO: 61502 - DNA, 8 bp, Unknown
  misc_feature (1)..( 8): Matrix.003 file - promoters60/4911314
atgtagct

SEQ ID NO: 61503 - DNA, 8 bp, Unknown
  misc_feature (1)..( 8): Matrix.003 file - promoters60/4911314
ttgacagt

SEQ ID NO: 61504 - DNA, 9 bp, Unknown
  misc_feature (1)..( 9): Matrix.003 file - promoters60/4911314
tttgtctaa

SEQ ID NO: 61505 - DNA, 7 bp, Unknown
  misc_feature (1)..( 7): Matrix.003 file - promoters60/4911314
tcttctc

SEQ ID NO: 61506 - DNA, 7 bp, Unknown
  misc_feature (1)..( 7): Matrix.003 file - promoters60/4911314
ttcactt

SEQ ID NO: 61507 - DNA, 6 bp, Unknown
  misc_feature (1)..( 6): Matrix.003 file - promoters60/4911314
atttaa

SEQ ID NO: 61508 - DNA, 7 bp, Unknown
  misc_feature (1)..( 7): Matrix.003 file - promoters60/4911314
aaagtaa

SEQ ID NO: 61509 - DNA, 9 bp, Unknown
  misc_feature (1)..( 9): Matrix.003 file - promoters60/4911314
cacgtgtga

SEQ ID NO: 61510 - DNA, 7 bp, Unknown
  misc_feature (1)..( 7): Matrix.003 file - promoters60/4911314
aagtcaa

SEQ ID NO: 61511 - DNA, 6 bp, Unknown
  misc_feature (1)..( 6): Matrix.003 file - promoters60/4911314
tcaagt

SEQ ID NO: 61512 - DNA, 7 bp, Unknown
  misc_feature (1)..( 7): Matrix.003 file - promoters60/4911314
acaaaca

SEQ ID NO: 61513 - DNA, 10 bp, Unknown
  misc_feature (1)..( 10): Matrix.003 file - promoters60/4911457
gttgaatttg

SEQ ID NO: 61514 - DNA, 8 bp, Unknown
  misc_feature (1)..( 8): Matrix.003 file - promoters60/4911457
tttagata

SEQ ID NO: 61515 - DNA, 7 bp, Unknown
  misc_feature (1)..( 7): Matrix.003 file - promoters60/4911457
catcaat

SEQ ID NO: 61516 - DNA, 9 bp, Unknown
  misc_feature (1)..( 9): Matrix.003 file - promoters60/4911457
tgtaacatt

SEQ ID NO: 61517 - DNA, 8 bp, Unknown
  misc_feature (1)..( 8): Matrix.003 file - promoters60/4911457
ttgatttc

SEQ ID NO: 61518 - DNA, 8 bp, Unknown
  misc_feature (1)..( 8): Matrix.003 file - promoters60/4911457
ttgatttc

SEQ ID NO: 61519 - DNA, 13 bp, Unknown
  misc_feature (1)..( 13): Matrix.003 file - promoters60/4911457
cttgagtccttta

SEQ ID NO: 61520 - DNA, 11 bp, Unknown
  misc_feature (1)..( 11): Matrix.003 file - promoters60/4911457
gaatttgagat

SEQ ID NO: 61521 - DNA, 8 bp, Unknown
  misc_feature (1)..( 8): Matrix.003 file - promoters60/4911457
ggtctttt

SEQ ID NO: 61522 - DNA, 9 bp, Unknown
  misc_feature (1)..( 9): Matrix.003 file - promoters60/4911457
tgttggaga

SEQ ID NO: 61523 - DNA, 10 bp, Unknown
  misc_feature (1)..( 10): Matrix.003 file - promoters60/4911457
aattttagat

SEQ ID NO: 61524 - DNA, 12 bp, Unknown
  misc_feature (1)..( 12): Matrix.003 file - promoters60/4911457
ataagtattgtt

SEQ ID NO: 61525 - DNA, 11 bp, Unknown
  misc_feature (1)..( 11): Matrix.003 file - promoters60/4911485
ttatattttat

SEQ ID NO: 61526 - DNA, 8 bp, Unknown
  misc_feature (1)..( 8): Matrix.003 file - promoters60/4911485
aatgggcc

SEQ ID NO: 61527 - DNA, 14 bp, Unknown
  misc_feature (1)..( 14): Matrix.003 file - promoters60/4911485
gaaatataaagccc

SEQ ID NO: 61528 - DNA, 7 bp, Unknown
  misc_feature (1)..( 7): Matrix.003 file - promoters60/4911492
atttatt

SEQ ID NO: 61529 - DNA, 10 bp, Unknown
  misc_feature (1)..( 10): Matrix.003 file - promoters60/4911492
ttaataatta

SEQ ID NO: 61530 - DNA, 10 bp, Unknown
  misc_feature (1)..( 10): Matrix.003 file - promoters60/4911492
gattaaaatt

SEQ ID NO: 61531 - DNA, 9 bp, Unknown
  misc_feature (1)..( 9): Matrix.003 file - promoters60/4911492
gtaaaataa

SEQ ID NO: 61532 - DNA, 8 bp, Unknown
  misc_feature (1)..( 8): Matrix.003 file - promoters60/4912240
caaaacac

SEQ ID NO: 61533 - DNA, 16 bp, Unknown
  misc_feature (1)..( 16): Matrix.003 file - promoters60/4912240
taattgattcaaaatt

SEQ ID NO: 61534 - DNA, 7 bp, Unknown
  misc_feature (1)..( 7): Matrix.003 file - promoters60/4912240
ttttaac

SEQ ID NO: 61535 - DNA, 11 bp, Unknown
  misc_feature (1)..( 11): Matrix.003 file - promoters60/4912541
ggctcctgtga

SEQ ID NO: 61536 - DNA, 8 bp, Unknown
  misc_feature (1)..( 8): Matrix.003 file - promoters60/4912541
gtttaaat

SEQ ID NO: 61537 - DNA, 13 bp, Unknown
  misc_feature (1)..( 13): Matrix.003 file - promoters60/4912541
aaattctcagtct

SEQ ID NO: 61538 - DNA, 9 bp, Unknown
  misc_feature (1)..( 9): Matrix.003 file - promoters60/4912541
gattctaat

SEQ ID NO: 61539 - DNA, 7 bp, Unknown
  misc_feature (1)..( 7): Matrix.003 file - promoters60/4912541
tgtgtaa

SEQ ID NO: 61540 - DNA, 7 bp, Unknown
  misc_feature (1)..( 7): Matrix.003 file - promoters60/4912541
gaaaccc

SEQ ID NO: 61541 - DNA, 7 bp, Unknown
  misc_feature (1)..( 7): Matrix.003 file - promoters60/4912541
aagggct

SEQ ID NO: 61542 - DNA, 6 bp, Unknown
  misc_feature (1)..( 6): Matrix.003 file - promoters60/4912541
gctaaa

SEQ ID NO: 61543 - DNA, 8 bp, Unknown
  misc_feature (1)..( 8): Matrix.003 file - promoters60/4912541
ccggtcaa

SEQ ID NO: 61544 - DNA, 6 bp, Unknown
  misc_feature (1)..( 6): Matrix.003 file - promoters60/4912541
aaagtt

SEQ ID NO: 61545 - DNA, 7 bp, Unknown
  misc_feature (1)..( 7): Matrix.003 file - promoters60/4912541
ccgtttt

SEQ ID NO: 61546 - DNA, 7 bp, Unknown
  misc_feature (1)..( 7): Matrix.003 file - promoters60/4912541
tttgttt

SEQ ID NO: 61547 - DNA, 6 bp, Unknown
  misc_feature (1)..( 6): Matrix.003 file - promoters60/4912541
gatttg

SEQ ID NO: 61548 - DNA, 8 bp, Unknown
  misc_feature (1)..( 8): Matrix.003 file - promoters60/4912541
aaggagaa

SEQ ID NO: 61549 - DNA, 13 bp, Unknown
  misc_feature (1)..( 13): Matrix.003 file - promoters60/4913068
gttgtaaaaatta

SEQ ID NO: 61550 - DNA, 8 bp, Unknown
  misc_feature (1)..( 8): Matrix.003 file - promoters60/4913068
aaaaatta

SEQ ID NO: 61551 - DNA, 15 bp, Unknown
  misc_feature (1)..( 15): Matrix.003 file - promoters60/4913068
aaaatgtaattctat

SEQ ID NO: 61552 - DNA, 8 bp, Unknown
  misc_feature (1)..( 8): Matrix.003 file - promoters60/4913068
ctttggaa

SEQ ID NO: 61553 - DNA, 7 bp, Unknown
  misc_feature (1)..( 7): Matrix.003 file - promoters60/4913068
ttgtatt

SEQ ID NO: 61554 - DNA, 11 bp, Unknown
  misc_feature (1)..( 11): Matrix.003 file - promoters60/4913068
ataatttttta

SEQ ID NO: 61555 - DNA, 10 bp, Unknown
  misc_feature (1)..( 10): Matrix.003 file - promoters60/4913068
taggaagaaa

SEQ ID NO: 61556 - DNA, 11 bp, Unknown
  misc_feature (1)..( 11): Matrix.003 file - promoters60/4913068
tgtaaaaaata

SEQ ID NO: 61557 - DNA, 15 bp, Unknown
  misc_feature (1)..( 15): Matrix.003 file - promoters60/4913068
ttgtataaaaaaatt

SEQ ID NO: 61558 - DNA, 11 bp, Unknown
  misc_feature (1)..( 11): Matrix.003 file - promoters60/4913068
ataaaaaaaaa

SEQ ID NO: 61559 - DNA, 8 bp, Unknown
  misc_feature (1)..( 8): Matrix.003 file - promoters60/4913068
ctttggaa

SEQ ID NO: 61560 - DNA, 11 bp, Unknown
  misc_feature (1)..( 11): Matrix.003 file - promoters60/4913068
gattattttgg

SEQ ID NO: 61561 - DNA, 8 bp, Unknown
  misc_feature (1)..( 8): Matrix.003 file - promoters60/4913068
aaatcttt

SEQ ID NO: 61562 - DNA, 13 bp, Unknown
  misc_feature (1)..( 13): Matrix.003 file - promoters60/4913068
acaaattaaattt

SEQ ID NO: 61563 - DNA, 10 bp, Unknown
  misc_feature (1)..( 10): Matrix.003 file - promoters60/4913068
ttaatgtttg

SEQ ID NO: 61564 - DNA, 8 bp, Unknown
  misc_feature (1)..( 8): Matrix.003 file - promoters60/4913083
ttactaaa

SEQ ID NO: 61565 - DNA, 9 bp, Unknown
  misc_feature (1)..( 9): Matrix.003 file - promoters60/4913083
agtgatgtt

SEQ ID NO: 61566 - DNA, 13 bp, Unknown
  misc_feature (1)..( 13): Matrix.003 file - promoters60/4913724
aacattttggttt
